United States Patent Application Publication US 2018/0305689 A1 - sequence listing, part 9

SEQ ID NO: 53116 - RNA, 19 nt, Artificial Sequence
  Description of Artificial Sequence: Synthetic oligonucleotide
  Sense strand starting at position 639 of SEQ ID NO: 643
gguguccacccuugaacuu

SEQ ID NO: 53117 - RNA, 19 nt, Artificial Sequence
  Description of Artificial Sequence: Synthetic oligonucleotide
  Antisense strand to SEQ ID NO: 53036
aaguucaaggguggacacc

SEQ ID NO: 53118 - RNA, 19 nt, Artificial Sequence
  Description of Artificial Sequence: Synthetic oligonucleotide
  Sense strand starting at position 625 of SEQ ID NO: 643
gggaaucaugcccaggugu

SEQ ID NO: 53119 - RNA, 19 nt, Artificial Sequence
  Description of Artificial Sequence: Synthetic oligonucleotide
  Antisense strand to SEQ ID NO: 53038
acaccugggcaugauuccc

SEQ ID NO: 53120 - RNA, 19 nt, Artificial Sequence
  Description of Artificial Sequence: Synthetic oligonucleotide
  Sense strand starting at position 576 of SEQ ID NO: 643
ucucauagucaccagcaua

SEQ ID NO: 53121 - RNA, 19 nt, Artificial Sequence
  Description of Artificial Sequence: Synthetic oligonucleotide
  Antisense strand to SEQ ID NO: 53040
uaugcuggugacuaugaga

SEQ ID NO: 53122 - RNA, 19 nt, Artificial Sequence
  Description of Artificial Sequence: Synthetic oligonucleotide
  Sense strand starting at position 411 of SEQ ID NO: 643
gcccuagagucaucuccaa

SEQ ID NO: 53123 - RNA, 19 nt, Artificial Sequence
  Description of Artificial Sequence: Synthetic oligonucleotide
  Antisense strand to SEQ ID NO: 53042
uuggagaugacucuagggc

SEQ ID NO: 53124 - RNA, 19 nt, Artificial Sequence
  Description of Artificial Sequence: Synthetic oligonucleotide
  Sense strand starting at position 374 of SEQ ID NO: 643
cagugaucccagugaacuc

SEQ ID NO: 53125 - RNA, 19 nt, Artificial Sequence
  Description of Artificial Sequence: Synthetic oligonucleotide
  Antisense strand to SEQ ID NO: 53044
gaguucacugggaucacug

SEQ ID NO: 53126 - RNA, 19 nt, Artificial Sequence
  Description of Artificial Sequence: Synthetic oligonucleotide
  Sense strand starting at position 368 of SEQ ID NO: 643
uucuaucagugaucccagu

SEQ ID NO: 53127 - RNA, 19 nt, Artificial Sequence
  Description of Artificial Sequence: Synthetic oligonucleotide
  Antisense strand to SEQ ID NO: 53046
acugggaucacugauagaa

SEQ ID NO: 53128 - RNA, 19 nt, Artificial Sequence
  Description of Artificial Sequence: Synthetic oligonucleotide
  Sense strand starting at position 308 of SEQ ID NO: 643
ccugcaguucuguaggaaa

SEQ ID NO: 53129 - RNA, 19 nt, Artificial Sequence
  Description of Artificial Sequence: Synthetic oligonucleotide
  Antisense strand to SEQ ID NO: 53048
uuuccuacagaacugcagg

SEQ ID NO: 53130 - RNA, 19 nt, Artificial Sequence
  Description of Artificial Sequence: Synthetic oligonucleotide
  Sense strand starting at position 232 of SEQ ID NO: 643
gaaauacuuguccacagug

SEQ ID NO: 53131 - RNA, 19 nt, Artificial Sequence
  Description of Artificial Sequence: Synthetic oligonucleotide
  Antisense strand to SEQ ID NO: 53050
cacuguggacaaguauuuc

SEQ ID NO: 53132 - RNA, 19 nt, Artificial Sequence
  Description of Artificial Sequence: Synthetic oligonucleotide
  Sense strand starting at position 231 of SEQ ID NO: 643
ugaaauacuuguccacagu

SEQ ID NO: 53133 - RNA, 19 nt, Artificial Sequence
  Description of Artificial Sequence: Synthetic oligonucleotide
  Antisense strand to SEQ ID NO: 53052
acuguggacaaguauuuca

SEQ ID NO: 53134 - RNA, 19 nt, Artificial Sequence
  Description of Artificial Sequence: Synthetic oligonucleotide
  Sense strand starting at position 230 of SEQ ID NO: 643
augaaauacuuguccacag

SEQ ID NO: 53135 - RNA, 19 nt, Artificial Sequence
  Description of Artificial Sequence: Synthetic oligonucleotide
  Antisense strand to SEQ ID NO: 53054
cuguggacaaguauuucau

SEQ ID NO: 53136 - RNA, 19 nt, Artificial Sequence
  Description of Artificial Sequence: Synthetic oligonucleotide
  Sense strand starting at position 124 of SEQ ID NO: 643
augucagauguuugggacu

SEQ ID NO: 53137 - RNA, 19 nt, Artificial Sequence
  Description of Artificial Sequence: Synthetic oligonucleotide
  Antisense strand to SEQ ID NO: 53056
agucccaaacaucugacau

SEQ ID NO: 53138 - RNA, 19 nt, Artificial Sequence
  Description of Artificial Sequence: Synthetic oligonucleotide
  Sense strand starting at position 3948 of SEQ ID NO: 641
acucuuaaagggugaguuu

SEQ ID NO: 53139 - RNA, 19 nt, Artificial Sequence
  Description of Artificial Sequence: Synthetic oligonucleotide
  Antisense strand to SEQ ID NO: 53058
aaacucacccuuuaagagu

SEQ ID NO: 53140 - RNA, 19 nt, Artificial Sequence
  Description of Artificial Sequence: Synthetic oligonucleotide
  Sense strand starting at position 3905 of SEQ ID NO: 641
ucacuacaagucuguaaau

SEQ ID NO: 53141 - RNA, 19 nt, Artificial Sequence
  Description of Artificial Sequence: Synthetic oligonucleotide
  Antisense strand to SEQ ID NO: 53060
auuuacagacuuguaguga

SEQ ID NO: 53142 - RNA, 19 nt, Artificial Sequence
  Description of Artificial Sequence: Synthetic oligonucleotide
  Sense strand starting at position 3899 of SEQ ID NO: 641
guuacaucacuacaagucu

SEQ ID NO: 53143 - RNA, 19 nt, Artificial Sequence
  Description of Artificial Sequence: Synthetic oligonucleotide
  Antisense strand to SEQ ID NO: 53062
agacuuguagugauguaac

SEQ ID NO: 53144 - RNA, 19 nt, Artificial Sequence
  Description of Artificial Sequence: Synthetic oligonucleotide
  Sense strand starting at position 3897 of SEQ ID NO: 641
ugguuacaucacuacaagu

SEQ ID NO: 53145 - RNA, 19 nt, Artificial Sequence
  Description of Artificial Sequence: Synthetic oligonucleotide
  Antisense strand to SEQ ID NO: 53064
acuuguagugauguaacca

SEQ ID NO: 53146 - RNA, 19 nt, Artificial Sequence
  Description of Artificial Sequence: Synthetic oligonucleotide
  Sense strand starting at position 3891 of SEQ ID NO: 641
uggugaugguuacaucacu

SEQ ID NO: 53147 - RNA, 19 nt, Artificial Sequence
  Description of Artificial Sequence: Synthetic oligonucleotide
  Antisense strand to SEQ ID NO: 53066
agugauguaaccaucacca

SEQ ID NO: 53148 - RNA, 19 nt, Artificial Sequence
  Description of Artificial Sequence: Synthetic oligonucleotide
  Sense strand starting at position 3889 of SEQ ID NO: 641
auuggugaugguuacauca

SEQ ID NO: 53149 - RNA, 19 nt, Artificial Sequence
  Description of Artificial Sequence: Synthetic oligonucleotide
  Antisense strand to SEQ ID NO: 53068
ugauguaaccaucaccaau

SEQ ID NO: 53150 - RNA, 19 nt, Artificial Sequence
  Description of Artificial Sequence: Synthetic oligonucleotide
  Sense strand starting at position 3489 of SEQ ID NO: 641
ccaucauaucagugugcca

SEQ ID NO: 53151 - RNA, 19 nt, Artificial Sequence
  Description of Artificial Sequence: Synthetic oligonucleotide
  Antisense strand to SEQ ID NO: 53070
uggcacacugauaugaugg

SEQ ID NO: 53152 - RNA, 19 nt, Artificial Sequence
  Description of Artificial Sequence: Synthetic oligonucleotide
  Sense strand starting at position 3359 of SEQ ID NO: 641
aacugcagugauggugaaa

SEQ ID NO: 53153 - RNA, 19 nt, Artificial Sequence
  Description of Artificial Sequence: Synthetic oligonucleotide
  Antisense strand to SEQ ID NO: 53072
uuucaccaucacugcaguu

SEQ ID NO: 53154 - RNA, 19 nt, Artificial Sequence
  Description of Artificial Sequence: Synthetic oligonucleotide
  Sense strand starting at position 3258 of SEQ ID NO: 641
ccugcagucugggagaguu

SEQ ID NO: 53155 - RNA, 19 nt, Artificial Sequence
  Description of Artificial Sequence: Synthetic oligonucleotide
  Antisense strand to SEQ ID NO: 53074
aacucucccagacugcagg

SEQ ID NO: 53156 - RNA, 19 nt, Artificial Sequence
  Description of Artificial Sequence: Synthetic oligonucleotide
  Sense strand starting at position 3232 of SEQ ID NO: 641
cugacaucucuguauuccu

SEQ ID NO: 53157 - RNA, 19 nt, Artificial Sequence
  Description of Artificial Sequence: Synthetic oligonucleotide
  Antisense strand to SEQ ID NO: 53076
aggaauacagagaugucag

SEQ ID NO: 53158 - RNA, 19 nt, Artificial Sequence
  Description of Artificial Sequence: Synthetic oligonucleotide
  Sense strand starting at position 3230 of SEQ ID NO: 641
cucugacaucucuguauuc

SEQ ID NO: 53159 - RNA, 19 nt, Artificial Sequence
  Description of Artificial Sequence: Synthetic oligonucleotide
  Antisense strand to SEQ ID NO: 53078
gaauacagagaugucagag

SEQ ID NO: 53160 - RNA, 19 nt, Artificial Sequence
  Description of Artificial Sequence: Synthetic oligonucleotide
  Sense strand starting at position 3172 of SEQ ID NO: 641
guccucuuguccuuuaauu

SEQ ID NO: 53161 - RNA, 19 nt, Artificial Sequence
  Description of Artificial Sequence: Synthetic oligonucleotide
  Antisense strand to SEQ ID NO: 53080
aauuaaaggacaagaggac

SEQ ID NO: 53162 - RNA, 19 nt, Artificial Sequence
  Description of Artificial Sequence: Synthetic oligonucleotide
  Sense strand starting at position 3169 of SEQ ID NO: 641
agaguccucuuguccuuua

SEQ ID NO: 53163 - RNA, 19 nt, Artificial Sequence
  Description of Artificial Sequence: Synthetic oligonucleotide
  Antisense strand to SEQ ID NO: 53082
uaaaggacaagaggacucu

SEQ ID NO: 53164 - RNA, 19 nt, Artificial Sequence
  Description of Artificial Sequence: Synthetic oligonucleotide
  Sense strand starting at position 3072 of SEQ ID NO: 641
aagaauucuggccggcaga

SEQ ID NO: 53165 - RNA, 19 nt, Artificial Sequence
  Description of Artificial Sequence: Synthetic oligonucleotide
  Antisense strand to SEQ ID NO: 53084
ucugccggccagaauucuu

SEQ ID NO: 53166 - RNA, 19 nt, Artificial Sequence
  Description of Artificial Sequence: Synthetic oligonucleotide
  Sense strand starting at position 2711 of SEQ ID NO: 641
ggagcaaccucuuagugaa

SEQ ID NO: 53167 - RNA, 19 nt, Artificial Sequence
  Description of Artificial Sequence: Synthetic oligonucleotide
  Antisense strand to SEQ ID NO: 53086
uucacuaagagguugcucc

SEQ ID NO: 53168 - RNA, 19 nt, Artificial Sequence
  Description of Artificial Sequence: Synthetic oligonucleotide
  Sense strand starting at position 2637 of SEQ ID NO: 641
gaagcaauggucugaagca

SEQ ID NO: 53169 - RNA, 19 nt, Artificial Sequence
  Description of Artificial Sequence: Synthetic oligonucleotide
  Antisense strand to SEQ ID NO: 53088
ugcuucagaccauugcuuc

SEQ ID NO: 53170 - RNA, 19 nt, Artificial Sequence
  Description of Artificial Sequence: Synthetic oligonucleotide
  Sense strand starting at position 2633 of SEQ ID NO: 641
gugagaagcaauggucuga

SEQ ID NO: 53171 - RNA, 19 nt, Artificial Sequence
  Description of Artificial Sequence: Synthetic oligonucleotide
  Antisense strand to SEQ ID NO: 53090
ucagaccauugcuucucac

SEQ ID NO: 53172 - RNA, 19 nt, Artificial Sequence
  Description of Artificial Sequence: Synthetic oligonucleotide
  Sense strand starting at position 2625 of SEQ ID NO: 641
cagagaaugugagaagcaa

SEQ ID NO: 53173 - RNA, 19 nt, Artificial Sequence
  Description of Artificial Sequence: Synthetic oligonucleotide
  Antisense strand to SEQ ID NO: 53092
uugcuucucacauucucug

SEQ ID NO: 53174 - RNA, 19 nt, Artificial Sequence
  Description of Artificial Sequence: Synthetic oligonucleotide
  Sense strand starting at position 2582 of SEQ ID NO: 641
cgugacaugcuuggaaauc

SEQ ID NO: 53175 - RNA, 19 nt, Artificial Sequence
  Description of Artificial Sequence: Synthetic oligonucleotide
  Antisense strand to SEQ ID NO: 53094
gauuuccaagcaugucacg

SEQ ID NO: 53176 - RNA, 19 nt, Artificial Sequence
  Description of Artificial Sequence: Synthetic oligonucleotide
  Sense strand starting at position 2581 of SEQ ID NO: 641
ccgugacaugcuuggaaau

SEQ ID NO: 53177 - RNA, 19 nt, Artificial Sequence
  Description of Artificial Sequence: Synthetic oligonucleotide
  Antisense strand to SEQ ID NO: 53096
auuuccaagcaugucacgg

SEQ ID NO: 53178 - RNA, 19 nt, Artificial Sequence
  Description of Artificial Sequence: Synthetic oligonucleotide
  Sense strand starting at position 2572 of SEQ ID NO: 641
cauauugguccgugacaug

SEQ ID NO: 53179 - RNA, 19 nt, Artificial Sequence
  Description of Artificial Sequence: Synthetic oligonucleotide
  Antisense strand to SEQ ID NO: 53098
caugucacggaccaauaug

SEQ ID NO: 53180 - RNA, 19 nt, Artificial Sequence
  Description of Artificial Sequence: Synthetic oligonucleotide
  Sense strand starting at position 2571 of SEQ ID NO: 641
acauauugguccgugacau

SEQ ID NO: 53181 - RNA, 19 nt, Artificial Sequence
  Description of Artificial Sequence: Synthetic oligonucleotide
  Antisense strand to SEQ ID NO: 53100
augucacggaccaauaugu

SEQ ID NO: 53182 - RNA, 19 nt, Artificial Sequence
  Description of Artificial Sequence: Synthetic oligonucleotide
  Sense strand starting at position 2570 of SEQ ID NO: 641
aacauauugguccgugaca

SEQ ID NO: 53183 - RNA, 19 nt, Artificial Sequence
  Description of Artificial Sequence: Synthetic oligonucleotide
  Antisense strand to SEQ ID NO: 53102
ugucacggaccaauauguu

SEQ ID NO: 53184 - RNA, 19 nt, Artificial Sequence
  Description of Artificial Sequence: Synthetic oligonucleotide
  Sense strand starting at position 2568 of SEQ ID NO: 641
caaacauauugguccguga

SEQ ID NO: 53185 - RNA, 19 nt, Artificial Sequence
  Description of Artificial Sequence: Synthetic oligonucleotide
  Antisense strand to SEQ ID NO: 53104
ucacggaccaauauguuug

SEQ ID NO: 53186 - RNA, 19 nt, Artificial Sequence
  Description of Artificial Sequence: Synthetic oligonucleotide
  Sense strand starting at position 2213 of SEQ ID NO: 641
ccaaacuugcaugauguau

SEQ ID NO: 53187 - RNA, 19 nt, Artificial Sequence
  Description of Artificial Sequence: Synthetic oligonucleotide
  Antisense strand to SEQ ID NO: 53106
auacaucaugcaaguuugg

SEQ ID NO: 53188 - RNA, 19 nt, Artificial Sequence
  Description of Artificial Sequence: Synthetic oligonucleotide
  Sense strand starting at position 2212 of SEQ ID NO: 641
uccaaacuugcaugaugua

SEQ ID NO: 53189 - RNA, 19 nt, Artificial Sequence
  Description of Artificial Sequence: Synthetic oligonucleotide
  Antisense strand to SEQ ID NO: 53108
uacaucaugcaaguuugga

SEQ ID NO: 53190 - RNA, 19 nt, Artificial Sequence
  Description of Artificial Sequence: Synthetic oligonucleotide
  Sense strand starting at position 2178 of SEQ ID NO: 641
ccguaacuucgucaguuga

SEQ ID NO: 53191 - RNA, 19 nt, Artificial Sequence
  Description of Artificial Sequence: Synthetic oligonucleotide
  Antisense strand to SEQ ID NO: 53110
ucaacugacgaaguuacgg

SEQ ID NO: 53192 - RNA, 19 nt, Artificial Sequence
  Description of Artificial Sequence: Synthetic oligonucleotide
  Sense strand starting at position 2176 of SEQ ID NO: 641
ucccguaacuucgucaguu

SEQ ID NO: 53193 - RNA, 19 nt, Artificial Sequence
  Description of Artificial Sequence: Synthetic oligonucleotide
  Antisense strand to SEQ ID NO: 53112
aacugacgaaguuacggga

SEQ ID NO: 53194 - RNA, 19 nt, Artificial Sequence
  Description of Artificial Sequence: Synthetic oligonucleotide
  Sense strand starting at position 2164 of SEQ ID NO: 641
acagcaguuugaucccgua

SEQ ID NO: 53195 - RNA, 19 nt, Artificial Sequence
  Description of Artificial Sequence: Synthetic oligonucleotide
  Antisense strand to SEQ ID NO: 53114
uacgggaucaaacugcugu

SEQ ID NO: 53196 - RNA, 19 nt, Artificial Sequence
  Description of Artificial Sequence: Synthetic oligonucleotide
  Sense strand starting at position 2077 of SEQ ID NO: 641
ccaccucugccagggauaa

SEQ ID NO: 53197 - RNA, 19 nt, Artificial Sequence
  Description of Artificial Sequence: Synthetic oligonucleotide
  Antisense strand to SEQ ID NO: 53116
uuaucccuggcagaggugg

SEQ ID NO: 53198 - RNA, 19 nt, Artificial Sequence
  Description of Artificial Sequence: Synthetic oligonucleotide
  Sense strand starting at position 970 of SEQ ID NO: 641
aguuuccuguucuacaaga

SEQ ID NO: 53199 - RNA, 19 nt, Artificial Sequence
  Description of Artificial Sequence: Synthetic oligonucleotide
  Antisense strand to SEQ ID NO: 53118
ucuuguagaacaggaaacu

SEQ ID NO: 53200 - RNA, 19 nt, Artificial Sequence
  Description of Artificial Sequence: Synthetic oligonucleotide
  Sense strand starting at position 473 of SEQ ID NO: 641
uuaaauuaugcuggaugca

SEQ ID NO: 53201 - RNA, 19 nt, Artificial Sequence
  Description of Artificial Sequence: Synthetic oligonucleotide
  Antisense strand to SEQ ID NO: 53120
ugcauccagcauaauuuaa

SEQ ID NO: 53202 - RNA, 19 nt, Artificial Sequence
  Description of Artificial Sequence: Synthetic oligonucleotide
  Sense strand starting at position 433 of SEQ ID NO: 641
uuacuuucuggagaagugu

SEQ ID NO: 53203 - RNA, 19 nt, Artificial Sequence
  Description of Artificial Sequence: Synthetic oligonucleotide
  Antisense strand to SEQ ID NO: 53122
acacuucuccagaaaguaa

SEQ ID NO: 53204 - RNA, 19 nt, Artificial Sequence
  Description of Artificial Sequence: Synthetic oligonucleotide
  Sense strand starting at position 431 of SEQ ID NO: 641
uguuacuuucuggagaagu

SEQ ID NO: 53205 - RNA, 19 nt, Artificial Sequence
  Description of Artificial Sequence: Synthetic oligonucleotide
  Antisense strand to SEQ ID NO: 53124
acuucuccagaaaguaaca

SEQ ID NO: 53206 - RNA, 19 nt, Artificial Sequence
  Description of Artificial Sequence: Synthetic oligonucleotide
  Sense strand starting at position 430 of SEQ ID NO: 641
auguuacuuucuggagaag

SEQ ID NO: 53207 - RNA, 19 nt, Artificial Sequence
  Description of Artificial Sequence: Synthetic oligonucleotide
  Antisense strand to SEQ ID NO: 53126
cuucuccagaaaguaacau

SEQ ID NO: 53208 - RNA, 19 nt, Artificial Sequence
  Description of Artificial Sequence: Synthetic oligonucleotide
  Sense strand starting at position 429 of SEQ ID NO: 641
aauguuacuuucuggagaa

SEQ ID NO: 53209 - RNA, 19 nt, Artificial Sequence
  Description of Artificial Sequence: Synthetic oligonucleotide
  Antisense strand to SEQ ID NO: 53128
uucuccagaaaguaacauu

SEQ ID NO: 53210 - RNA, 19 nt, Artificial Sequence
  Description of Artificial Sequence: Synthetic oligonucleotide
  Sense strand starting at position 428 of SEQ ID NO: 641
caauguuacuuucuggaga

SEQ ID NO: 53211 - RNA, 19 nt, Artificial Sequence
  Description of Artificial Sequence: Synthetic oligonucleotide
  Antisense strand to SEQ ID NO: 53130
ucuccagaaaguaacauug

SEQ ID NO: 53212 - RNA, 19 nt, Artificial Sequence
  Description of Artificial Sequence: Synthetic oligonucleotide
  Sense strand starting at position 285 of SEQ ID NO: 641
uguggaaauuugggaaaga

SEQ ID NO: 53213 - RNA, 19 nt, Artificial Sequence
  Description of Artificial Sequence: Synthetic oligonucleotide
  Antisense strand to SEQ ID NO: 53132
ucuuucccaaauuuccaca

SEQ ID NO: 53214 - RNA, 19 nt, Artificial Sequence
  Description of Artificial Sequence: Synthetic oligonucleotide
  Sense strand starting at position 276 of SEQ ID NO: 641
ccuccuagguguggaaauu

SEQ ID NO: 53215 - RNA, 19 nt, Artificial Sequence
  Description of Artificial Sequence: Synthetic oligonucleotide
  Antisense strand to SEQ ID NO: 53134
aauuuccacaccuaggagg

SEQ ID NO: 53216 - RNA, 19 nt, Artificial Sequence
  Description of Artificial Sequence: Synthetic oligonucleotide
  Sense strand starting at position 275 of SEQ ID NO: 641
gccuccuagguguggaaau

SEQ ID NO: 53217 - RNA, 19 nt, Artificial Sequence
  Description of Artificial Sequence: Synthetic oligonucleotide
  Antisense strand to SEQ ID NO: 53136
auuuccacaccuaggaggc

SEQ ID NO: 53218 - RNA, 19 nt, Artificial Sequence
  Description of Artificial Sequence: Synthetic oligonucleotide
  Sense strand starting at position 3965 of SEQ ID NO: 642
ucacuacaagucuguaaau

SEQ ID NO: 53219 - RNA, 19 nt, Artificial Sequence
  Description of Artificial Sequence: Synthetic oligonucleotide
  Antisense strand to SEQ ID NO: 53138
auuuacagacuuguaguga

SEQ ID NO: 53220 - RNA, 19 nt, Artificial Sequence
  Description of Artificial Sequence: Synthetic oligonucleotide
  Sense strand starting at position 3959 of SEQ ID NO: 642
guuacaucacuacaagucu

SEQ ID NO: 53221 - RNA, 19 nt, Artificial Sequence
  Description of Artificial Sequence: Synthetic oligonucleotide
  Antisense strand to SEQ ID NO: 53140
agacuuguagugauguaac

SEQ ID NO: 53222 - RNA, 19 nt, Artificial Sequence
  Description of Artificial Sequence: Synthetic oligonucleotide
  Sense strand starting at position 3957 of SEQ ID NO: 642
ugguuacaucacuacaagu

SEQ ID NO: 53223 - RNA, 19 nt, Artificial Sequence
  Description of Artificial Sequence: Synthetic oligonucleotide
  Antisense strand to SEQ ID NO: 53142
acuuguagugauguaacca

SEQ ID NO: 53224 - RNA, 19 nt, Artificial Sequence
  Description of Artificial Sequence: Synthetic oligonucleotide
  Sense strand starting at position 3951 of SEQ ID NO: 642
uggugaugguuacaucacu

SEQ ID NO: 53225 - RNA, 19 nt, Artificial Sequence
  Description of Artificial Sequence: Synthetic oligonucleotide
  Antisense strand to SEQ ID NO: 53144
agugauguaaccaucacca

SEQ ID NO: 53226 - RNA, 19 nt, Artificial Sequence
  Description of Artificial Sequence: Synthetic oligonucleotide
  Sense strand starting at position 3949 of SEQ ID NO: 642
auuggugaugguuacauca

SEQ ID NO: 53227 - RNA, 19 nt, Artificial Sequence
  Description of Artificial Sequence: Synthetic oligonucleotide
  Antisense strand to SEQ ID NO: 53146
ugauguaaccaucaccaau

SEQ ID NO: 53228 - RNA, 19 nt, Artificial Sequence
  Description of Artificial Sequence: Synthetic oligonucleotide
  Sense strand starting at position 3549 of SEQ ID NO: 642
ccaucauaucagugugcca

SEQ ID NO: 53229 - RNA, 19 nt, Artificial Sequence
  Description of Artificial Sequence: Synthetic oligonucleotide
  Antisense strand to SEQ ID NO: 53148
uggcacacugauaugaugg

SEQ ID NO: 53230 - RNA, 19 nt, Artificial Sequence
  Description of Artificial Sequence: Synthetic oligonucleotide
  Sense strand starting at position 3419 of SEQ ID NO: 642
aacugcagugauggugaaa

SEQ ID NO: 53231 - RNA, 19 nt, Artificial Sequence
  Description of Artificial Sequence: Synthetic oligonucleotide
  Antisense strand to SEQ ID NO: 53150
uuucaccaucacugcaguu

SEQ ID NO: 53232 - RNA, 19 nt, Artificial Sequence
  Description of Artificial Sequence: Synthetic oligonucleotide
  Sense strand starting at position 3318 of SEQ ID NO: 642
ccugcagucugggagaguu

SEQ ID NO: 53233 - RNA, 19 nt, Artificial Sequence
  Description of Artificial Sequence: Synthetic oligonucleotide
  Antisense strand to SEQ ID NO: 53152
aacucucccagacugcagg

SEQ ID NO: 53234 - RNA, 19 nt, Artificial Sequence
  Description of Artificial Sequence: Synthetic oligonucleotide
  Sense strand starting at position 3292 of SEQ ID NO: 642
cugacaucucuguauuccu

SEQ ID NO: 53235 - RNA, 19 nt, Artificial Sequence
  Description of Artificial Sequence: Synthetic oligonucleotide
  Antisense strand to SEQ ID NO: 53154
aggaauacagagaugucag

SEQ ID NO: 53236 - RNA, 19 nt, Artificial Sequence
  Description of Artificial Sequence: Synthetic oligonucleotide
  Sense strand starting at position 3290 of SEQ ID NO: 642
cucugacaucucuguauuc

SEQ ID NO: 53237 - RNA, 19 nt, Artificial Sequence
  Description of Artificial Sequence: Synthetic oligonucleotide
  Antisense strand to SEQ ID NO: 53156
gaauacagagaugucagag

SEQ ID NO: 53238 - RNA, 19 nt, Artificial Sequence
  Description of Artificial Sequence: Synthetic oligonucleotide
  Sense strand starting at position 3232 of SEQ ID NO: 642
guccucuuguccuuuaauu

SEQ ID NO: 53239 - RNA, 19 nt, Artificial Sequence
  Description of Artificial Sequence: Synthetic oligonucleotide
  Antisense strand to SEQ ID NO: 53158
aauuaaaggacaagaggac

SEQ ID NO: 53240 - RNA, 19 nt, Artificial Sequence
  Description of Artificial Sequence: Synthetic oligonucleotide
  Sense strand starting at position 3229 of SEQ ID NO: 642
agaguccucuuguccuuua

SEQ ID NO: 53241 - RNA, 19 nt, Artificial Sequence
  Description of Artificial Sequence: Synthetic oligonucleotide
  Antisense strand to SEQ ID NO: 53160
uaaaggacaagaggacucu

SEQ ID NO: 53242 - RNA, 19 nt, Artificial Sequence
  Description of Artificial Sequence: Synthetic oligonucleotide
  Sense strand starting at position 3132 of SEQ ID NO: 642
aagaauucuggccggcaga

SEQ ID NO: 53243 - RNA, 19 nt, Artificial Sequence
  Description of Artificial Sequence: Synthetic oligonucleotide
  Antisense strand to SEQ ID NO: 53162
ucugccggccagaauucuu

SEQ ID NO: 53244 - RNA, 19 nt, Artificial Sequence
  Description of Artificial Sequence: Synthetic oligonucleotide
  Sense strand starting at position 3023 of SEQ ID NO: 642
gcccguggcuggaguucua

SEQ ID NO: 53245 - RNA, 19 nt, Artificial Sequence
  Description of Artificial Sequence: Synthetic oligonucleotide
  Antisense strand to SEQ ID NO: 53164
uagaacuccagccacgggc

SEQ ID NO: 53246 - RNA, 19 nt, Artificial Sequence
  Description of Artificial Sequence: Synthetic oligonucleotide
  Sense strand starting at position 2771 of SEQ ID NO: 642
ggagcaaccucuuagugaa

SEQ ID NO: 53247 - RNA, 19 nt, Artificial Sequence
  Description of Artificial Sequence: Synthetic oligonucleotide
  Antisense strand to SEQ ID NO: 53166
uucacuaagagguugcucc

SEQ ID NO: 53248 - RNA, 19 nt, Artificial Sequence
  Description of Artificial Sequence: Synthetic oligonucleotide
  Sense strand starting at position 2697 of SEQ ID NO: 642
gaagcaauggucugaagca

SEQ ID NO: 53249 - RNA, 19 nt, Artificial Sequence
  Description of Artificial Sequence: Synthetic oligonucleotide
  Antisense strand to SEQ ID NO: 53168
ugcuucagaccauugcuuc

SEQ ID NO: 53250 - RNA, 19 nt, Artificial Sequence
  Description of Artificial Sequence: Synthetic oligonucleotide
  Sense strand starting at position 2693 of SEQ ID NO: 642
gugagaagcaauggucuga

SEQ ID NO: 53251 - RNA, 19 nt, Artificial Sequence
  Description of Artificial Sequence: Synthetic oligonucleotide
  Antisense strand to SEQ ID NO: 53170
ucagaccauugcuucucac

SEQ ID NO: 53252 - RNA, 19 nt, Artificial Sequence
  Description of Artificial Sequence: Synthetic oligonucleotide
  Sense strand starting at position 2685 of SEQ ID NO: 642
cagagaaugugagaagcaa

SEQ ID NO: 53253 - RNA, 19 nt, Artificial Sequence
  Description of Artificial Sequence: Synthetic oligonucleotide
  Antisense strand to SEQ ID NO: 53172
uugcuucucacauucucug

SEQ ID NO: 53254 - RNA, 19 nt, Artificial Sequence
  Description of Artificial Sequence: Synthetic oligonucleotide
  Sense strand starting at position 2642 of SEQ ID NO: 642
cgugacaugcuuggaaauc

SEQ ID NO: 53255 - RNA, 19 nt, Artificial Sequence
  Description of Artificial Sequence: Synthetic oligonucleotide
  Antisense strand to SEQ ID NO: 53174
gauuuccaagcaugucacg

SEQ ID NO: 53256 - RNA, 19 nt, Artificial Sequence
  Description of Artificial Sequence: Synthetic oligonucleotide
  Sense strand starting at position 2641 of SEQ ID NO: 642
ccgugacaugcuuggaaau

SEQ ID NO: 53257 - RNA, 19 nt, Artificial Sequence
  Description of Artificial Sequence: Synthetic oligonucleotide
  Antisense strand to SEQ ID NO: 53176
auuuccaagcaugucacgg

SEQ ID NO: 53258 - RNA, 19 nt, Artificial Sequence
  Description of Artificial Sequence: Synthetic oligonucleotide
  Sense strand starting at position 2632 of SEQ ID NO: 642
cauauugguccgugacaug

SEQ ID NO: 53259 - RNA, 19 nt, Artificial Sequence
  Description of Artificial Sequence: Synthetic oligonucleotide
  Antisense strand to SEQ ID NO: 53178
caugucacggaccaauaug

SEQ ID NO: 53260 - RNA, 19 nt, Artificial Sequence
  Description of Artificial Sequence: Synthetic oligonucleotide
  Sense strand starting at position 2631 of SEQ ID NO: 642
acauauugguccgugacau

SEQ ID NO: 53261 - RNA, 19 nt, Artificial Sequence
  Description of Artificial Sequence: Synthetic oligonucleotide
  Antisense strand to SEQ ID NO: 53180
augucacggaccaauaugu

SEQ ID NO: 53262 - RNA, 19 nt, Artificial Sequence
  Description of Artificial Sequence: Synthetic oligonucleotide
  Sense strand starting at position 2630 of SEQ ID NO: 642
aacauauugguccgugaca

SEQ ID NO: 53263 - RNA, 19 nt, Artificial Sequence
  Description of Artificial Sequence: Synthetic oligonucleotide
  Antisense strand to SEQ ID NO: 53182
ugucacggaccaauauguu

SEQ ID NO: 53264 - RNA, 19 nt, Artificial Sequence
  Description of Artificial Sequence: Synthetic oligonucleotide
  Sense strand starting at position 2628 of SEQ ID NO: 642
caaacauauugguccguga

SEQ ID NO: 53265 - RNA, 19 nt, Artificial Sequence
  Description of Artificial Sequence: Synthetic oligonucleotide
  Antisense strand to SEQ ID NO: 53184
ucacggaccaauauguuug

SEQ ID NO: 53266 - RNA, 19 nt, Artificial Sequence
  Description of Artificial Sequence: Synthetic oligonucleotide
  Sense strand starting at position 2273 of SEQ ID NO: 642
ccaaacuugcaugauguau

SEQ ID NO: 53267 - RNA, 19 nt, Artificial Sequence
  Description of Artificial Sequence: Synthetic oligonucleotide
  Antisense strand to SEQ ID NO: 53186
auacaucaugcaaguuugg

SEQ ID NO: 53268 - RNA, 19 nt, Artificial Sequence
  Description of Artificial Sequence: Synthetic oligonucleotide
  Sense strand starting at position 2272 of SEQ ID NO: 642
uccaaacuugcaugaugua

SEQ ID NO: 53269 - RNA, 19 nt, Artificial Sequence
  Description of Artificial Sequence: Synthetic oligonucleotide
  Antisense strand to SEQ ID NO: 53188
uacaucaugcaaguuugga

SEQ ID NO: 53270 - RNA, 19 nt, Artificial Sequence
  Description of Artificial Sequence: Synthetic oligonucleotide
  Sense strand starting at position 2238 of SEQ ID NO: 642
ccguaacuucgucaguuga

SEQ ID NO: 53271 - RNA, 19 nt, Artificial Sequence
  Description of Artificial Sequence: Synthetic oligonucleotide
  Antisense strand to SEQ ID NO: 53190
ucaacugacgaaguuacgg

SEQ ID NO: 53272 - RNA, 19 nt, Artificial Sequence
  Description of Artificial Sequence: Synthetic oligonucleotide
  Sense strand starting at position 2236 of SEQ ID NO: 642
ucccguaacuucgucaguu

SEQ ID NO: 53273 - RNA, 19 nt, Artificial Sequence
  Description of Artificial Sequence: Synthetic oligonucleotide
  Antisense strand to SEQ ID NO: 53192
aacugacgaaguuacggga

SEQ ID NO: 53274 - RNA, 19 nt, Artificial Sequence
  Description of Artificial Sequence: Synthetic oligonucleotide
  Sense strand starting at position 2224 of SEQ ID NO: 642
acagcaguuugaucccgua

SEQ ID NO: 53275 - RNA, 19 nt, Artificial Sequence
  Description of Artificial Sequence: Synthetic oligonucleotide
  Antisense strand to SEQ ID NO: 53194
uacgggaucaaacugcugu

SEQ ID NO: 53276 - RNA, 19 nt, Artificial Sequence
  Description of Artificial Sequence: Synthetic oligonucleotide
  Sense strand starting at position 2137 of SEQ ID NO: 642
ccaccucugccagggauaa

SEQ ID NO: 53277 - RNA, 19 nt, Artificial Sequence
  Description of Artificial Sequence: Synthetic oligonucleotide
  Antisense strand to SEQ ID NO: 53196
uuaucccuggcagaggugg

SEQ ID NO: 53278 - RNA, 19 nt, Artificial Sequence
  Description of Artificial Sequence: Synthetic oligonucleotide
  Sense strand starting at position 1030 of SEQ ID NO: 642
aguuuccuguucuacaaga

SEQ ID NO: 53279 - RNA, 19 nt, Artificial Sequence
  Description of Artificial Sequence: Synthetic oligonucleotide
  Antisense strand to SEQ ID NO: 53198
ucuuguagaacaggaaacu

SEQ ID NO: 53280 - RNA, 19 nt, Artificial Sequence
  Description of Artificial Sequence: Synthetic oligonucleotide
  Sense strand starting at position 533 of SEQ ID NO: 642
uuaaauuaugcuggaugca

SEQ ID NO: 53281 - RNA, 19 nt, Artificial Sequence
  Description of Artificial Sequence: Synthetic oligonucleotide
  Antisense strand to SEQ ID NO: 53200
ugcauccagcauaauuuaa

SEQ ID NO: 53282 - RNA, 19 nt, Artificial Sequence
  Description of Artificial Sequence: Synthetic oligonucleotide
  Sense strand starting at position 493 of SEQ ID NO: 642
uuacuuucuggagaagugu

SEQ ID NO: 53283 - RNA, 19 nt, Artificial Sequence
  Description of Artificial Sequence: Synthetic oligonucleotide
  Antisense strand to SEQ ID NO: 53202
acacuucuccagaaaguaa

SEQ ID NO: 53284 - RNA, 19 nt, Artificial Sequence
  Description of Artificial Sequence: Synthetic oligonucleotide
  Sense strand starting at position 491 of SEQ ID NO: 642
uguuacuuucuggagaagu

SEQ ID NO: 53285 - RNA, 19 nt, Artificial Sequence
  Description of Artificial Sequence: Synthetic oligonucleotide
  Antisense strand to SEQ ID NO: 53204
acuucuccagaaaguaaca

SEQ ID NO: 53286 - RNA, 19 nt, Artificial Sequence
  Description of Artificial Sequence: Synthetic oligonucleotide
  Sense strand starting at position 490 of SEQ ID NO: 642
auguuacuuucuggagaag

SEQ ID NO: 53287 - RNA, 19 nt, Artificial Sequence
  Description of Artificial Sequence: Synthetic oligonucleotide
  Antisense strand to SEQ ID NO: 53206
cuucuccagaaaguaacau

SEQ ID NO: 53288 - RNA, 19 nt, Artificial Sequence
  Description of Artificial Sequence: Synthetic oligonucleotide
  Sense strand starting at position 489 of SEQ ID NO: 642
aauguuacuuucuggagaa

SEQ ID NO: 53289 - RNA, 19 nt, Artificial Sequence
  Description of Artificial Sequence: Synthetic oligonucleotide
  Antisense strand to SEQ ID NO: 53208
uucuccagaaaguaacauu

SEQ ID NO: 53290 - RNA, 19 nt, Artificial Sequence
  Description of Artificial Sequence: Synthetic oligonucleotide
  Sense strand starting at position 488 of SEQ ID NO: 642
caauguuacuuucuggaga

SEQ ID NO: 53291 - RNA, 19 nt, Artificial Sequence
  Description of Artificial Sequence: Synthetic oligonucleotide
  Antisense strand to SEQ ID NO: 53210
ucuccagaaaguaacauug

SEQ ID NO: 53292 - RNA, 19 nt, Artificial Sequence
  Description of Artificial Sequence: Synthetic oligonucleotide
  Sense strand starting at position 345 of SEQ ID NO: 642
uguggaaauuugggaaaga

SEQ ID NO: 53293 - RNA, 19 nt, Artificial Sequence
  Description of Artificial Sequence: Synthetic oligonucleotide
  Antisense strand to SEQ ID NO: 53212
ucuuucccaaauuuccaca

SEQ ID NO: 53294 - RNA, 19 nt, Artificial Sequence
  Description of Artificial Sequence: Synthetic oligonucleotide
  Sense strand starting at position 336 of SEQ ID NO: 642
ccuccuagguguggaaauu

SEQ ID NO: 53295 - RNA, 19 nt, Artificial Sequence
  Description of Artificial Sequence: Synthetic oligonucleotide
  Antisense strand to SEQ ID NO: 53214
aauuuccacaccuaggagg

SEQ ID NO: 53296 - RNA, 19 nt, Artificial Sequence
  Description of Artificial Sequence: Synthetic oligonucleotide
  Sense strand starting at position 335 of SEQ ID NO: 642
gccuccuagguguggaaau

SEQ ID NO: 53297 - RNA, 19 nt, Artificial Sequence
  Description of Artificial Sequence: Synthetic oligonucleotide
  Antisense strand to SEQ ID NO: 53216
auuuccacaccuaggaggc

SEQ ID NO: 53298 - RNA, 19 nt, Artificial Sequence
  Description of Artificial Sequence: Synthetic oligonucleotide
  Sense strand starting at position 3889 of SEQ ID NO: 644
gccuuagcccuggaagguu

SEQ ID NO: 53299 - RNA, 19 nt, Artificial Sequence
  Description of Artificial Sequence: Synthetic oligonucleotide
  Antisense strand to SEQ ID NO: 53218
aaccuuccagggcuaaggc

SEQ ID NO: 53300 - RNA, 19 nt, Artificial Sequence
  Description of Artificial Sequence: Synthetic oligonucleotide
  Sense strand starting at position 3628 of SEQ ID NO: 644
uacauauguguugauaugu

SEQ ID NO: 53301 - RNA, 19 nt, Artificial Sequence
  Description of Artificial Sequence: Synthetic oligonucleotide
  Antisense strand to SEQ ID NO: 53220
acauaucaacacauaugua

SEQ ID NO: 53302 - RNA, 19 nt, Artificial Sequence
  Description of Artificial Sequence: Synthetic oligonucleotide
  Sense strand starting at position 3624 of SEQ ID NO: 644
guauuacauauguguugau

SEQ ID NO: 53303 - RNA, 19 nt, Artificial Sequence
  Description of Artificial Sequence: Synthetic oligonucleotide
  Antisense strand to SEQ ID NO: 53222
aucaacacauauguaauac

SEQ ID NO: 53304 - RNA, 19 nt, Artificial Sequence
  Description of Artificial Sequence: Synthetic oligonucleotide
  Sense strand starting at position 3610 of SEQ ID NO: 644
aguacucuuuaaucguauu

SEQ ID NO: 53305 - RNA, 19 nt, Artificial Sequence
  Description of Artificial Sequence: Synthetic oligonucleotide
  Antisense strand to SEQ ID NO: 53224
aauacgauuaaagaguacu

SEQ ID NO: 53306 - RNA, 19 nt, Artificial Sequence
  Description of Artificial Sequence: Synthetic oligonucleotide
  Sense strand starting at position 3607 of SEQ ID NO: 644
cucaguacucuuuaaucgu

SEQ ID NO: 53307 - RNA, 19 nt, Artificial Sequence
  Description of Artificial Sequence: Synthetic oligonucleotide
  Antisense strand to SEQ ID NO: 53226
acgauuaaagaguacugag

SEQ ID NO: 53308 - RNA, 19 nt, Artificial Sequence
  Description of Artificial Sequence: Synthetic oligonucleotide
  Sense strand starting at position 3600 of SEQ ID NO: 644
ggcaucucucaguacucuu

SEQ ID NO: 53309 - RNA, 19 nt, Artificial Sequence
  Description of Artificial Sequence: Synthetic oligonucleotide
  Antisense strand to SEQ ID NO: 53228
aagaguacugagagaugcc

SEQ ID NO: 53310 - RNA, 19 nt, Artificial Sequence
  Description of Artificial Sequence: Synthetic oligonucleotide
  Sense strand starting at position 3195 of SEQ ID NO: 644
uuguuugaggguuaacugu

SEQ ID NO: 53311 - RNA, 19 nt, Artificial Sequence
  Description of Artificial Sequence: Synthetic oligonucleotide
  Antisense strand to SEQ ID NO: 53230
acaguuaacccucaaacaa

SEQ ID NO: 53312 - RNA, 19 nt, Artificial Sequence
  Description of Artificial Sequence: Synthetic oligonucleotide
  Sense strand starting at position 3064 of SEQ ID NO: 644
ucaucaucagguuagguaa

SEQ ID NO: 53313 - RNA, 19 nt, Artificial Sequence
  Description of Artificial Sequence: Synthetic oligonucleotide
  Antisense strand to SEQ ID NO: 53232
uuaccuaaccugaugauga

SEQ ID NO: 53314 - RNA, 19 nt, Artificial Sequence
  Description of Artificial Sequence: Synthetic oligonucleotide
  Sense strand starting at position 3059 of SEQ ID NO: 644
ccuugucaucaucagguua

SEQ ID NO: 53315 - RNA, 19 nt, Artificial Sequence
  Description of Artificial Sequence: Synthetic oligonucleotide
  Antisense strand to SEQ ID NO: 53234
uaaccugaugaugacaagg

SEQ ID NO: 53316 - RNA, 19 nt, Artificial Sequence
  Description of Artificial Sequence: Synthetic oligonucleotide
  Sense strand starting at position 2801 of SEQ ID NO: 644
gugugaguuauacaauuga

SEQ ID NO: 53317 - RNA, 19 nt, Artificial Sequence
  Description of Artificial Sequence: Synthetic oligonucleotide
  Antisense strand to SEQ ID NO: 53236
ucaauuguauaacucacac

SEQ ID NO: 53318 - RNA, 19 nt, Artificial Sequence
  Description of Artificial Sequence: Synthetic oligonucleotide
  Sense strand starting at position 2797 of SEQ ID NO: 644
gcaugugugaguuauacaa

SEQ ID NO: 53319 - RNA, 19 nt, Artificial Sequence
  Description of Artificial Sequence: Synthetic oligonucleotide
  Antisense strand to SEQ ID NO: 53238
uuguauaacucacacaugc

SEQ ID NO: 53320 - RNA, 19 nt, Artificial Sequence
  Description of Artificial Sequence: Synthetic oligonucleotide
  Sense strand starting at position 2602 of SEQ ID NO: 644
gacaguccucgguagguau

SEQ ID NO: 53321 - RNA, 19 nt, Artificial Sequence
  Description of Artificial Sequence: Synthetic oligonucleotide
  Antisense strand to SEQ ID NO: 53240
auaccuaccgaggacuguc

SEQ ID NO: 53322 - RNA, 19 nt, Artificial Sequence
  Description of Artificial Sequence: Synthetic oligonucleotide
  Sense strand starting at position 2598 of SEQ ID NO: 644
gagugacaguccucgguag

SEQ ID NO: 53323 - RNA, 19 nt, Artificial Sequence
  Description of Artificial Sequence: Synthetic oligonucleotide
  Antisense strand to SEQ ID NO: 53242
cuaccgaggacugucacuc

SEQ ID NO: 53324 - RNA, 19 nt, Artificial Sequence
  Description of Artificial Sequence: Synthetic oligonucleotide
  Sense strand starting at position 2564 of SEQ ID NO: 644
accugagaguucgucgaag

SEQ ID NO: 53325 - RNA, 19 nt, Artificial Sequence
  Description of Artificial Sequence: Synthetic oligonucleotide
  Antisense strand to SEQ ID NO: 53244
cuucgacgaacucucaggu

SEQ ID NO: 53326 - RNA, 19 nt, Artificial Sequence
  Description of Artificial Sequence: Synthetic oligonucleotide
  Sense strand starting at position 2415 of SEQ ID NO: 644
aaaucuuucguggaaucau

SEQ ID NO: 53327 - RNA, 19 nt, Artificial Sequence
  Description of Artificial Sequence: Synthetic oligonucleotide
  Antisense strand to SEQ ID NO: 53246
augauuccacgaaagauuu

SEQ ID NO: 53328 - RNA, 19 nt, Artificial Sequence
  Description of Artificial Sequence: Synthetic oligonucleotide
  Sense strand starting at position 2350 of SEQ ID NO: 644
caaagagauucuuuagagu

SEQ ID NO: 53329 - RNA, 19 nt, Artificial Sequence
  Description of Artificial Sequence: Synthetic oligonucleotide
  Antisense strand to SEQ ID NO: 53248
acucuaaagaaucucuuug

SEQ ID NO: 53330 - RNA, 19 nt, Artificial Sequence
  Description of Artificial Sequence: Synthetic oligonucleotide
  Sense strand starting at position 2316 of SEQ ID NO: 644
acaggucagcgacaaacuu

SEQ ID NO: 53331 - RNA, 19 nt, Artificial Sequence
  Description of Artificial Sequence: Synthetic oligonucleotide
  Antisense strand to SEQ ID NO: 53250
aaguuugucgcugaccugu

SEQ ID NO: 53332 - RNA, 19 nt, Artificial Sequence
  Description of Artificial Sequence: Synthetic oligonucleotide
  Sense strand starting at position 2188 of SEQ ID NO: 644
aggcgagacuuucccaaac

SEQ ID NO: 53333 - RNA, 19 nt, Artificial Sequence
  Description of Artificial Sequence: Synthetic oligonucleotide
  Antisense strand to SEQ ID NO: 53252
guuugggaaagucucgccu

SEQ ID NO: 53334 - RNA, 19 nt, Artificial Sequence
  Description of Artificial Sequence: Synthetic oligonucleotide
  Sense strand starting at position 1347 of SEQ ID NO: 644
agguuuauucuggguuguu

SEQ ID NO: 53335 - RNA, 19 nt, Artificial Sequence
  Description of Artificial Sequence: Synthetic oligonucleotide
  Antisense strand to SEQ ID NO: 53254
aacaacccagaauaaaccu

SEQ ID NO: 53336 - RNA, 19 nt, Artificial Sequence
  Description of Artificial Sequence: Synthetic oligonucleotide
  Sense strand starting at position 1263 of SEQ ID NO: 644
ggaacaauucucuacagcu

SEQ ID NO: 53337 - RNA, 19 nt, Artificial Sequence
  Description of Artificial Sequence: Synthetic oligonucleotide
  Antisense strand to SEQ ID NO: 53256
agcuguagagaauuguucc

SEQ ID NO: 53338 - RNA, 19 nt, Artificial Sequence
  Description of Artificial Sequence: Synthetic oligonucleotide
  Sense strand starting at position 1194 of SEQ ID NO: 644
cugacuguuuacucuuauu

SEQ ID NO: 53339 - RNA, 19 nt, Artificial Sequence
  Description of Artificial Sequence: Synthetic oligonucleotide
  Antisense strand to SEQ ID NO: 53258
aauaagaguaaacagucag

SEQ ID NO: 53340 - RNA, 19 nt, Artificial Sequence
  Description of Artificial Sequence: Synthetic oligonucleotide
  Sense strand starting at position 1186 of SEQ ID NO: 644
cccaaagacugacuguuua

SEQ ID NO: 53341 - RNA, 19 nt, Artificial Sequence
  Description of Artificial Sequence: Synthetic oligonucleotide
  Antisense strand to SEQ ID NO: 53260
uaaacagucagucuuuggg

SEQ ID NO: 53342 - RNA, 19 nt, Artificial Sequence
  Description of Artificial Sequence: Synthetic oligonucleotide
  Sense strand starting at position 1156 of SEQ ID NO: 644
gucgucugugaucauaaua

SEQ ID NO: 53343 - RNA, 19 nt, Artificial Sequence
  Description of Artificial Sequence: Synthetic oligonucleotide
  Antisense strand to SEQ ID NO: 53262
uauuaugaucacagacgac

SEQ ID NO: 53344 - RNA, 19 nt, Artificial Sequence
  Description of Artificial Sequence: Synthetic oligonucleotide
  Sense strand starting at position 1042 of SEQ ID NO: 644
gcaggcauggcuggauuua

SEQ ID NO: 53345 - RNA, 19 nt, Artificial Sequence
  Description of Artificial Sequence: Synthetic oligonucleotide
  Antisense strand to SEQ ID NO: 53264
uaaauccagccaugccugc

SEQ ID NO: 53346 - RNA, 19 nt, Artificial Sequence
  Description of Artificial Sequence: Synthetic oligonucleotide
  Sense strand starting at position 950 of SEQ ID NO: 644
gguguaucacgggaacuau

SEQ ID NO: 53347 - RNA, 19 nt, Artificial Sequence
  Description of Artificial Sequence: Synthetic oligonucleotide
  Antisense strand to SEQ ID NO: 53266
auaguucccgugauacacc

SEQ ID NO: 53348 - RNA, 19 nt, Artificial Sequence
  Description of Artificial Sequence: Synthetic oligonucleotide
  Sense strand starting at position 949 of SEQ ID NO: 644
ggguguaucacgggaacua

SEQ ID NO: 53349 - RNA, 19 nt, Artificial Sequence
  Description of Artificial Sequence: Synthetic oligonucleotide
  Antisense strand to SEQ ID NO: 53268
uaguucccgugauacaccc

SEQ ID NO: 53350 - RNA, 19 nt, Artificial Sequence
  Description of Artificial Sequence: Synthetic oligonucleotide
  Sense strand starting at position 923 of SEQ ID NO: 644
uugaaaggccugugaguca

SEQ ID NO: 53351 - RNA, 19 nt, Artificial Sequence
  Description of Artificial Sequence: Synthetic oligonucleotide
  Antisense strand to SEQ ID NO: 53270
ugacucacaggccuuucaa

SEQ ID NO: 53352 - RNA, 19 nt, Artificial Sequence
  Description of Artificial Sequence: Synthetic oligonucleotide
  Sense strand starting at position 909 of SEQ ID NO: 644
uuaugaggcuggguuugaa

SEQ ID NO: 53353 - RNA, 19 nt, Artificial Sequence
  Description of Artificial Sequence: Synthetic oligonucleotide
  Antisense strand to SEQ ID NO: 53272
uucaaacccagccucauaa

SEQ ID NO: 53354 - RNA, 19 nt, Artificial Sequence
  Description of Artificial Sequence: Synthetic oligonucleotide
  Sense strand starting at position 702 of SEQ ID NO: 644
ggauuuaauuaacagauac

SEQ ID NO: 53355 - RNA, 19 nt, Artificial Sequence
  Description of Artificial Sequence: Synthetic oligonucleotide
  Antisense strand to SEQ ID NO: 53274
guaucuguuaauuaaaucc

SEQ ID NO: 53356 - RNA, 19 nt, Artificial Sequence
  Description of Artificial Sequence: Synthetic oligonucleotide
  Sense strand starting at position 664 of SEQ ID NO: 644
gugagucuuggaggauuaa

SEQ ID NO: 53357 - RNA, 19 nt, Artificial Sequence
  Description of Artificial Sequence: Synthetic oligonucleotide
  Antisense strand to SEQ ID NO: 53276
uuaauccuccaagacucac

SEQ ID NO: 53358 - RNA, 19 nt, Artificial Sequence
  Description of Artificial Sequence: Synthetic oligonucleotide
  Sense strand starting at position 661 of SEQ ID NO: 644
guggugagucuuggaggau

SEQ ID NO: 53359 - RNA, 19 nt, Artificial Sequence
  Description of Artificial Sequence: Synthetic oligonucleotide
  Antisense strand to SEQ ID NO: 53278
auccuccaagacucaccac

SEQ ID NO: 53360 - RNA, 19 nt, Artificial Sequence
  Description of Artificial Sequence: Synthetic oligonucleotide
  Sense strand starting at position 549 of SEQ ID NO: 644
uccagaugguucuuauacu

SEQ ID NO: 53361 - RNA, 19 nt, Artificial Sequence
  Description of Artificial Sequence: Synthetic oligonucleotide
  Antisense strand to SEQ ID NO: 53280
aguauaagaaccaucugga

SEQ ID NO: 53362 - RNA, 19 nt, Artificial Sequence
  Description of Artificial Sequence: Synthetic oligonucleotide
  Sense strand starting at position 544 of SEQ ID NO: 644
ggaauuccagaugguucuu

SEQ ID NO: 53363 - RNA, 19 nt, Artificial Sequence
  Description of Artificial Sequence: Synthetic oligonucleotide
  Antisense strand to SEQ ID NO: 53282
aagaaccaucuggaauucc

SEQ ID NO: 53364 - RNA, 19 nt, Artificial Sequence
  Description of Artificial Sequence: Synthetic oligonucleotide
  Sense strand starting at position 543 of SEQ ID NO: 644
uggaauuccagaugguucu

SEQ ID NO: 53365 - RNA, 19 nt, Artificial Sequence
  Description of Artificial Sequence: Synthetic oligonucleotide
  Antisense strand to SEQ ID NO: 53284
agaaccaucuggaauucca

SEQ ID NO: 53366 - RNA, 19 nt, Artificial Sequence
  Description of Artificial Sequence: Synthetic oligonucleotide
  Sense strand starting at position 465 of SEQ ID NO: 644
ggacaaugcucuuuccacu

SEQ ID NO: 53367 - RNA, 19 nt, Artificial Sequence
  Description of Artificial Sequence: Synthetic oligonucleotide
  Antisense strand to SEQ ID NO: 53286
aguggaaagagcauugucc

SEQ ID NO: 53368 - RNA, 19 nt, Artificial Sequence
  Description of Artificial Sequence: Synthetic oligonucleotide
  Sense strand starting at position 394 of SEQ ID NO: 644
augguaacaugagucauaa

SEQ ID NO: 53369 - RNA, 19 nt, Artificial Sequence
  Description of Artificial Sequence: Synthetic oligonucleotide
  Antisense strand to SEQ ID NO: 53288
uuaugacucauguuaccau

SEQ ID NO: 53370 - RNA, 19 nt, Artificial Sequence
  Description of Artificial Sequence: Synthetic oligonucleotide
  Sense strand starting at position 101 of SEQ ID NO: 644
agagaaugcccugagugcu

SEQ ID NO: 53371 - RNA, 19 nt, Artificial Sequence
  Description of Artificial Sequence: Synthetic oligonucleotide
  Antisense strand to SEQ ID NO: 53290
agcacucagggcauucucu

SEQ ID NO: 53372 - RNA, 19 nt, Artificial Sequence
  Description of Artificial Sequence: Synthetic oligonucleotide
  Sense strand starting at position 81 of SEQ ID NO: 644
gucagugugcguuucuaau

SEQ ID NO: 53373 - RNA, 19 nt, Artificial Sequence
  Description of Artificial Sequence: Synthetic oligonucleotide
  Antisense strand to SEQ ID NO: 53292
auuagaaacgcacacugac

SEQ ID NO: 53374 - RNA, 19 nt, Artificial Sequence
  Description of Artificial Sequence: Synthetic oligonucleotide
  Sense strand starting at position 70 of SEQ ID NO: 644
gcucaugucaugucagugu

SEQ ID NO: 53375 - RNA, 19 nt, Artificial Sequence
  Description of Artificial Sequence: Synthetic oligonucleotide
  Antisense strand to SEQ ID NO: 53294
acacugacaugacaugagc

SEQ ID NO: 53376 - RNA, 19 nt, Artificial Sequence
  Description of Artificial Sequence: Synthetic oligonucleotide
  Sense strand starting at position 38 of SEQ ID NO: 644
gaguguugcauguucuguu

SEQ ID NO: 53377 - RNA, 19 nt, Artificial Sequence
  Description of Artificial Sequence: Synthetic oligonucleotide
  Antisense strand to SEQ ID NO: 53296
aacagaacaugcaacacuc

SEQ ID NO: 53378 - RNA, 19 nt, Artificial Sequence
  Description of Artificial Sequence: Synthetic oligonucleotide
  Sense strand starting at position 139 of SEQ ID NO: 645
caaggaaacuaugggagaa

SEQ ID NO: 53379 - RNA, 19 nt, Artificial Sequence
  Description of Artificial Sequence: Synthetic oligonucleotide
  Antisense strand to SEQ ID NO: 53298
uucucccauaguuuccuug

SEQ ID NO: 53380 - RNA, 19 nt, Artificial Sequence
  Description of Artificial Sequence: Synthetic oligonucleotide
  Sense strand starting at position 192 of SEQ ID NO: 645
guaaguggcagccaggauu

SEQ ID NO: 53381 - RNA, 19 nt, Artificial Sequence
  Description of Artificial Sequence: Synthetic oligonucleotide
  Antisense strand to SEQ ID NO: 53300
aauccuggcugccacuuac

SEQ ID NO: 53382 - RNA, 19 nt, Artificial Sequence
  Description of Artificial Sequence: Synthetic oligonucleotide
  Sense strand starting at position 210 of SEQ ID NO: 645
uggacucaggucugcagaa

SEQ ID NO: 53383 - RNA, 19 nt, Artificial Sequence
  Description of Artificial Sequence: Synthetic oligonucleotide
  Antisense strand to SEQ ID NO: 53302
uucugcagaccugagucca

SEQ ID NO: 53384 - RNA, 19 nt, Artificial Sequence
  Description of Artificial Sequence: Synthetic oligonucleotide
  Sense strand starting at position 211 of SEQ ID NO: 645
ggacucaggucugcagaaa

SEQ ID NO: 53385 - RNA, 19 nt, Artificial Sequence
  Description of Artificial Sequence: Synthetic oligonucleotide
  Antisense strand to SEQ ID NO: 53304
uuucugcagaccugagucc

SEQ ID NO: 53386 - RNA, 19 nt, Artificial Sequence
  Description of Artificial Sequence: Synthetic oligonucleotide
  Sense strand starting at position 242 of SEQ ID NO: 645
gcucucaaucaugaaggca

SEQ ID NO: 53387 - RNA, 19 nt, Artificial Sequence
  Description of Artificial Sequence: Synthetic oligonucleotide
  Antisense strand to SEQ ID NO: 53306
ugccuucaugauugagagc

SEQ ID NO: 53388 - RNA, 19 nt, Artificial Sequence
  Description of Artificial Sequence: Synthetic oligonucleotide
  Sense strand starting at position 268 of SEQ ID NO: 645
gccuuuccagcucaggaau

SEQ ID NO: 53389 - RNA, 19 nt, Artificial Sequence
  Description of Artificial Sequence: Synthetic oligonucleotide
  Antisense strand to SEQ ID NO: 53308
auuccugagcuggaaaggc

SEQ ID NO: 53390 - RNA, 19 nt, Artificial Sequence
  Description of Artificial Sequence: Synthetic oligonucleotide
  Sense strand starting at position 311 of SEQ ID NO: 645
uugauuuguugugcgguua

SEQ ID NO: 53391 - RNA, 19 nt, Artificial Sequence
  Description of Artificial Sequence: Synthetic oligonucleotide
  Antisense strand to SEQ ID NO: 53310
uaaccgcacaacaaaucaa

SEQ ID NO: 53392 - RNA, 19 nt, Artificial Sequence
  Description of Artificial Sequence: Synthetic oligonucleotide
  Sense strand starting at position 466 of SEQ ID NO: 645
cguggucaacuguauauaa

SEQ ID NO: 53393 - RNA, 19 nt, Artificial Sequence
  Description of Artificial Sequence: Synthetic oligonucleotide
  Antisense strand to SEQ ID NO: 53312
uuauauacaguugaccacg

SEQ ID NO: 53394 - RNA, 19 nt, Artificial Sequence
  Description of Artificial Sequence: Synthetic oligonucleotide
  Sense strand starting at position 864 of SEQ ID NO: 645
ucggcaaacuacuuaaauu

SEQ ID NO: 53395 - RNA, 19 nt, Artificial Sequence
  Description of Artificial Sequence: Synthetic oligonucleotide
  Antisense strand to SEQ ID NO: 53314
aauuuaaguaguuugccga

SEQ ID NO: 53396 - RNA, 19 nt, Artificial Sequence
  Description of Artificial Sequence: Synthetic oligonucleotide
  Sense strand starting at position 886 of SEQ ID NO: 645
cuguguaauuucccaaagu

SEQ ID NO: 53397 - RNA, 19 nt, Artificial Sequence
  Description of Artificial Sequence: Synthetic oligonucleotide
  Antisense strand to SEQ ID NO: 53316
acuuugggaaauuacacag

SEQ ID NO: 53398 - RNA, 19 nt, Artificial Sequence
  Description of Artificial Sequence: Synthetic oligonucleotide
  Sense strand starting at position 938 of SEQ ID NO: 645
acaauaaucuuggucaugu

SEQ ID NO: 53399 - RNA, 19 nt, Artificial Sequence
  Description of Artificial Sequence: Synthetic oligonucleotide
  Antisense strand to SEQ ID NO: 53318
acaugaccaagauuauugu

SEQ ID NO: 53400 - RNA, 19 nt, Artificial Sequence
  Description of Artificial Sequence: Synthetic oligonucleotide
  Sense strand starting at position 978 of SEQ ID NO: 645
aacuuaagaugugucagua

SEQ ID NO: 53401 - RNA, 19 nt, Artificial Sequence
  Description of Artificial Sequence: Synthetic oligonucleotide
  Antisense strand to SEQ ID NO: 53320
uacugacacaucuuaaguu

SEQ ID NO: 53402 - RNA, 19 nt, Artificial Sequence
  Description of Artificial Sequence: Synthetic oligonucleotide
  Sense strand starting at position 982 of SEQ ID NO: 645
uaagaugugucaguaaggu

SEQ ID NO: 53403 - RNA, 19 nt, Artificial Sequence
  Description of Artificial Sequence: Synthetic oligonucleotide
  Antisense strand to SEQ ID NO: 53322
accuuacugacacaucuua

SEQ ID NO: 53404 - RNA, 19 nt, Artificial Sequence
  Description of Artificial Sequence: Synthetic oligonucleotide
  Sense strand starting at position 988 of SEQ ID NO: 645
gugucaguaaggugacaga

SEQ ID NO: 53405 - RNA, 19 nt, Artificial Sequence
  Description of Artificial Sequence: Synthetic oligonucleotide
  Antisense strand to SEQ ID NO: 53324
ucugucaccuuacugacac

SEQ ID NO: 53406 - RNA, 19 nt, Artificial Sequence
  Description of Artificial Sequence: Synthetic oligonucleotide
  Sense strand starting at position 1125 of SEQ ID NO: 645
aaugcagccucaguugaaa

SEQ ID NO: 53407 - RNA, 19 nt, Artificial Sequence
  Description of Artificial Sequence: Synthetic oligonucleotide
  Antisense strand to SEQ ID NO: 53326
uuucaacugaggcugcauu

SEQ ID NO: 53408 - RNA, 19 nt, Artificial Sequence
  Description of Artificial Sequence: Synthetic oligonucleotide
  Sense strand starting at position 1158 of SEQ ID NO: 645
augcucgucuggguuauuu

SEQ ID NO: 53409 - RNA, 19 nt, Artificial Sequence
  Description of Artificial Sequence: Synthetic oligonucleotide
  Antisense strand to SEQ ID NO: 53328
aaauaacccagacgagcau

SEQ ID NO: 53410 - RNA, 19 nt, Artificial Sequence
  Description of Artificial Sequence: Synthetic oligonucleotide
  Sense strand starting at position 1223 of SEQ ID NO: 645
gaggauuucuccugagagg

SEQ ID NO: 53411 - RNA, 19 nt, Artificial Sequence
  Description of Artificial Sequence: Synthetic oligonucleotide
  Antisense strand to SEQ ID NO: 53330
ccucucaggagaaauccuc

SEQ ID NO: 53412 - RNA, 19 nt, Artificial Sequence
  Description of Artificial Sequence: Synthetic oligonucleotide
  Sense strand starting at position 1294 of SEQ ID NO: 645
aagagaagcgacgacuauu

SEQ ID NO: 53413 - RNA, 19 nt, Artificial Sequence
  Description of Artificial Sequence: Synthetic oligonucleotide
  Antisense strand to SEQ ID NO: 53332
aauagucgucgcuucucuu

SEQ ID NO: 53414 - RNA, 19 nt, Artificial Sequence
  Description of Artificial Sequence: Synthetic oligonucleotide
  Sense strand starting at position 1376 of SEQ ID NO: 645
aggugaguugacugggagu

SEQ ID NO: 53415 - RNA, 19 nt, Artificial Sequence
  Description of Artificial Sequence: Synthetic oligonucleotide
  Antisense strand to SEQ ID NO: 53334
acucccagucaacucaccu

SEQ ID NO: 53416 - RNA, 19 nt, Artificial Sequence
  Description of Artificial Sequence: Synthetic oligonucleotide
  Sense strand starting at position 1422 of SEQ ID NO: 645
cggagucucguguugucua

SEQ ID NO: 53417 - RNA, 19 nt, Artificial Sequence
  Description of Artificial Sequence: Synthetic oligonucleotide
  Antisense strand to SEQ ID NO: 53336
uagacaacacgagacuccg

SEQ ID NO: 53418 - RNA, 19 nt, Artificial Sequence
  Description of Artificial Sequence: Synthetic oligonucleotide
  Sense strand starting at position 1687 of SEQ ID NO: 645
agcggagggucuccugaau

SEQ ID NO: 53419 - RNA, 19 nt, Artificial Sequence
  Description of Artificial Sequence: Synthetic oligonucleotide
  Antisense strand to SEQ ID NO: 53338
auucaggagacccuccgcu

SEQ ID NO: 53420 - RNA, 19 nt, Artificial Sequence
  Description of Artificial Sequence: Synthetic oligonucleotide
  Sense strand starting at position 2035 of SEQ ID NO: 645
acgacacuucgucaaguca

SEQ ID NO: 53421 - RNA, 19 nt, Artificial Sequence
  Description of Artificial Sequence: Synthetic oligonucleotide
  Antisense strand to SEQ ID NO: 53340
ugacuugacgaagugucgu

SEQ ID NO: 53422 - RNA, 19 nt, Artificial Sequence
  Description of Artificial Sequence: Synthetic oligonucleotide
  Sense strand starting at position 2095 of SEQ ID NO: 645
gggauaggcguuuauguga

SEQ ID NO: 53423 - RNA, 19 nt, Artificial Sequence
  Description of Artificial Sequence: Synthetic oligonucleotide
  Antisense strand to SEQ ID NO: 53342
ucacauaaacgccuauccc

SEQ ID NO: 53424 - RNA, 19 nt, Artificial Sequence
  Description of Artificial Sequence: Synthetic oligonucleotide
  Sense strand starting at position 2104 of SEQ ID NO: 645
guuuaugugaagcacgaaa

SEQ ID NO: 53425 - RNA, 19 nt, Artificial Sequence
  Description of Artificial Sequence: Synthetic oligonucleotide
  Antisense strand to SEQ ID NO: 53344
uuucgugcuucacauaaac

SEQ ID NO: 53426 - RNA, 19 nt, Artificial Sequence
  Description of Artificial Sequence: Synthetic oligonucleotide
  Sense strand starting at position 2130 of SEQ ID NO: 645
augcacugucuuuauguaa

SEQ ID NO: 53427 - RNA, 19 nt, Artificial Sequence
  Description of Artificial Sequence: Synthetic oligonucleotide
  Antisense strand to SEQ ID NO: 53346
uuacauaaagacagugcau

SEQ ID NO: 53428 - RNA, 19 nt, Artificial Sequence
  Description of Artificial Sequence: Synthetic oligonucleotide
  Sense strand starting at position 2172 of SEQ ID NO: 645
acacgauagccaugauuac

SEQ ID NO: 53429 - RNA, 19 nt, Artificial Sequence
  Description of Artificial Sequence: Synthetic oligonucleotide
  Antisense strand to SEQ ID NO: 53348
guaaucauggcuaucgugu

SEQ ID NO: 53430 - RNA, 19 nt, Artificial Sequence
  Description of Artificial Sequence: Synthetic oligonucleotide
  Sense strand starting at position 2181 of SEQ ID NO: 645
ccaugauuacguugggaau

SEQ ID NO: 53431 - RNA, 19 nt, Artificial Sequence
  Description of Artificial Sequence: Synthetic oligonucleotide
  Antisense strand to SEQ ID NO: 53350
auucccaacguaaucaugg

SEQ ID NO: 53432 - RNA, 19 nt, Artificial Sequence
  Description of Artificial Sequence: Synthetic oligonucleotide
  Sense strand starting at position 2182 of SEQ ID NO: 645
caugauuacguugggaaug

SEQ ID NO: 53433 - RNA, 19 nt, Artificial Sequence
  Description of Artificial Sequence: Synthetic oligonucleotide
  Antisense strand to SEQ ID NO: 53352
cauucccaacguaaucaug

SEQ ID NO: 53434 - RNA, 19 nt, Artificial Sequence
  Description of Artificial Sequence: Synthetic oligonucleotide
  Sense strand starting at position 2273 of SEQ ID NO: 645
ucaagaguuauuugcgugu

SEQ ID NO: 53435 - RNA, 19 nt, Artificial Sequence
  Description of Artificial Sequence: Synthetic oligonucleotide
  Antisense strand to SEQ ID NO: 53354
acacgcaaauaacucuuga

SEQ ID NO: 53436 - RNA, 19 nt, Artificial Sequence
  Description of Artificial Sequence: Synthetic oligonucleotide
  Sense strand starting at position 2276 of SEQ ID NO: 645
agaguuauuugcguguuga

SEQ ID NO: 53437 - RNA, 19 nt, Artificial Sequence
  Description of Artificial Sequence: Synthetic oligonucleotide
  Antisense strand to SEQ ID NO: 53356
ucaacacgcaaauaacucu

SEQ ID NO: 53438 - RNA, 19 nt, Artificial Sequence
  Description of Artificial Sequence: Synthetic oligonucleotide
  Sense strand starting at position 2277 of SEQ ID NO: 645
gaguuauuugcguguugaa

SEQ ID NO: 53439 - RNA, 19 nt, Artificial Sequence
  Description of Artificial Sequence: Synthetic oligonucleotide
  Antisense strand to SEQ ID NO: 53358
uucaacacgcaaauaacuc

SEQ ID NO: 53440 - RNA, 19 nt, Artificial Sequence
  Description of Artificial Sequence: Synthetic oligonucleotide
  Sense strand starting at position 3064 of SEQ ID NO: 645
uggacuugccugugaguag

SEQ ID NO: 53441 - RNA, 19 nt, Artificial Sequence
  Description of Artificial Sequence: Synthetic oligonucleotide
  Antisense strand to SEQ ID NO: 53360
cuacucacaggcaagucca

SEQ ID NO: 53442 - RNA, 19 nt, Artificial Sequence
  Description of Artificial Sequence: Synthetic oligonucleotide
  Sense strand starting at position 3238 of SEQ ID NO: 645
augcaugagcuccagagau

SEQ ID NO: 53443 - RNA, 19 nt, Artificial Sequence
  Description of Artificial Sequence: Synthetic oligonucleotide
  Antisense strand to SEQ ID NO: 53362
aucucuggagcucaugcau

SEQ ID NO: 53444 - RNA, 19 nt, Artificial Sequence
  Description of Artificial Sequence: Synthetic oligonucleotide
  Sense strand starting at position 3240 of SEQ ID NO: 645
gcaugagcuccagagauac

SEQ ID NO: 53445 - RNA, 19 nt, Artificial Sequence
  Description of Artificial Sequence: Synthetic oligonucleotide
  Antisense strand to SEQ ID NO: 53364
guaucucuggagcucaugc

SEQ ID NO: 53446 - RNA, 19 nt, Artificial Sequence
  Description of Artificial Sequence: Synthetic oligonucleotide
  Sense strand starting at position 3252 of SEQ ID NO: 645
gagauacuccaagguguau

SEQ ID NO: 53447 - RNA, 19 nt, Artificial Sequence
  Description of Artificial Sequence: Synthetic oligonucleotide
  Antisense strand to SEQ ID NO: 53366
auacaccuuggaguaucuc

SEQ ID NO: 53448 - RNA, 19 nt, Artificial Sequence
  Description of Artificial Sequence: Synthetic oligonucleotide
  Sense strand starting at position 3302 of SEQ ID NO: 645
auuucaagggcugguguua

SEQ ID NO: 53449 - RNA, 19 nt, Artificial Sequence
  Description of Artificial Sequence: Synthetic oligonucleotide
  Antisense strand to SEQ ID NO: 53368
uaacaccagcccuugaaau

SEQ ID NO: 53450 - RNA, 19 nt, Artificial Sequence
  Description of Artificial Sequence: Synthetic oligonucleotide
  Sense strand starting at position 3808 of SEQ ID NO: 645
gucuuagaguuaccaucuu

SEQ ID NO: 53451 - RNA, 19 nt, Artificial Sequence
  Description of Artificial Sequence: Synthetic oligonucleotide
  Antisense strand to SEQ ID NO: 53370
aagaugguaacucuaagac

SEQ ID NO: 53452 - RNA, 19 nt, Artificial Sequence
  Description of Artificial Sequence: Synthetic oligonucleotide
  Sense strand starting at position 3944 of SEQ ID NO: 645
gaacuuccagaaugauguu

SEQ ID NO: 53453 - RNA, 19 nt, Artificial Sequence
  Description of Artificial Sequence: Synthetic oligonucleotide
  Antisense strand to SEQ ID NO: 53372
aacaucauucuggaaguuc

SEQ ID NO: 53454 - RNA, 19 nt, Artificial Sequence
  Description of Artificial Sequence: Synthetic oligonucleotide
  Sense strand starting at position 3956 of SEQ ID NO: 645
ugauguuaaaugggagcaa

SEQ ID NO: 53455 - RNA, 19 nt, Artificial Sequence
  Description of Artificial Sequence: Synthetic oligonucleotide
  Antisense strand to SEQ ID NO: 53374
uugcucccauuuaacauca

SEQ ID NO: 53456 - RNA, 19 nt, Artificial Sequence
  Description of Artificial Sequence: Synthetic oligonucleotide
  Sense strand starting at position 3981 of SEQ ID NO: 645
ugucgaauaagagaguauu

SEQ ID NO: 53457 - RNA, 19 nt, Artificial Sequence
  Description of Artificial Sequence: Synthetic oligonucleotide
  Antisense strand to SEQ ID NO: 53376
aauacucucuuauucgaca

SEQ ID NO: 53458 - RNA, 19 nt, Artificial Sequence
  Description of Artificial Sequence: Synthetic oligonucleotide
  Sense strand starting at position 78 of SEQ ID NO: 647
caagcaaaucacggagaaa

SEQ ID NO: 53459 - RNA, 19 nt, Artificial Sequence
  Description of Artificial Sequence: Synthetic oligonucleotide
  Antisense strand to SEQ ID NO: 53378
uuucuccgugauuugcuug

SEQ ID NO: 53460 - RNA, 19 nt, Artificial Sequence
  Description of Artificial Sequence: Synthetic oligonucleotide
  Sense strand starting at position 417 of SEQ ID NO: 647
aguaauaacugcuuagaau

SEQ ID NO: 53461 - RNA, 19 nt, Artificial Sequence
  Description of Artificial Sequence: Synthetic oligonucleotide
  Antisense strand to SEQ ID NO: 53380
auucuaagcaguuauuacu

SEQ ID NO: 53462 - RNA, 19 nt, Artificial Sequence
  Description of Artificial Sequence: Synthetic oligonucleotide
  Sense strand starting at position 418 of SEQ ID NO: 647
guaauaacugcuuagaaug

SEQ ID NO: 53463 - RNA, 19 nt, Artificial Sequence
  Description of Artificial Sequence: Synthetic oligonucleotide
  Antisense strand to SEQ ID NO: 53382
cauucuaagcaguuauuac

SEQ ID NO: 53464 - RNA, 19 nt, Artificial Sequence
  Description of Artificial Sequence: Synthetic oligonucleotide
  Sense strand starting at position 548 of SEQ ID NO: 647
ugaugaugaucucuuaacu

SEQ ID NO: 53465 - RNA, 19 nt, Artificial Sequence
  Description of Artificial Sequence: Synthetic oligonucleotide
  Antisense strand to SEQ ID NO: 53384
aguuaagagaucaucauca

SEQ ID NO: 53466 - RNA, 19 nt, Artificial Sequence
  Description of Artificial Sequence: Synthetic oligonucleotide
  Sense strand starting at position 722 of SEQ ID NO: 647
augaauguccugcaucaaa

SEQ ID NO: 53467 - RNA, 19 nt, Artificial Sequence
  Description of Artificial Sequence: Synthetic oligonucleotide
  Antisense strand to SEQ ID NO: 53386
uuugaugcaggacauucau

SEQ ID NO: 53468 - RNA, 19 nt, Artificial Sequence
  Description of Artificial Sequence: Synthetic oligonucleotide
  Sense strand starting at position 842 of SEQ ID NO: 647
auccaagaguucuuacuag

SEQ ID NO: 53469 - RNA, 19 nt, Artificial Sequence
  Description of Artificial Sequence: Synthetic oligonucleotide
  Antisense strand to SEQ ID NO: 53388
cuaguaagaacucuuggau

SEQ ID NO: 53470 - RNA, 19 nt, Artificial Sequence
  Description of Artificial Sequence: Synthetic oligonucleotide
  Sense strand starting at position 1139 of SEQ ID NO: 647
aagauaugcugguuacuaa

SEQ ID NO: 53471 - RNA, 19 nt, Artificial Sequence
  Description of Artificial Sequence: Synthetic oligonucleotide
  Antisense strand to SEQ ID NO: 53390
uuaguaaccagcauaucuu

SEQ ID NO: 53472 - RNA, 19 nt, Artificial Sequence
  Description of Artificial Sequence: Synthetic oligonucleotide
  Sense strand starting at position 1140 of SEQ ID NO: 647
agauaugcugguuacuaag

SEQ ID NO: 53473 - RNA, 19 nt, Artificial Sequence
  Description of Artificial Sequence: Synthetic oligonucleotide
  Antisense strand to SEQ ID NO: 53392
cuuaguaaccagcauaucu

SEQ ID NO: 53474 - RNA, 19 nt, Artificial Sequence
  Description of Artificial Sequence: Synthetic oligonucleotide
  Sense strand starting at position 1392 of SEQ ID NO: 647
augauauaauaugcaggua

SEQ ID NO: 53475 - RNA, 19 nt, Artificial Sequence
  Description of Artificial Sequence: Synthetic oligonucleotide
  Antisense strand to SEQ ID NO: 53394
uaccugcauauuauaucau

SEQ ID NO: 53476 - RNA, 19 nt, Artificial Sequence
  Description of Artificial Sequence: Synthetic oligonucleotide
  Sense strand starting at position 1395 of SEQ ID NO: 647
auauaauaugcagguaagu

SEQ ID NO: 53477 - RNA, 19 nt, Artificial Sequence
  Description of Artificial Sequence: Synthetic oligonucleotide
  Antisense strand to SEQ ID NO: 53396
acuuaccugcauauuauau

SEQ ID NO: 53478 - RNA, 19 nt, Artificial Sequence
  Description of Artificial Sequence: Synthetic oligonucleotide
  Sense strand starting at position 1437 of SEQ ID NO: 647
acuagaaaucuaugcugaa

SEQ ID NO: 53479 - RNA, 19 nt, Artificial Sequence
  Description of Artificial Sequence: Synthetic oligonucleotide
  Antisense strand to SEQ ID NO: 53398
uucagcauagauuucuagu

SEQ ID NO: 53480 - RNA, 19 nt, Artificial Sequence
  Description of Artificial Sequence: Synthetic oligonucleotide
  Sense strand starting at position 1438 of SEQ ID NO: 647
cuagaaaucuaugcugaaa

SEQ ID NO: 53481 - RNA, 19 nt, Artificial Sequence
  Description of Artificial Sequence: Synthetic oligonucleotide
  Antisense strand to SEQ ID NO: 53400
uuucagcauagauuucuag

SEQ ID NO: 53482 - RNA, 19 nt, Artificial Sequence
  Description of Artificial Sequence: Synthetic oligonucleotide
  Sense strand starting at position 1479 of SEQ ID NO: 647
auaaucuuugcaggccaga

SEQ ID NO: 53483 - RNA, 19 nt, Artificial Sequence
  Description of Artificial Sequence: Synthetic oligonucleotide
  Antisense strand to SEQ ID NO: 53402
ucuggccugcaaagauuau

SEQ ID NO: 53484 - RNA, 19 nt, Artificial Sequence
  Description of Artificial Sequence: Synthetic oligonucleotide
  Sense strand starting at position 1482 of SEQ ID NO: 647
aucuuugcaggccagaauu

SEQ ID NO: 53485 - RNA, 19 nt, Artificial Sequence
  Description of Artificial Sequence: Synthetic oligonucleotide
  Antisense strand to SEQ ID NO: 53404
aauucuggccugcaaagau

SEQ ID NO: 53486 - RNA, 19 nt, Artificial Sequence
  Description of Artificial Sequence: Synthetic oligonucleotide
  Sense strand starting at position 1555 of SEQ ID NO: 647
aggcauucucuugaccuaa

SEQ ID NO: 53487 - RNA, 19 nt, Artificial Sequence
  Description of Artificial Sequence: Synthetic oligonucleotide
  Antisense strand to SEQ ID NO: 53406
uuaggucaagagaaugccu

SEQ ID NO: 53488 - RNA, 19 nt, Artificial Sequence
  Description of Artificial Sequence: Synthetic oligonucleotide
  Sense strand starting at position 1625 of SEQ ID NO: 647
cuaaaucagcaguggaaca

SEQ ID NO: 53489 - RNA, 19 nt, Artificial Sequence
  Description of Artificial Sequence: Synthetic oligonucleotide
  Antisense strand to SEQ ID NO: 53408
uguuccacugcugauuuag

SEQ ID NO: 53490 - RNA, 19 nt, Artificial Sequence
  Description of Artificial Sequence: Synthetic oligonucleotide
  Sense strand starting at position 1712 of SEQ ID NO: 647
gguccuguuccacauuauu

SEQ ID NO: 53491 - RNA, 19 nt, Artificial Sequence
  Description of Artificial Sequence: Synthetic oligonucleotide
  Antisense strand to SEQ ID NO: 53410
aauaauguggaacaggacc

SEQ ID NO: 53492 - RNA, 19 nt, Artificial Sequence
  Description of Artificial Sequence: Synthetic oligonucleotide
  Sense strand starting at position 2039 of SEQ ID NO: 647
uggaaauaguguccaauga

SEQ ID NO: 53493 - RNA, 19 nt, Artificial Sequence
  Description of Artificial Sequence: Synthetic oligonucleotide
  Antisense strand to SEQ ID NO: 53412
ucauuggacacuauuucca

SEQ ID NO: 53494 - RNA, 19 nt, Artificial Sequence
  Description of Artificial Sequence: Synthetic oligonucleotide
  Sense strand starting at position 2206 of SEQ ID NO: 647
aucacuggugugcaucaau

SEQ ID NO: 53495 - RNA, 19 nt, Artificial Sequence
  Description of Artificial Sequence: Synthetic oligonucleotide
  Antisense strand to SEQ ID NO: 53414
auugaugcacaccagugau

SEQ ID NO: 53496 - RNA, 19 nt, Artificial Sequence
  Description of Artificial Sequence: Synthetic oligonucleotide
  Sense strand starting at position 2438 of SEQ ID NO: 647
uuugaaacaucguuaccua

SEQ ID NO: 53497 - RNA, 19 nt, Artificial Sequence
  Description of Artificial Sequence: Synthetic oligonucleotide
  Antisense strand to SEQ ID NO: 53416
uagguaacgauguuucaaa

SEQ ID NO: 53498 - RNA, 19 nt, Artificial Sequence
  Description of Artificial Sequence: Synthetic oligonucleotide
  Sense strand starting at position 2439 of SEQ ID NO: 647
uugaaacaucguuaccuaa

SEQ ID NO: 53499 - RNA, 19 nt, Artificial Sequence
  Description of Artificial Sequence: Synthetic oligonucleotide
  Antisense strand to SEQ ID NO: 53418
uuagguaacgauguuucaa

SEQ ID NO: 53500 - RNA, 19 nt, Artificial Sequence
  Description of Artificial Sequence: Synthetic oligonucleotide
  Sense strand starting at position 2565 of SEQ ID NO: 647
gcccauuuguaguuguacu

SEQ ID NO: 53501 - RNA, 19 nt, Artificial Sequence
  Description of Artificial Sequence: Synthetic oligonucleotide
  Antisense strand to SEQ ID NO: 53420
aguacaacuacaaaugggc

SEQ ID NO: 53502 - RNA, 19 nt, Artificial Sequence
  Description of Artificial Sequence: Synthetic oligonucleotide
  Sense strand starting at position 2572 of SEQ ID NO: 647
uguaguuguacugaaauca

SEQ ID NO: 53503 - RNA, 19 nt, Artificial Sequence
  Description of Artificial Sequence: Synthetic oligonucleotide
  Antisense strand to SEQ ID NO: 53422
ugauuucaguacaacuaca

SEQ ID NO: 53504 - RNA, 19 nt, Artificial Sequence
  Description of Artificial Sequence: Synthetic oligonucleotide
  Sense strand starting at position 2665 of SEQ ID NO: 647
agaauucugcagcaguaca

SEQ ID NO: 53505 - RNA, 19 nt, Artificial Sequence
  Description of Artificial Sequence: Synthetic oligonucleotide
  Antisense strand to SEQ ID NO: 53424
uguacugcugcagaauucu

SEQ ID NO: 53506 - RNA, 19 nt, Artificial Sequence
  Description of Artificial Sequence: Synthetic oligonucleotide
  Sense strand starting at position 2744 of SEQ ID NO: 647
acaaguccuccagauuagu

SEQ ID NO: 53507 - RNA, 19 nt, Artificial Sequence
  Description of Artificial Sequence: Synthetic oligonucleotide
  Antisense strand to SEQ ID NO: 53426
acuaaucuggaggacuugu

SEQ ID NO: 53508 - RNA, 19 nt, Artificial Sequence
  Description of Artificial Sequence: Synthetic oligonucleotide
  Sense strand starting at position 2747 of SEQ ID NO: 647
aguccuccagauuaguaua

SEQ ID NO: 53509 - RNA, 19 nt, Artificial Sequence
  Description of Artificial Sequence: Synthetic oligonucleotide
  Antisense strand to SEQ ID NO: 53428
uauacuaaucuggaggacu

SEQ ID NO: 53510 - RNA, 19 nt, Artificial Sequence
  Description of Artificial Sequence: Synthetic oligonucleotide
  Sense strand starting at position 2752 of SEQ ID NO: 647
uccagauuaguauagccaa

SEQ ID NO: 53511 - RNA, 19 nt, Artificial Sequence
  Description of Artificial Sequence: Synthetic oligonucleotide
  Antisense strand to SEQ ID NO: 53430
uuggcuauacuaaucugga

SEQ ID NO: 53512 - RNA, 19 nt, Artificial Sequence
  Description of Artificial Sequence: Synthetic oligonucleotide
  Sense strand starting at position 2755 of SEQ ID NO: 647
agauuaguauagccaaguu

SEQ ID NO: 53513 - RNA, 19 nt, Artificial Sequence
  Description of Artificial Sequence: Synthetic oligonucleotide
  Antisense strand to SEQ ID NO: 53432
aacuuggcuauacuaaucu

SEQ ID NO: 53514 - RNA, 19 nt, Artificial Sequence
  Description of Artificial Sequence: Synthetic oligonucleotide
  Sense strand starting at position 2930 of SEQ ID NO: 647
accuucuugaggugagauu

SEQ ID NO: 53515 - RNA, 19 nt, Artificial Sequence
  Description of Artificial Sequence: Synthetic oligonucleotide
  Antisense strand to SEQ ID NO: 53434
aaucucaccucaagaaggu

SEQ ID NO: 53516 - RNA, 19 nt, Artificial Sequence
  Description of Artificial Sequence: Synthetic oligonucleotide
  Sense strand starting at position 2986 of SEQ ID NO: 647
ggcacaauguucuuaagau

SEQ ID NO: 53517 - RNA, 19 nt, Artificial Sequence
  Description of Artificial Sequence: Synthetic oligonucleotide
  Antisense strand to SEQ ID NO: 53436
aucuuaagaacauugugcc

SEQ ID NO: 53518 - RNA, 19 nt, Artificial Sequence
  Description of Artificial Sequence: Synthetic oligonucleotide
  Sense strand starting at position 2995 of SEQ ID NO: 647
uucuuaagaugucuaugga

SEQ ID NO: 53519 - RNA, 19 nt, Artificial Sequence
  Description of Artificial Sequence: Synthetic oligonucleotide
  Antisense strand to SEQ ID NO: 53438
uccauagacaucuuaagaa

SEQ ID NO: 53520 - RNA, 19 nt, Artificial Sequence
  Description of Artificial Sequence: Synthetic oligonucleotide
  Sense strand starting at position 3136 of SEQ ID NO: 647
agucccuuaccaugagaau

SEQ ID NO: 53521 - RNA, 19 nt, Artificial Sequence
  Description of Artificial Sequence: Synthetic oligonucleotide
  Antisense strand to SEQ ID NO: 53440
auucucaugguaagggacu

SEQ ID NO: 53522 - RNA, 19 nt, Artificial Sequence
  Description of Artificial Sequence: Synthetic oligonucleotide
  Sense strand starting at position 3137 of SEQ ID NO: 647
gucccuuaccaugagaauc

SEQ ID NO: 53523 - RNA, 19 nt, Artificial Sequence
  Description of Artificial Sequence: Synthetic oligonucleotide
  Antisense strand to SEQ ID NO: 53442
gauucucaugguaagggac

SEQ ID NO: 53524 - RNA, 19 nt, Artificial Sequence
  Description of Artificial Sequence: Synthetic oligonucleotide
  Sense strand starting at position 3319 of SEQ ID NO: 647
uucuuuccuccuuauguga

SEQ ID NO: 53525 - RNA, 19 nt, Artificial Sequence
  Description of Artificial Sequence: Synthetic oligonucleotide
  Antisense strand to SEQ ID NO: 53444
ucacauaaggaggaaagaa

SEQ ID NO: 53526 - RNA, 19 nt, Artificial Sequence
  Description of Artificial Sequence: Synthetic oligonucleotide
  Sense strand starting at position 3327 of SEQ ID NO: 647
uccuuaugugagcagauga

SEQ ID NO: 53527 - RNA, 19 nt, Artificial Sequence
  Description of Artificial Sequence: Synthetic oligonucleotide
  Antisense strand to SEQ ID NO: 53446
ucaucugcucacauaagga

SEQ ID NO: 53528 - RNA, 19 nt, Artificial Sequence
  Description of Artificial Sequence: Synthetic oligonucleotide
  Sense strand starting at position 3332 of SEQ ID NO: 647
augugagcagaugaauguu

SEQ ID NO: 53529 - RNA, 19 nt, Artificial Sequence
  Description of Artificial Sequence: Synthetic oligonucleotide
  Antisense strand to SEQ ID NO: 53448
aacauucaucugcucacau

SEQ ID NO: 53530 - RNA, 19 nt, Artificial Sequence
  Description of Artificial Sequence: Synthetic oligonucleotide
  Sense strand starting at position 3366 of SEQ ID NO: 647
gcauguuagagauaaguca

SEQ ID NO: 53531 - RNA, 19 nt, Artificial Sequence
  Description of Artificial Sequence: Synthetic oligonucleotide
  Antisense strand to SEQ ID NO: 53450
ugacuuaucucuaacaugc

SEQ ID NO: 53532 - RNA, 19 nt, Artificial Sequence
  Description of Artificial Sequence: Synthetic oligonucleotide
  Sense strand starting at position 3677 of SEQ ID NO: 647
ggaagcucacuuggugaaa

SEQ ID NO: 53533 - RNA, 19 nt, Artificial Sequence
  Description of Artificial Sequence: Synthetic oligonucleotide
  Antisense strand to SEQ ID NO: 53452
uuucaccaagugagcuucc

SEQ ID NO: 53534 - RNA, 19 nt, Artificial Sequence
  Description of Artificial Sequence: Synthetic oligonucleotide
  Sense strand starting at position 3837 of SEQ ID NO: 647
ugguguuaucucuaaucau

SEQ ID NO: 53535 - RNA, 19 nt, Artificial Sequence
  Description of Artificial Sequence: Synthetic oligonucleotide
  Antisense strand to SEQ ID NO: 53454
augauuagagauaacacca

SEQ ID NO: 53536 - RNA, 19 nt, Artificial Sequence
  Description of Artificial Sequence: Synthetic oligonucleotide
  Sense strand starting at position 3891 of SEQ ID NO: 647
ggagaucuuuaggcauuaa

SEQ ID NO: 53537 - RNA, 19 nt, Artificial Sequence
  Description of Artificial Sequence: Synthetic oligonucleotide
  Antisense strand to SEQ ID NO: 53456
uuaaugccuaaagaucucc

SEQ ID NO: 53538 - RNA, 19 nt, Artificial Sequence
  Description of Artificial Sequence: Synthetic oligonucleotide
  Sense strand starting at position 76 of SEQ ID NO: 646
ugaagcaauucuccagaga

SEQ ID NO: 53539 - RNA, 19 nt, Artificial Sequence
  Description of Artificial Sequence: Synthetic oligonucleotide
  Antisense strand to SEQ ID NO: 53458
ucucuggagaauugcuuca

SEQ ID NO: 53540 - RNA, 19 nt, Artificial Sequence
  Description of Artificial Sequence: Synthetic oligonucleotide
  Sense strand starting at position 123 of SEQ ID NO: 646
ugguauuacccagggagag

SEQ ID NO: 53541 - RNA, 19 nt, Artificial Sequence
  Description of Artificial Sequence: Synthetic oligonucleotide
  Antisense strand to SEQ ID NO: 53460
cucucccuggguaauacca

SEQ ID NO: 53542 - RNA, 19 nt, Artificial Sequence
  Description of Artificial Sequence: Synthetic oligonucleotide
  Sense strand starting at position 218 of SEQ ID NO: 646
gccagaauuggccaacaga

SEQ ID NO: 53543 - RNA, 19 nt, Artificial Sequence
  Description of Artificial Sequence: Synthetic oligonucleotide
  Antisense strand to SEQ ID NO: 53462
ucuguuggccaauucuggc

SEQ ID NO: 53544 - RNA, 19 nt, Artificial Sequence
  Description of Artificial Sequence: Synthetic oligonucleotide
  Sense strand starting at position 261 of SEQ ID NO: 646
agggaucuuguuuaaugca

SEQ ID NO: 53545 - RNA, 19 nt, Artificial Sequence
  Description of Artificial Sequence: Synthetic oligonucleotide
  Antisense strand to SEQ ID NO: 53464
ugcauuaaacaagaucccu

SEQ ID NO: 53546 - RNA, 19 nt, Artificial Sequence
  Description of Artificial Sequence: Synthetic oligonucleotide
  Sense strand starting at position 277 of SEQ ID NO: 646
gcaagucacuaacuagacu

SEQ ID NO: 53547 - RNA, 19 nt, Artificial Sequence
  Description of Artificial Sequence: Synthetic oligonucleotide
  Antisense strand to SEQ ID NO: 53466
agucuaguuagugacuugc

SEQ ID NO: 53548 - RNA, 19 nt, Artificial Sequence
  Description of Artificial Sequence: Synthetic oligonucleotide
  Sense strand starting at position 494 of SEQ ID NO: 646
gcaaacacggguuaguuau

SEQ ID NO: 53549 - RNA, 19 nt, Artificial Sequence
  Description of Artificial Sequence: Synthetic oligonucleotide
  Antisense strand to SEQ ID NO: 53468
auaacuaacccguguuugc

SEQ ID NO: 53550 - RNA, 19 nt, Artificial Sequence
  Description of Artificial Sequence: Synthetic oligonucleotide
  Sense strand starting at position 533 of SEQ ID NO: 646
gacuccugguuucugagaa

SEQ ID NO: 53551 - RNA, 19 nt, Artificial Sequence
  Description of Artificial Sequence: Synthetic oligonucleotide
  Antisense strand to SEQ ID NO: 53470
uucucagaaaccaggaguc

SEQ ID NO: 53552 - RNA, 19 nt, Artificial Sequence
  Description of Artificial Sequence: Synthetic oligonucleotide
  Sense strand starting at position 664 of SEQ ID NO: 646
cuuagaagcaccgacgaau

SEQ ID NO: 53553 - RNA, 19 nt, Artificial Sequence
  Description of Artificial Sequence: Synthetic oligonucleotide
  Antisense strand to SEQ ID NO: 53472
auucgucggugcuucuaag

SEQ ID NO: 53554 - RNA, 19 nt, Artificial Sequence
  Description of Artificial Sequence: Synthetic oligonucleotide
  Sense strand starting at position 697 of SEQ ID NO: 646
acaagauggcagugagaua

SEQ ID NO: 53555 - RNA, 19 nt, Artificial Sequence
  Description of Artificial Sequence: Synthetic oligonucleotide
  Antisense strand to SEQ ID NO: 53474
uaucucacugccaucuugu

SEQ ID NO: 53556 - RNA, 19 nt, Artificial Sequence
  Description of Artificial Sequence: Synthetic oligonucleotide
  Sense strand starting at position 863 of SEQ ID NO: 646
cggacaccauguuuacauu

SEQ ID NO: 53557 - RNA, 19 nt, Artificial Sequence
  Description of Artificial Sequence: Synthetic oligonucleotide
  Antisense strand to SEQ ID NO: 53476
aauguaaacaugguguccg

SEQ ID NO: 53558 - RNA, 19 nt, Artificial Sequence
  Description of Artificial Sequence: Synthetic oligonucleotide
  Sense strand starting at position 869 of SEQ ID NO: 646
ccauguuuacauuguaauu

SEQ ID NO: 53559 - RNA, 19 nt, Artificial Sequence
  Description of Artificial Sequence: Synthetic oligonucleotide
  Antisense strand to SEQ ID NO: 53478
aauuacaauguaaacaugg

SEQ ID NO: 53560 - RNA, 19 nt, Artificial Sequence
  Description of Artificial Sequence: Synthetic oligonucleotide
  Sense strand starting at position 882 of SEQ ID NO: 646
guaauuggcuucuuuacag

SEQ ID NO: 53561 - RNA, 19 nt, Artificial Sequence
  Description of Artificial Sequence: Synthetic oligonucleotide
  Antisense strand to SEQ ID NO: 53480
cuguaaagaagccaauuac

SEQ ID NO: 53562 - RNA, 19 nt, Artificial Sequence
  Description of Artificial Sequence: Synthetic oligonucleotide
  Sense strand starting at position 925 of SEQ ID NO: 646
gugagugauguuuagaggu

SEQ ID NO: 53563 - RNA, 19 nt, Artificial Sequence
  Description of Artificial Sequence: Synthetic oligonucleotide
  Antisense strand to SEQ ID NO: 53482
accucuaaacaucacucac

SEQ ID NO: 53564 - RNA, 19 nt, Artificial Sequence
  Description of Artificial Sequence: Synthetic oligonucleotide
  Sense strand starting at position 964 of SEQ ID NO: 646
uggacuuugacaggaagca

SEQ ID NO: 53565 - RNA, 19 nt, Artificial Sequence
  Description of Artificial Sequence: Synthetic oligonucleotide
  Antisense strand to SEQ ID NO: 53484
ugcuuccugucaaagucca

SEQ ID NO: 53566 - RNA, 19 nt, Artificial Sequence
  Description of Artificial Sequence: Synthetic oligonucleotide
  Sense strand starting at position 1248 of SEQ ID NO: 646
cagaguggguaguugagua

SEQ ID NO: 53567 - RNA, 19 nt, Artificial Sequence
  Description of Artificial Sequence: Synthetic oligonucleotide
  Antisense strand to SEQ ID NO: 53486
uacucaacuacccacucug

SEQ ID NO: 53568 - RNA, 19 nt, Artificial Sequence
  Description of Artificial Sequence: Synthetic oligonucleotide
  Sense strand starting at position 1252 of SEQ ID NO: 646
guggguaguugaguaggau

SEQ ID NO: 53569 - RNA, 19 nt, Artificial Sequence
  Description of Artificial Sequence: Synthetic oligonucleotide
  Antisense strand to SEQ ID NO: 53488
auccuacucaacuacccac

SEQ ID NO: 53570 - RNA, 19 nt, Artificial Sequence
  Description of Artificial Sequence: Synthetic oligonucleotide
  Sense strand starting at position 1258 of SEQ ID NO: 646
aguugaguaggaugagacu

SEQ ID NO: 53571 - RNA, 19 nt, Artificial Sequence
  Description of Artificial Sequence: Synthetic oligonucleotide
  Antisense strand to SEQ ID NO: 53490
agucucauccuacucaacu

SEQ ID NO: 53572 - RNA, 19 nt, Artificial Sequence
  Description of Artificial Sequence: Synthetic oligonucleotide
  Sense strand starting at position 1287 of SEQ ID NO: 646
cgaggcuaacuacauuaaa

SEQ ID NO: 53573 - RNA, 19 nt, Artificial Sequence
  Description of Artificial Sequence: Synthetic oligonucleotide
  Antisense strand to SEQ ID NO: 53492
uuuaauguaguuagccucg

SEQ ID NO: 53574 - RNA, 19 nt, Artificial Sequence
  Description of Artificial Sequence: Synthetic oligonucleotide
  Sense strand starting at position 1523 of SEQ ID NO: 646
ggaaacuuccuggguaggu

SEQ ID NO: 53575 - RNA, 19 nt, Artificial Sequence
  Description of Artificial Sequence: Synthetic oligonucleotide
  Antisense strand to SEQ ID NO: 53494
accuacccaggaaguuucc

SEQ ID NO: 53576 - RNA, 19 nt, Artificial Sequence
  Description of Artificial Sequence: Synthetic oligonucleotide
  Sense strand starting at position 1908 of SEQ ID NO: 646
ugguguuuccaucaugcaa

SEQ ID NO: 53577 - RNA, 19 nt, Artificial Sequence
  Description of Artificial Sequence: Synthetic oligonucleotide
  Antisense strand to SEQ ID NO: 53496
uugcaugauggaaacacca

SEQ ID NO: 53578 - RNA, 19 nt, Artificial Sequence
  Description of Artificial Sequence: Synthetic oligonucleotide
  Sense strand starting at position 2224 of SEQ ID NO: 646
ugcagauugaccugugaac

SEQ ID NO: 53579 - RNA, 19 nt, Artificial Sequence
  Description of Artificial Sequence: Synthetic oligonucleotide
  Antisense strand to SEQ ID NO: 53498
guucacaggucaaucugca

SEQ ID NO: 53580 - RNA, 19 nt, Artificial Sequence
  Description of Artificial Sequence: Synthetic oligonucleotide
  Sense strand starting at position 2226 of SEQ ID NO: 646
cagauugaccugugaacuu

SEQ ID NO: 53581 - RNA, 19 nt, Artificial Sequence
  Description of Artificial Sequence: Synthetic oligonucleotide
  Antisense strand to SEQ ID NO: 53500
aaguucacaggucaaucug

SEQ ID NO: 53582 - RNA, 19 nt, Artificial Sequence
  Description of Artificial Sequence: Synthetic oligonucleotide
  Sense strand starting at position 2307 of SEQ ID NO: 646
aggcccaguuacuuacaaa

SEQ ID NO: 53583 - RNA, 19 nt, Artificial Sequence
  Description of Artificial Sequence: Synthetic oligonucleotide
  Antisense strand to SEQ ID NO: 53502
uuuguaaguaacugggccu

SEQ ID NO: 53584 - RNA, 19 nt, Artificial Sequence
  Description of Artificial Sequence: Synthetic oligonucleotide
  Sense strand starting at position 2429 of SEQ ID NO: 646
acaaauaagugucuuacua

SEQ ID NO: 53585 - RNA, 19 nt, Artificial Sequence
  Description of Artificial Sequence: Synthetic oligonucleotide
  Antisense strand to SEQ ID NO: 53504
uaguaagacacuuauuugu

SEQ ID NO: 53586 - RNA, 19 nt, Artificial Sequence
  Description of Artificial Sequence: Synthetic oligonucleotide
  Sense strand starting at position 2433 of SEQ ID NO: 646
auaagugucuuacuaaggu

SEQ ID NO: 53587 - RNA, 19 nt, Artificial Sequence
  Description of Artificial Sequence: Synthetic oligonucleotide
  Antisense strand to SEQ ID NO: 53506
accuuaguaagacacuuau

SEQ ID NO: 53588 - RNA, 19 nt, Artificial Sequence
  Description of Artificial Sequence: Synthetic oligonucleotide
  Sense strand starting at position 2785 of SEQ ID NO: 646
ucuucucuaccuugugaag

SEQ ID NO: 53589 - RNA, 19 nt, Artificial Sequence
  Description of Artificial Sequence: Synthetic oligonucleotide
  Antisense strand to SEQ ID NO: 53508
cuucacaagguagagaaga

SEQ ID NO: 53590 - RNA, 19 nt, Artificial Sequence
  Description of Artificial Sequence: Synthetic oligonucleotide
  Sense strand starting at position 2796 of SEQ ID NO: 646
uugugaagucaucacccua

SEQ ID NO: 53591 - RNA, 19 nt, Artificial Sequence
  Description of Artificial Sequence: Synthetic oligonucleotide
  Antisense strand to SEQ ID NO: 53510
uagggugaugacuucacaa

SEQ ID NO: 53592 - RNA, 19 nt, Artificial Sequence
  Description of Artificial Sequence: Synthetic oligonucleotide
  Sense strand starting at position 2930 of SEQ ID NO: 646
gccuucguuccugccuaua

SEQ ID NO: 53593 - RNA, 19 nt, Artificial Sequence
  Description of Artificial Sequence: Synthetic oligonucleotide
  Antisense strand to SEQ ID NO: 53512
uauaggcaggaacgaaggc

SEQ ID NO: 53594 - RNA, 19 nt, Artificial Sequence
  Description of Artificial Sequence: Synthetic oligonucleotide
  Sense strand starting at position 2935 of SEQ ID NO: 646
cguuccugccuauauuaaa

SEQ ID NO: 53595 - RNA, 19 nt, Artificial Sequence
  Description of Artificial Sequence: Synthetic oligonucleotide
  Antisense strand to SEQ ID NO: 53514
uuuaauauaggcaggaacg

SEQ ID NO: 53596 - RNA, 19 nt, Artificial Sequence
  Description of Artificial Sequence: Synthetic oligonucleotide
  Sense strand starting at position 3083 of SEQ ID NO: 646
accucuaaguuguucugau

SEQ ID NO: 53597 - RNA, 19 nt, Artificial Sequence
  Description of Artificial Sequence: Synthetic oligonucleotide
  Antisense strand to SEQ ID NO: 53516
aucagaacaacuuagaggu

SEQ ID NO: 53598 - RNA, 19 nt, Artificial Sequence
  Description of Artificial Sequence: Synthetic oligonucleotide
  Sense strand starting at position 3084 of SEQ ID NO: 646
ccucuaaguuguucugaug

SEQ ID NO: 53599 - RNA, 19 nt, Artificial Sequence
  Description of Artificial Sequence: Synthetic oligonucleotide
  Antisense strand to SEQ ID NO: 53518
caucagaacaacuuagagg

SEQ ID NO: 53600 - RNA, 19 nt, Artificial Sequence
  Description of Artificial Sequence: Synthetic oligonucleotide
  Sense strand starting at position 3124 of SEQ ID NO: 646
uuaucuguaagcguuaguu

SEQ ID NO: 53601 - RNA, 19 nt, Artificial Sequence
  Description of Artificial Sequence: Synthetic oligonucleotide
  Antisense strand to SEQ ID NO: 53520
aacuaacgcuuacagauaa

SEQ ID NO: 53602 - RNA, 19 nt, Artificial Sequence
  Description of Artificial Sequence: Synthetic oligonucleotide
  Sense strand starting at position 3247 of SEQ ID NO: 646
aauguauuugcccgaauug

SEQ ID NO: 53603 - RNA, 19 nt, Artificial Sequence
  Description of Artificial Sequence: Synthetic oligonucleotide
  Antisense strand to SEQ ID NO: 53522
caauucgggcaaauacauu

SEQ ID NO: 53604 - RNA, 19 nt, Artificial Sequence
  Description of Artificial Sequence: Synthetic oligonucleotide
  Sense strand starting at position 3442 of SEQ ID NO: 646
ccagaaauuucccaaggaa

SEQ ID NO: 53605 - RNA, 19 nt, Artificial Sequence
  Description of Artificial Sequence: Synthetic oligonucleotide
  Antisense strand to SEQ ID NO: 53524
uuccuugggaaauuucugg

SEQ ID NO: 53606 - RNA, 19 nt, Artificial Sequence
  Description of Artificial Sequence: Synthetic oligonucleotide
  Sense strand starting at position 3512 of SEQ ID NO: 646
gccauauaggucuggugag

SEQ ID NO: 53607 - RNA, 19 nt, Artificial Sequence
  Description of Artificial Sequence: Synthetic oligonucleotide
  Antisense strand to SEQ ID NO: 53526
cucaccagaccuauauggc

SEQ ID NO: 53608 - RNA, 19 nt, Artificial Sequence
  Description of Artificial Sequence: Synthetic oligonucleotide
  Sense strand starting at position 3719 of SEQ ID NO: 646
ggaaguaaucgucauacuc

SEQ ID NO: 53609 - RNA, 19 nt, Artificial Sequence
  Description of Artificial Sequence: Synthetic oligonucleotide
  Antisense strand to SEQ ID NO: 53528
gaguaugacgauuacuucc

SEQ ID NO: 53610 - RNA, 19 nt, Artificial Sequence
  Description of Artificial Sequence: Synthetic oligonucleotide
  Sense strand starting at position 3776 of SEQ ID NO: 646
gugauuugcccaggguuau

SEQ ID NO: 53611 - RNA, 19 nt, Artificial Sequence
  Description of Artificial Sequence: Synthetic oligonucleotide
  Antisense strand to SEQ ID NO: 53530
auaacccugggcaaaucac

SEQ ID NO: 53612 - RNA, 19 nt, Artificial Sequence
  Description of Artificial Sequence: Synthetic oligonucleotide
  Sense strand starting at position 3805 of SEQ ID NO: 646
gacaaagcagcauaguaua

SEQ ID NO: 53613 - RNA, 19 nt, Artificial Sequence
  Description of Artificial Sequence: Synthetic oligonucleotide
  Antisense strand to SEQ ID NO: 53532
uauacuaugcugcuuuguc

SEQ ID NO: 53614 - RNA, 19 nt, Artificial Sequence
  Description of Artificial Sequence: Synthetic oligonucleotide
  Sense strand starting at position 3848 of SEQ ID NO: 646
uaggaauauccagguucca

SEQ ID NO: 53615 - RNA, 19 nt, Artificial Sequence
  Description of Artificial Sequence: Synthetic oligonucleotide
  Antisense strand to SEQ ID NO: 53534
uggaaccuggauauuccua

SEQ ID NO: 53616 - RNA, 19 nt, Artificial Sequence
  Description of Artificial Sequence: Synthetic oligonucleotide
  Sense strand starting at position 3913 of SEQ ID NO: 646
gaggaugaaugagaugaca

SEQ ID NO: 53617 - RNA, 19 nt, Artificial Sequence
  Description of Artificial Sequence: Synthetic oligonucleotide
  Antisense strand to SEQ ID NO: 53536
ugucaucucauucauccuc

SEQ ID NO: 53618 - RNA, 19 nt, Artificial Sequence
  Description of Artificial Sequence: Synthetic oligonucleotide
  Sense strand starting at position 23 of SEQ ID NO: 648
ucccaugguuuggcugaua

SEQ ID NO: 53619 - RNA, 19 nt, Artificial Sequence
  Description of Artificial Sequence: Synthetic oligonucleotide
  Antisense strand to SEQ ID NO: 53538
uaucagccaaaccauggga

SEQ ID NO: 53620 - RNA, 19 nt, Artificial Sequence
  Description of Artificial Sequence: Synthetic oligonucleotide
  Sense strand starting at position 26 of SEQ ID NO: 648
caugguuuggcugauaaag

SEQ ID NO: 53621 - RNA, 19 nt, Artificial Sequence
  Description of Artificial Sequence: Synthetic oligonucleotide
  Antisense strand to SEQ ID NO: 53540
cuuuaucagccaaaccaug

SEQ ID NO: 53622 - RNA, 19 nt, Artificial Sequence
  Description of Artificial Sequence: Synthetic oligonucleotide
  Sense strand starting at position 753 of SEQ ID NO: 648
gucacaaaugaacguuuaa

SEQ ID NO: 53623 - RNA, 19 nt, Artificial Sequence
  Description of Artificial Sequence: Synthetic oligonucleotide
  Antisense strand to SEQ ID NO: 53542
uuaaacguucauuugugac

SEQ ID NO: 53624 - RNA, 19 nt, Artificial Sequence
  Description of Artificial Sequence: Synthetic oligonucleotide
  Sense strand starting at position 884 of SEQ ID NO: 648
guugaaauggaguggaauu

SEQ ID NO: 53625 - RNA, 19 nt, Artificial Sequence
  Description of Artificial Sequence: Synthetic oligonucleotide
  Antisense strand to SEQ ID NO: 53544
aauuccacuccauuucaac

SEQ ID NO: 53626 - RNA, 19 nt, Artificial Sequence
  Description of Artificial Sequence: Synthetic oligonucleotide
  Sense strand starting at position 948 of SEQ ID NO: 648
gggucaaggguauguguua

SEQ ID NO: 53627 - RNA, 19 nt, Artificial Sequence
  Description of Artificial Sequence: Synthetic oligonucleotide
  Antisense strand to SEQ ID NO: 53546
uaacacauacccuugaccc

SEQ ID NO: 53628 - RNA, 19 nt, Artificial Sequence
  Description of Artificial Sequence: Synthetic oligonucleotide
  Sense strand starting at position 949 of SEQ ID NO: 648
ggucaaggguauguguuau

SEQ ID NO: 53629 - RNA, 19 nt, Artificial Sequence
  Description of Artificial Sequence: Synthetic oligonucleotide
  Antisense strand to SEQ ID NO: 53548
auaacacauacccuugacc

SEQ ID NO: 53630 - RNA, 19 nt, Artificial Sequence
  Description of Artificial Sequence: Synthetic oligonucleotide
  Sense strand starting at position 955 of SEQ ID NO: 648
ggguauguguuauccaaau

SEQ ID NO: 53631 - RNA, 19 nt, Artificial Sequence
  Description of Artificial Sequence: Synthetic oligonucleotide
  Antisense strand to SEQ ID NO: 53550
auuuggauaacacauaccc

SEQ ID NO: 53632 - RNA, 19 nt, Artificial Sequence
  Description of Artificial Sequence: Synthetic oligonucleotide
  Sense strand starting at position 957 of SEQ ID NO: 648
guauguguuauccaaauga

SEQ ID NO: 53633 - RNA, 19 nt, Artificial Sequence
  Description of Artificial Sequence: Synthetic oligonucleotide
  Antisense strand to SEQ ID NO: 53552
ucauuuggauaacacauac

SEQ ID NO: 53634 - RNA, 19 nt, Artificial Sequence
  Description of Artificial Sequence: Synthetic oligonucleotide
  Sense strand starting at position 961 of SEQ ID NO: 648
guguuauccaaaugagguu

SEQ ID NO: 53635 - RNA, 19 nt, Artificial Sequence
  Description of Artificial Sequence: Synthetic oligonucleotide
  Antisense strand to SEQ ID NO: 53554
aaccucauuuggauaacac

SEQ ID NO: 53636 - RNA, 19 nt, Artificial Sequence
  Description of Artificial Sequence: Synthetic oligonucleotide
  Sense strand starting at position 973 of SEQ ID NO: 648
ugagguuuguggguaucca

SEQ ID NO: 53637 - RNA, 19 nt, Artificial Sequence
  Description of Artificial Sequence: Synthetic oligonucleotide
  Antisense strand to SEQ ID NO: 53556
uggauacccacaaaccuca

SEQ ID NO: 53638 - RNA, 19 nt, Artificial Sequence
  Description of Artificial Sequence: Synthetic oligonucleotide
  Sense strand starting at position 988 of SEQ ID NO: 648
uccacaugucuacauggua

SEQ ID NO: 53639 - RNA, 19 nt, Artificial Sequence
  Description of Artificial Sequence: Synthetic oligonucleotide
  Antisense strand to SEQ ID NO: 53558
uaccauguagacaugugga

SEQ ID NO: 53640 - RNA, 19 nt, Artificial Sequence
  Description of Artificial Sequence: Synthetic oligonucleotide
  Sense strand starting at position 1007 of SEQ ID NO: 648
caccucaguugugcagaaa

SEQ ID NO: 53641 - RNA, 19 nt, Artificial Sequence
  Description of Artificial Sequence: Synthetic oligonucleotide
  Antisense strand to SEQ ID NO: 53560
uuucugcacaacugaggug

SEQ ID NO: 53642 - RNA, 19 nt, Artificial Sequence
  Description of Artificial Sequence: Synthetic oligonucleotide
  Sense strand starting at position 1008 of SEQ ID NO: 648
accucaguugugcagaaau

SEQ ID NO: 53643 - RNA, 19 nt, Artificial Sequence
  Description of Artificial Sequence: Synthetic oligonucleotide
  Antisense strand to SEQ ID NO: 53562
auuucugcacaacugaggu

SEQ ID NO: 53644 - RNA, 19 nt, Artificial Sequence
  Description of Artificial Sequence: Synthetic oligonucleotide
  Sense strand starting at position 1010 of SEQ ID NO: 648
cucaguugugcagaaauac

SEQ ID NO: 53645 - RNA, 19 nt, Artificial Sequence
  Description of Artificial Sequence: Synthetic oligonucleotide
  Antisense strand to SEQ ID NO: 53564
guauuucugcacaacugag

SEQ ID NO: 53646 - RNA, 19 nt, Artificial Sequence
  Description of Artificial Sequence: Synthetic oligonucleotide
  Sense strand starting at position 1038 of SEQ ID NO: 648
ccggguaacaugugagaga

SEQ ID NO: 53647 - RNA, 19 nt, Artificial Sequence
  Description of Artificial Sequence: Synthetic oligonucleotide
  Antisense strand to SEQ ID NO: 53566
ucucucacauguuacccgg

SEQ ID NO: 53648 - RNA, 19 nt, Artificial Sequence
  Description of Artificial Sequence: Synthetic oligonucleotide
  Sense strand starting at position 1095 of SEQ ID NO: 648
ugacguaggaucugauaag

SEQ ID NO: 53649 - RNA, 19 nt, Artificial Sequence
  Description of Artificial Sequence: Synthetic oligonucleotide
  Antisense strand to SEQ ID NO: 53568
cuuaucagauccuacguca

SEQ ID NO: 53650 - RNA, 19 nt, Artificial Sequence
  Description of Artificial Sequence: Synthetic oligonucleotide
  Sense strand starting at position 1110 of SEQ ID NO: 648
uaagaugacucagugugga

SEQ ID NO: 53651 - RNA, 19 nt, Artificial Sequence
  Description of Artificial Sequence: Synthetic oligonucleotide
  Antisense strand to SEQ ID NO: 53570
uccacacugagucaucuua

SEQ ID NO: 53652 - RNA, 19 nt, Artificial Sequence
  Description of Artificial Sequence: Synthetic oligonucleotide
  Sense strand starting at position 1118 of SEQ ID NO: 648
cucaguguggaaggaaaua

SEQ ID NO: 53653 - RNA, 19 nt, Artificial Sequence
  Description of Artificial Sequence: Synthetic oligonucleotide
  Antisense strand to SEQ ID NO: 53572
uauuuccuuccacacugag

SEQ ID NO: 53654 - RNA, 19 nt, Artificial Sequence
  Description of Artificial Sequence: Synthetic oligonucleotide
  Sense strand starting at position 1134 of SEQ ID NO: 648
auaaacugccagugaacaa

SEQ ID NO: 53655 - RNA, 19 nt, Artificial Sequence
  Description of Artificial Sequence: Synthetic oligonucleotide
  Antisense strand to SEQ ID NO: 53574
uuguucacuggcaguuuau

SEQ ID NO: 53656 - RNA, 19 nt, Artificial Sequence
  Description of Artificial Sequence: Synthetic oligonucleotide
  Sense strand starting at position 1184 of SEQ ID NO: 648
cugguuuccuuguuuggga

SEQ ID NO: 53657 - RNA, 19 nt, Artificial Sequence
  Description of Artificial Sequence: Synthetic oligonucleotide
  Antisense strand to SEQ ID NO: 53576
ucccaaacaaggaaaccag

SEQ ID NO: 53658 - RNA, 19 nt, Artificial Sequence
  Description of Artificial Sequence: Synthetic oligonucleotide
  Sense strand starting at position 1296 of SEQ ID NO: 648
ccaugcucuccaugcagaa

SEQ ID NO: 53659 - RNA, 19 nt, Artificial Sequence
  Description of Artificial Sequence: Synthetic oligonucleotide
  Antisense strand to SEQ ID NO: 53578
uucugcauggagagcaugg

SEQ ID NO: 53660 - RNA, 19 nt, Artificial Sequence
  Description of Artificial Sequence: Synthetic oligonucleotide
  Sense strand starting at position 1516 of SEQ ID NO: 648
cccuuuaagcccuagaugu

SEQ ID NO: 53661 - RNA, 19 nt, Artificial Sequence
  Description of Artificial Sequence: Synthetic oligonucleotide
  Antisense strand to SEQ ID NO: 53580
acaucuagggcuuaaaggg

SEQ ID NO: 53662 - RNA, 19 nt, Artificial Sequence
  Description of Artificial Sequence: Synthetic oligonucleotide
  Sense strand starting at position 1909 of SEQ ID NO: 648
ggcagagccugccuuugau

SEQ ID NO: 53663 - RNA, 19 nt, Artificial Sequence
  Description of Artificial Sequence: Synthetic oligonucleotide
  Antisense strand to SEQ ID NO: 53582
aucaaaggcaggcucugcc

SEQ ID NO: 53664 - RNA, 19 nt, Artificial Sequence
  Description of Artificial Sequence: Synthetic oligonucleotide
  Sense strand starting at position 1916 of SEQ ID NO: 648
ccugccuuugaugagguua

SEQ ID NO: 53665 - RNA, 19 nt, Artificial Sequence
  Description of Artificial Sequence: Synthetic oligonucleotide
  Antisense strand to SEQ ID NO: 53584
uaaccucaucaaaggcagg

SEQ ID NO: 53666 - RNA, 19 nt, Artificial Sequence
  Description of Artificial Sequence: Synthetic oligonucleotide
  Sense strand starting at position 1978 of SEQ ID NO: 648
gaggcuuccuggucacuaa

SEQ ID NO: 53667 - RNA, 19 nt, Artificial Sequence
  Description of Artificial Sequence: Synthetic oligonucleotide
  Antisense strand to SEQ ID NO: 53586
uuagugaccaggaagccuc

SEQ ID NO: 53668 - RNA, 19 nt, Artificial Sequence
  Description of Artificial Sequence: Synthetic oligonucleotide
  Sense strand starting at position 2304 of SEQ ID NO: 648
cacccauaggugugugauc

SEQ ID NO: 53669 - RNA, 19 nt, Artificial Sequence
  Description of Artificial Sequence: Synthetic oligonucleotide
  Antisense strand to SEQ ID NO: 53588
gaucacacaccuaugggug

SEQ ID NO: 53670 - RNA, 19 nt, Artificial Sequence
  Description of Artificial Sequence: Synthetic oligonucleotide
  Sense strand starting at position 2584 of SEQ ID NO: 648
ugcaucuaucucuagucau

SEQ ID NO: 53671 - RNA, 19 nt, Artificial Sequence
  Description of Artificial Sequence: Synthetic oligonucleotide
  Antisense strand to SEQ ID NO: 53590
augacuagagauagaugca

SEQ ID NO: 53672 - RNA, 19 nt, Artificial Sequence
  Description of Artificial Sequence: Synthetic oligonucleotide
  Sense strand starting at position 2863 of SEQ ID NO: 648
aucuuuagcuucccuggaa

SEQ ID NO: 53673 - RNA, 19 nt, Artificial Sequence
  Description of Artificial Sequence: Synthetic oligonucleotide
  Antisense strand to SEQ ID NO: 53592
uuccagggaagcuaaagau

SEQ ID NO: 53674 - RNA, 19 nt, Artificial Sequence
  Description of Artificial Sequence: Synthetic oligonucleotide
  Sense strand starting at position 2866 of SEQ ID NO: 648
uuuagcuucccuggaacua

SEQ ID NO: 53675 - RNA, 19 nt, Artificial Sequence
  Description of Artificial Sequence: Synthetic oligonucleotide
  Antisense strand to SEQ ID NO: 53594
uaguuccagggaagcuaaa

SEQ ID NO: 53676 - RNA, 19 nt, Artificial Sequence
  Description of Artificial Sequence: Synthetic oligonucleotide
  Sense strand starting at position 2867 of SEQ ID NO: 648
uuagcuucccuggaacuau

SEQ ID NO: 53677 - RNA, 19 nt, Artificial Sequence
  Description of Artificial Sequence: Synthetic oligonucleotide
  Antisense strand to SEQ ID NO: 53596
auaguuccagggaagcuaa

SEQ ID NO: 53678 - RNA, 19 nt, Artificial Sequence
  Description of Artificial Sequence: Synthetic oligonucleotide
  Sense strand starting at position 2876 of SEQ ID NO: 648
cuggaacuaucccaggaua

SEQ ID NO: 53679 - RNA, 19 nt, Artificial Sequence
  Description of Artificial Sequence: Synthetic oligonucleotide
  Antisense strand to SEQ ID NO: 53598
uauccugggauaguuccag

SEQ ID NO: 53680 - RNA, 19 nt, Artificial Sequence
  Description of Artificial Sequence: Synthetic oligonucleotide
  Sense strand starting at position 2945 of SEQ ID NO: 648
uggaguccaugcgucagau

SEQ ID NO: 53681 - RNA, 19 nt, Artificial Sequence
  Description of Artificial Sequence: Synthetic oligonucleotide
  Antisense strand to SEQ ID NO: 53600
aucugacgcauggacucca

SEQ ID NO: 53682 - RNA, 19 nt, Artificial Sequence
  Description of Artificial Sequence: Synthetic oligonucleotide
  Sense strand starting at position 3184 of SEQ ID NO: 648
ccgugaaggccacagucau

SEQ ID NO: 53683 - RNA, 19 nt, Artificial Sequence
  Description of Artificial Sequence: Synthetic oligonucleotide
  Antisense strand to SEQ ID NO: 53602
augacuguggccuucacgg

SEQ ID NO: 53684 - RNA, 19 nt, Artificial Sequence
  Description of Artificial Sequence: Synthetic oligonucleotide
  Sense strand starting at position 3354 of SEQ ID NO: 648
agaaacaaugaguggcauu

SEQ ID NO: 53685 - RNA, 19 nt, Artificial Sequence
  Description of Artificial Sequence: Synthetic oligonucleotide
  Antisense strand to SEQ ID NO: 53604
aaugccacucauuguuucu

SEQ ID NO: 53686 - RNA, 19 nt, Artificial Sequence
  Description of Artificial Sequence: Synthetic oligonucleotide
  Sense strand starting at position 3583 of SEQ ID NO: 648
acugaagcuucugcacaaa

SEQ ID NO: 53687 - RNA, 19 nt, Artificial Sequence
  Description of Artificial Sequence: Synthetic oligonucleotide
  Antisense strand to SEQ ID NO: 53606
uuugugcagaagcuucagu

SEQ ID NO: 53688 - RNA, 19 nt, Artificial Sequence
  Description of Artificial Sequence: Synthetic oligonucleotide
  Sense strand starting at position 3617 of SEQ ID NO: 648
gcagcucuucugcaaggga

SEQ ID NO: 53689 - RNA, 19 nt, Artificial Sequence
  Description of Artificial Sequence: Synthetic oligonucleotide
  Antisense strand to SEQ ID NO: 53608
ucccuugcagaagagcugc

SEQ ID NO: 53690 - RNA, 19 nt, Artificial Sequence
  Description of Artificial Sequence: Synthetic oligonucleotide
  Sense strand starting at position 3620 of SEQ ID NO: 648
gcucuucugcaagggaguu

SEQ ID NO: 53691 - RNA, 19 nt, Artificial Sequence
  Description of Artificial Sequence: Synthetic oligonucleotide
  Antisense strand to SEQ ID NO: 53610
aacucccuugcagaagagc

SEQ ID NO: 53692 - RNA, 19 nt, Artificial Sequence
  Description of Artificial Sequence: Synthetic oligonucleotide
  Sense strand starting at position 3694 of SEQ ID NO: 648
aagggcauguccuugaaau

SEQ ID NO: 53693 - RNA, 19 nt, Artificial Sequence
  Description of Artificial Sequence: Synthetic oligonucleotide
  Antisense strand to SEQ ID NO: 53612
auuucaaggacaugcccuu

SEQ ID NO: 53694 - RNA, 19 nt, Artificial Sequence
  Description of Artificial Sequence: Synthetic oligonucleotide
  Sense strand starting at position 3695 of SEQ ID NO: 648
agggcauguccuugaaauu

SEQ ID NO: 53695 - RNA, 19 nt, Artificial Sequence
  Description of Artificial Sequence: Synthetic oligonucleotide
  Antisense strand to SEQ ID NO: 53614
aauuucaaggacaugcccu

SEQ ID NO: 53696 - RNA, 19 nt, Artificial Sequence
  Description of Artificial Sequence: Synthetic oligonucleotide
  Sense strand starting at position 3696 of SEQ ID NO: 648
gggcauguccuugaaauug

SEQ ID NO: 53697 - RNA, 19 nt, Artificial Sequence
  Description of Artificial Sequence: Synthetic oligonucleotide
  Antisense strand to SEQ ID NO: 53616
caauuucaaggacaugccc

SEQ ID NO: 53698 - RNA, 19 nt, Artificial Sequence
  Description of Artificial Sequence: Synthetic oligonucleotide
  Sense strand starting at position 113 of SEQ ID NO: 649
uaagaaagucaagguaacu

SEQ ID NO: 53699 - RNA, 19 nt, Artificial Sequence
  Description of Artificial Sequence: Synthetic oligonucleotide
  Antisense strand to SEQ ID NO: 53618
aguuaccuugacuuucuua

SEQ ID NO: 53700 - RNA, 19 nt, Artificial Sequence
  Description of Artificial Sequence: Synthetic oligonucleotide
  Sense strand starting at position 475 of SEQ ID NO: 649
uugggcaggaauuguuaau

SEQ ID NO: 53701 - RNA, 19 nt, Artificial Sequence
  Description of Artificial Sequence: Synthetic oligonucleotide
  Antisense strand to SEQ ID NO: 53620
auuaacaauuccugcccaa

SEQ ID NO: 53702 - RNA, 19 nt, Artificial Sequence
  Description of Artificial Sequence: Synthetic oligonucleotide
  Sense strand starting at position 482 of SEQ ID NO: 649
ggaauuguuaaugagcuuu

SEQ ID NO: 53703 - RNA, 19 nt, Artificial Sequence
  Description of Artificial Sequence: Synthetic oligonucleotide
  Antisense strand to SEQ ID NO: 53622
aaagcucauuaacaauucc

SEQ ID NO: 53704 - RNA, 19 nt, Artificial Sequence
  Description of Artificial Sequence: Synthetic oligonucleotide
  Sense strand starting at position 637 of SEQ ID NO: 649
guggguuucuaaccaggau

SEQ ID NO: 53705 - RNA, 19 nt, Artificial Sequence
  Description of Artificial Sequence: Synthetic oligonucleotide
  Antisense strand to SEQ ID NO: 53624
auccugguuagaaacccac

SEQ ID NO: 53706 - RNA, 19 nt, Artificial Sequence
  Description of Artificial Sequence: Synthetic oligonucleotide
  Sense strand starting at position 684 of SEQ ID NO: 649
ccaagucccuguuuauaaa

SEQ ID NO: 53707 - RNA, 19 nt, Artificial Sequence
  Description of Artificial Sequence: Synthetic oligonucleotide
  Antisense strand to SEQ ID NO: 53626
uuuauaaacagggacuugg

SEQ ID NO: 53708 - RNA, 19 nt, Artificial Sequence
  Description of Artificial Sequence: Synthetic oligonucleotide
  Sense strand starting at position 768 of SEQ ID NO: 649
caaggcaugcuguauauga

SEQ ID NO: 53709 - RNA, 19 nt, Artificial Sequence
  Description of Artificial Sequence: Synthetic oligonucleotide
  Antisense strand to SEQ ID NO: 53628
ucauauacagcaugccuug

SEQ ID NO: 53710 - RNA, 19 nt, Artificial Sequence
  Description of Artificial Sequence: Synthetic oligonucleotide
  Sense strand starting at position 770 of SEQ ID NO: 649
aggcaugcuguauaugaua

SEQ ID NO: 53711 - RNA, 19 nt, Artificial Sequence
  Description of Artificial Sequence: Synthetic oligonucleotide
  Antisense strand to SEQ ID NO: 53630
uaucauauacagcaugccu

SEQ ID NO: 53712 - RNA, 19 nt, Artificial Sequence
  Description of Artificial Sequence: Synthetic oligonucleotide
  Sense strand starting at position 868 of SEQ ID NO: 649
ccuacuauaguuugaauag

SEQ ID NO: 53713 - RNA, 19 nt, Artificial Sequence
  Description of Artificial Sequence: Synthetic oligonucleotide
  Antisense strand to SEQ ID NO: 53632
cuauucaaacuauaguagg

SEQ ID NO: 53714 - RNA, 19 nt, Artificial Sequence
  Description of Artificial Sequence: Synthetic oligonucleotide
  Sense strand starting at position 942 of SEQ ID NO: 649
ugauuaaaugucugacaag

SEQ ID NO: 53715 - RNA, 19 nt, Artificial Sequence
  Description of Artificial Sequence: Synthetic oligonucleotide
  Antisense strand to SEQ ID NO: 53634
cuugucagacauuuaauca

SEQ ID NO: 53716 - RNA, 19 nt, Artificial Sequence
  Description of Artificial Sequence: Synthetic oligonucleotide
  Sense strand starting at position 961 of SEQ ID NO: 649
aguaaaugccauugaagug

SEQ ID NO: 53717 - RNA, 19 nt, Artificial Sequence
  Description of Artificial Sequence: Synthetic oligonucleotide
  Antisense strand to SEQ ID NO: 53636
cacuucaauggcauuuacu

SEQ ID NO: 53718 - RNA, 19 nt, Artificial Sequence
  Description of Artificial Sequence: Synthetic oligonucleotide
  Sense strand starting at position 985 of SEQ ID NO: 649
agaccucucgcagacacaa

SEQ ID NO: 53719 - RNA, 19 nt, Artificial Sequence
  Description of Artificial Sequence: Synthetic oligonucleotide
  Antisense strand to SEQ ID NO: 53638
uugugucugcgagaggucu

SEQ ID NO: 53720 - RNA, 19 nt, Artificial Sequence
  Description of Artificial Sequence: Synthetic oligonucleotide
  Sense strand starting at position 1008 of SEQ ID NO: 649
gggcacuauuuguugcaaa

SEQ ID NO: 53721 - RNA, 19 nt, Artificial Sequence
  Description of Artificial Sequence: Synthetic oligonucleotide
  Antisense strand to SEQ ID NO: 53640
uuugcaacaaauagugccc

SEQ ID NO: 53722 - RNA, 19 nt, Artificial Sequence
  Description of Artificial Sequence: Synthetic oligonucleotide
  Sense strand starting at position 1315 of SEQ ID NO: 649
gggucaagggaauguucua

SEQ ID NO: 53723 - RNA, 19 nt, Artificial Sequence
  Description of Artificial Sequence: Synthetic oligonucleotide
  Antisense strand to SEQ ID NO: 53642
uagaacauucccuugaccc

SEQ ID NO: 53724 - RNA, 19 nt, Artificial Sequence
  Description of Artificial Sequence: Synthetic oligonucleotide
  Sense strand starting at position 1464 of SEQ ID NO: 649
gccagaacauuacucagua

SEQ ID NO: 53725 - RNA, 19 nt, Artificial Sequence
  Description of Artificial Sequence: Synthetic oligonucleotide
  Antisense strand to SEQ ID NO: 53644
uacugaguaauguucuggc

SEQ ID NO: 53726 - RNA, 19 nt, Artificial Sequence
  Description of Artificial Sequence: Synthetic oligonucleotide
  Sense strand starting at position 2227 of SEQ ID NO: 649
cacuucugaucugugaaag

SEQ ID NO: 53727 - RNA, 19 nt, Artificial Sequence
  Description of Artificial Sequence: Synthetic oligonucleotide
  Antisense strand to SEQ ID NO: 53646
cuuucacagaucagaagug

SEQ ID NO: 53728 - RNA, 19 nt, Artificial Sequence
  Description of Artificial Sequence: Synthetic oligonucleotide
  Sense strand starting at position 2260 of SEQ ID NO: 649
ugaaacuuucuauggccua

SEQ ID NO: 53729 - RNA, 19 nt, Artificial Sequence
  Description of Artificial Sequence: Synthetic oligonucleotide
  Antisense strand to SEQ ID NO: 53648
uaggccauagaaaguuuca

SEQ ID NO: 53730 - RNA, 19 nt, Artificial Sequence
  Description of Artificial Sequence: Synthetic oligonucleotide
  Sense strand starting at position 2343 of SEQ ID NO: 649
ccaauauacccguaaggug

SEQ ID NO: 53731 - RNA, 19 nt, Artificial Sequence
  Description of Artificial Sequence: Synthetic oligonucleotide
  Antisense strand to SEQ ID NO: 53650
caccuuacggguauauugg

SEQ ID NO: 53732 - RNA, 19 nt, Artificial Sequence
  Description of Artificial Sequence: Synthetic oligonucleotide
  Sense strand starting at position 2378 of SEQ ID NO: 649
gugacagaauucuauuuac

SEQ ID NO: 53733 - RNA, 19 nt, Artificial Sequence
  Description of Artificial Sequence: Synthetic oligonucleotide
  Antisense strand to SEQ ID NO: 53652
guaaauagaauucugucac

SEQ ID NO: 53734 - RNA, 19 nt, Artificial Sequence
  Description of Artificial Sequence: Synthetic oligonucleotide
  Sense strand starting at position 2564 of SEQ ID NO: 649
gaggaaacuucuguuuaaa

SEQ ID NO: 53735 - RNA, 19 nt, Artificial Sequence
  Description of Artificial Sequence: Synthetic oligonucleotide
  Antisense strand to SEQ ID NO: 53654
uuuaaacagaaguuuccuc

SEQ ID NO: 53736 - RNA, 19 nt, Artificial Sequence
  Description of Artificial Sequence: Synthetic oligonucleotide
  Sense strand starting at position 2692 of SEQ ID NO: 649
cagguuaugagcugggaau

SEQ ID NO: 53737 - RNA, 19 nt, Artificial Sequence
  Description of Artificial Sequence: Synthetic oligonucleotide
  Antisense strand to SEQ ID NO: 53656
auucccagcucauaaccug

SEQ ID NO: 53738 - RNA, 19 nt, Artificial Sequence
  Description of Artificial Sequence: Synthetic oligonucleotide
  Sense strand starting at position 2693 of SEQ ID NO: 649
agguuaugagcugggaaug

SEQ ID NO: 53739 - RNA, 19 nt, Artificial Sequence
  Description of Artificial Sequence: Synthetic oligonucleotide
  Antisense strand to SEQ ID NO: 53658
cauucccagcucauaaccu

SEQ ID NO: 53740 - RNA, 19 nt, Artificial Sequence
  Description of Artificial Sequence: Synthetic oligonucleotide
  Sense strand starting at position 2694 of SEQ ID NO: 649
gguuaugagcugggaauga

SEQ ID NO: 53741 - RNA, 19 nt, Artificial Sequence
  Description of Artificial Sequence: Synthetic oligonucleotide
  Antisense strand to SEQ ID NO: 53660
ucauucccagcucauaacc

SEQ ID NO: 53742 - RNA, 19 nt, Artificial Sequence
  Description of Artificial Sequence: Synthetic oligonucleotide
  Sense strand starting at position 2707 of SEQ ID NO: 649
gaaugauggcuuugacagc

SEQ ID NO: 53743 - RNA, 19 nt, Artificial Sequence
  Description of Artificial Sequence: Synthetic oligonucleotide
  Antisense strand to SEQ ID NO: 53662
gcugucaaagccaucauuc

SEQ ID NO: 53744 - RNA, 19 nt, Artificial Sequence
  Description of Artificial Sequence: Synthetic oligonucleotide
  Sense strand starting at position 2779 of SEQ ID NO: 649
cucugugugcugucugcau

SEQ ID NO: 53745 - RNA, 19 nt, Artificial Sequence
  Description of Artificial Sequence: Synthetic oligonucleotide
  Antisense strand to SEQ ID NO: 53664
augcagacagcacacagag

SEQ ID NO: 53746 - RNA, 19 nt, Artificial Sequence
  Description of Artificial Sequence: Synthetic oligonucleotide
  Sense strand starting at position 2814 of SEQ ID NO: 649
augucauuucugggcccua

SEQ ID NO: 53747 - RNA, 19 nt, Artificial Sequence
  Description of Artificial Sequence: Synthetic oligonucleotide
  Antisense strand to SEQ ID NO: 53666
uagggcccagaaaugacau

SEQ ID NO: 53748 - RNA, 19 nt, Artificial Sequence
  Description of Artificial Sequence: Synthetic oligonucleotide
  Sense strand starting at position 2841 of SEQ ID NO: 649
gagagcggaccuuaccaua

SEQ ID NO: 53749 - RNA, 19 nt, Artificial Sequence
  Description of Artificial Sequence: Synthetic oligonucleotide
  Antisense strand to SEQ ID NO: 53668
uaugguaagguccgcucuc

SEQ ID NO: 53750 - RNA, 19 nt, Artificial Sequence
  Description of Artificial Sequence: Synthetic oligonucleotide
  Sense strand starting at position 2904 of SEQ ID NO: 649
gggaaugccuuccuuaauc

SEQ ID NO: 53751 - RNA, 19 nt, Artificial Sequence
  Description of Artificial Sequence: Synthetic oligonucleotide
  Antisense strand to SEQ ID NO: 53670
gauuaaggaaggcauuccc

SEQ ID NO: 53752 - RNA, 19 nt, Artificial Sequence
  Description of Artificial Sequence: Synthetic oligonucleotide
  Sense strand starting at position 2998 of SEQ ID NO: 649
ccuuguugucgcucccaca

SEQ ID NO: 53753 - RNA, 19 nt, Artificial Sequence
  Description of Artificial Sequence: Synthetic oligonucleotide
  Antisense strand to SEQ ID NO: 53672
ugugggagcgacaacaagg

SEQ ID NO: 53754 - RNA, 19 nt, Artificial Sequence
  Description of Artificial Sequence: Synthetic oligonucleotide
  Sense strand starting at position 3096 of SEQ ID NO: 649
aaagaaggcccgcaauaaa

SEQ ID NO: 53755 - RNA, 19 nt, Artificial Sequence
  Description of Artificial Sequence: Synthetic oligonucleotide
  Antisense strand to SEQ ID NO: 53674
uuuauugcgggccuucuuu

SEQ ID NO: 53756 - RNA, 19 nt, Artificial Sequence
  Description of Artificial Sequence: Synthetic oligonucleotide
  Sense strand starting at position 3113 of SEQ ID NO: 649
aaugucugcgaacaaauga

SEQ ID NO: 53757 - RNA, 19 nt, Artificial Sequence
  Description of Artificial Sequence: Synthetic oligonucleotide
  Antisense strand to SEQ ID NO: 53676
ucauuuguucgcagacauu

SEQ ID NO: 53758 - RNA, 19 nt, Artificial Sequence
  Description of Artificial Sequence: Synthetic oligonucleotide
  Sense strand starting at position 3153 of SEQ ID NO: 649
cagacuuaucccgagguca

SEQ ID NO: 53759 - RNA, 19 nt, Artificial Sequence
  Description of Artificial Sequence: Synthetic oligonucleotide
  Antisense strand to SEQ ID NO: 53678
ugaccucgggauaagucug

SEQ ID NO: 53760 - RNA, 19 nt, Artificial Sequence
  Description of Artificial Sequence: Synthetic oligonucleotide
  Sense strand starting at position 3207 of SEQ ID NO: 649
uggaacagauucuccuauu

SEQ ID NO: 53761 - RNA, 19 nt, Artificial Sequence
  Description of Artificial Sequence: Synthetic oligonucleotide
  Antisense strand to SEQ ID NO: 53680
aauaggagaaucuguucca

SEQ ID NO: 53762 - RNA, 19 nt, Artificial Sequence
  Description of Artificial Sequence: Synthetic oligonucleotide
  Sense strand starting at position 3255 of SEQ ID NO: 649
gucaguccaucuguauuua

SEQ ID NO: 53763 - RNA, 19 nt, Artificial Sequence
  Description of Artificial Sequence: Synthetic oligonucleotide
  Antisense strand to SEQ ID NO: 53682
uaaauacagauggacugac

SEQ ID NO: 53764 - RNA, 19 nt, Artificial Sequence
  Description of Artificial Sequence: Synthetic oligonucleotide
  Sense strand starting at position 3259 of SEQ ID NO: 649
guccaucuguauuuauagu

SEQ ID NO: 53765 - RNA, 19 nt, Artificial Sequence
  Description of Artificial Sequence: Synthetic oligonucleotide
  Antisense strand to SEQ ID NO: 53684
acuauaaauacagauggac

SEQ ID NO: 53766 - RNA, 19 nt, Artificial Sequence
  Description of Artificial Sequence: Synthetic oligonucleotide
  Sense strand starting at position 3597 of SEQ ID NO: 649
ugcagugagccauaauaaa

SEQ ID NO: 53767 - RNA, 19 nt, Artificial Sequence
  Description of Artificial Sequence: Synthetic oligonucleotide
  Antisense strand to SEQ ID NO: 53686
uuuauuauggcucacugca

SEQ ID NO: 53768 - RNA, 19 nt, Artificial Sequence
  Description of Artificial Sequence: Synthetic oligonucleotide
  Sense strand starting at position 3682 of SEQ ID NO: 649
gaggcagugagauagcuuu

SEQ ID NO: 53769 - RNA, 19 nt, Artificial Sequence
  Description of Artificial Sequence: Synthetic oligonucleotide
  Antisense strand to SEQ ID NO: 53688
aaagcuaucucacugccuc

SEQ ID NO: 53770 - RNA, 19 nt, Artificial Sequence
  Description of Artificial Sequence: Synthetic oligonucleotide
  Sense strand starting at position 3690 of SEQ ID NO: 649
gagauagcuuuguuauaua

SEQ ID NO: 53771 - RNA, 19 nt, Artificial Sequence
  Description of Artificial Sequence: Synthetic oligonucleotide
  Antisense strand to SEQ ID NO: 53690
uauauaacaaagcuaucuc

SEQ ID NO: 53772 - RNA, 19 nt, Artificial Sequence
  Description of Artificial Sequence: Synthetic oligonucleotide
  Sense strand starting at position 3711 of SEQ ID NO: 649
gaguuauggccugagagua

SEQ ID NO: 53773 - RNA, 19 nt, Artificial Sequence
  Description of Artificial Sequence: Synthetic oligonucleotide
  Antisense strand to SEQ ID NO: 53692
uacucucaggccauaacuc

SEQ ID NO: 53774 - RNA, 19 nt, Artificial Sequence
  Description of Artificial Sequence: Synthetic oligonucleotide
  Sense strand starting at position 3742 of SEQ ID NO: 649
ucuucuuggcuguaagaau

SEQ ID NO: 53775 - RNA, 19 nt, Artificial Sequence
  Description of Artificial Sequence: Synthetic oligonucleotide
  Antisense strand to SEQ ID NO: 53694
auucuuacagccaagaaga

SEQ ID NO: 53776 - RNA, 19 nt, Artificial Sequence
  Description of Artificial Sequence: Synthetic oligonucleotide
  Sense strand starting at position 3971 of SEQ ID NO: 649
aguuuaacagcucaguaua

SEQ ID NO: 53777 - RNA, 19 nt, Artificial Sequence
  Description of Artificial Sequence: Synthetic oligonucleotide
  Antisense strand to SEQ ID NO: 53696
uauacugagcuguuaaacu

SEQ ID NO: 53778 - RNA, 19 nt, Artificial Sequence
  Description of Artificial Sequence: Synthetic oligonucleotide
  Sense strand starting at position 30 of SEQ ID NO: 650
caugcaucucuagauugga

SEQ ID NO: 53779 - RNA, 19 nt, Artificial Sequence
  Description of Artificial Sequence: Synthetic oligonucleotide
  Antisense strand to SEQ ID NO: 53698
uccaaucuagagaugcaug

SEQ ID NO: 53780 - RNA, 19 nt, Artificial Sequence
  Description of Artificial Sequence: Synthetic oligonucleotide
  Sense strand starting at position 104 of SEQ ID NO: 650
ucugaacacuguccuaagu

SEQ ID NO: 53781 - RNA, 19 nt, Artificial Sequence
  Description of Artificial Sequence: Synthetic oligonucleotide
  Antisense strand to SEQ ID NO: 53700
acuuaggacaguguucaga

SEQ ID NO: 53782 - RNA, 19 nt, Artificial Sequence
  Description of Artificial Sequence: Synthetic oligonucleotide
  Sense strand starting at position 114 of SEQ ID NO: 650
guccuaagugaagggauca

SEQ ID NO: 53783 - RNA, 19 nt, Artificial Sequence
  Description of Artificial Sequence: Synthetic oligonucleotide
  Antisense strand to SEQ ID NO: 53702
ugaucccuucacuuaggac

SEQ ID NO: 53784 - RNA, 19 nt, Artificial Sequence
  Description of Artificial Sequence: Synthetic oligonucleotide
  Sense strand starting at position 163 of SEQ ID NO: 650
ucaggagcuuaccauuuaa

SEQ ID NO: 53785 - RNA, 19 nt, Artificial Sequence
  Description of Artificial Sequence: Synthetic oligonucleotide
  Antisense strand to SEQ ID NO: 53704
uuaaaugguaagcuccuga

SEQ ID NO: 53786 - RNA, 19 nt, Artificial Sequence
  Description of Artificial Sequence: Synthetic oligonucleotide
  Sense strand starting at position 333 of SEQ ID NO: 650
ugcacaguuuaaucaauag

SEQ ID NO: 53787 - RNA, 19 nt, Artificial Sequence
  Description of Artificial Sequence: Synthetic oligonucleotide
  Antisense strand to SEQ ID NO: 53706
cuauugauuaaacugugca

SEQ ID NO: 53788 - RNA, 19 nt, Artificial Sequence
  Description of Artificial Sequence: Synthetic oligonucleotide
  Sense strand starting at position 669 of SEQ ID NO: 650
acugauuuccaacguggca

SEQ ID NO: 53789 - RNA, 19 nt, Artificial Sequence
  Description of Artificial Sequence: Synthetic oligonucleotide
  Antisense strand to SEQ ID NO: 53708
ugccacguuggaaaucagu

SEQ ID NO: 53790 - RNA, 19 nt, Artificial Sequence
  Description of Artificial Sequence: Synthetic oligonucleotide
  Sense strand starting at position 760 of SEQ ID NO: 650
aaucuugaaguuuggguau

SEQ ID NO: 53791 - RNA, 19 nt, Artificial Sequence
  Description of Artificial Sequence: Synthetic oligonucleotide
  Antisense strand to SEQ ID NO: 53710
auacccaaacuucaagauu

SEQ ID NO: 53792 - RNA, 19 nt, Artificial Sequence
  Description of Artificial Sequence: Synthetic oligonucleotide
  Sense strand starting at position 763 of SEQ ID NO: 650
cuugaaguuuggguauaag

SEQ ID NO: 53793 - RNA, 19 nt, Artificial Sequence
  Description of Artificial Sequence: Synthetic oligonucleotide
  Antisense strand to SEQ ID NO: 53712
cuuauacccaaacuucaag

SEQ ID NO: 53794 - RNA, 19 nt, Artificial Sequence
  Description of Artificial Sequence: Synthetic oligonucleotide
  Sense strand starting at position 766 of SEQ ID NO: 650
gaaguuuggguauaaguuc

SEQ ID NO: 53795 - RNA, 19 nt, Artificial Sequence
  Description of Artificial Sequence: Synthetic oligonucleotide
  Antisense strand to SEQ ID NO: 53714
gaacuuauacccaaacuuc

SEQ ID NO: 53796 - RNA, 19 nt, Artificial Sequence
  Description of Artificial Sequence: Synthetic oligonucleotide
  Sense strand starting at position 918 of SEQ ID NO: 650
uugcaagauugacuaggau

SEQ ID NO: 53797 - RNA, 19 nt, Artificial Sequence
  Description of Artificial Sequence: Synthetic oligonucleotide
  Antisense strand to SEQ ID NO: 53716
auccuagucaaucuugcaa

SEQ ID NO: 53798 - RNA, 19 nt, Artificial Sequence
  Description of Artificial Sequence: Synthetic oligonucleotide
  Sense strand starting at position 941 of SEQ ID NO: 650
aucuucuuacuagauguau

SEQ ID NO: 53799 - RNA, 19 nt, Artificial Sequence
  Description of Artificial Sequence: Synthetic oligonucleotide
  Antisense strand to SEQ ID NO: 53718
auacaucuaguaagaagau

SEQ ID NO: 53800 - RNA, 19 nt, Artificial Sequence
  Description of Artificial Sequence: Synthetic oligonucleotide
  Sense strand starting at position 1063 of SEQ ID NO: 650
caauaaugacgguguucuu

SEQ ID NO: 53801 - RNA, 19 nt, Artificial Sequence
  Description of Artificial Sequence: Synthetic oligonucleotide
  Antisense strand to SEQ ID NO: 53720
aagaacaccgucauuauug

SEQ ID NO: 53802 - RNA, 19 nt, Artificial Sequence
  Description of Artificial Sequence: Synthetic oligonucleotide
  Sense strand starting at position 1074 of SEQ ID NO: 650
guguucuuucuagaauaca

SEQ ID NO: 53803 - RNA, 19 nt, Artificial Sequence
  Description of Artificial Sequence: Synthetic oligonucleotide
  Antisense strand to SEQ ID NO: 53722
uguauucuagaaagaacac

SEQ ID NO: 53804 - RNA, 19 nt, Artificial Sequence
  Description of Artificial Sequence: Synthetic oligonucleotide
  Sense strand starting at position 1439 of SEQ ID NO: 650
accacaggaucuucuugau

SEQ ID NO: 53805 - RNA, 19 nt, Artificial Sequence
  Description of Artificial Sequence: Synthetic oligonucleotide
  Antisense strand to SEQ ID NO: 53724
aucaagaagauccuguggu

SEQ ID NO: 53806 - RNA, 19 nt, Artificial Sequence
  Description of Artificial Sequence: Synthetic oligonucleotide
  Sense strand starting at position 1464 of SEQ ID NO: 650
gaagguccuugcuuaaugu

SEQ ID NO: 53807 - RNA, 19 nt, Artificial Sequence
  Description of Artificial Sequence: Synthetic oligonucleotide
  Antisense strand to SEQ ID NO: 53726
acauuaagcaaggaccuuc

SEQ ID NO: 53808 - RNA, 19 nt, Artificial Sequence
  Description of Artificial Sequence: Synthetic oligonucleotide
  Sense strand starting at position 1465 of SEQ ID NO: 650
aagguccuugcuuaaugua

SEQ ID NO: 53809 - RNA, 19 nt, Artificial Sequence
  Description of Artificial Sequence: Synthetic oligonucleotide
  Antisense strand to SEQ ID NO: 53728
uacauuaagcaaggaccuu

SEQ ID NO: 53810 - RNA, 19 nt, Artificial Sequence
  Description of Artificial Sequence: Synthetic oligonucleotide
  Sense strand starting at position 1505 of SEQ ID NO: 650
uuaauccuuccagggugaa

SEQ ID NO: 53811 - RNA, 19 nt, Artificial Sequence
  Description of Artificial Sequence: Synthetic oligonucleotide
  Antisense strand to SEQ ID NO: 53730
uucacccuggaaggauuaa

SEQ ID NO: 53812 - RNA, 19 nt, Artificial Sequence
  Description of Artificial Sequence: Synthetic oligonucleotide
  Sense strand starting at position 1506 of SEQ ID NO: 650
uaauccuuccagggugaaa

SEQ ID NO: 53813 - RNA, 19 nt, Artificial Sequence
  Description of Artificial Sequence: Synthetic oligonucleotide
  Antisense strand to SEQ ID NO: 53732
uuucacccuggaaggauua

SEQ ID NO: 53814 - RNA, 19 nt, Artificial Sequence
  Description of Artificial Sequence: Synthetic oligonucleotide
  Sense strand starting at position 1574 of SEQ ID NO: 650
gagacaugaugccugggau

SEQ ID NO: 53815 - RNA, 19 nt, Artificial Sequence
  Description of Artificial Sequence: Synthetic oligonucleotide
  Antisense strand to SEQ ID NO: 53734
aucccaggcaucaugucuc

SEQ ID NO: 53816 - RNA, 19 nt, Artificial Sequence
  Description of Artificial Sequence: Synthetic oligonucleotide
  Sense strand starting at position 1575 of SEQ ID NO: 650
agacaugaugccugggauu

SEQ ID NO: 53817 - RNA, 19 nt, Artificial Sequence
  Description of Artificial Sequence: Synthetic oligonucleotide
  Antisense strand to SEQ ID NO: 53736
aaucccaggcaucaugucu

SEQ ID NO: 53818 - RNA, 19 nt, Artificial Sequence
  Description of Artificial Sequence: Synthetic oligonucleotide
  Sense strand starting at position 2415 of SEQ ID NO: 650
ucuguaaggcauuacaauc

SEQ ID NO: 53819 - RNA, 19 nt, Artificial Sequence
  Description of Artificial Sequence: Synthetic oligonucleotide
  Antisense strand to SEQ ID NO: 53738
gauuguaaugccuuacaga

SEQ ID NO: 53820 - RNA, 19 nt, Artificial Sequence
  Description of Artificial Sequence: Synthetic oligonucleotide
  Sense strand starting at position 2592 of SEQ ID NO: 650
gaaugcagggcuuagauga

SEQ ID NO: 53821 - RNA, 19 nt, Artificial Sequence
  Description of Artificial Sequence: Synthetic oligonucleotide
  Antisense strand to SEQ ID NO: 53740
ucaucuaagcccugcauuc

SEQ ID NO: 53822 - RNA, 19 nt, Artificial Sequence
  Description of Artificial Sequence: Synthetic oligonucleotide
  Sense strand starting at position 2735 of SEQ ID NO: 650
agguuccucauguauaagu

SEQ ID NO: 53823 - RNA, 19 nt, Artificial Sequence
  Description of Artificial Sequence: Synthetic oligonucleotide
  Antisense strand to SEQ ID NO: 53742
acuuauacaugaggaaccu

SEQ ID NO: 53824 - RNA, 19 nt, Artificial Sequence
  Description of Artificial Sequence: Synthetic oligonucleotide
  Sense strand starting at position 2737 of SEQ ID NO: 650
guuccucauguauaaguga

SEQ ID NO: 53825 - RNA, 19 nt, Artificial Sequence
  Description of Artificial Sequence: Synthetic oligonucleotide
  Antisense strand to SEQ ID NO: 53744
ucacuuauacaugaggaac

SEQ ID NO: 53826 - RNA, 19 nt, Artificial Sequence
  Description of Artificial Sequence: Synthetic oligonucleotide
  Sense strand starting at position 2742 of SEQ ID NO: 650
ucauguauaagugaagggu

SEQ ID NO: 53827 - RNA, 19 nt, Artificial Sequence
  Description of Artificial Sequence: Synthetic oligonucleotide
  Antisense strand to SEQ ID NO: 53746
acccuucacuuauacauga

SEQ ID NO: 53828 - RNA, 19 nt, Artificial Sequence
  Description of Artificial Sequence: Synthetic oligonucleotide
  Sense strand starting at position 2826 of SEQ ID NO: 650
ggaagagcaucaccucauu

SEQ ID NO: 53829 - RNA, 19 nt, Artificial Sequence
  Description of Artificial Sequence: Synthetic oligonucleotide
  Antisense strand to SEQ ID NO: 53748
aaugaggugaugcucuucc

SEQ ID NO: 53830 - RNA, 19 nt, Artificial Sequence
  Description of Artificial Sequence: Synthetic oligonucleotide
  Sense strand starting at position 3182 of SEQ ID NO: 650
guauaacacuugcugaagu

SEQ ID NO: 53831 - RNA, 19 nt, Artificial Sequence
  Description of Artificial Sequence: Synthetic oligonucleotide
  Antisense strand to SEQ ID NO: 53750
acuucagcaaguguuauac

SEQ ID NO: 53832 - RNA, 19 nt, Artificial Sequence
  Description of Artificial Sequence: Synthetic oligonucleotide
  Sense strand starting at position 3292 of SEQ ID NO: 650
uuaauaaauguuugcagca

SEQ ID NO: 53833 - RNA, 19 nt, Artificial Sequence
  Description of Artificial Sequence: Synthetic oligonucleotide
  Antisense strand to SEQ ID NO: 53752
ugcugcaaacauuuauuaa

SEQ ID NO: 53834 - RNA, 19 nt, Artificial Sequence
  Description of Artificial Sequence: Synthetic oligonucleotide
  Sense strand starting at position 3297 of SEQ ID NO: 650
aaauguuugcagcaugagu

SEQ ID NO: 53835 - RNA, 19 nt, Artificial Sequence
  Description of Artificial Sequence: Synthetic oligonucleotide
  Antisense strand to SEQ ID NO: 53754
acucaugcugcaaacauuu

SEQ ID NO: 53836 - RNA, 19 nt, Artificial Sequence
  Description of Artificial Sequence: Synthetic oligonucleotide
  Sense strand starting at position 3342 of SEQ ID NO: 650
gguggcauuuguaacgagu

SEQ ID NO: 53837 - RNA, 19 nt, Artificial Sequence
  Description of Artificial Sequence: Synthetic oligonucleotide
  Antisense strand to SEQ ID NO: 53756
acucguuacaaaugccacc

SEQ ID NO: 53838 - RNA, 19 nt, Artificial Sequence
  Description of Artificial Sequence: Synthetic oligonucleotide
  Sense strand starting at position 3345 of SEQ ID NO: 650
ggcauuuguaacgaguugu

SEQ ID NO: 53839 - RNA, 19 nt, Artificial Sequence
  Description of Artificial Sequence: Synthetic oligonucleotide
  Antisense strand to SEQ ID NO: 53758
acaacucguuacaaaugcc

SEQ ID NO: 53840 - RNA, 19 nt, Artificial Sequence
  Description of Artificial Sequence: Synthetic oligonucleotide
  Sense strand starting at position 3351 of SEQ ID NO: 650
uguaacgaguuguuacuaa

SEQ ID NO: 53841 - RNA, 19 nt, Artificial Sequence
  Description of Artificial Sequence: Synthetic oligonucleotide
  Antisense strand to SEQ ID NO: 53760
uuaguaacaacucguuaca

SEQ ID NO: 53842 - RNA, 19 nt, Artificial Sequence
  Description of Artificial Sequence: Synthetic oligonucleotide
  Sense strand starting at position 3509 of SEQ ID NO: 650
aguggcuuccaaugggaaa

SEQ ID NO: 53843 - RNA, 19 nt, Artificial Sequence
  Description of Artificial Sequence: Synthetic oligonucleotide
  Antisense strand to SEQ ID NO: 53762
uuucccauuggaagccacu

SEQ ID NO: 53844 - RNA, 19 nt, Artificial Sequence
  Description of Artificial Sequence: Synthetic oligonucleotide
  Sense strand starting at position 3610 of SEQ ID NO: 650
cccuauaaauugccagaga

SEQ ID NO: 53845 - RNA, 19 nt, Artificial Sequence
  Description of Artificial Sequence: Synthetic oligonucleotide
  Antisense strand to SEQ ID NO: 53764
ucucuggcaauuuauaggg

SEQ ID NO: 53846 - RNA, 19 nt, Artificial Sequence
  Description of Artificial Sequence: Synthetic oligonucleotide
  Sense strand starting at position 3699 of SEQ ID NO: 650
auaugaugcuagcccaaua

SEQ ID NO: 53847 - RNA, 19 nt, Artificial Sequence
  Description of Artificial Sequence: Synthetic oligonucleotide
  Antisense strand to SEQ ID NO: 53766
uauugggcuagcaucauau

SEQ ID NO: 53848 - RNA, 19 nt, Artificial Sequence
  Description of Artificial Sequence: Synthetic oligonucleotide
  Sense strand starting at position 3834 of SEQ ID NO: 650
uugguuuccauuugagguu

SEQ ID NO: 53849 - RNA, 19 nt, Artificial Sequence
  Description of Artificial Sequence: Synthetic oligonucleotide
  Antisense strand to SEQ ID NO: 53768
aaccucaaauggaaaccaa

SEQ ID NO: 53850 - RNA, 19 nt, Artificial Sequence
  Description of Artificial Sequence: Synthetic oligonucleotide
  Sense strand starting at position 3846 of SEQ ID NO: 650
ugagguugcccuuaaugcu

SEQ ID NO: 53851 - RNA, 19 nt, Artificial Sequence
  Description of Artificial Sequence: Synthetic oligonucleotide
  Antisense strand to SEQ ID NO: 53770
agcauuaagggcaaccuca

SEQ ID NO: 53852 - RNA, 19 nt, Artificial Sequence
  Description of Artificial Sequence: Synthetic oligonucleotide
  Sense strand starting at position 3853 of SEQ ID NO: 650
gcccuuaaugcucacugua

SEQ ID NO: 53853 - RNA, 19 nt, Artificial Sequence
  Description of Artificial Sequence: Synthetic oligonucleotide
  Antisense strand to SEQ ID NO: 53772
uacagugagcauuaagggc

SEQ ID NO: 53854 - RNA, 19 nt, Artificial Sequence
  Description of Artificial Sequence: Synthetic oligonucleotide
  Sense strand starting at position 3861 of SEQ ID NO: 650
ugcucacuguaacuagauu

SEQ ID NO: 53855 - RNA, 19 nt, Artificial Sequence
  Description of Artificial Sequence: Synthetic oligonucleotide
  Antisense strand to SEQ ID NO: 53774
aaucuaguuacagugagca

SEQ ID NO: 53856 - RNA, 19 nt, Artificial Sequence
  Description of Artificial Sequence: Synthetic oligonucleotide
  Sense strand starting at position 3953 of SEQ ID NO: 650
gcugccaaucccuaaggau

SEQ ID NO: 53857 - RNA, 19 nt, Artificial Sequence
  Description of Artificial Sequence: Synthetic oligonucleotide
  Antisense strand to SEQ ID NO: 53776
auccuuagggauuggcagc

SEQ ID NO: 53858 - RNA, 19 nt, Artificial Sequence
  Description of Artificial Sequence: Synthetic oligonucleotide
  Sense strand starting at position 3606 of SEQ ID NO: 652
uggcaccugccuuagaauu

SEQ ID NO: 53859 - RNA, 19 nt, Artificial Sequence
  Description of Artificial Sequence: Synthetic oligonucleotide
  Antisense strand to SEQ ID NO: 53778
aauucuaaggcaggugcca

SEQ ID NO: 53860 - RNA, 19 nt, Artificial Sequence
  Description of Artificial Sequence: Synthetic oligonucleotide
  Sense strand starting at position 3567 of SEQ ID NO: 652
caaacauugcuguagugaa

SEQ ID NO: 53861 - RNA, 19 nt, Artificial Sequence
  Description of Artificial Sequence: Synthetic oligonucleotide
  Antisense strand to SEQ ID NO: 53780
uucacuacagcaauguuug

SEQ ID NO: 53862 - RNA, 19 nt, Artificial Sequence
  Description of Artificial Sequence: Synthetic oligonucleotide
  Sense strand starting at position 3182 of SEQ ID NO: 652
aguauuuaaugucagggaa

SEQ ID NO: 53863 - RNA, 19 nt, Artificial Sequence
  Description of Artificial Sequence: Synthetic oligonucleotide
  Antisense strand to SEQ ID NO: 53782
uucccugacauuaaauacu

SEQ ID NO: 53864 - RNA, 19 nt, Artificial Sequence
  Description of Artificial Sequence: Synthetic oligonucleotide
  Sense strand starting at position 3141 of SEQ ID NO: 652
ugccaauauugagccacau

SEQ ID NO: 53865 - RNA, 19 nt, Artificial Sequence
  Description of Artificial Sequence: Synthetic oligonucleotide
  Antisense strand to SEQ ID NO: 53784
auguggcucaauauuggca

SEQ ID NO: 53866 - RNA, 19 nt, Artificial Sequence
  Description of Artificial Sequence: Synthetic oligonucleotide
  Sense strand starting at position 3074 of SEQ ID NO: 652
caguguguuccuuuguucu

SEQ ID NO: 53867 - RNA, 19 nt, Artificial Sequence
  Description of Artificial Sequence: Synthetic oligonucleotide
  Antisense strand to SEQ ID NO: 53786
agaacaaaggaacacacug

SEQ ID NO: 53868 - RNA, 19 nt, Artificial Sequence
  Description of Artificial Sequence: Synthetic oligonucleotide
  Sense strand starting at position 3061 of SEQ ID NO: 652
gcuuuaaacucaccagugu

SEQ ID NO: 53869 - RNA, 19 nt, Artificial Sequence
  Description of Artificial Sequence: Synthetic oligonucleotide
  Antisense strand to SEQ ID NO: 53788
acacuggugaguuuaaagc

SEQ ID NO: 53870 - RNA, 19 nt, Artificial Sequence
  Description of Artificial Sequence: Synthetic oligonucleotide
  Sense strand starting at position 3001 of SEQ ID NO: 652
caguacagauguucuggau

SEQ ID NO: 53871 - RNA, 19 nt, Artificial Sequence
  Description of Artificial Sequence: Synthetic oligonucleotide
  Antisense strand to SEQ ID NO: 53790
auccagaacaucuguacug

SEQ ID NO: 53872 - RNA, 19 nt, Artificial Sequence
  Description of Artificial Sequence: Synthetic oligonucleotide
  Sense strand starting at position 2705 of SEQ ID NO: 652
uguagucugcuggagauga

SEQ ID NO: 53873 - RNA, 19 nt, Artificial Sequence
  Description of Artificial Sequence: Synthetic oligonucleotide
  Antisense strand to SEQ ID NO: 53792
ucaucuccagcagacuaca

SEQ ID NO: 53874 - RNA, 19 nt, Artificial Sequence
  Description of Artificial Sequence: Synthetic oligonucleotide
  Sense strand starting at position 2612 of SEQ ID NO: 652
cagaguugagaaggccaaa

SEQ ID NO: 53875 - RNA, 19 nt, Artificial Sequence
  Description of Artificial Sequence: Synthetic oligonucleotide
  Antisense strand to SEQ ID NO: 53794
uuuggccuucucaacucug

SEQ ID NO: 53876 - RNA, 19 nt, Artificial Sequence
  Description of Artificial Sequence: Synthetic oligonucleotide
  Sense strand starting at position 2600 of SEQ ID NO: 652
agaaucugucagcagaguu

SEQ ID NO: 53877 - RNA, 19 nt, Artificial Sequence
  Description of Artificial Sequence: Synthetic oligonucleotide
  Antisense strand to SEQ ID NO: 53796
aacucugcugacagauucu

SEQ ID NO: 53878 - RNA, 19 nt, Artificial Sequence
  Description of Artificial Sequence: Synthetic oligonucleotide
  Sense strand starting at position 2595 of SEQ ID NO: 652
guuaaagaaucugucagca

SEQ ID NO: 53879 - RNA, 19 nt, Artificial Sequence
  Description of Artificial Sequence: Synthetic oligonucleotide
  Antisense strand to SEQ ID NO: 53798
ugcugacagauucuuuaac

SEQ ID NO: 53880 - RNA, 19 nt, Artificial Sequence
  Description of Artificial Sequence: Synthetic oligonucleotide
  Sense strand starting at position 2499 of SEQ ID NO: 652
agaucugccucuuucugua

SEQ ID NO: 53881 - RNA, 19 nt, Artificial Sequence
  Description of Artificial Sequence: Synthetic oligonucleotide
  Antisense strand to SEQ ID NO: 53800
uacagaaagaggcagaucu

SEQ ID NO: 53882 - RNA, 19 nt, Artificial Sequence
  Description of Artificial Sequence: Synthetic oligonucleotide
  Sense strand starting at position 2459 of SEQ ID NO: 652
gaguaacuggcaggguauu

SEQ ID NO: 53883 - RNA, 19 nt, Artificial Sequence
  Description of Artificial Sequence: Synthetic oligonucleotide
  Antisense strand to SEQ ID NO: 53802
aauacccugccaguuacuc

SEQ ID NO: 53884 - RNA, 19 nt, Artificial Sequence
  Description of Artificial Sequence: Synthetic oligonucleotide
  Sense strand starting at position 1514 of SEQ ID NO: 652
uucgaauucugagcaauuc

SEQ ID NO: 53885 - RNA, 19 nt, Artificial Sequence
  Description of Artificial Sequence: Synthetic oligonucleotide
  Antisense strand to SEQ ID NO: 53804
gaauugcucagaauucgaa

SEQ ID NO: 53886 - RNA, 19 nt, Artificial Sequence
  Description of Artificial Sequence: Synthetic oligonucleotide
  Sense strand starting at position 1497 of SEQ ID NO: 652
gaaauugagccucggaauu

SEQ ID NO: 53887 - RNA, 19 nt, Artificial Sequence
  Description of Artificial Sequence: Synthetic oligonucleotide
  Antisense strand to SEQ ID NO: 53806
aauuccgaggcucaauuuc

SEQ ID NO: 53888 - RNA, 19 nt, Artificial Sequence
  Description of Artificial Sequence: Synthetic oligonucleotide
  Sense strand starting at position 1374 of SEQ ID NO: 652
auugguacuucugucaaga

SEQ ID NO: 53889 - RNA, 19 nt, Artificial Sequence
  Description of Artificial Sequence: Synthetic oligonucleotide
  Antisense strand to SEQ ID NO: 53808
ucuugacagaaguaccaau

SEQ ID NO: 53890 - RNA, 19 nt, Artificial Sequence
  Description of Artificial Sequence: Synthetic oligonucleotide
  Sense strand starting at position 1351 of SEQ ID NO: 652
uguucucuguauuuauacu

SEQ ID NO: 53891 - RNA, 19 nt, Artificial Sequence
  Description of Artificial Sequence: Synthetic oligonucleotide
  Antisense strand to SEQ ID NO: 53810
aguauaaauacagagaaca

SEQ ID NO: 53892 - RNA, 19 nt, Artificial Sequence
  Description of Artificial Sequence: Synthetic oligonucleotide
  Sense strand starting at position 1346 of SEQ ID NO: 652
gugaauguucucuguauuu

SEQ ID NO: 53893 - RNA, 19 nt, Artificial Sequence
  Description of Artificial Sequence: Synthetic oligonucleotide
  Antisense strand to SEQ ID NO: 53812
aaauacagagaacauucac

SEQ ID NO: 53894 - RNA, 19 nt, Artificial Sequence
  Description of Artificial Sequence: Synthetic oligonucleotide
  Sense strand starting at position 1336 of SEQ ID NO: 652
ucaguugaacgugaauguu

SEQ ID NO: 53895 - RNA, 19 nt, Artificial Sequence
  Description of Artificial Sequence: Synthetic oligonucleotide
  Antisense strand to SEQ ID NO: 53814
aacauucacguucaacuga

SEQ ID NO: 53896 - RNA, 19 nt, Artificial Sequence
  Description of Artificial Sequence: Synthetic oligonucleotide
  Sense strand starting at position 1335 of SEQ ID NO: 652
aucaguugaacgugaaugu

SEQ ID NO: 53897 - RNA, 19 nt, Artificial Sequence
  Description of Artificial Sequence: Synthetic oligonucleotide
  Antisense strand to SEQ ID NO: 53816
acauucacguucaacugau

SEQ ID NO: 53898 - RNA, 19 nt, Artificial Sequence
  Description of Artificial Sequence: Synthetic oligonucleotide
  Sense strand starting at position 1333 of SEQ ID NO: 652
uaaucaguugaacgugaau

SEQ ID NO: 53899 - RNA, 19 nt, Artificial Sequence
  Description of Artificial Sequence: Synthetic oligonucleotide
  Antisense strand to SEQ ID NO: 53818
auucacguucaacugauua

SEQ ID NO: 53900 - RNA, 19 nt, Artificial Sequence
  Description of Artificial Sequence: Synthetic oligonucleotide
  Sense strand starting at position 1319 of SEQ ID NO: 652
uuacaucuccucgguaauc

SEQ ID NO: 53901 - RNA, 19 nt, Artificial Sequence
  Description of Artificial Sequence: Synthetic oligonucleotide
  Antisense strand to SEQ ID NO: 53820
gauuaccgaggagauguaa

SEQ ID NO: 53902 - RNA, 19 nt, Artificial Sequence
  Description of Artificial Sequence: Synthetic oligonucleotide
  Sense strand starting at position 1318 of SEQ ID NO: 652
uuuacaucuccucgguaau

SEQ ID NO: 53903 - RNA, 19 nt, Artificial Sequence
  Description of Artificial Sequence: Synthetic oligonucleotide
  Antisense strand to SEQ ID NO: 53822
auuaccgaggagauguaaa

SEQ ID NO: 53904 - RNA, 19 nt, Artificial Sequence
  Description of Artificial Sequence: Synthetic oligonucleotide
  Sense strand starting at position 1242 of SEQ ID NO: 652
aauguaagguagcuauuau

SEQ ID NO: 53905 - RNA, 19 nt, Artificial Sequence
  Description of Artificial Sequence: Synthetic oligonucleotide
  Antisense strand to SEQ ID NO: 53824
auaauagcuaccuuacauu

SEQ ID NO: 53906 - RNA, 19 nt, Artificial Sequence
  Description of Artificial Sequence: Synthetic oligonucleotide
  Sense strand starting at position 1225 of SEQ ID NO: 652
ggaauauaguaagcccaaa

SEQ ID NO: 53907 - RNA, 19 nt, Artificial Sequence
  Description of Artificial Sequence: Synthetic oligonucleotide
  Antisense strand to SEQ ID NO: 53826
uuugggcuuacuauauucc

SEQ ID NO: 53908 - RNA, 19 nt, Artificial Sequence
  Description of Artificial Sequence: Synthetic oligonucleotide
  Sense strand starting at position 1212 of SEQ ID NO: 652
aagaacagugccuggaaua

SEQ ID NO: 53909 - RNA, 19 nt, Artificial Sequence
  Description of Artificial Sequence: Synthetic oligonucleotide
  Antisense strand to SEQ ID NO: 53828
uauuccaggcacuguucuu

SEQ ID NO: 53910 - RNA, 19 nt, Artificial Sequence
  Description of Artificial Sequence: Synthetic oligonucleotide
  Sense strand starting at position 1211 of SEQ ID NO: 652
uaagaacagugccuggaau

SEQ ID NO: 53911 - RNA, 19 nt, Artificial Sequence
  Description of Artificial Sequence: Synthetic oligonucleotide
  Antisense strand to SEQ ID NO: 53830
auuccaggcacuguucuua

SEQ ID NO: 53912 - RNA, 19 nt, Artificial Sequence
  Description of Artificial Sequence: Synthetic oligonucleotide
  Sense strand starting at position 1091 of SEQ ID NO: 652
cgggacaacucacuuaacu

SEQ ID NO: 53913 - RNA, 19 nt, Artificial Sequence
  Description of Artificial Sequence: Synthetic oligonucleotide
  Antisense strand to SEQ ID NO: 53832
aguuaagugaguugucccg

SEQ ID NO: 53914 - RNA, 19 nt, Artificial Sequence
  Description of Artificial Sequence: Synthetic oligonucleotide
  Sense strand starting at position 1042 of SEQ ID NO: 652
augaauccuggcugaaaua

SEQ ID NO: 53915 - RNA, 19 nt, Artificial Sequence
  Description of Artificial Sequence: Synthetic oligonucleotide
  Antisense strand to SEQ ID NO: 53834
uauuucagccaggauucau

SEQ ID NO: 53916 - RNA, 19 nt, Artificial Sequence
  Description of Artificial Sequence: Synthetic oligonucleotide
  Sense strand starting at position 1024 of SEQ ID NO: 652
ggauaaggccauuguccua

SEQ ID NO: 53917 - RNA, 19 nt, Artificial Sequence
  Description of Artificial Sequence: Synthetic oligonucleotide
  Antisense strand to SEQ ID NO: 53836
uaggacaauggccuuaucc

SEQ ID NO: 53918 - RNA, 19 nt, Artificial Sequence
  Description of Artificial Sequence: Synthetic oligonucleotide
  Sense strand starting at position 769 of SEQ ID NO: 652
cuuugauugcuuuagauac

SEQ ID NO: 53919 - RNA, 19 nt, Artificial Sequence
  Description of Artificial Sequence: Synthetic oligonucleotide
  Antisense strand to SEQ ID NO: 53838
guaucuaaagcaaucaaag

SEQ ID NO: 53920 - RNA, 19 nt, Artificial Sequence
  Description of Artificial Sequence: Synthetic oligonucleotide
  Sense strand starting at position 767 of SEQ ID NO: 652
gacuuugauugcuuuagau

SEQ ID NO: 53921 - RNA, 19 nt, Artificial Sequence
  Description of Artificial Sequence: Synthetic oligonucleotide
  Antisense strand to SEQ ID NO: 53840
aucuaaagcaaucaaaguc

SEQ ID NO: 53922 - RNA, 19 nt, Artificial Sequence
  Description of Artificial Sequence: Synthetic oligonucleotide
  Sense strand starting at position 766 of SEQ ID NO: 652
agacuuugauugcuuuaga

SEQ ID NO: 53923 - RNA, 19 nt, Artificial Sequence
  Description of Artificial Sequence: Synthetic oligonucleotide
  Antisense strand to SEQ ID NO: 53842
ucuaaagcaaucaaagucu

SEQ ID NO: 53924 - RNA, 19 nt, Artificial Sequence
  Description of Artificial Sequence: Synthetic oligonucleotide
  Sense strand starting at position 764 of SEQ ID NO: 652
uuagacuuugauugcuuua

SEQ ID NO: 53925 - RNA, 19 nt, Artificial Sequence
  Description of Artificial Sequence: Synthetic oligonucleotide
  Antisense strand to SEQ ID NO: 53844
uaaagcaaucaaagucuaa

SEQ ID NO: 53926 - RNA, 19 nt, Artificial Sequence
  Description of Artificial Sequence: Synthetic oligonucleotide
  Sense strand starting at position 763 of SEQ ID NO: 652
cuuagacuuugauugcuuu

SEQ ID NO: 53927 - RNA, 19 nt, Artificial Sequence
  Description of Artificial Sequence: Synthetic oligonucleotide
  Antisense strand to SEQ ID NO: 53846
aaagcaaucaaagucuaag

SEQ ID NO: 53928 - RNA, 19 nt, Artificial Sequence
  Description of Artificial Sequence: Synthetic oligonucleotide
  Sense strand starting at position 752 of SEQ ID NO: 652
acuuucuguuucuuagacu

SEQ ID NO: 53929 - RNA, 19 nt, Artificial Sequence
  Description of Artificial Sequence: Synthetic oligonucleotide
  Antisense strand to SEQ ID NO: 53848
agucuaagaaacagaaagu

SEQ ID NO: 53930 - RNA, 19 nt, Artificial Sequence
  Description of Artificial Sequence: Synthetic oligonucleotide
  Sense strand starting at position 309 of SEQ ID NO: 652
aaacguuuacuguagaaau

SEQ ID NO: 53931 - RNA, 19 nt, Artificial Sequence
  Description of Artificial Sequence: Synthetic oligonucleotide
  Antisense strand to SEQ ID NO: 53850
auuucuacaguaaacguuu

SEQ ID NO: 53932 - RNA, 19 nt, Artificial Sequence
  Description of Artificial Sequence: Synthetic oligonucleotide
  Sense strand starting at position 209 of SEQ ID NO: 652
gacucugacuugguuacuu

SEQ ID NO: 53933 - RNA, 19 nt, Artificial Sequence
  Description of Artificial Sequence: Synthetic oligonucleotide
  Antisense strand to SEQ ID NO: 53852
aaguaaccaagucagaguc

SEQ ID NO: 53934 - RNA, 19 nt, Artificial Sequence
  Description of Artificial Sequence: Synthetic oligonucleotide
  Sense strand starting at position 205 of SEQ ID NO: 652
aauagacucugacuugguu

SEQ ID NO: 53935 - RNA, 19 nt, Artificial Sequence
  Description of Artificial Sequence: Synthetic oligonucleotide
  Antisense strand to SEQ ID NO: 53854
aaccaagucagagucuauu

SEQ ID NO: 53936 - RNA, 19 nt, Artificial Sequence
  Description of Artificial Sequence: Synthetic oligonucleotide
  Sense strand starting at position 132 of SEQ ID NO: 652
agcuuauaugaacguuaua

SEQ ID NO: 53937 - RNA, 19 nt, Artificial Sequence
  Description of Artificial Sequence: Synthetic oligonucleotide
  Antisense strand to SEQ ID NO: 53856
uauaacguucauauaagcu

SEQ ID NO: 53938 - RNA, 19 nt, Artificial Sequence
  Description of Artificial Sequence: Synthetic oligonucleotide
  Sense strand starting at position 3924 of SEQ ID NO: 651
aaguaaucgcuugacucau

SEQ ID NO: 53939 - RNA, 19 nt, Artificial Sequence
  Description of Artificial Sequence: Synthetic oligonucleotide
  Antisense strand to SEQ ID NO: 53858
augagucaagcgauuacuu

SEQ ID NO: 53940 - RNA, 19 nt, Artificial Sequence
  Description of Artificial Sequence: Synthetic oligonucleotide
  Sense strand starting at position 3901 of SEQ ID NO: 651
uuaagugauugaguuguga

SEQ ID NO: 53941 - RNA, 19 nt, Artificial Sequence
  Description of Artificial Sequence: Synthetic oligonucleotide
  Antisense strand to SEQ ID NO: 53860
ucacaacucaaucacuuaa

SEQ ID NO: 53942 - RNA, 19 nt, Artificial Sequence
  Description of Artificial Sequence: Synthetic oligonucleotide
  Sense strand starting at position 3899 of SEQ ID NO: 651
ccuuaagugauugaguugu

SEQ ID NO: 53943 - RNA, 19 nt, Artificial Sequence
  Description of Artificial Sequence: Synthetic oligonucleotide
  Antisense strand to SEQ ID NO: 53862
acaacucaaucacuuaagg

SEQ ID NO: 53944 - RNA, 19 nt, Artificial Sequence
  Description of Artificial Sequence: Synthetic oligonucleotide
  Sense strand starting at position 3898 of SEQ ID NO: 651
accuuaagugauugaguug

SEQ ID NO: 53945 - RNA, 19 nt, Artificial Sequence
  Description of Artificial Sequence: Synthetic oligonucleotide
  Antisense strand to SEQ ID NO: 53864
caacucaaucacuuaaggu

SEQ ID NO: 53946 - RNA, 19 nt, Artificial Sequence
  Description of Artificial Sequence: Synthetic oligonucleotide
  Sense strand starting at position 3897 of SEQ ID NO: 651
aaccuuaagugauugaguu

SEQ ID NO: 53947 - RNA, 19 nt, Artificial Sequence
  Description of Artificial Sequence: Synthetic oligonucleotide
  Antisense strand to SEQ ID NO: 53866
aacucaaucacuuaagguu

SEQ ID NO: 53948 - RNA, 19 nt, Artificial Sequence
  Description of Artificial Sequence: Synthetic oligonucleotide
  Sense strand starting at position 3873 of SEQ ID NO: 651
guaugaugacuuuaucgag

SEQ ID NO: 53949 - RNA, 19 nt, Artificial Sequence
  Description of Artificial Sequence: Synthetic oligonucleotide
  Antisense strand to SEQ ID NO: 53868
cucgauaaagucaucauac

SEQ ID NO: 53950 - RNA, 19 nt, Artificial Sequence
  Description of Artificial Sequence: Synthetic oligonucleotide
  Sense strand starting at position 3815 of SEQ ID NO: 651
uuaauaguuugugugacaa

SEQ ID NO: 53951 - RNA, 19 nt, Artificial Sequence
  Description of Artificial Sequence: Synthetic oligonucleotide
  Antisense strand to SEQ ID NO: 53870
uugucacacaaacuauuaa

SEQ ID NO: 53952 - RNA, 19 nt, Artificial Sequence
  Description of Artificial Sequence: Synthetic oligonucleotide
  Sense strand starting at position 3757 of SEQ ID NO: 651
caaacuguaguagaaguua

SEQ ID NO: 53953 - RNA, 19 nt, Artificial Sequence
  Description of Artificial Sequence: Synthetic oligonucleotide
  Antisense strand to SEQ ID NO: 53872
uaacuucuacuacaguuug

SEQ ID NO: 53954 - RNA, 19 nt, Artificial Sequence
  Description of Artificial Sequence: Synthetic oligonucleotide
  Sense strand starting at position 3590 of SEQ ID NO: 651
augugugguccacaaacac

SEQ ID NO: 53955 - RNA, 19 nt, Artificial Sequence
  Description of Artificial Sequence: Synthetic oligonucleotide
  Antisense strand to SEQ ID NO: 53874
guguuuguggaccacacau

SEQ ID NO: 53956 - RNA, 19 nt, Artificial Sequence
  Description of Artificial Sequence: Synthetic oligonucleotide
  Sense strand starting at position 3588 of SEQ ID NO: 651
uaaugugugguccacaaac

SEQ ID NO: 53957 - RNA, 19 nt, Artificial Sequence
  Description of Artificial Sequence: Synthetic oligonucleotide
  Antisense strand to SEQ ID NO: 53876
guuuguggaccacacauua

SEQ ID NO: 53958 - RNA, 19 nt, Artificial Sequence
  Description of Artificial Sequence: Synthetic oligonucleotide
  Sense strand starting at position 3549 of SEQ ID NO: 651
ugcucacaugugcaagaau

SEQ ID NO: 53959 - RNA, 19 nt, Artificial Sequence
  Description of Artificial Sequence: Synthetic oligonucleotide
  Antisense strand to SEQ ID NO: 53878
auucuugcacaugugagca

SEQ ID NO: 53960 - RNA, 19 nt, Artificial Sequence
  Description of Artificial Sequence: Synthetic oligonucleotide
  Sense strand starting at position 3540 of SEQ ID NO: 651
gguauuuccugcucacaug

SEQ ID NO: 53961 - RNA, 19 nt, Artificial Sequence
  Description of Artificial Sequence: Synthetic oligonucleotide
  Antisense strand to SEQ ID NO: 53880
caugugagcaggaaauacc

SEQ ID NO: 53962 - RNA, 19 nt, Artificial Sequence
  Description of Artificial Sequence: Synthetic oligonucleotide
  Sense strand starting at position 3522 of SEQ ID NO: 651
cccugaacauucuugauag

SEQ ID NO: 53963 - RNA, 19 nt, Artificial Sequence
  Description of Artificial Sequence: Synthetic oligonucleotide
  Antisense strand to SEQ ID NO: 53882
cuaucaagaauguucaggg

SEQ ID NO: 53964 - RNA, 19 nt, Artificial Sequence
  Description of Artificial Sequence: Synthetic oligonucleotide
  Sense strand starting at position 3142 of SEQ ID NO: 651
ucucucgucccuuaaugau

SEQ ID NO: 53965 - RNA, 19 nt, Artificial Sequence
  Description of Artificial Sequence: Synthetic oligonucleotide
  Antisense strand to SEQ ID NO: 53884
aucauuaagggacgagaga

SEQ ID NO: 53966 - RNA, 19 nt, Artificial Sequence
  Description of Artificial Sequence: Synthetic oligonucleotide
  Sense strand starting at position 3103 of SEQ ID NO: 651
ugcuauauaguagaccauu

SEQ ID NO: 53967 - RNA, 19 nt, Artificial Sequence
  Description of Artificial Sequence: Synthetic oligonucleotide
  Antisense strand to SEQ ID NO: 53886
aauggucuacuauauagca

SEQ ID NO: 53968 - RNA, 19 nt, Artificial Sequence
  Description of Artificial Sequence: Synthetic oligonucleotide
  Sense strand starting at position 3077 of SEQ ID NO: 651
cacagagcacuaggauauu

SEQ ID NO: 53969 - RNA, 19 nt, Artificial Sequence
  Description of Artificial Sequence: Synthetic oligonucleotide
  Antisense strand to SEQ ID NO: 53888
aauauccuagugcucugug

SEQ ID NO: 53970 - RNA, 19 nt, Artificial Sequence
  Description of Artificial Sequence: Synthetic oligonucleotide
  Sense strand starting at position 3057 of SEQ ID NO: 651
gaaauuaauccagguuguu

SEQ ID NO: 53971 - RNA, 19 nt, Artificial Sequence
  Description of Artificial Sequence: Synthetic oligonucleotide
  Antisense strand to SEQ ID NO: 53890
aacaaccuggauuaauuuc

SEQ ID NO: 53972 - RNA, 19 nt, Artificial Sequence
  Description of Artificial Sequence: Synthetic oligonucleotide
  Sense strand starting at position 2862 of SEQ ID NO: 651
gaguguucccaaugggagu

SEQ ID NO: 53973 - RNA, 19 nt, Artificial Sequence
  Description of Artificial Sequence: Synthetic oligonucleotide
  Antisense strand to SEQ ID NO: 53892
acucccauugggaacacuc

SEQ ID NO: 53974 - RNA, 19 nt, Artificial Sequence
  Description of Artificial Sequence: Synthetic oligonucleotide
  Sense strand starting at position 2849 of SEQ ID NO: 651
acaugauuccucugagugu

SEQ ID NO: 53975 - RNA, 19 nt, Artificial Sequence
  Description of Artificial Sequence: Synthetic oligonucleotide
  Antisense strand to SEQ ID NO: 53894
acacucagaggaaucaugu

SEQ ID NO: 53976 - RNA, 19 nt, Artificial Sequence
  Description of Artificial Sequence: Synthetic oligonucleotide
  Sense strand starting at position 2847 of SEQ ID NO: 651
cgacaugauuccucugagu

SEQ ID NO: 53977 - RNA, 19 nt, Artificial Sequence
  Description of Artificial Sequence: Synthetic oligonucleotide
  Antisense strand to SEQ ID NO: 53896
acucagaggaaucaugucg

SEQ ID NO: 53978 - RNA, 19 nt, Artificial Sequence
  Description of Artificial Sequence: Synthetic oligonucleotide
  Sense strand starting at position 2838 of SEQ ID NO: 651
agcuguauucgacaugauu

SEQ ID NO: 53979 - RNA, 19 nt, Artificial Sequence
  Description of Artificial Sequence: Synthetic oligonucleotide
  Antisense strand to SEQ ID NO: 53898
aaucaugucgaauacagcu

SEQ ID NO: 53980 - RNA, 19 nt, Artificial Sequence
  Description of Artificial Sequence: Synthetic oligonucleotide
  Sense strand starting at position 2633 of SEQ ID NO: 651
uuugguguagcugagacuu

SEQ ID NO: 53981 - RNA, 19 nt, Artificial Sequence
  Description of Artificial Sequence: Synthetic oligonucleotide
  Antisense strand to SEQ ID NO: 53900
aagucucagcuacaccaaa

SEQ ID NO: 53982 - RNA, 19 nt, Artificial Sequence
  Description of Artificial Sequence: Synthetic oligonucleotide
  Sense strand starting at position 2519 of SEQ ID NO: 651
gauggagcccauuguacau

SEQ ID NO: 53983 - RNA, 19 nt, Artificial Sequence
  Description of Artificial Sequence: Synthetic oligonucleotide
  Antisense strand to SEQ ID NO: 53902
auguacaaugggcuccauc

SEQ ID NO: 53984 - RNA, 19 nt, Artificial Sequence
  Description of Artificial Sequence: Synthetic oligonucleotide
  Sense strand starting at position 2135 of SEQ ID NO: 651
gaguaugacugaccgggua

SEQ ID NO: 53985 - RNA, 19 nt, Artificial Sequence
  Description of Artificial Sequence: Synthetic oligonucleotide
  Antisense strand to SEQ ID NO: 53904
uacccggucagucauacuc

SEQ ID NO: 53986 - RNA, 19 nt, Artificial Sequence
  Description of Artificial Sequence: Synthetic oligonucleotide
  Sense strand starting at position 1536 of SEQ ID NO: 651
ugcaauugaucagucuaaa

SEQ ID NO: 53987 - RNA, 19 nt, Artificial Sequence
  Description of Artificial Sequence: Synthetic oligonucleotide
  Antisense strand to SEQ ID NO: 53906
uuuagacugaucaauugca

SEQ ID NO: 53988 - RNA, 19 nt, Artificial Sequence
  Description of Artificial Sequence: Synthetic oligonucleotide
  Sense strand starting at position 1534 of SEQ ID NO: 651
ucugcaauugaucagucua

SEQ ID NO: 53989 - RNA, 19 nt, Artificial Sequence
  Description of Artificial Sequence: Synthetic oligonucleotide
  Antisense strand to SEQ ID NO: 53908
uagacugaucaauugcaga

SEQ ID NO: 53990 - RNA, 19 nt, Artificial Sequence
  Description of Artificial Sequence: Synthetic oligonucleotide
  Sense strand starting at position 1526 of SEQ ID NO: 651
ccugcaaaucugcaauuga

SEQ ID NO: 53991 - RNA, 19 nt, Artificial Sequence
  Description of Artificial Sequence: Synthetic oligonucleotide
  Antisense strand to SEQ ID NO: 53910
ucaauugcagauuugcagg

SEQ ID NO: 53992 - RNA, 19 nt, Artificial Sequence
  Description of Artificial Sequence: Synthetic oligonucleotide
  Sense strand starting at position 1488 of SEQ ID NO: 651
agauguucucuugacaguc

SEQ ID NO: 53993 - RNA, 19 nt, Artificial Sequence
  Description of Artificial Sequence: Synthetic oligonucleotide
  Antisense strand to SEQ ID NO: 53912
gacugucaagagaacaucu

SEQ ID NO: 53994 - RNA, 19 nt, Artificial Sequence
  Description of Artificial Sequence: Synthetic oligonucleotide
  Sense strand starting at position 1329 of SEQ ID NO: 651
uuuaucuauugggacauuu

SEQ ID NO: 53995 - RNA, 19 nt, Artificial Sequence
  Description of Artificial Sequence: Synthetic oligonucleotide
  Antisense strand to SEQ ID NO: 53914
aaaugucccaauagauaaa

SEQ ID NO: 53996 - RNA, 19 nt, Artificial Sequence
  Description of Artificial Sequence: Synthetic oligonucleotide
  Sense strand starting at position 1317 of SEQ ID NO: 651
guaauuugcucguuuaucu

SEQ ID NO: 53997 - RNA, 19 nt, Artificial Sequence
  Description of Artificial Sequence: Synthetic oligonucleotide
  Antisense strand to SEQ ID NO: 53916
agauaaacgagcaaauuac

SEQ ID NO: 53998 - RNA, 19 nt, Artificial Sequence
  Description of Artificial Sequence: Synthetic oligonucleotide
  Sense strand starting at position 1315 of SEQ ID NO: 651
auguaauuugcucguuuau

SEQ ID NO: 53999 - RNA, 19 nt, Artificial Sequence
  Description of Artificial Sequence: Synthetic oligonucleotide
  Antisense strand to SEQ ID NO: 53918
auaaacgagcaaauuacau

SEQ ID NO: 54000 - RNA, 19 nt, Artificial Sequence
  Description of Artificial Sequence: Synthetic oligonucleotide
  Sense strand starting at position 1314 of SEQ ID NO: 651
uauguaauuugcucguuua

SEQ ID NO: 54001 - RNA, 19 nt, Artificial Sequence
  Description of Artificial Sequence: Synthetic oligonucleotide
  Antisense strand to SEQ ID NO: 53920
uaaacgagcaaauuacaua

SEQ ID NO: 54002 - RNA, 19 nt, Artificial Sequence
  Description of Artificial Sequence: Synthetic oligonucleotide
  Sense strand starting at position 1313 of SEQ ID NO: 651
cuauguaauuugcucguuu

SEQ ID NO: 54003 - RNA, 19 nt, Artificial Sequence
  Description of Artificial Sequence: Synthetic oligonucleotide
  Antisense strand to SEQ ID NO: 53922
aaacgagcaaauuacauag

SEQ ID NO: 54004 - RNA, 19 nt, Artificial Sequence
  Description of Artificial Sequence: Synthetic oligonucleotide
  Sense strand starting at position 1272 of SEQ ID NO: 651
uugauuacucacugguuau

SEQ ID NO: 54005 - RNA, 19 nt, Artificial Sequence
  Description of Artificial Sequence: Synthetic oligonucleotide
  Antisense strand to SEQ ID NO: 53924
auaaccagugaguaaucaa

SEQ ID NO: 54006 - RNA, 19 nt, Artificial Sequence
  Description of Artificial Sequence: Synthetic oligonucleotide
  Sense strand starting at position 1271 of SEQ ID NO: 651
uuugauuacucacugguua

SEQ ID NO: 54007 - RNA, 19 nt, Artificial Sequence
  Description of Artificial Sequence: Synthetic oligonucleotide
  Antisense strand to SEQ ID NO: 53926
uaaccagugaguaaucaaa

SEQ ID NO: 54008 - RNA, 19 nt, Artificial Sequence
  Description of Artificial Sequence: Synthetic oligonucleotide
  Sense strand starting at position 1035 of SEQ ID NO: 651
auucuuaggccuuaaguuu

SEQ ID NO: 54009 - RNA, 19 nt, Artificial Sequence
  Description of Artificial Sequence: Synthetic oligonucleotide
  Antisense strand to SEQ ID NO: 53928
aaacuuaaggccuaagaau

SEQ ID NO: 54010 - RNA, 19 nt, Artificial Sequence
  Description of Artificial Sequence: Synthetic oligonucleotide
  Sense strand starting at position 1031 of SEQ ID NO: 651
uuagauucuuaggccuuaa

SEQ ID NO: 54011 - RNA, 19 nt, Artificial Sequence
  Description of Artificial Sequence: Synthetic oligonucleotide
  Antisense strand to SEQ ID NO: 53930
uuaaggccuaagaaucuaa

SEQ ID NO: 54012 - RNA, 19 nt, Artificial Sequence
  Description of Artificial Sequence: Synthetic oligonucleotide
  Sense strand starting at position 1018 of SEQ ID NO: 651
uuaagcaagucacuuagau

SEQ ID NO: 54013 - RNA, 19 nt, Artificial Sequence
  Description of Artificial Sequence: Synthetic oligonucleotide
  Antisense strand to SEQ ID NO: 53932
aucuaagugacuugcuuaa

SEQ ID NO: 54014 - RNA, 19 nt, Artificial Sequence
  Description of Artificial Sequence: Synthetic oligonucleotide
  Sense strand starting at position 684 of SEQ ID NO: 651
ccuuacugcucugugauuu

SEQ ID NO: 54015 - RNA, 19 nt, Artificial Sequence
  Description of Artificial Sequence: Synthetic oligonucleotide
  Antisense strand to SEQ ID NO: 53934
aaaucacagagcaguaagg

SEQ ID NO: 54016 - RNA, 19 nt, Artificial Sequence
  Description of Artificial Sequence: Synthetic oligonucleotide
  Sense strand starting at position 6 of SEQ ID NO: 651
gucaaaucaucuguaauuc

SEQ ID NO: 54017 - RNA, 19 nt, Artificial Sequence
  Description of Artificial Sequence: Synthetic oligonucleotide
  Antisense strand to SEQ ID NO: 53936
gaauuacagaugauuugac

SEQ ID NO: 54018 - RNA, 19 nt, Artificial Sequence
  Description of Artificial Sequence: Synthetic oligonucleotide
  Sense strand starting at position 43 of SEQ ID NO: 653
aguugaagaucagccuaau

SEQ ID NO: 54019 - RNA, 19 nt, Artificial Sequence
  Description of Artificial Sequence: Synthetic oligonucleotide
  Antisense strand to SEQ ID NO: 53938
auuaggcugaucuucaacu

SEQ ID NO: 54020 - RNA, 19 nt, Artificial Sequence
  Description of Artificial Sequence: Synthetic oligonucleotide
  Sense strand starting at position 157 of SEQ ID NO: 653
aaaugaaguuucuagacag

SEQ ID NO: 54021 - RNA, 19 nt, Artificial Sequence
  Description of Artificial Sequence: Synthetic oligonucleotide
  Antisense strand to SEQ ID NO: 53940
cugucuagaaacuucauuu

SEQ ID NO: 54022 - RNA, 19 nt, Artificial Sequence
  Description of Artificial Sequence: Synthetic oligonucleotide
  Sense strand starting at position 319 of SEQ ID NO: 653
uuuaguaagucugcccaga

SEQ ID NO: 54023 - RNA, 19 nt, Artificial Sequence
  Description of Artificial Sequence: Synthetic oligonucleotide
  Antisense strand to SEQ ID NO: 53942
ucugggcagacuuacuaaa

SEQ ID NO: 54024 - RNA, 19 nt, Artificial Sequence
  Description of Artificial Sequence: Synthetic oligonucleotide
  Sense strand starting at position 321 of SEQ ID NO: 653
uaguaagucugcccagauu

SEQ ID NO: 54025 - RNA, 19 nt, Artificial Sequence
  Description of Artificial Sequence: Synthetic oligonucleotide
  Antisense strand to SEQ ID NO: 53944
aaucugggcagacuuacua

SEQ ID NO: 54026 - RNA, 19 nt, Artificial Sequence
  Description of Artificial Sequence: Synthetic oligonucleotide
  Sense strand starting at position 411 of SEQ ID NO: 653
guuauacuguacuugcaau

SEQ ID NO: 54027 - RNA, 19 nt, Artificial Sequence
  Description of Artificial Sequence: Synthetic oligonucleotide
  Antisense strand to SEQ ID NO: 53946
auugcaaguacaguauaac

SEQ ID NO: 54028 - RNA, 19 nt, Artificial Sequence
  Description of Artificial Sequence: Synthetic oligonucleotide
  Sense strand starting at position 421 of SEQ ID NO: 653
acuugcaauguuuguuuaa

SEQ ID NO: 54029 - RNA, 19 nt, Artificial Sequence
  Description of Artificial Sequence: Synthetic oligonucleotide
  Antisense strand to SEQ ID NO: 53948
uuaaacaaacauugcaagu

SEQ ID NO: 54030 - RNA, 19 nt, Artificial Sequence
  Description of Artificial Sequence: Synthetic oligonucleotide
  Sense strand starting at position 422 of SEQ ID NO: 653
cuugcaauguuuguuuaaa

SEQ ID NO: 54031 - RNA, 19 nt, Artificial Sequence
  Description of Artificial Sequence: Synthetic oligonucleotide
  Antisense strand to SEQ ID NO: 53950
uuuaaacaaacauugcaag

SEQ ID NO: 54032 - RNA, 19 nt, Artificial Sequence
  Description of Artificial Sequence: Synthetic oligonucleotide
  Sense strand starting at position 442 of SEQ ID NO: 653
ugcugauaucugggccaua

SEQ ID NO: 54033 - RNA, 19 nt, Artificial Sequence
  Description of Artificial Sequence: Synthetic oligonucleotide
  Antisense strand to SEQ ID NO: 53952
uauggcccagauaucagca

SEQ ID NO: 54034 - RNA, 19 nt, Artificial Sequence
  Description of Artificial Sequence: Synthetic oligonucleotide
  Sense strand starting at position 443 of SEQ ID NO: 653
gcugauaucugggccauau

SEQ ID NO: 54035 - RNA, 19 nt, Artificial Sequence
  Description of Artificial Sequence: Synthetic oligonucleotide
  Antisense strand to SEQ ID NO: 53954
auauggcccagauaucagc

SEQ ID NO: 54036 - RNA, 19 nt, Artificial Sequence
  Description of Artificial Sequence: Synthetic oligonucleotide
  Sense strand starting at position 454 of SEQ ID NO: 653
ggccauauuccagauccaa

SEQ ID NO: 54037 - RNA, 19 nt, Artificial Sequence
  Description of Artificial Sequence: Synthetic oligonucleotide
  Antisense strand to SEQ ID NO: 53956
uuggaucuggaauauggcc

SEQ ID NO: 54038 - RNA, 19 nt, Artificial Sequence
  Description of Artificial Sequence: Synthetic oligonucleotide
  Sense strand starting at position 1031 of SEQ ID NO: 653
uugggacuuaccuggcgau

SEQ ID NO: 54039 - RNA, 19 nt, Artificial Sequence
  Description of Artificial Sequence: Synthetic oligonucleotide
  Antisense strand to SEQ ID NO: 53958
aucgccagguaagucccaa

SEQ ID NO: 54040 - RNA, 19 nt, Artificial Sequence
  Description of Artificial Sequence: Synthetic oligonucleotide
  Sense strand starting at position 1147 of SEQ ID NO: 653
gacaguucgagugaagucu

SEQ ID NO: 54041 - RNA, 19 nt, Artificial Sequence
  Description of Artificial Sequence: Synthetic oligonucleotide
  Antisense strand to SEQ ID NO: 53960
agacuucacucgaacuguc

SEQ ID NO: 54042 - RNA, 19 nt, Artificial Sequence
  Description of Artificial Sequence: Synthetic oligonucleotide
  Sense strand starting at position 1467 of SEQ ID NO: 653
agauguuucccgcacugga

SEQ ID NO: 54043 - RNA, 19 nt, Artificial Sequence
  Description of Artificial Sequence: Synthetic oligonucleotide
  Antisense strand to SEQ ID NO: 53962
uccagugcgggaaacaucu

SEQ ID NO: 54044 - RNA, 19 nt, Artificial Sequence
  Description of Artificial Sequence: Synthetic oligonucleotide
  Sense strand starting at position 1511 of SEQ ID NO: 653
uucugcucgccagaaauca

SEQ ID NO: 54045 - RNA, 19 nt, Artificial Sequence
  Description of Artificial Sequence: Synthetic oligonucleotide
  Antisense strand to SEQ ID NO: 53964
ugauuucuggcgagcagaa

SEQ ID NO: 54046 - RNA, 19 nt, Artificial Sequence
  Description of Artificial Sequence: Synthetic oligonucleotide
  Sense strand starting at position 2206 of SEQ ID NO: 653
cgaccucuucuccgggaaa

SEQ ID NO: 54047 - RNA, 19 nt, Artificial Sequence
  Description of Artificial Sequence: Synthetic oligonucleotide
  Antisense strand to SEQ ID NO: 53966
uuucccggagaagaggucg

SEQ ID NO: 54048 - RNA, 19 nt, Artificial Sequence
  Description of Artificial Sequence: Synthetic oligonucleotide
  Sense strand starting at position 2209 of SEQ ID NO: 653
ccucuucuccgggaaacca

SEQ ID NO: 54049 - RNA, 19 nt, Artificial Sequence
  Description of Artificial Sequence: Synthetic oligonucleotide
  Antisense strand to SEQ ID NO: 53968
ugguuucccggagaagagg

SEQ ID NO: 54050 - RNA, 19 nt, Artificial Sequence
  Description of Artificial Sequence: Synthetic oligonucleotide
  Sense strand starting at position 2340 of SEQ ID NO: 653
cuuugacuuucggucugaa

SEQ ID NO: 54051 - RNA, 19 nt, Artificial Sequence
  Description of Artificial Sequence: Synthetic oligonucleotide
  Antisense strand to SEQ ID NO: 53970
uucagaccgaaagucaaag

SEQ ID NO: 54052 - RNA, 19 nt, Artificial Sequence
  Description of Artificial Sequence: Synthetic oligonucleotide
  Sense strand starting at position 2421 of SEQ ID NO: 653
cuaccugugacuuguagag

SEQ ID NO: 54053 - RNA, 19 nt, Artificial Sequence
  Description of Artificial Sequence: Synthetic oligonucleotide
  Antisense strand to SEQ ID NO: 53972
cucuacaagucacagguag

SEQ ID NO: 54054 - RNA, 19 nt, Artificial Sequence
  Description of Artificial Sequence: Synthetic oligonucleotide
  Sense strand starting at position 2530 of SEQ ID NO: 653
gaguauaacgcaugcuaaa

SEQ ID NO: 54055 - RNA, 19 nt, Artificial Sequence
  Description of Artificial Sequence: Synthetic oligonucleotide
  Antisense strand to SEQ ID NO: 53974
uuuagcaugcguuauacuc

SEQ ID NO: 54056 - RNA, 19 nt, Artificial Sequence
  Description of Artificial Sequence: Synthetic oligonucleotide
  Sense strand starting at position 2608 of SEQ ID NO: 653
aacuuagagugacauagau

SEQ ID NO: 54057 - RNA, 19 nt, Artificial Sequence
  Description of Artificial Sequence: Synthetic oligonucleotide
  Antisense strand to SEQ ID NO: 53976
aucuaugucacucuaaguu

SEQ ID NO: 54058 - RNA, 19 nt, Artificial Sequence
  Description of Artificial Sequence: Synthetic oligonucleotide
  Sense strand starting at position 2658 of SEQ ID NO: 653
gcuaguuauugggccuuaa

SEQ ID NO: 54059 - RNA, 19 nt, Artificial Sequence
  Description of Artificial Sequence: Synthetic oligonucleotide
  Antisense strand to SEQ ID NO: 53978
uuaaggcccaauaacuagc

SEQ ID NO: 54060 - RNA, 19 nt, Artificial Sequence
  Description of Artificial Sequence: Synthetic oligonucleotide
  Sense strand starting at position 2692 of SEQ ID NO: 653
uuguucuagggcuacauaa

SEQ ID NO: 54061 - RNA, 19 nt, Artificial Sequence
  Description of Artificial Sequence: Synthetic oligonucleotide
  Antisense strand to SEQ ID NO: 53980
uuauguagcccuagaacaa

SEQ ID NO: 54062 - RNA, 19 nt, Artificial Sequence
  Description of Artificial Sequence: Synthetic oligonucleotide
  Sense strand starting at position 2694 of SEQ ID NO: 653
guucuagggcuacauaaga

SEQ ID NO: 54063 - RNA, 19 nt, Artificial Sequence
  Description of Artificial Sequence: Synthetic oligonucleotide
  Antisense strand to SEQ ID NO: 53982
ucuuauguagcccuagaac

SEQ ID NO: 54064 - RNA, 19 nt, Artificial Sequence
  Description of Artificial Sequence: Synthetic oligonucleotide
  Sense strand starting at position 2819 of SEQ ID NO: 653
auacaucucccuuguguuu

SEQ ID NO: 54065 - RNA, 19 nt, Artificial Sequence
  Description of Artificial Sequence: Synthetic oligonucleotide
  Antisense strand to SEQ ID NO: 53984
aaacacaagggagauguau

SEQ ID NO: 54066 - RNA, 19 nt, Artificial Sequence
  Description of Artificial Sequence: Synthetic oligonucleotide
  Sense strand starting at position 2831 of SEQ ID NO: 653
uguguuuauguagcgugua

SEQ ID NO: 54067 - RNA, 19 nt, Artificial Sequence
  Description of Artificial Sequence: Synthetic oligonucleotide
  Antisense strand to SEQ ID NO: 53986
uacacgcuacauaaacaca

SEQ ID NO: 54068 - RNA, 19 nt, Artificial Sequence
  Description of Artificial Sequence: Synthetic oligonucleotide
  Sense strand starting at position 2833 of SEQ ID NO: 653
uguuuauguagcguguauu

SEQ ID NO: 54069 - RNA, 19 nt, Artificial Sequence
  Description of Artificial Sequence: Synthetic oligonucleotide
  Antisense strand to SEQ ID NO: 53988
aauacacgcuacauaaaca

SEQ ID NO: 54070 - RNA, 19 nt, Artificial Sequence
  Description of Artificial Sequence: Synthetic oligonucleotide
  Sense strand starting at position 2843 of SEQ ID NO: 653
gcguguauuaguuucucau

SEQ ID NO: 54071 - RNA, 19 nt, Artificial Sequence
  Description of Artificial Sequence: Synthetic oligonucleotide
  Antisense strand to SEQ ID NO: 53990
augagaaacuaauacacgc

SEQ ID NO: 54072 - RNA, 19 nt, Artificial Sequence
  Description of Artificial Sequence: Synthetic oligonucleotide
  Sense strand starting at position 2845 of SEQ ID NO: 653
guguauuaguuucucauug

SEQ ID NO: 54073 - RNA, 19 nt, Artificial Sequence
  Description of Artificial Sequence: Synthetic oligonucleotide
  Antisense strand to SEQ ID NO: 53992
caaugagaaacuaauacac

SEQ ID NO: 54074 - RNA, 19 nt, Artificial Sequence
  Description of Artificial Sequence: Synthetic oligonucleotide
  Sense strand starting at position 2846 of SEQ ID NO: 653
uguauuaguuucucauuga

SEQ ID NO: 54075 - RNA, 19 nt, Artificial Sequence
  Description of Artificial Sequence: Synthetic oligonucleotide
  Antisense strand to SEQ ID NO: 53994
ucaaugagaaacuaauaca

SEQ ID NO: 54076 - RNA, 19 nt, Artificial Sequence
  Description of Artificial Sequence: Synthetic oligonucleotide
  Sense strand starting at position 2850 of SEQ ID NO: 653
uuaguuucucauugaugcu

SEQ ID NO: 54077 - RNA, 19 nt, Artificial Sequence
  Description of Artificial Sequence: Synthetic oligonucleotide
  Antisense strand to SEQ ID NO: 53996
agcaucaaugagaaacuaa

SEQ ID NO: 54078 - RNA, 19 nt, Artificial Sequence
  Description of Artificial Sequence: Synthetic oligonucleotide
  Sense strand starting at position 2975 of SEQ ID NO: 653
ggaggcucucagggacaau

SEQ ID NO: 54079 - RNA, 19 nt, Artificial Sequence
  Description of Artificial Sequence: Synthetic oligonucleotide
  Antisense strand to SEQ ID NO: 53998
auugucccugagagccucc

SEQ ID NO: 54080 - RNA, 19 nt, Artificial Sequence
  Description of Artificial Sequence: Synthetic oligonucleotide
  Sense strand starting at position 2986 of SEQ ID NO: 653
gggacaauguguuuccuua

SEQ ID NO: 54081 - RNA, 19 nt, Artificial Sequence
  Description of Artificial Sequence: Synthetic oligonucleotide
  Antisense strand to SEQ ID NO: 54000
uaaggaaacacauuguccc

SEQ ID NO: 54082 - RNA, 19 nt, Artificial Sequence
  Description of Artificial Sequence: Synthetic oligonucleotide
  Sense strand starting at position 3137 of SEQ ID NO: 653
uugugauuacauugguuac

SEQ ID NO: 54083 - RNA, 19 nt, Artificial Sequence
  Description of Artificial Sequence: Synthetic oligonucleotide
  Antisense strand to SEQ ID NO: 54002
guaaccaauguaaucacaa

SEQ ID NO: 54084 - RNA, 19 nt, Artificial Sequence
  Description of Artificial Sequence: Synthetic oligonucleotide
  Sense strand starting at position 3140 of SEQ ID NO: 653
ugauuacauugguuacaga

SEQ ID NO: 54085 - RNA, 19 nt, Artificial Sequence
  Description of Artificial Sequence: Synthetic oligonucleotide
  Antisense strand to SEQ ID NO: 54004
ucuguaaccaauguaauca

SEQ ID NO: 54086 - RNA, 19 nt, Artificial Sequence
  Description of Artificial Sequence: Synthetic oligonucleotide
  Sense strand starting at position 3241 of SEQ ID NO: 653
agauuaggaugaggauuua

SEQ ID NO: 54087 - RNA, 19 nt, Artificial Sequence
  Description of Artificial Sequence: Synthetic oligonucleotide
  Antisense strand to SEQ ID NO: 54006
uaaauccucauccuaaucu

SEQ ID NO: 54088 - RNA, 19 nt, Artificial Sequence
  Description of Artificial Sequence: Synthetic oligonucleotide
  Sense strand starting at position 3257 of SEQ ID NO: 653
uuauaaauagagggucauu

SEQ ID NO: 54089 - RNA, 19 nt, Artificial Sequence
  Description of Artificial Sequence: Synthetic oligonucleotide
  Antisense strand to SEQ ID NO: 54008
aaugacccucuauuuauaa

SEQ ID NO: 54090 - RNA, 19 nt, Artificial Sequence
  Description of Artificial Sequence: Synthetic oligonucleotide
  Sense strand starting at position 3895 of SEQ ID NO: 653
uuaucaaguuugguagacu

SEQ ID NO: 54091 - RNA, 19 nt, Artificial Sequence
  Description of Artificial Sequence: Synthetic oligonucleotide
  Antisense strand to SEQ ID NO: 54010
agucuaccaaacuugauaa

SEQ ID NO: 54092 - RNA, 19 nt, Artificial Sequence
  Description of Artificial Sequence: Synthetic oligonucleotide
  Sense strand starting at position 3928 of SEQ ID NO: 653
uugucugugcuguauuuga

SEQ ID NO: 54093 - RNA, 19 nt, Artificial Sequence
  Description of Artificial Sequence: Synthetic oligonucleotide
  Antisense strand to SEQ ID NO: 54012
ucaaauacagcacagacaa

SEQ ID NO: 54094 - RNA, 19 nt, Artificial Sequence
  Description of Artificial Sequence: Synthetic oligonucleotide
  Sense strand starting at position 3938 of SEQ ID NO: 653
uguauuugagguugucaau

SEQ ID NO: 54095 - RNA, 19 nt, Artificial Sequence
  Description of Artificial Sequence: Synthetic oligonucleotide
  Antisense strand to SEQ ID NO: 54014
auugacaaccucaaauaca

SEQ ID NO: 54096 - RNA, 19 nt, Artificial Sequence
  Description of Artificial Sequence: Synthetic oligonucleotide
  Sense strand starting at position 3941 of SEQ ID NO: 653
auuugagguugucaauaac

SEQ ID NO: 54097 - RNA, 19 nt, Artificial Sequence
  Description of Artificial Sequence: Synthetic oligonucleotide
  Antisense strand to SEQ ID NO: 54016
guuauugacaaccucaaau

SEQ ID NO: 54098 - RNA, 19 nt, Artificial Sequence
  Description of Artificial Sequence: Synthetic oligonucleotide
  Sense strand starting at position 226 of SEQ ID NO: 654
ucuaauauaucugucaggu

SEQ ID NO: 54099 - RNA, 19 nt, Artificial Sequence
  Description of Artificial Sequence: Synthetic oligonucleotide
  Antisense strand to SEQ ID NO: 54018
accugacagauauauuaga

SEQ ID NO: 54100 - RNA, 19 nt, Artificial Sequence
  Description of Artificial Sequence: Synthetic oligonucleotide
  Sense strand starting at position 243 of SEQ ID NO: 654
guuauaaaucguuagucua

SEQ ID NO: 54101 - RNA, 19 nt, Artificial Sequence
  Description of Artificial Sequence: Synthetic oligonucleotide
  Antisense strand to SEQ ID NO: 54020
uagacuaacgauuuauaac

SEQ ID NO: 54102 - RNA, 19 nt, Artificial Sequence
  Description of Artificial Sequence: Synthetic oligonucleotide
  Sense strand starting at position 245 of SEQ ID NO: 654
uauaaaucguuagucuaag

SEQ ID NO: 54103 - RNA, 19 nt, Artificial Sequence
  Description of Artificial Sequence: Synthetic oligonucleotide
  Antisense strand to SEQ ID NO: 54022
cuuagacuaacgauuuaua

SEQ ID NO: 54104 - RNA, 19 nt, Artificial Sequence
  Description of Artificial Sequence: Synthetic oligonucleotide
  Sense strand starting at position 246 of SEQ ID NO: 654
auaaaucguuagucuaaga

SEQ ID NO: 54105 - RNA, 19 nt, Artificial Sequence
  Description of Artificial Sequence: Synthetic oligonucleotide
  Antisense strand to SEQ ID NO: 54024
ucuuagacuaacgauuuau

SEQ ID NO: 54106 - RNA, 19 nt, Artificial Sequence
  Description of Artificial Sequence: Synthetic oligonucleotide
  Sense strand starting at position 339 of SEQ ID NO: 654
gacaaauaguuucugaagu

SEQ ID NO: 54107 - RNA, 19 nt, Artificial Sequence
  Description of Artificial Sequence: Synthetic oligonucleotide
  Antisense strand to SEQ ID NO: 54026
acuucagaaacuauuuguc

SEQ ID NO: 54108 - RNA, 19 nt, Artificial Sequence
  Description of Artificial Sequence: Synthetic oligonucleotide
  Sense strand starting at position 349 of SEQ ID NO: 654
uucugaaguccaugcuaaa

SEQ ID NO: 54109 - RNA, 19 nt, Artificial Sequence
  Description of Artificial Sequence: Synthetic oligonucleotide
  Antisense strand to SEQ ID NO: 54028
uuuagcauggacuucagaa

SEQ ID NO: 54110 - RNA, 19 nt, Artificial Sequence
  Description of Artificial Sequence: Synthetic oligonucleotide
  Sense strand starting at position 389 of SEQ ID NO: 654
acuugcuaauaucuggaaa

SEQ ID NO: 54111 - RNA, 19 nt, Artificial Sequence
  Description of Artificial Sequence: Synthetic oligonucleotide
  Antisense strand to SEQ ID NO: 54030
uuuccagauauuagcaagu

SEQ ID NO: 54112 - RNA, 19 nt, Artificial Sequence
  Description of Artificial Sequence: Synthetic oligonucleotide
  Sense strand starting at position 444 of SEQ ID NO: 654
gccagcauguuagcaagaa

SEQ ID NO: 54113 - RNA, 19 nt, Artificial Sequence
  Description of Artificial Sequence: Synthetic oligonucleotide
  Antisense strand to SEQ ID NO: 54032
uucuugcuaacaugcuggc

SEQ ID NO: 54114 - RNA, 19 nt, Artificial Sequence
  Description of Artificial Sequence: Synthetic oligonucleotide
  Sense strand starting at position 448 of SEQ ID NO: 654
gcauguuagcaagaaacca

SEQ ID NO: 54115 - RNA, 19 nt, Artificial Sequence
  Description of Artificial Sequence: Synthetic oligonucleotide
  Antisense strand to SEQ ID NO: 54034
ugguuucuugcuaacaugc

SEQ ID NO: 54116 - RNA, 19 nt, Artificial Sequence
  Description of Artificial Sequence: Synthetic oligonucleotide
  Sense strand starting at position 684 of SEQ ID NO: 654
gaacauuuguucuggaagg

SEQ ID NO: 54117 - RNA, 19 nt, Artificial Sequence
  Description of Artificial Sequence: Synthetic oligonucleotide
  Antisense strand to SEQ ID NO: 54036
ccuuccagaacaaauguuc

SEQ ID NO: 54118 - RNA, 19 nt, Artificial Sequence
  Description of Artificial Sequence: Synthetic oligonucleotide
  Sense strand starting at position 738 of SEQ ID NO: 654
cccugacaguugccuagaa

SEQ ID NO: 54119 - RNA, 19 nt, Artificial Sequence
  Description of Artificial Sequence: Synthetic oligonucleotide
  Antisense strand to SEQ ID NO: 54038
uucuaggcaacugucaggg

SEQ ID NO: 54120 - RNA, 19 nt, Artificial Sequence
  Description of Artificial Sequence: Synthetic oligonucleotide
  Sense strand starting at position 739 of SEQ ID NO: 654
ccugacaguugccuagaaa

SEQ ID NO: 54121 - RNA, 19 nt, Artificial Sequence
  Description of Artificial Sequence: Synthetic oligonucleotide
  Antisense strand to SEQ ID NO: 54040
uuucuaggcaacugucagg

SEQ ID NO: 54122 - RNA, 19 nt, Artificial Sequence
  Description of Artificial Sequence: Synthetic oligonucleotide
  Sense strand starting at position 740 of SEQ ID NO: 654
cugacaguugccuagaaac

SEQ ID NO: 54123 - RNA, 19 nt, Artificial Sequence
  Description of Artificial Sequence: Synthetic oligonucleotide
  Antisense strand to SEQ ID NO: 54042
guuucuaggcaacugucag

SEQ ID NO: 54124 - RNA, 19 nt, Artificial Sequence
  Description of Artificial Sequence: Synthetic oligonucleotide
  Sense strand starting at position 742 of SEQ ID NO: 654
gacaguugccuagaaacca

SEQ ID NO: 54125 - RNA, 19 nt, Artificial Sequence
  Description of Artificial Sequence: Synthetic oligonucleotide
  Antisense strand to SEQ ID NO: 54044
ugguuucuaggcaacuguc

SEQ ID NO: 54126 - RNA, 19 nt, Artificial Sequence
  Description of Artificial Sequence: Synthetic oligonucleotide
  Sense strand starting at position 780 of SEQ ID NO: 654
gcagguguaccucaaguca

SEQ ID NO: 54127 - RNA, 19 nt, Artificial Sequence
  Description of Artificial Sequence: Synthetic oligonucleotide
  Antisense strand to SEQ ID NO: 54046
ugacuugagguacaccugc

SEQ ID NO: 54128 - RNA, 19 nt, Artificial Sequence
  Description of Artificial Sequence: Synthetic oligonucleotide
  Sense strand starting at position 833 of SEQ ID NO: 654
cugacuuaaguuuaugacu

SEQ ID NO: 54129 - RNA, 19 nt, Artificial Sequence
  Description of Artificial Sequence: Synthetic oligonucleotide
  Antisense strand to SEQ ID NO: 54048
agucauaaacuuaagucag

SEQ ID NO: 54130 - RNA, 19 nt, Artificial Sequence
  Description of Artificial Sequence: Synthetic oligonucleotide
  Sense strand starting at position 877 of SEQ ID NO: 654
guaagagacugguuucuuu

SEQ ID NO: 54131 - RNA, 19 nt, Artificial Sequence
  Description of Artificial Sequence: Synthetic oligonucleotide
  Antisense strand to SEQ ID NO: 54050
aaagaaaccagucucuuac

SEQ ID NO: 54132 - RNA, 19 nt, Artificial Sequence
  Description of Artificial Sequence: Synthetic oligonucleotide
  Sense strand starting at position 952 of SEQ ID NO: 654
cgguuaaagagucaucuaa

SEQ ID NO: 54133 - RNA, 19 nt, Artificial Sequence
  Description of Artificial Sequence: Synthetic oligonucleotide
  Antisense strand to SEQ ID NO: 54052
uuagaugacucuuuaaccg

SEQ ID NO: 54134 - RNA, 19 nt, Artificial Sequence
  Description of Artificial Sequence: Synthetic oligonucleotide
  Sense strand starting at position 954 of SEQ ID NO: 654
guuaaagagucaucuaauu

SEQ ID NO: 54135 - RNA, 19 nt, Artificial Sequence
  Description of Artificial Sequence: Synthetic oligonucleotide
  Antisense strand to SEQ ID NO: 54054
aauuagaugacucuuuaac

SEQ ID NO: 54136 - RNA, 19 nt, Artificial Sequence
  Description of Artificial Sequence: Synthetic oligonucleotide
  Sense strand starting at position 971 of SEQ ID NO: 654
uuuguacagggcuaugaua

SEQ ID NO: 54137 - RNA, 19 nt, Artificial Sequence
  Description of Artificial Sequence: Synthetic oligonucleotide
  Antisense strand to SEQ ID NO: 54056
uaucauagcccuguacaaa

SEQ ID NO: 54138 - RNA, 19 nt, Artificial Sequence
  Description of Artificial Sequence: Synthetic oligonucleotide
  Sense strand starting at position 973 of SEQ ID NO: 654
uguacagggcuaugauaua

SEQ ID NO: 54139 - RNA, 19 nt, Artificial Sequence
  Description of Artificial Sequence: Synthetic oligonucleotide
  Antisense strand to SEQ ID NO: 54058
uauaucauagcccuguaca

SEQ ID NO: 54140 - RNA, 19 nt, Artificial Sequence
  Description of Artificial Sequence: Synthetic oligonucleotide
  Sense strand starting at position 1027 of SEQ ID NO: 654
ucacgucuugaacacauaa

SEQ ID NO: 54141 - RNA, 19 nt, Artificial Sequence
  Description of Artificial Sequence: Synthetic oligonucleotide
  Antisense strand to SEQ ID NO: 54060
uuauguguucaagacguga

SEQ ID NO: 54142 - RNA, 19 nt, Artificial Sequence
  Description of Artificial Sequence: Synthetic oligonucleotide
  Sense strand starting at position 2347 of SEQ ID NO: 654
ucaggcuccgggcaagauu

SEQ ID NO: 54143 - RNA, 19 nt, Artificial Sequence
  Description of Artificial Sequence: Synthetic oligonucleotide
  Antisense strand to SEQ ID NO: 54062
aaucuugcccggagccuga

SEQ ID NO: 54144 - RNA, 19 nt, Artificial Sequence
  Description of Artificial Sequence: Synthetic oligonucleotide
  Sense strand starting at position 2506 of SEQ ID NO: 654
aaggauagugugggaugau

SEQ ID NO: 54145 - RNA, 19 nt, Artificial Sequence
  Description of Artificial Sequence: Synthetic oligonucleotide
  Antisense strand to SEQ ID NO: 54064
aucaucccacacuauccuu

SEQ ID NO: 54146 - RNA, 19 nt, Artificial Sequence
  Description of Artificial Sequence: Synthetic oligonucleotide
  Sense strand starting at position 2970 of SEQ ID NO: 654
cucugacugcguuggaaua

SEQ ID NO: 54147 - RNA, 19 nt, Artificial Sequence
  Description of Artificial Sequence: Synthetic oligonucleotide
  Antisense strand to SEQ ID NO: 54066
uauuccaacgcagucagag

SEQ ID NO: 54148 - RNA, 19 nt, Artificial Sequence
  Description of Artificial Sequence: Synthetic oligonucleotide
  Sense strand starting at position 2971 of SEQ ID NO: 654
ucugacugcguuggaauau

SEQ ID NO: 54149 - RNA, 19 nt, Artificial Sequence
  Description of Artificial Sequence: Synthetic oligonucleotide
  Antisense strand to SEQ ID NO: 54068
auauuccaacgcagucaga

SEQ ID NO: 54150 - RNA, 19 nt, Artificial Sequence
  Description of Artificial Sequence: Synthetic oligonucleotide
  Sense strand starting at position 3212 of SEQ ID NO: 654
gcaacuuaggcuuauaguu

SEQ ID NO: 54151 - RNA, 19 nt, Artificial Sequence
  Description of Artificial Sequence: Synthetic oligonucleotide
  Antisense strand to SEQ ID NO: 54070
aacuauaagccuaaguugc

SEQ ID NO: 54152 - RNA, 19 nt, Artificial Sequence
  Description of Artificial Sequence: Synthetic oligonucleotide
  Sense strand starting at position 3222 of SEQ ID NO: 654
cuuauaguuuaaccguaaa

SEQ ID NO: 54153 - RNA, 19 nt, Artificial Sequence
  Description of Artificial Sequence: Synthetic oligonucleotide
  Antisense strand to SEQ ID NO: 54072
uuuacgguuaaacuauaag

SEQ ID NO: 54154 - RNA, 19 nt, Artificial Sequence
  Description of Artificial Sequence: Synthetic oligonucleotide
  Sense strand starting at position 3411 of SEQ ID NO: 654
agcaauaaugccugauagu

SEQ ID NO: 54155 - RNA, 19 nt, Artificial Sequence
  Description of Artificial Sequence: Synthetic oligonucleotide
  Antisense strand to SEQ ID NO: 54074
acuaucaggcauuauugcu

SEQ ID NO: 54156 - RNA, 19 nt, Artificial Sequence
  Description of Artificial Sequence: Synthetic oligonucleotide
  Sense strand starting at position 3412 of SEQ ID NO: 654
gcaauaaugccugauaguu

SEQ ID NO: 54157 - RNA, 19 nt, Artificial Sequence
  Description of Artificial Sequence: Synthetic oligonucleotide
  Antisense strand to SEQ ID NO: 54076
aacuaucaggcauuauugc

SEQ ID NO: 54158 - RNA, 19 nt, Artificial Sequence
  Description of Artificial Sequence: Synthetic oligonucleotide
  Sense strand starting at position 3417 of SEQ ID NO: 654
aaugccugauaguuagaca

SEQ ID NO: 54159 - RNA, 19 nt, Artificial Sequence
  Description of Artificial Sequence: Synthetic oligonucleotide
  Antisense strand to SEQ ID NO: 54078
ugucuaacuaucaggcauu

SEQ ID NO: 54160 - RNA, 19 nt, Artificial Sequence
  Description of Artificial Sequence: Synthetic oligonucleotide
  Sense strand starting at position 3431 of SEQ ID NO: 654
agacacugaucacuagcua

SEQ ID NO: 54161 - RNA, 19 nt, Artificial Sequence
  Description of Artificial Sequence: Synthetic oligonucleotide
  Antisense strand to SEQ ID NO: 54080
uagcuagugaucagugucu

SEQ ID NO: 54162 - RNA, 19 nt, Artificial Sequence
  Description of Artificial Sequence: Synthetic oligonucleotide
  Sense strand starting at position 3473 of SEQ ID NO: 654
augagauucuggccuuauu

SEQ ID NO: 54163 - RNA, 19 nt, Artificial Sequence
  Description of Artificial Sequence: Synthetic oligonucleotide
  Antisense strand to SEQ ID NO: 54082
aauaaggccagaaucucau

SEQ ID NO: 54164 - RNA, 19 nt, Artificial Sequence
  Description of Artificial Sequence: Synthetic oligonucleotide
  Sense strand starting at position 3476 of SEQ ID NO: 654
agauucuggccuuauuauc

SEQ ID NO: 54165 - RNA, 19 nt, Artificial Sequence
  Description of Artificial Sequence: Synthetic oligonucleotide
  Antisense strand to SEQ ID NO: 54084
gauaauaaggccagaaucu

SEQ ID NO: 54166 - RNA, 19 nt, Artificial Sequence
  Description of Artificial Sequence: Synthetic oligonucleotide
  Sense strand starting at position 3714 of SEQ ID NO: 654
uggcucuucuggcuuacaa

SEQ ID NO: 54167 - RNA, 19 nt, Artificial Sequence
  Description of Artificial Sequence: Synthetic oligonucleotide
  Antisense strand to SEQ ID NO: 54086
uuguaagccagaagagcca

SEQ ID NO: 54168 - RNA, 19 nt, Artificial Sequence
  Description of Artificial Sequence: Synthetic oligonucleotide
  Sense strand starting at position 3849 of SEQ ID NO: 654
ugcagaguuccuuaccaac

SEQ ID NO: 54169 - RNA, 19 nt, Artificial Sequence
  Description of Artificial Sequence: Synthetic oligonucleotide
  Antisense strand to SEQ ID NO: 54088
guugguaaggaacucugca

SEQ ID NO: 54170 - RNA, 19 nt, Artificial Sequence
  Description of Artificial Sequence: Synthetic oligonucleotide
  Sense strand starting at position 3917 of SEQ ID NO: 654
uuuggcgucauuuauguuu

SEQ ID NO: 54171 - RNA, 19 nt, Artificial Sequence
  Description of Artificial Sequence: Synthetic oligonucleotide
  Antisense strand to SEQ ID NO: 54090
aaacauaaaugacgccaaa

SEQ ID NO: 54172 - RNA, 19 nt, Artificial Sequence
  Description of Artificial Sequence: Synthetic oligonucleotide
  Sense strand starting at position 3923 of SEQ ID NO: 654
gucauuuauguuuguggcu

SEQ ID NO: 54173 - RNA, 19 nt, Artificial Sequence
  Description of Artificial Sequence: Synthetic oligonucleotide
  Antisense strand to SEQ ID NO: 54092
agccacaaacauaaaugac

SEQ ID NO: 54174 - RNA, 19 nt, Artificial Sequence
  Description of Artificial Sequence: Synthetic oligonucleotide
  Sense strand starting at position 3924 of SEQ ID NO: 654
ucauuuauguuuguggcuu

SEQ ID NO: 54175 - RNA, 19 nt, Artificial Sequence
  Description of Artificial Sequence: Synthetic oligonucleotide
  Antisense strand to SEQ ID NO: 54094
aagccacaaacauaaauga

SEQ ID NO: 54176 - RNA, 19 nt, Artificial Sequence
  Description of Artificial Sequence: Synthetic oligonucleotide
  Sense strand starting at position 3982 of SEQ ID NO: 654
gagaacuugccaggguaca

SEQ ID NO: 54177 - RNA, 19 nt, Artificial Sequence
  Description of Artificial Sequence: Synthetic oligonucleotide
  Antisense strand to SEQ ID NO: 54096
uguacccuggcaaguucuc

SEQ ID NO: 54178 - RNA, 19 nt, Artificial Sequence
  Description of Artificial Sequence: Synthetic oligonucleotide
  Sense strand starting at position 3974 of SEQ ID NO: 655
ugcuaugagagagguacaa

SEQ ID NO: 54179 - RNA, 19 nt, Artificial Sequence
  Description of Artificial Sequence: Synthetic oligonucleotide
  Antisense strand to SEQ ID NO: 54098
uuguaccucucucauagca

SEQ ID NO: 54180 - RNA, 19 nt, Artificial Sequence
  Description of Artificial Sequence: Synthetic oligonucleotide
  Sense strand starting at position 3767 of SEQ ID NO: 655
cuccuuucgggacaugacu

SEQ ID NO: 54181 - RNA, 19 nt, Artificial Sequence
  Description of Artificial Sequence: Synthetic oligonucleotide
  Antisense strand to SEQ ID NO: 54100
agucaugucccgaaaggag

SEQ ID NO: 54182 - RNA, 19 nt, Artificial Sequence
  Description of Artificial Sequence: Synthetic oligonucleotide
  Sense strand starting at position 3763 of SEQ ID NO: 655
cagacuccuuucgggacau

SEQ ID NO: 54183 - RNA, 19 nt, Artificial Sequence
  Description of Artificial Sequence: Synthetic oligonucleotide
  Antisense strand to SEQ ID NO: 54102
augucccgaaaggagucug

SEQ ID NO: 54184 - RNA, 19 nt, Artificial Sequence
  Description of Artificial Sequence: Synthetic oligonucleotide
  Sense strand starting at position 3718 of SEQ ID NO: 655
ccauuagugccacauguga

SEQ ID NO: 54185 - RNA, 19 nt, Artificial Sequence
  Description of Artificial Sequence: Synthetic oligonucleotide
  Antisense strand to SEQ ID NO: 54104
ucacauguggcacuaaugg

SEQ ID NO: 54186 - RNA, 19 nt, Artificial Sequence
  Description of Artificial Sequence: Synthetic oligonucleotide
  Sense strand starting at position 3694 of SEQ ID NO: 655
cugccacuguuguuaauga

SEQ ID NO: 54187 - RNA, 19 nt, Artificial Sequence
  Description of Artificial Sequence: Synthetic oligonucleotide
  Antisense strand to SEQ ID NO: 54106
ucauuaacaacaguggcag

SEQ ID NO: 54188 - RNA, 19 nt, Artificial Sequence
  Description of Artificial Sequence: Synthetic oligonucleotide
  Sense strand starting at position 3692 of SEQ ID NO: 655
cccugccacuguuguuaau

SEQ ID NO: 54189 - RNA, 19 nt, Artificial Sequence
  Description of Artificial Sequence: Synthetic oligonucleotide
  Antisense strand to SEQ ID NO: 54108
auuaacaacaguggcaggg

SEQ ID NO: 54190 - RNA, 19 nt, Artificial Sequence
  Description of Artificial Sequence: Synthetic oligonucleotide
  Sense strand starting at position 3644 of SEQ ID NO: 655
ggugaugcuuuauugcuau

SEQ ID NO: 54191 - RNA, 19 nt, Artificial Sequence
  Description of Artificial Sequence: Synthetic oligonucleotide
  Antisense strand to SEQ ID NO: 54110
auagcaauaaagcaucacc

SEQ ID NO: 54192 - RNA, 19 nt, Artificial Sequence
  Description of Artificial Sequence: Synthetic oligonucleotide
  Sense strand starting at position 3637 of SEQ ID NO: 655
agggcuaggugaugcuuua

SEQ ID NO: 54193 - RNA, 19 nt, Artificial Sequence
  Description of Artificial Sequence: Synthetic oligonucleotide
  Antisense strand to SEQ ID NO: 54112
uaaagcaucaccuagcccu

SEQ ID NO: 54194 - RNA, 19 nt, Artificial Sequence
  Description of Artificial Sequence: Synthetic oligonucleotide
  Sense strand starting at position 3323 of SEQ ID NO: 655
cccagugguuugcagacaa

SEQ ID NO: 54195 - RNA, 19 nt, Artificial Sequence
  Description of Artificial Sequence: Synthetic oligonucleotide
  Antisense strand to SEQ ID NO: 54114
uugucugcaaaccacuggg

SEQ ID NO: 54196 - RNA, 19 nt, Artificial Sequence
  Description of Artificial Sequence: Synthetic oligonucleotide
  Sense strand starting at position 3314 of SEQ ID NO: 655
ggacgcuugcccagugguu

SEQ ID NO: 54197 - RNA, 19 nt, Artificial Sequence
  Description of Artificial Sequence: Synthetic oligonucleotide
  Antisense strand to SEQ ID NO: 54116
aaccacugggcaagcgucc

SEQ ID NO: 54198 - RNA, 19 nt, Artificial Sequence
  Description of Artificial Sequence: Synthetic oligonucleotide
  Sense strand starting at position 3303 of SEQ ID NO: 655
gcuggaaucugggacgcuu

SEQ ID NO: 54199 - RNA, 19 nt, Artificial Sequence
  Description of Artificial Sequence: Synthetic oligonucleotide
  Antisense strand to SEQ ID NO: 54118
aagcgucccagauuccagc

SEQ ID NO: 54200 - RNA, 19 nt, Artificial Sequence
  Description of Artificial Sequence: Synthetic oligonucleotide
  Sense strand starting at position 3101 of SEQ ID NO: 655
gugcuaaacucauagugcu

SEQ ID NO: 54201 - RNA, 19 nt, Artificial Sequence
  Description of Artificial Sequence: Synthetic oligonucleotide
  Antisense strand to SEQ ID NO: 54120
agcacuaugaguuuagcac

SEQ ID NO: 54202 - RNA, 19 nt, Artificial Sequence
  Description of Artificial Sequence: Synthetic oligonucleotide
  Sense strand starting at position 3093 of SEQ ID NO: 655
gagucauagugcuaaacuc

SEQ ID NO: 54203 - RNA, 19 nt, Artificial Sequence
  Description of Artificial Sequence: Synthetic oligonucleotide
  Antisense strand to SEQ ID NO: 54122
gaguuuagcacuaugacuc

SEQ ID NO: 54204 - RNA, 19 nt, Artificial Sequence
  Description of Artificial Sequence: Synthetic oligonucleotide
  Sense strand starting at position 3037 of SEQ ID NO: 655
cacagucagcacuggaaau

SEQ ID NO: 54205 - RNA, 19 nt, Artificial Sequence
  Description of Artificial Sequence: Synthetic oligonucleotide
  Antisense strand to SEQ ID NO: 54124
auuuccagugcugacugug

SEQ ID NO: 54206 - RNA, 19 nt, Artificial Sequence
  Description of Artificial Sequence: Synthetic oligonucleotide
  Sense strand starting at position 2299 of SEQ ID NO: 655
cgcaauuccagaggugaug

SEQ ID NO: 54207 - RNA, 19 nt, Artificial Sequence
  Description of Artificial Sequence: Synthetic oligonucleotide
  Antisense strand to SEQ ID NO: 54126
caucaccucuggaauugcg

SEQ ID NO: 54208 - RNA, 19 nt, Artificial Sequence
  Description of Artificial Sequence: Synthetic oligonucleotide
  Sense strand starting at position 2297 of SEQ ID NO: 655
gacgcaauuccagagguga

SEQ ID NO: 54209 - RNA, 19 nt, Artificial Sequence
  Description of Artificial Sequence: Synthetic oligonucleotide
  Antisense strand to SEQ ID NO: 54128
ucaccucuggaauugcguc

SEQ ID NO: 54210 - RNA, 19 nt, Artificial Sequence
  Description of Artificial Sequence: Synthetic oligonucleotide
  Sense strand starting at position 2156 of SEQ ID NO: 655
gggcuucucuccuaauuug

SEQ ID NO: 54211 - RNA, 19 nt, Artificial Sequence
  Description of Artificial Sequence: Synthetic oligonucleotide
  Antisense strand to SEQ ID NO: 54130
caaauuaggagagaagccc

SEQ ID NO: 54212 - RNA, 19 nt, Artificial Sequence
  Description of Artificial Sequence: Synthetic oligonucleotide
  Sense strand starting at position 1235 of SEQ ID NO: 655
ggaucagugcuuugcuucu

SEQ ID NO: 54213 - RNA, 19 nt, Artificial Sequence
  Description of Artificial Sequence: Synthetic oligonucleotide
  Antisense strand to SEQ ID NO: 54132
agaagcaaagcacugaucc

SEQ ID NO: 54214 - RNA, 19 nt, Artificial Sequence
  Description of Artificial Sequence: Synthetic oligonucleotide
  Sense strand starting at position 737 of SEQ ID NO: 655
cuaaccucggccuaugaua

SEQ ID NO: 54215 - RNA, 19 nt, Artificial Sequence
  Description of Artificial Sequence: Synthetic oligonucleotide
  Antisense strand to SEQ ID NO: 54134
uaucauaggccgagguuag

SEQ ID NO: 54216 - RNA, 19 nt, Artificial Sequence
  Description of Artificial Sequence: Synthetic oligonucleotide
  Sense strand starting at position 672 of SEQ ID NO: 655
guggaaaucgguugugguu

SEQ ID NO: 54217 - RNA, 19 nt, Artificial Sequence
  Description of Artificial Sequence: Synthetic oligonucleotide
  Antisense strand to SEQ ID NO: 54136
aaccacaaccgauuuccac

SEQ ID NO: 54218 - RNA, 19 nt, Artificial Sequence
  Description of Artificial Sequence: Synthetic oligonucleotide
  Sense strand starting at position 662 of SEQ ID NO: 655
aguggucuaaguggaaauc

SEQ ID NO: 54219 - RNA, 19 nt, Artificial Sequence
  Description of Artificial Sequence: Synthetic oligonucleotide
  Antisense strand to SEQ ID NO: 54138
gauuuccacuuagaccacu

SEQ ID NO: 54220 - RNA, 19 nt, Artificial Sequence
  Description of Artificial Sequence: Synthetic oligonucleotide
  Sense strand starting at position 603 of SEQ ID NO: 655
ggcauaguaagccaguuua

SEQ ID NO: 54221 - RNA, 19 nt, Artificial Sequence
  Description of Artificial Sequence: Synthetic oligonucleotide
  Antisense strand to SEQ ID NO: 54140
uaaacuggcuuacuaugcc

SEQ ID NO: 54222 - RNA, 19 nt, Artificial Sequence
  Description of Artificial Sequence: Synthetic oligonucleotide
  Sense strand starting at position 558 of SEQ ID NO: 655
uugcuaucugaaggcagaa

SEQ ID NO: 54223 - RNA, 19 nt, Artificial Sequence
  Description of Artificial Sequence: Synthetic oligonucleotide
  Antisense strand to SEQ ID NO: 54142
uucugccuucagauagcaa

SEQ ID NO: 54224 - RNA, 19 nt, Artificial Sequence
  Description of Artificial Sequence: Synthetic oligonucleotide
  Sense strand starting at position 483 of SEQ ID NO: 655
ccaggaagcccugguaaca

SEQ ID NO: 54225 - RNA, 19 nt, Artificial Sequence
  Description of Artificial Sequence: Synthetic oligonucleotide
  Antisense strand to SEQ ID NO: 54144
uguuaccagggcuuccugg

SEQ ID NO: 54226 - RNA, 19 nt, Artificial Sequence
  Description of Artificial Sequence: Synthetic oligonucleotide
  Sense strand starting at position 138 of SEQ ID NO: 655
gguggaaacuguaaggaga

SEQ ID NO: 54227 - RNA, 19 nt, Artificial Sequence
  Description of Artificial Sequence: Synthetic oligonucleotide
  Antisense strand to SEQ ID NO: 54146
ucuccuuacaguuuccacc

SEQ ID NO: 54228 - RNA, 19 nt, Artificial Sequence
  Description of Artificial Sequence: Synthetic oligonucleotide
  Sense strand starting at position 129 of SEQ ID NO: 655
ccucuaagugguggaaacu

SEQ ID NO: 54229 - RNA, 19 nt, Artificial Sequence
  Description of Artificial Sequence: Synthetic oligonucleotide
  Antisense strand to SEQ ID NO: 54148
aguuuccaccacuuagagg

SEQ ID NO: 54230 - RNA, 19 nt, Artificial Sequence
  Description of Artificial Sequence: Synthetic oligonucleotide
  Sense strand starting at position 128 of SEQ ID NO: 655
gccucuaagugguggaaac

SEQ ID NO: 54231 - RNA, 19 nt, Artificial Sequence
  Description of Artificial Sequence: Synthetic oligonucleotide
  Antisense strand to SEQ ID NO: 54150
guuuccaccacuuagaggc

SEQ ID NO: 54232 - RNA, 19 nt, Artificial Sequence
  Description of Artificial Sequence: Synthetic oligonucleotide
  Sense strand starting at position 17 of SEQ ID NO: 655
gcagaaccauggugaaaug

SEQ ID NO: 54233 - RNA, 19 nt, Artificial Sequence
  Description of Artificial Sequence: Synthetic oligonucleotide
  Antisense strand to SEQ ID NO: 54152
cauuucaccaugguucugc

SEQ ID NO: 54234 - RNA, 19 nt, Artificial Sequence
  Description of Artificial Sequence: Synthetic oligonucleotide
  Sense strand starting at position 14 of SEQ ID NO: 655
caggcagaaccauggugaa

SEQ ID NO: 54235 - RNA, 19 nt, Artificial Sequence
  Description of Artificial Sequence: Synthetic oligonucleotide
  Antisense strand to SEQ ID NO: 54154
uucaccaugguucugccug

SEQ ID NO: 54236 - RNA, 19 nt, Artificial Sequence
  Description of Artificial Sequence: Synthetic oligonucleotide
  Sense strand starting at position 80 of SEQ ID NO: 659
gcguguagccuauaaauag

SEQ ID NO: 54237 - RNA, 19 nt, Artificial Sequence
  Description of Artificial Sequence: Synthetic oligonucleotide
  Antisense strand to SEQ ID NO: 54156
cuauuuauaggcuacacgc

SEQ ID NO: 54238 - RNA, 19 nt, Artificial Sequence
  Description of Artificial Sequence: Synthetic oligonucleotide
  Sense strand starting at position 450 of SEQ ID NO: 659
cggguuucucucugggagu

SEQ ID NO: 54239 - RNA, 19 nt, Artificial Sequence
  Description of Artificial Sequence: Synthetic oligonucleotide
  Antisense strand to SEQ ID NO: 54158
acucccagagagaaacccg

SEQ ID NO: 54240 - RNA, 19 nt, Artificial Sequence
  Description of Artificial Sequence: Synthetic oligonucleotide
  Sense strand starting at position 617 of SEQ ID NO: 659
uuuccuuucccagaagcga

SEQ ID NO: 54241 - RNA, 19 nt, Artificial Sequence
  Description of Artificial Sequence: Synthetic oligonucleotide
  Antisense strand to SEQ ID NO: 54160
ucgcuucugggaaaggaaa

SEQ ID NO: 54242 - RNA, 19 nt, Artificial Sequence
  Description of Artificial Sequence: Synthetic oligonucleotide
  Sense strand starting at position 747 of SEQ ID NO: 659
aagccugagcugcgagaua

SEQ ID NO: 54243 - RNA, 19 nt, Artificial Sequence
  Description of Artificial Sequence: Synthetic oligonucleotide
  Antisense strand to SEQ ID NO: 54162
uaucucgcagcucaggcuu

SEQ ID NO: 54244 - RNA, 19 nt, Artificial Sequence
  Description of Artificial Sequence: Synthetic oligonucleotide
  Sense strand starting at position 787 of SEQ ID NO: 659
gggucuugcuuacuaauca

SEQ ID NO: 54245 - RNA, 19 nt, Artificial Sequence
  Description of Artificial Sequence: Synthetic oligonucleotide
  Antisense strand to SEQ ID NO: 54164
ugauuaguaagcaagaccc

SEQ ID NO: 54246 - RNA, 19 nt, Artificial Sequence
  Description of Artificial Sequence: Synthetic oligonucleotide
  Sense strand starting at position 880 of SEQ ID NO: 659
gaucuacuugacugagauu

SEQ ID NO: 54247 - RNA, 19 nt, Artificial Sequence
  Description of Artificial Sequence: Synthetic oligonucleotide
  Antisense strand to SEQ ID NO: 54166
aaucucagucaaguagauc

SEQ ID NO: 54248 - RNA, 19 nt, Artificial Sequence
  Description of Artificial Sequence: Synthetic oligonucleotide
  Sense strand starting at position 946 of SEQ ID NO: 659
ccggauuguggguggugau

SEQ ID NO: 54249 - RNA, 19 nt, Artificial Sequence
  Description of Artificial Sequence: Synthetic oligonucleotide
  Antisense strand to SEQ ID NO: 54168
aucaccacccacaauccgg

SEQ ID NO: 54250 - RNA, 19 nt, Artificial Sequence
  Description of Artificial Sequence: Synthetic oligonucleotide
  Sense strand starting at position 947 of SEQ ID NO: 659
cggauuguggguggugauu

SEQ ID NO: 54251 - RNA, 19 nt, Artificial Sequence
  Description of Artificial Sequence: Synthetic oligonucleotide
  Antisense strand to SEQ ID NO: 54170
aaucaccacccacaauccg

SEQ ID NO: 54252 - RNA, 19 nt, Artificial Sequence
  Description of Artificial Sequence: Synthetic oligonucleotide
  Sense strand starting at position 956 of SEQ ID NO: 659
gguggugauuggcucagua

SEQ ID NO: 54253 - RNA, 19 nt, Artificial Sequence
  Description of Artificial Sequence: Synthetic oligonucleotide
  Antisense strand to SEQ ID NO: 54172
uacugagccaaucaccacc

SEQ ID NO: 54254 - RNA, 19 nt, Artificial Sequence
  Description of Artificial Sequence: Synthetic oligonucleotide
  Sense strand starting at position 960 of SEQ ID NO: 659
gugauuggcucaguaggau

SEQ ID NO: 54255 - RNA, 19 nt, Artificial Sequence
  Description of Artificial Sequence: Synthetic oligonucleotide
  Antisense strand to SEQ ID NO: 54174
auccuacugagccaaucac

SEQ ID NO: 54256 - RNA, 19 nt, Artificial Sequence
  Description of Artificial Sequence: Synthetic oligonucleotide
  Sense strand starting at position 1066 of SEQ ID NO: 659
ugagguugcuacgcuaaau

SEQ ID NO: 54257 - RNA, 19 nt, Artificial Sequence
  Description of Artificial Sequence: Synthetic oligonucleotide
  Antisense strand to SEQ ID NO: 54176
auuuagcguagcaaccuca

SEQ ID NO: 54258 - RNA, 19 nt, Artificial Sequence
  Description of Artificial Sequence: Synthetic oligonucleotide
  Sense strand starting at position 1818 of SEQ ID NO: 659
gcgcgcuugcuuaagaguu

SEQ ID NO: 54259 - RNA, 19 nt, Artificial Sequence
  Description of Artificial Sequence: Synthetic oligonucleotide
  Antisense strand to SEQ ID NO: 54178
aacucuuaagcaagcgcgc

SEQ ID NO: 54260 - RNA, 19 nt, Artificial Sequence
  Description of Artificial Sequence: Synthetic oligonucleotide
  Sense strand starting at position 1826 of SEQ ID NO: 659
gcuuaagaguucucaaaga

SEQ ID NO: 54261 - RNA, 19 nt, Artificial Sequence
  Description of Artificial Sequence: Synthetic oligonucleotide
  Antisense strand to SEQ ID NO: 54180
ucuuugagaacucuuaagc

SEQ ID NO: 54262 - RNA, 19 nt, Artificial Sequence
  Description of Artificial Sequence: Synthetic oligonucleotide
  Sense strand starting at position 2199 of SEQ ID NO: 659
gaguccaggcuuugaaacu

SEQ ID NO: 54263 - RNA, 19 nt, Artificial Sequence
  Description of Artificial Sequence: Synthetic oligonucleotide
  Antisense strand to SEQ ID NO: 54182
aguuucaaagccuggacuc

SEQ ID NO: 54264 - RNA, 19 nt, Artificial Sequence
  Description of Artificial Sequence: Synthetic oligonucleotide
  Sense strand starting at position 2218 of SEQ ID NO: 659
gcagcaacuccgcaaagaa

SEQ ID NO: 54265 - RNA, 19 nt, Artificial Sequence
  Description of Artificial Sequence: Synthetic oligonucleotide
  Antisense strand to SEQ ID NO: 54184
uucuuugcggaguugcugc

SEQ ID NO: 54266 - RNA, 19 nt, Artificial Sequence
  Description of Artificial Sequence: Synthetic oligonucleotide
  Sense strand starting at position 2292 of SEQ ID NO: 659
guggguacucgcggcauuu

SEQ ID NO: 54267 - RNA, 19 nt, Artificial Sequence
  Description of Artificial Sequence: Synthetic oligonucleotide
  Antisense strand to SEQ ID NO: 54186
aaaugccgcgaguacccac

SEQ ID NO: 54268 - RNA, 19 nt, Artificial Sequence
  Description of Artificial Sequence: Synthetic oligonucleotide
  Sense strand starting at position 2759 of SEQ ID NO: 659
acggucuauccauauacau

SEQ ID NO: 54269 - RNA, 19 nt, Artificial Sequence
  Description of Artificial Sequence: Synthetic oligonucleotide
  Antisense strand to SEQ ID NO: 54188
auguauauggauagaccgu

SEQ ID NO: 54270 - RNA, 19 nt, Artificial Sequence
  Description of Artificial Sequence: Synthetic oligonucleotide
  Sense strand starting at position 2897 of SEQ ID NO: 659
gucggacacuaguuaacaa

SEQ ID NO: 54271 - RNA, 19 nt, Artificial Sequence
  Description of Artificial Sequence: Synthetic oligonucleotide
  Antisense strand to SEQ ID NO: 54190
uuguuaacuaguguccgac

SEQ ID NO: 54272 - RNA, 19 nt, Artificial Sequence
  Description of Artificial Sequence: Synthetic oligonucleotide
  Sense strand starting at position 2925 of SEQ ID NO: 659
cgguguuuaaaucauagcu

SEQ ID NO: 54273 - RNA, 19 nt, Artificial Sequence
  Description of Artificial Sequence: Synthetic oligonucleotide
  Antisense strand to SEQ ID NO: 54192
agcuaugauuuaaacaccg

SEQ ID NO: 54274 - RNA, 19 nt, Artificial Sequence
  Description of Artificial Sequence: Synthetic oligonucleotide
  Sense strand starting at position 2981 of SEQ ID NO: 659
gucuguuuccaaggaucug

SEQ ID NO: 54275 - RNA, 19 nt, Artificial Sequence
  Description of Artificial Sequence: Synthetic oligonucleotide
  Antisense strand to SEQ ID NO: 54194
cagauccuuggaaacagac

SEQ ID NO: 54276 - RNA, 19 nt, Artificial Sequence
  Description of Artificial Sequence: Synthetic oligonucleotide
  Sense strand starting at position 3071 of SEQ ID NO: 659
aauacuugguauucuggaa

SEQ ID NO: 54277 - RNA, 19 nt, Artificial Sequence
  Description of Artificial Sequence: Synthetic oligonucleotide
  Antisense strand to SEQ ID NO: 54196
uuccagaauaccaaguauu

SEQ ID NO: 54278 - RNA, 19 nt, Artificial Sequence
  Description of Artificial Sequence: Synthetic oligonucleotide
  Sense strand starting at position 3137 of SEQ ID NO: 659
aggugucaucaauaaggca

SEQ ID NO: 54279 - RNA, 19 nt, Artificial Sequence
  Description of Artificial Sequence: Synthetic oligonucleotide
  Antisense strand to SEQ ID NO: 54198
ugccuuauugaugacaccu

SEQ ID NO: 54280 - RNA, 19 nt, Artificial Sequence
  Description of Artificial Sequence: Synthetic oligonucleotide
  Sense strand starting at position 3240 of SEQ ID NO: 659
uguggcaucccugaaacca

SEQ ID NO: 54281 - RNA, 19 nt, Artificial Sequence
  Description of Artificial Sequence: Synthetic oligonucleotide
  Antisense strand to SEQ ID NO: 54200
ugguuucagggaugccaca

SEQ ID NO: 54282 - RNA, 19 nt, Artificial Sequence
  Description of Artificial Sequence: Synthetic oligonucleotide
  Sense strand starting at position 3250 of SEQ ID NO: 659
cugaaaccauguuaagaca

SEQ ID NO: 54283 - RNA, 19 nt, Artificial Sequence
  Description of Artificial Sequence: Synthetic oligonucleotide
  Antisense strand to SEQ ID NO: 54202
ugucuuaacaugguuucag

SEQ ID NO: 54284 - RNA, 19 nt, Artificial Sequence
  Description of Artificial Sequence: Synthetic oligonucleotide
  Sense strand starting at position 3292 of SEQ ID NO: 659
aguugacuuagagaucggu

SEQ ID NO: 54285 - RNA, 19 nt, Artificial Sequence
  Description of Artificial Sequence: Synthetic oligonucleotide
  Antisense strand to SEQ ID NO: 54204
accgaucucuaagucaacu

SEQ ID NO: 54286 - RNA, 19 nt, Artificial Sequence
  Description of Artificial Sequence: Synthetic oligonucleotide
  Sense strand starting at position 3366 of SEQ ID NO: 659
ggaaguugcaaugaacgau

SEQ ID NO: 54287 - RNA, 19 nt, Artificial Sequence
  Description of Artificial Sequence: Synthetic oligonucleotide
  Antisense strand to SEQ ID NO: 54206
aucguucauugcaacuucc

SEQ ID NO: 54288 - RNA, 19 nt, Artificial Sequence
  Description of Artificial Sequence: Synthetic oligonucleotide
  Sense strand starting at position 3378 of SEQ ID NO: 659
gaacgaugugugggagugu

SEQ ID NO: 54289 - RNA, 19 nt, Artificial Sequence
  Description of Artificial Sequence: Synthetic oligonucleotide
  Antisense strand to SEQ ID NO: 54208
acacucccacacaucguuc

SEQ ID NO: 54290 - RNA, 19 nt, Artificial Sequence
  Description of Artificial Sequence: Synthetic oligonucleotide
  Sense strand starting at position 3399 of SEQ ID NO: 659
gugaaugugggcgugcaua

SEQ ID NO: 54291 - RNA, 19 nt, Artificial Sequence
  Description of Artificial Sequence: Synthetic oligonucleotide
  Antisense strand to SEQ ID NO: 54210
uaugcacgcccacauucac

SEQ ID NO: 54292 - RNA, 19 nt, Artificial Sequence
  Description of Artificial Sequence: Synthetic oligonucleotide
  Sense strand starting at position 3438 of SEQ ID NO: 659
uguguauaggcaggagaau

SEQ ID NO: 54293 - RNA, 19 nt, Artificial Sequence
  Description of Artificial Sequence: Synthetic oligonucleotide
  Antisense strand to SEQ ID NO: 54212
auucuccugccuauacaca

SEQ ID NO: 54294 - RNA, 19 nt, Artificial Sequence
  Description of Artificial Sequence: Synthetic oligonucleotide
  Sense strand starting at position 3517 of SEQ ID NO: 659
gcucuuacucaaggucuuu

SEQ ID NO: 54295 - RNA, 19 nt, Artificial Sequence
  Description of Artificial Sequence: Synthetic oligonucleotide
  Antisense strand to SEQ ID NO: 54214
aaagaccuugaguaagagc

SEQ ID NO: 54296 - RNA, 19 nt, Artificial Sequence
  Description of Artificial Sequence: Synthetic oligonucleotide
  Sense strand starting at position 3724 of SEQ ID NO: 659
cuccgaugaggucgaugau

SEQ ID NO: 54297 - RNA, 19 nt, Artificial Sequence
  Description of Artificial Sequence: Synthetic oligonucleotide
  Antisense strand to SEQ ID NO: 54216
aucaucgaccucaucggag

SEQ ID NO: 54298 - RNA, 19 nt, Artificial Sequence
  Description of Artificial Sequence: Synthetic oligonucleotide
  Sense strand starting at position 3727 of SEQ ID NO: 659
cgaugaggucgaugaugau

SEQ ID NO: 54299 - RNA, 19 nt, Artificial Sequence
  Description of Artificial Sequence: Synthetic oligonucleotide
  Antisense strand to SEQ ID NO: 54218
aucaucaucgaccucaucg

SEQ ID NO: 54300 - RNA, 19 nt, Artificial Sequence
  Description of Artificial Sequence: Synthetic oligonucleotide
  Sense strand starting at position 3749 of SEQ ID NO: 659
aggugucuccgcgaauacu

SEQ ID NO: 54301 - RNA, 19 nt, Artificial Sequence
  Description of Artificial Sequence: Synthetic oligonucleotide
  Antisense strand to SEQ ID NO: 54220
aguauucgcggagacaccu

SEQ ID NO: 54302 - RNA, 19 nt, Artificial Sequence
  Description of Artificial Sequence: Synthetic oligonucleotide
  Sense strand starting at position 3750 of SEQ ID NO: 659
ggugucuccgcgaauacug

SEQ ID NO: 54303 - RNA, 19 nt, Artificial Sequence
  Description of Artificial Sequence: Synthetic oligonucleotide
  Antisense strand to SEQ ID NO: 54222
caguauucgcggagacacc

SEQ ID NO: 54304 - RNA, 19 nt, Artificial Sequence
  Description of Artificial Sequence: Synthetic oligonucleotide
  Sense strand starting at position 3872 of SEQ ID NO: 659
gcaagugagcuugcgguaa

SEQ ID NO: 54305 - RNA, 19 nt, Artificial Sequence
  Description of Artificial Sequence: Synthetic oligonucleotide
  Antisense strand to SEQ ID NO: 54224
uuaccgcaagcucacuugc

SEQ ID NO: 54306 - RNA, 19 nt, Artificial Sequence
  Description of Artificial Sequence: Synthetic oligonucleotide
  Sense strand starting at position 3876 of SEQ ID NO: 659
gugagcuugcgguaauuau

SEQ ID NO: 54307 - RNA, 19 nt, Artificial Sequence
  Description of Artificial Sequence: Synthetic oligonucleotide
  Antisense strand to SEQ ID NO: 54226
auaauuaccgcaagcucac

SEQ ID NO: 54308 - RNA, 19 nt, Artificial Sequence
  Description of Artificial Sequence: Synthetic oligonucleotide
  Sense strand starting at position 3885 of SEQ ID NO: 659
cgguaauuaucccuggaua

SEQ ID NO: 54309 - RNA, 19 nt, Artificial Sequence
  Description of Artificial Sequence: Synthetic oligonucleotide
  Antisense strand to SEQ ID NO: 54228
uauccagggauaauuaccg

SEQ ID NO: 54310 - RNA, 19 nt, Artificial Sequence
  Description of Artificial Sequence: Synthetic oligonucleotide
  Sense strand starting at position 3886 of SEQ ID NO: 659
gguaauuaucccuggauag

SEQ ID NO: 54311 - RNA, 19 nt, Artificial Sequence
  Description of Artificial Sequence: Synthetic oligonucleotide
  Antisense strand to SEQ ID NO: 54230
cuauccagggauaauuacc

SEQ ID NO: 54312 - RNA, 19 nt, Artificial Sequence
  Description of Artificial Sequence: Synthetic oligonucleotide
  Sense strand starting at position 3887 of SEQ ID NO: 659
guaauuaucccuggauaga

SEQ ID NO: 54313 - RNA, 19 nt, Artificial Sequence
  Description of Artificial Sequence: Synthetic oligonucleotide
  Antisense strand to SEQ ID NO: 54232
ucuauccagggauaauuac

SEQ ID NO: 54314 - RNA, 19 nt, Artificial Sequence
  Description of Artificial Sequence: Synthetic oligonucleotide
  Sense strand starting at position 3908 of SEQ ID NO: 659
aaccaaucuggcugggaga

SEQ ID NO: 54315 - RNA, 19 nt, Artificial Sequence
  Description of Artificial Sequence: Synthetic oligonucleotide
  Antisense strand to SEQ ID NO: 54234
ucucccagccagauugguu

SEQ ID NO: 54316 - RNA, 19 nt, Artificial Sequence
  Description of Artificial Sequence: Synthetic oligonucleotide
  Sense strand starting at position 285 of SEQ ID NO: 663
ucgccugcugcuucugaau

SEQ ID NO: 54317 - RNA, 19 nt, Artificial Sequence
  Description of Artificial Sequence: Synthetic oligonucleotide
  Antisense strand to SEQ ID NO: 54236
auucagaagcagcaggcga

SEQ ID NO: 54318 - RNA, 19 nt, Artificial Sequence
  Description of Artificial Sequence: Synthetic oligonucleotide
  Sense strand starting at position 334 of SEQ ID NO: 663
uggucuuugggcaguguga

SEQ ID NO: 54319 - RNA, 19 nt, Artificial Sequence
  Description of Artificial Sequence: Synthetic oligonucleotide
  Antisense strand to SEQ ID NO: 54238
ucacacugcccaaagacca

SEQ ID NO: 54320 - RNA, 19 nt, Artificial Sequence
  Description of Artificial Sequence: Synthetic oligonucleotide
  Sense strand starting at position 447 of SEQ ID NO: 663
uaaaguauuaggcaggagu

SEQ ID NO: 54321 - RNA, 19 nt, Artificial Sequence
  Description of Artificial Sequence: Synthetic oligonucleotide
  Antisense strand to SEQ ID NO: 54240
acuccugccuaauacuuua

SEQ ID NO: 54322 - RNA, 19 nt, Artificial Sequence
  Description of Artificial Sequence: Synthetic oligonucleotide
  Sense strand starting at position 450 of SEQ ID NO: 663
aguauuaggcaggaguguu

SEQ ID NO: 54323 - RNA, 19 nt, Artificial Sequence
  Description of Artificial Sequence: Synthetic oligonucleotide
  Antisense strand to SEQ ID NO: 54242
aacacuccugccuaauacu

SEQ ID NO: 54324 - RNA, 19 nt, Artificial Sequence
  Description of Artificial Sequence: Synthetic oligonucleotide
  Sense strand starting at position 472 of SEQ ID NO: 663
aaaguaguaggaggucaua

SEQ ID NO: 54325 - RNA, 19 nt, Artificial Sequence
  Description of Artificial Sequence: Synthetic oligonucleotide
  Antisense strand to SEQ ID NO: 54244
uaugaccuccuacuacuuu

SEQ ID NO: 54326 - RNA, 19 nt, Artificial Sequence
  Description of Artificial Sequence: Synthetic oligonucleotide
  Sense strand starting at position 614 of SEQ ID NO: 663
guuuauguuagugaaauca

SEQ ID NO: 54327 - RNA, 19 nt, Artificial Sequence
  Description of Artificial Sequence: Synthetic oligonucleotide
  Antisense strand to SEQ ID NO: 54246
ugauuucacuaacauaaac

SEQ ID NO: 54328 - RNA, 19 nt, Artificial Sequence
  Description of Artificial Sequence: Synthetic oligonucleotide
  Sense strand starting at position 624 of SEQ ID NO: 663
gugaaaucauuugcuuucu

SEQ ID NO: 54329 - RNA, 19 nt, Artificial Sequence
  Description of Artificial Sequence: Synthetic oligonucleotide
  Antisense strand to SEQ ID NO: 54248
agaaagcaaaugauuucac

SEQ ID NO: 54330 - RNA, 19 nt, Artificial Sequence
  Description of Artificial Sequence: Synthetic oligonucleotide
  Sense strand starting at position 839 of SEQ ID NO: 663
uccagaauugcucauuaag

SEQ ID NO: 54331 - RNA, 19 nt, Artificial Sequence
  Description of Artificial Sequence: Synthetic oligonucleotide
  Antisense strand to SEQ ID NO: 54250
cuuaaugagcaauucugga

SEQ ID NO: 54332 - RNA, 19 nt, Artificial Sequence
  Description of Artificial Sequence: Synthetic oligonucleotide
  Sense strand starting at position 923 of SEQ ID NO: 663
ggagcuuugcccucugugu

SEQ ID NO: 54333 - RNA, 19 nt, Artificial Sequence
  Description of Artificial Sequence: Synthetic oligonucleotide
  Antisense strand to SEQ ID NO: 54252
acacagagggcaaagcucc

SEQ ID NO: 54334 - RNA, 19 nt, Artificial Sequence
  Description of Artificial Sequence: Synthetic oligonucleotide
  Sense strand starting at position 1025 of SEQ ID NO: 663
gaaggagguagaugguuua

SEQ ID NO: 54335 - RNA, 19 nt, Artificial Sequence
  Description of Artificial Sequence: Synthetic oligonucleotide
  Antisense strand to SEQ ID NO: 54254
uaaaccaucuaccuccuuc

SEQ ID NO: 54336 - RNA, 19 nt, Artificial Sequence
  Description of Artificial Sequence: Synthetic oligonucleotide
  Sense strand starting at position 1335 of SEQ ID NO: 663
ugaagucucuauccaggaa

SEQ ID NO: 54337 - RNA, 19 nt, Artificial Sequence
  Description of Artificial Sequence: Synthetic oligonucleotide
  Antisense strand to SEQ ID NO: 54256
uuccuggauagagacuuca

SEQ ID NO: 54338 - RNA, 19 nt, Artificial Sequence
  Description of Artificial Sequence: Synthetic oligonucleotide
  Sense strand starting at position 1481 of SEQ ID NO: 663
gguuguguuauucagggag

SEQ ID NO: 54339 - RNA, 19 nt, Artificial Sequence
  Description of Artificial Sequence: Synthetic oligonucleotide
  Antisense strand to SEQ ID NO: 54258
cucccugaauaacacaacc

SEQ ID NO: 54340 - RNA, 19 nt, Artificial Sequence
  Description of Artificial Sequence: Synthetic oligonucleotide
  Sense strand starting at position 1607 of SEQ ID NO: 663
aaaugucugucuccagaug

SEQ ID NO: 54341 - RNA, 19 nt, Artificial Sequence
  Description of Artificial Sequence: Synthetic oligonucleotide
  Antisense strand to SEQ ID NO: 54260
caucuggagacagacauuu

SEQ ID NO: 54342 - RNA, 19 nt, Artificial Sequence
  Description of Artificial Sequence: Synthetic oligonucleotide
  Sense strand starting at position 2121 of SEQ ID NO: 663
guaugugcacgauucuguu

SEQ ID NO: 54343 - RNA, 19 nt, Artificial Sequence
  Description of Artificial Sequence: Synthetic oligonucleotide
  Antisense strand to SEQ ID NO: 54262
aacagaaucgugcacauac

SEQ ID NO: 54344 - RNA, 19 nt, Artificial Sequence
  Description of Artificial Sequence: Synthetic oligonucleotide
  Sense strand starting at position 2215 of SEQ ID NO: 663
ugcauuauugcguuugcau

SEQ ID NO: 54345 - RNA, 19 nt, Artificial Sequence
  Description of Artificial Sequence: Synthetic oligonucleotide
  Antisense strand to SEQ ID NO: 54264
augcaaacgcaauaaugca

SEQ ID NO: 54346 - RNA, 19 nt, Artificial Sequence
  Description of Artificial Sequence: Synthetic oligonucleotide
  Sense strand starting at position 2216 of SEQ ID NO: 663
gcauuauugcguuugcaua

SEQ ID NO: 54347 - RNA, 19 nt, Artificial Sequence
  Description of Artificial Sequence: Synthetic oligonucleotide
  Antisense strand to SEQ ID NO: 54266
uaugcaaacgcaauaaugc

SEQ ID NO: 54348 - RNA, 19 nt, Artificial Sequence
  Description of Artificial Sequence: Synthetic oligonucleotide
  Sense strand starting at position 2676 of SEQ ID NO: 663
guugcauucccggugugua

SEQ ID NO: 54349 - RNA, 19 nt, Artificial Sequence
  Description of Artificial Sequence: Synthetic oligonucleotide
  Antisense strand to SEQ ID NO: 54268
uacacaccgggaaugcaac

SEQ ID NO: 54350 - RNA, 19 nt, Artificial Sequence
  Description of Artificial Sequence: Synthetic oligonucleotide
  Sense strand starting at position 2727 of SEQ ID NO: 663
cagagauguucuuuaaagc

SEQ ID NO: 54351 - RNA, 19 nt, Artificial Sequence
  Description of Artificial Sequence: Synthetic oligonucleotide
  Antisense strand to SEQ ID NO: 54270
gcuuuaaagaacaucucug

SEQ ID NO: 54352 - RNA, 19 nt, Artificial Sequence
  Description of Artificial Sequence: Synthetic oligonucleotide
  Sense strand starting at position 2829 of SEQ ID NO: 663
aguugagaaacucgacuga

SEQ ID NO: 54353 - RNA, 19 nt, Artificial Sequence
  Description of Artificial Sequence: Synthetic oligonucleotide
  Antisense strand to SEQ ID NO: 54272
ucagucgaguuucucaacu

SEQ ID NO: 54354 - RNA, 19 nt, Artificial Sequence
  Description of Artificial Sequence: Synthetic oligonucleotide
  Sense strand starting at position 2990 of SEQ ID NO: 663
ugcacuguaucuguuauuu

SEQ ID NO: 54355 - RNA, 19 nt, Artificial Sequence
  Description of Artificial Sequence: Synthetic oligonucleotide
  Antisense strand to SEQ ID NO: 54274
aaauaacagauacagugca

SEQ ID NO: 54356 - RNA, 19 nt, Artificial Sequence
  Description of Artificial Sequence: Synthetic oligonucleotide
  Sense strand starting at position 3110 of SEQ ID NO: 663
gcagguaaagcacagauua

SEQ ID NO: 54357 - RNA, 19 nt, Artificial Sequence
  Description of Artificial Sequence: Synthetic oligonucleotide
  Antisense strand to SEQ ID NO: 54276
uaaucugugcuuuaccugc

SEQ ID NO: 54358 - RNA, 19 nt, Artificial Sequence
  Description of Artificial Sequence: Synthetic oligonucleotide
  Sense strand starting at position 3147 of SEQ ID NO: 663
guguuauuuguacauuguc

SEQ ID NO: 54359 - RNA, 19 nt, Artificial Sequence
  Description of Artificial Sequence: Synthetic oligonucleotide
  Antisense strand to SEQ ID NO: 54278
gacaauguacaaauaacac

SEQ ID NO: 54360 - RNA, 19 nt, Artificial Sequence
  Description of Artificial Sequence: Synthetic oligonucleotide
  Sense strand starting at position 3152 of SEQ ID NO: 663
auuuguacauugucuggua

SEQ ID NO: 54361 - RNA, 19 nt, Artificial Sequence
  Description of Artificial Sequence: Synthetic oligonucleotide
  Antisense strand to SEQ ID NO: 54280
uaccagacaauguacaaau

SEQ ID NO: 54362 - RNA, 19 nt, Artificial Sequence
  Description of Artificial Sequence: Synthetic oligonucleotide
  Sense strand starting at position 3222 of SEQ ID NO: 663
uggcauauuccugauaaau

SEQ ID NO: 54363 - RNA, 19 nt, Artificial Sequence
  Description of Artificial Sequence: Synthetic oligonucleotide
  Antisense strand to SEQ ID NO: 54282
auuuaucaggaauaugcca

SEQ ID NO: 54364 - RNA, 19 nt, Artificial Sequence
  Description of Artificial Sequence: Synthetic oligonucleotide
  Sense strand starting at position 3354 of SEQ ID NO: 663
cuuugucaccaucauguau

SEQ ID NO: 54365 - RNA, 19 nt, Artificial Sequence
  Description of Artificial Sequence: Synthetic oligonucleotide
  Antisense strand to SEQ ID NO: 54284
auacaugauggugacaaag

SEQ ID NO: 54366 - RNA, 19 nt, Artificial Sequence
  Description of Artificial Sequence: Synthetic oligonucleotide
  Sense strand starting at position 3560 of SEQ ID NO: 663
gaggucggauaaguuuaau

SEQ ID NO: 54367 - RNA, 19 nt, Artificial Sequence
  Description of Artificial Sequence: Synthetic oligonucleotide
  Antisense strand to SEQ ID NO: 54286
auuaaacuuauccgaccuc

SEQ ID NO: 54368 - RNA, 19 nt, Artificial Sequence
  Description of Artificial Sequence: Synthetic oligonucleotide
  Sense strand starting at position 3563 of SEQ ID NO: 663
gucggauaaguuuaaugaa

SEQ ID NO: 54369 - RNA, 19 nt, Artificial Sequence
  Description of Artificial Sequence: Synthetic oligonucleotide
  Antisense strand to SEQ ID NO: 54288
uucauuaaacuuauccgac

SEQ ID NO: 54370 - RNA, 19 nt, Artificial Sequence
  Description of Artificial Sequence: Synthetic oligonucleotide
  Sense strand starting at position 3586 of SEQ ID NO: 663
gcaaguaacuuacuagauc

SEQ ID NO: 54371 - RNA, 19 nt, Artificial Sequence
  Description of Artificial Sequence: Synthetic oligonucleotide
  Antisense strand to SEQ ID NO: 54290
gaucuaguaaguuacuugc

SEQ ID NO: 54372 - RNA, 19 nt, Artificial Sequence
  Description of Artificial Sequence: Synthetic oligonucleotide
  Sense strand starting at position 3618 of SEQ ID NO: 663
gucacaguccaagaaucau

SEQ ID NO: 54373 - RNA, 19 nt, Artificial Sequence
  Description of Artificial Sequence: Synthetic oligonucleotide
  Antisense strand to SEQ ID NO: 54292
augauucuuggacugugac

SEQ ID NO: 54374 - RNA, 19 nt, Artificial Sequence
  Description of Artificial Sequence: Synthetic oligonucleotide
  Sense strand starting at position 3637 of SEQ ID NO: 663
ucgcaaauuccacagggaa

SEQ ID NO: 54375 - RNA, 19 nt, Artificial Sequence
  Description of Artificial Sequence: Synthetic oligonucleotide
  Antisense strand to SEQ ID NO: 54294
uucccuguggaauuugcga

SEQ ID NO: 54376 - RNA, 19 nt, Artificial Sequence
  Description of Artificial Sequence: Synthetic oligonucleotide
  Sense strand starting at position 3658 of SEQ ID NO: 663
uauuguaauuaugcagaga

SEQ ID NO: 54377 - RNA, 19 nt, Artificial Sequence
  Description of Artificial Sequence: Synthetic oligonucleotide
  Antisense strand to SEQ ID NO: 54296
ucucugcauaauuacaaua

SEQ ID NO: 54378 - RNA, 19 nt, Artificial Sequence
  Description of Artificial Sequence: Synthetic oligonucleotide
  Sense strand starting at position 3661 of SEQ ID NO: 663
uguaauuaugcagagacca

SEQ ID NO: 54379 - RNA, 19 nt, Artificial Sequence
  Description of Artificial Sequence: Synthetic oligonucleotide
  Antisense strand to SEQ ID NO: 54298
uggucucugcauaauuaca

SEQ ID NO: 54380 - RNA, 19 nt, Artificial Sequence
  Description of Artificial Sequence: Synthetic oligonucleotide
  Sense strand starting at position 3817 of SEQ ID NO: 663
uuuggcaugccagaaggau

SEQ ID NO: 54381 - RNA, 19 nt, Artificial Sequence
  Description of Artificial Sequence: Synthetic oligonucleotide
  Antisense strand to SEQ ID NO: 54300
auccuucuggcaugccaaa

SEQ ID NO: 54382 - RNA, 19 nt, Artificial Sequence
  Description of Artificial Sequence: Synthetic oligonucleotide
  Sense strand starting at position 3833 of SEQ ID NO: 663
gaugaauuggugcagucuu

SEQ ID NO: 54383 - RNA, 19 nt, Artificial Sequence
  Description of Artificial Sequence: Synthetic oligonucleotide
  Antisense strand to SEQ ID NO: 54302
aagacugcaccaauucauc

SEQ ID NO: 54384 - RNA, 19 nt, Artificial Sequence
  Description of Artificial Sequence: Synthetic oligonucleotide
  Sense strand starting at position 3845 of SEQ ID NO: 663
cagucuugucgggugcuua

SEQ ID NO: 54385 - RNA, 19 nt, Artificial Sequence
  Description of Artificial Sequence: Synthetic oligonucleotide
  Antisense strand to SEQ ID NO: 54304
uaagcacccgacaagacug

SEQ ID NO: 54386 - RNA, 19 nt, Artificial Sequence
  Description of Artificial Sequence: Synthetic oligonucleotide
  Sense strand starting at position 3875 of SEQ ID NO: 663
aggcauagauguuuccaaa

SEQ ID NO: 54387 - RNA, 19 nt, Artificial Sequence
  Description of Artificial Sequence: Synthetic oligonucleotide
  Antisense strand to SEQ ID NO: 54306
uuuggaaacaucuaugccu

SEQ ID NO: 54388 - RNA, 19 nt, Artificial Sequence
  Description of Artificial Sequence: Synthetic oligonucleotide
  Sense strand starting at position 3922 of SEQ ID NO: 663
gagggauuacuauaggcgu

SEQ ID NO: 54389 - RNA, 19 nt, Artificial Sequence
  Description of Artificial Sequence: Synthetic oligonucleotide
  Antisense strand to SEQ ID NO: 54308
acgccuauaguaaucccuc

SEQ ID NO: 54390 - RNA, 19 nt, Artificial Sequence
  Description of Artificial Sequence: Synthetic oligonucleotide
  Sense strand starting at position 3942 of SEQ ID NO: 663
auugguaacuuuccaguaa

SEQ ID NO: 54391 - RNA, 19 nt, Artificial Sequence
  Description of Artificial Sequence: Synthetic oligonucleotide
  Antisense strand to SEQ ID NO: 54310
uuacuggaaaguuaccaau

SEQ ID NO: 54392 - RNA, 19 nt, Artificial Sequence
  Description of Artificial Sequence: Synthetic oligonucleotide
  Sense strand starting at position 3946 of SEQ ID NO: 663
guaacuuuccaguaacuau

SEQ ID NO: 54393 - RNA, 19 nt, Artificial Sequence
  Description of Artificial Sequence: Synthetic oligonucleotide
  Antisense strand to SEQ ID NO: 54312
auaguuacuggaaaguuac

SEQ ID NO: 54394 - RNA, 19 nt, Artificial Sequence
  Description of Artificial Sequence: Synthetic oligonucleotide
  Sense strand starting at position 3968 of SEQ ID NO: 663
agagguacucguuaauauu

SEQ ID NO: 54395 - RNA, 19 nt, Artificial Sequence
  Description of Artificial Sequence: Synthetic oligonucleotide
  Antisense strand to SEQ ID NO: 54314
aauauuaacgaguaccucu

SEQ ID NO: 54396 - RNA, 19 nt, Artificial Sequence
  Description of Artificial Sequence: Synthetic oligonucleotide
  Sense strand starting at position 56 of SEQ ID NO: 656
gugauaccauucucgauau

SEQ ID NO: 54397 - RNA, 19 nt, Artificial Sequence
  Description of Artificial Sequence: Synthetic oligonucleotide
  Antisense strand to SEQ ID NO: 54316
auaucgagaaugguaucac

SEQ ID NO: 54398 - RNA, 19 nt, Artificial Sequence
  Description of Artificial Sequence: Synthetic oligonucleotide
  Sense strand starting at position 115 of SEQ ID NO: 656
ugagaauugcuuuaguaag

SEQ ID NO: 54399 - RNA, 19 nt, Artificial Sequence
  Description of Artificial Sequence: Synthetic oligonucleotide
  Antisense strand to SEQ ID NO: 54318
cuuacuaaagcaauucuca

SEQ ID NO: 54400 - RNA, 19 nt, Artificial Sequence
  Description of Artificial Sequence: Synthetic oligonucleotide
  Sense strand starting at position 146 of SEQ ID NO: 656
augcguaacagacaaaugu

SEQ ID NO: 54401 - RNA, 19 nt, Artificial Sequence
  Description of Artificial Sequence: Synthetic oligonucleotide
  Antisense strand to SEQ ID NO: 54320
acauuugucuguuacgcau

SEQ ID NO: 54402 - RNA, 19 nt, Artificial Sequence
  Description of Artificial Sequence: Synthetic oligonucleotide
  Sense strand starting at position 154 of SEQ ID NO: 656
cagacaaauguacgcuuaa

SEQ ID NO: 54403 - RNA, 19 nt, Artificial Sequence
  Description of Artificial Sequence: Synthetic oligonucleotide
  Antisense strand to SEQ ID NO: 54322
uuaagcguacauuugucug

SEQ ID NO: 54404 - RNA, 19 nt, Artificial Sequence
  Description of Artificial Sequence: Synthetic oligonucleotide
  Sense strand starting at position 155 of SEQ ID NO: 656
agacaaauguacgcuuaaa

SEQ ID NO: 54405 - RNA, 19 nt, Artificial Sequence
  Description of Artificial Sequence: Synthetic oligonucleotide
  Antisense strand to SEQ ID NO: 54324
uuuaagcguacauuugucu

SEQ ID NO: 54406 - RNA, 19 nt, Artificial Sequence
  Description of Artificial Sequence: Synthetic oligonucleotide
  Sense strand starting at position 165 of SEQ ID NO: 656
acgcuuaaaugaucaucca

SEQ ID NO: 54407 - RNA, 19 nt, Artificial Sequence
  Description of Artificial Sequence: Synthetic oligonucleotide
  Antisense strand to SEQ ID NO: 54326
uggaugaucauuuaagcgu

SEQ ID NO: 54408 - RNA, 19 nt, Artificial Sequence
  Description of Artificial Sequence: Synthetic oligonucleotide
  Sense strand starting at position 494 of SEQ ID NO: 656
ucgccugcugcuucugaau

SEQ ID NO: 54409 - RNA, 19 nt, Artificial Sequence
  Description of Artificial Sequence: Synthetic oligonucleotide
  Antisense strand to SEQ ID NO: 54328
auucagaagcagcaggcga

SEQ ID NO: 54410 - RNA, 19 nt, Artificial Sequence
  Description of Artificial Sequence: Synthetic oligonucleotide
  Sense strand starting at position 543 of SEQ ID NO: 656
uggucuuugggcaguguga

SEQ ID NO: 54411 - RNA, 19 nt, Artificial Sequence
  Description of Artificial Sequence: Synthetic oligonucleotide
  Antisense strand to SEQ ID NO: 54330
ucacacugcccaaagacca

SEQ ID NO: 54412 - RNA, 19 nt, Artificial Sequence
  Description of Artificial Sequence: Synthetic oligonucleotide
  Sense strand starting at position 656 of SEQ ID NO: 656
uaaaguauuaggcaggagu

SEQ ID NO: 54413 - RNA, 19 nt, Artificial Sequence
  Description of Artificial Sequence: Synthetic oligonucleotide
  Antisense strand to SEQ ID NO: 54332
acuccugccuaauacuuua

SEQ ID NO: 54414 - RNA, 19 nt, Artificial Sequence
  Description of Artificial Sequence: Synthetic oligonucleotide
  Sense strand starting at position 659 of SEQ ID NO: 656
aguauuaggcaggaguguu

SEQ ID NO: 54415 - RNA, 19 nt, Artificial Sequence
  Description of Artificial Sequence: Synthetic oligonucleotide
  Antisense strand to SEQ ID NO: 54334
aacacuccugccuaauacu

SEQ ID NO: 54416 - RNA, 19 nt, Artificial Sequence
  Description of Artificial Sequence: Synthetic oligonucleotide
  Sense strand starting at position 681 of SEQ ID NO: 656
aaaguaguaggaggucaua

SEQ ID NO: 54417 - RNA, 19 nt, Artificial Sequence
  Description of Artificial Sequence: Synthetic oligonucleotide
  Antisense strand to SEQ ID NO: 54336
uaugaccuccuacuacuuu

SEQ ID NO: 54418 - RNA, 19 nt, Artificial Sequence
  Description of Artificial Sequence: Synthetic oligonucleotide
  Sense strand starting at position 823 of SEQ ID NO: 656
guuuauguuagugaaauca

SEQ ID NO: 54419 - RNA, 19 nt, Artificial Sequence
  Description of Artificial Sequence: Synthetic oligonucleotide
  Antisense strand to SEQ ID NO: 54338
ugauuucacuaacauaaac

SEQ ID NO: 54420 - RNA, 19 nt, Artificial Sequence
  Description of Artificial Sequence: Synthetic oligonucleotide
  Sense strand starting at position 833 of SEQ ID NO: 656
gugaaaucauuugcuuucu

SEQ ID NO: 54421 - RNA, 19 nt, Artificial Sequence
  Description of Artificial Sequence: Synthetic oligonucleotide
  Antisense strand to SEQ ID NO: 54340
agaaagcaaaugauuucac

SEQ ID NO: 54422 - RNA, 19 nt, Artificial Sequence
  Description of Artificial Sequence: Synthetic oligonucleotide
  Sense strand starting at position 1048 of SEQ ID NO: 656
uccagaauugcucauuaag

SEQ ID NO: 54423 - RNA, 19 nt, Artificial Sequence
  Description of Artificial Sequence: Synthetic oligonucleotide
  Antisense strand to SEQ ID NO: 54342
cuuaaugagcaauucugga

SEQ ID NO: 54424 - RNA, 19 nt, Artificial Sequence
  Description of Artificial Sequence: Synthetic oligonucleotide
  Sense strand starting at position 1132 of SEQ ID NO: 656
ggagcuuugcccucugugu

SEQ ID NO: 54425 - RNA, 19 nt, Artificial Sequence
  Description of Artificial Sequence: Synthetic oligonucleotide
  Antisense strand to SEQ ID NO: 54344
acacagagggcaaagcucc

SEQ ID NO: 54426 - RNA, 19 nt, Artificial Sequence
  Description of Artificial Sequence: Synthetic oligonucleotide
  Sense strand starting at position 1234 of SEQ ID NO: 656
gaaggagguagaugguuua

SEQ ID NO: 54427 - RNA, 19 nt, Artificial Sequence
  Description of Artificial Sequence: Synthetic oligonucleotide
  Antisense strand to SEQ ID NO: 54346
uaaaccaucuaccuccuuc

SEQ ID NO: 54428 - RNA, 19 nt, Artificial Sequence
  Description of Artificial Sequence: Synthetic oligonucleotide
  Sense strand starting at position 1544 of SEQ ID NO: 656
ugaagucucuauccaggaa

SEQ ID NO: 54429 - RNA, 19 nt, Artificial Sequence
  Description of Artificial Sequence: Synthetic oligonucleotide
  Antisense strand to SEQ ID NO: 54348
uuccuggauagagacuuca

SEQ ID NO: 54430 - RNA, 19 nt, Artificial Sequence
  Description of Artificial Sequence: Synthetic oligonucleotide
  Sense strand starting at position 1690 of SEQ ID NO: 656
gguuguguuauucagggag

SEQ ID NO: 54431 - RNA, 19 nt, Artificial Sequence
  Description of Artificial Sequence: Synthetic oligonucleotide
  Antisense strand to SEQ ID NO: 54350
cucccugaauaacacaacc

SEQ ID NO: 54432 - RNA, 19 nt, Artificial Sequence
  Description of Artificial Sequence: Synthetic oligonucleotide
  Sense strand starting at position 1816 of SEQ ID NO: 656
aaaugucugucuccagaug

SEQ ID NO: 54433 - RNA, 19 nt, Artificial Sequence
  Description of Artificial Sequence: Synthetic oligonucleotide
  Antisense strand to SEQ ID NO: 54352
caucuggagacagacauuu

SEQ ID NO: 54434 - RNA, 19 nt, Artificial Sequence
  Description of Artificial Sequence: Synthetic oligonucleotide
  Sense strand starting at position 2330 of SEQ ID NO: 656
guaugugcacgauucuguu

SEQ ID NO: 54435 - RNA, 19 nt, Artificial Sequence
  Description of Artificial Sequence: Synthetic oligonucleotide
  Antisense strand to SEQ ID NO: 54354
aacagaaucgugcacauac

SEQ ID NO: 54436 - RNA, 19 nt, Artificial Sequence
  Description of Artificial Sequence: Synthetic oligonucleotide
  Sense strand starting at position 2424 of SEQ ID NO: 656
ugcauuauugcguuugcau

SEQ ID NO: 54437 - RNA, 19 nt, Artificial Sequence
  Description of Artificial Sequence: Synthetic oligonucleotide
  Antisense strand to SEQ ID NO: 54356
augcaaacgcaauaaugca

SEQ ID NO: 54438 - RNA, 19 nt, Artificial Sequence
  Description of Artificial Sequence: Synthetic oligonucleotide
  Sense strand starting at position 2425 of SEQ ID NO: 656
gcauuauugcguuugcaua

SEQ ID NO: 54439 - RNA, 19 nt, Artificial Sequence
  Description of Artificial Sequence: Synthetic oligonucleotide
  Antisense strand to SEQ ID NO: 54358
uaugcaaacgcaauaaugc

SEQ ID NO: 54440 - RNA, 19 nt, Artificial Sequence
  Description of Artificial Sequence: Synthetic oligonucleotide
  Sense strand starting at position 2885 of SEQ ID NO: 656
guugcauucccggugugua

SEQ ID NO: 54441 - RNA, 19 nt, Artificial Sequence
  Description of Artificial Sequence: Synthetic oligonucleotide
  Antisense strand to SEQ ID NO: 54360
uacacaccgggaaugcaac

SEQ ID NO: 54442 - RNA, 19 nt, Artificial Sequence
  Description of Artificial Sequence: Synthetic oligonucleotide
  Sense strand starting at position 2936 of SEQ ID NO: 656
cagagauguucuuuaaagc

SEQ ID NO: 54443 - RNA, 19 nt, Artificial Sequence
  Description of Artificial Sequence: Synthetic oligonucleotide
  Antisense strand to SEQ ID NO: 54362
gcuuuaaagaacaucucug

SEQ ID NO: 54444 - RNA, 19 nt, Artificial Sequence
  Description of Artificial Sequence: Synthetic oligonucleotide
  Sense strand starting at position 3038 of SEQ ID NO: 656
aguugagaaacucgacuga

SEQ ID NO: 54445 - RNA, 19 nt, Artificial Sequence
  Description of Artificial Sequence: Synthetic oligonucleotide
  Antisense strand to SEQ ID NO: 54364
ucagucgaguuucucaacu

SEQ ID NO: 54446 - RNA, 19 nt, Artificial Sequence
  Description of Artificial Sequence: Synthetic oligonucleotide
  Sense strand starting at position 3199 of SEQ ID NO: 656
ugcacuguaucuguuauuu

SEQ ID NO: 54447 - RNA, 19 nt, Artificial Sequence
  Description of Artificial Sequence: Synthetic oligonucleotide
  Antisense strand to SEQ ID NO: 54366
aaauaacagauacagugca

SEQ ID NO: 54448 - RNA, 19 nt, Artificial Sequence
  Description of Artificial Sequence: Synthetic oligonucleotide
  Sense strand starting at position 3319 of SEQ ID NO: 656
gcagguaaagcacagauua

SEQ ID NO: 54449 - RNA, 19 nt, Artificial Sequence
  Description of Artificial Sequence: Synthetic oligonucleotide
  Antisense strand to SEQ ID NO: 54368
uaaucugugcuuuaccugc

SEQ ID NO: 54450 - RNA, 19 nt, Artificial Sequence
  Description of Artificial Sequence: Synthetic oligonucleotide
  Sense strand starting at position 3356 of SEQ ID NO: 656
guguuauuuguacauuguc

SEQ ID NO: 54451 - RNA, 19 nt, Artificial Sequence
  Description of Artificial Sequence: Synthetic oligonucleotide
  Antisense strand to SEQ ID NO: 54370
gacaauguacaaauaacac

SEQ ID NO: 54452 - RNA, 19 nt, Artificial Sequence
  Description of Artificial Sequence: Synthetic oligonucleotide
  Sense strand starting at position 3361 of SEQ ID NO: 656
auuuguacauugucuggua

SEQ ID NO: 54453 - RNA, 19 nt, Artificial Sequence
  Description of Artificial Sequence: Synthetic oligonucleotide
  Antisense strand to SEQ ID NO: 54372
uaccagacaauguacaaau

SEQ ID NO: 54454 - RNA, 19 nt, Artificial Sequence
  Description of Artificial Sequence: Synthetic oligonucleotide
  Sense strand starting at position 3410 of SEQ ID NO: 656
uuguguauauuacccaaca

SEQ ID NO: 54455 - RNA, 19 nt, Artificial Sequence
  Description of Artificial Sequence: Synthetic oligonucleotide
  Antisense strand to SEQ ID NO: 54374
uguuggguaauauacacaa

SEQ ID NO: 54456 - RNA, 19 nt, Artificial Sequence
  Description of Artificial Sequence: Synthetic oligonucleotide
  Sense strand starting at position 3411 of SEQ ID NO: 656
uguguauauuacccaacau

SEQ ID NO: 54457 - RNA, 19 nt, Artificial Sequence
  Description of Artificial Sequence: Synthetic oligonucleotide
  Antisense strand to SEQ ID NO: 54376
auguuggguaauauacaca

SEQ ID NO: 54458 - RNA, 19 nt, Artificial Sequence
  Description of Artificial Sequence: Synthetic oligonucleotide
  Sense strand starting at position 3431 of SEQ ID NO: 656
uggcauauuccugauaaau

SEQ ID NO: 54459 - RNA, 19 nt, Artificial Sequence
  Description of Artificial Sequence: Synthetic oligonucleotide
  Antisense strand to SEQ ID NO: 54378
auuuaucaggaauaugcca

SEQ ID NO: 54460 - RNA, 19 nt, Artificial Sequence
  Description of Artificial Sequence: Synthetic oligonucleotide
  Sense strand starting at position 3563 of SEQ ID NO: 656
cuuugucaccaucauguau

SEQ ID NO: 54461 - RNA, 19 nt, Artificial Sequence
  Description of Artificial Sequence: Synthetic oligonucleotide
  Antisense strand to SEQ ID NO: 54380
auacaugauggugacaaag

SEQ ID NO: 54462 - RNA, 19 nt, Artificial Sequence
  Description of Artificial Sequence: Synthetic oligonucleotide
  Sense strand starting at position 3769 of SEQ ID NO: 656
gaggucggauaaguuuaau

SEQ ID NO: 54463 - RNA, 19 nt, Artificial Sequence
  Description of Artificial Sequence: Synthetic oligonucleotide
  Antisense strand to SEQ ID NO: 54382
auuaaacuuauccgaccuc

SEQ ID NO: 54464 - RNA, 19 nt, Artificial Sequence
  Description of Artificial Sequence: Synthetic oligonucleotide
  Sense strand starting at position 3772 of SEQ ID NO: 656
gucggauaaguuuaaugaa

SEQ ID NO: 54465 - RNA, 19 nt, Artificial Sequence
  Description of Artificial Sequence: Synthetic oligonucleotide
  Antisense strand to SEQ ID NO: 54384
uucauuaaacuuauccgac

SEQ ID NO: 54466 - RNA, 19 nt, Artificial Sequence
  Description of Artificial Sequence: Synthetic oligonucleotide
  Sense strand starting at position 3795 of SEQ ID NO: 656
gcaaguaacuuacuagauc

SEQ ID NO: 54467 - RNA, 19 nt, Artificial Sequence
  Description of Artificial Sequence: Synthetic oligonucleotide
  Antisense strand to SEQ ID NO: 54386
gaucuaguaaguuacuugc

SEQ ID NO: 54468 - RNA, 19 nt, Artificial Sequence
  Description of Artificial Sequence: Synthetic oligonucleotide
  Sense strand starting at position 3827 of SEQ ID NO: 656
gucacaguccaagaaucau

SEQ ID NO: 54469 - RNA, 19 nt, Artificial Sequence
  Description of Artificial Sequence: Synthetic oligonucleotide
  Antisense strand to SEQ ID NO: 54388
augauucuuggacugugac

SEQ ID NO: 54470 - RNA, 19 nt, Artificial Sequence
  Description of Artificial Sequence: Synthetic oligonucleotide
  Sense strand starting at position 3846 of SEQ ID NO: 656
ucgcaaauuccacagggaa

SEQ ID NO: 54471 - RNA, 19 nt, Artificial Sequence
  Description of Artificial Sequence: Synthetic oligonucleotide
  Antisense strand to SEQ ID NO: 54390
uucccuguggaauuugcga

SEQ ID NO: 54472 - RNA, 19 nt, Artificial Sequence
  Description of Artificial Sequence: Synthetic oligonucleotide
  Sense strand starting at position 3867 of SEQ ID NO: 656
uauuguaauuaugcagaga

SEQ ID NO: 54473 - RNA, 19 nt, Artificial Sequence
  Description of Artificial Sequence: Synthetic oligonucleotide
  Antisense strand to SEQ ID NO: 54392
ucucugcauaauuacaaua

SEQ ID NO: 54474 - RNA, 19 nt, Artificial Sequence
  Description of Artificial Sequence: Synthetic oligonucleotide
  Sense strand starting at position 3870 of SEQ ID NO: 656
uguaauuaugcagagacca

SEQ ID NO: 54475 - RNA, 19 nt, Artificial Sequence
  Description of Artificial Sequence: Synthetic oligonucleotide
  Antisense strand to SEQ ID NO: 54394
uggucucugcauaauuaca

SEQ ID NO: 54476 - RNA, 19 nt, Artificial Sequence
  Description of Artificial Sequence: Synthetic oligonucleotide
  Sense strand starting at position 28 of SEQ ID NO: 658
cugggacuccugcauauac

SEQ ID NO: 54477 - RNA, 19 nt, Artificial Sequence
  Description of Artificial Sequence: Synthetic oligonucleotide
  Antisense strand to SEQ ID NO: 54396
guauaugcaggagucccag

SEQ ID NO: 54478 - RNA, 19 nt, Artificial Sequence
  Description of Artificial Sequence: Synthetic oligonucleotide
  Sense strand starting at position 215 of SEQ ID NO: 658
uuguucgagggucaagaua

SEQ ID NO: 54479 - RNA, 19 nt, Artificial Sequence
  Description of Artificial Sequence: Synthetic oligonucleotide
  Antisense strand to SEQ ID NO: 54398
uaucuugacccucgaacaa

SEQ ID NO: 54480 - RNA, 19 nt, Artificial Sequence
  Description of Artificial Sequence: Synthetic oligonucleotide
  Sense strand starting at position 259 of SEQ ID NO: 658
ggacacuuacucugccaga

SEQ ID NO: 54481 - RNA, 19 nt, Artificial Sequence
  Description of Artificial Sequence: Synthetic oligonucleotide
  Antisense strand to SEQ ID NO: 54400
ucuggcagaguaagugucc

SEQ ID NO: 54482 - RNA, 19 nt, Artificial Sequence
  Description of Artificial Sequence: Synthetic oligonucleotide
  Sense strand starting at position 284 of SEQ ID NO: 658
gcugaauacuuuccauaug

SEQ ID NO: 54483 - RNA, 19 nt, Artificial Sequence
  Description of Artificial Sequence: Synthetic oligonucleotide
  Antisense strand to SEQ ID NO: 54402
cauauggaaaguauucagc

SEQ ID NO: 54484 - RNA, 19 nt, Artificial Sequence
  Description of Artificial Sequence: Synthetic oligonucleotide
  Sense strand starting at position 386 of SEQ ID NO: 658
ugaagucacuuggccuaaa

SEQ ID NO: 54485 - RNA, 19 nt, Artificial Sequence
  Description of Artificial Sequence: Synthetic oligonucleotide
  Antisense strand to SEQ ID NO: 54404
uuuaggccaagugacuuca

SEQ ID NO: 54486 - RNA, 19 nt, Artificial Sequence
  Description of Artificial Sequence: Synthetic oligonucleotide
  Sense strand starting at position 416 of SEQ ID NO: 658
ugguuagguccagagcaaa

SEQ ID NO: 54487 - RNA, 19 nt, Artificial Sequence
  Description of Artificial Sequence: Synthetic oligonucleotide
  Antisense strand to SEQ ID NO: 54406
uuugcucuggaccuaacca

SEQ ID NO: 54488 - RNA, 19 nt, Artificial Sequence
  Description of Artificial Sequence: Synthetic oligonucleotide
  Sense strand starting at position 441 of SEQ ID NO: 658
acccaugucugacucugaa

SEQ ID NO: 54489 - RNA, 19 nt, Artificial Sequence
  Description of Artificial Sequence: Synthetic oligonucleotide
  Antisense strand to SEQ ID NO: 54408
uucagagucagacaugggu

SEQ ID NO: 54490 - RNA, 19 nt, Artificial Sequence
  Description of Artificial Sequence: Synthetic oligonucleotide
  Sense strand starting at position 666 of SEQ ID NO: 658
ugauaaacauagcugguau

SEQ ID NO: 54491 - RNA, 19 nt, Artificial Sequence
  Description of Artificial Sequence: Synthetic oligonucleotide
  Antisense strand to SEQ ID NO: 54410
auaccagcuauguuuauca

SEQ ID NO: 54492 - RNA, 19 nt, Artificial Sequence
  Description of Artificial Sequence: Synthetic oligonucleotide
  Sense strand starting at position 668 of SEQ ID NO: 658
auaaacauagcugguauua

SEQ ID NO: 54493 - RNA, 19 nt, Artificial Sequence
  Description of Artificial Sequence: Synthetic oligonucleotide
  Antisense strand to SEQ ID NO: 54412
uaauaccagcuauguuuau

SEQ ID NO: 54494 - RNA, 19 nt, Artificial Sequence
  Description of Artificial Sequence: Synthetic oligonucleotide
  Sense strand starting at position 956 of SEQ ID NO: 658
guucuauuacaguagaggu

SEQ ID NO: 54495 - RNA, 19 nt, Artificial Sequence
  Description of Artificial Sequence: Synthetic oligonucleotide
  Antisense strand to SEQ ID NO: 54414
accucuacuguaauagaac

SEQ ID NO: 54496 - RNA, 19 nt, Artificial Sequence
  Description of Artificial Sequence: Synthetic oligonucleotide
  Sense strand starting at position 958 of SEQ ID NO: 658
ucuauuacaguagagguau

SEQ ID NO: 54497 - RNA, 19 nt, Artificial Sequence
  Description of Artificial Sequence: Synthetic oligonucleotide
  Antisense strand to SEQ ID NO: 54416
auaccucuacuguaauaga

SEQ ID NO: 54498 - RNA, 19 nt, Artificial Sequence
  Description of Artificial Sequence: Synthetic oligonucleotide
  Sense strand starting at position 1013 of SEQ ID NO: 658
guaugacaccuguauaugu

SEQ ID NO: 54499 - RNA, 19 nt, Artificial Sequence
  Description of Artificial Sequence: Synthetic oligonucleotide
  Antisense strand to SEQ ID NO: 54418
acauauacaggugucauac

SEQ ID NO: 54500 - RNA, 19 nt, Artificial Sequence
  Description of Artificial Sequence: Synthetic oligonucleotide
  Sense strand starting at position 1021 of SEQ ID NO: 658
ccuguauauguacaaugau

SEQ ID NO: 54501 - RNA, 19 nt, Artificial Sequence
  Description of Artificial Sequence: Synthetic oligonucleotide
  Antisense strand to SEQ ID NO: 54420
aucauuguacauauacagg

SEQ ID NO: 54502 - RNA, 19 nt, Artificial Sequence
  Description of Artificial Sequence: Synthetic oligonucleotide
  Sense strand starting at position 1119 of SEQ ID NO: 658
auaccaucuguauguggaa

SEQ ID NO: 54503 - RNA, 19 nt, Artificial Sequence
  Description of Artificial Sequence: Synthetic oligonucleotide
  Antisense strand to SEQ ID NO: 54422
uuccacauacagaugguau

SEQ ID NO: 54504 - RNA, 19 nt, Artificial Sequence
  Description of Artificial Sequence: Synthetic oligonucleotide
  Sense strand starting at position 1136 of SEQ ID NO: 658
aaggaaguauggcucaaga

SEQ ID NO: 54505 - RNA, 19 nt, Artificial Sequence
  Description of Artificial Sequence: Synthetic oligonucleotide
  Antisense strand to SEQ ID NO: 54424
ucuugagccauacuuccuu

SEQ ID NO: 54506 - RNA, 19 nt, Artificial Sequence
  Description of Artificial Sequence: Synthetic oligonucleotide
  Sense strand starting at position 1359 of SEQ ID NO: 658
agacauuccucacuuaguu

SEQ ID NO: 54507 - RNA, 19 nt, Artificial Sequence
  Description of Artificial Sequence: Synthetic oligonucleotide
  Antisense strand to SEQ ID NO: 54426
aacuaagugaggaaugucu

SEQ ID NO: 54508 - RNA, 19 nt, Artificial Sequence
  Description of Artificial Sequence: Synthetic oligonucleotide
  Sense strand starting at position 1469 of SEQ ID NO: 658
aggcaaauuuaugaauaca

SEQ ID NO: 54509 - RNA, 19 nt, Artificial Sequence
  Description of Artificial Sequence: Synthetic oligonucleotide
  Antisense strand to SEQ ID NO: 54428
uguauucauaaauuugccu

SEQ ID NO: 54510 - RNA, 19 nt, Artificial Sequence
  Description of Artificial Sequence: Synthetic oligonucleotide
  Sense strand starting at position 1629 of SEQ ID NO: 658
ugcuuauuaccauauggca

SEQ ID NO: 54511 - RNA, 19 nt, Artificial Sequence
  Description of Artificial Sequence: Synthetic oligonucleotide
  Antisense strand to SEQ ID NO: 54430
ugccauaugguaauaagca

SEQ ID NO: 54512 - RNA, 19 nt, Artificial Sequence
  Description of Artificial Sequence: Synthetic oligonucleotide
  Sense strand starting at position 1774 of SEQ ID NO: 658
cucuuaugucaagacuuga

SEQ ID NO: 54513 - RNA, 19 nt, Artificial Sequence
  Description of Artificial Sequence: Synthetic oligonucleotide
  Antisense strand to SEQ ID NO: 54432
ucaagucuugacauaagag

SEQ ID NO: 54514 - RNA, 19 nt, Artificial Sequence
  Description of Artificial Sequence: Synthetic oligonucleotide
  Sense strand starting at position 1973 of SEQ ID NO: 658
ggagauaccuacuuggguu

SEQ ID NO: 54515 - RNA, 19 nt, Artificial Sequence
  Description of Artificial Sequence: Synthetic oligonucleotide
  Antisense strand to SEQ ID NO: 54434
aacccaaguagguaucucc

SEQ ID NO: 54516 - RNA, 19 nt, Artificial Sequence
  Description of Artificial Sequence: Synthetic oligonucleotide
  Sense strand starting at position 1989 of SEQ ID NO: 658
guugguuggaaauagguaa

SEQ ID NO: 54517 - RNA, 19 nt, Artificial Sequence
  Description of Artificial Sequence: Synthetic oligonucleotide
  Antisense strand to SEQ ID NO: 54436
uuaccuauuuccaaccaac

SEQ ID NO: 54518 - RNA, 19 nt, Artificial Sequence
  Description of Artificial Sequence: Synthetic oligonucleotide
  Sense strand starting at position 2130 of SEQ ID NO: 658
ucuccuggcucauuuguau

SEQ ID NO: 54519 - RNA, 19 nt, Artificial Sequence
  Description of Artificial Sequence: Synthetic oligonucleotide
  Antisense strand to SEQ ID NO: 54438
auacaaaugagccaggaga

SEQ ID NO: 54520 - RNA, 19 nt, Artificial Sequence
  Description of Artificial Sequence: Synthetic oligonucleotide
  Sense strand starting at position 2423 of SEQ ID NO: 658
gacuuagagccuuagagug

SEQ ID NO: 54521 - RNA, 19 nt, Artificial Sequence
  Description of Artificial Sequence: Synthetic oligonucleotide
  Antisense strand to SEQ ID NO: 54440
cacucuaaggcucuaaguc

SEQ ID NO: 54522 - RNA, 19 nt, Artificial Sequence
  Description of Artificial Sequence: Synthetic oligonucleotide
  Sense strand starting at position 2561 of SEQ ID NO: 658
ugaccugaauguucuuaga

SEQ ID NO: 54523 - RNA, 19 nt, Artificial Sequence
  Description of Artificial Sequence: Synthetic oligonucleotide
  Antisense strand to SEQ ID NO: 54442
ucuaagaacauucagguca

SEQ ID NO: 54524 - RNA, 19 nt, Artificial Sequence
  Description of Artificial Sequence: Synthetic oligonucleotide
  Sense strand starting at position 2563 of SEQ ID NO: 658
accugaauguucuuagaau

SEQ ID NO: 54525 - RNA, 19 nt, Artificial Sequence
  Description of Artificial Sequence: Synthetic oligonucleotide
  Antisense strand to SEQ ID NO: 54444
auucuaagaacauucaggu

SEQ ID NO: 54526 - RNA, 19 nt, Artificial Sequence
  Description of Artificial Sequence: Synthetic oligonucleotide
  Sense strand starting at position 2717 of SEQ ID NO: 658
gcucuuuacgaguaaauua

SEQ ID NO: 54527 - RNA, 19 nt, Artificial Sequence
  Description of Artificial Sequence: Synthetic oligonucleotide
  Antisense strand to SEQ ID NO: 54446
uaauuuacucguaaagagc

SEQ ID NO: 54528 - RNA, 19 nt, Artificial Sequence
  Description of Artificial Sequence: Synthetic oligonucleotide
  Sense strand starting at position 2902 of SEQ ID NO: 658
guuuaaugcccacaguaau

SEQ ID NO: 54529 - RNA, 19 nt, Artificial Sequence
  Description of Artificial Sequence: Synthetic oligonucleotide
  Antisense strand to SEQ ID NO: 54448
auuacugugggcauuaaac

SEQ ID NO: 54530 - RNA, 19 nt, Artificial Sequence
  Description of Artificial Sequence: Synthetic oligonucleotide
  Sense strand starting at position 2916 of SEQ ID NO: 658
guaauugucccacaaguca

SEQ ID NO: 54531 - RNA, 19 nt, Artificial Sequence
  Description of Artificial Sequence: Synthetic oligonucleotide
  Antisense strand to SEQ ID NO: 54450
ugacuugugggacaauuac

SEQ ID NO: 54532 - RNA, 19 nt, Artificial Sequence
  Description of Artificial Sequence: Synthetic oligonucleotide
  Sense strand starting at position 3090 of SEQ ID NO: 658
cugcuaaucggauauugua

SEQ ID NO: 54533 - RNA, 19 nt, Artificial Sequence
  Description of Artificial Sequence: Synthetic oligonucleotide
  Antisense strand to SEQ ID NO: 54452
uacaauauccgauuagcag

SEQ ID NO: 54534 - RNA, 19 nt, Artificial Sequence
  Description of Artificial Sequence: Synthetic oligonucleotide
  Sense strand starting at position 3097 of SEQ ID NO: 658
ucggauauuguauaauggu

SEQ ID NO: 54535 - RNA, 19 nt, Artificial Sequence
  Description of Artificial Sequence: Synthetic oligonucleotide
  Antisense strand to SEQ ID NO: 54454
accauuauacaauauccga

SEQ ID NO: 54536 - RNA, 19 nt, Artificial Sequence
  Description of Artificial Sequence: Synthetic oligonucleotide
  Sense strand starting at position 3105 of SEQ ID NO: 658
uguauaaugguugauugca

SEQ ID NO: 54537 - RNA, 19 nt, Artificial Sequence
  Description of Artificial Sequence: Synthetic oligonucleotide
  Antisense strand to SEQ ID NO: 54456
ugcaaucaaccauuauaca

SEQ ID NO: 54538 - RNA, 19 nt, Artificial Sequence
  Description of Artificial Sequence: Synthetic oligonucleotide
  Sense strand starting at position 3173 of SEQ ID NO: 658
ggguucuuccaagaguuug

SEQ ID NO: 54539 - RNA, 19 nt, Artificial Sequence
  Description of Artificial Sequence: Synthetic oligonucleotide
  Antisense strand to SEQ ID NO: 54458
caaacucuuggaagaaccc

SEQ ID NO: 54540 - RNA, 19 nt, Artificial Sequence
  Description of Artificial Sequence: Synthetic oligonucleotide
  Sense strand starting at position 3265 of SEQ ID NO: 658
acaagagcacagugcuaaa

SEQ ID NO: 54541 - RNA, 19 nt, Artificial Sequence
  Description of Artificial Sequence: Synthetic oligonucleotide
  Antisense strand to SEQ ID NO: 54460
uuuagcacugugcucuugu

SEQ ID NO: 54542 - RNA, 19 nt, Artificial Sequence
  Description of Artificial Sequence: Synthetic oligonucleotide
  Sense strand starting at position 3299 of SEQ ID NO: 658
ggaaacuuccugugugaag

SEQ ID NO: 54543 - RNA, 19 nt, Artificial Sequence
  Description of Artificial Sequence: Synthetic oligonucleotide
  Antisense strand to SEQ ID NO: 54462
cuucacacaggaaguuucc

SEQ ID NO: 54544 - RNA, 19 nt, Artificial Sequence
  Description of Artificial Sequence: Synthetic oligonucleotide
  Sense strand starting at position 3300 of SEQ ID NO: 658
gaaacuuccugugugaaga

SEQ ID NO: 54545 - RNA, 19 nt, Artificial Sequence
  Description of Artificial Sequence: Synthetic oligonucleotide
  Antisense strand to SEQ ID NO: 54464
ucuucacacaggaaguuuc

SEQ ID NO: 54546 - RNA, 19 nt, Artificial Sequence
  Description of Artificial Sequence: Synthetic oligonucleotide
  Sense strand starting at position 3301 of SEQ ID NO: 658
aaacuuccugugugaagag

SEQ ID NO: 54547 - RNA, 19 nt, Artificial Sequence
  Description of Artificial Sequence: Synthetic oligonucleotide
  Antisense strand to SEQ ID NO: 54466
cucuucacacaggaaguuu

SEQ ID NO: 54548 - RNA, 19 nt, Artificial Sequence
  Description of Artificial Sequence: Synthetic oligonucleotide
  Sense strand starting at position 3658 of SEQ ID NO: 658
agguauucucgggacuuau

SEQ ID NO: 54549 - RNA, 19 nt, Artificial Sequence
  Description of Artificial Sequence: Synthetic oligonucleotide
  Antisense strand to SEQ ID NO: 54468
auaagucccgagaauaccu

SEQ ID NO: 54550 - RNA, 19 nt, Artificial Sequence
  Description of Artificial Sequence: Synthetic oligonucleotide
  Sense strand starting at position 3701 of SEQ ID NO: 658
ugaccuacaguguacuaua

SEQ ID NO: 54551 - RNA, 19 nt, Artificial Sequence
  Description of Artificial Sequence: Synthetic oligonucleotide
  Antisense strand to SEQ ID NO: 54470
uauaguacacuguagguca

SEQ ID NO: 54552 - RNA, 19 nt, Artificial Sequence
  Description of Artificial Sequence: Synthetic oligonucleotide
  Sense strand starting at position 3780 of SEQ ID NO: 658
auagaaaccuuuguaugua

SEQ ID NO: 54553 - RNA, 19 nt, Artificial Sequence
  Description of Artificial Sequence: Synthetic oligonucleotide
  Antisense strand to SEQ ID NO: 54472
uacauacaaagguuucuau

SEQ ID NO: 54554 - RNA, 19 nt, Artificial Sequence
  Description of Artificial Sequence: Synthetic oligonucleotide
  Sense strand starting at position 3937 of SEQ ID NO: 658
aguauuguucuuuagaaac

SEQ ID NO: 54555 - RNA, 19 nt, Artificial Sequence
  Description of Artificial Sequence: Synthetic oligonucleotide
  Antisense strand to SEQ ID NO: 54474
guuucuaaagaacaauacu

SEQ ID NO: 54556 - RNA, 19 nt, Artificial Sequence
  Description of Artificial Sequence: Synthetic oligonucleotide
  Sense strand starting at position 56 of SEQ ID NO: 661
accugaaacccaggauguu

SEQ ID NO: 54557 - RNA, 19 nt, Artificial Sequence
  Description of Artificial Sequence: Synthetic oligonucleotide
  Antisense strand to SEQ ID NO: 54476
aacauccuggguuucaggu

SEQ ID NO: 54558 - RNA, 19 nt, Artificial Sequence
  Description of Artificial Sequence: Synthetic oligonucleotide
  Sense strand starting at position 81 of SEQ ID NO: 661
gaaagagcaucgcuggauu

SEQ ID NO: 54559 - RNA, 19 nt, Artificial Sequence
  Description of Artificial Sequence: Synthetic oligonucleotide
  Antisense strand to SEQ ID NO: 54478
aauccagcgaugcucuuuc

SEQ ID NO: 54560 - RNA, 19 nt, Artificial Sequence
  Description of Artificial Sequence: Synthetic oligonucleotide
  Sense strand starting at position 256 of SEQ ID NO: 661
uuacguacucuggagguga

SEQ ID NO: 54561 - RNA, 19 nt, Artificial Sequence
  Description of Artificial Sequence: Synthetic oligonucleotide
  Antisense strand to SEQ ID NO: 54480
ucaccuccagaguacguaa

SEQ ID NO: 54562 - RNA, 19 nt, Artificial Sequence
  Description of Artificial Sequence: Synthetic oligonucleotide
  Sense strand starting at position 258 of SEQ ID NO: 661
acguacucuggaggugaua

SEQ ID NO: 54563 - RNA, 19 nt, Artificial Sequence
  Description of Artificial Sequence: Synthetic oligonucleotide
  Antisense strand to SEQ ID NO: 54482
uaucaccuccagaguacgu

SEQ ID NO: 54564 - RNA, 19 nt, Artificial Sequence
  Description of Artificial Sequence: Synthetic oligonucleotide
  Sense strand starting at position 260 of SEQ ID NO: 661
guacucuggaggugauaaa

SEQ ID NO: 54565 - RNA, 19 nt, Artificial Sequence
  Description of Artificial Sequence: Synthetic oligonucleotide
  Antisense strand to SEQ ID NO: 54484
uuuaucaccuccagaguac

SEQ ID NO: 54566 - RNA, 19 nt, Artificial Sequence
  Description of Artificial Sequence: Synthetic oligonucleotide
  Sense strand starting at position 269 of SEQ ID NO: 661
aggugauaaaggugaaggu

SEQ ID NO: 54567 - RNA, 19 nt, Artificial Sequence
  Description of Artificial Sequence: Synthetic oligonucleotide
  Antisense strand to SEQ ID NO: 54486
accuucaccuuuaucaccu

SEQ ID NO: 54568 - RNA, 19 nt, Artificial Sequence
  Description of Artificial Sequence: Synthetic oligonucleotide
  Sense strand starting at position 436 of SEQ ID NO: 661
ugagcauguagcuauugau

SEQ ID NO: 54569 - RNA, 19 nt, Artificial Sequence
  Description of Artificial Sequence: Synthetic oligonucleotide
  Antisense strand to SEQ ID NO: 54488
aucaauagcuacaugcuca

SEQ ID NO: 54570 - RNA, 19 nt, Artificial Sequence
  Description of Artificial Sequence: Synthetic oligonucleotide
  Sense strand starting at position 482 of SEQ ID NO: 661
cucugagagaguugguuau

SEQ ID NO: 54571 - RNA, 19 nt, Artificial Sequence
  Description of Artificial Sequence: Synthetic oligonucleotide
  Antisense strand to SEQ ID NO: 54490
auaaccaacucucucagag

SEQ ID NO: 54572 - RNA, 19 nt, Artificial Sequence
  Description of Artificial Sequence: Synthetic oligonucleotide
  Sense strand starting at position 577 of SEQ ID NO: 661
uggcauaguaagcaugaau

SEQ ID NO: 54573 - RNA, 19 nt, Artificial Sequence
  Description of Artificial Sequence: Synthetic oligonucleotide
  Antisense strand to SEQ ID NO: 54492
auucaugcuuacuaugcca

SEQ ID NO: 54574 - RNA, 19 nt, Artificial Sequence
  Description of Artificial Sequence: Synthetic oligonucleotide
  Sense strand starting at position 638 of SEQ ID NO: 661
guccgugagaaguagaugu

SEQ ID NO: 54575 - RNA, 19 nt, Artificial Sequence
  Description of Artificial Sequence: Synthetic oligonucleotide
  Antisense strand to SEQ ID NO: 54494
acaucuacuucucacggac

SEQ ID NO: 54576 - RNA, 19 nt, Artificial Sequence
  Description of Artificial Sequence: Synthetic oligonucleotide
  Sense strand starting at position 642 of SEQ ID NO: 661
gugagaaguagauguaggu

SEQ ID NO: 54577 - RNA, 19 nt, Artificial Sequence
  Description of Artificial Sequence: Synthetic oligonucleotide
  Antisense strand to SEQ ID NO: 54496
accuacaucuacuucucac

SEQ ID NO: 54578 - RNA, 19 nt, Artificial Sequence
  Description of Artificial Sequence: Synthetic oligonucleotide
  Sense strand starting at position 646 of SEQ ID NO: 661
gaaguagauguagguauca

SEQ ID NO: 54579 - RNA, 19 nt, Artificial Sequence
  Description of Artificial Sequence: Synthetic oligonucleotide
  Antisense strand to SEQ ID NO: 54498
ugauaccuacaucuacuuc

SEQ ID NO: 54580 - RNA, 19 nt, Artificial Sequence
  Description of Artificial Sequence: Synthetic oligonucleotide
  Sense strand starting at position 648 of SEQ ID NO: 661
aguagauguagguaucacu

SEQ ID NO: 54581 - RNA, 19 nt, Artificial Sequence
  Description of Artificial Sequence: Synthetic oligonucleotide
  Antisense strand to SEQ ID NO: 54500
agugauaccuacaucuacu

SEQ ID NO: 54582 - RNA, 19 nt, Artificial Sequence
  Description of Artificial Sequence: Synthetic oligonucleotide
  Sense strand starting at position 1021 of SEQ ID NO: 661
agggauuccugugcaccua

SEQ ID NO: 54583 - RNA, 19 nt, Artificial Sequence
  Description of Artificial Sequence: Synthetic oligonucleotide
  Antisense strand to SEQ ID NO: 54502
uaggugcacaggaaucccu

SEQ ID NO: 54584 - RNA, 19 nt, Artificial Sequence
  Description of Artificial Sequence: Synthetic oligonucleotide
  Sense strand starting at position 1207 of SEQ ID NO: 661
guaugauagucauuacaac

SEQ ID NO: 54585 - RNA, 19 nt, Artificial Sequence
  Description of Artificial Sequence: Synthetic oligonucleotide
  Antisense strand to SEQ ID NO: 54504
guuguaaugacuaucauac

SEQ ID NO: 54586 - RNA, 19 nt, Artificial Sequence
  Description of Artificial Sequence: Synthetic oligonucleotide
  Sense strand starting at position 1286 of SEQ ID NO: 661
gaugguauccugggaaugu

SEQ ID NO: 54587 - RNA, 19 nt, Artificial Sequence
  Description of Artificial Sequence: Synthetic oligonucleotide
  Antisense strand to SEQ ID NO: 54506
acauucccaggauaccauc

SEQ ID NO: 54588 - RNA, 19 nt, Artificial Sequence
  Description of Artificial Sequence: Synthetic oligonucleotide
  Sense strand starting at position 1295 of SEQ ID NO: 661
cugggaauguuaguauuac

SEQ ID NO: 54589 - RNA, 19 nt, Artificial Sequence
  Description of Artificial Sequence: Synthetic oligonucleotide
  Antisense strand to SEQ ID NO: 54508
guaauacuaacauucccag

SEQ ID NO: 54590 - RNA, 19 nt, Artificial Sequence
  Description of Artificial Sequence: Synthetic oligonucleotide
  Sense strand starting at position 1341 of SEQ ID NO: 661
guagacagauaucucuaga

SEQ ID NO: 54591 - RNA, 19 nt, Artificial Sequence
  Description of Artificial Sequence: Synthetic oligonucleotide
  Antisense strand to SEQ ID NO: 54510
ucuagagauaucugucuac

SEQ ID NO: 54592 - RNA, 19 nt, Artificial Sequence
  Description of Artificial Sequence: Synthetic oligonucleotide
  Sense strand starting at position 1546 of SEQ ID NO: 661
cagcuuacuggucaguaua

SEQ ID NO: 54593 - RNA, 19 nt, Artificial Sequence
  Description of Artificial Sequence: Synthetic oligonucleotide
  Antisense strand to SEQ ID NO: 54512
uauacugaccaguaagcug

SEQ ID NO: 54594 - RNA, 19 nt, Artificial Sequence
  Description of Artificial Sequence: Synthetic oligonucleotide
  Sense strand starting at position 1628 of SEQ ID NO: 661
cuugguaaaguccaaucuu

SEQ ID NO: 54595 - RNA, 19 nt, Artificial Sequence
  Description of Artificial Sequence: Synthetic oligonucleotide
  Antisense strand to SEQ ID NO: 54514
aagauuggacuuuaccaag

SEQ ID NO: 54596 - RNA, 19 nt, Artificial Sequence
  Description of Artificial Sequence: Synthetic oligonucleotide
  Sense strand starting at position 1785 of SEQ ID NO: 661
ccacaauaguagucaaaga

SEQ ID NO: 54597 - RNA, 19 nt, Artificial Sequence
  Description of Artificial Sequence: Synthetic oligonucleotide
  Antisense strand to SEQ ID NO: 54516
ucuuugacuacuauugugg

SEQ ID NO: 54598 - RNA, 19 nt, Artificial Sequence
  Description of Artificial Sequence: Synthetic oligonucleotide
  Sense strand starting at position 1790 of SEQ ID NO: 661
auaguagucaaagauguca

SEQ ID NO: 54599 - RNA, 19 nt, Artificial Sequence
  Description of Artificial Sequence: Synthetic oligonucleotide
  Antisense strand to SEQ ID NO: 54518
ugacaucuuugacuacuau

SEQ ID NO: 54600 - RNA, 19 nt, Artificial Sequence
  Description of Artificial Sequence: Synthetic oligonucleotide
  Sense strand starting at position 2005 of SEQ ID NO: 661
auuuaugugacgugagcaa

SEQ ID NO: 54601 - RNA, 19 nt, Artificial Sequence
  Description of Artificial Sequence: Synthetic oligonucleotide
  Antisense strand to SEQ ID NO: 54520
uugcucacgucacauaaau

SEQ ID NO: 54602 - RNA, 19 nt, Artificial Sequence
  Description of Artificial Sequence: Synthetic oligonucleotide
  Sense strand starting at position 2141 of SEQ ID NO: 661
guaugcucugccuuuagca

SEQ ID NO: 54603 - RNA, 19 nt, Artificial Sequence
  Description of Artificial Sequence: Synthetic oligonucleotide
  Antisense strand to SEQ ID NO: 54522
ugcuaaaggcagagcauac

SEQ ID NO: 54604 - RNA, 19 nt, Artificial Sequence
  Description of Artificial Sequence: Synthetic oligonucleotide
  Sense strand starting at position 2153 of SEQ ID NO: 661
uuuagcaagucuuugauuu

SEQ ID NO: 54605 - RNA, 19 nt, Artificial Sequence
  Description of Artificial Sequence: Synthetic oligonucleotide
  Antisense strand to SEQ ID NO: 54524
aaaucaaagacuugcuaaa

SEQ ID NO: 54606 - RNA, 19 nt, Artificial Sequence
  Description of Artificial Sequence: Synthetic oligonucleotide
  Sense strand starting at position 2181 of SEQ ID NO: 661
uacacucagggcuguauua

SEQ ID NO: 54607 - RNA, 19 nt, Artificial Sequence
  Description of Artificial Sequence: Synthetic oligonucleotide
  Antisense strand to SEQ ID NO: 54526
uaauacagcccugagugua

SEQ ID NO: 54608 - RNA, 19 nt, Artificial Sequence
  Description of Artificial Sequence: Synthetic oligonucleotide
  Sense strand starting at position 2183 of SEQ ID NO: 661
cacucagggcuguauuaac

SEQ ID NO: 54609 - RNA, 19 nt, Artificial Sequence
  Description of Artificial Sequence: Synthetic oligonucleotide
  Antisense strand to SEQ ID NO: 54528
guuaauacagcccugagug

SEQ ID NO: 54610 - RNA, 19 nt, Artificial Sequence
  Description of Artificial Sequence: Synthetic oligonucleotide
  Sense strand starting at position 2443 of SEQ ID NO: 661
aaggcuuuguguccuauuu

SEQ ID NO: 54611 - RNA, 19 nt, Artificial Sequence
  Description of Artificial Sequence: Synthetic oligonucleotide
  Antisense strand to SEQ ID NO: 54530
aaauaggacacaaagccuu

SEQ ID NO: 54612 - RNA, 19 nt, Artificial Sequence
  Description of Artificial Sequence: Synthetic oligonucleotide
  Sense strand starting at position 2453 of SEQ ID NO: 661
guccuauuucucugaucuu

SEQ ID NO: 54613 - RNA, 19 nt, Artificial Sequence
  Description of Artificial Sequence: Synthetic oligonucleotide
  Antisense strand to SEQ ID NO: 54532
aagaucagagaaauaggac

SEQ ID NO: 54614 - RNA, 19 nt, Artificial Sequence
  Description of Artificial Sequence: Synthetic oligonucleotide
  Sense strand starting at position 2494 of SEQ ID NO: 661
aguagagaggcucaagcuu

SEQ ID NO: 54615 - RNA, 19 nt, Artificial Sequence
  Description of Artificial Sequence: Synthetic oligonucleotide
  Antisense strand to SEQ ID NO: 54534
aagcuugagccucucuacu

SEQ ID NO: 54616 - RNA, 19 nt, Artificial Sequence
  Description of Artificial Sequence: Synthetic oligonucleotide
  Sense strand starting at position 2591 of SEQ ID NO: 661
uagggagaugucugucaaa

SEQ ID NO: 54617 - RNA, 19 nt, Artificial Sequence
  Description of Artificial Sequence: Synthetic oligonucleotide
  Antisense strand to SEQ ID NO: 54536
uuugacagacaucucccua

SEQ ID NO: 54618 - RNA, 19 nt, Artificial Sequence
  Description of Artificial Sequence: Synthetic oligonucleotide
  Sense strand starting at position 2671 of SEQ ID NO: 661
auggcaauuccauaugauu

SEQ ID NO: 54619 - RNA, 19 nt, Artificial Sequence
  Description of Artificial Sequence: Synthetic oligonucleotide
  Antisense strand to SEQ ID NO: 54538
aaucauauggaauugccau

SEQ ID NO: 54620 - RNA, 19 nt, Artificial Sequence
  Description of Artificial Sequence: Synthetic oligonucleotide
  Sense strand starting at position 2996 of SEQ ID NO: 661
caaagagaugccuguauug

SEQ ID NO: 54621 - RNA, 19 nt, Artificial Sequence
  Description of Artificial Sequence: Synthetic oligonucleotide
  Antisense strand to SEQ ID NO: 54540
caauacaggcaucucuuug

SEQ ID NO: 54622 - RNA, 19 nt, Artificial Sequence
  Description of Artificial Sequence: Synthetic oligonucleotide
  Sense strand starting at position 2998 of SEQ ID NO: 661
aagagaugccuguauugca

SEQ ID NO: 54623 - RNA, 19 nt, Artificial Sequence
  Description of Artificial Sequence: Synthetic oligonucleotide
  Antisense strand to SEQ ID NO: 54542
ugcaauacaggcaucucuu

SEQ ID NO: 54624 - RNA, 19 nt, Artificial Sequence
  Description of Artificial Sequence: Synthetic oligonucleotide
  Sense strand starting at position 3006 of SEQ ID NO: 661
ccuguauugcauuagaaga

SEQ ID NO: 54625 - RNA, 19 nt, Artificial Sequence
  Description of Artificial Sequence: Synthetic oligonucleotide
  Antisense strand to SEQ ID NO: 54544
ucuucuaaugcaauacagg

SEQ ID NO: 54626 - RNA, 19 nt, Artificial Sequence
  Description of Artificial Sequence: Synthetic oligonucleotide
  Sense strand starting at position 3175 of SEQ ID NO: 661
uuggaaucauaucuuggua

SEQ ID NO: 54627 - RNA, 19 nt, Artificial Sequence
  Description of Artificial Sequence: Synthetic oligonucleotide
  Antisense strand to SEQ ID NO: 54546
uaccaagauaugauuccaa

SEQ ID NO: 54628 - RNA, 19 nt, Artificial Sequence
  Description of Artificial Sequence: Synthetic oligonucleotide
  Sense strand starting at position 3346 of SEQ ID NO: 661
ucaagaaaggacugugcuu

SEQ ID NO: 54629 - RNA, 19 nt, Artificial Sequence
  Description of Artificial Sequence: Synthetic oligonucleotide
  Antisense strand to SEQ ID NO: 54548
aagcacaguccuuucuuga

SEQ ID NO: 54630 - RNA, 19 nt, Artificial Sequence
  Description of Artificial Sequence: Synthetic oligonucleotide
  Sense strand starting at position 3348 of SEQ ID NO: 661
aagaaaggacugugcuuua

SEQ ID NO: 54631 - RNA, 19 nt, Artificial Sequence
  Description of Artificial Sequence: Synthetic oligonucleotide
  Antisense strand to SEQ ID NO: 54550
uaaagcacaguccuuucuu

SEQ ID NO: 54632 - RNA, 19 nt, Artificial Sequence
  Description of Artificial Sequence: Synthetic oligonucleotide
  Sense strand starting at position 3353 of SEQ ID NO: 661
aggacugugcuuuacacau

SEQ ID NO: 54633 - RNA, 19 nt, Artificial Sequence
  Description of Artificial Sequence: Synthetic oligonucleotide
  Antisense strand to SEQ ID NO: 54552
auguguaaagcacaguccu

SEQ ID NO: 54634 - RNA, 19 nt, Artificial Sequence
  Description of Artificial Sequence: Synthetic oligonucleotide
  Sense strand starting at position 3713 of SEQ ID NO: 661
gccaguguggccguagauu

SEQ ID NO: 54635 - RNA, 19 nt, Artificial Sequence
  Description of Artificial Sequence: Synthetic oligonucleotide
  Antisense strand to SEQ ID NO: 54554
aaucuacggccacacuggc

SEQ ID NO: 54636 - RNA, 19 nt, Artificial Sequence
  Description of Artificial Sequence: Synthetic oligonucleotide
  Sense strand starting at position 58 of SEQ ID NO: 657
accugaaacccaggauguu

SEQ ID NO: 54637 - RNA, 19 nt, Artificial Sequence
  Description of Artificial Sequence: Synthetic oligonucleotide
  Antisense strand to SEQ ID NO: 54556
aacauccuggguuucaggu

SEQ ID NO: 54638 - RNA, 19 nt, Artificial Sequence
  Description of Artificial Sequence: Synthetic oligonucleotide
  Sense strand starting at position 83 of SEQ ID NO: 657
gaaagagcaucgcuggauu

SEQ ID NO: 54639 - RNA, 19 nt, Artificial Sequence
  Description of Artificial Sequence: Synthetic oligonucleotide
  Antisense strand to SEQ ID NO: 54558
aauccagcgaugcucuuuc

SEQ ID NO: 54640 - RNA, 19 nt, Artificial Sequence
  Description of Artificial Sequence: Synthetic oligonucleotide
  Sense strand starting at position 258 of SEQ ID NO: 657
uuacguacucuggagguga

SEQ ID NO: 54641 - RNA, 19 nt, Artificial Sequence
  Description of Artificial Sequence: Synthetic oligonucleotide
  Antisense strand to SEQ ID NO: 54560
ucaccuccagaguacguaa

SEQ ID NO: 54642 - RNA, 19 nt, Artificial Sequence
  Description of Artificial Sequence: Synthetic oligonucleotide
  Sense strand starting at position 260 of SEQ ID NO: 657
acguacucuggaggugaua

SEQ ID NO: 54643 - RNA, 19 nt, Artificial Sequence
  Description of Artificial Sequence: Synthetic oligonucleotide
  Antisense strand to SEQ ID NO: 54562
uaucaccuccagaguacgu

SEQ ID NO: 54644 - RNA, 19 nt, Artificial Sequence
  Description of Artificial Sequence: Synthetic oligonucleotide
  Sense strand starting at position 262 of SEQ ID NO: 657
guacucuggaggugauaaa

SEQ ID NO: 54645 - RNA, 19 nt, Artificial Sequence
  Description of Artificial Sequence: Synthetic oligonucleotide
  Antisense strand to SEQ ID NO: 54564
uuuaucaccuccagaguac

SEQ ID NO: 54646 - RNA, 19 nt, Artificial Sequence
  Description of Artificial Sequence: Synthetic oligonucleotide
  Sense strand starting at position 271 of SEQ ID NO: 657
aggugauaaaggugaaggu

SEQ ID NO: 54647 - RNA, 19 nt, Artificial Sequence
  Description of Artificial Sequence: Synthetic oligonucleotide
  Antisense strand to SEQ ID NO: 54566
accuucaccuuuaucaccu

SEQ ID NO: 54648 - RNA, 19 nt, Artificial Sequence
  Description of Artificial Sequence: Synthetic oligonucleotide
  Sense strand starting at position 438 of SEQ ID NO: 657
ugagcauguagcuauugau

SEQ ID NO: 54649 - RNA, 19 nt, Artificial Sequence
  Description of Artificial Sequence: Synthetic oligonucleotide
  Antisense strand to SEQ ID NO: 54568
aucaauagcuacaugcuca

SEQ ID NO: 54650 - RNA, 19 nt, Artificial Sequence
  Description of Artificial Sequence: Synthetic oligonucleotide
  Sense strand starting at position 484 of SEQ ID NO: 657
cucugagagaguugguuau

SEQ ID NO: 54651 - RNA, 19 nt, Artificial Sequence
  Description of Artificial Sequence: Synthetic oligonucleotide
  Antisense strand to SEQ ID NO: 54570
auaaccaacucucucagag

SEQ ID NO: 54652 - RNA, 19 nt, Artificial Sequence
  Description of Artificial Sequence: Synthetic oligonucleotide
  Sense strand starting at position 579 of SEQ ID NO: 657
uggcauaguaagcaugaau

SEQ ID NO: 54653 - RNA, 19 nt, Artificial Sequence
  Description of Artificial Sequence: Synthetic oligonucleotide
  Antisense strand to SEQ ID NO: 54572
auucaugcuuacuaugcca

SEQ ID NO: 54654 - RNA, 19 nt, Artificial Sequence
  Description of Artificial Sequence: Synthetic oligonucleotide
  Sense strand starting at position 640 of SEQ ID NO: 657
guccgugagaaguagaugu

SEQ ID NO: 54655 - RNA, 19 nt, Artificial Sequence
  Description of Artificial Sequence: Synthetic oligonucleotide
  Antisense strand to SEQ ID NO: 54574
acaucuacuucucacggac

SEQ ID NO: 54656 - RNA, 19 nt, Artificial Sequence
  Description of Artificial Sequence: Synthetic oligonucleotide
  Sense strand starting at position 644 of SEQ ID NO: 657
gugagaaguagauguaggu

SEQ ID NO: 54657 - RNA, 19 nt, Artificial Sequence
  Description of Artificial Sequence: Synthetic oligonucleotide
  Antisense strand to SEQ ID NO: 54576
accuacaucuacuucucac

SEQ ID NO: 54658 - RNA, 19 nt, Artificial Sequence
  Description of Artificial Sequence: Synthetic oligonucleotide
  Sense strand starting at position 648 of SEQ ID NO: 657
gaaguagauguagguauca

SEQ ID NO: 54659 - RNA, 19 nt, Artificial Sequence
  Description of Artificial Sequence: Synthetic oligonucleotide
  Antisense strand to SEQ ID NO: 54578
ugauaccuacaucuacuuc

SEQ ID NO: 54660 - RNA, 19 nt, Artificial Sequence
  Description of Artificial Sequence: Synthetic oligonucleotide
  Sense strand starting at position 650 of SEQ ID NO: 657
aguagauguagguaucacu

SEQ ID NO: 54661 - RNA, 19 nt, Artificial Sequence
  Description of Artificial Sequence: Synthetic oligonucleotide
  Antisense strand to SEQ ID NO: 54580
agugauaccuacaucuacu

SEQ ID NO: 54662 - RNA, 19 nt, Artificial Sequence
  Description of Artificial Sequence: Synthetic oligonucleotide
  Sense strand starting at position 1023 of SEQ ID NO: 657
agggauuccugugcaccua

SEQ ID NO: 54663 - RNA, 19 nt, Artificial Sequence
  Description of Artificial Sequence: Synthetic oligonucleotide
  Antisense strand to SEQ ID NO: 54582
uaggugcacaggaaucccu

SEQ ID NO: 54664 - RNA, 19 nt, Artificial Sequence
  Description of Artificial Sequence: Synthetic oligonucleotide
  Sense strand starting at position 1209 of SEQ ID NO: 657
guaugauagucauuacaac

SEQ ID NO: 54665 - RNA, 19 nt, Artificial Sequence
  Description of Artificial Sequence: Synthetic oligonucleotide
  Antisense strand to SEQ ID NO: 54584
guuguaaugacuaucauac

SEQ ID NO: 54666 - RNA, 19 nt, Artificial Sequence
  Description of Artificial Sequence: Synthetic oligonucleotide
  Sense strand starting at position 1288 of SEQ ID NO: 657
gaugguauccugggaaugu

SEQ ID NO: 54667 - RNA, 19 nt, Artificial Sequence
  Description of Artificial Sequence: Synthetic oligonucleotide
  Antisense strand to SEQ ID NO: 54586
acauucccaggauaccauc

SEQ ID NO: 54668 - RNA, 19 nt, Artificial Sequence
  Description of Artificial Sequence: Synthetic oligonucleotide
  Sense strand starting at position 1297 of SEQ ID NO: 657
cugggaauguuaguauuac

SEQ ID NO: 54669 - RNA, 19 nt, Artificial Sequence
  Description of Artificial Sequence: Synthetic oligonucleotide
  Antisense strand to SEQ ID NO: 54588
guaauacuaacauucccag

SEQ ID NO: 54670 - RNA, 19 nt, Artificial Sequence
  Description of Artificial Sequence: Synthetic oligonucleotide
  Sense strand starting at position 1343 of SEQ ID NO: 657
guagacagauaucucuaga

SEQ ID NO: 54671 - RNA, 19 nt, Artificial Sequence
  Description of Artificial Sequence: Synthetic oligonucleotide
  Antisense strand to SEQ ID NO: 54590
ucuagagauaucugucuac

SEQ ID NO: 54672 - RNA, 19 nt, Artificial Sequence
  Description of Artificial Sequence: Synthetic oligonucleotide
  Sense strand starting at position 1548 of SEQ ID NO: 657
cagcuuacuggucaguaua

SEQ ID NO: 54673 - RNA, 19 nt, Artificial Sequence
  Description of Artificial Sequence: Synthetic oligonucleotide
  Antisense strand to SEQ ID NO: 54592
uauacugaccaguaagcug

SEQ ID NO: 54674 - RNA, 19 nt, Artificial Sequence
  Description of Artificial Sequence: Synthetic oligonucleotide
  Sense strand starting at position 1630 of SEQ ID NO: 657
cuugguaaaguccaaucuu

SEQ ID NO: 54675 - RNA, 19 nt, Artificial Sequence
  Description of Artificial Sequence: Synthetic oligonucleotide
  Antisense strand to SEQ ID NO: 54594
aagauuggacuuuaccaag

SEQ ID NO: 54676 - RNA, 19 nt, Artificial Sequence
  Description of Artificial Sequence: Synthetic oligonucleotide
  Sense strand starting at position 1787 of SEQ ID NO: 657
ccacaauaguagucaaaga

SEQ ID NO: 54677 - RNA, 19 nt, Artificial Sequence
  Description of Artificial Sequence: Synthetic oligonucleotide
  Antisense strand to SEQ ID NO: 54596
ucuuugacuacuauugugg

SEQ ID NO: 54678 - RNA, 19 nt, Artificial Sequence
  Description of Artificial Sequence: Synthetic oligonucleotide
  Sense strand starting at position 1792 of SEQ ID NO: 657
auaguagucaaagauguca

SEQ ID NO: 54679 - RNA, 19 nt, Artificial Sequence
  Description of Artificial Sequence: Synthetic oligonucleotide
  Antisense strand to SEQ ID NO: 54598
ugacaucuuugacuacuau

SEQ ID NO: 54680 - RNA, 19 nt, Artificial Sequence
  Description of Artificial Sequence: Synthetic oligonucleotide
  Sense strand starting at position 2007 of SEQ ID NO: 657
auuuaugugacgugagcaa

SEQ ID NO: 54681 - RNA, 19 nt, Artificial Sequence
  Description of Artificial Sequence: Synthetic oligonucleotide
  Antisense strand to SEQ ID NO: 54600
uugcucacgucacauaaau

SEQ ID NO: 54682 - RNA, 19 nt, Artificial Sequence
  Description of Artificial Sequence: Synthetic oligonucleotide
  Sense strand starting at position 2143 of SEQ ID NO: 657
guaugcucugccuuuagca

SEQ ID NO: 54683 - RNA, 19 nt, Artificial Sequence
  Description of Artificial Sequence: Synthetic oligonucleotide
  Antisense strand to SEQ ID NO: 54602
ugcuaaaggcagagcauac

SEQ ID NO: 54684 - RNA, 19 nt, Artificial Sequence
  Description of Artificial Sequence: Synthetic oligonucleotide
  Sense strand starting at position 2155 of SEQ ID NO: 657
uuuagcaagucuuugauuu

SEQ ID NO: 54685 - RNA, 19 nt, Artificial Sequence
  Description of Artificial Sequence: Synthetic oligonucleotide
  Antisense strand to SEQ ID NO: 54604
aaaucaaagacuugcuaaa

SEQ ID NO: 54686 - RNA, 19 nt, Artificial Sequence
  Description of Artificial Sequence: Synthetic oligonucleotide
  Sense strand starting at position 2183 of SEQ ID NO: 657
uacacucagggcuguauua

SEQ ID NO: 54687 - RNA, 19 nt, Artificial Sequence
  Description of Artificial Sequence: Synthetic oligonucleotide
  Antisense strand to SEQ ID NO: 54606
uaauacagcccugagugua

SEQ ID NO: 54688 - RNA, 19 nt, Artificial Sequence
  Description of Artificial Sequence: Synthetic oligonucleotide
  Sense strand starting at position 2185 of SEQ ID NO: 657
cacucagggcuguauuaac

SEQ ID NO: 54689 - RNA, 19 nt, Artificial Sequence
  Description of Artificial Sequence: Synthetic oligonucleotide
  Antisense strand to SEQ ID NO: 54608
guuaauacagcccugagug

SEQ ID NO: 54690 - RNA, 19 nt, Artificial Sequence
  Description of Artificial Sequence: Synthetic oligonucleotide
  Sense strand starting at position 2445 of SEQ ID NO: 657
aaggcuuuguguccuauuu

SEQ ID NO: 54691 - RNA, 19 nt, Artificial Sequence
  Description of Artificial Sequence: Synthetic oligonucleotide
  Antisense strand to SEQ ID NO: 54610
aaauaggacacaaagccuu

SEQ ID NO: 54692 - RNA, 19 nt, Artificial Sequence
  Description of Artificial Sequence: Synthetic oligonucleotide
  Sense strand starting at position 2455 of SEQ ID NO: 657
guccuauuucucugaucuu

SEQ ID NO: 54693 - RNA, 19 nt, Artificial Sequence
  Description of Artificial Sequence: Synthetic oligonucleotide
  Antisense strand to SEQ ID NO: 54612
aagaucagagaaauaggac

SEQ ID NO: 54694 - RNA, 19 nt, Artificial Sequence
  Description of Artificial Sequence: Synthetic oligonucleotide
  Sense strand starting at position 2496 of SEQ ID NO: 657
aguagagaggcucaagcuu

SEQ ID NO: 54695 - RNA, 19 nt, Artificial Sequence
  Description of Artificial Sequence: Synthetic oligonucleotide
  Antisense strand to SEQ ID NO: 54614
aagcuugagccucucuacu

SEQ ID NO: 54696 - RNA, 19 nt, Artificial Sequence
  Description of Artificial Sequence: Synthetic oligonucleotide
  Sense strand starting at position 2593 of SEQ ID NO: 657
uagggagaugucugucaaa

SEQ ID NO: 54697 - RNA, 19 nt, Artificial Sequence
  Description of Artificial Sequence: Synthetic oligonucleotide
  Antisense strand to SEQ ID NO: 54616
uuugacagacaucucccua

SEQ ID NO: 54698 - RNA, 19 nt, Artificial Sequence
  Description of Artificial Sequence: Synthetic oligonucleotide
  Sense strand starting at position 2673 of SEQ ID NO: 657
auggcaauuccauaugauu

SEQ ID NO: 54699 - RNA, 19 nt, Artificial Sequence
  Description of Artificial Sequence: Synthetic oligonucleotide
  Antisense strand to SEQ ID NO: 54618
aaucauauggaauugccau

SEQ ID NO: 54700 - RNA, 19 nt, Artificial Sequence
  Description of Artificial Sequence: Synthetic oligonucleotide
  Sense strand starting at position 2998 of SEQ ID NO: 657
caaagagaugccuguauug

SEQ ID NO: 54701 - RNA, 19 nt, Artificial Sequence
  Description of Artificial Sequence: Synthetic oligonucleotide
  Antisense strand to SEQ ID NO: 54620
caauacaggcaucucuuug

SEQ ID NO: 54702 - RNA, 19 nt, Artificial Sequence
  Description of Artificial Sequence: Synthetic oligonucleotide
  Sense strand starting at position 3000 of SEQ ID NO: 657
aagagaugccuguauugca

SEQ ID NO: 54703 - RNA, 19 nt, Artificial Sequence
  Description of Artificial Sequence: Synthetic oligonucleotide
  Antisense strand to SEQ ID NO: 54622
ugcaauacaggcaucucuu

SEQ ID NO: 54704 - RNA, 19 nt, Artificial Sequence
  Description of Artificial Sequence: Synthetic oligonucleotide
  Sense strand starting at position 3008 of SEQ ID NO: 657
ccuguauugcauuagaaga

SEQ ID NO: 54705 - RNA, 19 nt, Artificial Sequence
  Description of Artificial Sequence: Synthetic oligonucleotide
  Antisense strand to SEQ ID NO: 54624
ucuucuaaugcaauacagg

SEQ ID NO: 54706 - RNA, 19 nt, Artificial Sequence
  Description of Artificial Sequence: Synthetic oligonucleotide
  Sense strand starting at position 3177 of SEQ ID NO: 657
uuggaaucauaucuuggua

SEQ ID NO: 54707 - RNA, 19 nt, Artificial Sequence
  Description of Artificial Sequence: Synthetic oligonucleotide
  Antisense strand to SEQ ID NO: 54626
uaccaagauaugauuccaa

SEQ ID NO: 54708 - RNA, 19 nt, Artificial Sequence
  Description of Artificial Sequence: Synthetic oligonucleotide
  Sense strand starting at position 3348 of SEQ ID NO: 657
ucaagaaaggacugugcuu

SEQ ID NO: 54709 - RNA, 19 nt, Artificial Sequence
  Description of Artificial Sequence: Synthetic oligonucleotide
  Antisense strand to SEQ ID NO: 54628
aagcacaguccuuucuuga

SEQ ID NO: 54710 - RNA, 19 nt, Artificial Sequence
  Description of Artificial Sequence: Synthetic oligonucleotide
  Sense strand starting at position 3350 of SEQ ID NO: 657
aagaaaggacugugcuuua

SEQ ID NO: 54711 - RNA, 19 nt, Artificial Sequence
  Description of Artificial Sequence: Synthetic oligonucleotide
  Antisense strand to SEQ ID NO: 54630
uaaagcacaguccuuucuu

SEQ ID NO: 54712 - RNA, 19 nt, Artificial Sequence
  Description of Artificial Sequence: Synthetic oligonucleotide
  Sense strand starting at position 3355 of SEQ ID NO: 657
aggacugugcuuuacacau

SEQ ID NO: 54713 - RNA, 19 nt, Artificial Sequence
  Description of Artificial Sequence: Synthetic oligonucleotide
  Antisense strand to SEQ ID NO: 54632
auguguaaagcacaguccu

SEQ ID NO: 54714 - RNA, 19 nt, Artificial Sequence
  Description of Artificial Sequence: Synthetic oligonucleotide
  Sense strand starting at position 3715 of SEQ ID NO: 657
gccaguguggccguagauu

SEQ ID NO: 54715 - RNA, 19 nt, Artificial Sequence
  Description of Artificial Sequence: Synthetic oligonucleotide
  Antisense strand to SEQ ID NO: 54634
aaucuacggccacacuggc

SEQ ID NO: 54716 - RNA, 19 nt, Artificial Sequence
  Description of Artificial Sequence: Synthetic oligonucleotide
  Sense strand starting at position 334 of SEQ ID NO: 660
cgagcccuucgugugauua

SEQ ID NO: 54717 - RNA, 19 nt, Artificial Sequence
  Description of Artificial Sequence: Synthetic oligonucleotide
  Antisense strand to SEQ ID NO: 54636
uaaucacacgaagggcucg

SEQ ID NO: 54718 - RNA, 19 nt, Artificial Sequence
  Description of Artificial Sequence: Synthetic oligonucleotide
  Sense strand starting at position 747 of SEQ ID NO: 660
ggaaguguaaguugcauuu

SEQ ID NO: 54719 - RNA, 19 nt, Artificial Sequence
  Description of Artificial Sequence: Synthetic oligonucleotide
  Antisense strand to SEQ ID NO: 54638
aaaugcaacuuacacuucc

SEQ ID NO: 54720 - RNA, 19 nt, Artificial Sequence
  Description of Artificial Sequence: Synthetic oligonucleotide
  Sense strand starting at position 908 of SEQ ID NO: 660
caagcuuaccagugacuga

SEQ ID NO: 54721 - RNA, 19 nt, Artificial Sequence
  Description of Artificial Sequence: Synthetic oligonucleotide
  Antisense strand to SEQ ID NO: 54640
ucagucacugguaagcuug

SEQ ID NO: 54722 - RNA, 19 nt, Artificial Sequence
  Description of Artificial Sequence: Synthetic oligonucleotide
  Sense strand starting at position 931 of SEQ ID NO: 660
cgcuuaacugagcaaagau

SEQ ID NO: 54723 - RNA, 19 nt, Artificial Sequence
  Description of Artificial Sequence: Synthetic oligonucleotide
  Antisense strand to SEQ ID NO: 54642
aucuuugcucaguuaagcg

SEQ ID NO: 54724 - RNA, 19 nt, Artificial Sequence
  Description of Artificial Sequence: Synthetic oligonucleotide
  Sense strand starting at position 1131 of SEQ ID NO: 660
ccgaauaagcccugggauu

SEQ ID NO: 54725 - RNA, 19 nt, Artificial Sequence
  Description of Artificial Sequence: Synthetic oligonucleotide
  Antisense strand to SEQ ID NO: 54644
aaucccagggcuuauucgg

SEQ ID NO: 54726 - RNA, 19 nt, Artificial Sequence
  Description of Artificial Sequence: Synthetic oligonucleotide
  Sense strand starting at position 1223 of SEQ ID NO: 660
uauuaacuuguaggagcaa

SEQ ID NO: 54727 - RNA, 19 nt, Artificial Sequence
  Description of Artificial Sequence: Synthetic oligonucleotide
  Antisense strand to SEQ ID NO: 54646
uugcuccuacaaguuaaua

SEQ ID NO: 54728 - RNA, 19 nt, Artificial Sequence
  Description of Artificial Sequence: Synthetic oligonucleotide
  Sense strand starting at position 1309 of SEQ ID NO: 660
gcacaaauuugugcuuuga

SEQ ID NO: 54729 - RNA, 19 nt, Artificial Sequence
  Description of Artificial Sequence: Synthetic oligonucleotide
  Antisense strand to SEQ ID NO: 54648
ucaaagcacaaauuugugc

SEQ ID NO: 54730 - RNA, 19 nt, Artificial Sequence
  Description of Artificial Sequence: Synthetic oligonucleotide
  Sense strand starting at position 1313 of SEQ ID NO: 660
aaauuugugcuuugaaguu

SEQ ID NO: 54731 - RNA, 19 nt, Artificial Sequence
  Description of Artificial Sequence: Synthetic oligonucleotide
  Antisense strand to SEQ ID NO: 54650
aacuucaaagcacaaauuu

SEQ ID NO: 54732 - RNA, 19 nt, Artificial Sequence
  Description of Artificial Sequence: Synthetic oligonucleotide
  Sense strand starting at position 1345 of SEQ ID NO: 660
cauuccuuugagggaguga

SEQ ID NO: 54733 - RNA, 19 nt, Artificial Sequence
  Description of Artificial Sequence: Synthetic oligonucleotide
  Antisense strand to SEQ ID NO: 54652
ucacucccucaaaggaaug

SEQ ID NO: 54734 - RNA, 19 nt, Artificial Sequence
  Description of Artificial Sequence: Synthetic oligonucleotide
  Sense strand starting at position 1390 of SEQ ID NO: 660
gguacaaauguccacacau

SEQ ID NO: 54735 - RNA, 19 nt, Artificial Sequence
  Description of Artificial Sequence: Synthetic oligonucleotide
  Antisense strand to SEQ ID NO: 54654
auguguggacauuuguacc

SEQ ID NO: 54736 - RNA, 19 nt, Artificial Sequence
  Description of Artificial Sequence: Synthetic oligonucleotide
  Sense strand starting at position 1560 of SEQ ID NO: 660
ggaacauuguacuuacaau

SEQ ID NO: 54737 - RNA, 19 nt, Artificial Sequence
  Description of Artificial Sequence: Synthetic oligonucleotide
  Antisense strand to SEQ ID NO: 54656
auuguaaguacaauguucc

SEQ ID NO: 54738 - RNA, 19 nt, Artificial Sequence
  Description of Artificial Sequence: Synthetic oligonucleotide
  Sense strand starting at position 1586 of SEQ ID NO: 660
uguguaaugcagcugugua

SEQ ID NO: 54739 - RNA, 19 nt, Artificial Sequence
  Description of Artificial Sequence: Synthetic oligonucleotide
  Antisense strand to SEQ ID NO: 54658
uacacagcugcauuacaca

SEQ ID NO: 54740 - RNA, 19 nt, Artificial Sequence
  Description of Artificial Sequence: Synthetic oligonucleotide
  Sense strand starting at position 1733 of SEQ ID NO: 660
auucuuugaaucgagaugu

SEQ ID NO: 54741 - RNA, 19 nt, Artificial Sequence
  Description of Artificial Sequence: Synthetic oligonucleotide
  Antisense strand to SEQ ID NO: 54660
acaucucgauucaaagaau

SEQ ID NO: 54742 - RNA, 19 nt, Artificial Sequence
  Description of Artificial Sequence: Synthetic oligonucleotide
  Sense strand starting at position 1746 of SEQ ID NO: 660
agaugugguggcaguaagu

SEQ ID NO: 54743 - RNA, 19 nt, Artificial Sequence
  Description of Artificial Sequence: Synthetic oligonucleotide
  Antisense strand to SEQ ID NO: 54662
acuuacugccaccacaucu

SEQ ID NO: 54744 - RNA, 19 nt, Artificial Sequence
  Description of Artificial Sequence: Synthetic oligonucleotide
  Sense strand starting at position 1756 of SEQ ID NO: 660
gcaguaaguagucuguugu

SEQ ID NO: 54745 - RNA, 19 nt, Artificial Sequence
  Description of Artificial Sequence: Synthetic oligonucleotide
  Antisense strand to SEQ ID NO: 54664
acaacagacuacuuacugc

SEQ ID NO: 54746 - RNA, 19 nt, Artificial Sequence
  Description of Artificial Sequence: Synthetic oligonucleotide
  Sense strand starting at position 1915 of SEQ ID NO: 660
agacaugaaucgguacaca

SEQ ID NO: 54747 - RNA, 19 nt, Artificial Sequence
  Description of Artificial Sequence: Synthetic oligonucleotide
  Antisense strand to SEQ ID NO: 54666
uguguaccgauucaugucu

SEQ ID NO: 54748 - RNA, 19 nt, Artificial Sequence
  Description of Artificial Sequence: Synthetic oligonucleotide
  Sense strand starting at position 1990 of SEQ ID NO: 660
guguguggauaacuagaca

SEQ ID NO: 54749 - RNA, 19 nt, Artificial Sequence
  Description of Artificial Sequence: Synthetic oligonucleotide
  Antisense strand to SEQ ID NO: 54668
ugucuaguuauccacacac

SEQ ID NO: 54750 - RNA, 19 nt, Artificial Sequence
  Description of Artificial Sequence: Synthetic oligonucleotide
  Sense strand starting at position 1998 of SEQ ID NO: 660
auaacuagacagugucaga

SEQ ID NO: 54751 - RNA, 19 nt, Artificial Sequence
  Description of Artificial Sequence: Synthetic oligonucleotide
  Antisense strand to SEQ ID NO: 54670
ucugacacugucuaguuau

SEQ ID NO: 54752 - RNA, 19 nt, Artificial Sequence
  Description of Artificial Sequence: Synthetic oligonucleotide
  Sense strand starting at position 2053 of SEQ ID NO: 660
ggaugccucuuacuuggaa

SEQ ID NO: 54753 - RNA, 19 nt, Artificial Sequence
  Description of Artificial Sequence: Synthetic oligonucleotide
  Antisense strand to SEQ ID NO: 54672
uuccaaguaagaggcaucc

SEQ ID NO: 54754 - RNA, 19 nt, Artificial Sequence
  Description of Artificial Sequence: Synthetic oligonucleotide
  Sense strand starting at position 2114 of SEQ ID NO: 660
ccaugaaccuaugugagca

SEQ ID NO: 54755 - RNA, 19 nt, Artificial Sequence
  Description of Artificial Sequence: Synthetic oligonucleotide
  Antisense strand to SEQ ID NO: 54674
ugcucacauagguucaugg

SEQ ID NO: 54756 - RNA, 19 nt, Artificial Sequence
  Description of Artificial Sequence: Synthetic oligonucleotide
  Sense strand starting at position 2122 of SEQ ID NO: 660
cuaugugagcaucacaagu

SEQ ID NO: 54757 - RNA, 19 nt, Artificial Sequence
  Description of Artificial Sequence: Synthetic oligonucleotide
  Antisense strand to SEQ ID NO: 54676
acuugugaugcucacauag

SEQ ID NO: 54758 - RNA, 19 nt, Artificial Sequence
  Description of Artificial Sequence: Synthetic oligonucleotide
  Sense strand starting at position 2173 of SEQ ID NO: 660
gccaauugagauugacaug

SEQ ID NO: 54759 - RNA, 19 nt, Artificial Sequence
  Description of Artificial Sequence: Synthetic oligonucleotide
  Antisense strand to SEQ ID NO: 54678
caugucaaucucaauuggc

SEQ ID NO: 54760 - RNA, 19 nt, Artificial Sequence
  Description of Artificial Sequence: Synthetic oligonucleotide
  Sense strand starting at position 2231 of SEQ ID NO: 660
auugguggucuugagaaua

SEQ ID NO: 54761 - RNA, 19 nt, Artificial Sequence
  Description of Artificial Sequence: Synthetic oligonucleotide
  Antisense strand to SEQ ID NO: 54680
uauucucaagaccaccaau

SEQ ID NO: 54762 - RNA, 19 nt, Artificial Sequence
  Description of Artificial Sequence: Synthetic oligonucleotide
  Sense strand starting at position 2332 of SEQ ID NO: 660
gaaucucugucuguuagaa

SEQ ID NO: 54763 - RNA, 19 nt, Artificial Sequence
  Description of Artificial Sequence: Synthetic oligonucleotide
  Antisense strand to SEQ ID NO: 54682
uucuaacagacagagauuc

SEQ ID NO: 54764 - RNA, 19 nt, Artificial Sequence
  Description of Artificial Sequence: Synthetic oligonucleotide
  Sense strand starting at position 2446 of SEQ ID NO: 660
ucuguuugucaaggcauuu

SEQ ID NO: 54765 - RNA, 19 nt, Artificial Sequence
  Description of Artificial Sequence: Synthetic oligonucleotide
  Antisense strand to SEQ ID NO: 54684
aaaugccuugacaaacaga

SEQ ID NO: 54766 - RNA, 19 nt, Artificial Sequence
  Description of Artificial Sequence: Synthetic oligonucleotide
  Sense strand starting at position 2547 of SEQ ID NO: 660
ugacuagaaggcuguuaua

SEQ ID NO: 54767 - RNA, 19 nt, Artificial Sequence
  Description of Artificial Sequence: Synthetic oligonucleotide
  Antisense strand to SEQ ID NO: 54686
uauaacagccuucuaguca

SEQ ID NO: 54768 - RNA, 19 nt, Artificial Sequence
  Description of Artificial Sequence: Synthetic oligonucleotide
  Sense strand starting at position 2622 of SEQ ID NO: 660
cuuucuuuccucuauggga

SEQ ID NO: 54769 - RNA, 19 nt, Artificial Sequence
  Description of Artificial Sequence: Synthetic oligonucleotide
  Antisense strand to SEQ ID NO: 54688
ucccauagaggaaagaaag

SEQ ID NO: 54770 - RNA, 19 nt, Artificial Sequence
  Description of Artificial Sequence: Synthetic oligonucleotide
  Sense strand starting at position 2956 of SEQ ID NO: 660
aagagaugauuugaaaugu

SEQ ID NO: 54771 - RNA, 19 nt, Artificial Sequence
  Description of Artificial Sequence: Synthetic oligonucleotide
  Antisense strand to SEQ ID NO: 54690
acauuucaaaucaucucuu

SEQ ID NO: 54772 - RNA, 19 nt, Artificial Sequence
  Description of Artificial Sequence: Synthetic oligonucleotide
  Sense strand starting at position 3005 of SEQ ID NO: 660
uagagucacggucaacaga

SEQ ID NO: 54773 - RNA, 19 nt, Artificial Sequence
  Description of Artificial Sequence: Synthetic oligonucleotide
  Antisense strand to SEQ ID NO: 54692
ucuguugaccgugacucua

SEQ ID NO: 54774 - RNA, 19 nt, Artificial Sequence
  Description of Artificial Sequence: Synthetic oligonucleotide
  Sense strand starting at position 3008 of SEQ ID NO: 660
agucacggucaacagaaua

SEQ ID NO: 54775 - RNA, 19 nt, Artificial Sequence
  Description of Artificial Sequence: Synthetic oligonucleotide
  Antisense strand to SEQ ID NO: 54694
uauucuguugaccgugacu

SEQ ID NO: 54776 - RNA, 19 nt, Artificial Sequence
  Description of Artificial Sequence: Synthetic oligonucleotide
  Sense strand starting at position 3024 of SEQ ID NO: 660
auacauaauuagcuugagu

SEQ ID NO: 54777 - RNA, 19 nt, Artificial Sequence
  Description of Artificial Sequence: Synthetic oligonucleotide
  Antisense strand to SEQ ID NO: 54696
acucaagcuaauuauguau

SEQ ID NO: 54778 - RNA, 19 nt, Artificial Sequence
  Description of Artificial Sequence: Synthetic oligonucleotide
  Sense strand starting at position 3050 of SEQ ID NO: 660
ggcugcuuacugcuaguau

SEQ ID NO: 54779 - RNA, 19 nt, Artificial Sequence
  Description of Artificial Sequence: Synthetic oligonucleotide
  Antisense strand to SEQ ID NO: 54698
auacuagcaguaagcagcc

SEQ ID NO: 54780 - RNA, 19 nt, Artificial Sequence
  Description of Artificial Sequence: Synthetic oligonucleotide
  Sense strand starting at position 3053 of SEQ ID NO: 660
ugcuuacugcuaguauguu

SEQ ID NO: 54781 - RNA, 19 nt, Artificial Sequence
  Description of Artificial Sequence: Synthetic oligonucleotide
  Antisense strand to SEQ ID NO: 54700
aacauacuagcaguaagca

SEQ ID NO: 54782 - RNA, 19 nt, Artificial Sequence
  Description of Artificial Sequence: Synthetic oligonucleotide
  Sense strand starting at position 3062 of SEQ ID NO: 660
cuaguauguuaauuaacug

SEQ ID NO: 54783 - RNA, 19 nt, Artificial Sequence
  Description of Artificial Sequence: Synthetic oligonucleotide
  Antisense strand to SEQ ID NO: 54702
caguuaauuaacauacuag

SEQ ID NO: 54784 - RNA, 19 nt, Artificial Sequence
  Description of Artificial Sequence: Synthetic oligonucleotide
  Sense strand starting at position 3137 of SEQ ID NO: 660
uuuacauuucuuugugcuu

SEQ ID NO: 54785 - RNA, 19 nt, Artificial Sequence
  Description of Artificial Sequence: Synthetic oligonucleotide
  Antisense strand to SEQ ID NO: 54704
aagcacaaagaaauguaaa

SEQ ID NO: 54786 - RNA, 19 nt, Artificial Sequence
  Description of Artificial Sequence: Synthetic oligonucleotide
  Sense strand starting at position 3289 of SEQ ID NO: 660
guauuauauuacuugugga

SEQ ID NO: 54787 - RNA, 19 nt, Artificial Sequence
  Description of Artificial Sequence: Synthetic oligonucleotide
  Antisense strand to SEQ ID NO: 54706
uccacaaguaauauaauac

SEQ ID NO: 54788 - RNA, 19 nt, Artificial Sequence
  Description of Artificial Sequence: Synthetic oligonucleotide
  Sense strand starting at position 3294 of SEQ ID NO: 660
auauuacuuguggaguuaa

SEQ ID NO: 54789 - RNA, 19 nt, Artificial Sequence
  Description of Artificial Sequence: Synthetic oligonucleotide
  Antisense strand to SEQ ID NO: 54708
uuaacuccacaaguaauau

SEQ ID NO: 54790 - RNA, 19 nt, Artificial Sequence
  Description of Artificial Sequence: Synthetic oligonucleotide
  Sense strand starting at position 3896 of SEQ ID NO: 660
gggaucucauaauugucua

SEQ ID NO: 54791 - RNA, 19 nt, Artificial Sequence
  Description of Artificial Sequence: Synthetic oligonucleotide
  Antisense strand to SEQ ID NO: 54710
uagacaauuaugagauccc

SEQ ID NO: 54792 - RNA, 19 nt, Artificial Sequence
  Description of Artificial Sequence: Synthetic oligonucleotide
  Sense strand starting at position 3910 of SEQ ID NO: 660
gucuaugagaaauguguua

SEQ ID NO: 54793 - RNA, 19 nt, Artificial Sequence
  Description of Artificial Sequence: Synthetic oligonucleotide
  Antisense strand to SEQ ID NO: 54712
uaacacauuucucauagac

SEQ ID NO: 54794 - RNA, 19 nt, Artificial Sequence
  Description of Artificial Sequence: Synthetic oligonucleotide
  Sense strand starting at position 3978 of SEQ ID NO: 660
caggucugauagucauauu

SEQ ID NO: 54795 - RNA, 19 nt, Artificial Sequence
  Description of Artificial Sequence: Synthetic oligonucleotide
  Antisense strand to SEQ ID NO: 54714
aauaugacuaucagaccug

SEQ ID NO: 54796 - RNA, 19 nt, Artificial Sequence
  Description of Artificial Sequence: Synthetic oligonucleotide
  Sense strand starting at position 108 of SEQ ID NO: 662
cuuuaagaggcuuaucuaa

SEQ ID NO: 54797 - RNA, 19 nt, Artificial Sequence
  Description of Artificial Sequence: Synthetic oligonucleotide
  Antisense strand to SEQ ID NO: 54716
uuagauaagccucuuaaag

SEQ ID NO: 54798 - RNA, 19 nt, Artificial Sequence
  Description of Artificial Sequence: Synthetic oligonucleotide
  Sense strand starting at position 110 of SEQ ID NO: 662
uuaagaggcuuaucuaaac

SEQ ID NO: 54799 - RNA, 19 nt, Artificial Sequence
  Description of Artificial Sequence: Synthetic oligonucleotide
  Antisense strand to SEQ ID NO: 54718
guuuagauaagccucuuaa

SEQ ID NO: 54800 - RNA, 19 nt, Artificial Sequence
  Description of Artificial Sequence: Synthetic oligonucleotide
  Sense strand starting at position 263 of SEQ ID NO: 662
gacauucuuccugacacga

SEQ ID NO: 54801 - RNA, 19 nt, Artificial Sequence
  Description of Artificial Sequence: Synthetic oligonucleotide
  Antisense strand to SEQ ID NO: 54720
ucgugucaggaagaauguc

SEQ ID NO: 54802 - RNA, 19 nt, Artificial Sequence
  Description of Artificial Sequence: Synthetic oligonucleotide
  Sense strand starting at position 350 of SEQ ID NO: 662
gucuuaccuuuguuuauuu

SEQ ID NO: 54803 - RNA, 19 nt, Artificial Sequence
  Description of Artificial Sequence: Synthetic oligonucleotide
  Antisense strand to SEQ ID NO: 54722
aaauaaacaaagguaagac

SEQ ID NO: 54804 - RNA, 19 nt, Artificial Sequence
  Description of Artificial Sequence: Synthetic oligonucleotide
  Sense strand starting at position 517 of SEQ ID NO: 662
augugugagcgugcauaca

SEQ ID NO: 54805 - RNA, 19 nt, Artificial Sequence
  Description of Artificial Sequence: Synthetic oligonucleotide
  Antisense strand to SEQ ID NO: 54724
uguaugcacgcucacacau

SEQ ID NO: 54806 - RNA, 19 nt, Artificial Sequence
  Description of Artificial Sequence: Synthetic oligonucleotide
  Sense strand starting at position 652 of SEQ ID NO: 662
guggacaucuaccuauaau

SEQ ID NO: 54807 - RNA, 19 nt, Artificial Sequence
  Description of Artificial Sequence: Synthetic oligonucleotide
  Antisense strand to SEQ ID NO: 54726
auuauagguagauguccac

SEQ ID NO: 54808 - RNA, 19 nt, Artificial Sequence
  Description of Artificial Sequence: Synthetic oligonucleotide
  Sense strand starting at position 717 of SEQ ID NO: 662
gagagaaauguuugccaag

SEQ ID NO: 54809 - RNA, 19 nt, Artificial Sequence
  Description of Artificial Sequence: Synthetic oligonucleotide
  Antisense strand to SEQ ID NO: 54728
cuuggcaaacauuucucuc

SEQ ID NO: 54810 - RNA, 19 nt, Artificial Sequence
  Description of Artificial Sequence: Synthetic oligonucleotide
  Sense strand starting at position 856 of SEQ ID NO: 662
ucuuaacaguagguugaaa

SEQ ID NO: 54811 - RNA, 19 nt, Artificial Sequence
  Description of Artificial Sequence: Synthetic oligonucleotide
  Antisense strand to SEQ ID NO: 54730
uuucaaccuacuguuaaga

SEQ ID NO: 54812 - RNA, 19 nt, Artificial Sequence
  Description of Artificial Sequence: Synthetic oligonucleotide
  Sense strand starting at position 858 of SEQ ID NO: 662
uuaacaguagguugaaauu

SEQ ID NO: 54813 - RNA, 19 nt, Artificial Sequence
  Description of Artificial Sequence: Synthetic oligonucleotide
  Antisense strand to SEQ ID NO: 54732
aauuucaaccuacuguuaa

SEQ ID NO: 54814 - RNA, 19 nt, Artificial Sequence
  Description of Artificial Sequence: Synthetic oligonucleotide
  Sense strand starting at position 864 of SEQ ID NO: 662
guagguugaaauuaaguuu

SEQ ID NO: 54815 - RNA, 19 nt, Artificial Sequence
  Description of Artificial Sequence: Synthetic oligonucleotide
  Antisense strand to SEQ ID NO: 54734
aaacuuaauuucaaccuac

SEQ ID NO: 54816 - RNA, 19 nt, Artificial Sequence
  Description of Artificial Sequence: Synthetic oligonucleotide
  Sense strand starting at position 867 of SEQ ID NO: 662
gguugaaauuaaguuuauc

SEQ ID NO: 54817 - RNA, 19 nt, Artificial Sequence
  Description of Artificial Sequence: Synthetic oligonucleotide
  Antisense strand to SEQ ID NO: 54736
gauaaacuuaauuucaacc

SEQ ID NO: 54818 - RNA, 19 nt, Artificial Sequence
  Description of Artificial Sequence: Synthetic oligonucleotide
  Sense strand starting at position 968 of SEQ ID NO: 662
uuuccaugugcauaaagau

SEQ ID NO: 54819 - RNA, 19 nt, Artificial Sequence
  Description of Artificial Sequence: Synthetic oligonucleotide
  Antisense strand to SEQ ID NO: 54738
aucuuuaugcacauggaaa

SEQ ID NO: 54820 - RNA, 19 nt, Artificial Sequence
  Description of Artificial Sequence: Synthetic oligonucleotide
  Sense strand starting at position 1009 of SEQ ID NO: 662
gcuuguaagaacgaaagua

SEQ ID NO: 54821 - RNA, 19 nt, Artificial Sequence
  Description of Artificial Sequence: Synthetic oligonucleotide
  Antisense strand to SEQ ID NO: 54740
uacuuucguucuuacaagc

SEQ ID NO: 54822 - RNA, 19 nt, Artificial Sequence
  Description of Artificial Sequence: Synthetic oligonucleotide
  Sense strand starting at position 1066 of SEQ ID NO: 662
ccacacucugagcaguauu

SEQ ID NO: 54823 - RNA, 19 nt, Artificial Sequence
  Description of Artificial Sequence: Synthetic oligonucleotide
  Antisense strand to SEQ ID NO: 54742
aauacugcucagagugugg

SEQ ID NO: 54824 - RNA, 19 nt, Artificial Sequence
  Description of Artificial Sequence: Synthetic oligonucleotide
  Sense strand starting at position 1183 of SEQ ID NO: 662
ugauuugucaguuaagugc

SEQ ID NO: 54825 - RNA, 19 nt, Artificial Sequence
  Description of Artificial Sequence: Synthetic oligonucleotide
  Antisense strand to SEQ ID NO: 54744
gcacuuaacugacaaauca

SEQ ID NO: 54826 - RNA, 19 nt, Artificial Sequence
  Description of Artificial Sequence: Synthetic oligonucleotide
  Sense strand starting at position 1201 of SEQ ID NO: 662
cugacuuaacgcuaaccau

SEQ ID NO: 54827 - RNA, 19 nt, Artificial Sequence
  Description of Artificial Sequence: Synthetic oligonucleotide
  Antisense strand to SEQ ID NO: 54746
augguuagcguuaagucag

SEQ ID NO: 54828 - RNA, 19 nt, Artificial Sequence
  Description of Artificial Sequence: Synthetic oligonucleotide
  Sense strand starting at position 1264 of SEQ ID NO: 662
uaaauuguucucugaagga

SEQ ID NO: 54829 - RNA, 19 nt, Artificial Sequence
  Description of Artificial Sequence: Synthetic oligonucleotide
  Antisense strand to SEQ ID NO: 54748
uccuucagagaacaauuua

SEQ ID NO: 54830 - RNA, 19 nt, Artificial Sequence
  Description of Artificial Sequence: Synthetic oligonucleotide
  Sense strand starting at position 1268 of SEQ ID NO: 662
uuguucucugaaggagaau

SEQ ID NO: 54831 - RNA, 19 nt, Artificial Sequence
  Description of Artificial Sequence: Synthetic oligonucleotide
  Antisense strand to SEQ ID NO: 54750
auucuccuucagagaacaa

SEQ ID NO: 54832 - RNA, 19 nt, Artificial Sequence
  Description of Artificial Sequence: Synthetic oligonucleotide
  Sense strand starting at position 1368 of SEQ ID NO: 662
auaagaggcccucaauagu

SEQ ID NO: 54833 - RNA, 19 nt, Artificial Sequence
  Description of Artificial Sequence: Synthetic oligonucleotide
  Antisense strand to SEQ ID NO: 54752
acuauugagggccucuuau

SEQ ID NO: 54834 - RNA, 19 nt, Artificial Sequence
  Description of Artificial Sequence: Synthetic oligonucleotide
  Sense strand starting at position 1371 of SEQ ID NO: 662
agaggcccucaauaguaua

SEQ ID NO: 54835 - RNA, 19 nt, Artificial Sequence
  Description of Artificial Sequence: Synthetic oligonucleotide
  Antisense strand to SEQ ID NO: 54754
uauacuauugagggccucu

SEQ ID NO: 54836 - RNA, 19 nt, Artificial Sequence
  Description of Artificial Sequence: Synthetic oligonucleotide
  Sense strand starting at position 1507 of SEQ ID NO: 662
auaagaagugacugucaca

SEQ ID NO: 54837 - RNA, 19 nt, Artificial Sequence
  Description of Artificial Sequence: Synthetic oligonucleotide
  Antisense strand to SEQ ID NO: 54756
ugugacagucacuucuuau

SEQ ID NO: 54838 - RNA, 19 nt, Artificial Sequence
  Description of Artificial Sequence: Synthetic oligonucleotide
  Sense strand starting at position 1579 of SEQ ID NO: 662
agagaacaauucucgacuu

SEQ ID NO: 54839 - RNA, 19 nt, Artificial Sequence
  Description of Artificial Sequence: Synthetic oligonucleotide
  Antisense strand to SEQ ID NO: 54758
aagucgagaauuguucucu

SEQ ID NO: 54840 - RNA, 19 nt, Artificial Sequence
  Description of Artificial Sequence: Synthetic oligonucleotide
  Sense strand starting at position 1684 of SEQ ID NO: 662
cugaaucaguguguaaaga

SEQ ID NO: 54841 - RNA, 19 nt, Artificial Sequence
  Description of Artificial Sequence: Synthetic oligonucleotide
  Antisense strand to SEQ ID NO: 54760
ucuuuacacacugauucag

SEQ ID NO: 54842 - RNA, 19 nt, Artificial Sequence
  Description of Artificial Sequence: Synthetic oligonucleotide
  Sense strand starting at position 1685 of SEQ ID NO: 662
ugaaucaguguguaaagau

SEQ ID NO: 54843 - RNA, 19 nt, Artificial Sequence
  Description of Artificial Sequence: Synthetic oligonucleotide
  Antisense strand to SEQ ID NO: 54762
aucuuuacacacugauuca

SEQ ID NO: 54844 - RNA, 19 nt, Artificial Sequence
  Description of Artificial Sequence: Synthetic oligonucleotide
  Sense strand starting at position 1867 of SEQ ID NO: 662
aucaaaguuuccuugacag

SEQ ID NO: 54845 - RNA, 19 nt, Artificial Sequence
  Description of Artificial Sequence: Synthetic oligonucleotide
  Antisense strand to SEQ ID NO: 54764
cugucaaggaaacuuugau

SEQ ID NO: 54846 - RNA, 19 nt, Artificial Sequence
  Description of Artificial Sequence: Synthetic oligonucleotide
  Sense strand starting at position 1988 of SEQ ID NO: 662
ccgauuggagcuuauuaau

SEQ ID NO: 54847 - RNA, 19 nt, Artificial Sequence
  Description of Artificial Sequence: Synthetic oligonucleotide
  Antisense strand to SEQ ID NO: 54766
auuaauaagcuccaaucgg

SEQ ID NO: 54848 - RNA, 19 nt, Artificial Sequence
  Description of Artificial Sequence: Synthetic oligonucleotide
  Sense strand starting at position 2009 of SEQ ID NO: 662
gaaguagggcuuuacauau

SEQ ID NO: 54849 - RNA, 19 nt, Artificial Sequence
  Description of Artificial Sequence: Synthetic oligonucleotide
  Antisense strand to SEQ ID NO: 54768
auauguaaagcccuacuuc

SEQ ID NO: 54850 - RNA, 19 nt, Artificial Sequence
  Description of Artificial Sequence: Synthetic oligonucleotide
  Sense strand starting at position 2328 of SEQ ID NO: 662
ggauuugccuuugauuucu

SEQ ID NO: 54851 - RNA, 19 nt, Artificial Sequence
  Description of Artificial Sequence: Synthetic oligonucleotide
  Antisense strand to SEQ ID NO: 54770
agaaaucaaaggcaaaucc

SEQ ID NO: 54852 - RNA, 19 nt, Artificial Sequence
  Description of Artificial Sequence: Synthetic oligonucleotide
  Sense strand starting at position 2394 of SEQ ID NO: 662
caguuaauuugggaaagga

SEQ ID NO: 54853 - RNA, 19 nt, Artificial Sequence
  Description of Artificial Sequence: Synthetic oligonucleotide
  Antisense strand to SEQ ID NO: 54772
uccuuucccaaauuaacug

SEQ ID NO: 54854 - RNA, 19 nt, Artificial Sequence
  Description of Artificial Sequence: Synthetic oligonucleotide
  Sense strand starting at position 2408 of SEQ ID NO: 662
aaggauucugcggaaggua

SEQ ID NO: 54855 - RNA, 19 nt, Artificial Sequence
  Description of Artificial Sequence: Synthetic oligonucleotide
  Antisense strand to SEQ ID NO: 54774
uaccuuccgcagaauccuu

SEQ ID NO: 54856 - RNA, 19 nt, Artificial Sequence
  Description of Artificial Sequence: Synthetic oligonucleotide
  Sense strand starting at position 2676 of SEQ ID NO: 662
uugaaagaaugccuaagua

SEQ ID NO: 54857 - RNA, 19 nt, Artificial Sequence
  Description of Artificial Sequence: Synthetic oligonucleotide
  Antisense strand to SEQ ID NO: 54776
uacuuaggcauucuuucaa

SEQ ID NO: 54858 - RNA, 19 nt, Artificial Sequence
  Description of Artificial Sequence: Synthetic oligonucleotide
  Sense strand starting at position 3126 of SEQ ID NO: 662
cagucuggucacuauaaga

SEQ ID NO: 54859 - RNA, 19 nt, Artificial Sequence
  Description of Artificial Sequence: Synthetic oligonucleotide
  Antisense strand to SEQ ID NO: 54778
ucuuauagugaccagacug

SEQ ID NO: 54860 - RNA, 19 nt, Artificial Sequence
  Description of Artificial Sequence: Synthetic oligonucleotide
  Sense strand starting at position 3261 of SEQ ID NO: 662
uguguacaccgugucuuua

SEQ ID NO: 54861 - RNA, 19 nt, Artificial Sequence
  Description of Artificial Sequence: Synthetic oligonucleotide
  Antisense strand to SEQ ID NO: 54780
uaaagacacgguguacaca

SEQ ID NO: 54862 - RNA, 19 nt, Artificial Sequence
  Description of Artificial Sequence: Synthetic oligonucleotide
  Sense strand starting at position 3269 of SEQ ID NO: 662
ccgugucuuuaauuuccau

SEQ ID NO: 54863 - RNA, 19 nt, Artificial Sequence
  Description of Artificial Sequence: Synthetic oligonucleotide
  Antisense strand to SEQ ID NO: 54782
auggaaauuaaagacacgg

SEQ ID NO: 54864 - RNA, 19 nt, Artificial Sequence
  Description of Artificial Sequence: Synthetic oligonucleotide
  Sense strand starting at position 3342 of SEQ ID NO: 662
gcaaauguacauuggaaua

SEQ ID NO: 54865 - RNA, 19 nt, Artificial Sequence
  Description of Artificial Sequence: Synthetic oligonucleotide
  Antisense strand to SEQ ID NO: 54784
uauuccaauguacauuugc

SEQ ID NO: 54866 - RNA, 19 nt, Artificial Sequence
  Description of Artificial Sequence: Synthetic oligonucleotide
  Sense strand starting at position 3694 of SEQ ID NO: 662
ccuuguauuuagcuauauc

SEQ ID NO: 54867 - RNA, 19 nt, Artificial Sequence
  Description of Artificial Sequence: Synthetic oligonucleotide
  Antisense strand to SEQ ID NO: 54786
gauauagcuaaauacaagg

SEQ ID NO: 54868 - RNA, 19 nt, Artificial Sequence
  Description of Artificial Sequence: Synthetic oligonucleotide
  Sense strand starting at position 3743 of SEQ ID NO: 662
guucuaaaugcauacaaag

SEQ ID NO: 54869 - RNA, 19 nt, Artificial Sequence
  Description of Artificial Sequence: Synthetic oligonucleotide
  Antisense strand to SEQ ID NO: 54788
cuuuguaugcauuuagaac

SEQ ID NO: 54870 - RNA, 19 nt, Artificial Sequence
  Description of Artificial Sequence: Synthetic oligonucleotide
  Sense strand starting at position 3868 of SEQ ID NO: 662
augugaacucugcaauuaa

SEQ ID NO: 54871 - RNA, 19 nt, Artificial Sequence
  Description of Artificial Sequence: Synthetic oligonucleotide
  Antisense strand to SEQ ID NO: 54790
uuaauugcagaguucacau

SEQ ID NO: 54872 - RNA, 19 nt, Artificial Sequence
  Description of Artificial Sequence: Synthetic oligonucleotide
  Sense strand starting at position 3889 of SEQ ID NO: 662
uguaaauuugguugugagc

SEQ ID NO: 54873 - RNA, 19 nt, Artificial Sequence
  Description of Artificial Sequence: Synthetic oligonucleotide
  Antisense strand to SEQ ID NO: 54792
gcucacaaccaaauuuaca

SEQ ID NO: 54874 - RNA, 19 nt, Artificial Sequence
  Description of Artificial Sequence: Synthetic oligonucleotide
  Sense strand starting at position 3919 of SEQ ID NO: 662
agagcuuugagauguagaa

SEQ ID NO: 54875 - RNA, 19 nt, Artificial Sequence
  Description of Artificial Sequence: Synthetic oligonucleotide
  Antisense strand to SEQ ID NO: 54794
uucuacaucucaaagcucu

SEQ ID NO: 54876 - RNA, 19 nt, Artificial Sequence
  Description of Artificial Sequence: Synthetic oligonucleotide
  Sense strand starting at position 28 of SEQ ID NO: 664
gccucuagugaaugggauu

SEQ ID NO: 54877 - RNA, 19 nt, Artificial Sequence
  Description of Artificial Sequence: Synthetic oligonucleotide
  Antisense strand to SEQ ID NO: 54796
aaucccauucacuagaggc

SEQ ID NO: 54878 - RNA, 19 nt, Artificial Sequence
  Description of Artificial Sequence: Synthetic oligonucleotide
  Sense strand starting at position 159 of SEQ ID NO: 664
cugggaguugcccagaaca

SEQ ID NO: 54879 - RNA, 19 nt, Artificial Sequence
  Description of Artificial Sequence: Synthetic oligonucleotide
  Antisense strand to SEQ ID NO: 54798
uguucugggcaacucccag

SEQ ID NO: 54880 - RNA, 19 nt, Artificial Sequence
  Description of Artificial Sequence: Synthetic oligonucleotide
  Sense strand starting at position 161 of SEQ ID NO: 664
gggaguugcccagaacacu

SEQ ID NO: 54881 - RNA, 19 nt, Artificial Sequence
  Description of Artificial Sequence: Synthetic oligonucleotide
  Antisense strand to SEQ ID NO: 54800
aguguucugggcaacuccc

SEQ ID NO: 54882 - RNA, 19 nt, Artificial Sequence
  Description of Artificial Sequence: Synthetic oligonucleotide
  Sense strand starting at position 213 of SEQ ID NO: 664
ggcagugugcucugcucua

SEQ ID NO: 54883 - RNA, 19 nt, Artificial Sequence
  Description of Artificial Sequence: Synthetic oligonucleotide
  Antisense strand to SEQ ID NO: 54802
uagagcagagcacacugcc

SEQ ID NO: 54884 - RNA, 19 nt, Artificial Sequence
  Description of Artificial Sequence: Synthetic oligonucleotide
  Sense strand starting at position 293 of SEQ ID NO: 664
gacuuuaguggccagaggu

SEQ ID NO: 54885 - RNA, 19 nt, Artificial Sequence
  Description of Artificial Sequence: Synthetic oligonucleotide
  Antisense strand to SEQ ID NO: 54804
accucuggccacuaaaguc

SEQ ID NO: 54886 - RNA, 19 nt, Artificial Sequence
  Description of Artificial Sequence: Synthetic oligonucleotide
  Sense strand starting at position 346 of SEQ ID NO: 664
gagcaagguucucuggaca

SEQ ID NO: 54887 - RNA, 19 nt, Artificial Sequence
  Description of Artificial Sequence: Synthetic oligonucleotide
  Antisense strand to SEQ ID NO: 54806
uguccagagaaccuugcuc

SEQ ID NO: 54888 - RNA, 19 nt, Artificial Sequence
  Description of Artificial Sequence: Synthetic oligonucleotide
  Sense strand starting at position 445 of SEQ ID NO: 664
aaccaauucuacguaggga

SEQ ID NO: 54889 - RNA, 19 nt, Artificial Sequence
  Description of Artificial Sequence: Synthetic oligonucleotide
  Antisense strand to SEQ ID NO: 54808
ucccuacguagaauugguu

SEQ ID NO: 54890 - RNA, 19 nt, Artificial Sequence
  Description of Artificial Sequence: Synthetic oligonucleotide
  Sense strand starting at position 492 of SEQ ID NO: 664
cagauagcacguuagauca

SEQ ID NO: 54891 - RNA, 19 nt, Artificial Sequence
  Description of Artificial Sequence: Synthetic oligonucleotide
  Antisense strand to SEQ ID NO: 54810
ugaucuaacgugcuaucug

SEQ ID NO: 54892 - RNA, 19 nt, Artificial Sequence
  Description of Artificial Sequence: Synthetic oligonucleotide
  Sense strand starting at position 500 of SEQ ID NO: 664
acguuagaucagugcugga

SEQ ID NO: 54893 - RNA, 19 nt, Artificial Sequence
  Description of Artificial Sequence: Synthetic oligonucleotide
  Antisense strand to SEQ ID NO: 54812
uccagcacugaucuaacgu

SEQ ID NO: 54894 - RNA, 19 nt, Artificial Sequence
  Description of Artificial Sequence: Synthetic oligonucleotide
  Sense strand starting at position 503 of SEQ ID NO: 664
uuagaucagugcuggaauu

SEQ ID NO: 54895 - RNA, 19 nt, Artificial Sequence
  Description of Artificial Sequence: Synthetic oligonucleotide
  Antisense strand to SEQ ID NO: 54814
aauuccagcacugaucuaa

SEQ ID NO: 54896 - RNA, 19 nt, Artificial Sequence
  Description of Artificial Sequence: Synthetic oligonucleotide
  Sense strand starting at position 504 of SEQ ID NO: 664
uagaucagugcuggaauua

SEQ ID NO: 54897 - RNA, 19 nt, Artificial Sequence
  Description of Artificial Sequence: Synthetic oligonucleotide
  Antisense strand to SEQ ID NO: 54816
uaauuccagcacugaucua

SEQ ID NO: 54898 - RNA, 19 nt, Artificial Sequence
  Description of Artificial Sequence: Synthetic oligonucleotide
  Sense strand starting at position 531 of SEQ ID NO: 664
ccugcuugaugccuugaca

SEQ ID NO: 54899 - RNA, 19 nt, Artificial Sequence
  Description of Artificial Sequence: Synthetic oligonucleotide
  Antisense strand to SEQ ID NO: 54818
ugucaaggcaucaagcagg

SEQ ID NO: 54900 - RNA, 19 nt, Artificial Sequence
  Description of Artificial Sequence: Synthetic oligonucleotide
  Sense strand starting at position 534 of SEQ ID NO: 664
gcuugaugccuugacaguc

SEQ ID NO: 54901 - RNA, 19 nt, Artificial Sequence
  Description of Artificial Sequence: Synthetic oligonucleotide
  Antisense strand to SEQ ID NO: 54820
gacugucaaggcaucaagc

SEQ ID NO: 54902 - RNA, 19 nt, Artificial Sequence
  Description of Artificial Sequence: Synthetic oligonucleotide
  Sense strand starting at position 542 of SEQ ID NO: 664
ccuugacagucuuauacca

SEQ ID NO: 54903 - RNA, 19 nt, Artificial Sequence
  Description of Artificial Sequence: Synthetic oligonucleotide
  Antisense strand to SEQ ID NO: 54822
ugguauaagacugucaagg

SEQ ID NO: 54904 - RNA, 19 nt, Artificial Sequence
  Description of Artificial Sequence: Synthetic oligonucleotide
  Sense strand starting at position 616 of SEQ ID NO: 664
ccuccacacuugguuaaga

SEQ ID NO: 54905 - RNA, 19 nt, Artificial Sequence
  Description of Artificial Sequence: Synthetic oligonucleotide
  Antisense strand to SEQ ID NO: 54824
ucuuaaccaaguguggagg

SEQ ID NO: 54906 - RNA, 19 nt, Artificial Sequence
  Description of Artificial Sequence: Synthetic oligonucleotide
  Sense strand starting at position 617 of SEQ ID NO: 664
cuccacacuugguuaagaa

SEQ ID NO: 54907 - RNA, 19 nt, Artificial Sequence
  Description of Artificial Sequence: Synthetic oligonucleotide
  Antisense strand to SEQ ID NO: 54826
uucuuaaccaaguguggag

SEQ ID NO: 54908 - RNA, 19 nt, Artificial Sequence
  Description of Artificial Sequence: Synthetic oligonucleotide
  Sense strand starting at position 904 of SEQ ID NO: 664
cugagugcuagcuggaauu

SEQ ID NO: 54909 - RNA, 19 nt, Artificial Sequence
  Description of Artificial Sequence: Synthetic oligonucleotide
  Antisense strand to SEQ ID NO: 54828
aauuccagcuagcacucag

SEQ ID NO: 54910 - RNA, 19 nt, Artificial Sequence
  Description of Artificial Sequence: Synthetic oligonucleotide
  Sense strand starting at position 1000 of SEQ ID NO: 664
gcagcaauguaugcaugua

SEQ ID NO: 54911 - RNA, 19 nt, Artificial Sequence
  Description of Artificial Sequence: Synthetic oligonucleotide
  Antisense strand to SEQ ID NO: 54830
uacaugcauacauugcugc

SEQ ID NO: 54912 - RNA, 19 nt, Artificial Sequence
  Description of Artificial Sequence: Synthetic oligonucleotide
  Sense strand starting at position 1244 of SEQ ID NO: 664
uuugguagcgacgaaauca

SEQ ID NO: 54913 - RNA, 19 nt, Artificial Sequence
  Description of Artificial Sequence: Synthetic oligonucleotide
  Antisense strand to SEQ ID NO: 54832
ugauuucgucgcuaccaaa

SEQ ID NO: 54914 - RNA, 19 nt, Artificial Sequence
  Description of Artificial Sequence: Synthetic oligonucleotide
  Sense strand starting at position 1255 of SEQ ID NO: 664
cgaaaucaauccguacaca

SEQ ID NO: 54915 - RNA, 19 nt, Artificial Sequence
  Description of Artificial Sequence: Synthetic oligonucleotide
  Antisense strand to SEQ ID NO: 54834
uguguacggauugauuucg

SEQ ID NO: 54916 - RNA, 19 nt, Artificial Sequence
  Description of Artificial Sequence: Synthetic oligonucleotide
  Sense strand starting at position 1613 of SEQ ID NO: 664
ugugccuccucaggugaaa

SEQ ID NO: 54917 - RNA, 19 nt, Artificial Sequence
  Description of Artificial Sequence: Synthetic oligonucleotide
  Antisense strand to SEQ ID NO: 54836
uuucaccugaggaggcaca

SEQ ID NO: 54918 - RNA, 19 nt, Artificial Sequence
  Description of Artificial Sequence: Synthetic oligonucleotide
  Sense strand starting at position 2489 of SEQ ID NO: 664
gggccagacugaguuaaag

SEQ ID NO: 54919 - RNA, 19 nt, Artificial Sequence
  Description of Artificial Sequence: Synthetic oligonucleotide
  Antisense strand to SEQ ID NO: 54838
cuuuaacucagucuggccc

SEQ ID NO: 54920 - RNA, 19 nt, Artificial Sequence
  Description of Artificial Sequence: Synthetic oligonucleotide
  Sense strand starting at position 2516 of SEQ ID NO: 664
ccauccugagcgugugaau

SEQ ID NO: 54921 - RNA, 19 nt, Artificial Sequence
  Description of Artificial Sequence: Synthetic oligonucleotide
  Antisense strand to SEQ ID NO: 54840
auucacacgcucaggaugg

SEQ ID NO: 54922 - RNA, 19 nt, Artificial Sequence
  Description of Artificial Sequence: Synthetic oligonucleotide
  Sense strand starting at position 2791 of SEQ ID NO: 664
gccagauucuccuuugguc

SEQ ID NO: 54923 - RNA, 19 nt, Artificial Sequence
  Description of Artificial Sequence: Synthetic oligonucleotide
  Antisense strand to SEQ ID NO: 54842
gaccaaaggagaaucuggc

SEQ ID NO: 54924 - RNA, 19 nt, Artificial Sequence
  Description of Artificial Sequence: Synthetic oligonucleotide
  Sense strand starting at position 2794 of SEQ ID NO: 664
agauucuccuuuggucauu

SEQ ID NO: 54925 - RNA, 19 nt, Artificial Sequence
  Description of Artificial Sequence: Synthetic oligonucleotide
  Antisense strand to SEQ ID NO: 54844
aaugaccaaaggagaaucu

SEQ ID NO: 54926 - RNA, 19 nt, Artificial Sequence
  Description of Artificial Sequence: Synthetic oligonucleotide
  Sense strand starting at position 2877 of SEQ ID NO: 664
ggaucucacuagucacuau

SEQ ID NO: 54927 - RNA, 19 nt, Artificial Sequence
  Description of Artificial Sequence: Synthetic oligonucleotide
  Antisense strand to SEQ ID NO: 54846
auagugacuagugagaucc

SEQ ID NO: 54928 - RNA, 19 nt, Artificial Sequence
  Description of Artificial Sequence: Synthetic oligonucleotide
  Sense strand starting at position 3034 of SEQ ID NO: 664
agcagaacuucugcaguga

SEQ ID NO: 54929 - RNA, 19 nt, Artificial Sequence
  Description of Artificial Sequence: Synthetic oligonucleotide
  Antisense strand to SEQ ID NO: 54848
ucacugcagaaguucugcu

SEQ ID NO: 54930 - RNA, 19 nt, Artificial Sequence
  Description of Artificial Sequence: Synthetic oligonucleotide
  Sense strand starting at position 3035 of SEQ ID NO: 664
gcagaacuucugcagugau

SEQ ID NO: 54931 - RNA, 19 nt, Artificial Sequence
  Description of Artificial Sequence: Synthetic oligonucleotide
  Antisense strand to SEQ ID NO: 54850
aucacugcagaaguucugc

SEQ ID NO: 54932 - RNA, 19 nt, Artificial Sequence
  Description of Artificial Sequence: Synthetic oligonucleotide
  Sense strand starting at position 3038 of SEQ ID NO: 664
gaacuucugcagugauuga

SEQ ID NO: 54933 - RNA, 19 nt, Artificial Sequence
  Description of Artificial Sequence: Synthetic oligonucleotide
  Antisense strand to SEQ ID NO: 54852
ucaaucacugcagaaguuc

SEQ ID NO: 54934 - RNA, 19 nt, Artificial Sequence
  Description of Artificial Sequence: Synthetic oligonucleotide
  Sense strand starting at position 3457 of SEQ ID NO: 664
gccacaugugccuaccaua

SEQ ID NO: 54935 - RNA, 19 nt, Artificial Sequence
  Description of Artificial Sequence: Synthetic oligonucleotide
  Antisense strand to SEQ ID NO: 54854
uaugguaggcacauguggc

SEQ ID NO: 54936 - RNA, 19 nt, Artificial Sequence
  Description of Artificial Sequence: Synthetic oligonucleotide
  Sense strand starting at position 3472 of SEQ ID NO: 664
cauauuggauagugaagga

SEQ ID NO: 54937 - RNA, 19 nt, Artificial Sequence
  Description of Artificial Sequence: Synthetic oligonucleotide
  Antisense strand to SEQ ID NO: 54856
uccuucacuauccaauaug

SEQ ID NO: 54938 - RNA, 19 nt, Artificial Sequence
  Description of Artificial Sequence: Synthetic oligonucleotide
  Sense strand starting at position 3568 of SEQ ID NO: 664
cuuccuuugcagugaggaa

SEQ ID NO: 54939 - RNA, 19 nt, Artificial Sequence
  Description of Artificial Sequence: Synthetic oligonucleotide
  Antisense strand to SEQ ID NO: 54858
uuccucacugcaaaggaag

SEQ ID NO: 54940 - RNA, 19 nt, Artificial Sequence
  Description of Artificial Sequence: Synthetic oligonucleotide
  Sense strand starting at position 3824 of SEQ ID NO: 664
uuacaugugcccugaagac

SEQ ID NO: 54941 - RNA, 19 nt, Artificial Sequence
  Description of Artificial Sequence: Synthetic oligonucleotide
  Antisense strand to SEQ ID NO: 54860
gucuucagggcacauguaa

SEQ ID NO: 54942 - RNA, 19 nt, Artificial Sequence
  Description of Artificial Sequence: Synthetic oligonucleotide
  Sense strand starting at position 3869 of SEQ ID NO: 664
agacuucagccugacgagu

SEQ ID NO: 54943 - RNA, 19 nt, Artificial Sequence
  Description of Artificial Sequence: Synthetic oligonucleotide
  Antisense strand to SEQ ID NO: 54862
acucgucaggcugaagucu

SEQ ID NO: 54944 - RNA, 19 nt, Artificial Sequence
  Description of Artificial Sequence: Synthetic oligonucleotide
  Sense strand starting at position 3880 of SEQ ID NO: 664
ugacgagucccagguggau

SEQ ID NO: 54945 - RNA, 19 nt, Artificial Sequence
  Description of Artificial Sequence: Synthetic oligonucleotide
  Antisense strand to SEQ ID NO: 54864
auccaccugggacucguca

SEQ ID NO: 54946 - RNA, 19 nt, Artificial Sequence
  Description of Artificial Sequence: Synthetic oligonucleotide
  Sense strand starting at position 12 of SEQ ID NO: 665
uguaaacacugucuuuaau

SEQ ID NO: 54947 - RNA, 19 nt, Artificial Sequence
  Description of Artificial Sequence: Synthetic oligonucleotide
  Antisense strand to SEQ ID NO: 54866
auuaaagacaguguuuaca

SEQ ID NO: 54948 - RNA, 19 nt, Artificial Sequence
  Description of Artificial Sequence: Synthetic oligonucleotide
  Sense strand starting at position 140 of SEQ ID NO: 665
ugucuucuauuacuagaca

SEQ ID NO: 54949 - RNA, 19 nt, Artificial Sequence
  Description of Artificial Sequence: Synthetic oligonucleotide
  Antisense strand to SEQ ID NO: 54868
ugucuaguaauagaagaca

SEQ ID NO: 54950 - RNA, 19 nt, Artificial Sequence
  Description of Artificial Sequence: Synthetic oligonucleotide
  Sense strand starting at position 300 of SEQ ID NO: 665
ggaagauucuucccagcca

SEQ ID NO: 54951 - RNA, 19 nt, Artificial Sequence
  Description of Artificial Sequence: Synthetic oligonucleotide
  Antisense strand to SEQ ID NO: 54870
uggcugggaagaaucuucc

SEQ ID NO: 54952 - RNA, 19 nt, Artificial Sequence
  Description of Artificial Sequence: Synthetic oligonucleotide
  Sense strand starting at position 510 of SEQ ID NO: 665
ggagucuugcugcgauuug

SEQ ID NO: 54953 - RNA, 19 nt, Artificial Sequence
  Description of Artificial Sequence: Synthetic oligonucleotide
  Antisense strand to SEQ ID NO: 54872
caaaucgcagcaagacucc

SEQ ID NO: 54954 - RNA, 19 nt, Artificial Sequence
  Description of Artificial Sequence: Synthetic oligonucleotide
  Sense strand starting at position 750 of SEQ ID NO: 665
gggacaaauuccuuaucuu

SEQ ID NO: 54955 - RNA, 19 nt, Artificial Sequence
  Description of Artificial Sequence: Synthetic oligonucleotide
  Antisense strand to SEQ ID NO: 54874
aagauaaggaauuuguccc

SEQ ID NO: 54956 - RNA, 19 nt, Artificial Sequence
  Description of Artificial Sequence: Synthetic oligonucleotide
  Sense strand starting at position 1828 of SEQ ID NO: 665
cuuccauccucagcagaga

SEQ ID NO: 54957 - RNA, 19 nt, Artificial Sequence
  Description of Artificial Sequence: Synthetic oligonucleotide
  Antisense strand to SEQ ID NO: 54876
ucucugcugaggauggaag

SEQ ID NO: 54958 - RNA, 19 nt, Artificial Sequence
  Description of Artificial Sequence: Synthetic oligonucleotide
  Sense strand starting at position 2296 of SEQ ID NO: 665
cccgucuuucuccagaaau

SEQ ID NO: 54959 - RNA, 19 nt, Artificial Sequence
  Description of Artificial Sequence: Synthetic oligonucleotide
  Antisense strand to SEQ ID NO: 54878
auuucuggagaaagacggg

SEQ ID NO: 54960 - RNA, 19 nt, Artificial Sequence
  Description of Artificial Sequence: Synthetic oligonucleotide
  Sense strand starting at position 2298 of SEQ ID NO: 665
cgucuuucuccagaaaugg

SEQ ID NO: 54961 - RNA, 19 nt, Artificial Sequence
  Description of Artificial Sequence: Synthetic oligonucleotide
  Antisense strand to SEQ ID NO: 54880
ccauuucuggagaaagacg

SEQ ID NO: 54962 - RNA, 19 nt, Artificial Sequence
  Description of Artificial Sequence: Synthetic oligonucleotide
  Sense strand starting at position 2626 of SEQ ID NO: 665
cgggcaauuugucugucca

SEQ ID NO: 54963 - RNA, 19 nt, Artificial Sequence
  Description of Artificial Sequence: Synthetic oligonucleotide
  Antisense strand to SEQ ID NO: 54882
uggacagacaaauugcccg

SEQ ID NO: 54964 - RNA, 19 nt, Artificial Sequence
  Description of Artificial Sequence: Synthetic oligonucleotide
  Sense strand starting at position 2627 of SEQ ID NO: 665
gggcaauuugucuguccaa

SEQ ID NO: 54965 - RNA, 19 nt, Artificial Sequence
  Description of Artificial Sequence: Synthetic oligonucleotide
  Antisense strand to SEQ ID NO: 54884
uuggacagacaaauugccc

SEQ ID NO: 54966 - RNA, 19 nt, Artificial Sequence
  Description of Artificial Sequence: Synthetic oligonucleotide
  Sense strand starting at position 2628 of SEQ ID NO: 665
ggcaauuugucuguccaaa

SEQ ID NO: 54967 - RNA, 19 nt, Artificial Sequence
  Description of Artificial Sequence: Synthetic oligonucleotide
  Antisense strand to SEQ ID NO: 54886
uuuggacagacaaauugcc

SEQ ID NO: 54968 - RNA, 19 nt, Artificial Sequence
  Description of Artificial Sequence: Synthetic oligonucleotide
  Sense strand starting at position 2662 of SEQ ID NO: 665
ccuuuagaggcucauuaag

SEQ ID NO: 54969 - RNA, 19 nt, Artificial Sequence
  Description of Artificial Sequence: Synthetic oligonucleotide
  Antisense strand to SEQ ID NO: 54888
cuuaaugagccucuaaagg

SEQ ID NO: 54970 - RNA, 19 nt, Artificial Sequence
  Description of Artificial Sequence: Synthetic oligonucleotide
  Sense strand starting at position 2664 of SEQ ID NO: 665
uuuagaggcucauuaagga

SEQ ID NO: 54971 - RNA, 19 nt, Artificial Sequence
  Description of Artificial Sequence: Synthetic oligonucleotide
  Antisense strand to SEQ ID NO: 54890
uccuuaaugagccucuaaa

SEQ ID NO: 54972 - RNA, 19 nt, Artificial Sequence
  Description of Artificial Sequence: Synthetic oligonucleotide
  Sense strand starting at position 2777 of SEQ ID NO: 665
gggaguagugaggaucagu

SEQ ID NO: 54973 - RNA, 19 nt, Artificial Sequence
  Description of Artificial Sequence: Synthetic oligonucleotide
  Antisense strand to SEQ ID NO: 54892
acugauccucacuacuccc

SEQ ID NO: 54974 - RNA, 19 nt, Artificial Sequence
  Description of Artificial Sequence: Synthetic oligonucleotide
  Sense strand starting at position 2902 of SEQ ID NO: 665
guaccucugcucuaguaag

SEQ ID NO: 54975 - RNA, 19 nt, Artificial Sequence
  Description of Artificial Sequence: Synthetic oligonucleotide
  Antisense strand to SEQ ID NO: 54894
cuuacuagagcagagguac

SEQ ID NO: 54976 - RNA, 19 nt, Artificial Sequence
  Description of Artificial Sequence: Synthetic oligonucleotide
  Sense strand starting at position 2951 of SEQ ID NO: 665
uggagauauuaguuguuac

SEQ ID NO: 54977 - RNA, 19 nt, Artificial Sequence
  Description of Artificial Sequence: Synthetic oligonucleotide
  Antisense strand to SEQ ID NO: 54896
guaacaacuaauaucucca

SEQ ID NO: 54978 - RNA, 19 nt, Artificial Sequence
  Description of Artificial Sequence: Synthetic oligonucleotide
  Sense strand starting at position 2952 of SEQ ID NO: 665
ggagauauuaguuguuaca

SEQ ID NO: 54979 - RNA, 19 nt, Artificial Sequence
  Description of Artificial Sequence: Synthetic oligonucleotide
  Antisense strand to SEQ ID NO: 54898
uguaacaacuaauaucucc

SEQ ID NO: 54980 - RNA, 19 nt, Artificial Sequence
  Description of Artificial Sequence: Synthetic oligonucleotide
  Sense strand starting at position 3007 of SEQ ID NO: 665
uguguagcucuugauaaau

SEQ ID NO: 54981 - RNA, 19 nt, Artificial Sequence
  Description of Artificial Sequence: Synthetic oligonucleotide
  Antisense strand to SEQ ID NO: 54900
auuuaucaagagcuacaca

SEQ ID NO: 54982 - RNA, 19 nt, Artificial Sequence
  Description of Artificial Sequence: Synthetic oligonucleotide
  Sense strand starting at position 3204 of SEQ ID NO: 665
guaggaacugucuauauau

SEQ ID NO: 54983 - RNA, 19 nt, Artificial Sequence
  Description of Artificial Sequence: Synthetic oligonucleotide
  Antisense strand to SEQ ID NO: 54902
auauauagacaguuccuac

SEQ ID NO: 54984 - RNA, 19 nt, Artificial Sequence
  Description of Artificial Sequence: Synthetic oligonucleotide
  Sense strand starting at position 3269 of SEQ ID NO: 665
auaucagauguuugcuaga

SEQ ID NO: 54985 - RNA, 19 nt, Artificial Sequence
  Description of Artificial Sequence: Synthetic oligonucleotide
  Antisense strand to SEQ ID NO: 54904
ucuagcaaacaucugauau

SEQ ID NO: 54986 - RNA, 19 nt, Artificial Sequence
  Description of Artificial Sequence: Synthetic oligonucleotide
  Sense strand starting at position 3271 of SEQ ID NO: 665
aucagauguuugcuagaac

SEQ ID NO: 54987 - RNA, 19 nt, Artificial Sequence
  Description of Artificial Sequence: Synthetic oligonucleotide
  Antisense strand to SEQ ID NO: 54906
guucuagcaaacaucugau

SEQ ID NO: 54988 - RNA, 19 nt, Artificial Sequence
  Description of Artificial Sequence: Synthetic oligonucleotide
  Sense strand starting at position 3274 of SEQ ID NO: 665
agauguuugcuagaacauu

SEQ ID NO: 54989 - RNA, 19 nt, Artificial Sequence
  Description of Artificial Sequence: Synthetic oligonucleotide
  Antisense strand to SEQ ID NO: 54908
aauguucuagcaaacaucu

SEQ ID NO: 54990 - RNA, 19 nt, Artificial Sequence
  Description of Artificial Sequence: Synthetic oligonucleotide
  Sense strand starting at position 3359 of SEQ ID NO: 665
gaccuuaguuaagugacuu

SEQ ID NO: 54991 - RNA, 19 nt, Artificial Sequence
  Description of Artificial Sequence: Synthetic oligonucleotide
  Antisense strand to SEQ ID NO: 54910
aagucacuuaacuaagguc

SEQ ID NO: 54992 - RNA, 19 nt, Artificial Sequence
  Description of Artificial Sequence: Synthetic oligonucleotide
  Sense strand starting at position 3363 of SEQ ID NO: 665
uuaguuaagugacuuaacu

SEQ ID NO: 54993 - RNA, 19 nt, Artificial Sequence
  Description of Artificial Sequence: Synthetic oligonucleotide
  Antisense strand to SEQ ID NO: 54912
aguuaagucacuuaacuaa

SEQ ID NO: 54994 - RNA, 19 nt, Artificial Sequence
  Description of Artificial Sequence: Synthetic oligonucleotide
  Sense strand starting at position 3429 of SEQ ID NO: 665
uacugaugugauuguuauu

SEQ ID NO: 54995 - RNA, 19 nt, Artificial Sequence
  Description of Artificial Sequence: Synthetic oligonucleotide
  Antisense strand to SEQ ID NO: 54914
aauaacaaucacaucagua

SEQ ID NO: 54996 - RNA, 19 nt, Artificial Sequence
  Description of Artificial Sequence: Synthetic oligonucleotide
  Sense strand starting at position 3434 of SEQ ID NO: 665
augugauuguuauuagaug

SEQ ID NO: 54997 - RNA, 19 nt, Artificial Sequence
  Description of Artificial Sequence: Synthetic oligonucleotide
  Antisense strand to SEQ ID NO: 54916
caucuaauaacaaucacau

SEQ ID NO: 54998 - RNA, 19 nt, Artificial Sequence
  Description of Artificial Sequence: Synthetic oligonucleotide
  Sense strand starting at position 3451 of SEQ ID NO: 665
uguguuaauacauguagag

SEQ ID NO: 54999 - RNA, 19 nt, Artificial Sequence
  Description of Artificial Sequence: Synthetic oligonucleotide
  Antisense strand to SEQ ID NO: 54918
cucuacauguauuaacaca

SEQ ID NO: 55000 - RNA, 19 nt, Artificial Sequence
  Description of Artificial Sequence: Synthetic oligonucleotide
  Sense strand starting at position 3453 of SEQ ID NO: 665
uguuaauacauguagagug

SEQ ID NO: 55001 - RNA, 19 nt, Artificial Sequence
  Description of Artificial Sequence: Synthetic oligonucleotide
  Antisense strand to SEQ ID NO: 54920
cacucuacauguauuaaca

SEQ ID NO: 55002 - RNA, 19 nt, Artificial Sequence
  Description of Artificial Sequence: Synthetic oligonucleotide
  Sense strand starting at position 3477 of SEQ ID NO: 665
aacagagaaugguauauuu

SEQ ID NO: 55003 - RNA, 19 nt, Artificial Sequence
  Description of Artificial Sequence: Synthetic oligonucleotide
  Antisense strand to SEQ ID NO: 54922
aaauauaccauucucuguu

SEQ ID NO: 55004 - RNA, 19 nt, Artificial Sequence
  Description of Artificial Sequence: Synthetic oligonucleotide
  Sense strand starting at position 3580 of SEQ ID NO: 665
augcaaaucuuaguaauug

SEQ ID NO: 55005 - RNA, 19 nt, Artificial Sequence
  Description of Artificial Sequence: Synthetic oligonucleotide
  Antisense strand to SEQ ID NO: 54924
caauuacuaagauuugcau

SEQ ID NO: 55006 - RNA, 19 nt, Artificial Sequence
  Description of Artificial Sequence: Synthetic oligonucleotide
  Sense strand starting at position 3624 of SEQ ID NO: 665
gggaaugaguaguuucuuc

SEQ ID NO: 55007 - RNA, 19 nt, Artificial Sequence
  Description of Artificial Sequence: Synthetic oligonucleotide
  Antisense strand to SEQ ID NO: 54926
gaagaaacuacucauuccc

SEQ ID NO: 55008 - RNA, 19 nt, Artificial Sequence
  Description of Artificial Sequence: Synthetic oligonucleotide
  Sense strand starting at position 3628 of SEQ ID NO: 665
augaguaguuucuucugaa

SEQ ID NO: 55009 - RNA, 19 nt, Artificial Sequence
  Description of Artificial Sequence: Synthetic oligonucleotide
  Antisense strand to SEQ ID NO: 54928
uucagaagaaacuacucau

SEQ ID NO: 55010 - RNA, 19 nt, Artificial Sequence
  Description of Artificial Sequence: Synthetic oligonucleotide
  Sense strand starting at position 3629 of SEQ ID NO: 665
ugaguaguuucuucugaaa

SEQ ID NO: 55011 - RNA, 19 nt, Artificial Sequence
  Description of Artificial Sequence: Synthetic oligonucleotide
  Antisense strand to SEQ ID NO: 54930
uuucagaagaaacuacuca

SEQ ID NO: 55012 - RNA, 19 nt, Artificial Sequence
  Description of Artificial Sequence: Synthetic oligonucleotide
  Sense strand starting at position 3675 of SEQ ID NO: 665
agcucaaauggucaugguu

SEQ ID NO: 55013 - RNA, 19 nt, Artificial Sequence
  Description of Artificial Sequence: Synthetic oligonucleotide
  Antisense strand to SEQ ID NO: 54932
aaccaugaccauuugagcu

SEQ ID NO: 55014 - RNA, 19 nt, Artificial Sequence
  Description of Artificial Sequence: Synthetic oligonucleotide
  Sense strand starting at position 3678 of SEQ ID NO: 665
ucaaauggucaugguuaga

SEQ ID NO: 55015 - RNA, 19 nt, Artificial Sequence
  Description of Artificial Sequence: Synthetic oligonucleotide
  Antisense strand to SEQ ID NO: 54934
ucuaaccaugaccauuuga

SEQ ID NO: 55016 - RNA, 19 nt, Artificial Sequence
  Description of Artificial Sequence: Synthetic oligonucleotide
  Sense strand starting at position 3718 of SEQ ID NO: 665
gagccugugcucuacaaag

SEQ ID NO: 55017 - RNA, 19 nt, Artificial Sequence
  Description of Artificial Sequence: Synthetic oligonucleotide
  Antisense strand to SEQ ID NO: 54936
cuuuguagagcacaggcuc

SEQ ID NO: 55018 - RNA, 19 nt, Artificial Sequence
  Description of Artificial Sequence: Synthetic oligonucleotide
  Sense strand starting at position 3754 of SEQ ID NO: 665
uagggacucuuucugcaua

SEQ ID NO: 55019 - RNA, 19 nt, Artificial Sequence
  Description of Artificial Sequence: Synthetic oligonucleotide
  Antisense strand to SEQ ID NO: 54938
uaugcagaaagagucccua

SEQ ID NO: 55020 - RNA, 19 nt, Artificial Sequence
  Description of Artificial Sequence: Synthetic oligonucleotide
  Sense strand starting at position 3756 of SEQ ID NO: 665
gggacucuuucugcauauu

SEQ ID NO: 55021 - RNA, 19 nt, Artificial Sequence
  Description of Artificial Sequence: Synthetic oligonucleotide
  Antisense strand to SEQ ID NO: 54940
aauaugcagaaagaguccc

SEQ ID NO: 55022 - RNA, 19 nt, Artificial Sequence
  Description of Artificial Sequence: Synthetic oligonucleotide
  Sense strand starting at position 3828 of SEQ ID NO: 665
cacaaaggaugucuugagu

SEQ ID NO: 55023 - RNA, 19 nt, Artificial Sequence
  Description of Artificial Sequence: Synthetic oligonucleotide
  Antisense strand to SEQ ID NO: 54942
acucaagacauccuuugug

SEQ ID NO: 55024 - RNA, 19 nt, Artificial Sequence
  Description of Artificial Sequence: Synthetic oligonucleotide
  Sense strand starting at position 3960 of SEQ ID NO: 665
ucuaaucacuggccugaaa

SEQ ID NO: 55025 - RNA, 19 nt, Artificial Sequence
  Description of Artificial Sequence: Synthetic oligonucleotide
  Antisense strand to SEQ ID NO: 54944
uuucaggccagugauuaga

SEQ ID NO: 55026 - RNA, 19 nt, Artificial Sequence
  Description of Artificial Sequence: Synthetic oligonucleotide
  Sense strand starting at position 218 of SEQ ID NO: 666
uguaaacacugucuuuaau

SEQ ID NO: 55027 - RNA, 19 nt, Artificial Sequence
  Description of Artificial Sequence: Synthetic oligonucleotide
  Antisense strand to SEQ ID NO: 54946
auuaaagacaguguuuaca

SEQ ID NO: 55028 - RNA, 19 nt, Artificial Sequence
  Description of Artificial Sequence: Synthetic oligonucleotide
  Sense strand starting at position 336 of SEQ ID NO: 666
ucaaacaguuugucuucua

SEQ ID NO: 55029 - RNA, 19 nt, Artificial Sequence
  Description of Artificial Sequence: Synthetic oligonucleotide
  Antisense strand to SEQ ID NO: 54948
uagaagacaaacuguuuga

SEQ ID NO: 55030 - RNA, 19 nt, Artificial Sequence
  Description of Artificial Sequence: Synthetic oligonucleotide
  Sense strand starting at position 346 of SEQ ID NO: 666
ugucuucuauuacuagaca

SEQ ID NO: 55031 - RNA, 19 nt, Artificial Sequence
  Description of Artificial Sequence: Synthetic oligonucleotide
  Antisense strand to SEQ ID NO: 54950
ugucuaguaauagaagaca

SEQ ID NO: 55032 - RNA, 19 nt, Artificial Sequence
  Description of Artificial Sequence: Synthetic oligonucleotide
  Sense strand starting at position 506 of SEQ ID NO: 666
ggaagauucuucccagcca

SEQ ID NO: 55033 - RNA, 19 nt, Artificial Sequence
  Description of Artificial Sequence: Synthetic oligonucleotide
  Antisense strand to SEQ ID NO: 54952
uggcugggaagaaucuucc

SEQ ID NO: 55034 - RNA, 19 nt, Artificial Sequence
  Description of Artificial Sequence: Synthetic oligonucleotide
  Sense strand starting at position 716 of SEQ ID NO: 666
ggagucuugcugcgauuug

SEQ ID NO: 55035 - RNA, 19 nt, Artificial Sequence
  Description of Artificial Sequence: Synthetic oligonucleotide
  Antisense strand to SEQ ID NO: 54954
caaaucgcagcaagacucc

SEQ ID NO: 55036 - RNA, 19 nt, Artificial Sequence
  Description of Artificial Sequence: Synthetic oligonucleotide
  Sense strand starting at position 956 of SEQ ID NO: 666
gggacaaauuccuuaucuu

SEQ ID NO: 55037 - RNA, 19 nt, Artificial Sequence
  Description of Artificial Sequence: Synthetic oligonucleotide
  Antisense strand to SEQ ID NO: 54956
aagauaaggaauuuguccc

SEQ ID NO: 55038 - RNA, 19 nt, Artificial Sequence
  Description of Artificial Sequence: Synthetic oligonucleotide
  Sense strand starting at position 2034 of SEQ ID NO: 666
cuuccauccucagcagaga

SEQ ID NO: 55039 - RNA, 19 nt, Artificial Sequence
  Description of Artificial Sequence: Synthetic oligonucleotide
  Antisense strand to SEQ ID NO: 54958
ucucugcugaggauggaag

SEQ ID NO: 55040 - RNA, 19 nt, Artificial Sequence
  Description of Artificial Sequence: Synthetic oligonucleotide
  Sense strand starting at position 2502 of SEQ ID NO: 666
cccgucuuucuccagaaau

SEQ ID NO: 55041 - RNA, 19 nt, Artificial Sequence
  Description of Artificial Sequence: Synthetic oligonucleotide
  Antisense strand to SEQ ID NO: 54960
auuucuggagaaagacggg

SEQ ID NO: 55042 - RNA, 19 nt, Artificial Sequence
  Description of Artificial Sequence: Synthetic oligonucleotide
  Sense strand starting at position 2504 of SEQ ID NO: 666
cgucuuucuccagaaaugg

SEQ ID NO: 55043 - RNA, 19 nt, Artificial Sequence
  Description of Artificial Sequence: Synthetic oligonucleotide
  Antisense strand to SEQ ID NO: 54962
ccauuucuggagaaagacg

SEQ ID NO: 55044 - RNA, 19 nt, Artificial Sequence
  Description of Artificial Sequence: Synthetic oligonucleotide
  Sense strand starting at position 2832 of SEQ ID NO: 666
cgggcaauuugucugucca

SEQ ID NO: 55045 - RNA, 19 nt, Artificial Sequence
  Description of Artificial Sequence: Synthetic oligonucleotide
  Antisense strand to SEQ ID NO: 54964
uggacagacaaauugcccg

SEQ ID NO: 55046 - RNA, 19 nt, Artificial Sequence
  Description of Artificial Sequence: Synthetic oligonucleotide
  Sense strand starting at position 2833 of SEQ ID NO: 666
gggcaauuugucuguccaa

SEQ ID NO: 55047 - RNA, 19 nt, Artificial Sequence
  Description of Artificial Sequence: Synthetic oligonucleotide
  Antisense strand to SEQ ID NO: 54966
uuggacagacaaauugccc

SEQ ID NO: 55048 - RNA, 19 nt, Artificial Sequence
  Description of Artificial Sequence: Synthetic oligonucleotide
  Sense strand starting at position 2834 of SEQ ID NO: 666
ggcaauuugucuguccaaa

SEQ ID NO: 55049 - RNA, 19 nt, Artificial Sequence
  Description of Artificial Sequence: Synthetic oligonucleotide
  Antisense strand to SEQ ID NO: 54968
uuuggacagacaaauugcc

SEQ ID NO: 55050 - RNA, 19 nt, Artificial Sequence
  Description of Artificial Sequence: Synthetic oligonucleotide
  Sense strand starting at position 2868 of SEQ ID NO: 666
ccuuuagaggcucauuaag

SEQ ID NO: 55051 - RNA, 19 nt, Artificial Sequence
  Description of Artificial Sequence: Synthetic oligonucleotide
  Antisense strand to SEQ ID NO: 54970
cuuaaugagccucuaaagg

SEQ ID NO: 55052 - RNA, 19 nt, Artificial Sequence
  Description of Artificial Sequence: Synthetic oligonucleotide
  Sense strand starting at position 2870 of SEQ ID NO: 666
uuuagaggcucauuaagga

SEQ ID NO: 55053 - RNA, 19 nt, Artificial Sequence
  Description of Artificial Sequence: Synthetic oligonucleotide
  Antisense strand to SEQ ID NO: 54972
uccuuaaugagccucuaaa

SEQ ID NO: 55054 - RNA, 19 nt, Artificial Sequence
  Description of Artificial Sequence: Synthetic oligonucleotide
  Sense strand starting at position 2983 of SEQ ID NO: 666
gggaguagugaggaucagu

SEQ ID NO: 55055 - RNA, 19 nt, Artificial Sequence
  Description of Artificial Sequence: Synthetic oligonucleotide
  Antisense strand to SEQ ID NO: 54974
acugauccucacuacuccc

SEQ ID NO: 55056 - RNA, 19 nt, Artificial Sequence
  Description of Artificial Sequence: Synthetic oligonucleotide
  Sense strand starting at position 3108 of SEQ ID NO: 666
guaccucugcucuaguaag

SEQ ID NO: 55057 - RNA, 19 nt, Artificial Sequence
  Description of Artificial Sequence: Synthetic oligonucleotide
  Antisense strand to SEQ ID NO: 54976
cuuacuagagcagagguac

SEQ ID NO: 55058 - RNA, 19 nt, Artificial Sequence
  Description of Artificial Sequence: Synthetic oligonucleotide
  Sense strand starting at position 3157 of SEQ ID NO: 666
uggagauauuaguuguuac

SEQ ID NO: 55059 - RNA, 19 nt, Artificial Sequence
  Description of Artificial Sequence: Synthetic oligonucleotide
  Antisense strand to SEQ ID NO: 54978
guaacaacuaauaucucca

SEQ ID NO: 55060 - RNA, 19 nt, Artificial Sequence
  Description of Artificial Sequence: Synthetic oligonucleotide
  Sense strand starting at position 3158 of SEQ ID NO: 666
ggagauauuaguuguuaca

SEQ ID NO: 55061 - RNA, 19 nt, Artificial Sequence
  Description of Artificial Sequence: Synthetic oligonucleotide
  Antisense strand to SEQ ID NO: 54980
uguaacaacuaauaucucc

SEQ ID NO: 55062 - RNA, 19 nt, Artificial Sequence
  Description of Artificial Sequence: Synthetic oligonucleotide
  Sense strand starting at position 3213 of SEQ ID NO: 666
uguguagcucuugauaaau

SEQ ID NO: 55063 - RNA, 19 nt, Artificial Sequence
  Description of Artificial Sequence: Synthetic oligonucleotide
  Antisense strand to SEQ ID NO: 54982
auuuaucaagagcuacaca

SEQ ID NO: 55064 - RNA, 19 nt, Artificial Sequence
  Description of Artificial Sequence: Synthetic oligonucleotide
  Sense strand starting at position 3410 of SEQ ID NO: 666
guaggaacugucuauauau

SEQ ID NO: 55065 - RNA, 19 nt, Artificial Sequence
  Description of Artificial Sequence: Synthetic oligonucleotide
  Antisense strand to SEQ ID NO: 54984
auauauagacaguuccuac

SEQ ID NO: 55066 - RNA, 19 nt, Artificial Sequence
  Description of Artificial Sequence: Synthetic oligonucleotide
  Sense strand starting at position 3475 of SEQ ID NO: 666
auaucagauguuugcuaga

SEQ ID NO: 55067 - RNA, 19 nt, Artificial Sequence
  Description of Artificial Sequence: Synthetic oligonucleotide
  Antisense strand to SEQ ID NO: 54986
ucuagcaaacaucugauau

SEQ ID NO: 55068 - RNA, 19 nt, Artificial Sequence
  Description of Artificial Sequence: Synthetic oligonucleotide
  Sense strand starting at position 3477 of SEQ ID NO: 666
aucagauguuugcuagaac

SEQ ID NO: 55069 - RNA, 19 nt, Artificial Sequence
  Description of Artificial Sequence: Synthetic oligonucleotide
  Antisense strand to SEQ ID NO: 54988
guucuagcaaacaucugau

SEQ ID NO: 55070 - RNA, 19 nt, Artificial Sequence
  Description of Artificial Sequence: Synthetic oligonucleotide
  Sense strand starting at position 3480 of SEQ ID NO: 666
agauguuugcuagaacauu

SEQ ID NO: 55071 - RNA, 19 nt, Artificial Sequence
  Description of Artificial Sequence: Synthetic oligonucleotide
  Antisense strand to SEQ ID NO: 54990
aauguucuagcaaacaucu

SEQ ID NO: 55072 - RNA, 19 nt, Artificial Sequence
  Description of Artificial Sequence: Synthetic oligonucleotide
  Sense strand starting at position 3565 of SEQ ID NO: 666
gaccuuaguuaagugacuu

SEQ ID NO: 55073 - RNA, 19 nt, Artificial Sequence
  Description of Artificial Sequence: Synthetic oligonucleotide
  Antisense strand to SEQ ID NO: 54992
aagucacuuaacuaagguc

SEQ ID NO: 55074 - RNA, 19 nt, Artificial Sequence
  Description of Artificial Sequence: Synthetic oligonucleotide
  Sense strand starting at position 3569 of SEQ ID NO: 666
uuaguuaagugacuuaacu

SEQ ID NO: 55075 - RNA, 19 nt, Artificial Sequence
  Description of Artificial Sequence: Synthetic oligonucleotide
  Antisense strand to SEQ ID NO: 54994
aguuaagucacuuaacuaa

SEQ ID NO: 55076 - RNA, 19 nt, Artificial Sequence
  Description of Artificial Sequence: Synthetic oligonucleotide
  Sense strand starting at position 3599 of SEQ ID NO: 666
guuccucaucuaugugaac

SEQ ID NO: 55077 - RNA, 19 nt, Artificial Sequence
  Description of Artificial Sequence: Synthetic oligonucleotide
  Antisense strand to SEQ ID NO: 54996
guucacauagaugaggaac

SEQ ID NO: 55078 - RNA, 19 nt, Artificial Sequence
  Description of Artificial Sequence: Synthetic oligonucleotide
  Sense strand starting at position 3635 of SEQ ID NO: 666
uacugaugugauuguuauu

SEQ ID NO: 55079 - RNA, 19 nt, Artificial Sequence
  Description of Artificial Sequence: Synthetic oligonucleotide
  Antisense strand to SEQ ID NO: 54998
aauaacaaucacaucagua

SEQ ID NO: 55080 - RNA, 19 nt, Artificial Sequence
  Description of Artificial Sequence: Synthetic oligonucleotide
  Sense strand starting at position 3640 of SEQ ID NO: 666
augugauuguuauuagaug

SEQ ID NO: 55081 - RNA, 19 nt, Artificial Sequence
  Description of Artificial Sequence: Synthetic oligonucleotide
  Antisense strand to SEQ ID NO: 55000
caucuaauaacaaucacau

SEQ ID NO: 55082 - RNA, 19 nt, Artificial Sequence
  Description of Artificial Sequence: Synthetic oligonucleotide
  Sense strand starting at position 3657 of SEQ ID NO: 666
uguguuaauacauguagag

SEQ ID NO: 55083 - RNA, 19 nt, Artificial Sequence
  Description of Artificial Sequence: Synthetic oligonucleotide
  Antisense strand to SEQ ID NO: 55002
cucuacauguauuaacaca

SEQ ID NO: 55084 - RNA, 19 nt, Artificial Sequence
  Description of Artificial Sequence: Synthetic oligonucleotide
  Sense strand starting at position 3659 of SEQ ID NO: 666
uguuaauacauguagagug

SEQ ID NO: 55085 - RNA, 19 nt, Artificial Sequence
  Description of Artificial Sequence: Synthetic oligonucleotide
  Antisense strand to SEQ ID NO: 55004
cacucuacauguauuaaca

SEQ ID NO: 55086 - RNA, 19 nt, Artificial Sequence
  Description of Artificial Sequence: Synthetic oligonucleotide
  Sense strand starting at position 3683 of SEQ ID NO: 666
aacagagaaugguauauuu

SEQ ID NO: 55087 - RNA, 19 nt, Artificial Sequence
  Description of Artificial Sequence: Synthetic oligonucleotide
  Antisense strand to SEQ ID NO: 55006
aaauauaccauucucuguu

SEQ ID NO: 55088 - RNA, 19 nt, Artificial Sequence
  Description of Artificial Sequence: Synthetic oligonucleotide
  Sense strand starting at position 3786 of SEQ ID NO: 666
augcaaaucuuaguaauug

SEQ ID NO: 55089 - RNA, 19 nt, Artificial Sequence
  Description of Artificial Sequence: Synthetic oligonucleotide
  Antisense strand to SEQ ID NO: 55008
caauuacuaagauuugcau

SEQ ID NO: 55090 - RNA, 19 nt, Artificial Sequence
  Description of Artificial Sequence: Synthetic oligonucleotide
  Sense strand starting at position 3830 of SEQ ID NO: 666
gggaaugaguaguuucuuc

SEQ ID NO: 55091 - RNA, 19 nt, Artificial Sequence
  Description of Artificial Sequence: Synthetic oligonucleotide
  Antisense strand to SEQ ID NO: 55010
gaagaaacuacucauuccc

SEQ ID NO: 55092 - RNA, 19 nt, Artificial Sequence
  Description of Artificial Sequence: Synthetic oligonucleotide
  Sense strand starting at position 3834 of SEQ ID NO: 666
augaguaguuucuucugaa

SEQ ID NO: 55093 - RNA, 19 nt, Artificial Sequence
  Description of Artificial Sequence: Synthetic oligonucleotide
  Antisense strand to SEQ ID NO: 55012
uucagaagaaacuacucau

SEQ ID NO: 55094 - RNA, 19 nt, Artificial Sequence
  Description of Artificial Sequence: Synthetic oligonucleotide
  Sense strand starting at position 3835 of SEQ ID NO: 666
ugaguaguuucuucugaaa

SEQ ID NO: 55095 - RNA, 19 nt, Artificial Sequence
  Description of Artificial Sequence: Synthetic oligonucleotide
  Antisense strand to SEQ ID NO: 55014
uuucagaagaaacuacuca

SEQ ID NO: 55096 - RNA, 19 nt, Artificial Sequence
  Description of Artificial Sequence: Synthetic oligonucleotide
  Sense strand starting at position 3881 of SEQ ID NO: 666
agcucaaauggucaugguu

SEQ ID NO: 55097 - RNA, 19 nt, Artificial Sequence
  Description of Artificial Sequence: Synthetic oligonucleotide
  Antisense strand to SEQ ID NO: 55016
aaccaugaccauuugagcu

SEQ ID NO: 55098 - RNA, 19 nt, Artificial Sequence
  Description of Artificial Sequence: Synthetic oligonucleotide
  Sense strand starting at position 3884 of SEQ ID NO: 666
ucaaauggucaugguuaga

SEQ ID NO: 55099 - RNA, 19 nt, Artificial Sequence
  Description of Artificial Sequence: Synthetic oligonucleotide
  Antisense strand to SEQ ID NO: 55018
ucuaaccaugaccauuuga

SEQ ID NO: 55100 - RNA, 19 nt, Artificial Sequence
  Description of Artificial Sequence: Synthetic oligonucleotide
  Sense strand starting at position 3924 of SEQ ID NO: 666
gagccugugcucuacaaag

SEQ ID NO: 55101 - RNA, 19 nt, Artificial Sequence
  Description of Artificial Sequence: Synthetic oligonucleotide
  Antisense strand to SEQ ID NO: 55020
cuuuguagagcacaggcuc

SEQ ID NO: 55102 - RNA, 19 nt, Artificial Sequence
  Description of Artificial Sequence: Synthetic oligonucleotide
  Sense strand starting at position 3960 of SEQ ID NO: 666
uagggacucuuucugcaua

SEQ ID NO: 55103 - RNA, 19 nt, Artificial Sequence
  Description of Artificial Sequence: Synthetic oligonucleotide
  Antisense strand to SEQ ID NO: 55022
uaugcagaaagagucccua

SEQ ID NO: 55104 - RNA, 19 nt, Artificial Sequence
  Description of Artificial Sequence: Synthetic oligonucleotide
  Sense strand starting at position 3962 of SEQ ID NO: 666
gggacucuuucugcauauu

SEQ ID NO: 55105 - RNA, 19 nt, Artificial Sequence
  Description of Artificial Sequence: Synthetic oligonucleotide
  Antisense strand to SEQ ID NO: 55024
aauaugcagaaagaguccc

SEQ ID NO: 55106 - RNA, 19 nt, Artificial Sequence
  Description of Artificial Sequence: Synthetic oligonucleotide
  Sense strand starting at position 225 of SEQ ID NO: 667
gcauguauccuccaguaca

SEQ ID NO: 55107 - RNA, 19 nt, Artificial Sequence
  Description of Artificial Sequence: Synthetic oligonucleotide
  Antisense strand to SEQ ID NO: 55026
uguacuggaggauacaugc

SEQ ID NO: 55108 - RNA, 19 nt, Artificial Sequence
  Description of Artificial Sequence: Synthetic oligonucleotide
  Sense strand starting at position 993 of SEQ ID NO: 667
aaggauaguugacuacgau

SEQ ID NO: 55109 - RNA, 19 nt, Artificial Sequence
  Description of Artificial Sequence: Synthetic oligonucleotide
  Antisense strand to SEQ ID NO: 55028
aucguagucaacuauccuu

SEQ ID NO: 55110 - RNA, 19 nt, Artificial Sequence
  Description of Artificial Sequence: Synthetic oligonucleotide
  Sense strand starting at position 1005 of SEQ ID NO: 667
cuacgaugagcuugcugaa

SEQ ID NO: 55111 - RNA, 19 nt, Artificial Sequence
  Description of Artificial Sequence: Synthetic oligonucleotide
  Antisense strand to SEQ ID NO: 55030
uucagcaagcucaucguag

SEQ ID NO: 55112 - RNA, 19 nt, Artificial Sequence
  Description of Artificial Sequence: Synthetic oligonucleotide
  Sense strand starting at position 1020 of SEQ ID NO: 667
ugaaguugaacuuguaugu

SEQ ID NO: 55113 - RNA, 19 nt, Artificial Sequence
  Description of Artificial Sequence: Synthetic oligonucleotide
  Antisense strand to SEQ ID NO: 55032
acauacaaguucaacuuca

SEQ ID NO: 55114 - RNA, 19 nt, Artificial Sequence
  Description of Artificial Sequence: Synthetic oligonucleotide
  Sense strand starting at position 1024 of SEQ ID NO: 667
guugaacuuguaugugaac

SEQ ID NO: 55115 - RNA, 19 nt, Artificial Sequence
  Description of Artificial Sequence: Synthetic oligonucleotide
  Antisense strand to SEQ ID NO: 55034
guucacauacaaguucaac

SEQ ID NO: 55116 - RNA, 19 nt, Artificial Sequence
  Description of Artificial Sequence: Synthetic oligonucleotide
  Sense strand starting at position 1077 of SEQ ID NO: 667
uguaguaauaucuggagaa

SEQ ID NO: 55117 - RNA, 19 nt, Artificial Sequence
  Description of Artificial Sequence: Synthetic oligonucleotide
  Antisense strand to SEQ ID NO: 55036
uucuccagauauuacuaca

SEQ ID NO: 55118 - RNA, 19 nt, Artificial Sequence
  Description of Artificial Sequence: Synthetic oligonucleotide
  Sense strand starting at position 1092 of SEQ ID NO: 667
agaauucgaaguugagaau

SEQ ID NO: 55119 - RNA, 19 nt, Artificial Sequence
  Description of Artificial Sequence: Synthetic oligonucleotide
  Antisense strand to SEQ ID NO: 55038
auucucaacuucgaauucu

SEQ ID NO: 55120 - RNA, 19 nt, Artificial Sequence
  Description of Artificial Sequence: Synthetic oligonucleotide
  Sense strand starting at position 1098 of SEQ ID NO: 667
cgaaguugagaauagaguu

SEQ ID NO: 55121 - RNA, 19 nt, Artificial Sequence
  Description of Artificial Sequence: Synthetic oligonucleotide
  Antisense strand to SEQ ID NO: 55040
aacucuauucucaacuucg

SEQ ID NO: 55122 - RNA, 19 nt, Artificial Sequence
  Description of Artificial Sequence: Synthetic oligonucleotide
  Sense strand starting at position 1753 of SEQ ID NO: 667
gggaaauggucaccacuua

SEQ ID NO: 55123 - RNA, 19 nt, Artificial Sequence
  Description of Artificial Sequence: Synthetic oligonucleotide
  Antisense strand to SEQ ID NO: 55042
uaaguggugaccauuuccc

SEQ ID NO: 55124 - RNA, 19 nt, Artificial Sequence
  Description of Artificial Sequence: Synthetic oligonucleotide
  Sense strand starting at position 2012 of SEQ ID NO: 667
ggcugagcuacuuauauag

SEQ ID NO: 55125 - RNA, 19 nt, Artificial Sequence
  Description of Artificial Sequence: Synthetic oligonucleotide
  Antisense strand to SEQ ID NO: 55044
cuauauaaguagcucagcc

SEQ ID NO: 55126 - RNA, 19 nt, Artificial Sequence
  Description of Artificial Sequence: Synthetic oligonucleotide
  Sense strand starting at position 2152 of SEQ ID NO: 667
guaauuaaucaugggcuca

SEQ ID NO: 55127 - RNA, 19 nt, Artificial Sequence
  Description of Artificial Sequence: Synthetic oligonucleotide
  Antisense strand to SEQ ID NO: 55046
ugagcccaugauuaauuac

SEQ ID NO: 55128 - RNA, 19 nt, Artificial Sequence
  Description of Artificial Sequence: Synthetic oligonucleotide
  Sense strand starting at position 2172 of SEQ ID NO: 667
ucuaaaucuugagugggaa

SEQ ID NO: 55129 - RNA, 19 nt, Artificial Sequence
  Description of Artificial Sequence: Synthetic oligonucleotide
  Antisense strand to SEQ ID NO: 55048
uucccacucaagauuuaga

SEQ ID NO: 55130 - RNA, 19 nt, Artificial Sequence
  Description of Artificial Sequence: Synthetic oligonucleotide
  Sense strand starting at position 2984 of SEQ ID NO: 667
aaugauugcugaucgaaug

SEQ ID NO: 55131 - RNA, 19 nt, Artificial Sequence
  Description of Artificial Sequence: Synthetic oligonucleotide
  Antisense strand to SEQ ID NO: 55050
cauucgaucagcaaucauu

SEQ ID NO: 55132 - RNA, 19 nt, Artificial Sequence
  Description of Artificial Sequence: Synthetic oligonucleotide
  Sense strand starting at position 2985 of SEQ ID NO: 667
augauugcugaucgaauga

SEQ ID NO: 55133 - RNA, 19 nt, Artificial Sequence
  Description of Artificial Sequence: Synthetic oligonucleotide
  Antisense strand to SEQ ID NO: 55052
ucauucgaucagcaaucau

SEQ ID NO: 55134 - RNA, 19 nt, Artificial Sequence
  Description of Artificial Sequence: Synthetic oligonucleotide
  Sense strand starting at position 3023 of SEQ ID NO: 667
uagauagugucuucuuugu

SEQ ID NO: 55135 - RNA, 19 nt, Artificial Sequence
  Description of Artificial Sequence: Synthetic oligonucleotide
  Antisense strand to SEQ ID NO: 55054
acaaagaagacacuaucua

SEQ ID NO: 55136 - RNA, 19 nt, Artificial Sequence
  Description of Artificial Sequence: Synthetic oligonucleotide
  Sense strand starting at position 3025 of SEQ ID NO: 667
gauagugucuucuuuguug

SEQ ID NO: 55137 - RNA, 19 nt, Artificial Sequence
  Description of Artificial Sequence: Synthetic oligonucleotide
  Antisense strand to SEQ ID NO: 55056
caacaaagaagacacuauc

SEQ ID NO: 55138 - RNA, 19 nt, Artificial Sequence
  Description of Artificial Sequence: Synthetic oligonucleotide
  Sense strand starting at position 3027 of SEQ ID NO: 667
uagugucuucuuuguugaa

SEQ ID NO: 55139 - RNA, 19 nt, Artificial Sequence
  Description of Artificial Sequence: Synthetic oligonucleotide
  Antisense strand to SEQ ID NO: 55058
uucaacaaagaagacacua

SEQ ID NO: 55140 - RNA, 19 nt, Artificial Sequence
  Description of Artificial Sequence: Synthetic oligonucleotide
  Sense strand starting at position 3029 of SEQ ID NO: 667
gugucuucuuuguugaaca

SEQ ID NO: 55141 - RNA, 19 nt, Artificial Sequence
  Description of Artificial Sequence: Synthetic oligonucleotide
  Antisense strand to SEQ ID NO: 55060
uguucaacaaagaagacac

SEQ ID NO: 55142 - RNA, 19 nt, Artificial Sequence
  Description of Artificial Sequence: Synthetic oligonucleotide
  Sense strand starting at position 3063 of SEQ ID NO: 667
gagugucagcuccgagauc

SEQ ID NO: 55143 - RNA, 19 nt, Artificial Sequence
  Description of Artificial Sequence: Synthetic oligonucleotide
  Antisense strand to SEQ ID NO: 55062
gaucucggagcugacacuc

SEQ ID NO: 55144 - RNA, 19 nt, Artificial Sequence
  Description of Artificial Sequence: Synthetic oligonucleotide
  Sense strand starting at position 3139 of SEQ ID NO: 667
ggacaucguacucaaaggu

SEQ ID NO: 55145 - RNA, 19 nt, Artificial Sequence
  Description of Artificial Sequence: Synthetic oligonucleotide
  Antisense strand to SEQ ID NO: 55064
accuuugaguacgaugucc

SEQ ID NO: 55146 - RNA, 19 nt, Artificial Sequence
  Description of Artificial Sequence: Synthetic oligonucleotide
  Sense strand starting at position 3148 of SEQ ID NO: 667
acucaaaggugcuuuauag

SEQ ID NO: 55147 - RNA, 19 nt, Artificial Sequence
  Description of Artificial Sequence: Synthetic oligonucleotide
  Antisense strand to SEQ ID NO: 55066
cuauaaagcaccuuugagu

SEQ ID NO: 55148 - RNA, 19 nt, Artificial Sequence
  Description of Artificial Sequence: Synthetic oligonucleotide
  Sense strand starting at position 3172 of SEQ ID NO: 667
uguugaauuggugaaccau

SEQ ID NO: 55149 - RNA, 19 nt, Artificial Sequence
  Description of Artificial Sequence: Synthetic oligonucleotide
  Antisense strand to SEQ ID NO: 55068
augguucaccaauucaaca

SEQ ID NO: 55150 - RNA, 19 nt, Artificial Sequence
  Description of Artificial Sequence: Synthetic oligonucleotide
  Sense strand starting at position 3211 of SEQ ID NO: 667
gugguucuccgcugagaag

SEQ ID NO: 55151 - RNA, 19 nt, Artificial Sequence
  Description of Artificial Sequence: Synthetic oligonucleotide
  Antisense strand to SEQ ID NO: 55070
cuucucagcggagaaccac

SEQ ID NO: 55152 - RNA, 19 nt, Artificial Sequence
  Description of Artificial Sequence: Synthetic oligonucleotide
  Sense strand starting at position 3251 of SEQ ID NO: 667
gcccuagugagauagacuu

SEQ ID NO: 55153 - RNA, 19 nt, Artificial Sequence
  Description of Artificial Sequence: Synthetic oligonucleotide
  Antisense strand to SEQ ID NO: 55072
aagucuaucucacuagggc

SEQ ID NO: 55154 - RNA, 19 nt, Artificial Sequence
  Description of Artificial Sequence: Synthetic oligonucleotide
  Sense strand starting at position 3257 of SEQ ID NO: 667
gugagauagacuugccuga

SEQ ID NO: 55155 - RNA, 19 nt, Artificial Sequence
  Description of Artificial Sequence: Synthetic oligonucleotide
  Antisense strand to SEQ ID NO: 55074
ucaggcaagucuaucucac

SEQ ID NO: 55156 - RNA, 19 nt, Artificial Sequence
  Description of Artificial Sequence: Synthetic oligonucleotide
  Sense strand starting at position 3259 of SEQ ID NO: 667
gagauagacuugccugaua

SEQ ID NO: 55157 - RNA, 19 nt, Artificial Sequence
  Description of Artificial Sequence: Synthetic oligonucleotide
  Antisense strand to SEQ ID NO: 55076
uaucaggcaagucuaucuc

SEQ ID NO: 55158 - RNA, 19 nt, Artificial Sequence
  Description of Artificial Sequence: Synthetic oligonucleotide
  Sense strand starting at position 3261 of SEQ ID NO: 667
gauagacuugccugauaua

SEQ ID NO: 55159 - RNA, 19 nt, Artificial Sequence
  Description of Artificial Sequence: Synthetic oligonucleotide
  Antisense strand to SEQ ID NO: 55078
uauaucaggcaagucuauc

SEQ ID NO: 55160 - RNA, 19 nt, Artificial Sequence
  Description of Artificial Sequence: Synthetic oligonucleotide
  Sense strand starting at position 3309 of SEQ ID NO: 667
aagccuucuggauggaaca

SEQ ID NO: 55161 - RNA, 19 nt, Artificial Sequence
  Description of Artificial Sequence: Synthetic oligonucleotide
  Antisense strand to SEQ ID NO: 55080
uguuccauccagaaggcuu

SEQ ID NO: 55162 - RNA, 19 nt, Artificial Sequence
  Description of Artificial Sequence: Synthetic oligonucleotide
  Sense strand starting at position 3353 of SEQ ID NO: 667
gcugguuuccacuauaacu

SEQ ID NO: 55163 - RNA, 19 nt, Artificial Sequence
  Description of Artificial Sequence: Synthetic oligonucleotide
  Antisense strand to SEQ ID NO: 55082
aguuauaguggaaaccagc

SEQ ID NO: 55164 - RNA, 19 nt, Artificial Sequence
  Description of Artificial Sequence: Synthetic oligonucleotide
  Sense strand starting at position 3523 of SEQ ID NO: 667
uccaucucugguggaguua

SEQ ID NO: 55165 - RNA, 19 nt, Artificial Sequence
  Description of Artificial Sequence: Synthetic oligonucleotide
  Antisense strand to SEQ ID NO: 55084
uaacuccaccagagaugga

SEQ ID NO: 55166 - RNA, 19 nt, Artificial Sequence
  Description of Artificial Sequence: Synthetic oligonucleotide
  Sense strand starting at position 3535 of SEQ ID NO: 667
ggaguuagugugcaguagu

SEQ ID NO: 55167 - RNA, 19 nt, Artificial Sequence
  Description of Artificial Sequence: Synthetic oligonucleotide
  Antisense strand to SEQ ID NO: 55086
acuacugcacacuaacucc

SEQ ID NO: 55168 - RNA, 19 nt, Artificial Sequence
  Description of Artificial Sequence: Synthetic oligonucleotide
  Sense strand starting at position 3546 of SEQ ID NO: 667
gcaguagucucagugagaa

SEQ ID NO: 55169 - RNA, 19 nt, Artificial Sequence
  Description of Artificial Sequence: Synthetic oligonucleotide
  Antisense strand to SEQ ID NO: 55088
uucucacugagacuacugc

SEQ ID NO: 55170 - RNA, 19 nt, Artificial Sequence
  Description of Artificial Sequence: Synthetic oligonucleotide
  Sense strand starting at position 3548 of SEQ ID NO: 667
aguagucucagugagaacu

SEQ ID NO: 55171 - RNA, 19 nt, Artificial Sequence
  Description of Artificial Sequence: Synthetic oligonucleotide
  Antisense strand to SEQ ID NO: 55090
aguucucacugagacuacu

SEQ ID NO: 55172 - RNA, 19 nt, Artificial Sequence
  Description of Artificial Sequence: Synthetic oligonucleotide
  Sense strand starting at position 3561 of SEQ ID NO: 667
agaacuuauuaggcuguga

SEQ ID NO: 55173 - RNA, 19 nt, Artificial Sequence
  Description of Artificial Sequence: Synthetic oligonucleotide
  Antisense strand to SEQ ID NO: 55092
ucacagccuaauaaguucu

SEQ ID NO: 55174 - RNA, 19 nt, Artificial Sequence
  Description of Artificial Sequence: Synthetic oligonucleotide
  Sense strand starting at position 3598 of SEQ ID NO: 667
ggauuugucuggagggcau

SEQ ID NO: 55175 - RNA, 19 nt, Artificial Sequence
  Description of Artificial Sequence: Synthetic oligonucleotide
  Antisense strand to SEQ ID NO: 55094
augcccuccagacaaaucc

SEQ ID NO: 55176 - RNA, 19 nt, Artificial Sequence
  Description of Artificial Sequence: Synthetic oligonucleotide
  Sense strand starting at position 3619 of SEQ ID NO: 667
gaggauuugucuggaguug

SEQ ID NO: 55177 - RNA, 19 nt, Artificial Sequence
  Description of Artificial Sequence: Synthetic oligonucleotide
  Antisense strand to SEQ ID NO: 55096
caacuccagacaaauccuc

SEQ ID NO: 55178 - RNA, 19 nt, Artificial Sequence
  Description of Artificial Sequence: Synthetic oligonucleotide
  Sense strand starting at position 3630 of SEQ ID NO: 667
uggaguugcuuccucacuu

SEQ ID NO: 55179 - RNA, 19 nt, Artificial Sequence
  Description of Artificial Sequence: Synthetic oligonucleotide
  Antisense strand to SEQ ID NO: 55098
aagugaggaagcaacucca

SEQ ID NO: 55180 - RNA, 19 nt, Artificial Sequence
  Description of Artificial Sequence: Synthetic oligonucleotide
  Sense strand starting at position 3631 of SEQ ID NO: 667
ggaguugcuuccucacuuu

SEQ ID NO: 55181 - RNA, 19 nt, Artificial Sequence
  Description of Artificial Sequence: Synthetic oligonucleotide
  Antisense strand to SEQ ID NO: 55100
aaagugaggaagcaacucc

SEQ ID NO: 55182 - RNA, 19 nt, Artificial Sequence
  Description of Artificial Sequence: Synthetic oligonucleotide
  Sense strand starting at position 3803 of SEQ ID NO: 667
cucuaaugcgaauaggaau

SEQ ID NO: 55183 - RNA, 19 nt, Artificial Sequence
  Description of Artificial Sequence: Synthetic oligonucleotide
  Antisense strand to SEQ ID NO: 55102
auuccuauucgcauuagag

SEQ ID NO: 55184 - RNA, 19 nt, Artificial Sequence
  Description of Artificial Sequence: Synthetic oligonucleotide
  Sense strand starting at position 3823 of SEQ ID NO: 667
aucugaaggucucuuuaaa

SEQ ID NO: 55185 - RNA, 19 nt, Artificial Sequence
  Description of Artificial Sequence: Synthetic oligonucleotide
  Antisense strand to SEQ ID NO: 55104
uuuaaagagaccuucagau

SEQ ID NO: 55186 - RNA, 19 nt, Artificial Sequence
  Description of Artificial Sequence: Synthetic oligonucleotide
  Sense strand starting at position 296 of SEQ ID NO: 668
acgugaagacguugacguu

SEQ ID NO: 55187 - RNA, 19 nt, Artificial Sequence
  Description of Artificial Sequence: Synthetic oligonucleotide
  Antisense strand to SEQ ID NO: 55106
aacgucaacgucuucacgu

SEQ ID NO: 55188 - RNA, 19 nt, Artificial Sequence
  Description of Artificial Sequence: Synthetic oligonucleotide
  Sense strand starting at position 922 of SEQ ID NO: 668
ucagcaaagucagauccuu

SEQ ID NO: 55189 - RNA, 19 nt, Artificial Sequence
  Description of Artificial Sequence: Synthetic oligonucleotide
  Antisense strand to SEQ ID NO: 55108
aaggaucugacuuugcuga

SEQ ID NO: 55190 - RNA, 19 nt, Artificial Sequence
  Description of Artificial Sequence: Synthetic oligonucleotide
  Sense strand starting at position 1021 of SEQ ID NO: 668
gagagcgcuucccuaacuu

SEQ ID NO: 55191 - RNA, 19 nt, Artificial Sequence
  Description of Artificial Sequence: Synthetic oligonucleotide
  Antisense strand to SEQ ID NO: 55110
aaguuagggaagcgcucuc

SEQ ID NO: 55192 - RNA, 19 nt, Artificial Sequence
  Description of Artificial Sequence: Synthetic oligonucleotide
  Sense strand starting at position 1465 of SEQ ID NO: 668
ggcggaaaguuuccuccga

SEQ ID NO: 55193 - RNA, 19 nt, Artificial Sequence
  Description of Artificial Sequence: Synthetic oligonucleotide
  Antisense strand to SEQ ID NO: 55112
ucggaggaaacuuuccgcc

SEQ ID NO: 55194 - RNA, 19 nt, Artificial Sequence
  Description of Artificial Sequence: Synthetic oligonucleotide
  Sense strand starting at position 1469 of SEQ ID NO: 668
gaaaguuuccuccgaggaa

SEQ ID NO: 55195 - RNA, 19 nt, Artificial Sequence
  Description of Artificial Sequence: Synthetic oligonucleotide
  Antisense strand to SEQ ID NO: 55114
uuccucggaggaaacuuuc

SEQ ID NO: 55196 - RNA, 19 nt, Artificial Sequence
  Description of Artificial Sequence: Synthetic oligonucleotide
  Sense strand starting at position 1470 of SEQ ID NO: 668
aaaguuuccuccgaggaaa

SEQ ID NO: 55197 - RNA, 19 nt, Artificial Sequence
  Description of Artificial Sequence: Synthetic oligonucleotide
  Antisense strand to SEQ ID NO: 55116
uuuccucggaggaaacuuu

SEQ ID NO: 55198 - RNA, 19 nt, Artificial Sequence
  Description of Artificial Sequence: Synthetic oligonucleotide
  Sense strand starting at position 1472 of SEQ ID NO: 668
aguuuccuccgaggaaaga

SEQ ID NO: 55199 - RNA, 19 nt, Artificial Sequence
  Description of Artificial Sequence: Synthetic oligonucleotide
  Antisense strand to SEQ ID NO: 55118
ucuuuccucggaggaaacu

SEQ ID NO: 55200 - RNA, 19 nt, Artificial Sequence
  Description of Artificial Sequence: Synthetic oligonucleotide
  Sense strand starting at position 1794 of SEQ ID NO: 668
aacggagucuuggagagau

SEQ ID NO: 55201 - RNA, 19 nt, Artificial Sequence
  Description of Artificial Sequence: Synthetic oligonucleotide
  Antisense strand to SEQ ID NO: 55120
aucucuccaagacuccguu

SEQ ID NO: 55202 - RNA, 19 nt, Artificial Sequence
  Description of Artificial Sequence: Synthetic oligonucleotide
  Sense strand starting at position 1850 of SEQ ID NO: 668
gcugcucucugauccuaaa

SEQ ID NO: 55203 - RNA, 19 nt, Artificial Sequence
  Description of Artificial Sequence: Synthetic oligonucleotide
  Antisense strand to SEQ ID NO: 55122
uuuaggaucagagagcagc

SEQ ID NO: 55204 - RNA, 19 nt, Artificial Sequence
  Description of Artificial Sequence: Synthetic oligonucleotide
  Sense strand starting at position 1863 of SEQ ID NO: 668
ccuaaagccugagcuagaa

SEQ ID NO: 55205 - RNA, 19 nt, Artificial Sequence
  Description of Artificial Sequence: Synthetic oligonucleotide
  Antisense strand to SEQ ID NO: 55124
uucuagcucaggcuuuagg

SEQ ID NO: 55206 - RNA, 19 nt, Artificial Sequence
  Description of Artificial Sequence: Synthetic oligonucleotide
  Sense strand starting at position 2010 of SEQ ID NO: 668
ggccgagcucuggucuagu

SEQ ID NO: 55207 - RNA, 19 nt, Artificial Sequence
  Description of Artificial Sequence: Synthetic oligonucleotide
  Antisense strand to SEQ ID NO: 55126
acuagaccagagcucggcc

SEQ ID NO: 55208 - RNA, 19 nt, Artificial Sequence
  Description of Artificial Sequence: Synthetic oligonucleotide
  Sense strand starting at position 2021 of SEQ ID NO: 668
ggucuagucacgcaggguu

SEQ ID NO: 55209 - RNA, 19 nt, Artificial Sequence
  Description of Artificial Sequence: Synthetic oligonucleotide
  Antisense strand to SEQ ID NO: 55128
aacccugcgugacuagacc

SEQ ID NO: 55210 - RNA, 19 nt, Artificial Sequence
  Description of Artificial Sequence: Synthetic oligonucleotide
  Sense strand starting at position 2023 of SEQ ID NO: 668
ucuagucacgcaggguuaa

SEQ ID NO: 55211 - RNA, 19 nt, Artificial Sequence
  Description of Artificial Sequence: Synthetic oligonucleotide
  Antisense strand to SEQ ID NO: 55130
uuaacccugcgugacuaga

SEQ ID NO: 55212 - RNA, 19 nt, Artificial Sequence
  Description of Artificial Sequence: Synthetic oligonucleotide
  Sense strand starting at position 2024 of SEQ ID NO: 668
cuagucacgcaggguuaau

SEQ ID NO: 55213 - RNA, 19 nt, Artificial Sequence
  Description of Artificial Sequence: Synthetic oligonucleotide
  Antisense strand to SEQ ID NO: 55132
auuaacccugcgugacuag

SEQ ID NO: 55214 - RNA, 19 nt, Artificial Sequence
  Description of Artificial Sequence: Synthetic oligonucleotide
  Sense strand starting at position 2034 of SEQ ID NO: 668
aggguuaaugauuguugga

SEQ ID NO: 55215 - RNA, 19 nt, Artificial Sequence
  Description of Artificial Sequence: Synthetic oligonucleotide
  Antisense strand to SEQ ID NO: 55134
uccaacaaucauuaacccu

SEQ ID NO: 55216 - RNA, 19 nt, Artificial Sequence
  Description of Artificial Sequence: Synthetic oligonucleotide
  Sense strand starting at position 2036 of SEQ ID NO: 668
gguuaaugauuguuggacu

SEQ ID NO: 55217 - RNA, 19 nt, Artificial Sequence
  Description of Artificial Sequence: Synthetic oligonucleotide
  Antisense strand to SEQ ID NO: 55136
aguccaacaaucauuaacc

SEQ ID NO: 55218 - RNA, 19 nt, Artificial Sequence
  Description of Artificial Sequence: Synthetic oligonucleotide
  Sense strand starting at position 2039 of SEQ ID NO: 668
uaaugauuguuggacucca

SEQ ID NO: 55219 - RNA, 19 nt, Artificial Sequence
  Description of Artificial Sequence: Synthetic oligonucleotide
  Antisense strand to SEQ ID NO: 55138
uggaguccaacaaucauua

SEQ ID NO: 55220 - RNA, 19 nt, Artificial Sequence
  Description of Artificial Sequence: Synthetic oligonucleotide
  Sense strand starting at position 2252 of SEQ ID NO: 668
uguggugugugaucagugu

SEQ ID NO: 55221 - RNA, 19 nt, Artificial Sequence
  Description of Artificial Sequence: Synthetic oligonucleotide
  Antisense strand to SEQ ID NO: 55140
acacugaucacacaccaca

SEQ ID NO: 55222 - RNA, 19 nt, Artificial Sequence
  Description of Artificial Sequence: Synthetic oligonucleotide
  Sense strand starting at position 2405 of SEQ ID NO: 668
ggaaauugcagacauagcu

SEQ ID NO: 55223 - RNA, 19 nt, Artificial Sequence
  Description of Artificial Sequence: Synthetic oligonucleotide
  Antisense strand to SEQ ID NO: 55142
agcuaugucugcaauuucc

SEQ ID NO: 55224 - RNA, 19 nt, Artificial Sequence
  Description of Artificial Sequence: Synthetic oligonucleotide
  Sense strand starting at position 2579 of SEQ ID NO: 668
gggugucuuugugacuguu

SEQ ID NO: 55225 - RNA, 19 nt, Artificial Sequence
  Description of Artificial Sequence: Synthetic oligonucleotide
  Antisense strand to SEQ ID NO: 55144
aacagucacaaagacaccc

SEQ ID NO: 55226 - RNA, 19 nt, Artificial Sequence
  Description of Artificial Sequence: Synthetic oligonucleotide
  Sense strand starting at position 2581 of SEQ ID NO: 668
gugucuuugugacuguuua

SEQ ID NO: 55227 - RNA, 19 nt, Artificial Sequence
  Description of Artificial Sequence: Synthetic oligonucleotide
  Antisense strand to SEQ ID NO: 55146
uaaacagucacaaagacac

SEQ ID NO: 55228 - RNA, 19 nt, Artificial Sequence
  Description of Artificial Sequence: Synthetic oligonucleotide
  Sense strand starting at position 2582 of SEQ ID NO: 668
ugucuuugugacuguuuag

SEQ ID NO: 55229 - RNA, 19 nt, Artificial Sequence
  Description of Artificial Sequence: Synthetic oligonucleotide
  Antisense strand to SEQ ID NO: 55148
cuaaacagucacaaagaca

SEQ ID NO: 55230 - RNA, 19 nt, Artificial Sequence
  Description of Artificial Sequence: Synthetic oligonucleotide
  Sense strand starting at position 2585 of SEQ ID NO: 668
cuuugugacuguuuagugu

SEQ ID NO: 55231 - RNA, 19 nt, Artificial Sequence
  Description of Artificial Sequence: Synthetic oligonucleotide
  Antisense strand to SEQ ID NO: 55150
acacuaaacagucacaaag

SEQ ID NO: 55232 - RNA, 19 nt, Artificial Sequence
  Description of Artificial Sequence: Synthetic oligonucleotide
  Sense strand starting at position 2594 of SEQ ID NO: 668
uguuuaguguguucuguga

SEQ ID NO: 55233 - RNA, 19 nt, Artificial Sequence
  Description of Artificial Sequence: Synthetic oligonucleotide
  Antisense strand to SEQ ID NO: 55152
ucacagaacacacuaaaca

SEQ ID NO: 55234 - RNA, 19 nt, Artificial Sequence
  Description of Artificial Sequence: Synthetic oligonucleotide
  Sense strand starting at position 2598 of SEQ ID NO: 668
uaguguguucugugaaugu

SEQ ID NO: 55235 - RNA, 19 nt, Artificial Sequence
  Description of Artificial Sequence: Synthetic oligonucleotide
  Antisense strand to SEQ ID NO: 55154
acauucacagaacacacua

SEQ ID NO: 55236 - RNA, 19 nt, Artificial Sequence
  Description of Artificial Sequence: Synthetic oligonucleotide
  Sense strand starting at position 2631 of SEQ ID NO: 668
uugcccacaucuguauauu

SEQ ID NO: 55237 - RNA, 19 nt, Artificial Sequence
  Description of Artificial Sequence: Synthetic oligonucleotide
  Antisense strand to SEQ ID NO: 55156
aauauacagaugugggcaa

SEQ ID NO: 55238 - RNA, 19 nt, Artificial Sequence
  Description of Artificial Sequence: Synthetic oligonucleotide
  Sense strand starting at position 2650 of SEQ ID NO: 668
ugucuauuaaugugaugua

SEQ ID NO: 55239 - RNA, 19 nt, Artificial Sequence
  Description of Artificial Sequence: Synthetic oligonucleotide
  Antisense strand to SEQ ID NO: 55158
uacaucacauuaauagaca

SEQ ID NO: 55240 - RNA, 19 nt, Artificial Sequence
  Description of Artificial Sequence: Synthetic oligonucleotide
  Sense strand starting at position 2651 of SEQ ID NO: 668
gucuauuaaugugauguau

SEQ ID NO: 55241 - RNA, 19 nt, Artificial Sequence
  Description of Artificial Sequence: Synthetic oligonucleotide
  Antisense strand to SEQ ID NO: 55160
auacaucacauuaauagac

SEQ ID NO: 55242 - RNA, 19 nt, Artificial Sequence
  Description of Artificial Sequence: Synthetic oligonucleotide
  Sense strand starting at position 2660 of SEQ ID NO: 668
ugugauguauuugaguauu

SEQ ID NO: 55243 - RNA, 19 nt, Artificial Sequence
  Description of Artificial Sequence: Synthetic oligonucleotide
  Antisense strand to SEQ ID NO: 55162
aauacucaaauacaucaca

SEQ ID NO: 55244 - RNA, 19 nt, Artificial Sequence
  Description of Artificial Sequence: Synthetic oligonucleotide
  Sense strand starting at position 2666 of SEQ ID NO: 668
guauuugaguauuguugug

SEQ ID NO: 55245 - RNA, 19 nt, Artificial Sequence
  Description of Artificial Sequence: Synthetic oligonucleotide
  Antisense strand to SEQ ID NO: 55164
cacaacaauacucaaauac

SEQ ID NO: 55246 - RNA, 19 nt, Artificial Sequence
  Description of Artificial Sequence: Synthetic oligonucleotide
  Sense strand starting at position 2686 of SEQ ID NO: 668
gggcggguaugucuguaua

SEQ ID NO: 55247 - RNA, 19 nt, Artificial Sequence
  Description of Artificial Sequence: Synthetic oligonucleotide
  Antisense strand to SEQ ID NO: 55166
uauacagacauacccgccc

SEQ ID NO: 55248 - RNA, 19 nt, Artificial Sequence
  Description of Artificial Sequence: Synthetic oligonucleotide
  Sense strand starting at position 2688 of SEQ ID NO: 668
gcggguaugucuguauaua

SEQ ID NO: 55249 - RNA, 19 nt, Artificial Sequence
  Description of Artificial Sequence: Synthetic oligonucleotide
  Antisense strand to SEQ ID NO: 55168
uauauacagacauacccgc

SEQ ID NO: 55250 - RNA, 19 nt, Artificial Sequence
  Description of Artificial Sequence: Synthetic oligonucleotide
  Sense strand starting at position 2689 of SEQ ID NO: 668
cggguaugucuguauauaa

SEQ ID NO: 55251 - RNA, 19 nt, Artificial Sequence
  Description of Artificial Sequence: Synthetic oligonucleotide
  Antisense strand to SEQ ID NO: 55170
uuauauacagacauacccg

SEQ ID NO: 55252 - RNA, 19 nt, Artificial Sequence
  Description of Artificial Sequence: Synthetic oligonucleotide
  Sense strand starting at position 2766 of SEQ ID NO: 668
cacagcaucuguggguuua

SEQ ID NO: 55253 - RNA, 19 nt, Artificial Sequence
  Description of Artificial Sequence: Synthetic oligonucleotide
  Antisense strand to SEQ ID NO: 55172
uaaacccacagaugcugug

SEQ ID NO: 55254 - RNA, 19 nt, Artificial Sequence
  Description of Artificial Sequence: Synthetic oligonucleotide
  Sense strand starting at position 2767 of SEQ ID NO: 668
acagcaucuguggguuuaa

SEQ ID NO: 55255 - RNA, 19 nt, Artificial Sequence
  Description of Artificial Sequence: Synthetic oligonucleotide
  Antisense strand to SEQ ID NO: 55174
uuaaacccacagaugcugu

SEQ ID NO: 55256 - RNA, 19 nt, Artificial Sequence
  Description of Artificial Sequence: Synthetic oligonucleotide
  Sense strand starting at position 3194 of SEQ ID NO: 668
gcgguuacauuauauuaga

SEQ ID NO: 55257 - RNA, 19 nt, Artificial Sequence
  Description of Artificial Sequence: Synthetic oligonucleotide
  Antisense strand to SEQ ID NO: 55176
ucuaauauaauguaaccgc

SEQ ID NO: 55258 - RNA, 19 nt, Artificial Sequence
  Description of Artificial Sequence: Synthetic oligonucleotide
  Sense strand starting at position 3828 of SEQ ID NO: 668
aggguaaugcgauggacaa

SEQ ID NO: 55259 - RNA, 19 nt, Artificial Sequence
  Description of Artificial Sequence: Synthetic oligonucleotide
  Antisense strand to SEQ ID NO: 55178
uuguccaucgcauuacccu

SEQ ID NO: 55260 - RNA, 19 nt, Artificial Sequence
  Description of Artificial Sequence: Synthetic oligonucleotide
  Sense strand starting at position 3829 of SEQ ID NO: 668
ggguaaugcgauggacaac

SEQ ID NO: 55261 - RNA, 19 nt, Artificial Sequence
  Description of Artificial Sequence: Synthetic oligonucleotide
  Antisense strand to SEQ ID NO: 55180
guuguccaucgcauuaccc

SEQ ID NO: 55262 - RNA, 19 nt, Artificial Sequence
  Description of Artificial Sequence: Synthetic oligonucleotide
  Sense strand starting at position 3944 of SEQ ID NO: 668
guaagaacaugcuugggau

SEQ ID NO: 55263 - RNA, 19 nt, Artificial Sequence
  Description of Artificial Sequence: Synthetic oligonucleotide
  Antisense strand to SEQ ID NO: 55182
aucccaagcauguucuuac

SEQ ID NO: 55264 - RNA, 19 nt, Artificial Sequence
  Description of Artificial Sequence: Synthetic oligonucleotide
  Sense strand starting at position 3945 of SEQ ID NO: 668
uaagaacaugcuugggaua

SEQ ID NO: 55265 - RNA, 19 nt, Artificial Sequence
  Description of Artificial Sequence: Synthetic oligonucleotide
  Antisense strand to SEQ ID NO: 55184
uaucccaagcauguucuua

SEQ ID NO: 55266 - RNA, 19 nt, Artificial Sequence
  Description of Artificial Sequence: Synthetic oligonucleotide
  Sense strand starting at position 244 of SEQ ID NO: 669
gaguuauaagaauagcuuu

SEQ ID NO: 55267 - RNA, 19 nt, Artificial Sequence
  Description of Artificial Sequence: Synthetic oligonucleotide
  Antisense strand to SEQ ID NO: 55186
aaagcuauucuuauaacuc

SEQ ID NO: 55268 - RNA, 19 nt, Artificial Sequence
  Description of Artificial Sequence: Synthetic oligonucleotide
  Sense strand starting at position 480 of SEQ ID NO: 669
guaugcauucuuuagaaga

SEQ ID NO: 55269 - RNA, 19 nt, Artificial Sequence
  Description of Artificial Sequence: Synthetic oligonucleotide
  Antisense strand to SEQ ID NO: 55188
ucuucuaaagaaugcauac

SEQ ID NO: 55270 - RNA, 19 nt, Artificial Sequence
  Description of Artificial Sequence: Synthetic oligonucleotide
  Sense strand starting at position 490 of SEQ ID NO: 669
uuuagaagacucugacauc

SEQ ID NO: 55271 - RNA, 19 nt, Artificial Sequence
  Description of Artificial Sequence: Synthetic oligonucleotide
  Antisense strand to SEQ ID NO: 55190
gaugucagagucuucuaaa

SEQ ID NO: 55272 - RNA, 19 nt, Artificial Sequence
  Description of Artificial Sequence: Synthetic oligonucleotide
  Sense strand starting at position 546 of SEQ ID NO: 669
uguuuaucucuugauacuu

SEQ ID NO: 55273 - RNA, 19 nt, Artificial Sequence
  Description of Artificial Sequence: Synthetic oligonucleotide
  Antisense strand to SEQ ID NO: 55192
aaguaucaagagauaaaca

SEQ ID NO: 55274 - RNA, 19 nt, Artificial Sequence
  Description of Artificial Sequence: Synthetic oligonucleotide
  Sense strand starting at position 576 of SEQ ID NO: 669
gagacuagaucugccauga

SEQ ID NO: 55275 - RNA, 19 nt, Artificial Sequence
  Description of Artificial Sequence: Synthetic oligonucleotide
  Antisense strand to SEQ ID NO: 55194
ucauggcagaucuagucuc

SEQ ID NO: 55276 - RNA, 19 nt, Artificial Sequence
  Description of Artificial Sequence: Synthetic oligonucleotide
  Sense strand starting at position 580 of SEQ ID NO: 669
cuagaucugccaugacuau

SEQ ID NO: 55277 - RNA, 19 nt, Artificial Sequence
  Description of Artificial Sequence: Synthetic oligonucleotide
  Antisense strand to SEQ ID NO: 55196
auagucauggcagaucuag

SEQ ID NO: 55278 - RNA, 19 nt, Artificial Sequence
  Description of Artificial Sequence: Synthetic oligonucleotide
  Sense strand starting at position 586 of SEQ ID NO: 669
cugccaugacuaugggaaa

SEQ ID NO: 55279 - RNA, 19 nt, Artificial Sequence
  Description of Artificial Sequence: Synthetic oligonucleotide
  Antisense strand to SEQ ID NO: 55198
uuucccauagucauggcag

SEQ ID NO: 55280 - RNA, 19 nt, Artificial Sequence
  Description of Artificial Sequence: Synthetic oligonucleotide
  Sense strand starting at position 809 of SEQ ID NO: 669
gguggaacuagagguagua

SEQ ID NO: 55281 - RNA, 19 nt, Artificial Sequence
  Description of Artificial Sequence: Synthetic oligonucleotide
  Antisense strand to SEQ ID NO: 55200
uacuaccucuaguuccacc

SEQ ID NO: 55282 - RNA, 19 nt, Artificial Sequence
  Description of Artificial Sequence: Synthetic oligonucleotide
  Sense strand starting at position 1009 of SEQ ID NO: 669
gugacaguuaaguggaaua

SEQ ID NO: 55283 - RNA, 19 nt, Artificial Sequence
  Description of Artificial Sequence: Synthetic oligonucleotide
  Antisense strand to SEQ ID NO: 55202
uauuccacuuaacugucac

SEQ ID NO: 55284 - RNA, 19 nt, Artificial Sequence
  Description of Artificial Sequence: Synthetic oligonucleotide
  Sense strand starting at position 1022 of SEQ ID NO: 669
ggaauaauauaugccaugu

SEQ ID NO: 55285 - RNA, 19 nt, Artificial Sequence
  Description of Artificial Sequence: Synthetic oligonucleotide
  Antisense strand to SEQ ID NO: 55204
acauggcauauauuauucc

SEQ ID NO: 55286 - RNA, 19 nt, Artificial Sequence
  Description of Artificial Sequence: Synthetic oligonucleotide
  Sense strand starting at position 1030 of SEQ ID NO: 669
auaugccauguguauaaca

SEQ ID NO: 55287 - RNA, 19 nt, Artificial Sequence
  Description of Artificial Sequence: Synthetic oligonucleotide
  Antisense strand to SEQ ID NO: 55206
uguuauacacauggcauau

SEQ ID NO: 55288 - RNA, 19 nt, Artificial Sequence
  Description of Artificial Sequence: Synthetic oligonucleotide
  Sense strand starting at position 1032 of SEQ ID NO: 669
augccauguguauaacaaa

SEQ ID NO: 55289 - RNA, 19 nt, Artificial Sequence
  Description of Artificial Sequence: Synthetic oligonucleotide
  Antisense strand to SEQ ID NO: 55208
uuuguuauacacauggcau

SEQ ID NO: 55290 - RNA, 19 nt, Artificial Sequence
  Description of Artificial Sequence: Synthetic oligonucleotide
  Sense strand starting at position 1232 of SEQ ID NO: 669
gucccaaucauagaugcga

SEQ ID NO: 55291 - RNA, 19 nt, Artificial Sequence
  Description of Artificial Sequence: Synthetic oligonucleotide
  Antisense strand to SEQ ID NO: 55210
ucgcaucuaugauugggac

SEQ ID NO: 55292 - RNA, 19 nt, Artificial Sequence
  Description of Artificial Sequence: Synthetic oligonucleotide
  Sense strand starting at position 1263 of SEQ ID NO: 669
uuugauuucgugugaaauu

SEQ ID NO: 55293 - RNA, 19 nt, Artificial Sequence
  Description of Artificial Sequence: Synthetic oligonucleotide
  Antisense strand to SEQ ID NO: 55212
aauuucacacgaaaucaaa

SEQ ID NO: 55294 - RNA, 19 nt, Artificial Sequence
  Description of Artificial Sequence: Synthetic oligonucleotide
  Sense strand starting at position 1424 of SEQ ID NO: 669
ugaacuguguucccaaaca

SEQ ID NO: 55295 - RNA, 19 nt, Artificial Sequence
  Description of Artificial Sequence: Synthetic oligonucleotide
  Antisense strand to SEQ ID NO: 55214
uguuugggaacacaguuca

SEQ ID NO: 55296 - RNA, 19 nt, Artificial Sequence
  Description of Artificial Sequence: Synthetic oligonucleotide
  Sense strand starting at position 1501 of SEQ ID NO: 669
ccaaauagaguuugugaac

SEQ ID NO: 55297 - RNA, 19 nt, Artificial Sequence
  Description of Artificial Sequence: Synthetic oligonucleotide
  Antisense strand to SEQ ID NO: 55216
guucacaaacucuauuugg

SEQ ID NO: 55298 - RNA, 19 nt, Artificial Sequence
  Description of Artificial Sequence: Synthetic oligonucleotide
  Sense strand starting at position 1502 of SEQ ID NO: 669
caaauagaguuugugaaca

SEQ ID NO: 55299 - RNA, 19 nt, Artificial Sequence
  Description of Artificial Sequence: Synthetic oligonucleotide
  Antisense strand to SEQ ID NO: 55218
uguucacaaacucuauuug

SEQ ID NO: 55300 - RNA, 19 nt, Artificial Sequence
  Description of Artificial Sequence: Synthetic oligonucleotide
  Sense strand starting at position 1633 of SEQ ID NO: 669
gccaauuacagcuaggaga

SEQ ID NO: 55301 - RNA, 19 nt, Artificial Sequence
  Description of Artificial Sequence: Synthetic oligonucleotide
  Antisense strand to SEQ ID NO: 55220
ucuccuagcuguaauuggc

SEQ ID NO: 55302 - RNA, 19 nt, Artificial Sequence
  Description of Artificial Sequence: Synthetic oligonucleotide
  Sense strand starting at position 1698 of SEQ ID NO: 669
cuuucuugcagguauggaa

SEQ ID NO: 55303 - RNA, 19 nt, Artificial Sequence
  Description of Artificial Sequence: Synthetic oligonucleotide
  Antisense strand to SEQ ID NO: 55222
uuccauaccugcaagaaag

SEQ ID NO: 55304 - RNA, 19 nt, Artificial Sequence
  Description of Artificial Sequence: Synthetic oligonucleotide
  Sense strand starting at position 1825 of SEQ ID NO: 669
uuugaagauuaagcgaaau

SEQ ID NO: 55305 - RNA, 19 nt, Artificial Sequence
  Description of Artificial Sequence: Synthetic oligonucleotide
  Antisense strand to SEQ ID NO: 55224
auuucgcuuaaucuucaaa

SEQ ID NO: 55306 - RNA, 19 nt, Artificial Sequence
  Description of Artificial Sequence: Synthetic oligonucleotide
  Sense strand starting at position 2063 of SEQ ID NO: 669
agacauugccacugggauc

SEQ ID NO: 55307 - RNA, 19 nt, Artificial Sequence
  Description of Artificial Sequence: Synthetic oligonucleotide
  Antisense strand to SEQ ID NO: 55226
gaucccaguggcaaugucu

SEQ ID NO: 55308 - RNA, 19 nt, Artificial Sequence
  Description of Artificial Sequence: Synthetic oligonucleotide
  Sense strand starting at position 2137 of SEQ ID NO: 669
cugggaauguggaggauua

SEQ ID NO: 55309 - RNA, 19 nt, Artificial Sequence
  Description of Artificial Sequence: Synthetic oligonucleotide
  Antisense strand to SEQ ID NO: 55228
uaauccuccacauucccag

SEQ ID NO: 55310 - RNA, 19 nt, Artificial Sequence
  Description of Artificial Sequence: Synthetic oligonucleotide
  Sense strand starting at position 2318 of SEQ ID NO: 669
ucagaaugacguuacaauu

SEQ ID NO: 55311 - RNA, 19 nt, Artificial Sequence
  Description of Artificial Sequence: Synthetic oligonucleotide
  Antisense strand to SEQ ID NO: 55230
aauuguaacgucauucuga

SEQ ID NO: 55312 - RNA, 19 nt, Artificial Sequence
  Description of Artificial Sequence: Synthetic oligonucleotide
  Sense strand starting at position 2361 of SEQ ID NO: 669
ugaggcauuggcuagaaac

SEQ ID NO: 55313 - RNA, 19 nt, Artificial Sequence
  Description of Artificial Sequence: Synthetic oligonucleotide
  Antisense strand to SEQ ID NO: 55232
guuucuagccaaugccuca

SEQ ID NO: 55314 - RNA, 19 nt, Artificial Sequence
  Description of Artificial Sequence: Synthetic oligonucleotide
  Sense strand starting at position 2363 of SEQ ID NO: 669
aggcauuggcuagaaacuu

SEQ ID NO: 55315 - RNA, 19 nt, Artificial Sequence
  Description of Artificial Sequence: Synthetic oligonucleotide
  Antisense strand to SEQ ID NO: 55234
aaguuucuagccaaugccu

SEQ ID NO: 55316 - RNA, 19 nt, Artificial Sequence
  Description of Artificial Sequence: Synthetic oligonucleotide
  Sense strand starting at position 2480 of SEQ ID NO: 669
uuuggaauucugcaggcua

SEQ ID NO: 55317 - RNA, 19 nt, Artificial Sequence
  Description of Artificial Sequence: Synthetic oligonucleotide
  Antisense strand to SEQ ID NO: 55236
uagccugcagaauuccaaa

SEQ ID NO: 55318 - RNA, 19 nt, Artificial Sequence
  Description of Artificial Sequence: Synthetic oligonucleotide
  Sense strand starting at position 2507 of SEQ ID NO: 669
ucuauuaauggauauugca

SEQ ID NO: 55319 - RNA, 19 nt, Artificial Sequence
  Description of Artificial Sequence: Synthetic oligonucleotide
  Antisense strand to SEQ ID NO: 55238
ugcaauauccauuaauaga

SEQ ID NO: 55320 - RNA, 19 nt, Artificial Sequence
  Description of Artificial Sequence: Synthetic oligonucleotide
  Sense strand starting at position 2552 of SEQ ID NO: 669
uuuacuaugcaguacagaa

SEQ ID NO: 55321 - RNA, 19 nt, Artificial Sequence
  Description of Artificial Sequence: Synthetic oligonucleotide
  Antisense strand to SEQ ID NO: 55240
uucuguacugcauaguaaa

SEQ ID NO: 55322 - RNA, 19 nt, Artificial Sequence
  Description of Artificial Sequence: Synthetic oligonucleotide
  Sense strand starting at position 2583 of SEQ ID NO: 669
gcuugugagagguaccuaa

SEQ ID NO: 55323 - RNA, 19 nt, Artificial Sequence
  Description of Artificial Sequence: Synthetic oligonucleotide
  Antisense strand to SEQ ID NO: 55242
uuagguaccucucacaagc

SEQ ID NO: 55324 - RNA, 19 nt, Artificial Sequence
  Description of Artificial Sequence: Synthetic oligonucleotide
  Sense strand starting at position 2660 of SEQ ID NO: 669
aggauuaccucucucauga

SEQ ID NO: 55325 - RNA, 19 nt, Artificial Sequence
  Description of Artificial Sequence: Synthetic oligonucleotide
  Antisense strand to SEQ ID NO: 55244
ucaugagagagguaauccu

SEQ ID NO: 55326 - RNA, 19 nt, Artificial Sequence
  Description of Artificial Sequence: Synthetic oligonucleotide
  Sense strand starting at position 3154 of SEQ ID NO: 669
gucacauuguuaguagaag

SEQ ID NO: 55327 - RNA, 19 nt, Artificial Sequence
  Description of Artificial Sequence: Synthetic oligonucleotide
  Antisense strand to SEQ ID NO: 55246
cuucuacuaacaaugugac

SEQ ID NO: 55328 - RNA, 19 nt, Artificial Sequence
  Description of Artificial Sequence: Synthetic oligonucleotide
  Sense strand starting at position 3194 of SEQ ID NO: 669
ugagucucucuugacuaca

SEQ ID NO: 55329 - RNA, 19 nt, Artificial Sequence
  Description of Artificial Sequence: Synthetic oligonucleotide
  Antisense strand to SEQ ID NO: 55248
uguagucaagagagacuca

SEQ ID NO: 55330 - RNA, 19 nt, Artificial Sequence
  Description of Artificial Sequence: Synthetic oligonucleotide
  Sense strand starting at position 3271 of SEQ ID NO: 669
gaauguguagucuaguaua

SEQ ID NO: 55331 - RNA, 19 nt, Artificial Sequence
  Description of Artificial Sequence: Synthetic oligonucleotide
  Antisense strand to SEQ ID NO: 55250
uauacuagacuacacauuc

SEQ ID NO: 55332 - RNA, 19 nt, Artificial Sequence
  Description of Artificial Sequence: Synthetic oligonucleotide
  Sense strand starting at position 3276 of SEQ ID NO: 669
uguagucuaguauagaaga

SEQ ID NO: 55333 - RNA, 19 nt, Artificial Sequence
  Description of Artificial Sequence: Synthetic oligonucleotide
  Antisense strand to SEQ ID NO: 55252
ucuucuauacuagacuaca

SEQ ID NO: 55334 - RNA, 19 nt, Artificial Sequence
  Description of Artificial Sequence: Synthetic oligonucleotide
  Sense strand starting at position 3495 of SEQ ID NO: 669
ugaucauacugauugauuc

SEQ ID NO: 55335 - RNA, 19 nt, Artificial Sequence
  Description of Artificial Sequence: Synthetic oligonucleotide
  Antisense strand to SEQ ID NO: 55254
gaaucaaucaguaugauca

SEQ ID NO: 55336 - RNA, 19 nt, Artificial Sequence
  Description of Artificial Sequence: Synthetic oligonucleotide
  Sense strand starting at position 3517 of SEQ ID NO: 669
ggguuaugccugggagaau

SEQ ID NO: 55337 - RNA, 19 nt, Artificial Sequence
  Description of Artificial Sequence: Synthetic oligonucleotide
  Antisense strand to SEQ ID NO: 55256
auucucccaggcauaaccc

SEQ ID NO: 55338 - RNA, 19 nt, Artificial Sequence
  Description of Artificial Sequence: Synthetic oligonucleotide
  Sense strand starting at position 3582 of SEQ ID NO: 669
gugcccucucauuauaaag

SEQ ID NO: 55339 - RNA, 19 nt, Artificial Sequence
  Description of Artificial Sequence: Synthetic oligonucleotide
  Antisense strand to SEQ ID NO: 55258
cuuuauaaugagagggcac

SEQ ID NO: 55340 - RNA, 19 nt, Artificial Sequence
  Description of Artificial Sequence: Synthetic oligonucleotide
  Sense strand starting at position 3618 of SEQ ID NO: 669
uaaggagauccuggcuaua

SEQ ID NO: 55341 - RNA, 19 nt, Artificial Sequence
  Description of Artificial Sequence: Synthetic oligonucleotide
  Antisense strand to SEQ ID NO: 55260
uauagccaggaucuccuua

SEQ ID NO: 55342 - RNA, 19 nt, Artificial Sequence
  Description of Artificial Sequence: Synthetic oligonucleotide
  Sense strand starting at position 3620 of SEQ ID NO: 669
aggagauccuggcuauacu

SEQ ID NO: 55343 - RNA, 19 nt, Artificial Sequence
  Description of Artificial Sequence: Synthetic oligonucleotide
  Antisense strand to SEQ ID NO: 55262
aguauagccaggaucuccu

SEQ ID NO: 55344 - RNA, 19 nt, Artificial Sequence
  Description of Artificial Sequence: Synthetic oligonucleotide
  Sense strand starting at position 3870 of SEQ ID NO: 669
gaaauauguacagguggua

SEQ ID NO: 55345 - RNA, 19 nt, Artificial Sequence
  Description of Artificial Sequence: Synthetic oligonucleotide
  Antisense strand to SEQ ID NO: 55264
uaccaccuguacauauuuc

SEQ ID NO: 55346 - RNA, 19 nt, Artificial Sequence
  Description of Artificial Sequence: Synthetic oligonucleotide
  Sense strand starting at position 3952 of SEQ ID NO: 670
gaauuugacucccaagguu

SEQ ID NO: 55347 - RNA, 19 nt, Artificial Sequence
  Description of Artificial Sequence: Synthetic oligonucleotide
  Antisense strand to SEQ ID NO: 55266
aaccuugggagucaaauuc

SEQ ID NO: 55348 - RNA, 19 nt, Artificial Sequence
  Description of Artificial Sequence: Synthetic oligonucleotide
  Sense strand starting at position 3940 of SEQ ID NO: 670
uguauuuacugugaauuug

SEQ ID NO: 55349 - RNA, 19 nt, Artificial Sequence
  Description of Artificial Sequence: Synthetic oligonucleotide
  Antisense strand to SEQ ID NO: 55268
caaauucacaguaaauaca

SEQ ID NO: 55350 - RNA, 19 nt, Artificial Sequence
  Description of Artificial Sequence: Synthetic oligonucleotide
  Sense strand starting at position 3926 of SEQ ID NO: 670
cugugaacggcucauguau

SEQ ID NO: 55351 - RNA, 19 nt, Artificial Sequence
  Description of Artificial Sequence: Synthetic oligonucleotide
  Antisense strand to SEQ ID NO: 55270
auacaugagccguucacag

SEQ ID NO: 55352 - RNA, 19 nt, Artificial Sequence
  Description of Artificial Sequence: Synthetic oligonucleotide
  Sense strand starting at position 3884 of SEQ ID NO: 670
gucacuggaucugucauaa

SEQ ID NO: 55353 - RNA, 19 nt, Artificial Sequence
  Description of Artificial Sequence: Synthetic oligonucleotide
  Antisense strand to SEQ ID NO: 55272
uuaugacagauccagugac

SEQ ID NO: 55354 - RNA, 19 nt, Artificial Sequence
  Description of Artificial Sequence: Synthetic oligonucleotide
  Sense strand starting at position 3871 of SEQ ID NO: 670
uguccauuccagugucacu

SEQ ID NO: 55355 - RNA, 19 nt, Artificial Sequence
  Description of Artificial Sequence: Synthetic oligonucleotide
  Antisense strand to SEQ ID NO: 55274
agugacacuggaauggaca

SEQ ID NO: 55356 - RNA, 19 nt, Artificial Sequence
  Description of Artificial Sequence: Synthetic oligonucleotide
  Sense strand starting at position 3774 of SEQ ID NO: 670
ggacuauccagcuguagua

SEQ ID NO: 55357 - RNA, 19 nt, Artificial Sequence
  Description of Artificial Sequence: Synthetic oligonucleotide
  Antisense strand to SEQ ID NO: 55276
uacuacagcuggauagucc

SEQ ID NO: 55358 - RNA, 19 nt, Artificial Sequence
  Description of Artificial Sequence: Synthetic oligonucleotide
  Sense strand starting at position 3751 of SEQ ID NO: 670
agagaagccuucuuacacu

SEQ ID NO: 55359 - RNA, 19 nt, Artificial Sequence
  Description of Artificial Sequence: Synthetic oligonucleotide
  Antisense strand to SEQ ID NO: 55278
aguguaagaaggcuucucu

SEQ ID NO: 55360 - RNA, 19 nt, Artificial Sequence
  Description of Artificial Sequence: Synthetic oligonucleotide
  Sense strand starting at position 3737 of SEQ ID NO: 670
cagcauguguuuguagaga

SEQ ID NO: 55361 - RNA, 19 nt, Artificial Sequence
  Description of Artificial Sequence: Synthetic oligonucleotide
  Antisense strand to SEQ ID NO: 55280
ucucuacaaacacaugcug

SEQ ID NO: 55362 - RNA, 19 nt, Artificial Sequence
  Description of Artificial Sequence: Synthetic oligonucleotide
  Sense strand starting at position 3668 of SEQ ID NO: 670
aguggacucuuggagaaag

SEQ ID NO: 55363 - RNA, 19 nt, Artificial Sequence
  Description of Artificial Sequence: Synthetic oligonucleotide
  Antisense strand to SEQ ID NO: 55282
cuuucuccaagaguccacu

SEQ ID NO: 55364 - RNA, 19 nt, Artificial Sequence
  Description of Artificial Sequence: Synthetic oligonucleotide
  Sense strand starting at position 3576 of SEQ ID NO: 670
ggucuuuagagcugggacu

SEQ ID NO: 55365 - RNA, 19 nt, Artificial Sequence
  Description of Artificial Sequence: Synthetic oligonucleotide
  Antisense strand to SEQ ID NO: 55284
agucccagcucuaaagacc

SEQ ID NO: 55366 - RNA, 19 nt, Artificial Sequence
  Description of Artificial Sequence: Synthetic oligonucleotide
  Sense strand starting at position 3400 of SEQ ID NO: 670
ugauuacguucuuuacauc

SEQ ID NO: 55367 - RNA, 19 nt, Artificial Sequence
  Description of Artificial Sequence: Synthetic oligonucleotide
  Antisense strand to SEQ ID NO: 55286
gauguaaagaacguaauca

SEQ ID NO: 55368 - RNA, 19 nt, Artificial Sequence
  Description of Artificial Sequence: Synthetic oligonucleotide
  Sense strand starting at position 3399 of SEQ ID NO: 670
uugauuacguucuuuacau

SEQ ID NO: 55369 - RNA, 19 nt, Artificial Sequence
  Description of Artificial Sequence: Synthetic oligonucleotide
  Antisense strand to SEQ ID NO: 55288
auguaaagaacguaaucaa

SEQ ID NO: 55370 - RNA, 19 nt, Artificial Sequence
  Description of Artificial Sequence: Synthetic oligonucleotide
  Sense strand starting at position 3370 of SEQ ID NO: 670
gugagcacauuguuaaaca

SEQ ID NO: 55371 - RNA, 19 nt, Artificial Sequence
  Description of Artificial Sequence: Synthetic oligonucleotide
  Antisense strand to SEQ ID NO: 55290
uguuuaacaaugugcucac

SEQ ID NO: 55372 - RNA, 19 nt, Artificial Sequence
  Description of Artificial Sequence: Synthetic oligonucleotide
  Sense strand starting at position 3368 of SEQ ID NO: 670
aagugagcacauuguuaaa

SEQ ID NO: 55373 - RNA, 19 nt, Artificial Sequence
  Description of Artificial Sequence: Synthetic oligonucleotide
  Antisense strand to SEQ ID NO: 55292
uuuaacaaugugcucacuu

SEQ ID NO: 55374 - RNA, 19 nt, Artificial Sequence
  Description of Artificial Sequence: Synthetic oligonucleotide
  Sense strand starting at position 3302 of SEQ ID NO: 670
auguucugggcucaaagau

SEQ ID NO: 55375 - RNA, 19 nt, Artificial Sequence
  Description of Artificial Sequence: Synthetic oligonucleotide
  Antisense strand to SEQ ID NO: 55294
aucuuugagcccagaacau

SEQ ID NO: 55376 - RNA, 19 nt, Artificial Sequence
  Description of Artificial Sequence: Synthetic oligonucleotide
  Sense strand starting at position 3298 of SEQ ID NO: 670
aguaauguucugggcucaa

SEQ ID NO: 55377 - RNA, 19 nt, Artificial Sequence
  Description of Artificial Sequence: Synthetic oligonucleotide
  Antisense strand to SEQ ID NO: 55296
uugagcccagaacauuacu

SEQ ID NO: 55378 - RNA, 19 nt, Artificial Sequence
  Description of Artificial Sequence: Synthetic oligonucleotide
  Sense strand starting at position 3241 of SEQ ID NO: 670
uccucuuagggauauugua

SEQ ID NO: 55379 - RNA, 19 nt, Artificial Sequence
  Description of Artificial Sequence: Synthetic oligonucleotide
  Antisense strand to SEQ ID NO: 55298
uacaauaucccuaagagga

SEQ ID NO: 55380 - RNA, 19 nt, Artificial Sequence
  Description of Artificial Sequence: Synthetic oligonucleotide
  Sense strand starting at position 3077 of SEQ ID NO: 670
gaacccagcuucguuuauu

SEQ ID NO: 55381 - RNA, 19 nt, Artificial Sequence
  Description of Artificial Sequence: Synthetic oligonucleotide
  Antisense strand to SEQ ID NO: 55300
aauaaacgaagcuggguuc

SEQ ID NO: 55382 - RNA, 19 nt, Artificial Sequence
  Description of Artificial Sequence: Synthetic oligonucleotide
  Sense strand starting at position 2974 of SEQ ID NO: 670
cccgguugccucuacaaau

SEQ ID NO: 55383 - RNA, 19 nt, Artificial Sequence
  Description of Artificial Sequence: Synthetic oligonucleotide
  Antisense strand to SEQ ID NO: 55302
auuuguagaggcaaccggg

SEQ ID NO: 55384 - RNA, 19 nt, Artificial Sequence
  Description of Artificial Sequence: Synthetic oligonucleotide
  Sense strand starting at position 2842 of SEQ ID NO: 670
cccaguucuggaggcugau

SEQ ID NO: 55385 - RNA, 19 nt, Artificial Sequence
  Description of Artificial Sequence: Synthetic oligonucleotide
  Antisense strand to SEQ ID NO: 55304
aucagccuccagaacuggg

SEQ ID NO: 55386 - RNA, 19 nt, Artificial Sequence
  Description of Artificial Sequence: Synthetic oligonucleotide
  Sense strand starting at position 2130 of SEQ ID NO: 670
ggaaucgucugcucucuua

SEQ ID NO: 55387 - RNA, 19 nt, Artificial Sequence
  Description of Artificial Sequence: Synthetic oligonucleotide
  Antisense strand to SEQ ID NO: 55306
uaagagagcagacgauucc

SEQ ID NO: 55388 - RNA, 19 nt, Artificial Sequence
  Description of Artificial Sequence: Synthetic oligonucleotide
  Sense strand starting at position 1648 of SEQ ID NO: 670
aguuaaucuggaugcaggu

SEQ ID NO: 55389 - RNA, 19 nt, Artificial Sequence
  Description of Artificial Sequence: Synthetic oligonucleotide
  Antisense strand to SEQ ID NO: 55308
accugcauccagauuaacu

SEQ ID NO: 55390 - RNA, 19 nt, Artificial Sequence
  Description of Artificial Sequence: Synthetic oligonucleotide
  Sense strand starting at position 1615 of SEQ ID NO: 670
cuaguucugcugugaauga

SEQ ID NO: 55391 - RNA, 19 nt, Artificial Sequence
  Description of Artificial Sequence: Synthetic oligonucleotide
  Antisense strand to SEQ ID NO: 55310
ucauucacagcagaacuag

SEQ ID NO: 55392 - RNA, 19 nt, Artificial Sequence
  Description of Artificial Sequence: Synthetic oligonucleotide
  Sense strand starting at position 1451 of SEQ ID NO: 670
ccuaucaaacguuaaguuu

SEQ ID NO: 55393 - RNA, 19 nt, Artificial Sequence
  Description of Artificial Sequence: Synthetic oligonucleotide
  Antisense strand to SEQ ID NO: 55312
aaacuuaacguuugauagg

SEQ ID NO: 55394 - RNA, 19 nt, Artificial Sequence
  Description of Artificial Sequence: Synthetic oligonucleotide
  Sense strand starting at position 1237 of SEQ ID NO: 670
gugaaacugcgucugcuau

SEQ ID NO: 55395 - RNA, 19 nt, Artificial Sequence
  Description of Artificial Sequence: Synthetic oligonucleotide
  Antisense strand to SEQ ID NO: 55314
auagcagacgcaguuucac

SEQ ID NO: 55396 - RNA, 19 nt, Artificial Sequence
  Description of Artificial Sequence: Synthetic oligonucleotide
  Sense strand starting at position 1236 of SEQ ID NO: 670
ugugaaacugcgucugcua

SEQ ID NO: 55397 - RNA, 19 nt, Artificial Sequence
  Description of Artificial Sequence: Synthetic oligonucleotide
  Antisense strand to SEQ ID NO: 55316
uagcagacgcaguuucaca

SEQ ID NO: 55398 - RNA, 19 nt, Artificial Sequence
  Description of Artificial Sequence: Synthetic oligonucleotide
  Sense strand starting at position 1148 of SEQ ID NO: 670
uuauucuaagcacgaacau

SEQ ID NO: 55399 - RNA, 19 nt, Artificial Sequence
  Description of Artificial Sequence: Synthetic oligonucleotide
  Antisense strand to SEQ ID NO: 55318
auguucgugcuuagaauaa

SEQ ID NO: 55400 - RNA, 19 nt, Artificial Sequence
  Description of Artificial Sequence: Synthetic oligonucleotide
  Sense strand starting at position 1145 of SEQ ID NO: 670
gcauuauucuaagcacgaa

SEQ ID NO: 55401 - RNA, 19 nt, Artificial Sequence
  Description of Artificial Sequence: Synthetic oligonucleotide
  Antisense strand to SEQ ID NO: 55320
uucgugcuuagaauaaugc

SEQ ID NO: 55402 - RNA, 19 nt, Artificial Sequence
  Description of Artificial Sequence: Synthetic oligonucleotide
  Sense strand starting at position 1137 of SEQ ID NO: 670
auuagaacgcauuauucua

SEQ ID NO: 55403 - RNA, 19 nt, Artificial Sequence
  Description of Artificial Sequence: Synthetic oligonucleotide
  Antisense strand to SEQ ID NO: 55322
uagaauaaugcguucuaau

SEQ ID NO: 55404 - RNA, 19 nt, Artificial Sequence
  Description of Artificial Sequence: Synthetic oligonucleotide
  Sense strand starting at position 1132 of SEQ ID NO: 670
cugcuauuagaacgcauua

SEQ ID NO: 55405 - RNA, 19 nt, Artificial Sequence
  Description of Artificial Sequence: Synthetic oligonucleotide
  Antisense strand to SEQ ID NO: 55324
uaaugcguucuaauagcag

SEQ ID NO: 55406 - RNA, 19 nt, Artificial Sequence
  Description of Artificial Sequence: Synthetic oligonucleotide
  Sense strand starting at position 872 of SEQ ID NO: 670
uguuuagucuuuccaaagu

SEQ ID NO: 55407 - RNA, 19 nt, Artificial Sequence
  Description of Artificial Sequence: Synthetic oligonucleotide
  Antisense strand to SEQ ID NO: 55326
acuuuggaaagacuaaaca

SEQ ID NO: 55408 - RNA, 19 nt, Artificial Sequence
  Description of Artificial Sequence: Synthetic oligonucleotide
  Sense strand starting at position 799 of SEQ ID NO: 670
caauuuccauaggguagaa

SEQ ID NO: 55409 - RNA, 19 nt, Artificial Sequence
  Description of Artificial Sequence: Synthetic oligonucleotide
  Antisense strand to SEQ ID NO: 55328
uucuacccuauggaaauug

SEQ ID NO: 55410 - RNA, 19 nt, Artificial Sequence
  Description of Artificial Sequence: Synthetic oligonucleotide
  Sense strand starting at position 780 of SEQ ID NO: 670
ugggcuccucccuaucaaa

SEQ ID NO: 55411 - RNA, 19 nt, Artificial Sequence
  Description of Artificial Sequence: Synthetic oligonucleotide
  Antisense strand to SEQ ID NO: 55330
uuugauagggaggagccca

SEQ ID NO: 55412 - RNA, 19 nt, Artificial Sequence
  Description of Artificial Sequence: Synthetic oligonucleotide
  Sense strand starting at position 422 of SEQ ID NO: 670
agaaauugguuuguuguuu

SEQ ID NO: 55413 - RNA, 19 nt, Artificial Sequence
  Description of Artificial Sequence: Synthetic oligonucleotide
  Antisense strand to SEQ ID NO: 55332
aaacaacaaaccaauuucu

SEQ ID NO: 55414 - RNA, 19 nt, Artificial Sequence
  Description of Artificial Sequence: Synthetic oligonucleotide
  Sense strand starting at position 421 of SEQ ID NO: 670
cagaaauugguuuguuguu

SEQ ID NO: 55415 - RNA, 19 nt, Artificial Sequence
  Description of Artificial Sequence: Synthetic oligonucleotide
  Antisense strand to SEQ ID NO: 55334
aacaacaaaccaauuucug

SEQ ID NO: 55416 - RNA, 19 nt, Artificial Sequence
  Description of Artificial Sequence: Synthetic oligonucleotide
  Sense strand starting at position 419 of SEQ ID NO: 670
ugcagaaauugguuuguug

SEQ ID NO: 55417 - RNA, 19 nt, Artificial Sequence
  Description of Artificial Sequence: Synthetic oligonucleotide
  Antisense strand to SEQ ID NO: 55336
caacaaaccaauuucugca

SEQ ID NO: 55418 - RNA, 19 nt, Artificial Sequence
  Description of Artificial Sequence: Synthetic oligonucleotide
  Sense strand starting at position 407 of SEQ ID NO: 670
cuuggaguccaaugcagaa

SEQ ID NO: 55419 - RNA, 19 nt, Artificial Sequence
  Description of Artificial Sequence: Synthetic oligonucleotide
  Antisense strand to SEQ ID NO: 55338
uucugcauuggacuccaag

SEQ ID NO: 55420 - RNA, 19 nt, Artificial Sequence
  Description of Artificial Sequence: Synthetic oligonucleotide
  Sense strand starting at position 133 of SEQ ID NO: 670
gguccagacuuaccuauca

SEQ ID NO: 55421 - RNA, 19 nt, Artificial Sequence
  Description of Artificial Sequence: Synthetic oligonucleotide
  Antisense strand to SEQ ID NO: 55340
ugauagguaagucuggacc

SEQ ID NO: 55422 - RNA, 19 nt, Artificial Sequence
  Description of Artificial Sequence: Synthetic oligonucleotide
  Sense strand starting at position 43 of SEQ ID NO: 670
aguucuggcauugagugaa

SEQ ID NO: 55423 - RNA, 19 nt, Artificial Sequence
  Description of Artificial Sequence: Synthetic oligonucleotide
  Antisense strand to SEQ ID NO: 55342
uucacucaaugccagaacu

SEQ ID NO: 55424 - RNA, 19 nt, Artificial Sequence
  Description of Artificial Sequence: Synthetic oligonucleotide
  Sense strand starting at position 42 of SEQ ID NO: 670
aaguucuggcauugaguga

SEQ ID NO: 55425 - RNA, 19 nt, Artificial Sequence
  Description of Artificial Sequence: Synthetic oligonucleotide
  Antisense strand to SEQ ID NO: 55344
ucacucaaugccagaacuu

SEQ ID NO: 55426 - RNA, 19 nt, Artificial Sequence
  Description of Artificial Sequence: Synthetic oligonucleotide
  Sense strand starting at position 3866 of SEQ ID NO: 671
ucucauuguguuugaauug

SEQ ID NO: 55427 - RNA, 19 nt, Artificial Sequence
  Description of Artificial Sequence: Synthetic oligonucleotide
  Antisense strand to SEQ ID NO: 55346
caauucaaacacaaugaga

SEQ ID NO: 55428 - RNA, 19 nt, Artificial Sequence
  Description of Artificial Sequence: Synthetic oligonucleotide
  Sense strand starting at position 3840 of SEQ ID NO: 671
cucuuugguccugacacuu

SEQ ID NO: 55429 - RNA, 19 nt, Artificial Sequence
  Description of Artificial Sequence: Synthetic oligonucleotide
  Antisense strand to SEQ ID NO: 55348
aagugucaggaccaaagag

SEQ ID NO: 55430 - RNA, 19 nt, Artificial Sequence
  Description of Artificial Sequence: Synthetic oligonucleotide
  Sense strand starting at position 3811 of SEQ ID NO: 671
guuugauaugcacaagcau

SEQ ID NO: 55431 - RNA, 19 nt, Artificial Sequence
  Description of Artificial Sequence: Synthetic oligonucleotide
  Antisense strand to SEQ ID NO: 55350
augcuugugcauaucaaac

SEQ ID NO: 55432 - RNA, 19 nt, Artificial Sequence
  Description of Artificial Sequence: Synthetic oligonucleotide
  Sense strand starting at position 3788 of SEQ ID NO: 671
ugucuucccuaaguuagau

SEQ ID NO: 55433 - RNA, 19 nt, Artificial Sequence
  Description of Artificial Sequence: Synthetic oligonucleotide
  Antisense strand to SEQ ID NO: 55352
aucuaacuuagggaagaca

SEQ ID NO: 55434 - RNA, 19 nt, Artificial Sequence
  Description of Artificial Sequence: Synthetic oligonucleotide
  Sense strand starting at position 3783 of SEQ ID NO: 671
ccaaaugucuucccuaagu

SEQ ID NO: 55435 - RNA, 19 nt, Artificial Sequence
  Description of Artificial Sequence: Synthetic oligonucleotide
  Antisense strand to SEQ ID NO: 55354
acuuagggaagacauuugg

SEQ ID NO: 55436 - RNA, 19 nt, Artificial Sequence
  Description of Artificial Sequence: Synthetic oligonucleotide
  Sense strand starting at position 3752 of SEQ ID NO: 671
gcuuaagacucaguuccaa

SEQ ID NO: 55437 - RNA, 19 nt, Artificial Sequence
  Description of Artificial Sequence: Synthetic oligonucleotide
  Antisense strand to SEQ ID NO: 55356
uuggaacugagucuuaagc

SEQ ID NO: 55438 - RNA, 19 nt, Artificial Sequence
  Description of Artificial Sequence: Synthetic oligonucleotide
  Sense strand starting at position 3743 of SEQ ID NO: 671
auguuuccagcuuaagacu

SEQ ID NO: 55439 - RNA, 19 nt, Artificial Sequence
  Description of Artificial Sequence: Synthetic oligonucleotide
  Antisense strand to SEQ ID NO: 55358
agucuuaagcuggaaacau

SEQ ID NO: 55440 - RNA, 19 nt, Artificial Sequence
  Description of Artificial Sequence: Synthetic oligonucleotide
  Sense strand starting at position 3730 of SEQ ID NO: 671
ugguauaucccauauguuu

SEQ ID NO: 55441 - RNA, 19 nt, Artificial Sequence
  Description of Artificial Sequence: Synthetic oligonucleotide
  Antisense strand to SEQ ID NO: 55360
aaacauaugggauauacca

SEQ ID NO: 55442 - RNA, 19 nt, Artificial Sequence
  Description of Artificial Sequence: Synthetic oligonucleotide
  Sense strand starting at position 3701 of SEQ ID NO: 671
gauggcauguuauuaaaug

SEQ ID NO: 55443 - RNA, 19 nt, Artificial Sequence
  Description of Artificial Sequence: Synthetic oligonucleotide
  Antisense strand to SEQ ID NO: 55362
cauuuaauaacaugccauc

SEQ ID NO: 55444 - RNA, 19 nt, Artificial Sequence
  Description of Artificial Sequence: Synthetic oligonucleotide
  Sense strand starting at position 3689 of SEQ ID NO: 671
gucacaaaucaugauggca

SEQ ID NO: 55445 - RNA, 19 nt, Artificial Sequence
  Description of Artificial Sequence: Synthetic oligonucleotide
  Antisense strand to SEQ ID NO: 55364
ugccaucaugauuugugac

SEQ ID NO: 55446 - RNA, 19 nt, Artificial Sequence
  Description of Artificial Sequence: Synthetic oligonucleotide
  Sense strand starting at position 3646 of SEQ ID NO: 671
gaucuaguucuguagacaa

SEQ ID NO: 55447 - RNA, 19 nt, Artificial Sequence
  Description of Artificial Sequence: Synthetic oligonucleotide
  Antisense strand to SEQ ID NO: 55366
uugucuacagaacuagauc

SEQ ID NO: 55448 - RNA, 19 nt, Artificial Sequence
  Description of Artificial Sequence: Synthetic oligonucleotide
  Sense strand starting at position 3645 of SEQ ID NO: 671
agaucuaguucuguagaca

SEQ ID NO: 55449 - RNA, 19 nt, Artificial Sequence
  Description of Artificial Sequence: Synthetic oligonucleotide
  Antisense strand to SEQ ID NO: 55368
ugucuacagaacuagaucu

SEQ ID NO: 55450 - RNA, 19 nt, Artificial Sequence
  Description of Artificial Sequence: Synthetic oligonucleotide
  Sense strand starting at position 3576 of SEQ ID NO: 671
uuaagugugccugucaguu

SEQ ID NO: 55451 - RNA, 19 nt, Artificial Sequence
  Description of Artificial Sequence: Synthetic oligonucleotide
  Antisense strand to SEQ ID NO: 55370
aacugacaggcacacuuaa

SEQ ID NO: 55452 - RNA, 19 nt, Artificial Sequence
  Description of Artificial Sequence: Synthetic oligonucleotide
  Sense strand starting at position 3573 of SEQ ID NO: 671
gccuuaagugugccuguca

SEQ ID NO: 55453 - RNA, 19 nt, Artificial Sequence
  Description of Artificial Sequence: Synthetic oligonucleotide
  Antisense strand to SEQ ID NO: 55372
ugacaggcacacuuaaggc

SEQ ID NO: 55454 - RNA, 19 nt, Artificial Sequence
  Description of Artificial Sequence: Synthetic oligonucleotide
  Sense strand starting at position 3565 of SEQ ID NO: 671
uuacuacugccuuaagugu

SEQ ID NO: 55455 - RNA, 19 nt, Artificial Sequence
  Description of Artificial Sequence: Synthetic oligonucleotide
  Antisense strand to SEQ ID NO: 55374
acacuuaaggcaguaguaa

SEQ ID NO: 55456 - RNA, 19 nt, Artificial Sequence
  Description of Artificial Sequence: Synthetic oligonucleotide
  Sense strand starting at position 3546 of SEQ ID NO: 671
caucaaugugugcaguaau

SEQ ID NO: 55457 - RNA, 19 nt, Artificial Sequence
  Description of Artificial Sequence: Synthetic oligonucleotide
  Antisense strand to SEQ ID NO: 55376
auuacugcacacauugaug

SEQ ID NO: 55458 - RNA, 19 nt, Artificial Sequence
  Description of Artificial Sequence: Synthetic oligonucleotide
  Sense strand starting at position 3412 of SEQ ID NO: 671
gaauuugacucccaagguu

SEQ ID NO: 55459 - RNA, 19 nt, Artificial Sequence
  Description of Artificial Sequence: Synthetic oligonucleotide
  Antisense strand to SEQ ID NO: 55378
aaccuugggagucaaauuc

SEQ ID NO: 55460 - RNA, 19 nt, Artificial Sequence
  Description of Artificial Sequence: Synthetic oligonucleotide
  Sense strand starting at position 3400 of SEQ ID NO: 671
uguauuuacugugaauuug

SEQ ID NO: 55461 - RNA, 19 nt, Artificial Sequence
  Description of Artificial Sequence: Synthetic oligonucleotide
  Antisense strand to SEQ ID NO: 55380
caaauucacaguaaauaca

SEQ ID NO: 55462 - RNA, 19 nt, Artificial Sequence
  Description of Artificial Sequence: Synthetic oligonucleotide
  Sense strand starting at position 3344 of SEQ ID NO: 671
gucacuggaucugucauaa

SEQ ID NO: 55463 - RNA, 19 nt, Artificial Sequence
  Description of Artificial Sequence: Synthetic oligonucleotide
  Antisense strand to SEQ ID NO: 55382
uuaugacagauccagugac

SEQ ID NO: 55464 - RNA, 19 nt, Artificial Sequence
  Description of Artificial Sequence: Synthetic oligonucleotide
  Sense strand starting at position 3234 of SEQ ID NO: 671
ggacuauccagcuguagua

SEQ ID NO: 55465 - RNA, 19 nt, Artificial Sequence
  Description of Artificial Sequence: Synthetic oligonucleotide
  Antisense strand to SEQ ID NO: 55384
uacuacagcuggauagucc

SEQ ID NO: 55466 - RNA, 19 nt, Artificial Sequence
  Description of Artificial Sequence: Synthetic oligonucleotide
  Sense strand starting at position 3211 of SEQ ID NO: 671
agagaagccuucuuacacu

SEQ ID NO: 55467 - RNA, 19 nt, Artificial Sequence
  Description of Artificial Sequence: Synthetic oligonucleotide
  Antisense strand to SEQ ID NO: 55386
aguguaagaaggcuucucu

SEQ ID NO: 55468 - RNA, 19 nt, Artificial Sequence
  Description of Artificial Sequence: Synthetic oligonucleotide
  Sense strand starting at position 3036 of SEQ ID NO: 671
ggucuuuagagcugggacu

SEQ ID NO: 55469 - RNA, 19 nt, Artificial Sequence
  Description of Artificial Sequence: Synthetic oligonucleotide
  Antisense strand to SEQ ID NO: 55388
agucccagcucuaaagacc

SEQ ID NO: 55470 - RNA, 19 nt, Artificial Sequence
  Description of Artificial Sequence: Synthetic oligonucleotide
  Sense strand starting at position 2860 of SEQ ID NO: 671
ugauuacguucuuuacauc

SEQ ID NO: 55471 - RNA, 19 nt, Artificial Sequence
  Description of Artificial Sequence: Synthetic oligonucleotide
  Antisense strand to SEQ ID NO: 55390
gauguaaagaacguaauca

SEQ ID NO: 55472 - RNA, 19 nt, Artificial Sequence
  Description of Artificial Sequence: Synthetic oligonucleotide
  Sense strand starting at position 2859 of SEQ ID NO: 671
uugauuacguucuuuacau

SEQ ID NO: 55473 - RNA, 19 nt, Artificial Sequence
  Description of Artificial Sequence: Synthetic oligonucleotide
  Antisense strand to SEQ ID NO: 55392
auguaaagaacguaaucaa

SEQ ID NO: 55474 - RNA, 19 nt, Artificial Sequence
  Description of Artificial Sequence: Synthetic oligonucleotide
  Sense strand starting at position 2830 of SEQ ID NO: 671
gugagcacauuguuaaaca

SEQ ID NO: 55475 - RNA, 19 nt, Artificial Sequence
  Description of Artificial Sequence: Synthetic oligonucleotide
  Antisense strand to SEQ ID NO: 55394
uguuuaacaaugugcucac

SEQ ID NO: 55476 - RNA, 19 nt, Artificial Sequence
  Description of Artificial Sequence: Synthetic oligonucleotide
  Sense strand starting at position 2828 of SEQ ID NO: 671
aagugagcacauuguuaaa

SEQ ID NO: 55477 - RNA, 19 nt, Artificial Sequence
  Description of Artificial Sequence: Synthetic oligonucleotide
  Antisense strand to SEQ ID NO: 55396
uuuaacaaugugcucacuu

SEQ ID NO: 55478 - RNA, 19 nt, Artificial Sequence
  Description of Artificial Sequence: Synthetic oligonucleotide
  Sense strand starting at position 2762 of SEQ ID NO: 671
auguucugggcucaaagau

SEQ ID NO: 55479 - RNA, 19 nt, Artificial Sequence
  Description of Artificial Sequence: Synthetic oligonucleotide
  Antisense strand to SEQ ID NO: 55398
aucuuugagcccagaacau

SEQ ID NO: 55480 - RNA, 19 nt, Artificial Sequence
  Description of Artificial Sequence: Synthetic oligonucleotide
  Sense strand starting at position 2758 of SEQ ID NO: 671
aguaauguucugggcucaa

SEQ ID NO: 55481 - RNA, 19 nt, Artificial Sequence
  Description of Artificial Sequence: Synthetic oligonucleotide
  Antisense strand to SEQ ID NO: 55400
uugagcccagaacauuacu

SEQ ID NO: 55482 - RNA, 19 nt, Artificial Sequence
  Description of Artificial Sequence: Synthetic oligonucleotide
  Sense strand starting at position 2701 of SEQ ID NO: 671
uccucuuagggauauugua

SEQ ID NO: 55483 - RNA, 19 nt, Artificial Sequence
  Description of Artificial Sequence: Synthetic oligonucleotide
  Antisense strand to SEQ ID NO: 55402
uacaauaucccuaagagga

SEQ ID NO: 55484 - RNA, 19 nt, Artificial Sequence
  Description of Artificial Sequence: Synthetic oligonucleotide
  Sense strand starting at position 2434 of SEQ ID NO: 671
cccgguugccucuacaaau

SEQ ID NO: 55485 - RNA, 19 nt, Artificial Sequence
  Description of Artificial Sequence: Synthetic oligonucleotide
  Antisense strand to SEQ ID NO: 55404
auuuguagaggcaaccggg

SEQ ID NO: 55486 - RNA, 19 nt, Artificial Sequence
  Description of Artificial Sequence: Synthetic oligonucleotide
  Sense strand starting at position 2302 of SEQ ID NO: 671
cccaguucuggaggcugau

SEQ ID NO: 55487 - RNA, 19 nt, Artificial Sequence
  Description of Artificial Sequence: Synthetic oligonucleotide
  Antisense strand to SEQ ID NO: 55406
aucagccuccagaacuggg

SEQ ID NO: 55488 - RNA, 19 nt, Artificial Sequence
  Description of Artificial Sequence: Synthetic oligonucleotide
  Sense strand starting at position 1108 of SEQ ID NO: 671
aguuaaucuggaugcaggu

SEQ ID NO: 55489 - RNA, 19 nt, Artificial Sequence
  Description of Artificial Sequence: Synthetic oligonucleotide
  Antisense strand to SEQ ID NO: 55408
accugcauccagauuaacu

SEQ ID NO: 55490 - RNA, 19 nt, Artificial Sequence
  Description of Artificial Sequence: Synthetic oligonucleotide
  Sense strand starting at position 911 of SEQ ID NO: 671
ccuaucaaacguuaaguuu

SEQ ID NO: 55491 - RNA, 19 nt, Artificial Sequence
  Description of Artificial Sequence: Synthetic oligonucleotide
  Antisense strand to SEQ ID NO: 55410
aaacuuaacguuugauagg

SEQ ID NO: 55492 - RNA, 19 nt, Artificial Sequence
  Description of Artificial Sequence: Synthetic oligonucleotide
  Sense strand starting at position 697 of SEQ ID NO: 671
gugaaacugcgucugcuau

SEQ ID NO: 55493 - RNA, 19 nt, Artificial Sequence
  Description of Artificial Sequence: Synthetic oligonucleotide
  Antisense strand to SEQ ID NO: 55412
auagcagacgcaguuucac

SEQ ID NO: 55494 - RNA, 19 nt, Artificial Sequence
  Description of Artificial Sequence: Synthetic oligonucleotide
  Sense strand starting at position 696 of SEQ ID NO: 671
ugugaaacugcgucugcua

SEQ ID NO: 55495 - RNA, 19 nt, Artificial Sequence
  Description of Artificial Sequence: Synthetic oligonucleotide
  Antisense strand to SEQ ID NO: 55414
uagcagacgcaguuucaca

SEQ ID NO: 55496 - RNA, 19 nt, Artificial Sequence
  Description of Artificial Sequence: Synthetic oligonucleotide
  Sense strand starting at position 608 of SEQ ID NO: 671
uuauucuaagcacgaacau

SEQ ID NO: 55497 - RNA, 19 nt, Artificial Sequence
  Description of Artificial Sequence: Synthetic oligonucleotide
  Antisense strand to SEQ ID NO: 55416
auguucgugcuuagaauaa

SEQ ID NO: 55498 - RNA, 19 nt, Artificial Sequence
  Description of Artificial Sequence: Synthetic oligonucleotide
  Sense strand starting at position 605 of SEQ ID NO: 671
gcauuauucuaagcacgaa

SEQ ID NO: 55499 - RNA, 19 nt, Artificial Sequence
  Description of Artificial Sequence: Synthetic oligonucleotide
  Antisense strand to SEQ ID NO: 55418
uucgugcuuagaauaaugc

SEQ ID NO: 55500 - RNA, 19 nt, Artificial Sequence
  Description of Artificial Sequence: Synthetic oligonucleotide
  Sense strand starting at position 597 of SEQ ID NO: 671
auuagaacgcauuauucua

SEQ ID NO: 55501 - RNA, 19 nt, Artificial Sequence
  Description of Artificial Sequence: Synthetic oligonucleotide
  Antisense strand to SEQ ID NO: 55420
uagaauaaugcguucuaau

SEQ ID NO: 55502 - RNA, 19 nt, Artificial Sequence
  Description of Artificial Sequence: Synthetic oligonucleotide
  Sense strand starting at position 259 of SEQ ID NO: 671
caauuuccauaggguagaa

SEQ ID NO: 55503 - RNA, 19 nt, Artificial Sequence
  Description of Artificial Sequence: Synthetic oligonucleotide
  Antisense strand to SEQ ID NO: 55422
uucuacccuauggaaauug

SEQ ID NO: 55504 - RNA, 19 nt, Artificial Sequence
  Description of Artificial Sequence: Synthetic oligonucleotide
  Sense strand starting at position 240 of SEQ ID NO: 671
ugggcuccucccuaucaaa

SEQ ID NO: 55505 - RNA, 19 nt, Artificial Sequence
  Description of Artificial Sequence: Synthetic oligonucleotide
  Antisense strand to SEQ ID NO: 55424
uuugauagggaggagccca

SEQ ID NO: 55506 - RNA, 19 nt, Artificial Sequence
  Description of Artificial Sequence: Synthetic oligonucleotide
  Sense strand starting at position 3906 of SEQ ID NO: 672
aauuauaggucuccugagu

SEQ ID NO: 55507 - RNA, 19 nt, Artificial Sequence
  Description of Artificial Sequence: Synthetic oligonucleotide
  Antisense strand to SEQ ID NO: 55426
acucaggagaccuauaauu

SEQ ID NO: 55508 - RNA, 19 nt, Artificial Sequence
  Description of Artificial Sequence: Synthetic oligonucleotide
  Sense strand starting at position 3150 of SEQ ID NO: 672
aaucaauuguagcuggauu

SEQ ID NO: 55509 - RNA, 19 nt, Artificial Sequence
  Description of Artificial Sequence: Synthetic oligonucleotide
  Antisense strand to SEQ ID NO: 55428
aauccagcuacaauugauu

SEQ ID NO: 55510 - RNA, 19 nt, Artificial Sequence
  Description of Artificial Sequence: Synthetic oligonucleotide
  Sense strand starting at position 2782 of SEQ ID NO: 672
uggucuauucagugaaggu

SEQ ID NO: 55511 - RNA, 19 nt, Artificial Sequence
  Description of Artificial Sequence: Synthetic oligonucleotide
  Antisense strand to SEQ ID NO: 55430
accuucacugaauagacca

SEQ ID NO: 55512 - RNA, 19 nt, Artificial Sequence
  Description of Artificial Sequence: Synthetic oligonucleotide
  Sense strand starting at position 2760 of SEQ ID NO: 672
ucauacagccauggagaaa

SEQ ID NO: 55513 - RNA, 19 nt, Artificial Sequence
  Description of Artificial Sequence: Synthetic oligonucleotide
  Antisense strand to SEQ ID NO: 55432
uuucuccauggcuguauga

SEQ ID NO: 55514 - RNA, 19 nt, Artificial Sequence
  Description of Artificial Sequence: Synthetic oligonucleotide
  Sense strand starting at position 2759 of SEQ ID NO: 672
aucauacagccauggagaa

SEQ ID NO: 55515 - RNA, 19 nt, Artificial Sequence
  Description of Artificial Sequence: Synthetic oligonucleotide
  Antisense strand to SEQ ID NO: 55434
uucuccauggcuguaugau

SEQ ID NO: 55516 - RNA, 19 nt, Artificial Sequence
  Description of Artificial Sequence: Synthetic oligonucleotide
  Sense strand starting at position 2715 of SEQ ID NO: 672
guuuaucacgcauacuuga

SEQ ID NO: 55517 - RNA, 19 nt, Artificial Sequence
  Description of Artificial Sequence: Synthetic oligonucleotide
  Antisense strand to SEQ ID NO: 55436
ucaaguaugcgugauaaac

SEQ ID NO: 55518 - RNA, 19 nt, Artificial Sequence
  Description of Artificial Sequence: Synthetic oligonucleotide
  Sense strand starting at position 2261 of SEQ ID NO: 672
caguuaccaccgggacaau

SEQ ID NO: 55519 - RNA, 19 nt, Artificial Sequence
  Description of Artificial Sequence: Synthetic oligonucleotide
  Antisense strand to SEQ ID NO: 55438
auugucccggugguaacug

SEQ ID NO: 55520 - RNA, 19 nt, Artificial Sequence
  Description of Artificial Sequence: Synthetic oligonucleotide
  Sense strand starting at position 2195 of SEQ ID NO: 672
guugucugugggucguuua

SEQ ID NO: 55521 - RNA, 19 nt, Artificial Sequence
  Description of Artificial Sequence: Synthetic oligonucleotide
  Antisense strand to SEQ ID NO: 55440
uaaacgacccacagacaac

SEQ ID NO: 55522 - RNA, 19 nt, Artificial Sequence
  Description of Artificial Sequence: Synthetic oligonucleotide
  Sense strand starting at position 1854 of SEQ ID NO: 672
cucugauacuccuccgaac

SEQ ID NO: 55523 - RNA, 19 nt, Artificial Sequence
  Description of Artificial Sequence: Synthetic oligonucleotide
  Antisense strand to SEQ ID NO: 55442
guucggaggaguaucagag

SEQ ID NO: 55524 - RNA, 19 nt, Artificial Sequence
  Description of Artificial Sequence: Synthetic oligonucleotide
  Sense strand starting at position 1521 of SEQ ID NO: 672
guuugccuucagggaagau

SEQ ID NO: 55525 - RNA, 19 nt, Artificial Sequence
  Description of Artificial Sequence: Synthetic oligonucleotide
  Antisense strand to SEQ ID NO: 55444
aucuucccugaaggcaaac

SEQ ID NO: 55526 - RNA, 19 nt, Artificial Sequence
  Description of Artificial Sequence: Synthetic oligonucleotide
  Sense strand starting at position 1457 of SEQ ID NO: 672
cagaauugccgauggcaac

SEQ ID NO: 55527 - RNA, 19 nt, Artificial Sequence
  Description of Artificial Sequence: Synthetic oligonucleotide
  Antisense strand to SEQ ID NO: 55446
guugccaucggcaauucug

SEQ ID NO: 55528 - RNA, 19 nt, Artificial Sequence
  Description of Artificial Sequence: Synthetic oligonucleotide
  Sense strand starting at position 1455 of SEQ ID NO: 672
ugcagaauugccgauggca

SEQ ID NO: 55529 - RNA, 19 nt, Artificial Sequence
  Description of Artificial Sequence: Synthetic oligonucleotide
  Antisense strand to SEQ ID NO: 55448
ugccaucggcaauucugca

SEQ ID NO: 55530 - RNA, 19 nt, Artificial Sequence
  Description of Artificial Sequence: Synthetic oligonucleotide
  Sense strand starting at position 1241 of SEQ ID NO: 672
ggcaaacucucuccaugau

SEQ ID NO: 55531 - RNA, 19 nt, Artificial Sequence
  Description of Artificial Sequence: Synthetic oligonucleotide
  Antisense strand to SEQ ID NO: 55450
aucauggagagaguuugcc

SEQ ID NO: 55532 - RNA, 19 nt, Artificial Sequence
  Description of Artificial Sequence: Synthetic oligonucleotide
  Sense strand starting at position 1202 of SEQ ID NO: 672
cccagauccuagguuacau

SEQ ID NO: 55533 - RNA, 19 nt, Artificial Sequence
  Description of Artificial Sequence: Synthetic oligonucleotide
  Antisense strand to SEQ ID NO: 55452
auguaaccuaggaucuggg

SEQ ID NO: 55534 - RNA, 19 nt, Artificial Sequence
  Description of Artificial Sequence: Synthetic oligonucleotide
  Sense strand starting at position 1058 of SEQ ID NO: 672
ccaggucugcauuaaagaa

SEQ ID NO: 55535 - RNA, 19 nt, Artificial Sequence
  Description of Artificial Sequence: Synthetic oligonucleotide
  Antisense strand to SEQ ID NO: 55454
uucuuuaaugcagaccugg

SEQ ID NO: 55536 - RNA, 19 nt, Artificial Sequence
  Description of Artificial Sequence: Synthetic oligonucleotide
  Sense strand starting at position 1055 of SEQ ID NO: 672
agaccaggucugcauuaaa

SEQ ID NO: 55537 - RNA, 19 nt, Artificial Sequence
  Description of Artificial Sequence: Synthetic oligonucleotide
  Antisense strand to SEQ ID NO: 55456
uuuaaugcagaccuggucu

SEQ ID NO: 55538 - RNA, 19 nt, Artificial Sequence
  Description of Artificial Sequence: Synthetic oligonucleotide
  Sense strand starting at position 1054 of SEQ ID NO: 672
aagaccaggucugcauuaa

SEQ ID NO: 55539 - RNA, 19 nt, Artificial Sequence
  Description of Artificial Sequence: Synthetic oligonucleotide
  Antisense strand to SEQ ID NO: 55458
uuaaugcagaccuggucuu

SEQ ID NO: 55540 - RNA, 19 nt, Artificial Sequence
  Description of Artificial Sequence: Synthetic oligonucleotide
  Sense strand starting at position 1040 of SEQ ID NO: 672
gaaagaaguucugaaagac

SEQ ID NO: 55541 - RNA, 19 nt, Artificial Sequence
  Description of Artificial Sequence: Synthetic oligonucleotide
  Antisense strand to SEQ ID NO: 55460
gucuuucagaacuucuuuc

SEQ ID NO: 55542 - RNA, 19 nt, Artificial Sequence
  Description of Artificial Sequence: Synthetic oligonucleotide
  Sense strand starting at position 940 of SEQ ID NO: 672
gaugaaacuuuagaagaga

SEQ ID NO: 55543 - RNA, 19 nt, Artificial Sequence
  Description of Artificial Sequence: Synthetic oligonucleotide
  Antisense strand to SEQ ID NO: 55462
ucucuucuaaaguuucauc

SEQ ID NO: 55544 - RNA, 19 nt, Artificial Sequence
  Description of Artificial Sequence: Synthetic oligonucleotide
  Sense strand starting at position 859 of SEQ ID NO: 672
uuagcacucgaugaagaua

SEQ ID NO: 55545 - RNA, 19 nt, Artificial Sequence
  Description of Artificial Sequence: Synthetic oligonucleotide
  Antisense strand to SEQ ID NO: 55464
uaucuucaucgagugcuaa

SEQ ID NO: 55546 - RNA, 19 nt, Artificial Sequence
  Description of Artificial Sequence: Synthetic oligonucleotide
  Sense strand starting at position 858 of SEQ ID NO: 672
auuagcacucgaugaagau

SEQ ID NO: 55547 - RNA, 19 nt, Artificial Sequence
  Description of Artificial Sequence: Synthetic oligonucleotide
  Antisense strand to SEQ ID NO: 55466
aucuucaucgagugcuaau

SEQ ID NO: 55548 - RNA, 19 nt, Artificial Sequence
  Description of Artificial Sequence: Synthetic oligonucleotide
  Sense strand starting at position 856 of SEQ ID NO: 672
auauuagcacucgaugaag

SEQ ID NO: 55549 - RNA, 19 nt, Artificial Sequence
  Description of Artificial Sequence: Synthetic oligonucleotide
  Antisense strand to SEQ ID NO: 55468
cuucaucgagugcuaauau

SEQ ID NO: 55550 - RNA, 19 nt, Artificial Sequence
  Description of Artificial Sequence: Synthetic oligonucleotide
  Sense strand starting at position 825 of SEQ ID NO: 672
uccgaccauugagugauaa

SEQ ID NO: 55551 - RNA, 19 nt, Artificial Sequence
  Description of Artificial Sequence: Synthetic oligonucleotide
  Antisense strand to SEQ ID NO: 55470
uuaucacucaauggucgga

SEQ ID NO: 55552 - RNA, 19 nt, Artificial Sequence
  Description of Artificial Sequence: Synthetic oligonucleotide
  Sense strand starting at position 777 of SEQ ID NO: 672
ugaaguuacugacacauuu

SEQ ID NO: 55553 - RNA, 19 nt, Artificial Sequence
  Description of Artificial Sequence: Synthetic oligonucleotide
  Antisense strand to SEQ ID NO: 55472
aaaugugucaguaacuuca

SEQ ID NO: 55554 - RNA, 19 nt, Artificial Sequence
  Description of Artificial Sequence: Synthetic oligonucleotide
  Sense strand starting at position 696 of SEQ ID NO: 672
accuaauccugaguaguuc

SEQ ID NO: 55555 - RNA, 19 nt, Artificial Sequence
  Description of Artificial Sequence: Synthetic oligonucleotide
  Antisense strand to SEQ ID NO: 55474
gaacuacucaggauuaggu

SEQ ID NO: 55556 - RNA, 19 nt, Artificial Sequence
  Description of Artificial Sequence: Synthetic oligonucleotide
  Sense strand starting at position 529 of SEQ ID NO: 672
uguuucuuaggacaaguuu

SEQ ID NO: 55557 - RNA, 19 nt, Artificial Sequence
  Description of Artificial Sequence: Synthetic oligonucleotide
  Antisense strand to SEQ ID NO: 55476
aaacuuguccuaagaaaca

SEQ ID NO: 55558 - RNA, 19 nt, Artificial Sequence
  Description of Artificial Sequence: Synthetic oligonucleotide
  Sense strand starting at position 523 of SEQ ID NO: 672
agauauuguuucuuaggac

SEQ ID NO: 55559 - RNA, 19 nt, Artificial Sequence
  Description of Artificial Sequence: Synthetic oligonucleotide
  Antisense strand to SEQ ID NO: 55478
guccuaagaaacaauaucu

SEQ ID NO: 55560 - RNA, 19 nt, Artificial Sequence
  Description of Artificial Sequence: Synthetic oligonucleotide
  Sense strand starting at position 522 of SEQ ID NO: 672
cagauauuguuucuuagga

SEQ ID NO: 55561 - RNA, 19 nt, Artificial Sequence
  Description of Artificial Sequence: Synthetic oligonucleotide
  Antisense strand to SEQ ID NO: 55480
uccuaagaaacaauaucug

SEQ ID NO: 55562 - RNA, 19 nt, Artificial Sequence
  Description of Artificial Sequence: Synthetic oligonucleotide
  Sense strand starting at position 487 of SEQ ID NO: 672
cuguuauuggagcagccau

SEQ ID NO: 55563 - RNA, 19 nt, Artificial Sequence
  Description of Artificial Sequence: Synthetic oligonucleotide
  Antisense strand to SEQ ID NO: 55482
auggcugcuccaauaacag

SEQ ID NO: 55564 - RNA, 19 nt, Artificial Sequence
  Description of Artificial Sequence: Synthetic oligonucleotide
  Sense strand starting at position 345 of SEQ ID NO: 672
ggacuuuccuacgcagaaa

SEQ ID NO: 55565 - RNA, 19 nt, Artificial Sequence
  Description of Artificial Sequence: Synthetic oligonucleotide
  Antisense strand to SEQ ID NO: 55484
uuucugcguaggaaagucc

SEQ ID NO: 55566 - RNA, 19 nt, Artificial Sequence
  Description of Artificial Sequence: Synthetic oligonucleotide
  Sense strand starting at position 344 of SEQ ID NO: 672
gggacuuuccuacgcagaa

SEQ ID NO: 55567 - RNA, 19 nt, Artificial Sequence
  Description of Artificial Sequence: Synthetic oligonucleotide
  Antisense strand to SEQ ID NO: 55486
uucugcguaggaaaguccc

SEQ ID NO: 55568 - RNA, 19 nt, Artificial Sequence
  Description of Artificial Sequence: Synthetic oligonucleotide
  Sense strand starting at position 331 of SEQ ID NO: 672
cucagaugugucugggacu

SEQ ID NO: 55569 - RNA, 19 nt, Artificial Sequence
  Description of Artificial Sequence: Synthetic oligonucleotide
  Antisense strand to SEQ ID NO: 55488
agucccagacacaucugag

SEQ ID NO: 55570 - RNA, 19 nt, Artificial Sequence
  Description of Artificial Sequence: Synthetic oligonucleotide
  Sense strand starting at position 321 of SEQ ID NO: 672
augacugaugcucagaugu

SEQ ID NO: 55571 - RNA, 19 nt, Artificial Sequence
  Description of Artificial Sequence: Synthetic oligonucleotide
  Antisense strand to SEQ ID NO: 55490
acaucugagcaucagucau

SEQ ID NO: 55572 - RNA, 19 nt, Artificial Sequence
  Description of Artificial Sequence: Synthetic oligonucleotide
  Sense strand starting at position 320 of SEQ ID NO: 672
gaugacugaugcucagaug

SEQ ID NO: 55573 - RNA, 19 nt, Artificial Sequence
  Description of Artificial Sequence: Synthetic oligonucleotide
  Antisense strand to SEQ ID NO: 55492
caucugagcaucagucauc

SEQ ID NO: 55574 - RNA, 19 nt, Artificial Sequence
  Description of Artificial Sequence: Synthetic oligonucleotide
  Sense strand starting at position 264 of SEQ ID NO: 672
agggcauucucugugaaag

SEQ ID NO: 55575 - RNA, 19 nt, Artificial Sequence
  Description of Artificial Sequence: Synthetic oligonucleotide
  Antisense strand to SEQ ID NO: 55494
cuuucacagagaaugcccu

SEQ ID NO: 55576 - RNA, 19 nt, Artificial Sequence
  Description of Artificial Sequence: Synthetic oligonucleotide
  Sense strand starting at position 263 of SEQ ID NO: 672
cagggcauucucugugaaa

SEQ ID NO: 55577 - RNA, 19 nt, Artificial Sequence
  Description of Artificial Sequence: Synthetic oligonucleotide
  Antisense strand to SEQ ID NO: 55496
uuucacagagaaugcccug

SEQ ID NO: 55578 - RNA, 19 nt, Artificial Sequence
  Description of Artificial Sequence: Synthetic oligonucleotide
  Sense strand starting at position 228 of SEQ ID NO: 672
agggaagugaaaugucuuu

SEQ ID NO: 55579 - RNA, 19 nt, Artificial Sequence
  Description of Artificial Sequence: Synthetic oligonucleotide
  Antisense strand to SEQ ID NO: 55498
aaagacauuucacuucccu

SEQ ID NO: 55580 - RNA, 19 nt, Artificial Sequence
  Description of Artificial Sequence: Synthetic oligonucleotide
  Sense strand starting at position 208 of SEQ ID NO: 672
gagaacagguaguucuaaa

SEQ ID NO: 55581 - RNA, 19 nt, Artificial Sequence
  Description of Artificial Sequence: Synthetic oligonucleotide
  Antisense strand to SEQ ID NO: 55500
uuuagaacuaccuguucuc

SEQ ID NO: 55582 - RNA, 19 nt, Artificial Sequence
  Description of Artificial Sequence: Synthetic oligonucleotide
  Sense strand starting at position 165 of SEQ ID NO: 672
uccugaaauguauggaguu

SEQ ID NO: 55583 - RNA, 19 nt, Artificial Sequence
  Description of Artificial Sequence: Synthetic oligonucleotide
  Antisense strand to SEQ ID NO: 55502
aacuccauacauuucagga

SEQ ID NO: 55584 - RNA, 19 nt, Artificial Sequence
  Description of Artificial Sequence: Synthetic oligonucleotide
  Sense strand starting at position 16 of SEQ ID NO: 672
uauauuaagugcucaguag

SEQ ID NO: 55585 - RNA, 19 nt, Artificial Sequence
  Description of Artificial Sequence: Synthetic oligonucleotide
  Antisense strand to SEQ ID NO: 55504
cuacugagcacuuaauaua

SEQ ID NO: 55586 - RNA, 19 nt, Artificial Sequence
  Description of Artificial Sequence: Synthetic oligonucleotide
  Sense strand starting at position 54 of SEQ ID NO: 673
gaaagcaaccacuguguaa

SEQ ID NO: 55587 - RNA, 19 nt, Artificial Sequence
  Description of Artificial Sequence: Synthetic oligonucleotide
  Antisense strand to SEQ ID NO: 55506
uuacacagugguugcuuuc

SEQ ID NO: 55588 - RNA, 19 nt, Artificial Sequence
  Description of Artificial Sequence: Synthetic oligonucleotide
  Sense strand starting at position 58 of SEQ ID NO: 673
gcaaccacuguguaacuua

SEQ ID NO: 55589 - RNA, 19 nt, Artificial Sequence
  Description of Artificial Sequence: Synthetic oligonucleotide
  Antisense strand to SEQ ID NO: 55508
uaaguuacacagugguugc

SEQ ID NO: 55590 - RNA, 19 nt, Artificial Sequence
  Description of Artificial Sequence: Synthetic oligonucleotide
  Sense strand starting at position 98 of SEQ ID NO: 673
cuguguacugcucaaaguu

SEQ ID NO: 55591 - RNA, 19 nt, Artificial Sequence
  Description of Artificial Sequence: Synthetic oligonucleotide
  Antisense strand to SEQ ID NO: 55510
aacuuugagcaguacacag

SEQ ID NO: 55592 - RNA, 19 nt, Artificial Sequence
  Description of Artificial Sequence: Synthetic oligonucleotide
  Sense strand starting at position 365 of SEQ ID NO: 673
uagagaggcucuccuuacu

SEQ ID NO: 55593 - RNA, 19 nt, Artificial Sequence
  Description of Artificial Sequence: Synthetic oligonucleotide
  Antisense strand to SEQ ID NO: 55512
aguaaggagagccucucua

SEQ ID NO: 55594 - RNA, 19 nt, Artificial Sequence
  Description of Artificial Sequence: Synthetic oligonucleotide
  Sense strand starting at position 506 of SEQ ID NO: 673
ucucgagaaggcugguaaa

SEQ ID NO: 55595 - RNA, 19 nt, Artificial Sequence
  Description of Artificial Sequence: Synthetic oligonucleotide
  Antisense strand to SEQ ID NO: 55514
uuuaccagccuucucgaga

SEQ ID NO: 55596 - RNA, 19 nt, Artificial Sequence
  Description of Artificial Sequence: Synthetic oligonucleotide
  Sense strand starting at position 581 of SEQ ID NO: 673
gacgaauugcaguaugaac

SEQ ID NO: 55597 - RNA, 19 nt, Artificial Sequence
  Description of Artificial Sequence: Synthetic oligonucleotide
  Antisense strand to SEQ ID NO: 55516
guucauacugcaauucguc

SEQ ID NO: 55598 - RNA, 19 nt, Artificial Sequence
  Description of Artificial Sequence: Synthetic oligonucleotide
  Sense strand starting at position 736 of SEQ ID NO: 673
accucagugagcugucgaa

SEQ ID NO: 55599 - RNA, 19 nt, Artificial Sequence
  Description of Artificial Sequence: Synthetic oligonucleotide
  Antisense strand to SEQ ID NO: 55518
uucgacagcucacugaggu

SEQ ID NO: 55600 - RNA, 19 nt, Artificial Sequence
  Description of Artificial Sequence: Synthetic oligonucleotide
  Sense strand starting at position 790 of SEQ ID NO: 673
ggaggugggcuagguuuau

SEQ ID NO: 55601 - RNA, 19 nt, Artificial Sequence
  Description of Artificial Sequence: Synthetic oligonucleotide
  Antisense strand to SEQ ID NO: 55520
auaaaccuagcccaccucc

SEQ ID NO: 55602 - RNA, 19 nt, Artificial Sequence
  Description of Artificial Sequence: Synthetic oligonucleotide
  Sense strand starting at position 796 of SEQ ID NO: 673
gggcuagguuuaucuucca

SEQ ID NO: 55603 - RNA, 19 nt, Artificial Sequence
  Description of Artificial Sequence: Synthetic oligonucleotide
  Antisense strand to SEQ ID NO: 55522
uggaagauaaaccuagccc

SEQ ID NO: 55604 - RNA, 19 nt, Artificial Sequence
  Description of Artificial Sequence: Synthetic oligonucleotide
  Sense strand starting at position 799 of SEQ ID NO: 673
cuagguuuaucuuccaggu

SEQ ID NO: 55605 - RNA, 19 nt, Artificial Sequence
  Description of Artificial Sequence: Synthetic oligonucleotide
  Antisense strand to SEQ ID NO: 55524
accuggaagauaaaccuag

SEQ ID NO: 55606 - RNA, 19 nt, Artificial Sequence
  Description of Artificial Sequence: Synthetic oligonucleotide
  Sense strand starting at position 803 of SEQ ID NO: 673
guuuaucuuccagguaaug

SEQ ID NO: 55607 - RNA, 19 nt, Artificial Sequence
  Description of Artificial Sequence: Synthetic oligonucleotide
  Antisense strand to SEQ ID NO: 55526
cauuaccuggaagauaaac

SEQ ID NO: 55608 - RNA, 19 nt, Artificial Sequence
  Description of Artificial Sequence: Synthetic oligonucleotide
  Sense strand starting at position 890 of SEQ ID NO: 673
cagguaacuccuggaucca

SEQ ID NO: 55609 - RNA, 19 nt, Artificial Sequence
  Description of Artificial Sequence: Synthetic oligonucleotide
  Antisense strand to SEQ ID NO: 55528
uggauccaggaguuaccug

SEQ ID NO: 55610 - RNA, 19 nt, Artificial Sequence
  Description of Artificial Sequence: Synthetic oligonucleotide
  Sense strand starting at position 1179 of SEQ ID NO: 673
cggguuguccuugacauug

SEQ ID NO: 55611 - RNA, 19 nt, Artificial Sequence
  Description of Artificial Sequence: Synthetic oligonucleotide
  Antisense strand to SEQ ID NO: 55530
caaugucaaggacaacccg

SEQ ID NO: 55612 - RNA, 19 nt, Artificial Sequence
  Description of Artificial Sequence: Synthetic oligonucleotide
  Sense strand starting at position 1217 of SEQ ID NO: 673
gggaauagagagcguugua

SEQ ID NO: 55613 - RNA, 19 nt, Artificial Sequence
  Description of Artificial Sequence: Synthetic oligonucleotide
  Antisense strand to SEQ ID NO: 55532
uacaacgcucucuauuccc

SEQ ID NO: 55614 - RNA, 19 nt, Artificial Sequence
  Description of Artificial Sequence: Synthetic oligonucleotide
  Sense strand starting at position 1712 of SEQ ID NO: 673
gguaguucugguagacguu

SEQ ID NO: 55615 - RNA, 19 nt, Artificial Sequence
  Description of Artificial Sequence: Synthetic oligonucleotide
  Antisense strand to SEQ ID NO: 55534
aacgucuaccagaacuacc

SEQ ID NO: 55616 - RNA, 19 nt, Artificial Sequence
  Description of Artificial Sequence: Synthetic oligonucleotide
  Sense strand starting at position 1817 of SEQ ID NO: 673
gcgagagcugcuucacgua

SEQ ID NO: 55617 - RNA, 19 nt, Artificial Sequence
  Description of Artificial Sequence: Synthetic oligonucleotide
  Antisense strand to SEQ ID NO: 55536
uacgugaagcagcucucgc

SEQ ID NO: 55618 - RNA, 19 nt, Artificial Sequence
  Description of Artificial Sequence: Synthetic oligonucleotide
  Sense strand starting at position 2760 of SEQ ID NO: 673
ugcgaaugacccugugagu

SEQ ID NO: 55619 - RNA, 19 nt, Artificial Sequence
  Description of Artificial Sequence: Synthetic oligonucleotide
  Antisense strand to SEQ ID NO: 55538
acucacagggucauucgca

SEQ ID NO: 55620 - RNA, 19 nt, Artificial Sequence
  Description of Artificial Sequence: Synthetic oligonucleotide
  Sense strand starting at position 2924 of SEQ ID NO: 673
cguguuucugucuuccuua

SEQ ID NO: 55621 - RNA, 19 nt, Artificial Sequence
  Description of Artificial Sequence: Synthetic oligonucleotide
  Antisense strand to SEQ ID NO: 55540
uaaggaagacagaaacacg

SEQ ID NO: 55622 - RNA, 19 nt, Artificial Sequence
  Description of Artificial Sequence: Synthetic oligonucleotide
  Sense strand starting at position 2963 of SEQ ID NO: 673
auaagaaagcuguguagac

SEQ ID NO: 55623 - RNA, 19 nt, Artificial Sequence
  Description of Artificial Sequence: Synthetic oligonucleotide
  Antisense strand to SEQ ID NO: 55542
gucuacacagcuuucuuau

SEQ ID NO: 55624 - RNA, 19 nt, Artificial Sequence
  Description of Artificial Sequence: Synthetic oligonucleotide
  Sense strand starting at position 2998 of SEQ ID NO: 673
gacucagggccguaacaaa

SEQ ID NO: 55625 - RNA, 19 nt, Artificial Sequence
  Description of Artificial Sequence: Synthetic oligonucleotide
  Antisense strand to SEQ ID NO: 55544
uuuguuacggcccugaguc

SEQ ID NO: 55626 - RNA, 19 nt, Artificial Sequence
  Description of Artificial Sequence: Synthetic oligonucleotide
  Sense strand starting at position 3053 of SEQ ID NO: 673
auaacaaguuccugauuug

SEQ ID NO: 55627 - RNA, 19 nt, Artificial Sequence
  Description of Artificial Sequence: Synthetic oligonucleotide
  Antisense strand to SEQ ID NO: 55546
caaaucaggaacuuguuau

SEQ ID NO: 55628 - RNA, 19 nt, Artificial Sequence
  Description of Artificial Sequence: Synthetic oligonucleotide
  Sense strand starting at position 3176 of SEQ ID NO: 673
cucuauucccguuaggaaa

SEQ ID NO: 55629 - RNA, 19 nt, Artificial Sequence
  Description of Artificial Sequence: Synthetic oligonucleotide
  Antisense strand to SEQ ID NO: 55548
uuuccuaacgggaauagag

SEQ ID NO: 55630 - RNA, 19 nt, Artificial Sequence
  Description of Artificial Sequence: Synthetic oligonucleotide
  Sense strand starting at position 3200 of SEQ ID NO: 673
uuuaguuagcucguguguu

SEQ ID NO: 55631 - RNA, 19 nt, Artificial Sequence
  Description of Artificial Sequence: Synthetic oligonucleotide
  Antisense strand to SEQ ID NO: 55550
aacacacgagcuaacuaaa

SEQ ID NO: 55632 - RNA, 19 nt, Artificial Sequence
  Description of Artificial Sequence: Synthetic oligonucleotide
  Sense strand starting at position 3313 of SEQ ID NO: 673
cgugaacaggguuaaguuu

SEQ ID NO: 55633 - RNA, 19 nt, Artificial Sequence
  Description of Artificial Sequence: Synthetic oligonucleotide
  Antisense strand to SEQ ID NO: 55552
aaacuuaacccuguucacg

SEQ ID NO: 55634 - RNA, 19 nt, Artificial Sequence
  Description of Artificial Sequence: Synthetic oligonucleotide
  Sense strand starting at position 3467 of SEQ ID NO: 673
agauaugcuacuggagaua

SEQ ID NO: 55635 - RNA, 19 nt, Artificial Sequence
  Description of Artificial Sequence: Synthetic oligonucleotide
  Antisense strand to SEQ ID NO: 55554
uaucuccaguagcauaucu

SEQ ID NO: 55636 - RNA, 19 nt, Artificial Sequence
  Description of Artificial Sequence: Synthetic oligonucleotide
  Sense strand starting at position 3476 of SEQ ID NO: 673
acuggagauaucugcuugu

SEQ ID NO: 55637 - RNA, 19 nt, Artificial Sequence
  Description of Artificial Sequence: Synthetic oligonucleotide
  Antisense strand to SEQ ID NO: 55556
acaagcagauaucuccagu

SEQ ID NO: 55638 - RNA, 19 nt, Artificial Sequence
  Description of Artificial Sequence: Synthetic oligonucleotide
  Sense strand starting at position 3479 of SEQ ID NO: 673
ggagauaucugcuuguuaa

SEQ ID NO: 55639 - RNA, 19 nt, Artificial Sequence
  Description of Artificial Sequence: Synthetic oligonucleotide
  Antisense strand to SEQ ID NO: 55558
uuaacaagcagauaucucc

SEQ ID NO: 55640 - RNA, 19 nt, Artificial Sequence
  Description of Artificial Sequence: Synthetic oligonucleotide
  Sense strand starting at position 3480 of SEQ ID NO: 673
gagauaucugcuuguuaau

SEQ ID NO: 55641 - RNA, 19 nt, Artificial Sequence
  Description of Artificial Sequence: Synthetic oligonucleotide
  Antisense strand to SEQ ID NO: 55560
auuaacaagcagauaucuc

SEQ ID NO: 55642 - RNA, 19 nt, Artificial Sequence
  Description of Artificial Sequence: Synthetic oligonucleotide
  Sense strand starting at position 3504 of SEQ ID NO: 673
cgaacuguaacuugucgga

SEQ ID NO: 55643 - RNA, 19 nt, Artificial Sequence
  Description of Artificial Sequence: Synthetic oligonucleotide
  Antisense strand to SEQ ID NO: 55562
uccgacaaguuacaguucg

SEQ ID NO: 55644 - RNA, 19 nt, Artificial Sequence
  Description of Artificial Sequence: Synthetic oligonucleotide
  Sense strand starting at position 3506 of SEQ ID NO: 673
aacuguaacuugucggaag

SEQ ID NO: 55645 - RNA, 19 nt, Artificial Sequence
  Description of Artificial Sequence: Synthetic oligonucleotide
  Antisense strand to SEQ ID NO: 55564
cuuccgacaaguuacaguu

SEQ ID NO: 55646 - RNA, 19 nt, Artificial Sequence
  Description of Artificial Sequence: Synthetic oligonucleotide
  Sense strand starting at position 3508 of SEQ ID NO: 673
cuguaacuugucggaagga

SEQ ID NO: 55647 - RNA, 19 nt, Artificial Sequence
  Description of Artificial Sequence: Synthetic oligonucleotide
  Antisense strand to SEQ ID NO: 55566
uccuuccgacaaguuacag

SEQ ID NO: 55648 - RNA, 19 nt, Artificial Sequence
  Description of Artificial Sequence: Synthetic oligonucleotide
  Sense strand starting at position 3538 of SEQ ID NO: 673
gcagaauaggauugccuuu

SEQ ID NO: 55649 - RNA, 19 nt, Artificial Sequence
  Description of Artificial Sequence: Synthetic oligonucleotide
  Antisense strand to SEQ ID NO: 55568
aaaggcaauccuauucugc

SEQ ID NO: 55650 - RNA, 19 nt, Artificial Sequence
  Description of Artificial Sequence: Synthetic oligonucleotide
  Sense strand starting at position 3787 of SEQ ID NO: 673
uuaggugaaaugcaaguau

SEQ ID NO: 55651 - RNA, 19 nt, Artificial Sequence
  Description of Artificial Sequence: Synthetic oligonucleotide
  Antisense strand to SEQ ID NO: 55570
auacuugcauuucaccuaa

SEQ ID NO: 55652 - RNA, 19 nt, Artificial Sequence
  Description of Artificial Sequence: Synthetic oligonucleotide
  Sense strand starting at position 3846 of SEQ ID NO: 673
ccaacugaguuagugugaa

SEQ ID NO: 55653 - RNA, 19 nt, Artificial Sequence
  Description of Artificial Sequence: Synthetic oligonucleotide
  Antisense strand to SEQ ID NO: 55572
uucacacuaacucaguugg

SEQ ID NO: 55654 - RNA, 19 nt, Artificial Sequence
  Description of Artificial Sequence: Synthetic oligonucleotide
  Sense strand starting at position 3854 of SEQ ID NO: 673
guuagugugaacugcccaa

SEQ ID NO: 55655 - RNA, 19 nt, Artificial Sequence
  Description of Artificial Sequence: Synthetic oligonucleotide
  Antisense strand to SEQ ID NO: 55574
uugggcaguucacacuaac

SEQ ID NO: 55656 - RNA, 19 nt, Artificial Sequence
  Description of Artificial Sequence: Synthetic oligonucleotide
  Sense strand starting at position 3858 of SEQ ID NO: 673
gugugaacugcccaagaau

SEQ ID NO: 55657 - RNA, 19 nt, Artificial Sequence
  Description of Artificial Sequence: Synthetic oligonucleotide
  Antisense strand to SEQ ID NO: 55576
auucuugggcaguucacac

SEQ ID NO: 55658 - RNA, 19 nt, Artificial Sequence
  Description of Artificial Sequence: Synthetic oligonucleotide
  Sense strand starting at position 3876 of SEQ ID NO: 673
uguguaaggacuugggcau

SEQ ID NO: 55659 - RNA, 19 nt, Artificial Sequence
  Description of Artificial Sequence: Synthetic oligonucleotide
  Antisense strand to SEQ ID NO: 55578
augcccaaguccuuacaca

SEQ ID NO: 55660 - RNA, 19 nt, Artificial Sequence
  Description of Artificial Sequence: Synthetic oligonucleotide
  Sense strand starting at position 3877 of SEQ ID NO: 673
guguaaggacuugggcaua

SEQ ID NO: 55661 - RNA, 19 nt, Artificial Sequence
  Description of Artificial Sequence: Synthetic oligonucleotide
  Antisense strand to SEQ ID NO: 55580
uaugcccaaguccuuacac

SEQ ID NO: 55662 - RNA, 19 nt, Artificial Sequence
  Description of Artificial Sequence: Synthetic oligonucleotide
  Sense strand starting at position 3889 of SEQ ID NO: 673
gggcauauuuggccaaugu

SEQ ID NO: 55663 - RNA, 19 nt, Artificial Sequence
  Description of Artificial Sequence: Synthetic oligonucleotide
  Antisense strand to SEQ ID NO: 55582
acauuggccaaauaugccc

SEQ ID NO: 55664 - RNA, 19 nt, Artificial Sequence
  Description of Artificial Sequence: Synthetic oligonucleotide
  Sense strand starting at position 3933 of SEQ ID NO: 673
cuaggugugcugggauaug

SEQ ID NO: 55665 - RNA, 19 nt, Artificial Sequence
  Description of Artificial Sequence: Synthetic oligonucleotide
  Antisense strand to SEQ ID NO: 55584
cauaucccagcacaccuag

SEQ ID NO: 55666 - RNA, 19 nt, Artificial Sequence
  Description of Artificial Sequence: Synthetic oligonucleotide
  Sense strand starting at position 130 of SEQ ID NO: 674
aguacuuaccacugaagca

SEQ ID NO: 55667 - RNA, 19 nt, Artificial Sequence
  Description of Artificial Sequence: Synthetic oligonucleotide
  Antisense strand to SEQ ID NO: 55586
ugcuucagugguaaguacu

SEQ ID NO: 55668 - RNA, 19 nt, Artificial Sequence
  Description of Artificial Sequence: Synthetic oligonucleotide
  Sense strand starting at position 234 of SEQ ID NO: 674
cccagaugccuuggugacu

SEQ ID NO: 55669 - RNA, 19 nt, Artificial Sequence
  Description of Artificial Sequence: Synthetic oligonucleotide
  Antisense strand to SEQ ID NO: 55588
agucaccaaggcaucuggg

SEQ ID NO: 55670 - RNA, 19 nt, Artificial Sequence
  Description of Artificial Sequence: Synthetic oligonucleotide
  Sense strand starting at position 463 of SEQ ID NO: 674
gcuuauauucuugggagag

SEQ ID NO: 55671 - RNA, 19 nt, Artificial Sequence
  Description of Artificial Sequence: Synthetic oligonucleotide
  Antisense strand to SEQ ID NO: 55590
cucucccaagaauauaagc

SEQ ID NO: 55672 - RNA, 19 nt, Artificial Sequence
  Description of Artificial Sequence: Synthetic oligonucleotide
  Sense strand starting at position 546 of SEQ ID NO: 674
ugacucugcuacguauuaa

SEQ ID NO: 55673 - RNA, 19 nt, Artificial Sequence
  Description of Artificial Sequence: Synthetic oligonucleotide
  Antisense strand to SEQ ID NO: 55592
uuaauacguagcagaguca

SEQ ID NO: 55674 - RNA, 19 nt, Artificial Sequence
  Description of Artificial Sequence: Synthetic oligonucleotide
  Sense strand starting at position 574 of SEQ ID NO: 674
uggacaagugauugcuuua

SEQ ID NO: 55675 - RNA, 19 nt, Artificial Sequence
  Description of Artificial Sequence: Synthetic oligonucleotide
  Antisense strand to SEQ ID NO: 55594
uaaagcaaucacuugucca

SEQ ID NO: 55676 - RNA, 19 nt, Artificial Sequence
  Description of Artificial Sequence: Synthetic oligonucleotide
  Sense strand starting at position 585 of SEQ ID NO: 674
uugcuuuauuuggacuuua

SEQ ID NO: 55677 - RNA, 19 nt, Artificial Sequence
  Description of Artificial Sequence: Synthetic oligonucleotide
  Antisense strand to SEQ ID NO: 55596
uaaaguccaaauaaagcaa

SEQ ID NO: 55678 - RNA, 19 nt, Artificial Sequence
  Description of Artificial Sequence: Synthetic oligonucleotide
  Sense strand starting at position 603 of SEQ ID NO: 674
aguguucuccucugagaaa

SEQ ID NO: 55679 - RNA, 19 nt, Artificial Sequence
  Description of Artificial Sequence: Synthetic oligonucleotide
  Antisense strand to SEQ ID NO: 55598
uuucucagaggagaacacu

SEQ ID NO: 55680 - RNA, 19 nt, Artificial Sequence
  Description of Artificial Sequence: Synthetic oligonucleotide
  Sense strand starting at position 694 of SEQ ID NO: 674
aggacaguucuuggcacau

SEQ ID NO: 55681 - RNA, 19 nt, Artificial Sequence
  Description of Artificial Sequence: Synthetic oligonucleotide
  Antisense strand to SEQ ID NO: 55600
augugccaagaacuguccu

SEQ ID NO: 55682 - RNA, 19 nt, Artificial Sequence
  Description of Artificial Sequence: Synthetic oligonucleotide
  Sense strand starting at position 707 of SEQ ID NO: 674
gcacauaagcguuauuauu

SEQ ID NO: 55683 - RNA, 19 nt, Artificial Sequence
  Description of Artificial Sequence: Synthetic oligonucleotide
  Antisense strand to SEQ ID NO: 55602
aauaauaacgcuuaugugc

SEQ ID NO: 55684 - RNA, 19 nt, Artificial Sequence
  Description of Artificial Sequence: Synthetic oligonucleotide
  Sense strand starting at position 709 of SEQ ID NO: 674
acauaagcguuauuauuac

SEQ ID NO: 55685 - RNA, 19 nt, Artificial Sequence
  Description of Artificial Sequence: Synthetic oligonucleotide
  Antisense strand to SEQ ID NO: 55604
guaauaauaacgcuuaugu

SEQ ID NO: 55686 - RNA, 19 nt, Artificial Sequence
  Description of Artificial Sequence: Synthetic oligonucleotide
  Sense strand starting at position 813 of SEQ ID NO: 674
auccuagauccuuggacga

SEQ ID NO: 55687 - RNA, 19 nt, Artificial Sequence
  Description of Artificial Sequence: Synthetic oligonucleotide
  Antisense strand to SEQ ID NO: 55606
ucguccaaggaucuaggau

SEQ ID NO: 55688 - RNA, 19 nt, Artificial Sequence
  Description of Artificial Sequence: Synthetic oligonucleotide
  Sense strand starting at position 817 of SEQ ID NO: 674
uagauccuuggacgacaaa

SEQ ID NO: 55689 - RNA, 19 nt, Artificial Sequence
  Description of Artificial Sequence: Synthetic oligonucleotide
  Antisense strand to SEQ ID NO: 55608
uuugucguccaaggaucua

SEQ ID NO: 55690 - RNA, 19 nt, Artificial Sequence
  Description of Artificial Sequence: Synthetic oligonucleotide
  Sense strand starting at position 859 of SEQ ID NO: 674
cuggauuuguguuuauugu

SEQ ID NO: 55691 - RNA, 19 nt, Artificial Sequence
  Description of Artificial Sequence: Synthetic oligonucleotide
  Antisense strand to SEQ ID NO: 55610
acaauaaacacaaauccag

SEQ ID NO: 55692 - RNA, 19 nt, Artificial Sequence
  Description of Artificial Sequence: Synthetic oligonucleotide
  Sense strand starting at position 867 of SEQ ID NO: 674
guguuuauuguucaguuag

SEQ ID NO: 55693 - RNA, 19 nt, Artificial Sequence
  Description of Artificial Sequence: Synthetic oligonucleotide
  Antisense strand to SEQ ID NO: 55612
cuaacugaacaauaaacac

SEQ ID NO: 55694 - RNA, 19 nt, Artificial Sequence
  Description of Artificial Sequence: Synthetic oligonucleotide
  Sense strand starting at position 908 of SEQ ID NO: 674
acuguugugagguaacgaa

SEQ ID NO: 55695 - RNA, 19 nt, Artificial Sequence
  Description of Artificial Sequence: Synthetic oligonucleotide
  Antisense strand to SEQ ID NO: 55614
uucguuaccucacaacagu

SEQ ID NO: 55696 - RNA, 19 nt, Artificial Sequence
  Description of Artificial Sequence: Synthetic oligonucleotide
  Sense strand starting at position 942 of SEQ ID NO: 674
gacauaaaugauggcugau

SEQ ID NO: 55697 - RNA, 19 nt, Artificial Sequence
  Description of Artificial Sequence: Synthetic oligonucleotide
  Antisense strand to SEQ ID NO: 55616
aucagccaucauuuauguc

SEQ ID NO: 55698 - RNA, 19 nt, Artificial Sequence
  Description of Artificial Sequence: Synthetic oligonucleotide
  Sense strand starting at position 945 of SEQ ID NO: 674
auaaaugauggcugaucau

SEQ ID NO: 55699 - RNA, 19 nt, Artificial Sequence
  Description of Artificial Sequence: Synthetic oligonucleotide
  Antisense strand to SEQ ID NO: 55618
augaucagccaucauuuau

SEQ ID NO: 55700 - RNA, 19 nt, Artificial Sequence
  Description of Artificial Sequence: Synthetic oligonucleotide
  Sense strand starting at position 957 of SEQ ID NO: 674
ugaucaugugaaggccuaa

SEQ ID NO: 55701 - RNA, 19 nt, Artificial Sequence
  Description of Artificial Sequence: Synthetic oligonucleotide
  Antisense strand to SEQ ID NO: 55620
uuaggccuucacaugauca

SEQ ID NO: 55702 - RNA, 19 nt, Artificial Sequence
  Description of Artificial Sequence: Synthetic oligonucleotide
  Sense strand starting at position 1055 of SEQ ID NO: 674
ggaacaugguagcuuauga

SEQ ID NO: 55703 - RNA, 19 nt, Artificial Sequence
  Description of Artificial Sequence: Synthetic oligonucleotide
  Antisense strand to SEQ ID NO: 55622
ucauaagcuaccauguucc

SEQ ID NO: 55704 - RNA, 19 nt, Artificial Sequence
  Description of Artificial Sequence: Synthetic oligonucleotide
  Sense strand starting at position 1098 of SEQ ID NO: 674
cacaguuagugguccagga

SEQ ID NO: 55705 - RNA, 19 nt, Artificial Sequence
  Description of Artificial Sequence: Synthetic oligonucleotide
  Antisense strand to SEQ ID NO: 55624
uccuggaccacuaacugug

SEQ ID NO: 55706 - RNA, 19 nt, Artificial Sequence
  Description of Artificial Sequence: Synthetic oligonucleotide
  Sense strand starting at position 1100 of SEQ ID NO: 674
caguuagugguccaggaac

SEQ ID NO: 55707 - RNA, 19 nt, Artificial Sequence
  Description of Artificial Sequence: Synthetic oligonucleotide
  Antisense strand to SEQ ID NO: 55626
guuccuggaccacuaacug

SEQ ID NO: 55708 - RNA, 19 nt, Artificial Sequence
  Description of Artificial Sequence: Synthetic oligonucleotide
  Sense strand starting at position 1102 of SEQ ID NO: 674
guuagugguccaggaacua

SEQ ID NO: 55709 - RNA, 19 nt, Artificial Sequence
  Description of Artificial Sequence: Synthetic oligonucleotide
  Antisense strand to SEQ ID NO: 55628
uaguuccuggaccacuaac

SEQ ID NO: 55710 - RNA, 19 nt, Artificial Sequence
  Description of Artificial Sequence: Synthetic oligonucleotide
  Sense strand starting at position 1119 of SEQ ID NO: 674
uauugagagccauguuaau

SEQ ID NO: 55711 - RNA, 19 nt, Artificial Sequence
  Description of Artificial Sequence: Synthetic oligonucleotide
  Antisense strand to SEQ ID NO: 55630
auuaacauggcucucaaua

SEQ ID NO: 55712 - RNA, 19 nt, Artificial Sequence
  Description of Artificial Sequence: Synthetic oligonucleotide
  Sense strand starting at position 1173 of SEQ ID NO: 674
gauacaacguuaguggaau

SEQ ID NO: 55713 - RNA, 19 nt, Artificial Sequence
  Description of Artificial Sequence: Synthetic oligonucleotide
  Antisense strand to SEQ ID NO: 55632
auuccacuaacguuguauc

SEQ ID NO: 55714 - RNA, 19 nt, Artificial Sequence
  Description of Artificial Sequence: Synthetic oligonucleotide
  Sense strand starting at position 1193 of SEQ ID NO: 674
ucuguaaauuuauaggguu

SEQ ID NO: 55715 - RNA, 19 nt, Artificial Sequence
  Description of Artificial Sequence: Synthetic oligonucleotide
  Antisense strand to SEQ ID NO: 55634
aacccuauaaauuuacaga

SEQ ID NO: 55716 - RNA, 19 nt, Artificial Sequence
  Description of Artificial Sequence: Synthetic oligonucleotide
  Sense strand starting at position 1281 of SEQ ID NO: 674
gcucauauuuaagcuaagu

SEQ ID NO: 55717 - RNA, 19 nt, Artificial Sequence
  Description of Artificial Sequence: Synthetic oligonucleotide
  Antisense strand to SEQ ID NO: 55636
acuuagcuuaaauaugagc

SEQ ID NO: 55718 - RNA, 19 nt, Artificial Sequence
  Description of Artificial Sequence: Synthetic oligonucleotide
  Sense strand starting at position 1301 of SEQ ID NO: 674
auacaaagaucuuaaguga

SEQ ID NO: 55719 - RNA, 19 nt, Artificial Sequence
  Description of Artificial Sequence: Synthetic oligonucleotide
  Antisense strand to SEQ ID NO: 55638
ucacuuaagaucuuuguau

SEQ ID NO: 55720 - RNA, 19 nt, Artificial Sequence
  Description of Artificial Sequence: Synthetic oligonucleotide
  Sense strand starting at position 1314 of SEQ ID NO: 674
aagugaacgcccuguauac

SEQ ID NO: 55721 - RNA, 19 nt, Artificial Sequence
  Description of Artificial Sequence: Synthetic oligonucleotide
  Antisense strand to SEQ ID NO: 55640
guauacagggcguucacuu

SEQ ID NO: 55722 - RNA, 19 nt, Artificial Sequence
  Description of Artificial Sequence: Synthetic oligonucleotide
  Sense strand starting at position 1327 of SEQ ID NO: 674
guauaccuuccaggaguua

SEQ ID NO: 55723 - RNA, 19 nt, Artificial Sequence
  Description of Artificial Sequence: Synthetic oligonucleotide
  Antisense strand to SEQ ID NO: 55642
uaacuccuggaagguauac

SEQ ID NO: 55724 - RNA, 19 nt, Artificial Sequence
  Description of Artificial Sequence: Synthetic oligonucleotide
  Sense strand starting at position 1364 of SEQ ID NO: 674
ggcuuuaacaggugacauu

SEQ ID NO: 55725 - RNA, 19 nt, Artificial Sequence
  Description of Artificial Sequence: Synthetic oligonucleotide
  Antisense strand to SEQ ID NO: 55644
aaugucaccuguuaaagcc

SEQ ID NO: 55726 - RNA, 19 nt, Artificial Sequence
  Description of Artificial Sequence: Synthetic oligonucleotide
  Sense strand starting at position 1367 of SEQ ID NO: 674
uuuaacaggugacauuuaa

SEQ ID NO: 55727 - RNA, 19 nt, Artificial Sequence
  Description of Artificial Sequence: Synthetic oligonucleotide
  Antisense strand to SEQ ID NO: 55646
uuaaaugucaccuguuaaa

SEQ ID NO: 55728 - RNA, 19 nt, Artificial Sequence
  Description of Artificial Sequence: Synthetic oligonucleotide
  Sense strand starting at position 1378 of SEQ ID NO: 674
acauuuaacucaggguuaa

SEQ ID NO: 55729 - RNA, 19 nt, Artificial Sequence
  Description of Artificial Sequence: Synthetic oligonucleotide
  Antisense strand to SEQ ID NO: 55648
uuaacccugaguuaaaugu

SEQ ID NO: 55730 - RNA, 19 nt, Artificial Sequence
  Description of Artificial Sequence: Synthetic oligonucleotide
  Sense strand starting at position 1458 of SEQ ID NO: 674
gagacaacuccaggcaagu

SEQ ID NO: 55731 - RNA, 19 nt, Artificial Sequence
  Description of Artificial Sequence: Synthetic oligonucleotide
  Antisense strand to SEQ ID NO: 55650
acuugccuggaguugucuc

SEQ ID NO: 55732 - RNA, 19 nt, Artificial Sequence
  Description of Artificial Sequence: Synthetic oligonucleotide
  Sense strand starting at position 1878 of SEQ ID NO: 674
ccaucucuccgucggauuu

SEQ ID NO: 55733 - RNA, 19 nt, Artificial Sequence
  Description of Artificial Sequence: Synthetic oligonucleotide
  Antisense strand to SEQ ID NO: 55652
aaauccgacggagagaugg

SEQ ID NO: 55734 - RNA, 19 nt, Artificial Sequence
  Description of Artificial Sequence: Synthetic oligonucleotide
  Sense strand starting at position 2092 of SEQ ID NO: 674
cugcgauuagguugggaag

SEQ ID NO: 55735 - RNA, 19 nt, Artificial Sequence
  Description of Artificial Sequence: Synthetic oligonucleotide
  Antisense strand to SEQ ID NO: 55654
cuucccaaccuaaucgcag

SEQ ID NO: 55736 - RNA, 19 nt, Artificial Sequence
  Description of Artificial Sequence: Synthetic oligonucleotide
  Sense strand starting at position 2195 of SEQ ID NO: 674
agcgcucuggugugaauuu

SEQ ID NO: 55737 - RNA, 19 nt, Artificial Sequence
  Description of Artificial Sequence: Synthetic oligonucleotide
  Antisense strand to SEQ ID NO: 55656
aaauucacaccagagcgcu

SEQ ID NO: 55738 - RNA, 19 nt, Artificial Sequence
  Description of Artificial Sequence: Synthetic oligonucleotide
  Sense strand starting at position 2312 of SEQ ID NO: 674
ugcccaaucugguuucgaa

SEQ ID NO: 55739 - RNA, 19 nt, Artificial Sequence
  Description of Artificial Sequence: Synthetic oligonucleotide
  Antisense strand to SEQ ID NO: 55658
uucgaaaccagauugggca

SEQ ID NO: 55740 - RNA, 19 nt, Artificial Sequence
  Description of Artificial Sequence: Synthetic oligonucleotide
  Sense strand starting at position 2402 of SEQ ID NO: 674
ccgcuuauccucguguuua

SEQ ID NO: 55741 - RNA, 19 nt, Artificial Sequence
  Description of Artificial Sequence: Synthetic oligonucleotide
  Antisense strand to SEQ ID NO: 55660
uaaacacgaggauaagcgg

SEQ ID NO: 55742 - RNA, 19 nt, Artificial Sequence
  Description of Artificial Sequence: Synthetic oligonucleotide
  Sense strand starting at position 2404 of SEQ ID NO: 674
gcuuauccucguguuuauu

SEQ ID NO: 55743 - RNA, 19 nt, Artificial Sequence
  Description of Artificial Sequence: Synthetic oligonucleotide
  Antisense strand to SEQ ID NO: 55662
aauaaacacgaggauaagc

SEQ ID NO: 55744 - RNA, 19 nt, Artificial Sequence
  Description of Artificial Sequence: Synthetic oligonucleotide
  Sense strand starting at position 2406 of SEQ ID NO: 674
uuauccucguguuuauuua

SEQ ID NO: 55745 - RNA, 19 nt, Artificial Sequence
  Description of Artificial Sequence: Synthetic oligonucleotide
  Antisense strand to SEQ ID NO: 55664
uaaauaaacacgaggauaa

SEQ ID NO: 55746 - RNA, 19 nt, Artificial Sequence
  Description of Artificial Sequence: Synthetic oligonucleotide
  Sense strand starting at position 3885 of SEQ ID NO: 675
cugucugugugggaucaga

SEQ ID NO: 55747 - RNA, 19 nt, Artificial Sequence
  Description of Artificial Sequence: Synthetic oligonucleotide
  Antisense strand to SEQ ID NO: 55666
ucugaucccacacagacag

SEQ ID NO: 55748 - RNA, 19 nt, Artificial Sequence
  Description of Artificial Sequence: Synthetic oligonucleotide
  Sense strand starting at position 3825 of SEQ ID NO: 675
agugauaccuacccuaaga

SEQ ID NO: 55749 - RNA, 19 nt, Artificial Sequence
  Description of Artificial Sequence: Synthetic oligonucleotide
  Antisense strand to SEQ ID NO: 55668
ucuuaggguagguaucacu

SEQ ID NO: 55750 - RNA, 19 nt, Artificial Sequence
  Description of Artificial Sequence: Synthetic oligonucleotide
  Sense strand starting at position 3719 of SEQ ID NO: 675
auuauagaacuaggcaauu

SEQ ID NO: 55751 - RNA, 19 nt, Artificial Sequence
  Description of Artificial Sequence: Synthetic oligonucleotide
  Antisense strand to SEQ ID NO: 55670
aauugccuaguucuauaau

SEQ ID NO: 55752 - RNA, 19 nt, Artificial Sequence
  Description of Artificial Sequence: Synthetic oligonucleotide
  Sense strand starting at position 3711 of SEQ ID NO: 675
agaagacaauuauagaacu

SEQ ID NO: 55753 - RNA, 19 nt, Artificial Sequence
  Description of Artificial Sequence: Synthetic oligonucleotide
  Antisense strand to SEQ ID NO: 55672
aguucuauaauugucuucu

SEQ ID NO: 55754 - RNA, 19 nt, Artificial Sequence
  Description of Artificial Sequence: Synthetic oligonucleotide
  Sense strand starting at position 3618 of SEQ ID NO: 675
cagguagugugcuccuaua

SEQ ID NO: 55755 - RNA, 19 nt, Artificial Sequence
  Description of Artificial Sequence: Synthetic oligonucleotide
  Antisense strand to SEQ ID NO: 55674
uauaggagcacacuaccug

SEQ ID NO: 55756 - RNA, 19 nt, Artificial Sequence
  Description of Artificial Sequence: Synthetic oligonucleotide
  Sense strand starting at position 3584 of SEQ ID NO: 675
ccugaauucucacggcuua

SEQ ID NO: 55757 - RNA, 19 nt, Artificial Sequence
  Description of Artificial Sequence: Synthetic oligonucleotide
  Antisense strand to SEQ ID NO: 55676
uaagccgugagaauucagg

SEQ ID NO: 55758 - RNA, 19 nt, Artificial Sequence
  Description of Artificial Sequence: Synthetic oligonucleotide
  Sense strand starting at position 3518 of SEQ ID NO: 675
gagaaacugugaugaucca

SEQ ID NO: 55759 - RNA, 19 nt, Artificial Sequence
  Description of Artificial Sequence: Synthetic oligonucleotide
  Antisense strand to SEQ ID NO: 55678
uggaucaucacaguuucuc

SEQ ID NO: 55760 - RNA, 19 nt, Artificial Sequence
  Description of Artificial Sequence: Synthetic oligonucleotide
  Sense strand starting at position 3516 of SEQ ID NO: 675
gggagaaacugugaugauc

SEQ ID NO: 55761 - RNA, 19 nt, Artificial Sequence
  Description of Artificial Sequence: Synthetic oligonucleotide
  Antisense strand to SEQ ID NO: 55680
gaucaucacaguuucuccc

SEQ ID NO: 55762 - RNA, 19 nt, Artificial Sequence
  Description of Artificial Sequence: Synthetic oligonucleotide
  Sense strand starting at position 3423 of SEQ ID NO: 675
gaguaaucauagcugacac

SEQ ID NO: 55763 - RNA, 19 nt, Artificial Sequence
  Description of Artificial Sequence: Synthetic oligonucleotide
  Antisense strand to SEQ ID NO: 55682
gugucagcuaugauuacuc

SEQ ID NO: 55764 - RNA, 19 nt, Artificial Sequence
  Description of Artificial Sequence: Synthetic oligonucleotide
  Sense strand starting at position 3417 of SEQ ID NO: 675
gaguaagaguaaucauagc

SEQ ID NO: 55765 - RNA, 19 nt, Artificial Sequence
  Description of Artificial Sequence: Synthetic oligonucleotide
  Antisense strand to SEQ ID NO: 55684
gcuaugauuacucuuacuc

SEQ ID NO: 55766 - RNA, 19 nt, Artificial Sequence
  Description of Artificial Sequence: Synthetic oligonucleotide
  Sense strand starting at position 3411 of SEQ ID NO: 675
aacccugaguaagaguaau

SEQ ID NO: 55767 - RNA, 19 nt, Artificial Sequence
  Description of Artificial Sequence: Synthetic oligonucleotide
  Antisense strand to SEQ ID NO: 55686
auuacucuuacucaggguu

SEQ ID NO: 55768 - RNA, 19 nt, Artificial Sequence
  Description of Artificial Sequence: Synthetic oligonucleotide
  Sense strand starting at position 3362 of SEQ ID NO: 675
acuuaugaguguugaauau

SEQ ID NO: 55769 - RNA, 19 nt, Artificial Sequence
  Description of Artificial Sequence: Synthetic oligonucleotide
  Antisense strand to SEQ ID NO: 55688
auauucaacacucauaagu

SEQ ID NO: 55770 - RNA, 19 nt, Artificial Sequence
  Description of Artificial Sequence: Synthetic oligonucleotide
  Sense strand starting at position 3359 of SEQ ID NO: 675
aacacuuaugaguguugaa

SEQ ID NO: 55771 - RNA, 19 nt, Artificial Sequence
  Description of Artificial Sequence: Synthetic oligonucleotide
  Antisense strand to SEQ ID NO: 55690
uucaacacucauaaguguu

SEQ ID NO: 55772 - RNA, 19 nt, Artificial Sequence
  Description of Artificial Sequence: Synthetic oligonucleotide
  Sense strand starting at position 3293 of SEQ ID NO: 675
cgucuagguccucauguca

SEQ ID NO: 55773 - RNA, 19 nt, Artificial Sequence
  Description of Artificial Sequence: Synthetic oligonucleotide
  Antisense strand to SEQ ID NO: 55692
ugacaugaggaccuagacg

SEQ ID NO: 55774 - RNA, 19 nt, Artificial Sequence
  Description of Artificial Sequence: Synthetic oligonucleotide
  Sense strand starting at position 3250 of SEQ ID NO: 675
acaagaagcuucuccaaug

SEQ ID NO: 55775 - RNA, 19 nt, Artificial Sequence
  Description of Artificial Sequence: Synthetic oligonucleotide
  Antisense strand to SEQ ID NO: 55694
cauuggagaagcuucuugu

SEQ ID NO: 55776 - RNA, 19 nt, Artificial Sequence
  Description of Artificial Sequence: Synthetic oligonucleotide
  Sense strand starting at position 3116 of SEQ ID NO: 675
gcaguuccugcauaacuca

SEQ ID NO: 55777 - RNA, 19 nt, Artificial Sequence
  Description of Artificial Sequence: Synthetic oligonucleotide
  Antisense strand to SEQ ID NO: 55696
ugaguuaugcaggaacugc

SEQ ID NO: 55778 - RNA, 19 nt, Artificial Sequence
  Description of Artificial Sequence: Synthetic oligonucleotide
  Sense strand starting at position 2869 of SEQ ID NO: 675
ggcauaaugucagccagga

SEQ ID NO: 55779 - RNA, 19 nt, Artificial Sequence
  Description of Artificial Sequence: Synthetic oligonucleotide
  Antisense strand to SEQ ID NO: 55698
uccuggcugacauuaugcc

SEQ ID NO: 55780 - RNA, 19 nt, Artificial Sequence
  Description of Artificial Sequence: Synthetic oligonucleotide
  Sense strand starting at position 2755 of SEQ ID NO: 675
ggaguucugggcugaugag

SEQ ID NO: 55781 - RNA, 19 nt, Artificial Sequence
  Description of Artificial Sequence: Synthetic oligonucleotide
  Antisense strand to SEQ ID NO: 55700
cucaucagcccagaacucc

SEQ ID NO: 55782 - RNA, 19 nt, Artificial Sequence
  Description of Artificial Sequence: Synthetic oligonucleotide
  Sense strand starting at position 2752 of SEQ ID NO: 675
ugaggaguucugggcugau

SEQ ID NO: 55783 - RNA, 19 nt, Artificial Sequence
  Description of Artificial Sequence: Synthetic oligonucleotide
  Antisense strand to SEQ ID NO: 55702
aucagcccagaacuccuca

SEQ ID NO: 55784 - RNA, 19 nt, Artificial Sequence
  Description of Artificial Sequence: Synthetic oligonucleotide
  Sense strand starting at position 2700 of SEQ ID NO: 675
augucagccacugaggaau

SEQ ID NO: 55785 - RNA, 19 nt, Artificial Sequence
  Description of Artificial Sequence: Synthetic oligonucleotide
  Antisense strand to SEQ ID NO: 55704
auuccucaguggcugacau

SEQ ID NO: 55786 - RNA, 19 nt, Artificial Sequence
  Description of Artificial Sequence: Synthetic oligonucleotide
  Sense strand starting at position 2699 of SEQ ID NO: 675
gaugucagccacugaggaa

SEQ ID NO: 55787 - RNA, 19 nt, Artificial Sequence
  Description of Artificial Sequence: Synthetic oligonucleotide
  Antisense strand to SEQ ID NO: 55706
uuccucaguggcugacauc

SEQ ID NO: 55788 - RNA, 19 nt, Artificial Sequence
  Description of Artificial Sequence: Synthetic oligonucleotide
  Sense strand starting at position 2624 of SEQ ID NO: 675
uugacucuuccauagucca

SEQ ID NO: 55789 - RNA, 19 nt, Artificial Sequence
  Description of Artificial Sequence: Synthetic oligonucleotide
  Antisense strand to SEQ ID NO: 55708
uggacuauggaagagucaa

SEQ ID NO: 55790 - RNA, 19 nt, Artificial Sequence
  Description of Artificial Sequence: Synthetic oligonucleotide
  Sense strand starting at position 2620 of SEQ ID NO: 675
gcacuugacucuuccauag

SEQ ID NO: 55791 - RNA, 19 nt, Artificial Sequence
  Description of Artificial Sequence: Synthetic oligonucleotide
  Antisense strand to SEQ ID NO: 55710
cuauggaagagucaagugc

SEQ ID NO: 55792 - RNA, 19 nt, Artificial Sequence
  Description of Artificial Sequence: Synthetic oligonucleotide
  Sense strand starting at position 2604 of SEQ ID NO: 675
auggaaaguucuuccugca

SEQ ID NO: 55793 - RNA, 19 nt, Artificial Sequence
  Description of Artificial Sequence: Synthetic oligonucleotide
  Antisense strand to SEQ ID NO: 55712
ugcaggaagaacuuuccau

SEQ ID NO: 55794 - RNA, 19 nt, Artificial Sequence
  Description of Artificial Sequence: Synthetic oligonucleotide
  Sense strand starting at position 2594 of SEQ ID NO: 675
uccaguccuuauggaaagu

SEQ ID NO: 55795 - RNA, 19 nt, Artificial Sequence
  Description of Artificial Sequence: Synthetic oligonucleotide
  Antisense strand to SEQ ID NO: 55714
acuuuccauaaggacugga

SEQ ID NO: 55796 - RNA, 19 nt, Artificial Sequence
  Description of Artificial Sequence: Synthetic oligonucleotide
  Sense strand starting at position 2591 of SEQ ID NO: 675
ugcuccaguccuuauggaa

SEQ ID NO: 55797 - RNA, 19 nt, Artificial Sequence
  Description of Artificial Sequence: Synthetic oligonucleotide
  Antisense strand to SEQ ID NO: 55716
uuccauaaggacuggagca

SEQ ID NO: 55798 - RNA, 19 nt, Artificial Sequence
  Description of Artificial Sequence: Synthetic oligonucleotide
  Sense strand starting at position 2436 of SEQ ID NO: 675
ucugaaucggcacaugaga

SEQ ID NO: 55799 - RNA, 19 nt, Artificial Sequence
  Description of Artificial Sequence: Synthetic oligonucleotide
  Antisense strand to SEQ ID NO: 55718
ucucaugugccgauucaga

SEQ ID NO: 55800 - RNA, 19 nt, Artificial Sequence
  Description of Artificial Sequence: Synthetic oligonucleotide
  Sense strand starting at position 2418 of SEQ ID NO: 675
gccugagugugaggaaucu

SEQ ID NO: 55801 - RNA, 19 nt, Artificial Sequence
  Description of Artificial Sequence: Synthetic oligonucleotide
  Antisense strand to SEQ ID NO: 55720
agauuccucacacucaggc

SEQ ID NO: 55802 - RNA, 19 nt, Artificial Sequence
  Description of Artificial Sequence: Synthetic oligonucleotide
  Sense strand starting at position 2416 of SEQ ID NO: 675
gagccugagugugaggaau

SEQ ID NO: 55803 - RNA, 19 nt, Artificial Sequence
  Description of Artificial Sequence: Synthetic oligonucleotide
  Antisense strand to SEQ ID NO: 55722
auuccucacacucaggcuc

SEQ ID NO: 55804 - RNA, 19 nt, Artificial Sequence
  Description of Artificial Sequence: Synthetic oligonucleotide
  Sense strand starting at position 2350 of SEQ ID NO: 675
ggcccuguggcuggagaaa

SEQ ID NO: 55805 - RNA, 19 nt, Artificial Sequence
  Description of Artificial Sequence: Synthetic oligonucleotide
  Antisense strand to SEQ ID NO: 55724
uuucuccagccacagggcc

SEQ ID NO: 55806 - RNA, 19 nt, Artificial Sequence
  Description of Artificial Sequence: Synthetic oligonucleotide
  Sense strand starting at position 2261 of SEQ ID NO: 675
gaugaacucuuccuaaggu

SEQ ID NO: 55807 - RNA, 19 nt, Artificial Sequence
  Description of Artificial Sequence: Synthetic oligonucleotide
  Antisense strand to SEQ ID NO: 55726
accuuaggaagaguucauc

SEQ ID NO: 55808 - RNA, 19 nt, Artificial Sequence
  Description of Artificial Sequence: Synthetic oligonucleotide
  Sense strand starting at position 2225 of SEQ ID NO: 675
ugucauuucuuacagauga

SEQ ID NO: 55809 - RNA, 19 nt, Artificial Sequence
  Description of Artificial Sequence: Synthetic oligonucleotide
  Antisense strand to SEQ ID NO: 55728
ucaucuguaagaaaugaca

SEQ ID NO: 55810 - RNA, 19 nt, Artificial Sequence
  Description of Artificial Sequence: Synthetic oligonucleotide
  Sense strand starting at position 2223 of SEQ ID NO: 675
ccugucauuucuuacagau

SEQ ID NO: 55811 - RNA, 19 nt, Artificial Sequence
  Description of Artificial Sequence: Synthetic oligonucleotide
  Antisense strand to SEQ ID NO: 55730
aucuguaagaaaugacagg

SEQ ID NO: 55812 - RNA, 19 nt, Artificial Sequence
  Description of Artificial Sequence: Synthetic oligonucleotide
  Sense strand starting at position 2154 of SEQ ID NO: 675
acagcuggccaugaguuau

SEQ ID NO: 55813 - RNA, 19 nt, Artificial Sequence
  Description of Artificial Sequence: Synthetic oligonucleotide
  Antisense strand to SEQ ID NO: 55732
auaacucauggccagcugu

SEQ ID NO: 55814 - RNA, 19 nt, Artificial Sequence
  Description of Artificial Sequence: Synthetic oligonucleotide
  Sense strand starting at position 2153 of SEQ ID NO: 675
cacagcuggccaugaguua

SEQ ID NO: 55815 - RNA, 19 nt, Artificial Sequence
  Description of Artificial Sequence: Synthetic oligonucleotide
  Antisense strand to SEQ ID NO: 55734
uaacucauggccagcugug

SEQ ID NO: 55816 - RNA, 19 nt, Artificial Sequence
  Description of Artificial Sequence: Synthetic oligonucleotide
  Sense strand starting at position 2007 of SEQ ID NO: 675
ggcccauccugaucucuuu

SEQ ID NO: 55817 - RNA, 19 nt, Artificial Sequence
  Description of Artificial Sequence: Synthetic oligonucleotide
  Antisense strand to SEQ ID NO: 55736
aaagagaucaggaugggcc

SEQ ID NO: 55818 - RNA, 19 nt, Artificial Sequence
  Description of Artificial Sequence: Synthetic oligonucleotide
  Sense strand starting at position 235 of SEQ ID NO: 675
gccuaagucuaccaggacu

SEQ ID NO: 55819 - RNA, 19 nt, Artificial Sequence
  Description of Artificial Sequence: Synthetic oligonucleotide
  Antisense strand to SEQ ID NO: 55738
aguccugguagacuuaggc

SEQ ID NO: 55820 - RNA, 19 nt, Artificial Sequence
  Description of Artificial Sequence: Synthetic oligonucleotide
  Sense strand starting at position 187 of SEQ ID NO: 675
agugcucucugccaucuaa

SEQ ID NO: 55821 - RNA, 19 nt, Artificial Sequence
  Description of Artificial Sequence: Synthetic oligonucleotide
  Antisense strand to SEQ ID NO: 55740
uuagauggcagagagcacu

SEQ ID NO: 55822 - RNA, 19 nt, Artificial Sequence
  Description of Artificial Sequence: Synthetic oligonucleotide
  Sense strand starting at position 89 of SEQ ID NO: 675
uuuggaaugagucguguuu

SEQ ID NO: 55823 - RNA, 19 nt, Artificial Sequence
  Description of Artificial Sequence: Synthetic oligonucleotide
  Antisense strand to SEQ ID NO: 55742
aaacacgacucauuccaaa

SEQ ID NO: 55824 - RNA, 19 nt, Artificial Sequence
  Description of Artificial Sequence: Synthetic oligonucleotide
  Sense strand starting at position 80 of SEQ ID NO: 675
gguaggagguuuggaauga

SEQ ID NO: 55825 - RNA, 19 nt, Artificial Sequence
  Description of Artificial Sequence: Synthetic oligonucleotide
  Antisense strand to SEQ ID NO: 55744
ucauuccaaaccuccuacc

SEQ ID NO: 55826 - RNA, 19 nt, Artificial Sequence
  Description of Artificial Sequence: Synthetic oligonucleotide
  Sense strand starting at position 58 of SEQ ID NO: 676
uaagaauucugauugguga

SEQ ID NO: 55827 - RNA, 19 nt, Artificial Sequence
  Description of Artificial Sequence: Synthetic oligonucleotide
  Antisense strand to SEQ ID NO: 55746
ucaccaaucagaauucuua

SEQ ID NO: 55828 - RNA, 19 nt, Artificial Sequence
  Description of Artificial Sequence: Synthetic oligonucleotide
  Sense strand starting at position 59 of SEQ ID NO: 676
aagaauucugauuggugac

SEQ ID NO: 55829 - RNA, 19 nt, Artificial Sequence
  Description of Artificial Sequence: Synthetic oligonucleotide
  Antisense strand to SEQ ID NO: 55748
gucaccaaucagaauucuu

SEQ ID NO: 55830 - RNA, 19 nt, Artificial Sequence
  Description of Artificial Sequence: Synthetic oligonucleotide
  Sense strand starting at position 60 of SEQ ID NO: 676
agaauucugauuggugacu

SEQ ID NO: 55831 - RNA, 19 nt, Artificial Sequence
  Description of Artificial Sequence: Synthetic oligonucleotide
  Antisense strand to SEQ ID NO: 55750
agucaccaaucagaauucu

SEQ ID NO: 55832 - RNA, 19 nt, Artificial Sequence
  Description of Artificial Sequence: Synthetic oligonucleotide
  Sense strand starting at position 61 of SEQ ID NO: 676
gaauucugauuggugacuu

SEQ ID NO: 55833 - RNA, 19 nt, Artificial Sequence
  Description of Artificial Sequence: Synthetic oligonucleotide
  Antisense strand to SEQ ID NO: 55752
aagucaccaaucagaauuc

SEQ ID NO: 55834 - RNA, 19 nt, Artificial Sequence
  Description of Artificial Sequence: Synthetic oligonucleotide
  Sense strand starting at position 65 of SEQ ID NO: 676
ucugauuggugacuugcaa

SEQ ID NO: 55835 - RNA, 19 nt, Artificial Sequence
  Description of Artificial Sequence: Synthetic oligonucleotide
  Antisense strand to SEQ ID NO: 55754
uugcaagucaccaaucaga

SEQ ID NO: 55836 - RNA, 19 nt, Artificial Sequence
  Description of Artificial Sequence: Synthetic oligonucleotide
  Sense strand starting at position 72 of SEQ ID NO: 676
ggugacuugcaagauacca

SEQ ID NO: 55837 - RNA, 19 nt, Artificial Sequence
  Description of Artificial Sequence: Synthetic oligonucleotide
  Antisense strand to SEQ ID NO: 55756
ugguaucuugcaagucacc

SEQ ID NO: 55838 - RNA, 19 nt, Artificial Sequence
  Description of Artificial Sequence: Synthetic oligonucleotide
  Sense strand starting at position 158 of SEQ ID NO: 676
cuuaguauuuauggaaaga

SEQ ID NO: 55839 - RNA, 19 nt, Artificial Sequence
  Description of Artificial Sequence: Synthetic oligonucleotide
  Antisense strand to SEQ ID NO: 55758
ucuuuccauaaauacuaag

SEQ ID NO: 55840 - RNA, 19 nt, Artificial Sequence
  Description of Artificial Sequence: Synthetic oligonucleotide
  Sense strand starting at position 212 of SEQ ID NO: 676
aagggcaucccuuguguaa

SEQ ID NO: 55841 - RNA, 19 nt, Artificial Sequence
  Description of Artificial Sequence: Synthetic oligonucleotide
  Antisense strand to SEQ ID NO: 55760
uuacacaagggaugcccuu

SEQ ID NO: 55842 - RNA, 19 nt, Artificial Sequence
  Description of Artificial Sequence: Synthetic oligonucleotide
  Sense strand starting at position 399 of SEQ ID NO: 676
ucauuaaaugacuguugaa

SEQ ID NO: 55843 - RNA, 19 nt, Artificial Sequence
  Description of Artificial Sequence: Synthetic oligonucleotide
  Antisense strand to SEQ ID NO: 55762
uucaacagucauuuaauga

SEQ ID NO: 55844 - RNA, 19 nt, Artificial Sequence
  Description of Artificial Sequence: Synthetic oligonucleotide
  Sense strand starting at position 545 of SEQ ID NO: 676
uuuaaauaguguccaccua

SEQ ID NO: 55845 - RNA, 19 nt, Artificial Sequence
  Description of Artificial Sequence: Synthetic oligonucleotide
  Antisense strand to SEQ ID NO: 55764
uagguggacacuauuuaaa

SEQ ID NO: 55846 - RNA, 19 nt, Artificial Sequence
  Description of Artificial Sequence: Synthetic oligonucleotide
  Sense strand starting at position 614 of SEQ ID NO: 676
gcucuuuaagacugaaaga

SEQ ID NO: 55847 - RNA, 19 nt, Artificial Sequence
  Description of Artificial Sequence: Synthetic oligonucleotide
  Antisense strand to SEQ ID NO: 55766
ucuuucagucuuaaagagc

SEQ ID NO: 55848 - RNA, 19 nt, Artificial Sequence
  Description of Artificial Sequence: Synthetic oligonucleotide
  Sense strand starting at position 624 of SEQ ID NO: 676
acugaaagaugugaagaca

SEQ ID NO: 55849 - RNA, 19 nt, Artificial Sequence
  Description of Artificial Sequence: Synthetic oligonucleotide
  Antisense strand to SEQ ID NO: 55768
ugucuucacaucuuucagu

SEQ ID NO: 55850 - RNA, 19 nt, Artificial Sequence
  Description of Artificial Sequence: Synthetic oligonucleotide
  Sense strand starting at position 727 of SEQ ID NO: 676
gucucuggaaacugaugua

SEQ ID NO: 55851 - RNA, 19 nt, Artificial Sequence
  Description of Artificial Sequence: Synthetic oligonucleotide
  Antisense strand to SEQ ID NO: 55770
uacaucaguuuccagagac

SEQ ID NO: 55852 - RNA, 19 nt, Artificial Sequence
  Description of Artificial Sequence: Synthetic oligonucleotide
  Sense strand starting at position 832 of SEQ ID NO: 676
auuucugauuuguagcaau

SEQ ID NO: 55853 - RNA, 19 nt, Artificial Sequence
  Description of Artificial Sequence: Synthetic oligonucleotide
  Antisense strand to SEQ ID NO: 55772
auugcuacaaaucagaaau

SEQ ID NO: 55854 - RNA, 19 nt, Artificial Sequence
  Description of Artificial Sequence: Synthetic oligonucleotide
  Sense strand starting at position 906 of SEQ ID NO: 676
gcagcugaccuugaugagu

SEQ ID NO: 55855 - RNA, 19 nt, Artificial Sequence
  Description of Artificial Sequence: Synthetic oligonucleotide
  Antisense strand to SEQ ID NO: 55774
acucaucaaggucagcugc

SEQ ID NO: 55856 - RNA, 19 nt, Artificial Sequence
  Description of Artificial Sequence: Synthetic oligonucleotide
  Sense strand starting at position 911 of SEQ ID NO: 676
ugaccuugaugaguuagga

SEQ ID NO: 55857 - RNA, 19 nt, Artificial Sequence
  Description of Artificial Sequence: Synthetic oligonucleotide
  Antisense strand to SEQ ID NO: 55776
uccuaacucaucaagguca

SEQ ID NO: 55858 - RNA, 19 nt, Artificial Sequence
  Description of Artificial Sequence: Synthetic oligonucleotide
  Sense strand starting at position 925 of SEQ ID NO: 676
uaggauuaugcuggaaauc

SEQ ID NO: 55859 - RNA, 19 nt, Artificial Sequence
  Description of Artificial Sequence: Synthetic oligonucleotide
  Antisense strand to SEQ ID NO: 55778
gauuuccagcauaauccua

SEQ ID NO: 55860 - RNA, 19 nt, Artificial Sequence
  Description of Artificial Sequence: Synthetic oligonucleotide
  Sense strand starting at position 935 of SEQ ID NO: 676
cuggaaaucaguugcugaa

SEQ ID NO: 55861 - RNA, 19 nt, Artificial Sequence
  Description of Artificial Sequence: Synthetic oligonucleotide
  Antisense strand to SEQ ID NO: 55780
uucagcaacugauuuccag

SEQ ID NO: 55862 - RNA, 19 nt, Artificial Sequence
  Description of Artificial Sequence: Synthetic oligonucleotide
  Sense strand starting at position 937 of SEQ ID NO: 676
ggaaaucaguugcugaaau

SEQ ID NO: 55863 - RNA, 19 nt, Artificial Sequence
  Description of Artificial Sequence: Synthetic oligonucleotide
  Antisense strand to SEQ ID NO: 55782
auuucagcaacugauuucc

SEQ ID NO: 55864 - RNA, 19 nt, Artificial Sequence
  Description of Artificial Sequence: Synthetic oligonucleotide
  Sense strand starting at position 1499 of SEQ ID NO: 676
gcagcuuaguuaucauaaa

SEQ ID NO: 55865 - RNA, 19 nt, Artificial Sequence
  Description of Artificial Sequence: Synthetic oligonucleotide
  Antisense strand to SEQ ID NO: 55784
uuuaugauaacuaagcugc

SEQ ID NO: 55866 - RNA, 19 nt, Artificial Sequence
  Description of Artificial Sequence: Synthetic oligonucleotide
  Sense strand starting at position 1585 of SEQ ID NO: 676
ucuccauuagcuggauuaa

SEQ ID NO: 55867 - RNA, 19 nt, Artificial Sequence
  Description of Artificial Sequence: Synthetic oligonucleotide
  Antisense strand to SEQ ID NO: 55786
uuaauccagcuaauggaga

SEQ ID NO: 55868 - RNA, 19 nt, Artificial Sequence
  Description of Artificial Sequence: Synthetic oligonucleotide
  Sense strand starting at position 1586 of SEQ ID NO: 676
cuccauuagcuggauuaac

SEQ ID NO: 55869 - RNA, 19 nt, Artificial Sequence
  Description of Artificial Sequence: Synthetic oligonucleotide
  Antisense strand to SEQ ID NO: 55788
guuaauccagcuaauggag

SEQ ID NO: 55870 - RNA, 19 nt, Artificial Sequence
  Description of Artificial Sequence: Synthetic oligonucleotide
  Sense strand starting at position 2052 of SEQ ID NO: 676
gcacgaauucuagaguuuc

SEQ ID NO: 55871 - RNA, 19 nt, Artificial Sequence
  Description of Artificial Sequence: Synthetic oligonucleotide
  Antisense strand to SEQ ID NO: 55790
gaaacucuagaauucgugc

SEQ ID NO: 55872 - RNA, 19 nt, Artificial Sequence
  Description of Artificial Sequence: Synthetic oligonucleotide
  Sense strand starting at position 2086 of SEQ ID NO: 676
ugagauuguacgggaaaca

SEQ ID NO: 55873 - RNA, 19 nt, Artificial Sequence
  Description of Artificial Sequence: Synthetic oligonucleotide
  Antisense strand to SEQ ID NO: 55792
uguuucccguacaaucuca

SEQ ID NO: 55874 - RNA, 19 nt, Artificial Sequence
  Description of Artificial Sequence: Synthetic oligonucleotide
  Sense strand starting at position 2135 of SEQ ID NO: 676
acacgucugguagaaccua

SEQ ID NO: 55875 - RNA, 19 nt, Artificial Sequence
  Description of Artificial Sequence: Synthetic oligonucleotide
  Antisense strand to SEQ ID NO: 55794
uagguucuaccagacgugu

SEQ ID NO: 55876 - RNA, 19 nt, Artificial Sequence
  Description of Artificial Sequence: Synthetic oligonucleotide
  Sense strand starting at position 2444 of SEQ ID NO: 676
cuaagauuugggcgcccau

SEQ ID NO: 55877 - RNA, 19 nt, Artificial Sequence
  Description of Artificial Sequence: Synthetic oligonucleotide
  Antisense strand to SEQ ID NO: 55796
augggcgcccaaaucuuag

SEQ ID NO: 55878 - RNA, 19 nt, Artificial Sequence
  Description of Artificial Sequence: Synthetic oligonucleotide
  Sense strand starting at position 2612 of SEQ ID NO: 676
ccaugcauccgggaacacu

SEQ ID NO: 55879 - RNA, 19 nt, Artificial Sequence
  Description of Artificial Sequence: Synthetic oligonucleotide
  Antisense strand to SEQ ID NO: 55798
aguguucccggaugcaugg

SEQ ID NO: 55880 - RNA, 19 nt, Artificial Sequence
  Description of Artificial Sequence: Synthetic oligonucleotide
  Sense strand starting at position 3378 of SEQ ID NO: 676
guaucauucccaggucuau

SEQ ID NO: 55881 - RNA, 19 nt, Artificial Sequence
  Description of Artificial Sequence: Synthetic oligonucleotide
  Antisense strand to SEQ ID NO: 55800
auagaccugggaaugauac

SEQ ID NO: 55882 - RNA, 19 nt, Artificial Sequence
  Description of Artificial Sequence: Synthetic oligonucleotide
  Sense strand starting at position 3550 of SEQ ID NO: 676
guuugcuuaaugccacgua

SEQ ID NO: 55883 - RNA, 19 nt, Artificial Sequence
  Description of Artificial Sequence: Synthetic oligonucleotide
  Antisense strand to SEQ ID NO: 55802
uacguggcauuaagcaaac

SEQ ID NO: 55884 - RNA, 19 nt, Artificial Sequence
  Description of Artificial Sequence: Synthetic oligonucleotide
  Sense strand starting at position 3653 of SEQ ID NO: 676
gggcuacaguucuugagua

SEQ ID NO: 55885 - RNA, 19 nt, Artificial Sequence
  Description of Artificial Sequence: Synthetic oligonucleotide
  Antisense strand to SEQ ID NO: 55804
uacucaagaacuguagccc

SEQ ID NO: 55886 - RNA, 19 nt, Artificial Sequence
  Description of Artificial Sequence: Synthetic oligonucleotide
  Sense strand starting at position 3655 of SEQ ID NO: 676
gcuacaguucuugaguaag

SEQ ID NO: 55887 - RNA, 19 nt, Artificial Sequence
  Description of Artificial Sequence: Synthetic oligonucleotide
  Antisense strand to SEQ ID NO: 55806
cuuacucaagaacuguagc

SEQ ID NO: 55888 - RNA, 19 nt, Artificial Sequence
  Description of Artificial Sequence: Synthetic oligonucleotide
  Sense strand starting at position 3657 of SEQ ID NO: 676
uacaguucuugaguaagau

SEQ ID NO: 55889 - RNA, 19 nt, Artificial Sequence
  Description of Artificial Sequence: Synthetic oligonucleotide
  Antisense strand to SEQ ID NO: 55808
aucuuacucaagaacugua

SEQ ID NO: 55890 - RNA, 19 nt, Artificial Sequence
  Description of Artificial Sequence: Synthetic oligonucleotide
  Sense strand starting at position 3658 of SEQ ID NO: 676
acaguucuugaguaagauc

SEQ ID NO: 55891 - RNA, 19 nt, Artificial Sequence
  Description of Artificial Sequence: Synthetic oligonucleotide
  Antisense strand to SEQ ID NO: 55810
gaucuuacucaagaacugu

SEQ ID NO: 55892 - RNA, 19 nt, Artificial Sequence
  Description of Artificial Sequence: Synthetic oligonucleotide
  Sense strand starting at position 3667 of SEQ ID NO: 676
gaguaagaucugggccuau

SEQ ID NO: 55893 - RNA, 19 nt, Artificial Sequence
  Description of Artificial Sequence: Synthetic oligonucleotide
  Antisense strand to SEQ ID NO: 55812
auaggcccagaucuuacuc

SEQ ID NO: 55894 - RNA, 19 nt, Artificial Sequence
  Description of Artificial Sequence: Synthetic oligonucleotide
  Sense strand starting at position 3808 of SEQ ID NO: 676
cuuuguuggaauugggaga

SEQ ID NO: 55895 - RNA, 19 nt, Artificial Sequence
  Description of Artificial Sequence: Synthetic oligonucleotide
  Antisense strand to SEQ ID NO: 55814
ucucccaauuccaacaaag

SEQ ID NO: 55896 - RNA, 19 nt, Artificial Sequence
  Description of Artificial Sequence: Synthetic oligonucleotide
  Sense strand starting at position 3809 of SEQ ID NO: 676
uuuguuggaauugggagaa

SEQ ID NO: 55897 - RNA, 19 nt, Artificial Sequence
  Description of Artificial Sequence: Synthetic oligonucleotide
  Antisense strand to SEQ ID NO: 55816
uucucccaauuccaacaaa

SEQ ID NO: 55898 - RNA, 19 nt, Artificial Sequence
  Description of Artificial Sequence: Synthetic oligonucleotide
  Sense strand starting at position 3821 of SEQ ID NO: 676
gggagaaacuuguuugcug

SEQ ID NO: 55899 - RNA, 19 nt, Artificial Sequence
  Description of Artificial Sequence: Synthetic oligonucleotide
  Antisense strand to SEQ ID NO: 55818
cagcaaacaaguuucuccc

SEQ ID NO: 55900 - RNA, 19 nt, Artificial Sequence
  Description of Artificial Sequence: Synthetic oligonucleotide
  Sense strand starting at position 3948 of SEQ ID NO: 676
uaaagugauaucgggagga

SEQ ID NO: 55901 - RNA, 19 nt, Artificial Sequence
  Description of Artificial Sequence: Synthetic oligonucleotide
  Antisense strand to SEQ ID NO: 55820
uccucccgauaucacuuua

SEQ ID NO: 55902 - RNA, 19 nt, Artificial Sequence
  Description of Artificial Sequence: Synthetic oligonucleotide
  Sense strand starting at position 3952 of SEQ ID NO: 676
gugauaucgggaggaauau

SEQ ID NO: 55903 - RNA, 19 nt, Artificial Sequence
  Description of Artificial Sequence: Synthetic oligonucleotide
  Antisense strand to SEQ ID NO: 55822
auauuccucccgauaucac

SEQ ID NO: 55904 - RNA, 19 nt, Artificial Sequence
  Description of Artificial Sequence: Synthetic oligonucleotide
  Sense strand starting at position 3961 of SEQ ID NO: 676
ggaggaauaugugucauuc

SEQ ID NO: 55905 - RNA, 19 nt, Artificial Sequence
  Description of Artificial Sequence: Synthetic oligonucleotide
  Antisense strand to SEQ ID NO: 55824
gaaugacacauauuccucc

SEQ ID NO: 55906 - RNA, 19 nt, Artificial Sequence
  Description of Artificial Sequence: Synthetic oligonucleotide
  Sense strand starting at position 16 of SEQ ID NO: 677
cuggcauucccauggcuua

SEQ ID NO: 55907 - RNA, 19 nt, Artificial Sequence
  Description of Artificial Sequence: Synthetic oligonucleotide
  Antisense strand to SEQ ID NO: 55826
uaagccaugggaaugccag

SEQ ID NO: 55908 - RNA, 19 nt, Artificial Sequence
  Description of Artificial Sequence: Synthetic oligonucleotide
  Sense strand starting at position 17 of SEQ ID NO: 677
uggcauucccauggcuuaa

SEQ ID NO: 55909 - RNA, 19 nt, Artificial Sequence
  Description of Artificial Sequence: Synthetic oligonucleotide
  Antisense strand to SEQ ID NO: 55828
uuaagccaugggaaugcca

SEQ ID NO: 55910 - RNA, 19 nt, Artificial Sequence
  Description of Artificial Sequence: Synthetic oligonucleotide
  Sense strand starting at position 19 of SEQ ID NO: 677
gcauucccauggcuuaaau

SEQ ID NO: 55911 - RNA, 19 nt, Artificial Sequence
  Description of Artificial Sequence: Synthetic oligonucleotide
  Antisense strand to SEQ ID NO: 55830
auuuaagccaugggaaugc

SEQ ID NO: 55912 - RNA, 19 nt, Artificial Sequence
  Description of Artificial Sequence: Synthetic oligonucleotide
  Sense strand starting at position 21 of SEQ ID NO: 677
auucccauggcuuaaauga

SEQ ID NO: 55913 - RNA, 19 nt, Artificial Sequence
  Description of Artificial Sequence: Synthetic oligonucleotide
  Antisense strand to SEQ ID NO: 55832
ucauuuaagccaugggaau

SEQ ID NO: 55914 - RNA, 19 nt, Artificial Sequence
  Description of Artificial Sequence: Synthetic oligonucleotide
  Sense strand starting at position 70 of SEQ ID NO: 677
uggaguaagccauacacau

SEQ ID NO: 55915 - RNA, 19 nt, Artificial Sequence
  Description of Artificial Sequence: Synthetic oligonucleotide
  Antisense strand to SEQ ID NO: 55834
auguguauggcuuacucca

SEQ ID NO: 55916 - RNA, 19 nt, Artificial Sequence
  Description of Artificial Sequence: Synthetic oligonucleotide
  Sense strand starting at position 194 of SEQ ID NO: 677
gcaguuagauaaguccuga

SEQ ID NO: 55917 - RNA, 19 nt, Artificial Sequence
  Description of Artificial Sequence: Synthetic oligonucleotide
  Antisense strand to SEQ ID NO: 55836
ucaggacuuaucuaacugc

SEQ ID NO: 55918 - RNA, 19 nt, Artificial Sequence
  Description of Artificial Sequence: Synthetic oligonucleotide
  Sense strand starting at position 264 of SEQ ID NO: 677
gcuccaaaguccuuugcua

SEQ ID NO: 55919 - RNA, 19 nt, Artificial Sequence
  Description of Artificial Sequence: Synthetic oligonucleotide
  Antisense strand to SEQ ID NO: 55838
uagcaaaggacuuuggagc

SEQ ID NO: 55920 - RNA, 19 nt, Artificial Sequence
  Description of Artificial Sequence: Synthetic oligonucleotide
  Sense strand starting at position 396 of SEQ ID NO: 677
ggugcucaaagcuguauuu

SEQ ID NO: 55921 - RNA, 19 nt, Artificial Sequence
  Description of Artificial Sequence: Synthetic oligonucleotide
  Antisense strand to SEQ ID NO: 55840
aaauacagcuuugagcacc

SEQ ID NO: 55922 - RNA, 19 nt, Artificial Sequence
  Description of Artificial Sequence: Synthetic oligonucleotide
  Sense strand starting at position 484 of SEQ ID NO: 677
gcugcaaucaagugcuaga

SEQ ID NO: 55923 - RNA, 19 nt, Artificial Sequence
  Description of Artificial Sequence: Synthetic oligonucleotide
  Antisense strand to SEQ ID NO: 55842
ucuagcacuugauugcagc

SEQ ID NO: 55924 - RNA, 19 nt, Artificial Sequence
  Description of Artificial Sequence: Synthetic oligonucleotide
  Sense strand starting at position 747 of SEQ ID NO: 677
auguacuucuaaguaaugu

SEQ ID NO: 55925 - RNA, 19 nt, Artificial Sequence
  Description of Artificial Sequence: Synthetic oligonucleotide
  Antisense strand to SEQ ID NO: 55844
acauuacuuagaaguacau

SEQ ID NO: 55926 - RNA, 19 nt, Artificial Sequence
  Description of Artificial Sequence: Synthetic oligonucleotide
  Sense strand starting at position 770 of SEQ ID NO: 677
cuaaguaaagucuggcuaa

SEQ ID NO: 55927 - RNA, 19 nt, Artificial Sequence
  Description of Artificial Sequence: Synthetic oligonucleotide
  Antisense strand to SEQ ID NO: 55846
uuagccagacuuuacuuag

SEQ ID NO: 55928 - RNA, 19 nt, Artificial Sequence
  Description of Artificial Sequence: Synthetic oligonucleotide
  Sense strand starting at position 773 of SEQ ID NO: 677
aguaaagucuggcuaauga

SEQ ID NO: 55929 - RNA, 19 nt, Artificial Sequence
  Description of Artificial Sequence: Synthetic oligonucleotide
  Antisense strand to SEQ ID NO: 55848
ucauuagccagacuuuacu

SEQ ID NO: 55930 - RNA, 19 nt, Artificial Sequence
  Description of Artificial Sequence: Synthetic oligonucleotide
  Sense strand starting at position 840 of SEQ ID NO: 677
ugcauaugugcauacuaag

SEQ ID NO: 55931 - RNA, 19 nt, Artificial Sequence
  Description of Artificial Sequence: Synthetic oligonucleotide
  Antisense strand to SEQ ID NO: 55850
cuuaguaugcacauaugca

SEQ ID NO: 55932 - RNA, 19 nt, Artificial Sequence
  Description of Artificial Sequence: Synthetic oligonucleotide
  Sense strand starting at position 846 of SEQ ID NO: 677
ugugcauacuaaguuuaaa

SEQ ID NO: 55933 - RNA, 19 nt, Artificial Sequence
  Description of Artificial Sequence: Synthetic oligonucleotide
  Antisense strand to SEQ ID NO: 55852
uuuaaacuuaguaugcaca

SEQ ID NO: 55934 - RNA, 19 nt, Artificial Sequence
  Description of Artificial Sequence: Synthetic oligonucleotide
  Sense strand starting at position 849 of SEQ ID NO: 677
gcauacuaaguuuaaagau

SEQ ID NO: 55935 - RNA, 19 nt, Artificial Sequence
  Description of Artificial Sequence: Synthetic oligonucleotide
  Antisense strand to SEQ ID NO: 55854
aucuuuaaacuuaguaugc

SEQ ID NO: 55936 - RNA, 19 nt, Artificial Sequence
  Description of Artificial Sequence: Synthetic oligonucleotide
  Sense strand starting at position 942 of SEQ ID NO: 677
ggcuaaugaucucuccaca

SEQ ID NO: 55937 - RNA, 19 nt, Artificial Sequence
  Description of Artificial Sequence: Synthetic oligonucleotide
  Antisense strand to SEQ ID NO: 55856
uguggagagaucauuagcc

SEQ ID NO: 55938 - RNA, 19 nt, Artificial Sequence
  Description of Artificial Sequence: Synthetic oligonucleotide
  Sense strand starting at position 967 of SEQ ID NO: 677
guccucuaucaucacaagu

SEQ ID NO: 55939 - RNA, 19 nt, Artificial Sequence
  Description of Artificial Sequence: Synthetic oligonucleotide
  Antisense strand to SEQ ID NO: 55858
acuugugaugauagaggac

SEQ ID NO: 55940 - RNA, 19 nt, Artificial Sequence
  Description of Artificial Sequence: Synthetic oligonucleotide
  Sense strand starting at position 980 of SEQ ID NO: 677
acaaguguccuguaagaag

SEQ ID NO: 55941 - RNA, 19 nt, Artificial Sequence
  Description of Artificial Sequence: Synthetic oligonucleotide
  Antisense strand to SEQ ID NO: 55860
cuucuuacaggacacuugu

SEQ ID NO: 55942 - RNA, 19 nt, Artificial Sequence
  Description of Artificial Sequence: Synthetic oligonucleotide
  Sense strand starting at position 1062 of SEQ ID NO: 677
auccauucucaugggaaca

SEQ ID NO: 55943 - RNA, 19 nt, Artificial Sequence
  Description of Artificial Sequence: Synthetic oligonucleotide
  Antisense strand to SEQ ID NO: 55862
uguucccaugagaauggau

SEQ ID NO: 55944 - RNA, 19 nt, Artificial Sequence
  Description of Artificial Sequence: Synthetic oligonucleotide
  Sense strand starting at position 1064 of SEQ ID NO: 677
ccauucucaugggaacaca

SEQ ID NO: 55945 - RNA, 19 nt, Artificial Sequence
  Description of Artificial Sequence: Synthetic oligonucleotide
  Antisense strand to SEQ ID NO: 55864
uguguucccaugagaaugg

SEQ ID NO: 55946 - RNA, 19 nt, Artificial Sequence
  Description of Artificial Sequence: Synthetic oligonucleotide
  Sense strand starting at position 1213 of SEQ ID NO: 677
uaggaacgccuuuguugua

SEQ ID NO: 55947 - RNA, 19 nt, Artificial Sequence
  Description of Artificial Sequence: Synthetic oligonucleotide
  Antisense strand to SEQ ID NO: 55866
uacaacaaaggcguuccua

SEQ ID NO: 55948 - RNA, 19 nt, Artificial Sequence
  Description of Artificial Sequence: Synthetic oligonucleotide
  Sense strand starting at position 1223 of SEQ ID NO: 677
uuuguuguacccuaacuau

SEQ ID NO: 55949 - RNA, 19 nt, Artificial Sequence
  Description of Artificial Sequence: Synthetic oligonucleotide
  Antisense strand to SEQ ID NO: 55868
auaguuaggguacaacaaa

SEQ ID NO: 55950 - RNA, 19 nt, Artificial Sequence
  Description of Artificial Sequence: Synthetic oligonucleotide
  Sense strand starting at position 1457 of SEQ ID NO: 677
ucaguuucucguggugaag

SEQ ID NO: 55951 - RNA, 19 nt, Artificial Sequence
  Description of Artificial Sequence: Synthetic oligonucleotide
  Antisense strand to SEQ ID NO: 55870
cuucaccacgagaaacuga

SEQ ID NO: 55952 - RNA, 19 nt, Artificial Sequence
  Description of Artificial Sequence: Synthetic oligonucleotide
  Sense strand starting at position 1460 of SEQ ID NO: 677
guuucucguggugaagagu

SEQ ID NO: 55953 - RNA, 19 nt, Artificial Sequence
  Description of Artificial Sequence: Synthetic oligonucleotide
  Antisense strand to SEQ ID NO: 55872
acucuucaccacgagaaac

SEQ ID NO: 55954 - RNA, 19 nt, Artificial Sequence
  Description of Artificial Sequence: Synthetic oligonucleotide
  Sense strand starting at position 1469 of SEQ ID NO: 677
ggugaagagugagcacaau

SEQ ID NO: 55955 - RNA, 19 nt, Artificial Sequence
  Description of Artificial Sequence: Synthetic oligonucleotide
  Antisense strand to SEQ ID NO: 55874
auugugcucacucuucacc

SEQ ID NO: 55956 - RNA, 19 nt, Artificial Sequence
  Description of Artificial Sequence: Synthetic oligonucleotide
  Sense strand starting at position 1497 of SEQ ID NO: 677
ggccgucucgcuaggugaa

SEQ ID NO: 55957 - RNA, 19 nt, Artificial Sequence
  Description of Artificial Sequence: Synthetic oligonucleotide
  Antisense strand to SEQ ID NO: 55876
uucaccuagcgagacggcc

SEQ ID NO: 55958 - RNA, 19 nt, Artificial Sequence
  Description of Artificial Sequence: Synthetic oligonucleotide
  Sense strand starting at position 1511 of SEQ ID NO: 677
gugaaagaacgcugagauc

SEQ ID NO: 55959 - RNA, 19 nt, Artificial Sequence
  Description of Artificial Sequence: Synthetic oligonucleotide
  Antisense strand to SEQ ID NO: 55878
gaucucagcguucuuucac

SEQ ID NO: 55960 - RNA, 19 nt, Artificial Sequence
  Description of Artificial Sequence: Synthetic oligonucleotide
  Sense strand starting at position 2193 of SEQ ID NO: 677
ggcaguccugacgguacua

SEQ ID NO: 55961 - RNA, 19 nt, Artificial Sequence
  Description of Artificial Sequence: Synthetic oligonucleotide
  Antisense strand to SEQ ID NO: 55880
uaguaccgucaggacugcc

SEQ ID NO: 55962 - RNA, 19 nt, Artificial Sequence
  Description of Artificial Sequence: Synthetic oligonucleotide
  Sense strand starting at position 2274 of SEQ ID NO: 677
guaagaaguguugggugca

SEQ ID NO: 55963 - RNA, 19 nt, Artificial Sequence
  Description of Artificial Sequence: Synthetic oligonucleotide
  Antisense strand to SEQ ID NO: 55882
ugcacccaacacuucuuac

SEQ ID NO: 55964 - RNA, 19 nt, Artificial Sequence
  Description of Artificial Sequence: Synthetic oligonucleotide
  Sense strand starting at position 2277 of SEQ ID NO: 677
agaaguguugggugcauuu

SEQ ID NO: 55965 - RNA, 19 nt, Artificial Sequence
  Description of Artificial Sequence: Synthetic oligonucleotide
  Antisense strand to SEQ ID NO: 55884
aaaugcacccaacacuucu

SEQ ID NO: 55966 - RNA, 19 nt, Artificial Sequence
  Description of Artificial Sequence: Synthetic oligonucleotide
  Sense strand starting at position 2286 of SEQ ID NO: 677
gggugcauuugguagauuu

SEQ ID NO: 55967 - RNA, 19 nt, Artificial Sequence
  Description of Artificial Sequence: Synthetic oligonucleotide
  Antisense strand to SEQ ID NO: 55886
aaaucuaccaaaugcaccc

SEQ ID NO: 55968 - RNA, 19 nt, Artificial Sequence
  Description of Artificial Sequence: Synthetic oligonucleotide
  Sense strand starting at position 2320 of SEQ ID NO: 677
gagaaugagugggaaguuu

SEQ ID NO: 55969 - RNA, 19 nt, Artificial Sequence
  Description of Artificial Sequence: Synthetic oligonucleotide
  Antisense strand to SEQ ID NO: 55888
aaacuucccacucauucuc

SEQ ID NO: 55970 - RNA, 19 nt, Artificial Sequence
  Description of Artificial Sequence: Synthetic oligonucleotide
  Sense strand starting at position 2341 of SEQ ID NO: 677
gaagacauuugggaggcua

SEQ ID NO: 55971 - RNA, 19 nt, Artificial Sequence
  Description of Artificial Sequence: Synthetic oligonucleotide
  Antisense strand to SEQ ID NO: 55890
uagccucccaaaugucuuc

SEQ ID NO: 55972 - RNA, 19 nt, Artificial Sequence
  Description of Artificial Sequence: Synthetic oligonucleotide
  Sense strand starting at position 3115 of SEQ ID NO: 677
aggcuuuguggagacuuga

SEQ ID NO: 55973 - RNA, 19 nt, Artificial Sequence
  Description of Artificial Sequence: Synthetic oligonucleotide
  Antisense strand to SEQ ID NO: 55892
ucaagucuccacaaagccu

SEQ ID NO: 55974 - RNA, 19 nt, Artificial Sequence
  Description of Artificial Sequence: Synthetic oligonucleotide
  Sense strand starting at position 3251 of SEQ ID NO: 677
ggagaucaccugggcaaca

SEQ ID NO: 55975 - RNA, 19 nt, Artificial Sequence
  Description of Artificial Sequence: Synthetic oligonucleotide
  Antisense strand to SEQ ID NO: 55894
uguugcccaggugaucucc

SEQ ID NO: 55976 - RNA, 19 nt, Artificial Sequence
  Description of Artificial Sequence: Synthetic oligonucleotide
  Sense strand starting at position 3613 of SEQ ID NO: 677
cgaugacaacaauguacua

SEQ ID NO: 55977 - RNA, 19 nt, Artificial Sequence
  Description of Artificial Sequence: Synthetic oligonucleotide
  Antisense strand to SEQ ID NO: 55896
uaguacauuguugucaucg

SEQ ID NO: 55978 - RNA, 19 nt, Artificial Sequence
  Description of Artificial Sequence: Synthetic oligonucleotide
  Sense strand starting at position 3688 of SEQ ID NO: 677
ucagcaaguucugcaagau

SEQ ID NO: 55979 - RNA, 19 nt, Artificial Sequence
  Description of Artificial Sequence: Synthetic oligonucleotide
  Antisense strand to SEQ ID NO: 55898
aucuugcagaacuugcuga

SEQ ID NO: 55980 - RNA, 19 nt, Artificial Sequence
  Description of Artificial Sequence: Synthetic oligonucleotide
  Sense strand starting at position 3689 of SEQ ID NO: 677
cagcaaguucugcaagauu

SEQ ID NO: 55981 - RNA, 19 nt, Artificial Sequence
  Description of Artificial Sequence: Synthetic oligonucleotide
  Antisense strand to SEQ ID NO: 55900
aaucuugcagaacuugcug

SEQ ID NO: 55982 - RNA, 19 nt, Artificial Sequence
  Description of Artificial Sequence: Synthetic oligonucleotide
  Sense strand starting at position 3742 of SEQ ID NO: 677
cugccuccguugguauaaa

SEQ ID NO: 55983 - RNA, 19 nt, Artificial Sequence
  Description of Artificial Sequence: Synthetic oligonucleotide
  Antisense strand to SEQ ID NO: 55902
uuuauaccaacggaggcag

SEQ ID NO: 55984 - RNA, 19 nt, Artificial Sequence
  Description of Artificial Sequence: Synthetic oligonucleotide
  Sense strand starting at position 3774 of SEQ ID NO: 677
gacugugagugcccuauuu

SEQ ID NO: 55985 - RNA, 19 nt, Artificial Sequence
  Description of Artificial Sequence: Synthetic oligonucleotide
  Antisense strand to SEQ ID NO: 55904
aaauagggcacucacaguc

SEQ ID NO: 55986 - RNA, 19 nt, Artificial Sequence
  Description of Artificial Sequence: Synthetic oligonucleotide
  Sense strand starting at position 362 of SEQ ID NO: 678
gcuauagggugccugagau

SEQ ID NO: 55987 - RNA, 19 nt, Artificial Sequence
  Description of Artificial Sequence: Synthetic oligonucleotide
  Antisense strand to SEQ ID NO: 55906
aucucaggcacccuauagc

SEQ ID NO: 55988 - RNA, 19 nt, Artificial Sequence
  Description of Artificial Sequence: Synthetic oligonucleotide
  Sense strand starting at position 372 of SEQ ID NO: 678
gccugagaugcuggaucaa

SEQ ID NO: 55989 - RNA, 19 nt, Artificial Sequence
  Description of Artificial Sequence: Synthetic oligonucleotide
  Antisense strand to SEQ ID NO: 55908
uugauccagcaucucaggc

SEQ ID NO: 55990 - RNA, 19 nt, Artificial Sequence
  Description of Artificial Sequence: Synthetic oligonucleotide
  Sense strand starting at position 452 of SEQ ID NO: 678
acucuauugucauugaagu

SEQ ID NO: 55991 - RNA, 19 nt, Artificial Sequence
  Description of Artificial Sequence: Synthetic oligonucleotide
  Antisense strand to SEQ ID NO: 55910
acuucaaugacaauagagu

SEQ ID NO: 55992 - RNA, 19 nt, Artificial Sequence
  Description of Artificial Sequence: Synthetic oligonucleotide
  Sense strand starting at position 453 of SEQ ID NO: 678
cucuauugucauugaaguc

SEQ ID NO: 55993 - RNA, 19 nt, Artificial Sequence
  Description of Artificial Sequence: Synthetic oligonucleotide
  Antisense strand to SEQ ID NO: 55912
gacuucaaugacaauagag

SEQ ID NO: 55994 - RNA, 19 nt, Artificial Sequence
  Description of Artificial Sequence: Synthetic oligonucleotide
  Sense strand starting at position 483 of SEQ ID NO: 678
uggacuuguuuccuuauca

SEQ ID NO: 55995 - RNA, 19 nt, Artificial Sequence
  Description of Artificial Sequence: Synthetic oligonucleotide
  Antisense strand to SEQ ID NO: 55914
ugauaaggaaacaagucca

SEQ ID NO: 55996 - RNA, 19 nt, Artificial Sequence
  Description of Artificial Sequence: Synthetic oligonucleotide
  Sense strand starting at position 484 of SEQ ID NO: 678
ggacuuguuuccuuaucag

SEQ ID NO: 55997 - RNA, 19 nt, Artificial Sequence
  Description of Artificial Sequence: Synthetic oligonucleotide
  Antisense strand to SEQ ID NO: 55916
cugauaaggaaacaagucc

SEQ ID NO: 55998 - RNA, 19 nt, Artificial Sequence
  Description of Artificial Sequence: Synthetic oligonucleotide
  Sense strand starting at position 487 of SEQ ID NO: 678
cuuguuuccuuaucaguaa

SEQ ID NO: 55999 - RNA, 19 nt, Artificial Sequence
  Description of Artificial Sequence: Synthetic oligonucleotide
  Antisense strand to SEQ ID NO: 55918
uuacugauaaggaaacaag

SEQ ID NO: 56000 - RNA, 19 nt, Artificial Sequence
  Description of Artificial Sequence: Synthetic oligonucleotide
  Sense strand starting at position 520 of SEQ ID NO: 678
gauauaugccucuggucca

SEQ ID NO: 56001 - RNA, 19 nt, Artificial Sequence
  Description of Artificial Sequence: Synthetic oligonucleotide
  Antisense strand to SEQ ID NO: 55920
uggaccagaggcauauauc

SEQ ID NO: 56002 - RNA, 19 nt, Artificial Sequence
  Description of Artificial Sequence: Synthetic oligonucleotide
  Sense strand starting at position 848 of SEQ ID NO: 678
gccucauuguuccucagga

SEQ ID NO: 56003 - RNA, 19 nt, Artificial Sequence
  Description of Artificial Sequence: Synthetic oligonucleotide
  Antisense strand to SEQ ID NO: 55922
uccugaggaacaaugaggc

SEQ ID NO: 56004 - RNA, 19 nt, Artificial Sequence
  Description of Artificial Sequence: Synthetic oligonucleotide
  Sense strand starting at position 849 of SEQ ID NO: 678
ccucauuguuccucaggaa

SEQ ID NO: 56005 - RNA, 19 nt, Artificial Sequence
  Description of Artificial Sequence: Synthetic oligonucleotide
  Antisense strand to SEQ ID NO: 55924
uuccugaggaacaaugagg

SEQ ID NO: 56006 - RNA, 19 nt, Artificial Sequence
  Description of Artificial Sequence: Synthetic oligonucleotide
  Sense strand starting at position 850 of SEQ ID NO: 678
cucauuguuccucaggaaa

SEQ ID NO: 56007 - RNA, 19 nt, Artificial Sequence
  Description of Artificial Sequence: Synthetic oligonucleotide
  Antisense strand to SEQ ID NO: 55926
uuuccugaggaacaaugag

SEQ ID NO: 56008 - RNA, 19 nt, Artificial Sequence
  Description of Artificial Sequence: Synthetic oligonucleotide
  Sense strand starting at position 971 of SEQ ID NO: 678
ugggaagagucacucaauc

SEQ ID NO: 56009 - RNA, 19 nt, Artificial Sequence
  Description of Artificial Sequence: Synthetic oligonucleotide
  Antisense strand to SEQ ID NO: 55928
gauugagugacucuuccca

SEQ ID NO: 56010 - RNA, 19 nt, Artificial Sequence
  Description of Artificial Sequence: Synthetic oligonucleotide
  Sense strand starting at position 1005 of SEQ ID NO: 678
ggacuccugagguaguuau

SEQ ID NO: 56011 - RNA, 19 nt, Artificial Sequence
  Description of Artificial Sequence: Synthetic oligonucleotide
  Antisense strand to SEQ ID NO: 55930
auaacuaccucaggagucc

SEQ ID NO: 56012 - RNA, 19 nt, Artificial Sequence
  Description of Artificial Sequence: Synthetic oligonucleotide
  Sense strand starting at position 1012 of SEQ ID NO: 678
ugagguaguuauuccauaa

SEQ ID NO: 56013 - RNA, 19 nt, Artificial Sequence
  Description of Artificial Sequence: Synthetic oligonucleotide
  Antisense strand to SEQ ID NO: 55932
uuauggaauaacuaccuca

SEQ ID NO: 56014 - RNA, 19 nt, Artificial Sequence
  Description of Artificial Sequence: Synthetic oligonucleotide
  Sense strand starting at position 1222 of SEQ ID NO: 678
uucgaagaccguuaaagga

SEQ ID NO: 56015 - RNA, 19 nt, Artificial Sequence
  Description of Artificial Sequence: Synthetic oligonucleotide
  Antisense strand to SEQ ID NO: 55934
uccuuuaacggucuucgaa

SEQ ID NO: 56016 - RNA, 19 nt, Artificial Sequence
  Description of Artificial Sequence: Synthetic oligonucleotide
  Sense strand starting at position 1335 of SEQ ID NO: 678
uggguagaugaguguggaa

SEQ ID NO: 56017 - RNA, 19 nt, Artificial Sequence
  Description of Artificial Sequence: Synthetic oligonucleotide
  Antisense strand to SEQ ID NO: 55936
uuccacacucaucuaccca

SEQ ID NO: 56018 - RNA, 19 nt, Artificial Sequence
  Description of Artificial Sequence: Synthetic oligonucleotide
  Sense strand starting at position 1496 of SEQ ID NO: 678
agcugugagaguggugaaa

SEQ ID NO: 56019 - RNA, 19 nt, Artificial Sequence
  Description of Artificial Sequence: Synthetic oligonucleotide
  Antisense strand to SEQ ID NO: 55938
uuucaccacucucacagcu

SEQ ID NO: 56020 - RNA, 19 nt, Artificial Sequence
  Description of Artificial Sequence: Synthetic oligonucleotide
  Sense strand starting at position 1538 of SEQ ID NO: 678
agauaauucgcagaacgau

SEQ ID NO: 56021 - RNA, 19 nt, Artificial Sequence
  Description of Artificial Sequence: Synthetic oligonucleotide
  Antisense strand to SEQ ID NO: 55940
aucguucugcgaauuaucu

SEQ ID NO: 56022 - RNA, 19 nt, Artificial Sequence
  Description of Artificial Sequence: Synthetic oligonucleotide
  Sense strand starting at position 1541 of SEQ ID NO: 678
uaauucgcagaacgauaua

SEQ ID NO: 56023 - RNA, 19 nt, Artificial Sequence
  Description of Artificial Sequence: Synthetic oligonucleotide
  Antisense strand to SEQ ID NO: 55942
uauaucguucugcgaauua

SEQ ID NO: 56024 - RNA, 19 nt, Artificial Sequence
  Description of Artificial Sequence: Synthetic oligonucleotide
  Sense strand starting at position 1637 of SEQ ID NO: 678
ccgauuccucccgaaacuc

SEQ ID NO: 56025 - RNA, 19 nt, Artificial Sequence
  Description of Artificial Sequence: Synthetic oligonucleotide
  Antisense strand to SEQ ID NO: 55944
gaguuucgggaggaaucgg

SEQ ID NO: 56026 - RNA, 19 nt, Artificial Sequence
  Description of Artificial Sequence: Synthetic oligonucleotide
  Sense strand starting at position 1646 of SEQ ID NO: 678
cccgaaacucugggaacuu

SEQ ID NO: 56027 - RNA, 19 nt, Artificial Sequence
  Description of Artificial Sequence: Synthetic oligonucleotide
  Antisense strand to SEQ ID NO: 55946
aaguucccagaguuucggg

SEQ ID NO: 56028 - RNA, 19 nt, Artificial Sequence
  Description of Artificial Sequence: Synthetic oligonucleotide
  Sense strand starting at position 1886 of SEQ ID NO: 678
uuccgauugguguaaggaa

SEQ ID NO: 56029 - RNA, 19 nt, Artificial Sequence
  Description of Artificial Sequence: Synthetic oligonucleotide
  Antisense strand to SEQ ID NO: 55948
uuccuuacaccaaucggaa

SEQ ID NO: 56030 - RNA, 19 nt, Artificial Sequence
  Description of Artificial Sequence: Synthetic oligonucleotide
  Sense strand starting at position 2167 of SEQ ID NO: 678
agucguggugugggauuua

SEQ ID NO: 56031 - RNA, 19 nt, Artificial Sequence
  Description of Artificial Sequence: Synthetic oligonucleotide
  Antisense strand to SEQ ID NO: 55950
uaaaucccacaccacgacu

SEQ ID NO: 56032 - RNA, 19 nt, Artificial Sequence
  Description of Artificial Sequence: Synthetic oligonucleotide
  Sense strand starting at position 2256 of SEQ ID NO: 678
uuugguccugcagaaacuu

SEQ ID NO: 56033 - RNA, 19 nt, Artificial Sequence
  Description of Artificial Sequence: Synthetic oligonucleotide
  Antisense strand to SEQ ID NO: 55952
aaguuucugcaggaccaaa

SEQ ID NO: 56034 - RNA, 19 nt, Artificial Sequence
  Description of Artificial Sequence: Synthetic oligonucleotide
  Sense strand starting at position 2345 of SEQ ID NO: 678
auggaauguuacuuuggca

SEQ ID NO: 56035 - RNA, 19 nt, Artificial Sequence
  Description of Artificial Sequence: Synthetic oligonucleotide
  Antisense strand to SEQ ID NO: 55954
ugccaaaguaacauuccau

SEQ ID NO: 56036 - RNA, 19 nt, Artificial Sequence
  Description of Artificial Sequence: Synthetic oligonucleotide
  Sense strand starting at position 2397 of SEQ ID NO: 678
ggcuuugagagaugagcua

SEQ ID NO: 56037 - RNA, 19 nt, Artificial Sequence
  Description of Artificial Sequence: Synthetic oligonucleotide
  Antisense strand to SEQ ID NO: 55956
uagcucaucucucaaagcc

SEQ ID NO: 56038 - RNA, 19 nt, Artificial Sequence
  Description of Artificial Sequence: Synthetic oligonucleotide
  Sense strand starting at position 2666 of SEQ ID NO: 678
gcagaauuacguuaucuca

SEQ ID NO: 56039 - RNA, 19 nt, Artificial Sequence
  Description of Artificial Sequence: Synthetic oligonucleotide
  Antisense strand to SEQ ID NO: 55958
ugagauaacguaauucugc

SEQ ID NO: 56040 - RNA, 19 nt, Artificial Sequence
  Description of Artificial Sequence: Synthetic oligonucleotide
  Sense strand starting at position 2668 of SEQ ID NO: 678
agaauuacguuaucucaag

SEQ ID NO: 56041 - RNA, 19 nt, Artificial Sequence
  Description of Artificial Sequence: Synthetic oligonucleotide
  Antisense strand to SEQ ID NO: 55960
cuugagauaacguaauucu

SEQ ID NO: 56042 - RNA, 19 nt, Artificial Sequence
  Description of Artificial Sequence: Synthetic oligonucleotide
  Sense strand starting at position 2669 of SEQ ID NO: 678
gaauuacguuaucucaaga

SEQ ID NO: 56043 - RNA, 19 nt, Artificial Sequence
  Description of Artificial Sequence: Synthetic oligonucleotide
  Antisense strand to SEQ ID NO: 55962
ucuugagauaacguaauuc

SEQ ID NO: 56044 - RNA, 19 nt, Artificial Sequence
  Description of Artificial Sequence: Synthetic oligonucleotide
  Sense strand starting at position 2736 of SEQ ID NO: 678
agcugaacaugcucuagaa

SEQ ID NO: 56045 - RNA, 19 nt, Artificial Sequence
  Description of Artificial Sequence: Synthetic oligonucleotide
  Antisense strand to SEQ ID NO: 55964
uucuagagcauguucagcu

SEQ ID NO: 56046 - RNA, 19 nt, Artificial Sequence
  Description of Artificial Sequence: Synthetic oligonucleotide
  Sense strand starting at position 2750 of SEQ ID NO: 678
uagaaacaucucuggguga

SEQ ID NO: 56047 - RNA, 19 nt, Artificial Sequence
  Description of Artificial Sequence: Synthetic oligonucleotide
  Antisense strand to SEQ ID NO: 55966
ucacccagagauguuucua

SEQ ID NO: 56048 - RNA, 19 nt, Artificial Sequence
  Description of Artificial Sequence: Synthetic oligonucleotide
  Sense strand starting at position 2752 of SEQ ID NO: 678
gaaacaucucugggugacu

SEQ ID NO: 56049 - RNA, 19 nt, Artificial Sequence
  Description of Artificial Sequence: Synthetic oligonucleotide
  Antisense strand to SEQ ID NO: 55968
agucacccagagauguuuc

SEQ ID NO: 56050 - RNA, 19 nt, Artificial Sequence
  Description of Artificial Sequence: Synthetic oligonucleotide
  Sense strand starting at position 2769 of SEQ ID NO: 678
cuggauauguccuuuacac

SEQ ID NO: 56051 - RNA, 19 nt, Artificial Sequence
  Description of Artificial Sequence: Synthetic oligonucleotide
  Antisense strand to SEQ ID NO: 55970
guguaaaggacauauccag

SEQ ID NO: 56052 - RNA, 19 nt, Artificial Sequence
  Description of Artificial Sequence: Synthetic oligonucleotide
  Sense strand starting at position 2771 of SEQ ID NO: 678
ggauauguccuuuacacau

SEQ ID NO: 56053 - RNA, 19 nt, Artificial Sequence
  Description of Artificial Sequence: Synthetic oligonucleotide
  Antisense strand to SEQ ID NO: 55972
auguguaaaggacauaucc

SEQ ID NO: 56054 - RNA, 19 nt, Artificial Sequence
  Description of Artificial Sequence: Synthetic oligonucleotide
  Sense strand starting at position 2799 of SEQ ID NO: 678
gugaacaggucccuacauu

SEQ ID NO: 56055 - RNA, 19 nt, Artificial Sequence
  Description of Artificial Sequence: Synthetic oligonucleotide
  Antisense strand to SEQ ID NO: 55974
aauguagggaccuguucac

SEQ ID NO: 56056 - RNA, 19 nt, Artificial Sequence
  Description of Artificial Sequence: Synthetic oligonucleotide
  Sense strand starting at position 2834 of SEQ ID NO: 678
ucucacugugacuaauagu

SEQ ID NO: 56057 - RNA, 19 nt, Artificial Sequence
  Description of Artificial Sequence: Synthetic oligonucleotide
  Antisense strand to SEQ ID NO: 55976
acuauuagucacagugaga

SEQ ID NO: 56058 - RNA, 19 nt, Artificial Sequence
  Description of Artificial Sequence: Synthetic oligonucleotide
  Sense strand starting at position 2877 of SEQ ID NO: 678
uucuauagacaauguugau

SEQ ID NO: 56059 - RNA, 19 nt, Artificial Sequence
  Description of Artificial Sequence: Synthetic oligonucleotide
  Antisense strand to SEQ ID NO: 55978
aucaacauugucuauagaa

SEQ ID NO: 56060 - RNA, 19 nt, Artificial Sequence
  Description of Artificial Sequence: Synthetic oligonucleotide
  Sense strand starting at position 3089 of SEQ ID NO: 678
gaaugauauuguuugacau

SEQ ID NO: 56061 - RNA, 19 nt, Artificial Sequence
  Description of Artificial Sequence: Synthetic oligonucleotide
  Antisense strand to SEQ ID NO: 55980
augucaaacaauaucauuc

SEQ ID NO: 56062 - RNA, 19 nt, Artificial Sequence
  Description of Artificial Sequence: Synthetic oligonucleotide
  Sense strand starting at position 3144 of SEQ ID NO: 678
ccaucucuuuggccaaagu

SEQ ID NO: 56063 - RNA, 19 nt, Artificial Sequence
  Description of Artificial Sequence: Synthetic oligonucleotide
  Antisense strand to SEQ ID NO: 55982
acuuuggccaaagagaugg

SEQ ID NO: 56064 - RNA, 19 nt, Artificial Sequence
  Description of Artificial Sequence: Synthetic oligonucleotide
  Sense strand starting at position 3660 of SEQ ID NO: 678
aagacucugugucuaagaa

SEQ ID NO: 56065 - RNA, 19 nt, Artificial Sequence
  Description of Artificial Sequence: Synthetic oligonucleotide
  Antisense strand to SEQ ID NO: 55984
uucuuagacacagagucuu

SEQ ID NO: 56066 - RNA, 19 nt, Artificial Sequence
  Description of Artificial Sequence: Synthetic oligonucleotide
  Sense strand starting at position 20 of SEQ ID NO: 679
gcacauuauuuguuaaggu

SEQ ID NO: 56067 - RNA, 19 nt, Artificial Sequence
  Description of Artificial Sequence: Synthetic oligonucleotide
  Antisense strand to SEQ ID NO: 55986
accuuaacaaauaaugugc

SEQ ID NO: 56068 - RNA, 19 nt, Artificial Sequence
  Description of Artificial Sequence: Synthetic oligonucleotide
  Sense strand starting at position 40 of SEQ ID NO: 679
gcuggaaugccuuggagaa

SEQ ID NO: 56069 - RNA, 19 nt, Artificial Sequence
  Description of Artificial Sequence: Synthetic oligonucleotide
  Antisense strand to SEQ ID NO: 55988
uucuccaaggcauuccagc

SEQ ID NO: 56070 - RNA, 19 nt, Artificial Sequence
  Description of Artificial Sequence: Synthetic oligonucleotide
  Sense strand starting at position 41 of SEQ ID NO: 679
cuggaaugccuuggagaau

SEQ ID NO: 56071 - RNA, 19 nt, Artificial Sequence
  Description of Artificial Sequence: Synthetic oligonucleotide
  Antisense strand to SEQ ID NO: 55990
auucuccaaggcauuccag

SEQ ID NO: 56072 - RNA, 19 nt, Artificial Sequence
  Description of Artificial Sequence: Synthetic oligonucleotide
  Sense strand starting at position 125 of SEQ ID NO: 679
aucacagaugucugaacau

SEQ ID NO: 56073 - RNA, 19 nt, Artificial Sequence
  Description of Artificial Sequence: Synthetic oligonucleotide
  Antisense strand to SEQ ID NO: 55992
auguucagacaucugugau

SEQ ID NO: 56074 - RNA, 19 nt, Artificial Sequence
  Description of Artificial Sequence: Synthetic oligonucleotide
  Sense strand starting at position 258 of SEQ ID NO: 679
gacaauaugagguguuggu

SEQ ID NO: 56075 - RNA, 19 nt, Artificial Sequence
  Description of Artificial Sequence: Synthetic oligonucleotide
  Antisense strand to SEQ ID NO: 55994
accaacaccucauauuguc

SEQ ID NO: 56076 - RNA, 19 nt, Artificial Sequence
  Description of Artificial Sequence: Synthetic oligonucleotide
  Sense strand starting at position 262 of SEQ ID NO: 679
auaugagguguuggugaga

SEQ ID NO: 56077 - RNA, 19 nt, Artificial Sequence
  Description of Artificial Sequence: Synthetic oligonucleotide
  Antisense strand to SEQ ID NO: 55996
ucucaccaacaccucauau

SEQ ID NO: 56078 - RNA, 19 nt, Artificial Sequence
  Description of Artificial Sequence: Synthetic oligonucleotide
  Sense strand starting at position 265 of SEQ ID NO: 679
ugagguguuggugagaaug

SEQ ID NO: 56079 - RNA, 19 nt, Artificial Sequence
  Description of Artificial Sequence: Synthetic oligonucleotide
  Antisense strand to SEQ ID NO: 55998
cauucucaccaacaccuca

SEQ ID NO: 56080 - RNA, 19 nt, Artificial Sequence
  Description of Artificial Sequence: Synthetic oligonucleotide
  Sense strand starting at position 388 of SEQ ID NO: 679
caauaaugcuaucugugag

SEQ ID NO: 56081 - RNA, 19 nt, Artificial Sequence
  Description of Artificial Sequence: Synthetic oligonucleotide
  Antisense strand to SEQ ID NO: 56000
cucacagauagcauuauug

SEQ ID NO: 56082 - RNA, 19 nt, Artificial Sequence
  Description of Artificial Sequence: Synthetic oligonucleotide
  Sense strand starting at position 434 of SEQ ID NO: 679
gaaagauaaguugguuaua

SEQ ID NO: 56083 - RNA, 19 nt, Artificial Sequence
  Description of Artificial Sequence: Synthetic oligonucleotide
  Antisense strand to SEQ ID NO: 56002
uauaaccaacuuaucuuuc

SEQ ID NO: 56084 - RNA, 19 nt, Artificial Sequence
  Description of Artificial Sequence: Synthetic oligonucleotide
  Sense strand starting at position 466 of SEQ ID NO: 679
uccagagcuauuugugguu

SEQ ID NO: 56085 - RNA, 19 nt, Artificial Sequence
  Description of Artificial Sequence: Synthetic oligonucleotide
  Antisense strand to SEQ ID NO: 56004
aaccacaaauagcucugga

SEQ ID NO: 56086 - RNA, 19 nt, Artificial Sequence
  Description of Artificial Sequence: Synthetic oligonucleotide
  Sense strand starting at position 481 of SEQ ID NO: 679
gguugagagagcuagagua

SEQ ID NO: 56087 - RNA, 19 nt, Artificial Sequence
  Description of Artificial Sequence: Synthetic oligonucleotide
  Antisense strand to SEQ ID NO: 56006
uacucuagcucucucaacc

SEQ ID NO: 56088 - RNA, 19 nt, Artificial Sequence
  Description of Artificial Sequence: Synthetic oligonucleotide
  Sense strand starting at position 568 of SEQ ID NO: 679
guguaaguaaagcaagagu

SEQ ID NO: 56089 - RNA, 19 nt, Artificial Sequence
  Description of Artificial Sequence: Synthetic oligonucleotide
  Antisense strand to SEQ ID NO: 56008
acucuugcuuuacuuacac

SEQ ID NO: 56090 - RNA, 19 nt, Artificial Sequence
  Description of Artificial Sequence: Synthetic oligonucleotide
  Sense strand starting at position 600 of SEQ ID NO: 679
ggccaauaauacuugcaua

SEQ ID NO: 56091 - RNA, 19 nt, Artificial Sequence
  Description of Artificial Sequence: Synthetic oligonucleotide
  Antisense strand to SEQ ID NO: 56010
uaugcaaguauuauuggcc

SEQ ID NO: 56092 - RNA, 19 nt, Artificial Sequence
  Description of Artificial Sequence: Synthetic oligonucleotide
  Sense strand starting at position 610 of SEQ ID NO: 679
acuugcauaccaugaaaug

SEQ ID NO: 56093 - RNA, 19 nt, Artificial Sequence
  Description of Artificial Sequence: Synthetic oligonucleotide
  Antisense strand to SEQ ID NO: 56012
cauuucaugguaugcaagu

SEQ ID NO: 56094 - RNA, 19 nt, Artificial Sequence
  Description of Artificial Sequence: Synthetic oligonucleotide
  Sense strand starting at position 799 of SEQ ID NO: 679
gucuuuaugguauagauaa

SEQ ID NO: 56095 - RNA, 19 nt, Artificial Sequence
  Description of Artificial Sequence: Synthetic oligonucleotide
  Antisense strand to SEQ ID NO: 56014
uuaucuauaccauaaagac

SEQ ID NO: 56096 - RNA, 19 nt, Artificial Sequence
  Description of Artificial Sequence: Synthetic oligonucleotide
  Sense strand starting at position 824 of SEQ ID NO: 679
auuauaucugcugguauuu

SEQ ID NO: 56097 - RNA, 19 nt, Artificial Sequence
  Description of Artificial Sequence: Synthetic oligonucleotide
  Antisense strand to SEQ ID NO: 56016
aaauaccagcagauauaau

SEQ ID NO: 56098 - RNA, 19 nt, Artificial Sequence
  Description of Artificial Sequence: Synthetic oligonucleotide
  Sense strand starting at position 1135 of SEQ ID NO: 679
auccuauggccugauaaua

SEQ ID NO: 56099 - RNA, 19 nt, Artificial Sequence
  Description of Artificial Sequence: Synthetic oligonucleotide
  Antisense strand to SEQ ID NO: 56018
uauuaucaggccauaggau

SEQ ID NO: 56100 - RNA, 19 nt, Artificial Sequence
  Description of Artificial Sequence: Synthetic oligonucleotide
  Sense strand starting at position 1154 of SEQ ID NO: 679
uugauaauguuccugaaca

SEQ ID NO: 56101 - RNA, 19 nt, Artificial Sequence
  Description of Artificial Sequence: Synthetic oligonucleotide
  Antisense strand to SEQ ID NO: 56020
uguucaggaacauuaucaa

SEQ ID NO: 56102 - RNA, 19 nt, Artificial Sequence
  Description of Artificial Sequence: Synthetic oligonucleotide
  Sense strand starting at position 1224 of SEQ ID NO: 679
ugggcaaucugacuauaaa

SEQ ID NO: 56103 - RNA, 19 nt, Artificial Sequence
  Description of Artificial Sequence: Synthetic oligonucleotide
  Antisense strand to SEQ ID NO: 56022
uuuauagucagauugccca

SEQ ID NO: 56104 - RNA, 19 nt, Artificial Sequence
  Description of Artificial Sequence: Synthetic oligonucleotide
  Sense strand starting at position 1227 of SEQ ID NO: 679
gcaaucugacuauaaagcu

SEQ ID NO: 56105 - RNA, 19 nt, Artificial Sequence
  Description of Artificial Sequence: Synthetic oligonucleotide
  Antisense strand to SEQ ID NO: 56024
agcuuuauagucagauugc

SEQ ID NO: 56106 - RNA, 19 nt, Artificial Sequence
  Description of Artificial Sequence: Synthetic oligonucleotide
  Sense strand starting at position 1295 of SEQ ID NO: 679
acauguguuguccaaacag

SEQ ID NO: 56107 - RNA, 19 nt, Artificial Sequence
  Description of Artificial Sequence: Synthetic oligonucleotide
  Antisense strand to SEQ ID NO: 56026
cuguuuggacaacacaugu

SEQ ID NO: 56108 - RNA, 19 nt, Artificial Sequence
  Description of Artificial Sequence: Synthetic oligonucleotide
  Sense strand starting at position 1584 of SEQ ID NO: 679
gugacuucgaaauggacau

SEQ ID NO: 56109 - RNA, 19 nt, Artificial Sequence
  Description of Artificial Sequence: Synthetic oligonucleotide
  Antisense strand to SEQ ID NO: 56028
auguccauuucgaagucac

SEQ ID NO: 56110 - RNA, 19 nt, Artificial Sequence
  Description of Artificial Sequence: Synthetic oligonucleotide
  Sense strand starting at position 1585 of SEQ ID NO: 679
ugacuucgaaauggacaua

SEQ ID NO: 56111 - RNA, 19 nt, Artificial Sequence
  Description of Artificial Sequence: Synthetic oligonucleotide
  Antisense strand to SEQ ID NO: 56030
uauguccauuucgaaguca

SEQ ID NO: 56112 - RNA, 19 nt, Artificial Sequence
  Description of Artificial Sequence: Synthetic oligonucleotide
  Sense strand starting at position 1590 of SEQ ID NO: 679
ucgaaauggacauauuguu

SEQ ID NO: 56113 - RNA, 19 nt, Artificial Sequence
  Description of Artificial Sequence: Synthetic oligonucleotide
  Antisense strand to SEQ ID NO: 56032
aacaauauguccauuucga

SEQ ID NO: 56114 - RNA, 19 nt, Artificial Sequence
  Description of Artificial Sequence: Synthetic oligonucleotide
  Sense strand starting at position 1889 of SEQ ID NO: 679
uuaccuucugcauagaguu

SEQ ID NO: 56115 - RNA, 19 nt, Artificial Sequence
  Description of Artificial Sequence: Synthetic oligonucleotide
  Antisense strand to SEQ ID NO: 56034
aacucuaugcagaagguaa

SEQ ID NO: 56116 - RNA, 19 nt, Artificial Sequence
  Description of Artificial Sequence: Synthetic oligonucleotide
  Sense strand starting at position 2001 of SEQ ID NO: 679
aggaacuugucauuaagua

SEQ ID NO: 56117 - RNA, 19 nt, Artificial Sequence
  Description of Artificial Sequence: Synthetic oligonucleotide
  Antisense strand to SEQ ID NO: 56036
uacuuaaugacaaguuccu

SEQ ID NO: 56118 - RNA, 19 nt, Artificial Sequence
  Description of Artificial Sequence: Synthetic oligonucleotide
  Sense strand starting at position 2002 of SEQ ID NO: 679
ggaacuugucauuaaguac

SEQ ID NO: 56119 - RNA, 19 nt, Artificial Sequence
  Description of Artificial Sequence: Synthetic oligonucleotide
  Antisense strand to SEQ ID NO: 56038
guacuuaaugacaaguucc

SEQ ID NO: 56120 - RNA, 19 nt, Artificial Sequence
  Description of Artificial Sequence: Synthetic oligonucleotide
  Sense strand starting at position 2005 of SEQ ID NO: 679
acuugucauuaaguacaca

SEQ ID NO: 56121 - RNA, 19 nt, Artificial Sequence
  Description of Artificial Sequence: Synthetic oligonucleotide
  Antisense strand to SEQ ID NO: 56040
uguguacuuaaugacaagu

SEQ ID NO: 56122 - RNA, 19 nt, Artificial Sequence
  Description of Artificial Sequence: Synthetic oligonucleotide
  Sense strand starting at position 2168 of SEQ ID NO: 679
ccaguaagagcaugauaac

SEQ ID NO: 56123 - RNA, 19 nt, Artificial Sequence
  Description of Artificial Sequence: Synthetic oligonucleotide
  Antisense strand to SEQ ID NO: 56042
guuaucaugcucuuacugg

SEQ ID NO: 56124 - RNA, 19 nt, Artificial Sequence
  Description of Artificial Sequence: Synthetic oligonucleotide
  Sense strand starting at position 2306 of SEQ ID NO: 679
ggccauagaucuuuacuaa

SEQ ID NO: 56125 - RNA, 19 nt, Artificial Sequence
  Description of Artificial Sequence: Synthetic oligonucleotide
  Antisense strand to SEQ ID NO: 56044
uuaguaaagaucuauggcc

SEQ ID NO: 56126 - RNA, 19 nt, Artificial Sequence
  Description of Artificial Sequence: Synthetic oligonucleotide
  Sense strand starting at position 2554 of SEQ ID NO: 679
uuagaacguccaugauaau

SEQ ID NO: 56127 - RNA, 19 nt, Artificial Sequence
  Description of Artificial Sequence: Synthetic oligonucleotide
  Antisense strand to SEQ ID NO: 56046
auuaucauggacguucuaa

SEQ ID NO: 56128 - RNA, 19 nt, Artificial Sequence
  Description of Artificial Sequence: Synthetic oligonucleotide
  Sense strand starting at position 2776 of SEQ ID NO: 679
caagaacugcugcaaggau

SEQ ID NO: 56129 - RNA, 19 nt, Artificial Sequence
  Description of Artificial Sequence: Synthetic oligonucleotide
  Antisense strand to SEQ ID NO: 56048
auccuugcagcaguucuug

SEQ ID NO: 56130 - RNA, 19 nt, Artificial Sequence
  Description of Artificial Sequence: Synthetic oligonucleotide
  Sense strand starting at position 3365 of SEQ ID NO: 679
gagauuugcuuguuggguu

SEQ ID NO: 56131 - RNA, 19 nt, Artificial Sequence
  Description of Artificial Sequence: Synthetic oligonucleotide
  Antisense strand to SEQ ID NO: 56050
aacccaacaagcaaaucuc

SEQ ID NO: 56132 - RNA, 19 nt, Artificial Sequence
  Description of Artificial Sequence: Synthetic oligonucleotide
  Sense strand starting at position 3485 of SEQ ID NO: 679
cuccauuaaccugggaauc

SEQ ID NO: 56133 - RNA, 19 nt, Artificial Sequence
  Description of Artificial Sequence: Synthetic oligonucleotide
  Antisense strand to SEQ ID NO: 56052
gauucccagguuaauggag

SEQ ID NO: 56134 - RNA, 19 nt, Artificial Sequence
  Description of Artificial Sequence: Synthetic oligonucleotide
  Sense strand starting at position 3486 of SEQ ID NO: 679
uccauuaaccugggaauca

SEQ ID NO: 56135 - RNA, 19 nt, Artificial Sequence
  Description of Artificial Sequence: Synthetic oligonucleotide
  Antisense strand to SEQ ID NO: 56054
ugauucccagguuaaugga

SEQ ID NO: 56136 - RNA, 19 nt, Artificial Sequence
  Description of Artificial Sequence: Synthetic oligonucleotide
  Sense strand starting at position 3544 of SEQ ID NO: 679
agaagacucugagcucaga

SEQ ID NO: 56137 - RNA, 19 nt, Artificial Sequence
  Description of Artificial Sequence: Synthetic oligonucleotide
  Antisense strand to SEQ ID NO: 56056
ucugagcucagagucuucu

SEQ ID NO: 56138 - RNA, 19 nt, Artificial Sequence
  Description of Artificial Sequence: Synthetic oligonucleotide
  Sense strand starting at position 3624 of SEQ ID NO: 679
aggucauauucucuuggaa

SEQ ID NO: 56139 - RNA, 19 nt, Artificial Sequence
  Description of Artificial Sequence: Synthetic oligonucleotide
  Antisense strand to SEQ ID NO: 56058
uuccaagagaauaugaccu

SEQ ID NO: 56140 - RNA, 19 nt, Artificial Sequence
  Description of Artificial Sequence: Synthetic oligonucleotide
  Sense strand starting at position 3627 of SEQ ID NO: 679
ucauauucucuuggaaguu

SEQ ID NO: 56141 - RNA, 19 nt, Artificial Sequence
  Description of Artificial Sequence: Synthetic oligonucleotide
  Antisense strand to SEQ ID NO: 56060
aacuuccaagagaauauga

SEQ ID NO: 56142 - RNA, 19 nt, Artificial Sequence
  Description of Artificial Sequence: Synthetic oligonucleotide
  Sense strand starting at position 3690 of SEQ ID NO: 679
ugaugcucucaugaaagca

SEQ ID NO: 56143 - RNA, 19 nt, Artificial Sequence
  Description of Artificial Sequence: Synthetic oligonucleotide
  Antisense strand to SEQ ID NO: 56062
ugcuuucaugagagcauca

SEQ ID NO: 56144 - RNA, 19 nt, Artificial Sequence
  Description of Artificial Sequence: Synthetic oligonucleotide
  Sense strand starting at position 3729 of SEQ ID NO: 679
uggaauugguuccuuccaa

SEQ ID NO: 56145 - RNA, 19 nt, Artificial Sequence
  Description of Artificial Sequence: Synthetic oligonucleotide
  Antisense strand to SEQ ID NO: 56064
uuggaaggaaccaauucca

SEQ ID NO: 56146 - RNA, 19 nt, Artificial Sequence
  Description of Artificial Sequence: Synthetic oligonucleotide
  Sense strand starting at position 56 of SEQ ID NO: 680
agacaucaauguuuagaug

SEQ ID NO: 56147 - RNA, 19 nt, Artificial Sequence
  Description of Artificial Sequence: Synthetic oligonucleotide
  Antisense strand to SEQ ID NO: 56066
caucuaaacauugaugucu

SEQ ID NO: 56148 - RNA, 19 nt, Artificial Sequence
  Description of Artificial Sequence: Synthetic oligonucleotide
  Sense strand starting at position 112 of SEQ ID NO: 680
gugccuacucaagaugguu

SEQ ID NO: 56149 - RNA, 19 nt, Artificial Sequence
  Description of Artificial Sequence: Synthetic oligonucleotide
  Antisense strand to SEQ ID NO: 56068
aaccaucuugaguaggcac

SEQ ID NO: 56150 - RNA, 19 nt, Artificial Sequence
  Description of Artificial Sequence: Synthetic oligonucleotide
  Sense strand starting at position 203 of SEQ ID NO: 680
guucuaucaguuuaagguc

SEQ ID NO: 56151 - RNA, 19 nt, Artificial Sequence
  Description of Artificial Sequence: Synthetic oligonucleotide
  Antisense strand to SEQ ID NO: 56070
gaccuuaaacugauagaac

SEQ ID NO: 56152 - RNA, 19 nt, Artificial Sequence
  Description of Artificial Sequence: Synthetic oligonucleotide
  Sense strand starting at position 210 of SEQ ID NO: 680
caguuuaaggucuggaaau

SEQ ID NO: 56153 - RNA, 19 nt, Artificial Sequence
  Description of Artificial Sequence: Synthetic oligonucleotide
  Antisense strand to SEQ ID NO: 56072
auuuccagaccuuaaacug

SEQ ID NO: 56154 - RNA, 19 nt, Artificial Sequence
  Description of Artificial Sequence: Synthetic oligonucleotide
  Sense strand starting at position 212 of SEQ ID NO: 680
guuuaaggucuggaaaugu

SEQ ID NO: 56155 - RNA, 19 nt, Artificial Sequence
  Description of Artificial Sequence: Synthetic oligonucleotide
  Antisense strand to SEQ ID NO: 56074
acauuuccagaccuuaaac

SEQ ID NO: 56156 - RNA, 19 nt, Artificial Sequence
  Description of Artificial Sequence: Synthetic oligonucleotide
  Sense strand starting at position 223 of SEQ ID NO: 680
ggaaauguugcaggccuaa

SEQ ID NO: 56157 - RNA, 19 nt, Artificial Sequence
  Description of Artificial Sequence: Synthetic oligonucleotide
  Antisense strand to SEQ ID NO: 56076
uuaggccugcaacauuucc

SEQ ID NO: 56158 - RNA, 19 nt, Artificial Sequence
  Description of Artificial Sequence: Synthetic oligonucleotide
  Sense strand starting at position 313 of SEQ ID NO: 680
aguaaucagcuuuaaagac

SEQ ID NO: 56159 - RNA, 19 nt, Artificial Sequence
  Description of Artificial Sequence: Synthetic oligonucleotide
  Antisense strand to SEQ ID NO: 56078
gucuuuaaagcugauuacu

SEQ ID NO: 56160 - RNA, 19 nt, Artificial Sequence
  Description of Artificial Sequence: Synthetic oligonucleotide
  Sense strand starting at position 552 of SEQ ID NO: 680
agagcacucgaauguauug

SEQ ID NO: 56161 - RNA, 19 nt, Artificial Sequence
  Description of Artificial Sequence: Synthetic oligonucleotide
  Antisense strand to SEQ ID NO: 56080
caauacauucgagugcucu

SEQ ID NO: 56162 - RNA, 19 nt, Artificial Sequence
  Description of Artificial Sequence: Synthetic oligonucleotide
  Sense strand starting at position 558 of SEQ ID NO: 680
cucgaauguauugauguau

SEQ ID NO: 56163 - RNA, 19 nt, Artificial Sequence
  Description of Artificial Sequence: Synthetic oligonucleotide
  Antisense strand to SEQ ID NO: 56082
auacaucaauacauucgag

SEQ ID NO: 56164 - RNA, 19 nt, Artificial Sequence
  Description of Artificial Sequence: Synthetic oligonucleotide
  Sense strand starting at position 783 of SEQ ID NO: 680
guuauaacuugaccgggaa

SEQ ID NO: 56165 - RNA, 19 nt, Artificial Sequence
  Description of Artificial Sequence: Synthetic oligonucleotide
  Antisense strand to SEQ ID NO: 56084
uucccggucaaguuauaac

SEQ ID NO: 56166 - RNA, 19 nt, Artificial Sequence
  Description of Artificial Sequence: Synthetic oligonucleotide
  Sense strand starting at position 895 of SEQ ID NO: 680
agauaaaucccacacgugu

SEQ ID NO: 56167 - RNA, 19 nt, Artificial Sequence
  Description of Artificial Sequence: Synthetic oligonucleotide
  Antisense strand to SEQ ID NO: 56086
acacgugugggauuuaucu

SEQ ID NO: 56168 - RNA, 19 nt, Artificial Sequence
  Description of Artificial Sequence: Synthetic oligonucleotide
  Sense strand starting at position 974 of SEQ ID NO: 680
cugaaaugucgcuacacug

SEQ ID NO: 56169 - RNA, 19 nt, Artificial Sequence
  Description of Artificial Sequence: Synthetic oligonucleotide
  Antisense strand to SEQ ID NO: 56088
caguguagcgacauuucag

SEQ ID NO: 56170 - RNA, 19 nt, Artificial Sequence
  Description of Artificial Sequence: Synthetic oligonucleotide
  Sense strand starting at position 1040 of SEQ ID NO: 680
gcuguauuggaucaggauu

SEQ ID NO: 56171 - RNA, 19 nt, Artificial Sequence
  Description of Artificial Sequence: Synthetic oligonucleotide
  Antisense strand to SEQ ID NO: 56090
aauccugauccaauacagc

SEQ ID NO: 56172 - RNA, 19 nt, Artificial Sequence
  Description of Artificial Sequence: Synthetic oligonucleotide
  Sense strand starting at position 1053 of SEQ ID NO: 680
aggauuauuucuuaugaag

SEQ ID NO: 56173 - RNA, 19 nt, Artificial Sequence
  Description of Artificial Sequence: Synthetic oligonucleotide
  Antisense strand to SEQ ID NO: 56092
cuucauaagaaauaauccu

SEQ ID NO: 56174 - RNA, 19 nt, Artificial Sequence
  Description of Artificial Sequence: Synthetic oligonucleotide
  Sense strand starting at position 1189 of SEQ ID NO: 680
uuggauugccucuacccaa

SEQ ID NO: 56175 - RNA, 19 nt, Artificial Sequence
  Description of Artificial Sequence: Synthetic oligonucleotide
  Antisense strand to SEQ ID NO: 56094
uuggguagaggcaauccaa

SEQ ID NO: 56176 - RNA, 19 nt, Artificial Sequence
  Description of Artificial Sequence: Synthetic oligonucleotide
  Sense strand starting at position 1237 of SEQ ID NO: 680
cagggacgcucuuuauuaa

SEQ ID NO: 56177 - RNA, 19 nt, Artificial Sequence
  Description of Artificial Sequence: Synthetic oligonucleotide
  Antisense strand to SEQ ID NO: 56096
uuaauaaagagcgucccug

SEQ ID NO: 56178 - RNA, 19 nt, Artificial Sequence
  Description of Artificial Sequence: Synthetic oligonucleotide
  Sense strand starting at position 1374 of SEQ ID NO: 680
gaguuaaagcgggagcuaa

SEQ ID NO: 56179 - RNA, 19 nt, Artificial Sequence
  Description of Artificial Sequence: Synthetic oligonucleotide
  Antisense strand to SEQ ID NO: 56098
uuagcucccgcuuuaacuc

SEQ ID NO: 56180 - RNA, 19 nt, Artificial Sequence
  Description of Artificial Sequence: Synthetic oligonucleotide
  Sense strand starting at position 2067 of SEQ ID NO: 680
gccuccucccgguaggaaa

SEQ ID NO: 56181 - RNA, 19 nt, Artificial Sequence
  Description of Artificial Sequence: Synthetic oligonucleotide
  Antisense strand to SEQ ID NO: 56100
uuuccuaccgggaggaggc

SEQ ID NO: 56182 - RNA, 19 nt, Artificial Sequence
  Description of Artificial Sequence: Synthetic oligonucleotide
  Sense strand starting at position 2375 of SEQ ID NO: 680
gggcauuucccggaugcuu

SEQ ID NO: 56183 - RNA, 19 nt, Artificial Sequence
  Description of Artificial Sequence: Synthetic oligonucleotide
  Antisense strand to SEQ ID NO: 56102
aagcauccgggaaaugccc

SEQ ID NO: 56184 - RNA, 19 nt, Artificial Sequence
  Description of Artificial Sequence: Synthetic oligonucleotide
  Sense strand starting at position 2692 of SEQ ID NO: 680
ggagaauuccagcgugaca

SEQ ID NO: 56185 - RNA, 19 nt, Artificial Sequence
  Description of Artificial Sequence: Synthetic oligonucleotide
  Antisense strand to SEQ ID NO: 56104
ugucacgcuggaauucucc

SEQ ID NO: 56186 - RNA, 19 nt, Artificial Sequence
  Description of Artificial Sequence: Synthetic oligonucleotide
  Sense strand starting at position 2732 of SEQ ID NO: 680
aaaggaugguucccacauu

SEQ ID NO: 56187 - RNA, 19 nt, Artificial Sequence
  Description of Artificial Sequence: Synthetic oligonucleotide
  Antisense strand to SEQ ID NO: 56106
aaugugggaaccauccuuu

SEQ ID NO: 56188 - RNA, 19 nt, Artificial Sequence
  Description of Artificial Sequence: Synthetic oligonucleotide
  Sense strand starting at position 2738 of SEQ ID NO: 680
ugguucccacauugaagaa

SEQ ID NO: 56189 - RNA, 19 nt, Artificial Sequence
  Description of Artificial Sequence: Synthetic oligonucleotide
  Antisense strand to SEQ ID NO: 56108
uucuucaaugugggaacca

SEQ ID NO: 56190 - RNA, 19 nt, Artificial Sequence
  Description of Artificial Sequence: Synthetic oligonucleotide
  Sense strand starting at position 2825 of SEQ ID NO: 680
aguugugugccacuaguuu

SEQ ID NO: 56191 - RNA, 19 nt, Artificial Sequence
  Description of Artificial Sequence: Synthetic oligonucleotide
  Antisense strand to SEQ ID NO: 56110
aaacuaguggcacacaacu

SEQ ID NO: 56192 - RNA, 19 nt, Artificial Sequence
  Description of Artificial Sequence: Synthetic oligonucleotide
  Sense strand starting at position 2992 of SEQ ID NO: 680
cuauauugccugcaagaca

SEQ ID NO: 56193 - RNA, 19 nt, Artificial Sequence
  Description of Artificial Sequence: Synthetic oligonucleotide
  Antisense strand to SEQ ID NO: 56112
ugucuugcaggcaauauag

SEQ ID NO: 56194 - RNA, 19 nt, Artificial Sequence
  Description of Artificial Sequence: Synthetic oligonucleotide
  Sense strand starting at position 3013 of SEQ ID NO: 680
acuggagaauucuuagugu

SEQ ID NO: 56195 - RNA, 19 nt, Artificial Sequence
  Description of Artificial Sequence: Synthetic oligonucleotide
  Antisense strand to SEQ ID NO: 56114
acacuaagaauucuccagu

SEQ ID NO: 56196 - RNA, 19 nt, Artificial Sequence
  Description of Artificial Sequence: Synthetic oligonucleotide
  Sense strand starting at position 3016 of SEQ ID NO: 680
ggagaauucuuaguguaag

SEQ ID NO: 56197 - RNA, 19 nt, Artificial Sequence
  Description of Artificial Sequence: Synthetic oligonucleotide
  Antisense strand to SEQ ID NO: 56116
cuuacacuaagaauucucc

SEQ ID NO: 56198 - RNA, 19 nt, Artificial Sequence
  Description of Artificial Sequence: Synthetic oligonucleotide
  Sense strand starting at position 3111 of SEQ ID NO: 680
acauaucucguuuagcuua

SEQ ID NO: 56199 - RNA, 19 nt, Artificial Sequence
  Description of Artificial Sequence: Synthetic oligonucleotide
  Antisense strand to SEQ ID NO: 56118
uaagcuaaacgagauaugu

SEQ ID NO: 56200 - RNA, 19 nt, Artificial Sequence
  Description of Artificial Sequence: Synthetic oligonucleotide
  Sense strand starting at position 3178 of SEQ ID NO: 680
ccuccuuugccugaacuga

SEQ ID NO: 56201 - RNA, 19 nt, Artificial Sequence
  Description of Artificial Sequence: Synthetic oligonucleotide
  Antisense strand to SEQ ID NO: 56120
ucaguucaggcaaaggagg

SEQ ID NO: 56202 - RNA, 19 nt, Artificial Sequence
  Description of Artificial Sequence: Synthetic oligonucleotide
  Sense strand starting at position 3245 of SEQ ID NO: 680
gaaaguugcccuugaugau

SEQ ID NO: 56203 - RNA, 19 nt, Artificial Sequence
  Description of Artificial Sequence: Synthetic oligonucleotide
  Antisense strand to SEQ ID NO: 56122
aucaucaagggcaacuuuc

SEQ ID NO: 56204 - RNA, 19 nt, Artificial Sequence
  Description of Artificial Sequence: Synthetic oligonucleotide
  Sense strand starting at position 3246 of SEQ ID NO: 680
aaaguugcccuugaugauu

SEQ ID NO: 56205 - RNA, 19 nt, Artificial Sequence
  Description of Artificial Sequence: Synthetic oligonucleotide
  Antisense strand to SEQ ID NO: 56124
aaucaucaagggcaacuuu

SEQ ID NO: 56206 - RNA, 19 nt, Artificial Sequence
  Description of Artificial Sequence: Synthetic oligonucleotide
  Sense strand starting at position 3346 of SEQ ID NO: 680
aggcucuagccugagucau

SEQ ID NO: 56207 - RNA, 19 nt, Artificial Sequence
  Description of Artificial Sequence: Synthetic oligonucleotide
  Antisense strand to SEQ ID NO: 56126
augacucaggcuagagccu

SEQ ID NO: 56208 - RNA, 19 nt, Artificial Sequence
  Description of Artificial Sequence: Synthetic oligonucleotide
  Sense strand starting at position 3348 of SEQ ID NO: 680
gcucuagccugagucauuu

SEQ ID NO: 56209 - RNA, 19 nt, Artificial Sequence
  Description of Artificial Sequence: Synthetic oligonucleotide
  Antisense strand to SEQ ID NO: 56128
aaaugacucaggcuagagc

SEQ ID NO: 56210 - RNA, 19 nt, Artificial Sequence
  Description of Artificial Sequence: Synthetic oligonucleotide
  Sense strand starting at position 3404 of SEQ ID NO: 680
cuuugcucucugggauuga

SEQ ID NO: 56211 - RNA, 19 nt, Artificial Sequence
  Description of Artificial Sequence: Synthetic oligonucleotide
  Antisense strand to SEQ ID NO: 56130
ucaaucccagagagcaaag

SEQ ID NO: 56212 - RNA, 19 nt, Artificial Sequence
  Description of Artificial Sequence: Synthetic oligonucleotide
  Sense strand starting at position 3523 of SEQ ID NO: 680
ggcuuuaaacaaugucaag

SEQ ID NO: 56213 - RNA, 19 nt, Artificial Sequence
  Description of Artificial Sequence: Synthetic oligonucleotide
  Antisense strand to SEQ ID NO: 56132
cuugacauuguuuaaagcc

SEQ ID NO: 56214 - RNA, 19 nt, Artificial Sequence
  Description of Artificial Sequence: Synthetic oligonucleotide
  Sense strand starting at position 3543 of SEQ ID NO: 680
ucagccauuugauaagaaa

SEQ ID NO: 56215 - RNA, 19 nt, Artificial Sequence
  Description of Artificial Sequence: Synthetic oligonucleotide
  Antisense strand to SEQ ID NO: 56134
uuucuuaucaaauggcuga

SEQ ID NO: 56216 - RNA, 19 nt, Artificial Sequence
  Description of Artificial Sequence: Synthetic oligonucleotide
  Sense strand starting at position 3567 of SEQ ID NO: 680
uuaccauuggauugugaua

SEQ ID NO: 56217 - RNA, 19 nt, Artificial Sequence
  Description of Artificial Sequence: Synthetic oligonucleotide
  Antisense strand to SEQ ID NO: 56136
uaucacaauccaaugguaa

SEQ ID NO: 56218 - RNA, 19 nt, Artificial Sequence
  Description of Artificial Sequence: Synthetic oligonucleotide
  Sense strand starting at position 3690 of SEQ ID NO: 680
gucaguacggaaugacauu

SEQ ID NO: 56219 - RNA, 19 nt, Artificial Sequence
  Description of Artificial Sequence: Synthetic oligonucleotide
  Antisense strand to SEQ ID NO: 56138
aaugucauuccguacugac

SEQ ID NO: 56220 - RNA, 19 nt, Artificial Sequence
  Description of Artificial Sequence: Synthetic oligonucleotide
  Sense strand starting at position 3810 of SEQ ID NO: 680
aucuaauuguggccagauc

SEQ ID NO: 56221 - RNA, 19 nt, Artificial Sequence
  Description of Artificial Sequence: Synthetic oligonucleotide
  Antisense strand to SEQ ID NO: 56140
gaucuggccacaauuagau

SEQ ID NO: 56222 - RNA, 19 nt, Artificial Sequence
  Description of Artificial Sequence: Synthetic oligonucleotide
  Sense strand starting at position 3811 of SEQ ID NO: 680
ucuaauuguggccagaucu

SEQ ID NO: 56223 - RNA, 19 nt, Artificial Sequence
  Description of Artificial Sequence: Synthetic oligonucleotide
  Antisense strand to SEQ ID NO: 56142
agaucuggccacaauuaga

SEQ ID NO: 56224 - RNA, 19 nt, Artificial Sequence
  Description of Artificial Sequence: Synthetic oligonucleotide
  Sense strand starting at position 3873 of SEQ ID NO: 680
gcaguugaucuauaauaac

SEQ ID NO: 56225 - RNA, 19 nt, Artificial Sequence
  Description of Artificial Sequence: Synthetic oligonucleotide
  Antisense strand to SEQ ID NO: 56144
guuauuauagaucaacugc

SEQ ID NO: 56226 - RNA, 19 nt, Artificial Sequence
  Description of Artificial Sequence: Synthetic oligonucleotide
  Sense strand starting at position 85 of SEQ ID NO: 681
gauggaguuggcuauguug

SEQ ID NO: 56227 - RNA, 19 nt, Artificial Sequence
  Description of Artificial Sequence: Synthetic oligonucleotide
  Antisense strand to SEQ ID NO: 56146
caacauagccaacuccauc

SEQ ID NO: 56228 - RNA, 19 nt, Artificial Sequence
  Description of Artificial Sequence: Synthetic oligonucleotide
  Sense strand starting at position 108 of SEQ ID NO: 681
ucaccuagugaguaucaua

SEQ ID NO: 56229 - RNA, 19 nt, Artificial Sequence
  Description of Artificial Sequence: Synthetic oligonucleotide
  Antisense strand to SEQ ID NO: 56148
uaugauacucacuagguga

SEQ ID NO: 56230 - RNA, 19 nt, Artificial Sequence
  Description of Artificial Sequence: Synthetic oligonucleotide
  Sense strand starting at position 367 of SEQ ID NO: 681
cuguguacucaccauguga

SEQ ID NO: 56231 - RNA, 19 nt, Artificial Sequence
  Description of Artificial Sequence: Synthetic oligonucleotide
  Antisense strand to SEQ ID NO: 56150
ucacauggugaguacacag

SEQ ID NO: 56232 - RNA, 19 nt, Artificial Sequence
  Description of Artificial Sequence: Synthetic oligonucleotide
  Sense strand starting at position 480 of SEQ ID NO: 681
cccagcaugcuacaagaaa

SEQ ID NO: 56233 - RNA, 19 nt, Artificial Sequence
  Description of Artificial Sequence: Synthetic oligonucleotide
  Antisense strand to SEQ ID NO: 56152
uuucuuguagcaugcuggg

SEQ ID NO: 56234 - RNA, 19 nt, Artificial Sequence
  Description of Artificial Sequence: Synthetic oligonucleotide
  Sense strand starting at position 541 of SEQ ID NO: 681
uaguguuagaaggacuguu

SEQ ID NO: 56235 - RNA, 19 nt, Artificial Sequence
  Description of Artificial Sequence: Synthetic oligonucleotide
  Antisense strand to SEQ ID NO: 56154
aacaguccuucuaacacua

SEQ ID NO: 56236 - RNA, 19 nt, Artificial Sequence
  Description of Artificial Sequence: Synthetic oligonucleotide
  Sense strand starting at position 601 of SEQ ID NO: 681
gugggugugaccuagauua

SEQ ID NO: 56237 - RNA, 19 nt, Artificial Sequence
  Description of Artificial Sequence: Synthetic oligonucleotide
  Antisense strand to SEQ ID NO: 56156
uaaucuaggucacacccac

SEQ ID NO: 56238 - RNA, 19 nt, Artificial Sequence
  Description of Artificial Sequence: Synthetic oligonucleotide
  Sense strand starting at position 603 of SEQ ID NO: 681
gggugugaccuagauuauc

SEQ ID NO: 56239 - RNA, 19 nt, Artificial Sequence
  Description of Artificial Sequence: Synthetic oligonucleotide
  Antisense strand to SEQ ID NO: 56158
gauaaucuaggucacaccc

SEQ ID NO: 56240 - RNA, 19 nt, Artificial Sequence
  Description of Artificial Sequence: Synthetic oligonucleotide
  Sense strand starting at position 614 of SEQ ID NO: 681
agauuaucacuuugaagua

SEQ ID NO: 56241 - RNA, 19 nt, Artificial Sequence
  Description of Artificial Sequence: Synthetic oligonucleotide
  Antisense strand to SEQ ID NO: 56160
uacuucaaagugauaaucu

SEQ ID NO: 56242 - RNA, 19 nt, Artificial Sequence
  Description of Artificial Sequence: Synthetic oligonucleotide
  Sense strand starting at position 621 of SEQ ID NO: 681
cacuuugaaguacgauauu

SEQ ID NO: 56243 - RNA, 19 nt, Artificial Sequence
  Description of Artificial Sequence: Synthetic oligonucleotide
  Antisense strand to SEQ ID NO: 56162
aauaucguacuucaaagug

SEQ ID NO: 56244 - RNA, 19 nt, Artificial Sequence
  Description of Artificial Sequence: Synthetic oligonucleotide
  Sense strand starting at position 663 of SEQ ID NO: 681
agggaucucuucuuauuau

SEQ ID NO: 56245 - RNA, 19 nt, Artificial Sequence
  Description of Artificial Sequence: Synthetic oligonucleotide
  Antisense strand to SEQ ID NO: 56164
auaauaagaagagaucccu

SEQ ID NO: 56246 - RNA, 19 nt, Artificial Sequence
  Description of Artificial Sequence: Synthetic oligonucleotide
  Sense strand starting at position 686 of SEQ ID NO: 681
ccaagaugguauguaauac

SEQ ID NO: 56247 - RNA, 19 nt, Artificial Sequence
  Description of Artificial Sequence: Synthetic oligonucleotide
  Antisense strand to SEQ ID NO: 56166
guauuacauaccaucuugg

SEQ ID NO: 56248 - RNA, 19 nt, Artificial Sequence
  Description of Artificial Sequence: Synthetic oligonucleotide
  Sense strand starting at position 836 of SEQ ID NO: 681
cauaaugaagugugaugua

SEQ ID NO: 56249 - RNA, 19 nt, Artificial Sequence
  Description of Artificial Sequence: Synthetic oligonucleotide
  Antisense strand to SEQ ID NO: 56168
uacaucacacuucauuaug

SEQ ID NO: 56250 - RNA, 19 nt, Artificial Sequence
  Description of Artificial Sequence: Synthetic oligonucleotide
  Sense strand starting at position 913 of SEQ ID NO: 681
uauugaauagacuguauga

SEQ ID NO: 56251 - RNA, 19 nt, Artificial Sequence
  Description of Artificial Sequence: Synthetic oligonucleotide
  Antisense strand to SEQ ID NO: 56170
ucauacagucuauucaaua

SEQ ID NO: 56252 - RNA, 19 nt, Artificial Sequence
  Description of Artificial Sequence: Synthetic oligonucleotide
  Sense strand starting at position 985 of SEQ ID NO: 681
uuugcaacucaaggauagu

SEQ ID NO: 56253 - RNA, 19 nt, Artificial Sequence
  Description of Artificial Sequence: Synthetic oligonucleotide
  Antisense strand to SEQ ID NO: 56172
acuauccuugaguugcaaa

SEQ ID NO: 56254 - RNA, 19 nt, Artificial Sequence
  Description of Artificial Sequence: Synthetic oligonucleotide
  Sense strand starting at position 988 of SEQ ID NO: 681
gcaacucaaggauaguauu

SEQ ID NO: 56255 - RNA, 19 nt, Artificial Sequence
  Description of Artificial Sequence: Synthetic oligonucleotide
  Antisense strand to SEQ ID NO: 56174
aauacuauccuugaguugc

SEQ ID NO: 56256 - RNA, 19 nt, Artificial Sequence
  Description of Artificial Sequence: Synthetic oligonucleotide
  Sense strand starting at position 1190 of SEQ ID NO: 681
gaaagucauuuauaaggca

SEQ ID NO: 56257 - RNA, 19 nt, Artificial Sequence
  Description of Artificial Sequence: Synthetic oligonucleotide
  Antisense strand to SEQ ID NO: 56176
ugccuuauaaaugacuuuc

SEQ ID NO: 56258 - RNA, 19 nt, Artificial Sequence
  Description of Artificial Sequence: Synthetic oligonucleotide
  Sense strand starting at position 1260 of SEQ ID NO: 681
agaugaagcuauguagaca

SEQ ID NO: 56259 - RNA, 19 nt, Artificial Sequence
  Description of Artificial Sequence: Synthetic oligonucleotide
  Antisense strand to SEQ ID NO: 56178
ugucuacauagcuucaucu

SEQ ID NO: 56260 - RNA, 19 nt, Artificial Sequence
  Description of Artificial Sequence: Synthetic oligonucleotide
  Sense strand starting at position 1459 of SEQ ID NO: 681
gguagcaucuaaccaauca

SEQ ID NO: 56261 - RNA, 19 nt, Artificial Sequence
  Description of Artificial Sequence: Synthetic oligonucleotide
  Antisense strand to SEQ ID NO: 56180
ugauugguuagaugcuacc

SEQ ID NO: 56262 - RNA, 19 nt, Artificial Sequence
  Description of Artificial Sequence: Synthetic oligonucleotide
  Sense strand starting at position 1476 of SEQ ID NO: 681
caaauagggugcuuucuaa

SEQ ID NO: 56263 - RNA, 19 nt, Artificial Sequence
  Description of Artificial Sequence: Synthetic oligonucleotide
  Antisense strand to SEQ ID NO: 56182
uuagaaagcacccuauuug

SEQ ID NO: 56264 - RNA, 19 nt, Artificial Sequence
  Description of Artificial Sequence: Synthetic oligonucleotide
  Sense strand starting at position 1532 of SEQ ID NO: 681
uuagcauuugcccaguuua

SEQ ID NO: 56265 - RNA, 19 nt, Artificial Sequence
  Description of Artificial Sequence: Synthetic oligonucleotide
  Antisense strand to SEQ ID NO: 56184
uaaacugggcaaaugcuaa

SEQ ID NO: 56266 - RNA, 19 nt, Artificial Sequence
  Description of Artificial Sequence: Synthetic oligonucleotide
  Sense strand starting at position 1689 of SEQ ID NO: 681
cugaguuaccuugaguuug

SEQ ID NO: 56267 - RNA, 19 nt, Artificial Sequence
  Description of Artificial Sequence: Synthetic oligonucleotide
  Antisense strand to SEQ ID NO: 56186
caaacucaagguaacucag

SEQ ID NO: 56268 - RNA, 19 nt, Artificial Sequence
  Description of Artificial Sequence: Synthetic oligonucleotide
  Sense strand starting at position 2177 of SEQ ID NO: 681
ggacaaugcccagggauuc

SEQ ID NO: 56269 - RNA, 19 nt, Artificial Sequence
  Description of Artificial Sequence: Synthetic oligonucleotide
  Antisense strand to SEQ ID NO: 56188
gaaucccugggcauugucc

SEQ ID NO: 56270 - RNA, 19 nt, Artificial Sequence
  Description of Artificial Sequence: Synthetic oligonucleotide
  Sense strand starting at position 2388 of SEQ ID NO: 681
guuacugggcacugaaaca

SEQ ID NO: 56271 - RNA, 19 nt, Artificial Sequence
  Description of Artificial Sequence: Synthetic oligonucleotide
  Antisense strand to SEQ ID NO: 56190
uguuucagugcccaguaac

SEQ ID NO: 56272 - RNA, 19 nt, Artificial Sequence
  Description of Artificial Sequence: Synthetic oligonucleotide
  Sense strand starting at position 2547 of SEQ ID NO: 681
cuugaagagcuuggcugaa

SEQ ID NO: 56273 - RNA, 19 nt, Artificial Sequence
  Description of Artificial Sequence: Synthetic oligonucleotide
  Antisense strand to SEQ ID NO: 56192
uucagccaagcucuucaag

SEQ ID NO: 56274 - RNA, 19 nt, Artificial Sequence
  Description of Artificial Sequence: Synthetic oligonucleotide
  Sense strand starting at position 3149 of SEQ ID NO: 681
ucuugaaggaucugacugu

SEQ ID NO: 56275 - RNA, 19 nt, Artificial Sequence
  Description of Artificial Sequence: Synthetic oligonucleotide
  Antisense strand to SEQ ID NO: 56194
acagucagauccuucaaga

SEQ ID NO: 56276 - RNA, 19 nt, Artificial Sequence
  Description of Artificial Sequence: Synthetic oligonucleotide
  Sense strand starting at position 3199 of SEQ ID NO: 681
gauagagaaucugcgaauu

SEQ ID NO: 56277 - RNA, 19 nt, Artificial Sequence
  Description of Artificial Sequence: Synthetic oligonucleotide
  Antisense strand to SEQ ID NO: 56196
aauucgcagauucucuauc

SEQ ID NO: 56278 - RNA, 19 nt, Artificial Sequence
  Description of Artificial Sequence: Synthetic oligonucleotide
  Sense strand starting at position 3212 of SEQ ID NO: 681
cgaauuauauugucugagg

SEQ ID NO: 56279 - RNA, 19 nt, Artificial Sequence
  Description of Artificial Sequence: Synthetic oligonucleotide
  Antisense strand to SEQ ID NO: 56198
ccucagacaauauaauucg

SEQ ID NO: 56280 - RNA, 19 nt, Artificial Sequence
  Description of Artificial Sequence: Synthetic oligonucleotide
  Sense strand starting at position 3214 of SEQ ID NO: 681
aauuauauugucugaggca

SEQ ID NO: 56281 - RNA, 19 nt, Artificial Sequence
  Description of Artificial Sequence: Synthetic oligonucleotide
  Antisense strand to SEQ ID NO: 56200
ugccucagacaauauaauu

SEQ ID NO: 56282 - RNA, 19 nt, Artificial Sequence
  Description of Artificial Sequence: Synthetic oligonucleotide
  Sense strand starting at position 3335 of SEQ ID NO: 681
acaugaggucucuguuaau

SEQ ID NO: 56283 - RNA, 19 nt, Artificial Sequence
  Description of Artificial Sequence: Synthetic oligonucleotide
  Antisense strand to SEQ ID NO: 56202
auuaacagagaccucaugu

SEQ ID NO: 56284 - RNA, 19 nt, Artificial Sequence
  Description of Artificial Sequence: Synthetic oligonucleotide
  Sense strand starting at position 3477 of SEQ ID NO: 681
uucuuuacaguccagaguu

SEQ ID NO: 56285 - RNA, 19 nt, Artificial Sequence
  Description of Artificial Sequence: Synthetic oligonucleotide
  Antisense strand to SEQ ID NO: 56204
aacucuggacuguaaagaa

SEQ ID NO: 56286 - RNA, 19 nt, Artificial Sequence
  Description of Artificial Sequence: Synthetic oligonucleotide
  Sense strand starting at position 3506 of SEQ ID NO: 681
cccagauucugggcucaaa

SEQ ID NO: 56287 - RNA, 19 nt, Artificial Sequence
  Description of Artificial Sequence: Synthetic oligonucleotide
  Antisense strand to SEQ ID NO: 56206
uuugagcccagaaucuggg

SEQ ID NO: 56288 - RNA, 19 nt, Artificial Sequence
  Description of Artificial Sequence: Synthetic oligonucleotide
  Sense strand starting at position 3626 of SEQ ID NO: 681
ugaacaguugcuuacacuu

SEQ ID NO: 56289 - RNA, 19 nt, Artificial Sequence
  Description of Artificial Sequence: Synthetic oligonucleotide
  Antisense strand to SEQ ID NO: 56208
aaguguaagcaacuguuca

SEQ ID NO: 56290 - RNA, 19 nt, Artificial Sequence
  Description of Artificial Sequence: Synthetic oligonucleotide
  Sense strand starting at position 3650 of SEQ ID NO: 681
ucuacaauauuaucagugu

SEQ ID NO: 56291 - RNA, 19 nt, Artificial Sequence
  Description of Artificial Sequence: Synthetic oligonucleotide
  Antisense strand to SEQ ID NO: 56210
acacugauaauauuguaga

SEQ ID NO: 56292 - RNA, 19 nt, Artificial Sequence
  Description of Artificial Sequence: Synthetic oligonucleotide
  Sense strand starting at position 3718 of SEQ ID NO: 681
uguagauucugacucagga

SEQ ID NO: 56293 - RNA, 19 nt, Artificial Sequence
  Description of Artificial Sequence: Synthetic oligonucleotide
  Antisense strand to SEQ ID NO: 56212
uccugagucagaaucuaca

SEQ ID NO: 56294 - RNA, 19 nt, Artificial Sequence
  Description of Artificial Sequence: Synthetic oligonucleotide
  Sense strand starting at position 3767 of SEQ ID NO: 681
cuagccuacugauugacau

SEQ ID NO: 56295 - RNA, 19 nt, Artificial Sequence
  Description of Artificial Sequence: Synthetic oligonucleotide
  Antisense strand to SEQ ID NO: 56214
augucaaucaguaggcuag

SEQ ID NO: 56296 - RNA, 19 nt, Artificial Sequence
  Description of Artificial Sequence: Synthetic oligonucleotide
  Sense strand starting at position 3814 of SEQ ID NO: 681
caguguaucagagaaacgu

SEQ ID NO: 56297 - RNA, 19 nt, Artificial Sequence
  Description of Artificial Sequence: Synthetic oligonucleotide
  Antisense strand to SEQ ID NO: 56216
acguuucucugauacacug

SEQ ID NO: 56298 - RNA, 19 nt, Artificial Sequence
  Description of Artificial Sequence: Synthetic oligonucleotide
  Sense strand starting at position 3861 of SEQ ID NO: 681
agguuacuaccagaauugu

SEQ ID NO: 56299 - RNA, 19 nt, Artificial Sequence
  Description of Artificial Sequence: Synthetic oligonucleotide
  Antisense strand to SEQ ID NO: 56218
acaauucugguaguaaccu

SEQ ID NO: 56300 - RNA, 19 nt, Artificial Sequence
  Description of Artificial Sequence: Synthetic oligonucleotide
  Sense strand starting at position 3888 of SEQ ID NO: 681
uauuguaaccuuugaguag

SEQ ID NO: 56301 - RNA, 19 nt, Artificial Sequence
  Description of Artificial Sequence: Synthetic oligonucleotide
  Antisense strand to SEQ ID NO: 56220
cuacucaaagguuacaaua

SEQ ID NO: 56302 - RNA, 19 nt, Artificial Sequence
  Description of Artificial Sequence: Synthetic oligonucleotide
  Sense strand starting at position 3916 of SEQ ID NO: 681
uuauuugcauguuugcuua

SEQ ID NO: 56303 - RNA, 19 nt, Artificial Sequence
  Description of Artificial Sequence: Synthetic oligonucleotide
  Antisense strand to SEQ ID NO: 56222
uaagcaaacaugcaaauaa

SEQ ID NO: 56304 - RNA, 19 nt, Artificial Sequence
  Description of Artificial Sequence: Synthetic oligonucleotide
  Sense strand starting at position 3936 of SEQ ID NO: 681
guauauacaguguacauga

SEQ ID NO: 56305 - RNA, 19 nt, Artificial Sequence
  Description of Artificial Sequence: Synthetic oligonucleotide
  Antisense strand to SEQ ID NO: 56224
ucauguacacuguauauac

SEQ ID NO: 56306 - RNA, 19 nt, Artificial Sequence
  Description of Artificial Sequence: Synthetic oligonucleotide
  Sense strand starting at position 3458 of SEQ ID NO: 682
uguugagccuuccacaaau

SEQ ID NO: 56307 - RNA, 19 nt, Artificial Sequence
  Description of Artificial Sequence: Synthetic oligonucleotide
  Antisense strand to SEQ ID NO: 56226
auuuguggaaggcucaaca

SEQ ID NO: 56308 - RNA, 19 nt, Artificial Sequence
  Description of Artificial Sequence: Synthetic oligonucleotide
  Sense strand starting at position 3194 of SEQ ID NO: 682
ugggauuucuacuggaaug

SEQ ID NO: 56309 - RNA, 19 nt, Artificial Sequence
  Description of Artificial Sequence: Synthetic oligonucleotide
  Antisense strand to SEQ ID NO: 56228
cauuccaguagaaauccca

SEQ ID NO: 56310 - RNA, 19 nt, Artificial Sequence
  Description of Artificial Sequence: Synthetic oligonucleotide
  Sense strand starting at position 3095 of SEQ ID NO: 682
guucguguggaugaugaca

SEQ ID NO: 56311 - RNA, 19 nt, Artificial Sequence
  Description of Artificial Sequence: Synthetic oligonucleotide
  Antisense strand to SEQ ID NO: 56230
ugucaucauccacacgaac

SEQ ID NO: 56312 - RNA, 19 nt, Artificial Sequence
  Description of Artificial Sequence: Synthetic oligonucleotide
  Sense strand starting at position 3090 of SEQ ID NO: 682
guguuguucguguggauga

SEQ ID NO: 56313 - RNA, 19 nt, Artificial Sequence
  Description of Artificial Sequence: Synthetic oligonucleotide
  Antisense strand to SEQ ID NO: 56232
ucauccacacgaacaacac

SEQ ID NO: 56314 - RNA, 19 nt, Artificial Sequence
  Description of Artificial Sequence: Synthetic oligonucleotide
  Sense strand starting at position 2942 of SEQ ID NO: 682
gguaaagcauccucacaca

SEQ ID NO: 56315 - RNA, 19 nt, Artificial Sequence
  Description of Artificial Sequence: Synthetic oligonucleotide
  Antisense strand to SEQ ID NO: 56234
ugugugaggaugcuuuacc

SEQ ID NO: 56316 - RNA, 19 nt, Artificial Sequence
  Description of Artificial Sequence: Synthetic oligonucleotide
  Sense strand starting at position 2902 of SEQ ID NO: 682
agcucucagcaaugugaaa

SEQ ID NO: 56317 - RNA, 19 nt, Artificial Sequence
  Description of Artificial Sequence: Synthetic oligonucleotide
  Antisense strand to SEQ ID NO: 56236
uuucacauugcugagagcu

SEQ ID NO: 56318 - RNA, 19 nt, Artificial Sequence
  Description of Artificial Sequence: Synthetic oligonucleotide
  Sense strand starting at position 2874 of SEQ ID NO: 682
ggacucacccagugcaaga

SEQ ID NO: 56319 - RNA, 19 nt, Artificial Sequence
  Description of Artificial Sequence: Synthetic oligonucleotide
  Antisense strand to SEQ ID NO: 56238
ucuugcacugggugagucc

SEQ ID NO: 56320 - RNA, 19 nt, Artificial Sequence
  Description of Artificial Sequence: Synthetic oligonucleotide
  Sense strand starting at position 2773 of SEQ ID NO: 682
gcuugcucgugauuacauu

SEQ ID NO: 56321 - RNA, 19 nt, Artificial Sequence
  Description of Artificial Sequence: Synthetic oligonucleotide
  Antisense strand to SEQ ID NO: 56240
aauguaaucacgagcaagc

SEQ ID NO: 56322 - RNA, 19 nt, Artificial Sequence
  Description of Artificial Sequence: Synthetic oligonucleotide
  Sense strand starting at position 2771 of SEQ ID NO: 682
gggcuugcucgugauuaca

SEQ ID NO: 56323 - RNA, 19 nt, Artificial Sequence
  Description of Artificial Sequence: Synthetic oligonucleotide
  Antisense strand to SEQ ID NO: 56242
uguaaucacgagcaagccc

SEQ ID NO: 56324 - RNA, 19 nt, Artificial Sequence
  Description of Artificial Sequence: Synthetic oligonucleotide
  Sense strand starting at position 2635 of SEQ ID NO: 682
accuuugcuccgucuguga

SEQ ID NO: 56325 - RNA, 19 nt, Artificial Sequence
  Description of Artificial Sequence: Synthetic oligonucleotide
  Antisense strand to SEQ ID NO: 56244
ucacagacggagcaaaggu

SEQ ID NO: 56326 - RNA, 19 nt, Artificial Sequence
  Description of Artificial Sequence: Synthetic oligonucleotide
  Sense strand starting at position 2573 of SEQ ID NO: 682
ucaggaaucacguggguca

SEQ ID NO: 56327 - RNA, 19 nt, Artificial Sequence
  Description of Artificial Sequence: Synthetic oligonucleotide
  Antisense strand to SEQ ID NO: 56246
ugacccacgugauuccuga

SEQ ID NO: 56328 - RNA, 19 nt, Artificial Sequence
  Description of Artificial Sequence: Synthetic oligonucleotide
  Sense strand starting at position 2522 of SEQ ID NO: 682
auuaguuuagccuauaggu

SEQ ID NO: 56329 - RNA, 19 nt, Artificial Sequence
  Description of Artificial Sequence: Synthetic oligonucleotide
  Antisense strand to SEQ ID NO: 56248
accuauaggcuaaacuaau

SEQ ID NO: 56330 - RNA, 19 nt, Artificial Sequence
  Description of Artificial Sequence: Synthetic oligonucleotide
  Sense strand starting at position 2520 of SEQ ID NO: 682
gaauuaguuuagccuauag

SEQ ID NO: 56331 - RNA, 19 nt, Artificial Sequence
  Description of Artificial Sequence: Synthetic oligonucleotide
  Antisense strand to SEQ ID NO: 56250
cuauaggcuaaacuaauuc

SEQ ID NO: 56332 - RNA, 19 nt, Artificial Sequence
  Description of Artificial Sequence: Synthetic oligonucleotide
  Sense strand starting at position 2519 of SEQ ID NO: 682
ggaauuaguuuagccuaua

SEQ ID NO: 56333 - RNA, 19 nt, Artificial Sequence
  Description of Artificial Sequence: Synthetic oligonucleotide
  Antisense strand to SEQ ID NO: 56252
uauaggcuaaacuaauucc

SEQ ID NO: 56334 - RNA, 19 nt, Artificial Sequence
  Description of Artificial Sequence: Synthetic oligonucleotide
  Sense strand starting at position 2329 of SEQ ID NO: 682
ucaauaugucaguaucuuc

SEQ ID NO: 56335 - RNA, 19 nt, Artificial Sequence
  Description of Artificial Sequence: Synthetic oligonucleotide
  Antisense strand to SEQ ID NO: 56254
gaagauacugacauauuga

SEQ ID NO: 56336 - RNA, 19 nt, Artificial Sequence
  Description of Artificial Sequence: Synthetic oligonucleotide
  Sense strand starting at position 2289 of SEQ ID NO: 682
ccagcuguuagauaugagu

SEQ ID NO: 56337 - RNA, 19 nt, Artificial Sequence
  Description of Artificial Sequence: Synthetic oligonucleotide
  Antisense strand to SEQ ID NO: 56256
acucauaucuaacagcugg

SEQ ID NO: 56338 - RNA, 19 nt, Artificial Sequence
  Description of Artificial Sequence: Synthetic oligonucleotide
  Sense strand starting at position 2285 of SEQ ID NO: 682
caugccagcuguuagauau

SEQ ID NO: 56339 - RNA, 19 nt, Artificial Sequence
  Description of Artificial Sequence: Synthetic oligonucleotide
  Antisense strand to SEQ ID NO: 56258
auaucuaacagcuggcaug

SEQ ID NO: 56340 - RNA, 19 nt, Artificial Sequence
  Description of Artificial Sequence: Synthetic oligonucleotide
  Sense strand starting at position 2282 of SEQ ID NO: 682
agacaugccagcuguuaga

SEQ ID NO: 56341 - RNA, 19 nt, Artificial Sequence
  Description of Artificial Sequence: Synthetic oligonucleotide
  Antisense strand to SEQ ID NO: 56260
ucuaacagcuggcaugucu

SEQ ID NO: 56342 - RNA, 19 nt, Artificial Sequence
  Description of Artificial Sequence: Synthetic oligonucleotide
  Sense strand starting at position 2058 of SEQ ID NO: 682
gagccuagaggcuaucaga

SEQ ID NO: 56343 - RNA, 19 nt, Artificial Sequence
  Description of Artificial Sequence: Synthetic oligonucleotide
  Antisense strand to SEQ ID NO: 56262
ucugauagccucuaggcuc

SEQ ID NO: 56344 - RNA, 19 nt, Artificial Sequence
  Description of Artificial Sequence: Synthetic oligonucleotide
  Sense strand starting at position 1594 of SEQ ID NO: 682
aggagagauucuggagagu

SEQ ID NO: 56345 - RNA, 19 nt, Artificial Sequence
  Description of Artificial Sequence: Synthetic oligonucleotide
  Antisense strand to SEQ ID NO: 56264
acucuccagaaucucuccu

SEQ ID NO: 56346 - RNA, 19 nt, Artificial Sequence
  Description of Artificial Sequence: Synthetic oligonucleotide
  Sense strand starting at position 1577 of SEQ ID NO: 682
cggaauaucuuagggcaag

SEQ ID NO: 56347 - RNA, 19 nt, Artificial Sequence
  Description of Artificial Sequence: Synthetic oligonucleotide
  Antisense strand to SEQ ID NO: 56266
cuugcccuaagauauuccg

SEQ ID NO: 56348 - RNA, 19 nt, Artificial Sequence
  Description of Artificial Sequence: Synthetic oligonucleotide
  Sense strand starting at position 1575 of SEQ ID NO: 682
ugcggaauaucuuagggca

SEQ ID NO: 56349 - RNA, 19 nt, Artificial Sequence
  Description of Artificial Sequence: Synthetic oligonucleotide
  Antisense strand to SEQ ID NO: 56268
ugcccuaagauauuccgca

SEQ ID NO: 56350 - RNA, 19 nt, Artificial Sequence
  Description of Artificial Sequence: Synthetic oligonucleotide
  Sense strand starting at position 1570 of SEQ ID NO: 682
gaaagugcggaauaucuua

SEQ ID NO: 56351 - RNA, 19 nt, Artificial Sequence
  Description of Artificial Sequence: Synthetic oligonucleotide
  Antisense strand to SEQ ID NO: 56270
uaagauauuccgcacuuuc

SEQ ID NO: 56352 - RNA, 19 nt, Artificial Sequence
  Description of Artificial Sequence: Synthetic oligonucleotide
  Sense strand starting at position 1566 of SEQ ID NO: 682
cucagaaagugcggaauau

SEQ ID NO: 56353 - RNA, 19 nt, Artificial Sequence
  Description of Artificial Sequence: Synthetic oligonucleotide
  Antisense strand to SEQ ID NO: 56272
auauuccgcacuuucugag

SEQ ID NO: 56354 - RNA, 19 nt, Artificial Sequence
  Description of Artificial Sequence: Synthetic oligonucleotide
  Sense strand starting at position 1554 of SEQ ID NO: 682
ugcucuaccuggcucagaa

SEQ ID NO: 56355 - RNA, 19 nt, Artificial Sequence
  Description of Artificial Sequence: Synthetic oligonucleotide
  Antisense strand to SEQ ID NO: 56274
uucugagccagguagagca

SEQ ID NO: 56356 - RNA, 19 nt, Artificial Sequence
  Description of Artificial Sequence: Synthetic oligonucleotide
  Sense strand starting at position 1458 of SEQ ID NO: 682
gagauucuuuggcacaaag

SEQ ID NO: 56357 - RNA, 19 nt, Artificial Sequence
  Description of Artificial Sequence: Synthetic oligonucleotide
  Antisense strand to SEQ ID NO: 56276
cuuugugccaaagaaucuc

SEQ ID NO: 56358 - RNA, 19 nt, Artificial Sequence
  Description of Artificial Sequence: Synthetic oligonucleotide
  Sense strand starting at position 1457 of SEQ ID NO: 682
ugagauucuuuggcacaaa

SEQ ID NO: 56359 - RNA, 19 nt, Artificial Sequence
  Description of Artificial Sequence: Synthetic oligonucleotide
  Antisense strand to SEQ ID NO: 56278
uuugugccaaagaaucuca

SEQ ID NO: 56360 - RNA, 19 nt, Artificial Sequence
  Description of Artificial Sequence: Synthetic oligonucleotide
  Sense strand starting at position 1456 of SEQ ID NO: 682
gugagauucuuuggcacaa

SEQ ID NO: 56361 - RNA, 19 nt, Artificial Sequence
  Description of Artificial Sequence: Synthetic oligonucleotide
  Antisense strand to SEQ ID NO: 56280
uugugccaaagaaucucac

SEQ ID NO: 56362 - RNA, 19 nt, Artificial Sequence
  Description of Artificial Sequence: Synthetic oligonucleotide
  Sense strand starting at position 1454 of SEQ ID NO: 682
ucgugagauucuuuggcac

SEQ ID NO: 56363 - RNA, 19 nt, Artificial Sequence
  Description of Artificial Sequence: Synthetic oligonucleotide
  Antisense strand to SEQ ID NO: 56282
gugccaaagaaucucacga

SEQ ID NO: 56364 - RNA, 19 nt, Artificial Sequence
  Description of Artificial Sequence: Synthetic oligonucleotide
  Sense strand starting at position 1448 of SEQ ID NO: 682
cagcaaucgugagauucuu

SEQ ID NO: 56365 - RNA, 19 nt, Artificial Sequence
  Description of Artificial Sequence: Synthetic oligonucleotide
  Antisense strand to SEQ ID NO: 56284
aagaaucucacgauugcug

SEQ ID NO: 56366 - RNA, 19 nt, Artificial Sequence
  Description of Artificial Sequence: Synthetic oligonucleotide
  Sense strand starting at position 1446 of SEQ ID NO: 682
ggcagcaaucgugagauuc

SEQ ID NO: 56367 - RNA, 19 nt, Artificial Sequence
  Description of Artificial Sequence: Synthetic oligonucleotide
  Antisense strand to SEQ ID NO: 56286
gaaucucacgauugcugcc

SEQ ID NO: 56368 - RNA, 19 nt, Artificial Sequence
  Description of Artificial Sequence: Synthetic oligonucleotide
  Sense strand starting at position 1366 of SEQ ID NO: 682
gccauuacacucugcgauu

SEQ ID NO: 56369 - RNA, 19 nt, Artificial Sequence
  Description of Artificial Sequence: Synthetic oligonucleotide
  Antisense strand to SEQ ID NO: 56288
aaucgcagaguguaauggc

SEQ ID NO: 56370 - RNA, 19 nt, Artificial Sequence
  Description of Artificial Sequence: Synthetic oligonucleotide
  Sense strand starting at position 1011 of SEQ ID NO: 682
ugcacaaaucaagaagcuu

SEQ ID NO: 56371 - RNA, 19 nt, Artificial Sequence
  Description of Artificial Sequence: Synthetic oligonucleotide
  Antisense strand to SEQ ID NO: 56290
aagcuucuugauuugugca

SEQ ID NO: 56372 - RNA, 19 nt, Artificial Sequence
  Description of Artificial Sequence: Synthetic oligonucleotide
  Sense strand starting at position 954 of SEQ ID NO: 682
ccaagaucucccugugcac

SEQ ID NO: 56373 - RNA, 19 nt, Artificial Sequence
  Description of Artificial Sequence: Synthetic oligonucleotide
  Antisense strand to SEQ ID NO: 56292
gugcacagggagaucuugg

SEQ ID NO: 56374 - RNA, 19 nt, Artificial Sequence
  Description of Artificial Sequence: Synthetic oligonucleotide
  Sense strand starting at position 460 of SEQ ID NO: 682
ccuguuccucuccacgaaa

SEQ ID NO: 56375 - RNA, 19 nt, Artificial Sequence
  Description of Artificial Sequence: Synthetic oligonucleotide
  Antisense strand to SEQ ID NO: 56294
uuucguggagaggaacagg

SEQ ID NO: 56376 - RNA, 19 nt, Artificial Sequence
  Description of Artificial Sequence: Synthetic oligonucleotide
  Sense strand starting at position 45 of SEQ ID NO: 682
cugagaugcuuguauaaag

SEQ ID NO: 56377 - RNA, 19 nt, Artificial Sequence
  Description of Artificial Sequence: Synthetic oligonucleotide
  Antisense strand to SEQ ID NO: 56296
cuuuauacaagcaucucag

SEQ ID NO: 56378 - RNA, 19 nt, Artificial Sequence
  Description of Artificial Sequence: Synthetic oligonucleotide
  Sense strand starting at position 43 of SEQ ID NO: 682
cacugagaugcuuguauaa

SEQ ID NO: 56379 - RNA, 19 nt, Artificial Sequence
  Description of Artificial Sequence: Synthetic oligonucleotide
  Antisense strand to SEQ ID NO: 56298
uuauacaagcaucucagug

SEQ ID NO: 56380 - RNA, 19 nt, Artificial Sequence
  Description of Artificial Sequence: Synthetic oligonucleotide
  Sense strand starting at position 22 of SEQ ID NO: 682
ugacaauacuguuguuuac

SEQ ID NO: 56381 - RNA, 19 nt, Artificial Sequence
  Description of Artificial Sequence: Synthetic oligonucleotide
  Antisense strand to SEQ ID NO: 56300
guaaacaacaguauuguca

SEQ ID NO: 56382 - RNA, 19 nt, Artificial Sequence
  Description of Artificial Sequence: Synthetic oligonucleotide
  Sense strand starting at position 10 of SEQ ID NO: 682
gagacaugcuggugacaau

SEQ ID NO: 56383 - RNA, 19 nt, Artificial Sequence
  Description of Artificial Sequence: Synthetic oligonucleotide
  Antisense strand to SEQ ID NO: 56302
auugucaccagcaugucuc

SEQ ID NO: 56384 - RNA, 19 nt, Artificial Sequence
  Description of Artificial Sequence: Synthetic oligonucleotide
  Sense strand starting at position 8 of SEQ ID NO: 682
gugagacaugcuggugaca

SEQ ID NO: 56385 - RNA, 19 nt, Artificial Sequence
  Description of Artificial Sequence: Synthetic oligonucleotide
  Antisense strand to SEQ ID NO: 56304
ugucaccagcaugucucac

SEQ ID NO: 56386 - RNA, 19 nt, Artificial Sequence
  Description of Artificial Sequence: Synthetic oligonucleotide
  Sense strand starting at position 27 of SEQ ID NO: 683
gcaguugugccugugguca

SEQ ID NO: 56387 - RNA, 19 nt, Artificial Sequence
  Description of Artificial Sequence: Synthetic oligonucleotide
  Antisense strand to SEQ ID NO: 56306
ugaccacaggcacaacugc

SEQ ID NO: 56388 - RNA, 19 nt, Artificial Sequence
  Description of Artificial Sequence: Synthetic oligonucleotide
  Sense strand starting at position 174 of SEQ ID NO: 683
uugguaucaggaugaguca

SEQ ID NO: 56389 - RNA, 19 nt, Artificial Sequence
  Description of Artificial Sequence: Synthetic oligonucleotide
  Antisense strand to SEQ ID NO: 56308
ugacucauccugauaccaa

SEQ ID NO: 56390 - RNA, 19 nt, Artificial Sequence
  Description of Artificial Sequence: Synthetic oligonucleotide
  Sense strand starting at position 267 of SEQ ID NO: 683
agagguauggaguguuuga

SEQ ID NO: 56391 - RNA, 19 nt, Artificial Sequence
  Description of Artificial Sequence: Synthetic oligonucleotide
  Antisense strand to SEQ ID NO: 56310
ucaaacacuccauaccucu

SEQ ID NO: 56392 - RNA, 19 nt, Artificial Sequence
  Description of Artificial Sequence: Synthetic oligonucleotide
  Sense strand starting at position 365 of SEQ ID NO: 683
cagggagaucuggguucua

SEQ ID NO: 56393 - RNA, 19 nt, Artificial Sequence
  Description of Artificial Sequence: Synthetic oligonucleotide
  Antisense strand to SEQ ID NO: 56312
uagaacccagaucucccug

SEQ ID NO: 56394 - RNA, 19 nt, Artificial Sequence
  Description of Artificial Sequence: Synthetic oligonucleotide
  Sense strand starting at position 443 of SEQ ID NO: 683
ccauuccuacgaugagaau

SEQ ID NO: 56395 - RNA, 19 nt, Artificial Sequence
  Description of Artificial Sequence: Synthetic oligonucleotide
  Antisense strand to SEQ ID NO: 56314
auucucaucguaggaaugg

SEQ ID NO: 56396 - RNA, 19 nt, Artificial Sequence
  Description of Artificial Sequence: Synthetic oligonucleotide
  Sense strand starting at position 475 of SEQ ID NO: 683
acauaagcugcugaaagau

SEQ ID NO: 56397 - RNA, 19 nt, Artificial Sequence
  Description of Artificial Sequence: Synthetic oligonucleotide
  Antisense strand to SEQ ID NO: 56316
aucuuucagcagcuuaugu

SEQ ID NO: 56398 - RNA, 19 nt, Artificial Sequence
  Description of Artificial Sequence: Synthetic oligonucleotide
  Sense strand starting at position 689 of SEQ ID NO: 683
augacugccugccuagaau

SEQ ID NO: 56399 - RNA, 19 nt, Artificial Sequence
  Description of Artificial Sequence: Synthetic oligonucleotide
  Antisense strand to SEQ ID NO: 56318
auucuaggcaggcagucau

SEQ ID NO: 56400 - RNA, 19 nt, Artificial Sequence
  Description of Artificial Sequence: Synthetic oligonucleotide
  Sense strand starting at position 701 of SEQ ID NO: 683
cuagaauuacugggcauag

SEQ ID NO: 56401 - RNA, 19 nt, Artificial Sequence
  Description of Artificial Sequence: Synthetic oligonucleotide
  Antisense strand to SEQ ID NO: 56320
cuaugcccaguaauucuag

SEQ ID NO: 56402 - RNA, 19 nt, Artificial Sequence
  Description of Artificial Sequence: Synthetic oligonucleotide
  Sense strand starting at position 712 of SEQ ID NO: 683
gggcauagcgcccaagaua

SEQ ID NO: 56403 - RNA, 19 nt, Artificial Sequence
  Description of Artificial Sequence: Synthetic oligonucleotide
  Antisense strand to SEQ ID NO: 56322
uaucuugggcgcuaugccc

SEQ ID NO: 56404 - RNA, 19 nt, Artificial Sequence
  Description of Artificial Sequence: Synthetic oligonucleotide
  Sense strand starting at position 792 of SEQ ID NO: 683
ugaggucaaucauuagcua

SEQ ID NO: 56405 - RNA, 19 nt, Artificial Sequence
  Description of Artificial Sequence: Synthetic oligonucleotide
  Antisense strand to SEQ ID NO: 56324
uagcuaaugauugaccuca

SEQ ID NO: 56406 - RNA, 19 nt, Artificial Sequence
  Description of Artificial Sequence: Synthetic oligonucleotide
  Sense strand starting at position 793 of SEQ ID NO: 683
gaggucaaucauuagcuaa

SEQ ID NO: 56407 - RNA, 19 nt, Artificial Sequence
  Description of Artificial Sequence: Synthetic oligonucleotide
  Antisense strand to SEQ ID NO: 56326
uuagcuaaugauugaccuc

SEQ ID NO: 56408 - RNA, 19 nt, Artificial Sequence
  Description of Artificial Sequence: Synthetic oligonucleotide
  Sense strand starting at position 855 of SEQ ID NO: 683
ugggaagagcucuggguua

SEQ ID NO: 56409 - RNA, 19 nt, Artificial Sequence
  Description of Artificial Sequence: Synthetic oligonucleotide
  Antisense strand to SEQ ID NO: 56328
uaacccagagcucuuccca

SEQ ID NO: 56410 - RNA, 19 nt, Artificial Sequence
  Description of Artificial Sequence: Synthetic oligonucleotide
  Sense strand starting at position 857 of SEQ ID NO: 683
ggaagagcucuggguuaca

SEQ ID NO: 56411 - RNA, 19 nt, Artificial Sequence
  Description of Artificial Sequence: Synthetic oligonucleotide
  Antisense strand to SEQ ID NO: 56330
uguaacccagagcucuucc

SEQ ID NO: 56412 - RNA, 19 nt, Artificial Sequence
  Description of Artificial Sequence: Synthetic oligonucleotide
  Sense strand starting at position 860 of SEQ ID NO: 683
agagcucuggguuacagau

SEQ ID NO: 56413 - RNA, 19 nt, Artificial Sequence
  Description of Artificial Sequence: Synthetic oligonucleotide
  Antisense strand to SEQ ID NO: 56332
aucuguaacccagagcucu

SEQ ID NO: 56414 - RNA, 19 nt, Artificial Sequence
  Description of Artificial Sequence: Synthetic oligonucleotide
  Sense strand starting at position 956 of SEQ ID NO: 683
ccuguugaacuagauggua

SEQ ID NO: 56415 - RNA, 19 nt, Artificial Sequence
  Description of Artificial Sequence: Synthetic oligonucleotide
  Antisense strand to SEQ ID NO: 56334
uaccaucuaguucaacagg

SEQ ID NO: 56416 - RNA, 19 nt, Artificial Sequence
  Description of Artificial Sequence: Synthetic oligonucleotide
  Sense strand starting at position 984 of SEQ ID NO: 683
ccaaguuccucaccuguga

SEQ ID NO: 56417 - RNA, 19 nt, Artificial Sequence
  Description of Artificial Sequence: Synthetic oligonucleotide
  Antisense strand to SEQ ID NO: 56336
ucacaggugaggaacuugg

SEQ ID NO: 56418 - RNA, 19 nt, Artificial Sequence
  Description of Artificial Sequence: Synthetic oligonucleotide
  Sense strand starting at position 997 of SEQ ID NO: 683
cugugagauucuuugaauc

SEQ ID NO: 56419 - RNA, 19 nt, Artificial Sequence
  Description of Artificial Sequence: Synthetic oligonucleotide
  Antisense strand to SEQ ID NO: 56338
gauucaaagaaucucacag

SEQ ID NO: 56420 - RNA, 19 nt, Artificial Sequence
  Description of Artificial Sequence: Synthetic oligonucleotide
  Sense strand starting at position 1120 of SEQ ID NO: 683
ucagaaguccaauggcuuu

SEQ ID NO: 56421 - RNA, 19 nt, Artificial Sequence
  Description of Artificial Sequence: Synthetic oligonucleotide
  Antisense strand to SEQ ID NO: 56340
aaagccauuggacuucuga

SEQ ID NO: 56422 - RNA, 19 nt, Artificial Sequence
  Description of Artificial Sequence: Synthetic oligonucleotide
  Sense strand starting at position 1228 of SEQ ID NO: 683
gcucacagacagugaugaa

SEQ ID NO: 56423 - RNA, 19 nt, Artificial Sequence
  Description of Artificial Sequence: Synthetic oligonucleotide
  Antisense strand to SEQ ID NO: 56342
uucaucacugucugugagc

SEQ ID NO: 56424 - RNA, 19 nt, Artificial Sequence
  Description of Artificial Sequence: Synthetic oligonucleotide
  Sense strand starting at position 1240 of SEQ ID NO: 683
ugaugaaggccuggauaca

SEQ ID NO: 56425 - RNA, 19 nt, Artificial Sequence
  Description of Artificial Sequence: Synthetic oligonucleotide
  Antisense strand to SEQ ID NO: 56344
uguauccaggccuucauca

SEQ ID NO: 56426 - RNA, 19 nt, Artificial Sequence
  Description of Artificial Sequence: Synthetic oligonucleotide
  Sense strand starting at position 1297 of SEQ ID NO: 683
ggcauucuccagcaagaau

SEQ ID NO: 56427 - RNA, 19 nt, Artificial Sequence
  Description of Artificial Sequence: Synthetic oligonucleotide
  Antisense strand to SEQ ID NO: 56346
auucuugcuggagaaugcc

SEQ ID NO: 56428 - RNA, 19 nt, Artificial Sequence
  Description of Artificial Sequence: Synthetic oligonucleotide
  Sense strand starting at position 1435 of SEQ ID NO: 683
gguauuuccuacuuguuua

SEQ ID NO: 56429 - RNA, 19 nt, Artificial Sequence
  Description of Artificial Sequence: Synthetic oligonucleotide
  Antisense strand to SEQ ID NO: 56348
uaaacaaguaggaaauacc

SEQ ID NO: 56430 - RNA, 19 nt, Artificial Sequence
  Description of Artificial Sequence: Synthetic oligonucleotide
  Sense strand starting at position 1445 of SEQ ID NO: 683
acuuguuuacaucauugua

SEQ ID NO: 56431 - RNA, 19 nt, Artificial Sequence
  Description of Artificial Sequence: Synthetic oligonucleotide
  Antisense strand to SEQ ID NO: 56350
uacaaugauguaaacaagu

SEQ ID NO: 56432 - RNA, 19 nt, Artificial Sequence
  Description of Artificial Sequence: Synthetic oligonucleotide
  Sense strand starting at position 1447 of SEQ ID NO: 683
uuguuuacaucauuguaca

SEQ ID NO: 56433 - RNA, 19 nt, Artificial Sequence
  Description of Artificial Sequence: Synthetic oligonucleotide
  Antisense strand to SEQ ID NO: 56352
uguacaaugauguaaacaa

SEQ ID NO: 56434 - RNA, 19 nt, Artificial Sequence
  Description of Artificial Sequence: Synthetic oligonucleotide
  Sense strand starting at position 1569 of SEQ ID NO: 683
aucaguguucuuuauccaa

SEQ ID NO: 56435 - RNA, 19 nt, Artificial Sequence
  Description of Artificial Sequence: Synthetic oligonucleotide
  Antisense strand to SEQ ID NO: 56354
uuggauaaagaacacugau

SEQ ID NO: 56436 - RNA, 19 nt, Artificial Sequence
  Description of Artificial Sequence: Synthetic oligonucleotide
  Sense strand starting at position 1614 of SEQ ID NO: 683
aucccucuuccuggaaaga

SEQ ID NO: 56437 - RNA, 19 nt, Artificial Sequence
  Description of Artificial Sequence: Synthetic oligonucleotide
  Antisense strand to SEQ ID NO: 56356
ucuuuccaggaagagggau

SEQ ID NO: 56438 - RNA, 19 nt, Artificial Sequence
  Description of Artificial Sequence: Synthetic oligonucleotide
  Sense strand starting at position 1875 of SEQ ID NO: 683
ucauguagucaucgaaauu

SEQ ID NO: 56439 - RNA, 19 nt, Artificial Sequence
  Description of Artificial Sequence: Synthetic oligonucleotide
  Antisense strand to SEQ ID NO: 56358
aauuucgaugacuacauga

SEQ ID NO: 56440 - RNA, 19 nt, Artificial Sequence
  Description of Artificial Sequence: Synthetic oligonucleotide
  Sense strand starting at position 1921 of SEQ ID NO: 683
caggaaagcguccaccaua

SEQ ID NO: 56441 - RNA, 19 nt, Artificial Sequence
  Description of Artificial Sequence: Synthetic oligonucleotide
  Antisense strand to SEQ ID NO: 56360
uaugguggacgcuuuccug

SEQ ID NO: 56442 - RNA, 19 nt, Artificial Sequence
  Description of Artificial Sequence: Synthetic oligonucleotide
  Sense strand starting at position 1926 of SEQ ID NO: 683
aagcguccaccauagugau

SEQ ID NO: 56443 - RNA, 19 nt, Artificial Sequence
  Description of Artificial Sequence: Synthetic oligonucleotide
  Antisense strand to SEQ ID NO: 56362
aucacuaugguggacgcuu

SEQ ID NO: 56444 - RNA, 19 nt, Artificial Sequence
  Description of Artificial Sequence: Synthetic oligonucleotide
  Sense strand starting at position 2011 of SEQ ID NO: 683
ccgggcugccgcuuuaaau

SEQ ID NO: 56445 - RNA, 19 nt, Artificial Sequence
  Description of Artificial Sequence: Synthetic oligonucleotide
  Antisense strand to SEQ ID NO: 56364
auuuaaagcggcagcccgg

SEQ ID NO: 56446 - RNA, 19 nt, Artificial Sequence
  Description of Artificial Sequence: Synthetic oligonucleotide
  Sense strand starting at position 2012 of SEQ ID NO: 683
cgggcugccgcuuuaaaua

SEQ ID NO: 56447 - RNA, 19 nt, Artificial Sequence
  Description of Artificial Sequence: Synthetic oligonucleotide
  Antisense strand to SEQ ID NO: 56366
uauuuaaagcggcagcccg

SEQ ID NO: 56448 - RNA, 19 nt, Artificial Sequence
  Description of Artificial Sequence: Synthetic oligonucleotide
  Sense strand starting at position 2258 of SEQ ID NO: 683
ucuggaaucugagaaggaa

SEQ ID NO: 56449 - RNA, 19 nt, Artificial Sequence
  Description of Artificial Sequence: Synthetic oligonucleotide
  Antisense strand to SEQ ID NO: 56368
uuccuucucagauuccaga

SEQ ID NO: 56450 - RNA, 19 nt, Artificial Sequence
  Description of Artificial Sequence: Synthetic oligonucleotide
  Sense strand starting at position 2857 of SEQ ID NO: 683
ugcagaaauucugccaauu

SEQ ID NO: 56451 - RNA, 19 nt, Artificial Sequence
  Description of Artificial Sequence: Synthetic oligonucleotide
  Antisense strand to SEQ ID NO: 56370
aauuggcagaauuucugca

SEQ ID NO: 56452 - RNA, 19 nt, Artificial Sequence
  Description of Artificial Sequence: Synthetic oligonucleotide
  Sense strand starting at position 3005 of SEQ ID NO: 683
uuugucacuguauaguuua

SEQ ID NO: 56453 - RNA, 19 nt, Artificial Sequence
  Description of Artificial Sequence: Synthetic oligonucleotide
  Antisense strand to SEQ ID NO: 56372
uaaacuauacagugacaaa

SEQ ID NO: 56454 - RNA, 19 nt, Artificial Sequence
  Description of Artificial Sequence: Synthetic oligonucleotide
  Sense strand starting at position 3051 of SEQ ID NO: 683
ugccuugucuugcuauuua

SEQ ID NO: 56455 - RNA, 19 nt, Artificial Sequence
  Description of Artificial Sequence: Synthetic oligonucleotide
  Antisense strand to SEQ ID NO: 56374
uaaauagcaagacaaggca

SEQ ID NO: 56456 - RNA, 19 nt, Artificial Sequence
  Description of Artificial Sequence: Synthetic oligonucleotide
  Sense strand starting at position 3369 of SEQ ID NO: 683
ggagcucacucauuaauuc

SEQ ID NO: 56457 - RNA, 19 nt, Artificial Sequence
  Description of Artificial Sequence: Synthetic oligonucleotide
  Antisense strand to SEQ ID NO: 56376
gaauuaaugagugagcucc

SEQ ID NO: 56458 - RNA, 19 nt, Artificial Sequence
  Description of Artificial Sequence: Synthetic oligonucleotide
  Sense strand starting at position 3537 of SEQ ID NO: 683
aauguagacuucucaaagg

SEQ ID NO: 56459 - RNA, 19 nt, Artificial Sequence
  Description of Artificial Sequence: Synthetic oligonucleotide
  Antisense strand to SEQ ID NO: 56378
ccuuugagaagucuacauu

SEQ ID NO: 56460 - RNA, 19 nt, Artificial Sequence
  Description of Artificial Sequence: Synthetic oligonucleotide
  Sense strand starting at position 3607 of SEQ ID NO: 683
aggaguagugccgaacuga

SEQ ID NO: 56461 - RNA, 19 nt, Artificial Sequence
  Description of Artificial Sequence: Synthetic oligonucleotide
  Antisense strand to SEQ ID NO: 56380
ucaguucggcacuacuccu

SEQ ID NO: 56462 - RNA, 19 nt, Artificial Sequence
  Description of Artificial Sequence: Synthetic oligonucleotide
  Sense strand starting at position 3819 of SEQ ID NO: 683
gaucuugauuccuuuggac

SEQ ID NO: 56463 - RNA, 19 nt, Artificial Sequence
  Description of Artificial Sequence: Synthetic oligonucleotide
  Antisense strand to SEQ ID NO: 56382
guccaaaggaaucaagauc

SEQ ID NO: 56464 - RNA, 19 nt, Artificial Sequence
  Description of Artificial Sequence: Synthetic oligonucleotide
  Sense strand starting at position 3916 of SEQ ID NO: 683
uggugaucucacuguugga

SEQ ID NO: 56465 - RNA, 19 nt, Artificial Sequence
  Description of Artificial Sequence: Synthetic oligonucleotide
  Antisense strand to SEQ ID NO: 56384
uccaacagugagaucacca

SEQ ID NO: 56466 - RNA, 19 nt, Artificial Sequence
  Description of Artificial Sequence: Synthetic oligonucleotide
  Sense strand starting at position 47 of SEQ ID NO: 684
auaccuguauaucagauuu

SEQ ID NO: 56467 - RNA, 19 nt, Artificial Sequence
  Description of Artificial Sequence: Synthetic oligonucleotide
  Antisense strand to SEQ ID NO: 56386
aaaucugauauacagguau

SEQ ID NO: 56468 - RNA, 19 nt, Artificial Sequence
  Description of Artificial Sequence: Synthetic oligonucleotide
  Sense strand starting at position 98 of SEQ ID NO: 684
ugguuaucugaacguuaau

SEQ ID NO: 56469 - RNA, 19 nt, Artificial Sequence
  Description of Artificial Sequence: Synthetic oligonucleotide
  Antisense strand to SEQ ID NO: 56388
auuaacguucagauaacca

SEQ ID NO: 56470 - RNA, 19 nt, Artificial Sequence
  Description of Artificial Sequence: Synthetic oligonucleotide
  Sense strand starting at position 524 of SEQ ID NO: 684
aguguuagaaccugugcaa

SEQ ID NO: 56471 - RNA, 19 nt, Artificial Sequence
  Description of Artificial Sequence: Synthetic oligonucleotide
  Antisense strand to SEQ ID NO: 56390
uugcacagguucuaacacu

SEQ ID NO: 56472 - RNA, 19 nt, Artificial Sequence
  Description of Artificial Sequence: Synthetic oligonucleotide
  Sense strand starting at position 536 of SEQ ID NO: 684
ugugcaaugugaguauuaa

SEQ ID NO: 56473 - RNA, 19 nt, Artificial Sequence
  Description of Artificial Sequence: Synthetic oligonucleotide
  Antisense strand to SEQ ID NO: 56392
uuaauacucacauugcaca

SEQ ID NO: 56474 - RNA, 19 nt, Artificial Sequence
  Description of Artificial Sequence: Synthetic oligonucleotide
  Sense strand starting at position 537 of SEQ ID NO: 684
gugcaaugugaguauuaaa

SEQ ID NO: 56475 - RNA, 19 nt, Artificial Sequence
  Description of Artificial Sequence: Synthetic oligonucleotide
  Antisense strand to SEQ ID NO: 56394
uuuaauacucacauugcac

SEQ ID NO: 56476 - RNA, 19 nt, Artificial Sequence
  Description of Artificial Sequence: Synthetic oligonucleotide
  Sense strand starting at position 570 of SEQ ID NO: 684
cugccuauacuugacagua

SEQ ID NO: 56477 - RNA, 19 nt, Artificial Sequence
  Description of Artificial Sequence: Synthetic oligonucleotide
  Antisense strand to SEQ ID NO: 56396
uacugucaaguauaggcag

SEQ ID NO: 56478 - RNA, 19 nt, Artificial Sequence
  Description of Artificial Sequence: Synthetic oligonucleotide
  Sense strand starting at position 667 of SEQ ID NO: 684
gcacucacaggauauuagu

SEQ ID NO: 56479 - RNA, 19 nt, Artificial Sequence
  Description of Artificial Sequence: Synthetic oligonucleotide
  Antisense strand to SEQ ID NO: 56398
acuaauauccugugagugc

SEQ ID NO: 56480 - RNA, 19 nt, Artificial Sequence
  Description of Artificial Sequence: Synthetic oligonucleotide
  Sense strand starting at position 801 of SEQ ID NO: 684
ccuuuaaaguauuccugga

SEQ ID NO: 56481 - RNA, 19 nt, Artificial Sequence
  Description of Artificial Sequence: Synthetic oligonucleotide
  Antisense strand to SEQ ID NO: 56400
uccaggaauacuuuaaagg

SEQ ID NO: 56482 - RNA, 19 nt, Artificial Sequence
  Description of Artificial Sequence: Synthetic oligonucleotide
  Sense strand starting at position 803 of SEQ ID NO: 684
uuuaaaguauuccuggaga

SEQ ID NO: 56483 - RNA, 19 nt, Artificial Sequence
  Description of Artificial Sequence: Synthetic oligonucleotide
  Antisense strand to SEQ ID NO: 56402
ucuccaggaauacuuuaaa

SEQ ID NO: 56484 - RNA, 19 nt, Artificial Sequence
  Description of Artificial Sequence: Synthetic oligonucleotide
  Sense strand starting at position 866 of SEQ ID NO: 684
cgcaaauaugaauagguaa

SEQ ID NO: 56485 - RNA, 19 nt, Artificial Sequence
  Description of Artificial Sequence: Synthetic oligonucleotide
  Antisense strand to SEQ ID NO: 56404
uuaccuauucauauuugcg

SEQ ID NO: 56486 - RNA, 19 nt, Artificial Sequence
  Description of Artificial Sequence: Synthetic oligonucleotide
  Sense strand starting at position 920 of SEQ ID NO: 684
uggaauauauagucuuauc

SEQ ID NO: 56487 - RNA, 19 nt, Artificial Sequence
  Description of Artificial Sequence: Synthetic oligonucleotide
  Antisense strand to SEQ ID NO: 56406
gauaagacuauauauucca

SEQ ID NO: 56488 - RNA, 19 nt, Artificial Sequence
  Description of Artificial Sequence: Synthetic oligonucleotide
  Sense strand starting at position 1030 of SEQ ID NO: 684
uugucauugcccucgccau

SEQ ID NO: 56489 - RNA, 19 nt, Artificial Sequence
  Description of Artificial Sequence: Synthetic oligonucleotide
  Antisense strand to SEQ ID NO: 56408
auggcgagggcaaugacaa

SEQ ID NO: 56490 - RNA, 19 nt, Artificial Sequence
  Description of Artificial Sequence: Synthetic oligonucleotide
  Sense strand starting at position 1432 of SEQ ID NO: 684
agaagacucccuuguggca

SEQ ID NO: 56491 - RNA, 19 nt, Artificial Sequence
  Description of Artificial Sequence: Synthetic oligonucleotide
  Antisense strand to SEQ ID NO: 56410
ugccacaagggagucuucu

SEQ ID NO: 56492 - RNA, 19 nt, Artificial Sequence
  Description of Artificial Sequence: Synthetic oligonucleotide
  Sense strand starting at position 1517 of SEQ ID NO: 684
ggaucaucucccgguccau

SEQ ID NO: 56493 - RNA, 19 nt, Artificial Sequence
  Description of Artificial Sequence: Synthetic oligonucleotide
  Antisense strand to SEQ ID NO: 56412
auggaccgggagaugaucc

SEQ ID NO: 56494 - RNA, 19 nt, Artificial Sequence
  Description of Artificial Sequence: Synthetic oligonucleotide
  Sense strand starting at position 1722 of SEQ ID NO: 684
gcgcucaugcacucgguaa

SEQ ID NO: 56495 - RNA, 19 nt, Artificial Sequence
  Description of Artificial Sequence: Synthetic oligonucleotide
  Antisense strand to SEQ ID NO: 56414
uuaccgagugcaugagcgc

SEQ ID NO: 56496 - RNA, 19 nt, Artificial Sequence
  Description of Artificial Sequence: Synthetic oligonucleotide
  Sense strand starting at position 1803 of SEQ ID NO: 684
ggaagauuggucuggaugu

SEQ ID NO: 56497 - RNA, 19 nt, Artificial Sequence
  Description of Artificial Sequence: Synthetic oligonucleotide
  Antisense strand to SEQ ID NO: 56416
acauccagaccaaucuucc

SEQ ID NO: 56498 - RNA, 19 nt, Artificial Sequence
  Description of Artificial Sequence: Synthetic oligonucleotide
  Sense strand starting at position 2175 of SEQ ID NO: 684
gcaacagguuauuccaguu

SEQ ID NO: 56499 - RNA, 19 nt, Artificial Sequence
  Description of Artificial Sequence: Synthetic oligonucleotide
  Antisense strand to SEQ ID NO: 56418
aacuggaauaaccuguugc

SEQ ID NO: 56500 - RNA, 19 nt, Artificial Sequence
  Description of Artificial Sequence: Synthetic oligonucleotide
  Sense strand starting at position 2314 of SEQ ID NO: 684
uguuacaacucgucuaaca

SEQ ID NO: 56501 - RNA, 19 nt, Artificial Sequence
  Description of Artificial Sequence: Synthetic oligonucleotide
  Antisense strand to SEQ ID NO: 56420
uguuagacgaguuguaaca

SEQ ID NO: 56502 - RNA, 19 nt, Artificial Sequence
  Description of Artificial Sequence: Synthetic oligonucleotide
  Sense strand starting at position 2618 of SEQ ID NO: 684
uuaauaggguugcuccaaa

SEQ ID NO: 56503 - RNA, 19 nt, Artificial Sequence
  Description of Artificial Sequence: Synthetic oligonucleotide
  Antisense strand to SEQ ID NO: 56422
uuuggagcaacccuauuaa

SEQ ID NO: 56504 - RNA, 19 nt, Artificial Sequence
  Description of Artificial Sequence: Synthetic oligonucleotide
  Sense strand starting at position 2720 of SEQ ID NO: 684
ugaauccagcuuugaauau

SEQ ID NO: 56505 - RNA, 19 nt, Artificial Sequence
  Description of Artificial Sequence: Synthetic oligonucleotide
  Antisense strand to SEQ ID NO: 56424
auauucaaagcuggauuca

SEQ ID NO: 56506 - RNA, 19 nt, Artificial Sequence
  Description of Artificial Sequence: Synthetic oligonucleotide
  Sense strand starting at position 2729 of SEQ ID NO: 684
cuuugaauauagucagucu

SEQ ID NO: 56507 - RNA, 19 nt, Artificial Sequence
  Description of Artificial Sequence: Synthetic oligonucleotide
  Antisense strand to SEQ ID NO: 56426
agacugacuauauucaaag

SEQ ID NO: 56508 - RNA, 19 nt, Artificial Sequence
  Description of Artificial Sequence: Synthetic oligonucleotide
  Sense strand starting at position 2732 of SEQ ID NO: 684
ugaauauagucagucuauu

SEQ ID NO: 56509 - RNA, 19 nt, Artificial Sequence
  Description of Artificial Sequence: Synthetic oligonucleotide
  Antisense strand to SEQ ID NO: 56428
aauagacugacuauauuca

SEQ ID NO: 56510 - RNA, 19 nt, Artificial Sequence
  Description of Artificial Sequence: Synthetic oligonucleotide
  Sense strand starting at position 3167 of SEQ ID NO: 684
agccaaagacuauguacaa

SEQ ID NO: 56511 - RNA, 19 nt, Artificial Sequence
  Description of Artificial Sequence: Synthetic oligonucleotide
  Antisense strand to SEQ ID NO: 56430
uuguacauagucuuuggcu

SEQ ID NO: 56512 - RNA, 19 nt, Artificial Sequence
  Description of Artificial Sequence: Synthetic oligonucleotide
  Sense strand starting at position 3168 of SEQ ID NO: 684
gccaaagacuauguacaau

SEQ ID NO: 56513 - RNA, 19 nt, Artificial Sequence
  Description of Artificial Sequence: Synthetic oligonucleotide
  Antisense strand to SEQ ID NO: 56432
auuguacauagucuuuggc

SEQ ID NO: 56514 - RNA, 19 nt, Artificial Sequence
  Description of Artificial Sequence: Synthetic oligonucleotide
  Sense strand starting at position 3179 of SEQ ID NO: 684
uguacaaugaagugugaca

SEQ ID NO: 56515 - RNA, 19 nt, Artificial Sequence
  Description of Artificial Sequence: Synthetic oligonucleotide
  Antisense strand to SEQ ID NO: 56434
ugucacacuucauuguaca

SEQ ID NO: 56516 - RNA, 19 nt, Artificial Sequence
  Description of Artificial Sequence: Synthetic oligonucleotide
  Sense strand starting at position 3207 of SEQ ID NO: 684
ugucguccagguuagagaa

SEQ ID NO: 56517 - RNA, 19 nt, Artificial Sequence
  Description of Artificial Sequence: Synthetic oligonucleotide
  Antisense strand to SEQ ID NO: 56436
uucucuaaccuggacgaca

SEQ ID NO: 56518 - RNA, 19 nt, Artificial Sequence
  Description of Artificial Sequence: Synthetic oligonucleotide
  Sense strand starting at position 3225 of SEQ ID NO: 684
aagugugacaguggaaguu

SEQ ID NO: 56519 - RNA, 19 nt, Artificial Sequence
  Description of Artificial Sequence: Synthetic oligonucleotide
  Antisense strand to SEQ ID NO: 56438
aacuuccacugucacacuu

SEQ ID NO: 56520 - RNA, 19 nt, Artificial Sequence
  Description of Artificial Sequence: Synthetic oligonucleotide
  Sense strand starting at position 3289 of SEQ ID NO: 684
ggcauuuacuugcuuugga

SEQ ID NO: 56521 - RNA, 19 nt, Artificial Sequence
  Description of Artificial Sequence: Synthetic oligonucleotide
  Antisense strand to SEQ ID NO: 56440
uccaaagcaaguaaaugcc

SEQ ID NO: 56522 - RNA, 19 nt, Artificial Sequence
  Description of Artificial Sequence: Synthetic oligonucleotide
  Sense strand starting at position 3290 of SEQ ID NO: 684
gcauuuacuugcuuuggaa

SEQ ID NO: 56523 - RNA, 19 nt, Artificial Sequence
  Description of Artificial Sequence: Synthetic oligonucleotide
  Antisense strand to SEQ ID NO: 56442
uuccaaagcaaguaaaugc

SEQ ID NO: 56524 - RNA, 19 nt, Artificial Sequence
  Description of Artificial Sequence: Synthetic oligonucleotide
  Sense strand starting at position 3299 of SEQ ID NO: 684
ugcuuuggaaaguauguaa

SEQ ID NO: 56525 - RNA, 19 nt, Artificial Sequence
  Description of Artificial Sequence: Synthetic oligonucleotide
  Antisense strand to SEQ ID NO: 56444
uuacauacuuuccaaagca

SEQ ID NO: 56526 - RNA, 19 nt, Artificial Sequence
  Description of Artificial Sequence: Synthetic oligonucleotide
  Sense strand starting at position 3401 of SEQ ID NO: 684
cuaggcuucccuuaagaac

SEQ ID NO: 56527 - RNA, 19 nt, Artificial Sequence
  Description of Artificial Sequence: Synthetic oligonucleotide
  Antisense strand to SEQ ID NO: 56446
guucuuaagggaagccuag

SEQ ID NO: 56528 - RNA, 19 nt, Artificial Sequence
  Description of Artificial Sequence: Synthetic oligonucleotide
  Sense strand starting at position 3583 of SEQ ID NO: 684
uccauaaacugggaauaua

SEQ ID NO: 56529 - RNA, 19 nt, Artificial Sequence
  Description of Artificial Sequence: Synthetic oligonucleotide
  Antisense strand to SEQ ID NO: 56448
uauauucccaguuuaugga

SEQ ID NO: 56530 - RNA, 19 nt, Artificial Sequence
  Description of Artificial Sequence: Synthetic oligonucleotide
  Sense strand starting at position 3651 of SEQ ID NO: 684
aaagaagugcacuguauua

SEQ ID NO: 56531 - RNA, 19 nt, Artificial Sequence
  Description of Artificial Sequence: Synthetic oligonucleotide
  Antisense strand to SEQ ID NO: 56450
uaauacagugcacuucuuu

SEQ ID NO: 56532 - RNA, 19 nt, Artificial Sequence
  Description of Artificial Sequence: Synthetic oligonucleotide
  Sense strand starting at position 3653 of SEQ ID NO: 684
agaagugcacuguauuaug

SEQ ID NO: 56533 - RNA, 19 nt, Artificial Sequence
  Description of Artificial Sequence: Synthetic oligonucleotide
  Antisense strand to SEQ ID NO: 56452
cauaauacagugcacuucu

SEQ ID NO: 56534 - RNA, 19 nt, Artificial Sequence
  Description of Artificial Sequence: Synthetic oligonucleotide
  Sense strand starting at position 3661 of SEQ ID NO: 684
acuguauuaugaucugagu

SEQ ID NO: 56535 - RNA, 19 nt, Artificial Sequence
  Description of Artificial Sequence: Synthetic oligonucleotide
  Antisense strand to SEQ ID NO: 56454
acucagaucauaauacagu

SEQ ID NO: 56536 - RNA, 19 nt, Artificial Sequence
  Description of Artificial Sequence: Synthetic oligonucleotide
  Sense strand starting at position 3714 of SEQ ID NO: 684
ggccuacaguucuuaagua

SEQ ID NO: 56537 - RNA, 19 nt, Artificial Sequence
  Description of Artificial Sequence: Synthetic oligonucleotide
  Antisense strand to SEQ ID NO: 56456
uacuuaagaacuguaggcc

SEQ ID NO: 56538 - RNA, 19 nt, Artificial Sequence
  Description of Artificial Sequence: Synthetic oligonucleotide
  Sense strand starting at position 3729 of SEQ ID NO: 684
aguacuaaucuguguuuag

SEQ ID NO: 56539 - RNA, 19 nt, Artificial Sequence
  Description of Artificial Sequence: Synthetic oligonucleotide
  Antisense strand to SEQ ID NO: 56458
cuaaacacagauuaguacu

SEQ ID NO: 56540 - RNA, 19 nt, Artificial Sequence
  Description of Artificial Sequence: Synthetic oligonucleotide
  Sense strand starting at position 3730 of SEQ ID NO: 684
guacuaaucuguguuuaga

SEQ ID NO: 56541 - RNA, 19 nt, Artificial Sequence
  Description of Artificial Sequence: Synthetic oligonucleotide
  Antisense strand to SEQ ID NO: 56460
ucuaaacacagauuaguac

SEQ ID NO: 56542 - RNA, 19 nt, Artificial Sequence
  Description of Artificial Sequence: Synthetic oligonucleotide
  Sense strand starting at position 3733 of SEQ ID NO: 684
cuaaucuguguuuagacca

SEQ ID NO: 56543 - RNA, 19 nt, Artificial Sequence
  Description of Artificial Sequence: Synthetic oligonucleotide
  Antisense strand to SEQ ID NO: 56462
uggucuaaacacagauuag

SEQ ID NO: 56544 - RNA, 19 nt, Artificial Sequence
  Description of Artificial Sequence: Synthetic oligonucleotide
  Sense strand starting at position 3738 of SEQ ID NO: 684
cuguguuuagaccagaauu

SEQ ID NO: 56545 - RNA, 19 nt, Artificial Sequence
  Description of Artificial Sequence: Synthetic oligonucleotide
  Antisense strand to SEQ ID NO: 56464
aauucuggucuaaacacag

SEQ ID NO: 56546 - RNA, 19 nt, Artificial Sequence
  Description of Artificial Sequence: Synthetic oligonucleotide
  Sense strand starting at position 47 of SEQ ID NO: 685
agccauugggcucagaaga

SEQ ID NO: 56547 - RNA, 19 nt, Artificial Sequence
  Description of Artificial Sequence: Synthetic oligonucleotide
  Antisense strand to SEQ ID NO: 56466
ucuucugagcccaauggcu

SEQ ID NO: 56548 - RNA, 19 nt, Artificial Sequence
  Description of Artificial Sequence: Synthetic oligonucleotide
  Sense strand starting at position 91 of SEQ ID NO: 685
ggaggugaaguuugagaug

SEQ ID NO: 56549 - RNA, 19 nt, Artificial Sequence
  Description of Artificial Sequence: Synthetic oligonucleotide
  Antisense strand to SEQ ID NO: 56468
caucucaaacuucaccucc

SEQ ID NO: 56550 - RNA, 19 nt, Artificial Sequence
  Description of Artificial Sequence: Synthetic oligonucleotide
  Sense strand starting at position 96 of SEQ ID NO: 685
ugaaguuugagauggacuu

SEQ ID NO: 56551 - RNA, 19 nt, Artificial Sequence
  Description of Artificial Sequence: Synthetic oligonucleotide
  Antisense strand to SEQ ID NO: 56470
aaguccaucucaaacuuca

SEQ ID NO: 56552 - RNA, 19 nt, Artificial Sequence
  Description of Artificial Sequence: Synthetic oligonucleotide
  Sense strand starting at position 97 of SEQ ID NO: 685
gaaguuugagauggacuuu

SEQ ID NO: 56553 - RNA, 19 nt, Artificial Sequence
  Description of Artificial Sequence: Synthetic oligonucleotide
  Antisense strand to SEQ ID NO: 56472
aaaguccaucucaaacuuc

SEQ ID NO: 56554 - RNA, 19 nt, Artificial Sequence
  Description of Artificial Sequence: Synthetic oligonucleotide
  Sense strand starting at position 570 of SEQ ID NO: 685
guuggcucagaguaugaaa

SEQ ID NO: 56555 - RNA, 19 nt, Artificial Sequence
  Description of Artificial Sequence: Synthetic oligonucleotide
  Antisense strand to SEQ ID NO: 56474
uuucauacucugagccaac

SEQ ID NO: 56556 - RNA, 19 nt, Artificial Sequence
  Description of Artificial Sequence: Synthetic oligonucleotide
  Sense strand starting at position 624 of SEQ ID NO: 685
ggcaguaggagucauuaga

SEQ ID NO: 56557 - RNA, 19 nt, Artificial Sequence
  Description of Artificial Sequence: Synthetic oligonucleotide
  Antisense strand to SEQ ID NO: 56476
ucuaaugacuccuacugcc

SEQ ID NO: 56558 - RNA, 19 nt, Artificial Sequence
  Description of Artificial Sequence: Synthetic oligonucleotide
  Sense strand starting at position 644 of SEQ ID NO: 685
guucuugggagagguaauc

SEQ ID NO: 56559 - RNA, 19 nt, Artificial Sequence
  Description of Artificial Sequence: Synthetic oligonucleotide
  Antisense strand to SEQ ID NO: 56478
gauuaccucucccaagaac

SEQ ID NO: 56560 - RNA, 19 nt, Artificial Sequence
  Description of Artificial Sequence: Synthetic oligonucleotide
  Sense strand starting at position 654 of SEQ ID NO: 685
gagguaauccugugauuag

SEQ ID NO: 56561 - RNA, 19 nt, Artificial Sequence
  Description of Artificial Sequence: Synthetic oligonucleotide
  Antisense strand to SEQ ID NO: 56480
cuaaucacaggauuaccuc

SEQ ID NO: 56562 - RNA, 19 nt, Artificial Sequence
  Description of Artificial Sequence: Synthetic oligonucleotide
  Sense strand starting at position 657 of SEQ ID NO: 685
guaauccugugauuagaag

SEQ ID NO: 56563 - RNA, 19 nt, Artificial Sequence
  Description of Artificial Sequence: Synthetic oligonucleotide
  Antisense strand to SEQ ID NO: 56482
cuucuaaucacaggauuac

SEQ ID NO: 56564 - RNA, 19 nt, Artificial Sequence
  Description of Artificial Sequence: Synthetic oligonucleotide
  Sense strand starting at position 658 of SEQ ID NO: 685
uaauccugugauuagaagu

SEQ ID NO: 56565 - RNA, 19 nt, Artificial Sequence
  Description of Artificial Sequence: Synthetic oligonucleotide
  Antisense strand to SEQ ID NO: 56484
acuucuaaucacaggauua

SEQ ID NO: 56566 - RNA, 19 nt, Artificial Sequence
  Description of Artificial Sequence: Synthetic oligonucleotide
  Sense strand starting at position 665 of SEQ ID NO: 685
gugauuagaagucaaguuu

SEQ ID NO: 56567 - RNA, 19 nt, Artificial Sequence
  Description of Artificial Sequence: Synthetic oligonucleotide
  Antisense strand to SEQ ID NO: 56486
aaacuugacuucuaaucac

SEQ ID NO: 56568 - RNA, 19 nt, Artificial Sequence
  Description of Artificial Sequence: Synthetic oligonucleotide
  Sense strand starting at position 705 of SEQ ID NO: 685
caggcauccugaguuagag

SEQ ID NO: 56569 - RNA, 19 nt, Artificial Sequence
  Description of Artificial Sequence: Synthetic oligonucleotide
  Antisense strand to SEQ ID NO: 56488
cucuaacucaggaugccug

SEQ ID NO: 56570 - RNA, 19 nt, Artificial Sequence
  Description of Artificial Sequence: Synthetic oligonucleotide
  Sense strand starting at position 707 of SEQ ID NO: 685
ggcauccugaguuagagga

SEQ ID NO: 56571 - RNA, 19 nt, Artificial Sequence
  Description of Artificial Sequence: Synthetic oligonucleotide
  Antisense strand to SEQ ID NO: 56490
uccucuaacucaggaugcc

SEQ ID NO: 56572 - RNA, 19 nt, Artificial Sequence
  Description of Artificial Sequence: Synthetic oligonucleotide
  Sense strand starting at position 810 of SEQ ID NO: 685
uucuuaucccaguagacau

SEQ ID NO: 56573 - RNA, 19 nt, Artificial Sequence
  Description of Artificial Sequence: Synthetic oligonucleotide
  Antisense strand to SEQ ID NO: 56492
augucuacugggauaagaa

SEQ ID NO: 56574 - RNA, 19 nt, Artificial Sequence
  Description of Artificial Sequence: Synthetic oligonucleotide
  Sense strand starting at position 817 of SEQ ID NO: 685
cccaguagacauggaucua

SEQ ID NO: 56575 - RNA, 19 nt, Artificial Sequence
  Description of Artificial Sequence: Synthetic oligonucleotide
  Antisense strand to SEQ ID NO: 56494
uagauccaugucuacuggg

SEQ ID NO: 56576 - RNA, 19 nt, Artificial Sequence
  Description of Artificial Sequence: Synthetic oligonucleotide
  Sense strand starting at position 851 of SEQ ID NO: 685
uggccauugacuggaucaa

SEQ ID NO: 56577 - RNA, 19 nt, Artificial Sequence
  Description of Artificial Sequence: Synthetic oligonucleotide
  Antisense strand to SEQ ID NO: 56496
uugauccagucaauggcca

SEQ ID NO: 56578 - RNA, 19 nt, Artificial Sequence
  Description of Artificial Sequence: Synthetic oligonucleotide
  Sense strand starting at position 887 of SEQ ID NO: 685
augggaagaggugguaauu

SEQ ID NO: 56579 - RNA, 19 nt, Artificial Sequence
  Description of Artificial Sequence: Synthetic oligonucleotide
  Antisense strand to SEQ ID NO: 56498
aauuaccaccucuucccau

SEQ ID NO: 56580 - RNA, 19 nt, Artificial Sequence
  Description of Artificial Sequence: Synthetic oligonucleotide
  Sense strand starting at position 954 of SEQ ID NO: 685
ugaaauagcugguuuggau

SEQ ID NO: 56581 - RNA, 19 nt, Artificial Sequence
  Description of Artificial Sequence: Synthetic oligonucleotide
  Antisense strand to SEQ ID NO: 56500
auccaaaccagcuauuuca

SEQ ID NO: 56582 - RNA, 19 nt, Artificial Sequence
  Description of Artificial Sequence: Synthetic oligonucleotide
  Sense strand starting at position 966 of SEQ ID NO: 685
uuuggauggugaucaauga

SEQ ID NO: 56583 - RNA, 19 nt, Artificial Sequence
  Description of Artificial Sequence: Synthetic oligonucleotide
  Antisense strand to SEQ ID NO: 56502
ucauugaucaccauccaaa

SEQ ID NO: 56584 - RNA, 19 nt, Artificial Sequence
  Description of Artificial Sequence: Synthetic oligonucleotide
  Sense strand starting at position 1016 of SEQ ID NO: 685
ucaaaucuugguggaauau

SEQ ID NO: 56585 - RNA, 19 nt, Artificial Sequence
  Description of Artificial Sequence: Synthetic oligonucleotide
  Antisense strand to SEQ ID NO: 56504
auauuccaccaagauuuga

SEQ ID NO: 56586 - RNA, 19 nt, Artificial Sequence
  Description of Artificial Sequence: Synthetic oligonucleotide
  Sense strand starting at position 1041 of SEQ ID NO: 685
agagguugcccaggagaca

SEQ ID NO: 56587 - RNA, 19 nt, Artificial Sequence
  Description of Artificial Sequence: Synthetic oligonucleotide
  Antisense strand to SEQ ID NO: 56506
ugucuccugggcaaccucu

SEQ ID NO: 56588 - RNA, 19 nt, Artificial Sequence
  Description of Artificial Sequence: Synthetic oligonucleotide
  Sense strand starting at position 1057 of SEQ ID NO: 685
acaguuguaaguugagaua

SEQ ID NO: 56589 - RNA, 19 nt, Artificial Sequence
  Description of Artificial Sequence: Synthetic oligonucleotide
  Antisense strand to SEQ ID NO: 56508
uaucucaacuuacaacugu

SEQ ID NO: 56590 - RNA, 19 nt, Artificial Sequence
  Description of Artificial Sequence: Synthetic oligonucleotide
  Sense strand starting at position 1096 of SEQ ID NO: 685
agagcuacugaauggauua

SEQ ID NO: 56591 - RNA, 19 nt, Artificial Sequence
  Description of Artificial Sequence: Synthetic oligonucleotide
  Antisense strand to SEQ ID NO: 56510
uaauccauucaguagcucu

SEQ ID NO: 56592 - RNA, 19 nt, Artificial Sequence
  Description of Artificial Sequence: Synthetic oligonucleotide
  Sense strand starting at position 1129 of SEQ ID NO: 685
aggguugaaaguuggaaau

SEQ ID NO: 56593 - RNA, 19 nt, Artificial Sequence
  Description of Artificial Sequence: Synthetic oligonucleotide
  Antisense strand to SEQ ID NO: 56512
auuuccaacuuucaacccu

SEQ ID NO: 56594 - RNA, 19 nt, Artificial Sequence
  Description of Artificial Sequence: Synthetic oligonucleotide
  Sense strand starting at position 1202 of SEQ ID NO: 685
ggagacacuugcuuuaaga

SEQ ID NO: 56595 - RNA, 19 nt, Artificial Sequence
  Description of Artificial Sequence: Synthetic oligonucleotide
  Antisense strand to SEQ ID NO: 56514
ucuuaaagcaagugucucc

SEQ ID NO: 56596 - RNA, 19 nt, Artificial Sequence
  Description of Artificial Sequence: Synthetic oligonucleotide
  Sense strand starting at position 1204 of SEQ ID NO: 685
agacacuugcuuuaagauc

SEQ ID NO: 56597 - RNA, 19 nt, Artificial Sequence
  Description of Artificial Sequence: Synthetic oligonucleotide
  Antisense strand to SEQ ID NO: 56516
gaucuuaaagcaagugucu

SEQ ID NO: 56598 - RNA, 19 nt, Artificial Sequence
  Description of Artificial Sequence: Synthetic oligonucleotide
  Sense strand starting at position 1475 of SEQ ID NO: 685
guaggaucacucgaaccca

SEQ ID NO: 56599 - RNA, 19 nt, Artificial Sequence
  Description of Artificial Sequence: Synthetic oligonucleotide
  Antisense strand to SEQ ID NO: 56518
uggguucgagugauccuac

SEQ ID NO: 56600 - RNA, 19 nt, Artificial Sequence
  Description of Artificial Sequence: Synthetic oligonucleotide
  Sense strand starting at position 1576 of SEQ ID NO: 685
gagugucuggaguggagaa

SEQ ID NO: 56601 - RNA, 19 nt, Artificial Sequence
  Description of Artificial Sequence: Synthetic oligonucleotide
  Antisense strand to SEQ ID NO: 56520
uucuccacuccagacacuc

SEQ ID NO: 56602 - RNA, 19 nt, Artificial Sequence
  Description of Artificial Sequence: Synthetic oligonucleotide
  Sense strand starting at position 1596 of SEQ ID NO: 685
ggagcauuaccauggagug

SEQ ID NO: 56603 - RNA, 19 nt, Artificial Sequence
  Description of Artificial Sequence: Synthetic oligonucleotide
  Antisense strand to SEQ ID NO: 56522
cacuccaugguaaugcucc

SEQ ID NO: 56604 - RNA, 19 nt, Artificial Sequence
  Description of Artificial Sequence: Synthetic oligonucleotide
  Sense strand starting at position 1597 of SEQ ID NO: 685
gagcauuaccauggaguga

SEQ ID NO: 56605 - RNA, 19 nt, Artificial Sequence
  Description of Artificial Sequence: Synthetic oligonucleotide
  Antisense strand to SEQ ID NO: 56524
ucacuccaugguaaugcuc

SEQ ID NO: 56606 - RNA, 19 nt, Artificial Sequence
  Description of Artificial Sequence: Synthetic oligonucleotide
  Sense strand starting at position 1945 of SEQ ID NO: 685
aaagcuugacgaugaggaa

SEQ ID NO: 56607 - RNA, 19 nt, Artificial Sequence
  Description of Artificial Sequence: Synthetic oligonucleotide
  Antisense strand to SEQ ID NO: 56526
uuccucaucgucaagcuuu

SEQ ID NO: 56608 - RNA, 19 nt, Artificial Sequence
  Description of Artificial Sequence: Synthetic oligonucleotide
  Sense strand starting at position 2051 of SEQ ID NO: 685
uguuguguggaguaagaaa

SEQ ID NO: 56609 - RNA, 19 nt, Artificial Sequence
  Description of Artificial Sequence: Synthetic oligonucleotide
  Antisense strand to SEQ ID NO: 56528
uuucuuacuccacacaaca

SEQ ID NO: 56610 - RNA, 19 nt, Artificial Sequence
  Description of Artificial Sequence: Synthetic oligonucleotide
  Sense strand starting at position 2093 of SEQ ID NO: 685
cuaagaaguuccuccagac

SEQ ID NO: 56611 - RNA, 19 nt, Artificial Sequence
  Description of Artificial Sequence: Synthetic oligonucleotide
  Antisense strand to SEQ ID NO: 56530
gucuggaggaacuucuuag

SEQ ID NO: 56612 - RNA, 19 nt, Artificial Sequence
  Description of Artificial Sequence: Synthetic oligonucleotide
  Sense strand starting at position 2305 of SEQ ID NO: 685
ucagaagaugcugacugua

SEQ ID NO: 56613 - RNA, 19 nt, Artificial Sequence
  Description of Artificial Sequence: Synthetic oligonucleotide
  Antisense strand to SEQ ID NO: 56532
uacagucagcaucuucuga

SEQ ID NO: 56614 - RNA, 19 nt, Artificial Sequence
  Description of Artificial Sequence: Synthetic oligonucleotide
  Sense strand starting at position 2466 of SEQ ID NO: 685
acuagaugaucccugccau

SEQ ID NO: 56615 - RNA, 19 nt, Artificial Sequence
  Description of Artificial Sequence: Synthetic oligonucleotide
  Antisense strand to SEQ ID NO: 56534
auggcagggaucaucuagu

SEQ ID NO: 56616 - RNA, 19 nt, Artificial Sequence
  Description of Artificial Sequence: Synthetic oligonucleotide
  Sense strand starting at position 2724 of SEQ ID NO: 685
ggguaaggcccaugacuga

SEQ ID NO: 56617 - RNA, 19 nt, Artificial Sequence
  Description of Artificial Sequence: Synthetic oligonucleotide
  Antisense strand to SEQ ID NO: 56536
ucagucaugggccuuaccc

SEQ ID NO: 56618 - RNA, 19 nt, Artificial Sequence
  Description of Artificial Sequence: Synthetic oligonucleotide
  Sense strand starting at position 2842 of SEQ ID NO: 685
ggcaaauuucccugggccu

SEQ ID NO: 56619 - RNA, 19 nt, Artificial Sequence
  Description of Artificial Sequence: Synthetic oligonucleotide
  Antisense strand to SEQ ID NO: 56538
aggcccagggaaauuugcc

SEQ ID NO: 56620 - RNA, 19 nt, Artificial Sequence
  Description of Artificial Sequence: Synthetic oligonucleotide
  Sense strand starting at position 3654 of SEQ ID NO: 685
auguuugagcgugugaagu

SEQ ID NO: 56621 - RNA, 19 nt, Artificial Sequence
  Description of Artificial Sequence: Synthetic oligonucleotide
  Antisense strand to SEQ ID NO: 56540
acuucacacgcucaaacau

SEQ ID NO: 56622 - RNA, 19 nt, Artificial Sequence
  Description of Artificial Sequence: Synthetic oligonucleotide
  Sense strand starting at position 3820 of SEQ ID NO: 685
auguguaaugugucugugu

SEQ ID NO: 56623 - RNA, 19 nt, Artificial Sequence
  Description of Artificial Sequence: Synthetic oligonucleotide
  Antisense strand to SEQ ID NO: 56542
acacagacacauuacacau

SEQ ID NO: 56624 - RNA, 19 nt, Artificial Sequence
  Description of Artificial Sequence: Synthetic oligonucleotide
  Sense strand starting at position 3829 of SEQ ID NO: 685
gugucugugugaauguaug

SEQ ID NO: 56625 - RNA, 19 nt, Artificial Sequence
  Description of Artificial Sequence: Synthetic oligonucleotide
  Antisense strand to SEQ ID NO: 56544
cauacauucacacagacac

SEQ ID NO: 56626 - RNA, 19 nt, Artificial Sequence
  Description of Artificial Sequence: Synthetic oligonucleotide
  Sense strand starting at position 190 of SEQ ID NO: 686
agccauugggcucagaaga

SEQ ID NO: 56627 - RNA, 19 nt, Artificial Sequence
  Description of Artificial Sequence: Synthetic oligonucleotide
  Antisense strand to SEQ ID NO: 56546
ucuucugagcccaauggcu

SEQ ID NO: 56628 - RNA, 19 nt, Artificial Sequence
  Description of Artificial Sequence: Synthetic oligonucleotide
  Sense strand starting at position 234 of SEQ ID NO: 686
ggaggugaaguuugagaug

SEQ ID NO: 56629 - RNA, 19 nt, Artificial Sequence
  Description of Artificial Sequence: Synthetic oligonucleotide
  Antisense strand to SEQ ID NO: 56548
caucucaaacuucaccucc

SEQ ID NO: 56630 - RNA, 19 nt, Artificial Sequence
  Description of Artificial Sequence: Synthetic oligonucleotide
  Sense strand starting at position 239 of SEQ ID NO: 686
ugaaguuugagauggacuu

SEQ ID NO: 56631 - RNA, 19 nt, Artificial Sequence
  Description of Artificial Sequence: Synthetic oligonucleotide
  Antisense strand to SEQ ID NO: 56550
aaguccaucucaaacuuca

SEQ ID NO: 56632 - RNA, 19 nt, Artificial Sequence
  Description of Artificial Sequence: Synthetic oligonucleotide
  Sense strand starting at position 240 of SEQ ID NO: 686
gaaguuugagauggacuuu

SEQ ID NO: 56633 - RNA, 19 nt, Artificial Sequence
  Description of Artificial Sequence: Synthetic oligonucleotide
  Antisense strand to SEQ ID NO: 56552
aaaguccaucucaaacuuc

SEQ ID NO: 56634 - RNA, 19 nt, Artificial Sequence
  Description of Artificial Sequence: Synthetic oligonucleotide
  Sense strand starting at position 713 of SEQ ID NO: 686
guuggcucagaguaugaaa

SEQ ID NO: 56635 - RNA, 19 nt, Artificial Sequence
  Description of Artificial Sequence: Synthetic oligonucleotide
  Antisense strand to SEQ ID NO: 56554
uuucauacucugagccaac

SEQ ID NO: 56636 - RNA, 19 nt, Artificial Sequence
  Description of Artificial Sequence: Synthetic oligonucleotide
  Sense strand starting at position 767 of SEQ ID NO: 686
ggcaguaggagucauuaga

SEQ ID NO: 56637 - RNA, 19 nt, Artificial Sequence
  Description of Artificial Sequence: Synthetic oligonucleotide
  Antisense strand to SEQ ID NO: 56556
ucuaaugacuccuacugcc

SEQ ID NO: 56638 - RNA, 19 nt, Artificial Sequence
  Description of Artificial Sequence: Synthetic oligonucleotide
  Sense strand starting at position 787 of SEQ ID NO: 686
guucuugggagagguaauc

SEQ ID NO: 56639 - RNA, 19 nt, Artificial Sequence
  Description of Artificial Sequence: Synthetic oligonucleotide
  Antisense strand to SEQ ID NO: 56558
gauuaccucucccaagaac

SEQ ID NO: 56640 - RNA, 19 nt, Artificial Sequence
  Description of Artificial Sequence: Synthetic oligonucleotide
  Sense strand starting at position 797 of SEQ ID NO: 686
gagguaauccugugauuag

SEQ ID NO: 56641 - RNA, 19 nt, Artificial Sequence
  Description of Artificial Sequence: Synthetic oligonucleotide
  Antisense strand to SEQ ID NO: 56560
cuaaucacaggauuaccuc

SEQ ID NO: 56642 - RNA, 19 nt, Artificial Sequence
  Description of Artificial Sequence: Synthetic oligonucleotide
  Sense strand starting at position 800 of SEQ ID NO: 686
guaauccugugauuagaag

SEQ ID NO: 56643 - RNA, 19 nt, Artificial Sequence
  Description of Artificial Sequence: Synthetic oligonucleotide
  Antisense strand to SEQ ID NO: 56562
cuucuaaucacaggauuac

SEQ ID NO: 56644 - RNA, 19 nt, Artificial Sequence
  Description of Artificial Sequence: Synthetic oligonucleotide
  Sense strand starting at position 801 of SEQ ID NO: 686
uaauccugugauuagaagu

SEQ ID NO: 56645 - RNA, 19 nt, Artificial Sequence
  Description of Artificial Sequence: Synthetic oligonucleotide
  Antisense strand to SEQ ID NO: 56564
acuucuaaucacaggauua

SEQ ID NO: 56646 - RNA, 19 nt, Artificial Sequence
  Description of Artificial Sequence: Synthetic oligonucleotide
  Sense strand starting at position 808 of SEQ ID NO: 686
gugauuagaagucaaguuu

SEQ ID NO: 56647 - RNA, 19 nt, Artificial Sequence
  Description of Artificial Sequence: Synthetic oligonucleotide
  Antisense strand to SEQ ID NO: 56566
aaacuugacuucuaaucac

SEQ ID NO: 56648 - RNA, 19 nt, Artificial Sequence
  Description of Artificial Sequence: Synthetic oligonucleotide
  Sense strand starting at position 848 of SEQ ID NO: 686
caggcauccugaguuagag

SEQ ID NO: 56649 - RNA, 19 nt, Artificial Sequence
  Description of Artificial Sequence: Synthetic oligonucleotide
  Antisense strand to SEQ ID NO: 56568
cucuaacucaggaugccug

SEQ ID NO: 56650 - RNA, 19 nt, Artificial Sequence
  Description of Artificial Sequence: Synthetic oligonucleotide
  Sense strand starting at position 850 of SEQ ID NO: 686
ggcauccugaguuagagga

SEQ ID NO: 56651 - RNA, 19 nt, Artificial Sequence
  Description of Artificial Sequence: Synthetic oligonucleotide
  Antisense strand to SEQ ID NO: 56570
uccucuaacucaggaugcc

SEQ ID NO: 56652 - RNA, 19 nt, Artificial Sequence
  Description of Artificial Sequence: Synthetic oligonucleotide
  Sense strand starting at position 953 of SEQ ID NO: 686
uucuuaucccaguagacau

SEQ ID NO: 56653 - RNA, 19 nt, Artificial Sequence
  Description of Artificial Sequence: Synthetic oligonucleotide
  Antisense strand to SEQ ID NO: 56572
augucuacugggauaagaa

SEQ ID NO: 56654 - RNA, 19 nt, Artificial Sequence
  Description of Artificial Sequence: Synthetic oligonucleotide
  Sense strand starting at position 960 of SEQ ID NO: 686
cccaguagacauggaucua

SEQ ID NO: 56655 - RNA, 19 nt, Artificial Sequence
  Description of Artificial Sequence: Synthetic oligonucleotide
  Antisense strand to SEQ ID NO: 56574
uagauccaugucuacuggg

SEQ ID NO: 56656 - RNA, 19 nt, Artificial Sequence
  Description of Artificial Sequence: Synthetic oligonucleotide
  Sense strand starting at position 994 of SEQ ID NO: 686
uggccauugacuggaucaa

SEQ ID NO: 56657 - RNA, 19 nt, Artificial Sequence
  Description of Artificial Sequence: Synthetic oligonucleotide
  Antisense strand to SEQ ID NO: 56576
uugauccagucaauggcca

SEQ ID NO: 56658 - RNA, 19 nt, Artificial Sequence
  Description of Artificial Sequence: Synthetic oligonucleotide
  Sense strand starting at position 1030 of SEQ ID NO: 686
augggaagaggugguaauu

SEQ ID NO: 56659 - RNA, 19 nt, Artificial Sequence
  Description of Artificial Sequence: Synthetic oligonucleotide
  Antisense strand to SEQ ID NO: 56578
aauuaccaccucuucccau

SEQ ID NO: 56660 - RNA, 19 nt, Artificial Sequence
  Description of Artificial Sequence: Synthetic oligonucleotide
  Sense strand starting at position 1097 of SEQ ID NO: 686
ugaaauagcugguuuggau

SEQ ID NO: 56661 - RNA, 19 nt, Artificial Sequence
  Description of Artificial Sequence: Synthetic oligonucleotide
  Antisense strand to SEQ ID NO: 56580
auccaaaccagcuauuuca

SEQ ID NO: 56662 - RNA, 19 nt, Artificial Sequence
  Description of Artificial Sequence: Synthetic oligonucleotide
  Sense strand starting at position 1109 of SEQ ID NO: 686
uuuggauggugaucaauga

SEQ ID NO: 56663 - RNA, 19 nt, Artificial Sequence
  Description of Artificial Sequence: Synthetic oligonucleotide
  Antisense strand to SEQ ID NO: 56582
ucauugaucaccauccaaa

SEQ ID NO: 56664 - RNA, 19 nt, Artificial Sequence
  Description of Artificial Sequence: Synthetic oligonucleotide
  Sense strand starting at position 1159 of SEQ ID NO: 686
ucaaaucuugguggaauau

SEQ ID NO: 56665 - RNA, 19 nt, Artificial Sequence
  Description of Artificial Sequence: Synthetic oligonucleotide
  Antisense strand to SEQ ID NO: 56584
auauuccaccaagauuuga

SEQ ID NO: 56666 - RNA, 19 nt, Artificial Sequence
  Description of Artificial Sequence: Synthetic oligonucleotide
  Sense strand starting at position 1184 of SEQ ID NO: 686
agagguugcccaggagaca

SEQ ID NO: 56667 - RNA, 19 nt, Artificial Sequence
  Description of Artificial Sequence: Synthetic oligonucleotide
  Antisense strand to SEQ ID NO: 56586
ugucuccugggcaaccucu

SEQ ID NO: 56668 - RNA, 19 nt, Artificial Sequence
  Description of Artificial Sequence: Synthetic oligonucleotide
  Sense strand starting at position 1200 of SEQ ID NO: 686
acaguuguaaguugagaua

SEQ ID NO: 56669 - RNA, 19 nt, Artificial Sequence
  Description of Artificial Sequence: Synthetic oligonucleotide
  Antisense strand to SEQ ID NO: 56588
uaucucaacuuacaacugu

SEQ ID NO: 56670 - RNA, 19 nt, Artificial Sequence
  Description of Artificial Sequence: Synthetic oligonucleotide
  Sense strand starting at position 1239 of SEQ ID NO: 686
agagcuacugaauggauua

SEQ ID NO: 56671 - RNA, 19 nt, Artificial Sequence
  Description of Artificial Sequence: Synthetic oligonucleotide
  Antisense strand to SEQ ID NO: 56590
uaauccauucaguagcucu

SEQ ID NO: 56672 - RNA, 19 nt, Artificial Sequence
  Description of Artificial Sequence: Synthetic oligonucleotide
  Sense strand starting at position 1272 of SEQ ID NO: 686
aggguugaaaguuggaaau

SEQ ID NO: 56673 - RNA, 19 nt, Artificial Sequence
  Description of Artificial Sequence: Synthetic oligonucleotide
  Antisense strand to SEQ ID NO: 56592
auuuccaacuuucaacccu

SEQ ID NO: 56674 - RNA, 19 nt, Artificial Sequence
  Description of Artificial Sequence: Synthetic oligonucleotide
  Sense strand starting at position 1345 of SEQ ID NO: 686
ggagacacuugcuuuaaga

SEQ ID NO: 56675 - RNA, 19 nt, Artificial Sequence
  Description of Artificial Sequence: Synthetic oligonucleotide
  Antisense strand to SEQ ID NO: 56594
ucuuaaagcaagugucucc

SEQ ID NO: 56676 - RNA, 19 nt, Artificial Sequence
  Description of Artificial Sequence: Synthetic oligonucleotide
  Sense strand starting at position 1347 of SEQ ID NO: 686
agacacuugcuuuaagauc

SEQ ID NO: 56677 - RNA, 19 nt, Artificial Sequence
  Description of Artificial Sequence: Synthetic oligonucleotide
  Antisense strand to SEQ ID NO: 56596
gaucuuaaagcaagugucu

SEQ ID NO: 56678 - RNA, 19 nt, Artificial Sequence
  Description of Artificial Sequence: Synthetic oligonucleotide
  Sense strand starting at position 1618 of SEQ ID NO: 686
guaggaucacucgaaccca

SEQ ID NO: 56679 - RNA, 19 nt, Artificial Sequence
  Description of Artificial Sequence: Synthetic oligonucleotide
  Antisense strand to SEQ ID NO: 56598
uggguucgagugauccuac

SEQ ID NO: 56680 - RNA, 19 nt, Artificial Sequence
  Description of Artificial Sequence: Synthetic oligonucleotide
  Sense strand starting at position 1719 of SEQ ID NO: 686
gagugucuggaguggagaa

SEQ ID NO: 56681 - RNA, 19 nt, Artificial Sequence
  Description of Artificial Sequence: Synthetic oligonucleotide
  Antisense strand to SEQ ID NO: 56600
uucuccacuccagacacuc

SEQ ID NO: 56682 - RNA, 19 nt, Artificial Sequence
  Description of Artificial Sequence: Synthetic oligonucleotide
  Sense strand starting at position 1739 of SEQ ID NO: 686
ggagcauuaccauggagug

SEQ ID NO: 56683 - RNA, 19 nt, Artificial Sequence
  Description of Artificial Sequence: Synthetic oligonucleotide
  Antisense strand to SEQ ID NO: 56602
cacuccaugguaaugcucc

SEQ ID NO: 56684 - RNA, 19 nt, Artificial Sequence
  Description of Artificial Sequence: Synthetic oligonucleotide
  Sense strand starting at position 1740 of SEQ ID NO: 686
gagcauuaccauggaguga

SEQ ID NO: 56685 - RNA, 19 nt, Artificial Sequence
  Description of Artificial Sequence: Synthetic oligonucleotide
  Antisense strand to SEQ ID NO: 56604
ucacuccaugguaaugcuc

SEQ ID NO: 56686 - RNA, 19 nt, Artificial Sequence
  Description of Artificial Sequence: Synthetic oligonucleotide
  Sense strand starting at position 2088 of SEQ ID NO: 686
aaagcuugacgaugaggaa

SEQ ID NO: 56687 - RNA, 19 nt, Artificial Sequence
  Description of Artificial Sequence: Synthetic oligonucleotide
  Antisense strand to SEQ ID NO: 56606
uuccucaucgucaagcuuu

SEQ ID NO: 56688 - RNA, 19 nt, Artificial Sequence
  Description of Artificial Sequence: Synthetic oligonucleotide
  Sense strand starting at position 2194 of SEQ ID NO: 686
uguuguguggaguaagaaa

SEQ ID NO: 56689 - RNA, 19 nt, Artificial Sequence
  Description of Artificial Sequence: Synthetic oligonucleotide
  Antisense strand to SEQ ID NO: 56608
uuucuuacuccacacaaca

SEQ ID NO: 56690 - RNA, 19 nt, Artificial Sequence
  Description of Artificial Sequence: Synthetic oligonucleotide
  Sense strand starting at position 2236 of SEQ ID NO: 686
cuaagaaguuccuccagac

SEQ ID NO: 56691 - RNA, 19 nt, Artificial Sequence
  Description of Artificial Sequence: Synthetic oligonucleotide
  Antisense strand to SEQ ID NO: 56610
gucuggaggaacuucuuag

SEQ ID NO: 56692 - RNA, 19 nt, Artificial Sequence
  Description of Artificial Sequence: Synthetic oligonucleotide
  Sense strand starting at position 2448 of SEQ ID NO: 686
ucagaagaugcugacugua

SEQ ID NO: 56693 - RNA, 19 nt, Artificial Sequence
  Description of Artificial Sequence: Synthetic oligonucleotide
  Antisense strand to SEQ ID NO: 56612
uacagucagcaucuucuga

SEQ ID NO: 56694 - RNA, 19 nt, Artificial Sequence
  Description of Artificial Sequence: Synthetic oligonucleotide
  Sense strand starting at position 2609 of SEQ ID NO: 686
acuagaugaucccugccau

SEQ ID NO: 56695 - RNA, 19 nt, Artificial Sequence
  Description of Artificial Sequence: Synthetic oligonucleotide
  Antisense strand to SEQ ID NO: 56614
auggcagggaucaucuagu

SEQ ID NO: 56696 - RNA, 19 nt, Artificial Sequence
  Description of Artificial Sequence: Synthetic oligonucleotide
  Sense strand starting at position 2867 of SEQ ID NO: 686
ggguaaggcccaugacuga

SEQ ID NO: 56697 - RNA, 19 nt, Artificial Sequence
  Description of Artificial Sequence: Synthetic oligonucleotide
  Antisense strand to SEQ ID NO: 56616
ucagucaugggccuuaccc

SEQ ID NO: 56698 - RNA, 19 nt, Artificial Sequence
  Description of Artificial Sequence: Synthetic oligonucleotide
  Sense strand starting at position 2985 of SEQ ID NO: 686
ggcaaauuucccugggccu

SEQ ID NO: 56699 - RNA, 19 nt, Artificial Sequence
  Description of Artificial Sequence: Synthetic oligonucleotide
  Antisense strand to SEQ ID NO: 56618
aggcccagggaaauuugcc

SEQ ID NO: 56700 - RNA, 19 nt, Artificial Sequence
  Description of Artificial Sequence: Synthetic oligonucleotide
  Sense strand starting at position 3797 of SEQ ID NO: 686
auguuugagcgugugaagu

SEQ ID NO: 56701 - RNA, 19 nt, Artificial Sequence
  Description of Artificial Sequence: Synthetic oligonucleotide
  Antisense strand to SEQ ID NO: 56620
acuucacacgcucaaacau

SEQ ID NO: 56702 - RNA, 19 nt, Artificial Sequence
  Description of Artificial Sequence: Synthetic oligonucleotide
  Sense strand starting at position 3963 of SEQ ID NO: 686
auguguaaugugucugugu

SEQ ID NO: 56703 - RNA, 19 nt, Artificial Sequence
  Description of Artificial Sequence: Synthetic oligonucleotide
  Antisense strand to SEQ ID NO: 56622
acacagacacauuacacau

SEQ ID NO: 56704 - RNA, 19 nt, Artificial Sequence
  Description of Artificial Sequence: Synthetic oligonucleotide
  Sense strand starting at position 3972 of SEQ ID NO: 686
gugucugugugaauguaug

SEQ ID NO: 56705 - RNA, 19 nt, Artificial Sequence
  Description of Artificial Sequence: Synthetic oligonucleotide
  Antisense strand to SEQ ID NO: 56624
cauacauucacacagacac

SEQ ID NO: 56706 - RNA, 19 nt, Artificial Sequence
  Description of Artificial Sequence: Synthetic oligonucleotide
  Sense strand starting at position 3926 of SEQ ID NO: 687
ucgugaaggugccuaagaa

SEQ ID NO: 56707 - RNA, 19 nt, Artificial Sequence
  Description of Artificial Sequence: Synthetic oligonucleotide
  Antisense strand to SEQ ID NO: 56626
uucuuaggcaccuucacga

SEQ ID NO: 56708 - RNA, 19 nt, Artificial Sequence
  Description of Artificial Sequence: Synthetic oligonucleotide
  Sense strand starting at position 3871 of SEQ ID NO: 687
gguggauaaggaugaguua

SEQ ID NO: 56709 - RNA, 19 nt, Artificial Sequence
  Description of Artificial Sequence: Synthetic oligonucleotide
  Antisense strand to SEQ ID NO: 56628
uaacucauccuuauccacc

SEQ ID NO: 56710 - RNA, 19 nt, Artificial Sequence
  Description of Artificial Sequence: Synthetic oligonucleotide
  Sense strand starting at position 3841 of SEQ ID NO: 687
gagguaaucgcugauggcu

SEQ ID NO: 56711 - RNA, 19 nt, Artificial Sequence
  Description of Artificial Sequence: Synthetic oligonucleotide
  Antisense strand to SEQ ID NO: 56630
agccaucagcgauuaccuc

SEQ ID NO: 56712 - RNA, 19 nt, Artificial Sequence
  Description of Artificial Sequence: Synthetic oligonucleotide
  Sense strand starting at position 3824 of SEQ ID NO: 687
auauacauuugggaauuga

SEQ ID NO: 56713 - RNA, 19 nt, Artificial Sequence
  Description of Artificial Sequence: Synthetic oligonucleotide
  Antisense strand to SEQ ID NO: 56632
ucaauucccaaauguauau

SEQ ID NO: 56714 - RNA, 19 nt, Artificial Sequence
  Description of Artificial Sequence: Synthetic oligonucleotide
  Sense strand starting at position 3588 of SEQ ID NO: 687
ggauaaagcuucuuacccu

SEQ ID NO: 56715 - RNA, 19 nt, Artificial Sequence
  Description of Artificial Sequence: Synthetic oligonucleotide
  Antisense strand to SEQ ID NO: 56634
aggguaagaagcuuuaucc

SEQ ID NO: 56716 - RNA, 19 nt, Artificial Sequence
  Description of Artificial Sequence: Synthetic oligonucleotide
  Sense strand starting at position 3575 of SEQ ID NO: 687
gggauuugguaauggauaa

SEQ ID NO: 56717 - RNA, 19 nt, Artificial Sequence
  Description of Artificial Sequence: Synthetic oligonucleotide
  Antisense strand to SEQ ID NO: 56636
uuauccauuaccaaauccc

SEQ ID NO: 56718 - RNA, 19 nt, Artificial Sequence
  Description of Artificial Sequence: Synthetic oligonucleotide
  Sense strand starting at position 3513 of SEQ ID NO: 687
uaaguuguucuaggagaaa

SEQ ID NO: 56719 - RNA, 19 nt, Artificial Sequence
  Description of Artificial Sequence: Synthetic oligonucleotide
  Antisense strand to SEQ ID NO: 56638
uuucuccuagaacaacuua

SEQ ID NO: 56720 - RNA, 19 nt, Artificial Sequence
  Description of Artificial Sequence: Synthetic oligonucleotide
  Sense strand starting at position 3418 of SEQ ID NO: 687
agcaccaagcuauguagaa

SEQ ID NO: 56721 - RNA, 19 nt, Artificial Sequence
  Description of Artificial Sequence: Synthetic oligonucleotide
  Antisense strand to SEQ ID NO: 56640
uucuacauagcuuggugcu

SEQ ID NO: 56722 - RNA, 19 nt, Artificial Sequence
  Description of Artificial Sequence: Synthetic oligonucleotide
  Sense strand starting at position 3308 of SEQ ID NO: 687
augucaaucaucggcuaga

SEQ ID NO: 56723 - RNA, 19 nt, Artificial Sequence
  Description of Artificial Sequence: Synthetic oligonucleotide
  Antisense strand to SEQ ID NO: 56642
ucuagccgaugauugacau

SEQ ID NO: 56724 - RNA, 19 nt, Artificial Sequence
  Description of Artificial Sequence: Synthetic oligonucleotide
  Sense strand starting at position 3306 of SEQ ID NO: 687
aaaugucaaucaucggcua

SEQ ID NO: 56725 - RNA, 19 nt, Artificial Sequence
  Description of Artificial Sequence: Synthetic oligonucleotide
  Antisense strand to SEQ ID NO: 56644
uagccgaugauugacauuu

SEQ ID NO: 56726 - RNA, 19 nt, Artificial Sequence
  Description of Artificial Sequence: Synthetic oligonucleotide
  Sense strand starting at position 3263 of SEQ ID NO: 687
aguuuacucguuuacucau

SEQ ID NO: 56727 - RNA, 19 nt, Artificial Sequence
  Description of Artificial Sequence: Synthetic oligonucleotide
  Antisense strand to SEQ ID NO: 56646
augaguaaacgaguaaacu

SEQ ID NO: 56728 - RNA, 19 nt, Artificial Sequence
  Description of Artificial Sequence: Synthetic oligonucleotide
  Sense strand starting at position 3223 of SEQ ID NO: 687
guaauucugaaaggguuua

SEQ ID NO: 56729 - RNA, 19 nt, Artificial Sequence
  Description of Artificial Sequence: Synthetic oligonucleotide
  Antisense strand to SEQ ID NO: 56648
uaaacccuuucagaauuac

SEQ ID NO: 56730 - RNA, 19 nt, Artificial Sequence
  Description of Artificial Sequence: Synthetic oligonucleotide
  Sense strand starting at position 3137 of SEQ ID NO: 687
uguuacaaugaauguuaca

SEQ ID NO: 56731 - RNA, 19 nt, Artificial Sequence
  Description of Artificial Sequence: Synthetic oligonucleotide
  Antisense strand to SEQ ID NO: 56650
uguaacauucauuguaaca

SEQ ID NO: 56732 - RNA, 19 nt, Artificial Sequence
  Description of Artificial Sequence: Synthetic oligonucleotide
  Sense strand starting at position 2984 of SEQ ID NO: 687
cuugcaaugaucggagauc

SEQ ID NO: 56733 - RNA, 19 nt, Artificial Sequence
  Description of Artificial Sequence: Synthetic oligonucleotide
  Antisense strand to SEQ ID NO: 56652
gaucuccgaucauugcaag

SEQ ID NO: 56734 - RNA, 19 nt, Artificial Sequence
  Description of Artificial Sequence: Synthetic oligonucleotide
  Sense strand starting at position 2788 of SEQ ID NO: 687
uccugucacccaggacaaa

SEQ ID NO: 56735 - RNA, 19 nt, Artificial Sequence
  Description of Artificial Sequence: Synthetic oligonucleotide
  Antisense strand to SEQ ID NO: 56654
uuuguccugggugacagga

SEQ ID NO: 56736 - RNA, 19 nt, Artificial Sequence
  Description of Artificial Sequence: Synthetic oligonucleotide
  Sense strand starting at position 2577 of SEQ ID NO: 687
uggguuaauagaggcaauu

SEQ ID NO: 56737 - RNA, 19 nt, Artificial Sequence
  Description of Artificial Sequence: Synthetic oligonucleotide
  Antisense strand to SEQ ID NO: 56656
aauugccucuauuaaccca

SEQ ID NO: 56738 - RNA, 19 nt, Artificial Sequence
  Description of Artificial Sequence: Synthetic oligonucleotide
  Sense strand starting at position 2567 of SEQ ID NO: 687
uugagagccauggguuaau

SEQ ID NO: 56739 - RNA, 19 nt, Artificial Sequence
  Description of Artificial Sequence: Synthetic oligonucleotide
  Antisense strand to SEQ ID NO: 56658
auuaacccauggcucucaa

SEQ ID NO: 56740 - RNA, 19 nt, Artificial Sequence
  Description of Artificial Sequence: Synthetic oligonucleotide
  Sense strand starting at position 2565 of SEQ ID NO: 687
guuugagagccauggguua

SEQ ID NO: 56741 - RNA, 19 nt, Artificial Sequence
  Description of Artificial Sequence: Synthetic oligonucleotide
  Antisense strand to SEQ ID NO: 56660
uaacccauggcucucaaac

SEQ ID NO: 56742 - RNA, 19 nt, Artificial Sequence
  Description of Artificial Sequence: Synthetic oligonucleotide
  Sense strand starting at position 2466 of SEQ ID NO: 687
agagaaagcuuccuucuac

SEQ ID NO: 56743 - RNA, 19 nt, Artificial Sequence
  Description of Artificial Sequence: Synthetic oligonucleotide
  Antisense strand to SEQ ID NO: 56662
guagaaggaagcuuucucu

SEQ ID NO: 56744 - RNA, 19 nt, Artificial Sequence
  Description of Artificial Sequence: Synthetic oligonucleotide
  Sense strand starting at position 1776 of SEQ ID NO: 687
gcgaguuaccuggaggacu

SEQ ID NO: 56745 - RNA, 19 nt, Artificial Sequence
  Description of Artificial Sequence: Synthetic oligonucleotide
  Antisense strand to SEQ ID NO: 56664
aguccuccagguaacucgc

SEQ ID NO: 56746 - RNA, 19 nt, Artificial Sequence
  Description of Artificial Sequence: Synthetic oligonucleotide
  Sense strand starting at position 1774 of SEQ ID NO: 687
aggcgaguuaccuggagga

SEQ ID NO: 56747 - RNA, 19 nt, Artificial Sequence
  Description of Artificial Sequence: Synthetic oligonucleotide
  Antisense strand to SEQ ID NO: 56666
uccuccagguaacucgccu

SEQ ID NO: 56748 - RNA, 19 nt, Artificial Sequence
  Description of Artificial Sequence: Synthetic oligonucleotide
  Sense strand starting at position 1716 of SEQ ID NO: 687
agagaugcugcccauccaa

SEQ ID NO: 56749 - RNA, 19 nt, Artificial Sequence
  Description of Artificial Sequence: Synthetic oligonucleotide
  Antisense strand to SEQ ID NO: 56668
uuggaugggcagcaucucu

SEQ ID NO: 56750 - RNA, 19 nt, Artificial Sequence
  Description of Artificial Sequence: Synthetic oligonucleotide
  Sense strand starting at position 1715 of SEQ ID NO: 687
gagagaugcugcccaucca

SEQ ID NO: 56751 - RNA, 19 nt, Artificial Sequence
  Description of Artificial Sequence: Synthetic oligonucleotide
  Antisense strand to SEQ ID NO: 56670
uggaugggcagcaucucuc

SEQ ID NO: 56752 - RNA, 19 nt, Artificial Sequence
  Description of Artificial Sequence: Synthetic oligonucleotide
  Sense strand starting at position 1013 of SEQ ID NO: 687
accugugaguagcucugaa

SEQ ID NO: 56753 - RNA, 19 nt, Artificial Sequence
  Description of Artificial Sequence: Synthetic oligonucleotide
  Antisense strand to SEQ ID NO: 56672
uucagagcuacucacaggu

SEQ ID NO: 56754 - RNA, 19 nt, Artificial Sequence
  Description of Artificial Sequence: Synthetic oligonucleotide
  Sense strand starting at position 873 of SEQ ID NO: 687
gccuaagaccaguauauau

SEQ ID NO: 56755 - RNA, 19 nt, Artificial Sequence
  Description of Artificial Sequence: Synthetic oligonucleotide
  Antisense strand to SEQ ID NO: 56674
auauauacuggucuuaggc

SEQ ID NO: 56756 - RNA, 19 nt, Artificial Sequence
  Description of Artificial Sequence: Synthetic oligonucleotide
  Sense strand starting at position 698 of SEQ ID NO: 687
ucauauauccuuugguuua

SEQ ID NO: 56757 - RNA, 19 nt, Artificial Sequence
  Description of Artificial Sequence: Synthetic oligonucleotide
  Antisense strand to SEQ ID NO: 56676
uaaaccaaaggauauauga

SEQ ID NO: 56758 - RNA, 19 nt, Artificial Sequence
  Description of Artificial Sequence: Synthetic oligonucleotide
  Sense strand starting at position 673 of SEQ ID NO: 687
aacugucuucggcaaacua

SEQ ID NO: 56759 - RNA, 19 nt, Artificial Sequence
  Description of Artificial Sequence: Synthetic oligonucleotide
  Antisense strand to SEQ ID NO: 56678
uaguuugccgaagacaguu

SEQ ID NO: 56760 - RNA, 19 nt, Artificial Sequence
  Description of Artificial Sequence: Synthetic oligonucleotide
  Sense strand starting at position 643 of SEQ ID NO: 687
acugaugugucaccacagu

SEQ ID NO: 56761 - RNA, 19 nt, Artificial Sequence
  Description of Artificial Sequence: Synthetic oligonucleotide
  Antisense strand to SEQ ID NO: 56680
acuguggugacacaucagu

SEQ ID NO: 56762 - RNA, 19 nt, Artificial Sequence
  Description of Artificial Sequence: Synthetic oligonucleotide
  Sense strand starting at position 633 of SEQ ID NO: 687
cugaauauccacugaugug

SEQ ID NO: 56763 - RNA, 19 nt, Artificial Sequence
  Description of Artificial Sequence: Synthetic oligonucleotide
  Antisense strand to SEQ ID NO: 56682
cacaucaguggauauucag

SEQ ID NO: 56764 - RNA, 19 nt, Artificial Sequence
  Description of Artificial Sequence: Synthetic oligonucleotide
  Sense strand starting at position 594 of SEQ ID NO: 687
agguuacauucuucucuua

SEQ ID NO: 56765 - RNA, 19 nt, Artificial Sequence
  Description of Artificial Sequence: Synthetic oligonucleotide
  Antisense strand to SEQ ID NO: 56684
uaagagaagaauguaaccu

SEQ ID NO: 56766 - RNA, 19 nt, Artificial Sequence
  Description of Artificial Sequence: Synthetic oligonucleotide
  Sense strand starting at position 555 of SEQ ID NO: 687
caaguaagagaugguccaa

SEQ ID NO: 56767 - RNA, 19 nt, Artificial Sequence
  Description of Artificial Sequence: Synthetic oligonucleotide
  Antisense strand to SEQ ID NO: 56686
uuggaccaucucuuacuug

SEQ ID NO: 56768 - RNA, 19 nt, Artificial Sequence
  Description of Artificial Sequence: Synthetic oligonucleotide
  Sense strand starting at position 337 of SEQ ID NO: 687
aagugacuugugggaagua

SEQ ID NO: 56769 - RNA, 19 nt, Artificial Sequence
  Description of Artificial Sequence: Synthetic oligonucleotide
  Antisense strand to SEQ ID NO: 56688
uacuucccacaagucacuu

SEQ ID NO: 56770 - RNA, 19 nt, Artificial Sequence
  Description of Artificial Sequence: Synthetic oligonucleotide
  Sense strand starting at position 333 of SEQ ID NO: 687
gaauaagugacuuguggga

SEQ ID NO: 56771 - RNA, 19 nt, Artificial Sequence
  Description of Artificial Sequence: Synthetic oligonucleotide
  Antisense strand to SEQ ID NO: 56690
ucccacaagucacuuauuc

SEQ ID NO: 56772 - RNA, 19 nt, Artificial Sequence
  Description of Artificial Sequence: Synthetic oligonucleotide
  Sense strand starting at position 249 of SEQ ID NO: 687
auagacuugcuaugagaau

SEQ ID NO: 56773 - RNA, 19 nt, Artificial Sequence
  Description of Artificial Sequence: Synthetic oligonucleotide
  Antisense strand to SEQ ID NO: 56692
auucucauagcaagucuau

SEQ ID NO: 56774 - RNA, 19 nt, Artificial Sequence
  Description of Artificial Sequence: Synthetic oligonucleotide
  Sense strand starting at position 246 of SEQ ID NO: 687
cuuauagacuugcuaugag

SEQ ID NO: 56775 - RNA, 19 nt, Artificial Sequence
  Description of Artificial Sequence: Synthetic oligonucleotide
  Antisense strand to SEQ ID NO: 56694
cucauagcaagucuauaag

SEQ ID NO: 56776 - RNA, 19 nt, Artificial Sequence
  Description of Artificial Sequence: Synthetic oligonucleotide
  Sense strand starting at position 218 of SEQ ID NO: 687
uuauuuaucuacgaaaugg

SEQ ID NO: 56777 - RNA, 19 nt, Artificial Sequence
  Description of Artificial Sequence: Synthetic oligonucleotide
  Antisense strand to SEQ ID NO: 56696
ccauuucguagauaaauaa

SEQ ID NO: 56778 - RNA, 19 nt, Artificial Sequence
  Description of Artificial Sequence: Synthetic oligonucleotide
  Sense strand starting at position 186 of SEQ ID NO: 687
aggaaaguuaguuaugcuu

SEQ ID NO: 56779 - RNA, 19 nt, Artificial Sequence
  Description of Artificial Sequence: Synthetic oligonucleotide
  Antisense strand to SEQ ID NO: 56698
aagcauaacuaacuuuccu

SEQ ID NO: 56780 - RNA, 19 nt, Artificial Sequence
  Description of Artificial Sequence: Synthetic oligonucleotide
  Sense strand starting at position 185 of SEQ ID NO: 687
uaggaaaguuaguuaugcu

SEQ ID NO: 56781 - RNA, 19 nt, Artificial Sequence
  Description of Artificial Sequence: Synthetic oligonucleotide
  Antisense strand to SEQ ID NO: 56700
agcauaacuaacuuuccua

SEQ ID NO: 56782 - RNA, 19 nt, Artificial Sequence
  Description of Artificial Sequence: Synthetic oligonucleotide
  Sense strand starting at position 81 of SEQ ID NO: 687
ucauauauggcacacgauu

SEQ ID NO: 56783 - RNA, 19 nt, Artificial Sequence
  Description of Artificial Sequence: Synthetic oligonucleotide
  Antisense strand to SEQ ID NO: 56702
aaucgugugccauauauga

SEQ ID NO: 56784 - RNA, 19 nt, Artificial Sequence
  Description of Artificial Sequence: Synthetic oligonucleotide
  Sense strand starting at position 16 of SEQ ID NO: 687
cuaagucuugcggaguaua

SEQ ID NO: 56785 - RNA, 19 nt, Artificial Sequence
  Description of Artificial Sequence: Synthetic oligonucleotide
  Antisense strand to SEQ ID NO: 56704
uauacuccgcaagacuuag

SEQ ID NO: 56786 - RNA, 19 nt, Artificial Sequence
  Description of Artificial Sequence: Synthetic oligonucleotide
  Sense strand starting at position 3197 of SEQ ID NO: 688
auuagcugcuuugucauaa

SEQ ID NO: 56787 - RNA, 19 nt, Artificial Sequence
  Description of Artificial Sequence: Synthetic oligonucleotide
  Antisense strand to SEQ ID NO: 56706
uuaugacaaagcagcuaau

SEQ ID NO: 56788 - RNA, 19 nt, Artificial Sequence
  Description of Artificial Sequence: Synthetic oligonucleotide
  Sense strand starting at position 3194 of SEQ ID NO: 688
gccauuagcugcuuuguca

SEQ ID NO: 56789 - RNA, 19 nt, Artificial Sequence
  Description of Artificial Sequence: Synthetic oligonucleotide
  Antisense strand to SEQ ID NO: 56708
ugacaaagcagcuaauggc

SEQ ID NO: 56790 - RNA, 19 nt, Artificial Sequence
  Description of Artificial Sequence: Synthetic oligonucleotide
  Sense strand starting at position 3151 of SEQ ID NO: 688
uggugauaguuccauauuu

SEQ ID NO: 56791 - RNA, 19 nt, Artificial Sequence
  Description of Artificial Sequence: Synthetic oligonucleotide
  Antisense strand to SEQ ID NO: 56710
aaauauggaacuaucacca

SEQ ID NO: 56792 - RNA, 19 nt, Artificial Sequence
  Description of Artificial Sequence: Synthetic oligonucleotide
  Sense strand starting at position 2983 of SEQ ID NO: 688
cuuaaugaguaaggaaaca

SEQ ID NO: 56793 - RNA, 19 nt, Artificial Sequence
  Description of Artificial Sequence: Synthetic oligonucleotide
  Antisense strand to SEQ ID NO: 56712
uguuuccuuacucauuaag

SEQ ID NO: 56794 - RNA, 19 nt, Artificial Sequence
  Description of Artificial Sequence: Synthetic oligonucleotide
  Sense strand starting at position 2979 of SEQ ID NO: 688
cccacuuaaugaguaagga

SEQ ID NO: 56795 - RNA, 19 nt, Artificial Sequence
  Description of Artificial Sequence: Synthetic oligonucleotide
  Antisense strand to SEQ ID NO: 56714
uccuuacucauuaaguggg

SEQ ID NO: 56796 - RNA, 19 nt, Artificial Sequence
  Description of Artificial Sequence: Synthetic oligonucleotide
  Sense strand starting at position 2913 of SEQ ID NO: 688
gcucucugaucuccuuuga

SEQ ID NO: 56797 - RNA, 19 nt, Artificial Sequence
  Description of Artificial Sequence: Synthetic oligonucleotide
  Antisense strand to SEQ ID NO: 56716
ucaaaggagaucagagagc

SEQ ID NO: 56798 - RNA, 19 nt, Artificial Sequence
  Description of Artificial Sequence: Synthetic oligonucleotide
  Sense strand starting at position 2697 of SEQ ID NO: 688
agaguuucuucucugacac

SEQ ID NO: 56799 - RNA, 19 nt, Artificial Sequence
  Description of Artificial Sequence: Synthetic oligonucleotide
  Antisense strand to SEQ ID NO: 56718
gugucagagaagaaacucu

SEQ ID NO: 56800 - RNA, 19 nt, Artificial Sequence
  Description of Artificial Sequence: Synthetic oligonucleotide
  Sense strand starting at position 2694 of SEQ ID NO: 688
aucagaguuucuucucuga

SEQ ID NO: 56801 - RNA, 19 nt, Artificial Sequence
  Description of Artificial Sequence: Synthetic oligonucleotide
  Antisense strand to SEQ ID NO: 56720
ucagagaagaaacucugau

SEQ ID NO: 56802 - RNA, 19 nt, Artificial Sequence
  Description of Artificial Sequence: Synthetic oligonucleotide
  Sense strand starting at position 2684 of SEQ ID NO: 688
agcuucuuccaucagaguu

SEQ ID NO: 56803 - RNA, 19 nt, Artificial Sequence
  Description of Artificial Sequence: Synthetic oligonucleotide
  Antisense strand to SEQ ID NO: 56722
aacucugauggaagaagcu

SEQ ID NO: 56804 - RNA, 19 nt, Artificial Sequence
  Description of Artificial Sequence: Synthetic oligonucleotide
  Sense strand starting at position 2586 of SEQ ID NO: 688
gggauugccugggaagaca

SEQ ID NO: 56805 - RNA, 19 nt, Artificial Sequence
  Description of Artificial Sequence: Synthetic oligonucleotide
  Antisense strand to SEQ ID NO: 56724
ugucuucccaggcaauccc

SEQ ID NO: 56806 - RNA, 19 nt, Artificial Sequence
  Description of Artificial Sequence: Synthetic oligonucleotide
  Sense strand starting at position 2584 of SEQ ID NO: 688
augggauugccugggaaga

SEQ ID NO: 56807 - RNA, 19 nt, Artificial Sequence
  Description of Artificial Sequence: Synthetic oligonucleotide
  Antisense strand to SEQ ID NO: 56726
ucuucccaggcaaucccau

SEQ ID NO: 56808 - RNA, 19 nt, Artificial Sequence
  Description of Artificial Sequence: Synthetic oligonucleotide
  Sense strand starting at position 2516 of SEQ ID NO: 688
caagucuugucaugaaggu

SEQ ID NO: 56809 - RNA, 19 nt, Artificial Sequence
  Description of Artificial Sequence: Synthetic oligonucleotide
  Antisense strand to SEQ ID NO: 56728
accuucaugacaagacuug

SEQ ID NO: 56810 - RNA, 19 nt, Artificial Sequence
  Description of Artificial Sequence: Synthetic oligonucleotide
  Sense strand starting at position 2513 of SEQ ID NO: 688
cggcaagucuugucaugaa

SEQ ID NO: 56811 - RNA, 19 nt, Artificial Sequence
  Description of Artificial Sequence: Synthetic oligonucleotide
  Antisense strand to SEQ ID NO: 56730
uucaugacaagacuugccg

SEQ ID NO: 56812 - RNA, 19 nt, Artificial Sequence
  Description of Artificial Sequence: Synthetic oligonucleotide
  Sense strand starting at position 2476 of SEQ ID NO: 688
gggcauuggugcuauagau

SEQ ID NO: 56813 - RNA, 19 nt, Artificial Sequence
  Description of Artificial Sequence: Synthetic oligonucleotide
  Antisense strand to SEQ ID NO: 56732
aucuauagcaccaaugccc

SEQ ID NO: 56814 - RNA, 19 nt, Artificial Sequence
  Description of Artificial Sequence: Synthetic oligonucleotide
  Sense strand starting at position 2346 of SEQ ID NO: 688
agaacaggguucuagucaa

SEQ ID NO: 56815 - RNA, 19 nt, Artificial Sequence
  Description of Artificial Sequence: Synthetic oligonucleotide
  Antisense strand to SEQ ID NO: 56734
uugacuagaacccuguucu

SEQ ID NO: 56816 - RNA, 19 nt, Artificial Sequence
  Description of Artificial Sequence: Synthetic oligonucleotide
  Sense strand starting at position 2112 of SEQ ID NO: 688
uguggagaccugugaacca

SEQ ID NO: 56817 - RNA, 19 nt, Artificial Sequence
  Description of Artificial Sequence: Synthetic oligonucleotide
  Antisense strand to SEQ ID NO: 56736
ugguucacaggucuccaca

SEQ ID NO: 56818 - RNA, 19 nt, Artificial Sequence
  Description of Artificial Sequence: Synthetic oligonucleotide
  Sense strand starting at position 1752 of SEQ ID NO: 688
ugaaacuuguggucucaac

SEQ ID NO: 56819 - RNA, 19 nt, Artificial Sequence
  Description of Artificial Sequence: Synthetic oligonucleotide
  Antisense strand to SEQ ID NO: 56738
guugagaccacaaguuuca

SEQ ID NO: 56820 - RNA, 19 nt, Artificial Sequence
  Description of Artificial Sequence: Synthetic oligonucleotide
  Sense strand starting at position 1750 of SEQ ID NO: 688
ccugaaacuuguggucuca

SEQ ID NO: 56821 - RNA, 19 nt, Artificial Sequence
  Description of Artificial Sequence: Synthetic oligonucleotide
  Antisense strand to SEQ ID NO: 56740
ugagaccacaaguuucagg

SEQ ID NO: 56822 - RNA, 19 nt, Artificial Sequence
  Description of Artificial Sequence: Synthetic oligonucleotide
  Sense strand starting at position 1499 of SEQ ID NO: 688
gucagauuccaagguccca

SEQ ID NO: 56823 - RNA, 19 nt, Artificial Sequence
  Description of Artificial Sequence: Synthetic oligonucleotide
  Antisense strand to SEQ ID NO: 56742
ugggaccuuggaaucugac

SEQ ID NO: 56824 - RNA, 19 nt, Artificial Sequence
  Description of Artificial Sequence: Synthetic oligonucleotide
  Sense strand starting at position 1402 of SEQ ID NO: 688
uguagucagucugcucaua

SEQ ID NO: 56825 - RNA, 19 nt, Artificial Sequence
  Description of Artificial Sequence: Synthetic oligonucleotide
  Antisense strand to SEQ ID NO: 56744
uaugagcagacugacuaca

SEQ ID NO: 56826 - RNA, 19 nt, Artificial Sequence
  Description of Artificial Sequence: Synthetic oligonucleotide
  Sense strand starting at position 1182 of SEQ ID NO: 688
uucucuuggcaguaacaga

SEQ ID NO: 56827 - RNA, 19 nt, Artificial Sequence
  Description of Artificial Sequence: Synthetic oligonucleotide
  Antisense strand to SEQ ID NO: 56746
ucuguuacugccaagagaa

SEQ ID NO: 56828 - RNA, 19 nt, Artificial Sequence
  Description of Artificial Sequence: Synthetic oligonucleotide
  Sense strand starting at position 1178 of SEQ ID NO: 688
acaguucucuuggcaguaa

SEQ ID NO: 56829 - RNA, 19 nt, Artificial Sequence
  Description of Artificial Sequence: Synthetic oligonucleotide
  Antisense strand to SEQ ID NO: 56748
uuacugccaagagaacugu

SEQ ID NO: 56830 - RNA, 19 nt, Artificial Sequence
  Description of Artificial Sequence: Synthetic oligonucleotide
  Sense strand starting at position 1177 of SEQ ID NO: 688
gacaguucucuuggcagua

SEQ ID NO: 56831 - RNA, 19 nt, Artificial Sequence
  Description of Artificial Sequence: Synthetic oligonucleotide
  Antisense strand to SEQ ID NO: 56750
uacugccaagagaacuguc

SEQ ID NO: 56832 - RNA, 19 nt, Artificial Sequence
  Description of Artificial Sequence: Synthetic oligonucleotide
  Sense strand starting at position 1160 of SEQ ID NO: 688
guuguaaaucaagagcuga

SEQ ID NO: 56833 - RNA, 19 nt, Artificial Sequence
  Description of Artificial Sequence: Synthetic oligonucleotide
  Antisense strand to SEQ ID NO: 56752
ucagcucuugauuuacaac

SEQ ID NO: 56834 - RNA, 19 nt, Artificial Sequence
  Description of Artificial Sequence: Synthetic oligonucleotide
  Sense strand starting at position 978 of SEQ ID NO: 688
ccaagcaauuuccguuaga

SEQ ID NO: 56835 - RNA, 19 nt, Artificial Sequence
  Description of Artificial Sequence: Synthetic oligonucleotide
  Antisense strand to SEQ ID NO: 56754
ucuaacggaaauugcuugg

SEQ ID NO: 56836 - RNA, 19 nt, Artificial Sequence
  Description of Artificial Sequence: Synthetic oligonucleotide
  Sense strand starting at position 956 of SEQ ID NO: 688
guguauucccgcugcuaua

SEQ ID NO: 56837 - RNA, 19 nt, Artificial Sequence
  Description of Artificial Sequence: Synthetic oligonucleotide
  Antisense strand to SEQ ID NO: 56756
uauagcagcgggaauacac

SEQ ID NO: 56838 - RNA, 19 nt, Artificial Sequence
  Description of Artificial Sequence: Synthetic oligonucleotide
  Sense strand starting at position 955 of SEQ ID NO: 688
cguguauucccgcugcuau

SEQ ID NO: 56839 - RNA, 19 nt, Artificial Sequence
  Description of Artificial Sequence: Synthetic oligonucleotide
  Antisense strand to SEQ ID NO: 56758
auagcagcgggaauacacg

SEQ ID NO: 56840 - RNA, 19 nt, Artificial Sequence
  Description of Artificial Sequence: Synthetic oligonucleotide
  Sense strand starting at position 954 of SEQ ID NO: 688
gcguguauucccgcugcua

SEQ ID NO: 56841 - RNA, 19 nt, Artificial Sequence
  Description of Artificial Sequence: Synthetic oligonucleotide
  Antisense strand to SEQ ID NO: 56760
uagcagcgggaauacacgc

SEQ ID NO: 56842 - RNA, 19 nt, Artificial Sequence
  Description of Artificial Sequence: Synthetic oligonucleotide
  Sense strand starting at position 682 of SEQ ID NO: 688
ggugaauuaccuuagguga

SEQ ID NO: 56843 - RNA, 19 nt, Artificial Sequence
  Description of Artificial Sequence: Synthetic oligonucleotide
  Antisense strand to SEQ ID NO: 56762
ucaccuaagguaauucacc

SEQ ID NO: 56844 - RNA, 19 nt, Artificial Sequence
  Description of Artificial Sequence: Synthetic oligonucleotide
  Sense strand starting at position 568 of SEQ ID NO: 688
gguuucuugccuugcaguu

SEQ ID NO: 56845 - RNA, 19 nt, Artificial Sequence
  Description of Artificial Sequence: Synthetic oligonucleotide
  Antisense strand to SEQ ID NO: 56764
aacugcaaggcaagaaacc

SEQ ID NO: 56846 - RNA, 19 nt, Artificial Sequence
  Description of Artificial Sequence: Synthetic oligonucleotide
  Sense strand starting at position 565 of SEQ ID NO: 688
ccagguuucuugccuugca

SEQ ID NO: 56847 - RNA, 19 nt, Artificial Sequence
  Description of Artificial Sequence: Synthetic oligonucleotide
  Antisense strand to SEQ ID NO: 56766
ugcaaggcaagaaaccugg

SEQ ID NO: 56848 - RNA, 19 nt, Artificial Sequence
  Description of Artificial Sequence: Synthetic oligonucleotide
  Sense strand starting at position 481 of SEQ ID NO: 688
ucagguccuauugagaguu

SEQ ID NO: 56849 - RNA, 19 nt, Artificial Sequence
  Description of Artificial Sequence: Synthetic oligonucleotide
  Antisense strand to SEQ ID NO: 56768
aacucucaauaggaccuga

SEQ ID NO: 56850 - RNA, 19 nt, Artificial Sequence
  Description of Artificial Sequence: Synthetic oligonucleotide
  Sense strand starting at position 403 of SEQ ID NO: 688
cuguaaacaucaccuuguu

SEQ ID NO: 56851 - RNA, 19 nt, Artificial Sequence
  Description of Artificial Sequence: Synthetic oligonucleotide
  Antisense strand to SEQ ID NO: 56770
aacaaggugauguuuacag

SEQ ID NO: 56852 - RNA, 19 nt, Artificial Sequence
  Description of Artificial Sequence: Synthetic oligonucleotide
  Sense strand starting at position 106 of SEQ ID NO: 688
ggcccaauuccugaaagug

SEQ ID NO: 56853 - RNA, 19 nt, Artificial Sequence
  Description of Artificial Sequence: Synthetic oligonucleotide
  Antisense strand to SEQ ID NO: 56772
cacuuucaggaauugggcc

SEQ ID NO: 56854 - RNA, 19 nt, Artificial Sequence
  Description of Artificial Sequence: Synthetic oligonucleotide
  Sense strand starting at position 105 of SEQ ID NO: 688
cggcccaauuccugaaagu

SEQ ID NO: 56855 - RNA, 19 nt, Artificial Sequence
  Description of Artificial Sequence: Synthetic oligonucleotide
  Antisense strand to SEQ ID NO: 56774
acuuucaggaauugggccg

SEQ ID NO: 56856 - RNA, 19 nt, Artificial Sequence
  Description of Artificial Sequence: Synthetic oligonucleotide
  Sense strand starting at position 53 of SEQ ID NO: 689
augcuauagguuuacucau

SEQ ID NO: 56857 - RNA, 19 nt, Artificial Sequence
  Description of Artificial Sequence: Synthetic oligonucleotide
  Antisense strand to SEQ ID NO: 56776
augaguaaaccuauagcau

SEQ ID NO: 56858 - RNA, 19 nt, Artificial Sequence
  Description of Artificial Sequence: Synthetic oligonucleotide
  Sense strand starting at position 224 of SEQ ID NO: 689
caggaagucuucuuuaagc

SEQ ID NO: 56859 - RNA, 19 nt, Artificial Sequence
  Description of Artificial Sequence: Synthetic oligonucleotide
  Antisense strand to SEQ ID NO: 56778
gcuuaaagaagacuuccug

SEQ ID NO: 56860 - RNA, 19 nt, Artificial Sequence
  Description of Artificial Sequence: Synthetic oligonucleotide
  Sense strand starting at position 226 of SEQ ID NO: 689
ggaagucuucuuuaagcau

SEQ ID NO: 56861 - RNA, 19 nt, Artificial Sequence
  Description of Artificial Sequence: Synthetic oligonucleotide
  Antisense strand to SEQ ID NO: 56780
augcuuaaagaagacuucc

SEQ ID NO: 56862 - RNA, 19 nt, Artificial Sequence
  Description of Artificial Sequence: Synthetic oligonucleotide
  Sense strand starting at position 704 of SEQ ID NO: 689
aaauguuguggugacugaa

SEQ ID NO: 56863 - RNA, 19 nt, Artificial Sequence
  Description of Artificial Sequence: Synthetic oligonucleotide
  Antisense strand to SEQ ID NO: 56782
uucagucaccacaacauuu

SEQ ID NO: 56864 - RNA, 19 nt, Artificial Sequence
  Description of Artificial Sequence: Synthetic oligonucleotide
  Sense strand starting at position 752 of SEQ ID NO: 689
augauuuccucuuaggaaa

SEQ ID NO: 56865 - RNA, 19 nt, Artificial Sequence
  Description of Artificial Sequence: Synthetic oligonucleotide
  Antisense strand to SEQ ID NO: 56784
uuuccuaagaggaaaucau

SEQ ID NO: 56866 - RNA, 19 nt, Artificial Sequence
  Description of Artificial Sequence: Synthetic oligonucleotide
  Sense strand starting at position 798 of SEQ ID NO: 689
uuuaauacauagucuggaa

SEQ ID NO: 56867 - RNA, 19 nt, Artificial Sequence
  Description of Artificial Sequence: Synthetic oligonucleotide
  Antisense strand to SEQ ID NO: 56786
uuccagacuauguauuaaa

SEQ ID NO: 56868 - RNA, 19 nt, Artificial Sequence
  Description of Artificial Sequence: Synthetic oligonucleotide
  Sense strand starting at position 866 of SEQ ID NO: 689
gacaguaaauugguaagau

SEQ ID NO: 56869 - RNA, 19 nt, Artificial Sequence
  Description of Artificial Sequence: Synthetic oligonucleotide
  Antisense strand to SEQ ID NO: 56788
aucuuaccaauuuacuguc

SEQ ID NO: 56870 - RNA, 19 nt, Artificial Sequence
  Description of Artificial Sequence: Synthetic oligonucleotide
  Sense strand starting at position 944 of SEQ ID NO: 689
gccaaauacgcccaggaaa

SEQ ID NO: 56871 - RNA, 19 nt, Artificial Sequence
  Description of Artificial Sequence: Synthetic oligonucleotide
  Antisense strand to SEQ ID NO: 56790
uuuccugggcguauuuggc

SEQ ID NO: 56872 - RNA, 19 nt, Artificial Sequence
  Description of Artificial Sequence: Synthetic oligonucleotide
  Sense strand starting at position 1062 of SEQ ID NO: 689
cucugagggucucccuaaa

SEQ ID NO: 56873 - RNA, 19 nt, Artificial Sequence
  Description of Artificial Sequence: Synthetic oligonucleotide
  Antisense strand to SEQ ID NO: 56792
uuuagggagacccucagag

SEQ ID NO: 56874 - RNA, 19 nt, Artificial Sequence
  Description of Artificial Sequence: Synthetic oligonucleotide
  Sense strand starting at position 1164 of SEQ ID NO: 689
aagggaacggcaugacauu

SEQ ID NO: 56875 - RNA, 19 nt, Artificial Sequence
  Description of Artificial Sequence: Synthetic oligonucleotide
  Antisense strand to SEQ ID NO: 56794
aaugucaugccguucccuu

SEQ ID NO: 56876 - RNA, 19 nt, Artificial Sequence
  Description of Artificial Sequence: Synthetic oligonucleotide
  Sense strand starting at position 1286 of SEQ ID NO: 689
gagggaaauucugcuuuag

SEQ ID NO: 56877 - RNA, 19 nt, Artificial Sequence
  Description of Artificial Sequence: Synthetic oligonucleotide
  Antisense strand to SEQ ID NO: 56796
cuaaagcagaauuucccuc

SEQ ID NO: 56878 - RNA, 19 nt, Artificial Sequence
  Description of Artificial Sequence: Synthetic oligonucleotide
  Sense strand starting at position 1327 of SEQ ID NO: 689
ucucuagaaacgcgggaua

SEQ ID NO: 56879 - RNA, 19 nt, Artificial Sequence
  Description of Artificial Sequence: Synthetic oligonucleotide
  Antisense strand to SEQ ID NO: 56798
uaucccgcguuucuagaga

SEQ ID NO: 56880 - RNA, 19 nt, Artificial Sequence
  Description of Artificial Sequence: Synthetic oligonucleotide
  Sense strand starting at position 1372 of SEQ ID NO: 689
ucagaaaccgcucagaacu

SEQ ID NO: 56881 - RNA, 19 nt, Artificial Sequence
  Description of Artificial Sequence: Synthetic oligonucleotide
  Antisense strand to SEQ ID NO: 56800
aguucugagcgguuucuga

SEQ ID NO: 56882 - RNA, 19 nt, Artificial Sequence
  Description of Artificial Sequence: Synthetic oligonucleotide
  Sense strand starting at position 1870 of SEQ ID NO: 689
gagcaaacuuccuucgaga

SEQ ID NO: 56883 - RNA, 19 nt, Artificial Sequence
  Description of Artificial Sequence: Synthetic oligonucleotide
  Antisense strand to SEQ ID NO: 56802
ucucgaaggaaguuugcuc

SEQ ID NO: 56884 - RNA, 19 nt, Artificial Sequence
  Description of Artificial Sequence: Synthetic oligonucleotide
  Sense strand starting at position 2113 of SEQ ID NO: 689
uggaccauuucucaaguga

SEQ ID NO: 56885 - RNA, 19 nt, Artificial Sequence
  Description of Artificial Sequence: Synthetic oligonucleotide
  Antisense strand to SEQ ID NO: 56804
ucacuugagaaauggucca

SEQ ID NO: 56886 - RNA, 19 nt, Artificial Sequence
  Description of Artificial Sequence: Synthetic oligonucleotide
  Sense strand starting at position 2129 of SEQ ID NO: 689
ugacuaaaucucugugagc

SEQ ID NO: 56887 - RNA, 19 nt, Artificial Sequence
  Description of Artificial Sequence: Synthetic oligonucleotide
  Antisense strand to SEQ ID NO: 56806
gcucacagagauuuaguca

SEQ ID NO: 56888 - RNA, 19 nt, Artificial Sequence
  Description of Artificial Sequence: Synthetic oligonucleotide
  Sense strand starting at position 2130 of SEQ ID NO: 689
gacuaaaucucugugagcu

SEQ ID NO: 56889 - RNA, 19 nt, Artificial Sequence
  Description of Artificial Sequence: Synthetic oligonucleotide
  Antisense strand to SEQ ID NO: 56808
agcucacagagauuuaguc

SEQ ID NO: 56890 - RNA, 19 nt, Artificial Sequence
  Description of Artificial Sequence: Synthetic oligonucleotide
  Sense strand starting at position 2131 of SEQ ID NO: 689
acuaaaucucugugagcug

SEQ ID NO: 56891 - RNA, 19 nt, Artificial Sequence
  Description of Artificial Sequence: Synthetic oligonucleotide
  Antisense strand to SEQ ID NO: 56810
cagcucacagagauuuagu

SEQ ID NO: 56892 - RNA, 19 nt, Artificial Sequence
  Description of Artificial Sequence: Synthetic oligonucleotide
  Sense strand starting at position 2134 of SEQ ID NO: 689
aaaucucugugagcuggaa

SEQ ID NO: 56893 - RNA, 19 nt, Artificial Sequence
  Description of Artificial Sequence: Synthetic oligonucleotide
  Antisense strand to SEQ ID NO: 56812
uuccagcucacagagauuu

SEQ ID NO: 56894 - RNA, 19 nt, Artificial Sequence
  Description of Artificial Sequence: Synthetic oligonucleotide
  Sense strand starting at position 2138 of SEQ ID NO: 689
cucugugagcuggaacuuu

SEQ ID NO: 56895 - RNA, 19 nt, Artificial Sequence
  Description of Artificial Sequence: Synthetic oligonucleotide
  Antisense strand to SEQ ID NO: 56814
aaaguuccagcucacagag

SEQ ID NO: 56896 - RNA, 19 nt, Artificial Sequence
  Description of Artificial Sequence: Synthetic oligonucleotide
  Sense strand starting at position 2205 of SEQ ID NO: 689
aguguugcuguccaagaag

SEQ ID NO: 56897 - RNA, 19 nt, Artificial Sequence
  Description of Artificial Sequence: Synthetic oligonucleotide
  Antisense strand to SEQ ID NO: 56816
cuucuuggacagcaacacu

SEQ ID NO: 56898 - RNA, 19 nt, Artificial Sequence
  Description of Artificial Sequence: Synthetic oligonucleotide
  Sense strand starting at position 2208 of SEQ ID NO: 689
guugcuguccaagaagcaa

SEQ ID NO: 56899 - RNA, 19 nt, Artificial Sequence
  Description of Artificial Sequence: Synthetic oligonucleotide
  Antisense strand to SEQ ID NO: 56818
uugcuucuuggacagcaac

SEQ ID NO: 56900 - RNA, 19 nt, Artificial Sequence
  Description of Artificial Sequence: Synthetic oligonucleotide
  Sense strand starting at position 2320 of SEQ ID NO: 689
acacuuagaaucuguggga

SEQ ID NO: 56901 - RNA, 19 nt, Artificial Sequence
  Description of Artificial Sequence: Synthetic oligonucleotide
  Antisense strand to SEQ ID NO: 56820
ucccacagauucuaagugu

SEQ ID NO: 56902 - RNA, 19 nt, Artificial Sequence
  Description of Artificial Sequence: Synthetic oligonucleotide
  Sense strand starting at position 2770 of SEQ ID NO: 689
aaggucaaauggucuguau

SEQ ID NO: 56903 - RNA, 19 nt, Artificial Sequence
  Description of Artificial Sequence: Synthetic oligonucleotide
  Antisense strand to SEQ ID NO: 56822
auacagaccauuugaccuu

SEQ ID NO: 56904 - RNA, 19 nt, Artificial Sequence
  Description of Artificial Sequence: Synthetic oligonucleotide
  Sense strand starting at position 2773 of SEQ ID NO: 689
gucaaauggucuguauaca

SEQ ID NO: 56905 - RNA, 19 nt, Artificial Sequence
  Description of Artificial Sequence: Synthetic oligonucleotide
  Antisense strand to SEQ ID NO: 56824
uguauacagaccauuugac

SEQ ID NO: 56906 - RNA, 19 nt, Artificial Sequence
  Description of Artificial Sequence: Synthetic oligonucleotide
  Sense strand starting at position 2774 of SEQ ID NO: 689
ucaaauggucuguauacac

SEQ ID NO: 56907 - RNA, 19 nt, Artificial Sequence
  Description of Artificial Sequence: Synthetic oligonucleotide
  Antisense strand to SEQ ID NO: 56826
guguauacagaccauuuga

SEQ ID NO: 56908 - RNA, 19 nt, Artificial Sequence
  Description of Artificial Sequence: Synthetic oligonucleotide
  Sense strand starting at position 2916 of SEQ ID NO: 689
uccaaucugucaguaaauc

SEQ ID NO: 56909 - RNA, 19 nt, Artificial Sequence
  Description of Artificial Sequence: Synthetic oligonucleotide
  Antisense strand to SEQ ID NO: 56828
gauuuacugacagauugga

SEQ ID NO: 56910 - RNA, 19 nt, Artificial Sequence
  Description of Artificial Sequence: Synthetic oligonucleotide
  Sense strand starting at position 3247 of SEQ ID NO: 689
guuacucucucagucauuu

SEQ ID NO: 56911 - RNA, 19 nt, Artificial Sequence
  Description of Artificial Sequence: Synthetic oligonucleotide
  Antisense strand to SEQ ID NO: 56830
aaaugacugagagaguaac

SEQ ID NO: 56912 - RNA, 19 nt, Artificial Sequence
  Description of Artificial Sequence: Synthetic oligonucleotide
  Sense strand starting at position 3297 of SEQ ID NO: 689
cagagagguucuccuugac

SEQ ID NO: 56913 - RNA, 19 nt, Artificial Sequence
  Description of Artificial Sequence: Synthetic oligonucleotide
  Antisense strand to SEQ ID NO: 56832
gucaaggagaaccucucug

SEQ ID NO: 56914 - RNA, 19 nt, Artificial Sequence
  Description of Artificial Sequence: Synthetic oligonucleotide
  Sense strand starting at position 3300 of SEQ ID NO: 689
agagguucuccuugaccca

SEQ ID NO: 56915 - RNA, 19 nt, Artificial Sequence
  Description of Artificial Sequence: Synthetic oligonucleotide
  Antisense strand to SEQ ID NO: 56834
ugggucaaggagaaccucu

SEQ ID NO: 56916 - RNA, 19 nt, Artificial Sequence
  Description of Artificial Sequence: Synthetic oligonucleotide
  Sense strand starting at position 3434 of SEQ ID NO: 689
ucuauaagaucagggauuu

SEQ ID NO: 56917 - RNA, 19 nt, Artificial Sequence
  Description of Artificial Sequence: Synthetic oligonucleotide
  Antisense strand to SEQ ID NO: 56836
aaaucccugaucuuauaga

SEQ ID NO: 56918 - RNA, 19 nt, Artificial Sequence
  Description of Artificial Sequence: Synthetic oligonucleotide
  Sense strand starting at position 3599 of SEQ ID NO: 689
guaguagguguccaguaga

SEQ ID NO: 56919 - RNA, 19 nt, Artificial Sequence
  Description of Artificial Sequence: Synthetic oligonucleotide
  Antisense strand to SEQ ID NO: 56838
ucuacuggacaccuacuac

SEQ ID NO: 56920 - RNA, 19 nt, Artificial Sequence
  Description of Artificial Sequence: Synthetic oligonucleotide
  Sense strand starting at position 3602 of SEQ ID NO: 689
guagguguccaguagauaa

SEQ ID NO: 56921 - RNA, 19 nt, Artificial Sequence
  Description of Artificial Sequence: Synthetic oligonucleotide
  Antisense strand to SEQ ID NO: 56840
uuaucuacuggacaccuac

SEQ ID NO: 56922 - RNA, 19 nt, Artificial Sequence
  Description of Artificial Sequence: Synthetic oligonucleotide
  Sense strand starting at position 3758 of SEQ ID NO: 689
ggcuccuagaauuaagugu

SEQ ID NO: 56923 - RNA, 19 nt, Artificial Sequence
  Description of Artificial Sequence: Synthetic oligonucleotide
  Antisense strand to SEQ ID NO: 56842
acacuuaauucuaggagcc

SEQ ID NO: 56924 - RNA, 19 nt, Artificial Sequence
  Description of Artificial Sequence: Synthetic oligonucleotide
  Sense strand starting at position 3769 of SEQ ID NO: 689
uuaaguguaucuucuugga

SEQ ID NO: 56925 - RNA, 19 nt, Artificial Sequence
  Description of Artificial Sequence: Synthetic oligonucleotide
  Antisense strand to SEQ ID NO: 56844
uccaagaagauacacuuaa

SEQ ID NO: 56926 - RNA, 19 nt, Artificial Sequence
  Description of Artificial Sequence: Synthetic oligonucleotide
  Sense strand starting at position 3771 of SEQ ID NO: 689
aaguguaucuucuuggaga

SEQ ID NO: 56927 - RNA, 19 nt, Artificial Sequence
  Description of Artificial Sequence: Synthetic oligonucleotide
  Antisense strand to SEQ ID NO: 56846
ucuccaagaagauacacuu

SEQ ID NO: 56928 - RNA, 19 nt, Artificial Sequence
  Description of Artificial Sequence: Synthetic oligonucleotide
  Sense strand starting at position 3773 of SEQ ID NO: 689
guguaucuucuuggagaag

SEQ ID NO: 56929 - RNA, 19 nt, Artificial Sequence
  Description of Artificial Sequence: Synthetic oligonucleotide
  Antisense strand to SEQ ID NO: 56848
cuucuccaagaagauacac

SEQ ID NO: 56930 - RNA, 19 nt, Artificial Sequence
  Description of Artificial Sequence: Synthetic oligonucleotide
  Sense strand starting at position 3816 of SEQ ID NO: 689
cuauaacugugccucagaa

SEQ ID NO: 56931 - RNA, 19 nt, Artificial Sequence
  Description of Artificial Sequence: Synthetic oligonucleotide
  Antisense strand to SEQ ID NO: 56850
uucugaggcacaguuauag

SEQ ID NO: 56932 - RNA, 19 nt, Artificial Sequence
  Description of Artificial Sequence: Synthetic oligonucleotide
  Sense strand starting at position 3818 of SEQ ID NO: 689
auaacugugccucagaaua

SEQ ID NO: 56933 - RNA, 19 nt, Artificial Sequence
  Description of Artificial Sequence: Synthetic oligonucleotide
  Antisense strand to SEQ ID NO: 56852
uauucugaggcacaguuau

SEQ ID NO: 56934 - RNA, 19 nt, Artificial Sequence
  Description of Artificial Sequence: Synthetic oligonucleotide
  Sense strand starting at position 3912 of SEQ ID NO: 689
ggaauacucugagaaagga

SEQ ID NO: 56935 - RNA, 19 nt, Artificial Sequence
  Description of Artificial Sequence: Synthetic oligonucleotide
  Antisense strand to SEQ ID NO: 56854
uccuuucucagaguauucc

SEQ ID NO: 56936 - RNA, 19 nt, Artificial Sequence
  Description of Artificial Sequence: Synthetic oligonucleotide
  Sense strand starting at position 381 of SEQ ID NO: 690
ggagccuggugcuccuaaa

SEQ ID NO: 56937 - RNA, 19 nt, Artificial Sequence
  Description of Artificial Sequence: Synthetic oligonucleotide
  Antisense strand to SEQ ID NO: 56856
uuuaggagcaccaggcucc

SEQ ID NO: 56938 - RNA, 19 nt, Artificial Sequence
  Description of Artificial Sequence: Synthetic oligonucleotide
  Sense strand starting at position 524 of SEQ ID NO: 690
cacggcagcuaucauguua

SEQ ID NO: 56939 - RNA, 19 nt, Artificial Sequence
  Description of Artificial Sequence: Synthetic oligonucleotide
  Antisense strand to SEQ ID NO: 56858
uaacaugauagcugccgug

SEQ ID NO: 56940 - RNA, 19 nt, Artificial Sequence
  Description of Artificial Sequence: Synthetic oligonucleotide
  Sense strand starting at position 548 of SEQ ID NO: 690
agcuuaaugcauggauaag

SEQ ID NO: 56941 - RNA, 19 nt, Artificial Sequence
  Description of Artificial Sequence: Synthetic oligonucleotide
  Antisense strand to SEQ ID NO: 56860
cuuauccaugcauuaagcu

SEQ ID NO: 56942 - RNA, 19 nt, Artificial Sequence
  Description of Artificial Sequence: Synthetic oligonucleotide
  Sense strand starting at position 549 of SEQ ID NO: 690
gcuuaaugcauggauaagu

SEQ ID NO: 56943 - RNA, 19 nt, Artificial Sequence
  Description of Artificial Sequence: Synthetic oligonucleotide
  Antisense strand to SEQ ID NO: 56862
acuuauccaugcauuaagc

SEQ ID NO: 56944 - RNA, 19 nt, Artificial Sequence
  Description of Artificial Sequence: Synthetic oligonucleotide
  Sense strand starting at position 639 of SEQ ID NO: 690
gagacauccugagccacuu

SEQ ID NO: 56945 - RNA, 19 nt, Artificial Sequence
  Description of Artificial Sequence: Synthetic oligonucleotide
  Antisense strand to SEQ ID NO: 56864
aaguggcucaggaugucuc

SEQ ID NO: 56946 - RNA, 19 nt, Artificial Sequence
  Description of Artificial Sequence: Synthetic oligonucleotide
  Sense strand starting at position 722 of SEQ ID NO: 690
uugugcuccuugcucaaua

SEQ ID NO: 56947 - RNA, 19 nt, Artificial Sequence
  Description of Artificial Sequence: Synthetic oligonucleotide
  Antisense strand to SEQ ID NO: 56866
uauugagcaaggagcacaa

SEQ ID NO: 56948 - RNA, 19 nt, Artificial Sequence
  Description of Artificial Sequence: Synthetic oligonucleotide
  Sense strand starting at position 758 of SEQ ID NO: 690
ccucuauucuggguaagcu

SEQ ID NO: 56949 - RNA, 19 nt, Artificial Sequence
  Description of Artificial Sequence: Synthetic oligonucleotide
  Antisense strand to SEQ ID NO: 56868
agcuuacccagaauagagg

SEQ ID NO: 56950 - RNA, 19 nt, Artificial Sequence
  Description of Artificial Sequence: Synthetic oligonucleotide
  Sense strand starting at position 759 of SEQ ID NO: 690
cucuauucuggguaagcua

SEQ ID NO: 56951 - RNA, 19 nt, Artificial Sequence
  Description of Artificial Sequence: Synthetic oligonucleotide
  Antisense strand to SEQ ID NO: 56870
uagcuuacccagaauagag

SEQ ID NO: 56952 - RNA, 19 nt, Artificial Sequence
  Description of Artificial Sequence: Synthetic oligonucleotide
  Sense strand starting at position 920 of SEQ ID NO: 690
agcccaaucgcuugucuaa

SEQ ID NO: 56953 - RNA, 19 nt, Artificial Sequence
  Description of Artificial Sequence: Synthetic oligonucleotide
  Antisense strand to SEQ ID NO: 56872
uuagacaagcgauugggcu

SEQ ID NO: 56954 - RNA, 19 nt, Artificial Sequence
  Description of Artificial Sequence: Synthetic oligonucleotide
  Sense strand starting at position 958 of SEQ ID NO: 690
uuggaaagcugguggugau

SEQ ID NO: 56955 - RNA, 19 nt, Artificial Sequence
  Description of Artificial Sequence: Synthetic oligonucleotide
  Antisense strand to SEQ ID NO: 56874
aucaccaccagcuuuccaa

SEQ ID NO: 56956 - RNA, 19 nt, Artificial Sequence
  Description of Artificial Sequence: Synthetic oligonucleotide
  Sense strand starting at position 1024 of SEQ ID NO: 690
ccaaucucugugcaagacu

SEQ ID NO: 56957 - RNA, 19 nt, Artificial Sequence
  Description of Artificial Sequence: Synthetic oligonucleotide
  Antisense strand to SEQ ID NO: 56876
agucuugcacagagauugg

SEQ ID NO: 56958 - RNA, 19 nt, Artificial Sequence
  Description of Artificial Sequence: Synthetic oligonucleotide
  Sense strand starting at position 1376 of SEQ ID NO: 690
gcugguaagaccugugucu

SEQ ID NO: 56959 - RNA, 19 nt, Artificial Sequence
  Description of Artificial Sequence: Synthetic oligonucleotide
  Antisense strand to SEQ ID NO: 56878
agacacaggucuuaccagc

SEQ ID NO: 56960 - RNA, 19 nt, Artificial Sequence
  Description of Artificial Sequence: Synthetic oligonucleotide
  Sense strand starting at position 1498 of SEQ ID NO: 690
gguguguggcuguagggau

SEQ ID NO: 56961 - RNA, 19 nt, Artificial Sequence
  Description of Artificial Sequence: Synthetic oligonucleotide
  Antisense strand to SEQ ID NO: 56880
aucccuacagccacacacc

SEQ ID NO: 56962 - RNA, 19 nt, Artificial Sequence
  Description of Artificial Sequence: Synthetic oligonucleotide
  Sense strand starting at position 2389 of SEQ ID NO: 690
cugugaguucagcgacuuu

SEQ ID NO: 56963 - RNA, 19 nt, Artificial Sequence
  Description of Artificial Sequence: Synthetic oligonucleotide
  Antisense strand to SEQ ID NO: 56882
aaagucgcugaacucacag

SEQ ID NO: 56964 - RNA, 19 nt, Artificial Sequence
  Description of Artificial Sequence: Synthetic oligonucleotide
  Sense strand starting at position 2455 of SEQ ID NO: 690
auaauauaugcccagaggu

SEQ ID NO: 56965 - RNA, 19 nt, Artificial Sequence
  Description of Artificial Sequence: Synthetic oligonucleotide
  Antisense strand to SEQ ID NO: 56884
accucugggcauauauuau

SEQ ID NO: 56966 - RNA, 19 nt, Artificial Sequence
  Description of Artificial Sequence: Synthetic oligonucleotide
  Sense strand starting at position 2530 of SEQ ID NO: 690
gucuccagcgaugguugaa

SEQ ID NO: 56967 - RNA, 19 nt, Artificial Sequence
  Description of Artificial Sequence: Synthetic oligonucleotide
  Antisense strand to SEQ ID NO: 56886
uucaaccaucgcuggagac

SEQ ID NO: 56968 - RNA, 19 nt, Artificial Sequence
  Description of Artificial Sequence: Synthetic oligonucleotide
  Sense strand starting at position 2571 of SEQ ID NO: 690
agggcuugucuagggcaga

SEQ ID NO: 56969 - RNA, 19 nt, Artificial Sequence
  Description of Artificial Sequence: Synthetic oligonucleotide
  Antisense strand to SEQ ID NO: 56888
ucugcccuagacaagcccu

SEQ ID NO: 56970 - RNA, 19 nt, Artificial Sequence
  Description of Artificial Sequence: Synthetic oligonucleotide
  Sense strand starting at position 2576 of SEQ ID NO: 690
uugucuagggcagaguaaa

SEQ ID NO: 56971 - RNA, 19 nt, Artificial Sequence
  Description of Artificial Sequence: Synthetic oligonucleotide
  Antisense strand to SEQ ID NO: 56890
uuuacucugcccuagacaa

SEQ ID NO: 56972 - RNA, 19 nt, Artificial Sequence
  Description of Artificial Sequence: Synthetic oligonucleotide
  Sense strand starting at position 2702 of SEQ ID NO: 690
acacacugauggucauaca

SEQ ID NO: 56973 - RNA, 19 nt, Artificial Sequence
  Description of Artificial Sequence: Synthetic oligonucleotide
  Antisense strand to SEQ ID NO: 56892
uguaugaccaucagugugu

SEQ ID NO: 56974 - RNA, 19 nt, Artificial Sequence
  Description of Artificial Sequence: Synthetic oligonucleotide
  Sense strand starting at position 2894 of SEQ ID NO: 690
gcuccugaggugugaagau

SEQ ID NO: 56975 - RNA, 19 nt, Artificial Sequence
  Description of Artificial Sequence: Synthetic oligonucleotide
  Antisense strand to SEQ ID NO: 56894
aucuucacaccucaggagc

SEQ ID NO: 56976 - RNA, 19 nt, Artificial Sequence
  Description of Artificial Sequence: Synthetic oligonucleotide
  Sense strand starting at position 2903 of SEQ ID NO: 690
gugugaagauccuuuagca

SEQ ID NO: 56977 - RNA, 19 nt, Artificial Sequence
  Description of Artificial Sequence: Synthetic oligonucleotide
  Antisense strand to SEQ ID NO: 56896
ugcuaaaggaucuucacac

SEQ ID NO: 56978 - RNA, 19 nt, Artificial Sequence
  Description of Artificial Sequence: Synthetic oligonucleotide
  Sense strand starting at position 2942 of SEQ ID NO: 690
acucaaugucagugucuga

SEQ ID NO: 56979 - RNA, 19 nt, Artificial Sequence
  Description of Artificial Sequence: Synthetic oligonucleotide
  Antisense strand to SEQ ID NO: 56898
ucagacacugacauugagu

SEQ ID NO: 56980 - RNA, 19 nt, Artificial Sequence
  Description of Artificial Sequence: Synthetic oligonucleotide
  Sense strand starting at position 3728 of SEQ ID NO: 690
augaauaagguuugaggca

SEQ ID NO: 56981 - RNA, 19 nt, Artificial Sequence
  Description of Artificial Sequence: Synthetic oligonucleotide
  Antisense strand to SEQ ID NO: 56900
ugccucaaaccuuauucau

SEQ ID NO: 56982 - RNA, 19 nt, Artificial Sequence
  Description of Artificial Sequence: Synthetic oligonucleotide
  Sense strand starting at position 3861 of SEQ ID NO: 690
ggugcucucugcccaguaa

SEQ ID NO: 56983 - RNA, 19 nt, Artificial Sequence
  Description of Artificial Sequence: Synthetic oligonucleotide
  Antisense strand to SEQ ID NO: 56902
uuacugggcagagagcacc

SEQ ID NO: 56984 - RNA, 19 nt, Artificial Sequence
  Description of Artificial Sequence: Synthetic oligonucleotide
  Sense strand starting at position 3862 of SEQ ID NO: 690
gugcucucugcccaguaaa

SEQ ID NO: 56985 - RNA, 19 nt, Artificial Sequence
  Description of Artificial Sequence: Synthetic oligonucleotide
  Antisense strand to SEQ ID NO: 56904
uuuacugggcagagagcac

SEQ ID NO: 56986 - RNA, 19 nt, Artificial Sequence
  Description of Artificial Sequence: Synthetic oligonucleotide
  Sense strand starting at position 3918 of SEQ ID NO: 690
ucagcagaccugggugaau

SEQ ID NO: 56987 - RNA, 19 nt, Artificial Sequence
  Description of Artificial Sequence: Synthetic oligonucleotide
  Antisense strand to SEQ ID NO: 56906
auucacccaggucugcuga

SEQ ID NO: 56988 - RNA, 19 nt, Artificial Sequence
  Description of Artificial Sequence: Synthetic oligonucleotide
  Sense strand starting at position 3937 of SEQ ID NO: 690
gagggcuuagcucacacaa

SEQ ID NO: 56989 - RNA, 19 nt, Artificial Sequence
  Description of Artificial Sequence: Synthetic oligonucleotide
  Antisense strand to SEQ ID NO: 56908
uugugugagcuaagcccuc

SEQ ID NO: 56990 - RNA, 19 nt, Artificial Sequence
  Description of Artificial Sequence: Synthetic oligonucleotide
  Sense strand starting at position 801 of SEQ ID NO: 691
gcagggucucuggaggagu

SEQ ID NO: 56991 - RNA, 19 nt, Artificial Sequence
  Description of Artificial Sequence: Synthetic oligonucleotide
  Antisense strand to SEQ ID NO: 56910
acuccuccagagacccugc

SEQ ID NO: 56992 - RNA, 19 nt, Artificial Sequence
  Description of Artificial Sequence: Synthetic oligonucleotide
  Sense strand starting at position 1249 of SEQ ID NO: 691
ccuucugucuuugugagga

SEQ ID NO: 56993 - RNA, 19 nt, Artificial Sequence
  Description of Artificial Sequence: Synthetic oligonucleotide
  Antisense strand to SEQ ID NO: 56912
uccucacaaagacagaagg

SEQ ID NO: 56994 - RNA, 19 nt, Artificial Sequence
  Description of Artificial Sequence: Synthetic oligonucleotide
  Sense strand starting at position 3143 of SEQ ID NO: 691
ucuagcaugggucgggaaa

SEQ ID NO: 56995 - RNA, 19 nt, Artificial Sequence
  Description of Artificial Sequence: Synthetic oligonucleotide
  Antisense strand to SEQ ID NO: 56914
uuucccgacccaugcuaga

SEQ ID NO: 56996 - RNA, 19 nt, Artificial Sequence
  Description of Artificial Sequence: Synthetic oligonucleotide
  Sense strand starting at position 5 of SEQ ID NO: 692
ggccucgaacuuuagcaaa

SEQ ID NO: 56997 - RNA, 19 nt, Artificial Sequence
  Description of Artificial Sequence: Synthetic oligonucleotide
  Antisense strand to SEQ ID NO: 56916
uuugcuaaaguucgaggcc

SEQ ID NO: 56998 - RNA, 19 nt, Artificial Sequence
  Description of Artificial Sequence: Synthetic oligonucleotide
  Sense strand starting at position 260 of SEQ ID NO: 692
ccagguaccugugugaaug

SEQ ID NO: 56999 - RNA, 19 nt, Artificial Sequence
  Description of Artificial Sequence: Synthetic oligonucleotide
  Antisense strand to SEQ ID NO: 56918
cauucacacagguaccugg

SEQ ID NO: 57000 - RNA, 19 nt, Artificial Sequence
  Description of Artificial Sequence: Synthetic oligonucleotide
  Sense strand starting at position 327 of SEQ ID NO: 692
aagagaugagcucagccua

SEQ ID NO: 57001 - RNA, 19 nt, Artificial Sequence
  Description of Artificial Sequence: Synthetic oligonucleotide
  Antisense strand to SEQ ID NO: 56920
uaggcugagcucaucucuu

SEQ ID NO: 57002 - RNA, 19 nt, Artificial Sequence
  Description of Artificial Sequence: Synthetic oligonucleotide
  Sense strand starting at position 406 of SEQ ID NO: 692
gcugaaagccaagaucuga

SEQ ID NO: 57003 - RNA, 19 nt, Artificial Sequence
  Description of Artificial Sequence: Synthetic oligonucleotide
  Antisense strand to SEQ ID NO: 56922
ucagaucuuggcuuucagc

SEQ ID NO: 57004 - RNA, 19 nt, Artificial Sequence
  Description of Artificial Sequence: Synthetic oligonucleotide
  Sense strand starting at position 433 of SEQ ID NO: 692
aggcaagugaaguaguaaa

SEQ ID NO: 57005 - RNA, 19 nt, Artificial Sequence
  Description of Artificial Sequence: Synthetic oligonucleotide
  Antisense strand to SEQ ID NO: 56924
uuuacuacuucacuugccu

SEQ ID NO: 57006 - RNA, 19 nt, Artificial Sequence
  Description of Artificial Sequence: Synthetic oligonucleotide
  Sense strand starting at position 1271 of SEQ ID NO: 692
gaugaagucauguaggguu

SEQ ID NO: 57007 - RNA, 19 nt, Artificial Sequence
  Description of Artificial Sequence: Synthetic oligonucleotide
  Antisense strand to SEQ ID NO: 56926
aacccuacaugacuucauc

SEQ ID NO: 57008 - RNA, 19 nt, Artificial Sequence
  Description of Artificial Sequence: Synthetic oligonucleotide
  Sense strand starting at position 1301 of SEQ ID NO: 692
gagagaaagagcuguggau

SEQ ID NO: 57009 - RNA, 19 nt, Artificial Sequence
  Description of Artificial Sequence: Synthetic oligonucleotide
  Antisense strand to SEQ ID NO: 56928
auccacagcucuuucucuc

SEQ ID NO: 57010 - RNA, 19 nt, Artificial Sequence
  Description of Artificial Sequence: Synthetic oligonucleotide
  Sense strand starting at position 1665 of SEQ ID NO: 692
acuggucagagcuguaagu

SEQ ID NO: 57011 - RNA, 19 nt, Artificial Sequence
  Description of Artificial Sequence: Synthetic oligonucleotide
  Antisense strand to SEQ ID NO: 56930
acuuacagcucugaccagu

SEQ ID NO: 57012 - RNA, 19 nt, Artificial Sequence
  Description of Artificial Sequence: Synthetic oligonucleotide
  Sense strand starting at position 1667 of SEQ ID NO: 692
uggucagagcuguaaguga

SEQ ID NO: 57013 - RNA, 19 nt, Artificial Sequence
  Description of Artificial Sequence: Synthetic oligonucleotide
  Antisense strand to SEQ ID NO: 56932
ucacuuacagcucugacca

SEQ ID NO: 57014 - RNA, 19 nt, Artificial Sequence
  Description of Artificial Sequence: Synthetic oligonucleotide
  Sense strand starting at position 1672 of SEQ ID NO: 692
agagcuguaagugagaagu

SEQ ID NO: 57015 - RNA, 19 nt, Artificial Sequence
  Description of Artificial Sequence: Synthetic oligonucleotide
  Antisense strand to SEQ ID NO: 56934
acuucucacuuacagcucu

SEQ ID NO: 57016 - RNA, 19 nt, Artificial Sequence
  Description of Artificial Sequence: Synthetic oligonucleotide
  Sense strand starting at position 1763 of SEQ ID NO: 692
gggugauggcaaggacuau

SEQ ID NO: 57017 - RNA, 19 nt, Artificial Sequence
  Description of Artificial Sequence: Synthetic oligonucleotide
  Antisense strand to SEQ ID NO: 56936
auaguccuugccaucaccc

SEQ ID NO: 57018 - RNA, 19 nt, Artificial Sequence
  Description of Artificial Sequence: Synthetic oligonucleotide
  Sense strand starting at position 1764 of SEQ ID NO: 692
ggugauggcaaggacuauu

SEQ ID NO: 57019 - RNA, 19 nt, Artificial Sequence
  Description of Artificial Sequence: Synthetic oligonucleotide
  Antisense strand to SEQ ID NO: 56938
aauaguccuugccaucacc

SEQ ID NO: 57020 - RNA, 19 nt, Artificial Sequence
  Description of Artificial Sequence: Synthetic oligonucleotide
  Sense strand starting at position 1775 of SEQ ID NO: 692
ggacuauugcggcaaugac

SEQ ID NO: 57021 - RNA, 19 nt, Artificial Sequence
  Description of Artificial Sequence: Synthetic oligonucleotide
  Antisense strand to SEQ ID NO: 56940
gucauugccgcaauagucc

SEQ ID NO: 57022 - RNA, 19 nt, Artificial Sequence
  Description of Artificial Sequence: Synthetic oligonucleotide
  Sense strand starting at position 1831 of SEQ ID NO: 692
uugaccugauucuuugaua

SEQ ID NO: 57023 - RNA, 19 nt, Artificial Sequence
  Description of Artificial Sequence: Synthetic oligonucleotide
  Antisense strand to SEQ ID NO: 56942
uaucaaagaaucaggucaa

SEQ ID NO: 57024 - RNA, 19 nt, Artificial Sequence
  Description of Artificial Sequence: Synthetic oligonucleotide
  Sense strand starting at position 1832 of SEQ ID NO: 692
ugaccugauucuuugauaa

SEQ ID NO: 57025 - RNA, 19 nt, Artificial Sequence
  Description of Artificial Sequence: Synthetic oligonucleotide
  Antisense strand to SEQ ID NO: 56944
uuaucaaagaaucagguca

SEQ ID NO: 57026 - RNA, 19 nt, Artificial Sequence
  Description of Artificial Sequence: Synthetic oligonucleotide
  Sense strand starting at position 1996 of SEQ ID NO: 692
ucugcagcccuguaauauc

SEQ ID NO: 57027 - RNA, 19 nt, Artificial Sequence
  Description of Artificial Sequence: Synthetic oligonucleotide
  Antisense strand to SEQ ID NO: 56946
gauauuacagggcugcaga

SEQ ID NO: 57028 - RNA, 19 nt, Artificial Sequence
  Description of Artificial Sequence: Synthetic oligonucleotide
  Sense strand starting at position 2273 of SEQ ID NO: 692
ucauuuccuuccguguaaa

SEQ ID NO: 57029 - RNA, 19 nt, Artificial Sequence
  Description of Artificial Sequence: Synthetic oligonucleotide
  Antisense strand to SEQ ID NO: 56948
uuuacacggaaggaaauga

SEQ ID NO: 57030 - RNA, 19 nt, Artificial Sequence
  Description of Artificial Sequence: Synthetic oligonucleotide
  Sense strand starting at position 2305 of SEQ ID NO: 692
cugggugaucccgaacauu

SEQ ID NO: 57031 - RNA, 19 nt, Artificial Sequence
  Description of Artificial Sequence: Synthetic oligonucleotide
  Antisense strand to SEQ ID NO: 56950
aauguucgggaucacccag

SEQ ID NO: 57032 - RNA, 19 nt, Artificial Sequence
  Description of Artificial Sequence: Synthetic oligonucleotide
  Sense strand starting at position 2314 of SEQ ID NO: 692
cccgaacauucuguucuuu

SEQ ID NO: 57033 - RNA, 19 nt, Artificial Sequence
  Description of Artificial Sequence: Synthetic oligonucleotide
  Antisense strand to SEQ ID NO: 56952
aaagaacagaauguucggg

SEQ ID NO: 57034 - RNA, 19 nt, Artificial Sequence
  Description of Artificial Sequence: Synthetic oligonucleotide
  Sense strand starting at position 2376 of SEQ ID NO: 692
ugcauuaucaggcaagggu

SEQ ID NO: 57035 - RNA, 19 nt, Artificial Sequence
  Description of Artificial Sequence: Synthetic oligonucleotide
  Antisense strand to SEQ ID NO: 56954
acccuugccugauaaugca

SEQ ID NO: 57036 - RNA, 19 nt, Artificial Sequence
  Description of Artificial Sequence: Synthetic oligonucleotide
  Sense strand starting at position 2405 of SEQ ID NO: 692
acagauuagaucugcguaa

SEQ ID NO: 57037 - RNA, 19 nt, Artificial Sequence
  Description of Artificial Sequence: Synthetic oligonucleotide
  Antisense strand to SEQ ID NO: 56956
uuacgcagaucuaaucugu

SEQ ID NO: 57038 - RNA, 19 nt, Artificial Sequence
  Description of Artificial Sequence: Synthetic oligonucleotide
  Sense strand starting at position 2406 of SEQ ID NO: 692
cagauuagaucugcguaag

SEQ ID NO: 57039 - RNA, 19 nt, Artificial Sequence
  Description of Artificial Sequence: Synthetic oligonucleotide
  Antisense strand to SEQ ID NO: 56958
cuuacgcagaucuaaucug

SEQ ID NO: 57040 - RNA, 19 nt, Artificial Sequence
  Description of Artificial Sequence: Synthetic oligonucleotide
  Sense strand starting at position 2407 of SEQ ID NO: 692
agauuagaucugcguaagg

SEQ ID NO: 57041 - RNA, 19 nt, Artificial Sequence
  Description of Artificial Sequence: Synthetic oligonucleotide
  Antisense strand to SEQ ID NO: 56960
ccuuacgcagaucuaaucu

SEQ ID NO: 57042 - RNA, 19 nt, Artificial Sequence
  Description of Artificial Sequence: Synthetic oligonucleotide
  Sense strand starting at position 2425 of SEQ ID NO: 692
gggcaauaaucuuccuuuc

SEQ ID NO: 57043 - RNA, 19 nt, Artificial Sequence
  Description of Artificial Sequence: Synthetic oligonucleotide
  Antisense strand to SEQ ID NO: 56962
gaaaggaagauuauugccc

SEQ ID NO: 57044 - RNA, 19 nt, Artificial Sequence
  Description of Artificial Sequence: Synthetic oligonucleotide
  Sense strand starting at position 2446 of SEQ ID NO: 692
cugagauuaugguuaacag

SEQ ID NO: 57045 - RNA, 19 nt, Artificial Sequence
  Description of Artificial Sequence: Synthetic oligonucleotide
  Antisense strand to SEQ ID NO: 56964
cuguuaaccauaaucucag

SEQ ID NO: 57046 - RNA, 19 nt, Artificial Sequence
  Description of Artificial Sequence: Synthetic oligonucleotide
  Sense strand starting at position 2462 of SEQ ID NO: 692
cagauuaucuaccugggau

SEQ ID NO: 57047 - RNA, 19 nt, Artificial Sequence
  Description of Artificial Sequence: Synthetic oligonucleotide
  Antisense strand to SEQ ID NO: 56966
aucccagguagauaaucug

SEQ ID NO: 57048 - RNA, 19 nt, Artificial Sequence
  Description of Artificial Sequence: Synthetic oligonucleotide
  Sense strand starting at position 2787 of SEQ ID NO: 692
gugaaagggugucuagaau

SEQ ID NO: 57049 - RNA, 19 nt, Artificial Sequence
  Description of Artificial Sequence: Synthetic oligonucleotide
  Antisense strand to SEQ ID NO: 56968
auucuagacacccuuucac

SEQ ID NO: 57050 - RNA, 19 nt, Artificial Sequence
  Description of Artificial Sequence: Synthetic oligonucleotide
  Sense strand starting at position 2884 of SEQ ID NO: 692
ugggucauuccugagucca

SEQ ID NO: 57051 - RNA, 19 nt, Artificial Sequence
  Description of Artificial Sequence: Synthetic oligonucleotide
  Antisense strand to SEQ ID NO: 56970
uggacucaggaaugaccca

SEQ ID NO: 57052 - RNA, 19 nt, Artificial Sequence
  Description of Artificial Sequence: Synthetic oligonucleotide
  Sense strand starting at position 2886 of SEQ ID NO: 692
ggucauuccugaguccauu

SEQ ID NO: 57053 - RNA, 19 nt, Artificial Sequence
  Description of Artificial Sequence: Synthetic oligonucleotide
  Antisense strand to SEQ ID NO: 56972
aauggacucaggaaugacc

SEQ ID NO: 57054 - RNA, 19 nt, Artificial Sequence
  Description of Artificial Sequence: Synthetic oligonucleotide
  Sense strand starting at position 3208 of SEQ ID NO: 692
gacaguuucccuggaucag

SEQ ID NO: 57055 - RNA, 19 nt, Artificial Sequence
  Description of Artificial Sequence: Synthetic oligonucleotide
  Antisense strand to SEQ ID NO: 56974
cugauccagggaaacuguc

SEQ ID NO: 57056 - RNA, 19 nt, Artificial Sequence
  Description of Artificial Sequence: Synthetic oligonucleotide
  Sense strand starting at position 3209 of SEQ ID NO: 692
acaguuucccuggaucagu

SEQ ID NO: 57057 - RNA, 19 nt, Artificial Sequence
  Description of Artificial Sequence: Synthetic oligonucleotide
  Antisense strand to SEQ ID NO: 56976
acugauccagggaaacugu

SEQ ID NO: 57058 - RNA, 19 nt, Artificial Sequence
  Description of Artificial Sequence: Synthetic oligonucleotide
  Sense strand starting at position 3354 of SEQ ID NO: 692
gggugcuauucuguaggau

SEQ ID NO: 57059 - RNA, 19 nt, Artificial Sequence
  Description of Artificial Sequence: Synthetic oligonucleotide
  Antisense strand to SEQ ID NO: 56978
auccuacagaauagcaccc

SEQ ID NO: 57060 - RNA, 19 nt, Artificial Sequence
  Description of Artificial Sequence: Synthetic oligonucleotide
  Sense strand starting at position 3355 of SEQ ID NO: 692
ggugcuauucuguaggaug

SEQ ID NO: 57061 - RNA, 19 nt, Artificial Sequence
  Description of Artificial Sequence: Synthetic oligonucleotide
  Antisense strand to SEQ ID NO: 56980
cauccuacagaauagcacc

SEQ ID NO: 57062 - RNA, 19 nt, Artificial Sequence
  Description of Artificial Sequence: Synthetic oligonucleotide
  Sense strand starting at position 3498 of SEQ ID NO: 692
gugguaugccuacagggau

SEQ ID NO: 57063 - RNA, 19 nt, Artificial Sequence
  Description of Artificial Sequence: Synthetic oligonucleotide
  Antisense strand to SEQ ID NO: 56982
aucccuguaggcauaccac

SEQ ID NO: 57064 - RNA, 19 nt, Artificial Sequence
  Description of Artificial Sequence: Synthetic oligonucleotide
  Sense strand starting at position 3580 of SEQ ID NO: 692
cacuguguauauccggaaa

SEQ ID NO: 57065 - RNA, 19 nt, Artificial Sequence
  Description of Artificial Sequence: Synthetic oligonucleotide
  Antisense strand to SEQ ID NO: 56984
uuuccggauauacacagug

SEQ ID NO: 57066 - RNA, 19 nt, Artificial Sequence
  Description of Artificial Sequence: Synthetic oligonucleotide
  Sense strand starting at position 3583 of SEQ ID NO: 692
uguguauauccggaaaugu

SEQ ID NO: 57067 - RNA, 19 nt, Artificial Sequence
  Description of Artificial Sequence: Synthetic oligonucleotide
  Antisense strand to SEQ ID NO: 56986
acauuuccggauauacaca

SEQ ID NO: 57068 - RNA, 19 nt, Artificial Sequence
  Description of Artificial Sequence: Synthetic oligonucleotide
  Sense strand starting at position 3648 of SEQ ID NO: 692
gcucaauucucaguucuug

SEQ ID NO: 57069 - RNA, 19 nt, Artificial Sequence
  Description of Artificial Sequence: Synthetic oligonucleotide
  Antisense strand to SEQ ID NO: 56988
caagaacugagaauugagc

SEQ ID NO: 57070 - RNA, 19 nt, Artificial Sequence
  Description of Artificial Sequence: Synthetic oligonucleotide
  Sense strand starting at position 3966 of SEQ ID NO: 692
cauggaaggguguguuaac

SEQ ID NO: 57071 - RNA, 19 nt, Artificial Sequence
  Description of Artificial Sequence: Synthetic oligonucleotide
  Antisense strand to SEQ ID NO: 56990
guuaacacacccuuccaug

SEQ ID NO: 57072 - RNA, 19 nt, Artificial Sequence
  Description of Artificial Sequence: Synthetic oligonucleotide
  Sense strand starting at position 3973 of SEQ ID NO: 692
ggguguguuaacugggaua

SEQ ID NO: 57073 - RNA, 19 nt, Artificial Sequence
  Description of Artificial Sequence: Synthetic oligonucleotide
  Antisense strand to SEQ ID NO: 56992
uaucccaguuaacacaccc

SEQ ID NO: 57074 - RNA, 19 nt, Artificial Sequence
  Description of Artificial Sequence: Synthetic oligonucleotide
  Sense strand starting at position 3975 of SEQ ID NO: 692
guguguuaacugggauauu

SEQ ID NO: 57075 - RNA, 19 nt, Artificial Sequence
  Description of Artificial Sequence: Synthetic oligonucleotide
  Antisense strand to SEQ ID NO: 56994
aauaucccaguuaacacac

SEQ ID NO: 57076 - RNA, 19 nt, Artificial Sequence
  Description of Artificial Sequence: Synthetic oligonucleotide
  Sense strand starting at position 3754 of SEQ ID NO: 693
gggugaaugugccugaaau

SEQ ID NO: 57077 - RNA, 19 nt, Artificial Sequence
  Description of Artificial Sequence: Synthetic oligonucleotide
  Antisense strand to SEQ ID NO: 56996
auuucaggcacauucaccc

SEQ ID NO: 57078 - RNA, 19 nt, Artificial Sequence
  Description of Artificial Sequence: Synthetic oligonucleotide
  Sense strand starting at position 3554 of SEQ ID NO: 693
ucuuuaucagauggagagu

SEQ ID NO: 57079 - RNA, 19 nt, Artificial Sequence
  Description of Artificial Sequence: Synthetic oligonucleotide
  Antisense strand to SEQ ID NO: 56998
acucuccaucugauaaaga

SEQ ID NO: 57080 - RNA, 19 nt, Artificial Sequence
  Description of Artificial Sequence: Synthetic oligonucleotide
  Sense strand starting at position 3449 of SEQ ID NO: 693
gcuggagggaacuguuauu

SEQ ID NO: 57081 - RNA, 19 nt, Artificial Sequence
  Description of Artificial Sequence: Synthetic oligonucleotide
  Antisense strand to SEQ ID NO: 57000
aauaacaguucccuccagc

SEQ ID NO: 57082 - RNA, 19 nt, Artificial Sequence
  Description of Artificial Sequence: Synthetic oligonucleotide
  Sense strand starting at position 3417 of SEQ ID NO: 693
ccucaagagucacuguaag

SEQ ID NO: 57083 - RNA, 19 nt, Artificial Sequence
  Description of Artificial Sequence: Synthetic oligonucleotide
  Antisense strand to SEQ ID NO: 57002
cuuacagugacucuugagg

SEQ ID NO: 57084 - RNA, 19 nt, Artificial Sequence
  Description of Artificial Sequence: Synthetic oligonucleotide
  Sense strand starting at position 3415 of SEQ ID NO: 693
guccucaagagucacugua

SEQ ID NO: 57085 - RNA, 19 nt, Artificial Sequence
  Description of Artificial Sequence: Synthetic oligonucleotide
  Antisense strand to SEQ ID NO: 57004
uacagugacucuugaggac

SEQ ID NO: 57086 - RNA, 19 nt, Artificial Sequence
  Description of Artificial Sequence: Synthetic oligonucleotide
  Sense strand starting at position 3409 of SEQ ID NO: 693
ggcgguguccucaagaguc

SEQ ID NO: 57087 - RNA, 19 nt, Artificial Sequence
  Description of Artificial Sequence: Synthetic oligonucleotide
  Antisense strand to SEQ ID NO: 57006
gacucuugaggacaccgcc

SEQ ID NO: 57088 - RNA, 19 nt, Artificial Sequence
  Description of Artificial Sequence: Synthetic oligonucleotide
  Sense strand starting at position 2991 of SEQ ID NO: 693
gugccuuagcucuacauuu

SEQ ID NO: 57089 - RNA, 19 nt, Artificial Sequence
  Description of Artificial Sequence: Synthetic oligonucleotide
  Antisense strand to SEQ ID NO: 57008
aaauguagagcuaaggcac

SEQ ID NO: 57090 - RNA, 19 nt, Artificial Sequence
  Description of Artificial Sequence: Synthetic oligonucleotide
  Sense strand starting at position 2710 of SEQ ID NO: 693
ggacaauguccacacucuu

SEQ ID NO: 57091 - RNA, 19 nt, Artificial Sequence
  Description of Artificial Sequence: Synthetic oligonucleotide
  Antisense strand to SEQ ID NO: 57010
aagaguguggacauugucc

SEQ ID NO: 57092 - RNA, 19 nt, Artificial Sequence
  Description of Artificial Sequence: Synthetic oligonucleotide
  Sense strand starting at position 2651 of SEQ ID NO: 693
uuuagauguccucaucauc

SEQ ID NO: 57093 - RNA, 19 nt, Artificial Sequence
  Description of Artificial Sequence: Synthetic oligonucleotide
  Antisense strand to SEQ ID NO: 57012
gaugaugaggacaucuaaa

SEQ ID NO: 57094 - RNA, 19 nt, Artificial Sequence
  Description of Artificial Sequence: Synthetic oligonucleotide
  Sense strand starting at position 2543 of SEQ ID NO: 693
aagccauuucccggaguuc

SEQ ID NO: 57095 - RNA, 19 nt, Artificial Sequence
  Description of Artificial Sequence: Synthetic oligonucleotide
  Antisense strand to SEQ ID NO: 57014
gaacuccgggaaauggcuu

SEQ ID NO: 57096 - RNA, 19 nt, Artificial Sequence
  Description of Artificial Sequence: Synthetic oligonucleotide
  Sense strand starting at position 2502 of SEQ ID NO: 693
guucgcauccguguuaaag

SEQ ID NO: 57097 - RNA, 19 nt, Artificial Sequence
  Description of Artificial Sequence: Synthetic oligonucleotide
  Antisense strand to SEQ ID NO: 57016
cuuuaacacggaugcgaac

SEQ ID NO: 57098 - RNA, 19 nt, Artificial Sequence
  Description of Artificial Sequence: Synthetic oligonucleotide
  Sense strand starting at position 2498 of SEQ ID NO: 693
ggauguucgcauccguguu

SEQ ID NO: 57099 - RNA, 19 nt, Artificial Sequence
  Description of Artificial Sequence: Synthetic oligonucleotide
  Antisense strand to SEQ ID NO: 57018
aacacggaugcgaacaucc

SEQ ID NO: 57100 - RNA, 19 nt, Artificial Sequence
  Description of Artificial Sequence: Synthetic oligonucleotide
  Sense strand starting at position 2497 of SEQ ID NO: 693
gggauguucgcauccgugu

SEQ ID NO: 57101 - RNA, 19 nt, Artificial Sequence
  Description of Artificial Sequence: Synthetic oligonucleotide
  Antisense strand to SEQ ID NO: 57020
acacggaugcgaacauccc

SEQ ID NO: 57102 - RNA, 19 nt, Artificial Sequence
  Description of Artificial Sequence: Synthetic oligonucleotide
  Sense strand starting at position 1544 of SEQ ID NO: 693
aggaaaucgagcugagaug

SEQ ID NO: 57103 - RNA, 19 nt, Artificial Sequence
  Description of Artificial Sequence: Synthetic oligonucleotide
  Antisense strand to SEQ ID NO: 57022
caucucagcucgauuuccu

SEQ ID NO: 57104 - RNA, 19 nt, Artificial Sequence
  Description of Artificial Sequence: Synthetic oligonucleotide
  Sense strand starting at position 1508 of SEQ ID NO: 693
cgagcauggcucuaaauaa

SEQ ID NO: 57105 - RNA, 19 nt, Artificial Sequence
  Description of Artificial Sequence: Synthetic oligonucleotide
  Antisense strand to SEQ ID NO: 57024
uuauuuagagccaugcucg

SEQ ID NO: 57106 - RNA, 19 nt, Artificial Sequence
  Description of Artificial Sequence: Synthetic oligonucleotide
  Sense strand starting at position 1404 of SEQ ID NO: 693
ggaggcuugauaugugauu

SEQ ID NO: 57107 - RNA, 19 nt, Artificial Sequence
  Description of Artificial Sequence: Synthetic oligonucleotide
  Antisense strand to SEQ ID NO: 57026
aaucacauaucaagccucc

SEQ ID NO: 57108 - RNA, 19 nt, Artificial Sequence
  Description of Artificial Sequence: Synthetic oligonucleotide
  Sense strand starting at position 1149 of SEQ ID NO: 693
gagguuuggauguagaucu

SEQ ID NO: 57109 - RNA, 19 nt, Artificial Sequence
  Description of Artificial Sequence: Synthetic oligonucleotide
  Antisense strand to SEQ ID NO: 57028
agaucuacauccaaaccuc

SEQ ID NO: 57110 - RNA, 19 nt, Artificial Sequence
  Description of Artificial Sequence: Synthetic oligonucleotide
  Sense strand starting at position 1131 of SEQ ID NO: 693
ggguuaagucuggagguug

SEQ ID NO: 57111 - RNA, 19 nt, Artificial Sequence
  Description of Artificial Sequence: Synthetic oligonucleotide
  Antisense strand to SEQ ID NO: 57030
caaccuccagacuuaaccc

SEQ ID NO: 57112 - RNA, 19 nt, Artificial Sequence
  Description of Artificial Sequence: Synthetic oligonucleotide
  Sense strand starting at position 1129 of SEQ ID NO: 693
gaggguuaagucuggaggu

SEQ ID NO: 57113 - RNA, 19 nt, Artificial Sequence
  Description of Artificial Sequence: Synthetic oligonucleotide
  Antisense strand to SEQ ID NO: 57032
accuccagacuuaacccuc

SEQ ID NO: 57114 - RNA, 19 nt, Artificial Sequence
  Description of Artificial Sequence: Synthetic oligonucleotide
  Sense strand starting at position 1029 of SEQ ID NO: 693
ccaagugcucaguagagag

SEQ ID NO: 57115 - RNA, 19 nt, Artificial Sequence
  Description of Artificial Sequence: Synthetic oligonucleotide
  Antisense strand to SEQ ID NO: 57034
cucucuacugagcacuugg

SEQ ID NO: 57116 - RNA, 19 nt, Artificial Sequence
  Description of Artificial Sequence: Synthetic oligonucleotide
  Sense strand starting at position 1026 of SEQ ID NO: 693
acaccaagugcucaguaga

SEQ ID NO: 57117 - RNA, 19 nt, Artificial Sequence
  Description of Artificial Sequence: Synthetic oligonucleotide
  Antisense strand to SEQ ID NO: 57036
ucuacugagcacuuggugu

SEQ ID NO: 57118 - RNA, 19 nt, Artificial Sequence
  Description of Artificial Sequence: Synthetic oligonucleotide
  Sense strand starting at position 891 of SEQ ID NO: 693
augaauauggccugagcua

SEQ ID NO: 57119 - RNA, 19 nt, Artificial Sequence
  Description of Artificial Sequence: Synthetic oligonucleotide
  Antisense strand to SEQ ID NO: 57038
uagcucaggccauauucau

SEQ ID NO: 57120 - RNA, 19 nt, Artificial Sequence
  Description of Artificial Sequence: Synthetic oligonucleotide
  Sense strand starting at position 862 of SEQ ID NO: 693
gguccuauggguggagagu

SEQ ID NO: 57121 - RNA, 19 nt, Artificial Sequence
  Description of Artificial Sequence: Synthetic oligonucleotide
  Antisense strand to SEQ ID NO: 57040
acucuccacccauaggacc

SEQ ID NO: 57122 - RNA, 19 nt, Artificial Sequence
  Description of Artificial Sequence: Synthetic oligonucleotide
  Sense strand starting at position 743 of SEQ ID NO: 693
aguuccauucuccagguaa

SEQ ID NO: 57123 - RNA, 19 nt, Artificial Sequence
  Description of Artificial Sequence: Synthetic oligonucleotide
  Antisense strand to SEQ ID NO: 57042
uuaccuggagaauggaacu

SEQ ID NO: 57124 - RNA, 19 nt, Artificial Sequence
  Description of Artificial Sequence: Synthetic oligonucleotide
  Sense strand starting at position 560 of SEQ ID NO: 693
gcccguuugauagaugaaa

SEQ ID NO: 57125 - RNA, 19 nt, Artificial Sequence
  Description of Artificial Sequence: Synthetic oligonucleotide
  Antisense strand to SEQ ID NO: 57044
uuucaucuaucaaacgggc

SEQ ID NO: 57126 - RNA, 19 nt, Artificial Sequence
  Description of Artificial Sequence: Synthetic oligonucleotide
  Sense strand starting at position 538 of SEQ ID NO: 693
ggcaaugauugaucauccu

SEQ ID NO: 57127 - RNA, 19 nt, Artificial Sequence
  Description of Artificial Sequence: Synthetic oligonucleotide
  Antisense strand to SEQ ID NO: 57046
aggaugaucaaucauugcc

SEQ ID NO: 57128 - RNA, 19 nt, Artificial Sequence
  Description of Artificial Sequence: Synthetic oligonucleotide
  Sense strand starting at position 535 of SEQ ID NO: 693
cagggcaaugauugaucau

SEQ ID NO: 57129 - RNA, 19 nt, Artificial Sequence
  Description of Artificial Sequence: Synthetic oligonucleotide
  Antisense strand to SEQ ID NO: 57048
augaucaaucauugcccug

SEQ ID NO: 57130 - RNA, 19 nt, Artificial Sequence
  Description of Artificial Sequence: Synthetic oligonucleotide
  Sense strand starting at position 526 of SEQ ID NO: 693
gucagaaaucagggcaaug

SEQ ID NO: 57131 - RNA, 19 nt, Artificial Sequence
  Description of Artificial Sequence: Synthetic oligonucleotide
  Antisense strand to SEQ ID NO: 57050
cauugcccugauuucugac

SEQ ID NO: 57132 - RNA, 19 nt, Artificial Sequence
  Description of Artificial Sequence: Synthetic oligonucleotide
  Sense strand starting at position 514 of SEQ ID NO: 693
accacugccuuagucagaa

SEQ ID NO: 57133 - RNA, 19 nt, Artificial Sequence
  Description of Artificial Sequence: Synthetic oligonucleotide
  Antisense strand to SEQ ID NO: 57052
uucugacuaaggcaguggu

SEQ ID NO: 57134 - RNA, 19 nt, Artificial Sequence
  Description of Artificial Sequence: Synthetic oligonucleotide
  Sense strand starting at position 488 of SEQ ID NO: 693
ucuguuauguaugucauuu

SEQ ID NO: 57135 - RNA, 19 nt, Artificial Sequence
  Description of Artificial Sequence: Synthetic oligonucleotide
  Antisense strand to SEQ ID NO: 57054
aaaugacauacauaacaga

SEQ ID NO: 57136 - RNA, 19 nt, Artificial Sequence
  Description of Artificial Sequence: Synthetic oligonucleotide
  Sense strand starting at position 456 of SEQ ID NO: 693
uugucauuggcauauguca

SEQ ID NO: 57137 - RNA, 19 nt, Artificial Sequence
  Description of Artificial Sequence: Synthetic oligonucleotide
  Antisense strand to SEQ ID NO: 57056
ugacauaugccaaugacaa

SEQ ID NO: 57138 - RNA, 19 nt, Artificial Sequence
  Description of Artificial Sequence: Synthetic oligonucleotide
  Sense strand starting at position 418 of SEQ ID NO: 693
uggaucgagucaccuagaa

SEQ ID NO: 57139 - RNA, 19 nt, Artificial Sequence
  Description of Artificial Sequence: Synthetic oligonucleotide
  Antisense strand to SEQ ID NO: 57058
uucuaggugacucgaucca

SEQ ID NO: 57140 - RNA, 19 nt, Artificial Sequence
  Description of Artificial Sequence: Synthetic oligonucleotide
  Sense strand starting at position 411 of SEQ ID NO: 693
agaauuguggaucgaguca

SEQ ID NO: 57141 - RNA, 19 nt, Artificial Sequence
  Description of Artificial Sequence: Synthetic oligonucleotide
  Antisense strand to SEQ ID NO: 57060
ugacucgauccacaauucu

SEQ ID NO: 57142 - RNA, 19 nt, Artificial Sequence
  Description of Artificial Sequence: Synthetic oligonucleotide
  Sense strand starting at position 351 of SEQ ID NO: 693
cuggguuauagauagcaca

SEQ ID NO: 57143 - RNA, 19 nt, Artificial Sequence
  Description of Artificial Sequence: Synthetic oligonucleotide
  Antisense strand to SEQ ID NO: 57062
ugugcuaucuauaacccag

SEQ ID NO: 57144 - RNA, 19 nt, Artificial Sequence
  Description of Artificial Sequence: Synthetic oligonucleotide
  Sense strand starting at position 343 of SEQ ID NO: 693
auaauucccuggguuauag

SEQ ID NO: 57145 - RNA, 19 nt, Artificial Sequence
  Description of Artificial Sequence: Synthetic oligonucleotide
  Antisense strand to SEQ ID NO: 57064
cuauaacccagggaauuau

SEQ ID NO: 57146 - RNA, 19 nt, Artificial Sequence
  Description of Artificial Sequence: Synthetic oligonucleotide
  Sense strand starting at position 341 of SEQ ID NO: 693
auauaauucccuggguuau

SEQ ID NO: 57147 - RNA, 19 nt, Artificial Sequence
  Description of Artificial Sequence: Synthetic oligonucleotide
  Antisense strand to SEQ ID NO: 57066
auaacccagggaauuauau

SEQ ID NO: 57148 - RNA, 19 nt, Artificial Sequence
  Description of Artificial Sequence: Synthetic oligonucleotide
  Sense strand starting at position 201 of SEQ ID NO: 693
cuaaauaaacugugaguuc

SEQ ID NO: 57149 - RNA, 19 nt, Artificial Sequence
  Description of Artificial Sequence: Synthetic oligonucleotide
  Antisense strand to SEQ ID NO: 57068
gaacucacaguuuauuuag

SEQ ID NO: 57150 - RNA, 19 nt, Artificial Sequence
  Description of Artificial Sequence: Synthetic oligonucleotide
  Sense strand starting at position 182 of SEQ ID NO: 693
agugaauaccauuguaucu

SEQ ID NO: 57151 - RNA, 19 nt, Artificial Sequence
  Description of Artificial Sequence: Synthetic oligonucleotide
  Antisense strand to SEQ ID NO: 57070
agauacaaugguauucacu

SEQ ID NO: 57152 - RNA, 19 nt, Artificial Sequence
  Description of Artificial Sequence: Synthetic oligonucleotide
  Sense strand starting at position 176 of SEQ ID NO: 693
uugucaagugaauaccauu

SEQ ID NO: 57153 - RNA, 19 nt, Artificial Sequence
  Description of Artificial Sequence: Synthetic oligonucleotide
  Antisense strand to SEQ ID NO: 57072
aaugguauucacuugacaa

SEQ ID NO: 57154 - RNA, 19 nt, Artificial Sequence
  Description of Artificial Sequence: Synthetic oligonucleotide
  Sense strand starting at position 48 of SEQ ID NO: 693
ggguguggauuugagaauu

SEQ ID NO: 57155 - RNA, 19 nt, Artificial Sequence
  Description of Artificial Sequence: Synthetic oligonucleotide
  Antisense strand to SEQ ID NO: 57074
aauucucaaauccacaccc

SEQ ID NO: 57156 - RNA, 19 nt, Artificial Sequence
  Description of Artificial Sequence: Synthetic oligonucleotide
  Sense strand starting at position 3926 of SEQ ID NO: 694
ggugucucacugugaucuu

SEQ ID NO: 57157 - RNA, 19 nt, Artificial Sequence
  Description of Artificial Sequence: Synthetic oligonucleotide
  Antisense strand to SEQ ID NO: 57076
aagaucacagugagacacc

SEQ ID NO: 57158 - RNA, 19 nt, Artificial Sequence
  Description of Artificial Sequence: Synthetic oligonucleotide
  Sense strand starting at position 3914 of SEQ ID NO: 694
cggagauguaauggugucu

SEQ ID NO: 57159 - RNA, 19 nt, Artificial Sequence
  Description of Artificial Sequence: Synthetic oligonucleotide
  Antisense strand to SEQ ID NO: 57078
agacaccauuacaucuccg

SEQ ID NO: 57160 - RNA, 19 nt, Artificial Sequence
  Description of Artificial Sequence: Synthetic oligonucleotide
  Sense strand starting at position 3906 of SEQ ID NO: 694
cagucuggcggagauguaa

SEQ ID NO: 57161 - RNA, 19 nt, Artificial Sequence
  Description of Artificial Sequence: Synthetic oligonucleotide
  Antisense strand to SEQ ID NO: 57080
uuacaucuccgccagacug

SEQ ID NO: 57162 - RNA, 19 nt, Artificial Sequence
  Description of Artificial Sequence: Synthetic oligonucleotide
  Sense strand starting at position 3830 of SEQ ID NO: 694
aucagagauguacgguaau

SEQ ID NO: 57163 - RNA, 19 nt, Artificial Sequence
  Description of Artificial Sequence: Synthetic oligonucleotide
  Antisense strand to SEQ ID NO: 57082
auuaccguacaucucugau

SEQ ID NO: 57164 - RNA, 19 nt, Artificial Sequence
  Description of Artificial Sequence: Synthetic oligonucleotide
  Sense strand starting at position 3828 of SEQ ID NO: 694
ccaucagagauguacggua

SEQ ID NO: 57165 - RNA, 19 nt, Artificial Sequence
  Description of Artificial Sequence: Synthetic oligonucleotide
  Antisense strand to SEQ ID NO: 57084
uaccguacaucucugaugg

SEQ ID NO: 57166 - RNA, 19 nt, Artificial Sequence
  Description of Artificial Sequence: Synthetic oligonucleotide
  Sense strand starting at position 3751 of SEQ ID NO: 694
acuauaggguaugcauaua

SEQ ID NO: 57167 - RNA, 19 nt, Artificial Sequence
  Description of Artificial Sequence: Synthetic oligonucleotide
  Antisense strand to SEQ ID NO: 57086
uauaugcauacccuauagu

SEQ ID NO: 57168 - RNA, 19 nt, Artificial Sequence
  Description of Artificial Sequence: Synthetic oligonucleotide
  Sense strand starting at position 3750 of SEQ ID NO: 694
gacuauaggguaugcauau

SEQ ID NO: 57169 - RNA, 19 nt, Artificial Sequence
  Description of Artificial Sequence: Synthetic oligonucleotide
  Antisense strand to SEQ ID NO: 57088
auaugcauacccuauaguc

SEQ ID NO: 57170 - RNA, 19 nt, Artificial Sequence
  Description of Artificial Sequence: Synthetic oligonucleotide
  Sense strand starting at position 3737 of SEQ ID NO: 694
ggugaaauuacuggacuau

SEQ ID NO: 57171 - RNA, 19 nt, Artificial Sequence
  Description of Artificial Sequence: Synthetic oligonucleotide
  Antisense strand to SEQ ID NO: 57090
auaguccaguaauuucacc

SEQ ID NO: 57172 - RNA, 19 nt, Artificial Sequence
  Description of Artificial Sequence: Synthetic oligonucleotide
  Sense strand starting at position 3686 of SEQ ID NO: 694
uuguguauaucuccuggua

SEQ ID NO: 57173 - RNA, 19 nt, Artificial Sequence
  Description of Artificial Sequence: Synthetic oligonucleotide
  Antisense strand to SEQ ID NO: 57092
uaccaggagauauacacaa

SEQ ID NO: 57174 - RNA, 19 nt, Artificial Sequence
  Description of Artificial Sequence: Synthetic oligonucleotide
  Sense strand starting at position 3517 of SEQ ID NO: 694
uuguaagagucaucuacuu

SEQ ID NO: 57175 - RNA, 19 nt, Artificial Sequence
  Description of Artificial Sequence: Synthetic oligonucleotide
  Antisense strand to SEQ ID NO: 57094
aaguagaugacucuuacaa

SEQ ID NO: 57176 - RNA, 19 nt, Artificial Sequence
  Description of Artificial Sequence: Synthetic oligonucleotide
  Sense strand starting at position 3515 of SEQ ID NO: 694
gguuguaagagucaucuac

SEQ ID NO: 57177 - RNA, 19 nt, Artificial Sequence
  Description of Artificial Sequence: Synthetic oligonucleotide
  Antisense strand to SEQ ID NO: 57096
guagaugacucuuacaacc

SEQ ID NO: 57178 - RNA, 19 nt, Artificial Sequence
  Description of Artificial Sequence: Synthetic oligonucleotide
  Sense strand starting at position 3404 of SEQ ID NO: 694
uguaauguaucccuaacca

SEQ ID NO: 57179 - RNA, 19 nt, Artificial Sequence
  Description of Artificial Sequence: Synthetic oligonucleotide
  Antisense strand to SEQ ID NO: 57098
ugguuagggauacauuaca

SEQ ID NO: 57180 - RNA, 19 nt, Artificial Sequence
  Description of Artificial Sequence: Synthetic oligonucleotide
  Sense strand starting at position 3402 of SEQ ID NO: 694
uuuguaauguaucccuaac

SEQ ID NO: 57181 - RNA, 19 nt, Artificial Sequence
  Description of Artificial Sequence: Synthetic oligonucleotide
  Antisense strand to SEQ ID NO: 57100
guuagggauacauuacaaa

SEQ ID NO: 57182 - RNA, 19 nt, Artificial Sequence
  Description of Artificial Sequence: Synthetic oligonucleotide
  Sense strand starting at position 3394 of SEQ ID NO: 694
ucuaccaauuuguaaugua

SEQ ID NO: 57183 - RNA, 19 nt, Artificial Sequence
  Description of Artificial Sequence: Synthetic oligonucleotide
  Antisense strand to SEQ ID NO: 57102
uacauuacaaauugguaga

SEQ ID NO: 57184 - RNA, 19 nt, Artificial Sequence
  Description of Artificial Sequence: Synthetic oligonucleotide
  Sense strand starting at position 3374 of SEQ ID NO: 694
ccuuacguaucuuuauagu

SEQ ID NO: 57185 - RNA, 19 nt, Artificial Sequence
  Description of Artificial Sequence: Synthetic oligonucleotide
  Antisense strand to SEQ ID NO: 57104
acuauaaagauacguaagg

SEQ ID NO: 57186 - RNA, 19 nt, Artificial Sequence
  Description of Artificial Sequence: Synthetic oligonucleotide
  Sense strand starting at position 3372 of SEQ ID NO: 694
uuccuuacguaucuuuaua

SEQ ID NO: 57187 - RNA, 19 nt, Artificial Sequence
  Description of Artificial Sequence: Synthetic oligonucleotide
  Antisense strand to SEQ ID NO: 57106
uauaaagauacguaaggaa

SEQ ID NO: 57188 - RNA, 19 nt, Artificial Sequence
  Description of Artificial Sequence: Synthetic oligonucleotide
  Sense strand starting at position 3364 of SEQ ID NO: 694
guaauuacuuccuuacgua

SEQ ID NO: 57189 - RNA, 19 nt, Artificial Sequence
  Description of Artificial Sequence: Synthetic oligonucleotide
  Antisense strand to SEQ ID NO: 57108
uacguaaggaaguaauuac

SEQ ID NO: 57190 - RNA, 19 nt, Artificial Sequence
  Description of Artificial Sequence: Synthetic oligonucleotide
  Sense strand starting at position 3363 of SEQ ID NO: 694
gguaauuacuuccuuacgu

SEQ ID NO: 57191 - RNA, 19 nt, Artificial Sequence
  Description of Artificial Sequence: Synthetic oligonucleotide
  Antisense strand to SEQ ID NO: 57110
acguaaggaaguaauuacc

SEQ ID NO: 57192 - RNA, 19 nt, Artificial Sequence
  Description of Artificial Sequence: Synthetic oligonucleotide
  Sense strand starting at position 3120 of SEQ ID NO: 694
caguuaaggcucgugccua

SEQ ID NO: 57193 - RNA, 19 nt, Artificial Sequence
  Description of Artificial Sequence: Synthetic oligonucleotide
  Antisense strand to SEQ ID NO: 57112
uaggcacgagccuuaacug

SEQ ID NO: 57194 - RNA, 19 nt, Artificial Sequence
  Description of Artificial Sequence: Synthetic oligonucleotide
  Sense strand starting at position 2759 of SEQ ID NO: 694
gagcguucccacuacauca

SEQ ID NO: 57195 - RNA, 19 nt, Artificial Sequence
  Description of Artificial Sequence: Synthetic oligonucleotide
  Antisense strand to SEQ ID NO: 57114
ugauguagugggaacgcuc

SEQ ID NO: 57196 - RNA, 19 nt, Artificial Sequence
  Description of Artificial Sequence: Synthetic oligonucleotide
  Sense strand starting at position 2742 of SEQ ID NO: 694
guuaaugcucgaggaggga

SEQ ID NO: 57197 - RNA, 19 nt, Artificial Sequence
  Description of Artificial Sequence: Synthetic oligonucleotide
  Antisense strand to SEQ ID NO: 57116
ucccuccucgagcauuaac

SEQ ID NO: 57198 - RNA, 19 nt, Artificial Sequence
  Description of Artificial Sequence: Synthetic oligonucleotide
  Sense strand starting at position 2739 of SEQ ID NO: 694
ccgguuaaugcucgaggag

SEQ ID NO: 57199 - RNA, 19 nt, Artificial Sequence
  Description of Artificial Sequence: Synthetic oligonucleotide
  Antisense strand to SEQ ID NO: 57118
cuccucgagcauuaaccgg

SEQ ID NO: 57200 - RNA, 19 nt, Artificial Sequence
  Description of Artificial Sequence: Synthetic oligonucleotide
  Sense strand starting at position 2738 of SEQ ID NO: 694
cccgguuaaugcucgagga

SEQ ID NO: 57201 - RNA, 19 nt, Artificial Sequence
  Description of Artificial Sequence: Synthetic oligonucleotide
  Antisense strand to SEQ ID NO: 57120
uccucgagcauuaaccggg

SEQ ID NO: 57202 - RNA, 19 nt, Artificial Sequence
  Description of Artificial Sequence: Synthetic oligonucleotide
  Sense strand starting at position 2688 of SEQ ID NO: 694
uuccgaucuugauuggacu

SEQ ID NO: 57203 - RNA, 19 nt, Artificial Sequence
  Description of Artificial Sequence: Synthetic oligonucleotide
  Antisense strand to SEQ ID NO: 57122
aguccaaucaagaucggaa

SEQ ID NO: 57204 - RNA, 19 nt, Artificial Sequence
  Description of Artificial Sequence: Synthetic oligonucleotide
  Sense strand starting at position 2675 of SEQ ID NO: 694
ucuugauccugcuuuccga

SEQ ID NO: 57205 - RNA, 19 nt, Artificial Sequence
  Description of Artificial Sequence: Synthetic oligonucleotide
  Antisense strand to SEQ ID NO: 57124
ucggaaagcaggaucaaga

SEQ ID NO: 57206 - RNA, 19 nt, Artificial Sequence
  Description of Artificial Sequence: Synthetic oligonucleotide
  Sense strand starting at position 2660 of SEQ ID NO: 694
gucugaucaucuuucucuu

SEQ ID NO: 57207 - RNA, 19 nt, Artificial Sequence
  Description of Artificial Sequence: Synthetic oligonucleotide
  Antisense strand to SEQ ID NO: 57126
aagagaaagaugaucagac

SEQ ID NO: 57208 - RNA, 19 nt, Artificial Sequence
  Description of Artificial Sequence: Synthetic oligonucleotide
  Sense strand starting at position 2623 of SEQ ID NO: 694
uccgaagcaucucuauaug

SEQ ID NO: 57209 - RNA, 19 nt, Artificial Sequence
  Description of Artificial Sequence: Synthetic oligonucleotide
  Antisense strand to SEQ ID NO: 57128
cauauagagaugcuucgga

SEQ ID NO: 57210 - RNA, 19 nt, Artificial Sequence
  Description of Artificial Sequence: Synthetic oligonucleotide
  Sense strand starting at position 2448 of SEQ ID NO: 694
accugaauggugcgcuaga

SEQ ID NO: 57211 - RNA, 19 nt, Artificial Sequence
  Description of Artificial Sequence: Synthetic oligonucleotide
  Antisense strand to SEQ ID NO: 57130
ucuagcgcaccauucaggu

SEQ ID NO: 57212 - RNA, 19 nt, Artificial Sequence
  Description of Artificial Sequence: Synthetic oligonucleotide
  Sense strand starting at position 2372 of SEQ ID NO: 694
ugauuagagcugugacggu

SEQ ID NO: 57213 - RNA, 19 nt, Artificial Sequence
  Description of Artificial Sequence: Synthetic oligonucleotide
  Antisense strand to SEQ ID NO: 57132
accgucacagcucuaauca

SEQ ID NO: 57214 - RNA, 19 nt, Artificial Sequence
  Description of Artificial Sequence: Synthetic oligonucleotide
  Sense strand starting at position 2356 of SEQ ID NO: 694
cagaucagucaggguguga

SEQ ID NO: 57215 - RNA, 19 nt, Artificial Sequence
  Description of Artificial Sequence: Synthetic oligonucleotide
  Antisense strand to SEQ ID NO: 57134
ucacacccugacugaucug

SEQ ID NO: 57216 - RNA, 19 nt, Artificial Sequence
  Description of Artificial Sequence: Synthetic oligonucleotide
  Sense strand starting at position 2206 of SEQ ID NO: 694
ucgcuauccacuggaaaga

SEQ ID NO: 57217 - RNA, 19 nt, Artificial Sequence
  Description of Artificial Sequence: Synthetic oligonucleotide
  Antisense strand to SEQ ID NO: 57136
ucuuuccaguggauagcga

SEQ ID NO: 57218 - RNA, 19 nt, Artificial Sequence
  Description of Artificial Sequence: Synthetic oligonucleotide
  Sense strand starting at position 2205 of SEQ ID NO: 694
gucgcuauccacuggaaag

SEQ ID NO: 57219 - RNA, 19 nt, Artificial Sequence
  Description of Artificial Sequence: Synthetic oligonucleotide
  Antisense strand to SEQ ID NO: 57138
cuuuccaguggauagcgac

SEQ ID NO: 57220 - RNA, 19 nt, Artificial Sequence
  Description of Artificial Sequence: Synthetic oligonucleotide
  Sense strand starting at position 2133 of SEQ ID NO: 694
gacuuugcgcccuacagau

SEQ ID NO: 57221 - RNA, 19 nt, Artificial Sequence
  Description of Artificial Sequence: Synthetic oligonucleotide
  Antisense strand to SEQ ID NO: 57140
aucuguagggcgcaaaguc

SEQ ID NO: 57222 - RNA, 19 nt, Artificial Sequence
  Description of Artificial Sequence: Synthetic oligonucleotide
  Sense strand starting at position 1072 of SEQ ID NO: 694
gcacuucgcccucuuuauu

SEQ ID NO: 57223 - RNA, 19 nt, Artificial Sequence
  Description of Artificial Sequence: Synthetic oligonucleotide
  Antisense strand to SEQ ID NO: 57142
aauaaagagggcgaagugc

SEQ ID NO: 57224 - RNA, 19 nt, Artificial Sequence
  Description of Artificial Sequence: Synthetic oligonucleotide
  Sense strand starting at position 281 of SEQ ID NO: 694
guuugucucccacacgaca

SEQ ID NO: 57225 - RNA, 19 nt, Artificial Sequence
  Description of Artificial Sequence: Synthetic oligonucleotide
  Antisense strand to SEQ ID NO: 57144
ugucgugugggagacaaac

SEQ ID NO: 57226 - RNA, 19 nt, Artificial Sequence
  Description of Artificial Sequence: Synthetic oligonucleotide
  Sense strand starting at position 274 of SEQ ID NO: 694
aguuauuguuugucuccca

SEQ ID NO: 57227 - RNA, 19 nt, Artificial Sequence
  Description of Artificial Sequence: Synthetic oligonucleotide
  Antisense strand to SEQ ID NO: 57146
ugggagacaaacaauaacu

SEQ ID NO: 57228 - RNA, 19 nt, Artificial Sequence
  Description of Artificial Sequence: Synthetic oligonucleotide
  Sense strand starting at position 261 of SEQ ID NO: 694
gauugaagcccgcaguuau

SEQ ID NO: 57229 - RNA, 19 nt, Artificial Sequence
  Description of Artificial Sequence: Synthetic oligonucleotide
  Antisense strand to SEQ ID NO: 57148
auaacugcgggcuucaauc

SEQ ID NO: 57230 - RNA, 19 nt, Artificial Sequence
  Description of Artificial Sequence: Synthetic oligonucleotide
  Sense strand starting at position 249 of SEQ ID NO: 694
gcgaacaugcgggauugaa

SEQ ID NO: 57231 - RNA, 19 nt, Artificial Sequence
  Description of Artificial Sequence: Synthetic oligonucleotide
  Antisense strand to SEQ ID NO: 57150
uucaaucccgcauguucgc

SEQ ID NO: 57232 - RNA, 19 nt, Artificial Sequence
  Description of Artificial Sequence: Synthetic oligonucleotide
  Sense strand starting at position 164 of SEQ ID NO: 694
gucuguuacaugcaaguau

SEQ ID NO: 57233 - RNA, 19 nt, Artificial Sequence
  Description of Artificial Sequence: Synthetic oligonucleotide
  Antisense strand to SEQ ID NO: 57152
auacuugcauguaacagac

SEQ ID NO: 57234 - RNA, 19 nt, Artificial Sequence
  Description of Artificial Sequence: Synthetic oligonucleotide
  Sense strand starting at position 33 of SEQ ID NO: 694
uguaccugcugguuuagau

SEQ ID NO: 57235 - RNA, 19 nt, Artificial Sequence
  Description of Artificial Sequence: Synthetic oligonucleotide
  Antisense strand to SEQ ID NO: 57154
aucuaaaccagcagguaca

SEQ ID NO: 57236 - RNA, 19 nt, Artificial Sequence
  Description of Artificial Sequence: Synthetic oligonucleotide
  Sense strand starting at position 3844 of SEQ ID NO: 695
cucuguugcucauaauggu

SEQ ID NO: 57237 - RNA, 19 nt, Artificial Sequence
  Description of Artificial Sequence: Synthetic oligonucleotide
  Antisense strand to SEQ ID NO: 57156
accauuaugagcaacagag

SEQ ID NO: 57238 - RNA, 19 nt, Artificial Sequence
  Description of Artificial Sequence: Synthetic oligonucleotide
  Sense strand starting at position 3736 of SEQ ID NO: 695
aggugauucucuugcuuga

SEQ ID NO: 57239 - RNA, 19 nt, Artificial Sequence
  Description of Artificial Sequence: Synthetic oligonucleotide
  Antisense strand to SEQ ID NO: 57158
ucaagcaagagaaucaccu

SEQ ID NO: 57240 - RNA, 19 nt, Artificial Sequence
  Description of Artificial Sequence: Synthetic oligonucleotide
  Sense strand starting at position 3611 of SEQ ID NO: 695
ugcugcuggucuggaauuu

SEQ ID NO: 57241 - RNA, 19 nt, Artificial Sequence
  Description of Artificial Sequence: Synthetic oligonucleotide
  Antisense strand to SEQ ID NO: 57160
aaauuccagaccagcagca

SEQ ID NO: 57242 - RNA, 19 nt, Artificial Sequence
  Description of Artificial Sequence: Synthetic oligonucleotide
  Sense strand starting at position 3502 of SEQ ID NO: 695
uagaaagcuugcuaagaug

SEQ ID NO: 57243 - RNA, 19 nt, Artificial Sequence
  Description of Artificial Sequence: Synthetic oligonucleotide
  Antisense strand to SEQ ID NO: 57162
caucuuagcaagcuuucua

SEQ ID NO: 57244 - RNA, 19 nt, Artificial Sequence
  Description of Artificial Sequence: Synthetic oligonucleotide
  Sense strand starting at position 3501 of SEQ ID NO: 695
cuagaaagcuugcuaagau

SEQ ID NO: 57245 - RNA, 19 nt, Artificial Sequence
  Description of Artificial Sequence: Synthetic oligonucleotide
  Antisense strand to SEQ ID NO: 57164
aucuuagcaagcuuucuag

SEQ ID NO: 57246 - RNA, 19 nt, Artificial Sequence
  Description of Artificial Sequence: Synthetic oligonucleotide
  Sense strand starting at position 3400 of SEQ ID NO: 695
ucacuaaucuaaggguaac

SEQ ID NO: 57247 - RNA, 19 nt, Artificial Sequence
  Description of Artificial Sequence: Synthetic oligonucleotide
  Antisense strand to SEQ ID NO: 57166
guuacccuuagauuaguga

SEQ ID NO: 57248 - RNA, 19 nt, Artificial Sequence
  Description of Artificial Sequence: Synthetic oligonucleotide
  Sense strand starting at position 3392 of SEQ ID NO: 695
cuggccugucacuaaucua

SEQ ID NO: 57249 - RNA, 19 nt, Artificial Sequence
  Description of Artificial Sequence: Synthetic oligonucleotide
  Antisense strand to SEQ ID NO: 57168
uagauuagugacaggccag

SEQ ID NO: 57250 - RNA, 19 nt, Artificial Sequence
  Description of Artificial Sequence: Synthetic oligonucleotide
  Sense strand starting at position 3287 of SEQ ID NO: 695
cucgaugaauucucccaaa

SEQ ID NO: 57251 - RNA, 19 nt, Artificial Sequence
  Description of Artificial Sequence: Synthetic oligonucleotide
  Antisense strand to SEQ ID NO: 57170
uuugggagaauucaucgag

SEQ ID NO: 57252 - RNA, 19 nt, Artificial Sequence
  Description of Artificial Sequence: Synthetic oligonucleotide
  Sense strand starting at position 3278 of SEQ ID NO: 695
aauguauggcucgaugaau

SEQ ID NO: 57253 - RNA, 19 nt, Artificial Sequence
  Description of Artificial Sequence: Synthetic oligonucleotide
  Antisense strand to SEQ ID NO: 57172
auucaucgagccauacauu

SEQ ID NO: 57254 - RNA, 19 nt, Artificial Sequence
  Description of Artificial Sequence: Synthetic oligonucleotide
  Sense strand starting at position 3277 of SEQ ID NO: 695
gaauguauggcucgaugaa

SEQ ID NO: 57255 - RNA, 19 nt, Artificial Sequence
  Description of Artificial Sequence: Synthetic oligonucleotide
  Antisense strand to SEQ ID NO: 57174
uucaucgagccauacauuc

SEQ ID NO: 57256 - RNA, 19 nt, Artificial Sequence
  Description of Artificial Sequence: Synthetic oligonucleotide
  Sense strand starting at position 2959 of SEQ ID NO: 695
ucauaaaugcauggagaca

SEQ ID NO: 57257 - RNA, 19 nt, Artificial Sequence
  Description of Artificial Sequence: Synthetic oligonucleotide
  Antisense strand to SEQ ID NO: 57176
ugucuccaugcauuuauga

SEQ ID NO: 57258 - RNA, 19 nt, Artificial Sequence
  Description of Artificial Sequence: Synthetic oligonucleotide
  Sense strand starting at position 2376 of SEQ ID NO: 695
gagcucuguugggacagau

SEQ ID NO: 57259 - RNA, 19 nt, Artificial Sequence
  Description of Artificial Sequence: Synthetic oligonucleotide
  Antisense strand to SEQ ID NO: 57178
aucugucccaacagagcuc

SEQ ID NO: 57260 - RNA, 19 nt, Artificial Sequence
  Description of Artificial Sequence: Synthetic oligonucleotide
  Sense strand starting at position 2375 of SEQ ID NO: 695
agagcucuguugggacaga

SEQ ID NO: 57261 - RNA, 19 nt, Artificial Sequence
  Description of Artificial Sequence: Synthetic oligonucleotide
  Antisense strand to SEQ ID NO: 57180
ucugucccaacagagcucu

SEQ ID NO: 57262 - RNA, 19 nt, Artificial Sequence
  Description of Artificial Sequence: Synthetic oligonucleotide
  Sense strand starting at position 2331 of SEQ ID NO: 695
uagugcuggcucugcagaa

SEQ ID NO: 57263 - RNA, 19 nt, Artificial Sequence
  Description of Artificial Sequence: Synthetic oligonucleotide
  Antisense strand to SEQ ID NO: 57182
uucugcagagccagcacua

SEQ ID NO: 57264 - RNA, 19 nt, Artificial Sequence
  Description of Artificial Sequence: Synthetic oligonucleotide
  Sense strand starting at position 2252 of SEQ ID NO: 695
guccuuacucgugacacca

SEQ ID NO: 57265 - RNA, 19 nt, Artificial Sequence
  Description of Artificial Sequence: Synthetic oligonucleotide
  Antisense strand to SEQ ID NO: 57184
uggugucacgaguaaggac

SEQ ID NO: 57266 - RNA, 19 nt, Artificial Sequence
  Description of Artificial Sequence: Synthetic oligonucleotide
  Sense strand starting at position 2197 of SEQ ID NO: 695
caagacucauguuaaggga

SEQ ID NO: 57267 - RNA, 19 nt, Artificial Sequence
  Description of Artificial Sequence: Synthetic oligonucleotide
  Antisense strand to SEQ ID NO: 57186
ucccuuaacaugagucuug

SEQ ID NO: 57268 - RNA, 19 nt, Artificial Sequence
  Description of Artificial Sequence: Synthetic oligonucleotide
  Sense strand starting at position 2194 of SEQ ID NO: 695
ucccaagacucauguuaag

SEQ ID NO: 57269 - RNA, 19 nt, Artificial Sequence
  Description of Artificial Sequence: Synthetic oligonucleotide
  Antisense strand to SEQ ID NO: 57188
cuuaacaugagucuuggga

SEQ ID NO: 57270 - RNA, 19 nt, Artificial Sequence
  Description of Artificial Sequence: Synthetic oligonucleotide
  Sense strand starting at position 2144 of SEQ ID NO: 695
guugcuccaggaugagaaa

SEQ ID NO: 57271 - RNA, 19 nt, Artificial Sequence
  Description of Artificial Sequence: Synthetic oligonucleotide
  Antisense strand to SEQ ID NO: 57190
uuucucauccuggagcaac

SEQ ID NO: 57272 - RNA, 19 nt, Artificial Sequence
  Description of Artificial Sequence: Synthetic oligonucleotide
  Sense strand starting at position 2100 of SEQ ID NO: 695
uauugucuuugcccagaag

SEQ ID NO: 57273 - RNA, 19 nt, Artificial Sequence
  Description of Artificial Sequence: Synthetic oligonucleotide
  Antisense strand to SEQ ID NO: 57192
cuucugggcaaagacaaua

SEQ ID NO: 57274 - RNA, 19 nt, Artificial Sequence
  Description of Artificial Sequence: Synthetic oligonucleotide
  Sense strand starting at position 2098 of SEQ ID NO: 695
uuuauugucuuugcccaga

SEQ ID NO: 57275 - RNA, 19 nt, Artificial Sequence
  Description of Artificial Sequence: Synthetic oligonucleotide
  Antisense strand to SEQ ID NO: 57194
ucugggcaaagacaauaaa

SEQ ID NO: 57276 - RNA, 19 nt, Artificial Sequence
  Description of Artificial Sequence: Synthetic oligonucleotide
  Sense strand starting at position 1354 of SEQ ID NO: 695
gcaagccucccugaauaca

SEQ ID NO: 57277 - RNA, 19 nt, Artificial Sequence
  Description of Artificial Sequence: Synthetic oligonucleotide
  Antisense strand to SEQ ID NO: 57196
uguauucagggaggcuugc

SEQ ID NO: 57278 - RNA, 19 nt, Artificial Sequence
  Description of Artificial Sequence: Synthetic oligonucleotide
  Sense strand starting at position 1325 of SEQ ID NO: 695
gucaguagauuggauggaa

SEQ ID NO: 57279 - RNA, 19 nt, Artificial Sequence
  Description of Artificial Sequence: Synthetic oligonucleotide
  Antisense strand to SEQ ID NO: 57198
uuccauccaaucuacugac

SEQ ID NO: 57280 - RNA, 19 nt, Artificial Sequence
  Description of Artificial Sequence: Synthetic oligonucleotide
  Sense strand starting at position 1317 of SEQ ID NO: 695
agcacaaggucaguagauu

SEQ ID NO: 57281 - RNA, 19 nt, Artificial Sequence
  Description of Artificial Sequence: Synthetic oligonucleotide
  Antisense strand to SEQ ID NO: 57200
aaucuacugaccuugugcu

SEQ ID NO: 57282 - RNA, 19 nt, Artificial Sequence
  Description of Artificial Sequence: Synthetic oligonucleotide
  Sense strand starting at position 1244 of SEQ ID NO: 695
ggcuguguauuucccuauu

SEQ ID NO: 57283 - RNA, 19 nt, Artificial Sequence
  Description of Artificial Sequence: Synthetic oligonucleotide
  Antisense strand to SEQ ID NO: 57202
aauagggaaauacacagcc

SEQ ID NO: 57284 - RNA, 19 nt, Artificial Sequence
  Description of Artificial Sequence: Synthetic oligonucleotide
  Sense strand starting at position 1220 of SEQ ID NO: 695
cauagaaagucccagagua

SEQ ID NO: 57285 - RNA, 19 nt, Artificial Sequence
  Description of Artificial Sequence: Synthetic oligonucleotide
  Antisense strand to SEQ ID NO: 57204
uacucugggacuuucuaug

SEQ ID NO: 57286 - RNA, 19 nt, Artificial Sequence
  Description of Artificial Sequence: Synthetic oligonucleotide
  Sense strand starting at position 1208 of SEQ ID NO: 695
guaucuuuaggccauagaa

SEQ ID NO: 57287 - RNA, 19 nt, Artificial Sequence
  Description of Artificial Sequence: Synthetic oligonucleotide
  Antisense strand to SEQ ID NO: 57206
uucuauggccuaaagauac

SEQ ID NO: 57288 - RNA, 19 nt, Artificial Sequence
  Description of Artificial Sequence: Synthetic oligonucleotide
  Sense strand starting at position 1205 of SEQ ID NO: 695
gcuguaucuuuaggccaua

SEQ ID NO: 57289 - RNA, 19 nt, Artificial Sequence
  Description of Artificial Sequence: Synthetic oligonucleotide
  Antisense strand to SEQ ID NO: 57208
uauggccuaaagauacagc

SEQ ID NO: 57290 - RNA, 19 nt, Artificial Sequence
  Description of Artificial Sequence: Synthetic oligonucleotide
  Sense strand starting at position 1097 of SEQ ID NO: 695
gagccuggguaucuuuaua

SEQ ID NO: 57291 - RNA, 19 nt, Artificial Sequence
  Description of Artificial Sequence: Synthetic oligonucleotide
  Antisense strand to SEQ ID NO: 57210
uauaaagauacccaggcuc

SEQ ID NO: 57292 - RNA, 19 nt, Artificial Sequence
  Description of Artificial Sequence: Synthetic oligonucleotide
  Sense strand starting at position 1080 of SEQ ID NO: 695
gcagaaucucuguguugga

SEQ ID NO: 57293 - RNA, 19 nt, Artificial Sequence
  Description of Artificial Sequence: Synthetic oligonucleotide
  Antisense strand to SEQ ID NO: 57212
uccaacacagagauucugc

SEQ ID NO: 57294 - RNA, 19 nt, Artificial Sequence
  Description of Artificial Sequence: Synthetic oligonucleotide
  Sense strand starting at position 1077 of SEQ ID NO: 695
uaagcagaaucucuguguu

SEQ ID NO: 57295 - RNA, 19 nt, Artificial Sequence
  Description of Artificial Sequence: Synthetic oligonucleotide
  Antisense strand to SEQ ID NO: 57214
aacacagagauucugcuua

SEQ ID NO: 57296 - RNA, 19 nt, Artificial Sequence
  Description of Artificial Sequence: Synthetic oligonucleotide
  Sense strand starting at position 1026 of SEQ ID NO: 695
aggagucauuauuaagcaa

SEQ ID NO: 57297 - RNA, 19 nt, Artificial Sequence
  Description of Artificial Sequence: Synthetic oligonucleotide
  Antisense strand to SEQ ID NO: 57216
uugcuuaauaaugacuccu

SEQ ID NO: 57298 - RNA, 19 nt, Artificial Sequence
  Description of Artificial Sequence: Synthetic oligonucleotide
  Sense strand starting at position 335 of SEQ ID NO: 695
ugaauaaacgacugcaaga

SEQ ID NO: 57299 - RNA, 19 nt, Artificial Sequence
  Description of Artificial Sequence: Synthetic oligonucleotide
  Antisense strand to SEQ ID NO: 57218
ucuugcagucguuuauuca

SEQ ID NO: 57300 - RNA, 19 nt, Artificial Sequence
  Description of Artificial Sequence: Synthetic oligonucleotide
  Sense strand starting at position 324 of SEQ ID NO: 695
ggccuugggccugaauaaa

SEQ ID NO: 57301 - RNA, 19 nt, Artificial Sequence
  Description of Artificial Sequence: Synthetic oligonucleotide
  Antisense strand to SEQ ID NO: 57220
uuuauucaggcccaaggcc

SEQ ID NO: 57302 - RNA, 19 nt, Artificial Sequence
  Description of Artificial Sequence: Synthetic oligonucleotide
  Sense strand starting at position 323 of SEQ ID NO: 695
cggccuugggccugaauaa

SEQ ID NO: 57303 - RNA, 19 nt, Artificial Sequence
  Description of Artificial Sequence: Synthetic oligonucleotide
  Antisense strand to SEQ ID NO: 57222
uuauucaggcccaaggccg

SEQ ID NO: 57304 - RNA, 19 nt, Artificial Sequence
  Description of Artificial Sequence: Synthetic oligonucleotide
  Sense strand starting at position 213 of SEQ ID NO: 695
acccaugucucucagauuc

SEQ ID NO: 57305 - RNA, 19 nt, Artificial Sequence
  Description of Artificial Sequence: Synthetic oligonucleotide
  Antisense strand to SEQ ID NO: 57224
gaaucugagagacaugggu

SEQ ID NO: 57306 - RNA, 19 nt, Artificial Sequence
  Description of Artificial Sequence: Synthetic oligonucleotide
  Sense strand starting at position 3977 of SEQ ID NO: 696
cuggcuuaguaaguauaaa

SEQ ID NO: 57307 - RNA, 19 nt, Artificial Sequence
  Description of Artificial Sequence: Synthetic oligonucleotide
  Antisense strand to SEQ ID NO: 57226
uuuauacuuacuaagccag

SEQ ID NO: 57308 - RNA, 19 nt, Artificial Sequence
  Description of Artificial Sequence: Synthetic oligonucleotide
  Sense strand starting at position 3678 of SEQ ID NO: 696
augcaaauguuugucauuu

SEQ ID NO: 57309 - RNA, 19 nt, Artificial Sequence
  Description of Artificial Sequence: Synthetic oligonucleotide
  Antisense strand to SEQ ID NO: 57228
aaaugacaaacauuugcau

SEQ ID NO: 57310 - RNA, 19 nt, Artificial Sequence
  Description of Artificial Sequence: Synthetic oligonucleotide
  Sense strand starting at position 3592 of SEQ ID NO: 696
agaagugauaggugccaau

SEQ ID NO: 57311 - RNA, 19 nt, Artificial Sequence
  Description of Artificial Sequence: Synthetic oligonucleotide
  Antisense strand to SEQ ID NO: 57230
auuggcaccuaucacuucu

SEQ ID NO: 57312 - RNA, 19 nt, Artificial Sequence
  Description of Artificial Sequence: Synthetic oligonucleotide
  Sense strand starting at position 3543 of SEQ ID NO: 696
auuacuaagcacgagacau

SEQ ID NO: 57313 - RNA, 19 nt, Artificial Sequence
  Description of Artificial Sequence: Synthetic oligonucleotide
  Antisense strand to SEQ ID NO: 57232
augucucgugcuuaguaau

SEQ ID NO: 57314 - RNA, 19 nt, Artificial Sequence
  Description of Artificial Sequence: Synthetic oligonucleotide
  Sense strand starting at position 3540 of SEQ ID NO: 696
gcuauuacuaagcacgaga

SEQ ID NO: 57315 - RNA, 19 nt, Artificial Sequence
  Description of Artificial Sequence: Synthetic oligonucleotide
  Antisense strand to SEQ ID NO: 57234
ucucgugcuuaguaauagc

SEQ ID NO: 57316 - RNA, 19 nt, Artificial Sequence
  Description of Artificial Sequence: Synthetic oligonucleotide
  Sense strand starting at position 3518 of SEQ ID NO: 696
guacaaauacuguaucaug

SEQ ID NO: 57317 - RNA, 19 nt, Artificial Sequence
  Description of Artificial Sequence: Synthetic oligonucleotide
  Antisense strand to SEQ ID NO: 57236
caugauacaguauuuguac

SEQ ID NO: 57318 - RNA, 19 nt, Artificial Sequence
  Description of Artificial Sequence: Synthetic oligonucleotide
  Sense strand starting at position 3474 of SEQ ID NO: 696
auuguacagcgauaaugau

SEQ ID NO: 57319 - RNA, 19 nt, Artificial Sequence
  Description of Artificial Sequence: Synthetic oligonucleotide
  Antisense strand to SEQ ID NO: 57238
aucauuaucgcuguacaau

SEQ ID NO: 57320 - RNA, 19 nt, Artificial Sequence
  Description of Artificial Sequence: Synthetic oligonucleotide
  Sense strand starting at position 3468 of SEQ ID NO: 696
cagauuauuguacagcgau

SEQ ID NO: 57321 - RNA, 19 nt, Artificial Sequence
  Description of Artificial Sequence: Synthetic oligonucleotide
  Antisense strand to SEQ ID NO: 57240
aucgcuguacaauaaucug

SEQ ID NO: 57322 - RNA, 19 nt, Artificial Sequence
  Description of Artificial Sequence: Synthetic oligonucleotide
  Sense strand starting at position 3444 of SEQ ID NO: 696
guuugcaaggaauagaguu

SEQ ID NO: 57323 - RNA, 19 nt, Artificial Sequence
  Description of Artificial Sequence: Synthetic oligonucleotide
  Antisense strand to SEQ ID NO: 57242
aacucuauuccuugcaaac

SEQ ID NO: 57324 - RNA, 19 nt, Artificial Sequence
  Description of Artificial Sequence: Synthetic oligonucleotide
  Sense strand starting at position 3440 of SEQ ID NO: 696
ucaaguuugcaaggaauag

SEQ ID NO: 57325 - RNA, 19 nt, Artificial Sequence
  Description of Artificial Sequence: Synthetic oligonucleotide
  Antisense strand to SEQ ID NO: 57244
cuauuccuugcaaacuuga

SEQ ID NO: 57326 - RNA, 19 nt, Artificial Sequence
  Description of Artificial Sequence: Synthetic oligonucleotide
  Sense strand starting at position 3397 of SEQ ID NO: 696
guauuauuucugcaugcau

SEQ ID NO: 57327 - RNA, 19 nt, Artificial Sequence
  Description of Artificial Sequence: Synthetic oligonucleotide
  Antisense strand to SEQ ID NO: 57246
augcaugcagaaauaauac

SEQ ID NO: 57328 - RNA, 19 nt, Artificial Sequence
  Description of Artificial Sequence: Synthetic oligonucleotide
  Sense strand starting at position 3396 of SEQ ID NO: 696
gguauuauuucugcaugca

SEQ ID NO: 57329 - RNA, 19 nt, Artificial Sequence
  Description of Artificial Sequence: Synthetic oligonucleotide
  Antisense strand to SEQ ID NO: 57248
ugcaugcagaaauaauacc

SEQ ID NO: 57330 - RNA, 19 nt, Artificial Sequence
  Description of Artificial Sequence: Synthetic oligonucleotide
  Sense strand starting at position 3360 of SEQ ID NO: 696
gcaugaguacucuaauucu

SEQ ID NO: 57331 - RNA, 19 nt, Artificial Sequence
  Description of Artificial Sequence: Synthetic oligonucleotide
  Antisense strand to SEQ ID NO: 57250
agaauuagaguacucaugc

SEQ ID NO: 57332 - RNA, 19 nt, Artificial Sequence
  Description of Artificial Sequence: Synthetic oligonucleotide
  Sense strand starting at position 3352 of SEQ ID NO: 696
uuucuaaagcaugaguacu

SEQ ID NO: 57333 - RNA, 19 nt, Artificial Sequence
  Description of Artificial Sequence: Synthetic oligonucleotide
  Antisense strand to SEQ ID NO: 57252
aguacucaugcuuuagaaa

SEQ ID NO: 57334 - RNA, 19 nt, Artificial Sequence
  Description of Artificial Sequence: Synthetic oligonucleotide
  Sense strand starting at position 3099 of SEQ ID NO: 696
cauuaaauugcugaaguga

SEQ ID NO: 57335 - RNA, 19 nt, Artificial Sequence
  Description of Artificial Sequence: Synthetic oligonucleotide
  Antisense strand to SEQ ID NO: 57254
ucacuucagcaauuuaaug

SEQ ID NO: 57336 - RNA, 19 nt, Artificial Sequence
  Description of Artificial Sequence: Synthetic oligonucleotide
  Sense strand starting at position 3049 of SEQ ID NO: 696
gugacuauauaagcuucua

SEQ ID NO: 57337 - RNA, 19 nt, Artificial Sequence
  Description of Artificial Sequence: Synthetic oligonucleotide
  Antisense strand to SEQ ID NO: 57256
uagaagcuuauauagucac

SEQ ID NO: 57338 - RNA, 19 nt, Artificial Sequence
  Description of Artificial Sequence: Synthetic oligonucleotide
  Sense strand starting at position 3041 of SEQ ID NO: 696
cucugaaagugacuauaua

SEQ ID NO: 57339 - RNA, 19 nt, Artificial Sequence
  Description of Artificial Sequence: Synthetic oligonucleotide
  Antisense strand to SEQ ID NO: 57258
uauauagucacuuucagag

SEQ ID NO: 57340 - RNA, 19 nt, Artificial Sequence
  Description of Artificial Sequence: Synthetic oligonucleotide
  Sense strand starting at position 2987 of SEQ ID NO: 696
gaagcucugcauuagagaa

SEQ ID NO: 57341 - RNA, 19 nt, Artificial Sequence
  Description of Artificial Sequence: Synthetic oligonucleotide
  Antisense strand to SEQ ID NO: 57260
uucucuaaugcagagcuuc

SEQ ID NO: 57342 - RNA, 19 nt, Artificial Sequence
  Description of Artificial Sequence: Synthetic oligonucleotide
  Sense strand starting at position 2958 of SEQ ID NO: 696
cgaucaauagcuugagaca

SEQ ID NO: 57343 - RNA, 19 nt, Artificial Sequence
  Description of Artificial Sequence: Synthetic oligonucleotide
  Antisense strand to SEQ ID NO: 57262
ugucucaagcuauugaucg

SEQ ID NO: 57344 - RNA, 19 nt, Artificial Sequence
  Description of Artificial Sequence: Synthetic oligonucleotide
  Sense strand starting at position 2956 of SEQ ID NO: 696
uucgaucaauagcuugaga

SEQ ID NO: 57345 - RNA, 19 nt, Artificial Sequence
  Description of Artificial Sequence: Synthetic oligonucleotide
  Antisense strand to SEQ ID NO: 57264
ucucaagcuauugaucgaa

SEQ ID NO: 57346 - RNA, 19 nt, Artificial Sequence
  Description of Artificial Sequence: Synthetic oligonucleotide
  Sense strand starting at position 2946 of SEQ ID NO: 696
cccagaaggcuucgaucaa

SEQ ID NO: 57347 - RNA, 19 nt, Artificial Sequence
  Description of Artificial Sequence: Synthetic oligonucleotide
  Antisense strand to SEQ ID NO: 57266
uugaucgaagccuucuggg

SEQ ID NO: 57348 - RNA, 19 nt, Artificial Sequence
  Description of Artificial Sequence: Synthetic oligonucleotide
  Sense strand starting at position 2882 of SEQ ID NO: 696
uuuggaauucuggaggcga

SEQ ID NO: 57349 - RNA, 19 nt, Artificial Sequence
  Description of Artificial Sequence: Synthetic oligonucleotide
  Antisense strand to SEQ ID NO: 57268
ucgccuccagaauuccaaa

SEQ ID NO: 57350 - RNA, 19 nt, Artificial Sequence
  Description of Artificial Sequence: Synthetic oligonucleotide
  Sense strand starting at position 2722 of SEQ ID NO: 696
uugagaauuacaggagcau

SEQ ID NO: 57351 - RNA, 19 nt, Artificial Sequence
  Description of Artificial Sequence: Synthetic oligonucleotide
  Antisense strand to SEQ ID NO: 57270
augcuccuguaauucucaa

SEQ ID NO: 57352 - RNA, 19 nt, Artificial Sequence
  Description of Artificial Sequence: Synthetic oligonucleotide
  Sense strand starting at position 2404 of SEQ ID NO: 696
aacugauguugggucauua

SEQ ID NO: 57353 - RNA, 19 nt, Artificial Sequence
  Description of Artificial Sequence: Synthetic oligonucleotide
  Antisense strand to SEQ ID NO: 57272
uaaugacccaacaucaguu

SEQ ID NO: 57354 - RNA, 19 nt, Artificial Sequence
  Description of Artificial Sequence: Synthetic oligonucleotide
  Sense strand starting at position 2267 of SEQ ID NO: 696
guucuacaucuuggcauuu

SEQ ID NO: 57355 - RNA, 19 nt, Artificial Sequence
  Description of Artificial Sequence: Synthetic oligonucleotide
  Antisense strand to SEQ ID NO: 57274
aaaugccaagauguagaac

SEQ ID NO: 57356 - RNA, 19 nt, Artificial Sequence
  Description of Artificial Sequence: Synthetic oligonucleotide
  Sense strand starting at position 2126 of SEQ ID NO: 696
uuguaacugucuuuauuuc

SEQ ID NO: 57357 - RNA, 19 nt, Artificial Sequence
  Description of Artificial Sequence: Synthetic oligonucleotide
  Antisense strand to SEQ ID NO: 57276
gaaauaaagacaguuacaa

SEQ ID NO: 57358 - RNA, 19 nt, Artificial Sequence
  Description of Artificial Sequence: Synthetic oligonucleotide
  Sense strand starting at position 2025 of SEQ ID NO: 696
guagcuggaacucaguauu

SEQ ID NO: 57359 - RNA, 19 nt, Artificial Sequence
  Description of Artificial Sequence: Synthetic oligonucleotide
  Antisense strand to SEQ ID NO: 57278
aauacugaguuccagcuac

SEQ ID NO: 57360 - RNA, 19 nt, Artificial Sequence
  Description of Artificial Sequence: Synthetic oligonucleotide
  Sense strand starting at position 1536 of SEQ ID NO: 696
ccgucucaccuagaguaaa

SEQ ID NO: 57361 - RNA, 19 nt, Artificial Sequence
  Description of Artificial Sequence: Synthetic oligonucleotide
  Antisense strand to SEQ ID NO: 57280
uuuacucuaggugagacgg

SEQ ID NO: 57362 - RNA, 19 nt, Artificial Sequence
  Description of Artificial Sequence: Synthetic oligonucleotide
  Sense strand starting at position 1480 of SEQ ID NO: 696
guuaaauccuaagugagac

SEQ ID NO: 57363 - RNA, 19 nt, Artificial Sequence
  Description of Artificial Sequence: Synthetic oligonucleotide
  Antisense strand to SEQ ID NO: 57282
gucucacuuaggauuuaac

SEQ ID NO: 57364 - RNA, 19 nt, Artificial Sequence
  Description of Artificial Sequence: Synthetic oligonucleotide
  Sense strand starting at position 1469 of SEQ ID NO: 696
gagccagaauuguuaaauc

SEQ ID NO: 57365 - RNA, 19 nt, Artificial Sequence
  Description of Artificial Sequence: Synthetic oligonucleotide
  Antisense strand to SEQ ID NO: 57284
gauuuaacaauucuggcuc

SEQ ID NO: 57366 - RNA, 19 nt, Artificial Sequence
  Description of Artificial Sequence: Synthetic oligonucleotide
  Sense strand starting at position 1467 of SEQ ID NO: 696
aggagccagaauuguuaaa

SEQ ID NO: 57367 - RNA, 19 nt, Artificial Sequence
  Description of Artificial Sequence: Synthetic oligonucleotide
  Antisense strand to SEQ ID NO: 57286
uuuaacaauucuggcuccu

SEQ ID NO: 57368 - RNA, 19 nt, Artificial Sequence
  Description of Artificial Sequence: Synthetic oligonucleotide
  Sense strand starting at position 1086 of SEQ ID NO: 696
uucuuaguugucuaaugga

SEQ ID NO: 57369 - RNA, 19 nt, Artificial Sequence
  Description of Artificial Sequence: Synthetic oligonucleotide
  Antisense strand to SEQ ID NO: 57288
uccauuagacaacuaagaa

SEQ ID NO: 57370 - RNA, 19 nt, Artificial Sequence
  Description of Artificial Sequence: Synthetic oligonucleotide
  Sense strand starting at position 1022 of SEQ ID NO: 696
uuauauucuccaggucaga

SEQ ID NO: 57371 - RNA, 19 nt, Artificial Sequence
  Description of Artificial Sequence: Synthetic oligonucleotide
  Antisense strand to SEQ ID NO: 57290
ucugaccuggagaauauaa

SEQ ID NO: 57372 - RNA, 19 nt, Artificial Sequence
  Description of Artificial Sequence: Synthetic oligonucleotide
  Sense strand starting at position 842 of SEQ ID NO: 696
gaaggauaguuccuaagua

SEQ ID NO: 57373 - RNA, 19 nt, Artificial Sequence
  Description of Artificial Sequence: Synthetic oligonucleotide
  Antisense strand to SEQ ID NO: 57292
uacuuaggaacuauccuuc

SEQ ID NO: 57374 - RNA, 19 nt, Artificial Sequence
  Description of Artificial Sequence: Synthetic oligonucleotide
  Sense strand starting at position 839 of SEQ ID NO: 696
uaugaaggauaguuccuaa

SEQ ID NO: 57375 - RNA, 19 nt, Artificial Sequence
  Description of Artificial Sequence: Synthetic oligonucleotide
  Antisense strand to SEQ ID NO: 57294
uuaggaacuauccuucaua

SEQ ID NO: 57376 - RNA, 19 nt, Artificial Sequence
  Description of Artificial Sequence: Synthetic oligonucleotide
  Sense strand starting at position 782 of SEQ ID NO: 696
aguuuaauucuugggagca

SEQ ID NO: 57377 - RNA, 19 nt, Artificial Sequence
  Description of Artificial Sequence: Synthetic oligonucleotide
  Antisense strand to SEQ ID NO: 57296
ugcucccaagaauuaaacu

SEQ ID NO: 57378 - RNA, 19 nt, Artificial Sequence
  Description of Artificial Sequence: Synthetic oligonucleotide
  Sense strand starting at position 482 of SEQ ID NO: 696
caccuagaugucgguauuu

SEQ ID NO: 57379 - RNA, 19 nt, Artificial Sequence
  Description of Artificial Sequence: Synthetic oligonucleotide
  Antisense strand to SEQ ID NO: 57298
aaauaccgacaucuaggug

SEQ ID NO: 57380 - RNA, 19 nt, Artificial Sequence
  Description of Artificial Sequence: Synthetic oligonucleotide
  Sense strand starting at position 424 of SEQ ID NO: 696
uagugaacaguuuggaauc

SEQ ID NO: 57381 - RNA, 19 nt, Artificial Sequence
  Description of Artificial Sequence: Synthetic oligonucleotide
  Antisense strand to SEQ ID NO: 57300
gauuccaaacuguucacua

SEQ ID NO: 57382 - RNA, 19 nt, Artificial Sequence
  Description of Artificial Sequence: Synthetic oligonucleotide
  Sense strand starting at position 416 of SEQ ID NO: 696
ggucucaauagugaacagu

SEQ ID NO: 57383 - RNA, 19 nt, Artificial Sequence
  Description of Artificial Sequence: Synthetic oligonucleotide
  Antisense strand to SEQ ID NO: 57302
acuguucacuauugagacc

SEQ ID NO: 57384 - RNA, 19 nt, Artificial Sequence
  Description of Artificial Sequence: Synthetic oligonucleotide
  Sense strand starting at position 284 of SEQ ID NO: 696
cgugaaugagcacaagagu

SEQ ID NO: 57385 - RNA, 19 nt, Artificial Sequence
  Description of Artificial Sequence: Synthetic oligonucleotide
  Antisense strand to SEQ ID NO: 57304
acucuugugcucauucacg

SEQ ID NO: 57386 - RNA, 19 nt, Artificial Sequence
  Description of Artificial Sequence: Synthetic oligonucleotide
  Sense strand starting at position 3899 of SEQ ID NO: 697
ggaguauccaguugaccca

SEQ ID NO: 57387 - RNA, 19 nt, Artificial Sequence
  Description of Artificial Sequence: Synthetic oligonucleotide
  Antisense strand to SEQ ID NO: 57306
ugggucaacuggauacucc

SEQ ID NO: 57388 - RNA, 19 nt, Artificial Sequence
  Description of Artificial Sequence: Synthetic oligonucleotide
  Sense strand starting at position 3856 of SEQ ID NO: 697
ugcagugugagguaggaau

SEQ ID NO: 57389 - RNA, 19 nt, Artificial Sequence
  Description of Artificial Sequence: Synthetic oligonucleotide
  Antisense strand to SEQ ID NO: 57308
auuccuaccucacacugca

SEQ ID NO: 57390 - RNA, 19 nt, Artificial Sequence
  Description of Artificial Sequence: Synthetic oligonucleotide
  Sense strand starting at position 3828 of SEQ ID NO: 697
uguauuccaccugaaauug

SEQ ID NO: 57391 - RNA, 19 nt, Artificial Sequence
  Description of Artificial Sequence: Synthetic oligonucleotide
  Antisense strand to SEQ ID NO: 57310
caauuucagguggaauaca

SEQ ID NO: 57392 - RNA, 19 nt, Artificial Sequence
  Description of Artificial Sequence: Synthetic oligonucleotide
  Sense strand starting at position 3818 of SEQ ID NO: 697
cagugagaucuguauucca

SEQ ID NO: 57393 - RNA, 19 nt, Artificial Sequence
  Description of Artificial Sequence: Synthetic oligonucleotide
  Antisense strand to SEQ ID NO: 57312
uggaauacagaucucacug

SEQ ID NO: 57394 - RNA, 19 nt, Artificial Sequence
  Description of Artificial Sequence: Synthetic oligonucleotide
  Sense strand starting at position 3809 of SEQ ID NO: 697
acccuuucucagugagauc

SEQ ID NO: 57395 - RNA, 19 nt, Artificial Sequence
  Description of Artificial Sequence: Synthetic oligonucleotide
  Antisense strand to SEQ ID NO: 57314
gaucucacugagaaagggu

SEQ ID NO: 57396 - RNA, 19 nt, Artificial Sequence
  Description of Artificial Sequence: Synthetic oligonucleotide
  Sense strand starting at position 3565 of SEQ ID NO: 697
uaguaucugcauuaagaga

SEQ ID NO: 57397 - RNA, 19 nt, Artificial Sequence
  Description of Artificial Sequence: Synthetic oligonucleotide
  Antisense strand to SEQ ID NO: 57316
ucucuuaaugcagauacua

SEQ ID NO: 57398 - RNA, 19 nt, Artificial Sequence
  Description of Artificial Sequence: Synthetic oligonucleotide
  Sense strand starting at position 3373 of SEQ ID NO: 697
gugucuucuggacaccaaa

SEQ ID NO: 57399 - RNA, 19 nt, Artificial Sequence
  Description of Artificial Sequence: Synthetic oligonucleotide
  Antisense strand to SEQ ID NO: 57318
uuugguguccagaagacac

SEQ ID NO: 57400 - RNA, 19 nt, Artificial Sequence
  Description of Artificial Sequence: Synthetic oligonucleotide
  Sense strand starting at position 3226 of SEQ ID NO: 697
ggguuuagucugggacaca

SEQ ID NO: 57401 - RNA, 19 nt, Artificial Sequence
  Description of Artificial Sequence: Synthetic oligonucleotide
  Antisense strand to SEQ ID NO: 57320
ugugucccagacuaaaccc

SEQ ID NO: 57402 - RNA, 19 nt, Artificial Sequence
  Description of Artificial Sequence: Synthetic oligonucleotide
  Sense strand starting at position 3224 of SEQ ID NO: 697
auggguuuagucugggaca

SEQ ID NO: 57403 - RNA, 19 nt, Artificial Sequence
  Description of Artificial Sequence: Synthetic oligonucleotide
  Antisense strand to SEQ ID NO: 57322
ugucccagacuaaacccau

SEQ ID NO: 57404 - RNA, 19 nt, Artificial Sequence
  Description of Artificial Sequence: Synthetic oligonucleotide
  Sense strand starting at position 3130 of SEQ ID NO: 697
cuaaauacugucugaagac

SEQ ID NO: 57405 - RNA, 19 nt, Artificial Sequence
  Description of Artificial Sequence: Synthetic oligonucleotide
  Antisense strand to SEQ ID NO: 57324
gucuucagacaguauuuag

SEQ ID NO: 57406 - RNA, 19 nt, Artificial Sequence
  Description of Artificial Sequence: Synthetic oligonucleotide
  Sense strand starting at position 3129 of SEQ ID NO: 697
ccuaaauacugucugaaga

SEQ ID NO: 57407 - RNA, 19 nt, Artificial Sequence
  Description of Artificial Sequence: Synthetic oligonucleotide
  Antisense strand to SEQ ID NO: 57326
ucuucagacaguauuuagg

SEQ ID NO: 57408 - RNA, 19 nt, Artificial Sequence
  Description of Artificial Sequence: Synthetic oligonucleotide
  Sense strand starting at position 3083 of SEQ ID NO: 697
guaggucuagcauaaagaa

SEQ ID NO: 57409 - RNA, 19 nt, Artificial Sequence
  Description of Artificial Sequence: Synthetic oligonucleotide
  Antisense strand to SEQ ID NO: 57328
uucuuuaugcuagaccuac

SEQ ID NO: 57410 - RNA, 19 nt, Artificial Sequence
  Description of Artificial Sequence: Synthetic oligonucleotide
  Sense strand starting at position 2733 of SEQ ID NO: 697
uugagucugcuagauaccu

SEQ ID NO: 57411 - RNA, 19 nt, Artificial Sequence
  Description of Artificial Sequence: Synthetic oligonucleotide
  Antisense strand to SEQ ID NO: 57330
agguaucuagcagacucaa

SEQ ID NO: 57412 - RNA, 19 nt, Artificial Sequence
  Description of Artificial Sequence: Synthetic oligonucleotide
  Sense strand starting at position 2514 of SEQ ID NO: 697
acuuguugacuuuauaguu

SEQ ID NO: 57413 - RNA, 19 nt, Artificial Sequence
  Description of Artificial Sequence: Synthetic oligonucleotide
  Antisense strand to SEQ ID NO: 57332
aacuauaaagucaacaagu

SEQ ID NO: 57414 - RNA, 19 nt, Artificial Sequence
  Description of Artificial Sequence: Synthetic oligonucleotide
  Sense strand starting at position 2511 of SEQ ID NO: 697
ggaacuuguugacuuuaua

SEQ ID NO: 57415 - RNA, 19 nt, Artificial Sequence
  Description of Artificial Sequence: Synthetic oligonucleotide
  Antisense strand to SEQ ID NO: 57334
uauaaagucaacaaguucc

SEQ ID NO: 57416 - RNA, 19 nt, Artificial Sequence
  Description of Artificial Sequence: Synthetic oligonucleotide
  Sense strand starting at position 2424 of SEQ ID NO: 697
agguuuccucucugagaaa

SEQ ID NO: 57417 - RNA, 19 nt, Artificial Sequence
  Description of Artificial Sequence: Synthetic oligonucleotide
  Antisense strand to SEQ ID NO: 57336
uuucucagagaggaaaccu

SEQ ID NO: 57418 - RNA, 19 nt, Artificial Sequence
  Description of Artificial Sequence: Synthetic oligonucleotide
  Sense strand starting at position 2423 of SEQ ID NO: 697
gagguuuccucucugagaa

SEQ ID NO: 57419 - RNA, 19 nt, Artificial Sequence
  Description of Artificial Sequence: Synthetic oligonucleotide
  Antisense strand to SEQ ID NO: 57338
uucucagagaggaaaccuc

SEQ ID NO: 57420 - RNA, 19 nt, Artificial Sequence
  Description of Artificial Sequence: Synthetic oligonucleotide
  Sense strand starting at position 2386 of SEQ ID NO: 697
agcagaugcccagaaucaa

SEQ ID NO: 57421 - RNA, 19 nt, Artificial Sequence
  Description of Artificial Sequence: Synthetic oligonucleotide
  Antisense strand to SEQ ID NO: 57340
uugauucugggcaucugcu

SEQ ID NO: 57422 - RNA, 19 nt, Artificial Sequence
  Description of Artificial Sequence: Synthetic oligonucleotide
  Sense strand starting at position 2251 of SEQ ID NO: 697
ccuggauaccgccaggaaa

SEQ ID NO: 57423 - RNA, 19 nt, Artificial Sequence
  Description of Artificial Sequence: Synthetic oligonucleotide
  Antisense strand to SEQ ID NO: 57342
uuuccuggcgguauccagg

SEQ ID NO: 57424 - RNA, 19 nt, Artificial Sequence
  Description of Artificial Sequence: Synthetic oligonucleotide
  Sense strand starting at position 1690 of SEQ ID NO: 697
aagucaugguuccugaaau

SEQ ID NO: 57425 - RNA, 19 nt, Artificial Sequence
  Description of Artificial Sequence: Synthetic oligonucleotide
  Antisense strand to SEQ ID NO: 57344
auuucaggaaccaugacuu

SEQ ID NO: 57426 - RNA, 19 nt, Artificial Sequence
  Description of Artificial Sequence: Synthetic oligonucleotide
  Sense strand starting at position 1657 of SEQ ID NO: 697
agcgaauacaucugauaug

SEQ ID NO: 57427 - RNA, 19 nt, Artificial Sequence
  Description of Artificial Sequence: Synthetic oligonucleotide
  Antisense strand to SEQ ID NO: 57346
cauaucagauguauucgcu

SEQ ID NO: 57428 - RNA, 19 nt, Artificial Sequence
  Description of Artificial Sequence: Synthetic oligonucleotide
  Sense strand starting at position 1647 of SEQ ID NO: 697
acuuuaauacagcgaauac

SEQ ID NO: 57429 - RNA, 19 nt, Artificial Sequence
  Description of Artificial Sequence: Synthetic oligonucleotide
  Antisense strand to SEQ ID NO: 57348
guauucgcuguauuaaagu

SEQ ID NO: 57430 - RNA, 19 nt, Artificial Sequence
  Description of Artificial Sequence: Synthetic oligonucleotide
  Sense strand starting at position 1639 of SEQ ID NO: 697
gcgcaugaacuuuaauaca

SEQ ID NO: 57431 - RNA, 19 nt, Artificial Sequence
  Description of Artificial Sequence: Synthetic oligonucleotide
  Antisense strand to SEQ ID NO: 57350
uguauuaaaguucaugcgc

SEQ ID NO: 57432 - RNA, 19 nt, Artificial Sequence
  Description of Artificial Sequence: Synthetic oligonucleotide
  Sense strand starting at position 1460 of SEQ ID NO: 697
gaacuuuccgaagggcaau

SEQ ID NO: 57433 - RNA, 19 nt, Artificial Sequence
  Description of Artificial Sequence: Synthetic oligonucleotide
  Antisense strand to SEQ ID NO: 57352
auugcccuucggaaaguuc

SEQ ID NO: 57434 - RNA, 19 nt, Artificial Sequence
  Description of Artificial Sequence: Synthetic oligonucleotide
  Sense strand starting at position 1404 of SEQ ID NO: 697
gagagugcucagugacaag

SEQ ID NO: 57435 - RNA, 19 nt, Artificial Sequence
  Description of Artificial Sequence: Synthetic oligonucleotide
  Antisense strand to SEQ ID NO: 57354
cuugucacugagcacucuc

SEQ ID NO: 57436 - RNA, 19 nt, Artificial Sequence
  Description of Artificial Sequence: Synthetic oligonucleotide
  Sense strand starting at position 1400 of SEQ ID NO: 697
caaggagagugcucaguga

SEQ ID NO: 57437 - RNA, 19 nt, Artificial Sequence
  Description of Artificial Sequence: Synthetic oligonucleotide
  Antisense strand to SEQ ID NO: 57356
ucacugagcacucuccuug

SEQ ID NO: 57438 - RNA, 19 nt, Artificial Sequence
  Description of Artificial Sequence: Synthetic oligonucleotide
  Sense strand starting at position 1212 of SEQ ID NO: 697
gguauucuggagcagcaga

SEQ ID NO: 57439 - RNA, 19 nt, Artificial Sequence
  Description of Artificial Sequence: Synthetic oligonucleotide
  Antisense strand to SEQ ID NO: 57358
ucugcugcuccagaauacc

SEQ ID NO: 57440 - RNA, 19 nt, Artificial Sequence
  Description of Artificial Sequence: Synthetic oligonucleotide
  Sense strand starting at position 953 of SEQ ID NO: 697
cuacuuagagcaugaaagu

SEQ ID NO: 57441 - RNA, 19 nt, Artificial Sequence
  Description of Artificial Sequence: Synthetic oligonucleotide
  Antisense strand to SEQ ID NO: 57360
acuuucaugcucuaaguag

SEQ ID NO: 57442 - RNA, 19 nt, Artificial Sequence
  Description of Artificial Sequence: Synthetic oligonucleotide
  Sense strand starting at position 951 of SEQ ID NO: 697
ugcuacuuagagcaugaaa

SEQ ID NO: 57443 - RNA, 19 nt, Artificial Sequence
  Description of Artificial Sequence: Synthetic oligonucleotide
  Antisense strand to SEQ ID NO: 57362
uuucaugcucuaaguagca

SEQ ID NO: 57444 - RNA, 19 nt, Artificial Sequence
  Description of Artificial Sequence: Synthetic oligonucleotide
  Sense strand starting at position 911 of SEQ ID NO: 697
aggcuucaggagugaggau

SEQ ID NO: 57445 - RNA, 19 nt, Artificial Sequence
  Description of Artificial Sequence: Synthetic oligonucleotide
  Antisense strand to SEQ ID NO: 57364
auccucacuccugaagccu

SEQ ID NO: 57446 - RNA, 19 nt, Artificial Sequence
  Description of Artificial Sequence: Synthetic oligonucleotide
  Sense strand starting at position 758 of SEQ ID NO: 697
gugggauugaugugaucua

SEQ ID NO: 57447 - RNA, 19 nt, Artificial Sequence
  Description of Artificial Sequence: Synthetic oligonucleotide
  Antisense strand to SEQ ID NO: 57366
uagaucacaucaaucccac

SEQ ID NO: 57448 - RNA, 19 nt, Artificial Sequence
  Description of Artificial Sequence: Synthetic oligonucleotide
  Sense strand starting at position 705 of SEQ ID NO: 697
uuaugucgugauugauuua

SEQ ID NO: 57449 - RNA, 19 nt, Artificial Sequence
  Description of Artificial Sequence: Synthetic oligonucleotide
  Antisense strand to SEQ ID NO: 57368
uaaaucaaucacgacauaa

SEQ ID NO: 57450 - RNA, 19 nt, Artificial Sequence
  Description of Artificial Sequence: Synthetic oligonucleotide
  Sense strand starting at position 606 of SEQ ID NO: 697
cagaguaggcaccaaagua

SEQ ID NO: 57451 - RNA, 19 nt, Artificial Sequence
  Description of Artificial Sequence: Synthetic oligonucleotide
  Antisense strand to SEQ ID NO: 57370
uacuuuggugccuacucug

SEQ ID NO: 57452 - RNA, 19 nt, Artificial Sequence
  Description of Artificial Sequence: Synthetic oligonucleotide
  Sense strand starting at position 449 of SEQ ID NO: 697
acauauuaggcacagaguu

SEQ ID NO: 57453 - RNA, 19 nt, Artificial Sequence
  Description of Artificial Sequence: Synthetic oligonucleotide
  Antisense strand to SEQ ID NO: 57372
aacucugugccuaauaugu

SEQ ID NO: 57454 - RNA, 19 nt, Artificial Sequence
  Description of Artificial Sequence: Synthetic oligonucleotide
  Sense strand starting at position 446 of SEQ ID NO: 697
uuuacauauuaggcacaga

SEQ ID NO: 57455 - RNA, 19 nt, Artificial Sequence
  Description of Artificial Sequence: Synthetic oligonucleotide
  Antisense strand to SEQ ID NO: 57374
ucugugccuaauauguaaa

SEQ ID NO: 57456 - RNA, 19 nt, Artificial Sequence
  Description of Artificial Sequence: Synthetic oligonucleotide
  Sense strand starting at position 300 of SEQ ID NO: 697
uuuggaauggaccgaguuu

SEQ ID NO: 57457 - RNA, 19 nt, Artificial Sequence
  Description of Artificial Sequence: Synthetic oligonucleotide
  Antisense strand to SEQ ID NO: 57376
aaacucgguccauuccaaa

SEQ ID NO: 57458 - RNA, 19 nt, Artificial Sequence
  Description of Artificial Sequence: Synthetic oligonucleotide
  Sense strand starting at position 292 of SEQ ID NO: 697
uuccauuauuuggaaugga

SEQ ID NO: 57459 - RNA, 19 nt, Artificial Sequence
  Description of Artificial Sequence: Synthetic oligonucleotide
  Antisense strand to SEQ ID NO: 57378
uccauuccaaauaauggaa

SEQ ID NO: 57460 - RNA, 19 nt, Artificial Sequence
  Description of Artificial Sequence: Synthetic oligonucleotide
  Sense strand starting at position 274 of SEQ ID NO: 697
guugccugaagagauuauu

SEQ ID NO: 57461 - RNA, 19 nt, Artificial Sequence
  Description of Artificial Sequence: Synthetic oligonucleotide
  Antisense strand to SEQ ID NO: 57380
aauaaucucuucaggcaac

SEQ ID NO: 57462 - RNA, 19 nt, Artificial Sequence
  Description of Artificial Sequence: Synthetic oligonucleotide
  Sense strand starting at position 267 of SEQ ID NO: 697
caugaagguugccugaaga

SEQ ID NO: 57463 - RNA, 19 nt, Artificial Sequence
  Description of Artificial Sequence: Synthetic oligonucleotide
  Antisense strand to SEQ ID NO: 57382
ucuucaggcaaccuucaug

SEQ ID NO: 57464 - RNA, 19 nt, Artificial Sequence
  Description of Artificial Sequence: Synthetic oligonucleotide
  Sense strand starting at position 122 of SEQ ID NO: 697
ggacuauuaucaguauauu

SEQ ID NO: 57465 - RNA, 19 nt, Artificial Sequence
  Description of Artificial Sequence: Synthetic oligonucleotide
  Antisense strand to SEQ ID NO: 57384
aauauacugauaauagucc

SEQ ID NO: 57466 - RNA, 19 nt, Artificial Sequence
  Description of Artificial Sequence: Synthetic oligonucleotide
  Sense strand starting at position 4 of SEQ ID NO: 698
agaugaggauaauagauaa

SEQ ID NO: 57467 - RNA, 19 nt, Artificial Sequence
  Description of Artificial Sequence: Synthetic oligonucleotide
  Antisense strand to SEQ ID NO: 57386
uuaucuauuauccucaucu

SEQ ID NO: 57468 - RNA, 19 nt, Artificial Sequence
  Description of Artificial Sequence: Synthetic oligonucleotide
  Sense strand starting at position 159 of SEQ ID NO: 698
gggagaagauuuggaugca

SEQ ID NO: 57469 - RNA, 19 nt, Artificial Sequence
  Description of Artificial Sequence: Synthetic oligonucleotide
  Antisense strand to SEQ ID NO: 57388
ugcauccaaaucuucuccc

SEQ ID NO: 57470 - RNA, 19 nt, Artificial Sequence
  Description of Artificial Sequence: Synthetic oligonucleotide
  Sense strand starting at position 199 of SEQ ID NO: 698
acagauuauagcggcacaa

SEQ ID NO: 57471 - RNA, 19 nt, Artificial Sequence
  Description of Artificial Sequence: Synthetic oligonucleotide
  Antisense strand to SEQ ID NO: 57390
uugugccgcuauaaucugu

SEQ ID NO: 57472 - RNA, 19 nt, Artificial Sequence
  Description of Artificial Sequence: Synthetic oligonucleotide
  Sense strand starting at position 201 of SEQ ID NO: 698
agauuauagcggcacaaau

SEQ ID NO: 57473 - RNA, 19 nt, Artificial Sequence
  Description of Artificial Sequence: Synthetic oligonucleotide
  Antisense strand to SEQ ID NO: 57392
auuugugccgcuauaaucu

SEQ ID NO: 57474 - RNA, 19 nt, Artificial Sequence
  Description of Artificial Sequence: Synthetic oligonucleotide
  Sense strand starting at position 285 of SEQ ID NO: 698
ggcuaaguuccacacauua

SEQ ID NO: 57475 - RNA, 19 nt, Artificial Sequence
  Description of Artificial Sequence: Synthetic oligonucleotide
  Antisense strand to SEQ ID NO: 57394
uaauguguggaacuuagcc

SEQ ID NO: 57476 - RNA, 19 nt, Artificial Sequence
  Description of Artificial Sequence: Synthetic oligonucleotide
  Sense strand starting at position 298 of SEQ ID NO: 698
acauuaugggccugugagu

SEQ ID NO: 57477 - RNA, 19 nt, Artificial Sequence
  Description of Artificial Sequence: Synthetic oligonucleotide
  Antisense strand to SEQ ID NO: 57396
acucacaggcccauaaugu

SEQ ID NO: 57478 - RNA, 19 nt, Artificial Sequence
  Description of Artificial Sequence: Synthetic oligonucleotide
  Sense strand starting at position 351 of SEQ ID NO: 698
ggauguuugcagggugcaa

SEQ ID NO: 57479 - RNA, 19 nt, Artificial Sequence
  Description of Artificial Sequence: Synthetic oligonucleotide
  Antisense strand to SEQ ID NO: 57398
uugcacccugcaaacaucc

SEQ ID NO: 57480 - RNA, 19 nt, Artificial Sequence
  Description of Artificial Sequence: Synthetic oligonucleotide
  Sense strand starting at position 520 of SEQ ID NO: 698
cagccugagucaggacaaa

SEQ ID NO: 57481 - RNA, 19 nt, Artificial Sequence
  Description of Artificial Sequence: Synthetic oligonucleotide
  Antisense strand to SEQ ID NO: 57400
uuuguccugacucaggcug

SEQ ID NO: 57482 - RNA, 19 nt, Artificial Sequence
  Description of Artificial Sequence: Synthetic oligonucleotide
  Sense strand starting at position 632 of SEQ ID NO: 698
ugagcauucuuacaggaga

SEQ ID NO: 57483 - RNA, 19 nt, Artificial Sequence
  Description of Artificial Sequence: Synthetic oligonucleotide
  Antisense strand to SEQ ID NO: 57402
ucuccuguaagaaugcuca

SEQ ID NO: 57484 - RNA, 19 nt, Artificial Sequence
  Description of Artificial Sequence: Synthetic oligonucleotide
  Sense strand starting at position 634 of SEQ ID NO: 698
agcauucuuacaggagaga

SEQ ID NO: 57485 - RNA, 19 nt, Artificial Sequence
  Description of Artificial Sequence: Synthetic oligonucleotide
  Antisense strand to SEQ ID NO: 57404
ucucuccuguaagaaugcu

SEQ ID NO: 57486 - RNA, 19 nt, Artificial Sequence
  Description of Artificial Sequence: Synthetic oligonucleotide
  Sense strand starting at position 831 of SEQ ID NO: 698
ccaguucccuucuugagga

SEQ ID NO: 57487 - RNA, 19 nt, Artificial Sequence
  Description of Artificial Sequence: Synthetic oligonucleotide
  Antisense strand to SEQ ID NO: 57406
uccucaagaagggaacugg

SEQ ID NO: 57488 - RNA, 19 nt, Artificial Sequence
  Description of Artificial Sequence: Synthetic oligonucleotide
  Sense strand starting at position 1670 of SEQ ID NO: 698
aucgcaucucccuagggaa

SEQ ID NO: 57489 - RNA, 19 nt, Artificial Sequence
  Description of Artificial Sequence: Synthetic oligonucleotide
  Antisense strand to SEQ ID NO: 57408
uucccuagggagaugcgau

SEQ ID NO: 57490 - RNA, 19 nt, Artificial Sequence
  Description of Artificial Sequence: Synthetic oligonucleotide
  Sense strand starting at position 2058 of SEQ ID NO: 698
aguuguaguucgggacuga

SEQ ID NO: 57491 - RNA, 19 nt, Artificial Sequence
  Description of Artificial Sequence: Synthetic oligonucleotide
  Antisense strand to SEQ ID NO: 57410
ucagucccgaacuacaacu

SEQ ID NO: 57492 - RNA, 19 nt, Artificial Sequence
  Description of Artificial Sequence: Synthetic oligonucleotide
  Sense strand starting at position 2226 of SEQ ID NO: 698
ccgcguauuccuuggcguu

SEQ ID NO: 57493 - RNA, 19 nt, Artificial Sequence
  Description of Artificial Sequence: Synthetic oligonucleotide
  Antisense strand to SEQ ID NO: 57412
aacgccaaggaauacgcgg

SEQ ID NO: 57494 - RNA, 19 nt, Artificial Sequence
  Description of Artificial Sequence: Synthetic oligonucleotide
  Sense strand starting at position 2460 of SEQ ID NO: 698
aggccuaauucccaaugaa

SEQ ID NO: 57495 - RNA, 19 nt, Artificial Sequence
  Description of Artificial Sequence: Synthetic oligonucleotide
  Antisense strand to SEQ ID NO: 57414
uucauugggaauuaggccu

SEQ ID NO: 57496 - RNA, 19 nt, Artificial Sequence
  Description of Artificial Sequence: Synthetic oligonucleotide
  Sense strand starting at position 2611 of SEQ ID NO: 698
gggacuaggucacagugaa

SEQ ID NO: 57497 - RNA, 19 nt, Artificial Sequence
  Description of Artificial Sequence: Synthetic oligonucleotide
  Antisense strand to SEQ ID NO: 57416
uucacugugaccuaguccc

SEQ ID NO: 57498 - RNA, 19 nt, Artificial Sequence
  Description of Artificial Sequence: Synthetic oligonucleotide
  Sense strand starting at position 2653 of SEQ ID NO: 698
agcagucauggccauagga

SEQ ID NO: 57499 - RNA, 19 nt, Artificial Sequence
  Description of Artificial Sequence: Synthetic oligonucleotide
  Antisense strand to SEQ ID NO: 57418
uccuauggccaugacugcu

SEQ ID NO: 57500 - RNA, 19 nt, Artificial Sequence
  Description of Artificial Sequence: Synthetic oligonucleotide
  Sense strand starting at position 2655 of SEQ ID NO: 698
cagucauggccauaggauu

SEQ ID NO: 57501 - RNA, 19 nt, Artificial Sequence
  Description of Artificial Sequence: Synthetic oligonucleotide
  Antisense strand to SEQ ID NO: 57420
aauccuauggccaugacug

SEQ ID NO: 57502 - RNA, 19 nt, Artificial Sequence
  Description of Artificial Sequence: Synthetic oligonucleotide
  Sense strand starting at position 2688 of SEQ ID NO: 698
ggagccaucaguuagugau

SEQ ID NO: 57503 - RNA, 19 nt, Artificial Sequence
  Description of Artificial Sequence: Synthetic oligonucleotide
  Antisense strand to SEQ ID NO: 57422
aucacuaacugauggcucc

SEQ ID NO: 57504 - RNA, 19 nt, Artificial Sequence
  Description of Artificial Sequence: Synthetic oligonucleotide
  Sense strand starting at position 2692 of SEQ ID NO: 698
ccaucaguuagugaugucu

SEQ ID NO: 57505 - RNA, 19 nt, Artificial Sequence
  Description of Artificial Sequence: Synthetic oligonucleotide
  Antisense strand to SEQ ID NO: 57424
agacaucacuaacugaugg

SEQ ID NO: 57506 - RNA, 19 nt, Artificial Sequence
  Description of Artificial Sequence: Synthetic oligonucleotide
  Sense strand starting at position 2694 of SEQ ID NO: 698
aucaguuagugaugucucu

SEQ ID NO: 57507 - RNA, 19 nt, Artificial Sequence
  Description of Artificial Sequence: Synthetic oligonucleotide
  Antisense strand to SEQ ID NO: 57426
agagacaucacuaacugau

SEQ ID NO: 57508 - RNA, 19 nt, Artificial Sequence
  Description of Artificial Sequence: Synthetic oligonucleotide
  Sense strand starting at position 2701 of SEQ ID NO: 698
agugaugucucuccaaguc

SEQ ID NO: 57509 - RNA, 19 nt, Artificial Sequence
  Description of Artificial Sequence: Synthetic oligonucleotide
  Antisense strand to SEQ ID NO: 57428
gacuuggagagacaucacu

SEQ ID NO: 57510 - RNA, 19 nt, Artificial Sequence
  Description of Artificial Sequence: Synthetic oligonucleotide
  Sense strand starting at position 2927 of SEQ ID NO: 698
aggaguggaucugcaagua

SEQ ID NO: 57511 - RNA, 19 nt, Artificial Sequence
  Description of Artificial Sequence: Synthetic oligonucleotide
  Antisense strand to SEQ ID NO: 57430
uacuugcagauccacuccu

SEQ ID NO: 57512 - RNA, 19 nt, Artificial Sequence
  Description of Artificial Sequence: Synthetic oligonucleotide
  Sense strand starting at position 3069 of SEQ ID NO: 698
gguccauuagcugagaaca

SEQ ID NO: 57513 - RNA, 19 nt, Artificial Sequence
  Description of Artificial Sequence: Synthetic oligonucleotide
  Antisense strand to SEQ ID NO: 57432
uguucucagcuaauggacc

SEQ ID NO: 57514 - RNA, 19 nt, Artificial Sequence
  Description of Artificial Sequence: Synthetic oligonucleotide
  Sense strand starting at position 3108 of SEQ ID NO: 698
ccaguugcuccugaauguu

SEQ ID NO: 57515 - RNA, 19 nt, Artificial Sequence
  Description of Artificial Sequence: Synthetic oligonucleotide
  Antisense strand to SEQ ID NO: 57434
aacauucaggagcaacugg

SEQ ID NO: 57516 - RNA, 19 nt, Artificial Sequence
  Description of Artificial Sequence: Synthetic oligonucleotide
  Sense strand starting at position 3217 of SEQ ID NO: 698
cagcaaugccagugaagag

SEQ ID NO: 57517 - RNA, 19 nt, Artificial Sequence
  Description of Artificial Sequence: Synthetic oligonucleotide
  Antisense strand to SEQ ID NO: 57436
cucuucacuggcauugcug

SEQ ID NO: 57518 - RNA, 19 nt, Artificial Sequence
  Description of Artificial Sequence: Synthetic oligonucleotide
  Sense strand starting at position 3358 of SEQ ID NO: 698
cugguuaugucaccagcau

SEQ ID NO: 57519 - RNA, 19 nt, Artificial Sequence
  Description of Artificial Sequence: Synthetic oligonucleotide
  Antisense strand to SEQ ID NO: 57438
augcuggugacauaaccag

SEQ ID NO: 57520 - RNA, 19 nt, Artificial Sequence
  Description of Artificial Sequence: Synthetic oligonucleotide
  Sense strand starting at position 3359 of SEQ ID NO: 698
ugguuaugucaccagcauc

SEQ ID NO: 57521 - RNA, 19 nt, Artificial Sequence
  Description of Artificial Sequence: Synthetic oligonucleotide
  Antisense strand to SEQ ID NO: 57440
gaugcuggugacauaacca

SEQ ID NO: 57522 - RNA, 19 nt, Artificial Sequence
  Description of Artificial Sequence: Synthetic oligonucleotide
  Sense strand starting at position 3412 of SEQ ID NO: 698
cugucaaucgagcagcauu

SEQ ID NO: 57523 - RNA, 19 nt, Artificial Sequence
  Description of Artificial Sequence: Synthetic oligonucleotide
  Antisense strand to SEQ ID NO: 57442
aaugcugcucgauugacag

SEQ ID NO: 57524 - RNA, 19 nt, Artificial Sequence
  Description of Artificial Sequence: Synthetic oligonucleotide
  Sense strand starting at position 3586 of SEQ ID NO: 698
accuuagauuggccaaaug

SEQ ID NO: 57525 - RNA, 19 nt, Artificial Sequence
  Description of Artificial Sequence: Synthetic oligonucleotide
  Antisense strand to SEQ ID NO: 57444
cauuuggccaaucuaaggu

SEQ ID NO: 57526 - RNA, 19 nt, Artificial Sequence
  Description of Artificial Sequence: Synthetic oligonucleotide
  Sense strand starting at position 3596 of SEQ ID NO: 698
ggccaaaugcagcauucuu

SEQ ID NO: 57527 - RNA, 19 nt, Artificial Sequence
  Description of Artificial Sequence: Synthetic oligonucleotide
  Antisense strand to SEQ ID NO: 57446
aagaaugcugcauuuggcc

SEQ ID NO: 57528 - RNA, 19 nt, Artificial Sequence
  Description of Artificial Sequence: Synthetic oligonucleotide
  Sense strand starting at position 3622 of SEQ ID NO: 698
aucuauaugugucaagagu

SEQ ID NO: 57529 - RNA, 19 nt, Artificial Sequence
  Description of Artificial Sequence: Synthetic oligonucleotide
  Antisense strand to SEQ ID NO: 57448
acucuugacacauauagau

SEQ ID NO: 57530 - RNA, 19 nt, Artificial Sequence
  Description of Artificial Sequence: Synthetic oligonucleotide
  Sense strand starting at position 3637 of SEQ ID NO: 698
gagugcugucugcgcucua

SEQ ID NO: 57531 - RNA, 19 nt, Artificial Sequence
  Description of Artificial Sequence: Synthetic oligonucleotide
  Antisense strand to SEQ ID NO: 57450
uagagcgcagacagcacuc

SEQ ID NO: 57532 - RNA, 19 nt, Artificial Sequence
  Description of Artificial Sequence: Synthetic oligonucleotide
  Sense strand starting at position 3648 of SEQ ID NO: 698
gcgcucuauccuggaagua

SEQ ID NO: 57533 - RNA, 19 nt, Artificial Sequence
  Description of Artificial Sequence: Synthetic oligonucleotide
  Antisense strand to SEQ ID NO: 57452
uacuuccaggauagagcgc

SEQ ID NO: 57534 - RNA, 19 nt, Artificial Sequence
  Description of Artificial Sequence: Synthetic oligonucleotide
  Sense strand starting at position 3649 of SEQ ID NO: 698
cgcucuauccuggaaguau

SEQ ID NO: 57535 - RNA, 19 nt, Artificial Sequence
  Description of Artificial Sequence: Synthetic oligonucleotide
  Antisense strand to SEQ ID NO: 57454
auacuuccaggauagagcg

SEQ ID NO: 57536 - RNA, 19 nt, Artificial Sequence
  Description of Artificial Sequence: Synthetic oligonucleotide
  Sense strand starting at position 3658 of SEQ ID NO: 698
cuggaaguaugucuuguau

SEQ ID NO: 57537 - RNA, 19 nt, Artificial Sequence
  Description of Artificial Sequence: Synthetic oligonucleotide
  Antisense strand to SEQ ID NO: 57456
auacaagacauacuuccag

SEQ ID NO: 57538 - RNA, 19 nt, Artificial Sequence
  Description of Artificial Sequence: Synthetic oligonucleotide
  Sense strand starting at position 3660 of SEQ ID NO: 698
ggaaguaugucuuguaucu

SEQ ID NO: 57539 - RNA, 19 nt, Artificial Sequence
  Description of Artificial Sequence: Synthetic oligonucleotide
  Antisense strand to SEQ ID NO: 57458
agauacaagacauacuucc

SEQ ID NO: 57540 - RNA, 19 nt, Artificial Sequence
  Description of Artificial Sequence: Synthetic oligonucleotide
  Sense strand starting at position 3667 of SEQ ID NO: 698
ugucuuguaucucauuaaa

SEQ ID NO: 57541 - RNA, 19 nt, Artificial Sequence
  Description of Artificial Sequence: Synthetic oligonucleotide
  Antisense strand to SEQ ID NO: 57460
uuuaaugagauacaagaca

SEQ ID NO: 57542 - RNA, 19 nt, Artificial Sequence
  Description of Artificial Sequence: Synthetic oligonucleotide
  Sense strand starting at position 3685 of SEQ ID NO: 698
acuaguaccucccaaggau

SEQ ID NO: 57543 - RNA, 19 nt, Artificial Sequence
  Description of Artificial Sequence: Synthetic oligonucleotide
  Antisense strand to SEQ ID NO: 57462
auccuugggagguacuagu

SEQ ID NO: 57544 - RNA, 19 nt, Artificial Sequence
  Description of Artificial Sequence: Synthetic oligonucleotide
  Sense strand starting at position 3688 of SEQ ID NO: 698
aguaccucccaaggauuaa

SEQ ID NO: 57545 - RNA, 19 nt, Artificial Sequence
  Description of Artificial Sequence: Synthetic oligonucleotide
  Antisense strand to SEQ ID NO: 57464
uuaauccuugggagguacu

SEQ ID NO: 57546 - RNA, 19 nt, Artificial Sequence
  Description of Artificial Sequence: Synthetic oligonucleotide
  Sense strand starting at position 3963 of SEQ ID NO: 699
ccacuaguggcauguugau

SEQ ID NO: 57547 - RNA, 19 nt, Artificial Sequence
  Description of Artificial Sequence: Synthetic oligonucleotide
  Antisense strand to SEQ ID NO: 57466
aucaacaugccacuagugg

SEQ ID NO: 57548 - RNA, 19 nt, Artificial Sequence
  Description of Artificial Sequence: Synthetic oligonucleotide
  Sense strand starting at position 3936 of SEQ ID NO: 699
gcagaacugcauuguccaa

SEQ ID NO: 57549 - RNA, 19 nt, Artificial Sequence
  Description of Artificial Sequence: Synthetic oligonucleotide
  Antisense strand to SEQ ID NO: 57468
uuggacaaugcaguucugc

SEQ ID NO: 57550 - RNA, 19 nt, Artificial Sequence
  Description of Artificial Sequence: Synthetic oligonucleotide
  Sense strand starting at position 3923 of SEQ ID NO: 699
agcuuugaagauugcagaa

SEQ ID NO: 57551 - RNA, 19 nt, Artificial Sequence
  Description of Artificial Sequence: Synthetic oligonucleotide
  Antisense strand to SEQ ID NO: 57470
uucugcaaucuucaaagcu

SEQ ID NO: 57552 - RNA, 19 nt, Artificial Sequence
  Description of Artificial Sequence: Synthetic oligonucleotide
  Sense strand starting at position 3884 of SEQ ID NO: 699
gggagugaggagugauuga

SEQ ID NO: 57553 - RNA, 19 nt, Artificial Sequence
  Description of Artificial Sequence: Synthetic oligonucleotide
  Antisense strand to SEQ ID NO: 57472
ucaaucacuccucacuccc

SEQ ID NO: 57554 - RNA, 19 nt, Artificial Sequence
  Description of Artificial Sequence: Synthetic oligonucleotide
  Sense strand starting at position 3152 of SEQ ID NO: 699
aggguuugaggaugugaac

SEQ ID NO: 57555 - RNA, 19 nt, Artificial Sequence
  Description of Artificial Sequence: Synthetic oligonucleotide
  Antisense strand to SEQ ID NO: 57474
guucacauccucaaacccu

SEQ ID NO: 57556 - RNA, 19 nt, Artificial Sequence
  Description of Artificial Sequence: Synthetic oligonucleotide
  Sense strand starting at position 3142 of SEQ ID NO: 699
cugcauuacaaggguuuga

SEQ ID NO: 57557 - RNA, 19 nt, Artificial Sequence
  Description of Artificial Sequence: Synthetic oligonucleotide
  Antisense strand to SEQ ID NO: 57476
ucaaacccuuguaaugcag

SEQ ID NO: 57558 - RNA, 19 nt, Artificial Sequence
  Description of Artificial Sequence: Synthetic oligonucleotide
  Sense strand starting at position 3018 of SEQ ID NO: 699
ccugaaacagcuggacaua

SEQ ID NO: 57559 - RNA, 19 nt, Artificial Sequence
  Description of Artificial Sequence: Synthetic oligonucleotide
  Antisense strand to SEQ ID NO: 57478
uauguccagcuguuucagg

SEQ ID NO: 57560 - RNA, 19 nt, Artificial Sequence
  Description of Artificial Sequence: Synthetic oligonucleotide
  Sense strand starting at position 2778 of SEQ ID NO: 699
cucuuuccugaguagagau

SEQ ID NO: 57561 - RNA, 19 nt, Artificial Sequence
  Description of Artificial Sequence: Synthetic oligonucleotide
  Antisense strand to SEQ ID NO: 57480
aucucuacucaggaaagag

SEQ ID NO: 57562 - RNA, 19 nt, Artificial Sequence
  Description of Artificial Sequence: Synthetic oligonucleotide
  Sense strand starting at position 2777 of SEQ ID NO: 699
ccucuuuccugaguagaga

SEQ ID NO: 57563 - RNA, 19 nt, Artificial Sequence
  Description of Artificial Sequence: Synthetic oligonucleotide
  Antisense strand to SEQ ID NO: 57482
ucucuacucaggaaagagg

SEQ ID NO: 57564 - RNA, 19 nt, Artificial Sequence
  Description of Artificial Sequence: Synthetic oligonucleotide
  Sense strand starting at position 2775 of SEQ ID NO: 699
ugccucuuuccugaguaga

SEQ ID NO: 57565 - RNA, 19 nt, Artificial Sequence
  Description of Artificial Sequence: Synthetic oligonucleotide
  Antisense strand to SEQ ID NO: 57484
ucuacucaggaaagaggca

SEQ ID NO: 57566 - RNA, 19 nt, Artificial Sequence
  Description of Artificial Sequence: Synthetic oligonucleotide
  Sense strand starting at position 2770 of SEQ ID NO: 699
agaugugccucuuuccuga

SEQ ID NO: 57567 - RNA, 19 nt, Artificial Sequence
  Description of Artificial Sequence: Synthetic oligonucleotide
  Antisense strand to SEQ ID NO: 57486
ucaggaaagaggcacaucu

SEQ ID NO: 57568 - RNA, 19 nt, Artificial Sequence
  Description of Artificial Sequence: Synthetic oligonucleotide
  Sense strand starting at position 2353 of SEQ ID NO: 699
cagauuccugcuggaagag

SEQ ID NO: 57569 - RNA, 19 nt, Artificial Sequence
  Description of Artificial Sequence: Synthetic oligonucleotide
  Antisense strand to SEQ ID NO: 57488
cucuuccagcaggaaucug

SEQ ID NO: 57570 - RNA, 19 nt, Artificial Sequence
  Description of Artificial Sequence: Synthetic oligonucleotide
  Sense strand starting at position 2152 of SEQ ID NO: 699
ucucuucuggccugggaau

SEQ ID NO: 57571 - RNA, 19 nt, Artificial Sequence
  Description of Artificial Sequence: Synthetic oligonucleotide
  Antisense strand to SEQ ID NO: 57490
auucccaggccagaagaga

SEQ ID NO: 57572 - RNA, 19 nt, Artificial Sequence
  Description of Artificial Sequence: Synthetic oligonucleotide
  Sense strand starting at position 1877 of SEQ ID NO: 699
gguacuugaucucugucca

SEQ ID NO: 57573 - RNA, 19 nt, Artificial Sequence
  Description of Artificial Sequence: Synthetic oligonucleotide
  Antisense strand to SEQ ID NO: 57492
uggacagagaucaaguacc

SEQ ID NO: 57574 - RNA, 19 nt, Artificial Sequence
  Description of Artificial Sequence: Synthetic oligonucleotide
  Sense strand starting at position 1739 of SEQ ID NO: 699
ggagaagucccaggaugca

SEQ ID NO: 57575 - RNA, 19 nt, Artificial Sequence
  Description of Artificial Sequence: Synthetic oligonucleotide
  Antisense strand to SEQ ID NO: 57494
ugcauccugggacuucucc

SEQ ID NO: 57576 - RNA, 19 nt, Artificial Sequence
  Description of Artificial Sequence: Synthetic oligonucleotide
  Sense strand starting at position 1283 of SEQ ID NO: 699
ugcauaaacuagcuuugaa

SEQ ID NO: 57577 - RNA, 19 nt, Artificial Sequence
  Description of Artificial Sequence: Synthetic oligonucleotide
  Antisense strand to SEQ ID NO: 57496
uucaaagcuaguuuaugca

SEQ ID NO: 57578 - RNA, 19 nt, Artificial Sequence
  Description of Artificial Sequence: Synthetic oligonucleotide
  Sense strand starting at position 1272 of SEQ ID NO: 699
uugcucagauaugcauaaa

SEQ ID NO: 57579 - RNA, 19 nt, Artificial Sequence
  Description of Artificial Sequence: Synthetic oligonucleotide
  Antisense strand to SEQ ID NO: 57498
uuuaugcauaucugagcaa

SEQ ID NO: 57580 - RNA, 19 nt, Artificial Sequence
  Description of Artificial Sequence: Synthetic oligonucleotide
  Sense strand starting at position 1265 of SEQ ID NO: 699
aucuauguugcucagauau

SEQ ID NO: 57581 - RNA, 19 nt, Artificial Sequence
  Description of Artificial Sequence: Synthetic oligonucleotide
  Antisense strand to SEQ ID NO: 57500
auaucugagcaacauagau

SEQ ID NO: 57582 - RNA, 19 nt, Artificial Sequence
  Description of Artificial Sequence: Synthetic oligonucleotide
  Sense strand starting at position 1263 of SEQ ID NO: 699
uuaucuauguugcucagau

SEQ ID NO: 57583 - RNA, 19 nt, Artificial Sequence
  Description of Artificial Sequence: Synthetic oligonucleotide
  Antisense strand to SEQ ID NO: 57502
aucugagcaacauagauaa

SEQ ID NO: 57584 - RNA, 19 nt, Artificial Sequence
  Description of Artificial Sequence: Synthetic oligonucleotide
  Sense strand starting at position 1258 of SEQ ID NO: 699
aaggauuaucuauguugcu

SEQ ID NO: 57585 - RNA, 19 nt, Artificial Sequence
  Description of Artificial Sequence: Synthetic oligonucleotide
  Antisense strand to SEQ ID NO: 57504
agcaacauagauaauccuu

SEQ ID NO: 57586 - RNA, 19 nt, Artificial Sequence
  Description of Artificial Sequence: Synthetic oligonucleotide
  Sense strand starting at position 1171 of SEQ ID NO: 699
gaucuaugacugugcuacu

SEQ ID NO: 57587 - RNA, 19 nt, Artificial Sequence
  Description of Artificial Sequence: Synthetic oligonucleotide
  Antisense strand to SEQ ID NO: 57506
aguagcacagucauagauc

SEQ ID NO: 57588 - RNA, 19 nt, Artificial Sequence
  Description of Artificial Sequence: Synthetic oligonucleotide
  Sense strand starting at position 1169 of SEQ ID NO: 699
gugaucuaugacugugcua

SEQ ID NO: 57589 - RNA, 19 nt, Artificial Sequence
  Description of Artificial Sequence: Synthetic oligonucleotide
  Antisense strand to SEQ ID NO: 57508
uagcacagucauagaucac

SEQ ID NO: 57590 - RNA, 19 nt, Artificial Sequence
  Description of Artificial Sequence: Synthetic oligonucleotide
  Sense strand starting at position 936 of SEQ ID NO: 699
auacgauguguauaaggca

SEQ ID NO: 57591 - RNA, 19 nt, Artificial Sequence
  Description of Artificial Sequence: Synthetic oligonucleotide
  Antisense strand to SEQ ID NO: 57510
ugccuuauacacaucguau

SEQ ID NO: 57592 - RNA, 19 nt, Artificial Sequence
  Description of Artificial Sequence: Synthetic oligonucleotide
  Sense strand starting at position 923 of SEQ ID NO: 699
uagaaugguguguauacga

SEQ ID NO: 57593 - RNA, 19 nt, Artificial Sequence
  Description of Artificial Sequence: Synthetic oligonucleotide
  Antisense strand to SEQ ID NO: 57512
ucguauacacaccauucua

SEQ ID NO: 57594 - RNA, 19 nt, Artificial Sequence
  Description of Artificial Sequence: Synthetic oligonucleotide
  Sense strand starting at position 921 of SEQ ID NO: 699
uguagaaugguguguauac

SEQ ID NO: 57595 - RNA, 19 nt, Artificial Sequence
  Description of Artificial Sequence: Synthetic oligonucleotide
  Antisense strand to SEQ ID NO: 57514
guauacacaccauucuaca

SEQ ID NO: 57596 - RNA, 19 nt, Artificial Sequence
  Description of Artificial Sequence: Synthetic oligonucleotide
  Sense strand starting at position 885 of SEQ ID NO: 699
gugauaauccacuguuaag

SEQ ID NO: 57597 - RNA, 19 nt, Artificial Sequence
  Description of Artificial Sequence: Synthetic oligonucleotide
  Antisense strand to SEQ ID NO: 57516
cuuaacaguggauuaucac

SEQ ID NO: 57598 - RNA, 19 nt, Artificial Sequence
  Description of Artificial Sequence: Synthetic oligonucleotide
  Sense strand starting at position 874 of SEQ ID NO: 699
agugaucuccagugauaau

SEQ ID NO: 57599 - RNA, 19 nt, Artificial Sequence
  Description of Artificial Sequence: Synthetic oligonucleotide
  Antisense strand to SEQ ID NO: 57518
auuaucacuggagaucacu

SEQ ID NO: 57600 - RNA, 19 nt, Artificial Sequence
  Description of Artificial Sequence: Synthetic oligonucleotide
  Sense strand starting at position 871 of SEQ ID NO: 699
ugcagugaucuccagugau

SEQ ID NO: 57601 - RNA, 19 nt, Artificial Sequence
  Description of Artificial Sequence: Synthetic oligonucleotide
  Antisense strand to SEQ ID NO: 57520
aucacuggagaucacugca

SEQ ID NO: 57602 - RNA, 19 nt, Artificial Sequence
  Description of Artificial Sequence: Synthetic oligonucleotide
  Sense strand starting at position 853 of SEQ ID NO: 699
gcuuuauguccugacacau

SEQ ID NO: 57603 - RNA, 19 nt, Artificial Sequence
  Description of Artificial Sequence: Synthetic oligonucleotide
  Antisense strand to SEQ ID NO: 57522
augugucaggacauaaagc

SEQ ID NO: 57604 - RNA, 19 nt, Artificial Sequence
  Description of Artificial Sequence: Synthetic oligonucleotide
  Sense strand starting at position 850 of SEQ ID NO: 699
auugcuuuauguccugaca

SEQ ID NO: 57605 - RNA, 19 nt, Artificial Sequence
  Description of Artificial Sequence: Synthetic oligonucleotide
  Antisense strand to SEQ ID NO: 57524
ugucaggacauaaagcaau

SEQ ID NO: 57606 - RNA, 19 nt, Artificial Sequence
  Description of Artificial Sequence: Synthetic oligonucleotide
  Sense strand starting at position 817 of SEQ ID NO: 699
ccauccagauagcuguaaa

SEQ ID NO: 57607 - RNA, 19 nt, Artificial Sequence
  Description of Artificial Sequence: Synthetic oligonucleotide
  Antisense strand to SEQ ID NO: 57526
uuuacagcuaucuggaugg

SEQ ID NO: 57608 - RNA, 19 nt, Artificial Sequence
  Description of Artificial Sequence: Synthetic oligonucleotide
  Sense strand starting at position 791 of SEQ ID NO: 699
cguaaagagucuguacaaa

SEQ ID NO: 57609 - RNA, 19 nt, Artificial Sequence
  Description of Artificial Sequence: Synthetic oligonucleotide
  Antisense strand to SEQ ID NO: 57528
uuuguacagacucuuuacg

SEQ ID NO: 57610 - RNA, 19 nt, Artificial Sequence
  Description of Artificial Sequence: Synthetic oligonucleotide
  Sense strand starting at position 790 of SEQ ID NO: 699
ucguaaagagucuguacaa

SEQ ID NO: 57611 - RNA, 19 nt, Artificial Sequence
  Description of Artificial Sequence: Synthetic oligonucleotide
  Antisense strand to SEQ ID NO: 57530
uuguacagacucuuuacga

SEQ ID NO: 57612 - RNA, 19 nt, Artificial Sequence
  Description of Artificial Sequence: Synthetic oligonucleotide
  Sense strand starting at position 779 of SEQ ID NO: 699
ggcugaauacaucguaaag

SEQ ID NO: 57613 - RNA, 19 nt, Artificial Sequence
  Description of Artificial Sequence: Synthetic oligonucleotide
  Antisense strand to SEQ ID NO: 57532
cuuuacgauguauucagcc

SEQ ID NO: 57614 - RNA, 19 nt, Artificial Sequence
  Description of Artificial Sequence: Synthetic oligonucleotide
  Sense strand starting at position 549 of SEQ ID NO: 699
aggcaucuuggaggaugaa

SEQ ID NO: 57615 - RNA, 19 nt, Artificial Sequence
  Description of Artificial Sequence: Synthetic oligonucleotide
  Antisense strand to SEQ ID NO: 57534
uucauccuccaagaugccu

SEQ ID NO: 57616 - RNA, 19 nt, Artificial Sequence
  Description of Artificial Sequence: Synthetic oligonucleotide
  Sense strand starting at position 498 of SEQ ID NO: 699
gugagugcugcaggaagaa

SEQ ID NO: 57617 - RNA, 19 nt, Artificial Sequence
  Description of Artificial Sequence: Synthetic oligonucleotide
  Antisense strand to SEQ ID NO: 57536
uucuuccugcagcacucac

SEQ ID NO: 57618 - RNA, 19 nt, Artificial Sequence
  Description of Artificial Sequence: Synthetic oligonucleotide
  Sense strand starting at position 481 of SEQ ID NO: 699
gagucaugcaggcaguagu

SEQ ID NO: 57619 - RNA, 19 nt, Artificial Sequence
  Description of Artificial Sequence: Synthetic oligonucleotide
  Antisense strand to SEQ ID NO: 57538
acuacugccugcaugacuc

SEQ ID NO: 57620 - RNA, 19 nt, Artificial Sequence
  Description of Artificial Sequence: Synthetic oligonucleotide
  Sense strand starting at position 479 of SEQ ID NO: 699
cagagucaugcaggcagua

SEQ ID NO: 57621 - RNA, 19 nt, Artificial Sequence
  Description of Artificial Sequence: Synthetic oligonucleotide
  Antisense strand to SEQ ID NO: 57540
uacugccugcaugacucug

SEQ ID NO: 57622 - RNA, 19 nt, Artificial Sequence
  Description of Artificial Sequence: Synthetic oligonucleotide
  Sense strand starting at position 329 of SEQ ID NO: 699
acucauccugcggagagaa

SEQ ID NO: 57623 - RNA, 19 nt, Artificial Sequence
  Description of Artificial Sequence: Synthetic oligonucleotide
  Antisense strand to SEQ ID NO: 57542
uucucuccgcaggaugagu

SEQ ID NO: 57624 - RNA, 19 nt, Artificial Sequence
  Description of Artificial Sequence: Synthetic oligonucleotide
  Sense strand starting at position 170 of SEQ ID NO: 699
ccagguguccugggaaacu

SEQ ID NO: 57625 - RNA, 19 nt, Artificial Sequence
  Description of Artificial Sequence: Synthetic oligonucleotide
  Antisense strand to SEQ ID NO: 57544
aguuucccaggacaccugg

SEQ ID NO: 57626 - RNA, 19 nt, Artificial Sequence
  Description of Artificial Sequence: Synthetic oligonucleotide
  Sense strand starting at position 3673 of SEQ ID NO: 700
cccuucugucuuuaaggau

SEQ ID NO: 57627 - RNA, 19 nt, Artificial Sequence
  Description of Artificial Sequence: Synthetic oligonucleotide
  Antisense strand to SEQ ID NO: 57546
auccuuaaagacagaaggg

SEQ ID NO: 57628 - RNA, 19 nt, Artificial Sequence
  Description of Artificial Sequence: Synthetic oligonucleotide
  Sense strand starting at position 3408 of SEQ ID NO: 700
ggaagauaaugagaaucua

SEQ ID NO: 57629 - RNA, 19 nt, Artificial Sequence
  Description of Artificial Sequence: Synthetic oligonucleotide
  Antisense strand to SEQ ID NO: 57548
uagauucucauuaucuucc

SEQ ID NO: 57630 - RNA, 19 nt, Artificial Sequence
  Description of Artificial Sequence: Synthetic oligonucleotide
  Sense strand starting at position 3269 of SEQ ID NO: 700
agcauuaaucacugcagga

SEQ ID NO: 57631 - RNA, 19 nt, Artificial Sequence
  Description of Artificial Sequence: Synthetic oligonucleotide
  Antisense strand to SEQ ID NO: 57550
uccugcagugauuaaugcu

SEQ ID NO: 57632 - RNA, 19 nt, Artificial Sequence
  Description of Artificial Sequence: Synthetic oligonucleotide
  Sense strand starting at position 3224 of SEQ ID NO: 700
auaauugggcuugacacuu

SEQ ID NO: 57633 - RNA, 19 nt, Artificial Sequence
  Description of Artificial Sequence: Synthetic oligonucleotide
  Antisense strand to SEQ ID NO: 57552
aagugucaagcccaauuau

SEQ ID NO: 57634 - RNA, 19 nt, Artificial Sequence
  Description of Artificial Sequence: Synthetic oligonucleotide
  Sense strand starting at position 3195 of SEQ ID NO: 700
agcauuuacuaucaggaga

SEQ ID NO: 57635 - RNA, 19 nt, Artificial Sequence
  Description of Artificial Sequence: Synthetic oligonucleotide
  Antisense strand to SEQ ID NO: 57554
ucuccugauaguaaaugcu

SEQ ID NO: 57636 - RNA, 19 nt, Artificial Sequence
  Description of Artificial Sequence: Synthetic oligonucleotide
  Sense strand starting at position 3180 of SEQ ID NO: 700
ucuguauauuugcugagca

SEQ ID NO: 57637 - RNA, 19 nt, Artificial Sequence
  Description of Artificial Sequence: Synthetic oligonucleotide
  Antisense strand to SEQ ID NO: 57556
ugcucagcaaauauacaga

SEQ ID NO: 57638 - RNA, 19 nt, Artificial Sequence
  Description of Artificial Sequence: Synthetic oligonucleotide
  Sense strand starting at position 3172 of SEQ ID NO: 700
guuauucgucuguauauuu

SEQ ID NO: 57639 - RNA, 19 nt, Artificial Sequence
  Description of Artificial Sequence: Synthetic oligonucleotide
  Antisense strand to SEQ ID NO: 57558
aaauauacagacgaauaac

SEQ ID NO: 57640 - RNA, 19 nt, Artificial Sequence
  Description of Artificial Sequence: Synthetic oligonucleotide
  Sense strand starting at position 3151 of SEQ ID NO: 700
gauuauuguguaugauuag

SEQ ID NO: 57641 - RNA, 19 nt, Artificial Sequence
  Description of Artificial Sequence: Synthetic oligonucleotide
  Antisense strand to SEQ ID NO: 57560
cuaaucauacacaauaauc

SEQ ID NO: 57642 - RNA, 19 nt, Artificial Sequence
  Description of Artificial Sequence: Synthetic oligonucleotide
  Sense strand starting at position 3144 of SEQ ID NO: 700
acucuaagauuauugugua

SEQ ID NO: 57643 - RNA, 19 nt, Artificial Sequence
  Description of Artificial Sequence: Synthetic oligonucleotide
  Antisense strand to SEQ ID NO: 57562
uacacaauaaucuuagagu

SEQ ID NO: 57644 - RNA, 19 nt, Artificial Sequence
  Description of Artificial Sequence: Synthetic oligonucleotide
  Sense strand starting at position 3106 of SEQ ID NO: 700
uguuguaaggauuaaguua

SEQ ID NO: 57645 - RNA, 19 nt, Artificial Sequence
  Description of Artificial Sequence: Synthetic oligonucleotide
  Antisense strand to SEQ ID NO: 57564
uaacuuaauccuuacaaca

SEQ ID NO: 57646 - RNA, 19 nt, Artificial Sequence
  Description of Artificial Sequence: Synthetic oligonucleotide
  Sense strand starting at position 3034 of SEQ ID NO: 700
ggaugugccaguuaacuuu

SEQ ID NO: 57647 - RNA, 19 nt, Artificial Sequence
  Description of Artificial Sequence: Synthetic oligonucleotide
  Antisense strand to SEQ ID NO: 57566
aaaguuaacuggcacaucc

SEQ ID NO: 57648 - RNA, 19 nt, Artificial Sequence
  Description of Artificial Sequence: Synthetic oligonucleotide
  Sense strand starting at position 3013 of SEQ ID NO: 700
ucuuacuggcuguaugaua

SEQ ID NO: 57649 - RNA, 19 nt, Artificial Sequence
  Description of Artificial Sequence: Synthetic oligonucleotide
  Antisense strand to SEQ ID NO: 57568
uaucauacagccaguaaga

SEQ ID NO: 57650 - RNA, 19 nt, Artificial Sequence
  Description of Artificial Sequence: Synthetic oligonucleotide
  Sense strand starting at position 2991 of SEQ ID NO: 700
aggcguacugaacagaauu

SEQ ID NO: 57651 - RNA, 19 nt, Artificial Sequence
  Description of Artificial Sequence: Synthetic oligonucleotide
  Antisense strand to SEQ ID NO: 57570
aauucuguucaguacgccu

SEQ ID NO: 57652 - RNA, 19 nt, Artificial Sequence
  Description of Artificial Sequence: Synthetic oligonucleotide
  Sense strand starting at position 2984 of SEQ ID NO: 700
aucaguaaggcguacugaa

SEQ ID NO: 57653 - RNA, 19 nt, Artificial Sequence
  Description of Artificial Sequence: Synthetic oligonucleotide
  Antisense strand to SEQ ID NO: 57572
uucaguacgccuuacugau

SEQ ID NO: 57654 - RNA, 19 nt, Artificial Sequence
  Description of Artificial Sequence: Synthetic oligonucleotide
  Sense strand starting at position 2906 of SEQ ID NO: 700
agguuacuccauggaauaa

SEQ ID NO: 57655 - RNA, 19 nt, Artificial Sequence
  Description of Artificial Sequence: Synthetic oligonucleotide
  Antisense strand to SEQ ID NO: 57574
uuauuccauggaguaaccu

SEQ ID NO: 57656 - RNA, 19 nt, Artificial Sequence
  Description of Artificial Sequence: Synthetic oligonucleotide
  Sense strand starting at position 2905 of SEQ ID NO: 700
cagguuacuccauggaaua

SEQ ID NO: 57657 - RNA, 19 nt, Artificial Sequence
  Description of Artificial Sequence: Synthetic oligonucleotide
  Antisense strand to SEQ ID NO: 57576
uauuccauggaguaaccug

SEQ ID NO: 57658 - RNA, 19 nt, Artificial Sequence
  Description of Artificial Sequence: Synthetic oligonucleotide
  Sense strand starting at position 2882 of SEQ ID NO: 700
gugccugacccugaaauau

SEQ ID NO: 57659 - RNA, 19 nt, Artificial Sequence
  Description of Artificial Sequence: Synthetic oligonucleotide
  Antisense strand to SEQ ID NO: 57578
auauuucagggucaggcac

SEQ ID NO: 57660 - RNA, 19 nt, Artificial Sequence
  Description of Artificial Sequence: Synthetic oligonucleotide
  Sense strand starting at position 2765 of SEQ ID NO: 700
ggauaaaucgugugaauga

SEQ ID NO: 57661 - RNA, 19 nt, Artificial Sequence
  Description of Artificial Sequence: Synthetic oligonucleotide
  Antisense strand to SEQ ID NO: 57580
ucauucacacgauuuaucc

SEQ ID NO: 57662 - RNA, 19 nt, Artificial Sequence
  Description of Artificial Sequence: Synthetic oligonucleotide
  Sense strand starting at position 2597 of SEQ ID NO: 700
cggagcguccugcuacaua

SEQ ID NO: 57663 - RNA, 19 nt, Artificial Sequence
  Description of Artificial Sequence: Synthetic oligonucleotide
  Antisense strand to SEQ ID NO: 57582
uauguagcaggacgcuccg

SEQ ID NO: 57664 - RNA, 19 nt, Artificial Sequence
  Description of Artificial Sequence: Synthetic oligonucleotide
  Sense strand starting at position 2498 of SEQ ID NO: 700
ggaacuucugccuaucuaa

SEQ ID NO: 57665 - RNA, 19 nt, Artificial Sequence
  Description of Artificial Sequence: Synthetic oligonucleotide
  Antisense strand to SEQ ID NO: 57584
uuagauaggcagaaguucc

SEQ ID NO: 57666 - RNA, 19 nt, Artificial Sequence
  Description of Artificial Sequence: Synthetic oligonucleotide
  Sense strand starting at position 2321 of SEQ ID NO: 700
uucuguauuuguccuccau

SEQ ID NO: 57667 - RNA, 19 nt, Artificial Sequence
  Description of Artificial Sequence: Synthetic oligonucleotide
  Antisense strand to SEQ ID NO: 57586
auggaggacaaauacagaa

SEQ ID NO: 57668 - RNA, 19 nt, Artificial Sequence
  Description of Artificial Sequence: Synthetic oligonucleotide
  Sense strand starting at position 1158 of SEQ ID NO: 700
cguaucgguccgcucuuaa

SEQ ID NO: 57669 - RNA, 19 nt, Artificial Sequence
  Description of Artificial Sequence: Synthetic oligonucleotide
  Antisense strand to SEQ ID NO: 57588
uuaagagcggaccgauacg

SEQ ID NO: 57670 - RNA, 19 nt, Artificial Sequence
  Description of Artificial Sequence: Synthetic oligonucleotide
  Sense strand starting at position 1076 of SEQ ID NO: 700
gucagauuagaaugaaucu

SEQ ID NO: 57671 - RNA, 19 nt, Artificial Sequence
  Description of Artificial Sequence: Synthetic oligonucleotide
  Antisense strand to SEQ ID NO: 57590
agauucauucuaaucugac

SEQ ID NO: 57672 - RNA, 19 nt, Artificial Sequence
  Description of Artificial Sequence: Synthetic oligonucleotide
  Sense strand starting at position 738 of SEQ ID NO: 700
uguaccagauuauagauuu

SEQ ID NO: 57673 - RNA, 19 nt, Artificial Sequence
  Description of Artificial Sequence: Synthetic oligonucleotide
  Antisense strand to SEQ ID NO: 57592
aaaucuauaaucugguaca

SEQ ID NO: 57674 - RNA, 19 nt, Artificial Sequence
  Description of Artificial Sequence: Synthetic oligonucleotide
  Sense strand starting at position 657 of SEQ ID NO: 700
agaaaucaacgccagugaa

SEQ ID NO: 57675 - RNA, 19 nt, Artificial Sequence
  Description of Artificial Sequence: Synthetic oligonucleotide
  Antisense strand to SEQ ID NO: 57594
uucacuggcguugauuucu

SEQ ID NO: 57676 - RNA, 19 nt, Artificial Sequence
  Description of Artificial Sequence: Synthetic oligonucleotide
  Sense strand starting at position 606 of SEQ ID NO: 700
caaggaauguuuguaauac

SEQ ID NO: 57677 - RNA, 19 nt, Artificial Sequence
  Description of Artificial Sequence: Synthetic oligonucleotide
  Antisense strand to SEQ ID NO: 57596
guauuacaaacauuccuug

SEQ ID NO: 57678 - RNA, 19 nt, Artificial Sequence
  Description of Artificial Sequence: Synthetic oligonucleotide
  Sense strand starting at position 597 of SEQ ID NO: 700
gcauaaacucaaggaaugu

SEQ ID NO: 57679 - RNA, 19 nt, Artificial Sequence
  Description of Artificial Sequence: Synthetic oligonucleotide
  Antisense strand to SEQ ID NO: 57598
acauuccuugaguuuaugc

SEQ ID NO: 57680 - RNA, 19 nt, Artificial Sequence
  Description of Artificial Sequence: Synthetic oligonucleotide
  Sense strand starting at position 575 of SEQ ID NO: 700
cuaagcuuagcucaaagau

SEQ ID NO: 57681 - RNA, 19 nt, Artificial Sequence
  Description of Artificial Sequence: Synthetic oligonucleotide
  Antisense strand to SEQ ID NO: 57600
aucuuugagcuaagcuuag

SEQ ID NO: 57682 - RNA, 19 nt, Artificial Sequence
  Description of Artificial Sequence: Synthetic oligonucleotide
  Sense strand starting at position 564 of SEQ ID NO: 700
gaggaagugcucuaagcuu

SEQ ID NO: 57683 - RNA, 19 nt, Artificial Sequence
  Description of Artificial Sequence: Synthetic oligonucleotide
  Antisense strand to SEQ ID NO: 57602
aagcuuagagcacuuccuc

SEQ ID NO: 57684 - RNA, 19 nt, Artificial Sequence
  Description of Artificial Sequence: Synthetic oligonucleotide
  Sense strand starting at position 554 of SEQ ID NO: 700
aaucauauuugaggaagug

SEQ ID NO: 57685 - RNA, 19 nt, Artificial Sequence
  Description of Artificial Sequence: Synthetic oligonucleotide
  Antisense strand to SEQ ID NO: 57604
cacuuccucaaauaugauu

SEQ ID NO: 57686 - RNA, 19 nt, Artificial Sequence
  Description of Artificial Sequence: Synthetic oligonucleotide
  Sense strand starting at position 541 of SEQ ID NO: 700
agucgugauaacgaaucau

SEQ ID NO: 57687 - RNA, 19 nt, Artificial Sequence
  Description of Artificial Sequence: Synthetic oligonucleotide
  Antisense strand to SEQ ID NO: 57606
augauucguuaucacgacu

SEQ ID NO: 57688 - RNA, 19 nt, Artificial Sequence
  Description of Artificial Sequence: Synthetic oligonucleotide
  Sense strand starting at position 483 of SEQ ID NO: 700
cuaugagucugggcaaaua

SEQ ID NO: 57689 - RNA, 19 nt, Artificial Sequence
  Description of Artificial Sequence: Synthetic oligonucleotide
  Antisense strand to SEQ ID NO: 57608
uauuugcccagacucauag

SEQ ID NO: 57690 - RNA, 19 nt, Artificial Sequence
  Description of Artificial Sequence: Synthetic oligonucleotide
  Sense strand starting at position 474 of SEQ ID NO: 700
ugagauuggcuaugagucu

SEQ ID NO: 57691 - RNA, 19 nt, Artificial Sequence
  Description of Artificial Sequence: Synthetic oligonucleotide
  Antisense strand to SEQ ID NO: 57610
agacucauagccaaucuca

SEQ ID NO: 57692 - RNA, 19 nt, Artificial Sequence
  Description of Artificial Sequence: Synthetic oligonucleotide
  Sense strand starting at position 331 of SEQ ID NO: 700
uguauucuccuuugauaag

SEQ ID NO: 57693 - RNA, 19 nt, Artificial Sequence
  Description of Artificial Sequence: Synthetic oligonucleotide
  Antisense strand to SEQ ID NO: 57612
cuuaucaaaggagaauaca

SEQ ID NO: 57694 - RNA, 19 nt, Artificial Sequence
  Description of Artificial Sequence: Synthetic oligonucleotide
  Sense strand starting at position 279 of SEQ ID NO: 700
gcacuuuaucaugagugag

SEQ ID NO: 57695 - RNA, 19 nt, Artificial Sequence
  Description of Artificial Sequence: Synthetic oligonucleotide
  Antisense strand to SEQ ID NO: 57614
cucacucaugauaaagugc

SEQ ID NO: 57696 - RNA, 19 nt, Artificial Sequence
  Description of Artificial Sequence: Synthetic oligonucleotide
  Sense strand starting at position 237 of SEQ ID NO: 700
agaugucuugaucaucuuu

SEQ ID NO: 57697 - RNA, 19 nt, Artificial Sequence
  Description of Artificial Sequence: Synthetic oligonucleotide
  Antisense strand to SEQ ID NO: 57616
aaagaugaucaagacaucu

SEQ ID NO: 57698 - RNA, 19 nt, Artificial Sequence
  Description of Artificial Sequence: Synthetic oligonucleotide
  Sense strand starting at position 234 of SEQ ID NO: 700
ccaagaugucuugaucauc

SEQ ID NO: 57699 - RNA, 19 nt, Artificial Sequence
  Description of Artificial Sequence: Synthetic oligonucleotide
  Antisense strand to SEQ ID NO: 57618
gaugaucaagacaucuugg

SEQ ID NO: 57700 - RNA, 19 nt, Artificial Sequence
  Description of Artificial Sequence: Synthetic oligonucleotide
  Sense strand starting at position 223 of SEQ ID NO: 700
cgcugugaacuccaagaug

SEQ ID NO: 57701 - RNA, 19 nt, Artificial Sequence
  Description of Artificial Sequence: Synthetic oligonucleotide
  Antisense strand to SEQ ID NO: 57620
caucuuggaguucacagcg

SEQ ID NO: 57702 - RNA, 19 nt, Artificial Sequence
  Description of Artificial Sequence: Synthetic oligonucleotide
  Sense strand starting at position 182 of SEQ ID NO: 700
agagcauaccaaugucaca

SEQ ID NO: 57703 - RNA, 19 nt, Artificial Sequence
  Description of Artificial Sequence: Synthetic oligonucleotide
  Antisense strand to SEQ ID NO: 57622
ugugacauugguaugcucu

SEQ ID NO: 57704 - RNA, 19 nt, Artificial Sequence
  Description of Artificial Sequence: Synthetic oligonucleotide
  Sense strand starting at position 55 of SEQ ID NO: 700
gauagaagcagugaugugu

SEQ ID NO: 57705 - RNA, 19 nt, Artificial Sequence
  Description of Artificial Sequence: Synthetic oligonucleotide
  Antisense strand to SEQ ID NO: 57624
acacaucacugcuucuauc

SEQ ID NO: 57706 - RNA, 19 nt, Artificial Sequence
  Description of Artificial Sequence: Synthetic oligonucleotide
  Sense strand starting at position 64 of SEQ ID NO: 702
aaaggaggauuccauuaga

SEQ ID NO: 57707 - RNA, 19 nt, Artificial Sequence
  Description of Artificial Sequence: Synthetic oligonucleotide
  Antisense strand to SEQ ID NO: 57626
ucuaauggaauccuccuuu

SEQ ID NO: 57708 - RNA, 19 nt, Artificial Sequence
  Description of Artificial Sequence: Synthetic oligonucleotide
  Sense strand starting at position 109 of SEQ ID NO: 702
cucagacauuaucugugau

SEQ ID NO: 57709 - RNA, 19 nt, Artificial Sequence
  Description of Artificial Sequence: Synthetic oligonucleotide
  Antisense strand to SEQ ID NO: 57628
aucacagauaaugucugag

SEQ ID NO: 57710 - RNA, 19 nt, Artificial Sequence
  Description of Artificial Sequence: Synthetic oligonucleotide
  Sense strand starting at position 111 of SEQ ID NO: 702
cagacauuaucugugauga

SEQ ID NO: 57711 - RNA, 19 nt, Artificial Sequence
  Description of Artificial Sequence: Synthetic oligonucleotide
  Antisense strand to SEQ ID NO: 57630
ucaucacagauaaugucug

SEQ ID NO: 57712 - RNA, 19 nt, Artificial Sequence
  Description of Artificial Sequence: Synthetic oligonucleotide
  Sense strand starting at position 112 of SEQ ID NO: 702
agacauuaucugugaugac

SEQ ID NO: 57713 - RNA, 19 nt, Artificial Sequence
  Description of Artificial Sequence: Synthetic oligonucleotide
  Antisense strand to SEQ ID NO: 57632
gucaucacagauaaugucu

SEQ ID NO: 57714 - RNA, 19 nt, Artificial Sequence
  Description of Artificial Sequence: Synthetic oligonucleotide
  Sense strand starting at position 121 of SEQ ID NO: 702
cugugaugaccuugagcuu

SEQ ID NO: 57715 - RNA, 19 nt, Artificial Sequence
  Description of Artificial Sequence: Synthetic oligonucleotide
  Antisense strand to SEQ ID NO: 57634
aagcucaaggucaucacag

SEQ ID NO: 57716 - RNA, 19 nt, Artificial Sequence
  Description of Artificial Sequence: Synthetic oligonucleotide
  Sense strand starting at position 122 of SEQ ID NO: 702
ugugaugaccuugagcuuu

SEQ ID NO: 57717 - RNA, 19 nt, Artificial Sequence
  Description of Artificial Sequence: Synthetic oligonucleotide
  Antisense strand to SEQ ID NO: 57636
aaagcucaaggucaucaca

SEQ ID NO: 57718 - RNA, 19 nt, Artificial Sequence
  Description of Artificial Sequence: Synthetic oligonucleotide
  Sense strand starting at position 144 of SEQ ID NO: 702
ucugguacugcacacauaa

SEQ ID NO: 57719 - RNA, 19 nt, Artificial Sequence
  Description of Artificial Sequence: Synthetic oligonucleotide
  Antisense strand to SEQ ID NO: 57638
uuaugugugcaguaccaga

SEQ ID NO: 57720 - RNA, 19 nt, Artificial Sequence
  Description of Artificial Sequence: Synthetic oligonucleotide
  Sense strand starting at position 173 of SEQ ID NO: 702
augagaauuguguacgugu

SEQ ID NO: 57721 - RNA, 19 nt, Artificial Sequence
  Description of Artificial Sequence: Synthetic oligonucleotide
  Antisense strand to SEQ ID NO: 57640
acacguacacaauucucau

SEQ ID NO: 57722 - RNA, 19 nt, Artificial Sequence
  Description of Artificial Sequence: Synthetic oligonucleotide
  Sense strand starting at position 174 of SEQ ID NO: 702
ugagaauuguguacgugug

SEQ ID NO: 57723 - RNA, 19 nt, Artificial Sequence
  Description of Artificial Sequence: Synthetic oligonucleotide
  Antisense strand to SEQ ID NO: 57642
cacacguacacaauucuca

SEQ ID NO: 57724 - RNA, 19 nt, Artificial Sequence
  Description of Artificial Sequence: Synthetic oligonucleotide
  Sense strand starting at position 209 of SEQ ID NO: 702
cccaaucuggcaugagaag

SEQ ID NO: 57725 - RNA, 19 nt, Artificial Sequence
  Description of Artificial Sequence: Synthetic oligonucleotide
  Antisense strand to SEQ ID NO: 57644
cuucucaugccagauuggg

SEQ ID NO: 57726 - RNA, 19 nt, Artificial Sequence
  Description of Artificial Sequence: Synthetic oligonucleotide
  Sense strand starting at position 218 of SEQ ID NO: 702
gcaugagaagcaugugcaa

SEQ ID NO: 57727 - RNA, 19 nt, Artificial Sequence
  Description of Artificial Sequence: Synthetic oligonucleotide
  Antisense strand to SEQ ID NO: 57646
uugcacaugcuucucaugc

SEQ ID NO: 57728 - RNA, 19 nt, Artificial Sequence
  Description of Artificial Sequence: Synthetic oligonucleotide
  Sense strand starting at position 331 of SEQ ID NO: 702
aucugagugucaccacaga

SEQ ID NO: 57729 - RNA, 19 nt, Artificial Sequence
  Description of Artificial Sequence: Synthetic oligonucleotide
  Antisense strand to SEQ ID NO: 57648
ucuguggugacacucagau

SEQ ID NO: 57730 - RNA, 19 nt, Artificial Sequence
  Description of Artificial Sequence: Synthetic oligonucleotide
  Sense strand starting at position 375 of SEQ ID NO: 702
gagagaaaugaucguugau

SEQ ID NO: 57731 - RNA, 19 nt, Artificial Sequence
  Description of Artificial Sequence: Synthetic oligonucleotide
  Antisense strand to SEQ ID NO: 57650
aucaacgaucauuucucuc

SEQ ID NO: 57732 - RNA, 19 nt, Artificial Sequence
  Description of Artificial Sequence: Synthetic oligonucleotide
  Sense strand starting at position 377 of SEQ ID NO: 702
gagaaaugaucguugaugu

SEQ ID NO: 57733 - RNA, 19 nt, Artificial Sequence
  Description of Artificial Sequence: Synthetic oligonucleotide
  Antisense strand to SEQ ID NO: 57652
acaucaacgaucauuucuc

SEQ ID NO: 57734 - RNA, 19 nt, Artificial Sequence
  Description of Artificial Sequence: Synthetic oligonucleotide
  Sense strand starting at position 378 of SEQ ID NO: 702
agaaaugaucguugaugug

SEQ ID NO: 57735 - RNA, 19 nt, Artificial Sequence
  Description of Artificial Sequence: Synthetic oligonucleotide
  Antisense strand to SEQ ID NO: 57654
cacaucaacgaucauuucu

SEQ ID NO: 57736 - RNA, 19 nt, Artificial Sequence
  Description of Artificial Sequence: Synthetic oligonucleotide
  Sense strand starting at position 436 of SEQ ID NO: 702
caggguuacuuggucagga

SEQ ID NO: 57737 - RNA, 19 nt, Artificial Sequence
  Description of Artificial Sequence: Synthetic oligonucleotide
  Antisense strand to SEQ ID NO: 57656
uccugaccaaguaacccug

SEQ ID NO: 57738 - RNA, 19 nt, Artificial Sequence
  Description of Artificial Sequence: Synthetic oligonucleotide
  Sense strand starting at position 437 of SEQ ID NO: 702
aggguuacuuggucaggaa

SEQ ID NO: 57739 - RNA, 19 nt, Artificial Sequence
  Description of Artificial Sequence: Synthetic oligonucleotide
  Antisense strand to SEQ ID NO: 57658
uuccugaccaaguaacccu

SEQ ID NO: 57740 - RNA, 19 nt, Artificial Sequence
  Description of Artificial Sequence: Synthetic oligonucleotide
  Sense strand starting at position 441 of SEQ ID NO: 702
uuacuuggucaggaagcau

SEQ ID NO: 57741 - RNA, 19 nt, Artificial Sequence
  Description of Artificial Sequence: Synthetic oligonucleotide
  Antisense strand to SEQ ID NO: 57660
augcuuccugaccaaguaa

SEQ ID NO: 57742 - RNA, 19 nt, Artificial Sequence
  Description of Artificial Sequence: Synthetic oligonucleotide
  Sense strand starting at position 450 of SEQ ID NO: 702
caggaagcaucagugagaa

SEQ ID NO: 57743 - RNA, 19 nt, Artificial Sequence
  Description of Artificial Sequence: Synthetic oligonucleotide
  Antisense strand to SEQ ID NO: 57662
uucucacugaugcuuccug

SEQ ID NO: 57744 - RNA, 19 nt, Artificial Sequence
  Description of Artificial Sequence: Synthetic oligonucleotide
  Sense strand starting at position 656 of SEQ ID NO: 702
ggcucuguaaaguaagaag

SEQ ID NO: 57745 - RNA, 19 nt, Artificial Sequence
  Description of Artificial Sequence: Synthetic oligonucleotide
  Antisense strand to SEQ ID NO: 57664
cuucuuacuuuacagagcc

SEQ ID NO: 57746 - RNA, 19 nt, Artificial Sequence
  Description of Artificial Sequence: Synthetic oligonucleotide
  Sense strand starting at position 659 of SEQ ID NO: 702
ucuguaaaguaagaagaaa

SEQ ID NO: 57747 - RNA, 19 nt, Artificial Sequence
  Description of Artificial Sequence: Synthetic oligonucleotide
  Antisense strand to SEQ ID NO: 57666
uuucuucuuacuuuacaga

SEQ ID NO: 57748 - RNA, 19 nt, Artificial Sequence
  Description of Artificial Sequence: Synthetic oligonucleotide
  Sense strand starting at position 691 of SEQ ID NO: 702
aagugagacugagaagagu

SEQ ID NO: 57749 - RNA, 19 nt, Artificial Sequence
  Description of Artificial Sequence: Synthetic oligonucleotide
  Antisense strand to SEQ ID NO: 57668
acucuucucagucucacuu

SEQ ID NO: 57750 - RNA, 19 nt, Artificial Sequence
  Description of Artificial Sequence: Synthetic oligonucleotide
  Sense strand starting at position 809 of SEQ ID NO: 702
gcuguaugugcauaacauu

SEQ ID NO: 57751 - RNA, 19 nt, Artificial Sequence
  Description of Artificial Sequence: Synthetic oligonucleotide
  Antisense strand to SEQ ID NO: 57670
aauguuaugcacauacagc

SEQ ID NO: 57752 - RNA, 19 nt, Artificial Sequence
  Description of Artificial Sequence: Synthetic oligonucleotide
  Sense strand starting at position 830 of SEQ ID NO: 702
ccugaauuccgguggguga

SEQ ID NO: 57753 - RNA, 19 nt, Artificial Sequence
  Description of Artificial Sequence: Synthetic oligonucleotide
  Antisense strand to SEQ ID NO: 57672
ucacccaccggaauucagg

SEQ ID NO: 57754 - RNA, 19 nt, Artificial Sequence
  Description of Artificial Sequence: Synthetic oligonucleotide
  Sense strand starting at position 831 of SEQ ID NO: 702
cugaauuccggugggugaa

SEQ ID NO: 57755 - RNA, 19 nt, Artificial Sequence
  Description of Artificial Sequence: Synthetic oligonucleotide
  Antisense strand to SEQ ID NO: 57674
uucacccaccggaauucag

SEQ ID NO: 57756 - RNA, 19 nt, Artificial Sequence
  Description of Artificial Sequence: Synthetic oligonucleotide
  Sense strand starting at position 837 of SEQ ID NO: 702
uccggugggugaaggaaua

SEQ ID NO: 57757 - RNA, 19 nt, Artificial Sequence
  Description of Artificial Sequence: Synthetic oligonucleotide
  Antisense strand to SEQ ID NO: 57676
uauuccuucacccaccgga

SEQ ID NO: 57758 - RNA, 19 nt, Artificial Sequence
  Description of Artificial Sequence: Synthetic oligonucleotide
  Sense strand starting at position 894 of SEQ ID NO: 702
auaugaagccagugagaau

SEQ ID NO: 57759 - RNA, 19 nt, Artificial Sequence
  Description of Artificial Sequence: Synthetic oligonucleotide
  Antisense strand to SEQ ID NO: 57678
auucucacuggcuucauau

SEQ ID NO: 57760 - RNA, 19 nt, Artificial Sequence
  Description of Artificial Sequence: Synthetic oligonucleotide
  Sense strand starting at position 927 of SEQ ID NO: 702
cuaacauagcuuuagcgaa

SEQ ID NO: 57761 - RNA, 19 nt, Artificial Sequence
  Description of Artificial Sequence: Synthetic oligonucleotide
  Antisense strand to SEQ ID NO: 57680
uucgcuaaagcuauguuag

SEQ ID NO: 57762 - RNA, 19 nt, Artificial Sequence
  Description of Artificial Sequence: Synthetic oligonucleotide
  Sense strand starting at position 1541 of SEQ ID NO: 702
acuuguucuugucucauca

SEQ ID NO: 57763 - RNA, 19 nt, Artificial Sequence
  Description of Artificial Sequence: Synthetic oligonucleotide
  Antisense strand to SEQ ID NO: 57682
ugaugagacaagaacaagu

SEQ ID NO: 57764 - RNA, 19 nt, Artificial Sequence
  Description of Artificial Sequence: Synthetic oligonucleotide
  Sense strand starting at position 1545 of SEQ ID NO: 702
guucuugucucaucacaaa

SEQ ID NO: 57765 - RNA, 19 nt, Artificial Sequence
  Description of Artificial Sequence: Synthetic oligonucleotide
  Antisense strand to SEQ ID NO: 57684
uuugugaugagacaagaac

SEQ ID NO: 57766 - RNA, 19 nt, Artificial Sequence
  Description of Artificial Sequence: Synthetic oligonucleotide
  Sense strand starting at position 1770 of SEQ ID NO: 702
guuugaggcgacggagaua

SEQ ID NO: 57767 - RNA, 19 nt, Artificial Sequence
  Description of Artificial Sequence: Synthetic oligonucleotide
  Antisense strand to SEQ ID NO: 57686
uaucuccgucgccucaaac

SEQ ID NO: 57768 - RNA, 19 nt, Artificial Sequence
  Description of Artificial Sequence: Synthetic oligonucleotide
  Sense strand starting at position 2238 of SEQ ID NO: 702
acccucguguggucauaaa

SEQ ID NO: 57769 - RNA, 19 nt, Artificial Sequence
  Description of Artificial Sequence: Synthetic oligonucleotide
  Antisense strand to SEQ ID NO: 57688
uuuaugaccacacgagggu

SEQ ID NO: 57770 - RNA, 19 nt, Artificial Sequence
  Description of Artificial Sequence: Synthetic oligonucleotide
  Sense strand starting at position 2671 of SEQ ID NO: 702
cacgguaagcacgguaauu

SEQ ID NO: 57771 - RNA, 19 nt, Artificial Sequence
  Description of Artificial Sequence: Synthetic oligonucleotide
  Antisense strand to SEQ ID NO: 57690
aauuaccgugcuuaccgug

SEQ ID NO: 57772 - RNA, 19 nt, Artificial Sequence
  Description of Artificial Sequence: Synthetic oligonucleotide
  Sense strand starting at position 3094 of SEQ ID NO: 702
gcaauuagcgacguguugu

SEQ ID NO: 57773 - RNA, 19 nt, Artificial Sequence
  Description of Artificial Sequence: Synthetic oligonucleotide
  Antisense strand to SEQ ID NO: 57692
acaacacgucgcuaauugc

SEQ ID NO: 57774 - RNA, 19 nt, Artificial Sequence
  Description of Artificial Sequence: Synthetic oligonucleotide
  Sense strand starting at position 3097 of SEQ ID NO: 702
auuagcgacguguuguuaa

SEQ ID NO: 57775 - RNA, 19 nt, Artificial Sequence
  Description of Artificial Sequence: Synthetic oligonucleotide
  Antisense strand to SEQ ID NO: 57694
uuaacaacacgucgcuaau

SEQ ID NO: 57776 - RNA, 19 nt, Artificial Sequence
  Description of Artificial Sequence: Synthetic oligonucleotide
  Sense strand starting at position 3156 of SEQ ID NO: 702
gaggucucugagugggaca

SEQ ID NO: 57777 - RNA, 19 nt, Artificial Sequence
  Description of Artificial Sequence: Synthetic oligonucleotide
  Antisense strand to SEQ ID NO: 57696
ugucccacucagagaccuc

SEQ ID NO: 57778 - RNA, 19 nt, Artificial Sequence
  Description of Artificial Sequence: Synthetic oligonucleotide
  Sense strand starting at position 3157 of SEQ ID NO: 702
aggucucugagugggacaa

SEQ ID NO: 57779 - RNA, 19 nt, Artificial Sequence
  Description of Artificial Sequence: Synthetic oligonucleotide
  Antisense strand to SEQ ID NO: 57698
uugucccacucagagaccu

SEQ ID NO: 57780 - RNA, 19 nt, Artificial Sequence
  Description of Artificial Sequence: Synthetic oligonucleotide
  Sense strand starting at position 3742 of SEQ ID NO: 702
uugaauggccuccacuuaa

SEQ ID NO: 57781 - RNA, 19 nt, Artificial Sequence
  Description of Artificial Sequence: Synthetic oligonucleotide
  Antisense strand to SEQ ID NO: 57700
uuaaguggaggccauucaa

SEQ ID NO: 57782 - RNA, 19 nt, Artificial Sequence
  Description of Artificial Sequence: Synthetic oligonucleotide
  Sense strand starting at position 3938 of SEQ ID NO: 702
cuaccagucugagcaguau

SEQ ID NO: 57783 - RNA, 19 nt, Artificial Sequence
  Description of Artificial Sequence: Synthetic oligonucleotide
  Antisense strand to SEQ ID NO: 57702
auacugcucagacugguag

SEQ ID NO: 57784 - RNA, 19 nt, Artificial Sequence
  Description of Artificial Sequence: Synthetic oligonucleotide
  Sense strand starting at position 3975 of SEQ ID NO: 702
ugcagcugugggcagaaau

SEQ ID NO: 57785 - RNA, 19 nt, Artificial Sequence
  Description of Artificial Sequence: Synthetic oligonucleotide
  Antisense strand to SEQ ID NO: 57704
auuucugcccacagcugca

SEQ ID NO: 57786 - RNA, 19 nt, Artificial Sequence
  Description of Artificial Sequence: Synthetic oligonucleotide
  Sense strand starting at position 55 of SEQ ID NO: 701
uuauuuauagugugaugug

SEQ ID NO: 57787 - RNA, 19 nt, Artificial Sequence
  Description of Artificial Sequence: Synthetic oligonucleotide
  Antisense strand to SEQ ID NO: 57706
cacaucacacuauaaauaa

SEQ ID NO: 57788 - RNA, 19 nt, Artificial Sequence
  Description of Artificial Sequence: Synthetic oligonucleotide
  Sense strand starting at position 197 of SEQ ID NO: 701
gguacauggcugggauaga

SEQ ID NO: 57789 - RNA, 19 nt, Artificial Sequence
  Description of Artificial Sequence: Synthetic oligonucleotide
  Antisense strand to SEQ ID NO: 57708
ucuaucccagccauguacc

SEQ ID NO: 57790 - RNA, 19 nt, Artificial Sequence
  Description of Artificial Sequence: Synthetic oligonucleotide
  Sense strand starting at position 255 of SEQ ID NO: 701
gcgaguuaggaugauaaag

SEQ ID NO: 57791 - RNA, 19 nt, Artificial Sequence
  Description of Artificial Sequence: Synthetic oligonucleotide
  Antisense strand to SEQ ID NO: 57710
cuuuaucauccuaacucgc

SEQ ID NO: 57792 - RNA, 19 nt, Artificial Sequence
  Description of Artificial Sequence: Synthetic oligonucleotide
  Sense strand starting at position 320 of SEQ ID NO: 701
gugaaauauuuggaggcaa

SEQ ID NO: 57793 - RNA, 19 nt, Artificial Sequence
  Description of Artificial Sequence: Synthetic oligonucleotide
  Antisense strand to SEQ ID NO: 57712
uugccuccaaauauuucac

SEQ ID NO: 57794 - RNA, 19 nt, Artificial Sequence
  Description of Artificial Sequence: Synthetic oligonucleotide
  Sense strand starting at position 350 of SEQ ID NO: 701
cuugguaaauuguuagaaa

SEQ ID NO: 57795 - RNA, 19 nt, Artificial Sequence
  Description of Artificial Sequence: Synthetic oligonucleotide
  Antisense strand to SEQ ID NO: 57714
uuucuaacaauuuaccaag

SEQ ID NO: 57796 - RNA, 19 nt, Artificial Sequence
  Description of Artificial Sequence: Synthetic oligonucleotide
  Sense strand starting at position 358 of SEQ ID NO: 701
auuguuagaaaguggcaaa

SEQ ID NO: 57797 - RNA, 19 nt, Artificial Sequence
  Description of Artificial Sequence: Synthetic oligonucleotide
  Antisense strand to SEQ ID NO: 57716
uuugccacuuucuaacaau

SEQ ID NO: 57798 - RNA, 19 nt, Artificial Sequence
  Description of Artificial Sequence: Synthetic oligonucleotide
  Sense strand starting at position 557 of SEQ ID NO: 701
accaccuuccaaugggauu

SEQ ID NO: 57799 - RNA, 19 nt, Artificial Sequence
  Description of Artificial Sequence: Synthetic oligonucleotide
  Antisense strand to SEQ ID NO: 57718
aaucccauuggaagguggu

SEQ ID NO: 57800 - RNA, 19 nt, Artificial Sequence
  Description of Artificial Sequence: Synthetic oligonucleotide
  Sense strand starting at position 568 of SEQ ID NO: 701
augggauuaccaugucaaa

SEQ ID NO: 57801 - RNA, 19 nt, Artificial Sequence
  Description of Artificial Sequence: Synthetic oligonucleotide
  Antisense strand to SEQ ID NO: 57720
uuugacaugguaaucccau

SEQ ID NO: 57802 - RNA, 19 nt, Artificial Sequence
  Description of Artificial Sequence: Synthetic oligonucleotide
  Sense strand starting at position 920 of SEQ ID NO: 701
ugacuaagaguuuguuaua

SEQ ID NO: 57803 - RNA, 19 nt, Artificial Sequence
  Description of Artificial Sequence: Synthetic oligonucleotide
  Antisense strand to SEQ ID NO: 57722
uauaacaaacucuuaguca

SEQ ID NO: 57804 - RNA, 19 nt, Artificial Sequence
  Description of Artificial Sequence: Synthetic oligonucleotide
  Sense strand starting at position 921 of SEQ ID NO: 701
gacuaagaguuuguuauag

SEQ ID NO: 57805 - RNA, 19 nt, Artificial Sequence
  Description of Artificial Sequence: Synthetic oligonucleotide
  Antisense strand to SEQ ID NO: 57724
cuauaacaaacucuuaguc

SEQ ID NO: 57806 - RNA, 19 nt, Artificial Sequence
  Description of Artificial Sequence: Synthetic oligonucleotide
  Sense strand starting at position 933 of SEQ ID NO: 701
guuauaggagcucaaucau

SEQ ID NO: 57807 - RNA, 19 nt, Artificial Sequence
  Description of Artificial Sequence: Synthetic oligonucleotide
  Antisense strand to SEQ ID NO: 57726
augauugagcuccuauaac

SEQ ID NO: 57808 - RNA, 19 nt, Artificial Sequence
  Description of Artificial Sequence: Synthetic oligonucleotide
  Sense strand starting at position 1028 of SEQ ID NO: 701
gguucuuguccucauagag

SEQ ID NO: 57809 - RNA, 19 nt, Artificial Sequence
  Description of Artificial Sequence: Synthetic oligonucleotide
  Antisense strand to SEQ ID NO: 57728
cucuaugaggacaagaacc

SEQ ID NO: 57810 - RNA, 19 nt, Artificial Sequence
  Description of Artificial Sequence: Synthetic oligonucleotide
  Sense strand starting at position 1151 of SEQ ID NO: 701
ggaugacagagcugucuua

SEQ ID NO: 57811 - RNA, 19 nt, Artificial Sequence
  Description of Artificial Sequence: Synthetic oligonucleotide
  Antisense strand to SEQ ID NO: 57730
uaagacagcucugucaucc

SEQ ID NO: 57812 - RNA, 19 nt, Artificial Sequence
  Description of Artificial Sequence: Synthetic oligonucleotide
  Sense strand starting at position 1424 of SEQ ID NO: 701
ggagaucugaggcggagau

SEQ ID NO: 57813 - RNA, 19 nt, Artificial Sequence
  Description of Artificial Sequence: Synthetic oligonucleotide
  Antisense strand to SEQ ID NO: 57732
aucuccgccucagaucucc

SEQ ID NO: 57814 - RNA, 19 nt, Artificial Sequence
  Description of Artificial Sequence: Synthetic oligonucleotide
  Sense strand starting at position 1425 of SEQ ID NO: 701
gagaucugaggcggagaua

SEQ ID NO: 57815 - RNA, 19 nt, Artificial Sequence
  Description of Artificial Sequence: Synthetic oligonucleotide
  Antisense strand to SEQ ID NO: 57734
uaucuccgccucagaucuc

SEQ ID NO: 57816 - RNA, 19 nt, Artificial Sequence
  Description of Artificial Sequence: Synthetic oligonucleotide
  Sense strand starting at position 1515 of SEQ ID NO: 701
agggacuugcuaggagaua

SEQ ID NO: 57817 - RNA, 19 nt, Artificial Sequence
  Description of Artificial Sequence: Synthetic oligonucleotide
  Antisense strand to SEQ ID NO: 57736
uaucuccuagcaagucccu

SEQ ID NO: 57818 - RNA, 19 nt, Artificial Sequence
  Description of Artificial Sequence: Synthetic oligonucleotide
  Sense strand starting at position 1538 of SEQ ID NO: 701
ggguuuaucucaccggaga

SEQ ID NO: 57819 - RNA, 19 nt, Artificial Sequence
  Description of Artificial Sequence: Synthetic oligonucleotide
  Antisense strand to SEQ ID NO: 57738
ucuccggugagauaaaccc

SEQ ID NO: 57820 - RNA, 19 nt, Artificial Sequence
  Description of Artificial Sequence: Synthetic oligonucleotide
  Sense strand starting at position 1549 of SEQ ID NO: 701
accggagauaaaugugguu

SEQ ID NO: 57821 - RNA, 19 nt, Artificial Sequence
  Description of Artificial Sequence: Synthetic oligonucleotide
  Antisense strand to SEQ ID NO: 57740
aaccacauuuaucuccggu

SEQ ID NO: 57822 - RNA, 19 nt, Artificial Sequence
  Description of Artificial Sequence: Synthetic oligonucleotide
  Sense strand starting at position 1554 of SEQ ID NO: 701
agauaaaugugguugcaca

SEQ ID NO: 57823 - RNA, 19 nt, Artificial Sequence
  Description of Artificial Sequence: Synthetic oligonucleotide
  Antisense strand to SEQ ID NO: 57742
ugugcaaccacauuuaucu

SEQ ID NO: 57824 - RNA, 19 nt, Artificial Sequence
  Description of Artificial Sequence: Synthetic oligonucleotide
  Sense strand starting at position 2567 of SEQ ID NO: 701
cgcuacgcucaguuaacuu

SEQ ID NO: 57825 - RNA, 19 nt, Artificial Sequence
  Description of Artificial Sequence: Synthetic oligonucleotide
  Antisense strand to SEQ ID NO: 57744
aaguuaacugagcguagcg

SEQ ID NO: 57826 - RNA, 19 nt, Artificial Sequence
  Description of Artificial Sequence: Synthetic oligonucleotide
  Sense strand starting at position 2653 of SEQ ID NO: 701
ugguucuaaguuugagaag

SEQ ID NO: 57827 - RNA, 19 nt, Artificial Sequence
  Description of Artificial Sequence: Synthetic oligonucleotide
  Antisense strand to SEQ ID NO: 57746
cuucucaaacuuagaacca

SEQ ID NO: 57828 - RNA, 19 nt, Artificial Sequence
  Description of Artificial Sequence: Synthetic oligonucleotide
  Sense strand starting at position 2668 of SEQ ID NO: 701
gaagauaaacgguaaacgu

SEQ ID NO: 57829 - RNA, 19 nt, Artificial Sequence
  Description of Artificial Sequence: Synthetic oligonucleotide
  Antisense strand to SEQ ID NO: 57748
acguuuaccguuuaucuuc

SEQ ID NO: 57830 - RNA, 19 nt, Artificial Sequence
  Description of Artificial Sequence: Synthetic oligonucleotide
  Sense strand starting at position 2943 of SEQ ID NO: 701
ggugaguuagcugagagga

SEQ ID NO: 57831 - RNA, 19 nt, Artificial Sequence
  Description of Artificial Sequence: Synthetic oligonucleotide
  Antisense strand to SEQ ID NO: 57750
uccucucagcuaacucacc

SEQ ID NO: 57832 - RNA, 19 nt, Artificial Sequence
  Description of Artificial Sequence: Synthetic oligonucleotide
  Sense strand starting at position 3031 of SEQ ID NO: 701
aagugaauuugaugaauga

SEQ ID NO: 57833 - RNA, 19 nt, Artificial Sequence
  Description of Artificial Sequence: Synthetic oligonucleotide
  Antisense strand to SEQ ID NO: 57752
ucauucaucaaauucacuu

SEQ ID NO: 57834 - RNA, 19 nt, Artificial Sequence
  Description of Artificial Sequence: Synthetic oligonucleotide
  Sense strand starting at position 3038 of SEQ ID NO: 701
uuugaugaaugauugaguu

SEQ ID NO: 57835 - RNA, 19 nt, Artificial Sequence
  Description of Artificial Sequence: Synthetic oligonucleotide
  Antisense strand to SEQ ID NO: 57754
aacucaaucauucaucaaa

SEQ ID NO: 57836 - RNA, 19 nt, Artificial Sequence
  Description of Artificial Sequence: Synthetic oligonucleotide
  Sense strand starting at position 3042 of SEQ ID NO: 701
augaaugauugaguuaagu

SEQ ID NO: 57837 - RNA, 19 nt, Artificial Sequence
  Description of Artificial Sequence: Synthetic oligonucleotide
  Antisense strand to SEQ ID NO: 57756
acuuaacucaaucauucau

SEQ ID NO: 57838 - RNA, 19 nt, Artificial Sequence
  Description of Artificial Sequence: Synthetic oligonucleotide
  Sense strand starting at position 3061 of SEQ ID NO: 701
gguggugguggcgaaauuu

SEQ ID NO: 57839 - RNA, 19 nt, Artificial Sequence
  Description of Artificial Sequence: Synthetic oligonucleotide
  Antisense strand to SEQ ID NO: 57758
aaauuucgccaccaccacc

SEQ ID NO: 57840 - RNA, 19 nt, Artificial Sequence
  Description of Artificial Sequence: Synthetic oligonucleotide
  Sense strand starting at position 3090 of SEQ ID NO: 701
augcguaccuuauuuaaau

SEQ ID NO: 57841 - RNA, 19 nt, Artificial Sequence
  Description of Artificial Sequence: Synthetic oligonucleotide
  Antisense strand to SEQ ID NO: 57760
auuuaaauaagguacgcau

SEQ ID NO: 57842 - RNA, 19 nt, Artificial Sequence
  Description of Artificial Sequence: Synthetic oligonucleotide
  Sense strand starting at position 3091 of SEQ ID NO: 701
ugcguaccuuauuuaaaua

SEQ ID NO: 57843 - RNA, 19 nt, Artificial Sequence
  Description of Artificial Sequence: Synthetic oligonucleotide
  Antisense strand to SEQ ID NO: 57762
uauuuaaauaagguacgca

SEQ ID NO: 57844 - RNA, 19 nt, Artificial Sequence
  Description of Artificial Sequence: Synthetic oligonucleotide
  Sense strand starting at position 3565 of SEQ ID NO: 701
cuuaaagcucuguaaaugu

SEQ ID NO: 57845 - RNA, 19 nt, Artificial Sequence
  Description of Artificial Sequence: Synthetic oligonucleotide
  Antisense strand to SEQ ID NO: 57764
acauuuacagagcuuuaag

SEQ ID NO: 57846 - RNA, 19 nt, Artificial Sequence
  Description of Artificial Sequence: Synthetic oligonucleotide
  Sense strand starting at position 3582 of SEQ ID NO: 701
guaucauauugaucuccca

SEQ ID NO: 57847 - RNA, 19 nt, Artificial Sequence
  Description of Artificial Sequence: Synthetic oligonucleotide
  Antisense strand to SEQ ID NO: 57766
ugggagaucaauaugauac

SEQ ID NO: 57848 - RNA, 19 nt, Artificial Sequence
  Description of Artificial Sequence: Synthetic oligonucleotide
  Sense strand starting at position 3614 of SEQ ID NO: 701
cuuagaguguuucuaagau

SEQ ID NO: 57849 - RNA, 19 nt, Artificial Sequence
  Description of Artificial Sequence: Synthetic oligonucleotide
  Antisense strand to SEQ ID NO: 57768
aucuuagaaacacucuaag

SEQ ID NO: 57850 - RNA, 19 nt, Artificial Sequence
  Description of Artificial Sequence: Synthetic oligonucleotide
  Sense strand starting at position 3640 of SEQ ID NO: 701
cccaaauuagcaggaaauu

SEQ ID NO: 57851 - RNA, 19 nt, Artificial Sequence
  Description of Artificial Sequence: Synthetic oligonucleotide
  Antisense strand to SEQ ID NO: 57770
aauuuccugcuaauuuggg

SEQ ID NO: 57852 - RNA, 19 nt, Artificial Sequence
  Description of Artificial Sequence: Synthetic oligonucleotide
  Sense strand starting at position 3814 of SEQ ID NO: 701
caggcauugguauaucuga

SEQ ID NO: 57853 - RNA, 19 nt, Artificial Sequence
  Description of Artificial Sequence: Synthetic oligonucleotide
  Antisense strand to SEQ ID NO: 57772
ucagauauaccaaugccug

SEQ ID NO: 57854 - RNA, 19 nt, Artificial Sequence
  Description of Artificial Sequence: Synthetic oligonucleotide
  Sense strand starting at position 3912 of SEQ ID NO: 701
uaccaaauccuaggugaug

SEQ ID NO: 57855 - RNA, 19 nt, Artificial Sequence
  Description of Artificial Sequence: Synthetic oligonucleotide
  Antisense strand to SEQ ID NO: 57774
caucaccuaggauuuggua

SEQ ID NO: 57856 - RNA, 19 nt, Artificial Sequence
  Description of Artificial Sequence: Synthetic oligonucleotide
  Sense strand starting at position 3913 of SEQ ID NO: 701
accaaauccuaggugaugu

SEQ ID NO: 57857 - RNA, 19 nt, Artificial Sequence
  Description of Artificial Sequence: Synthetic oligonucleotide
  Antisense strand to SEQ ID NO: 57776
acaucaccuaggauuuggu

SEQ ID NO: 57858 - RNA, 19 nt, Artificial Sequence
  Description of Artificial Sequence: Synthetic oligonucleotide
  Sense strand starting at position 3924 of SEQ ID NO: 701
ggugauguugcacauugga

SEQ ID NO: 57859 - RNA, 19 nt, Artificial Sequence
  Description of Artificial Sequence: Synthetic oligonucleotide
  Antisense strand to SEQ ID NO: 57778
uccaaugugcaacaucacc

SEQ ID NO: 57860 - RNA, 19 nt, Artificial Sequence
  Description of Artificial Sequence: Synthetic oligonucleotide
  Sense strand starting at position 3927 of SEQ ID NO: 701
gauguugcacauuggaaau

SEQ ID NO: 57861 - RNA, 19 nt, Artificial Sequence
  Description of Artificial Sequence: Synthetic oligonucleotide
  Antisense strand to SEQ ID NO: 57780
auuuccaaugugcaacauc

SEQ ID NO: 57862 - RNA, 19 nt, Artificial Sequence
  Description of Artificial Sequence: Synthetic oligonucleotide
  Sense strand starting at position 3957 of SEQ ID NO: 701
ccaagaaccugaguuaguc

SEQ ID NO: 57863 - RNA, 19 nt, Artificial Sequence
  Description of Artificial Sequence: Synthetic oligonucleotide
  Antisense strand to SEQ ID NO: 57782
gacuaacucagguucuugg

SEQ ID NO: 57864 - RNA, 19 nt, Artificial Sequence
  Description of Artificial Sequence: Synthetic oligonucleotide
  Sense strand starting at position 3961 of SEQ ID NO: 701
gaaccugaguuagucuaau

SEQ ID NO: 57865 - RNA, 19 nt, Artificial Sequence
  Description of Artificial Sequence: Synthetic oligonucleotide
  Antisense strand to SEQ ID NO: 57784
auuagacuaacucagguuc

SEQ ID NO: 57866 - RNA, 19 nt, Artificial Sequence
  Description of Artificial Sequence: Synthetic oligonucleotide
  Sense strand starting at position 3980 of SEQ ID NO: 703
agucgugugcugaguugga

SEQ ID NO: 57867 - RNA, 19 nt, Artificial Sequence
  Description of Artificial Sequence: Synthetic oligonucleotide
  Antisense strand to SEQ ID NO: 57786
uccaacucagcacacgacu

SEQ ID NO: 57868 - RNA, 19 nt, Artificial Sequence
  Description of Artificial Sequence: Synthetic oligonucleotide
  Sense strand starting at position 3905 of SEQ ID NO: 703
gccaguguauuugauuaaa

SEQ ID NO: 57869 - RNA, 19 nt, Artificial Sequence
  Description of Artificial Sequence: Synthetic oligonucleotide
  Antisense strand to SEQ ID NO: 57788
uuuaaucaaauacacuggc

SEQ ID NO: 57870 - RNA, 19 nt, Artificial Sequence
  Description of Artificial Sequence: Synthetic oligonucleotide
  Sense strand starting at position 3903 of SEQ ID NO: 703
augccaguguauuugauua

SEQ ID NO: 57871 - RNA, 19 nt, Artificial Sequence
  Description of Artificial Sequence: Synthetic oligonucleotide
  Antisense strand to SEQ ID NO: 57790
uaaucaaauacacuggcau

SEQ ID NO: 57872 - RNA, 19 nt, Artificial Sequence
  Description of Artificial Sequence: Synthetic oligonucleotide
  Sense strand starting at position 3898 of SEQ ID NO: 703
ucaucaugccaguguauuu

SEQ ID NO: 57873 - RNA, 19 nt, Artificial Sequence
  Description of Artificial Sequence: Synthetic oligonucleotide
  Antisense strand to SEQ ID NO: 57792
aaauacacuggcaugauga

SEQ ID NO: 57874 - RNA, 19 nt, Artificial Sequence
  Description of Artificial Sequence: Synthetic oligonucleotide
  Sense strand starting at position 3895 of SEQ ID NO: 703
agaucaucaugccagugua

SEQ ID NO: 57875 - RNA, 19 nt, Artificial Sequence
  Description of Artificial Sequence: Synthetic oligonucleotide
  Antisense strand to SEQ ID NO: 57794
uacacuggcaugaugaucu

SEQ ID NO: 57876 - RNA, 19 nt, Artificial Sequence
  Description of Artificial Sequence: Synthetic oligonucleotide
  Sense strand starting at position 3892 of SEQ ID NO: 703
gacagaucaucaugccagu

SEQ ID NO: 57877 - RNA, 19 nt, Artificial Sequence
  Description of Artificial Sequence: Synthetic oligonucleotide
  Antisense strand to SEQ ID NO: 57796
acuggcaugaugaucuguc

SEQ ID NO: 57878 - RNA, 19 nt, Artificial Sequence
  Description of Artificial Sequence: Synthetic oligonucleotide
  Sense strand starting at position 3791 of SEQ ID NO: 703
ucagauacaugcuaugugu

SEQ ID NO: 57879 - RNA, 19 nt, Artificial Sequence
  Description of Artificial Sequence: Synthetic oligonucleotide
  Antisense strand to SEQ ID NO: 57798
acacauagcauguaucuga

SEQ ID NO: 57880 - RNA, 19 nt, Artificial Sequence
  Description of Artificial Sequence: Synthetic oligonucleotide
  Sense strand starting at position 3597 of SEQ ID NO: 703
acgagaaugcgagaucaau

SEQ ID NO: 57881 - RNA, 19 nt, Artificial Sequence
  Description of Artificial Sequence: Synthetic oligonucleotide
  Antisense strand to SEQ ID NO: 57800
auugaucucgcauucucgu

SEQ ID NO: 57882 - RNA, 19 nt, Artificial Sequence
  Description of Artificial Sequence: Synthetic oligonucleotide
  Sense strand starting at position 3580 of SEQ ID NO: 703
cagagacguucccagaaac

SEQ ID NO: 57883 - RNA, 19 nt, Artificial Sequence
  Description of Artificial Sequence: Synthetic oligonucleotide
  Antisense strand to SEQ ID NO: 57802
guuucugggaacgucucug

SEQ ID NO: 57884 - RNA, 19 nt, Artificial Sequence
  Description of Artificial Sequence: Synthetic oligonucleotide
  Sense strand starting at position 3150 of SEQ ID NO: 703
agucgucacuaugucagaa

SEQ ID NO: 57885 - RNA, 19 nt, Artificial Sequence
  Description of Artificial Sequence: Synthetic oligonucleotide
  Antisense strand to SEQ ID NO: 57804
uucugacauagugacgacu

SEQ ID NO: 57886 - RNA, 19 nt, Artificial Sequence
  Description of Artificial Sequence: Synthetic oligonucleotide
  Sense strand starting at position 3147 of SEQ ID NO: 703
ggaagucgucacuauguca

SEQ ID NO: 57887 - RNA, 19 nt, Artificial Sequence
  Description of Artificial Sequence: Synthetic oligonucleotide
  Antisense strand to SEQ ID NO: 57806
ugacauagugacgacuucc

SEQ ID NO: 57888 - RNA, 19 nt, Artificial Sequence
  Description of Artificial Sequence: Synthetic oligonucleotide
  Sense strand starting at position 2704 of SEQ ID NO: 703
cgaugucuuuaaucaugaa

SEQ ID NO: 57889 - RNA, 19 nt, Artificial Sequence
  Description of Artificial Sequence: Synthetic oligonucleotide
  Antisense strand to SEQ ID NO: 57808
uucaugauuaaagacaucg

SEQ ID NO: 57890 - RNA, 19 nt, Artificial Sequence
  Description of Artificial Sequence: Synthetic oligonucleotide
  Sense strand starting at position 2701 of SEQ ID NO: 703
acgcgaugucuuuaaucau

SEQ ID NO: 57891 - RNA, 19 nt, Artificial Sequence
  Description of Artificial Sequence: Synthetic oligonucleotide
  Antisense strand to SEQ ID NO: 57810
augauuaaagacaucgcgu

SEQ ID NO: 57892 - RNA, 19 nt, Artificial Sequence
  Description of Artificial Sequence: Synthetic oligonucleotide
  Sense strand starting at position 2676 of SEQ ID NO: 703
gcggcagcaucucaauuau

SEQ ID NO: 57893 - RNA, 19 nt, Artificial Sequence
  Description of Artificial Sequence: Synthetic oligonucleotide
  Antisense strand to SEQ ID NO: 57812
auaauugagaugcugccgc

SEQ ID NO: 57894 - RNA, 19 nt, Artificial Sequence
  Description of Artificial Sequence: Synthetic oligonucleotide
  Sense strand starting at position 1196 of SEQ ID NO: 703
ggcugagucccagaggcaa

SEQ ID NO: 57895 - RNA, 19 nt, Artificial Sequence
  Description of Artificial Sequence: Synthetic oligonucleotide
  Antisense strand to SEQ ID NO: 57814
uugccucugggacucagcc

SEQ ID NO: 57896 - RNA, 19 nt, Artificial Sequence
  Description of Artificial Sequence: Synthetic oligonucleotide
  Sense strand starting at position 756 of SEQ ID NO: 703
cgagguggcucauuacagu

SEQ ID NO: 57897 - RNA, 19 nt, Artificial Sequence
  Description of Artificial Sequence: Synthetic oligonucleotide
  Antisense strand to SEQ ID NO: 57816
acuguaaugagccaccucg

SEQ ID NO: 57898 - RNA, 19 nt, Artificial Sequence
  Description of Artificial Sequence: Synthetic oligonucleotide
  Sense strand starting at position 432 of SEQ ID NO: 703
gagaccaguuccuagguca

SEQ ID NO: 57899 - RNA, 19 nt, Artificial Sequence
  Description of Artificial Sequence: Synthetic oligonucleotide
  Antisense strand to SEQ ID NO: 57818
ugaccuaggaacuggucuc

SEQ ID NO: 57900 - RNA, 19 nt, Artificial Sequence
  Description of Artificial Sequence: Synthetic oligonucleotide
  Sense strand starting at position 222 of SEQ ID NO: 703
cugagucaauccuagaaga

SEQ ID NO: 57901 - RNA, 19 nt, Artificial Sequence
  Description of Artificial Sequence: Synthetic oligonucleotide
  Antisense strand to SEQ ID NO: 57820
ucuucuaggauugacucag

SEQ ID NO: 57902 - RNA, 19 nt, Artificial Sequence
  Description of Artificial Sequence: Synthetic oligonucleotide
  Sense strand starting at position 410 of SEQ ID NO: 704
gagcaagucgcagaacuuu

SEQ ID NO: 57903 - RNA, 19 nt, Artificial Sequence
  Description of Artificial Sequence: Synthetic oligonucleotide
  Antisense strand to SEQ ID NO: 57822
aaaguucugcgacuugcuc

SEQ ID NO: 57904 - RNA, 19 nt, Artificial Sequence
  Description of Artificial Sequence: Synthetic oligonucleotide
  Sense strand starting at position 418 of SEQ ID NO: 704
cgcagaacuuugucgcaga

SEQ ID NO: 57905 - RNA, 19 nt, Artificial Sequence
  Description of Artificial Sequence: Synthetic oligonucleotide
  Antisense strand to SEQ ID NO: 57824
ucugcgacaaaguucugcg

SEQ ID NO: 57906 - RNA, 19 nt, Artificial Sequence
  Description of Artificial Sequence: Synthetic oligonucleotide
  Sense strand starting at position 421 of SEQ ID NO: 704
agaacuuugucgcagaacu

SEQ ID NO: 57907 - RNA, 19 nt, Artificial Sequence
  Description of Artificial Sequence: Synthetic oligonucleotide
  Antisense strand to SEQ ID NO: 57826
aguucugcgacaaaguucu

SEQ ID NO: 57908 - RNA, 19 nt, Artificial Sequence
  Description of Artificial Sequence: Synthetic oligonucleotide
  Sense strand starting at position 433 of SEQ ID NO: 704
cagaacuucucgcucgaga

SEQ ID NO: 57909 - RNA, 19 nt, Artificial Sequence
  Description of Artificial Sequence: Synthetic oligonucleotide
  Antisense strand to SEQ ID NO: 57828
ucucgagcgagaaguucug

SEQ ID NO: 57910 - RNA, 19 nt, Artificial Sequence
  Description of Artificial Sequence: Synthetic oligonucleotide
  Sense strand starting at position 438 of SEQ ID NO: 704
cuucucgcucgagaggauu

SEQ ID NO: 57911 - RNA, 19 nt, Artificial Sequence
  Description of Artificial Sequence: Synthetic oligonucleotide
  Antisense strand to SEQ ID NO: 57830
aauccucucgagcgagaag

SEQ ID NO: 57912 - RNA, 19 nt, Artificial Sequence
  Description of Artificial Sequence: Synthetic oligonucleotide
  Sense strand starting at position 440 of SEQ ID NO: 704
ucucgcucgagaggauuaa

SEQ ID NO: 57913 - RNA, 19 nt, Artificial Sequence
  Description of Artificial Sequence: Synthetic oligonucleotide
  Antisense strand to SEQ ID NO: 57832
uuaauccucucgagcgaga

SEQ ID NO: 57914 - RNA, 19 nt, Artificial Sequence
  Description of Artificial Sequence: Synthetic oligonucleotide
  Sense strand starting at position 441 of SEQ ID NO: 704
cucgcucgagaggauuaaa

SEQ ID NO: 57915 - RNA, 19 nt, Artificial Sequence
  Description of Artificial Sequence: Synthetic oligonucleotide
  Antisense strand to SEQ ID NO: 57834
uuuaauccucucgagcgag

SEQ ID NO: 57916 - RNA, 19 nt, Artificial Sequence
  Description of Artificial Sequence: Synthetic oligonucleotide
  Sense strand starting at position 691 of SEQ ID NO: 704
ggccuauggcuguauucua

SEQ ID NO: 57917 - RNA, 19 nt, Artificial Sequence
  Description of Artificial Sequence: Synthetic oligonucleotide
  Antisense strand to SEQ ID NO: 57836
uagaauacagccauaggcc

SEQ ID NO: 57918 - RNA, 19 nt, Artificial Sequence
  Description of Artificial Sequence: Synthetic oligonucleotide
  Sense strand starting at position 696 of SEQ ID NO: 704
auggcuguauucuauguua

SEQ ID NO: 57919 - RNA, 19 nt, Artificial Sequence
  Description of Artificial Sequence: Synthetic oligonucleotide
  Antisense strand to SEQ ID NO: 57838
uaacauagaauacagccau

SEQ ID NO: 57920 - RNA, 19 nt, Artificial Sequence
  Description of Artificial Sequence: Synthetic oligonucleotide
  Sense strand starting at position 698 of SEQ ID NO: 704
ggcuguauucuauguuacu

SEQ ID NO: 57921 - RNA, 19 nt, Artificial Sequence
  Description of Artificial Sequence: Synthetic oligonucleotide
  Antisense strand to SEQ ID NO: 57840
aguaacauagaauacagcc

SEQ ID NO: 57922 - RNA, 19 nt, Artificial Sequence
  Description of Artificial Sequence: Synthetic oligonucleotide
  Sense strand starting at position 699 of SEQ ID NO: 704
gcuguauucuauguuacuu

SEQ ID NO: 57923 - RNA, 19 nt, Artificial Sequence
  Description of Artificial Sequence: Synthetic oligonucleotide
  Antisense strand to SEQ ID NO: 57842
aaguaacauagaauacagc

SEQ ID NO: 57924 - RNA, 19 nt, Artificial Sequence
  Description of Artificial Sequence: Synthetic oligonucleotide
  Sense strand starting at position 767 of SEQ ID NO: 704
ccagcacagugaugugaau

SEQ ID NO: 57925 - RNA, 19 nt, Artificial Sequence
  Description of Artificial Sequence: Synthetic oligonucleotide
  Antisense strand to SEQ ID NO: 57844
auucacaucacugugcugg

SEQ ID NO: 57926 - RNA, 19 nt, Artificial Sequence
  Description of Artificial Sequence: Synthetic oligonucleotide
  Sense strand starting at position 954 of SEQ ID NO: 704
aagggaaaguguuauugga

SEQ ID NO: 57927 - RNA, 19 nt, Artificial Sequence
  Description of Artificial Sequence: Synthetic oligonucleotide
  Antisense strand to SEQ ID NO: 57846
uccaauaacacuuucccuu

SEQ ID NO: 57928 - RNA, 19 nt, Artificial Sequence
  Description of Artificial Sequence: Synthetic oligonucleotide
  Sense strand starting at position 956 of SEQ ID NO: 704
gggaaaguguuauuggacu

SEQ ID NO: 57929 - RNA, 19 nt, Artificial Sequence
  Description of Artificial Sequence: Synthetic oligonucleotide
  Antisense strand to SEQ ID NO: 57848
aguccaauaacacuuuccc

SEQ ID NO: 57930 - RNA, 19 nt, Artificial Sequence
  Description of Artificial Sequence: Synthetic oligonucleotide
  Sense strand starting at position 963 of SEQ ID NO: 704
uguuauuggacugggcaga

SEQ ID NO: 57931 - RNA, 19 nt, Artificial Sequence
  Description of Artificial Sequence: Synthetic oligonucleotide
  Antisense strand to SEQ ID NO: 57850
ucugcccaguccaauaaca

SEQ ID NO: 57932 - RNA, 19 nt, Artificial Sequence
  Description of Artificial Sequence: Synthetic oligonucleotide
  Sense strand starting at position 1036 of SEQ ID NO: 704
caguuugugcugugcuuua

SEQ ID NO: 57933 - RNA, 19 nt, Artificial Sequence
  Description of Artificial Sequence: Synthetic oligonucleotide
  Antisense strand to SEQ ID NO: 57852
uaaagcacagcacaaacug

SEQ ID NO: 57934 - RNA, 19 nt, Artificial Sequence
  Description of Artificial Sequence: Synthetic oligonucleotide
  Sense strand starting at position 1038 of SEQ ID NO: 704
guuugugcugugcuuuauu

SEQ ID NO: 57935 - RNA, 19 nt, Artificial Sequence
  Description of Artificial Sequence: Synthetic oligonucleotide
  Antisense strand to SEQ ID NO: 57854
aauaaagcacagcacaaac

SEQ ID NO: 57936 - RNA, 19 nt, Artificial Sequence
  Description of Artificial Sequence: Synthetic oligonucleotide
  Sense strand starting at position 1040 of SEQ ID NO: 704
uugugcugugcuuuauuaa

SEQ ID NO: 57937 - RNA, 19 nt, Artificial Sequence
  Description of Artificial Sequence: Synthetic oligonucleotide
  Antisense strand to SEQ ID NO: 57856
uuaauaaagcacagcacaa

SEQ ID NO: 57938 - RNA, 19 nt, Artificial Sequence
  Description of Artificial Sequence: Synthetic oligonucleotide
  Sense strand starting at position 1296 of SEQ ID NO: 704
gggaaauugacgcgcgaca

SEQ ID NO: 57939 - RNA, 19 nt, Artificial Sequence
  Description of Artificial Sequence: Synthetic oligonucleotide
  Antisense strand to SEQ ID NO: 57858
ugucgcgcgucaauuuccc

SEQ ID NO: 57940 - RNA, 19 nt, Artificial Sequence
  Description of Artificial Sequence: Synthetic oligonucleotide
  Sense strand starting at position 1493 of SEQ ID NO: 704
ggguugugcuccgucgcua

SEQ ID NO: 57941 - RNA, 19 nt, Artificial Sequence
  Description of Artificial Sequence: Synthetic oligonucleotide
  Antisense strand to SEQ ID NO: 57860
uagcgacggagcacaaccc

SEQ ID NO: 57942 - RNA, 19 nt, Artificial Sequence
  Description of Artificial Sequence: Synthetic oligonucleotide
  Sense strand starting at position 2658 of SEQ ID NO: 704
ugcuuccuccuguuuguua

SEQ ID NO: 57943 - RNA, 19 nt, Artificial Sequence
  Description of Artificial Sequence: Synthetic oligonucleotide
  Antisense strand to SEQ ID NO: 57862
uaacaaacaggaggaagca

SEQ ID NO: 57944 - RNA, 19 nt, Artificial Sequence
  Description of Artificial Sequence: Synthetic oligonucleotide
  Sense strand starting at position 2660 of SEQ ID NO: 704
cuuccuccuguuuguuaga

SEQ ID NO: 57945 - RNA, 19 nt, Artificial Sequence
  Description of Artificial Sequence: Synthetic oligonucleotide
  Antisense strand to SEQ ID NO: 57864
ucuaacaaacaggaggaag

SEQ ID NO: 57946 - RNA, 19 nt, Artificial Sequence
  Description of Artificial Sequence: Synthetic oligonucleotide
  Sense strand starting at position 2661 of SEQ ID NO: 704
uuccuccuguuuguuagaa

SEQ ID NO: 57947 - RNA, 19 nt, Artificial Sequence
  Description of Artificial Sequence: Synthetic oligonucleotide
  Antisense strand to SEQ ID NO: 57866
uucuaacaaacaggaggaa

SEQ ID NO: 57948 - RNA, 19 nt, Artificial Sequence
  Description of Artificial Sequence: Synthetic oligonucleotide
  Sense strand starting at position 2665 of SEQ ID NO: 704
uccuguuuguuagaacgau

SEQ ID NO: 57949 - RNA, 19 nt, Artificial Sequence
  Description of Artificial Sequence: Synthetic oligonucleotide
  Antisense strand to SEQ ID NO: 57868
aucguucuaacaaacagga

SEQ ID NO: 57950 - RNA, 19 nt, Artificial Sequence
  Description of Artificial Sequence: Synthetic oligonucleotide
  Sense strand starting at position 2669 of SEQ ID NO: 704
guuuguuagaacgaucauu

SEQ ID NO: 57951 - RNA, 19 nt, Artificial Sequence
  Description of Artificial Sequence: Synthetic oligonucleotide
  Antisense strand to SEQ ID NO: 57870
aaugaucguucuaacaaac

SEQ ID NO: 57952 - RNA, 19 nt, Artificial Sequence
  Description of Artificial Sequence: Synthetic oligonucleotide
  Sense strand starting at position 2674 of SEQ ID NO: 704
uuagaacgaucauucgauc

SEQ ID NO: 57953 - RNA, 19 nt, Artificial Sequence
  Description of Artificial Sequence: Synthetic oligonucleotide
  Antisense strand to SEQ ID NO: 57872
gaucgaaugaucguucuaa

SEQ ID NO: 57954 - RNA, 19 nt, Artificial Sequence
  Description of Artificial Sequence: Synthetic oligonucleotide
  Sense strand starting at position 2677 of SEQ ID NO: 704
gaacgaucauucgaucauu

SEQ ID NO: 57955 - RNA, 19 nt, Artificial Sequence
  Description of Artificial Sequence: Synthetic oligonucleotide
  Antisense strand to SEQ ID NO: 57874
aaugaucgaaugaucguuc

SEQ ID NO: 57956 - RNA, 19 nt, Artificial Sequence
  Description of Artificial Sequence: Synthetic oligonucleotide
  Sense strand starting at position 2828 of SEQ ID NO: 704
gaaggauccucagaggcaa

SEQ ID NO: 57957 - RNA, 19 nt, Artificial Sequence
  Description of Artificial Sequence: Synthetic oligonucleotide
  Antisense strand to SEQ ID NO: 57876
uugccucugaggauccuuc

SEQ ID NO: 57958 - RNA, 19 nt, Artificial Sequence
  Description of Artificial Sequence: Synthetic oligonucleotide
  Sense strand starting at position 3040 of SEQ ID NO: 704
gccuuauaauuugugauuc

SEQ ID NO: 57959 - RNA, 19 nt, Artificial Sequence
  Description of Artificial Sequence: Synthetic oligonucleotide
  Antisense strand to SEQ ID NO: 57878
gaaucacaaauuauaaggc

SEQ ID NO: 57960 - RNA, 19 nt, Artificial Sequence
  Description of Artificial Sequence: Synthetic oligonucleotide
  Sense strand starting at position 3048 of SEQ ID NO: 704
auuugugauucuguggcuu

SEQ ID NO: 57961 - RNA, 19 nt, Artificial Sequence
  Description of Artificial Sequence: Synthetic oligonucleotide
  Antisense strand to SEQ ID NO: 57880
aagccacagaaucacaaau

SEQ ID NO: 57962 - RNA, 19 nt, Artificial Sequence
  Description of Artificial Sequence: Synthetic oligonucleotide
  Sense strand starting at position 3056 of SEQ ID NO: 704
uucuguggcuuugucuaaa

SEQ ID NO: 57963 - RNA, 19 nt, Artificial Sequence
  Description of Artificial Sequence: Synthetic oligonucleotide
  Antisense strand to SEQ ID NO: 57882
uuuagacaaagccacagaa

SEQ ID NO: 57964 - RNA, 19 nt, Artificial Sequence
  Description of Artificial Sequence: Synthetic oligonucleotide
  Sense strand starting at position 3105 of SEQ ID NO: 704
acagacugcucacaacagu

SEQ ID NO: 57965 - RNA, 19 nt, Artificial Sequence
  Description of Artificial Sequence: Synthetic oligonucleotide
  Antisense strand to SEQ ID NO: 57884
acuguugugagcagucugu

SEQ ID NO: 57966 - RNA, 19 nt, Artificial Sequence
  Description of Artificial Sequence: Synthetic oligonucleotide
  Sense strand starting at position 3155 of SEQ ID NO: 704
augauauacuaacgacaaa

SEQ ID NO: 57967 - RNA, 19 nt, Artificial Sequence
  Description of Artificial Sequence: Synthetic oligonucleotide
  Antisense strand to SEQ ID NO: 57886
uuugucguuaguauaucau

SEQ ID NO: 57968 - RNA, 19 nt, Artificial Sequence
  Description of Artificial Sequence: Synthetic oligonucleotide
  Sense strand starting at position 3183 of SEQ ID NO: 704
agugaacauucuuugcaau

SEQ ID NO: 57969 - RNA, 19 nt, Artificial Sequence
  Description of Artificial Sequence: Synthetic oligonucleotide
  Antisense strand to SEQ ID NO: 57888
auugcaaagaauguucacu

SEQ ID NO: 57970 - RNA, 19 nt, Artificial Sequence
  Description of Artificial Sequence: Synthetic oligonucleotide
  Sense strand starting at position 3184 of SEQ ID NO: 704
gugaacauucuuugcaaug

SEQ ID NO: 57971 - RNA, 19 nt, Artificial Sequence
  Description of Artificial Sequence: Synthetic oligonucleotide
  Antisense strand to SEQ ID NO: 57890
cauugcaaagaauguucac

SEQ ID NO: 57972 - RNA, 19 nt, Artificial Sequence
  Description of Artificial Sequence: Synthetic oligonucleotide
  Sense strand starting at position 3185 of SEQ ID NO: 704
ugaacauucuuugcaaugu

SEQ ID NO: 57973 - RNA, 19 nt, Artificial Sequence
  Description of Artificial Sequence: Synthetic oligonucleotide
  Antisense strand to SEQ ID NO: 57892
acauugcaaagaauguuca

SEQ ID NO: 57974 - RNA, 19 nt, Artificial Sequence
  Description of Artificial Sequence: Synthetic oligonucleotide
  Sense strand starting at position 3304 of SEQ ID NO: 704
gggccuuucugaucugcca

SEQ ID NO: 57975 - RNA, 19 nt, Artificial Sequence
  Description of Artificial Sequence: Synthetic oligonucleotide
  Antisense strand to SEQ ID NO: 57894
uggcagaucagaaaggccc

SEQ ID NO: 57976 - RNA, 19 nt, Artificial Sequence
  Description of Artificial Sequence: Synthetic oligonucleotide
  Sense strand starting at position 3337 of SEQ ID NO: 704
cccuuacuuccucagaguu

SEQ ID NO: 57977 - RNA, 19 nt, Artificial Sequence
  Description of Artificial Sequence: Synthetic oligonucleotide
  Antisense strand to SEQ ID NO: 57896
aacucugaggaaguaaggg

SEQ ID NO: 57978 - RNA, 19 nt, Artificial Sequence
  Description of Artificial Sequence: Synthetic oligonucleotide
  Sense strand starting at position 3339 of SEQ ID NO: 704
cuuacuuccucagaguuua

SEQ ID NO: 57979 - RNA, 19 nt, Artificial Sequence
  Description of Artificial Sequence: Synthetic oligonucleotide
  Antisense strand to SEQ ID NO: 57898
uaaacucugaggaaguaag

SEQ ID NO: 57980 - RNA, 19 nt, Artificial Sequence
  Description of Artificial Sequence: Synthetic oligonucleotide
  Sense strand starting at position 3347 of SEQ ID NO: 704
cucagaguuuauccagaga

SEQ ID NO: 57981 - RNA, 19 nt, Artificial Sequence
  Description of Artificial Sequence: Synthetic oligonucleotide
  Antisense strand to SEQ ID NO: 57900
ucucuggauaaacucugag

SEQ ID NO: 57982 - RNA, 19 nt, Artificial Sequence
  Description of Artificial Sequence: Synthetic oligonucleotide
  Sense strand starting at position 3729 of SEQ ID NO: 706
auacgacuuuacucagauc

SEQ ID NO: 57983 - RNA, 19 nt, Artificial Sequence
  Description of Artificial Sequence: Synthetic oligonucleotide
  Antisense strand to SEQ ID NO: 57902
gaucugaguaaagucguau

SEQ ID NO: 57984 - RNA, 19 nt, Artificial Sequence
  Description of Artificial Sequence: Synthetic oligonucleotide
  Sense strand starting at position 3503 of SEQ ID NO: 706
auuucugagugggacacau

SEQ ID NO: 57985 - RNA, 19 nt, Artificial Sequence
  Description of Artificial Sequence: Synthetic oligonucleotide
  Antisense strand to SEQ ID NO: 57904
augugucccacucagaaau

SEQ ID NO: 57986 - RNA, 19 nt, Artificial Sequence
  Description of Artificial Sequence: Synthetic oligonucleotide
  Sense strand starting at position 3462 of SEQ ID NO: 706
auguauuugucagcagcau

SEQ ID NO: 57987 - RNA, 19 nt, Artificial Sequence
  Description of Artificial Sequence: Synthetic oligonucleotide
  Antisense strand to SEQ ID NO: 57906
augcugcugacaaauacau

SEQ ID NO: 57988 - RNA, 19 nt, Artificial Sequence
  Description of Artificial Sequence: Synthetic oligonucleotide
  Sense strand starting at position 3458 of SEQ ID NO: 706
uguuauguauuugucagca

SEQ ID NO: 57989 - RNA, 19 nt, Artificial Sequence
  Description of Artificial Sequence: Synthetic oligonucleotide
  Antisense strand to SEQ ID NO: 57908
ugcugacaaauacauaaca

SEQ ID NO: 57990 - RNA, 19 nt, Artificial Sequence
  Description of Artificial Sequence: Synthetic oligonucleotide
  Sense strand starting at position 3451 of SEQ ID NO: 706
uggacucuguuauguauuu

SEQ ID NO: 57991 - RNA, 19 nt, Artificial Sequence
  Description of Artificial Sequence: Synthetic oligonucleotide
  Antisense strand to SEQ ID NO: 57910
aaauacauaacagagucca

SEQ ID NO: 57992 - RNA, 19 nt, Artificial Sequence
  Description of Artificial Sequence: Synthetic oligonucleotide
  Sense strand starting at position 3276 of SEQ ID NO: 706
ccugauagccaguaagucu

SEQ ID NO: 57993 - RNA, 19 nt, Artificial Sequence
  Description of Artificial Sequence: Synthetic oligonucleotide
  Antisense strand to SEQ ID NO: 57912
agacuuacuggcuaucagg

SEQ ID NO: 57994 - RNA, 19 nt, Artificial Sequence
  Description of Artificial Sequence: Synthetic oligonucleotide
  Sense strand starting at position 3025 of SEQ ID NO: 706
accuuaaagucagauagua

SEQ ID NO: 57995 - RNA, 19 nt, Artificial Sequence
  Description of Artificial Sequence: Synthetic oligonucleotide
  Antisense strand to SEQ ID NO: 57914
uacuaucugacuuuaaggu

SEQ ID NO: 57996 - RNA, 19 nt, Artificial Sequence
  Description of Artificial Sequence: Synthetic oligonucleotide
  Sense strand starting at position 2979 of SEQ ID NO: 706
auccguuugucacucuuga

SEQ ID NO: 57997 - RNA, 19 nt, Artificial Sequence
  Description of Artificial Sequence: Synthetic oligonucleotide
  Antisense strand to SEQ ID NO: 57916
ucaagagugacaaacggau

SEQ ID NO: 57998 - RNA, 19 nt, Artificial Sequence
  Description of Artificial Sequence: Synthetic oligonucleotide
  Sense strand starting at position 2972 of SEQ ID NO: 706
gcuguuuauccguuuguca

SEQ ID NO: 57999 - RNA, 19 nt, Artificial Sequence
  Description of Artificial Sequence: Synthetic oligonucleotide
  Antisense strand to SEQ ID NO: 57918
ugacaaacggauaaacagc

SEQ ID NO: 58000 - RNA, 19 nt, Artificial Sequence
  Description of Artificial Sequence: Synthetic oligonucleotide
  Sense strand starting at position 2934 of SEQ ID NO: 706
cguauagcuguggaucaau

SEQ ID NO: 58001 - RNA, 19 nt, Artificial Sequence
  Description of Artificial Sequence: Synthetic oligonucleotide
  Antisense strand to SEQ ID NO: 57920
auugauccacagcuauacg

SEQ ID NO: 58002 - RNA, 19 nt, Artificial Sequence
  Description of Artificial Sequence: Synthetic oligonucleotide
  Sense strand starting at position 2817 of SEQ ID NO: 706
guguaacgugagggagaau

SEQ ID NO: 58003 - RNA, 19 nt, Artificial Sequence
  Description of Artificial Sequence: Synthetic oligonucleotide
  Antisense strand to SEQ ID NO: 57922
auucucccucacguuacac

SEQ ID NO: 58004 - RNA, 19 nt, Artificial Sequence
  Description of Artificial Sequence: Synthetic oligonucleotide
  Sense strand starting at position 2717 of SEQ ID NO: 706
gcuaaucuuugccugccaa

SEQ ID NO: 58005 - RNA, 19 nt, Artificial Sequence
  Description of Artificial Sequence: Synthetic oligonucleotide
  Antisense strand to SEQ ID NO: 57924
uuggcaggcaaagauuagc

SEQ ID NO: 58006 - RNA, 19 nt, Artificial Sequence
  Description of Artificial Sequence: Synthetic oligonucleotide
  Sense strand starting at position 1359 of SEQ ID NO: 706
gccaguugucucuuucuuu

SEQ ID NO: 58007 - RNA, 19 nt, Artificial Sequence
  Description of Artificial Sequence: Synthetic oligonucleotide
  Antisense strand to SEQ ID NO: 57926
aaagaaagagacaacuggc

SEQ ID NO: 58008 - RNA, 19 nt, Artificial Sequence
  Description of Artificial Sequence: Synthetic oligonucleotide
  Sense strand starting at position 974 of SEQ ID NO: 706
cgcauaguucccugggaau

SEQ ID NO: 58009 - RNA, 19 nt, Artificial Sequence
  Description of Artificial Sequence: Synthetic oligonucleotide
  Antisense strand to SEQ ID NO: 57928
auucccagggaacuaugcg

SEQ ID NO: 58010 - RNA, 19 nt, Artificial Sequence
  Description of Artificial Sequence: Synthetic oligonucleotide
  Sense strand starting at position 631 of SEQ ID NO: 706
gugaauguauucucuuaau

SEQ ID NO: 58011 - RNA, 19 nt, Artificial Sequence
  Description of Artificial Sequence: Synthetic oligonucleotide
  Antisense strand to SEQ ID NO: 57930
auuaagagaauacauucac

SEQ ID NO: 58012 - RNA, 19 nt, Artificial Sequence
  Description of Artificial Sequence: Synthetic oligonucleotide
  Sense strand starting at position 116 of SEQ ID NO: 706
agaggugucugagauucca

SEQ ID NO: 58013 - RNA, 19 nt, Artificial Sequence
  Description of Artificial Sequence: Synthetic oligonucleotide
  Antisense strand to SEQ ID NO: 57932
uggaaucucagacaccucu

SEQ ID NO: 58014 - RNA, 19 nt, Artificial Sequence
  Description of Artificial Sequence: Synthetic oligonucleotide
  Sense strand starting at position 113 of SEQ ID NO: 706
aggagaggugucugagauu

SEQ ID NO: 58015 - RNA, 19 nt, Artificial Sequence
  Description of Artificial Sequence: Synthetic oligonucleotide
  Antisense strand to SEQ ID NO: 57934
aaucucagacaccucuccu

SEQ ID NO: 58016 - RNA, 19 nt, Artificial Sequence
  Description of Artificial Sequence: Synthetic oligonucleotide
  Sense strand starting at position 26 of SEQ ID NO: 706
caaggagucuguucuguca

SEQ ID NO: 58017 - RNA, 19 nt, Artificial Sequence
  Description of Artificial Sequence: Synthetic oligonucleotide
  Antisense strand to SEQ ID NO: 57936
ugacagaacagacuccuug

SEQ ID NO: 58018 - RNA, 19 nt, Artificial Sequence
  Description of Artificial Sequence: Synthetic oligonucleotide
  Sense strand starting at position 414 of SEQ ID NO: 705
aggagaggugucugagauu

SEQ ID NO: 58019 - RNA, 19 nt, Artificial Sequence
  Description of Artificial Sequence: Synthetic oligonucleotide
  Antisense strand to SEQ ID NO: 57938
aaucucagacaccucuccu

SEQ ID NO: 58020 - RNA, 19 nt, Artificial Sequence
  Description of Artificial Sequence: Synthetic oligonucleotide
  Sense strand starting at position 417 of SEQ ID NO: 705
agaggugucugagauucca

SEQ ID NO: 58021 - RNA, 19 nt, Artificial Sequence
  Description of Artificial Sequence: Synthetic oligonucleotide
  Antisense strand to SEQ ID NO: 57940
uggaaucucagacaccucu

SEQ ID NO: 58022 - RNA, 19 nt, Artificial Sequence
  Description of Artificial Sequence: Synthetic oligonucleotide
  Sense strand starting at position 444 of SEQ ID NO: 705
gcaggaacucaguaguuaa

SEQ ID NO: 58023 - RNA, 19 nt, Artificial Sequence
  Description of Artificial Sequence: Synthetic oligonucleotide
  Antisense strand to SEQ ID NO: 57942
uuaacuacugaguuccugc

SEQ ID NO: 58024 - RNA, 19 nt, Artificial Sequence
  Description of Artificial Sequence: Synthetic oligonucleotide
  Sense strand starting at position 447 of SEQ ID NO: 705
ggaacucaguaguuaagac

SEQ ID NO: 58025 - RNA, 19 nt, Artificial Sequence
  Description of Artificial Sequence: Synthetic oligonucleotide
  Antisense strand to SEQ ID NO: 57944
gucuuaacuacugaguucc

SEQ ID NO: 58026 - RNA, 19 nt, Artificial Sequence
  Description of Artificial Sequence: Synthetic oligonucleotide
  Sense strand starting at position 474 of SEQ ID NO: 705
ggucuccuuggccaagaaa

SEQ ID NO: 58027 - RNA, 19 nt, Artificial Sequence
  Description of Artificial Sequence: Synthetic oligonucleotide
  Antisense strand to SEQ ID NO: 57946
uuucuuggccaaggagacc

SEQ ID NO: 58028 - RNA, 19 nt, Artificial Sequence
  Description of Artificial Sequence: Synthetic oligonucleotide
  Sense strand starting at position 489 of SEQ ID NO: 705
gaaacagucuguccaguug

SEQ ID NO: 58029 - RNA, 19 nt, Artificial Sequence
  Description of Artificial Sequence: Synthetic oligonucleotide
  Antisense strand to SEQ ID NO: 57948
caacuggacagacuguuuc

SEQ ID NO: 58030 - RNA, 19 nt, Artificial Sequence
  Description of Artificial Sequence: Synthetic oligonucleotide
  Sense strand starting at position 1358 of SEQ ID NO: 705
gccaguugucucuuucuuu

SEQ ID NO: 58031 - RNA, 19 nt, Artificial Sequence
  Description of Artificial Sequence: Synthetic oligonucleotide
  Antisense strand to SEQ ID NO: 57950
aaagaaagagacaacuggc

SEQ ID NO: 58032 - RNA, 19 nt, Artificial Sequence
  Description of Artificial Sequence: Synthetic oligonucleotide
  Sense strand starting at position 1771 of SEQ ID NO: 705
cccacacguucuguccaaa

SEQ ID NO: 58033 - RNA, 19 nt, Artificial Sequence
  Description of Artificial Sequence: Synthetic oligonucleotide
  Antisense strand to SEQ ID NO: 57952
uuuggacagaacguguggg

SEQ ID NO: 58034 - RNA, 19 nt, Artificial Sequence
  Description of Artificial Sequence: Synthetic oligonucleotide
  Sense strand starting at position 2716 of SEQ ID NO: 705
gcuaaucuuugccugccaa

SEQ ID NO: 58035 - RNA, 19 nt, Artificial Sequence
  Description of Artificial Sequence: Synthetic oligonucleotide
  Antisense strand to SEQ ID NO: 57954
uuggcaggcaaagauuagc

SEQ ID NO: 58036 - RNA, 19 nt, Artificial Sequence
  Description of Artificial Sequence: Synthetic oligonucleotide
  Sense strand starting at position 2738 of SEQ ID NO: 705
gucacaaaguauccuugaa

SEQ ID NO: 58037 - RNA, 19 nt, Artificial Sequence
  Description of Artificial Sequence: Synthetic oligonucleotide
  Antisense strand to SEQ ID NO: 57956
uucaaggauacuuugugac

SEQ ID NO: 58038 - RNA, 19 nt, Artificial Sequence
  Description of Artificial Sequence: Synthetic oligonucleotide
  Sense strand starting at position 2789 of SEQ ID NO: 705
guguaaugcggcugaaauu

SEQ ID NO: 58039 - RNA, 19 nt, Artificial Sequence
  Description of Artificial Sequence: Synthetic oligonucleotide
  Antisense strand to SEQ ID NO: 57958
aauuucagccgcauuacac

SEQ ID NO: 58040 - RNA, 19 nt, Artificial Sequence
  Description of Artificial Sequence: Synthetic oligonucleotide
  Sense strand starting at position 2790 of SEQ ID NO: 705
uguaaugcggcugaaauua

SEQ ID NO: 58041 - RNA, 19 nt, Artificial Sequence
  Description of Artificial Sequence: Synthetic oligonucleotide
  Antisense strand to SEQ ID NO: 57960
uaauuucagccgcauuaca

SEQ ID NO: 58042 - RNA, 19 nt, Artificial Sequence
  Description of Artificial Sequence: Synthetic oligonucleotide
  Sense strand starting at position 2816 of SEQ ID NO: 705
guguaacgugagggagaau

SEQ ID NO: 58043 - RNA, 19 nt, Artificial Sequence
  Description of Artificial Sequence: Synthetic oligonucleotide
  Antisense strand to SEQ ID NO: 57962
auucucccucacguuacac

SEQ ID NO: 58044 - RNA, 19 nt, Artificial Sequence
  Description of Artificial Sequence: Synthetic oligonucleotide
  Sense strand starting at position 2933 of SEQ ID NO: 705
cguauagcuguggaucaau

SEQ ID NO: 58045 - RNA, 19 nt, Artificial Sequence
  Description of Artificial Sequence: Synthetic oligonucleotide
  Antisense strand to SEQ ID NO: 57964
auugauccacagcuauacg

SEQ ID NO: 58046 - RNA, 19 nt, Artificial Sequence
  Description of Artificial Sequence: Synthetic oligonucleotide
  Sense strand starting at position 2971 of SEQ ID NO: 705
gcuguuuauccguuuguca

SEQ ID NO: 58047 - RNA, 19 nt, Artificial Sequence
  Description of Artificial Sequence: Synthetic oligonucleotide
  Antisense strand to SEQ ID NO: 57966
ugacaaacggauaaacagc

SEQ ID NO: 58048 - RNA, 19 nt, Artificial Sequence
  Description of Artificial Sequence: Synthetic oligonucleotide
  Sense strand starting at position 2978 of SEQ ID NO: 705
auccguuugucacucuuga

SEQ ID NO: 58049 - RNA, 19 nt, Artificial Sequence
  Description of Artificial Sequence: Synthetic oligonucleotide
  Antisense strand to SEQ ID NO: 57968
ucaagagugacaaacggau

SEQ ID NO: 58050 - RNA, 19 nt, Artificial Sequence
  Description of Artificial Sequence: Synthetic oligonucleotide
  Sense strand starting at position 2995 of SEQ ID NO: 705
gaugccuugugucuaauag

SEQ ID NO: 58051 - RNA, 19 nt, Artificial Sequence
  Description of Artificial Sequence: Synthetic oligonucleotide
  Antisense strand to SEQ ID NO: 57970
cuauuagacacaaggcauc

SEQ ID NO: 58052 - RNA, 19 nt, Artificial Sequence
  Description of Artificial Sequence: Synthetic oligonucleotide
  Sense strand starting at position 3004 of SEQ ID NO: 705
ugucuaauagcuuauagua

SEQ ID NO: 58053 - RNA, 19 nt, Artificial Sequence
  Description of Artificial Sequence: Synthetic oligonucleotide
  Antisense strand to SEQ ID NO: 57972
uacuauaagcuauuagaca

SEQ ID NO: 58054 - RNA, 19 nt, Artificial Sequence
  Description of Artificial Sequence: Synthetic oligonucleotide
  Sense strand starting at position 3275 of SEQ ID NO: 705
ccugauagccaguaagucu

SEQ ID NO: 58055 - RNA, 19 nt, Artificial Sequence
  Description of Artificial Sequence: Synthetic oligonucleotide
  Antisense strand to SEQ ID NO: 57974
agacuuacuggcuaucagg

SEQ ID NO: 58056 - RNA, 19 nt, Artificial Sequence
  Description of Artificial Sequence: Synthetic oligonucleotide
  Sense strand starting at position 3450 of SEQ ID NO: 705
uggacucuguuauguauuu

SEQ ID NO: 58057 - RNA, 19 nt, Artificial Sequence
  Description of Artificial Sequence: Synthetic oligonucleotide
  Antisense strand to SEQ ID NO: 57976
aaauacauaacagagucca

SEQ ID NO: 58058 - RNA, 19 nt, Artificial Sequence
  Description of Artificial Sequence: Synthetic oligonucleotide
  Sense strand starting at position 3461 of SEQ ID NO: 705
auguauuugucagcagcau

SEQ ID NO: 58059 - RNA, 19 nt, Artificial Sequence
  Description of Artificial Sequence: Synthetic oligonucleotide
  Antisense strand to SEQ ID NO: 57978
augcugcugacaaauacau

SEQ ID NO: 58060 - RNA, 19 nt, Artificial Sequence
  Description of Artificial Sequence: Synthetic oligonucleotide
  Sense strand starting at position 3728 of SEQ ID NO: 705
auacgacuuuacucagauc

SEQ ID NO: 58061 - RNA, 19 nt, Artificial Sequence
  Description of Artificial Sequence: Synthetic oligonucleotide
  Antisense strand to SEQ ID NO: 57980
gaucugaguaaagucguau

SEQ ID NO: 58062 - RNA, 19 nt, Artificial Sequence
  Description of Artificial Sequence: Synthetic oligonucleotide
  Sense strand starting at position 3521 of SEQ ID NO: 707
acauuugucuccugggcca

SEQ ID NO: 58063 - RNA, 19 nt, Artificial Sequence
  Description of Artificial Sequence: Synthetic oligonucleotide
  Antisense strand to SEQ ID NO: 57982
uggcccaggagacaaaugu

SEQ ID NO: 58064 - RNA, 19 nt, Artificial Sequence
  Description of Artificial Sequence: Synthetic oligonucleotide
  Sense strand starting at position 3488 of SEQ ID NO: 707
gccagugaucauugcagug

SEQ ID NO: 58065 - RNA, 19 nt, Artificial Sequence
  Description of Artificial Sequence: Synthetic oligonucleotide
  Antisense strand to SEQ ID NO: 57984
cacugcaaugaucacuggc

SEQ ID NO: 58066 - RNA, 19 nt, Artificial Sequence
  Description of Artificial Sequence: Synthetic oligonucleotide
  Sense strand starting at position 3482 of SEQ ID NO: 707
ugagaagccagugaucauu

SEQ ID NO: 58067 - RNA, 19 nt, Artificial Sequence
  Description of Artificial Sequence: Synthetic oligonucleotide
  Antisense strand to SEQ ID NO: 57986
aaugaucacuggcuucuca

SEQ ID NO: 58068 - RNA, 19 nt, Artificial Sequence
  Description of Artificial Sequence: Synthetic oligonucleotide
  Sense strand starting at position 3481 of SEQ ID NO: 707
cugagaagccagugaucau

SEQ ID NO: 58069 - RNA, 19 nt, Artificial Sequence
  Description of Artificial Sequence: Synthetic oligonucleotide
  Antisense strand to SEQ ID NO: 57988
augaucacuggcuucucag

SEQ ID NO: 58070 - RNA, 19 nt, Artificial Sequence
  Description of Artificial Sequence: Synthetic oligonucleotide
  Sense strand starting at position 3412 of SEQ ID NO: 707
gaaaguaagucuccuacug

SEQ ID NO: 58071 - RNA, 19 nt, Artificial Sequence
  Description of Artificial Sequence: Synthetic oligonucleotide
  Antisense strand to SEQ ID NO: 57990
caguaggagacuuacuuuc

SEQ ID NO: 58072 - RNA, 19 nt, Artificial Sequence
  Description of Artificial Sequence: Synthetic oligonucleotide
  Sense strand starting at position 3371 of SEQ ID NO: 707
ggaagaugugcuuguggua

SEQ ID NO: 58073 - RNA, 19 nt, Artificial Sequence
  Description of Artificial Sequence: Synthetic oligonucleotide
  Antisense strand to SEQ ID NO: 57992
uaccacaagcacaucuucc

SEQ ID NO: 58074 - RNA, 19 nt, Artificial Sequence
  Description of Artificial Sequence: Synthetic oligonucleotide
  Sense strand starting at position 3308 of SEQ ID NO: 707
gguuguagccucgguucau

SEQ ID NO: 58075 - RNA, 19 nt, Artificial Sequence
  Description of Artificial Sequence: Synthetic oligonucleotide
  Antisense strand to SEQ ID NO: 57994
augaaccgaggcuacaacc

SEQ ID NO: 58076 - RNA, 19 nt, Artificial Sequence
  Description of Artificial Sequence: Synthetic oligonucleotide
  Sense strand starting at position 3296 of SEQ ID NO: 707
gaugaucugguugguugua

SEQ ID NO: 58077 - RNA, 19 nt, Artificial Sequence
  Description of Artificial Sequence: Synthetic oligonucleotide
  Antisense strand to SEQ ID NO: 57996
uacaaccaaccagaucauc

SEQ ID NO: 58078 - RNA, 19 nt, Artificial Sequence
  Description of Artificial Sequence: Synthetic oligonucleotide
  Sense strand starting at position 3295 of SEQ ID NO: 707
agaugaucugguugguugu

SEQ ID NO: 58079 - RNA, 19 nt, Artificial Sequence
  Description of Artificial Sequence: Synthetic oligonucleotide
  Antisense strand to SEQ ID NO: 57998
acaaccaaccagaucaucu

SEQ ID NO: 58080 - RNA, 19 nt, Artificial Sequence
  Description of Artificial Sequence: Synthetic oligonucleotide
  Sense strand starting at position 3282 of SEQ ID NO: 707
gagggugccucccagauga

SEQ ID NO: 58081 - RNA, 19 nt, Artificial Sequence
  Description of Artificial Sequence: Synthetic oligonucleotide
  Antisense strand to SEQ ID NO: 58000
ucaucugggaggcacccuc

SEQ ID NO: 58082 - RNA, 19 nt, Artificial Sequence
  Description of Artificial Sequence: Synthetic oligonucleotide
  Sense strand starting at position 3265 of SEQ ID NO: 707
gcaguaucuuugguuugga

SEQ ID NO: 58083 - RNA, 19 nt, Artificial Sequence
  Description of Artificial Sequence: Synthetic oligonucleotide
  Antisense strand to SEQ ID NO: 58002
uccaaaccaaagauacugc

SEQ ID NO: 58084 - RNA, 19 nt, Artificial Sequence
  Description of Artificial Sequence: Synthetic oligonucleotide
  Sense strand starting at position 3257 of SEQ ID NO: 707
uccgaauugcaguaucuuu

SEQ ID NO: 58085 - RNA, 19 nt, Artificial Sequence
  Description of Artificial Sequence: Synthetic oligonucleotide
  Antisense strand to SEQ ID NO: 58004
aaagauacugcaauucgga

SEQ ID NO: 58086 - RNA, 19 nt, Artificial Sequence
  Description of Artificial Sequence: Synthetic oligonucleotide
  Sense strand starting at position 3247 of SEQ ID NO: 707
aggaaauuacuccgaauug

SEQ ID NO: 58087 - RNA, 19 nt, Artificial Sequence
  Description of Artificial Sequence: Synthetic oligonucleotide
  Antisense strand to SEQ ID NO: 58006
caauucggaguaauuuccu

SEQ ID NO: 58088 - RNA, 19 nt, Artificial Sequence
  Description of Artificial Sequence: Synthetic oligonucleotide
  Sense strand starting at position 3167 of SEQ ID NO: 707
gagugucugggucagaauc

SEQ ID NO: 58089 - RNA, 19 nt, Artificial Sequence
  Description of Artificial Sequence: Synthetic oligonucleotide
  Antisense strand to SEQ ID NO: 58008
gauucugacccagacacuc

SEQ ID NO: 58090 - RNA, 19 nt, Artificial Sequence
  Description of Artificial Sequence: Synthetic oligonucleotide
  Sense strand starting at position 3165 of SEQ ID NO: 707
gugagugucugggucagaa

SEQ ID NO: 58091 - RNA, 19 nt, Artificial Sequence
  Description of Artificial Sequence: Synthetic oligonucleotide
  Antisense strand to SEQ ID NO: 58010
uucugacccagacacucac

SEQ ID NO: 58092 - RNA, 19 nt, Artificial Sequence
  Description of Artificial Sequence: Synthetic oligonucleotide
  Sense strand starting at position 3162 of SEQ ID NO: 707
ggagugagugucuggguca

SEQ ID NO: 58093 - RNA, 19 nt, Artificial Sequence
  Description of Artificial Sequence: Synthetic oligonucleotide
  Antisense strand to SEQ ID NO: 58012
ugacccagacacucacucc

SEQ ID NO: 58094 - RNA, 19 nt, Artificial Sequence
  Description of Artificial Sequence: Synthetic oligonucleotide
  Sense strand starting at position 3126 of SEQ ID NO: 707
gugcuaucucggccagcaa

SEQ ID NO: 58095 - RNA, 19 nt, Artificial Sequence
  Description of Artificial Sequence: Synthetic oligonucleotide
  Antisense strand to SEQ ID NO: 58014
uugcuggccgagauagcac

SEQ ID NO: 58096 - RNA, 19 nt, Artificial Sequence
  Description of Artificial Sequence: Synthetic oligonucleotide
  Sense strand starting at position 3114 of SEQ ID NO: 707
ggaagacagugugugcuau

SEQ ID NO: 58097 - RNA, 19 nt, Artificial Sequence
  Description of Artificial Sequence: Synthetic oligonucleotide
  Antisense strand to SEQ ID NO: 58016
auagcacacacugucuucc

SEQ ID NO: 58098 - RNA, 19 nt, Artificial Sequence
  Description of Artificial Sequence: Synthetic oligonucleotide
  Sense strand starting at position 3101 of SEQ ID NO: 707
gugggaagauuugggaaga

SEQ ID NO: 58099 - RNA, 19 nt, Artificial Sequence
  Description of Artificial Sequence: Synthetic oligonucleotide
  Antisense strand to SEQ ID NO: 58018
ucuucccaaaucuucccac

SEQ ID NO: 58100 - RNA, 19 nt, Artificial Sequence
  Description of Artificial Sequence: Synthetic oligonucleotide
  Sense strand starting at position 3075 of SEQ ID NO: 707
ccacaugaccuccgagagu

SEQ ID NO: 58101 - RNA, 19 nt, Artificial Sequence
  Description of Artificial Sequence: Synthetic oligonucleotide
  Antisense strand to SEQ ID NO: 58020
acucucggaggucaugugg

SEQ ID NO: 58102 - RNA, 19 nt, Artificial Sequence
  Description of Artificial Sequence: Synthetic oligonucleotide
  Sense strand starting at position 2941 of SEQ ID NO: 707
ugggcucucacagagucaa

SEQ ID NO: 58103 - RNA, 19 nt, Artificial Sequence
  Description of Artificial Sequence: Synthetic oligonucleotide
  Antisense strand to SEQ ID NO: 58022
uugacucugugagagccca

SEQ ID NO: 58104 - RNA, 19 nt, Artificial Sequence
  Description of Artificial Sequence: Synthetic oligonucleotide
  Sense strand starting at position 2923 of SEQ ID NO: 707
ccaggagucuuguugccuu

SEQ ID NO: 58105 - RNA, 19 nt, Artificial Sequence
  Description of Artificial Sequence: Synthetic oligonucleotide
  Antisense strand to SEQ ID NO: 58024
aaggcaacaagacuccugg

SEQ ID NO: 58106 - RNA, 19 nt, Artificial Sequence
  Description of Artificial Sequence: Synthetic oligonucleotide
  Sense strand starting at position 2914 of SEQ ID NO: 707
cugauaugaccaggagucu

SEQ ID NO: 58107 - RNA, 19 nt, Artificial Sequence
  Description of Artificial Sequence: Synthetic oligonucleotide
  Antisense strand to SEQ ID NO: 58026
agacuccuggucauaucag

SEQ ID NO: 58108 - RNA, 19 nt, Artificial Sequence
  Description of Artificial Sequence: Synthetic oligonucleotide
  Sense strand starting at position 2904 of SEQ ID NO: 707
caggacugcucugauauga

SEQ ID NO: 58109 - RNA, 19 nt, Artificial Sequence
  Description of Artificial Sequence: Synthetic oligonucleotide
  Antisense strand to SEQ ID NO: 58028
ucauaucagagcaguccug

SEQ ID NO: 58110 - RNA, 19 nt, Artificial Sequence
  Description of Artificial Sequence: Synthetic oligonucleotide
  Sense strand starting at position 2903 of SEQ ID NO: 707
ccaggacugcucugauaug

SEQ ID NO: 58111 - RNA, 19 nt, Artificial Sequence
  Description of Artificial Sequence: Synthetic oligonucleotide
  Antisense strand to SEQ ID NO: 58030
cauaucagagcaguccugg

SEQ ID NO: 58112 - RNA, 19 nt, Artificial Sequence
  Description of Artificial Sequence: Synthetic oligonucleotide
  Sense strand starting at position 2831 of SEQ ID NO: 707
gacaguugucccugggugu

SEQ ID NO: 58113 - RNA, 19 nt, Artificial Sequence
  Description of Artificial Sequence: Synthetic oligonucleotide
  Antisense strand to SEQ ID NO: 58032
acacccagggacaacuguc

SEQ ID NO: 58114 - RNA, 19 nt, Artificial Sequence
  Description of Artificial Sequence: Synthetic oligonucleotide
  Sense strand starting at position 2807 of SEQ ID NO: 707
ggaggaaguucugauauac

SEQ ID NO: 58115 - RNA, 19 nt, Artificial Sequence
  Description of Artificial Sequence: Synthetic oligonucleotide
  Antisense strand to SEQ ID NO: 58034
guauaucagaacuuccucc

SEQ ID NO: 58116 - RNA, 19 nt, Artificial Sequence
  Description of Artificial Sequence: Synthetic oligonucleotide
  Sense strand starting at position 2656 of SEQ ID NO: 707
agcccaggcucaguuaaau

SEQ ID NO: 58117 - RNA, 19 nt, Artificial Sequence
  Description of Artificial Sequence: Synthetic oligonucleotide
  Antisense strand to SEQ ID NO: 58036
auuuaacugagccugggcu

SEQ ID NO: 58118 - RNA, 19 nt, Artificial Sequence
  Description of Artificial Sequence: Synthetic oligonucleotide
  Sense strand starting at position 2639 of SEQ ID NO: 707
auuuaauucuuggaacaag

SEQ ID NO: 58119 - RNA, 19 nt, Artificial Sequence
  Description of Artificial Sequence: Synthetic oligonucleotide
  Antisense strand to SEQ ID NO: 58038
cuuguuccaagaauuaaau

SEQ ID NO: 58120 - RNA, 19 nt, Artificial Sequence
  Description of Artificial Sequence: Synthetic oligonucleotide
  Sense strand starting at position 2595 of SEQ ID NO: 707
ugugaacuccugugaguuc

SEQ ID NO: 58121 - RNA, 19 nt, Artificial Sequence
  Description of Artificial Sequence: Synthetic oligonucleotide
  Antisense strand to SEQ ID NO: 58040
gaacucacaggaguucaca

SEQ ID NO: 58122 - RNA, 19 nt, Artificial Sequence
  Description of Artificial Sequence: Synthetic oligonucleotide
  Sense strand starting at position 2566 of SEQ ID NO: 707
cugggcgcaugauuaaaua

SEQ ID NO: 58123 - RNA, 19 nt, Artificial Sequence
  Description of Artificial Sequence: Synthetic oligonucleotide
  Antisense strand to SEQ ID NO: 58042
uauuuaaucaugcgcccag

SEQ ID NO: 58124 - RNA, 19 nt, Artificial Sequence
  Description of Artificial Sequence: Synthetic oligonucleotide
  Sense strand starting at position 2348 of SEQ ID NO: 707
aguacugucgcuuggugaa

SEQ ID NO: 58125 - RNA, 19 nt, Artificial Sequence
  Description of Artificial Sequence: Synthetic oligonucleotide
  Antisense strand to SEQ ID NO: 58044
uucaccaagcgacaguacu

SEQ ID NO: 58126 - RNA, 19 nt, Artificial Sequence
  Description of Artificial Sequence: Synthetic oligonucleotide
  Sense strand starting at position 2133 of SEQ ID NO: 707
uuuauuuggccucgcuacu

SEQ ID NO: 58127 - RNA, 19 nt, Artificial Sequence
  Description of Artificial Sequence: Synthetic oligonucleotide
  Antisense strand to SEQ ID NO: 58046
aguagcgaggccaaauaaa

SEQ ID NO: 58128 - RNA, 19 nt, Artificial Sequence
  Description of Artificial Sequence: Synthetic oligonucleotide
  Sense strand starting at position 2118 of SEQ ID NO: 707
cuucguccaugcuaauuua

SEQ ID NO: 58129 - RNA, 19 nt, Artificial Sequence
  Description of Artificial Sequence: Synthetic oligonucleotide
  Antisense strand to SEQ ID NO: 58048
uaaauuagcauggacgaag

SEQ ID NO: 58130 - RNA, 19 nt, Artificial Sequence
  Description of Artificial Sequence: Synthetic oligonucleotide
  Sense strand starting at position 2116 of SEQ ID NO: 707
ggcuucguccaugcuaauu

SEQ ID NO: 58131 - RNA, 19 nt, Artificial Sequence
  Description of Artificial Sequence: Synthetic oligonucleotide
  Antisense strand to SEQ ID NO: 58050
aauuagcauggacgaagcc

SEQ ID NO: 58132 - RNA, 19 nt, Artificial Sequence
  Description of Artificial Sequence: Synthetic oligonucleotide
  Sense strand starting at position 2115 of SEQ ID NO: 707
gggcuucguccaugcuaau

SEQ ID NO: 58133 - RNA, 19 nt, Artificial Sequence
  Description of Artificial Sequence: Synthetic oligonucleotide
  Antisense strand to SEQ ID NO: 58052
auuagcauggacgaagccc

SEQ ID NO: 58134 - RNA, 19 nt, Artificial Sequence
  Description of Artificial Sequence: Synthetic oligonucleotide
  Sense strand starting at position 2113 of SEQ ID NO: 707
gagggcuucguccaugcua

SEQ ID NO: 58135 - RNA, 19 nt, Artificial Sequence
  Description of Artificial Sequence: Synthetic oligonucleotide
  Antisense strand to SEQ ID NO: 58054
uagcauggacgaagcccuc

SEQ ID NO: 58136 - RNA, 19 nt, Artificial Sequence
  Description of Artificial Sequence: Synthetic oligonucleotide
  Sense strand starting at position 2038 of SEQ ID NO: 707
ggguuuaaucauuauuagu

SEQ ID NO: 58137 - RNA, 19 nt, Artificial Sequence
  Description of Artificial Sequence: Synthetic oligonucleotide
  Antisense strand to SEQ ID NO: 58056
acuaauaaugauuaaaccc

SEQ ID NO: 58138 - RNA, 19 nt, Artificial Sequence
  Description of Artificial Sequence: Synthetic oligonucleotide
  Sense strand starting at position 2037 of SEQ ID NO: 707
cggguuuaaucauuauuag

SEQ ID NO: 58139 - RNA, 19 nt, Artificial Sequence
  Description of Artificial Sequence: Synthetic oligonucleotide
  Antisense strand to SEQ ID NO: 58058
cuaauaaugauuaaacccg

SEQ ID NO: 58140 - RNA, 19 nt, Artificial Sequence
  Description of Artificial Sequence: Synthetic oligonucleotide
  Sense strand starting at position 2031 of SEQ ID NO: 707
guggaacggguuuaaucau

SEQ ID NO: 58141 - RNA, 19 nt, Artificial Sequence
  Description of Artificial Sequence: Synthetic oligonucleotide
  Antisense strand to SEQ ID NO: 58060
augauuaaacccguuccac

SEQ ID NO: 58142 - RNA, 19 nt, Artificial Sequence
  Description of Artificial Sequence: Synthetic oligonucleotide
  Sense strand starting at position 36 of SEQ ID NO: 708
gcccuugguuuccuaaaca

SEQ ID NO: 58143 - RNA, 19 nt, Artificial Sequence
  Description of Artificial Sequence: Synthetic oligonucleotide
  Antisense strand to SEQ ID NO: 58062
uguuuaggaaaccaagggc

SEQ ID NO: 58144 - RNA, 19 nt, Artificial Sequence
  Description of Artificial Sequence: Synthetic oligonucleotide
  Sense strand starting at position 231 of SEQ ID NO: 708
ccaggaaugacuugacugu

SEQ ID NO: 58145 - RNA, 19 nt, Artificial Sequence
  Description of Artificial Sequence: Synthetic oligonucleotide
  Antisense strand to SEQ ID NO: 58064
acagucaagucauuccugg

SEQ ID NO: 58146 - RNA, 19 nt, Artificial Sequence
  Description of Artificial Sequence: Synthetic oligonucleotide
  Sense strand starting at position 256 of SEQ ID NO: 708
gauuaaagccucgacuggu

SEQ ID NO: 58147 - RNA, 19 nt, Artificial Sequence
  Description of Artificial Sequence: Synthetic oligonucleotide
  Antisense strand to SEQ ID NO: 58066
accagucgaggcuuuaauc

SEQ ID NO: 58148 - RNA, 19 nt, Artificial Sequence
  Description of Artificial Sequence: Synthetic oligonucleotide
  Sense strand starting at position 266 of SEQ ID NO: 708
ucgacugguuuccuaauca

SEQ ID NO: 58149 - RNA, 19 nt, Artificial Sequence
  Description of Artificial Sequence: Synthetic oligonucleotide
  Antisense strand to SEQ ID NO: 58068
ugauuaggaaaccagucga

SEQ ID NO: 58150 - RNA, 19 nt, Artificial Sequence
  Description of Artificial Sequence: Synthetic oligonucleotide
  Sense strand starting at position 277 of SEQ ID NO: 708
ccuaaucacccaggugaca

SEQ ID NO: 58151 - RNA, 19 nt, Artificial Sequence
  Description of Artificial Sequence: Synthetic oligonucleotide
  Antisense strand to SEQ ID NO: 58070
ugucaccugggugauuagg

SEQ ID NO: 58152 - RNA, 19 nt, Artificial Sequence
  Description of Artificial Sequence: Synthetic oligonucleotide
  Sense strand starting at position 341 of SEQ ID NO: 708
ugagucagccaaggagaau

SEQ ID NO: 58153 - RNA, 19 nt, Artificial Sequence
  Description of Artificial Sequence: Synthetic oligonucleotide
  Antisense strand to SEQ ID NO: 58072
auucuccuuggcugacuca

SEQ ID NO: 58154 - RNA, 19 nt, Artificial Sequence
  Description of Artificial Sequence: Synthetic oligonucleotide
  Sense strand starting at position 623 of SEQ ID NO: 708
uaaucugcuccugggaaga

SEQ ID NO: 58155 - RNA, 19 nt, Artificial Sequence
  Description of Artificial Sequence: Synthetic oligonucleotide
  Antisense strand to SEQ ID NO: 58074
ucuucccaggagcagauua

SEQ ID NO: 58156 - RNA, 19 nt, Artificial Sequence
  Description of Artificial Sequence: Synthetic oligonucleotide
  Sense strand starting at position 676 of SEQ ID NO: 708
aaguaaucuuggguggcaa

SEQ ID NO: 58157 - RNA, 19 nt, Artificial Sequence
  Description of Artificial Sequence: Synthetic oligonucleotide
  Antisense strand to SEQ ID NO: 58076
uugccacccaagauuacuu

SEQ ID NO: 58158 - RNA, 19 nt, Artificial Sequence
  Description of Artificial Sequence: Synthetic oligonucleotide
  Sense strand starting at position 677 of SEQ ID NO: 708
aguaaucuuggguggcaaa

SEQ ID NO: 58159 - RNA, 19 nt, Artificial Sequence
  Description of Artificial Sequence: Synthetic oligonucleotide
  Antisense strand to SEQ ID NO: 58078
uuugccacccaagauuacu

SEQ ID NO: 58160 - RNA, 19 nt, Artificial Sequence
  Description of Artificial Sequence: Synthetic oligonucleotide
  Sense strand starting at position 792 of SEQ ID NO: 708
gucguugagguucagauaa

SEQ ID NO: 58161 - RNA, 19 nt, Artificial Sequence
  Description of Artificial Sequence: Synthetic oligonucleotide
  Antisense strand to SEQ ID NO: 58080
uuaucugaaccucaacgac

SEQ ID NO: 58162 - RNA, 19 nt, Artificial Sequence
  Description of Artificial Sequence: Synthetic oligonucleotide
  Sense strand starting at position 851 of SEQ ID NO: 708
ucucccuuuccucaggaga

SEQ ID NO: 58163 - RNA, 19 nt, Artificial Sequence
  Description of Artificial Sequence: Synthetic oligonucleotide
  Antisense strand to SEQ ID NO: 58082
ucuccugaggaaagggaga

SEQ ID NO: 58164 - RNA, 19 nt, Artificial Sequence
  Description of Artificial Sequence: Synthetic oligonucleotide
  Sense strand starting at position 936 of SEQ ID NO: 708
cuaaauuggucacuuaaug

SEQ ID NO: 58165 - RNA, 19 nt, Artificial Sequence
  Description of Artificial Sequence: Synthetic oligonucleotide
  Antisense strand to SEQ ID NO: 58084
cauuaagugaccaauuuag

SEQ ID NO: 58166 - RNA, 19 nt, Artificial Sequence
  Description of Artificial Sequence: Synthetic oligonucleotide
  Sense strand starting at position 970 of SEQ ID NO: 708
ggguaucaggucugaccuu

SEQ ID NO: 58167 - RNA, 19 nt, Artificial Sequence
  Description of Artificial Sequence: Synthetic oligonucleotide
  Antisense strand to SEQ ID NO: 58086
aaggucagaccugauaccc

SEQ ID NO: 58168 - RNA, 19 nt, Artificial Sequence
  Description of Artificial Sequence: Synthetic oligonucleotide
  Sense strand starting at position 982 of SEQ ID NO: 708
ugaccuucggcuuaauaaa

SEQ ID NO: 58169 - RNA, 19 nt, Artificial Sequence
  Description of Artificial Sequence: Synthetic oligonucleotide
  Antisense strand to SEQ ID NO: 58088
uuuauuaagccgaagguca

SEQ ID NO: 58170 - RNA, 19 nt, Artificial Sequence
  Description of Artificial Sequence: Synthetic oligonucleotide
  Sense strand starting at position 1338 of SEQ ID NO: 708
gaaucaggguucuccaaga

SEQ ID NO: 58171 - RNA, 19 nt, Artificial Sequence
  Description of Artificial Sequence: Synthetic oligonucleotide
  Antisense strand to SEQ ID NO: 58090
ucuuggagaacccugauuc

SEQ ID NO: 58172 - RNA, 19 nt, Artificial Sequence
  Description of Artificial Sequence: Synthetic oligonucleotide
  Sense strand starting at position 1343 of SEQ ID NO: 708
aggguucuccaagagucga

SEQ ID NO: 58173 - RNA, 19 nt, Artificial Sequence
  Description of Artificial Sequence: Synthetic oligonucleotide
  Antisense strand to SEQ ID NO: 58092
ucgacucuuggagaacccu

SEQ ID NO: 58174 - RNA, 19 nt, Artificial Sequence
  Description of Artificial Sequence: Synthetic oligonucleotide
  Sense strand starting at position 1402 of SEQ ID NO: 708
ggaggucuggucuaccauu

SEQ ID NO: 58175 - RNA, 19 nt, Artificial Sequence
  Description of Artificial Sequence: Synthetic oligonucleotide
  Antisense strand to SEQ ID NO: 58094
aaugguagaccagaccucc

SEQ ID NO: 58176 - RNA, 19 nt, Artificial Sequence
  Description of Artificial Sequence: Synthetic oligonucleotide
  Sense strand starting at position 1465 of SEQ ID NO: 708
uucccuagcugucuagaaa

SEQ ID NO: 58177 - RNA, 19 nt, Artificial Sequence
  Description of Artificial Sequence: Synthetic oligonucleotide
  Antisense strand to SEQ ID NO: 58096
uuucuagacagcuagggaa

SEQ ID NO: 58178 - RNA, 19 nt, Artificial Sequence
  Description of Artificial Sequence: Synthetic oligonucleotide
  Sense strand starting at position 2137 of SEQ ID NO: 708
agucacuguucucuaggga

SEQ ID NO: 58179 - RNA, 19 nt, Artificial Sequence
  Description of Artificial Sequence: Synthetic oligonucleotide
  Antisense strand to SEQ ID NO: 58098
ucccuagagaacagugacu

SEQ ID NO: 58180 - RNA, 19 nt, Artificial Sequence
  Description of Artificial Sequence: Synthetic oligonucleotide
  Sense strand starting at position 2140 of SEQ ID NO: 708
cacuguucucuagggagau

SEQ ID NO: 58181 - RNA, 19 nt, Artificial Sequence
  Description of Artificial Sequence: Synthetic oligonucleotide
  Antisense strand to SEQ ID NO: 58100
aucucccuagagaacagug

SEQ ID NO: 58182 - RNA, 19 nt, Artificial Sequence
  Description of Artificial Sequence: Synthetic oligonucleotide
  Sense strand starting at position 2153 of SEQ ID NO: 708
ggagauuccgauuggcuag

SEQ ID NO: 58183 - RNA, 19 nt, Artificial Sequence
  Description of Artificial Sequence: Synthetic oligonucleotide
  Antisense strand to SEQ ID NO: 58102
cuagccaaucggaaucucc

SEQ ID NO: 58184 - RNA, 19 nt, Artificial Sequence
  Description of Artificial Sequence: Synthetic oligonucleotide
  Sense strand starting at position 2154 of SEQ ID NO: 708
gagauuccgauuggcuaga

SEQ ID NO: 58185 - RNA, 19 nt, Artificial Sequence
  Description of Artificial Sequence: Synthetic oligonucleotide
  Antisense strand to SEQ ID NO: 58104
ucuagccaaucggaaucuc

SEQ ID NO: 58186 - RNA, 19 nt, Artificial Sequence
  Description of Artificial Sequence: Synthetic oligonucleotide
  Sense strand starting at position 2214 of SEQ ID NO: 708
cuccuuugguccuuaaaga

SEQ ID NO: 58187 - RNA, 19 nt, Artificial Sequence
  Description of Artificial Sequence: Synthetic oligonucleotide
  Antisense strand to SEQ ID NO: 58106
ucuuuaaggaccaaaggag

SEQ ID NO: 58188 - RNA, 19 nt, Artificial Sequence
  Description of Artificial Sequence: Synthetic oligonucleotide
  Sense strand starting at position 2215 of SEQ ID NO: 708
uccuuugguccuuaaagaa

SEQ ID NO: 58189 - RNA, 19 nt, Artificial Sequence
  Description of Artificial Sequence: Synthetic oligonucleotide
  Antisense strand to SEQ ID NO: 58108
uucuuuaaggaccaaagga

SEQ ID NO: 58190 - RNA, 19 nt, Artificial Sequence
  Description of Artificial Sequence: Synthetic oligonucleotide
  Sense strand starting at position 2312 of SEQ ID NO: 708
ggaagugaccugcggaguu

SEQ ID NO: 58191 - RNA, 19 nt, Artificial Sequence
  Description of Artificial Sequence: Synthetic oligonucleotide
  Antisense strand to SEQ ID NO: 58110
aacuccgcaggucacuucc

SEQ ID NO: 58192 - RNA, 19 nt, Artificial Sequence
  Description of Artificial Sequence: Synthetic oligonucleotide
  Sense strand starting at position 2323 of SEQ ID NO: 708
gcggaguuuguagcagagu

SEQ ID NO: 58193 - RNA, 19 nt, Artificial Sequence
  Description of Artificial Sequence: Synthetic oligonucleotide
  Antisense strand to SEQ ID NO: 58112
acucugcuacaaacuccgc

SEQ ID NO: 58194 - RNA, 19 nt, Artificial Sequence
  Description of Artificial Sequence: Synthetic oligonucleotide
  Sense strand starting at position 2388 of SEQ ID NO: 708
ggaagaaauugagaaguca

SEQ ID NO: 58195 - RNA, 19 nt, Artificial Sequence
  Description of Artificial Sequence: Synthetic oligonucleotide
  Antisense strand to SEQ ID NO: 58114
ugacuucucaauuucuucc

SEQ ID NO: 58196 - RNA, 19 nt, Artificial Sequence
  Description of Artificial Sequence: Synthetic oligonucleotide
  Sense strand starting at position 2439 of SEQ ID NO: 708
aagagauugagccacguga

SEQ ID NO: 58197 - RNA, 19 nt, Artificial Sequence
  Description of Artificial Sequence: Synthetic oligonucleotide
  Antisense strand to SEQ ID NO: 58116
ucacguggcucaaucucuu

SEQ ID NO: 58198 - RNA, 19 nt, Artificial Sequence
  Description of Artificial Sequence: Synthetic oligonucleotide
  Sense strand starting at position 2441 of SEQ ID NO: 708
gagauugagccacgugauc

SEQ ID NO: 58199 - RNA, 19 nt, Artificial Sequence
  Description of Artificial Sequence: Synthetic oligonucleotide
  Antisense strand to SEQ ID NO: 58118
gaucacguggcucaaucuc

SEQ ID NO: 58200 - RNA, 19 nt, Artificial Sequence
  Description of Artificial Sequence: Synthetic oligonucleotide
  Sense strand starting at position 3179 of SEQ ID NO: 708
aguaaaggcuuucuaagac

SEQ ID NO: 58201 - RNA, 19 nt, Artificial Sequence
  Description of Artificial Sequence: Synthetic oligonucleotide
  Antisense strand to SEQ ID NO: 58120
gucuuagaaagccuuuacu

SEQ ID NO: 58202 - RNA, 19 nt, Artificial Sequence
  Description of Artificial Sequence: Synthetic oligonucleotide
  Sense strand starting at position 3188 of SEQ ID NO: 708
uuucuaagacacuguugau

SEQ ID NO: 58203 - RNA, 19 nt, Artificial Sequence
  Description of Artificial Sequence: Synthetic oligonucleotide
  Antisense strand to SEQ ID NO: 58122
aucaacagugucuuagaaa

SEQ ID NO: 58204 - RNA, 19 nt, Artificial Sequence
  Description of Artificial Sequence: Synthetic oligonucleotide
  Sense strand starting at position 3283 of SEQ ID NO: 708
aggcuuugugauuacccga

SEQ ID NO: 58205 - RNA, 19 nt, Artificial Sequence
  Description of Artificial Sequence: Synthetic oligonucleotide
  Antisense strand to SEQ ID NO: 58124
ucggguaaucacaaagccu

SEQ ID NO: 58206 - RNA, 19 nt, Artificial Sequence
  Description of Artificial Sequence: Synthetic oligonucleotide
  Sense strand starting at position 3291 of SEQ ID NO: 708
ugauuacccgacugucaca

SEQ ID NO: 58207 - RNA, 19 nt, Artificial Sequence
  Description of Artificial Sequence: Synthetic oligonucleotide
  Antisense strand to SEQ ID NO: 58126
ugugacagucggguaauca

SEQ ID NO: 58208 - RNA, 19 nt, Artificial Sequence
  Description of Artificial Sequence: Synthetic oligonucleotide
  Sense strand starting at position 3414 of SEQ ID NO: 708
aacgaauaauguguuuaca

SEQ ID NO: 58209 - RNA, 19 nt, Artificial Sequence
  Description of Artificial Sequence: Synthetic oligonucleotide
  Antisense strand to SEQ ID NO: 58128
uguaaacacauuauucguu

SEQ ID NO: 58210 - RNA, 19 nt, Artificial Sequence
  Description of Artificial Sequence: Synthetic oligonucleotide
  Sense strand starting at position 3416 of SEQ ID NO: 708
cgaauaauguguuuacaug

SEQ ID NO: 58211 - RNA, 19 nt, Artificial Sequence
  Description of Artificial Sequence: Synthetic oligonucleotide
  Antisense strand to SEQ ID NO: 58130
cauguaaacacauuauucg

SEQ ID NO: 58212 - RNA, 19 nt, Artificial Sequence
  Description of Artificial Sequence: Synthetic oligonucleotide
  Sense strand starting at position 3417 of SEQ ID NO: 708
gaauaauguguuuacaugu

SEQ ID NO: 58213 - RNA, 19 nt, Artificial Sequence
  Description of Artificial Sequence: Synthetic oligonucleotide
  Antisense strand to SEQ ID NO: 58132
acauguaaacacauuauuc

SEQ ID NO: 58214 - RNA, 19 nt, Artificial Sequence
  Description of Artificial Sequence: Synthetic oligonucleotide
  Sense strand starting at position 3603 of SEQ ID NO: 708
acuggaguugacugucaug

SEQ ID NO: 58215 - RNA, 19 nt, Artificial Sequence
  Description of Artificial Sequence: Synthetic oligonucleotide
  Antisense strand to SEQ ID NO: 58134
caugacagucaacuccagu

SEQ ID NO: 58216 - RNA, 19 nt, Artificial Sequence
  Description of Artificial Sequence: Synthetic oligonucleotide
  Sense strand starting at position 3754 of SEQ ID NO: 708
gagauaagggucuggccau

SEQ ID NO: 58217 - RNA, 19 nt, Artificial Sequence
  Description of Artificial Sequence: Synthetic oligonucleotide
  Antisense strand to SEQ ID NO: 58136
auggccagacccuuaucuc

SEQ ID NO: 58218 - RNA, 19 nt, Artificial Sequence
  Description of Artificial Sequence: Synthetic oligonucleotide
  Sense strand starting at position 3838 of SEQ ID NO: 708
agggauuacaggugucaac

SEQ ID NO: 58219 - RNA, 19 nt, Artificial Sequence
  Description of Artificial Sequence: Synthetic oligonucleotide
  Antisense strand to SEQ ID NO: 58138
guugacaccuguaaucccu

SEQ ID NO: 58220 - RNA, 19 nt, Artificial Sequence
  Description of Artificial Sequence: Synthetic oligonucleotide
  Sense strand starting at position 3932 of SEQ ID NO: 708
aaacaugugcuguagcaaa

SEQ ID NO: 58221 - RNA, 19 nt, Artificial Sequence
  Description of Artificial Sequence: Synthetic oligonucleotide
  Antisense strand to SEQ ID NO: 58140
uuugcuacagcacauguuu

SEQ ID NO: 58222 - RNA, 19 nt, Artificial Sequence
  Description of Artificial Sequence: Synthetic oligonucleotide
  Sense strand starting at position 3896 of SEQ ID NO: 709
gguuccaaccagugauaug

SEQ ID NO: 58223 - RNA, 19 nt, Artificial Sequence
  Description of Artificial Sequence: Synthetic oligonucleotide
  Antisense strand to SEQ ID NO: 58142
cauaucacugguuggaacc

SEQ ID NO: 58224 - RNA, 19 nt, Artificial Sequence
  Description of Artificial Sequence: Synthetic oligonucleotide
  Sense strand starting at position 3674 of SEQ ID NO: 709
cgauuuguguacucauccu

SEQ ID NO: 58225 - RNA, 19 nt, Artificial Sequence
  Description of Artificial Sequence: Synthetic oligonucleotide
  Antisense strand to SEQ ID NO: 58144
aggaugaguacacaaaucg

SEQ ID NO: 58226 - RNA, 19 nt, Artificial Sequence
  Description of Artificial Sequence: Synthetic oligonucleotide
  Sense strand starting at position 3616 of SEQ ID NO: 709
guaacaaugguccauucuu

SEQ ID NO: 58227 - RNA, 19 nt, Artificial Sequence
  Description of Artificial Sequence: Synthetic oligonucleotide
  Antisense strand to SEQ ID NO: 58146
aagaauggaccauuguuac

SEQ ID NO: 58228 - RNA, 19 nt, Artificial Sequence
  Description of Artificial Sequence: Synthetic oligonucleotide
  Sense strand starting at position 3522 of SEQ ID NO: 709
acuugcuauggaugaaaua

SEQ ID NO: 58229 - RNA, 19 nt, Artificial Sequence
  Description of Artificial Sequence: Synthetic oligonucleotide
  Antisense strand to SEQ ID NO: 58148
uauuucauccauagcaagu

SEQ ID NO: 58230 - RNA, 19 nt, Artificial Sequence
  Description of Artificial Sequence: Synthetic oligonucleotide
  Sense strand starting at position 3518 of SEQ ID NO: 709
uugaacuugcuauggauga

SEQ ID NO: 58231 - RNA, 19 nt, Artificial Sequence
  Description of Artificial Sequence: Synthetic oligonucleotide
  Antisense strand to SEQ ID NO: 58150
ucauccauagcaaguucaa

SEQ ID NO: 58232 - RNA, 19 nt, Artificial Sequence
  Description of Artificial Sequence: Synthetic oligonucleotide
  Sense strand starting at position 3355 of SEQ ID NO: 709
aaguguccagaaugauaau

SEQ ID NO: 58233 - RNA, 19 nt, Artificial Sequence
  Description of Artificial Sequence: Synthetic oligonucleotide
  Antisense strand to SEQ ID NO: 58152
auuaucauucuggacacuu

SEQ ID NO: 58234 - RNA, 19 nt, Artificial Sequence
  Description of Artificial Sequence: Synthetic oligonucleotide
  Sense strand starting at position 3272 of SEQ ID NO: 709
acgcgaaaucaagacauau

SEQ ID NO: 58235 - RNA, 19 nt, Artificial Sequence
  Description of Artificial Sequence: Synthetic oligonucleotide
  Antisense strand to SEQ ID NO: 58154
auaugucuugauuucgcgu

SEQ ID NO: 58236 - RNA, 19 nt, Artificial Sequence
  Description of Artificial Sequence: Synthetic oligonucleotide
  Sense strand starting at position 3264 of SEQ ID NO: 709
auuguuagacgcgaaauca

SEQ ID NO: 58237 - RNA, 19 nt, Artificial Sequence
  Description of Artificial Sequence: Synthetic oligonucleotide
  Antisense strand to SEQ ID NO: 58156
ugauuucgcgucuaacaau

SEQ ID NO: 58238 - RNA, 19 nt, Artificial Sequence
  Description of Artificial Sequence: Synthetic oligonucleotide
  Sense strand starting at position 3248 of SEQ ID NO: 709
gaaagccagugauccuauu

SEQ ID NO: 58239 - RNA, 19 nt, Artificial Sequence
  Description of Artificial Sequence: Synthetic oligonucleotide
  Antisense strand to SEQ ID NO: 58158
aauaggaucacuggcuuuc

SEQ ID NO: 58240 - RNA, 19 nt, Artificial Sequence
  Description of Artificial Sequence: Synthetic oligonucleotide
  Sense strand starting at position 3245 of SEQ ID NO: 709
agggaaagccagugauccu

SEQ ID NO: 58241 - RNA, 19 nt, Artificial Sequence
  Description of Artificial Sequence: Synthetic oligonucleotide
  Antisense strand to SEQ ID NO: 58160
aggaucacuggcuuucccu

SEQ ID NO: 58242 - RNA, 19 nt, Artificial Sequence
  Description of Artificial Sequence: Synthetic oligonucleotide
  Sense strand starting at position 3229 of SEQ ID NO: 709
caauaugaguguuuauagg

SEQ ID NO: 58243 - RNA, 19 nt, Artificial Sequence
  Description of Artificial Sequence: Synthetic oligonucleotide
  Antisense strand to SEQ ID NO: 58162
ccuauaaacacucauauug

SEQ ID NO: 58244 - RNA, 19 nt, Artificial Sequence
  Description of Artificial Sequence: Synthetic oligonucleotide
  Sense strand starting at position 3225 of SEQ ID NO: 709
acaucaauaugaguguuua

SEQ ID NO: 58245 - RNA, 19 nt, Artificial Sequence
  Description of Artificial Sequence: Synthetic oligonucleotide
  Antisense strand to SEQ ID NO: 58164
uaaacacucauauugaugu

SEQ ID NO: 58246 - RNA, 19 nt, Artificial Sequence
  Description of Artificial Sequence: Synthetic oligonucleotide
  Sense strand starting at position 3222 of SEQ ID NO: 709
aggacaucaauaugagugu

SEQ ID NO: 58247 - RNA, 19 nt, Artificial Sequence
  Description of Artificial Sequence: Synthetic oligonucleotide
  Antisense strand to SEQ ID NO: 58166
acacucauauugauguccu

SEQ ID NO: 58248 - RNA, 19 nt, Artificial Sequence
  Description of Artificial Sequence: Synthetic oligonucleotide
  Sense strand starting at position 3209 of SEQ ID NO: 709
acuuuaaugcgauaggaca

SEQ ID NO: 58249 - RNA, 19 nt, Artificial Sequence
  Description of Artificial Sequence: Synthetic oligonucleotide
  Antisense strand to SEQ ID NO: 58168
uguccuaucgcauuaaagu

SEQ ID NO: 58250 - RNA, 19 nt, Artificial Sequence
  Description of Artificial Sequence: Synthetic oligonucleotide
  Sense strand starting at position 3195 of SEQ ID NO: 709
gugaguauccaggaacuuu

SEQ ID NO: 58251 - RNA, 19 nt, Artificial Sequence
  Description of Artificial Sequence: Synthetic oligonucleotide
  Antisense strand to SEQ ID NO: 58170
aaaguuccuggauacucac

SEQ ID NO: 58252 - RNA, 19 nt, Artificial Sequence
  Description of Artificial Sequence: Synthetic oligonucleotide
  Sense strand starting at position 3061 of SEQ ID NO: 709
gauuacuucccagaugcag

SEQ ID NO: 58253 - RNA, 19 nt, Artificial Sequence
  Description of Artificial Sequence: Synthetic oligonucleotide
  Antisense strand to SEQ ID NO: 58172
cugcaucugggaaguaauc

SEQ ID NO: 58254 - RNA, 19 nt, Artificial Sequence
  Description of Artificial Sequence: Synthetic oligonucleotide
  Sense strand starting at position 2987 of SEQ ID NO: 709
aauguuggacaauguuauu

SEQ ID NO: 58255 - RNA, 19 nt, Artificial Sequence
  Description of Artificial Sequence: Synthetic oligonucleotide
  Antisense strand to SEQ ID NO: 58174
aauaacauuguccaacauu

SEQ ID NO: 58256 - RNA, 19 nt, Artificial Sequence
  Description of Artificial Sequence: Synthetic oligonucleotide
  Sense strand starting at position 2984 of SEQ ID NO: 709
gccaauguuggacaauguu

SEQ ID NO: 58257 - RNA, 19 nt, Artificial Sequence
  Description of Artificial Sequence: Synthetic oligonucleotide
  Antisense strand to SEQ ID NO: 58176
aacauuguccaacauuggc

SEQ ID NO: 58258 - RNA, 19 nt, Artificial Sequence
  Description of Artificial Sequence: Synthetic oligonucleotide
  Sense strand starting at position 2913 of SEQ ID NO: 709
gggaaacaauuagugcauu

SEQ ID NO: 58259 - RNA, 19 nt, Artificial Sequence
  Description of Artificial Sequence: Synthetic oligonucleotide
  Antisense strand to SEQ ID NO: 58178
aaugcacuaauuguuuccc

SEQ ID NO: 58260 - RNA, 19 nt, Artificial Sequence
  Description of Artificial Sequence: Synthetic oligonucleotide
  Sense strand starting at position 2873 of SEQ ID NO: 709
gacagcucuguagaauuau

SEQ ID NO: 58261 - RNA, 19 nt, Artificial Sequence
  Description of Artificial Sequence: Synthetic oligonucleotide
  Antisense strand to SEQ ID NO: 58180
auaauucuacagagcuguc

SEQ ID NO: 58262 - RNA, 19 nt, Artificial Sequence
  Description of Artificial Sequence: Synthetic oligonucleotide
  Sense strand starting at position 2871 of SEQ ID NO: 709
gggacagcucuguagaauu

SEQ ID NO: 58263 - RNA, 19 nt, Artificial Sequence
  Description of Artificial Sequence: Synthetic oligonucleotide
  Antisense strand to SEQ ID NO: 58182
aauucuacagagcuguccc

SEQ ID NO: 58264 - RNA, 19 nt, Artificial Sequence
  Description of Artificial Sequence: Synthetic oligonucleotide
  Sense strand starting at position 2870 of SEQ ID NO: 709
ugggacagcucuguagaau

SEQ ID NO: 58265 - RNA, 19 nt, Artificial Sequence
  Description of Artificial Sequence: Synthetic oligonucleotide
  Antisense strand to SEQ ID NO: 58184
auucuacagagcuguccca

SEQ ID NO: 58266 - RNA, 19 nt, Artificial Sequence
  Description of Artificial Sequence: Synthetic oligonucleotide
  Sense strand starting at position 2869 of SEQ ID NO: 709
augggacagcucuguagaa

SEQ ID NO: 58267 - RNA, 19 nt, Artificial Sequence
  Description of Artificial Sequence: Synthetic oligonucleotide
  Antisense strand to SEQ ID NO: 58186
uucuacagagcugucccau

SEQ ID NO: 58268 - RNA, 19 nt, Artificial Sequence
  Description of Artificial Sequence: Synthetic oligonucleotide
  Sense strand starting at position 2841 of SEQ ID NO: 709
gucuccuaucuguaggaca

SEQ ID NO: 58269 - RNA, 19 nt, Artificial Sequence
  Description of Artificial Sequence: Synthetic oligonucleotide
  Antisense strand to SEQ ID NO: 58188
uguccuacagauaggagac

SEQ ID NO: 58270 - RNA, 19 nt, Artificial Sequence
  Description of Artificial Sequence: Synthetic oligonucleotide
  Sense strand starting at position 2765 of SEQ ID NO: 709
uugagaucuccaugcacca

SEQ ID NO: 58271 - RNA, 19 nt, Artificial Sequence
  Description of Artificial Sequence: Synthetic oligonucleotide
  Antisense strand to SEQ ID NO: 58190
uggugcauggagaucucaa

SEQ ID NO: 58272 - RNA, 19 nt, Artificial Sequence
  Description of Artificial Sequence: Synthetic oligonucleotide
  Sense strand starting at position 2763 of SEQ ID NO: 709
aguugagaucuccaugcac

SEQ ID NO: 58273 - RNA, 19 nt, Artificial Sequence
  Description of Artificial Sequence: Synthetic oligonucleotide
  Antisense strand to SEQ ID NO: 58192
gugcauggagaucucaacu

SEQ ID NO: 58274 - RNA, 19 nt, Artificial Sequence
  Description of Artificial Sequence: Synthetic oligonucleotide
  Sense strand starting at position 2657 of SEQ ID NO: 709
gcacuugguccaguguguu

SEQ ID NO: 58275 - RNA, 19 nt, Artificial Sequence
  Description of Artificial Sequence: Synthetic oligonucleotide
  Antisense strand to SEQ ID NO: 58194
aacacacuggaccaagugc

SEQ ID NO: 58276 - RNA, 19 nt, Artificial Sequence
  Description of Artificial Sequence: Synthetic oligonucleotide
  Sense strand starting at position 2271 of SEQ ID NO: 709
cugcuauuccugccgcaua

SEQ ID NO: 58277 - RNA, 19 nt, Artificial Sequence
  Description of Artificial Sequence: Synthetic oligonucleotide
  Antisense strand to SEQ ID NO: 58196
uaugcggcaggaauagcag

SEQ ID NO: 58278 - RNA, 19 nt, Artificial Sequence
  Description of Artificial Sequence: Synthetic oligonucleotide
  Sense strand starting at position 2231 of SEQ ID NO: 709
gaguuagugggacaccuuu

SEQ ID NO: 58279 - RNA, 19 nt, Artificial Sequence
  Description of Artificial Sequence: Synthetic oligonucleotide
  Antisense strand to SEQ ID NO: 58198
aaaggugucccacuaacuc

SEQ ID NO: 58280 - RNA, 19 nt, Artificial Sequence
  Description of Artificial Sequence: Synthetic oligonucleotide
  Sense strand starting at position 2113 of SEQ ID NO: 709
ggugaaugguugccaagag

SEQ ID NO: 58281 - RNA, 19 nt, Artificial Sequence
  Description of Artificial Sequence: Synthetic oligonucleotide
  Antisense strand to SEQ ID NO: 58200
cucuuggcaaccauucacc

SEQ ID NO: 58282 - RNA, 19 nt, Artificial Sequence
  Description of Artificial Sequence: Synthetic oligonucleotide
  Sense strand starting at position 845 of SEQ ID NO: 709
cguugaguucaggugugca

SEQ ID NO: 58283 - RNA, 19 nt, Artificial Sequence
  Description of Artificial Sequence: Synthetic oligonucleotide
  Antisense strand to SEQ ID NO: 58202
ugcacaccugaacucaacg

SEQ ID NO: 58284 - RNA, 19 nt, Artificial Sequence
  Description of Artificial Sequence: Synthetic oligonucleotide
  Sense strand starting at position 751 of SEQ ID NO: 709
aauaguggguucuccagaa

SEQ ID NO: 58285 - RNA, 19 nt, Artificial Sequence
  Description of Artificial Sequence: Synthetic oligonucleotide
  Antisense strand to SEQ ID NO: 58204
uucuggagaacccacuauu

SEQ ID NO: 58286 - RNA, 19 nt, Artificial Sequence
  Description of Artificial Sequence: Synthetic oligonucleotide
  Sense strand starting at position 644 of SEQ ID NO: 709
uuaauuaagccagggaacu

SEQ ID NO: 58287 - RNA, 19 nt, Artificial Sequence
  Description of Artificial Sequence: Synthetic oligonucleotide
  Antisense strand to SEQ ID NO: 58206
aguucccuggcuuaauuaa

SEQ ID NO: 58288 - RNA, 19 nt, Artificial Sequence
  Description of Artificial Sequence: Synthetic oligonucleotide
  Sense strand starting at position 593 of SEQ ID NO: 709
uuuauaucuccguaagaaa

SEQ ID NO: 58289 - RNA, 19 nt, Artificial Sequence
  Description of Artificial Sequence: Synthetic oligonucleotide
  Antisense strand to SEQ ID NO: 58208
uuucuuacggagauauaaa

SEQ ID NO: 58290 - RNA, 19 nt, Artificial Sequence
  Description of Artificial Sequence: Synthetic oligonucleotide
  Sense strand starting at position 592 of SEQ ID NO: 709
cuuuauaucuccguaagaa

SEQ ID NO: 58291 - RNA, 19 nt, Artificial Sequence
  Description of Artificial Sequence: Synthetic oligonucleotide
  Antisense strand to SEQ ID NO: 58210
uucuuacggagauauaaag

SEQ ID NO: 58292 - RNA, 19 nt, Artificial Sequence
  Description of Artificial Sequence: Synthetic oligonucleotide
  Sense strand starting at position 418 of SEQ ID NO: 709
uguacuuugggaggaucua

SEQ ID NO: 58293 - RNA, 19 nt, Artificial Sequence
  Description of Artificial Sequence: Synthetic oligonucleotide
  Antisense strand to SEQ ID NO: 58212
uagauccucccaaaguaca

SEQ ID NO: 58294 - RNA, 19 nt, Artificial Sequence
  Description of Artificial Sequence: Synthetic oligonucleotide
  Sense strand starting at position 411 of SEQ ID NO: 709
ccagaaguguacuuuggga

SEQ ID NO: 58295 - RNA, 19 nt, Artificial Sequence
  Description of Artificial Sequence: Synthetic oligonucleotide
  Antisense strand to SEQ ID NO: 58214
ucccaaaguacacuucugg

SEQ ID NO: 58296 - RNA, 19 nt, Artificial Sequence
  Description of Artificial Sequence: Synthetic oligonucleotide
  Sense strand starting at position 318 of SEQ ID NO: 709
ggcucauuuccuugccaau

SEQ ID NO: 58297 - RNA, 19 nt, Artificial Sequence
  Description of Artificial Sequence: Synthetic oligonucleotide
  Antisense strand to SEQ ID NO: 58216
auuggcaaggaaaugagcc

SEQ ID NO: 58298 - RNA, 19 nt, Artificial Sequence
  Description of Artificial Sequence: Synthetic oligonucleotide
  Sense strand starting at position 317 of SEQ ID NO: 709
gggcucauuuccuugccaa

SEQ ID NO: 58299 - RNA, 19 nt, Artificial Sequence
  Description of Artificial Sequence: Synthetic oligonucleotide
  Antisense strand to SEQ ID NO: 58218
uuggcaaggaaaugagccc

SEQ ID NO: 58300 - RNA, 19 nt, Artificial Sequence
  Description of Artificial Sequence: Synthetic oligonucleotide
  Sense strand starting at position 4 of SEQ ID NO: 709
acucuaaagcuauggguau

SEQ ID NO: 58301 - RNA, 19 nt, Artificial Sequence
  Description of Artificial Sequence: Synthetic oligonucleotide
  Antisense strand to SEQ ID NO: 58220
auacccauagcuuuagagu

SEQ ID NO: 58302 - RNA, 19 nt, Artificial Sequence
  Description of Artificial Sequence: Synthetic oligonucleotide
  Sense strand starting at position 69 of SEQ ID NO: 711
augcuagcugcauaucauu

SEQ ID NO: 58303 - RNA, 19 nt, Artificial Sequence
  Description of Artificial Sequence: Synthetic oligonucleotide
  Antisense strand to SEQ ID NO: 58222
aaugauaugcagcuagcau

SEQ ID NO: 58304 - RNA, 19 nt, Artificial Sequence
  Description of Artificial Sequence: Synthetic oligonucleotide
  Sense strand starting at position 80 of SEQ ID NO: 711
auaucauuuacguguuguu

SEQ ID NO: 58305 - RNA, 19 nt, Artificial Sequence
  Description of Artificial Sequence: Synthetic oligonucleotide
  Antisense strand to SEQ ID NO: 58224
aacaacacguaaaugauau

SEQ ID NO: 58306 - RNA, 19 nt, Artificial Sequence
  Description of Artificial Sequence: Synthetic oligonucleotide
  Sense strand starting at position 89 of SEQ ID NO: 711
acguguuguuaauuuagaa

SEQ ID NO: 58307 - RNA, 19 nt, Artificial Sequence
  Description of Artificial Sequence: Synthetic oligonucleotide
  Antisense strand to SEQ ID NO: 58226
uucuaaauuaacaacacgu

SEQ ID NO: 58308 - RNA, 19 nt, Artificial Sequence
  Description of Artificial Sequence: Synthetic oligonucleotide
  Sense strand starting at position 529 of SEQ ID NO: 711
gugagacucuugccuccaa

SEQ ID NO: 58309 - RNA, 19 nt, Artificial Sequence
  Description of Artificial Sequence: Synthetic oligonucleotide
  Antisense strand to SEQ ID NO: 58228
uuggaggcaagagucucac

SEQ ID NO: 58310 - RNA, 19 nt, Artificial Sequence
  Description of Artificial Sequence: Synthetic oligonucleotide
  Sense strand starting at position 819 of SEQ ID NO: 711
uggaguauuucagaguagg

SEQ ID NO: 58311 - RNA, 19 nt, Artificial Sequence
  Description of Artificial Sequence: Synthetic oligonucleotide
  Antisense strand to SEQ ID NO: 58230
ccuacucugaaauacucca

SEQ ID NO: 58312 - RNA, 19 nt, Artificial Sequence
  Description of Artificial Sequence: Synthetic oligonucleotide
  Sense strand starting at position 850 of SEQ ID NO: 711
agaggauagucagauaaau

SEQ ID NO: 58313 - RNA, 19 nt, Artificial Sequence
  Description of Artificial Sequence: Synthetic oligonucleotide
  Antisense strand to SEQ ID NO: 58232
auuuaucugacuauccucu

SEQ ID NO: 58314 - RNA, 19 nt, Artificial Sequence
  Description of Artificial Sequence: Synthetic oligonucleotide
  Sense strand starting at position 930 of SEQ ID NO: 711
uggaauuaugguggugagu

SEQ ID NO: 58315 - RNA, 19 nt, Artificial Sequence
  Description of Artificial Sequence: Synthetic oligonucleotide
  Antisense strand to SEQ ID NO: 58234
acucaccaccauaauucca

SEQ ID NO: 58316 - RNA, 19 nt, Artificial Sequence
  Description of Artificial Sequence: Synthetic oligonucleotide
  Sense strand starting at position 1093 of SEQ ID NO: 711
uccuucuuagucugaccua

SEQ ID NO: 58317 - RNA, 19 nt, Artificial Sequence
  Description of Artificial Sequence: Synthetic oligonucleotide
  Antisense strand to SEQ ID NO: 58236
uaggucagacuaagaagga

SEQ ID NO: 58318 - RNA, 19 nt, Artificial Sequence
  Description of Artificial Sequence: Synthetic oligonucleotide
  Sense strand starting at position 1096 of SEQ ID NO: 711
uucuuagucugaccuaugu

SEQ ID NO: 58319 - RNA, 19 nt, Artificial Sequence
  Description of Artificial Sequence: Synthetic oligonucleotide
  Antisense strand to SEQ ID NO: 58238
acauaggucagacuaagaa

SEQ ID NO: 58320 - RNA, 19 nt, Artificial Sequence
  Description of Artificial Sequence: Synthetic oligonucleotide
  Sense strand starting at position 1106 of SEQ ID NO: 711
gaccuaugucuuugugcaa

SEQ ID NO: 58321 - RNA, 19 nt, Artificial Sequence
  Description of Artificial Sequence: Synthetic oligonucleotide
  Antisense strand to SEQ ID NO: 58240
uugcacaaagacauagguc

SEQ ID NO: 58322 - RNA, 19 nt, Artificial Sequence
  Description of Artificial Sequence: Synthetic oligonucleotide
  Sense strand starting at position 1117 of SEQ ID NO: 711
uugugcaaucaauaguuua

SEQ ID NO: 58323 - RNA, 19 nt, Artificial Sequence
  Description of Artificial Sequence: Synthetic oligonucleotide
  Antisense strand to SEQ ID NO: 58242
uaaacuauugauugcacaa

SEQ ID NO: 58324 - RNA, 19 nt, Artificial Sequence
  Description of Artificial Sequence: Synthetic oligonucleotide
  Sense strand starting at position 1120 of SEQ ID NO: 711
ugcaaucaauaguuuagau

SEQ ID NO: 58325 - RNA, 19 nt, Artificial Sequence
  Description of Artificial Sequence: Synthetic oligonucleotide
  Antisense strand to SEQ ID NO: 58244
aucuaaacuauugauugca

SEQ ID NO: 58326 - RNA, 19 nt, Artificial Sequence
  Description of Artificial Sequence: Synthetic oligonucleotide
  Sense strand starting at position 1176 of SEQ ID NO: 711
cuguauacuugcucacaag

SEQ ID NO: 58327 - RNA, 19 nt, Artificial Sequence
  Description of Artificial Sequence: Synthetic oligonucleotide
  Antisense strand to SEQ ID NO: 58246
cuugugagcaaguauacag

SEQ ID NO: 58328 - RNA, 19 nt, Artificial Sequence
  Description of Artificial Sequence: Synthetic oligonucleotide
  Sense strand starting at position 1252 of SEQ ID NO: 711
uuacaugucucuccugacu

SEQ ID NO: 58329 - RNA, 19 nt, Artificial Sequence
  Description of Artificial Sequence: Synthetic oligonucleotide
  Antisense strand to SEQ ID NO: 58248
agucaggagagacauguaa

SEQ ID NO: 58330 - RNA, 19 nt, Artificial Sequence
  Description of Artificial Sequence: Synthetic oligonucleotide
  Sense strand starting at position 1513 of SEQ ID NO: 711
cugucaacgccugagcuua

SEQ ID NO: 58331 - RNA, 19 nt, Artificial Sequence
  Description of Artificial Sequence: Synthetic oligonucleotide
  Antisense strand to SEQ ID NO: 58250
uaagcucaggcguugacag

SEQ ID NO: 58332 - RNA, 19 nt, Artificial Sequence
  Description of Artificial Sequence: Synthetic oligonucleotide
  Sense strand starting at position 1854 of SEQ ID NO: 711
ggauuuccaucaggacuuu

SEQ ID NO: 58333 - RNA, 19 nt, Artificial Sequence
  Description of Artificial Sequence: Synthetic oligonucleotide
  Antisense strand to SEQ ID NO: 58252
aaaguccugauggaaaucc

SEQ ID NO: 58334 - RNA, 19 nt, Artificial Sequence
  Description of Artificial Sequence: Synthetic oligonucleotide
  Sense strand starting at position 1879 of SEQ ID NO: 711
cggucagcagcuuugugau

SEQ ID NO: 58335 - RNA, 19 nt, Artificial Sequence
  Description of Artificial Sequence: Synthetic oligonucleotide
  Antisense strand to SEQ ID NO: 58254
aucacaaagcugcugaccg

SEQ ID NO: 58336 - RNA, 19 nt, Artificial Sequence
  Description of Artificial Sequence: Synthetic oligonucleotide
  Sense strand starting at position 1886 of SEQ ID NO: 711
cagcuuugugaucagcaga

SEQ ID NO: 58337 - RNA, 19 nt, Artificial Sequence
  Description of Artificial Sequence: Synthetic oligonucleotide
  Antisense strand to SEQ ID NO: 58256
ucugcugaucacaaagcug

SEQ ID NO: 58338 - RNA, 19 nt, Artificial Sequence
  Description of Artificial Sequence: Synthetic oligonucleotide
  Sense strand starting at position 1985 of SEQ ID NO: 711
ugccucucuggugagaaua

SEQ ID NO: 58339 - RNA, 19 nt, Artificial Sequence
  Description of Artificial Sequence: Synthetic oligonucleotide
  Antisense strand to SEQ ID NO: 58258
uauucucaccagagaggca

SEQ ID NO: 58340 - RNA, 19 nt, Artificial Sequence
  Description of Artificial Sequence: Synthetic oligonucleotide
  Sense strand starting at position 2011 of SEQ ID NO: 711
gcaagugcccuugcuaagu

SEQ ID NO: 58341 - RNA, 19 nt, Artificial Sequence
  Description of Artificial Sequence: Synthetic oligonucleotide
  Antisense strand to SEQ ID NO: 58260
acuuagcaagggcacuugc

SEQ ID NO: 58342 - RNA, 19 nt, Artificial Sequence
  Description of Artificial Sequence: Synthetic oligonucleotide
  Sense strand starting at position 2121 of SEQ ID NO: 711
gagcaaagagcacgauauu

SEQ ID NO: 58343 - RNA, 19 nt, Artificial Sequence
  Description of Artificial Sequence: Synthetic oligonucleotide
  Antisense strand to SEQ ID NO: 58262
aauaucgugcucuuugcuc

SEQ ID NO: 58344 - RNA, 19 nt, Artificial Sequence
  Description of Artificial Sequence: Synthetic oligonucleotide
  Sense strand starting at position 2132 of SEQ ID NO: 711
acgauauuugcauguauua

SEQ ID NO: 58345 - RNA, 19 nt, Artificial Sequence
  Description of Artificial Sequence: Synthetic oligonucleotide
  Antisense strand to SEQ ID NO: 58264
uaauacaugcaaauaucgu

SEQ ID NO: 58346 - RNA, 19 nt, Artificial Sequence
  Description of Artificial Sequence: Synthetic oligonucleotide
  Sense strand starting at position 2254 of SEQ ID NO: 711
aaaugaaacugguuggguu

SEQ ID NO: 58347 - RNA, 19 nt, Artificial Sequence
  Description of Artificial Sequence: Synthetic oligonucleotide
  Antisense strand to SEQ ID NO: 58266
aacccaaccaguuucauuu

SEQ ID NO: 58348 - RNA, 19 nt, Artificial Sequence
  Description of Artificial Sequence: Synthetic oligonucleotide
  Sense strand starting at position 2784 of SEQ ID NO: 711
uuugaugaugaguguccau

SEQ ID NO: 58349 - RNA, 19 nt, Artificial Sequence
  Description of Artificial Sequence: Synthetic oligonucleotide
  Antisense strand to SEQ ID NO: 58268
auggacacucaucaucaaa

SEQ ID NO: 58350 - RNA, 19 nt, Artificial Sequence
  Description of Artificial Sequence: Synthetic oligonucleotide
  Sense strand starting at position 2957 of SEQ ID NO: 711
gaacaauuaggguggcaga

SEQ ID NO: 58351 - RNA, 19 nt, Artificial Sequence
  Description of Artificial Sequence: Synthetic oligonucleotide
  Antisense strand to SEQ ID NO: 58270
ucugccacccuaauuguuc

SEQ ID NO: 58352 - RNA, 19 nt, Artificial Sequence
  Description of Artificial Sequence: Synthetic oligonucleotide
  Sense strand starting at position 2991 of SEQ ID NO: 711
guuacaaccguccaagaaa

SEQ ID NO: 58353 - RNA, 19 nt, Artificial Sequence
  Description of Artificial Sequence: Synthetic oligonucleotide
  Antisense strand to SEQ ID NO: 58272
uuucuuggacgguuguaac

SEQ ID NO: 58354 - RNA, 19 nt, Artificial Sequence
  Description of Artificial Sequence: Synthetic oligonucleotide
  Sense strand starting at position 3017 of SEQ ID NO: 711
gauauuugccgaggcugua

SEQ ID NO: 58355 - RNA, 19 nt, Artificial Sequence
  Description of Artificial Sequence: Synthetic oligonucleotide
  Antisense strand to SEQ ID NO: 58274
uacagccucggcaaauauc

SEQ ID NO: 58356 - RNA, 19 nt, Artificial Sequence
  Description of Artificial Sequence: Synthetic oligonucleotide
  Sense strand starting at position 3085 of SEQ ID NO: 711
aggagacuguagguguuaa

SEQ ID NO: 58357 - RNA, 19 nt, Artificial Sequence
  Description of Artificial Sequence: Synthetic oligonucleotide
  Antisense strand to SEQ ID NO: 58276
uuaacaccuacagucuccu

SEQ ID NO: 58358 - RNA, 19 nt, Artificial Sequence
  Description of Artificial Sequence: Synthetic oligonucleotide
  Sense strand starting at position 3111 of SEQ ID NO: 711
ggucaaagauuauucuaau

SEQ ID NO: 58359 - RNA, 19 nt, Artificial Sequence
  Description of Artificial Sequence: Synthetic oligonucleotide
  Antisense strand to SEQ ID NO: 58278
auuagaauaaucuuugacc

SEQ ID NO: 58360 - RNA, 19 nt, Artificial Sequence
  Description of Artificial Sequence: Synthetic oligonucleotide
  Sense strand starting at position 3112 of SEQ ID NO: 711
gucaaagauuauucuaaug

SEQ ID NO: 58361 - RNA, 19 nt, Artificial Sequence
  Description of Artificial Sequence: Synthetic oligonucleotide
  Antisense strand to SEQ ID NO: 58280
cauuagaauaaucuuugac

SEQ ID NO: 58362 - RNA, 19 nt, Artificial Sequence
  Description of Artificial Sequence: Synthetic oligonucleotide
  Sense strand starting at position 3244 of SEQ ID NO: 711
agaugcucggugugauaua

SEQ ID NO: 58363 - RNA, 19 nt, Artificial Sequence
  Description of Artificial Sequence: Synthetic oligonucleotide
  Antisense strand to SEQ ID NO: 58282
uauaucacaccgagcaucu

SEQ ID NO: 58364 - RNA, 19 nt, Artificial Sequence
  Description of Artificial Sequence: Synthetic oligonucleotide
  Sense strand starting at position 3249 of SEQ ID NO: 711
cucggugugauauauguaa

SEQ ID NO: 58365 - RNA, 19 nt, Artificial Sequence
  Description of Artificial Sequence: Synthetic oligonucleotide
  Antisense strand to SEQ ID NO: 58284
uuacauauaucacaccgag

SEQ ID NO: 58366 - RNA, 19 nt, Artificial Sequence
  Description of Artificial Sequence: Synthetic oligonucleotide
  Sense strand starting at position 3251 of SEQ ID NO: 711
cggugugauauauguaaag

SEQ ID NO: 58367 - RNA, 19 nt, Artificial Sequence
  Description of Artificial Sequence: Synthetic oligonucleotide
  Antisense strand to SEQ ID NO: 58286
cuuuacauauaucacaccg

SEQ ID NO: 58368 - RNA, 19 nt, Artificial Sequence
  Description of Artificial Sequence: Synthetic oligonucleotide
  Sense strand starting at position 3253 of SEQ ID NO: 711
gugugauauauguaaagau

SEQ ID NO: 58369 - RNA, 19 nt, Artificial Sequence
  Description of Artificial Sequence: Synthetic oligonucleotide
  Antisense strand to SEQ ID NO: 58288
aucuuuacauauaucacac

SEQ ID NO: 58370 - RNA, 19 nt, Artificial Sequence
  Description of Artificial Sequence: Synthetic oligonucleotide
  Sense strand starting at position 3269 of SEQ ID NO: 711
gauguuauacuuggccuga

SEQ ID NO: 58371 - RNA, 19 nt, Artificial Sequence
  Description of Artificial Sequence: Synthetic oligonucleotide
  Antisense strand to SEQ ID NO: 58290
ucaggccaaguauaacauc

SEQ ID NO: 58372 - RNA, 19 nt, Artificial Sequence
  Description of Artificial Sequence: Synthetic oligonucleotide
  Sense strand starting at position 3270 of SEQ ID NO: 711
auguuauacuuggccugau

SEQ ID NO: 58373 - RNA, 19 nt, Artificial Sequence
  Description of Artificial Sequence: Synthetic oligonucleotide
  Antisense strand to SEQ ID NO: 58292
aucaggccaaguauaacau

SEQ ID NO: 58374 - RNA, 19 nt, Artificial Sequence
  Description of Artificial Sequence: Synthetic oligonucleotide
  Sense strand starting at position 3271 of SEQ ID NO: 711
uguuauacuuggccugauc

SEQ ID NO: 58375 - RNA, 19 nt, Artificial Sequence
  Description of Artificial Sequence: Synthetic oligonucleotide
  Antisense strand to SEQ ID NO: 58294
gaucaggccaaguauaaca

SEQ ID NO: 58376 - RNA, 19 nt, Artificial Sequence
  Description of Artificial Sequence: Synthetic oligonucleotide
  Sense strand starting at position 3274 of SEQ ID NO: 711
uauacuuggccugaucuga

SEQ ID NO: 58377 - RNA, 19 nt, Artificial Sequence
  Description of Artificial Sequence: Synthetic oligonucleotide
  Antisense strand to SEQ ID NO: 58296
ucagaucaggccaaguaua

SEQ ID NO: 58378 - RNA, 19 nt, Artificial Sequence
  Description of Artificial Sequence: Synthetic oligonucleotide
  Sense strand starting at position 3932 of SEQ ID NO: 711
ccaguuuaggagcgugaga

SEQ ID NO: 58379 - RNA, 19 nt, Artificial Sequence
  Description of Artificial Sequence: Synthetic oligonucleotide
  Antisense strand to SEQ ID NO: 58298
ucucacgcuccuaaacugg

SEQ ID NO: 58380 - RNA, 19 nt, Artificial Sequence
  Description of Artificial Sequence: Synthetic oligonucleotide
  Sense strand starting at position 3934 of SEQ ID NO: 711
aguuuaggagcgugagaau

SEQ ID NO: 58381 - RNA, 19 nt, Artificial Sequence
  Description of Artificial Sequence: Synthetic oligonucleotide
  Antisense strand to SEQ ID NO: 58300
auucucacgcuccuaaacu

SEQ ID NO: 58382 - RNA, 19 nt, Artificial Sequence
  Description of Artificial Sequence: Synthetic oligonucleotide
  Sense strand starting at position 385 of SEQ ID NO: 710
ggauuuccaucaggacuuu

SEQ ID NO: 58383 - RNA, 19 nt, Artificial Sequence
  Description of Artificial Sequence: Synthetic oligonucleotide
  Antisense strand to SEQ ID NO: 58302
aaaguccugauggaaaucc

SEQ ID NO: 58384 - RNA, 19 nt, Artificial Sequence
  Description of Artificial Sequence: Synthetic oligonucleotide
  Sense strand starting at position 410 of SEQ ID NO: 710
cggucagcagcuuugugau

SEQ ID NO: 58385 - RNA, 19 nt, Artificial Sequence
  Description of Artificial Sequence: Synthetic oligonucleotide
  Antisense strand to SEQ ID NO: 58304
aucacaaagcugcugaccg

SEQ ID NO: 58386 - RNA, 19 nt, Artificial Sequence
  Description of Artificial Sequence: Synthetic oligonucleotide
  Sense strand starting at position 417 of SEQ ID NO: 710
cagcuuugugaucagcaga

SEQ ID NO: 58387 - RNA, 19 nt, Artificial Sequence
  Description of Artificial Sequence: Synthetic oligonucleotide
  Antisense strand to SEQ ID NO: 58306
ucugcugaucacaaagcug

SEQ ID NO: 58388 - RNA, 19 nt, Artificial Sequence
  Description of Artificial Sequence: Synthetic oligonucleotide
  Sense strand starting at position 516 of SEQ ID NO: 710
ugccucucuggugagaaua

SEQ ID NO: 58389 - RNA, 19 nt, Artificial Sequence
  Description of Artificial Sequence: Synthetic oligonucleotide
  Antisense strand to SEQ ID NO: 58308
uauucucaccagagaggca

SEQ ID NO: 58390 - RNA, 19 nt, Artificial Sequence
  Description of Artificial Sequence: Synthetic oligonucleotide
  Sense strand starting at position 542 of SEQ ID NO: 710
gcaagugcccuugcuaagu

SEQ ID NO: 58391 - RNA, 19 nt, Artificial Sequence
  Description of Artificial Sequence: Synthetic oligonucleotide
  Antisense strand to SEQ ID NO: 58310
acuuagcaagggcacuugc

SEQ ID NO: 58392 - RNA, 19 nt, Artificial Sequence
  Description of Artificial Sequence: Synthetic oligonucleotide
  Sense strand starting at position 652 of SEQ ID NO: 710
gagcaaagagcacgauauu

SEQ ID NO: 58393 - RNA, 19 nt, Artificial Sequence
  Description of Artificial Sequence: Synthetic oligonucleotide
  Antisense strand to SEQ ID NO: 58312
aauaucgugcucuuugcuc

SEQ ID NO: 58394 - RNA, 19 nt, Artificial Sequence
  Description of Artificial Sequence: Synthetic oligonucleotide
  Sense strand starting at position 663 of SEQ ID NO: 710
acgauauuugcauguauua

SEQ ID NO: 58395 - RNA, 19 nt, Artificial Sequence
  Description of Artificial Sequence: Synthetic oligonucleotide
  Antisense strand to SEQ ID NO: 58314
uaauacaugcaaauaucgu

SEQ ID NO: 58396 - RNA, 19 nt, Artificial Sequence
  Description of Artificial Sequence: Synthetic oligonucleotide
  Sense strand starting at position 785 of SEQ ID NO: 710
aaaugaaacugguuggguu

SEQ ID NO: 58397 - RNA, 19 nt, Artificial Sequence
  Description of Artificial Sequence: Synthetic oligonucleotide
  Antisense strand to SEQ ID NO: 58316
aacccaaccaguuucauuu

SEQ ID NO: 58398 - RNA, 19 nt, Artificial Sequence
  Description of Artificial Sequence: Synthetic oligonucleotide
  Sense strand starting at position 1315 of SEQ ID NO: 710
uuugaugaugaguguccau

SEQ ID NO: 58399 - RNA, 19 nt, Artificial Sequence
  Description of Artificial Sequence: Synthetic oligonucleotide
  Antisense strand to SEQ ID NO: 58318
auggacacucaucaucaaa

SEQ ID NO: 58400 - RNA, 19 nt, Artificial Sequence
  Description of Artificial Sequence: Synthetic oligonucleotide
  Sense strand starting at position 1488 of SEQ ID NO: 710
gaacaauuaggguggcaga

SEQ ID NO: 58401 - RNA, 19 nt, Artificial Sequence
  Description of Artificial Sequence: Synthetic oligonucleotide
  Antisense strand to SEQ ID NO: 58320
ucugccacccuaauuguuc

SEQ ID NO: 58402 - RNA, 19 nt, Artificial Sequence
  Description of Artificial Sequence: Synthetic oligonucleotide
  Sense strand starting at position 1522 of SEQ ID NO: 710
guuacaaccguccaagaaa

SEQ ID NO: 58403 - RNA, 19 nt, Artificial Sequence
  Description of Artificial Sequence: Synthetic oligonucleotide
  Antisense strand to SEQ ID NO: 58322
uuucuuggacgguuguaac

SEQ ID NO: 58404 - RNA, 19 nt, Artificial Sequence
  Description of Artificial Sequence: Synthetic oligonucleotide
  Sense strand starting at position 1548 of SEQ ID NO: 710
gauauuugccgaggcugua

SEQ ID NO: 58405 - RNA, 19 nt, Artificial Sequence
  Description of Artificial Sequence: Synthetic oligonucleotide
  Antisense strand to SEQ ID NO: 58324
uacagccucggcaaauauc

SEQ ID NO: 58406 - RNA, 19 nt, Artificial Sequence
  Description of Artificial Sequence: Synthetic oligonucleotide
  Sense strand starting at position 1616 of SEQ ID NO: 710
aggagacuguagguguuaa

SEQ ID NO: 58407 - RNA, 19 nt, Artificial Sequence
  Description of Artificial Sequence: Synthetic oligonucleotide
  Antisense strand to SEQ ID NO: 58326
uuaacaccuacagucuccu

SEQ ID NO: 58408 - RNA, 19 nt, Artificial Sequence
  Description of Artificial Sequence: Synthetic oligonucleotide
  Sense strand starting at position 1642 of SEQ ID NO: 710
ggucaaagauuauucuaau

SEQ ID NO: 58409 - RNA, 19 nt, Artificial Sequence
  Description of Artificial Sequence: Synthetic oligonucleotide
  Antisense strand to SEQ ID NO: 58328
auuagaauaaucuuugacc

SEQ ID NO: 58410 - RNA, 19 nt, Artificial Sequence
  Description of Artificial Sequence: Synthetic oligonucleotide
  Sense strand starting at position 1643 of SEQ ID NO: 710
gucaaagauuauucuaaug

SEQ ID NO: 58411 - RNA, 19 nt, Artificial Sequence
  Description of Artificial Sequence: Synthetic oligonucleotide
  Antisense strand to SEQ ID NO: 58330
cauuagaauaaucuuugac

SEQ ID NO: 58412 - RNA, 19 nt, Artificial Sequence
  Description of Artificial Sequence: Synthetic oligonucleotide
  Sense strand starting at position 1780 of SEQ ID NO: 710
cucggugugauauauguaa

SEQ ID NO: 58413 - RNA, 19 nt, Artificial Sequence
  Description of Artificial Sequence: Synthetic oligonucleotide
  Antisense strand to SEQ ID NO: 58332
uuacauauaucacaccgag

SEQ ID NO: 58414 - RNA, 19 nt, Artificial Sequence
  Description of Artificial Sequence: Synthetic oligonucleotide
  Sense strand starting at position 1782 of SEQ ID NO: 710
cggugugauauauguaaag

SEQ ID NO: 58415 - RNA, 19 nt, Artificial Sequence
  Description of Artificial Sequence: Synthetic oligonucleotide
  Antisense strand to SEQ ID NO: 58334
cuuuacauauaucacaccg

SEQ ID NO: 58416 - RNA, 19 nt, Artificial Sequence
  Description of Artificial Sequence: Synthetic oligonucleotide
  Sense strand starting at position 1784 of SEQ ID NO: 710
gugugauauauguaaagau

SEQ ID NO: 58417 - RNA, 19 nt, Artificial Sequence
  Description of Artificial Sequence: Synthetic oligonucleotide
  Antisense strand to SEQ ID NO: 58336
aucuuuacauauaucacac

SEQ ID NO: 58418 - RNA, 19 nt, Artificial Sequence
  Description of Artificial Sequence: Synthetic oligonucleotide
  Sense strand starting at position 1800 of SEQ ID NO: 710
gauguuauacuuggccuga

SEQ ID NO: 58419 - RNA, 19 nt, Artificial Sequence
  Description of Artificial Sequence: Synthetic oligonucleotide
  Antisense strand to SEQ ID NO: 58338
ucaggccaaguauaacauc

SEQ ID NO: 58420 - RNA, 19 nt, Artificial Sequence
  Description of Artificial Sequence: Synthetic oligonucleotide
  Sense strand starting at position 1801 of SEQ ID NO: 710
auguuauacuuggccugau

SEQ ID NO: 58421 - RNA, 19 nt, Artificial Sequence
  Description of Artificial Sequence: Synthetic oligonucleotide
  Antisense strand to SEQ ID NO: 58340
aucaggccaaguauaacau

SEQ ID NO: 58422 - RNA, 19 nt, Artificial Sequence
  Description of Artificial Sequence: Synthetic oligonucleotide
  Sense strand starting at position 1802 of SEQ ID NO: 710
uguuauacuuggccugauc

SEQ ID NO: 58423 - RNA, 19 nt, Artificial Sequence
  Description of Artificial Sequence: Synthetic oligonucleotide
  Antisense strand to SEQ ID NO: 58342
gaucaggccaaguauaaca

SEQ ID NO: 58424 - RNA, 19 nt, Artificial Sequence
  Description of Artificial Sequence: Synthetic oligonucleotide
  Sense strand starting at position 1805 of SEQ ID NO: 710
uauacuuggccugaucuga

SEQ ID NO: 58425 - RNA, 19 nt, Artificial Sequence
  Description of Artificial Sequence: Synthetic oligonucleotide
  Antisense strand to SEQ ID NO: 58344
ucagaucaggccaaguaua

SEQ ID NO: 58426 - RNA, 19 nt, Artificial Sequence
  Description of Artificial Sequence: Synthetic oligonucleotide
  Sense strand starting at position 2463 of SEQ ID NO: 710
ccaguuuaggagcgugaga

SEQ ID NO: 58427 - RNA, 19 nt, Artificial Sequence
  Description of Artificial Sequence: Synthetic oligonucleotide
  Antisense strand to SEQ ID NO: 58346
ucucacgcuccuaaacugg

SEQ ID NO: 58428 - RNA, 19 nt, Artificial Sequence
  Description of Artificial Sequence: Synthetic oligonucleotide
  Sense strand starting at position 2465 of SEQ ID NO: 710
aguuuaggagcgugagaau

SEQ ID NO: 58429 - RNA, 19 nt, Artificial Sequence
  Description of Artificial Sequence: Synthetic oligonucleotide
  Antisense strand to SEQ ID NO: 58348
auucucacgcuccuaaacu

SEQ ID NO: 58430 - RNA, 19 nt, Artificial Sequence
  Description of Artificial Sequence: Synthetic oligonucleotide
  Sense strand starting at position 2542 of SEQ ID NO: 710
gggagaagucuugggucug

SEQ ID NO: 58431 - RNA, 19 nt, Artificial Sequence
  Description of Artificial Sequence: Synthetic oligonucleotide
  Antisense strand to SEQ ID NO: 58350
cagacccaagacuucuccc

SEQ ID NO: 58432 - RNA, 19 nt, Artificial Sequence
  Description of Artificial Sequence: Synthetic oligonucleotide
  Sense strand starting at position 2644 of SEQ ID NO: 710
ccgcgagguguguuuauuc

SEQ ID NO: 58433 - RNA, 19 nt, Artificial Sequence
  Description of Artificial Sequence: Synthetic oligonucleotide
  Antisense strand to SEQ ID NO: 58352
gaauaaacacaccucgcgg

SEQ ID NO: 58434 - RNA, 19 nt, Artificial Sequence
  Description of Artificial Sequence: Synthetic oligonucleotide
  Sense strand starting at position 2762 of SEQ ID NO: 710
cggccuuauuuccuccgaa

SEQ ID NO: 58435 - RNA, 19 nt, Artificial Sequence
  Description of Artificial Sequence: Synthetic oligonucleotide
  Antisense strand to SEQ ID NO: 58354
uucggaggaaauaaggccg

SEQ ID NO: 58436 - RNA, 19 nt, Artificial Sequence
  Description of Artificial Sequence: Synthetic oligonucleotide
  Sense strand starting at position 2763 of SEQ ID NO: 710
ggccuuauuuccuccgaau

SEQ ID NO: 58437 - RNA, 19 nt, Artificial Sequence
  Description of Artificial Sequence: Synthetic oligonucleotide
  Antisense strand to SEQ ID NO: 58356
auucggaggaaauaaggcc

SEQ ID NO: 58438 - RNA, 19 nt, Artificial Sequence
  Description of Artificial Sequence: Synthetic oligonucleotide
  Sense strand starting at position 2803 of SEQ ID NO: 710
ugaacucauuucuagguua

SEQ ID NO: 58439 - RNA, 19 nt, Artificial Sequence
  Description of Artificial Sequence: Synthetic oligonucleotide
  Antisense strand to SEQ ID NO: 58358
uaaccuagaaaugaguuca

SEQ ID NO: 58440 - RNA, 19 nt, Artificial Sequence
  Description of Artificial Sequence: Synthetic oligonucleotide
  Sense strand starting at position 2818 of SEQ ID NO: 710
guuagaaguagucacagua

SEQ ID NO: 58441 - RNA, 19 nt, Artificial Sequence
  Description of Artificial Sequence: Synthetic oligonucleotide
  Antisense strand to SEQ ID NO: 58360
uacugugacuacuucuaac

SEQ ID NO: 58442 - RNA, 19 nt, Artificial Sequence
  Description of Artificial Sequence: Synthetic oligonucleotide
  Sense strand starting at position 2937 of SEQ ID NO: 710
ggccuuaacgcacacaaau

SEQ ID NO: 58443 - RNA, 19 nt, Artificial Sequence
  Description of Artificial Sequence: Synthetic oligonucleotide
  Antisense strand to SEQ ID NO: 58362
auuugugugcguuaaggcc

SEQ ID NO: 58444 - RNA, 19 nt, Artificial Sequence
  Description of Artificial Sequence: Synthetic oligonucleotide
  Sense strand starting at position 3030 of SEQ ID NO: 710
aaugcuuuguggcuuauuu

SEQ ID NO: 58445 - RNA, 19 nt, Artificial Sequence
  Description of Artificial Sequence: Synthetic oligonucleotide
  Antisense strand to SEQ ID NO: 58364
aaauaagccacaaagcauu

SEQ ID NO: 58446 - RNA, 19 nt, Artificial Sequence
  Description of Artificial Sequence: Synthetic oligonucleotide
  Sense strand starting at position 3172 of SEQ ID NO: 710
ccucuacuuugaguuauac

SEQ ID NO: 58447 - RNA, 19 nt, Artificial Sequence
  Description of Artificial Sequence: Synthetic oligonucleotide
  Antisense strand to SEQ ID NO: 58366
guauaacucaaaguagagg

SEQ ID NO: 58448 - RNA, 19 nt, Artificial Sequence
  Description of Artificial Sequence: Synthetic oligonucleotide
  Sense strand starting at position 3182 of SEQ ID NO: 710
gaguuauacugcccugaag

SEQ ID NO: 58449 - RNA, 19 nt, Artificial Sequence
  Description of Artificial Sequence: Synthetic oligonucleotide
  Antisense strand to SEQ ID NO: 58368
cuucagggcaguauaacuc

SEQ ID NO: 58450 - RNA, 19 nt, Artificial Sequence
  Description of Artificial Sequence: Synthetic oligonucleotide
  Sense strand starting at position 3184 of SEQ ID NO: 710
guuauacugcccugaagaa

SEQ ID NO: 58451 - RNA, 19 nt, Artificial Sequence
  Description of Artificial Sequence: Synthetic oligonucleotide
  Antisense strand to SEQ ID NO: 58370
uucuucagggcaguauaac

SEQ ID NO: 58452 - RNA, 19 nt, Artificial Sequence
  Description of Artificial Sequence: Synthetic oligonucleotide
  Sense strand starting at position 3269 of SEQ ID NO: 710
gacagauucuggucuuuaa

SEQ ID NO: 58453 - RNA, 19 nt, Artificial Sequence
  Description of Artificial Sequence: Synthetic oligonucleotide
  Antisense strand to SEQ ID NO: 58372
uuaaagaccagaaucuguc

SEQ ID NO: 58454 - RNA, 19 nt, Artificial Sequence
  Description of Artificial Sequence: Synthetic oligonucleotide
  Sense strand starting at position 3272 of SEQ ID NO: 710
agauucuggucuuuaacaa

SEQ ID NO: 58455 - RNA, 19 nt, Artificial Sequence
  Description of Artificial Sequence: Synthetic oligonucleotide
  Antisense strand to SEQ ID NO: 58374
uuguuaaagaccagaaucu

SEQ ID NO: 58456 - RNA, 19 nt, Artificial Sequence
  Description of Artificial Sequence: Synthetic oligonucleotide
  Sense strand starting at position 3319 of SEQ ID NO: 710
gacucagcugcuggaauaa

SEQ ID NO: 58457 - RNA, 19 nt, Artificial Sequence
  Description of Artificial Sequence: Synthetic oligonucleotide
  Antisense strand to SEQ ID NO: 58376
uuauuccagcagcugaguc

SEQ ID NO: 58458 - RNA, 19 nt, Artificial Sequence
  Description of Artificial Sequence: Synthetic oligonucleotide
  Sense strand starting at position 3491 of SEQ ID NO: 710
gcgcuuauuggaggacuaa

SEQ ID NO: 58459 - RNA, 19 nt, Artificial Sequence
  Description of Artificial Sequence: Synthetic oligonucleotide
  Antisense strand to SEQ ID NO: 58378
uuaguccuccaauaagcgc

SEQ ID NO: 58460 - RNA, 19 nt, Artificial Sequence
  Description of Artificial Sequence: Synthetic oligonucleotide
  Sense strand starting at position 3492 of SEQ ID NO: 710
cgcuuauuggaggacuaau

SEQ ID NO: 58461 - RNA, 19 nt, Artificial Sequence
  Description of Artificial Sequence: Synthetic oligonucleotide
  Antisense strand to SEQ ID NO: 58380
auuaguccuccaauaagcg

SEQ ID NO: 58462 - RNA, 19 nt, Artificial Sequence
  Description of Artificial Sequence: Synthetic oligonucleotide
  Sense strand starting at position 181 of SEQ ID NO: 712
augcuagcugcauaucauu

SEQ ID NO: 58463 - RNA, 19 nt, Artificial Sequence
  Description of Artificial Sequence: Synthetic oligonucleotide
  Antisense strand to SEQ ID NO: 58382
aaugauaugcagcuagcau

SEQ ID NO: 58464 - RNA, 19 nt, Artificial Sequence
  Description of Artificial Sequence: Synthetic oligonucleotide
  Sense strand starting at position 192 of SEQ ID NO: 712
auaucauuuacguguuguu

SEQ ID NO: 58465 - RNA, 19 nt, Artificial Sequence
  Description of Artificial Sequence: Synthetic oligonucleotide
  Antisense strand to SEQ ID NO: 58384
aacaacacguaaaugauau

SEQ ID NO: 58466 - RNA, 19 nt, Artificial Sequence
  Description of Artificial Sequence: Synthetic oligonucleotide
  Sense strand starting at position 201 of SEQ ID NO: 712
acguguuguuaauuuagaa

SEQ ID NO: 58467 - RNA, 19 nt, Artificial Sequence
  Description of Artificial Sequence: Synthetic oligonucleotide
  Antisense strand to SEQ ID NO: 58386
uucuaaauuaacaacacgu

SEQ ID NO: 58468 - RNA, 19 nt, Artificial Sequence
  Description of Artificial Sequence: Synthetic oligonucleotide
  Sense strand starting at position 641 of SEQ ID NO: 712
gugagacucuugccuccaa

SEQ ID NO: 58469 - RNA, 19 nt, Artificial Sequence
  Description of Artificial Sequence: Synthetic oligonucleotide
  Antisense strand to SEQ ID NO: 58388
uuggaggcaagagucucac

SEQ ID NO: 58470 - RNA, 19 nt, Artificial Sequence
  Description of Artificial Sequence: Synthetic oligonucleotide
  Sense strand starting at position 931 of SEQ ID NO: 712
uggaguauuucagaguagg

SEQ ID NO: 58471 - RNA, 19 nt, Artificial Sequence
  Description of Artificial Sequence: Synthetic oligonucleotide
  Antisense strand to SEQ ID NO: 58390
ccuacucugaaauacucca

SEQ ID NO: 58472 - RNA, 19 nt, Artificial Sequence
  Description of Artificial Sequence: Synthetic oligonucleotide
  Sense strand starting at position 962 of SEQ ID NO: 712
agaggauagucagauaaau

SEQ ID NO: 58473 - RNA, 19 nt, Artificial Sequence
  Description of Artificial Sequence: Synthetic oligonucleotide
  Antisense strand to SEQ ID NO: 58392
auuuaucugacuauccucu

SEQ ID NO: 58474 - RNA, 19 nt, Artificial Sequence
  Description of Artificial Sequence: Synthetic oligonucleotide
  Sense strand starting at position 1042 of SEQ ID NO: 712
uggaauuaugguggugagu

SEQ ID NO: 58475 - RNA, 19 nt, Artificial Sequence
  Description of Artificial Sequence: Synthetic oligonucleotide
  Antisense strand to SEQ ID NO: 58394
acucaccaccauaauucca

SEQ ID NO: 58476 - RNA, 19 nt, Artificial Sequence
  Description of Artificial Sequence: Synthetic oligonucleotide
  Sense strand starting at position 1205 of SEQ ID NO: 712
uccuucuuagucugaccua

SEQ ID NO: 58477 - RNA, 19 nt, Artificial Sequence
  Description of Artificial Sequence: Synthetic oligonucleotide
  Antisense strand to SEQ ID NO: 58396
uaggucagacuaagaagga

SEQ ID NO: 58478 - RNA, 19 nt, Artificial Sequence
  Description of Artificial Sequence: Synthetic oligonucleotide
  Sense strand starting at position 1208 of SEQ ID NO: 712
uucuuagucugaccuaugu

SEQ ID NO: 58479 - RNA, 19 nt, Artificial Sequence
  Description of Artificial Sequence: Synthetic oligonucleotide
  Antisense strand to SEQ ID NO: 58398
acauaggucagacuaagaa

SEQ ID NO: 58480 - RNA, 19 nt, Artificial Sequence
  Description of Artificial Sequence: Synthetic oligonucleotide
  Sense strand starting at position 1218 of SEQ ID NO: 712
gaccuaugucuuugugcaa

SEQ ID NO: 58481 - RNA, 19 nt, Artificial Sequence
  Description of Artificial Sequence: Synthetic oligonucleotide
  Antisense strand to SEQ ID NO: 58400
uugcacaaagacauagguc

SEQ ID NO: 58482 - RNA, 19 nt, Artificial Sequence
  Description of Artificial Sequence: Synthetic oligonucleotide
  Sense strand starting at position 1219 of SEQ ID NO: 712
accuaugucuuugugcaau

SEQ ID NO: 58483 - RNA, 19 nt, Artificial Sequence
  Description of Artificial Sequence: Synthetic oligonucleotide
  Antisense strand to SEQ ID NO: 58402
auugcacaaagacauaggu

SEQ ID NO: 58484 - RNA, 19 nt, Artificial Sequence
  Description of Artificial Sequence: Synthetic oligonucleotide
  Sense strand starting at position 1229 of SEQ ID NO: 712
uugugcaaucaauaguuua

SEQ ID NO: 58485 - RNA, 19 nt, Artificial Sequence
  Description of Artificial Sequence: Synthetic oligonucleotide
  Antisense strand to SEQ ID NO: 58404
uaaacuauugauugcacaa

SEQ ID NO: 58486 - RNA, 19 nt, Artificial Sequence
  Description of Artificial Sequence: Synthetic oligonucleotide
  Sense strand starting at position 1232 of SEQ ID NO: 712
ugcaaucaauaguuuagau

SEQ ID NO: 58487 - RNA, 19 nt, Artificial Sequence
  Description of Artificial Sequence: Synthetic oligonucleotide
  Antisense strand to SEQ ID NO: 58406
aucuaaacuauugauugca

SEQ ID NO: 58488 - RNA, 19 nt, Artificial Sequence
  Description of Artificial Sequence: Synthetic oligonucleotide
  Sense strand starting at position 1288 of SEQ ID NO: 712
cuguauacuugcucacaag

SEQ ID NO: 58489 - RNA, 19 nt, Artificial Sequence
  Description of Artificial Sequence: Synthetic oligonucleotide
  Antisense strand to SEQ ID NO: 58408
cuugugagcaaguauacag

SEQ ID NO: 58490 - RNA, 19 nt, Artificial Sequence
  Description of Artificial Sequence: Synthetic oligonucleotide
  Sense strand starting at position 1364 of SEQ ID NO: 712
uuacaugucucuccugacu

SEQ ID NO: 58491 - RNA, 19 nt, Artificial Sequence
  Description of Artificial Sequence: Synthetic oligonucleotide
  Antisense strand to SEQ ID NO: 58410
agucaggagagacauguaa

SEQ ID NO: 58492 - RNA, 19 nt, Artificial Sequence
  Description of Artificial Sequence: Synthetic oligonucleotide
  Sense strand starting at position 1625 of SEQ ID NO: 712
cugucaacgccugagcuua

SEQ ID NO: 58493 - RNA, 19 nt, Artificial Sequence
  Description of Artificial Sequence: Synthetic oligonucleotide
  Antisense strand to SEQ ID NO: 58412
uaagcucaggcguugacag

SEQ ID NO: 58494 - RNA, 19 nt, Artificial Sequence
  Description of Artificial Sequence: Synthetic oligonucleotide
  Sense strand starting at position 1966 of SEQ ID NO: 712
ggauuuccaucaggacuuu

SEQ ID NO: 58495 - RNA, 19 nt, Artificial Sequence
  Description of Artificial Sequence: Synthetic oligonucleotide
  Antisense strand to SEQ ID NO: 58414
aaaguccugauggaaaucc

SEQ ID NO: 58496 - RNA, 19 nt, Artificial Sequence
  Description of Artificial Sequence: Synthetic oligonucleotide
  Sense strand starting at position 1991 of SEQ ID NO: 712
cggucagcagcuuugugau

SEQ ID NO: 58497 - RNA, 19 nt, Artificial Sequence
  Description of Artificial Sequence: Synthetic oligonucleotide
  Antisense strand to SEQ ID NO: 58416
aucacaaagcugcugaccg

SEQ ID NO: 58498 - RNA, 19 nt, Artificial Sequence
  Description of Artificial Sequence: Synthetic oligonucleotide
  Sense strand starting at position 1998 of SEQ ID NO: 712
cagcuuugugaucagcaga

SEQ ID NO: 58499 - RNA, 19 nt, Artificial Sequence
  Description of Artificial Sequence: Synthetic oligonucleotide
  Antisense strand to SEQ ID NO: 58418
ucugcugaucacaaagcug

SEQ ID NO: 58500 - RNA, 19 nt, Artificial Sequence
  Description of Artificial Sequence: Synthetic oligonucleotide
  Sense strand starting at position 2097 of SEQ ID NO: 712
ugccucucuggugagaaua

SEQ ID NO: 58501 - RNA, 19 nt, Artificial Sequence
  Description of Artificial Sequence: Synthetic oligonucleotide
  Antisense strand to SEQ ID NO: 58420
uauucucaccagagaggca

SEQ ID NO: 58502 - RNA, 19 nt, Artificial Sequence
  Description of Artificial Sequence: Synthetic oligonucleotide
  Sense strand starting at position 2123 of SEQ ID NO: 712
gcaagugcccuugcuaagu

SEQ ID NO: 58503 - RNA, 19 nt, Artificial Sequence
  Description of Artificial Sequence: Synthetic oligonucleotide
  Antisense strand to SEQ ID NO: 58422
acuuagcaagggcacuugc

SEQ ID NO: 58504 - RNA, 19 nt, Artificial Sequence
  Description of Artificial Sequence: Synthetic oligonucleotide
  Sense strand starting at position 2233 of SEQ ID NO: 712
gagcaaagagcacgauauu

SEQ ID NO: 58505 - RNA, 19 nt, Artificial Sequence
  Description of Artificial Sequence: Synthetic oligonucleotide
  Antisense strand to SEQ ID NO: 58424
aauaucgugcucuuugcuc

SEQ ID NO: 58506 - RNA, 19 nt, Artificial Sequence
  Description of Artificial Sequence: Synthetic oligonucleotide
  Sense strand starting at position 2244 of SEQ ID NO: 712
acgauauuugcauguauua

SEQ ID NO: 58507 - RNA, 19 nt, Artificial Sequence
  Description of Artificial Sequence: Synthetic oligonucleotide
  Antisense strand to SEQ ID NO: 58426
uaauacaugcaaauaucgu

SEQ ID NO: 58508 - RNA, 19 nt, Artificial Sequence
  Description of Artificial Sequence: Synthetic oligonucleotide
  Sense strand starting at position 2366 of SEQ ID NO: 712
aaaugaaacugguuggguu

SEQ ID NO: 58509 - RNA, 19 nt, Artificial Sequence
  Description of Artificial Sequence: Synthetic oligonucleotide
  Antisense strand to SEQ ID NO: 58428
aacccaaccaguuucauuu

SEQ ID NO: 58510 - RNA, 19 nt, Artificial Sequence
  Description of Artificial Sequence: Synthetic oligonucleotide
  Sense strand starting at position 2896 of SEQ ID NO: 712
uuugaugaugaguguccau

SEQ ID NO: 58511 - RNA, 19 nt, Artificial Sequence
  Description of Artificial Sequence: Synthetic oligonucleotide
  Antisense strand to SEQ ID NO: 58430
auggacacucaucaucaaa

SEQ ID NO: 58512 - RNA, 19 nt, Artificial Sequence
  Description of Artificial Sequence: Synthetic oligonucleotide
  Sense strand starting at position 3069 of SEQ ID NO: 712
gaacaauuaggguggcaga

SEQ ID NO: 58513 - RNA, 19 nt, Artificial Sequence
  Description of Artificial Sequence: Synthetic oligonucleotide
  Antisense strand to SEQ ID NO: 58432
ucugccacccuaauuguuc

SEQ ID NO: 58514 - RNA, 19 nt, Artificial Sequence
  Description of Artificial Sequence: Synthetic oligonucleotide
  Sense strand starting at position 3103 of SEQ ID NO: 712
guuacaaccguccaagaaa

SEQ ID NO: 58515 - RNA, 19 nt, Artificial Sequence
  Description of Artificial Sequence: Synthetic oligonucleotide
  Antisense strand to SEQ ID NO: 58434
uuucuuggacgguuguaac

SEQ ID NO: 58516 - RNA, 19 nt, Artificial Sequence
  Description of Artificial Sequence: Synthetic oligonucleotide
  Sense strand starting at position 3129 of SEQ ID NO: 712
gauauuugccgaggcugua

SEQ ID NO: 58517 - RNA, 19 nt, Artificial Sequence
  Description of Artificial Sequence: Synthetic oligonucleotide
  Antisense strand to SEQ ID NO: 58436
uacagccucggcaaauauc

SEQ ID NO: 58518 - RNA, 19 nt, Artificial Sequence
  Description of Artificial Sequence: Synthetic oligonucleotide
  Sense strand starting at position 3197 of SEQ ID NO: 712
aggagacuguagguguuaa

SEQ ID NO: 58519 - RNA, 19 nt, Artificial Sequence
  Description of Artificial Sequence: Synthetic oligonucleotide
  Antisense strand to SEQ ID NO: 58438
uuaacaccuacagucuccu

SEQ ID NO: 58520 - RNA, 19 nt, Artificial Sequence
  Description of Artificial Sequence: Synthetic oligonucleotide
  Sense strand starting at position 3223 of SEQ ID NO: 712
ggucaaagauuauucuaau

SEQ ID NO: 58521 - RNA, 19 nt, Artificial Sequence
  Description of Artificial Sequence: Synthetic oligonucleotide
  Antisense strand to SEQ ID NO: 58440
auuagaauaaucuuugacc

SEQ ID NO: 58522 - RNA, 19 nt, Artificial Sequence
  Description of Artificial Sequence: Synthetic oligonucleotide
  Sense strand starting at position 3224 of SEQ ID NO: 712
gucaaagauuauucuaaug

SEQ ID NO: 58523 - RNA, 19 nt, Artificial Sequence
  Description of Artificial Sequence: Synthetic oligonucleotide
  Antisense strand to SEQ ID NO: 58442
cauuagaauaaucuuugac

SEQ ID NO: 58524 - RNA, 19 nt, Artificial Sequence
  Description of Artificial Sequence: Synthetic oligonucleotide
  Sense strand starting at position 3353 of SEQ ID NO: 712
accagaugcucggugugau

SEQ ID NO: 58525 - RNA, 19 nt, Artificial Sequence
  Description of Artificial Sequence: Synthetic oligonucleotide
  Antisense strand to SEQ ID NO: 58444
aucacaccgagcaucuggu

SEQ ID NO: 58526 - RNA, 19 nt, Artificial Sequence
  Description of Artificial Sequence: Synthetic oligonucleotide
  Sense strand starting at position 3356 of SEQ ID NO: 712
agaugcucggugugauaua

SEQ ID NO: 58527 - RNA, 19 nt, Artificial Sequence
  Description of Artificial Sequence: Synthetic oligonucleotide
  Antisense strand to SEQ ID NO: 58446
uauaucacaccgagcaucu

SEQ ID NO: 58528 - RNA, 19 nt, Artificial Sequence
  Description of Artificial Sequence: Synthetic oligonucleotide
  Sense strand starting at position 3361 of SEQ ID NO: 712
cucggugugauauauguaa

SEQ ID NO: 58529 - RNA, 19 nt, Artificial Sequence
  Description of Artificial Sequence: Synthetic oligonucleotide
  Antisense strand to SEQ ID NO: 58448
uuacauauaucacaccgag

SEQ ID NO: 58530 - RNA, 19 nt, Artificial Sequence
  Description of Artificial Sequence: Synthetic oligonucleotide
  Sense strand starting at position 3363 of SEQ ID NO: 712
cggugugauauauguaaag

SEQ ID NO: 58531 - RNA, 19 nt, Artificial Sequence
  Description of Artificial Sequence: Synthetic oligonucleotide
  Antisense strand to SEQ ID NO: 58450
cuuuacauauaucacaccg

SEQ ID NO: 58532 - RNA, 19 nt, Artificial Sequence
  Description of Artificial Sequence: Synthetic oligonucleotide
  Sense strand starting at position 3365 of SEQ ID NO: 712
gugugauauauguaaagau

SEQ ID NO: 58533 - RNA, 19 nt, Artificial Sequence
  Description of Artificial Sequence: Synthetic oligonucleotide
  Antisense strand to SEQ ID NO: 58452
aucuuuacauauaucacac

SEQ ID NO: 58534 - RNA, 19 nt, Artificial Sequence
  Description of Artificial Sequence: Synthetic oligonucleotide
  Sense strand starting at position 3381 of SEQ ID NO: 712
gauguuauacuuggccuga

SEQ ID NO: 58535 - RNA, 19 nt, Artificial Sequence
  Description of Artificial Sequence: Synthetic oligonucleotide
  Antisense strand to SEQ ID NO: 58454
ucaggccaaguauaacauc

SEQ ID NO: 58536 - RNA, 19 nt, Artificial Sequence
  Description of Artificial Sequence: Synthetic oligonucleotide
  Sense strand starting at position 3382 of SEQ ID NO: 712
auguuauacuuggccugau

SEQ ID NO: 58537 - RNA, 19 nt, Artificial Sequence
  Description of Artificial Sequence: Synthetic oligonucleotide
  Antisense strand to SEQ ID NO: 58456
aucaggccaaguauaacau

SEQ ID NO: 58538 - RNA, 19 nt, Artificial Sequence
  Description of Artificial Sequence: Synthetic oligonucleotide
  Sense strand starting at position 3383 of SEQ ID NO: 712
uguuauacuuggccugauc

SEQ ID NO: 58539 - RNA, 19 nt, Artificial Sequence
  Description of Artificial Sequence: Synthetic oligonucleotide
  Antisense strand to SEQ ID NO: 58458
gaucaggccaaguauaaca

SEQ ID NO: 58540 - RNA, 19 nt, Artificial Sequence
  Description of Artificial Sequence: Synthetic oligonucleotide
  Sense strand starting at position 3386 of SEQ ID NO: 712
uauacuuggccugaucuga

SEQ ID NO: 58541 - RNA, 19 nt, Artificial Sequence
  Description of Artificial Sequence: Synthetic oligonucleotide
  Antisense strand to SEQ ID NO: 58460
ucagaucaggccaaguaua

SEQ ID NO: 58542 - RNA, 19 nt, Artificial Sequence
  Description of Artificial Sequence: Synthetic oligonucleotide
  Sense strand starting at position 458 of SEQ ID NO: 713
uccagagcucaaggaauca

SEQ ID NO: 58543 - RNA, 19 nt, Artificial Sequence
  Description of Artificial Sequence: Synthetic oligonucleotide
  Antisense strand to SEQ ID NO: 58462
ugauuccuugagcucugga

SEQ ID NO: 58544 - RNA, 19 nt, Artificial Sequence
  Description of Artificial Sequence: Synthetic oligonucleotide
  Sense strand starting at position 681 of SEQ ID NO: 713
uuaauaucauggguuguca

SEQ ID NO: 58545 - RNA, 19 nt, Artificial Sequence
  Description of Artificial Sequence: Synthetic oligonucleotide
  Antisense strand to SEQ ID NO: 58464
ugacaacccaugauauuaa

SEQ ID NO: 58546 - RNA, 19 nt, Artificial Sequence
  Description of Artificial Sequence: Synthetic oligonucleotide
  Sense strand starting at position 683 of SEQ ID NO: 713
aauaucauggguugucaaa

SEQ ID NO: 58547 - RNA, 19 nt, Artificial Sequence
  Description of Artificial Sequence: Synthetic oligonucleotide
  Antisense strand to SEQ ID NO: 58466
uuugacaacccaugauauu

SEQ ID NO: 58548 - RNA, 19 nt, Artificial Sequence
  Description of Artificial Sequence: Synthetic oligonucleotide
  Sense strand starting at position 685 of SEQ ID NO: 713
uaucauggguugucaaauc

SEQ ID NO: 58549 - RNA, 19 nt, Artificial Sequence
  Description of Artificial Sequence: Synthetic oligonucleotide
  Antisense strand to SEQ ID NO: 58468
gauuugacaacccaugaua

SEQ ID NO: 58550 - RNA, 19 nt, Artificial Sequence
  Description of Artificial Sequence: Synthetic oligonucleotide
  Sense strand starting at position 714 of SEQ ID NO: 713
uuugcaauacgucacucau

SEQ ID NO: 58551 - RNA, 19 nt, Artificial Sequence
  Description of Artificial Sequence: Synthetic oligonucleotide
  Antisense strand to SEQ ID NO: 58470
augagugacguauugcaaa

SEQ ID NO: 58552 - RNA, 19 nt, Artificial Sequence
  Description of Artificial Sequence: Synthetic oligonucleotide
  Sense strand starting at position 716 of SEQ ID NO: 713
ugcaauacgucacucauuu

SEQ ID NO: 58553 - RNA, 19 nt, Artificial Sequence
  Description of Artificial Sequence: Synthetic oligonucleotide
  Antisense strand to SEQ ID NO: 58472
aaaugagugacguauugca

SEQ ID NO: 58554 - RNA, 19 nt, Artificial Sequence
  Description of Artificial Sequence: Synthetic oligonucleotide
  Sense strand starting at position 870 of SEQ ID NO: 713
uaauguaagcgguaaagga

SEQ ID NO: 58555 - RNA, 19 nt, Artificial Sequence
  Description of Artificial Sequence: Synthetic oligonucleotide
  Antisense strand to SEQ ID NO: 58474
uccuuuaccgcuuacauua

SEQ ID NO: 58556 - RNA, 19 nt, Artificial Sequence
  Description of Artificial Sequence: Synthetic oligonucleotide
  Sense strand starting at position 884 of SEQ ID NO: 713
aaggaauacuguccucuga

SEQ ID NO: 58557 - RNA, 19 nt, Artificial Sequence
  Description of Artificial Sequence: Synthetic oligonucleotide
  Antisense strand to SEQ ID NO: 58476
ucagaggacaguauuccuu

SEQ ID NO: 58558 - RNA, 19 nt, Artificial Sequence
  Description of Artificial Sequence: Synthetic oligonucleotide
  Sense strand starting at position 886 of SEQ ID NO: 713
ggaauacuguccucugaau

SEQ ID NO: 58559 - RNA, 19 nt, Artificial Sequence
  Description of Artificial Sequence: Synthetic oligonucleotide
  Antisense strand to SEQ ID NO: 58478
auucagaggacaguauucc

SEQ ID NO: 58560 - RNA, 19 nt, Artificial Sequence
  Description of Artificial Sequence: Synthetic oligonucleotide
  Sense strand starting at position 957 of SEQ ID NO: 713
uuuccaucggagugaugga

SEQ ID NO: 58561 - RNA, 19 nt, Artificial Sequence
  Description of Artificial Sequence: Synthetic oligonucleotide
  Antisense strand to SEQ ID NO: 58480
uccaucacuccgauggaaa

SEQ ID NO: 58562 - RNA, 19 nt, Artificial Sequence
  Description of Artificial Sequence: Synthetic oligonucleotide
  Sense strand starting at position 1129 of SEQ ID NO: 713
augacugagaauuacguuu

SEQ ID NO: 58563 - RNA, 19 nt, Artificial Sequence
  Description of Artificial Sequence: Synthetic oligonucleotide
  Antisense strand to SEQ ID NO: 58482
aaacguaauucucagucau

SEQ ID NO: 58564 - RNA, 19 nt, Artificial Sequence
  Description of Artificial Sequence: Synthetic oligonucleotide
  Sense strand starting at position 1135 of SEQ ID NO: 713
gagaauuacguuugcauua

SEQ ID NO: 58565 - RNA, 19 nt, Artificial Sequence
  Description of Artificial Sequence: Synthetic oligonucleotide
  Antisense strand to SEQ ID NO: 58484
uaaugcaaacguaauucuc

SEQ ID NO: 58566 - RNA, 19 nt, Artificial Sequence
  Description of Artificial Sequence: Synthetic oligonucleotide
  Sense strand starting at position 1145 of SEQ ID NO: 713
uuugcauuacuaggguauu

SEQ ID NO: 58567 - RNA, 19 nt, Artificial Sequence
  Description of Artificial Sequence: Synthetic oligonucleotide
  Antisense strand to SEQ ID NO: 58486
aauacccuaguaaugcaaa

SEQ ID NO: 58568 - RNA, 19 nt, Artificial Sequence
  Description of Artificial Sequence: Synthetic oligonucleotide
  Sense strand starting at position 1253 of SEQ ID NO: 713
uuaaaucuugggugugaug

SEQ ID NO: 58569 - RNA, 19 nt, Artificial Sequence
  Description of Artificial Sequence: Synthetic oligonucleotide
  Antisense strand to SEQ ID NO: 58488
caucacacccaagauuuaa

SEQ ID NO: 58570 - RNA, 19 nt, Artificial Sequence
  Description of Artificial Sequence: Synthetic oligonucleotide
  Sense strand starting at position 1255 of SEQ ID NO: 713
aaaucuugggugugaugga

SEQ ID NO: 58571 - RNA, 19 nt, Artificial Sequence
  Description of Artificial Sequence: Synthetic oligonucleotide
  Antisense strand to SEQ ID NO: 58490
uccaucacacccaagauuu

SEQ ID NO: 58572 - RNA, 19 nt, Artificial Sequence
  Description of Artificial Sequence: Synthetic oligonucleotide
  Sense strand starting at position 1328 of SEQ ID NO: 713
gaaacacuggugugacaaa

SEQ ID NO: 58573 - RNA, 19 nt, Artificial Sequence
  Description of Artificial Sequence: Synthetic oligonucleotide
  Antisense strand to SEQ ID NO: 58492
uuugucacaccaguguuuc

SEQ ID NO: 58574 - RNA, 19 nt, Artificial Sequence
  Description of Artificial Sequence: Synthetic oligonucleotide
  Sense strand starting at position 1338 of SEQ ID NO: 713
ugugacaaauugucauaau

SEQ ID NO: 58575 - RNA, 19 nt, Artificial Sequence
  Description of Artificial Sequence: Synthetic oligonucleotide
  Antisense strand to SEQ ID NO: 58494
auuaugacaauuugucaca

SEQ ID NO: 58576 - RNA, 19 nt, Artificial Sequence
  Description of Artificial Sequence: Synthetic oligonucleotide
  Sense strand starting at position 1847 of SEQ ID NO: 713
ggccuaccuggagguaaua

SEQ ID NO: 58577 - RNA, 19 nt, Artificial Sequence
  Description of Artificial Sequence: Synthetic oligonucleotide
  Antisense strand to SEQ ID NO: 58496
uauuaccuccagguaggcc

SEQ ID NO: 58578 - RNA, 19 nt, Artificial Sequence
  Description of Artificial Sequence: Synthetic oligonucleotide
  Sense strand starting at position 1889 of SEQ ID NO: 713
gacagagacuccucgccau

SEQ ID NO: 58579 - RNA, 19 nt, Artificial Sequence
  Description of Artificial Sequence: Synthetic oligonucleotide
  Antisense strand to SEQ ID NO: 58498
auggcgaggagucucuguc

SEQ ID NO: 58580 - RNA, 19 nt, Artificial Sequence
  Description of Artificial Sequence: Synthetic oligonucleotide
  Sense strand starting at position 1893 of SEQ ID NO: 713
gagacuccucgccauggua

SEQ ID NO: 58581 - RNA, 19 nt, Artificial Sequence
  Description of Artificial Sequence: Synthetic oligonucleotide
  Antisense strand to SEQ ID NO: 58500
uaccauggcgaggagucuc

SEQ ID NO: 58582 - RNA, 19 nt, Artificial Sequence
  Description of Artificial Sequence: Synthetic oligonucleotide
  Sense strand starting at position 2424 of SEQ ID NO: 713
gacucuucuccuggaguca

SEQ ID NO: 58583 - RNA, 19 nt, Artificial Sequence
  Description of Artificial Sequence: Synthetic oligonucleotide
  Antisense strand to SEQ ID NO: 58502
ugacuccaggagaagaguc

SEQ ID NO: 58584 - RNA, 19 nt, Artificial Sequence
  Description of Artificial Sequence: Synthetic oligonucleotide
  Sense strand starting at position 2452 of SEQ ID NO: 713
uggacggguuguuuggaaa

SEQ ID NO: 58585 - RNA, 19 nt, Artificial Sequence
  Description of Artificial Sequence: Synthetic oligonucleotide
  Antisense strand to SEQ ID NO: 58504
uuuccaaacaacccgucca

SEQ ID NO: 58586 - RNA, 19 nt, Artificial Sequence
  Description of Artificial Sequence: Synthetic oligonucleotide
  Sense strand starting at position 2453 of SEQ ID NO: 713
ggacggguuguuuggaaau

SEQ ID NO: 58587 - RNA, 19 nt, Artificial Sequence
  Description of Artificial Sequence: Synthetic oligonucleotide
  Antisense strand to SEQ ID NO: 58506
auuuccaaacaacccgucc

SEQ ID NO: 58588 - RNA, 19 nt, Artificial Sequence
  Description of Artificial Sequence: Synthetic oligonucleotide
  Sense strand starting at position 2861 of SEQ ID NO: 713
cuugguuaaggcuacauaa

SEQ ID NO: 58589 - RNA, 19 nt, Artificial Sequence
  Description of Artificial Sequence: Synthetic oligonucleotide
  Antisense strand to SEQ ID NO: 58508
uuauguagccuuaaccaag

SEQ ID NO: 58590 - RNA, 19 nt, Artificial Sequence
  Description of Artificial Sequence: Synthetic oligonucleotide
  Sense strand starting at position 2863 of SEQ ID NO: 713
ugguuaaggcuacauaaca

SEQ ID NO: 58591 - RNA, 19 nt, Artificial Sequence
  Description of Artificial Sequence: Synthetic oligonucleotide
  Antisense strand to SEQ ID NO: 58510
uguuauguagccuuaacca

SEQ ID NO: 58592 - RNA, 19 nt, Artificial Sequence
  Description of Artificial Sequence: Synthetic oligonucleotide
  Sense strand starting at position 2956 of SEQ ID NO: 713
uguugauccaagugacuug

SEQ ID NO: 58593 - RNA, 19 nt, Artificial Sequence
  Description of Artificial Sequence: Synthetic oligonucleotide
  Antisense strand to SEQ ID NO: 58512
caagucacuuggaucaaca

SEQ ID NO: 58594 - RNA, 19 nt, Artificial Sequence
  Description of Artificial Sequence: Synthetic oligonucleotide
  Sense strand starting at position 2959 of SEQ ID NO: 713
ugauccaagugacuuguaa

SEQ ID NO: 58595 - RNA, 19 nt, Artificial Sequence
  Description of Artificial Sequence: Synthetic oligonucleotide
  Antisense strand to SEQ ID NO: 58514
uuacaagucacuuggauca

SEQ ID NO: 58596 - RNA, 19 nt, Artificial Sequence
  Description of Artificial Sequence: Synthetic oligonucleotide
  Sense strand starting at position 2967 of SEQ ID NO: 713
gugacuuguaauggaagaa

SEQ ID NO: 58597 - RNA, 19 nt, Artificial Sequence
  Description of Artificial Sequence: Synthetic oligonucleotide
  Antisense strand to SEQ ID NO: 58516
uucuuccauuacaagucac

SEQ ID NO: 58598 - RNA, 19 nt, Artificial Sequence
  Description of Artificial Sequence: Synthetic oligonucleotide
  Sense strand starting at position 3359 of SEQ ID NO: 713
acagcuacuuggucuuauu

SEQ ID NO: 58599 - RNA, 19 nt, Artificial Sequence
  Description of Artificial Sequence: Synthetic oligonucleotide
  Antisense strand to SEQ ID NO: 58518
aauaagaccaaguagcugu

SEQ ID NO: 58600 - RNA, 19 nt, Artificial Sequence
  Description of Artificial Sequence: Synthetic oligonucleotide
  Sense strand starting at position 3429 of SEQ ID NO: 713
acaguaauuucugaguaag

SEQ ID NO: 58601 - RNA, 19 nt, Artificial Sequence
  Description of Artificial Sequence: Synthetic oligonucleotide
  Antisense strand to SEQ ID NO: 58520
cuuacucagaaauuacugu

SEQ ID NO: 58602 - RNA, 19 nt, Artificial Sequence
  Description of Artificial Sequence: Synthetic oligonucleotide
  Sense strand starting at position 3517 of SEQ ID NO: 713
aguuguuucgguuacauaa

SEQ ID NO: 58603 - RNA, 19 nt, Artificial Sequence
  Description of Artificial Sequence: Synthetic oligonucleotide
  Antisense strand to SEQ ID NO: 58522
uuauguaaccgaaacaacu

SEQ ID NO: 58604 - RNA, 19 nt, Artificial Sequence
  Description of Artificial Sequence: Synthetic oligonucleotide
  Sense strand starting at position 3615 of SEQ ID NO: 713
auuggauaagaaugcuaau

SEQ ID NO: 58605 - RNA, 19 nt, Artificial Sequence
  Description of Artificial Sequence: Synthetic oligonucleotide
  Antisense strand to SEQ ID NO: 58524
auuagcauucuuauccaau

SEQ ID NO: 58606 - RNA, 19 nt, Artificial Sequence
  Description of Artificial Sequence: Synthetic oligonucleotide
  Sense strand starting at position 3754 of SEQ ID NO: 713
uggagaucuugauuaggca

SEQ ID NO: 58607 - RNA, 19 nt, Artificial Sequence
  Description of Artificial Sequence: Synthetic oligonucleotide
  Antisense strand to SEQ ID NO: 58526
ugccuaaucaagaucucca

SEQ ID NO: 58608 - RNA, 19 nt, Artificial Sequence
  Description of Artificial Sequence: Synthetic oligonucleotide
  Sense strand starting at position 3776 of SEQ ID NO: 713
guauguaugaaugagucua

SEQ ID NO: 58609 - RNA, 19 nt, Artificial Sequence
  Description of Artificial Sequence: Synthetic oligonucleotide
  Antisense strand to SEQ ID NO: 58528
uagacucauucauacauac

SEQ ID NO: 58610 - RNA, 19 nt, Artificial Sequence
  Description of Artificial Sequence: Synthetic oligonucleotide
  Sense strand starting at position 3810 of SEQ ID NO: 713
guccaagcuagagguauau

SEQ ID NO: 58611 - RNA, 19 nt, Artificial Sequence
  Description of Artificial Sequence: Synthetic oligonucleotide
  Antisense strand to SEQ ID NO: 58530
auauaccucuagcuuggac

SEQ ID NO: 58612 - RNA, 19 nt, Artificial Sequence
  Description of Artificial Sequence: Synthetic oligonucleotide
  Sense strand starting at position 3816 of SEQ ID NO: 713
gcuagagguauaugagaga

SEQ ID NO: 58613 - RNA, 19 nt, Artificial Sequence
  Description of Artificial Sequence: Synthetic oligonucleotide
  Antisense strand to SEQ ID NO: 58532
ucucucauauaccucuagc

SEQ ID NO: 58614 - RNA, 19 nt, Artificial Sequence
  Description of Artificial Sequence: Synthetic oligonucleotide
  Sense strand starting at position 3850 of SEQ ID NO: 713
ggcguuuaaagccaugaga

SEQ ID NO: 58615 - RNA, 19 nt, Artificial Sequence
  Description of Artificial Sequence: Synthetic oligonucleotide
  Antisense strand to SEQ ID NO: 58534
ucucauggcuuuaaacgcc

SEQ ID NO: 58616 - RNA, 19 nt, Artificial Sequence
  Description of Artificial Sequence: Synthetic oligonucleotide
  Sense strand starting at position 3852 of SEQ ID NO: 713
cguuuaaagccaugagacu

SEQ ID NO: 58617 - RNA, 19 nt, Artificial Sequence
  Description of Artificial Sequence: Synthetic oligonucleotide
  Antisense strand to SEQ ID NO: 58536
agucucauggcuuuaaacg

SEQ ID NO: 58618 - RNA, 19 nt, Artificial Sequence
  Description of Artificial Sequence: Synthetic oligonucleotide
  Sense strand starting at position 3861 of SEQ ID NO: 713
ccaugagacugccuaagau

SEQ ID NO: 58619 - RNA, 19 nt, Artificial Sequence
  Description of Artificial Sequence: Synthetic oligonucleotide
  Antisense strand to SEQ ID NO: 58538
aucuuaggcagucucaugg

SEQ ID NO: 58620 - RNA, 19 nt, Artificial Sequence
  Description of Artificial Sequence: Synthetic oligonucleotide
  Sense strand starting at position 3883 of SEQ ID NO: 713
caaggaagugaguguaaau

SEQ ID NO: 58621 - RNA, 19 nt, Artificial Sequence
  Description of Artificial Sequence: Synthetic oligonucleotide
  Antisense strand to SEQ ID NO: 58540
auuuacacucacuuccuug

SEQ ID NO: 58622 - RNA, 19 nt, Artificial Sequence
  Description of Artificial Sequence: Synthetic oligonucleotide
  Sense strand starting at position 31 of SEQ ID NO: 714
guugcuaucuuauuuaucu

SEQ ID NO: 58623 - RNA, 19 nt, Artificial Sequence
  Description of Artificial Sequence: Synthetic oligonucleotide
  Antisense strand to SEQ ID NO: 58542
agauaaauaagauagcaac

SEQ ID NO: 58624 - RNA, 19 nt, Artificial Sequence
  Description of Artificial Sequence: Synthetic oligonucleotide
  Sense strand starting at position 78 of SEQ ID NO: 714
ccugauccacuguaaguuu

SEQ ID NO: 58625 - RNA, 19 nt, Artificial Sequence
  Description of Artificial Sequence: Synthetic oligonucleotide
  Antisense strand to SEQ ID NO: 58544
aaacuuacaguggaucagg

SEQ ID NO: 58626 - RNA, 19 nt, Artificial Sequence
  Description of Artificial Sequence: Synthetic oligonucleotide
  Sense strand starting at position 122 of SEQ ID NO: 714
cuguuauaugcauacacca

SEQ ID NO: 58627 - RNA, 19 nt, Artificial Sequence
  Description of Artificial Sequence: Synthetic oligonucleotide
  Antisense strand to SEQ ID NO: 58546
ugguguaugcauauaacag

SEQ ID NO: 58628 - RNA, 19 nt, Artificial Sequence
  Description of Artificial Sequence: Synthetic oligonucleotide
  Sense strand starting at position 777 of SEQ ID NO: 714
agauguguucuagaaaguc

SEQ ID NO: 58629 - RNA, 19 nt, Artificial Sequence
  Description of Artificial Sequence: Synthetic oligonucleotide
  Antisense strand to SEQ ID NO: 58548
gacuuucuagaacacaucu

SEQ ID NO: 58630 - RNA, 19 nt, Artificial Sequence
  Description of Artificial Sequence: Synthetic oligonucleotide
  Sense strand starting at position 787 of SEQ ID NO: 714
uagaaagucugccuguaaa

SEQ ID NO: 58631 - RNA, 19 nt, Artificial Sequence
  Description of Artificial Sequence: Synthetic oligonucleotide
  Antisense strand to SEQ ID NO: 58550
uuuacaggcagacuuucua

SEQ ID NO: 58632 - RNA, 19 nt, Artificial Sequence
  Description of Artificial Sequence: Synthetic oligonucleotide
  Sense strand starting at position 992 of SEQ ID NO: 714
uuacuaaugggucauguca

SEQ ID NO: 58633 - RNA, 19 nt, Artificial Sequence
  Description of Artificial Sequence: Synthetic oligonucleotide
  Antisense strand to SEQ ID NO: 58552
ugacaugacccauuaguaa

SEQ ID NO: 58634 - RNA, 19 nt, Artificial Sequence
  Description of Artificial Sequence: Synthetic oligonucleotide
  Sense strand starting at position 1079 of SEQ ID NO: 714
guauguaagcaguaaauau

SEQ ID NO: 58635 - RNA, 19 nt, Artificial Sequence
  Description of Artificial Sequence: Synthetic oligonucleotide
  Antisense strand to SEQ ID NO: 58554
auauuuacugcuuacauac

SEQ ID NO: 58636 - RNA, 19 nt, Artificial Sequence
  Description of Artificial Sequence: Synthetic oligonucleotide
  Sense strand starting at position 1097 of SEQ ID NO: 714
uaguguuaugaagaggcuu

SEQ ID NO: 58637 - RNA, 19 nt, Artificial Sequence
  Description of Artificial Sequence: Synthetic oligonucleotide
  Antisense strand to SEQ ID NO: 58556
aagccucuucauaacacua

SEQ ID NO: 58638 - RNA, 19 nt, Artificial Sequence
  Description of Artificial Sequence: Synthetic oligonucleotide
  Sense strand starting at position 1172 of SEQ ID NO: 714
ugcauaauucuguauaggu

SEQ ID NO: 58639 - RNA, 19 nt, Artificial Sequence
  Description of Artificial Sequence: Synthetic oligonucleotide
  Antisense strand to SEQ ID NO: 58558
accuauacagaauuaugca

SEQ ID NO: 58640 - RNA, 19 nt, Artificial Sequence
  Description of Artificial Sequence: Synthetic oligonucleotide
  Sense strand starting at position 1177 of SEQ ID NO: 714
aauucuguauagguagaau

SEQ ID NO: 58641 - RNA, 19 nt, Artificial Sequence
  Description of Artificial Sequence: Synthetic oligonucleotide
  Antisense strand to SEQ ID NO: 58560
auucuaccuauacagaauu

SEQ ID NO: 58642 - RNA, 19 nt, Artificial Sequence
  Description of Artificial Sequence: Synthetic oligonucleotide
  Sense strand starting at position 1180 of SEQ ID NO: 714
ucuguauagguagaauacu

SEQ ID NO: 58643 - RNA, 19 nt, Artificial Sequence
  Description of Artificial Sequence: Synthetic oligonucleotide
  Antisense strand to SEQ ID NO: 58562
aguauucuaccuauacaga

SEQ ID NO: 58644 - RNA, 19 nt, Artificial Sequence
  Description of Artificial Sequence: Synthetic oligonucleotide
  Sense strand starting at position 1188 of SEQ ID NO: 714
gguagaauacugcacauau

SEQ ID NO: 58645 - RNA, 19 nt, Artificial Sequence
  Description of Artificial Sequence: Synthetic oligonucleotide
  Antisense strand to SEQ ID NO: 58564
auaugugcaguauucuacc

SEQ ID NO: 58646 - RNA, 19 nt, Artificial Sequence
  Description of Artificial Sequence: Synthetic oligonucleotide
  Sense strand starting at position 1660 of SEQ ID NO: 714
ucuuaaaggucuuuaggaa

SEQ ID NO: 58647 - RNA, 19 nt, Artificial Sequence
  Description of Artificial Sequence: Synthetic oligonucleotide
  Antisense strand to SEQ ID NO: 58566
uuccuaaagaccuuuaaga

SEQ ID NO: 58648 - RNA, 19 nt, Artificial Sequence
  Description of Artificial Sequence: Synthetic oligonucleotide
  Sense strand starting at position 1726 of SEQ ID NO: 714
cuggcuauuugucuaaugu

SEQ ID NO: 58649 - RNA, 19 nt, Artificial Sequence
  Description of Artificial Sequence: Synthetic oligonucleotide
  Antisense strand to SEQ ID NO: 58568
acauuagacaaauagccag

SEQ ID NO: 58650 - RNA, 19 nt, Artificial Sequence
  Description of Artificial Sequence: Synthetic oligonucleotide
  Sense strand starting at position 1775 of SEQ ID NO: 714
gcucuacagucauuucuau

SEQ ID NO: 58651 - RNA, 19 nt, Artificial Sequence
  Description of Artificial Sequence: Synthetic oligonucleotide
  Antisense strand to SEQ ID NO: 58570
auagaaaugacuguagagc

SEQ ID NO: 58652 - RNA, 19 nt, Artificial Sequence
  Description of Artificial Sequence: Synthetic oligonucleotide
  Sense strand starting at position 1853 of SEQ ID NO: 714
ccgaauagauauucuggaa

SEQ ID NO: 58653 - RNA, 19 nt, Artificial Sequence
  Description of Artificial Sequence: Synthetic oligonucleotide
  Antisense strand to SEQ ID NO: 58572
uuccagaauaucuauucgg

SEQ ID NO: 58654 - RNA, 19 nt, Artificial Sequence
  Description of Artificial Sequence: Synthetic oligonucleotide
  Sense strand starting at position 1966 of SEQ ID NO: 714
aguguaaagcugcacaaua

SEQ ID NO: 58655 - RNA, 19 nt, Artificial Sequence
  Description of Artificial Sequence: Synthetic oligonucleotide
  Antisense strand to SEQ ID NO: 58574
uauugugcagcuuuacacu

SEQ ID NO: 58656 - RNA, 19 nt, Artificial Sequence
  Description of Artificial Sequence: Synthetic oligonucleotide
  Sense strand starting at position 1982 of SEQ ID NO: 714
auaggauccucuuugcauu

SEQ ID NO: 58657 - RNA, 19 nt, Artificial Sequence
  Description of Artificial Sequence: Synthetic oligonucleotide
  Antisense strand to SEQ ID NO: 58576
aaugcaaagaggauccuau

SEQ ID NO: 58658 - RNA, 19 nt, Artificial Sequence
  Description of Artificial Sequence: Synthetic oligonucleotide
  Sense strand starting at position 2006 of SEQ ID NO: 714
guuuccagugcucuuguau

SEQ ID NO: 58659 - RNA, 19 nt, Artificial Sequence
  Description of Artificial Sequence: Synthetic oligonucleotide
  Antisense strand to SEQ ID NO: 58578
auacaagagcacuggaaac

SEQ ID NO: 58660 - RNA, 19 nt, Artificial Sequence
  Description of Artificial Sequence: Synthetic oligonucleotide
  Sense strand starting at position 2419 of SEQ ID NO: 714
uuuagauaucuuugugagg

SEQ ID NO: 58661 - RNA, 19 nt, Artificial Sequence
  Description of Artificial Sequence: Synthetic oligonucleotide
  Antisense strand to SEQ ID NO: 58580
ccucacaaagauaucuaaa

SEQ ID NO: 58662 - RNA, 19 nt, Artificial Sequence
  Description of Artificial Sequence: Synthetic oligonucleotide
  Sense strand starting at position 2420 of SEQ ID NO: 714
uuagauaucuuugugaggu

SEQ ID NO: 58663 - RNA, 19 nt, Artificial Sequence
  Description of Artificial Sequence: Synthetic oligonucleotide
  Antisense strand to SEQ ID NO: 58582
accucacaaagauaucuaa

SEQ ID NO: 58664 - RNA, 19 nt, Artificial Sequence
  Description of Artificial Sequence: Synthetic oligonucleotide
  Sense strand starting at position 2434 of SEQ ID NO: 714
gagguuaacagauggugaa

SEQ ID NO: 58665 - RNA, 19 nt, Artificial Sequence
  Description of Artificial Sequence: Synthetic oligonucleotide
  Antisense strand to SEQ ID NO: 58584
uucaccaucuguuaaccuc

SEQ ID NO: 58666 - RNA, 19 nt, Artificial Sequence
  Description of Artificial Sequence: Synthetic oligonucleotide
  Sense strand starting at position 2435 of SEQ ID NO: 714
agguuaacagauggugaau

SEQ ID NO: 58667 - RNA, 19 nt, Artificial Sequence
  Description of Artificial Sequence: Synthetic oligonucleotide
  Antisense strand to SEQ ID NO: 58586
auucaccaucuguuaaccu

SEQ ID NO: 58668 - RNA, 19 nt, Artificial Sequence
  Description of Artificial Sequence: Synthetic oligonucleotide
  Sense strand starting at position 2447 of SEQ ID NO: 714
ggugaaucccuguaccaaa

SEQ ID NO: 58669 - RNA, 19 nt, Artificial Sequence
  Description of Artificial Sequence: Synthetic oligonucleotide
  Antisense strand to SEQ ID NO: 58588
uuugguacagggauucacc

SEQ ID NO: 58670 - RNA, 19 nt, Artificial Sequence
  Description of Artificial Sequence: Synthetic oligonucleotide
  Sense strand starting at position 2534 of SEQ ID NO: 714
gccuuaaugcaagauacuu

SEQ ID NO: 58671 - RNA, 19 nt, Artificial Sequence
  Description of Artificial Sequence: Synthetic oligonucleotide
  Antisense strand to SEQ ID NO: 58590
aaguaucuugcauuaaggc

SEQ ID NO: 58672 - RNA, 19 nt, Artificial Sequence
  Description of Artificial Sequence: Synthetic oligonucleotide
  Sense strand starting at position 2552 of SEQ ID NO: 714
uuuguauugcucuaaguaa

SEQ ID NO: 58673 - RNA, 19 nt, Artificial Sequence
  Description of Artificial Sequence: Synthetic oligonucleotide
  Antisense strand to SEQ ID NO: 58592
uuacuuagagcaauacaaa

SEQ ID NO: 58674 - RNA, 19 nt, Artificial Sequence
  Description of Artificial Sequence: Synthetic oligonucleotide
  Sense strand starting at position 2653 of SEQ ID NO: 714
uaagaugacucgucucuaa

SEQ ID NO: 58675 - RNA, 19 nt, Artificial Sequence
  Description of Artificial Sequence: Synthetic oligonucleotide
  Antisense strand to SEQ ID NO: 58594
uuagagacgagucaucuua

SEQ ID NO: 58676 - RNA, 19 nt, Artificial Sequence
  Description of Artificial Sequence: Synthetic oligonucleotide
  Sense strand starting at position 2656 of SEQ ID NO: 714
gaugacucgucucuaauaa

SEQ ID NO: 58677 - RNA, 19 nt, Artificial Sequence
  Description of Artificial Sequence: Synthetic oligonucleotide
  Antisense strand to SEQ ID NO: 58596
uuauuagagacgagucauc

SEQ ID NO: 58678 - RNA, 19 nt, Artificial Sequence
  Description of Artificial Sequence: Synthetic oligonucleotide
  Sense strand starting at position 2657 of SEQ ID NO: 714
augacucgucucuaauaag

SEQ ID NO: 58679 - RNA, 19 nt, Artificial Sequence
  Description of Artificial Sequence: Synthetic oligonucleotide
  Antisense strand to SEQ ID NO: 58598
cuuauuagagacgagucau

SEQ ID NO: 58680 - RNA, 19 nt, Artificial Sequence
  Description of Artificial Sequence: Synthetic oligonucleotide
  Sense strand starting at position 2669 of SEQ ID NO: 714
uaauaagagguuuggucau

SEQ ID NO: 58681 - RNA, 19 nt, Artificial Sequence
  Description of Artificial Sequence: Synthetic oligonucleotide
  Antisense strand to SEQ ID NO: 58600
augaccaaaccucuuauua

SEQ ID NO: 58682 - RNA, 19 nt, Artificial Sequence
  Description of Artificial Sequence: Synthetic oligonucleotide
  Sense strand starting at position 2671 of SEQ ID NO: 714
auaagagguuuggucauca

SEQ ID NO: 58683 - RNA, 19 nt, Artificial Sequence
  Description of Artificial Sequence: Synthetic oligonucleotide
  Antisense strand to SEQ ID NO: 58602
ugaugaccaaaccucuuau

SEQ ID NO: 58684 - RNA, 19 nt, Artificial Sequence
  Description of Artificial Sequence: Synthetic oligonucleotide
  Sense strand starting at position 2675 of SEQ ID NO: 714
gagguuuggucaucagaca

SEQ ID NO: 58685 - RNA, 19 nt, Artificial Sequence
  Description of Artificial Sequence: Synthetic oligonucleotide
  Antisense strand to SEQ ID NO: 58604
ugucugaugaccaaaccuc

SEQ ID NO: 58686 - RNA, 19 nt, Artificial Sequence
  Description of Artificial Sequence: Synthetic oligonucleotide
  Sense strand starting at position 2676 of SEQ ID NO: 714
agguuuggucaucagacag

SEQ ID NO: 58687 - RNA, 19 nt, Artificial Sequence
  Description of Artificial Sequence: Synthetic oligonucleotide
  Antisense strand to SEQ ID NO: 58606
cugucugaugaccaaaccu

SEQ ID NO: 58688 - RNA, 19 nt, Artificial Sequence
  Description of Artificial Sequence: Synthetic oligonucleotide
  Sense strand starting at position 2814 of SEQ ID NO: 714
gcaagucacugggcaagaa

SEQ ID NO: 58689 - RNA, 19 nt, Artificial Sequence
  Description of Artificial Sequence: Synthetic oligonucleotide
  Antisense strand to SEQ ID NO: 58608
uucuugcccagugacuugc

SEQ ID NO: 58690 - RNA, 19 nt, Artificial Sequence
  Description of Artificial Sequence: Synthetic oligonucleotide
  Sense strand starting at position 2963 of SEQ ID NO: 714
gugacacuuaaguaaguga

SEQ ID NO: 58691 - RNA, 19 nt, Artificial Sequence
  Description of Artificial Sequence: Synthetic oligonucleotide
  Antisense strand to SEQ ID NO: 58610
ucacuuacuuaagugucac

SEQ ID NO: 58692 - RNA, 19 nt, Artificial Sequence
  Description of Artificial Sequence: Synthetic oligonucleotide
  Sense strand starting at position 3120 of SEQ ID NO: 714
uauauuaggcuagaucugu

SEQ ID NO: 58693 - RNA, 19 nt, Artificial Sequence
  Description of Artificial Sequence: Synthetic oligonucleotide
  Antisense strand to SEQ ID NO: 58612
acagaucuagccuaauaua

SEQ ID NO: 58694 - RNA, 19 nt, Artificial Sequence
  Description of Artificial Sequence: Synthetic oligonucleotide
  Sense strand starting at position 3164 of SEQ ID NO: 714
guaggagaaucacuuaagu

SEQ ID NO: 58695 - RNA, 19 nt, Artificial Sequence
  Description of Artificial Sequence: Synthetic oligonucleotide
  Antisense strand to SEQ ID NO: 58614
acuuaagugauucuccuac

SEQ ID NO: 58696 - RNA, 19 nt, Artificial Sequence
  Description of Artificial Sequence: Synthetic oligonucleotide
  Sense strand starting at position 3183 of SEQ ID NO: 714
auaggaauuugagaucagu

SEQ ID NO: 58697 - RNA, 19 nt, Artificial Sequence
  Description of Artificial Sequence: Synthetic oligonucleotide
  Antisense strand to SEQ ID NO: 58616
acugaucucaaauuccuau

SEQ ID NO: 58698 - RNA, 19 nt, Artificial Sequence
  Description of Artificial Sequence: Synthetic oligonucleotide
  Sense strand starting at position 3214 of SEQ ID NO: 714
gugagacauugucucuaug

SEQ ID NO: 58699 - RNA, 19 nt, Artificial Sequence
  Description of Artificial Sequence: Synthetic oligonucleotide
  Antisense strand to SEQ ID NO: 58618
cauagagacaaugucucac

SEQ ID NO: 58700 - RNA, 19 nt, Artificial Sequence
  Description of Artificial Sequence: Synthetic oligonucleotide
  Sense strand starting at position 3216 of SEQ ID NO: 714
gagacauugucucuaugaa

SEQ ID NO: 58701 - RNA, 19 nt, Artificial Sequence
  Description of Artificial Sequence: Synthetic oligonucleotide
  Antisense strand to SEQ ID NO: 58620
uucauagagacaaugucuc

SEQ ID NO: 58702 - RNA, 19 nt, Artificial Sequence
  Description of Artificial Sequence: Synthetic oligonucleotide
  Sense strand starting at position 3965 of SEQ ID NO: 715
ggaugcucagugggcaaau

SEQ ID NO: 58703 - RNA, 19 nt, Artificial Sequence
  Description of Artificial Sequence: Synthetic oligonucleotide
  Antisense strand to SEQ ID NO: 58622
auuugcccacugagcaucc

SEQ ID NO: 58704 - RNA, 19 nt, Artificial Sequence
  Description of Artificial Sequence: Synthetic oligonucleotide
  Sense strand starting at position 3911 of SEQ ID NO: 715
guuugaugagacuguguua

SEQ ID NO: 58705 - RNA, 19 nt, Artificial Sequence
  Description of Artificial Sequence: Synthetic oligonucleotide
  Antisense strand to SEQ ID NO: 58624
uaacacagucucaucaaac

SEQ ID NO: 58706 - RNA, 19 nt, Artificial Sequence
  Description of Artificial Sequence: Synthetic oligonucleotide
  Sense strand starting at position 3898 of SEQ ID NO: 715
cccugaaagcaguguuuga

SEQ ID NO: 58707 - RNA, 19 nt, Artificial Sequence
  Description of Artificial Sequence: Synthetic oligonucleotide
  Antisense strand to SEQ ID NO: 58626
ucaaacacugcuuucaggg

SEQ ID NO: 58708 - RNA, 19 nt, Artificial Sequence
  Description of Artificial Sequence: Synthetic oligonucleotide
  Sense strand starting at position 3888 of SEQ ID NO: 715
guaaauuccucccugaaag

SEQ ID NO: 58709 - RNA, 19 nt, Artificial Sequence
  Description of Artificial Sequence: Synthetic oligonucleotide
  Antisense strand to SEQ ID NO: 58628
cuuucagggaggaauuuac

SEQ ID NO: 58710 - RNA, 19 nt, Artificial Sequence
  Description of Artificial Sequence: Synthetic oligonucleotide
  Sense strand starting at position 3885 of SEQ ID NO: 715
aguguaaauuccucccuga

SEQ ID NO: 58711 - RNA, 19 nt, Artificial Sequence
  Description of Artificial Sequence: Synthetic oligonucleotide
  Antisense strand to SEQ ID NO: 58630
ucagggaggaauuuacacu

SEQ ID NO: 58712 - RNA, 19 nt, Artificial Sequence
  Description of Artificial Sequence: Synthetic oligonucleotide
  Sense strand starting at position 3854 of SEQ ID NO: 715
agcauuaguccucaacagu

SEQ ID NO: 58713 - RNA, 19 nt, Artificial Sequence
  Description of Artificial Sequence: Synthetic oligonucleotide
  Antisense strand to SEQ ID NO: 58632
acuguugaggacuaaugcu

SEQ ID NO: 58714 - RNA, 19 nt, Artificial Sequence
  Description of Artificial Sequence: Synthetic oligonucleotide
  Sense strand starting at position 3824 of SEQ ID NO: 715
uguccuacgcaauaaaugu

SEQ ID NO: 58715 - RNA, 19 nt, Artificial Sequence
  Description of Artificial Sequence: Synthetic oligonucleotide
  Antisense strand to SEQ ID NO: 58634
acauuuauugcguaggaca

SEQ ID NO: 58716 - RNA, 19 nt, Artificial Sequence
  Description of Artificial Sequence: Synthetic oligonucleotide
  Sense strand starting at position 3819 of SEQ ID NO: 715
uguauuguccuacgcaaua

SEQ ID NO: 58717 - RNA, 19 nt, Artificial Sequence
  Description of Artificial Sequence: Synthetic oligonucleotide
  Antisense strand to SEQ ID NO: 58636
uauugcguaggacaauaca

SEQ ID NO: 58718 - RNA, 19 nt, Artificial Sequence
  Description of Artificial Sequence: Synthetic oligonucleotide
  Sense strand starting at position 3816 of SEQ ID NO: 715
uaguguauuguccuacgca

SEQ ID NO: 58719 - RNA, 19 nt, Artificial Sequence
  Description of Artificial Sequence: Synthetic oligonucleotide
  Antisense strand to SEQ ID NO: 58638
ugcguaggacaauacacua

SEQ ID NO: 58720 - RNA, 19 nt, Artificial Sequence
  Description of Artificial Sequence: Synthetic oligonucleotide
  Sense strand starting at position 3804 of SEQ ID NO: 715
augugaaguguuuagugua

SEQ ID NO: 58721 - RNA, 19 nt, Artificial Sequence
  Description of Artificial Sequence: Synthetic oligonucleotide
  Antisense strand to SEQ ID NO: 58640
uacacuaaacacuucacau

SEQ ID NO: 58722 - RNA, 19 nt, Artificial Sequence
  Description of Artificial Sequence: Synthetic oligonucleotide
  Sense strand starting at position 3795 of SEQ ID NO: 715
ggauaauacaugugaagug

SEQ ID NO: 58723 - RNA, 19 nt, Artificial Sequence
  Description of Artificial Sequence: Synthetic oligonucleotide
  Antisense strand to SEQ ID NO: 58642
cacuucacauguauuaucc

SEQ ID NO: 58724 - RNA, 19 nt, Artificial Sequence
  Description of Artificial Sequence: Synthetic oligonucleotide
  Sense strand starting at position 3716 of SEQ ID NO: 715
ugagaccucgagcaaguua

SEQ ID NO: 58725 - RNA, 19 nt, Artificial Sequence
  Description of Artificial Sequence: Synthetic oligonucleotide
  Antisense strand to SEQ ID NO: 58644
uaacuugcucgaggucuca

SEQ ID NO: 58726 - RNA, 19 nt, Artificial Sequence
  Description of Artificial Sequence: Synthetic oligonucleotide
  Sense strand starting at position 3713 of SEQ ID NO: 715
cugugagaccucgagcaag

SEQ ID NO: 58727 - RNA, 19 nt, Artificial Sequence
  Description of Artificial Sequence: Synthetic oligonucleotide
  Antisense strand to SEQ ID NO: 58646
cuugcucgaggucucacag

SEQ ID NO: 58728 - RNA, 19 nt, Artificial Sequence
  Description of Artificial Sequence: Synthetic oligonucleotide
  Sense strand starting at position 3660 of SEQ ID NO: 715
uugaaaucauugcuguuga

SEQ ID NO: 58729 - RNA, 19 nt, Artificial Sequence
  Description of Artificial Sequence: Synthetic oligonucleotide
  Antisense strand to SEQ ID NO: 58648
ucaacagcaaugauuucaa

SEQ ID NO: 58730 - RNA, 19 nt, Artificial Sequence
  Description of Artificial Sequence: Synthetic oligonucleotide
  Sense strand starting at position 3658 of SEQ ID NO: 715
guuugaaaucauugcuguu

SEQ ID NO: 58731 - RNA, 19 nt, Artificial Sequence
  Description of Artificial Sequence: Synthetic oligonucleotide
  Antisense strand to SEQ ID NO: 58650
aacagcaaugauuucaaac

SEQ ID NO: 58732 - RNA, 19 nt, Artificial Sequence
  Description of Artificial Sequence: Synthetic oligonucleotide
  Sense strand starting at position 3542 of SEQ ID NO: 715
guuacacugcauugugaau

SEQ ID NO: 58733 - RNA, 19 nt, Artificial Sequence
  Description of Artificial Sequence: Synthetic oligonucleotide
  Antisense strand to SEQ ID NO: 58652
auucacaaugcaguguaac

SEQ ID NO: 58734 - RNA, 19 nt, Artificial Sequence
  Description of Artificial Sequence: Synthetic oligonucleotide
  Sense strand starting at position 3525 of SEQ ID NO: 715
ggaacuagauaguaauggu

SEQ ID NO: 58735 - RNA, 19 nt, Artificial Sequence
  Description of Artificial Sequence: Synthetic oligonucleotide
  Antisense strand to SEQ ID NO: 58654
accauuacuaucuaguucc

SEQ ID NO: 58736 - RNA, 19 nt, Artificial Sequence
  Description of Artificial Sequence: Synthetic oligonucleotide
  Sense strand starting at position 3470 of SEQ ID NO: 715
aagagugacuccuuaaugg

SEQ ID NO: 58737 - RNA, 19 nt, Artificial Sequence
  Description of Artificial Sequence: Synthetic oligonucleotide
  Antisense strand to SEQ ID NO: 58656
ccauuaaggagucacucuu

SEQ ID NO: 58738 - RNA, 19 nt, Artificial Sequence
  Description of Artificial Sequence: Synthetic oligonucleotide
  Sense strand starting at position 3466 of SEQ ID NO: 715
aaugaagagugacuccuua

SEQ ID NO: 58739 - RNA, 19 nt, Artificial Sequence
  Description of Artificial Sequence: Synthetic oligonucleotide
  Antisense strand to SEQ ID NO: 58658
uaaggagucacucuucauu

SEQ ID NO: 58740 - RNA, 19 nt, Artificial Sequence
  Description of Artificial Sequence: Synthetic oligonucleotide
  Sense strand starting at position 3372 of SEQ ID NO: 715
auuguaugaugcuauuuac

SEQ ID NO: 58741 - RNA, 19 nt, Artificial Sequence
  Description of Artificial Sequence: Synthetic oligonucleotide
  Antisense strand to SEQ ID NO: 58660
guaaauagcaucauacaau

SEQ ID NO: 58742 - RNA, 19 nt, Artificial Sequence
  Description of Artificial Sequence: Synthetic oligonucleotide
  Sense strand starting at position 3350 of SEQ ID NO: 715
cguauugugcgaaaggcca

SEQ ID NO: 58743 - RNA, 19 nt, Artificial Sequence
  Description of Artificial Sequence: Synthetic oligonucleotide
  Antisense strand to SEQ ID NO: 58662
uggccuuucgcacaauacg

SEQ ID NO: 58744 - RNA, 19 nt, Artificial Sequence
  Description of Artificial Sequence: Synthetic oligonucleotide
  Sense strand starting at position 3178 of SEQ ID NO: 715
gcuagcuguuucuuaacau

SEQ ID NO: 58745 - RNA, 19 nt, Artificial Sequence
  Description of Artificial Sequence: Synthetic oligonucleotide
  Antisense strand to SEQ ID NO: 58664
auguuaagaaacagcuagc

SEQ ID NO: 58746 - RNA, 19 nt, Artificial Sequence
  Description of Artificial Sequence: Synthetic oligonucleotide
  Sense strand starting at position 3175 of SEQ ID NO: 715
aaggcuagcuguuucuuaa

SEQ ID NO: 58747 - RNA, 19 nt, Artificial Sequence
  Description of Artificial Sequence: Synthetic oligonucleotide
  Antisense strand to SEQ ID NO: 58666
uuaagaaacagcuagccuu

SEQ ID NO: 58748 - RNA, 19 nt, Artificial Sequence
  Description of Artificial Sequence: Synthetic oligonucleotide
  Sense strand starting at position 3127 of SEQ ID NO: 715
ugacaucaggccugaaauc

SEQ ID NO: 58749 - RNA, 19 nt, Artificial Sequence
  Description of Artificial Sequence: Synthetic oligonucleotide
  Antisense strand to SEQ ID NO: 58668
gauuucaggccugauguca

SEQ ID NO: 58750 - RNA, 19 nt, Artificial Sequence
  Description of Artificial Sequence: Synthetic oligonucleotide
  Sense strand starting at position 2899 of SEQ ID NO: 715
uggaaagugugagcuuaca

SEQ ID NO: 58751 - RNA, 19 nt, Artificial Sequence
  Description of Artificial Sequence: Synthetic oligonucleotide
  Antisense strand to SEQ ID NO: 58670
uguaagcucacacuuucca

SEQ ID NO: 58752 - RNA, 19 nt, Artificial Sequence
  Description of Artificial Sequence: Synthetic oligonucleotide
  Sense strand starting at position 2871 of SEQ ID NO: 715
ugugaaaugccgggagaag

SEQ ID NO: 58753 - RNA, 19 nt, Artificial Sequence
  Description of Artificial Sequence: Synthetic oligonucleotide
  Antisense strand to SEQ ID NO: 58672
cuucucccggcauuucaca

SEQ ID NO: 58754 - RNA, 19 nt, Artificial Sequence
  Description of Artificial Sequence: Synthetic oligonucleotide
  Sense strand starting at position 2870 of SEQ ID NO: 715
cugugaaaugccgggagaa

SEQ ID NO: 58755 - RNA, 19 nt, Artificial Sequence
  Description of Artificial Sequence: Synthetic oligonucleotide
  Antisense strand to SEQ ID NO: 58674
uucucccggcauuucacag

SEQ ID NO: 58756 - RNA, 19 nt, Artificial Sequence
  Description of Artificial Sequence: Synthetic oligonucleotide
  Sense strand starting at position 2685 of SEQ ID NO: 715
gcauguuauggagaaucca

SEQ ID NO: 58757 - RNA, 19 nt, Artificial Sequence
  Description of Artificial Sequence: Synthetic oligonucleotide
  Antisense strand to SEQ ID NO: 58676
uggauucuccauaacaugc

SEQ ID NO: 58758 - RNA, 19 nt, Artificial Sequence
  Description of Artificial Sequence: Synthetic oligonucleotide
  Sense strand starting at position 2683 of SEQ ID NO: 715
augcauguuauggagaauc

SEQ ID NO: 58759 - RNA, 19 nt, Artificial Sequence
  Description of Artificial Sequence: Synthetic oligonucleotide
  Antisense strand to SEQ ID NO: 58678
gauucuccauaacaugcau

SEQ ID NO: 58760 - RNA, 19 nt, Artificial Sequence
  Description of Artificial Sequence: Synthetic oligonucleotide
  Sense strand starting at position 2541 of SEQ ID NO: 715
gagguauuauuugaauaca

SEQ ID NO: 58761 - RNA, 19 nt, Artificial Sequence
  Description of Artificial Sequence: Synthetic oligonucleotide
  Antisense strand to SEQ ID NO: 58680
uguauucaaauaauaccuc

SEQ ID NO: 58762 - RNA, 19 nt, Artificial Sequence
  Description of Artificial Sequence: Synthetic oligonucleotide
  Sense strand starting at position 2502 of SEQ ID NO: 715
ugugaaacauaccugcauu

SEQ ID NO: 58763 - RNA, 19 nt, Artificial Sequence
  Description of Artificial Sequence: Synthetic oligonucleotide
  Antisense strand to SEQ ID NO: 58682
aaugcagguauguuucaca

SEQ ID NO: 58764 - RNA, 19 nt, Artificial Sequence
  Description of Artificial Sequence: Synthetic oligonucleotide
  Sense strand starting at position 2441 of SEQ ID NO: 715
uccauuccaguuugauacu

SEQ ID NO: 58765 - RNA, 19 nt, Artificial Sequence
  Description of Artificial Sequence: Synthetic oligonucleotide
  Antisense strand to SEQ ID NO: 58684
aguaucaaacuggaaugga

SEQ ID NO: 58766 - RNA, 19 nt, Artificial Sequence
  Description of Artificial Sequence: Synthetic oligonucleotide
  Sense strand starting at position 2420 of SEQ ID NO: 715
gcgccauacuauguaucaa

SEQ ID NO: 58767 - RNA, 19 nt, Artificial Sequence
  Description of Artificial Sequence: Synthetic oligonucleotide
  Antisense strand to SEQ ID NO: 58686
uugauacauaguauggcgc

SEQ ID NO: 58768 - RNA, 19 nt, Artificial Sequence
  Description of Artificial Sequence: Synthetic oligonucleotide
  Sense strand starting at position 2399 of SEQ ID NO: 715
augagagauugcuucuucu

SEQ ID NO: 58769 - RNA, 19 nt, Artificial Sequence
  Description of Artificial Sequence: Synthetic oligonucleotide
  Antisense strand to SEQ ID NO: 58688
agaagaagcaaucucucau

SEQ ID NO: 58770 - RNA, 19 nt, Artificial Sequence
  Description of Artificial Sequence: Synthetic oligonucleotide
  Sense strand starting at position 2391 of SEQ ID NO: 715
auaauaacaugagagauug

SEQ ID NO: 58771 - RNA, 19 nt, Artificial Sequence
  Description of Artificial Sequence: Synthetic oligonucleotide
  Antisense strand to SEQ ID NO: 58690
caaucucucauguuauuau

SEQ ID NO: 58772 - RNA, 19 nt, Artificial Sequence
  Description of Artificial Sequence: Synthetic oligonucleotide
  Sense strand starting at position 2361 of SEQ ID NO: 715
ggaaaucuuuaguaauaac

SEQ ID NO: 58773 - RNA, 19 nt, Artificial Sequence
  Description of Artificial Sequence: Synthetic oligonucleotide
  Antisense strand to SEQ ID NO: 58692
guuauuacuaaagauuucc

SEQ ID NO: 58774 - RNA, 19 nt, Artificial Sequence
  Description of Artificial Sequence: Synthetic oligonucleotide
  Sense strand starting at position 2348 of SEQ ID NO: 715
ucaugcugacaauggaaau

SEQ ID NO: 58775 - RNA, 19 nt, Artificial Sequence
  Description of Artificial Sequence: Synthetic oligonucleotide
  Antisense strand to SEQ ID NO: 58694
auuuccauugucagcauga

SEQ ID NO: 58776 - RNA, 19 nt, Artificial Sequence
  Description of Artificial Sequence: Synthetic oligonucleotide
  Sense strand starting at position 2249 of SEQ ID NO: 715
ugggauaaauuugaaccau

SEQ ID NO: 58777 - RNA, 19 nt, Artificial Sequence
  Description of Artificial Sequence: Synthetic oligonucleotide
  Antisense strand to SEQ ID NO: 58696
augguucaaauuuauccca

SEQ ID NO: 58778 - RNA, 19 nt, Artificial Sequence
  Description of Artificial Sequence: Synthetic oligonucleotide
  Sense strand starting at position 2240 of SEQ ID NO: 715
gcaagaugaugggauaaau

SEQ ID NO: 58779 - RNA, 19 nt, Artificial Sequence
  Description of Artificial Sequence: Synthetic oligonucleotide
  Antisense strand to SEQ ID NO: 58698
auuuaucccaucaucuugc

SEQ ID NO: 58780 - RNA, 19 nt, Artificial Sequence
  Description of Artificial Sequence: Synthetic oligonucleotide
  Sense strand starting at position 2238 of SEQ ID NO: 715
acgcaagaugaugggauaa

SEQ ID NO: 58781 - RNA, 19 nt, Artificial Sequence
  Description of Artificial Sequence: Synthetic oligonucleotide
  Antisense strand to SEQ ID NO: 58700
uuaucccaucaucuugcgu

SEQ ID NO: 58782 - RNA, 19 nt, Artificial Sequence
  Description of Artificial Sequence: Synthetic oligonucleotide
  Sense strand starting at position 2689 of SEQ ID NO: 716
cugccuucgcccuagugaa

SEQ ID NO: 58783 - RNA, 19 nt, Artificial Sequence
  Description of Artificial Sequence: Synthetic oligonucleotide
  Antisense strand to SEQ ID NO: 58702
uucacuagggcgaaggcag

SEQ ID NO: 58784 - RNA, 19 nt, Artificial Sequence
  Description of Artificial Sequence: Synthetic oligonucleotide
  Sense strand starting at position 2830 of SEQ ID NO: 716
cgugccuuagcucaagagu

SEQ ID NO: 58785 - RNA, 19 nt, Artificial Sequence
  Description of Artificial Sequence: Synthetic oligonucleotide
  Antisense strand to SEQ ID NO: 58704
acucuugagcuaaggcacg

SEQ ID NO: 58786 - RNA, 19 nt, Artificial Sequence
  Description of Artificial Sequence: Synthetic oligonucleotide
  Sense strand starting at position 292 of SEQ ID NO: 717
agagguuuauuugaguaaa

SEQ ID NO: 58787 - RNA, 19 nt, Artificial Sequence
  Description of Artificial Sequence: Synthetic oligonucleotide
  Antisense strand to SEQ ID NO: 58706
uuuacucaaauaaaccucu

SEQ ID NO: 58788 - RNA, 19 nt, Artificial Sequence
  Description of Artificial Sequence: Synthetic oligonucleotide
  Sense strand starting at position 2255 of SEQ ID NO: 717
cugccuuagcccuagugaa

SEQ ID NO: 58789 - RNA, 19 nt, Artificial Sequence
  Description of Artificial Sequence: Synthetic oligonucleotide
  Antisense strand to SEQ ID NO: 58708
uucacuagggcuaaggcag

SEQ ID NO: 58790 - RNA, 19 nt, Artificial Sequence
  Description of Artificial Sequence: Synthetic oligonucleotide
  Sense strand starting at position 2396 of SEQ ID NO: 717
caugccuuagcucaagagu

SEQ ID NO: 58791 - RNA, 19 nt, Artificial Sequence
  Description of Artificial Sequence: Synthetic oligonucleotide
  Antisense strand to SEQ ID NO: 58710
acucuugagcuaaggcaug

SEQ ID NO: 58792 - RNA, 19 nt, Artificial Sequence
  Description of Artificial Sequence: Synthetic oligonucleotide
  Sense strand starting at position 2569 of SEQ ID NO: 717
gguaucagcucuuccuauu

SEQ ID NO: 58793 - RNA, 19 nt, Artificial Sequence
  Description of Artificial Sequence: Synthetic oligonucleotide
  Antisense strand to SEQ ID NO: 58712
aauaggaagagcugauacc

SEQ ID NO: 58794 - RNA, 19 nt, Artificial Sequence
  Description of Artificial Sequence: Synthetic oligonucleotide
  Sense strand starting at position 1117 of SEQ ID NO: 718
uacaaauguugguggacau

SEQ ID NO: 58795 - RNA, 19 nt, Artificial Sequence
  Description of Artificial Sequence: Synthetic oligonucleotide
  Antisense strand to SEQ ID NO: 58714
auguccaccaacauuugua

SEQ ID NO: 58796 - RNA, 19 nt, Artificial Sequence
  Description of Artificial Sequence: Synthetic oligonucleotide
  Sense strand starting at position 2218 of SEQ ID NO: 718
cugcuuuagcccuagugaa

SEQ ID NO: 58797 - RNA, 19 nt, Artificial Sequence
  Description of Artificial Sequence: Synthetic oligonucleotide
  Antisense strand to SEQ ID NO: 58716
uucacuagggcuaaagcag

SEQ ID NO: 58798 - RNA, 19 nt, Artificial Sequence
  Description of Artificial Sequence: Synthetic oligonucleotide
  Sense strand starting at position 3813 of SEQ ID NO: 719
ugggauaucugggaucucu

SEQ ID NO: 58799 - RNA, 19 nt, Artificial Sequence
  Description of Artificial Sequence: Synthetic oligonucleotide
  Antisense strand to SEQ ID NO: 58718
agagaucccagauauccca

SEQ ID NO: 58800 - RNA, 19 nt, Artificial Sequence
  Description of Artificial Sequence: Synthetic oligonucleotide
  Sense strand starting at position 3812 of SEQ ID NO: 719
gugggauaucugggaucuc

SEQ ID NO: 58801 - RNA, 19 nt, Artificial Sequence
  Description of Artificial Sequence: Synthetic oligonucleotide
  Antisense strand to SEQ ID NO: 58720
gagaucccagauaucccac

SEQ ID NO: 58802 - RNA, 19 nt, Artificial Sequence
  Description of Artificial Sequence: Synthetic oligonucleotide
  Sense strand starting at position 3802 of SEQ ID NO: 719
cugggauugggugggauau

SEQ ID NO: 58803 - RNA, 19 nt, Artificial Sequence
  Description of Artificial Sequence: Synthetic oligonucleotide
  Antisense strand to SEQ ID NO: 58722
auaucccacccaaucccag

SEQ ID NO: 58804 - RNA, 19 nt, Artificial Sequence
  Description of Artificial Sequence: Synthetic oligonucleotide
  Sense strand starting at position 3117 of SEQ ID NO: 719
uuggcaucgcgcguaauca

SEQ ID NO: 58805 - RNA, 19 nt, Artificial Sequence
  Description of Artificial Sequence: Synthetic oligonucleotide
  Antisense strand to SEQ ID NO: 58724
ugauuacgcgcgaugccaa

SEQ ID NO: 58806 - RNA, 19 nt, Artificial Sequence
  Description of Artificial Sequence: Synthetic oligonucleotide
  Sense strand starting at position 2680 of SEQ ID NO: 719
cacagaucugcguagaaac

SEQ ID NO: 58807 - RNA, 19 nt, Artificial Sequence
  Description of Artificial Sequence: Synthetic oligonucleotide
  Antisense strand to SEQ ID NO: 58726
guuucuacgcagaucugug

SEQ ID NO: 58808 - RNA, 19 nt, Artificial Sequence
  Description of Artificial Sequence: Synthetic oligonucleotide
  Sense strand starting at position 2678 of SEQ ID NO: 719
ggcacagaucugcguagaa

SEQ ID NO: 58809 - RNA, 19 nt, Artificial Sequence
  Description of Artificial Sequence: Synthetic oligonucleotide
  Antisense strand to SEQ ID NO: 58728
uucuacgcagaucugugcc

SEQ ID NO: 58810 - RNA, 19 nt, Artificial Sequence
  Description of Artificial Sequence: Synthetic oligonucleotide
  Sense strand starting at position 2550 of SEQ ID NO: 719
gggaucagcucuuccuauu

SEQ ID NO: 58811 - RNA, 19 nt, Artificial Sequence
  Description of Artificial Sequence: Synthetic oligonucleotide
  Antisense strand to SEQ ID NO: 58730
aauaggaagagcugauccc

SEQ ID NO: 58812 - RNA, 19 nt, Artificial Sequence
  Description of Artificial Sequence: Synthetic oligonucleotide
  Sense strand starting at position 2467 of SEQ ID NO: 719
gagcuuaaucugugaccac

SEQ ID NO: 58813 - RNA, 19 nt, Artificial Sequence
  Description of Artificial Sequence: Synthetic oligonucleotide
  Antisense strand to SEQ ID NO: 58732
guggucacagauuaagcuc

SEQ ID NO: 58814 - RNA, 19 nt, Artificial Sequence
  Description of Artificial Sequence: Synthetic oligonucleotide
  Sense strand starting at position 2466 of SEQ ID NO: 719
ggagcuuaaucugugacca

SEQ ID NO: 58815 - RNA, 19 nt, Artificial Sequence
  Description of Artificial Sequence: Synthetic oligonucleotide
  Antisense strand to SEQ ID NO: 58734
uggucacagauuaagcucc

SEQ ID NO: 58816 - RNA, 19 nt, Artificial Sequence
  Description of Artificial Sequence: Synthetic oligonucleotide
  Sense strand starting at position 2463 of SEQ ID NO: 719
gguggagcuuaaucuguga

SEQ ID NO: 58817 - RNA, 19 nt, Artificial Sequence
  Description of Artificial Sequence: Synthetic oligonucleotide
  Antisense strand to SEQ ID NO: 58736
ucacagauuaagcuccacc

SEQ ID NO: 58818 - RNA, 19 nt, Artificial Sequence
  Description of Artificial Sequence: Synthetic oligonucleotide
  Sense strand starting at position 2388 of SEQ ID NO: 719
ucaagaguuuguguuuggu

SEQ ID NO: 58819 - RNA, 19 nt, Artificial Sequence
  Description of Artificial Sequence: Synthetic oligonucleotide
  Antisense strand to SEQ ID NO: 58738
accaaacacaaacucuuga

SEQ ID NO: 58820 - RNA, 19 nt, Artificial Sequence
  Description of Artificial Sequence: Synthetic oligonucleotide
  Sense strand starting at position 2385 of SEQ ID NO: 719
agcucaagaguuuguguuu

SEQ ID NO: 58821 - RNA, 19 nt, Artificial Sequence
  Description of Artificial Sequence: Synthetic oligonucleotide
  Antisense strand to SEQ ID NO: 58740
aaacacaaacucuugagcu

SEQ ID NO: 58822 - RNA, 19 nt, Artificial Sequence
  Description of Artificial Sequence: Synthetic oligonucleotide
  Sense strand starting at position 2314 of SEQ ID NO: 719
cucuacucuuuauugguua

SEQ ID NO: 58823 - RNA, 19 nt, Artificial Sequence
  Description of Artificial Sequence: Synthetic oligonucleotide
  Antisense strand to SEQ ID NO: 58742
uaaccaauaaagaguagag

SEQ ID NO: 58824 - RNA, 19 nt, Artificial Sequence
  Description of Artificial Sequence: Synthetic oligonucleotide
  Sense strand starting at position 2308 of SEQ ID NO: 719
accggucucuacucuuuau

SEQ ID NO: 58825 - RNA, 19 nt, Artificial Sequence
  Description of Artificial Sequence: Synthetic oligonucleotide
  Antisense strand to SEQ ID NO: 58744
auaaagaguagagaccggu

SEQ ID NO: 58826 - RNA, 19 nt, Artificial Sequence
  Description of Artificial Sequence: Synthetic oligonucleotide
  Sense strand starting at position 2268 of SEQ ID NO: 719
gcccuucccgcuucuuauu

SEQ ID NO: 58827 - RNA, 19 nt, Artificial Sequence
  Description of Artificial Sequence: Synthetic oligonucleotide
  Antisense strand to SEQ ID NO: 58746
aauaagaagcgggaagggc

SEQ ID NO: 58828 - RNA, 19 nt, Artificial Sequence
  Description of Artificial Sequence: Synthetic oligonucleotide
  Sense strand starting at position 2236 of SEQ ID NO: 719
cugcuuuagcccuagugaa

SEQ ID NO: 58829 - RNA, 19 nt, Artificial Sequence
  Description of Artificial Sequence: Synthetic oligonucleotide
  Antisense strand to SEQ ID NO: 58748
uucacuagggcuaaagcag

SEQ ID NO: 58830 - RNA, 19 nt, Artificial Sequence
  Description of Artificial Sequence: Synthetic oligonucleotide
  Sense strand starting at position 2154 of SEQ ID NO: 719
gagaucaauucggcuuucu

SEQ ID NO: 58831 - RNA, 19 nt, Artificial Sequence
  Description of Artificial Sequence: Synthetic oligonucleotide
  Antisense strand to SEQ ID NO: 58750
agaaagccgaauugaucuc

SEQ ID NO: 58832 - RNA, 19 nt, Artificial Sequence
  Description of Artificial Sequence: Synthetic oligonucleotide
  Sense strand starting at position 2152 of SEQ ID NO: 719
cugagaucaauucggcuuu

SEQ ID NO: 58833 - RNA, 19 nt, Artificial Sequence
  Description of Artificial Sequence: Synthetic oligonucleotide
  Antisense strand to SEQ ID NO: 58752
aaagccgaauugaucucag

SEQ ID NO: 58834 - RNA, 19 nt, Artificial Sequence
  Description of Artificial Sequence: Synthetic oligonucleotide
  Sense strand starting at position 2108 of SEQ ID NO: 719
agcuuaguggcuugaagac

SEQ ID NO: 58835 - RNA, 19 nt, Artificial Sequence
  Description of Artificial Sequence: Synthetic oligonucleotide
  Antisense strand to SEQ ID NO: 58754
gucuucaagccacuaagcu

SEQ ID NO: 58836 - RNA, 19 nt, Artificial Sequence
  Description of Artificial Sequence: Synthetic oligonucleotide
  Sense strand starting at position 2010 of SEQ ID NO: 719
ccgguaucaguuugaauug

SEQ ID NO: 58837 - RNA, 19 nt, Artificial Sequence
  Description of Artificial Sequence: Synthetic oligonucleotide
  Antisense strand to SEQ ID NO: 58756
caauucaaacugauaccgg

SEQ ID NO: 58838 - RNA, 19 nt, Artificial Sequence
  Description of Artificial Sequence: Synthetic oligonucleotide
  Sense strand starting at position 943 of SEQ ID NO: 719
agccauaaguguucccauu

SEQ ID NO: 58839 - RNA, 19 nt, Artificial Sequence
  Description of Artificial Sequence: Synthetic oligonucleotide
  Antisense strand to SEQ ID NO: 58758
aaugggaacacuuauggcu

SEQ ID NO: 58840 - RNA, 19 nt, Artificial Sequence
  Description of Artificial Sequence: Synthetic oligonucleotide
  Sense strand starting at position 910 of SEQ ID NO: 719
augauaaccuccuuguuga

SEQ ID NO: 58841 - RNA, 19 nt, Artificial Sequence
  Description of Artificial Sequence: Synthetic oligonucleotide
  Antisense strand to SEQ ID NO: 58760
ucaacaaggagguuaucau

SEQ ID NO: 58842 - RNA, 19 nt, Artificial Sequence
  Description of Artificial Sequence: Synthetic oligonucleotide
  Sense strand starting at position 830 of SEQ ID NO: 719
agacuuuguccagacaguc

SEQ ID NO: 58843 - RNA, 19 nt, Artificial Sequence
  Description of Artificial Sequence: Synthetic oligonucleotide
  Antisense strand to SEQ ID NO: 58762
gacugucuggacaaagucu

SEQ ID NO: 58844 - RNA, 19 nt, Artificial Sequence
  Description of Artificial Sequence: Synthetic oligonucleotide
  Sense strand starting at position 825 of SEQ ID NO: 719
accauagacuuuguccaga

SEQ ID NO: 58845 - RNA, 19 nt, Artificial Sequence
  Description of Artificial Sequence: Synthetic oligonucleotide
  Antisense strand to SEQ ID NO: 58764
ucuggacaaagucuauggu

SEQ ID NO: 58846 - RNA, 19 nt, Artificial Sequence
  Description of Artificial Sequence: Synthetic oligonucleotide
  Sense strand starting at position 817 of SEQ ID NO: 719
uuggcuaaaccauagacuu

SEQ ID NO: 58847 - RNA, 19 nt, Artificial Sequence
  Description of Artificial Sequence: Synthetic oligonucleotide
  Antisense strand to SEQ ID NO: 58766
aagucuaugguuuagccaa

SEQ ID NO: 58848 - RNA, 19 nt, Artificial Sequence
  Description of Artificial Sequence: Synthetic oligonucleotide
  Sense strand starting at position 779 of SEQ ID NO: 719
gcaauugaacuagaagcau

SEQ ID NO: 58849 - RNA, 19 nt, Artificial Sequence
  Description of Artificial Sequence: Synthetic oligonucleotide
  Antisense strand to SEQ ID NO: 58768
augcuucuaguucaauugc

SEQ ID NO: 58850 - RNA, 19 nt, Artificial Sequence
  Description of Artificial Sequence: Synthetic oligonucleotide
  Sense strand starting at position 768 of SEQ ID NO: 719
gucgcaugacugcaauuga

SEQ ID NO: 58851 - RNA, 19 nt, Artificial Sequence
  Description of Artificial Sequence: Synthetic oligonucleotide
  Antisense strand to SEQ ID NO: 58770
ucaauugcagucaugcgac

SEQ ID NO: 58852 - RNA, 19 nt, Artificial Sequence
  Description of Artificial Sequence: Synthetic oligonucleotide
  Sense strand starting at position 757 of SEQ ID NO: 719
agagauguguggucgcaug

SEQ ID NO: 58853 - RNA, 19 nt, Artificial Sequence
  Description of Artificial Sequence: Synthetic oligonucleotide
  Antisense strand to SEQ ID NO: 58772
caugcgaccacacaucucu

SEQ ID NO: 58854 - RNA, 19 nt, Artificial Sequence
  Description of Artificial Sequence: Synthetic oligonucleotide
  Sense strand starting at position 746 of SEQ ID NO: 719
gaucaaacuuaagagaugu

SEQ ID NO: 58855 - RNA, 19 nt, Artificial Sequence
  Description of Artificial Sequence: Synthetic oligonucleotide
  Antisense strand to SEQ ID NO: 58774
acaucucuuaaguuugauc

SEQ ID NO: 58856 - RNA, 19 nt, Artificial Sequence
  Description of Artificial Sequence: Synthetic oligonucleotide
  Sense strand starting at position 442 of SEQ ID NO: 719
gauuaaggcuaagucucua

SEQ ID NO: 58857 - RNA, 19 nt, Artificial Sequence
  Description of Artificial Sequence: Synthetic oligonucleotide
  Antisense strand to SEQ ID NO: 58776
uagagacuuagccuuaauc

SEQ ID NO: 58858 - RNA, 19 nt, Artificial Sequence
  Description of Artificial Sequence: Synthetic oligonucleotide
  Sense strand starting at position 422 of SEQ ID NO: 719
uagucuuuauuggagauaa

SEQ ID NO: 58859 - RNA, 19 nt, Artificial Sequence
  Description of Artificial Sequence: Synthetic oligonucleotide
  Antisense strand to SEQ ID NO: 58778
uuaucuccaauaaagacua

SEQ ID NO: 58860 - RNA, 19 nt, Artificial Sequence
  Description of Artificial Sequence: Synthetic oligonucleotide
  Sense strand starting at position 398 of SEQ ID NO: 719
ggaacaaauguguaauguc

SEQ ID NO: 58861 - RNA, 19 nt, Artificial Sequence
  Description of Artificial Sequence: Synthetic oligonucleotide
  Antisense strand to SEQ ID NO: 58780
gacauuacacauuuguucc

SEQ ID NO: 58862 - RNA, 19 nt, Artificial Sequence
  Description of Artificial Sequence: Synthetic oligonucleotide
  Sense strand starting at position 275 of SEQ ID NO: 719
agagguuuauuugagucaa

SEQ ID NO: 58863 - RNA, 19 nt, Artificial Sequence
  Description of Artificial Sequence: Synthetic oligonucleotide
  Antisense strand to SEQ ID NO: 58782
uugacucaaauaaaccucu

SEQ ID NO: 58864 - RNA, 19 nt, Artificial Sequence
  Description of Artificial Sequence: Synthetic oligonucleotide
  Sense strand starting at position 123 of SEQ ID NO: 719
uccaaagacuuagagaaua

SEQ ID NO: 58865 - RNA, 19 nt, Artificial Sequence
  Description of Artificial Sequence: Synthetic oligonucleotide
  Antisense strand to SEQ ID NO: 58784
uauucucuaagucuuugga

SEQ ID NO: 58866 - RNA, 19 nt, Artificial Sequence
  Description of Artificial Sequence: Synthetic oligonucleotide
  Sense strand starting at position 84 of SEQ ID NO: 719
augaauugugguuauuaac

SEQ ID NO: 58867 - RNA, 19 nt, Artificial Sequence
  Description of Artificial Sequence: Synthetic oligonucleotide
  Antisense strand to SEQ ID NO: 58786
guuaauaaccacaauucau

SEQ ID NO: 58868 - RNA, 19 nt, Artificial Sequence
  Description of Artificial Sequence: Synthetic oligonucleotide
  Sense strand starting at position 45 of SEQ ID NO: 719
cuuguaaaguuucuaucau

SEQ ID NO: 58869 - RNA, 19 nt, Artificial Sequence
  Description of Artificial Sequence: Synthetic oligonucleotide
  Antisense strand to SEQ ID NO: 58788
augauagaaacuuuacaag

SEQ ID NO: 58870 - RNA, 19 nt, Artificial Sequence
  Description of Artificial Sequence: Synthetic oligonucleotide
  Sense strand starting at position 21 of SEQ ID NO: 719
gcuuuaccuggguaaauca

SEQ ID NO: 58871 - RNA, 19 nt, Artificial Sequence
  Description of Artificial Sequence: Synthetic oligonucleotide
  Antisense strand to SEQ ID NO: 58790
ugauuuacccagguaaagc

SEQ ID NO: 58872 - RNA, 19 nt, Artificial Sequence
  Description of Artificial Sequence: Synthetic oligonucleotide
  Sense strand starting at position 20 of SEQ ID NO: 719
agcuuuaccuggguaaauc

SEQ ID NO: 58873 - RNA, 19 nt, Artificial Sequence
  Description of Artificial Sequence: Synthetic oligonucleotide
  Antisense strand to SEQ ID NO: 58792
gauuuacccagguaaagcu

SEQ ID NO: 58874 - RNA, 19 nt, Artificial Sequence
  Description of Artificial Sequence: Synthetic oligonucleotide
  Sense strand starting at position 19 of SEQ ID NO: 719
cagcuuuaccuggguaaau

SEQ ID NO: 58875 - RNA, 19 nt, Artificial Sequence
  Description of Artificial Sequence: Synthetic oligonucleotide
  Antisense strand to SEQ ID NO: 58794
auuuacccagguaaagcug

SEQ ID NO: 58876 - RNA, 19 nt, Artificial Sequence
  Description of Artificial Sequence: Synthetic oligonucleotide
  Sense strand starting at position 18 of SEQ ID NO: 719
acagcuuuaccuggguaaa

SEQ ID NO: 58877 - RNA, 19 nt, Artificial Sequence
  Description of Artificial Sequence: Synthetic oligonucleotide
  Antisense strand to SEQ ID NO: 58796
uuuacccagguaaagcugu

SEQ ID NO: 58878 - RNA, 19 nt, Artificial Sequence
  Description of Artificial Sequence: Synthetic oligonucleotide
  Sense strand starting at position 3941 of SEQ ID NO: 720
ggauccuaucugcauaaua

SEQ ID NO: 58879 - RNA, 19 nt, Artificial Sequence
  Description of Artificial Sequence: Synthetic oligonucleotide
  Antisense strand to SEQ ID NO: 58798
uauuaugcagauaggaucc

SEQ ID NO: 58880 - RNA, 19 nt, Artificial Sequence
  Description of Artificial Sequence: Synthetic oligonucleotide
  Sense strand starting at position 3940 of SEQ ID NO: 720
gggauccuaucugcauaau

SEQ ID NO: 58881 - RNA, 19 nt, Artificial Sequence
  Description of Artificial Sequence: Synthetic oligonucleotide
  Antisense strand to SEQ ID NO: 58800
auuaugcagauaggauccc

SEQ ID NO: 58882 - RNA, 19 nt, Artificial Sequence
  Description of Artificial Sequence: Synthetic oligonucleotide
  Sense strand starting at position 3882 of SEQ ID NO: 720
guuguuucuucuguacaag

SEQ ID NO: 58883 - RNA, 19 nt, Artificial Sequence
  Description of Artificial Sequence: Synthetic oligonucleotide
  Antisense strand to SEQ ID NO: 58802
cuuguacagaagaaacaac

SEQ ID NO: 58884 - RNA, 19 nt, Artificial Sequence
  Description of Artificial Sequence: Synthetic oligonucleotide
  Sense strand starting at position 3835 of SEQ ID NO: 720
guguaaugcucacuaaacc

SEQ ID NO: 58885 - RNA, 19 nt, Artificial Sequence
  Description of Artificial Sequence: Synthetic oligonucleotide
  Antisense strand to SEQ ID NO: 58804
gguuuagugagcauuacac

SEQ ID NO: 58886 - RNA, 19 nt, Artificial Sequence
  Description of Artificial Sequence: Synthetic oligonucleotide
  Sense strand starting at position 3833 of SEQ ID NO: 720
ucguguaaugcucacuaaa

SEQ ID NO: 58887 - RNA, 19 nt, Artificial Sequence
  Description of Artificial Sequence: Synthetic oligonucleotide
  Antisense strand to SEQ ID NO: 58806
uuuagugagcauuacacga

SEQ ID NO: 58888 - RNA, 19 nt, Artificial Sequence
  Description of Artificial Sequence: Synthetic oligonucleotide
  Sense strand starting at position 3822 of SEQ ID NO: 720
uaaccaagccaucguguaa

SEQ ID NO: 58889 - RNA, 19 nt, Artificial Sequence
  Description of Artificial Sequence: Synthetic oligonucleotide
  Antisense strand to SEQ ID NO: 58808
uuacacgauggcuugguua

SEQ ID NO: 58890 - RNA, 19 nt, Artificial Sequence
  Description of Artificial Sequence: Synthetic oligonucleotide
  Sense strand starting at position 3738 of SEQ ID NO: 720
gggacucaaugucuucuga

SEQ ID NO: 58891 - RNA, 19 nt, Artificial Sequence
  Description of Artificial Sequence: Synthetic oligonucleotide
  Antisense strand to SEQ ID NO: 58810
ucagaagacauugaguccc

SEQ ID NO: 58892 - RNA, 19 nt, Artificial Sequence
  Description of Artificial Sequence: Synthetic oligonucleotide
  Sense strand starting at position 3710 of SEQ ID NO: 720
caaguagugguuuaaacca

SEQ ID NO: 58893 - RNA, 19 nt, Artificial Sequence
  Description of Artificial Sequence: Synthetic oligonucleotide
  Antisense strand to SEQ ID NO: 58812
ugguuuaaaccacuacuug

SEQ ID NO: 58894 - RNA, 19 nt, Artificial Sequence
  Description of Artificial Sequence: Synthetic oligonucleotide
  Sense strand starting at position 3676 of SEQ ID NO: 720
uuaacauauucgcuacaag

SEQ ID NO: 58895 - RNA, 19 nt, Artificial Sequence
  Description of Artificial Sequence: Synthetic oligonucleotide
  Antisense strand to SEQ ID NO: 58814
cuuguagcgaauauguuaa

SEQ ID NO: 58896 - RNA, 19 nt, Artificial Sequence
  Description of Artificial Sequence: Synthetic oligonucleotide
  Sense strand starting at position 3675 of SEQ ID NO: 720
guuaacauauucgcuacaa

SEQ ID NO: 58897 - RNA, 19 nt, Artificial Sequence
  Description of Artificial Sequence: Synthetic oligonucleotide
  Antisense strand to SEQ ID NO: 58816
uuguagcgaauauguuaac

SEQ ID NO: 58898 - RNA, 19 nt, Artificial Sequence
  Description of Artificial Sequence: Synthetic oligonucleotide
  Sense strand starting at position 3656 of SEQ ID NO: 720
gccauuauuggauauauua

SEQ ID NO: 58899 - RNA, 19 nt, Artificial Sequence
  Description of Artificial Sequence: Synthetic oligonucleotide
  Antisense strand to SEQ ID NO: 58818
uaauauauccaauaauggc

SEQ ID NO: 58900 - RNA, 19 nt, Artificial Sequence
  Description of Artificial Sequence: Synthetic oligonucleotide
  Sense strand starting at position 3632 of SEQ ID NO: 720
ggcagaguacugcacucaa

SEQ ID NO: 58901 - RNA, 19 nt, Artificial Sequence
  Description of Artificial Sequence: Synthetic oligonucleotide
  Antisense strand to SEQ ID NO: 58820
uugagugcaguacucugcc

SEQ ID NO: 58902 - RNA, 19 nt, Artificial Sequence
  Description of Artificial Sequence: Synthetic oligonucleotide
  Sense strand starting at position 3624 of SEQ ID NO: 720
ucugguuuggcagaguacu

SEQ ID NO: 58903 - RNA, 19 nt, Artificial Sequence
  Description of Artificial Sequence: Synthetic oligonucleotide
  Antisense strand to SEQ ID NO: 58822
aguacucugccaaaccaga

SEQ ID NO: 58904 - RNA, 19 nt, Artificial Sequence
  Description of Artificial Sequence: Synthetic oligonucleotide
  Sense strand starting at position 3598 of SEQ ID NO: 720
uguaauuugcuguaagccu

SEQ ID NO: 58905 - RNA, 19 nt, Artificial Sequence
  Description of Artificial Sequence: Synthetic oligonucleotide
  Antisense strand to SEQ ID NO: 58824
aggcuuacagcaaauuaca

SEQ ID NO: 58906 - RNA, 19 nt, Artificial Sequence
  Description of Artificial Sequence: Synthetic oligonucleotide
  Sense strand starting at position 3486 of SEQ ID NO: 720
agguaagaaguucgagauu

SEQ ID NO: 58907 - RNA, 19 nt, Artificial Sequence
  Description of Artificial Sequence: Synthetic oligonucleotide
  Antisense strand to SEQ ID NO: 58826
aaucucgaacuucuuaccu

SEQ ID NO: 58908 - RNA, 19 nt, Artificial Sequence
  Description of Artificial Sequence: Synthetic oligonucleotide
  Sense strand starting at position 3378 of SEQ ID NO: 720
gaguuuauucuuuagcaug

SEQ ID NO: 58909 - RNA, 19 nt, Artificial Sequence
  Description of Artificial Sequence: Synthetic oligonucleotide
  Antisense strand to SEQ ID NO: 58828
caugcuaaagaauaaacuc

SEQ ID NO: 58910 - RNA, 19 nt, Artificial Sequence
  Description of Artificial Sequence: Synthetic oligonucleotide
  Sense strand starting at position 3377 of SEQ ID NO: 720
agaguuuauucuuuagcau

SEQ ID NO: 58911 - RNA, 19 nt, Artificial Sequence
  Description of Artificial Sequence: Synthetic oligonucleotide
  Antisense strand to SEQ ID NO: 58830
augcuaaagaauaaacucu

SEQ ID NO: 58912 - RNA, 19 nt, Artificial Sequence
  Description of Artificial Sequence: Synthetic oligonucleotide
  Sense strand starting at position 3257 of SEQ ID NO: 720
acguaaugagaauagcagu

SEQ ID NO: 58913 - RNA, 19 nt, Artificial Sequence
  Description of Artificial Sequence: Synthetic oligonucleotide
  Antisense strand to SEQ ID NO: 58832
acugcuauucucauuacgu

SEQ ID NO: 58914 - RNA, 19 nt, Artificial Sequence
  Description of Artificial Sequence: Synthetic oligonucleotide
  Sense strand starting at position 3177 of SEQ ID NO: 720
accugaaauuuguaaggcu

SEQ ID NO: 58915 - RNA, 19 nt, Artificial Sequence
  Description of Artificial Sequence: Synthetic oligonucleotide
  Antisense strand to SEQ ID NO: 58834
agccuuacaaauuucaggu

SEQ ID NO: 58916 - RNA, 19 nt, Artificial Sequence
  Description of Artificial Sequence: Synthetic oligonucleotide
  Sense strand starting at position 2979 of SEQ ID NO: 720
uccaguugcugagcauauu

SEQ ID NO: 58917 - RNA, 19 nt, Artificial Sequence
  Description of Artificial Sequence: Synthetic oligonucleotide
  Antisense strand to SEQ ID NO: 58836
aauaugcucagcaacugga

SEQ ID NO: 58918 - RNA, 19 nt, Artificial Sequence
  Description of Artificial Sequence: Synthetic oligonucleotide
  Sense strand starting at position 2977 of SEQ ID NO: 720
auuccaguugcugagcaua

SEQ ID NO: 58919 - RNA, 19 nt, Artificial Sequence
  Description of Artificial Sequence: Synthetic oligonucleotide
  Antisense strand to SEQ ID NO: 58838
uaugcucagcaacuggaau

SEQ ID NO: 58920 - RNA, 19 nt, Artificial Sequence
  Description of Artificial Sequence: Synthetic oligonucleotide
  Sense strand starting at position 2496 of SEQ ID NO: 720
gcaauuuauuggcagagua

SEQ ID NO: 58921 - RNA, 19 nt, Artificial Sequence
  Description of Artificial Sequence: Synthetic oligonucleotide
  Antisense strand to SEQ ID NO: 58840
uacucugccaauaaauugc

SEQ ID NO: 58922 - RNA, 19 nt, Artificial Sequence
  Description of Artificial Sequence: Synthetic oligonucleotide
  Sense strand starting at position 2485 of SEQ ID NO: 720
uauugaauguggcaauuua

SEQ ID NO: 58923 - RNA, 19 nt, Artificial Sequence
  Description of Artificial Sequence: Synthetic oligonucleotide
  Antisense strand to SEQ ID NO: 58842
uaaauugccacauucaaua

SEQ ID NO: 58924 - RNA, 19 nt, Artificial Sequence
  Description of Artificial Sequence: Synthetic oligonucleotide
  Sense strand starting at position 2480 of SEQ ID NO: 720
aagaauauugaauguggca

SEQ ID NO: 58925 - RNA, 19 nt, Artificial Sequence
  Description of Artificial Sequence: Synthetic oligonucleotide
  Antisense strand to SEQ ID NO: 58844
ugccacauucaauauucuu

SEQ ID NO: 58926 - RNA, 19 nt, Artificial Sequence
  Description of Artificial Sequence: Synthetic oligonucleotide
  Sense strand starting at position 2453 of SEQ ID NO: 720
uguguuucccacugaauua

SEQ ID NO: 58927 - RNA, 19 nt, Artificial Sequence
  Description of Artificial Sequence: Synthetic oligonucleotide
  Antisense strand to SEQ ID NO: 58846
uaauucagugggaaacaca

SEQ ID NO: 58928 - RNA, 19 nt, Artificial Sequence
  Description of Artificial Sequence: Synthetic oligonucleotide
  Sense strand starting at position 2391 of SEQ ID NO: 720
auuccaauccgguauagau

SEQ ID NO: 58929 - RNA, 19 nt, Artificial Sequence
  Description of Artificial Sequence: Synthetic oligonucleotide
  Antisense strand to SEQ ID NO: 58848
aucuauaccggauuggaau

SEQ ID NO: 58930 - RNA, 19 nt, Artificial Sequence
  Description of Artificial Sequence: Synthetic oligonucleotide
  Sense strand starting at position 2388 of SEQ ID NO: 720
ggcauuccaauccgguaua

SEQ ID NO: 58931 - RNA, 19 nt, Artificial Sequence
  Description of Artificial Sequence: Synthetic oligonucleotide
  Antisense strand to SEQ ID NO: 58850
uauaccggauuggaaugcc

SEQ ID NO: 58932 - RNA, 19 nt, Artificial Sequence
  Description of Artificial Sequence: Synthetic oligonucleotide
  Sense strand starting at position 2378 of SEQ ID NO: 720
aguguuaagaggcauucca

SEQ ID NO: 58933 - RNA, 19 nt, Artificial Sequence
  Description of Artificial Sequence: Synthetic oligonucleotide
  Antisense strand to SEQ ID NO: 58852
uggaaugccucuuaacacu

SEQ ID NO: 58934 - RNA, 19 nt, Artificial Sequence
  Description of Artificial Sequence: Synthetic oligonucleotide
  Sense strand starting at position 2367 of SEQ ID NO: 720
ucagaugaaugaguguuaa

SEQ ID NO: 58935 - RNA, 19 nt, Artificial Sequence
  Description of Artificial Sequence: Synthetic oligonucleotide
  Antisense strand to SEQ ID NO: 58854
uuaacacucauucaucuga

SEQ ID NO: 58936 - RNA, 19 nt, Artificial Sequence
  Description of Artificial Sequence: Synthetic oligonucleotide
  Sense strand starting at position 2211 of SEQ ID NO: 720
cuagaacgguugucaaucu

SEQ ID NO: 58937 - RNA, 19 nt, Artificial Sequence
  Description of Artificial Sequence: Synthetic oligonucleotide
  Antisense strand to SEQ ID NO: 58856
agauugacaaccguucuag

SEQ ID NO: 58938 - RNA, 19 nt, Artificial Sequence
  Description of Artificial Sequence: Synthetic oligonucleotide
  Sense strand starting at position 1751 of SEQ ID NO: 720
cuggcacuccgagagcuaa

SEQ ID NO: 58939 - RNA, 19 nt, Artificial Sequence
  Description of Artificial Sequence: Synthetic oligonucleotide
  Antisense strand to SEQ ID NO: 58858
uuagcucucggagugccag

SEQ ID NO: 58940 - RNA, 19 nt, Artificial Sequence
  Description of Artificial Sequence: Synthetic oligonucleotide
  Sense strand starting at position 1339 of SEQ ID NO: 720
ugcaaagcagaguaaucuu

SEQ ID NO: 58941 - RNA, 19 nt, Artificial Sequence
  Description of Artificial Sequence: Synthetic oligonucleotide
  Antisense strand to SEQ ID NO: 58860
aagauuacucugcuuugca

SEQ ID NO: 58942 - RNA, 19 nt, Artificial Sequence
  Description of Artificial Sequence: Synthetic oligonucleotide
  Sense strand starting at position 1302 of SEQ ID NO: 720
acaauacucccgugcuaaa

SEQ ID NO: 58943 - RNA, 19 nt, Artificial Sequence
  Description of Artificial Sequence: Synthetic oligonucleotide
  Antisense strand to SEQ ID NO: 58862
uuuagcacgggaguauugu

SEQ ID NO: 58944 - RNA, 19 nt, Artificial Sequence
  Description of Artificial Sequence: Synthetic oligonucleotide
  Sense strand starting at position 1087 of SEQ ID NO: 720
gaaggaaagucugaaguau

SEQ ID NO: 58945 - RNA, 19 nt, Artificial Sequence
  Description of Artificial Sequence: Synthetic oligonucleotide
  Antisense strand to SEQ ID NO: 58864
auacuucagacuuuccuuc

SEQ ID NO: 58946 - RNA, 19 nt, Artificial Sequence
  Description of Artificial Sequence: Synthetic oligonucleotide
  Sense strand starting at position 959 of SEQ ID NO: 720
uauuguccugugugauauu

SEQ ID NO: 58947 - RNA, 19 nt, Artificial Sequence
  Description of Artificial Sequence: Synthetic oligonucleotide
  Antisense strand to SEQ ID NO: 58866
aauaucacacaggacaaua

SEQ ID NO: 58948 - RNA, 19 nt, Artificial Sequence
  Description of Artificial Sequence: Synthetic oligonucleotide
  Sense strand starting at position 957 of SEQ ID NO: 720
aauauuguccugugugaua

SEQ ID NO: 58949 - RNA, 19 nt, Artificial Sequence
  Description of Artificial Sequence: Synthetic oligonucleotide
  Antisense strand to SEQ ID NO: 58868
uaucacacaggacaauauu

SEQ ID NO: 58950 - RNA, 19 nt, Artificial Sequence
  Description of Artificial Sequence: Synthetic oligonucleotide
  Sense strand starting at position 372 of SEQ ID NO: 720
uuuaauuggcugcagagau

SEQ ID NO: 58951 - RNA, 19 nt, Artificial Sequence
  Description of Artificial Sequence: Synthetic oligonucleotide
  Antisense strand to SEQ ID NO: 58870
aucucugcagccaauuaaa

SEQ ID NO: 58952 - RNA, 19 nt, Artificial Sequence
  Description of Artificial Sequence: Synthetic oligonucleotide
  Sense strand starting at position 315 of SEQ ID NO: 720
ccuauaauggagcauucca

SEQ ID NO: 58953 - RNA, 19 nt, Artificial Sequence
  Description of Artificial Sequence: Synthetic oligonucleotide
  Antisense strand to SEQ ID NO: 58872
uggaaugcuccauuauagg

SEQ ID NO: 58954 - RNA, 19 nt, Artificial Sequence
  Description of Artificial Sequence: Synthetic oligonucleotide
  Sense strand starting at position 84 of SEQ ID NO: 720
auaagucuguuuguaauac

SEQ ID NO: 58955 - RNA, 19 nt, Artificial Sequence
  Description of Artificial Sequence: Synthetic oligonucleotide
  Antisense strand to SEQ ID NO: 58874
guauuacaaacagacuuau

SEQ ID NO: 58956 - RNA, 19 nt, Artificial Sequence
  Description of Artificial Sequence: Synthetic oligonucleotide
  Sense strand starting at position 80 of SEQ ID NO: 720
ccuuauaagucuguuugua

SEQ ID NO: 58957 - RNA, 19 nt, Artificial Sequence
  Description of Artificial Sequence: Synthetic oligonucleotide
  Antisense strand to SEQ ID NO: 58876
uacaaacagacuuauaagg

SEQ ID NO: 58958 - RNA, 19 nt, Artificial Sequence
  Description of Artificial Sequence: Synthetic oligonucleotide
  Sense strand starting at position 3891 of SEQ ID NO: 721
ugcccugagccaugauuau

SEQ ID NO: 58959 - RNA, 19 nt, Artificial Sequence
  Description of Artificial Sequence: Synthetic oligonucleotide
  Antisense strand to SEQ ID NO: 58878
auaaucauggcucagggca

SEQ ID NO: 58960 - RNA, 19 nt, Artificial Sequence
  Description of Artificial Sequence: Synthetic oligonucleotide
  Sense strand starting at position 3693 of SEQ ID NO: 721
ugaauuccagccuggacua

SEQ ID NO: 58961 - RNA, 19 nt, Artificial Sequence
  Description of Artificial Sequence: Synthetic oligonucleotide
  Antisense strand to SEQ ID NO: 58880
uaguccaggcuggaauuca

SEQ ID NO: 58962 - RNA, 19 nt, Artificial Sequence
  Description of Artificial Sequence: Synthetic oligonucleotide
  Sense strand starting at position 3493 of SEQ ID NO: 721
ggugaaucacccgaggauc

SEQ ID NO: 58963 - RNA, 19 nt, Artificial Sequence
  Description of Artificial Sequence: Synthetic oligonucleotide
  Antisense strand to SEQ ID NO: 58882
gauccucgggugauucacc

SEQ ID NO: 58964 - RNA, 19 nt, Artificial Sequence
  Description of Artificial Sequence: Synthetic oligonucleotide
  Sense strand starting at position 3492 of SEQ ID NO: 721
gggugaaucacccgaggau

SEQ ID NO: 58965 - RNA, 19 nt, Artificial Sequence
  Description of Artificial Sequence: Synthetic oligonucleotide
  Antisense strand to SEQ ID NO: 58884
auccucgggugauucaccc

SEQ ID NO: 58966 - RNA, 19 nt, Artificial Sequence
  Description of Artificial Sequence: Synthetic oligonucleotide
  Sense strand starting at position 3405 of SEQ ID NO: 721
acuugagccuugggauuua

SEQ ID NO: 58967 - RNA, 19 nt, Artificial Sequence
  Description of Artificial Sequence: Synthetic oligonucleotide
  Antisense strand to SEQ ID NO: 58886
uaaaucccaaggcucaagu

SEQ ID NO: 58968 - RNA, 19 nt, Artificial Sequence
  Description of Artificial Sequence: Synthetic oligonucleotide
  Sense strand starting at position 3403 of SEQ ID NO: 721
ucacuugagccuugggauu

SEQ ID NO: 58969 - RNA, 19 nt, Artificial Sequence
  Description of Artificial Sequence: Synthetic oligonucleotide
  Antisense strand to SEQ ID NO: 58888
aaucccaaggcucaaguga

SEQ ID NO: 58970 - RNA, 19 nt, Artificial Sequence
  Description of Artificial Sequence: Synthetic oligonucleotide
  Sense strand starting at position 3311 of SEQ ID NO: 721
aggucauugugagaaucaa

SEQ ID NO: 58971 - RNA, 19 nt, Artificial Sequence
  Description of Artificial Sequence: Synthetic oligonucleotide
  Antisense strand to SEQ ID NO: 58890
uugauucucacaaugaccu

SEQ ID NO: 58972 - RNA, 19 nt, Artificial Sequence
  Description of Artificial Sequence: Synthetic oligonucleotide
  Sense strand starting at position 3306 of SEQ ID NO: 721
caaugaggucauugugaga

SEQ ID NO: 58973 - RNA, 19 nt, Artificial Sequence
  Description of Artificial Sequence: Synthetic oligonucleotide
  Antisense strand to SEQ ID NO: 58892
ucucacaaugaccucauug

SEQ ID NO: 58974 - RNA, 19 nt, Artificial Sequence
  Description of Artificial Sequence: Synthetic oligonucleotide
  Sense strand starting at position 3260 of SEQ ID NO: 721
uggaucuaucacugaacuu

SEQ ID NO: 58975 - RNA, 19 nt, Artificial Sequence
  Description of Artificial Sequence: Synthetic oligonucleotide
  Antisense strand to SEQ ID NO: 58894
aaguucagugauagaucca

SEQ ID NO: 58976 - RNA, 19 nt, Artificial Sequence
  Description of Artificial Sequence: Synthetic oligonucleotide
  Sense strand starting at position 3259 of SEQ ID NO: 721
uuggaucuaucacugaacu

SEQ ID NO: 58977 - RNA, 19 nt, Artificial Sequence
  Description of Artificial Sequence: Synthetic oligonucleotide
  Antisense strand to SEQ ID NO: 58896
aguucagugauagauccaa

SEQ ID NO: 58978 - RNA, 19 nt, Artificial Sequence
  Description of Artificial Sequence: Synthetic oligonucleotide
  Sense strand starting at position 3249 of SEQ ID NO: 721
cuacaugaccuuggaucua

SEQ ID NO: 58979 - RNA, 19 nt, Artificial Sequence
  Description of Artificial Sequence: Synthetic oligonucleotide
  Antisense strand to SEQ ID NO: 58898
uagauccaaggucauguag

SEQ ID NO: 58980 - RNA, 19 nt, Artificial Sequence
  Description of Artificial Sequence: Synthetic oligonucleotide
  Sense strand starting at position 3196 of SEQ ID NO: 721
auuaaucauuaggaucaga

SEQ ID NO: 58981 - RNA, 19 nt, Artificial Sequence
  Description of Artificial Sequence: Synthetic oligonucleotide
  Antisense strand to SEQ ID NO: 58900
ucugauccuaaugauuaau

SEQ ID NO: 58982 - RNA, 19 nt, Artificial Sequence
  Description of Artificial Sequence: Synthetic oligonucleotide
  Sense strand starting at position 3193 of SEQ ID NO: 721
ugcauuaaucauuaggauc

SEQ ID NO: 58983 - RNA, 19 nt, Artificial Sequence
  Description of Artificial Sequence: Synthetic oligonucleotide
  Antisense strand to SEQ ID NO: 58902
gauccuaaugauuaaugca

SEQ ID NO: 58984 - RNA, 19 nt, Artificial Sequence
  Description of Artificial Sequence: Synthetic oligonucleotide
  Sense strand starting at position 3192 of SEQ ID NO: 721
gugcauuaaucauuaggau

SEQ ID NO: 58985 - RNA, 19 nt, Artificial Sequence
  Description of Artificial Sequence: Synthetic oligonucleotide
  Antisense strand to SEQ ID NO: 58904
auccuaaugauuaaugcac

SEQ ID NO: 58986 - RNA, 19 nt, Artificial Sequence
  Description of Artificial Sequence: Synthetic oligonucleotide
  Sense strand starting at position 3183 of SEQ ID NO: 721
cccaaagaugugcauuaau

SEQ ID NO: 58987 - RNA, 19 nt, Artificial Sequence
  Description of Artificial Sequence: Synthetic oligonucleotide
  Antisense strand to SEQ ID NO: 58906
auuaaugcacaucuuuggg

SEQ ID NO: 58988 - RNA, 19 nt, Artificial Sequence
  Description of Artificial Sequence: Synthetic oligonucleotide
  Sense strand starting at position 3097 of SEQ ID NO: 721
cugacuuaauggcuucuau

SEQ ID NO: 58989 - RNA, 19 nt, Artificial Sequence
  Description of Artificial Sequence: Synthetic oligonucleotide
  Antisense strand to SEQ ID NO: 58908
auagaagccauuaagucag

SEQ ID NO: 58990 - RNA, 19 nt, Artificial Sequence
  Description of Artificial Sequence: Synthetic oligonucleotide
  Sense strand starting at position 2935 of SEQ ID NO: 721
gacuucuuguucuugaggu

SEQ ID NO: 58991 - RNA, 19 nt, Artificial Sequence
  Description of Artificial Sequence: Synthetic oligonucleotide
  Antisense strand to SEQ ID NO: 58910
accucaagaacaagaaguc

SEQ ID NO: 58992 - RNA, 19 nt, Artificial Sequence
  Description of Artificial Sequence: Synthetic oligonucleotide
  Sense strand starting at position 2932 of SEQ ID NO: 721
acagacuucuuguucuuga

SEQ ID NO: 58993 - RNA, 19 nt, Artificial Sequence
  Description of Artificial Sequence: Synthetic oligonucleotide
  Antisense strand to SEQ ID NO: 58912
ucaagaacaagaagucugu

SEQ ID NO: 58994 - RNA, 19 nt, Artificial Sequence
  Description of Artificial Sequence: Synthetic oligonucleotide
  Sense strand starting at position 2841 of SEQ ID NO: 721
gccugacuuccggaaggca

SEQ ID NO: 58995 - RNA, 19 nt, Artificial Sequence
  Description of Artificial Sequence: Synthetic oligonucleotide
  Antisense strand to SEQ ID NO: 58914
ugccuuccggaagucaggc

SEQ ID NO: 58996 - RNA, 19 nt, Artificial Sequence
  Description of Artificial Sequence: Synthetic oligonucleotide
  Sense strand starting at position 2813 of SEQ ID NO: 721
aagcaaccaccuggugauu

SEQ ID NO: 58997 - RNA, 19 nt, Artificial Sequence
  Description of Artificial Sequence: Synthetic oligonucleotide
  Antisense strand to SEQ ID NO: 58916
aaucaccaggugguugcuu

SEQ ID NO: 58998 - RNA, 19 nt, Artificial Sequence
  Description of Artificial Sequence: Synthetic oligonucleotide
  Sense strand starting at position 2665 of SEQ ID NO: 721
ggacuaaagagauggcagu

SEQ ID NO: 58999 - RNA, 19 nt, Artificial Sequence
  Description of Artificial Sequence: Synthetic oligonucleotide
  Antisense strand to SEQ ID NO: 58918
acugccaucucuuuagucc

SEQ ID NO: 59000 - RNA, 19 nt, Artificial Sequence
  Description of Artificial Sequence: Synthetic oligonucleotide
  Sense strand starting at position 2602 of SEQ ID NO: 721
ggcugugggccuuaggaga

SEQ ID NO: 59001 - RNA, 19 nt, Artificial Sequence
  Description of Artificial Sequence: Synthetic oligonucleotide
  Antisense strand to SEQ ID NO: 58920
ucuccuaaggcccacagcc

SEQ ID NO: 59002 - RNA, 19 nt, Artificial Sequence
  Description of Artificial Sequence: Synthetic oligonucleotide
  Sense strand starting at position 2556 of SEQ ID NO: 721
uuagaaguguguccucaau

SEQ ID NO: 59003 - RNA, 19 nt, Artificial Sequence
  Description of Artificial Sequence: Synthetic oligonucleotide
  Antisense strand to SEQ ID NO: 58922
auugaggacacacuucuaa

SEQ ID NO: 59004 - RNA, 19 nt, Artificial Sequence
  Description of Artificial Sequence: Synthetic oligonucleotide
  Sense strand starting at position 2141 of SEQ ID NO: 721
uucggucuggccuggagua

SEQ ID NO: 59005 - RNA, 19 nt, Artificial Sequence
  Description of Artificial Sequence: Synthetic oligonucleotide
  Antisense strand to SEQ ID NO: 58924
uacuccaggccagaccgaa

SEQ ID NO: 59006 - RNA, 19 nt, Artificial Sequence
  Description of Artificial Sequence: Synthetic oligonucleotide
  Sense strand starting at position 2084 of SEQ ID NO: 721
ggcuuugacgucgaucaag

SEQ ID NO: 59007 - RNA, 19 nt, Artificial Sequence
  Description of Artificial Sequence: Synthetic oligonucleotide
  Antisense strand to SEQ ID NO: 58926
cuugaucgacgucaaagcc

SEQ ID NO: 59008 - RNA, 19 nt, Artificial Sequence
  Description of Artificial Sequence: Synthetic oligonucleotide
  Sense strand starting at position 2083 of SEQ ID NO: 721
gggcuuugacgucgaucaa

SEQ ID NO: 59009 - RNA, 19 nt, Artificial Sequence
  Description of Artificial Sequence: Synthetic oligonucleotide
  Antisense strand to SEQ ID NO: 58928
uugaucgacgucaaagccc

SEQ ID NO: 59010 - RNA, 19 nt, Artificial Sequence
  Description of Artificial Sequence: Synthetic oligonucleotide
  Sense strand starting at position 1406 of SEQ ID NO: 721
ccgaguucgacacauuccu

SEQ ID NO: 59011 - RNA, 19 nt, Artificial Sequence
  Description of Artificial Sequence: Synthetic oligonucleotide
  Antisense strand to SEQ ID NO: 58930
aggaaugugucgaacucgg

SEQ ID NO: 59012 - RNA, 19 nt, Artificial Sequence
  Description of Artificial Sequence: Synthetic oligonucleotide
  Sense strand starting at position 1404 of SEQ ID NO: 721
gcccgaguucgacacauuc

SEQ ID NO: 59013 - RNA, 19 nt, Artificial Sequence
  Description of Artificial Sequence: Synthetic oligonucleotide
  Antisense strand to SEQ ID NO: 58932
gaaugugucgaacucgggc

SEQ ID NO: 59014 - RNA, 19 nt, Artificial Sequence
  Description of Artificial Sequence: Synthetic oligonucleotide
  Sense strand starting at position 840 of SEQ ID NO: 721
aaugaaagugcuggauuaa

SEQ ID NO: 59015 - RNA, 19 nt, Artificial Sequence
  Description of Artificial Sequence: Synthetic oligonucleotide
  Antisense strand to SEQ ID NO: 58934
uuaauccagcacuuucauu

SEQ ID NO: 59016 - RNA, 19 nt, Artificial Sequence
  Description of Artificial Sequence: Synthetic oligonucleotide
  Sense strand starting at position 688 of SEQ ID NO: 721
ggaguuaaguaagaacuua

SEQ ID NO: 59017 - RNA, 19 nt, Artificial Sequence
  Description of Artificial Sequence: Synthetic oligonucleotide
  Antisense strand to SEQ ID NO: 58936
uaaguucuuacuuaacucc

SEQ ID NO: 59018 - RNA, 19 nt, Artificial Sequence
  Description of Artificial Sequence: Synthetic oligonucleotide
  Sense strand starting at position 681 of SEQ ID NO: 721
ugaugugggaguuaaguaa

SEQ ID NO: 59019 - RNA, 19 nt, Artificial Sequence
  Description of Artificial Sequence: Synthetic oligonucleotide
  Antisense strand to SEQ ID NO: 58938
uuacuuaacucccacauca

SEQ ID NO: 59020 - RNA, 19 nt, Artificial Sequence
  Description of Artificial Sequence: Synthetic oligonucleotide
  Sense strand starting at position 676 of SEQ ID NO: 721
acuguugaugugggaguua

SEQ ID NO: 59021 - RNA, 19 nt, Artificial Sequence
  Description of Artificial Sequence: Synthetic oligonucleotide
  Antisense strand to SEQ ID NO: 58940
uaacucccacaucaacagu

SEQ ID NO: 59022 - RNA, 19 nt, Artificial Sequence
  Description of Artificial Sequence: Synthetic oligonucleotide
  Sense strand starting at position 663 of SEQ ID NO: 721
gcaucacuucccuacuguu

SEQ ID NO: 59023 - RNA, 19 nt, Artificial Sequence
  Description of Artificial Sequence: Synthetic oligonucleotide
  Antisense strand to SEQ ID NO: 58942
aacaguagggaagugaugc

SEQ ID NO: 59024 - RNA, 19 nt, Artificial Sequence
  Description of Artificial Sequence: Synthetic oligonucleotide
  Sense strand starting at position 623 of SEQ ID NO: 721
uuaaacuuucugggccuua

SEQ ID NO: 59025 - RNA, 19 nt, Artificial Sequence
  Description of Artificial Sequence: Synthetic oligonucleotide
  Antisense strand to SEQ ID NO: 58944
uaaggcccagaaaguuuaa

SEQ ID NO: 59026 - RNA, 19 nt, Artificial Sequence
  Description of Artificial Sequence: Synthetic oligonucleotide
  Sense strand starting at position 610 of SEQ ID NO: 721
uugagugagucacuuaaac

SEQ ID NO: 59027 - RNA, 19 nt, Artificial Sequence
  Description of Artificial Sequence: Synthetic oligonucleotide
  Antisense strand to SEQ ID NO: 58946
guuuaagugacucacucaa

SEQ ID NO: 59028 - RNA, 19 nt, Artificial Sequence
  Description of Artificial Sequence: Synthetic oligonucleotide
  Sense strand starting at position 608 of SEQ ID NO: 721
gcuugagugagucacuuaa

SEQ ID NO: 59029 - RNA, 19 nt, Artificial Sequence
  Description of Artificial Sequence: Synthetic oligonucleotide
  Antisense strand to SEQ ID NO: 58948
uuaagugacucacucaagc

SEQ ID NO: 59030 - RNA, 19 nt, Artificial Sequence
  Description of Artificial Sequence: Synthetic oligonucleotide
  Sense strand starting at position 599 of SEQ ID NO: 721
agcuacuaugcuugaguga

SEQ ID NO: 59031 - RNA, 19 nt, Artificial Sequence
  Description of Artificial Sequence: Synthetic oligonucleotide
  Antisense strand to SEQ ID NO: 58950
ucacucaagcauaguagcu

SEQ ID NO: 59032 - RNA, 19 nt, Artificial Sequence
  Description of Artificial Sequence: Synthetic oligonucleotide
  Sense strand starting at position 581 of SEQ ID NO: 721
ggguacuauuucuagcaua

SEQ ID NO: 59033 - RNA, 19 nt, Artificial Sequence
  Description of Artificial Sequence: Synthetic oligonucleotide
  Antisense strand to SEQ ID NO: 58952
uaugcuagaaauaguaccc

SEQ ID NO: 59034 - RNA, 19 nt, Artificial Sequence
  Description of Artificial Sequence: Synthetic oligonucleotide
  Sense strand starting at position 357 of SEQ ID NO: 721
auagcaucuguacaugaaa

SEQ ID NO: 59035 - RNA, 19 nt, Artificial Sequence
  Description of Artificial Sequence: Synthetic oligonucleotide
  Antisense strand to SEQ ID NO: 58954
uuucauguacagaugcuau

SEQ ID NO: 59036 - RNA, 19 nt, Artificial Sequence
  Description of Artificial Sequence: Synthetic oligonucleotide
  Sense strand starting at position 295 of SEQ ID NO: 721
gcaauuauagucuguauau

SEQ ID NO: 59037 - RNA, 19 nt, Artificial Sequence
  Description of Artificial Sequence: Synthetic oligonucleotide
  Antisense strand to SEQ ID NO: 58956
auauacagacuauaauugc

SEQ ID NO: 59038 - RNA, 19 nt, Artificial Sequence
  Description of Artificial Sequence: Synthetic oligonucleotide
  Sense strand starting at position 151 of SEQ ID NO: 722
ggcuaauuaggguguucua

SEQ ID NO: 59039 - RNA, 19 nt, Artificial Sequence
  Description of Artificial Sequence: Synthetic oligonucleotide
  Antisense strand to SEQ ID NO: 58958
uagaacacccuaauuagcc

SEQ ID NO: 59040 - RNA, 19 nt, Artificial Sequence
  Description of Artificial Sequence: Synthetic oligonucleotide
  Sense strand starting at position 154 of SEQ ID NO: 722
uaauuaggguguucuagac

SEQ ID NO: 59041 - RNA, 19 nt, Artificial Sequence
  Description of Artificial Sequence: Synthetic oligonucleotide
  Antisense strand to SEQ ID NO: 58960
gucuagaacacccuaauua

SEQ ID NO: 59042 - RNA, 19 nt, Artificial Sequence
  Description of Artificial Sequence: Synthetic oligonucleotide
  Sense strand starting at position 164 of SEQ ID NO: 722
guucuagaccuacauugua

SEQ ID NO: 59043 - RNA, 19 nt, Artificial Sequence
  Description of Artificial Sequence: Synthetic oligonucleotide
  Antisense strand to SEQ ID NO: 58962
uacaauguaggucuagaac

SEQ ID NO: 59044 - RNA, 19 nt, Artificial Sequence
  Description of Artificial Sequence: Synthetic oligonucleotide
  Sense strand starting at position 236 of SEQ ID NO: 722
cucagagucuaguucugaa

SEQ ID NO: 59045 - RNA, 19 nt, Artificial Sequence
  Description of Artificial Sequence: Synthetic oligonucleotide
  Antisense strand to SEQ ID NO: 58964
uucagaacuagacucugag

SEQ ID NO: 59046 - RNA, 19 nt, Artificial Sequence
  Description of Artificial Sequence: Synthetic oligonucleotide
  Sense strand starting at position 729 of SEQ ID NO: 722
gggacaaggguucgaaacu

SEQ ID NO: 59047 - RNA, 19 nt, Artificial Sequence
  Description of Artificial Sequence: Synthetic oligonucleotide
  Antisense strand to SEQ ID NO: 58966
aguuucgaacccuuguccc

SEQ ID NO: 59048 - RNA, 19 nt, Artificial Sequence
  Description of Artificial Sequence: Synthetic oligonucleotide
  Sense strand starting at position 1473 of SEQ ID NO: 722
cgauguucucgcgccggau

SEQ ID NO: 59049 - RNA, 19 nt, Artificial Sequence
  Description of Artificial Sequence: Synthetic oligonucleotide
  Antisense strand to SEQ ID NO: 58968
auccggcgcgagaacaucg

SEQ ID NO: 59050 - RNA, 19 nt, Artificial Sequence
  Description of Artificial Sequence: Synthetic oligonucleotide
  Sense strand starting at position 2530 of SEQ ID NO: 722
ggcuguagagugaguguuu

SEQ ID NO: 59051 - RNA, 19 nt, Artificial Sequence
  Description of Artificial Sequence: Synthetic oligonucleotide
  Antisense strand to SEQ ID NO: 58970
aaacacucacucuacagcc

SEQ ID NO: 59052 - RNA, 19 nt, Artificial Sequence
  Description of Artificial Sequence: Synthetic oligonucleotide
  Sense strand starting at position 2542 of SEQ ID NO: 722
aguguuucgggcagcagaa

SEQ ID NO: 59053 - RNA, 19 nt, Artificial Sequence
  Description of Artificial Sequence: Synthetic oligonucleotide
  Antisense strand to SEQ ID NO: 58972
uucugcugcccgaaacacu

SEQ ID NO: 59054 - RNA, 19 nt, Artificial Sequence
  Description of Artificial Sequence: Synthetic oligonucleotide
  Sense strand starting at position 2569 of SEQ ID NO: 722
ggaacagcuuuaucagaga

SEQ ID NO: 59055 - RNA, 19 nt, Artificial Sequence
  Description of Artificial Sequence: Synthetic oligonucleotide
  Antisense strand to SEQ ID NO: 58974
ucucugauaaagcuguucc

SEQ ID NO: 59056 - RNA, 19 nt, Artificial Sequence
  Description of Artificial Sequence: Synthetic oligonucleotide
  Sense strand starting at position 2574 of SEQ ID NO: 722
agcuuuaucagagauuggu

SEQ ID NO: 59057 - RNA, 19 nt, Artificial Sequence
  Description of Artificial Sequence: Synthetic oligonucleotide
  Antisense strand to SEQ ID NO: 58976
accaaucucugauaaagcu

SEQ ID NO: 59058 - RNA, 19 nt, Artificial Sequence
  Description of Artificial Sequence: Synthetic oligonucleotide
  Sense strand starting at position 2578 of SEQ ID NO: 722
uuaucagagauuggucguu

SEQ ID NO: 59059 - RNA, 19 nt, Artificial Sequence
  Description of Artificial Sequence: Synthetic oligonucleotide
  Antisense strand to SEQ ID NO: 58978
aacgaccaaucucugauaa

SEQ ID NO: 59060 - RNA, 19 nt, Artificial Sequence
  Description of Artificial Sequence: Synthetic oligonucleotide
  Sense strand starting at position 2580 of SEQ ID NO: 722
aucagagauuggucguuau

SEQ ID NO: 59061 - RNA, 19 nt, Artificial Sequence
  Description of Artificial Sequence: Synthetic oligonucleotide
  Antisense strand to SEQ ID NO: 58980
auaacgaccaaucucugau

SEQ ID NO: 59062 - RNA, 19 nt, Artificial Sequence
  Description of Artificial Sequence: Synthetic oligonucleotide
  Sense strand starting at position 2583 of SEQ ID NO: 722
agagauuggucguuauuca

SEQ ID NO: 59063 - RNA, 19 nt, Artificial Sequence
  Description of Artificial Sequence: Synthetic oligonucleotide
  Antisense strand to SEQ ID NO: 58982
ugaauaacgaccaaucucu

SEQ ID NO: 59064 - RNA, 19 nt, Artificial Sequence
  Description of Artificial Sequence: Synthetic oligonucleotide
  Sense strand starting at position 2584 of SEQ ID NO: 722
gagauuggucguuauucag

SEQ ID NO: 59065 - RNA, 19 nt, Artificial Sequence
  Description of Artificial Sequence: Synthetic oligonucleotide
  Antisense strand to SEQ ID NO: 58984
cugaauaacgaccaaucuc

SEQ ID NO: 59066 - RNA, 19 nt, Artificial Sequence
  Description of Artificial Sequence: Synthetic oligonucleotide
  Sense strand starting at position 2600 of SEQ ID NO: 722
cagaauauagcuuguugga

SEQ ID NO: 59067 - RNA, 19 nt, Artificial Sequence
  Description of Artificial Sequence: Synthetic oligonucleotide
  Antisense strand to SEQ ID NO: 58986
uccaacaagcuauauucug

SEQ ID NO: 59068 - RNA, 19 nt, Artificial Sequence
  Description of Artificial Sequence: Synthetic oligonucleotide
  Sense strand starting at position 2602 of SEQ ID NO: 722
gaauauagcuuguuggauu

SEQ ID NO: 59069 - RNA, 19 nt, Artificial Sequence
  Description of Artificial Sequence: Synthetic oligonucleotide
  Antisense strand to SEQ ID NO: 58988
aauccaacaagcuauauuc

SEQ ID NO: 59070 - RNA, 19 nt, Artificial Sequence
  Description of Artificial Sequence: Synthetic oligonucleotide
  Sense strand starting at position 2675 of SEQ ID NO: 722
gcuccagcagcguuacuaa

SEQ ID NO: 59071 - RNA, 19 nt, Artificial Sequence
  Description of Artificial Sequence: Synthetic oligonucleotide
  Antisense strand to SEQ ID NO: 58990
uuaguaacgcugcuggagc

SEQ ID NO: 59072 - RNA, 19 nt, Artificial Sequence
  Description of Artificial Sequence: Synthetic oligonucleotide
  Sense strand starting at position 2772 of SEQ ID NO: 722
ccggaagaaucccuccgua

SEQ ID NO: 59073 - RNA, 19 nt, Artificial Sequence
  Description of Artificial Sequence: Synthetic oligonucleotide
  Antisense strand to SEQ ID NO: 58992
uacggagggauucuuccgg

SEQ ID NO: 59074 - RNA, 19 nt, Artificial Sequence
  Description of Artificial Sequence: Synthetic oligonucleotide
  Sense strand starting at position 2775 of SEQ ID NO: 722
gaagaaucccuccguacuc

SEQ ID NO: 59075 - RNA, 19 nt, Artificial Sequence
  Description of Artificial Sequence: Synthetic oligonucleotide
  Antisense strand to SEQ ID NO: 58994
gaguacggagggauucuuc

SEQ ID NO: 59076 - RNA, 19 nt, Artificial Sequence
  Description of Artificial Sequence: Synthetic oligonucleotide
  Sense strand starting at position 2846 of SEQ ID NO: 722
acaguaugaccacggucau

SEQ ID NO: 59077 - RNA, 19 nt, Artificial Sequence
  Description of Artificial Sequence: Synthetic oligonucleotide
  Antisense strand to SEQ ID NO: 58996
augaccguggucauacugu

SEQ ID NO: 59078 - RNA, 19 nt, Artificial Sequence
  Description of Artificial Sequence: Synthetic oligonucleotide
  Sense strand starting at position 2965 of SEQ ID NO: 722
cuaaguauuucuucugcga

SEQ ID NO: 59079 - RNA, 19 nt, Artificial Sequence
  Description of Artificial Sequence: Synthetic oligonucleotide
  Antisense strand to SEQ ID NO: 58998
ucgcagaagaaauacuuag

SEQ ID NO: 59080 - RNA, 19 nt, Artificial Sequence
  Description of Artificial Sequence: Synthetic oligonucleotide
  Sense strand starting at position 2968 of SEQ ID NO: 722
aguauuucuucugcgauca

SEQ ID NO: 59081 - RNA, 19 nt, Artificial Sequence
  Description of Artificial Sequence: Synthetic oligonucleotide
  Antisense strand to SEQ ID NO: 59000
ugaucgcagaagaaauacu

SEQ ID NO: 59082 - RNA, 19 nt, Artificial Sequence
  Description of Artificial Sequence: Synthetic oligonucleotide
  Sense strand starting at position 2969 of SEQ ID NO: 722
guauuucuucugcgaucau

SEQ ID NO: 59083 - RNA, 19 nt, Artificial Sequence
  Description of Artificial Sequence: Synthetic oligonucleotide
  Antisense strand to SEQ ID NO: 59002
augaucgcagaagaaauac

SEQ ID NO: 59084 - RNA, 19 nt, Artificial Sequence
  Description of Artificial Sequence: Synthetic oligonucleotide
  Sense strand starting at position 2973 of SEQ ID NO: 722
uucuucugcgaucauugaa

SEQ ID NO: 59085 - RNA, 19 nt, Artificial Sequence
  Description of Artificial Sequence: Synthetic oligonucleotide
  Antisense strand to SEQ ID NO: 59004
uucaaugaucgcagaagaa

SEQ ID NO: 59086 - RNA, 19 nt, Artificial Sequence
  Description of Artificial Sequence: Synthetic oligonucleotide
  Sense strand starting at position 2976 of SEQ ID NO: 722
uucugcgaucauugaacau

SEQ ID NO: 59087 - RNA, 19 nt, Artificial Sequence
  Description of Artificial Sequence: Synthetic oligonucleotide
  Antisense strand to SEQ ID NO: 59006
auguucaaugaucgcagaa

SEQ ID NO: 59088 - RNA, 19 nt, Artificial Sequence
  Description of Artificial Sequence: Synthetic oligonucleotide
  Sense strand starting at position 3044 of SEQ ID NO: 722
aggugcuagaguuagucuu

SEQ ID NO: 59089 - RNA, 19 nt, Artificial Sequence
  Description of Artificial Sequence: Synthetic oligonucleotide
  Antisense strand to SEQ ID NO: 59008
aagacuaacucuagcaccu

SEQ ID NO: 59090 - RNA, 19 nt, Artificial Sequence
  Description of Artificial Sequence: Synthetic oligonucleotide
  Sense strand starting at position 3051 of SEQ ID NO: 722
agaguuagucuuuagcuag

SEQ ID NO: 59091 - RNA, 19 nt, Artificial Sequence
  Description of Artificial Sequence: Synthetic oligonucleotide
  Antisense strand to SEQ ID NO: 59010
cuagcuaaagacuaacucu

SEQ ID NO: 59092 - RNA, 19 nt, Artificial Sequence
  Description of Artificial Sequence: Synthetic oligonucleotide
  Sense strand starting at position 3285 of SEQ ID NO: 722
aacauagugcuagguacua

SEQ ID NO: 59093 - RNA, 19 nt, Artificial Sequence
  Description of Artificial Sequence: Synthetic oligonucleotide
  Antisense strand to SEQ ID NO: 59012
uaguaccuagcacuauguu

SEQ ID NO: 59094 - RNA, 19 nt, Artificial Sequence
  Description of Artificial Sequence: Synthetic oligonucleotide
  Sense strand starting at position 3431 of SEQ ID NO: 722
guaaaucucuggccacaug

SEQ ID NO: 59095 - RNA, 19 nt, Artificial Sequence
  Description of Artificial Sequence: Synthetic oligonucleotide
  Antisense strand to SEQ ID NO: 59014
cauguggccagagauuuac

SEQ ID NO: 59096 - RNA, 19 nt, Artificial Sequence
  Description of Artificial Sequence: Synthetic oligonucleotide
  Sense strand starting at position 3447 of SEQ ID NO: 722
auguaaaucccucaguggu

SEQ ID NO: 59097 - RNA, 19 nt, Artificial Sequence
  Description of Artificial Sequence: Synthetic oligonucleotide
  Antisense strand to SEQ ID NO: 59016
accacugagggauuuacau

SEQ ID NO: 59098 - RNA, 19 nt, Artificial Sequence
  Description of Artificial Sequence: Synthetic oligonucleotide
  Sense strand starting at position 3449 of SEQ ID NO: 722
guaaaucccucagugguca

SEQ ID NO: 59099 - RNA, 19 nt, Artificial Sequence
  Description of Artificial Sequence: Synthetic oligonucleotide
  Antisense strand to SEQ ID NO: 59018
ugaccacugagggauuuac

SEQ ID NO: 59100 - RNA, 19 nt, Artificial Sequence
  Description of Artificial Sequence: Synthetic oligonucleotide
  Sense strand starting at position 3484 of SEQ ID NO: 722
cucucuggccacugagaga

SEQ ID NO: 59101 - RNA, 19 nt, Artificial Sequence
  Description of Artificial Sequence: Synthetic oligonucleotide
  Antisense strand to SEQ ID NO: 59020
ucucucaguggccagagag

SEQ ID NO: 59102 - RNA, 19 nt, Artificial Sequence
  Description of Artificial Sequence: Synthetic oligonucleotide
  Sense strand starting at position 3499 of SEQ ID NO: 722
gagauuuacgugugacuuu

SEQ ID NO: 59103 - RNA, 19 nt, Artificial Sequence
  Description of Artificial Sequence: Synthetic oligonucleotide
  Antisense strand to SEQ ID NO: 59022
aaagucacacguaaaucuc

SEQ ID NO: 59104 - RNA, 19 nt, Artificial Sequence
  Description of Artificial Sequence: Synthetic oligonucleotide
  Sense strand starting at position 3681 of SEQ ID NO: 722
ggcauuucucaagguguua

SEQ ID NO: 59105 - RNA, 19 nt, Artificial Sequence
  Description of Artificial Sequence: Synthetic oligonucleotide
  Antisense strand to SEQ ID NO: 59024
uaacaccuugagaaaugcc

SEQ ID NO: 59106 - RNA, 19 nt, Artificial Sequence
  Description of Artificial Sequence: Synthetic oligonucleotide
  Sense strand starting at position 3733 of SEQ ID NO: 722
agaaucaauugguuguuga

SEQ ID NO: 59107 - RNA, 19 nt, Artificial Sequence
  Description of Artificial Sequence: Synthetic oligonucleotide
  Antisense strand to SEQ ID NO: 59026
ucaacaaccaauugauucu

SEQ ID NO: 59108 - RNA, 19 nt, Artificial Sequence
  Description of Artificial Sequence: Synthetic oligonucleotide
  Sense strand starting at position 3734 of SEQ ID NO: 722
gaaucaauugguuguugau

SEQ ID NO: 59109 - RNA, 19 nt, Artificial Sequence
  Description of Artificial Sequence: Synthetic oligonucleotide
  Antisense strand to SEQ ID NO: 59028
aucaacaaccaauugauuc

SEQ ID NO: 59110 - RNA, 19 nt, Artificial Sequence
  Description of Artificial Sequence: Synthetic oligonucleotide
  Sense strand starting at position 3747 of SEQ ID NO: 722
guugauagaccauaucuuu

SEQ ID NO: 59111 - RNA, 19 nt, Artificial Sequence
  Description of Artificial Sequence: Synthetic oligonucleotide
  Antisense strand to SEQ ID NO: 59030
aaagauauggucuaucaac

SEQ ID NO: 59112 - RNA, 19 nt, Artificial Sequence
  Description of Artificial Sequence: Synthetic oligonucleotide
  Sense strand starting at position 3960 of SEQ ID NO: 722
gucagauauucuguagaau

SEQ ID NO: 59113 - RNA, 19 nt, Artificial Sequence
  Description of Artificial Sequence: Synthetic oligonucleotide
  Antisense strand to SEQ ID NO: 59032
auucuacagaauaucugac

SEQ ID NO: 59114 - RNA, 19 nt, Artificial Sequence
  Description of Artificial Sequence: Synthetic oligonucleotide
  Sense strand starting at position 3969 of SEQ ID NO: 722
ucuguagaauuguuccuca

SEQ ID NO: 59115 - RNA, 19 nt, Artificial Sequence
  Description of Artificial Sequence: Synthetic oligonucleotide
  Antisense strand to SEQ ID NO: 59034
ugaggaacaauucuacaga

SEQ ID NO: 59116 - RNA, 19 nt, Artificial Sequence
  Description of Artificial Sequence: Synthetic oligonucleotide
  Sense strand starting at position 3980 of SEQ ID NO: 722
guuccucauuugcauuuau

SEQ ID NO: 59117 - RNA, 19 nt, Artificial Sequence
  Description of Artificial Sequence: Synthetic oligonucleotide
  Antisense strand to SEQ ID NO: 59036
auaaaugcaaaugaggaac

SEQ ID NO: 59118 - RNA, 19 nt, Artificial Sequence
  Description of Artificial Sequence: Synthetic oligonucleotide
  Sense strand starting at position 8 of SEQ ID NO: 723
ugguccaaggcguaauuau

SEQ ID NO: 59119 - RNA, 19 nt, Artificial Sequence
  Description of Artificial Sequence: Synthetic oligonucleotide
  Antisense strand to SEQ ID NO: 59038
auaauuacgccuuggacca

SEQ ID NO: 59120 - RNA, 19 nt, Artificial Sequence
  Description of Artificial Sequence: Synthetic oligonucleotide
  Sense strand starting at position 16 of SEQ ID NO: 723
ggcguaauuauacggaugu

SEQ ID NO: 59121 - RNA, 19 nt, Artificial Sequence
  Description of Artificial Sequence: Synthetic oligonucleotide
  Antisense strand to SEQ ID NO: 59040
acauccguauaauuacgcc

SEQ ID NO: 59122 - RNA, 19 nt, Artificial Sequence
  Description of Artificial Sequence: Synthetic oligonucleotide
  Sense strand starting at position 20 of SEQ ID NO: 723
uaauuauacggaugugguu

SEQ ID NO: 59123 - RNA, 19 nt, Artificial Sequence
  Description of Artificial Sequence: Synthetic oligonucleotide
  Antisense strand to SEQ ID NO: 59042
aaccacauccguauaauua

SEQ ID NO: 59124 - RNA, 19 nt, Artificial Sequence
  Description of Artificial Sequence: Synthetic oligonucleotide
  Sense strand starting at position 32 of SEQ ID NO: 723
ugugguugugcuucaguca

SEQ ID NO: 59125 - RNA, 19 nt, Artificial Sequence
  Description of Artificial Sequence: Synthetic oligonucleotide
  Antisense strand to SEQ ID NO: 59044
ugacugaagcacaaccaca

SEQ ID NO: 59126 - RNA, 19 nt, Artificial Sequence
  Description of Artificial Sequence: Synthetic oligonucleotide
  Sense strand starting at position 116 of SEQ ID NO: 723
gacuccagagcauguuuau

SEQ ID NO: 59127 - RNA, 19 nt, Artificial Sequence
  Description of Artificial Sequence: Synthetic oligonucleotide
  Antisense strand to SEQ ID NO: 59046
auaaacaugcucuggaguc

SEQ ID NO: 59128 - RNA, 19 nt, Artificial Sequence
  Description of Artificial Sequence: Synthetic oligonucleotide
  Sense strand starting at position 122 of SEQ ID NO: 723
agagcauguuuauaaacca

SEQ ID NO: 59129 - RNA, 19 nt, Artificial Sequence
  Description of Artificial Sequence: Synthetic oligonucleotide
  Antisense strand to SEQ ID NO: 59048
ugguuuauaaacaugcucu

SEQ ID NO: 59130 - RNA, 19 nt, Artificial Sequence
  Description of Artificial Sequence: Synthetic oligonucleotide
  Sense strand starting at position 180 of SEQ ID NO: 723
cuugcucaaguauggaauu

SEQ ID NO: 59131 - RNA, 19 nt, Artificial Sequence
  Description of Artificial Sequence: Synthetic oligonucleotide
  Antisense strand to SEQ ID NO: 59050
aauuccauacuugagcaag

SEQ ID NO: 59132 - RNA, 19 nt, Artificial Sequence
  Description of Artificial Sequence: Synthetic oligonucleotide
  Sense strand starting at position 234 of SEQ ID NO: 723
gugguucugcuauguccaa

SEQ ID NO: 59133 - RNA, 19 nt, Artificial Sequence
  Description of Artificial Sequence: Synthetic oligonucleotide
  Antisense strand to SEQ ID NO: 59052
uuggacauagcagaaccac

SEQ ID NO: 59134 - RNA, 19 nt, Artificial Sequence
  Description of Artificial Sequence: Synthetic oligonucleotide
  Sense strand starting at position 274 of SEQ ID NO: 723
cguguagauuuaucuaauu

SEQ ID NO: 59135 - RNA, 19 nt, Artificial Sequence
  Description of Artificial Sequence: Synthetic oligonucleotide
  Antisense strand to SEQ ID NO: 59054
aauuagauaaaucuacacg

SEQ ID NO: 59136 - RNA, 19 nt, Artificial Sequence
  Description of Artificial Sequence: Synthetic oligonucleotide
  Sense strand starting at position 308 of SEQ ID NO: 723
agcugugugaugcuuaugu

SEQ ID NO: 59137 - RNA, 19 nt, Artificial Sequence
  Description of Artificial Sequence: Synthetic oligonucleotide
  Antisense strand to SEQ ID NO: 59056
acauaagcaucacacagcu

SEQ ID NO: 59138 - RNA, 19 nt, Artificial Sequence
  Description of Artificial Sequence: Synthetic oligonucleotide
  Sense strand starting at position 310 of SEQ ID NO: 723
cugugugaugcuuauguca

SEQ ID NO: 59139 - RNA, 19 nt, Artificial Sequence
  Description of Artificial Sequence: Synthetic oligonucleotide
  Antisense strand to SEQ ID NO: 59058
ugacauaagcaucacacag

SEQ ID NO: 59140 - RNA, 19 nt, Artificial Sequence
  Description of Artificial Sequence: Synthetic oligonucleotide
  Sense strand starting at position 313 of SEQ ID NO: 723
ugugaugcuuaugucaaug

SEQ ID NO: 59141 - RNA, 19 nt, Artificial Sequence
  Description of Artificial Sequence: Synthetic oligonucleotide
  Antisense strand to SEQ ID NO: 59060
cauugacauaagcaucaca

SEQ ID NO: 59142 - RNA, 19 nt, Artificial Sequence
  Description of Artificial Sequence: Synthetic oligonucleotide
  Sense strand starting at position 353 of SEQ ID NO: 723
aacgguuggcuuggaauuu

SEQ ID NO: 59143 - RNA, 19 nt, Artificial Sequence
  Description of Artificial Sequence: Synthetic oligonucleotide
  Antisense strand to SEQ ID NO: 59062
aaauuccaagccaaccguu

SEQ ID NO: 59144 - RNA, 19 nt, Artificial Sequence
  Description of Artificial Sequence: Synthetic oligonucleotide
  Sense strand starting at position 354 of SEQ ID NO: 723
acgguuggcuuggaauuua

SEQ ID NO: 59145 - RNA, 19 nt, Artificial Sequence
  Description of Artificial Sequence: Synthetic oligonucleotide
  Antisense strand to SEQ ID NO: 59064
uaaauuccaagccaaccgu

SEQ ID NO: 59146 - RNA, 19 nt, Artificial Sequence
  Description of Artificial Sequence: Synthetic oligonucleotide
  Sense strand starting at position 370 of SEQ ID NO: 723
uuaagugguucuguaagaa

SEQ ID NO: 59147 - RNA, 19 nt, Artificial Sequence
  Description of Artificial Sequence: Synthetic oligonucleotide
  Antisense strand to SEQ ID NO: 59066
uucuuacagaaccacuuaa

SEQ ID NO: 59148 - RNA, 19 nt, Artificial Sequence
  Description of Artificial Sequence: Synthetic oligonucleotide
  Sense strand starting at position 405 of SEQ ID NO: 723
cagugagaauuggaaauca

SEQ ID NO: 59149 - RNA, 19 nt, Artificial Sequence
  Description of Artificial Sequence: Synthetic oligonucleotide
  Antisense strand to SEQ ID NO: 59068
ugauuuccaauucucacug

SEQ ID NO: 59150 - RNA, 19 nt, Artificial Sequence
  Description of Artificial Sequence: Synthetic oligonucleotide
  Sense strand starting at position 473 of SEQ ID NO: 723
uguuaaggcugcuuucuga

SEQ ID NO: 59151 - RNA, 19 nt, Artificial Sequence
  Description of Artificial Sequence: Synthetic oligonucleotide
  Antisense strand to SEQ ID NO: 59070
ucagaaagcagccuuaaca

SEQ ID NO: 59152 - RNA, 19 nt, Artificial Sequence
  Description of Artificial Sequence: Synthetic oligonucleotide
  Sense strand starting at position 764 of SEQ ID NO: 723
gggccaguaagaugguaga

SEQ ID NO: 59153 - RNA, 19 nt, Artificial Sequence
  Description of Artificial Sequence: Synthetic oligonucleotide
  Antisense strand to SEQ ID NO: 59072
ucuaccaucuuacuggccc

SEQ ID NO: 59154 - RNA, 19 nt, Artificial Sequence
  Description of Artificial Sequence: Synthetic oligonucleotide
  Sense strand starting at position 894 of SEQ ID NO: 723
ccuaaaucauguguguucu

SEQ ID NO: 59155 - RNA, 19 nt, Artificial Sequence
  Description of Artificial Sequence: Synthetic oligonucleotide
  Antisense strand to SEQ ID NO: 59074
agaacacacaugauuuagg

SEQ ID NO: 59156 - RNA, 19 nt, Artificial Sequence
  Description of Artificial Sequence: Synthetic oligonucleotide
  Sense strand starting at position 905 of SEQ ID NO: 723
uguguucugguccacaaac

SEQ ID NO: 59157 - RNA, 19 nt, Artificial Sequence
  Description of Artificial Sequence: Synthetic oligonucleotide
  Antisense strand to SEQ ID NO: 59076
guuuguggaccagaacaca

SEQ ID NO: 59158 - RNA, 19 nt, Artificial Sequence
  Description of Artificial Sequence: Synthetic oligonucleotide
  Sense strand starting at position 1035 of SEQ ID NO: 723
caccuuucucaagaggguu

SEQ ID NO: 59159 - RNA, 19 nt, Artificial Sequence
  Description of Artificial Sequence: Synthetic oligonucleotide
  Antisense strand to SEQ ID NO: 59078
aacccucuugagaaaggug

SEQ ID NO: 59160 - RNA, 19 nt, Artificial Sequence
  Description of Artificial Sequence: Synthetic oligonucleotide
  Sense strand starting at position 1239 of SEQ ID NO: 723
aguuguccucuucguggua

SEQ ID NO: 59161 - RNA, 19 nt, Artificial Sequence
  Description of Artificial Sequence: Synthetic oligonucleotide
  Antisense strand to SEQ ID NO: 59080
uaccacgaagaggacaacu

SEQ ID NO: 59162 - RNA, 19 nt, Artificial Sequence
  Description of Artificial Sequence: Synthetic oligonucleotide
  Sense strand starting at position 1279 of SEQ ID NO: 723
ccguugggccgcugugaaa

SEQ ID NO: 59163 - RNA, 19 nt, Artificial Sequence
  Description of Artificial Sequence: Synthetic oligonucleotide
  Antisense strand to SEQ ID NO: 59082
uuucacagcggcccaacgg

SEQ ID NO: 59164 - RNA, 19 nt, Artificial Sequence
  Description of Artificial Sequence: Synthetic oligonucleotide
  Sense strand starting at position 3118 of SEQ ID NO: 723
gaguaacucuaaguggaaa

SEQ ID NO: 59165 - RNA, 19 nt, Artificial Sequence
  Description of Artificial Sequence: Synthetic oligonucleotide
  Antisense strand to SEQ ID NO: 59084
uuuccacuuagaguuacuc

SEQ ID NO: 59166 - RNA, 19 nt, Artificial Sequence
  Description of Artificial Sequence: Synthetic oligonucleotide
  Sense strand starting at position 3120 of SEQ ID NO: 723
guaacucuaaguggaaaug

SEQ ID NO: 59167 - RNA, 19 nt, Artificial Sequence
  Description of Artificial Sequence: Synthetic oligonucleotide
  Antisense strand to SEQ ID NO: 59086
cauuuccacuuagaguuac

SEQ ID NO: 59168 - RNA, 19 nt, Artificial Sequence
  Description of Artificial Sequence: Synthetic oligonucleotide
  Sense strand starting at position 3156 of SEQ ID NO: 723
gggauuaaaucucggaaau

SEQ ID NO: 59169 - RNA, 19 nt, Artificial Sequence
  Description of Artificial Sequence: Synthetic oligonucleotide
  Antisense strand to SEQ ID NO: 59088
auuuccgagauuuaauccc

SEQ ID NO: 59170 - RNA, 19 nt, Artificial Sequence
  Description of Artificial Sequence: Synthetic oligonucleotide
  Sense strand starting at position 3157 of SEQ ID NO: 723
ggauuaaaucucggaaauu

SEQ ID NO: 59171 - RNA, 19 nt, Artificial Sequence
  Description of Artificial Sequence: Synthetic oligonucleotide
  Antisense strand to SEQ ID NO: 59090
aauuuccgagauuuaaucc

SEQ ID NO: 59172 - RNA, 19 nt, Artificial Sequence
  Description of Artificial Sequence: Synthetic oligonucleotide
  Sense strand starting at position 3324 of SEQ ID NO: 723
agcccaaccgcagauuaaa

SEQ ID NO: 59173 - RNA, 19 nt, Artificial Sequence
  Description of Artificial Sequence: Synthetic oligonucleotide
  Antisense strand to SEQ ID NO: 59092
uuuaaucugcgguugggcu

SEQ ID NO: 59174 - RNA, 19 nt, Artificial Sequence
  Description of Artificial Sequence: Synthetic oligonucleotide
  Sense strand starting at position 3342 of SEQ ID NO: 723
aaacuaaugcaguguauag

SEQ ID NO: 59175 - RNA, 19 nt, Artificial Sequence
  Description of Artificial Sequence: Synthetic oligonucleotide
  Antisense strand to SEQ ID NO: 59094
cuauacacugcauuaguuu

SEQ ID NO: 59176 - RNA, 19 nt, Artificial Sequence
  Description of Artificial Sequence: Synthetic oligonucleotide
  Sense strand starting at position 3344 of SEQ ID NO: 723
acuaaugcaguguauagau

SEQ ID NO: 59177 - RNA, 19 nt, Artificial Sequence
  Description of Artificial Sequence: Synthetic oligonucleotide
  Antisense strand to SEQ ID NO: 59096
aucuauacacugcauuagu

SEQ ID NO: 59178 - RNA, 19 nt, Artificial Sequence
  Description of Artificial Sequence: Synthetic oligonucleotide
  Sense strand starting at position 3351 of SEQ ID NO: 723
caguguauagauuggauaa

SEQ ID NO: 59179 - RNA, 19 nt, Artificial Sequence
  Description of Artificial Sequence: Synthetic oligonucleotide
  Antisense strand to SEQ ID NO: 59098
uuauccaaucuauacacug

SEQ ID NO: 59180 - RNA, 19 nt, Artificial Sequence
  Description of Artificial Sequence: Synthetic oligonucleotide
  Sense strand starting at position 3352 of SEQ ID NO: 723
aguguauagauuggauaac

SEQ ID NO: 59181 - RNA, 19 nt, Artificial Sequence
  Description of Artificial Sequence: Synthetic oligonucleotide
  Antisense strand to SEQ ID NO: 59100
guuauccaaucuauacacu

SEQ ID NO: 59182 - RNA, 19 nt, Artificial Sequence
  Description of Artificial Sequence: Synthetic oligonucleotide
  Sense strand starting at position 3353 of SEQ ID NO: 723
guguauagauuggauaacu

SEQ ID NO: 59183 - RNA, 19 nt, Artificial Sequence
  Description of Artificial Sequence: Synthetic oligonucleotide
  Antisense strand to SEQ ID NO: 59102
aguuauccaaucuauacac

SEQ ID NO: 59184 - RNA, 19 nt, Artificial Sequence
  Description of Artificial Sequence: Synthetic oligonucleotide
  Sense strand starting at position 3364 of SEQ ID NO: 723
ggauaacuuuaaugcccau

SEQ ID NO: 59185 - RNA, 19 nt, Artificial Sequence
  Description of Artificial Sequence: Synthetic oligonucleotide
  Antisense strand to SEQ ID NO: 59104
augggcauuaaaguuaucc

SEQ ID NO: 59186 - RNA, 19 nt, Artificial Sequence
  Description of Artificial Sequence: Synthetic oligonucleotide
  Sense strand starting at position 3540 of SEQ ID NO: 723
gaagcagugucuuugaaau

SEQ ID NO: 59187 - RNA, 19 nt, Artificial Sequence
  Description of Artificial Sequence: Synthetic oligonucleotide
  Antisense strand to SEQ ID NO: 59106
auuucaaagacacugcuuc

SEQ ID NO: 59188 - RNA, 19 nt, Artificial Sequence
  Description of Artificial Sequence: Synthetic oligonucleotide
  Sense strand starting at position 3550 of SEQ ID NO: 723
cuuugaaauuggcacaaua

SEQ ID NO: 59189 - RNA, 19 nt, Artificial Sequence
  Description of Artificial Sequence: Synthetic oligonucleotide
  Antisense strand to SEQ ID NO: 59108
uauugugccaauuucaaag

SEQ ID NO: 59190 - RNA, 19 nt, Artificial Sequence
  Description of Artificial Sequence: Synthetic oligonucleotide
  Sense strand starting at position 3561 of SEQ ID NO: 723
gcacaauauucucccugga

SEQ ID NO: 59191 - RNA, 19 nt, Artificial Sequence
  Description of Artificial Sequence: Synthetic oligonucleotide
  Antisense strand to SEQ ID NO: 59110
uccagggagaauauugugc

SEQ ID NO: 59192 - RNA, 19 nt, Artificial Sequence
  Description of Artificial Sequence: Synthetic oligonucleotide
  Sense strand starting at position 3591 of SEQ ID NO: 723
gggugagacugauaugaag

SEQ ID NO: 59193 - RNA, 19 nt, Artificial Sequence
  Description of Artificial Sequence: Synthetic oligonucleotide
  Antisense strand to SEQ ID NO: 59112
cuucauaucagucucaccc

SEQ ID NO: 59194 - RNA, 19 nt, Artificial Sequence
  Description of Artificial Sequence: Synthetic oligonucleotide
  Sense strand starting at position 3715 of SEQ ID NO: 723
uagucacauuucuggaugu

SEQ ID NO: 59195 - RNA, 19 nt, Artificial Sequence
  Description of Artificial Sequence: Synthetic oligonucleotide
  Antisense strand to SEQ ID NO: 59114
acauccagaaaugugacua

SEQ ID NO: 59196 - RNA, 19 nt, Artificial Sequence
  Description of Artificial Sequence: Synthetic oligonucleotide
  Sense strand starting at position 3766 of SEQ ID NO: 723
gggugucuucaggagagug

SEQ ID NO: 59197 - RNA, 19 nt, Artificial Sequence
  Description of Artificial Sequence: Synthetic oligonucleotide
  Antisense strand to SEQ ID NO: 59116
cacucuccugaagacaccc

SEQ ID NO: 59198 - RNA, 19 nt, Artificial Sequence
  Description of Artificial Sequence: Synthetic oligonucleotide
  Sense strand starting at position 3878 of SEQ ID NO: 724
acguuuaacuggucaccca

SEQ ID NO: 59199 - RNA, 19 nt, Artificial Sequence
  Description of Artificial Sequence: Synthetic oligonucleotide
  Antisense strand to SEQ ID NO: 59118
ugggugaccaguuaaacgu

SEQ ID NO: 59200 - RNA, 19 nt, Artificial Sequence
  Description of Artificial Sequence: Synthetic oligonucleotide
  Sense strand starting at position 3690 of SEQ ID NO: 724
uauaucaugcuuugggauu

SEQ ID NO: 59201 - RNA, 19 nt, Artificial Sequence
  Description of Artificial Sequence: Synthetic oligonucleotide
  Antisense strand to SEQ ID NO: 59120
aaucccaaagcaugauaua

SEQ ID NO: 59202 - RNA, 19 nt, Artificial Sequence
  Description of Artificial Sequence: Synthetic oligonucleotide
  Sense strand starting at position 3688 of SEQ ID NO: 724
uuuauaucaugcuuuggga

SEQ ID NO: 59203 - RNA, 19 nt, Artificial Sequence
  Description of Artificial Sequence: Synthetic oligonucleotide
  Antisense strand to SEQ ID NO: 59122
ucccaaagcaugauauaaa

SEQ ID NO: 59204 - RNA, 19 nt, Artificial Sequence
  Description of Artificial Sequence: Synthetic oligonucleotide
  Sense strand starting at position 3436 of SEQ ID NO: 724
guguccuauuucuuuguuu

SEQ ID NO: 59205 - RNA, 19 nt, Artificial Sequence
  Description of Artificial Sequence: Synthetic oligonucleotide
  Antisense strand to SEQ ID NO: 59124
aaacaaagaaauaggacac

SEQ ID NO: 59206 - RNA, 19 nt, Artificial Sequence
  Description of Artificial Sequence: Synthetic oligonucleotide
  Sense strand starting at position 3428 of SEQ ID NO: 724
cuaacucuguguccuauuu

SEQ ID NO: 59207 - RNA, 19 nt, Artificial Sequence
  Description of Artificial Sequence: Synthetic oligonucleotide
  Antisense strand to SEQ ID NO: 59126
aaauaggacacagaguuag

SEQ ID NO: 59208 - RNA, 19 nt, Artificial Sequence
  Description of Artificial Sequence: Synthetic oligonucleotide
  Sense strand starting at position 3426 of SEQ ID NO: 724
aucuaacucuguguccuau

SEQ ID NO: 59209 - RNA, 19 nt, Artificial Sequence
  Description of Artificial Sequence: Synthetic oligonucleotide
  Antisense strand to SEQ ID NO: 59128
auaggacacagaguuagau

SEQ ID NO: 59210 - RNA, 19 nt, Artificial Sequence
  Description of Artificial Sequence: Synthetic oligonucleotide
  Sense strand starting at position 3300 of SEQ ID NO: 724
auacauggugcccaguuaa

SEQ ID NO: 59211 - RNA, 19 nt, Artificial Sequence
  Description of Artificial Sequence: Synthetic oligonucleotide
  Antisense strand to SEQ ID NO: 59130
uuaacugggcaccauguau

SEQ ID NO: 59212 - RNA, 19 nt, Artificial Sequence
  Description of Artificial Sequence: Synthetic oligonucleotide
  Sense strand starting at position 3299 of SEQ ID NO: 724
aauacauggugcccaguua

SEQ ID NO: 59213 - RNA, 19 nt, Artificial Sequence
  Description of Artificial Sequence: Synthetic oligonucleotide
  Antisense strand to SEQ ID NO: 59132
uaacugggcaccauguauu

SEQ ID NO: 59214 - RNA, 19 nt, Artificial Sequence
  Description of Artificial Sequence: Synthetic oligonucleotide
  Sense strand starting at position 3257 of SEQ ID NO: 724
ccaacauuucugugugcug

SEQ ID NO: 59215 - RNA, 19 nt, Artificial Sequence
  Description of Artificial Sequence: Synthetic oligonucleotide
  Antisense strand to SEQ ID NO: 59134
cagcacacagaaauguugg

SEQ ID NO: 59216 - RNA, 19 nt, Artificial Sequence
  Description of Artificial Sequence: Synthetic oligonucleotide
  Sense strand starting at position 3126 of SEQ ID NO: 724
acccaaucagugggaagua

SEQ ID NO: 59217 - RNA, 19 nt, Artificial Sequence
  Description of Artificial Sequence: Synthetic oligonucleotide
  Antisense strand to SEQ ID NO: 59136
uacuucccacugauugggu

SEQ ID NO: 59218 - RNA, 19 nt, Artificial Sequence
  Description of Artificial Sequence: Synthetic oligonucleotide
  Sense strand starting at position 2833 of SEQ ID NO: 724
ggcauaagucacuacaccu

SEQ ID NO: 59219 - RNA, 19 nt, Artificial Sequence
  Description of Artificial Sequence: Synthetic oligonucleotide
  Antisense strand to SEQ ID NO: 59138
agguguagugacuuaugcc

SEQ ID NO: 59220 - RNA, 19 nt, Artificial Sequence
  Description of Artificial Sequence: Synthetic oligonucleotide
  Sense strand starting at position 2746 of SEQ ID NO: 724
aguggugcuaucguaguua

SEQ ID NO: 59221 - RNA, 19 nt, Artificial Sequence
  Description of Artificial Sequence: Synthetic oligonucleotide
  Antisense strand to SEQ ID NO: 59140
uaacuacgauagcaccacu

SEQ ID NO: 59222 - RNA, 19 nt, Artificial Sequence
  Description of Artificial Sequence: Synthetic oligonucleotide
  Sense strand starting at position 2445 of SEQ ID NO: 724
gagucauggccagagaagu

SEQ ID NO: 59223 - RNA, 19 nt, Artificial Sequence
  Description of Artificial Sequence: Synthetic oligonucleotide
  Antisense strand to SEQ ID NO: 59142
acuucucuggccaugacuc

SEQ ID NO: 59224 - RNA, 19 nt, Artificial Sequence
  Description of Artificial Sequence: Synthetic oligonucleotide
  Sense strand starting at position 2075 of SEQ ID NO: 724
gaaguuuccgcccacaauu

SEQ ID NO: 59225 - RNA, 19 nt, Artificial Sequence
  Description of Artificial Sequence: Synthetic oligonucleotide
  Antisense strand to SEQ ID NO: 59144
aauugugggcggaaacuuc

SEQ ID NO: 59226 - RNA, 19 nt, Artificial Sequence
  Description of Artificial Sequence: Synthetic oligonucleotide
  Sense strand starting at position 1953 of SEQ ID NO: 724
gggaaacaccucugucuuu

SEQ ID NO: 59227 - RNA, 19 nt, Artificial Sequence
  Description of Artificial Sequence: Synthetic oligonucleotide
  Antisense strand to SEQ ID NO: 59146
aaagacagagguguuuccc

SEQ ID NO: 59228 - RNA, 19 nt, Artificial Sequence
  Description of Artificial Sequence: Synthetic oligonucleotide
  Sense strand starting at position 1302 of SEQ ID NO: 724
gccuccauuucucugucua

SEQ ID NO: 59229 - RNA, 19 nt, Artificial Sequence
  Description of Artificial Sequence: Synthetic oligonucleotide
  Antisense strand to SEQ ID NO: 59148
uagacagagaaauggaggc

SEQ ID NO: 59230 - RNA, 19 nt, Artificial Sequence
  Description of Artificial Sequence: Synthetic oligonucleotide
  Sense strand starting at position 1255 of SEQ ID NO: 724
ggcucugauucuuuacaaa

SEQ ID NO: 59231 - RNA, 19 nt, Artificial Sequence
  Description of Artificial Sequence: Synthetic oligonucleotide
  Antisense strand to SEQ ID NO: 59150
uuuguaaagaaucagagcc

SEQ ID NO: 59232 - RNA, 19 nt, Artificial Sequence
  Description of Artificial Sequence: Synthetic oligonucleotide
  Sense strand starting at position 1254 of SEQ ID NO: 724
gggcucugauucuuuacaa

SEQ ID NO: 59233 - RNA, 19 nt, Artificial Sequence
  Description of Artificial Sequence: Synthetic oligonucleotide
  Antisense strand to SEQ ID NO: 59152
uuguaaagaaucagagccc

SEQ ID NO: 59234 - RNA, 19 nt, Artificial Sequence
  Description of Artificial Sequence: Synthetic oligonucleotide
  Sense strand starting at position 1201 of SEQ ID NO: 724
ggcaguaagugguucaaca

SEQ ID NO: 59235 - RNA, 19 nt, Artificial Sequence
  Description of Artificial Sequence: Synthetic oligonucleotide
  Antisense strand to SEQ ID NO: 59154
uguugaaccacuuacugcc

SEQ ID NO: 59236 - RNA, 19 nt, Artificial Sequence
  Description of Artificial Sequence: Synthetic oligonucleotide
  Sense strand starting at position 1112 of SEQ ID NO: 724
uuaguuuggucaucugaac

SEQ ID NO: 59237 - RNA, 19 nt, Artificial Sequence
  Description of Artificial Sequence: Synthetic oligonucleotide
  Antisense strand to SEQ ID NO: 59156
guucagaugaccaaacuaa

SEQ ID NO: 59238 - RNA, 19 nt, Artificial Sequence
  Description of Artificial Sequence: Synthetic oligonucleotide
  Sense strand starting at position 1020 of SEQ ID NO: 724
cucagaaguucugcuaacu

SEQ ID NO: 59239 - RNA, 19 nt, Artificial Sequence
  Description of Artificial Sequence: Synthetic oligonucleotide
  Antisense strand to SEQ ID NO: 59158
aguuagcagaacuucugag

SEQ ID NO: 59240 - RNA, 19 nt, Artificial Sequence
  Description of Artificial Sequence: Synthetic oligonucleotide
  Sense strand starting at position 971 of SEQ ID NO: 724
gaggcagaaucgucaaaua

SEQ ID NO: 59241 - RNA, 19 nt, Artificial Sequence
  Description of Artificial Sequence: Synthetic oligonucleotide
  Antisense strand to SEQ ID NO: 59160
uauuugacgauucugccuc

SEQ ID NO: 59242 - RNA, 19 nt, Artificial Sequence
  Description of Artificial Sequence: Synthetic oligonucleotide
  Sense strand starting at position 834 of SEQ ID NO: 724
uugggaacucaauguacau

SEQ ID NO: 59243 - RNA, 19 nt, Artificial Sequence
  Description of Artificial Sequence: Synthetic oligonucleotide
  Antisense strand to SEQ ID NO: 59162
auguacauugaguucccaa

SEQ ID NO: 59244 - RNA, 19 nt, Artificial Sequence
  Description of Artificial Sequence: Synthetic oligonucleotide
  Sense strand starting at position 807 of SEQ ID NO: 724
aacauaguucugugcugag

SEQ ID NO: 59245 - RNA, 19 nt, Artificial Sequence
  Description of Artificial Sequence: Synthetic oligonucleotide
  Antisense strand to SEQ ID NO: 59164
cucagcacagaacuauguu

SEQ ID NO: 59246 - RNA, 19 nt, Artificial Sequence
  Description of Artificial Sequence: Synthetic oligonucleotide
  Sense strand starting at position 753 of SEQ ID NO: 724
ccucuuauaguguacagaa

SEQ ID NO: 59247 - RNA, 19 nt, Artificial Sequence
  Description of Artificial Sequence: Synthetic oligonucleotide
  Antisense strand to SEQ ID NO: 59166
uucuguacacuauaagagg

SEQ ID NO: 59248 - RNA, 19 nt, Artificial Sequence
  Description of Artificial Sequence: Synthetic oligonucleotide
  Sense strand starting at position 667 of SEQ ID NO: 724
uauugauugugagcaauuc

SEQ ID NO: 59249 - RNA, 19 nt, Artificial Sequence
  Description of Artificial Sequence: Synthetic oligonucleotide
  Antisense strand to SEQ ID NO: 59168
gaauugcucacaaucaaua

SEQ ID NO: 59250 - RNA, 19 nt, Artificial Sequence
  Description of Artificial Sequence: Synthetic oligonucleotide
  Sense strand starting at position 661 of SEQ ID NO: 724
cagcuauauugauugugag

SEQ ID NO: 59251 - RNA, 19 nt, Artificial Sequence
  Description of Artificial Sequence: Synthetic oligonucleotide
  Antisense strand to SEQ ID NO: 59170
cucacaaucaauauagcug

SEQ ID NO: 59252 - RNA, 19 nt, Artificial Sequence
  Description of Artificial Sequence: Synthetic oligonucleotide
  Sense strand starting at position 655 of SEQ ID NO: 724
agugcucagcuauauugau

SEQ ID NO: 59253 - RNA, 19 nt, Artificial Sequence
  Description of Artificial Sequence: Synthetic oligonucleotide
  Antisense strand to SEQ ID NO: 59172
aucaauauagcugagcacu

SEQ ID NO: 59254 - RNA, 19 nt, Artificial Sequence
  Description of Artificial Sequence: Synthetic oligonucleotide
  Sense strand starting at position 496 of SEQ ID NO: 724
cuucucuucccaggaguua

SEQ ID NO: 59255 - RNA, 19 nt, Artificial Sequence
  Description of Artificial Sequence: Synthetic oligonucleotide
  Antisense strand to SEQ ID NO: 59174
uaacuccugggaagagaag

SEQ ID NO: 59256 - RNA, 19 nt, Artificial Sequence
  Description of Artificial Sequence: Synthetic oligonucleotide
  Sense strand starting at position 453 of SEQ ID NO: 724
aaaggacguuucucagaaa

SEQ ID NO: 59257 - RNA, 19 nt, Artificial Sequence
  Description of Artificial Sequence: Synthetic oligonucleotide
  Antisense strand to SEQ ID NO: 59176
uuucugagaaacguccuuu

SEQ ID NO: 59258 - RNA, 19 nt, Artificial Sequence
  Description of Artificial Sequence: Synthetic oligonucleotide
  Sense strand starting at position 423 of SEQ ID NO: 724
auguaaucucuuuagggca

SEQ ID NO: 59259 - RNA, 19 nt, Artificial Sequence
  Description of Artificial Sequence: Synthetic oligonucleotide
  Antisense strand to SEQ ID NO: 59178
ugcccuaaagagauuacau

SEQ ID NO: 59260 - RNA, 19 nt, Artificial Sequence
  Description of Artificial Sequence: Synthetic oligonucleotide
  Sense strand starting at position 360 of SEQ ID NO: 724
ggaauugauuauccauguu

SEQ ID NO: 59261 - RNA, 19 nt, Artificial Sequence
  Description of Artificial Sequence: Synthetic oligonucleotide
  Antisense strand to SEQ ID NO: 59180
aacauggauaaucaauucc

SEQ ID NO: 59262 - RNA, 19 nt, Artificial Sequence
  Description of Artificial Sequence: Synthetic oligonucleotide
  Sense strand starting at position 359 of SEQ ID NO: 724
gggaauugauuauccaugu

SEQ ID NO: 59263 - RNA, 19 nt, Artificial Sequence
  Description of Artificial Sequence: Synthetic oligonucleotide
  Antisense strand to SEQ ID NO: 59182
acauggauaaucaauuccc

SEQ ID NO: 59264 - RNA, 19 nt, Artificial Sequence
  Description of Artificial Sequence: Synthetic oligonucleotide
  Sense strand starting at position 318 of SEQ ID NO: 724
uuaagcuucucagugacuu

SEQ ID NO: 59265 - RNA, 19 nt, Artificial Sequence
  Description of Artificial Sequence: Synthetic oligonucleotide
  Antisense strand to SEQ ID NO: 59184
aagucacugagaagcuuaa

SEQ ID NO: 59266 - RNA, 19 nt, Artificial Sequence
  Description of Artificial Sequence: Synthetic oligonucleotide
  Sense strand starting at position 304 of SEQ ID NO: 724
gcugaagucuucccuuaag

SEQ ID NO: 59267 - RNA, 19 nt, Artificial Sequence
  Description of Artificial Sequence: Synthetic oligonucleotide
  Antisense strand to SEQ ID NO: 59186
cuuaagggaagacuucagc

SEQ ID NO: 59268 - RNA, 19 nt, Artificial Sequence
  Description of Artificial Sequence: Synthetic oligonucleotide
  Sense strand starting at position 293 of SEQ ID NO: 724
uuugaaugauggcugaagu

SEQ ID NO: 59269 - RNA, 19 nt, Artificial Sequence
  Description of Artificial Sequence: Synthetic oligonucleotide
  Antisense strand to SEQ ID NO: 59188
acuucagccaucauucaaa

SEQ ID NO: 59270 - RNA, 19 nt, Artificial Sequence
  Description of Artificial Sequence: Synthetic oligonucleotide
  Sense strand starting at position 283 of SEQ ID NO: 724
cugaacauccuuugaauga

SEQ ID NO: 59271 - RNA, 19 nt, Artificial Sequence
  Description of Artificial Sequence: Synthetic oligonucleotide
  Antisense strand to SEQ ID NO: 59190
ucauucaaaggauguucag

SEQ ID NO: 59272 - RNA, 19 nt, Artificial Sequence
  Description of Artificial Sequence: Synthetic oligonucleotide
  Sense strand starting at position 281 of SEQ ID NO: 724
agcugaacauccuuugaau

SEQ ID NO: 59273 - RNA, 19 nt, Artificial Sequence
  Description of Artificial Sequence: Synthetic oligonucleotide
  Antisense strand to SEQ ID NO: 59192
auucaaaggauguucagcu

SEQ ID NO: 59274 - RNA, 19 nt, Artificial Sequence
  Description of Artificial Sequence: Synthetic oligonucleotide
  Sense strand starting at position 237 of SEQ ID NO: 724
uuccuuugugaucaagggu

SEQ ID NO: 59275 - RNA, 19 nt, Artificial Sequence
  Description of Artificial Sequence: Synthetic oligonucleotide
  Antisense strand to SEQ ID NO: 59194
acccuugaucacaaaggaa

SEQ ID NO: 59276 - RNA, 19 nt, Artificial Sequence
  Description of Artificial Sequence: Synthetic oligonucleotide
  Sense strand starting at position 159 of SEQ ID NO: 724
gcacaacuaugcccugaaa

SEQ ID NO: 59277 - RNA, 19 nt, Artificial Sequence
  Description of Artificial Sequence: Synthetic oligonucleotide
  Antisense strand to SEQ ID NO: 59196
uuucagggcauaguugugc

SEQ ID NO: 59278 - RNA, 19 nt, Artificial Sequence
  Description of Artificial Sequence: Synthetic oligonucleotide
  Sense strand starting at position 3760 of SEQ ID NO: 726
cauucuuugugugccuaga

SEQ ID NO: 59279 - RNA, 19 nt, Artificial Sequence
  Description of Artificial Sequence: Synthetic oligonucleotide
  Antisense strand to SEQ ID NO: 59198
ucuaggcacacaaagaaug

SEQ ID NO: 59280 - RNA, 19 nt, Artificial Sequence
  Description of Artificial Sequence: Synthetic oligonucleotide
  Sense strand starting at position 3758 of SEQ ID NO: 726
ugcauucuuugugugccua

SEQ ID NO: 59281 - RNA, 19 nt, Artificial Sequence
  Description of Artificial Sequence: Synthetic oligonucleotide
  Antisense strand to SEQ ID NO: 59200
uaggcacacaaagaaugca

SEQ ID NO: 59282 - RNA, 19 nt, Artificial Sequence
  Description of Artificial Sequence: Synthetic oligonucleotide
  Sense strand starting at position 3681 of SEQ ID NO: 726
guggacgaaagcgaugaua

SEQ ID NO: 59283 - RNA, 19 nt, Artificial Sequence
  Description of Artificial Sequence: Synthetic oligonucleotide
  Antisense strand to SEQ ID NO: 59202
uaucaucgcuuucguccac

SEQ ID NO: 59284 - RNA, 19 nt, Artificial Sequence
  Description of Artificial Sequence: Synthetic oligonucleotide
  Sense strand starting at position 3661 of SEQ ID NO: 726
gcaguuuccugcugccaag

SEQ ID NO: 59285 - RNA, 19 nt, Artificial Sequence
  Description of Artificial Sequence: Synthetic oligonucleotide
  Antisense strand to SEQ ID NO: 59204
cuuggcagcaggaaacugc

SEQ ID NO: 59286 - RNA, 19 nt, Artificial Sequence
  Description of Artificial Sequence: Synthetic oligonucleotide
  Sense strand starting at position 3660 of SEQ ID NO: 726
ggcaguuuccugcugccaa

SEQ ID NO: 59287 - RNA, 19 nt, Artificial Sequence
  Description of Artificial Sequence: Synthetic oligonucleotide
  Antisense strand to SEQ ID NO: 59206
uuggcagcaggaaacugcc

SEQ ID NO: 59288 - RNA, 19 nt, Artificial Sequence
  Description of Artificial Sequence: Synthetic oligonucleotide
  Sense strand starting at position 3537 of SEQ ID NO: 726
caguguuucuucuaugguu

SEQ ID NO: 59289 - RNA, 19 nt, Artificial Sequence
  Description of Artificial Sequence: Synthetic oligonucleotide
  Antisense strand to SEQ ID NO: 59208
aaccauagaagaaacacug

SEQ ID NO: 59290 - RNA, 19 nt, Artificial Sequence
  Description of Artificial Sequence: Synthetic oligonucleotide
  Sense strand starting at position 3533 of SEQ ID NO: 726
cuugcaguguuucuucuau

SEQ ID NO: 59291 - RNA, 19 nt, Artificial Sequence
  Description of Artificial Sequence: Synthetic oligonucleotide
  Antisense strand to SEQ ID NO: 59210
auagaagaaacacugcaag

SEQ ID NO: 59292 - RNA, 19 nt, Artificial Sequence
  Description of Artificial Sequence: Synthetic oligonucleotide
  Sense strand starting at position 2507 of SEQ ID NO: 726
cccugaucuuucuagagca

SEQ ID NO: 59293 - RNA, 19 nt, Artificial Sequence
  Description of Artificial Sequence: Synthetic oligonucleotide
  Antisense strand to SEQ ID NO: 59212
ugcucuagaaagaucaggg

SEQ ID NO: 59294 - RNA, 19 nt, Artificial Sequence
  Description of Artificial Sequence: Synthetic oligonucleotide
  Sense strand starting at position 2375 of SEQ ID NO: 726
cuugcuuucuagugccaga

SEQ ID NO: 59295 - RNA, 19 nt, Artificial Sequence
  Description of Artificial Sequence: Synthetic oligonucleotide
  Antisense strand to SEQ ID NO: 59214
ucuggcacuagaaagcaag

SEQ ID NO: 59296 - RNA, 19 nt, Artificial Sequence
  Description of Artificial Sequence: Synthetic oligonucleotide
  Sense strand starting at position 2250 of SEQ ID NO: 726
agagaagucaccuguccag

SEQ ID NO: 59297 - RNA, 19 nt, Artificial Sequence
  Description of Artificial Sequence: Synthetic oligonucleotide
  Antisense strand to SEQ ID NO: 59216
cuggacaggugacuucucu

SEQ ID NO: 59298 - RNA, 19 nt, Artificial Sequence
  Description of Artificial Sequence: Synthetic oligonucleotide
  Sense strand starting at position 2237 of SEQ ID NO: 726
aaucgagacucagagagaa

SEQ ID NO: 59299 - RNA, 19 nt, Artificial Sequence
  Description of Artificial Sequence: Synthetic oligonucleotide
  Antisense strand to SEQ ID NO: 59218
uucucucugagucucgauu

SEQ ID NO: 59300 - RNA, 19 nt, Artificial Sequence
  Description of Artificial Sequence: Synthetic oligonucleotide
  Sense strand starting at position 2158 of SEQ ID NO: 726
cguuaugcucauuaacuca

SEQ ID NO: 59301 - RNA, 19 nt, Artificial Sequence
  Description of Artificial Sequence: Synthetic oligonucleotide
  Antisense strand to SEQ ID NO: 59220
ugaguuaaugagcauaacg

SEQ ID NO: 59302 - RNA, 19 nt, Artificial Sequence
  Description of Artificial Sequence: Synthetic oligonucleotide
  Sense strand starting at position 2157 of SEQ ID NO: 726
acguuaugcucauuaacuc

SEQ ID NO: 59303 - RNA, 19 nt, Artificial Sequence
  Description of Artificial Sequence: Synthetic oligonucleotide
  Antisense strand to SEQ ID NO: 59222
gaguuaaugagcauaacgu

SEQ ID NO: 59304 - RNA, 19 nt, Artificial Sequence
  Description of Artificial Sequence: Synthetic oligonucleotide
  Sense strand starting at position 2155 of SEQ ID NO: 726
acacguuaugcucauuaac

SEQ ID NO: 59305 - RNA, 19 nt, Artificial Sequence
  Description of Artificial Sequence: Synthetic oligonucleotide
  Antisense strand to SEQ ID NO: 59224
guuaaugagcauaacgugu

SEQ ID NO: 59306 - RNA, 19 nt, Artificial Sequence
  Description of Artificial Sequence: Synthetic oligonucleotide
  Sense strand starting at position 2120 of SEQ ID NO: 726
cugagcauguuauacucau

SEQ ID NO: 59307 - RNA, 19 nt, Artificial Sequence
  Description of Artificial Sequence: Synthetic oligonucleotide
  Antisense strand to SEQ ID NO: 59226
augaguauaacaugcucag

SEQ ID NO: 59308 - RNA, 19 nt, Artificial Sequence
  Description of Artificial Sequence: Synthetic oligonucleotide
  Sense strand starting at position 2115 of SEQ ID NO: 726
cugcccugagcauguuaua

SEQ ID NO: 59309 - RNA, 19 nt, Artificial Sequence
  Description of Artificial Sequence: Synthetic oligonucleotide
  Antisense strand to SEQ ID NO: 59228
uauaacaugcucagggcag

SEQ ID NO: 59310 - RNA, 19 nt, Artificial Sequence
  Description of Artificial Sequence: Synthetic oligonucleotide
  Sense strand starting at position 1146 of SEQ ID NO: 726
cccguugaugugugaauuu

SEQ ID NO: 59311 - RNA, 19 nt, Artificial Sequence
  Description of Artificial Sequence: Synthetic oligonucleotide
  Antisense strand to SEQ ID NO: 59230
aaauucacacaucaacggg

SEQ ID NO: 59312 - RNA, 19 nt, Artificial Sequence
  Description of Artificial Sequence: Synthetic oligonucleotide
  Sense strand starting at position 1145 of SEQ ID NO: 726
ucccguugaugugugaauu

SEQ ID NO: 59313 - RNA, 19 nt, Artificial Sequence
  Description of Artificial Sequence: Synthetic oligonucleotide
  Antisense strand to SEQ ID NO: 59232
aauucacacaucaacggga

SEQ ID NO: 59314 - RNA, 19 nt, Artificial Sequence
  Description of Artificial Sequence: Synthetic oligonucleotide
  Sense strand starting at position 1074 of SEQ ID NO: 726
cggaaauucugacaucuag

SEQ ID NO: 59315 - RNA, 19 nt, Artificial Sequence
  Description of Artificial Sequence: Synthetic oligonucleotide
  Antisense strand to SEQ ID NO: 59234
cuagaugucagaauuuccg

SEQ ID NO: 59316 - RNA, 19 nt, Artificial Sequence
  Description of Artificial Sequence: Synthetic oligonucleotide
  Sense strand starting at position 1072 of SEQ ID NO: 726
cccggaaauucugacaucu

SEQ ID NO: 59317 - RNA, 19 nt, Artificial Sequence
  Description of Artificial Sequence: Synthetic oligonucleotide
  Antisense strand to SEQ ID NO: 59236
agaugucagaauuuccggg

SEQ ID NO: 59318 - RNA, 19 nt, Artificial Sequence
  Description of Artificial Sequence: Synthetic oligonucleotide
  Sense strand starting at position 1008 of SEQ ID NO: 726
guuugaucuuguucccaca

SEQ ID NO: 59319 - RNA, 19 nt, Artificial Sequence
  Description of Artificial Sequence: Synthetic oligonucleotide
  Antisense strand to SEQ ID NO: 59238
ugugggaacaagaucaaac

SEQ ID NO: 59320 - RNA, 19 nt, Artificial Sequence
  Description of Artificial Sequence: Synthetic oligonucleotide
  Sense strand starting at position 1002 of SEQ ID NO: 726
aggcaaguuugaucuuguu

SEQ ID NO: 59321 - RNA, 19 nt, Artificial Sequence
  Description of Artificial Sequence: Synthetic oligonucleotide
  Antisense strand to SEQ ID NO: 59240
aacaagaucaaacuugccu

SEQ ID NO: 59322 - RNA, 19 nt, Artificial Sequence
  Description of Artificial Sequence: Synthetic oligonucleotide
  Sense strand starting at position 938 of SEQ ID NO: 726
guauuaaauuggcagacga

SEQ ID NO: 59323 - RNA, 19 nt, Artificial Sequence
  Description of Artificial Sequence: Synthetic oligonucleotide
  Antisense strand to SEQ ID NO: 59242
ucgucugccaauuuaauac

SEQ ID NO: 59324 - RNA, 19 nt, Artificial Sequence
  Description of Artificial Sequence: Synthetic oligonucleotide
  Sense strand starting at position 935 of SEQ ID NO: 726
aggguauuaaauuggcaga

SEQ ID NO: 59325 - RNA, 19 nt, Artificial Sequence
  Description of Artificial Sequence: Synthetic oligonucleotide
  Antisense strand to SEQ ID NO: 59244
ucugccaauuuaauacccu

SEQ ID NO: 59326 - RNA, 19 nt, Artificial Sequence
  Description of Artificial Sequence: Synthetic oligonucleotide
  Sense strand starting at position 930 of SEQ ID NO: 726
gcuugaggguauuaaauug

SEQ ID NO: 59327 - RNA, 19 nt, Artificial Sequence
  Description of Artificial Sequence: Synthetic oligonucleotide
  Antisense strand to SEQ ID NO: 59246
caauuuaauacccucaagc

SEQ ID NO: 59328 - RNA, 19 nt, Artificial Sequence
  Description of Artificial Sequence: Synthetic oligonucleotide
  Sense strand starting at position 927 of SEQ ID NO: 726
ucugcuugaggguauuaaa

SEQ ID NO: 59329 - RNA, 19 nt, Artificial Sequence
  Description of Artificial Sequence: Synthetic oligonucleotide
  Antisense strand to SEQ ID NO: 59248
uuuaauacccucaagcaga

SEQ ID NO: 59330 - RNA, 19 nt, Artificial Sequence
  Description of Artificial Sequence: Synthetic oligonucleotide
  Sense strand starting at position 733 of SEQ ID NO: 726
ggaugacucugagaggaca

SEQ ID NO: 59331 - RNA, 19 nt, Artificial Sequence
  Description of Artificial Sequence: Synthetic oligonucleotide
  Antisense strand to SEQ ID NO: 59250
uguccucucagagucaucc

SEQ ID NO: 59332 - RNA, 19 nt, Artificial Sequence
  Description of Artificial Sequence: Synthetic oligonucleotide
  Sense strand starting at position 731 of SEQ ID NO: 726
gaggaugacucugagagga

SEQ ID NO: 59333 - RNA, 19 nt, Artificial Sequence
  Description of Artificial Sequence: Synthetic oligonucleotide
  Antisense strand to SEQ ID NO: 59252
uccucucagagucauccuc

SEQ ID NO: 59334 - RNA, 19 nt, Artificial Sequence
  Description of Artificial Sequence: Synthetic oligonucleotide
  Sense strand starting at position 478 of SEQ ID NO: 726
cagugacuguguugguaca

SEQ ID NO: 59335 - RNA, 19 nt, Artificial Sequence
  Description of Artificial Sequence: Synthetic oligonucleotide
  Antisense strand to SEQ ID NO: 59254
uguaccaacacagucacug

SEQ ID NO: 59336 - RNA, 19 nt, Artificial Sequence
  Description of Artificial Sequence: Synthetic oligonucleotide
  Sense strand starting at position 476 of SEQ ID NO: 726
cccagugacuguguuggua

SEQ ID NO: 59337 - RNA, 19 nt, Artificial Sequence
  Description of Artificial Sequence: Synthetic oligonucleotide
  Antisense strand to SEQ ID NO: 59256
uaccaacacagucacuggg

SEQ ID NO: 59338 - RNA, 19 nt, Artificial Sequence
  Description of Artificial Sequence: Synthetic oligonucleotide
  Sense strand starting at position 417 of SEQ ID NO: 726
ggcagaucugcugaaucag

SEQ ID NO: 59339 - RNA, 19 nt, Artificial Sequence
  Description of Artificial Sequence: Synthetic oligonucleotide
  Antisense strand to SEQ ID NO: 59258
cugauucagcagaucugcc

SEQ ID NO: 59340 - RNA, 19 nt, Artificial Sequence
  Description of Artificial Sequence: Synthetic oligonucleotide
  Sense strand starting at position 414 of SEQ ID NO: 726
cacggcagaucugcugaau

SEQ ID NO: 59341 - RNA, 19 nt, Artificial Sequence
  Description of Artificial Sequence: Synthetic oligonucleotide
  Antisense strand to SEQ ID NO: 59260
auucagcagaucugccgug

SEQ ID NO: 59342 - RNA, 19 nt, Artificial Sequence
  Description of Artificial Sequence: Synthetic oligonucleotide
  Sense strand starting at position 2972 of SEQ ID NO: 727
cccugaucuuucuagagca

SEQ ID NO: 59343 - RNA, 19 nt, Artificial Sequence
  Description of Artificial Sequence: Synthetic oligonucleotide
  Antisense strand to SEQ ID NO: 59262
ugcucuagaaagaucaggg

SEQ ID NO: 59344 - RNA, 19 nt, Artificial Sequence
  Description of Artificial Sequence: Synthetic oligonucleotide
  Sense strand starting at position 2840 of SEQ ID NO: 727
cuugcuuucuagugccaga

SEQ ID NO: 59345 - RNA, 19 nt, Artificial Sequence
  Description of Artificial Sequence: Synthetic oligonucleotide
  Antisense strand to SEQ ID NO: 59264
ucuggcacuagaaagcaag

SEQ ID NO: 59346 - RNA, 19 nt, Artificial Sequence
  Description of Artificial Sequence: Synthetic oligonucleotide
  Sense strand starting at position 2715 of SEQ ID NO: 727
agagaagucaccuguccag

SEQ ID NO: 59347 - RNA, 19 nt, Artificial Sequence
  Description of Artificial Sequence: Synthetic oligonucleotide
  Antisense strand to SEQ ID NO: 59266
cuggacaggugacuucucu

SEQ ID NO: 59348 - RNA, 19 nt, Artificial Sequence
  Description of Artificial Sequence: Synthetic oligonucleotide
  Sense strand starting at position 2702 of SEQ ID NO: 727
aaucgagacucagagagaa

SEQ ID NO: 59349 - RNA, 19 nt, Artificial Sequence
  Description of Artificial Sequence: Synthetic oligonucleotide
  Antisense strand to SEQ ID NO: 59268
uucucucugagucucgauu

SEQ ID NO: 59350 - RNA, 19 nt, Artificial Sequence
  Description of Artificial Sequence: Synthetic oligonucleotide
  Sense strand starting at position 2623 of SEQ ID NO: 727
cguuaugcucauuaacuca

SEQ ID NO: 59351 - RNA, 19 nt, Artificial Sequence
  Description of Artificial Sequence: Synthetic oligonucleotide
  Antisense strand to SEQ ID NO: 59270
ugaguuaaugagcauaacg

SEQ ID NO: 59352 - RNA, 19 nt, Artificial Sequence
  Description of Artificial Sequence: Synthetic oligonucleotide
  Sense strand starting at position 2622 of SEQ ID NO: 727
acguuaugcucauuaacuc

SEQ ID NO: 59353 - RNA, 19 nt, Artificial Sequence
  Description of Artificial Sequence: Synthetic oligonucleotide
  Antisense strand to SEQ ID NO: 59272
gaguuaaugagcauaacgu

SEQ ID NO: 59354 - RNA, 19 nt, Artificial Sequence
  Description of Artificial Sequence: Synthetic oligonucleotide
  Sense strand starting at position 2620 of SEQ ID NO: 727
acacguuaugcucauuaac

SEQ ID NO: 59355 - RNA, 19 nt, Artificial Sequence
  Description of Artificial Sequence: Synthetic oligonucleotide
  Antisense strand to SEQ ID NO: 59274
guuaaugagcauaacgugu

SEQ ID NO: 59356 - RNA, 19 nt, Artificial Sequence
  Description of Artificial Sequence: Synthetic oligonucleotide
  Sense strand starting at position 2585 of SEQ ID NO: 727
cugagcauguuauacucau

SEQ ID NO: 59357 - RNA, 19 nt, Artificial Sequence
  Description of Artificial Sequence: Synthetic oligonucleotide
  Antisense strand to SEQ ID NO: 59276
augaguauaacaugcucag

SEQ ID NO: 59358 - RNA, 19 nt, Artificial Sequence
  Description of Artificial Sequence: Synthetic oligonucleotide
  Sense strand starting at position 2580 of SEQ ID NO: 727
cugcccugagcauguuaua

SEQ ID NO: 59359 - RNA, 19 nt, Artificial Sequence
  Description of Artificial Sequence: Synthetic oligonucleotide
  Antisense strand to SEQ ID NO: 59278
uauaacaugcucagggcag

SEQ ID NO: 59360 - RNA, 19 nt, Artificial Sequence
  Description of Artificial Sequence: Synthetic oligonucleotide
  Sense strand starting at position 1611 of SEQ ID NO: 727
cccguugaugugugaauuu

SEQ ID NO: 59361 - RNA, 19 nt, Artificial Sequence
  Description of Artificial Sequence: Synthetic oligonucleotide
  Antisense strand to SEQ ID NO: 59280
aaauucacacaucaacggg

SEQ ID NO: 59362 - RNA, 19 nt, Artificial Sequence
  Description of Artificial Sequence: Synthetic oligonucleotide
  Sense strand starting at position 1610 of SEQ ID NO: 727
ucccguugaugugugaauu

SEQ ID NO: 59363 - RNA, 19 nt, Artificial Sequence
  Description of Artificial Sequence: Synthetic oligonucleotide
  Antisense strand to SEQ ID NO: 59282
aauucacacaucaacggga

SEQ ID NO: 59364 - RNA, 19 nt, Artificial Sequence
  Description of Artificial Sequence: Synthetic oligonucleotide
  Sense strand starting at position 1539 of SEQ ID NO: 727
cggaaauucugacaucuag

SEQ ID NO: 59365 - RNA, 19 nt, Artificial Sequence
  Description of Artificial Sequence: Synthetic oligonucleotide
  Antisense strand to SEQ ID NO: 59284
cuagaugucagaauuuccg

SEQ ID NO: 59366 - RNA, 19 nt, Artificial Sequence
  Description of Artificial Sequence: Synthetic oligonucleotide
  Sense strand starting at position 1537 of SEQ ID NO: 727
cccggaaauucugacaucu

SEQ ID NO: 59367 - RNA, 19 nt, Artificial Sequence
  Description of Artificial Sequence: Synthetic oligonucleotide
  Antisense strand to SEQ ID NO: 59286
agaugucagaauuuccggg

SEQ ID NO: 59368 - RNA, 19 nt, Artificial Sequence
  Description of Artificial Sequence: Synthetic oligonucleotide
  Sense strand starting at position 1473 of SEQ ID NO: 727
guuugaucuuguucccaca

SEQ ID NO: 59369 - RNA, 19 nt, Artificial Sequence
  Description of Artificial Sequence: Synthetic oligonucleotide
  Antisense strand to SEQ ID NO: 59288
ugugggaacaagaucaaac

SEQ ID NO: 59370 - RNA, 19 nt, Artificial Sequence
  Description of Artificial Sequence: Synthetic oligonucleotide
  Sense strand starting at position 1467 of SEQ ID NO: 727
aggcaaguuugaucuuguu

SEQ ID NO: 59371 - RNA, 19 nt, Artificial Sequence
  Description of Artificial Sequence: Synthetic oligonucleotide
  Antisense strand to SEQ ID NO: 59290
aacaagaucaaacuugccu

SEQ ID NO: 59372 - RNA, 19 nt, Artificial Sequence
  Description of Artificial Sequence: Synthetic oligonucleotide
  Sense strand starting at position 1403 of SEQ ID NO: 727
guauuaaauuggcagacga

SEQ ID NO: 59373 - RNA, 19 nt, Artificial Sequence
  Description of Artificial Sequence: Synthetic oligonucleotide
  Antisense strand to SEQ ID NO: 59292
ucgucugccaauuuaauac

SEQ ID NO: 59374 - RNA, 19 nt, Artificial Sequence
  Description of Artificial Sequence: Synthetic oligonucleotide
  Sense strand starting at position 1400 of SEQ ID NO: 727
aggguauuaaauuggcaga

SEQ ID NO: 59375 - RNA, 19 nt, Artificial Sequence
  Description of Artificial Sequence: Synthetic oligonucleotide
  Antisense strand to SEQ ID NO: 59294
ucugccaauuuaauacccu

SEQ ID NO: 59376 - RNA, 19 nt, Artificial Sequence
  Description of Artificial Sequence: Synthetic oligonucleotide
  Sense strand starting at position 1395 of SEQ ID NO: 727
gcuugaggguauuaaauug

SEQ ID NO: 59377 - RNA, 19 nt, Artificial Sequence
  Description of Artificial Sequence: Synthetic oligonucleotide
  Antisense strand to SEQ ID NO: 59296
caauuuaauacccucaagc

SEQ ID NO: 59378 - RNA, 19 nt, Artificial Sequence
  Description of Artificial Sequence: Synthetic oligonucleotide
  Sense strand starting at position 1392 of SEQ ID NO: 727
ucugcuugaggguauuaaa

SEQ ID NO: 59379 - RNA, 19 nt, Artificial Sequence
  Description of Artificial Sequence: Synthetic oligonucleotide
  Antisense strand to SEQ ID NO: 59298
uuuaauacccucaagcaga

SEQ ID NO: 59380 - RNA, 19 nt, Artificial Sequence
  Description of Artificial Sequence: Synthetic oligonucleotide
  Sense strand starting at position 1198 of SEQ ID NO: 727
ggaugacucugagaggaca

SEQ ID NO: 59381 - RNA, 19 nt, Artificial Sequence
  Description of Artificial Sequence: Synthetic oligonucleotide
  Antisense strand to SEQ ID NO: 59300
uguccucucagagucaucc

SEQ ID NO: 59382 - RNA, 19 nt, Artificial Sequence
  Description of Artificial Sequence: Synthetic oligonucleotide
  Sense strand starting at position 1196 of SEQ ID NO: 727
gaggaugacucugagagga

SEQ ID NO: 59383 - RNA, 19 nt, Artificial Sequence
  Description of Artificial Sequence: Synthetic oligonucleotide
  Antisense strand to SEQ ID NO: 59302
uccucucagagucauccuc

SEQ ID NO: 59384 - RNA, 19 nt, Artificial Sequence
  Description of Artificial Sequence: Synthetic oligonucleotide
  Sense strand starting at position 943 of SEQ ID NO: 727
cagugacuguguugguaca

SEQ ID NO: 59385 - RNA, 19 nt, Artificial Sequence
  Description of Artificial Sequence: Synthetic oligonucleotide
  Antisense strand to SEQ ID NO: 59304
uguaccaacacagucacug

SEQ ID NO: 59386 - RNA, 19 nt, Artificial Sequence
  Description of Artificial Sequence: Synthetic oligonucleotide
  Sense strand starting at position 941 of SEQ ID NO: 727
cccagugacuguguuggua

SEQ ID NO: 59387 - RNA, 19 nt, Artificial Sequence
  Description of Artificial Sequence: Synthetic oligonucleotide
  Antisense strand to SEQ ID NO: 59306
uaccaacacagucacuggg

SEQ ID NO: 59388 - RNA, 19 nt, Artificial Sequence
  Description of Artificial Sequence: Synthetic oligonucleotide
  Sense strand starting at position 882 of SEQ ID NO: 727
ggcagaucugcugaaucag

SEQ ID NO: 59389 - RNA, 19 nt, Artificial Sequence
  Description of Artificial Sequence: Synthetic oligonucleotide
  Antisense strand to SEQ ID NO: 59308
cugauucagcagaucugcc

SEQ ID NO: 59390 - RNA, 19 nt, Artificial Sequence
  Description of Artificial Sequence: Synthetic oligonucleotide
  Sense strand starting at position 879 of SEQ ID NO: 727
cacggcagaucugcugaau

SEQ ID NO: 59391 - RNA, 19 nt, Artificial Sequence
  Description of Artificial Sequence: Synthetic oligonucleotide
  Antisense strand to SEQ ID NO: 59310
auucagcagaucugccgug

SEQ ID NO: 59392 - RNA, 19 nt, Artificial Sequence
  Description of Artificial Sequence: Synthetic oligonucleotide
  Sense strand starting at position 457 of SEQ ID NO: 727
ccuggcaacccuggugaaa

SEQ ID NO: 59393 - RNA, 19 nt, Artificial Sequence
  Description of Artificial Sequence: Synthetic oligonucleotide
  Antisense strand to SEQ ID NO: 59312
uuucaccaggguugccagg

SEQ ID NO: 59394 - RNA, 19 nt, Artificial Sequence
  Description of Artificial Sequence: Synthetic oligonucleotide
  Sense strand starting at position 3802 of SEQ ID NO: 725
cuuagugacccagaaguuu

SEQ ID NO: 59395 - RNA, 19 nt, Artificial Sequence
  Description of Artificial Sequence: Synthetic oligonucleotide
  Antisense strand to SEQ ID NO: 59314
aaacuucugggucacuaag

SEQ ID NO: 59396 - RNA, 19 nt, Artificial Sequence
  Description of Artificial Sequence: Synthetic oligonucleotide
  Sense strand starting at position 3800 of SEQ ID NO: 725
ugcuuagugacccagaagu

SEQ ID NO: 59397 - RNA, 19 nt, Artificial Sequence
  Description of Artificial Sequence: Synthetic oligonucleotide
  Antisense strand to SEQ ID NO: 59316
acuucugggucacuaagca

SEQ ID NO: 59398 - RNA, 19 nt, Artificial Sequence
  Description of Artificial Sequence: Synthetic oligonucleotide
  Sense strand starting at position 3798 of SEQ ID NO: 725
aaugcuuagugacccagaa

SEQ ID NO: 59399 - RNA, 19 nt, Artificial Sequence
  Description of Artificial Sequence: Synthetic oligonucleotide
  Antisense strand to SEQ ID NO: 59318
uucugggucacuaagcauu

SEQ ID NO: 59400 - RNA, 19 nt, Artificial Sequence
  Description of Artificial Sequence: Synthetic oligonucleotide
  Sense strand starting at position 3791 of SEQ ID NO: 725
cuuugcaaaugcuuaguga

SEQ ID NO: 59401 - RNA, 19 nt, Artificial Sequence
  Description of Artificial Sequence: Synthetic oligonucleotide
  Antisense strand to SEQ ID NO: 59320
ucacuaagcauuugcaaag

SEQ ID NO: 59402 - RNA, 19 nt, Artificial Sequence
  Description of Artificial Sequence: Synthetic oligonucleotide
  Sense strand starting at position 3630 of SEQ ID NO: 725
cuggcuuggcagugauauc

SEQ ID NO: 59403 - RNA, 19 nt, Artificial Sequence
  Description of Artificial Sequence: Synthetic oligonucleotide
  Antisense strand to SEQ ID NO: 59322
gauaucacugccaagccag

SEQ ID NO: 59404 - RNA, 19 nt, Artificial Sequence
  Description of Artificial Sequence: Synthetic oligonucleotide
  Sense strand starting at position 3563 of SEQ ID NO: 725
cugagaguucugugcagca

SEQ ID NO: 59405 - RNA, 19 nt, Artificial Sequence
  Description of Artificial Sequence: Synthetic oligonucleotide
  Antisense strand to SEQ ID NO: 59324
ugcugcacagaacucucag

SEQ ID NO: 59406 - RNA, 19 nt, Artificial Sequence
  Description of Artificial Sequence: Synthetic oligonucleotide
  Sense strand starting at position 3521 of SEQ ID NO: 725
agugccauccuuuacagaa

SEQ ID NO: 59407 - RNA, 19 nt, Artificial Sequence
  Description of Artificial Sequence: Synthetic oligonucleotide
  Antisense strand to SEQ ID NO: 59326
uucuguaaaggauggcacu

SEQ ID NO: 59408 - RNA, 19 nt, Artificial Sequence
  Description of Artificial Sequence: Synthetic oligonucleotide
  Sense strand starting at position 3166 of SEQ ID NO: 725
cugguuuaugagggucaga

SEQ ID NO: 59409 - RNA, 19 nt, Artificial Sequence
  Description of Artificial Sequence: Synthetic oligonucleotide
  Antisense strand to SEQ ID NO: 59328
ucugacccucauaaaccag

SEQ ID NO: 59410 - RNA, 19 nt, Artificial Sequence
  Description of Artificial Sequence: Synthetic oligonucleotide
  Sense strand starting at position 3158 of SEQ ID NO: 725
gagggaggcugguuuauga

SEQ ID NO: 59411 - RNA, 19 nt, Artificial Sequence
  Description of Artificial Sequence: Synthetic oligonucleotide
  Antisense strand to SEQ ID NO: 59330
ucauaaaccagccucccuc

SEQ ID NO: 59412 - RNA, 19 nt, Artificial Sequence
  Description of Artificial Sequence: Synthetic oligonucleotide
  Sense strand starting at position 2982 of SEQ ID NO: 725
ggaaucugggucugauuca

SEQ ID NO: 59413 - RNA, 19 nt, Artificial Sequence
  Description of Artificial Sequence: Synthetic oligonucleotide
  Antisense strand to SEQ ID NO: 59332
ugaaucagacccagauucc

SEQ ID NO: 59414 - RNA, 19 nt, Artificial Sequence
  Description of Artificial Sequence: Synthetic oligonucleotide
  Sense strand starting at position 2724 of SEQ ID NO: 725
cugcucuccugagcgguaa

SEQ ID NO: 59415 - RNA, 19 nt, Artificial Sequence
  Description of Artificial Sequence: Synthetic oligonucleotide
  Antisense strand to SEQ ID NO: 59334
uuaccgcucaggagagcag

SEQ ID NO: 59416 - RNA, 19 nt, Artificial Sequence
  Description of Artificial Sequence: Synthetic oligonucleotide
  Sense strand starting at position 2666 of SEQ ID NO: 725
gggaguguuccugagggug

SEQ ID NO: 59417 - RNA, 19 nt, Artificial Sequence
  Description of Artificial Sequence: Synthetic oligonucleotide
  Antisense strand to SEQ ID NO: 59336
cacccucaggaacacuccc

SEQ ID NO: 59418 - RNA, 19 nt, Artificial Sequence
  Description of Artificial Sequence: Synthetic oligonucleotide
  Sense strand starting at position 2622 of SEQ ID NO: 725
gugauuaauagugguuaau

SEQ ID NO: 59419 - RNA, 19 nt, Artificial Sequence
  Description of Artificial Sequence: Synthetic oligonucleotide
  Antisense strand to SEQ ID NO: 59338
auuaaccacuauuaaucac

SEQ ID NO: 59420 - RNA, 19 nt, Artificial Sequence
  Description of Artificial Sequence: Synthetic oligonucleotide
  Sense strand starting at position 2621 of SEQ ID NO: 725
ugugauuaauagugguuaa

SEQ ID NO: 59421 - RNA, 19 nt, Artificial Sequence
  Description of Artificial Sequence: Synthetic oligonucleotide
  Antisense strand to SEQ ID NO: 59340
uuaaccacuauuaaucaca

SEQ ID NO: 59422 - RNA, 19 nt, Artificial Sequence
  Description of Artificial Sequence: Synthetic oligonucleotide
  Sense strand starting at position 2618 of SEQ ID NO: 725
gacugugauuaauaguggu

SEQ ID NO: 59423 - RNA, 19 nt, Artificial Sequence
  Description of Artificial Sequence: Synthetic oligonucleotide
  Antisense strand to SEQ ID NO: 59342
accacuauuaaucacaguc

SEQ ID NO: 59424 - RNA, 19 nt, Artificial Sequence
  Description of Artificial Sequence: Synthetic oligonucleotide
  Sense strand starting at position 2614 of SEQ ID NO: 725
ccaggacugugauuaauag

SEQ ID NO: 59425 - RNA, 19 nt, Artificial Sequence
  Description of Artificial Sequence: Synthetic oligonucleotide
  Antisense strand to SEQ ID NO: 59344
cuauuaaucacaguccugg

SEQ ID NO: 59426 - RNA, 19 nt, Artificial Sequence
  Description of Artificial Sequence: Synthetic oligonucleotide
  Sense strand starting at position 2611 of SEQ ID NO: 725
cagccaggacugugauuaa

SEQ ID NO: 59427 - RNA, 19 nt, Artificial Sequence
  Description of Artificial Sequence: Synthetic oligonucleotide
  Antisense strand to SEQ ID NO: 59346
uuaaucacaguccuggcug

SEQ ID NO: 59428 - RNA, 19 nt, Artificial Sequence
  Description of Artificial Sequence: Synthetic oligonucleotide
  Sense strand starting at position 2578 of SEQ ID NO: 725
ccagguuggccugaggaua

SEQ ID NO: 59429 - RNA, 19 nt, Artificial Sequence
  Description of Artificial Sequence: Synthetic oligonucleotide
  Antisense strand to SEQ ID NO: 59348
uauccucaggccaaccugg

SEQ ID NO: 59430 - RNA, 19 nt, Artificial Sequence
  Description of Artificial Sequence: Synthetic oligonucleotide
  Sense strand starting at position 2485 of SEQ ID NO: 725
ccguuuacuaagcgugaga

SEQ ID NO: 59431 - RNA, 19 nt, Artificial Sequence
  Description of Artificial Sequence: Synthetic oligonucleotide
  Antisense strand to SEQ ID NO: 59350
ucucacgcuuaguaaacgg

SEQ ID NO: 59432 - RNA, 19 nt, Artificial Sequence
  Description of Artificial Sequence: Synthetic oligonucleotide
  Sense strand starting at position 2483 of SEQ ID NO: 725
ggccguuuacuaagcguga

SEQ ID NO: 59433 - RNA, 19 nt, Artificial Sequence
  Description of Artificial Sequence: Synthetic oligonucleotide
  Antisense strand to SEQ ID NO: 59352
ucacgcuuaguaaacggcc

SEQ ID NO: 59434 - RNA, 19 nt, Artificial Sequence
  Description of Artificial Sequence: Synthetic oligonucleotide
  Sense strand starting at position 2164 of SEQ ID NO: 725
cccuuuguucccuggacga

SEQ ID NO: 59435 - RNA, 19 nt, Artificial Sequence
  Description of Artificial Sequence: Synthetic oligonucleotide
  Antisense strand to SEQ ID NO: 59354
ucguccagggaacaaaggg

SEQ ID NO: 59436 - RNA, 19 nt, Artificial Sequence
  Description of Artificial Sequence: Synthetic oligonucleotide
  Sense strand starting at position 1560 of SEQ ID NO: 725
ggagcuuuaauucgaucca

SEQ ID NO: 59437 - RNA, 19 nt, Artificial Sequence
  Description of Artificial Sequence: Synthetic oligonucleotide
  Antisense strand to SEQ ID NO: 59356
uggaucgaauuaaagcucc

SEQ ID NO: 59438 - RNA, 19 nt, Artificial Sequence
  Description of Artificial Sequence: Synthetic oligonucleotide
  Sense strand starting at position 1249 of SEQ ID NO: 725
ucauuaagagcaggaaucu

SEQ ID NO: 59439 - RNA, 19 nt, Artificial Sequence
  Description of Artificial Sequence: Synthetic oligonucleotide
  Antisense strand to SEQ ID NO: 59358
agauuccugcucuuaauga

SEQ ID NO: 59440 - RNA, 19 nt, Artificial Sequence
  Description of Artificial Sequence: Synthetic oligonucleotide
  Sense strand starting at position 1247 of SEQ ID NO: 725
cgucauuaagagcaggaau

SEQ ID NO: 59441 - RNA, 19 nt, Artificial Sequence
  Description of Artificial Sequence: Synthetic oligonucleotide
  Antisense strand to SEQ ID NO: 59360
auuccugcucuuaaugacg

SEQ ID NO: 59442 - RNA, 19 nt, Artificial Sequence
  Description of Artificial Sequence: Synthetic oligonucleotide
  Sense strand starting at position 1240 of SEQ ID NO: 725
ccuacagcgucauuaagag

SEQ ID NO: 59443 - RNA, 19 nt, Artificial Sequence
  Description of Artificial Sequence: Synthetic oligonucleotide
  Antisense strand to SEQ ID NO: 59362
cucuuaaugacgcuguagg

SEQ ID NO: 59444 - RNA, 19 nt, Artificial Sequence
  Description of Artificial Sequence: Synthetic oligonucleotide
  Sense strand starting at position 1112 of SEQ ID NO: 725
aaagaagacucagggucua

SEQ ID NO: 59445 - RNA, 19 nt, Artificial Sequence
  Description of Artificial Sequence: Synthetic oligonucleotide
  Antisense strand to SEQ ID NO: 59364
uagacccugagucuucuuu

SEQ ID NO: 59446 - RNA, 19 nt, Artificial Sequence
  Description of Artificial Sequence: Synthetic oligonucleotide
  Sense strand starting at position 1098 of SEQ ID NO: 725
gaggauauauaaggaaaga

SEQ ID NO: 59447 - RNA, 19 nt, Artificial Sequence
  Description of Artificial Sequence: Synthetic oligonucleotide
  Antisense strand to SEQ ID NO: 59366
ucuuuccuuauauauccuc

SEQ ID NO: 59448 - RNA, 19 nt, Artificial Sequence
  Description of Artificial Sequence: Synthetic oligonucleotide
  Sense strand starting at position 1089 of SEQ ID NO: 725
ggcggcugagaggauauau

SEQ ID NO: 59449 - RNA, 19 nt, Artificial Sequence
  Description of Artificial Sequence: Synthetic oligonucleotide
  Antisense strand to SEQ ID NO: 59368
auauauccucucagccgcc

SEQ ID NO: 59450 - RNA, 19 nt, Artificial Sequence
  Description of Artificial Sequence: Synthetic oligonucleotide
  Sense strand starting at position 1069 of SEQ ID NO: 725
gagaaugagugugucccua

SEQ ID NO: 59451 - RNA, 19 nt, Artificial Sequence
  Description of Artificial Sequence: Synthetic oligonucleotide
  Antisense strand to SEQ ID NO: 59370
uagggacacacucauucuc

SEQ ID NO: 59452 - RNA, 19 nt, Artificial Sequence
  Description of Artificial Sequence: Synthetic oligonucleotide
  Sense strand starting at position 1024 of SEQ ID NO: 725
ccgaauaggucacagaaac

SEQ ID NO: 59453 - RNA, 19 nt, Artificial Sequence
  Description of Artificial Sequence: Synthetic oligonucleotide
  Antisense strand to SEQ ID NO: 59372
guuucugugaccuauucgg

SEQ ID NO: 59454 - RNA, 19 nt, Artificial Sequence
  Description of Artificial Sequence: Synthetic oligonucleotide
  Sense strand starting at position 827 of SEQ ID NO: 725
uucuuuaaugaccggauaa

SEQ ID NO: 59455 - RNA, 19 nt, Artificial Sequence
  Description of Artificial Sequence: Synthetic oligonucleotide
  Antisense strand to SEQ ID NO: 59374
uuauccggucauuaaagaa

SEQ ID NO: 59456 - RNA, 19 nt, Artificial Sequence
  Description of Artificial Sequence: Synthetic oligonucleotide
  Sense strand starting at position 826 of SEQ ID NO: 725
guucuuuaaugaccggaua

SEQ ID NO: 59457 - RNA, 19 nt, Artificial Sequence
  Description of Artificial Sequence: Synthetic oligonucleotide
  Antisense strand to SEQ ID NO: 59376
uauccggucauuaaagaac

SEQ ID NO: 59458 - RNA, 19 nt, Artificial Sequence
  Description of Artificial Sequence: Synthetic oligonucleotide
  Sense strand starting at position 820 of SEQ ID NO: 725
agcuuuguucuuuaaugac

SEQ ID NO: 59459 - RNA, 19 nt, Artificial Sequence
  Description of Artificial Sequence: Synthetic oligonucleotide
  Antisense strand to SEQ ID NO: 59378
gucauuaaagaacaaagcu

SEQ ID NO: 59460 - RNA, 19 nt, Artificial Sequence
  Description of Artificial Sequence: Synthetic oligonucleotide
  Sense strand starting at position 818 of SEQ ID NO: 725
ccagcuuuguucuuuaaug

SEQ ID NO: 59461 - RNA, 19 nt, Artificial Sequence
  Description of Artificial Sequence: Synthetic oligonucleotide
  Antisense strand to SEQ ID NO: 59380
cauuaaagaacaaagcugg

SEQ ID NO: 59462 - RNA, 19 nt, Artificial Sequence
  Description of Artificial Sequence: Synthetic oligonucleotide
  Sense strand starting at position 815 of SEQ ID NO: 725
cggccagcuuuguucuuua

SEQ ID NO: 59463 - RNA, 19 nt, Artificial Sequence
  Description of Artificial Sequence: Synthetic oligonucleotide
  Antisense strand to SEQ ID NO: 59382
uaaagaacaaagcuggccg

SEQ ID NO: 59464 - RNA, 19 nt, Artificial Sequence
  Description of Artificial Sequence: Synthetic oligonucleotide
  Sense strand starting at position 511 of SEQ ID NO: 725
gcuuaagcuuuguuauuua

SEQ ID NO: 59465 - RNA, 19 nt, Artificial Sequence
  Description of Artificial Sequence: Synthetic oligonucleotide
  Antisense strand to SEQ ID NO: 59384
uaaauaacaaagcuuaagc

SEQ ID NO: 59466 - RNA, 19 nt, Artificial Sequence
  Description of Artificial Sequence: Synthetic oligonucleotide
  Sense strand starting at position 510 of SEQ ID NO: 725
ggcuuaagcuuuguuauuu

SEQ ID NO: 59467 - RNA, 19 nt, Artificial Sequence
  Description of Artificial Sequence: Synthetic oligonucleotide
  Antisense strand to SEQ ID NO: 59386
aaauaacaaagcuuaagcc

SEQ ID NO: 59468 - RNA, 19 nt, Artificial Sequence
  Description of Artificial Sequence: Synthetic oligonucleotide
  Sense strand starting at position 509 of SEQ ID NO: 725
cggcuuaagcuuuguuauu

SEQ ID NO: 59469 - RNA, 19 nt, Artificial Sequence
  Description of Artificial Sequence: Synthetic oligonucleotide
  Antisense strand to SEQ ID NO: 59388
aauaacaaagcuuaagccg

SEQ ID NO: 59470 - RNA, 19 nt, Artificial Sequence
  Description of Artificial Sequence: Synthetic oligonucleotide
  Sense strand starting at position 508 of SEQ ID NO: 725
ccggcuuaagcuuuguuau

SEQ ID NO: 59471 - RNA, 19 nt, Artificial Sequence
  Description of Artificial Sequence: Synthetic oligonucleotide
  Antisense strand to SEQ ID NO: 59390
auaacaaagcuuaagccgg

SEQ ID NO: 59472 - RNA, 19 nt, Artificial Sequence
  Description of Artificial Sequence: Synthetic oligonucleotide
  Sense strand starting at position 507 of SEQ ID NO: 725
cccggcuuaagcuuuguua

SEQ ID NO: 59473 - RNA, 19 nt, Artificial Sequence
  Description of Artificial Sequence: Synthetic oligonucleotide
  Antisense strand to SEQ ID NO: 59392
uaacaaagcuuaagccggg

SEQ ID NO: 59474 - RNA, 19 nt, Artificial Sequence
  Description of Artificial Sequence: Synthetic oligonucleotide
  Sense strand starting at position 55 of SEQ ID NO: 728
cacagugaguccucaguca

SEQ ID NO: 59475 - RNA, 19 nt, Artificial Sequence
  Description of Artificial Sequence: Synthetic oligonucleotide
  Antisense strand to SEQ ID NO: 59394
ugacugaggacucacugug

SEQ ID NO: 59476 - RNA, 19 nt, Artificial Sequence
  Description of Artificial Sequence: Synthetic oligonucleotide
  Sense strand starting at position 69 of SEQ ID NO: 728
agucaaucuuacugaguga

SEQ ID NO: 59477 - RNA, 19 nt, Artificial Sequence
  Description of Artificial Sequence: Synthetic oligonucleotide
  Antisense strand to SEQ ID NO: 59396
ucacucaguaagauugacu

SEQ ID NO: 59478 - RNA, 19 nt, Artificial Sequence
  Description of Artificial Sequence: Synthetic oligonucleotide
  Sense strand starting at position 82 of SEQ ID NO: 728
gagugaaccucauugaaca

SEQ ID NO: 59479 - RNA, 19 nt, Artificial Sequence
  Description of Artificial Sequence: Synthetic oligonucleotide
  Antisense strand to SEQ ID NO: 59398
uguucaaugagguucacuc

SEQ ID NO: 59480 - RNA, 19 nt, Artificial Sequence
  Description of Artificial Sequence: Synthetic oligonucleotide
  Sense strand starting at position 131 of SEQ ID NO: 728
uuggccacaucuuuaugau

SEQ ID NO: 59481 - RNA, 19 nt, Artificial Sequence
  Description of Artificial Sequence: Synthetic oligonucleotide
  Antisense strand to SEQ ID NO: 59400
aucauaaagauguggccaa

SEQ ID NO: 59482 - RNA, 19 nt, Artificial Sequence
  Description of Artificial Sequence: Synthetic oligonucleotide
  Sense strand starting at position 132 of SEQ ID NO: 728
uggccacaucuuuaugaug

SEQ ID NO: 59483 - RNA, 19 nt, Artificial Sequence
  Description of Artificial Sequence: Synthetic oligonucleotide
  Antisense strand to SEQ ID NO: 59402
caucauaaagauguggcca

SEQ ID NO: 59484 - RNA, 19 nt, Artificial Sequence
  Description of Artificial Sequence: Synthetic oligonucleotide
  Sense strand starting at position 134 of SEQ ID NO: 728
gccacaucuuuaugaugug

SEQ ID NO: 59485 - RNA, 19 nt, Artificial Sequence
  Description of Artificial Sequence: Synthetic oligonucleotide
  Antisense strand to SEQ ID NO: 59404
cacaucauaaagauguggc

SEQ ID NO: 59486 - RNA, 19 nt, Artificial Sequence
  Description of Artificial Sequence: Synthetic oligonucleotide
  Sense strand starting at position 492 of SEQ ID NO: 728
cacauuguugccggcggaa

SEQ ID NO: 59487 - RNA, 19 nt, Artificial Sequence
  Description of Artificial Sequence: Synthetic oligonucleotide
  Antisense strand to SEQ ID NO: 59406
uuccgccggcaacaaugug

SEQ ID NO: 59488 - RNA, 19 nt, Artificial Sequence
  Description of Artificial Sequence: Synthetic oligonucleotide
  Sense strand starting at position 586 of SEQ ID NO: 728
auagcugaucccugggaaa

SEQ ID NO: 59489 - RNA, 19 nt, Artificial Sequence
  Description of Artificial Sequence: Synthetic oligonucleotide
  Antisense strand to SEQ ID NO: 59408
uuucccagggaucagcuau

SEQ ID NO: 59490 - RNA, 19 nt, Artificial Sequence
  Description of Artificial Sequence: Synthetic oligonucleotide
  Sense strand starting at position 669 of SEQ ID NO: 728
ggcugcgagagcuggaauu

SEQ ID NO: 59491 - RNA, 19 nt, Artificial Sequence
  Description of Artificial Sequence: Synthetic oligonucleotide
  Antisense strand to SEQ ID NO: 59410
aauuccagcucucgcagcc

SEQ ID NO: 59492 - RNA, 19 nt, Artificial Sequence
  Description of Artificial Sequence: Synthetic oligonucleotide
  Sense strand starting at position 828 of SEQ ID NO: 728
uuguuuccauccugacuca

SEQ ID NO: 59493 - RNA, 19 nt, Artificial Sequence
  Description of Artificial Sequence: Synthetic oligonucleotide
  Antisense strand to SEQ ID NO: 59412
ugagucaggauggaaacaa

SEQ ID NO: 59494 - RNA, 19 nt, Artificial Sequence
  Description of Artificial Sequence: Synthetic oligonucleotide
  Sense strand starting at position 1238 of SEQ ID NO: 728
ggugcuacuuccuggcuaa

SEQ ID NO: 59495 - RNA, 19 nt, Artificial Sequence
  Description of Artificial Sequence: Synthetic oligonucleotide
  Antisense strand to SEQ ID NO: 59414
uuagccaggaaguagcacc

SEQ ID NO: 59496 - RNA, 19 nt, Artificial Sequence
  Description of Artificial Sequence: Synthetic oligonucleotide
  Sense strand starting at position 1239 of SEQ ID NO: 728
gugcuacuuccuggcuaaa

SEQ ID NO: 59497 - RNA, 19 nt, Artificial Sequence
  Description of Artificial Sequence: Synthetic oligonucleotide
  Antisense strand to SEQ ID NO: 59416
uuuagccaggaaguagcac

SEQ ID NO: 59498 - RNA, 19 nt, Artificial Sequence
  Description of Artificial Sequence: Synthetic oligonucleotide
  Sense strand starting at position 1241 of SEQ ID NO: 728
gcuacuuccuggcuaaaug

SEQ ID NO: 59499 - RNA, 19 nt, Artificial Sequence
  Description of Artificial Sequence: Synthetic oligonucleotide
  Antisense strand to SEQ ID NO: 59418
cauuuagccaggaaguagc

SEQ ID NO: 59500 - RNA, 19 nt, Artificial Sequence
  Description of Artificial Sequence: Synthetic oligonucleotide
  Sense strand starting at position 1320 of SEQ ID NO: 728
agcagagagacgugcucuu

SEQ ID NO: 59501 - RNA, 19 nt, Artificial Sequence
  Description of Artificial Sequence: Synthetic oligonucleotide
  Antisense strand to SEQ ID NO: 59420
aagagcacgucucucugcu

SEQ ID NO: 59502 - RNA, 19 nt, Artificial Sequence
  Description of Artificial Sequence: Synthetic oligonucleotide
  Sense strand starting at position 1354 of SEQ ID NO: 728
gggcuucgcuggcgugaaa

SEQ ID NO: 59503 - RNA, 19 nt, Artificial Sequence
  Description of Artificial Sequence: Synthetic oligonucleotide
  Antisense strand to SEQ ID NO: 59422
uuucacgccagcgaagccc

SEQ ID NO: 59504 - RNA, 19 nt, Artificial Sequence
  Description of Artificial Sequence: Synthetic oligonucleotide
  Sense strand starting at position 1356 of SEQ ID NO: 728
gcuucgcuggcgugaaagu

SEQ ID NO: 59505 - RNA, 19 nt, Artificial Sequence
  Description of Artificial Sequence: Synthetic oligonucleotide
  Antisense strand to SEQ ID NO: 59424
acuuucacgccagcgaagc

SEQ ID NO: 59506 - RNA, 19 nt, Artificial Sequence
  Description of Artificial Sequence: Synthetic oligonucleotide
  Sense strand starting at position 1357 of SEQ ID NO: 728
cuucgcuggcgugaaaguu

SEQ ID NO: 59507 - RNA, 19 nt, Artificial Sequence
  Description of Artificial Sequence: Synthetic oligonucleotide
  Antisense strand to SEQ ID NO: 59426
aacuuucacgccagcgaag

SEQ ID NO: 59508 - RNA, 19 nt, Artificial Sequence
  Description of Artificial Sequence: Synthetic oligonucleotide
  Sense strand starting at position 1358 of SEQ ID NO: 728
uucgcuggcgugaaaguuu

SEQ ID NO: 59509 - RNA, 19 nt, Artificial Sequence
  Description of Artificial Sequence: Synthetic oligonucleotide
  Antisense strand to SEQ ID NO: 59428
aaacuuucacgccagcgaa

SEQ ID NO: 59510 - RNA, 19 nt, Artificial Sequence
  Description of Artificial Sequence: Synthetic oligonucleotide
  Sense strand starting at position 2873 of SEQ ID NO: 728
ggcauccauuuacagagaa

SEQ ID NO: 59511 - RNA, 19 nt, Artificial Sequence
  Description of Artificial Sequence: Synthetic oligonucleotide
  Antisense strand to SEQ ID NO: 59430
uucucuguaaauggaugcc

SEQ ID NO: 59512 - RNA, 19 nt, Artificial Sequence
  Description of Artificial Sequence: Synthetic oligonucleotide
  Sense strand starting at position 2913 of SEQ ID NO: 728
ccaugcucucccgagauaa

SEQ ID NO: 59513 - RNA, 19 nt, Artificial Sequence
  Description of Artificial Sequence: Synthetic oligonucleotide
  Antisense strand to SEQ ID NO: 59432
uuaucucgggagagcaugg

SEQ ID NO: 59514 - RNA, 19 nt, Artificial Sequence
  Description of Artificial Sequence: Synthetic oligonucleotide
  Sense strand starting at position 2915 of SEQ ID NO: 728
augcucucccgagauaaau

SEQ ID NO: 59515 - RNA, 19 nt, Artificial Sequence
  Description of Artificial Sequence: Synthetic oligonucleotide
  Antisense strand to SEQ ID NO: 59434
auuuaucucgggagagcau

SEQ ID NO: 59516 - RNA, 19 nt, Artificial Sequence
  Description of Artificial Sequence: Synthetic oligonucleotide
  Sense strand starting at position 2944 of SEQ ID NO: 728
ggaugaggccugcagcaua

SEQ ID NO: 59517 - RNA, 19 nt, Artificial Sequence
  Description of Artificial Sequence: Synthetic oligonucleotide
  Antisense strand to SEQ ID NO: 59436
uaugcugcaggccucaucc

SEQ ID NO: 59518 - RNA, 19 nt, Artificial Sequence
  Description of Artificial Sequence: Synthetic oligonucleotide
  Sense strand starting at position 3321 of SEQ ID NO: 728
ggaacauguauugagcacu

SEQ ID NO: 59519 - RNA, 19 nt, Artificial Sequence
  Description of Artificial Sequence: Synthetic oligonucleotide
  Antisense strand to SEQ ID NO: 59438
agugcucaauacauguucc

SEQ ID NO: 59520 - RNA, 19 nt, Artificial Sequence
  Description of Artificial Sequence: Synthetic oligonucleotide
  Sense strand starting at position 3351 of SEQ ID NO: 728
ggguacuuuggaugguuua

SEQ ID NO: 59521 - RNA, 19 nt, Artificial Sequence
  Description of Artificial Sequence: Synthetic oligonucleotide
  Antisense strand to SEQ ID NO: 59440
uaaaccauccaaaguaccc

SEQ ID NO: 59522 - RNA, 19 nt, Artificial Sequence
  Description of Artificial Sequence: Synthetic oligonucleotide
  Sense strand starting at position 3352 of SEQ ID NO: 728
gguacuuuggaugguuuaa

SEQ ID NO: 59523 - RNA, 19 nt, Artificial Sequence
  Description of Artificial Sequence: Synthetic oligonucleotide
  Antisense strand to SEQ ID NO: 59442
uuaaaccauccaaaguacc

SEQ ID NO: 59524 - RNA, 19 nt, Artificial Sequence
  Description of Artificial Sequence: Synthetic oligonucleotide
  Sense strand starting at position 3354 of SEQ ID NO: 728
uacuuuggaugguuuaaca

SEQ ID NO: 59525 - RNA, 19 nt, Artificial Sequence
  Description of Artificial Sequence: Synthetic oligonucleotide
  Antisense strand to SEQ ID NO: 59444
uguuaaaccauccaaagua

SEQ ID NO: 59526 - RNA, 19 nt, Artificial Sequence
  Description of Artificial Sequence: Synthetic oligonucleotide
  Sense strand starting at position 3399 of SEQ ID NO: 728
agagguagcuacuguuagu

SEQ ID NO: 59527 - RNA, 19 nt, Artificial Sequence
  Description of Artificial Sequence: Synthetic oligonucleotide
  Antisense strand to SEQ ID NO: 59446
acuaacaguagcuaccucu

SEQ ID NO: 59528 - RNA, 19 nt, Artificial Sequence
  Description of Artificial Sequence: Synthetic oligonucleotide
  Sense strand starting at position 3446 of SEQ ID NO: 728
ggccaagagugguguuucu

SEQ ID NO: 59529 - RNA, 19 nt, Artificial Sequence
  Description of Artificial Sequence: Synthetic oligonucleotide
  Antisense strand to SEQ ID NO: 59448
agaaacaccacucuuggcc

SEQ ID NO: 59530 - RNA, 19 nt, Artificial Sequence
  Description of Artificial Sequence: Synthetic oligonucleotide
  Sense strand starting at position 3453 of SEQ ID NO: 728
agugguguuucuuauucuu

SEQ ID NO: 59531 - RNA, 19 nt, Artificial Sequence
  Description of Artificial Sequence: Synthetic oligonucleotide
  Antisense strand to SEQ ID NO: 59450
aagaauaagaaacaccacu

SEQ ID NO: 59532 - RNA, 19 nt, Artificial Sequence
  Description of Artificial Sequence: Synthetic oligonucleotide
  Sense strand starting at position 3455 of SEQ ID NO: 728
ugguguuucuuauucuuac

SEQ ID NO: 59533 - RNA, 19 nt, Artificial Sequence
  Description of Artificial Sequence: Synthetic oligonucleotide
  Antisense strand to SEQ ID NO: 59452
guaagaauaagaaacacca

SEQ ID NO: 59534 - RNA, 19 nt, Artificial Sequence
  Description of Artificial Sequence: Synthetic oligonucleotide
  Sense strand starting at position 3456 of SEQ ID NO: 728
gguguuucuuauucuuacu

SEQ ID NO: 59535 - RNA, 19 nt, Artificial Sequence
  Description of Artificial Sequence: Synthetic oligonucleotide
  Antisense strand to SEQ ID NO: 59454
aguaagaauaagaaacacc

SEQ ID NO: 59536 - RNA, 19 nt, Artificial Sequence
  Description of Artificial Sequence: Synthetic oligonucleotide
  Sense strand starting at position 3978 of SEQ ID NO: 728
gagggaauguuggccaacu

SEQ ID NO: 59537 - RNA, 19 nt, Artificial Sequence
  Description of Artificial Sequence: Synthetic oligonucleotide
  Antisense strand to SEQ ID NO: 59456
aguuggccaacauucccuc

SEQ ID NO: 59538 - RNA, 19 nt, Artificial Sequence
  Description of Artificial Sequence: Synthetic oligonucleotide
  Sense strand starting at position 3980 of SEQ ID NO: 728
gggaauguuggccaacuga

SEQ ID NO: 59539 - RNA, 19 nt, Artificial Sequence
  Description of Artificial Sequence: Synthetic oligonucleotide
  Antisense strand to SEQ ID NO: 59458
ucaguuggccaacauuccc

SEQ ID NO: 59540 - RNA, 19 nt, Artificial Sequence
  Description of Artificial Sequence: Synthetic oligonucleotide
  Sense strand starting at position 3936 of SEQ ID NO: 729
gcuucucagauauugcguu

SEQ ID NO: 59541 - RNA, 19 nt, Artificial Sequence
  Description of Artificial Sequence: Synthetic oligonucleotide
  Antisense strand to SEQ ID NO: 59460
aacgcaauaucugagaagc

SEQ ID NO: 59542 - RNA, 19 nt, Artificial Sequence
  Description of Artificial Sequence: Synthetic oligonucleotide
  Sense strand starting at position 3595 of SEQ ID NO: 729
gaaggauaagcaugcuucu

SEQ ID NO: 59543 - RNA, 19 nt, Artificial Sequence
  Description of Artificial Sequence: Synthetic oligonucleotide
  Antisense strand to SEQ ID NO: 59462
agaagcaugcuuauccuuc

SEQ ID NO: 59544 - RNA, 19 nt, Artificial Sequence
  Description of Artificial Sequence: Synthetic oligonucleotide
  Sense strand starting at position 3568 of SEQ ID NO: 729
ugucuuugucuuuaggaaa

SEQ ID NO: 59545 - RNA, 19 nt, Artificial Sequence
  Description of Artificial Sequence: Synthetic oligonucleotide
  Antisense strand to SEQ ID NO: 59464
uuuccuaaagacaaagaca

SEQ ID NO: 59546 - RNA, 19 nt, Artificial Sequence
  Description of Artificial Sequence: Synthetic oligonucleotide
  Sense strand starting at position 3441 of SEQ ID NO: 729
agaaauaacuaugaagaac

SEQ ID NO: 59547 - RNA, 19 nt, Artificial Sequence
  Description of Artificial Sequence: Synthetic oligonucleotide
  Antisense strand to SEQ ID NO: 59466
guucuucauaguuauuucu

SEQ ID NO: 59548 - RNA, 19 nt, Artificial Sequence
  Description of Artificial Sequence: Synthetic oligonucleotide
  Sense strand starting at position 3396 of SEQ ID NO: 729
caacuaaaucuauggguga

SEQ ID NO: 59549 - RNA, 19 nt, Artificial Sequence
  Description of Artificial Sequence: Synthetic oligonucleotide
  Antisense strand to SEQ ID NO: 59468
ucacccauagauuuaguug

SEQ ID NO: 59550 - RNA, 19 nt, Artificial Sequence
  Description of Artificial Sequence: Synthetic oligonucleotide
  Sense strand starting at position 3358 of SEQ ID NO: 729
ggguuuguggcagauuaaa

SEQ ID NO: 59551 - RNA, 19 nt, Artificial Sequence
  Description of Artificial Sequence: Synthetic oligonucleotide
  Antisense strand to SEQ ID NO: 59470
uuuaaucugccacaaaccc

SEQ ID NO: 59552 - RNA, 19 nt, Artificial Sequence
  Description of Artificial Sequence: Synthetic oligonucleotide
  Sense strand starting at position 3288 of SEQ ID NO: 729
gguagacaucgcuagauga

SEQ ID NO: 59553 - RNA, 19 nt, Artificial Sequence
  Description of Artificial Sequence: Synthetic oligonucleotide
  Antisense strand to SEQ ID NO: 59472
ucaucuagcgaugucuacc

SEQ ID NO: 59554 - RNA, 19 nt, Artificial Sequence
  Description of Artificial Sequence: Synthetic oligonucleotide
  Sense strand starting at position 3285 of SEQ ID NO: 729
ugagguagacaucgcuaga

SEQ ID NO: 59555 - RNA, 19 nt, Artificial Sequence
  Description of Artificial Sequence: Synthetic oligonucleotide
  Antisense strand to SEQ ID NO: 59474
ucuagcgaugucuaccuca

SEQ ID NO: 59556 - RNA, 19 nt, Artificial Sequence
  Description of Artificial Sequence: Synthetic oligonucleotide
  Sense strand starting at position 3173 of SEQ ID NO: 729
agacuaacgccacaguuau

SEQ ID NO: 59557 - RNA, 19 nt, Artificial Sequence
  Description of Artificial Sequence: Synthetic oligonucleotide
  Antisense strand to SEQ ID NO: 59476
auaacuguggcguuagucu

SEQ ID NO: 59558 - RNA, 19 nt, Artificial Sequence
  Description of Artificial Sequence: Synthetic oligonucleotide
  Sense strand starting at position 3135 of SEQ ID NO: 729
agagaaauuugguggacac

SEQ ID NO: 59559 - RNA, 19 nt, Artificial Sequence
  Description of Artificial Sequence: Synthetic oligonucleotide
  Antisense strand to SEQ ID NO: 59478
guguccaccaaauuucucu

SEQ ID NO: 59560 - RNA, 19 nt, Artificial Sequence
  Description of Artificial Sequence: Synthetic oligonucleotide
  Sense strand starting at position 2761 of SEQ ID NO: 729
acaugauauuuccauaguc

SEQ ID NO: 59561 - RNA, 19 nt, Artificial Sequence
  Description of Artificial Sequence: Synthetic oligonucleotide
  Antisense strand to SEQ ID NO: 59480
gacuauggaaauaucaugu

SEQ ID NO: 59562 - RNA, 19 nt, Artificial Sequence
  Description of Artificial Sequence: Synthetic oligonucleotide
  Sense strand starting at position 2617 of SEQ ID NO: 729
guuacacaaccguaugaau

SEQ ID NO: 59563 - RNA, 19 nt, Artificial Sequence
  Description of Artificial Sequence: Synthetic oligonucleotide
  Antisense strand to SEQ ID NO: 59482
auucauacgguuguguaac

SEQ ID NO: 59564 - RNA, 19 nt, Artificial Sequence
  Description of Artificial Sequence: Synthetic oligonucleotide
  Sense strand starting at position 2601 of SEQ ID NO: 729
ggaauuagcggugaugguu

SEQ ID NO: 59565 - RNA, 19 nt, Artificial Sequence
  Description of Artificial Sequence: Synthetic oligonucleotide
  Antisense strand to SEQ ID NO: 59484
aaccaucaccgcuaauucc

SEQ ID NO: 59566 - RNA, 19 nt, Artificial Sequence
  Description of Artificial Sequence: Synthetic oligonucleotide
  Sense strand starting at position 2397 of SEQ ID NO: 729
augaaugaaccgugagaac

SEQ ID NO: 59567 - RNA, 19 nt, Artificial Sequence
  Description of Artificial Sequence: Synthetic oligonucleotide
  Antisense strand to SEQ ID NO: 59486
guucucacgguucauucau

SEQ ID NO: 59568 - RNA, 19 nt, Artificial Sequence
  Description of Artificial Sequence: Synthetic oligonucleotide
  Sense strand starting at position 2395 of SEQ ID NO: 729
acaugaaugaaccgugaga

SEQ ID NO: 59569 - RNA, 19 nt, Artificial Sequence
  Description of Artificial Sequence: Synthetic oligonucleotide
  Antisense strand to SEQ ID NO: 59488
ucucacgguucauucaugu

SEQ ID NO: 59570 - RNA, 19 nt, Artificial Sequence
  Description of Artificial Sequence: Synthetic oligonucleotide
  Sense strand starting at position 2300 of SEQ ID NO: 729
gaaauaauguaguuagacu

SEQ ID NO: 59571 - RNA, 19 nt, Artificial Sequence
  Description of Artificial Sequence: Synthetic oligonucleotide
  Antisense strand to SEQ ID NO: 59490
agucuaacuacauuauuuc

SEQ ID NO: 59572 - RNA, 19 nt, Artificial Sequence
  Description of Artificial Sequence: Synthetic oligonucleotide
  Sense strand starting at position 2287 of SEQ ID NO: 729
guaaguguagauggaaaua

SEQ ID NO: 59573 - RNA, 19 nt, Artificial Sequence
  Description of Artificial Sequence: Synthetic oligonucleotide
  Antisense strand to SEQ ID NO: 59492
uauuuccaucuacacuuac

SEQ ID NO: 59574 - RNA, 19 nt, Artificial Sequence
  Description of Artificial Sequence: Synthetic oligonucleotide
  Sense strand starting at position 2284 of SEQ ID NO: 729
cuaguaaguguagauggaa

SEQ ID NO: 59575 - RNA, 19 nt, Artificial Sequence
  Description of Artificial Sequence: Synthetic oligonucleotide
  Antisense strand to SEQ ID NO: 59494
uuccaucuacacuuacuag

SEQ ID NO: 59576 - RNA, 19 nt, Artificial Sequence
  Description of Artificial Sequence: Synthetic oligonucleotide
  Sense strand starting at position 2273 of SEQ ID NO: 729
aaagauguugccuaguaag

SEQ ID NO: 59577 - RNA, 19 nt, Artificial Sequence
  Description of Artificial Sequence: Synthetic oligonucleotide
  Antisense strand to SEQ ID NO: 59496
cuuacuaggcaacaucuuu

SEQ ID NO: 59578 - RNA, 19 nt, Artificial Sequence
  Description of Artificial Sequence: Synthetic oligonucleotide
  Sense strand starting at position 2272 of SEQ ID NO: 729
uaaagauguugccuaguaa

SEQ ID NO: 59579 - RNA, 19 nt, Artificial Sequence
  Description of Artificial Sequence: Synthetic oligonucleotide
  Antisense strand to SEQ ID NO: 59498
uuacuaggcaacaucuuua

SEQ ID NO: 59580 - RNA, 19 nt, Artificial Sequence
  Description of Artificial Sequence: Synthetic oligonucleotide
  Sense strand starting at position 2260 of SEQ ID NO: 729
gacaauggaugauaaagau

SEQ ID NO: 59581 - RNA, 19 nt, Artificial Sequence
  Description of Artificial Sequence: Synthetic oligonucleotide
  Antisense strand to SEQ ID NO: 59500
aucuuuaucauccauuguc

SEQ ID NO: 59582 - RNA, 19 nt, Artificial Sequence
  Description of Artificial Sequence: Synthetic oligonucleotide
  Sense strand starting at position 2253 of SEQ ID NO: 729
gcuuccugacaauggauga

SEQ ID NO: 59583 - RNA, 19 nt, Artificial Sequence
  Description of Artificial Sequence: Synthetic oligonucleotide
  Antisense strand to SEQ ID NO: 59502
ucauccauugucaggaagc

SEQ ID NO: 59584 - RNA, 19 nt, Artificial Sequence
  Description of Artificial Sequence: Synthetic oligonucleotide
  Sense strand starting at position 2174 of SEQ ID NO: 729
ugucuaagauuaguaacua

SEQ ID NO: 59585 - RNA, 19 nt, Artificial Sequence
  Description of Artificial Sequence: Synthetic oligonucleotide
  Antisense strand to SEQ ID NO: 59504
uaguuacuaaucuuagaca

SEQ ID NO: 59586 - RNA, 19 nt, Artificial Sequence
  Description of Artificial Sequence: Synthetic oligonucleotide
  Sense strand starting at position 2146 of SEQ ID NO: 729
caagaaagguggucauccu

SEQ ID NO: 59587 - RNA, 19 nt, Artificial Sequence
  Description of Artificial Sequence: Synthetic oligonucleotide
  Antisense strand to SEQ ID NO: 59506
aggaugaccaccuuucuug

SEQ ID NO: 59588 - RNA, 19 nt, Artificial Sequence
  Description of Artificial Sequence: Synthetic oligonucleotide
  Sense strand starting at position 2143 of SEQ ID NO: 729
ccucaagaaagguggucau

SEQ ID NO: 59589 - RNA, 19 nt, Artificial Sequence
  Description of Artificial Sequence: Synthetic oligonucleotide
  Antisense strand to SEQ ID NO: 59508
augaccaccuuucuugagg

SEQ ID NO: 59590 - RNA, 19 nt, Artificial Sequence
  Description of Artificial Sequence: Synthetic oligonucleotide
  Sense strand starting at position 2064 of SEQ ID NO: 729
gggaggagccugugggaua

SEQ ID NO: 59591 - RNA, 19 nt, Artificial Sequence
  Description of Artificial Sequence: Synthetic oligonucleotide
  Antisense strand to SEQ ID NO: 59510
uaucccacaggcuccuccc

SEQ ID NO: 59592 - RNA, 19 nt, Artificial Sequence
  Description of Artificial Sequence: Synthetic oligonucleotide
  Sense strand starting at position 1276 of SEQ ID NO: 729
ggaucaucugccuacuucu

SEQ ID NO: 59593 - RNA, 19 nt, Artificial Sequence
  Description of Artificial Sequence: Synthetic oligonucleotide
  Antisense strand to SEQ ID NO: 59512
agaaguaggcagaugaucc

SEQ ID NO: 59594 - RNA, 19 nt, Artificial Sequence
  Description of Artificial Sequence: Synthetic oligonucleotide
  Sense strand starting at position 1273 of SEQ ID NO: 729
cugggaucaucugccuacu

SEQ ID NO: 59595 - RNA, 19 nt, Artificial Sequence
  Description of Artificial Sequence: Synthetic oligonucleotide
  Antisense strand to SEQ ID NO: 59514
aguaggcagaugaucccag

SEQ ID NO: 59596 - RNA, 19 nt, Artificial Sequence
  Description of Artificial Sequence: Synthetic oligonucleotide
  Sense strand starting at position 1234 of SEQ ID NO: 729
ggaacaauucguuauucuu

SEQ ID NO: 59597 - RNA, 19 nt, Artificial Sequence
  Description of Artificial Sequence: Synthetic oligonucleotide
  Antisense strand to SEQ ID NO: 59516
aagaauaacgaauuguucc

SEQ ID NO: 59598 - RNA, 19 nt, Artificial Sequence
  Description of Artificial Sequence: Synthetic oligonucleotide
  Sense strand starting at position 1233 of SEQ ID NO: 729
gggaacaauucguuauucu

SEQ ID NO: 59599 - RNA, 19 nt, Artificial Sequence
  Description of Artificial Sequence: Synthetic oligonucleotide
  Antisense strand to SEQ ID NO: 59518
agaauaacgaauuguuccc

SEQ ID NO: 59600 - RNA, 19 nt, Artificial Sequence
  Description of Artificial Sequence: Synthetic oligonucleotide
  Sense strand starting at position 1089 of SEQ ID NO: 729
uacuuuaguggucaauuag

SEQ ID NO: 59601 - RNA, 19 nt, Artificial Sequence
  Description of Artificial Sequence: Synthetic oligonucleotide
  Antisense strand to SEQ ID NO: 59520
cuaauugaccacuaaagua

SEQ ID NO: 59602 - RNA, 19 nt, Artificial Sequence
  Description of Artificial Sequence: Synthetic oligonucleotide
  Sense strand starting at position 1088 of SEQ ID NO: 729
cuacuuuaguggucaauua

SEQ ID NO: 59603 - RNA, 19 nt, Artificial Sequence
  Description of Artificial Sequence: Synthetic oligonucleotide
  Antisense strand to SEQ ID NO: 59522
uaauugaccacuaaaguag

SEQ ID NO: 59604 - RNA, 19 nt, Artificial Sequence
  Description of Artificial Sequence: Synthetic oligonucleotide
  Sense strand starting at position 1072 of SEQ ID NO: 729
gucauuucccaaggcucua

SEQ ID NO: 59605 - RNA, 19 nt, Artificial Sequence
  Description of Artificial Sequence: Synthetic oligonucleotide
  Antisense strand to SEQ ID NO: 59524
uagagccuugggaaaugac

SEQ ID NO: 59606 - RNA, 19 nt, Artificial Sequence
  Description of Artificial Sequence: Synthetic oligonucleotide
  Sense strand starting at position 966 of SEQ ID NO: 729
ggcguaaaucacuaguuaa

SEQ ID NO: 59607 - RNA, 19 nt, Artificial Sequence
  Description of Artificial Sequence: Synthetic oligonucleotide
  Antisense strand to SEQ ID NO: 59526
uuaacuagugauuuacgcc

SEQ ID NO: 59608 - RNA, 19 nt, Artificial Sequence
  Description of Artificial Sequence: Synthetic oligonucleotide
  Sense strand starting at position 853 of SEQ ID NO: 729
aaaccucuggagugaagua

SEQ ID NO: 59609 - RNA, 19 nt, Artificial Sequence
  Description of Artificial Sequence: Synthetic oligonucleotide
  Antisense strand to SEQ ID NO: 59528
uacuucacuccagagguuu

SEQ ID NO: 59610 - RNA, 19 nt, Artificial Sequence
  Description of Artificial Sequence: Synthetic oligonucleotide
  Sense strand starting at position 723 of SEQ ID NO: 729
uuagcuucuccauggaauc

SEQ ID NO: 59611 - RNA, 19 nt, Artificial Sequence
  Description of Artificial Sequence: Synthetic oligonucleotide
  Antisense strand to SEQ ID NO: 59530
gauuccauggagaagcuaa

SEQ ID NO: 59612 - RNA, 19 nt, Artificial Sequence
  Description of Artificial Sequence: Synthetic oligonucleotide
  Sense strand starting at position 622 of SEQ ID NO: 729
gguguaugccuacaauaua

SEQ ID NO: 59613 - RNA, 19 nt, Artificial Sequence
  Description of Artificial Sequence: Synthetic oligonucleotide
  Antisense strand to SEQ ID NO: 59532
uauauuguaggcauacacc

SEQ ID NO: 59614 - RNA, 19 nt, Artificial Sequence
  Description of Artificial Sequence: Synthetic oligonucleotide
  Sense strand starting at position 610 of SEQ ID NO: 729
cuugaaaguggagguguau

SEQ ID NO: 59615 - RNA, 19 nt, Artificial Sequence
  Description of Artificial Sequence: Synthetic oligonucleotide
  Antisense strand to SEQ ID NO: 59534
auacaccuccacuuucaag

SEQ ID NO: 59616 - RNA, 19 nt, Artificial Sequence
  Description of Artificial Sequence: Synthetic oligonucleotide
  Sense strand starting at position 329 of SEQ ID NO: 729
auauguacagcgcgaauuu

SEQ ID NO: 59617 - RNA, 19 nt, Artificial Sequence
  Description of Artificial Sequence: Synthetic oligonucleotide
  Antisense strand to SEQ ID NO: 59536
aaauucgcgcuguacauau

SEQ ID NO: 59618 - RNA, 19 nt, Artificial Sequence
  Description of Artificial Sequence: Synthetic oligonucleotide
  Sense strand starting at position 326 of SEQ ID NO: 729
uguauauguacagcgcgaa

SEQ ID NO: 59619 - RNA, 19 nt, Artificial Sequence
  Description of Artificial Sequence: Synthetic oligonucleotide
  Antisense strand to SEQ ID NO: 59538
uucgcgcuguacauauaca

SEQ ID NO: 59620 - RNA, 19 nt, Artificial Sequence
  Description of Artificial Sequence: Synthetic oligonucleotide
  Sense strand starting at position 46 of SEQ ID NO: 730
aggguaucgcuugagacca

SEQ ID NO: 59621 - RNA, 19 nt, Artificial Sequence
  Description of Artificial Sequence: Synthetic oligonucleotide
  Antisense strand to SEQ ID NO: 59540
uggucucaagcgauacccu

SEQ ID NO: 59622 - RNA, 19 nt, Artificial Sequence
  Description of Artificial Sequence: Synthetic oligonucleotide
  Sense strand starting at position 401 of SEQ ID NO: 730
acgcaacaugccuauggau

SEQ ID NO: 59623 - RNA, 19 nt, Artificial Sequence
  Description of Artificial Sequence: Synthetic oligonucleotide
  Antisense strand to SEQ ID NO: 59542
auccauaggcauguugcgu

SEQ ID NO: 59624 - RNA, 19 nt, Artificial Sequence
  Description of Artificial Sequence: Synthetic oligonucleotide
  Sense strand starting at position 403 of SEQ ID NO: 730
gcaacaugccuauggauca

SEQ ID NO: 59625 - RNA, 19 nt, Artificial Sequence
  Description of Artificial Sequence: Synthetic oligonucleotide
  Antisense strand to SEQ ID NO: 59544
ugauccauaggcauguugc

SEQ ID NO: 59626 - RNA, 19 nt, Artificial Sequence
  Description of Artificial Sequence: Synthetic oligonucleotide
  Sense strand starting at position 408 of SEQ ID NO: 730
augccuauggaucaaugua

SEQ ID NO: 59627 - RNA, 19 nt, Artificial Sequence
  Description of Artificial Sequence: Synthetic oligonucleotide
  Antisense strand to SEQ ID NO: 59546
uacauugauccauaggcau

SEQ ID NO: 59628 - RNA, 19 nt, Artificial Sequence
  Description of Artificial Sequence: Synthetic oligonucleotide
  Sense strand starting at position 441 of SEQ ID NO: 730
uuuauacuggcuugucaaa

SEQ ID NO: 59629 - RNA, 19 nt, Artificial Sequence
  Description of Artificial Sequence: Synthetic oligonucleotide
  Antisense strand to SEQ ID NO: 59548
uuugacaagccaguauaaa

SEQ ID NO: 59630 - RNA, 19 nt, Artificial Sequence
  Description of Artificial Sequence: Synthetic oligonucleotide
  Sense strand starting at position 464 of SEQ ID NO: 730
aacaguuacuggguauaaa

SEQ ID NO: 59631 - RNA, 19 nt, Artificial Sequence
  Description of Artificial Sequence: Synthetic oligonucleotide
  Antisense strand to SEQ ID NO: 59550
uuuauacccaguaacuguu

SEQ ID NO: 59632 - RNA, 19 nt, Artificial Sequence
  Description of Artificial Sequence: Synthetic oligonucleotide
  Sense strand starting at position 605 of SEQ ID NO: 730
auucuaaaugaugguacuu

SEQ ID NO: 59633 - RNA, 19 nt, Artificial Sequence
  Description of Artificial Sequence: Synthetic oligonucleotide
  Antisense strand to SEQ ID NO: 59552
aaguaccaucauuuagaau

SEQ ID NO: 59634 - RNA, 19 nt, Artificial Sequence
  Description of Artificial Sequence: Synthetic oligonucleotide
  Sense strand starting at position 652 of SEQ ID NO: 730
ccaugaugucaucauucuu

SEQ ID NO: 59635 - RNA, 19 nt, Artificial Sequence
  Description of Artificial Sequence: Synthetic oligonucleotide
  Antisense strand to SEQ ID NO: 59554
aagaaugaugacaucaugg

SEQ ID NO: 59636 - RNA, 19 nt, Artificial Sequence
  Description of Artificial Sequence: Synthetic oligonucleotide
  Sense strand starting at position 805 of SEQ ID NO: 730
ccgacuucccuacaugaca

SEQ ID NO: 59637 - RNA, 19 nt, Artificial Sequence
  Description of Artificial Sequence: Synthetic oligonucleotide
  Antisense strand to SEQ ID NO: 59556
ugucauguagggaagucgg

SEQ ID NO: 59638 - RNA, 19 nt, Artificial Sequence
  Description of Artificial Sequence: Synthetic oligonucleotide
  Sense strand starting at position 988 of SEQ ID NO: 730
uccagacucuggcaauuaa

SEQ ID NO: 59639 - RNA, 19 nt, Artificial Sequence
  Description of Artificial Sequence: Synthetic oligonucleotide
  Antisense strand to SEQ ID NO: 59558
uuaauugccagagucugga

SEQ ID NO: 59640 - RNA, 19 nt, Artificial Sequence
  Description of Artificial Sequence: Synthetic oligonucleotide
  Sense strand starting at position 1057 of SEQ ID NO: 730
agcaauugguuauucugaa

SEQ ID NO: 59641 - RNA, 19 nt, Artificial Sequence
  Description of Artificial Sequence: Synthetic oligonucleotide
  Antisense strand to SEQ ID NO: 59560
uucagaauaaccaauugcu

SEQ ID NO: 59642 - RNA, 19 nt, Artificial Sequence
  Description of Artificial Sequence: Synthetic oligonucleotide
  Sense strand starting at position 1058 of SEQ ID NO: 730
gcaauugguuauucugaau

SEQ ID NO: 59643 - RNA, 19 nt, Artificial Sequence
  Description of Artificial Sequence: Synthetic oligonucleotide
  Antisense strand to SEQ ID NO: 59562
auucagaauaaccaauugc

SEQ ID NO: 59644 - RNA, 19 nt, Artificial Sequence
  Description of Artificial Sequence: Synthetic oligonucleotide
  Sense strand starting at position 1100 of SEQ ID NO: 730
cgaacucagcgcugaaguu

SEQ ID NO: 59645 - RNA, 19 nt, Artificial Sequence
  Description of Artificial Sequence: Synthetic oligonucleotide
  Antisense strand to SEQ ID NO: 59564
aacuucagcgcugaguucg

SEQ ID NO: 59646 - RNA, 19 nt, Artificial Sequence
  Description of Artificial Sequence: Synthetic oligonucleotide
  Sense strand starting at position 1101 of SEQ ID NO: 730
gaacucagcgcugaaguua

SEQ ID NO: 59647 - RNA, 19 nt, Artificial Sequence
  Description of Artificial Sequence: Synthetic oligonucleotide
  Antisense strand to SEQ ID NO: 59566
uaacuucagcgcugaguuc

SEQ ID NO: 59648 - RNA, 19 nt, Artificial Sequence
  Description of Artificial Sequence: Synthetic oligonucleotide
  Sense strand starting at position 1112 of SEQ ID NO: 730
ugaaguuacucugcagcga

SEQ ID NO: 59649 - RNA, 19 nt, Artificial Sequence
  Description of Artificial Sequence: Synthetic oligonucleotide
  Antisense strand to SEQ ID NO: 59568
ucgcugcagaguaacuuca

SEQ ID NO: 59650 - RNA, 19 nt, Artificial Sequence
  Description of Artificial Sequence: Synthetic oligonucleotide
  Sense strand starting at position 1202 of SEQ ID NO: 730
acacaauucucgccaagag

SEQ ID NO: 59651 - RNA, 19 nt, Artificial Sequence
  Description of Artificial Sequence: Synthetic oligonucleotide
  Antisense strand to SEQ ID NO: 59570
cucuuggcgagaauugugu

SEQ ID NO: 59652 - RNA, 19 nt, Artificial Sequence
  Description of Artificial Sequence: Synthetic oligonucleotide
  Sense strand starting at position 1277 of SEQ ID NO: 730
ccauuucucuaagggaaca

SEQ ID NO: 59653 - RNA, 19 nt, Artificial Sequence
  Description of Artificial Sequence: Synthetic oligonucleotide
  Antisense strand to SEQ ID NO: 59572
uguucccuuagagaaaugg

SEQ ID NO: 59654 - RNA, 19 nt, Artificial Sequence
  Description of Artificial Sequence: Synthetic oligonucleotide
  Sense strand starting at position 1453 of SEQ ID NO: 730
gagugaaauguucggagga

SEQ ID NO: 59655 - RNA, 19 nt, Artificial Sequence
  Description of Artificial Sequence: Synthetic oligonucleotide
  Antisense strand to SEQ ID NO: 59574
uccuccgaacauuucacuc

SEQ ID NO: 59656 - RNA, 19 nt, Artificial Sequence
  Description of Artificial Sequence: Synthetic oligonucleotide
  Sense strand starting at position 2279 of SEQ ID NO: 730
gugguuugagacuaacauu

SEQ ID NO: 59657 - RNA, 19 nt, Artificial Sequence
  Description of Artificial Sequence: Synthetic oligonucleotide
  Antisense strand to SEQ ID NO: 59576
aauguuagucucaaaccac

SEQ ID NO: 59658 - RNA, 19 nt, Artificial Sequence
  Description of Artificial Sequence: Synthetic oligonucleotide
  Sense strand starting at position 2282 of SEQ ID NO: 730
guuugagacuaacauuuag

SEQ ID NO: 59659 - RNA, 19 nt, Artificial Sequence
  Description of Artificial Sequence: Synthetic oligonucleotide
  Antisense strand to SEQ ID NO: 59578
cuaaauguuagucucaaac

SEQ ID NO: 59660 - RNA, 19 nt, Artificial Sequence
  Description of Artificial Sequence: Synthetic oligonucleotide
  Sense strand starting at position 2353 of SEQ ID NO: 730
ggcggaugugagugcucuu

SEQ ID NO: 59661 - RNA, 19 nt, Artificial Sequence
  Description of Artificial Sequence: Synthetic oligonucleotide
  Antisense strand to SEQ ID NO: 59580
aagagcacucacauccgcc

SEQ ID NO: 59662 - RNA, 19 nt, Artificial Sequence
  Description of Artificial Sequence: Synthetic oligonucleotide
  Sense strand starting at position 2356 of SEQ ID NO: 730
ggaugugagugcucuugga

SEQ ID NO: 59663 - RNA, 19 nt, Artificial Sequence
  Description of Artificial Sequence: Synthetic oligonucleotide
  Antisense strand to SEQ ID NO: 59582
uccaagagcacucacaucc

SEQ ID NO: 59664 - RNA, 19 nt, Artificial Sequence
  Description of Artificial Sequence: Synthetic oligonucleotide
  Sense strand starting at position 2360 of SEQ ID NO: 730
gugagugcucuuggauauc

SEQ ID NO: 59665 - RNA, 19 nt, Artificial Sequence
  Description of Artificial Sequence: Synthetic oligonucleotide
  Antisense strand to SEQ ID NO: 59584
gauauccaagagcacucac

SEQ ID NO: 59666 - RNA, 19 nt, Artificial Sequence
  Description of Artificial Sequence: Synthetic oligonucleotide
  Sense strand starting at position 2389 of SEQ ID NO: 730
gggaaacugugcuugaggu

SEQ ID NO: 59667 - RNA, 19 nt, Artificial Sequence
  Description of Artificial Sequence: Synthetic oligonucleotide
  Antisense strand to SEQ ID NO: 59586
accucaagcacaguuuccc

SEQ ID NO: 59668 - RNA, 19 nt, Artificial Sequence
  Description of Artificial Sequence: Synthetic oligonucleotide
  Sense strand starting at position 2402 of SEQ ID NO: 730
ugaggugugcaggagaagu

SEQ ID NO: 59669 - RNA, 19 nt, Artificial Sequence
  Description of Artificial Sequence: Synthetic oligonucleotide
  Antisense strand to SEQ ID NO: 59588
acuucuccugcacaccuca

SEQ ID NO: 59670 - RNA, 19 nt, Artificial Sequence
  Description of Artificial Sequence: Synthetic oligonucleotide
  Sense strand starting at position 2413 of SEQ ID NO: 730
ggagaagucuucccuuaac

SEQ ID NO: 59671 - RNA, 19 nt, Artificial Sequence
  Description of Artificial Sequence: Synthetic oligonucleotide
  Antisense strand to SEQ ID NO: 59590
guuaagggaagacuucucc

SEQ ID NO: 59672 - RNA, 19 nt, Artificial Sequence
  Description of Artificial Sequence: Synthetic oligonucleotide
  Sense strand starting at position 2416 of SEQ ID NO: 730
gaagucuucccuuaaccgu

SEQ ID NO: 59673 - RNA, 19 nt, Artificial Sequence
  Description of Artificial Sequence: Synthetic oligonucleotide
  Antisense strand to SEQ ID NO: 59592
acgguuaagggaagacuuc

SEQ ID NO: 59674 - RNA, 19 nt, Artificial Sequence
  Description of Artificial Sequence: Synthetic oligonucleotide
  Sense strand starting at position 2449 of SEQ ID NO: 730
cacugugaguucuuacuag

SEQ ID NO: 59675 - RNA, 19 nt, Artificial Sequence
  Description of Artificial Sequence: Synthetic oligonucleotide
  Antisense strand to SEQ ID NO: 59594
cuaguaagaacucacagug

SEQ ID NO: 59676 - RNA, 19 nt, Artificial Sequence
  Description of Artificial Sequence: Synthetic oligonucleotide
  Sense strand starting at position 2508 of SEQ ID NO: 730
ucacuuauuugcccggagu

SEQ ID NO: 59677 - RNA, 19 nt, Artificial Sequence
  Description of Artificial Sequence: Synthetic oligonucleotide
  Antisense strand to SEQ ID NO: 59596
acuccgggcaaauaaguga

SEQ ID NO: 59678 - RNA, 19 nt, Artificial Sequence
  Description of Artificial Sequence: Synthetic oligonucleotide
  Sense strand starting at position 2509 of SEQ ID NO: 730
cacuuauuugcccggaguc

SEQ ID NO: 59679 - RNA, 19 nt, Artificial Sequence
  Description of Artificial Sequence: Synthetic oligonucleotide
  Antisense strand to SEQ ID NO: 59598
gacuccgggcaaauaagug

SEQ ID NO: 59680 - RNA, 19 nt, Artificial Sequence
  Description of Artificial Sequence: Synthetic oligonucleotide
  Sense strand starting at position 2510 of SEQ ID NO: 730
acuuauuugcccggaguca

SEQ ID NO: 59681 - RNA, 19 nt, Artificial Sequence
  Description of Artificial Sequence: Synthetic oligonucleotide
  Antisense strand to SEQ ID NO: 59600
ugacuccgggcaaauaagu

SEQ ID NO: 59682 - RNA, 19 nt, Artificial Sequence
  Description of Artificial Sequence: Synthetic oligonucleotide
  Sense strand starting at position 2567 of SEQ ID NO: 730
gauuuaaacucaggcuugu

SEQ ID NO: 59683 - RNA, 19 nt, Artificial Sequence
  Description of Artificial Sequence: Synthetic oligonucleotide
  Antisense strand to SEQ ID NO: 59602
acaagccugaguuuaaauc

SEQ ID NO: 59684 - RNA, 19 nt, Artificial Sequence
  Description of Artificial Sequence: Synthetic oligonucleotide
  Sense strand starting at position 2578 of SEQ ID NO: 730
aggcuugucugguucccaa

SEQ ID NO: 59685 - RNA, 19 nt, Artificial Sequence
  Description of Artificial Sequence: Synthetic oligonucleotide
  Antisense strand to SEQ ID NO: 59604
uugggaaccagacaagccu

SEQ ID NO: 59686 - RNA, 19 nt, Artificial Sequence
  Description of Artificial Sequence: Synthetic oligonucleotide
  Sense strand starting at position 2608 of SEQ ID NO: 730
uccuacuagcuagguuaua

SEQ ID NO: 59687 - RNA, 19 nt, Artificial Sequence
  Description of Artificial Sequence: Synthetic oligonucleotide
  Antisense strand to SEQ ID NO: 59606
uauaaccuagcuaguagga

SEQ ID NO: 59688 - RNA, 19 nt, Artificial Sequence
  Description of Artificial Sequence: Synthetic oligonucleotide
  Sense strand starting at position 2661 of SEQ ID NO: 730
ccugguguguaggugagaa

SEQ ID NO: 59689 - RNA, 19 nt, Artificial Sequence
  Description of Artificial Sequence: Synthetic oligonucleotide
  Antisense strand to SEQ ID NO: 59608
uucucaccuacacaccagg

SEQ ID NO: 59690 - RNA, 19 nt, Artificial Sequence
  Description of Artificial Sequence: Synthetic oligonucleotide
  Sense strand starting at position 2700 of SEQ ID NO: 730
cagcauguggucuaaggaa

SEQ ID NO: 59691 - RNA, 19 nt, Artificial Sequence
  Description of Artificial Sequence: Synthetic oligonucleotide
  Antisense strand to SEQ ID NO: 59610
uuccuuagaccacaugcug

SEQ ID NO: 59692 - RNA, 19 nt, Artificial Sequence
  Description of Artificial Sequence: Synthetic oligonucleotide
  Sense strand starting at position 2746 of SEQ ID NO: 730
gucuaaacucuguaagcca

SEQ ID NO: 59693 - RNA, 19 nt, Artificial Sequence
  Description of Artificial Sequence: Synthetic oligonucleotide
  Antisense strand to SEQ ID NO: 59612
uggcuuacagaguuuagac

SEQ ID NO: 59694 - RNA, 19 nt, Artificial Sequence
  Description of Artificial Sequence: Synthetic oligonucleotide
  Sense strand starting at position 2912 of SEQ ID NO: 730
ugagacaugccucauuaca

SEQ ID NO: 59695 - RNA, 19 nt, Artificial Sequence
  Description of Artificial Sequence: Synthetic oligonucleotide
  Antisense strand to SEQ ID NO: 59614
uguaaugaggcaugucuca

SEQ ID NO: 59696 - RNA, 19 nt, Artificial Sequence
  Description of Artificial Sequence: Synthetic oligonucleotide
  Sense strand starting at position 2960 of SEQ ID NO: 730
ccuuaagacugguaagaaa

SEQ ID NO: 59697 - RNA, 19 nt, Artificial Sequence
  Description of Artificial Sequence: Synthetic oligonucleotide
  Antisense strand to SEQ ID NO: 59616
uuucuuaccagucuuaagg

SEQ ID NO: 59698 - RNA, 19 nt, Artificial Sequence
  Description of Artificial Sequence: Synthetic oligonucleotide
  Sense strand starting at position 3148 of SEQ ID NO: 730
agugaugaguucuugguuc

SEQ ID NO: 59699 - RNA, 19 nt, Artificial Sequence
  Description of Artificial Sequence: Synthetic oligonucleotide
  Antisense strand to SEQ ID NO: 59618
gaaccaagaacucaucacu

SEQ ID NO: 59700 - RNA, 19 nt, Artificial Sequence
  Description of Artificial Sequence: Synthetic oligonucleotide
  Sense strand starting at position 3973 of SEQ ID NO: 732
ugcucugggcucugugaaa

SEQ ID NO: 59701 - RNA, 19 nt, Artificial Sequence
  Description of Artificial Sequence: Synthetic oligonucleotide
  Antisense strand to SEQ ID NO: 59620
uuucacagagcccagagca

SEQ ID NO: 59702 - RNA, 19 nt, Artificial Sequence
  Description of Artificial Sequence: Synthetic oligonucleotide
  Sense strand starting at position 3949 of SEQ ID NO: 732
aagauugacugaggacuca

SEQ ID NO: 59703 - RNA, 19 nt, Artificial Sequence
  Description of Artificial Sequence: Synthetic oligonucleotide
  Antisense strand to SEQ ID NO: 59622
ugaguccucagucaaucuu

SEQ ID NO: 59704 - RNA, 19 nt, Artificial Sequence
  Description of Artificial Sequence: Synthetic oligonucleotide
  Sense strand starting at position 3922 of SEQ ID NO: 732
ugcuguguucaaugagguu

SEQ ID NO: 59705 - RNA, 19 nt, Artificial Sequence
  Description of Artificial Sequence: Synthetic oligonucleotide
  Antisense strand to SEQ ID NO: 59624
aaccucauugaacacagca

SEQ ID NO: 59706 - RNA, 19 nt, Artificial Sequence
  Description of Artificial Sequence: Synthetic oligonucleotide
  Sense strand starting at position 3915 of SEQ ID NO: 732
ggagaagugcuguguucaa

SEQ ID NO: 59707 - RNA, 19 nt, Artificial Sequence
  Description of Artificial Sequence: Synthetic oligonucleotide
  Antisense strand to SEQ ID NO: 59626
uugaacacagcacuucucc

SEQ ID NO: 59708 - RNA, 19 nt, Artificial Sequence
  Description of Artificial Sequence: Synthetic oligonucleotide
  Sense strand starting at position 3879 of SEQ ID NO: 732
ucauaaagauguggccaaa

SEQ ID NO: 59709 - RNA, 19 nt, Artificial Sequence
  Description of Artificial Sequence: Synthetic oligonucleotide
  Antisense strand to SEQ ID NO: 59628
uuuggccacaucuuuauga

SEQ ID NO: 59710 - RNA, 19 nt, Artificial Sequence
  Description of Artificial Sequence: Synthetic oligonucleotide
  Sense strand starting at position 3809 of SEQ ID NO: 732
gggagaagcuguuaagccu

SEQ ID NO: 59711 - RNA, 19 nt, Artificial Sequence
  Description of Artificial Sequence: Synthetic oligonucleotide
  Antisense strand to SEQ ID NO: 59630
aggcuuaacagcuucuccc

SEQ ID NO: 59712 - RNA, 19 nt, Artificial Sequence
  Description of Artificial Sequence: Synthetic oligonucleotide
  Sense strand starting at position 3798 of SEQ ID NO: 732
cgauguggucugggagaag

SEQ ID NO: 59713 - RNA, 19 nt, Artificial Sequence
  Description of Artificial Sequence: Synthetic oligonucleotide
  Antisense strand to SEQ ID NO: 59632
cuucucccagaccacaucg

SEQ ID NO: 59714 - RNA, 19 nt, Artificial Sequence
  Description of Artificial Sequence: Synthetic oligonucleotide
  Sense strand starting at position 3797 of SEQ ID NO: 732
gcgauguggucugggagaa

SEQ ID NO: 59715 - RNA, 19 nt, Artificial Sequence
  Description of Artificial Sequence: Synthetic oligonucleotide
  Antisense strand to SEQ ID NO: 59634
uucucccagaccacaucgc

SEQ ID NO: 59716 - RNA, 19 nt, Artificial Sequence
  Description of Artificial Sequence: Synthetic oligonucleotide
  Sense strand starting at position 3796 of SEQ ID NO: 732
ugcgauguggucugggaga

SEQ ID NO: 59717 - RNA, 19 nt, Artificial Sequence
  Description of Artificial Sequence: Synthetic oligonucleotide
  Antisense strand to SEQ ID NO: 59636
ucucccagaccacaucgca

SEQ ID NO: 59718 - RNA, 19 nt, Artificial Sequence
  Description of Artificial Sequence: Synthetic oligonucleotide
  Sense strand starting at position 3566 of SEQ ID NO: 732
gggagcuguaauuggaucu

SEQ ID NO: 59719 - RNA, 19 nt, Artificial Sequence
  Description of Artificial Sequence: Synthetic oligonucleotide
  Antisense strand to SEQ ID NO: 59638
agauccaauuacagcuccc

SEQ ID NO: 59720 - RNA, 19 nt, Artificial Sequence
  Description of Artificial Sequence: Synthetic oligonucleotide
  Sense strand starting at position 3250 of SEQ ID NO: 732
augggcauugcuuggguua

SEQ ID NO: 59721 - RNA, 19 nt, Artificial Sequence
  Description of Artificial Sequence: Synthetic oligonucleotide
  Antisense strand to SEQ ID NO: 59640
uaacccaagcaaugcccau

SEQ ID NO: 59722 - RNA, 19 nt, Artificial Sequence
  Description of Artificial Sequence: Synthetic oligonucleotide
  Sense strand starting at position 1139 of SEQ ID NO: 732
ucuguaaauggaugccuua

SEQ ID NO: 59723 - RNA, 19 nt, Artificial Sequence
  Description of Artificial Sequence: Synthetic oligonucleotide
  Antisense strand to SEQ ID NO: 59642
uaaggcauccauuuacaga

SEQ ID NO: 59724 - RNA, 19 nt, Artificial Sequence
  Description of Artificial Sequence: Synthetic oligonucleotide
  Sense strand starting at position 1129 of SEQ ID NO: 732
uguuuccuucucuguaaau

SEQ ID NO: 59725 - RNA, 19 nt, Artificial Sequence
  Description of Artificial Sequence: Synthetic oligonucleotide
  Antisense strand to SEQ ID NO: 59644
auuuacagagaaggaaaca

SEQ ID NO: 59726 - RNA, 19 nt, Artificial Sequence
  Description of Artificial Sequence: Synthetic oligonucleotide
  Sense strand starting at position 1092 of SEQ ID NO: 732
ccauuuaucucgggagagc

SEQ ID NO: 59727 - RNA, 19 nt, Artificial Sequence
  Description of Artificial Sequence: Synthetic oligonucleotide
  Antisense strand to SEQ ID NO: 59646
gcucucccgagauaaaugg

SEQ ID NO: 59728 - RNA, 19 nt, Artificial Sequence
  Description of Artificial Sequence: Synthetic oligonucleotide
  Sense strand starting at position 1090 of SEQ ID NO: 732
ugccauuuaucucgggaga

SEQ ID NO: 59729 - RNA, 19 nt, Artificial Sequence
  Description of Artificial Sequence: Synthetic oligonucleotide
  Antisense strand to SEQ ID NO: 59648
ucucccgagauaaauggca

SEQ ID NO: 59730 - RNA, 19 nt, Artificial Sequence
  Description of Artificial Sequence: Synthetic oligonucleotide
  Sense strand starting at position 716 of SEQ ID NO: 732
gacuguguacuggaggcau

SEQ ID NO: 59731 - RNA, 19 nt, Artificial Sequence
  Description of Artificial Sequence: Synthetic oligonucleotide
  Antisense strand to SEQ ID NO: 59650
augccuccaguacacaguc

SEQ ID NO: 59732 - RNA, 19 nt, Artificial Sequence
  Description of Artificial Sequence: Synthetic oligonucleotide
  Sense strand starting at position 709 of SEQ ID NO: 732
gugucaugacuguguacug

SEQ ID NO: 59733 - RNA, 19 nt, Artificial Sequence
  Description of Artificial Sequence: Synthetic oligonucleotide
  Antisense strand to SEQ ID NO: 59652
caguacacagucaugacac

SEQ ID NO: 59734 - RNA, 19 nt, Artificial Sequence
  Description of Artificial Sequence: Synthetic oligonucleotide
  Sense strand starting at position 696 of SEQ ID NO: 732
auacauguuccugguguca

SEQ ID NO: 59735 - RNA, 19 nt, Artificial Sequence
  Description of Artificial Sequence: Synthetic oligonucleotide
  Antisense strand to SEQ ID NO: 59654
ugacaccaggaacauguau

SEQ ID NO: 59736 - RNA, 19 nt, Artificial Sequence
  Description of Artificial Sequence: Synthetic oligonucleotide
  Sense strand starting at position 641 of SEQ ID NO: 732
gagagaaguaaagguguua

SEQ ID NO: 59737 - RNA, 19 nt, Artificial Sequence
  Description of Artificial Sequence: Synthetic oligonucleotide
  Antisense strand to SEQ ID NO: 59656
uaacaccuuuacuucucuc

SEQ ID NO: 59738 - RNA, 19 nt, Artificial Sequence
  Description of Artificial Sequence: Synthetic oligonucleotide
  Sense strand starting at position 633 of SEQ ID NO: 732
guuacugugagagaaguaa

SEQ ID NO: 59739 - RNA, 19 nt, Artificial Sequence
  Description of Artificial Sequence: Synthetic oligonucleotide
  Antisense strand to SEQ ID NO: 59658
uuacuucucucacaguaac

SEQ ID NO: 59740 - RNA, 19 nt, Artificial Sequence
  Description of Artificial Sequence: Synthetic oligonucleotide
  Sense strand starting at position 631 of SEQ ID NO: 732
ggguuacugugagagaagu

SEQ ID NO: 59741 - RNA, 19 nt, Artificial Sequence
  Description of Artificial Sequence: Synthetic oligonucleotide
  Antisense strand to SEQ ID NO: 59660
acuucucucacaguaaccc

SEQ ID NO: 59742 - RNA, 19 nt, Artificial Sequence
  Description of Artificial Sequence: Synthetic oligonucleotide
  Sense strand starting at position 629 of SEQ ID NO: 732
uuggguuacugugagagaa

SEQ ID NO: 59743 - RNA, 19 nt, Artificial Sequence
  Description of Artificial Sequence: Synthetic oligonucleotide
  Antisense strand to SEQ ID NO: 59662
uucucucacaguaacccaa

SEQ ID NO: 59744 - RNA, 19 nt, Artificial Sequence
  Description of Artificial Sequence: Synthetic oligonucleotide
  Sense strand starting at position 600 of SEQ ID NO: 732
aaaugugugcacuaacagu

SEQ ID NO: 59745 - RNA, 19 nt, Artificial Sequence
  Description of Artificial Sequence: Synthetic oligonucleotide
  Antisense strand to SEQ ID NO: 59664
acuguuagugcacacauuu

SEQ ID NO: 59746 - RNA, 19 nt, Artificial Sequence
  Description of Artificial Sequence: Synthetic oligonucleotide
  Sense strand starting at position 546 of SEQ ID NO: 732
agaguauaguaagaauaag

SEQ ID NO: 59747 - RNA, 19 nt, Artificial Sequence
  Description of Artificial Sequence: Synthetic oligonucleotide
  Antisense strand to SEQ ID NO: 59666
cuuauucuuacuauacucu

SEQ ID NO: 59748 - RNA, 19 nt, Artificial Sequence
  Description of Artificial Sequence: Synthetic oligonucleotide
  Sense strand starting at position 68 of SEQ ID NO: 732
gggaaauaaucuuaagagc

SEQ ID NO: 59749 - RNA, 19 nt, Artificial Sequence
  Description of Artificial Sequence: Synthetic oligonucleotide
  Antisense strand to SEQ ID NO: 59668
gcucuuaagauuauuuccc

SEQ ID NO: 59750 - RNA, 19 nt, Artificial Sequence
  Description of Artificial Sequence: Synthetic oligonucleotide
  Sense strand starting at position 8 of SEQ ID NO: 732
gugucuugagcagaauuag

SEQ ID NO: 59751 - RNA, 19 nt, Artificial Sequence
  Description of Artificial Sequence: Synthetic oligonucleotide
  Antisense strand to SEQ ID NO: 59670
cuaauucugcucaagacac

SEQ ID NO: 59752 - RNA, 19 nt, Artificial Sequence
  Description of Artificial Sequence: Synthetic oligonucleotide
  Sense strand starting at position 6 of SEQ ID NO: 732
uugugucuugagcagaauu

SEQ ID NO: 59753 - RNA, 19 nt, Artificial Sequence
  Description of Artificial Sequence: Synthetic oligonucleotide
  Antisense strand to SEQ ID NO: 59672
aauucugcucaagacacaa

SEQ ID NO: 59754 - RNA, 19 nt, Artificial Sequence
  Description of Artificial Sequence: Synthetic oligonucleotide
  Sense strand starting at position 2 of SEQ ID NO: 732
ggccuugugucuugagcag

SEQ ID NO: 59755 - RNA, 19 nt, Artificial Sequence
  Description of Artificial Sequence: Synthetic oligonucleotide
  Antisense strand to SEQ ID NO: 59674
cugcucaagacacaaggcc

SEQ ID NO: 59756 - RNA, 19 nt, Artificial Sequence
  Description of Artificial Sequence: Synthetic oligonucleotide
  Sense strand starting at position 3929 of SEQ ID NO: 731
uuuguauggccuggcacaa

SEQ ID NO: 59757 - RNA, 19 nt, Artificial Sequence
  Description of Artificial Sequence: Synthetic oligonucleotide
  Antisense strand to SEQ ID NO: 59676
uugugccaggccauacaaa

SEQ ID NO: 59758 - RNA, 19 nt, Artificial Sequence
  Description of Artificial Sequence: Synthetic oligonucleotide
  Sense strand starting at position 3928 of SEQ ID NO: 731
guuuguauggccuggcaca

SEQ ID NO: 59759 - RNA, 19 nt, Artificial Sequence
  Description of Artificial Sequence: Synthetic oligonucleotide
  Antisense strand to SEQ ID NO: 59678
ugugccaggccauacaaac

SEQ ID NO: 59760 - RNA, 19 nt, Artificial Sequence
  Description of Artificial Sequence: Synthetic oligonucleotide
  Sense strand starting at position 3917 of SEQ ID NO: 731
acgucuguccuguuuguau

SEQ ID NO: 59761 - RNA, 19 nt, Artificial Sequence
  Description of Artificial Sequence: Synthetic oligonucleotide
  Antisense strand to SEQ ID NO: 59680
auacaaacaggacagacgu

SEQ ID NO: 59762 - RNA, 19 nt, Artificial Sequence
  Description of Artificial Sequence: Synthetic oligonucleotide
  Sense strand starting at position 3916 of SEQ ID NO: 731
gacgucuguccuguuugua

SEQ ID NO: 59763 - RNA, 19 nt, Artificial Sequence
  Description of Artificial Sequence: Synthetic oligonucleotide
  Antisense strand to SEQ ID NO: 59682
uacaaacaggacagacguc

SEQ ID NO: 59764 - RNA, 19 nt, Artificial Sequence
  Description of Artificial Sequence: Synthetic oligonucleotide
  Sense strand starting at position 3702 of SEQ ID NO: 731
gcuguagucuuccugauca

SEQ ID NO: 59765 - RNA, 19 nt, Artificial Sequence
  Description of Artificial Sequence: Synthetic oligonucleotide
  Antisense strand to SEQ ID NO: 59684
ugaucaggaagacuacagc

SEQ ID NO: 59766 - RNA, 19 nt, Artificial Sequence
  Description of Artificial Sequence: Synthetic oligonucleotide
  Sense strand starting at position 3694 of SEQ ID NO: 731
gucugagagcuguagucuu

SEQ ID NO: 59767 - RNA, 19 nt, Artificial Sequence
  Description of Artificial Sequence: Synthetic oligonucleotide
  Antisense strand to SEQ ID NO: 59686
aagacuacagcucucagac

SEQ ID NO: 59768 - RNA, 19 nt, Artificial Sequence
  Description of Artificial Sequence: Synthetic oligonucleotide
  Sense strand starting at position 3550 of SEQ ID NO: 731
gcugcauaugaggagguua

SEQ ID NO: 59769 - RNA, 19 nt, Artificial Sequence
  Description of Artificial Sequence: Synthetic oligonucleotide
  Antisense strand to SEQ ID NO: 59688
uaaccuccucauaugcagc

SEQ ID NO: 59770 - RNA, 19 nt, Artificial Sequence
  Description of Artificial Sequence: Synthetic oligonucleotide
  Sense strand starting at position 3491 of SEQ ID NO: 731
ugcucugggcucugugaaa

SEQ ID NO: 59771 - RNA, 19 nt, Artificial Sequence
  Description of Artificial Sequence: Synthetic oligonucleotide
  Antisense strand to SEQ ID NO: 59690
uuucacagagcccagagca

SEQ ID NO: 59772 - RNA, 19 nt, Artificial Sequence
  Description of Artificial Sequence: Synthetic oligonucleotide
  Sense strand starting at position 3467 of SEQ ID NO: 731
aagauugacugaggacuca

SEQ ID NO: 59773 - RNA, 19 nt, Artificial Sequence
  Description of Artificial Sequence: Synthetic oligonucleotide
  Antisense strand to SEQ ID NO: 59692
ugaguccucagucaaucuu

SEQ ID NO: 59774 - RNA, 19 nt, Artificial Sequence
  Description of Artificial Sequence: Synthetic oligonucleotide
  Sense strand starting at position 3440 of SEQ ID NO: 731
ugcuguguucaaugagguu

SEQ ID NO: 59775 - RNA, 19 nt, Artificial Sequence
  Description of Artificial Sequence: Synthetic oligonucleotide
  Antisense strand to SEQ ID NO: 59694
aaccucauugaacacagca

SEQ ID NO: 59776 - RNA, 19 nt, Artificial Sequence
  Description of Artificial Sequence: Synthetic oligonucleotide
  Sense strand starting at position 3433 of SEQ ID NO: 731
ggagaagugcuguguucaa

SEQ ID NO: 59777 - RNA, 19 nt, Artificial Sequence
  Description of Artificial Sequence: Synthetic oligonucleotide
  Antisense strand to SEQ ID NO: 59696
uugaacacagcacuucucc

SEQ ID NO: 59778 - RNA, 19 nt, Artificial Sequence
  Description of Artificial Sequence: Synthetic oligonucleotide
  Sense strand starting at position 3397 of SEQ ID NO: 731
ucauaaagauguggccaaa

SEQ ID NO: 59779 - RNA, 19 nt, Artificial Sequence
  Description of Artificial Sequence: Synthetic oligonucleotide
  Antisense strand to SEQ ID NO: 59698
uuuggccacaucuuuauga

SEQ ID NO: 59780 - RNA, 19 nt, Artificial Sequence
  Description of Artificial Sequence: Synthetic oligonucleotide
  Sense strand starting at position 3327 of SEQ ID NO: 731
gggagaagcuguuaagccu

SEQ ID NO: 59781 - RNA, 19 nt, Artificial Sequence
  Description of Artificial Sequence: Synthetic oligonucleotide
  Antisense strand to SEQ ID NO: 59700
aggcuuaacagcuucuccc

SEQ ID NO: 59782 - RNA, 19 nt, Artificial Sequence
  Description of Artificial Sequence: Synthetic oligonucleotide
  Sense strand starting at position 3316 of SEQ ID NO: 731
cgauguggucugggagaag

SEQ ID NO: 59783 - RNA, 19 nt, Artificial Sequence
  Description of Artificial Sequence: Synthetic oligonucleotide
  Antisense strand to SEQ ID NO: 59702
cuucucccagaccacaucg

SEQ ID NO: 59784 - RNA, 19 nt, Artificial Sequence
  Description of Artificial Sequence: Synthetic oligonucleotide
  Sense strand starting at position 3315 of SEQ ID NO: 731
gcgauguggucugggagaa

SEQ ID NO: 59785 - RNA, 19 nt, Artificial Sequence
  Description of Artificial Sequence: Synthetic oligonucleotide
  Antisense strand to SEQ ID NO: 59704
uucucccagaccacaucgc

SEQ ID NO: 59786 - RNA, 19 nt, Artificial Sequence
  Description of Artificial Sequence: Synthetic oligonucleotide
  Sense strand starting at position 3314 of SEQ ID NO: 731
ugcgauguggucugggaga

SEQ ID NO: 59787 - RNA, 19 nt, Artificial Sequence
  Description of Artificial Sequence: Synthetic oligonucleotide
  Antisense strand to SEQ ID NO: 59706
ucucccagaccacaucgca

SEQ ID NO: 59788 - RNA, 19 nt, Artificial Sequence
  Description of Artificial Sequence: Synthetic oligonucleotide
  Sense strand starting at position 3084 of SEQ ID NO: 731
gggagcuguaauuggaucu

SEQ ID NO: 59789 - RNA, 19 nt, Artificial Sequence
  Description of Artificial Sequence: Synthetic oligonucleotide
  Antisense strand to SEQ ID NO: 59708
agauccaauuacagcuccc

SEQ ID NO: 59790 - RNA, 19 nt, Artificial Sequence
  Description of Artificial Sequence: Synthetic oligonucleotide
  Sense strand starting at position 2768 of SEQ ID NO: 731
augggcauugcuuggguua

SEQ ID NO: 59791 - RNA, 19 nt, Artificial Sequence
  Description of Artificial Sequence: Synthetic oligonucleotide
  Antisense strand to SEQ ID NO: 59710
uaacccaagcaaugcccau

SEQ ID NO: 59792 - RNA, 19 nt, Artificial Sequence
  Description of Artificial Sequence: Synthetic oligonucleotide
  Sense strand starting at position 657 of SEQ ID NO: 731
ucuguaaauggaugccuua

SEQ ID NO: 59793 - RNA, 19 nt, Artificial Sequence
  Description of Artificial Sequence: Synthetic oligonucleotide
  Antisense strand to SEQ ID NO: 59712
uaaggcauccauuuacaga

SEQ ID NO: 59794 - RNA, 19 nt, Artificial Sequence
  Description of Artificial Sequence: Synthetic oligonucleotide
  Sense strand starting at position 647 of SEQ ID NO: 731
uguuuccuucucuguaaau

SEQ ID NO: 59795 - RNA, 19 nt, Artificial Sequence
  Description of Artificial Sequence: Synthetic oligonucleotide
  Antisense strand to SEQ ID NO: 59714
auuuacagagaaggaaaca

SEQ ID NO: 59796 - RNA, 19 nt, Artificial Sequence
  Description of Artificial Sequence: Synthetic oligonucleotide
  Sense strand starting at position 610 of SEQ ID NO: 731
ccauuuaucucgggagagc

SEQ ID NO: 59797 - RNA, 19 nt, Artificial Sequence
  Description of Artificial Sequence: Synthetic oligonucleotide
  Antisense strand to SEQ ID NO: 59716
gcucucccgagauaaaugg

SEQ ID NO: 59798 - RNA, 19 nt, Artificial Sequence
  Description of Artificial Sequence: Synthetic oligonucleotide
  Sense strand starting at position 608 of SEQ ID NO: 731
ugccauuuaucucgggaga

SEQ ID NO: 59799 - RNA, 19 nt, Artificial Sequence
  Description of Artificial Sequence: Synthetic oligonucleotide
  Antisense strand to SEQ ID NO: 59718
ucucccgagauaaauggca

SEQ ID NO: 59800 - RNA, 19 nt, Artificial Sequence
  Description of Artificial Sequence: Synthetic oligonucleotide
  Sense strand starting at position 234 of SEQ ID NO: 731
gacuguguacuggaggcau

SEQ ID NO: 59801 - RNA, 19 nt, Artificial Sequence
  Description of Artificial Sequence: Synthetic oligonucleotide
  Antisense strand to SEQ ID NO: 59720
augccuccaguacacaguc

SEQ ID NO: 59802 - RNA, 19 nt, Artificial Sequence
  Description of Artificial Sequence: Synthetic oligonucleotide
  Sense strand starting at position 227 of SEQ ID NO: 731
gugucaugacuguguacug

SEQ ID NO: 59803 - RNA, 19 nt, Artificial Sequence
  Description of Artificial Sequence: Synthetic oligonucleotide
  Antisense strand to SEQ ID NO: 59722
caguacacagucaugacac

SEQ ID NO: 59804 - RNA, 19 nt, Artificial Sequence
  Description of Artificial Sequence: Synthetic oligonucleotide
  Sense strand starting at position 214 of SEQ ID NO: 731
auacauguuccugguguca

SEQ ID NO: 59805 - RNA, 19 nt, Artificial Sequence
  Description of Artificial Sequence: Synthetic oligonucleotide
  Antisense strand to SEQ ID NO: 59724
ugacaccaggaacauguau

SEQ ID NO: 59806 - RNA, 19 nt, Artificial Sequence
  Description of Artificial Sequence: Synthetic oligonucleotide
  Sense strand starting at position 159 of SEQ ID NO: 731
gagagaaguaaagguguua

SEQ ID NO: 59807 - RNA, 19 nt, Artificial Sequence
  Description of Artificial Sequence: Synthetic oligonucleotide
  Antisense strand to SEQ ID NO: 59726
uaacaccuuuacuucucuc

SEQ ID NO: 59808 - RNA, 19 nt, Artificial Sequence
  Description of Artificial Sequence: Synthetic oligonucleotide
  Sense strand starting at position 151 of SEQ ID NO: 731
guuacugugagagaaguaa

SEQ ID NO: 59809 - RNA, 19 nt, Artificial Sequence
  Description of Artificial Sequence: Synthetic oligonucleotide
  Antisense strand to SEQ ID NO: 59728
uuacuucucucacaguaac

SEQ ID NO: 59810 - RNA, 19 nt, Artificial Sequence
  Description of Artificial Sequence: Synthetic oligonucleotide
  Sense strand starting at position 149 of SEQ ID NO: 731
ggguuacugugagagaagu

SEQ ID NO: 59811 - RNA, 19 nt, Artificial Sequence
  Description of Artificial Sequence: Synthetic oligonucleotide
  Antisense strand to SEQ ID NO: 59730
acuucucucacaguaaccc

SEQ ID NO: 59812 - RNA, 19 nt, Artificial Sequence
  Description of Artificial Sequence: Synthetic oligonucleotide
  Sense strand starting at position 147 of SEQ ID NO: 731
uuggguuacugugagagaa

SEQ ID NO: 59813 - RNA, 19 nt, Artificial Sequence
  Description of Artificial Sequence: Synthetic oligonucleotide
  Antisense strand to SEQ ID NO: 59732
uucucucacaguaacccaa

SEQ ID NO: 59814 - RNA, 19 nt, Artificial Sequence
  Description of Artificial Sequence: Synthetic oligonucleotide
  Sense strand starting at position 118 of SEQ ID NO: 731
aaaugugugcacuaacagu

SEQ ID NO: 59815 - RNA, 19 nt, Artificial Sequence
  Description of Artificial Sequence: Synthetic oligonucleotide
  Antisense strand to SEQ ID NO: 59734
acuguuagugcacacauuu

SEQ ID NO: 59816 - RNA, 19 nt, Artificial Sequence
  Description of Artificial Sequence: Synthetic oligonucleotide
  Sense strand starting at position 64 of SEQ ID NO: 731
agaguauaguaagaauaag

SEQ ID NO: 59817 - RNA, 19 nt, Artificial Sequence
  Description of Artificial Sequence: Synthetic oligonucleotide
  Antisense strand to SEQ ID NO: 59736
cuuauucuuacuauacucu

SEQ ID NO: 59818 - RNA, 19 nt, Artificial Sequence
  Description of Artificial Sequence: Synthetic oligonucleotide
  Sense strand starting at position 2705 of SEQ ID NO: 733
cuuauugagcacuggauua

SEQ ID NO: 59819 - RNA, 19 nt, Artificial Sequence
  Description of Artificial Sequence: Synthetic oligonucleotide
  Antisense strand to SEQ ID NO: 59738
uaauccagugcucaauaag

SEQ ID NO: 59820 - RNA, 19 nt, Artificial Sequence
  Description of Artificial Sequence: Synthetic oligonucleotide
  Sense strand starting at position 2702 of SEQ ID NO: 733
guacuuauugagcacugga

SEQ ID NO: 59821 - RNA, 19 nt, Artificial Sequence
  Description of Artificial Sequence: Synthetic oligonucleotide
  Antisense strand to SEQ ID NO: 59740
uccagugcucaauaaguac

SEQ ID NO: 59822 - RNA, 19 nt, Artificial Sequence
  Description of Artificial Sequence: Synthetic oligonucleotide
  Sense strand starting at position 2699 of SEQ ID NO: 733
ggaguacuuauugagcacu

SEQ ID NO: 59823 - RNA, 19 nt, Artificial Sequence
  Description of Artificial Sequence: Synthetic oligonucleotide
  Antisense strand to SEQ ID NO: 59742
agugcucaauaaguacucc

SEQ ID NO: 59824 - RNA, 19 nt, Artificial Sequence
  Description of Artificial Sequence: Synthetic oligonucleotide
  Sense strand starting at position 2688 of SEQ ID NO: 733
gcuaaaugugaggaguacu

SEQ ID NO: 59825 - RNA, 19 nt, Artificial Sequence
  Description of Artificial Sequence: Synthetic oligonucleotide
  Antisense strand to SEQ ID NO: 59744
aguacuccucacauuuagc

SEQ ID NO: 59826 - RNA, 19 nt, Artificial Sequence
  Description of Artificial Sequence: Synthetic oligonucleotide
  Sense strand starting at position 2669 of SEQ ID NO: 733
cucacccuugacugagaua

SEQ ID NO: 59827 - RNA, 19 nt, Artificial Sequence
  Description of Artificial Sequence: Synthetic oligonucleotide
  Antisense strand to SEQ ID NO: 59746
uaucucagucaagggugag

SEQ ID NO: 59828 - RNA, 19 nt, Artificial Sequence
  Description of Artificial Sequence: Synthetic oligonucleotide
  Sense strand starting at position 2650 of SEQ ID NO: 733
ggccaaagcccuuaucuag

SEQ ID NO: 59829 - RNA, 19 nt, Artificial Sequence
  Description of Artificial Sequence: Synthetic oligonucleotide
  Antisense strand to SEQ ID NO: 59748
cuagauaagggcuuuggcc

SEQ ID NO: 59830 - RNA, 19 nt, Artificial Sequence
  Description of Artificial Sequence: Synthetic oligonucleotide
  Sense strand starting at position 2583 of SEQ ID NO: 733
acauguucuccguggaagg

SEQ ID NO: 59831 - RNA, 19 nt, Artificial Sequence
  Description of Artificial Sequence: Synthetic oligonucleotide
  Antisense strand to SEQ ID NO: 59750
ccuuccacggagaacaugu

SEQ ID NO: 59832 - RNA, 19 nt, Artificial Sequence
  Description of Artificial Sequence: Synthetic oligonucleotide
  Sense strand starting at position 2581 of SEQ ID NO: 733
cuacauguucuccguggaa

SEQ ID NO: 59833 - RNA, 19 nt, Artificial Sequence
  Description of Artificial Sequence: Synthetic oligonucleotide
  Antisense strand to SEQ ID NO: 59752
uuccacggagaacauguag

SEQ ID NO: 59834 - RNA, 19 nt, Artificial Sequence
  Description of Artificial Sequence: Synthetic oligonucleotide
  Sense strand starting at position 2580 of SEQ ID NO: 733
gcuacauguucuccgugga

SEQ ID NO: 59835 - RNA, 19 nt, Artificial Sequence
  Description of Artificial Sequence: Synthetic oligonucleotide
  Antisense strand to SEQ ID NO: 59754
uccacggagaacauguagc

SEQ ID NO: 59836 - RNA, 19 nt, Artificial Sequence
  Description of Artificial Sequence: Synthetic oligonucleotide
  Sense strand starting at position 2285 of SEQ ID NO: 733
guggcacaggucuauaauc

SEQ ID NO: 59837 - RNA, 19 nt, Artificial Sequence
  Description of Artificial Sequence: Synthetic oligonucleotide
  Antisense strand to SEQ ID NO: 59756
gauuauagaccugugccac

SEQ ID NO: 59838 - RNA, 19 nt, Artificial Sequence
  Description of Artificial Sequence: Synthetic oligonucleotide
  Sense strand starting at position 1989 of SEQ ID NO: 733
cgcacuaguuccuuccuua

SEQ ID NO: 59839 - RNA, 19 nt, Artificial Sequence
  Description of Artificial Sequence: Synthetic oligonucleotide
  Antisense strand to SEQ ID NO: 59758
uaaggaaggaacuagugcg

SEQ ID NO: 59840 - RNA, 19 nt, Artificial Sequence
  Description of Artificial Sequence: Synthetic oligonucleotide
  Sense strand starting at position 1436 of SEQ ID NO: 733
ccuugacaguucuccgaac

SEQ ID NO: 59841 - RNA, 19 nt, Artificial Sequence
  Description of Artificial Sequence: Synthetic oligonucleotide
  Antisense strand to SEQ ID NO: 59760
guucggagaacugucaagg

SEQ ID NO: 59842 - RNA, 19 nt, Artificial Sequence
  Description of Artificial Sequence: Synthetic oligonucleotide
  Sense strand starting at position 1357 of SEQ ID NO: 733
accgguuucucggaaacag

SEQ ID NO: 59843 - RNA, 19 nt, Artificial Sequence
  Description of Artificial Sequence: Synthetic oligonucleotide
  Antisense strand to SEQ ID NO: 59762
cuguuuccgagaaaccggu

SEQ ID NO: 59844 - RNA, 19 nt, Artificial Sequence
  Description of Artificial Sequence: Synthetic oligonucleotide
  Sense strand starting at position 184 of SEQ ID NO: 733
cuuguagucuaggcaacau

SEQ ID NO: 59845 - RNA, 19 nt, Artificial Sequence
  Description of Artificial Sequence: Synthetic oligonucleotide
  Antisense strand to SEQ ID NO: 59764
auguugccuagacuacaag

SEQ ID NO: 59846 - RNA, 19 nt, Artificial Sequence
  Description of Artificial Sequence: Synthetic oligonucleotide
  Sense strand starting at position 183 of SEQ ID NO: 733
gcuuguagucuaggcaaca

SEQ ID NO: 59847 - RNA, 19 nt, Artificial Sequence
  Description of Artificial Sequence: Synthetic oligonucleotide
  Antisense strand to SEQ ID NO: 59766
uguugccuagacuacaagc

SEQ ID NO: 59848 - RNA, 19 nt, Artificial Sequence
  Description of Artificial Sequence: Synthetic oligonucleotide
  Sense strand starting at position 181 of SEQ ID NO: 733
augcuuguagucuaggcaa

SEQ ID NO: 59849 - RNA, 19 nt, Artificial Sequence
  Description of Artificial Sequence: Synthetic oligonucleotide
  Antisense strand to SEQ ID NO: 59768
uugccuagacuacaagcau

SEQ ID NO: 59850 - RNA, 19 nt, Artificial Sequence
  Description of Artificial Sequence: Synthetic oligonucleotide
  Sense strand starting at position 117 of SEQ ID NO: 733
ucuucuaaguucugagaag

SEQ ID NO: 59851 - RNA, 19 nt, Artificial Sequence
  Description of Artificial Sequence: Synthetic oligonucleotide
  Antisense strand to SEQ ID NO: 59770
cuucucagaacuuagaaga

SEQ ID NO: 59852 - RNA, 19 nt, Artificial Sequence
  Description of Artificial Sequence: Synthetic oligonucleotide
  Sense strand starting at position 110 of SEQ ID NO: 733
ggccaagucuucuaaguuc

SEQ ID NO: 59853 - RNA, 19 nt, Artificial Sequence
  Description of Artificial Sequence: Synthetic oligonucleotide
  Antisense strand to SEQ ID NO: 59772
gaacuuagaagacuuggcc

SEQ ID NO: 59854 - RNA, 19 nt, Artificial Sequence
  Description of Artificial Sequence: Synthetic oligonucleotide
  Sense strand starting at position 108 of SEQ ID NO: 733
guggccaagucuucuaagu

SEQ ID NO: 59855 - RNA, 19 nt, Artificial Sequence
  Description of Artificial Sequence: Synthetic oligonucleotide
  Antisense strand to SEQ ID NO: 59774
acuuagaagacuuggccac

SEQ ID NO: 59856 - RNA, 19 nt, Artificial Sequence
  Description of Artificial Sequence: Synthetic oligonucleotide
  Sense strand starting at position 207 of SEQ ID NO: 734
caacuagacuuggcaaguu

SEQ ID NO: 59857 - RNA, 19 nt, Artificial Sequence
  Description of Artificial Sequence: Synthetic oligonucleotide
  Antisense strand to SEQ ID NO: 59776
aacuugccaagucuaguug

SEQ ID NO: 59858 - RNA, 19 nt, Artificial Sequence
  Description of Artificial Sequence: Synthetic oligonucleotide
  Sense strand starting at position 450 of SEQ ID NO: 734
guguuuguuccugcaccua

SEQ ID NO: 59859 - RNA, 19 nt, Artificial Sequence
  Description of Artificial Sequence: Synthetic oligonucleotide
  Antisense strand to SEQ ID NO: 59778
uaggugcaggaacaaacac

SEQ ID NO: 59860 - RNA, 19 nt, Artificial Sequence
  Description of Artificial Sequence: Synthetic oligonucleotide
  Sense strand starting at position 698 of SEQ ID NO: 734
aaauguuuccagggaguua

SEQ ID NO: 59861 - RNA, 19 nt, Artificial Sequence
  Description of Artificial Sequence: Synthetic oligonucleotide
  Antisense strand to SEQ ID NO: 59780
uaacucccuggaaacauuu

SEQ ID NO: 59862 - RNA, 19 nt, Artificial Sequence
  Description of Artificial Sequence: Synthetic oligonucleotide
  Sense strand starting at position 752 of SEQ ID NO: 734
acggaaugucuccaaguca

SEQ ID NO: 59863 - RNA, 19 nt, Artificial Sequence
  Description of Artificial Sequence: Synthetic oligonucleotide
  Antisense strand to SEQ ID NO: 59782
ugacuuggagacauuccgu

SEQ ID NO: 59864 - RNA, 19 nt, Artificial Sequence
  Description of Artificial Sequence: Synthetic oligonucleotide
  Sense strand starting at position 796 of SEQ ID NO: 734
auccuuucuccaggagaca

SEQ ID NO: 59865 - RNA, 19 nt, Artificial Sequence
  Description of Artificial Sequence: Synthetic oligonucleotide
  Antisense strand to SEQ ID NO: 59784
ugucuccuggagaaaggau

SEQ ID NO: 59866 - RNA, 19 nt, Artificial Sequence
  Description of Artificial Sequence: Synthetic oligonucleotide
  Sense strand starting at position 1052 of SEQ ID NO: 734
gggaaggagucaguguagu

SEQ ID NO: 59867 - RNA, 19 nt, Artificial Sequence
  Description of Artificial Sequence: Synthetic oligonucleotide
  Antisense strand to SEQ ID NO: 59786
acuacacugacuccuuccc

SEQ ID NO: 59868 - RNA, 19 nt, Artificial Sequence
  Description of Artificial Sequence: Synthetic oligonucleotide
  Sense strand starting at position 1060 of SEQ ID NO: 734
gucaguguaguauagagga

SEQ ID NO: 59869 - RNA, 19 nt, Artificial Sequence
  Description of Artificial Sequence: Synthetic oligonucleotide
  Antisense strand to SEQ ID NO: 59788
uccucuauacuacacugac

SEQ ID NO: 59870 - RNA, 19 nt, Artificial Sequence
  Description of Artificial Sequence: Synthetic oligonucleotide
  Sense strand starting at position 1264 of SEQ ID NO: 734
ggugggugugagcagaaua

SEQ ID NO: 59871 - RNA, 19 nt, Artificial Sequence
  Description of Artificial Sequence: Synthetic oligonucleotide
  Antisense strand to SEQ ID NO: 59790
uauucugcucacacccacc

SEQ ID NO: 59872 - RNA, 19 nt, Artificial Sequence
  Description of Artificial Sequence: Synthetic oligonucleotide
  Sense strand starting at position 1303 of SEQ ID NO: 734
cccuauguucuggacucua

SEQ ID NO: 59873 - RNA, 19 nt, Artificial Sequence
  Description of Artificial Sequence: Synthetic oligonucleotide
  Antisense strand to SEQ ID NO: 59792
uagaguccagaacauaggg

SEQ ID NO: 59874 - RNA, 19 nt, Artificial Sequence
  Description of Artificial Sequence: Synthetic oligonucleotide
  Sense strand starting at position 1513 of SEQ ID NO: 734
acaagauccagguggacuu

SEQ ID NO: 59875 - RNA, 19 nt, Artificial Sequence
  Description of Artificial Sequence: Synthetic oligonucleotide
  Antisense strand to SEQ ID NO: 59794
aaguccaccuggaucuugu

SEQ ID NO: 59876 - RNA, 19 nt, Artificial Sequence
  Description of Artificial Sequence: Synthetic oligonucleotide
  Sense strand starting at position 1550 of SEQ ID NO: 734
gcagguguuuggacgacuu

SEQ ID NO: 59877 - RNA, 19 nt, Artificial Sequence
  Description of Artificial Sequence: Synthetic oligonucleotide
  Antisense strand to SEQ ID NO: 59796
aagucguccaaacaccugc

SEQ ID NO: 59878 - RNA, 19 nt, Artificial Sequence
  Description of Artificial Sequence: Synthetic oligonucleotide
  Sense strand starting at position 1579 of SEQ ID NO: 734
uccuuuaaaccuggagacu

SEQ ID NO: 59879 - RNA, 19 nt, Artificial Sequence
  Description of Artificial Sequence: Synthetic oligonucleotide
  Antisense strand to SEQ ID NO: 59798
agucuccagguuuaaagga

SEQ ID NO: 59880 - RNA, 19 nt, Artificial Sequence
  Description of Artificial Sequence: Synthetic oligonucleotide
  Sense strand starting at position 1596 of SEQ ID NO: 734
cugagaagucaagguggua

SEQ ID NO: 59881 - RNA, 19 nt, Artificial Sequence
  Description of Artificial Sequence: Synthetic oligonucleotide
  Antisense strand to SEQ ID NO: 59800
uaccaccuugacuucucag

SEQ ID NO: 59882 - RNA, 19 nt, Artificial Sequence
  Description of Artificial Sequence: Synthetic oligonucleotide
  Sense strand starting at position 1749 of SEQ ID NO: 734
ugucacuuauuccugaaga

SEQ ID NO: 59883 - RNA, 19 nt, Artificial Sequence
  Description of Artificial Sequence: Synthetic oligonucleotide
  Antisense strand to SEQ ID NO: 59802
ucuucaggaauaagugaca

SEQ ID NO: 59884 - RNA, 19 nt, Artificial Sequence
  Description of Artificial Sequence: Synthetic oligonucleotide
  Sense strand starting at position 1890 of SEQ ID NO: 734
aggcaucucccggacaagu

SEQ ID NO: 59885 - RNA, 19 nt, Artificial Sequence
  Description of Artificial Sequence: Synthetic oligonucleotide
  Antisense strand to SEQ ID NO: 59804
acuuguccgggagaugccu

SEQ ID NO: 59886 - RNA, 19 nt, Artificial Sequence
  Description of Artificial Sequence: Synthetic oligonucleotide
  Sense strand starting at position 2027 of SEQ ID NO: 734
gaagaacuuugggcagcuu

SEQ ID NO: 59887 - RNA, 19 nt, Artificial Sequence
  Description of Artificial Sequence: Synthetic oligonucleotide
  Antisense strand to SEQ ID NO: 59806
aagcugcccaaaguucuuc

SEQ ID NO: 59888 - RNA, 19 nt, Artificial Sequence
  Description of Artificial Sequence: Synthetic oligonucleotide
  Sense strand starting at position 2068 of SEQ ID NO: 734
augaucuggugguuacuaa

SEQ ID NO: 59889 - RNA, 19 nt, Artificial Sequence
  Description of Artificial Sequence: Synthetic oligonucleotide
  Antisense strand to SEQ ID NO: 59808
uuaguaaccaccagaucau

SEQ ID NO: 59890 - RNA, 19 nt, Artificial Sequence
  Description of Artificial Sequence: Synthetic oligonucleotide
  Sense strand starting at position 2069 of SEQ ID NO: 734
ugaucuggugguuacuaau

SEQ ID NO: 59891 - RNA, 19 nt, Artificial Sequence
  Description of Artificial Sequence: Synthetic oligonucleotide
  Antisense strand to SEQ ID NO: 59810
auuaguaaccaccagauca

SEQ ID NO: 59892 - RNA, 19 nt, Artificial Sequence
  Description of Artificial Sequence: Synthetic oligonucleotide
  Sense strand starting at position 2149 of SEQ ID NO: 734
agaaguguggcuuacccaa

SEQ ID NO: 59893 - RNA, 19 nt, Artificial Sequence
  Description of Artificial Sequence: Synthetic oligonucleotide
  Antisense strand to SEQ ID NO: 59812
uuggguaagccacacuucu

SEQ ID NO: 59894 - RNA, 19 nt, Artificial Sequence
  Description of Artificial Sequence: Synthetic oligonucleotide
  Sense strand starting at position 2420 of SEQ ID NO: 734
gggcaacucuuccuuaaga

SEQ ID NO: 59895 - RNA, 19 nt, Artificial Sequence
  Description of Artificial Sequence: Synthetic oligonucleotide
  Antisense strand to SEQ ID NO: 59814
ucuuaaggaagaguugccc

SEQ ID NO: 59896 - RNA, 19 nt, Artificial Sequence
  Description of Artificial Sequence: Synthetic oligonucleotide
  Sense strand starting at position 2421 of SEQ ID NO: 734
ggcaacucuuccuuaagaa

SEQ ID NO: 59897 - RNA, 19 nt, Artificial Sequence
  Description of Artificial Sequence: Synthetic oligonucleotide
  Antisense strand to SEQ ID NO: 59816
uucuuaaggaagaguugcc

SEQ ID NO: 59898 - RNA, 19 nt, Artificial Sequence
  Description of Artificial Sequence: Synthetic oligonucleotide
  Sense strand starting at position 2463 of SEQ ID NO: 734
uguaauuugcuguagccau

SEQ ID NO: 59899 - RNA, 19 nt, Artificial Sequence
  Description of Artificial Sequence: Synthetic oligonucleotide
  Antisense strand to SEQ ID NO: 59818
auggcuacagcaaauuaca

SEQ ID NO: 59900 - RNA, 19 nt, Artificial Sequence
  Description of Artificial Sequence: Synthetic oligonucleotide
  Sense strand starting at position 2479 of SEQ ID NO: 734
cauagauggcagcauguau

SEQ ID NO: 59901 - RNA, 19 nt, Artificial Sequence
  Description of Artificial Sequence: Synthetic oligonucleotide
  Antisense strand to SEQ ID NO: 59820
auacaugcugccaucuaug

SEQ ID NO: 59902 - RNA, 19 nt, Artificial Sequence
  Description of Artificial Sequence: Synthetic oligonucleotide
  Sense strand starting at position 2536 of SEQ ID NO: 734
gaggguagaaauugaguca

SEQ ID NO: 59903 - RNA, 19 nt, Artificial Sequence
  Description of Artificial Sequence: Synthetic oligonucleotide
  Antisense strand to SEQ ID NO: 59822
ugacucaauuucuacccuc

SEQ ID NO: 59904 - RNA, 19 nt, Artificial Sequence
  Description of Artificial Sequence: Synthetic oligonucleotide
  Sense strand starting at position 2539 of SEQ ID NO: 734
gguagaaauugagucacug

SEQ ID NO: 59905 - RNA, 19 nt, Artificial Sequence
  Description of Artificial Sequence: Synthetic oligonucleotide
  Antisense strand to SEQ ID NO: 59824
cagugacucaauuucuacc

SEQ ID NO: 59906 - RNA, 19 nt, Artificial Sequence
  Description of Artificial Sequence: Synthetic oligonucleotide
  Sense strand starting at position 2600 of SEQ ID NO: 734
ggaguuuggccaugacagg

SEQ ID NO: 59907 - RNA, 19 nt, Artificial Sequence
  Description of Artificial Sequence: Synthetic oligonucleotide
  Antisense strand to SEQ ID NO: 59826
ccugucauggccaaacucc

SEQ ID NO: 59908 - RNA, 19 nt, Artificial Sequence
  Description of Artificial Sequence: Synthetic oligonucleotide
  Sense strand starting at position 2601 of SEQ ID NO: 734
gaguuuggccaugacagga

SEQ ID NO: 59909 - RNA, 19 nt, Artificial Sequence
  Description of Artificial Sequence: Synthetic oligonucleotide
  Antisense strand to SEQ ID NO: 59828
uccugucauggccaaacuc

SEQ ID NO: 59910 - RNA, 19 nt, Artificial Sequence
  Description of Artificial Sequence: Synthetic oligonucleotide
  Sense strand starting at position 2758 of SEQ ID NO: 734
cuacaaugugaaugguauc

SEQ ID NO: 59911 - RNA, 19 nt, Artificial Sequence
  Description of Artificial Sequence: Synthetic oligonucleotide
  Antisense strand to SEQ ID NO: 59830
gauaccauucacauuguag

SEQ ID NO: 59912 - RNA, 19 nt, Artificial Sequence
  Description of Artificial Sequence: Synthetic oligonucleotide
  Sense strand starting at position 2769 of SEQ ID NO: 734
augguaucuccuuaguaau

SEQ ID NO: 59913 - RNA, 19 nt, Artificial Sequence
  Description of Artificial Sequence: Synthetic oligonucleotide
  Antisense strand to SEQ ID NO: 59832
auuacuaaggagauaccau

SEQ ID NO: 59914 - RNA, 19 nt, Artificial Sequence
  Description of Artificial Sequence: Synthetic oligonucleotide
  Sense strand starting at position 2842 of SEQ ID NO: 734
cgagacugguuuccagaaa

SEQ ID NO: 59915 - RNA, 19 nt, Artificial Sequence
  Description of Artificial Sequence: Synthetic oligonucleotide
  Antisense strand to SEQ ID NO: 59834
uuucuggaaaccagucucg

SEQ ID NO: 59916 - RNA, 19 nt, Artificial Sequence
  Description of Artificial Sequence: Synthetic oligonucleotide
  Sense strand starting at position 2849 of SEQ ID NO: 734
gguuuccagaaaugaguga

SEQ ID NO: 59917 - RNA, 19 nt, Artificial Sequence
  Description of Artificial Sequence: Synthetic oligonucleotide
  Antisense strand to SEQ ID NO: 59836
ucacucauuucuggaaacc

SEQ ID NO: 59918 - RNA, 19 nt, Artificial Sequence
  Description of Artificial Sequence: Synthetic oligonucleotide
  Sense strand starting at position 2853 of SEQ ID NO: 734
uccagaaaugagugaccuu

SEQ ID NO: 59919 - RNA, 19 nt, Artificial Sequence
  Description of Artificial Sequence: Synthetic oligonucleotide
  Antisense strand to SEQ ID NO: 59838
aaggucacucauuucugga

SEQ ID NO: 59920 - RNA, 19 nt, Artificial Sequence
  Description of Artificial Sequence: Synthetic oligonucleotide
  Sense strand starting at position 2879 of SEQ ID NO: 734
gugguagagagguagcuaa

SEQ ID NO: 59921 - RNA, 19 nt, Artificial Sequence
  Description of Artificial Sequence: Synthetic oligonucleotide
  Antisense strand to SEQ ID NO: 59840
uuagcuaccucucuaccac

SEQ ID NO: 59922 - RNA, 19 nt, Artificial Sequence
  Description of Artificial Sequence: Synthetic oligonucleotide
  Sense strand starting at position 2923 of SEQ ID NO: 734
cuccucauggagcaguaua

SEQ ID NO: 59923 - RNA, 19 nt, Artificial Sequence
  Description of Artificial Sequence: Synthetic oligonucleotide
  Antisense strand to SEQ ID NO: 59842
uauacugcuccaugaggag

SEQ ID NO: 59924 - RNA, 19 nt, Artificial Sequence
  Description of Artificial Sequence: Synthetic oligonucleotide
  Sense strand starting at position 3112 of SEQ ID NO: 734
uauuauguggaucaaaugu

SEQ ID NO: 59925 - RNA, 19 nt, Artificial Sequence
  Description of Artificial Sequence: Synthetic oligonucleotide
  Antisense strand to SEQ ID NO: 59844
acauuugauccacauaaua

SEQ ID NO: 59926 - RNA, 19 nt, Artificial Sequence
  Description of Artificial Sequence: Synthetic oligonucleotide
  Sense strand starting at position 3118 of SEQ ID NO: 734
guggaucaaaugugauaau

SEQ ID NO: 59927 - RNA, 19 nt, Artificial Sequence
  Description of Artificial Sequence: Synthetic oligonucleotide
  Antisense strand to SEQ ID NO: 59846
auuaucacauuugauccac

SEQ ID NO: 59928 - RNA, 19 nt, Artificial Sequence
  Description of Artificial Sequence: Synthetic oligonucleotide
  Sense strand starting at position 3187 of SEQ ID NO: 734
cugagaauauuauuagcuu

SEQ ID NO: 59929 - RNA, 19 nt, Artificial Sequence
  Description of Artificial Sequence: Synthetic oligonucleotide
  Antisense strand to SEQ ID NO: 59848
aagcuaauaauauucucag

SEQ ID NO: 59930 - RNA, 19 nt, Artificial Sequence
  Description of Artificial Sequence: Synthetic oligonucleotide
  Sense strand starting at position 3449 of SEQ ID NO: 734
ccauuugcauccuuaaggu

SEQ ID NO: 59931 - RNA, 19 nt, Artificial Sequence
  Description of Artificial Sequence: Synthetic oligonucleotide
  Antisense strand to SEQ ID NO: 59850
accuuaaggaugcaaaugg

SEQ ID NO: 59932 - RNA, 19 nt, Artificial Sequence
  Description of Artificial Sequence: Synthetic oligonucleotide
  Sense strand starting at position 3754 of SEQ ID NO: 734
ucaggcuuugaccagacau

SEQ ID NO: 59933 - RNA, 19 nt, Artificial Sequence
  Description of Artificial Sequence: Synthetic oligonucleotide
  Antisense strand to SEQ ID NO: 59852
augucuggucaaagccuga

SEQ ID NO: 59934 - RNA, 19 nt, Artificial Sequence
  Description of Artificial Sequence: Synthetic oligonucleotide
  Sense strand starting at position 3966 of SEQ ID NO: 734
cuuucuaauguguaaugaa

SEQ ID NO: 59935 - RNA, 19 nt, Artificial Sequence
  Description of Artificial Sequence: Synthetic oligonucleotide
  Antisense strand to SEQ ID NO: 59854
uucauuacacauuagaaag

SEQ ID NO: 59936 - RNA, 19 nt, Artificial Sequence
  Description of Artificial Sequence: Synthetic oligonucleotide
  Sense strand starting at position 3894 of SEQ ID NO: 735
gaggcaagucuuuaucuau

SEQ ID NO: 59937 - RNA, 19 nt, Artificial Sequence
  Description of Artificial Sequence: Synthetic oligonucleotide
  Antisense strand to SEQ ID NO: 59856
auagauaaagacuugccuc

SEQ ID NO: 59938 - RNA, 19 nt, Artificial Sequence
  Description of Artificial Sequence: Synthetic oligonucleotide
  Sense strand starting at position 3725 of SEQ ID NO: 735
agucaaugacuauauuagu

SEQ ID NO: 59939 - RNA, 19 nt, Artificial Sequence
  Description of Artificial Sequence: Synthetic oligonucleotide
  Antisense strand to SEQ ID NO: 59858
acuaauauagucauugacu

SEQ ID NO: 59940 - RNA, 19 nt, Artificial Sequence
  Description of Artificial Sequence: Synthetic oligonucleotide
  Sense strand starting at position 3722 of SEQ ID NO: 735
ugaagucaaugacuauauu

SEQ ID NO: 59941 - RNA, 19 nt, Artificial Sequence
  Description of Artificial Sequence: Synthetic oligonucleotide
  Antisense strand to SEQ ID NO: 59860
aauauagucauugacuuca

SEQ ID NO: 59942 - RNA, 19 nt, Artificial Sequence
  Description of Artificial Sequence: Synthetic oligonucleotide
  Sense strand starting at position 3609 of SEQ ID NO: 735
gccagaagauuacuuauug

SEQ ID NO: 59943 - RNA, 19 nt, Artificial Sequence
  Description of Artificial Sequence: Synthetic oligonucleotide
  Antisense strand to SEQ ID NO: 59862
caauaaguaaucuucuggc

SEQ ID NO: 59944 - RNA, 19 nt, Artificial Sequence
  Description of Artificial Sequence: Synthetic oligonucleotide
  Sense strand starting at position 3566 of SEQ ID NO: 735
ucacuuucuggugaaugua

SEQ ID NO: 59945 - RNA, 19 nt, Artificial Sequence
  Description of Artificial Sequence: Synthetic oligonucleotide
  Antisense strand to SEQ ID NO: 59864
uacauucaccagaaaguga

SEQ ID NO: 59946 - RNA, 19 nt, Artificial Sequence
  Description of Artificial Sequence: Synthetic oligonucleotide
  Sense strand starting at position 3461 of SEQ ID NO: 735
cugaccagucucugagaca

SEQ ID NO: 59947 - RNA, 19 nt, Artificial Sequence
  Description of Artificial Sequence: Synthetic oligonucleotide
  Antisense strand to SEQ ID NO: 59866
ugucucagagacuggucag

SEQ ID NO: 59948 - RNA, 19 nt, Artificial Sequence
  Description of Artificial Sequence: Synthetic oligonucleotide
  Sense strand starting at position 3347 of SEQ ID NO: 735
ccaagaauaguccgaugaa

SEQ ID NO: 59949 - RNA, 19 nt, Artificial Sequence
  Description of Artificial Sequence: Synthetic oligonucleotide
  Antisense strand to SEQ ID NO: 59868
uucaucggacuauucuugg

SEQ ID NO: 59950 - RNA, 19 nt, Artificial Sequence
  Description of Artificial Sequence: Synthetic oligonucleotide
  Sense strand starting at position 3099 of SEQ ID NO: 735
aaaugauaagagugcagua

SEQ ID NO: 59951 - RNA, 19 nt, Artificial Sequence
  Description of Artificial Sequence: Synthetic oligonucleotide
  Antisense strand to SEQ ID NO: 59870
uacugcacucuuaucauuu

SEQ ID NO: 59952 - RNA, 19 nt, Artificial Sequence
  Description of Artificial Sequence: Synthetic oligonucleotide
  Sense strand starting at position 2947 of SEQ ID NO: 735
ggauuauuauaguccauca

SEQ ID NO: 59953 - RNA, 19 nt, Artificial Sequence
  Description of Artificial Sequence: Synthetic oligonucleotide
  Antisense strand to SEQ ID NO: 59872
ugauggacuauaauaaucc

SEQ ID NO: 59954 - RNA, 19 nt, Artificial Sequence
  Description of Artificial Sequence: Synthetic oligonucleotide
  Sense strand starting at position 2941 of SEQ ID NO: 735
ccucaaggauuauuauagu

SEQ ID NO: 59955 - RNA, 19 nt, Artificial Sequence
  Description of Artificial Sequence: Synthetic oligonucleotide
  Antisense strand to SEQ ID NO: 59874
acuauaauaauccuugagg

SEQ ID NO: 59956 - RNA, 19 nt, Artificial Sequence
  Description of Artificial Sequence: Synthetic oligonucleotide
  Sense strand starting at position 2939 of SEQ ID NO: 735
gcccucaaggauuauuaua

SEQ ID NO: 59957 - RNA, 19 nt, Artificial Sequence
  Description of Artificial Sequence: Synthetic oligonucleotide
  Antisense strand to SEQ ID NO: 59876
uauaauaauccuugagggc

SEQ ID NO: 59958 - RNA, 19 nt, Artificial Sequence
  Description of Artificial Sequence: Synthetic oligonucleotide
  Sense strand starting at position 2936 of SEQ ID NO: 735
ggugcccucaaggauuauu

SEQ ID NO: 59959 - RNA, 19 nt, Artificial Sequence
  Description of Artificial Sequence: Synthetic oligonucleotide
  Antisense strand to SEQ ID NO: 59878
aauaauccuugagggcacc

SEQ ID NO: 59960 - RNA, 19 nt, Artificial Sequence
  Description of Artificial Sequence: Synthetic oligonucleotide
  Sense strand starting at position 2893 of SEQ ID NO: 735
gcuuuaguugaagauacag

SEQ ID NO: 59961 - RNA, 19 nt, Artificial Sequence
  Description of Artificial Sequence: Synthetic oligonucleotide
  Antisense strand to SEQ ID NO: 59880
cuguaucuucaacuaaagc

SEQ ID NO: 59962 - RNA, 19 nt, Artificial Sequence
  Description of Artificial Sequence: Synthetic oligonucleotide
  Sense strand starting at position 2830 of SEQ ID NO: 735
agcaauuaauuaguggaaa

SEQ ID NO: 59963 - RNA, 19 nt, Artificial Sequence
  Description of Artificial Sequence: Synthetic oligonucleotide
  Antisense strand to SEQ ID NO: 59882
uuuccacuaauuaauugcu

SEQ ID NO: 59964 - RNA, 19 nt, Artificial Sequence
  Description of Artificial Sequence: Synthetic oligonucleotide
  Sense strand starting at position 2670 of SEQ ID NO: 735
uguuauuucuaguuuccua

SEQ ID NO: 59965 - RNA, 19 nt, Artificial Sequence
  Description of Artificial Sequence: Synthetic oligonucleotide
  Antisense strand to SEQ ID NO: 59884
uaggaaacuagaaauaaca

SEQ ID NO: 59966 - RNA, 19 nt, Artificial Sequence
  Description of Artificial Sequence: Synthetic oligonucleotide
  Sense strand starting at position 2626 of SEQ ID NO: 735
acgauaaccaugggauauu

SEQ ID NO: 59967 - RNA, 19 nt, Artificial Sequence
  Description of Artificial Sequence: Synthetic oligonucleotide
  Antisense strand to SEQ ID NO: 59886
aauaucccaugguuaucgu

SEQ ID NO: 59968 - RNA, 19 nt, Artificial Sequence
  Description of Artificial Sequence: Synthetic oligonucleotide
  Sense strand starting at position 2260 of SEQ ID NO: 735
guguguaugaaauggaaag

SEQ ID NO: 59969 - RNA, 19 nt, Artificial Sequence
  Description of Artificial Sequence: Synthetic oligonucleotide
  Antisense strand to SEQ ID NO: 59888
cuuuccauuucauacacac

SEQ ID NO: 59970 - RNA, 19 nt, Artificial Sequence
  Description of Artificial Sequence: Synthetic oligonucleotide
  Sense strand starting at position 2219 of SEQ ID NO: 735
auguuuacaccucacaagu

SEQ ID NO: 59971 - RNA, 19 nt, Artificial Sequence
  Description of Artificial Sequence: Synthetic oligonucleotide
  Antisense strand to SEQ ID NO: 59890
acuugugagguguaaacau

SEQ ID NO: 59972 - RNA, 19 nt, Artificial Sequence
  Description of Artificial Sequence: Synthetic oligonucleotide
  Sense strand starting at position 2159 of SEQ ID NO: 735
gcuacugcccaagaagaau

SEQ ID NO: 59973 - RNA, 19 nt, Artificial Sequence
  Description of Artificial Sequence: Synthetic oligonucleotide
  Antisense strand to SEQ ID NO: 59892
auucuucuugggcaguagc

SEQ ID NO: 59974 - RNA, 19 nt, Artificial Sequence
  Description of Artificial Sequence: Synthetic oligonucleotide
  Sense strand starting at position 2067 of SEQ ID NO: 735
uuugauugugccuaauaac

SEQ ID NO: 59975 - RNA, 19 nt, Artificial Sequence
  Description of Artificial Sequence: Synthetic oligonucleotide
  Antisense strand to SEQ ID NO: 59894
guuauuaggcacaaucaaa

SEQ ID NO: 59976 - RNA, 19 nt, Artificial Sequence
  Description of Artificial Sequence: Synthetic oligonucleotide
  Sense strand starting at position 1647 of SEQ ID NO: 735
agguauucccaugagagca

SEQ ID NO: 59977 - RNA, 19 nt, Artificial Sequence
  Description of Artificial Sequence: Synthetic oligonucleotide
  Antisense strand to SEQ ID NO: 59896
ugcucucaugggaauaccu

SEQ ID NO: 59978 - RNA, 19 nt, Artificial Sequence
  Description of Artificial Sequence: Synthetic oligonucleotide
  Sense strand starting at position 1619 of SEQ ID NO: 735
gacauagguucuucuggag

SEQ ID NO: 59979 - RNA, 19 nt, Artificial Sequence
  Description of Artificial Sequence: Synthetic oligonucleotide
  Antisense strand to SEQ ID NO: 59898
cuccagaagaaccuauguc

SEQ ID NO: 59980 - RNA, 19 nt, Artificial Sequence
  Description of Artificial Sequence: Synthetic oligonucleotide
  Sense strand starting at position 1618 of SEQ ID NO: 735
ggacauagguucuucugga

SEQ ID NO: 59981 - RNA, 19 nt, Artificial Sequence
  Description of Artificial Sequence: Synthetic oligonucleotide
  Antisense strand to SEQ ID NO: 59900
uccagaagaaccuaugucc

SEQ ID NO: 59982 - RNA, 19 nt, Artificial Sequence
  Description of Artificial Sequence: Synthetic oligonucleotide
  Sense strand starting at position 1343 of SEQ ID NO: 735
gcagguuagaaguaaugga

SEQ ID NO: 59983 - RNA, 19 nt, Artificial Sequence
  Description of Artificial Sequence: Synthetic oligonucleotide
  Antisense strand to SEQ ID NO: 59902
uccauuacuucuaaccugc

SEQ ID NO: 59984 - RNA, 19 nt, Artificial Sequence
  Description of Artificial Sequence: Synthetic oligonucleotide
  Sense strand starting at position 1216 of SEQ ID NO: 735
cuccaauaaguugagaguu

SEQ ID NO: 59985 - RNA, 19 nt, Artificial Sequence
  Description of Artificial Sequence: Synthetic oligonucleotide
  Antisense strand to SEQ ID NO: 59904
aacucucaacuuauuggag

SEQ ID NO: 59986 - RNA, 19 nt, Artificial Sequence
  Description of Artificial Sequence: Synthetic oligonucleotide
  Sense strand starting at position 1080 of SEQ ID NO: 735
acaacuagugaauggcaaa

SEQ ID NO: 59987 - RNA, 19 nt, Artificial Sequence
  Description of Artificial Sequence: Synthetic oligonucleotide
  Antisense strand to SEQ ID NO: 59906
uuugccauucacuaguugu

SEQ ID NO: 59988 - RNA, 19 nt, Artificial Sequence
  Description of Artificial Sequence: Synthetic oligonucleotide
  Sense strand starting at position 962 of SEQ ID NO: 735
uuugaacacugacuguauu

SEQ ID NO: 59989 - RNA, 19 nt, Artificial Sequence
  Description of Artificial Sequence: Synthetic oligonucleotide
  Antisense strand to SEQ ID NO: 59908
aauacagucaguguucaaa

SEQ ID NO: 59990 - RNA, 19 nt, Artificial Sequence
  Description of Artificial Sequence: Synthetic oligonucleotide
  Sense strand starting at position 910 of SEQ ID NO: 735
aaacuaggauguguucuaa

SEQ ID NO: 59991 - RNA, 19 nt, Artificial Sequence
  Description of Artificial Sequence: Synthetic oligonucleotide
  Antisense strand to SEQ ID NO: 59910
uuagaacacauccuaguuu

SEQ ID NO: 59992 - RNA, 19 nt, Artificial Sequence
  Description of Artificial Sequence: Synthetic oligonucleotide
  Sense strand starting at position 812 of SEQ ID NO: 735
gaauacugcguagaauaca

SEQ ID NO: 59993 - RNA, 19 nt, Artificial Sequence
  Description of Artificial Sequence: Synthetic oligonucleotide
  Antisense strand to SEQ ID NO: 59912
uguauucuacgcaguauuc

SEQ ID NO: 59994 - RNA, 19 nt, Artificial Sequence
  Description of Artificial Sequence: Synthetic oligonucleotide
  Sense strand starting at position 810 of SEQ ID NO: 735
uggaauacugcguagaaua

SEQ ID NO: 59995 - RNA, 19 nt, Artificial Sequence
  Description of Artificial Sequence: Synthetic oligonucleotide
  Antisense strand to SEQ ID NO: 59914
uauucuacgcaguauucca

SEQ ID NO: 59996 - RNA, 19 nt, Artificial Sequence
  Description of Artificial Sequence: Synthetic oligonucleotide
  Sense strand starting at position 800 of SEQ ID NO: 735
uagcaauauguggaauacu

SEQ ID NO: 59997 - RNA, 19 nt, Artificial Sequence
  Description of Artificial Sequence: Synthetic oligonucleotide
  Antisense strand to SEQ ID NO: 59916
aguauuccacauauugcua

SEQ ID NO: 59998 - RNA, 19 nt, Artificial Sequence
  Description of Artificial Sequence: Synthetic oligonucleotide
  Sense strand starting at position 783 of SEQ ID NO: 735
agcaguugccaugugcaua

SEQ ID NO: 59999 - RNA, 19 nt, Artificial Sequence
  Description of Artificial Sequence: Synthetic oligonucleotide
  Antisense strand to SEQ ID NO: 59918
uaugcacauggcaacugcu

SEQ ID NO: 60000 - RNA, 19 nt, Artificial Sequence
  Description of Artificial Sequence: Synthetic oligonucleotide
  Sense strand starting at position 593 of SEQ ID NO: 735
gcuaguaagauuuguguua

SEQ ID NO: 60001 - RNA, 19 nt, Artificial Sequence
  Description of Artificial Sequence: Synthetic oligonucleotide
  Antisense strand to SEQ ID NO: 59920
uaacacaaaucuuacuagc

SEQ ID NO: 60002 - RNA, 19 nt, Artificial Sequence
  Description of Artificial Sequence: Synthetic oligonucleotide
  Sense strand starting at position 548 of SEQ ID NO: 735
auaguuacugugcagaaua

SEQ ID NO: 60003 - RNA, 19 nt, Artificial Sequence
  Description of Artificial Sequence: Synthetic oligonucleotide
  Antisense strand to SEQ ID NO: 59922
uauucugcacaguaacuau

SEQ ID NO: 60004 - RNA, 19 nt, Artificial Sequence
  Description of Artificial Sequence: Synthetic oligonucleotide
  Sense strand starting at position 424 of SEQ ID NO: 735
cuuucaaagguugguggaa

SEQ ID NO: 60005 - RNA, 19 nt, Artificial Sequence
  Description of Artificial Sequence: Synthetic oligonucleotide
  Antisense strand to SEQ ID NO: 59924
uuccaccaaccuuugaaag

SEQ ID NO: 60006 - RNA, 19 nt, Artificial Sequence
  Description of Artificial Sequence: Synthetic oligonucleotide
  Sense strand starting at position 312 of SEQ ID NO: 735
ccaucagagcaguaacaua

SEQ ID NO: 60007 - RNA, 19 nt, Artificial Sequence
  Description of Artificial Sequence: Synthetic oligonucleotide
  Antisense strand to SEQ ID NO: 59926
uauguuacugcucugaugg

SEQ ID NO: 60008 - RNA, 19 nt, Artificial Sequence
  Description of Artificial Sequence: Synthetic oligonucleotide
  Sense strand starting at position 261 of SEQ ID NO: 735
cuaacaagucuuugagagg

SEQ ID NO: 60009 - RNA, 19 nt, Artificial Sequence
  Description of Artificial Sequence: Synthetic oligonucleotide
  Antisense strand to SEQ ID NO: 59928
ccucucaaagacuuguuag

SEQ ID NO: 60010 - RNA, 19 nt, Artificial Sequence
  Description of Artificial Sequence: Synthetic oligonucleotide
  Sense strand starting at position 36 of SEQ ID NO: 735
uguauuuguuagcuaacag

SEQ ID NO: 60011 - RNA, 19 nt, Artificial Sequence
  Description of Artificial Sequence: Synthetic oligonucleotide
  Antisense strand to SEQ ID NO: 59930
cuguuagcuaacaaauaca

SEQ ID NO: 60012 - RNA, 19 nt, Artificial Sequence
  Description of Artificial Sequence: Synthetic oligonucleotide
  Sense strand starting at position 35 of SEQ ID NO: 735
uuguauuuguuagcuaaca

SEQ ID NO: 60013 - RNA, 19 nt, Artificial Sequence
  Description of Artificial Sequence: Synthetic oligonucleotide
  Antisense strand to SEQ ID NO: 59932
uguuagcuaacaaauacaa

SEQ ID NO: 60014 - RNA, 19 nt, Artificial Sequence
  Description of Artificial Sequence: Synthetic oligonucleotide
  Sense strand starting at position 29 of SEQ ID NO: 735
gcuggauuguauuuguuag

SEQ ID NO: 60015 - RNA, 19 nt, Artificial Sequence
  Description of Artificial Sequence: Synthetic oligonucleotide
  Antisense strand to SEQ ID NO: 59934
cuaacaaauacaauccagc

SEQ ID NO: 60016 - RNA, 19 nt, Artificial Sequence
  Description of Artificial Sequence: Synthetic oligonucleotide
  Sense strand starting at position 3749 of SEQ ID NO: 736
ugagcuauuuguuaaacau

SEQ ID NO: 60017 - RNA, 19 nt, Artificial Sequence
  Description of Artificial Sequence: Synthetic oligonucleotide
  Antisense strand to SEQ ID NO: 59936
auguuuaacaaauagcuca

SEQ ID NO: 60018 - RNA, 19 nt, Artificial Sequence
  Description of Artificial Sequence: Synthetic oligonucleotide
  Sense strand starting at position 3737 of SEQ ID NO: 736
cucauugaugaaugagcua

SEQ ID NO: 60019 - RNA, 19 nt, Artificial Sequence
  Description of Artificial Sequence: Synthetic oligonucleotide
  Antisense strand to SEQ ID NO: 59938
uagcucauucaucaaugag

SEQ ID NO: 60020 - RNA, 19 nt, Artificial Sequence
  Description of Artificial Sequence: Synthetic oligonucleotide
  Sense strand starting at position 3663 of SEQ ID NO: 736
aagguugggugucuguauu

SEQ ID NO: 60021 - RNA, 19 nt, Artificial Sequence
  Description of Artificial Sequence: Synthetic oligonucleotide
  Antisense strand to SEQ ID NO: 59940
aauacagacacccaaccuu

SEQ ID NO: 60022 - RNA, 19 nt, Artificial Sequence
  Description of Artificial Sequence: Synthetic oligonucleotide
  Sense strand starting at position 3553 of SEQ ID NO: 736
gauugauucuuaccagaug

SEQ ID NO: 60023 - RNA, 19 nt, Artificial Sequence
  Description of Artificial Sequence: Synthetic oligonucleotide
  Antisense strand to SEQ ID NO: 59942
caucugguaagaaucaauc

SEQ ID NO: 60024 - RNA, 19 nt, Artificial Sequence
  Description of Artificial Sequence: Synthetic oligonucleotide
  Sense strand starting at position 3551 of SEQ ID NO: 736
gggauugauucuuaccaga

SEQ ID NO: 60025 - RNA, 19 nt, Artificial Sequence
  Description of Artificial Sequence: Synthetic oligonucleotide
  Antisense strand to SEQ ID NO: 59944
ucugguaagaaucaauccc

SEQ ID NO: 60026 - RNA, 19 nt, Artificial Sequence
  Description of Artificial Sequence: Synthetic oligonucleotide
  Sense strand starting at position 3550 of SEQ ID NO: 736
ugggauugauucuuaccag

SEQ ID NO: 60027 - RNA, 19 nt, Artificial Sequence
  Description of Artificial Sequence: Synthetic oligonucleotide
  Antisense strand to SEQ ID NO: 59946
cugguaagaaucaauccca

SEQ ID NO: 60028 - RNA, 19 nt, Artificial Sequence
  Description of Artificial Sequence: Synthetic oligonucleotide
  Sense strand starting at position 3545 of SEQ ID NO: 736
guuacugggauugauucuu

SEQ ID NO: 60029 - RNA, 19 nt, Artificial Sequence
  Description of Artificial Sequence: Synthetic oligonucleotide
  Antisense strand to SEQ ID NO: 59948
aagaaucaaucccaguaac

SEQ ID NO: 60030 - RNA, 19 nt, Artificial Sequence
  Description of Artificial Sequence: Synthetic oligonucleotide
  Sense strand starting at position 3539 of SEQ ID NO: 736
guuauaguuacugggauug

SEQ ID NO: 60031 - RNA, 19 nt, Artificial Sequence
  Description of Artificial Sequence: Synthetic oligonucleotide
  Antisense strand to SEQ ID NO: 59950
caaucccaguaacuauaac

SEQ ID NO: 60032 - RNA, 19 nt, Artificial Sequence
  Description of Artificial Sequence: Synthetic oligonucleotide
  Sense strand starting at position 3537 of SEQ ID NO: 736
gaguuauaguuacugggau

SEQ ID NO: 60033 - RNA, 19 nt, Artificial Sequence
  Description of Artificial Sequence: Synthetic oligonucleotide
  Antisense strand to SEQ ID NO: 59952
aucccaguaacuauaacuc

SEQ ID NO: 60034 - RNA, 19 nt, Artificial Sequence
  Description of Artificial Sequence: Synthetic oligonucleotide
  Sense strand starting at position 3452 of SEQ ID NO: 736
gcaacaauguuaguuaaga

SEQ ID NO: 60035 - RNA, 19 nt, Artificial Sequence
  Description of Artificial Sequence: Synthetic oligonucleotide
  Antisense strand to SEQ ID NO: 59954
ucuuaacuaacauuguugc

SEQ ID NO: 60036 - RNA, 19 nt, Artificial Sequence
  Description of Artificial Sequence: Synthetic oligonucleotide
  Sense strand starting at position 3444 of SEQ ID NO: 736
uugagauggcaacaauguu

SEQ ID NO: 60037 - RNA, 19 nt, Artificial Sequence
  Description of Artificial Sequence: Synthetic oligonucleotide
  Antisense strand to SEQ ID NO: 59956
aacauuguugccaucucaa

SEQ ID NO: 60038 - RNA, 19 nt, Artificial Sequence
  Description of Artificial Sequence: Synthetic oligonucleotide
  Sense strand starting at position 2872 of SEQ ID NO: 736
cuaagauacugagacacua

SEQ ID NO: 60039 - RNA, 19 nt, Artificial Sequence
  Description of Artificial Sequence: Synthetic oligonucleotide
  Antisense strand to SEQ ID NO: 59958
uagugucucaguaucuuag

SEQ ID NO: 60040 - RNA, 19 nt, Artificial Sequence
  Description of Artificial Sequence: Synthetic oligonucleotide
  Sense strand starting at position 2869 of SEQ ID NO: 736
acacuaagauacugagaca

SEQ ID NO: 60041 - RNA, 19 nt, Artificial Sequence
  Description of Artificial Sequence: Synthetic oligonucleotide
  Antisense strand to SEQ ID NO: 59960
ugucucaguaucuuagugu

SEQ ID NO: 60042 - RNA, 19 nt, Artificial Sequence
  Description of Artificial Sequence: Synthetic oligonucleotide
  Sense strand starting at position 2847 of SEQ ID NO: 736
agguuuacaguccgaguga

SEQ ID NO: 60043 - RNA, 19 nt, Artificial Sequence
  Description of Artificial Sequence: Synthetic oligonucleotide
  Antisense strand to SEQ ID NO: 59962
ucacucggacuguaaaccu

SEQ ID NO: 60044 - RNA, 19 nt, Artificial Sequence
  Description of Artificial Sequence: Synthetic oligonucleotide
  Sense strand starting at position 2798 of SEQ ID NO: 736
cuaagaccugacugaaucu

SEQ ID NO: 60045 - RNA, 19 nt, Artificial Sequence
  Description of Artificial Sequence: Synthetic oligonucleotide
  Antisense strand to SEQ ID NO: 59964
agauucagucaggucuuag

SEQ ID NO: 60046 - RNA, 19 nt, Artificial Sequence
  Description of Artificial Sequence: Synthetic oligonucleotide
  Sense strand starting at position 2674 of SEQ ID NO: 736
caaguuaugugggcacuga

SEQ ID NO: 60047 - RNA, 19 nt, Artificial Sequence
  Description of Artificial Sequence: Synthetic oligonucleotide
  Antisense strand to SEQ ID NO: 59966
ucagugcccacauaacuug

SEQ ID NO: 60048 - RNA, 19 nt, Artificial Sequence
  Description of Artificial Sequence: Synthetic oligonucleotide
  Sense strand starting at position 2661 of SEQ ID NO: 736
uugagugguuuaccaaguu

SEQ ID NO: 60049 - RNA, 19 nt, Artificial Sequence
  Description of Artificial Sequence: Synthetic oligonucleotide
  Antisense strand to SEQ ID NO: 59968
aacuugguaaaccacucaa

SEQ ID NO: 60050 - RNA, 19 nt, Artificial Sequence
  Description of Artificial Sequence: Synthetic oligonucleotide
  Sense strand starting at position 2597 of SEQ ID NO: 736
ccgucaacauucccucaga

SEQ ID NO: 60051 - RNA, 19 nt, Artificial Sequence
  Description of Artificial Sequence: Synthetic oligonucleotide
  Antisense strand to SEQ ID NO: 59970
ucugagggaauguugacgg

SEQ ID NO: 60052 - RNA, 19 nt, Artificial Sequence
  Description of Artificial Sequence: Synthetic oligonucleotide
  Sense strand starting at position 2589 of SEQ ID NO: 736
gaaacugcccgucaacauu

SEQ ID NO: 60053 - RNA, 19 nt, Artificial Sequence
  Description of Artificial Sequence: Synthetic oligonucleotide
  Antisense strand to SEQ ID NO: 59972
aauguugacgggcaguuuc

SEQ ID NO: 60054 - RNA, 19 nt, Artificial Sequence
  Description of Artificial Sequence: Synthetic oligonucleotide
  Sense strand starting at position 2585 of SEQ ID NO: 736
gugugaaacugcccgucaa

SEQ ID NO: 60055 - RNA, 19 nt, Artificial Sequence
  Description of Artificial Sequence: Synthetic oligonucleotide
  Antisense strand to SEQ ID NO: 59974
uugacgggcaguuucacac

SEQ ID NO: 60056 - RNA, 19 nt, Artificial Sequence
  Description of Artificial Sequence: Synthetic oligonucleotide
  Sense strand starting at position 2577 of SEQ ID NO: 736
auuuaucugugugaaacug

SEQ ID NO: 60057 - RNA, 19 nt, Artificial Sequence
  Description of Artificial Sequence: Synthetic oligonucleotide
  Antisense strand to SEQ ID NO: 59976
caguuucacacagauaaau

SEQ ID NO: 60058 - RNA, 19 nt, Artificial Sequence
  Description of Artificial Sequence: Synthetic oligonucleotide
  Sense strand starting at position 2562 of SEQ ID NO: 736
ccggcugguucagagauuu

SEQ ID NO: 60059 - RNA, 19 nt, Artificial Sequence
  Description of Artificial Sequence: Synthetic oligonucleotide
  Antisense strand to SEQ ID NO: 59978
aaaucucugaaccagccgg

SEQ ID NO: 60060 - RNA, 19 nt, Artificial Sequence
  Description of Artificial Sequence: Synthetic oligonucleotide
  Sense strand starting at position 2222 of SEQ ID NO: 736
aggaaaggcugucuacauc

SEQ ID NO: 60061 - RNA, 19 nt, Artificial Sequence
  Description of Artificial Sequence: Synthetic oligonucleotide
  Antisense strand to SEQ ID NO: 59980
gauguagacagccuuuccu

SEQ ID NO: 60062 - RNA, 19 nt, Artificial Sequence
  Description of Artificial Sequence: Synthetic oligonucleotide
  Sense strand starting at position 2144 of SEQ ID NO: 736
uugggagaucugggcucuu

SEQ ID NO: 60063 - RNA, 19 nt, Artificial Sequence
  Description of Artificial Sequence: Synthetic oligonucleotide
  Antisense strand to SEQ ID NO: 59982
aagagcccagaucucccaa

SEQ ID NO: 60064 - RNA, 19 nt, Artificial Sequence
  Description of Artificial Sequence: Synthetic oligonucleotide
  Sense strand starting at position 1749 of SEQ ID NO: 736
agggaacuaugagucuagu

SEQ ID NO: 60065 - RNA, 19 nt, Artificial Sequence
  Description of Artificial Sequence: Synthetic oligonucleotide
  Antisense strand to SEQ ID NO: 59984
acuagacucauaguucccu

SEQ ID NO: 60066 - RNA, 19 nt, Artificial Sequence
  Description of Artificial Sequence: Synthetic oligonucleotide
  Sense strand starting at position 1359 of SEQ ID NO: 736
cgauguggccaacauagua

SEQ ID NO: 60067 - RNA, 19 nt, Artificial Sequence
  Description of Artificial Sequence: Synthetic oligonucleotide
  Antisense strand to SEQ ID NO: 59986
uacuauguuggccacaucg

SEQ ID NO: 60068 - RNA, 19 nt, Artificial Sequence
  Description of Artificial Sequence: Synthetic oligonucleotide
  Sense strand starting at position 1356 of SEQ ID NO: 736
gaccgauguggccaacaua

SEQ ID NO: 60069 - RNA, 19 nt, Artificial Sequence
  Description of Artificial Sequence: Synthetic oligonucleotide
  Antisense strand to SEQ ID NO: 59988
uauguuggccacaucgguc

SEQ ID NO: 60070 - RNA, 19 nt, Artificial Sequence
  Description of Artificial Sequence: Synthetic oligonucleotide
  Sense strand starting at position 1184 of SEQ ID NO: 736
gggaaaugcucaucaugag

SEQ ID NO: 60071 - RNA, 19 nt, Artificial Sequence
  Description of Artificial Sequence: Synthetic oligonucleotide
  Antisense strand to SEQ ID NO: 59990
cucaugaugagcauuuccc

SEQ ID NO: 60072 - RNA, 19 nt, Artificial Sequence
  Description of Artificial Sequence: Synthetic oligonucleotide
  Sense strand starting at position 1119 of SEQ ID NO: 736
gggugcuuuguauauuaaa

SEQ ID NO: 60073 - RNA, 19 nt, Artificial Sequence
  Description of Artificial Sequence: Synthetic oligonucleotide
  Antisense strand to SEQ ID NO: 59992
uuuaauauacaaagcaccc

SEQ ID NO: 60074 - RNA, 19 nt, Artificial Sequence
  Description of Artificial Sequence: Synthetic oligonucleotide
  Sense strand starting at position 1113 of SEQ ID NO: 736
caccaagggugcuuuguau

SEQ ID NO: 60075 - RNA, 19 nt, Artificial Sequence
  Description of Artificial Sequence: Synthetic oligonucleotide
  Antisense strand to SEQ ID NO: 59994
auacaaagcacccuuggug

SEQ ID NO: 60076 - RNA, 19 nt, Artificial Sequence
  Description of Artificial Sequence: Synthetic oligonucleotide
  Sense strand starting at position 787 of SEQ ID NO: 736
uggcuauauccuugccuua

SEQ ID NO: 60077 - RNA, 19 nt, Artificial Sequence
  Description of Artificial Sequence: Synthetic oligonucleotide
  Antisense strand to SEQ ID NO: 59996
uaaggcaaggauauagcca

SEQ ID NO: 60078 - RNA, 19 nt, Artificial Sequence
  Description of Artificial Sequence: Synthetic oligonucleotide
  Sense strand starting at position 777 of SEQ ID NO: 736
cuguuugucuuggcuauau

SEQ ID NO: 60079 - RNA, 19 nt, Artificial Sequence
  Description of Artificial Sequence: Synthetic oligonucleotide
  Antisense strand to SEQ ID NO: 59998
auauagccaagacaaacag

SEQ ID NO: 60080 - RNA, 19 nt, Artificial Sequence
  Description of Artificial Sequence: Synthetic oligonucleotide
  Sense strand starting at position 776 of SEQ ID NO: 736
ucuguuugucuuggcuaua

SEQ ID NO: 60081 - RNA, 19 nt, Artificial Sequence
  Description of Artificial Sequence: Synthetic oligonucleotide
  Antisense strand to SEQ ID NO: 60000
uauagccaagacaaacaga

SEQ ID NO: 60082 - RNA, 19 nt, Artificial Sequence
  Description of Artificial Sequence: Synthetic oligonucleotide
  Sense strand starting at position 600 of SEQ ID NO: 736
ugagaauucuuagauagug

SEQ ID NO: 60083 - RNA, 19 nt, Artificial Sequence
  Description of Artificial Sequence: Synthetic oligonucleotide
  Antisense strand to SEQ ID NO: 60002
cacuaucuaagaauucuca

SEQ ID NO: 60084 - RNA, 19 nt, Artificial Sequence
  Description of Artificial Sequence: Synthetic oligonucleotide
  Sense strand starting at position 496 of SEQ ID NO: 736
uccacaguuucccugaagu

SEQ ID NO: 60085 - RNA, 19 nt, Artificial Sequence
  Description of Artificial Sequence: Synthetic oligonucleotide
  Antisense strand to SEQ ID NO: 60004
acuucagggaaacugugga

SEQ ID NO: 60086 - RNA, 19 nt, Artificial Sequence
  Description of Artificial Sequence: Synthetic oligonucleotide
  Sense strand starting at position 417 of SEQ ID NO: 736
accaguggcuaacuuaaua

SEQ ID NO: 60087 - RNA, 19 nt, Artificial Sequence
  Description of Artificial Sequence: Synthetic oligonucleotide
  Antisense strand to SEQ ID NO: 60006
uauuaaguuagccacuggu

SEQ ID NO: 60088 - RNA, 19 nt, Artificial Sequence
  Description of Artificial Sequence: Synthetic oligonucleotide
  Sense strand starting at position 140 of SEQ ID NO: 736
gucagucaauugcugacau

SEQ ID NO: 60089 - RNA, 19 nt, Artificial Sequence
  Description of Artificial Sequence: Synthetic oligonucleotide
  Antisense strand to SEQ ID NO: 60008
augucagcaauugacugac

SEQ ID NO: 60090 - RNA, 19 nt, Artificial Sequence
  Description of Artificial Sequence: Synthetic oligonucleotide
  Sense strand starting at position 132 of SEQ ID NO: 736
ugacuaacgucagucaauu

SEQ ID NO: 60091 - RNA, 19 nt, Artificial Sequence
  Description of Artificial Sequence: Synthetic oligonucleotide
  Antisense strand to SEQ ID NO: 60010
aauugacugacguuaguca

SEQ ID NO: 60092 - RNA, 19 nt, Artificial Sequence
  Description of Artificial Sequence: Synthetic oligonucleotide
  Sense strand starting at position 3 of SEQ ID NO: 736
guuacucugcccuauuacu

SEQ ID NO: 60093 - RNA, 19 nt, Artificial Sequence
  Description of Artificial Sequence: Synthetic oligonucleotide
  Antisense strand to SEQ ID NO: 60012
aguaauagggcagaguaac

SEQ ID NO: 60094 - RNA, 19 nt, Artificial Sequence
  Description of Artificial Sequence: Synthetic oligonucleotide
  Sense strand starting at position 1 of SEQ ID NO: 736
cuguuacucugcccuauua

SEQ ID NO: 60095 - RNA, 19 nt, Artificial Sequence
  Description of Artificial Sequence: Synthetic oligonucleotide
  Antisense strand to SEQ ID NO: 60014
uaauagggcagaguaacag

SEQ ID NO: 60096 - RNA, 19 nt, Artificial Sequence
  Description of Artificial Sequence: Synthetic oligonucleotide
  Sense strand starting at position 3843 of SEQ ID NO: 737
guacucacugauggaguau

SEQ ID NO: 60097 - RNA, 19 nt, Artificial Sequence
  Description of Artificial Sequence: Synthetic oligonucleotide
  Antisense strand to SEQ ID NO: 60016
auacuccaucagugaguac

SEQ ID NO: 60098 - RNA, 19 nt, Artificial Sequence
  Description of Artificial Sequence: Synthetic oligonucleotide
  Sense strand starting at position 3842 of SEQ ID NO: 737
cguacucacugauggagua

SEQ ID NO: 60099 - RNA, 19 nt, Artificial Sequence
  Description of Artificial Sequence: Synthetic oligonucleotide
  Antisense strand to SEQ ID NO: 60018
uacuccaucagugaguacg

SEQ ID NO: 60100 - RNA, 19 nt, Artificial Sequence
  Description of Artificial Sequence: Synthetic oligonucleotide
  Sense strand starting at position 3839 of SEQ ID NO: 737
uuacguacucacugaugga

SEQ ID NO: 60101 - RNA, 19 nt, Artificial Sequence
  Description of Artificial Sequence: Synthetic oligonucleotide
  Antisense strand to SEQ ID NO: 60020
uccaucagugaguacguaa

SEQ ID NO: 60102 - RNA, 19 nt, Artificial Sequence
  Description of Artificial Sequence: Synthetic oligonucleotide
  Sense strand starting at position 3215 of SEQ ID NO: 737
aggauugcuauacgagcaa

SEQ ID NO: 60103 - RNA, 19 nt, Artificial Sequence
  Description of Artificial Sequence: Synthetic oligonucleotide
  Antisense strand to SEQ ID NO: 60022
uugcucguauagcaauccu

SEQ ID NO: 60104 - RNA, 19 nt, Artificial Sequence
  Description of Artificial Sequence: Synthetic oligonucleotide
  Sense strand starting at position 2920 of SEQ ID NO: 737
ggguaugucucugacucuu

SEQ ID NO: 60105 - RNA, 19 nt, Artificial Sequence
  Description of Artificial Sequence: Synthetic oligonucleotide
  Antisense strand to SEQ ID NO: 60024
aagagucagagacauaccc

SEQ ID NO: 60106 - RNA, 19 nt, Artificial Sequence
  Description of Artificial Sequence: Synthetic oligonucleotide
  Sense strand starting at position 2919 of SEQ ID NO: 737
aggguaugucucugacucu

SEQ ID NO: 60107 - RNA, 19 nt, Artificial Sequence
  Description of Artificial Sequence: Synthetic oligonucleotide
  Antisense strand to SEQ ID NO: 60026
agagucagagacauacccu

SEQ ID NO: 60108 - RNA, 19 nt, Artificial Sequence
  Description of Artificial Sequence: Synthetic oligonucleotide
  Sense strand starting at position 2918 of SEQ ID NO: 737
gaggguaugucucugacuc

SEQ ID NO: 60109 - RNA, 19 nt, Artificial Sequence
  Description of Artificial Sequence: Synthetic oligonucleotide
  Antisense strand to SEQ ID NO: 60028
gagucagagacauacccuc

SEQ ID NO: 60110 - RNA, 19 nt, Artificial Sequence
  Description of Artificial Sequence: Synthetic oligonucleotide
  Sense strand starting at position 2839 of SEQ ID NO: 737
gacaaaucaugcuguaagu

SEQ ID NO: 60111 - RNA, 19 nt, Artificial Sequence
  Description of Artificial Sequence: Synthetic oligonucleotide
  Antisense strand to SEQ ID NO: 60030
acuuacagcaugauuuguc

SEQ ID NO: 60112 - RNA, 19 nt, Artificial Sequence
  Description of Artificial Sequence: Synthetic oligonucleotide
  Sense strand starting at position 389 of SEQ ID NO: 737
agaggaagaccuugugguu

SEQ ID NO: 60113 - RNA, 19 nt, Artificial Sequence
  Description of Artificial Sequence: Synthetic oligonucleotide
  Antisense strand to SEQ ID NO: 60032
aaccacaaggucuuccucu

SEQ ID NO: 60114 - RNA, 19 nt, Artificial Sequence
  Description of Artificial Sequence: Synthetic oligonucleotide
  Sense strand starting at position 199 of SEQ ID NO: 737
gccuaagucuuacucuaga

SEQ ID NO: 60115 - RNA, 19 nt, Artificial Sequence
  Description of Artificial Sequence: Synthetic oligonucleotide
  Antisense strand to SEQ ID NO: 60034
ucuagaguaagacuuaggc

SEQ ID NO: 60116 - RNA, 19 nt, Artificial Sequence
  Description of Artificial Sequence: Synthetic oligonucleotide
  Sense strand starting at position 197 of SEQ ID NO: 737
gggccuaagucuuacucua

SEQ ID NO: 60117 - RNA, 19 nt, Artificial Sequence
  Description of Artificial Sequence: Synthetic oligonucleotide
  Antisense strand to SEQ ID NO: 60036
uagaguaagacuuaggccc

SEQ ID NO: 60118 - RNA, 19 nt, Artificial Sequence
  Description of Artificial Sequence: Synthetic oligonucleotide
  Sense strand starting at position 186 of SEQ ID NO: 737
auacaaucuuagggccuaa

SEQ ID NO: 60119 - RNA, 19 nt, Artificial Sequence
  Description of Artificial Sequence: Synthetic oligonucleotide
  Antisense strand to SEQ ID NO: 60038
uuaggcccuaagauuguau

SEQ ID NO: 60120 - RNA, 19 nt, Artificial Sequence
  Description of Artificial Sequence: Synthetic oligonucleotide
  Sense strand starting at position 3851 of SEQ ID NO: 738
ugauuccugcuuuguagua

SEQ ID NO: 60121 - RNA, 19 nt, Artificial Sequence
  Description of Artificial Sequence: Synthetic oligonucleotide
  Antisense strand to SEQ ID NO: 60040
uacuacaaagcaggaauca

SEQ ID NO: 60122 - RNA, 19 nt, Artificial Sequence
  Description of Artificial Sequence: Synthetic oligonucleotide
  Sense strand starting at position 3849 of SEQ ID NO: 738
ugugauuccugcuuuguag

SEQ ID NO: 60123 - RNA, 19 nt, Artificial Sequence
  Description of Artificial Sequence: Synthetic oligonucleotide
  Antisense strand to SEQ ID NO: 60042
cuacaaagcaggaaucaca

SEQ ID NO: 60124 - RNA, 19 nt, Artificial Sequence
  Description of Artificial Sequence: Synthetic oligonucleotide
  Sense strand starting at position 3747 of SEQ ID NO: 738
uuuguccaagguugugaaa

SEQ ID NO: 60125 - RNA, 19 nt, Artificial Sequence
  Description of Artificial Sequence: Synthetic oligonucleotide
  Antisense strand to SEQ ID NO: 60044
uuucacaaccuuggacaaa

SEQ ID NO: 60126 - RNA, 19 nt, Artificial Sequence
  Description of Artificial Sequence: Synthetic oligonucleotide
  Sense strand starting at position 3616 of SEQ ID NO: 738
gagugcuuauuacaagcca

SEQ ID NO: 60127 - RNA, 19 nt, Artificial Sequence
  Description of Artificial Sequence: Synthetic oligonucleotide
  Antisense strand to SEQ ID NO: 60046
uggcuuguaauaagcacuc

SEQ ID NO: 60128 - RNA, 19 nt, Artificial Sequence
  Description of Artificial Sequence: Synthetic oligonucleotide
  Sense strand starting at position 3179 of SEQ ID NO: 738
ugaagauugcuauacaagc

SEQ ID NO: 60129 - RNA, 19 nt, Artificial Sequence
  Description of Artificial Sequence: Synthetic oligonucleotide
  Antisense strand to SEQ ID NO: 60048
gcuuguauagcaaucuuca

SEQ ID NO: 60130 - RNA, 19 nt, Artificial Sequence
  Description of Artificial Sequence: Synthetic oligonucleotide
  Sense strand starting at position 3177 of SEQ ID NO: 738
uuugaagauugcuauacaa

SEQ ID NO: 60131 - RNA, 19 nt, Artificial Sequence
  Description of Artificial Sequence: Synthetic oligonucleotide
  Antisense strand to SEQ ID NO: 60050
uuguauagcaaucuucaaa

SEQ ID NO: 60132 - RNA, 19 nt, Artificial Sequence
  Description of Artificial Sequence: Synthetic oligonucleotide
  Sense strand starting at position 2888 of SEQ ID NO: 738
guacaucucugacucuuga

SEQ ID NO: 60133 - RNA, 19 nt, Artificial Sequence
  Description of Artificial Sequence: Synthetic oligonucleotide
  Antisense strand to SEQ ID NO: 60052
ucaagagucagagauguac

SEQ ID NO: 60134 - RNA, 19 nt, Artificial Sequence
  Description of Artificial Sequence: Synthetic oligonucleotide
  Sense strand starting at position 2886 of SEQ ID NO: 738
ggguacaucucugacucuu

SEQ ID NO: 60135 - RNA, 19 nt, Artificial Sequence
  Description of Artificial Sequence: Synthetic oligonucleotide
  Antisense strand to SEQ ID NO: 60054
aagagucagagauguaccc

SEQ ID NO: 60136 - RNA, 19 nt, Artificial Sequence
  Description of Artificial Sequence: Synthetic oligonucleotide
  Sense strand starting at position 2264 of SEQ ID NO: 738
aggguuagaauauggcaaa

SEQ ID NO: 60137 - RNA, 19 nt, Artificial Sequence
  Description of Artificial Sequence: Synthetic oligonucleotide
  Antisense strand to SEQ ID NO: 60056
uuugccauauucuaacccu

SEQ ID NO: 60138 - RNA, 19 nt, Artificial Sequence
  Description of Artificial Sequence: Synthetic oligonucleotide
  Sense strand starting at position 2259 of SEQ ID NO: 738
uucuuaggguuagaauaug

SEQ ID NO: 60139 - RNA, 19 nt, Artificial Sequence
  Description of Artificial Sequence: Synthetic oligonucleotide
  Antisense strand to SEQ ID NO: 60058
cauauucuaacccuaagaa

SEQ ID NO: 60140 - RNA, 19 nt, Artificial Sequence
  Description of Artificial Sequence: Synthetic oligonucleotide
  Sense strand starting at position 2257 of SEQ ID NO: 738
guuucuuaggguuagaaua

SEQ ID NO: 60141 - RNA, 19 nt, Artificial Sequence
  Description of Artificial Sequence: Synthetic oligonucleotide
  Antisense strand to SEQ ID NO: 60060
uauucuaacccuaagaaac

SEQ ID NO: 60142 - RNA, 19 nt, Artificial Sequence
  Description of Artificial Sequence: Synthetic oligonucleotide
  Sense strand starting at position 2254 of SEQ ID NO: 738
ucuguuucuuaggguuaga

SEQ ID NO: 60143 - RNA, 19 nt, Artificial Sequence
  Description of Artificial Sequence: Synthetic oligonucleotide
  Antisense strand to SEQ ID NO: 60062
ucuaacccuaagaaacaga

SEQ ID NO: 60144 - RNA, 19 nt, Artificial Sequence
  Description of Artificial Sequence: Synthetic oligonucleotide
  Sense strand starting at position 2251 of SEQ ID NO: 738
guuucuguuucuuaggguu

SEQ ID NO: 60145 - RNA, 19 nt, Artificial Sequence
  Description of Artificial Sequence: Synthetic oligonucleotide
  Antisense strand to SEQ ID NO: 60064
aacccuaagaaacagaaac

SEQ ID NO: 60146 - RNA, 19 nt, Artificial Sequence
  Description of Artificial Sequence: Synthetic oligonucleotide
  Sense strand starting at position 1716 of SEQ ID NO: 738
ugcgguguguccaggcuua

SEQ ID NO: 60147 - RNA, 19 nt, Artificial Sequence
  Description of Artificial Sequence: Synthetic oligonucleotide
  Antisense strand to SEQ ID NO: 60066
uaagccuggacacaccgca

SEQ ID NO: 60148 - RNA, 19 nt, Artificial Sequence
  Description of Artificial Sequence: Synthetic oligonucleotide
  Sense strand starting at position 197 of SEQ ID NO: 738
gccgaagucuuacucuaga

SEQ ID NO: 60149 - RNA, 19 nt, Artificial Sequence
  Description of Artificial Sequence: Synthetic oligonucleotide
  Antisense strand to SEQ ID NO: 60068
ucuagaguaagacuucggc

SEQ ID NO: 60150 - RNA, 19 nt, Artificial Sequence
  Description of Artificial Sequence: Synthetic oligonucleotide
  Sense strand starting at position 3911 of SEQ ID NO: 739
cugcuuacccaagagauau

SEQ ID NO: 60151 - RNA, 19 nt, Artificial Sequence
  Description of Artificial Sequence: Synthetic oligonucleotide
  Antisense strand to SEQ ID NO: 60070
auaucucuuggguaagcag

SEQ ID NO: 60152 - RNA, 19 nt, Artificial Sequence
  Description of Artificial Sequence: Synthetic oligonucleotide
  Sense strand starting at position 3755 of SEQ ID NO: 739
ugugaucauggcuaggacu

SEQ ID NO: 60153 - RNA, 19 nt, Artificial Sequence
  Description of Artificial Sequence: Synthetic oligonucleotide
  Antisense strand to SEQ ID NO: 60072
aguccuagccaugaucaca

SEQ ID NO: 60154 - RNA, 19 nt, Artificial Sequence
  Description of Artificial Sequence: Synthetic oligonucleotide
  Sense strand starting at position 3710 of SEQ ID NO: 739
gguauaugggucugagagg

SEQ ID NO: 60155 - RNA, 19 nt, Artificial Sequence
  Description of Artificial Sequence: Synthetic oligonucleotide
  Antisense strand to SEQ ID NO: 60074
ccucucagacccauauacc

SEQ ID NO: 60156 - RNA, 19 nt, Artificial Sequence
  Description of Artificial Sequence: Synthetic oligonucleotide
  Sense strand starting at position 3697 of SEQ ID NO: 739
gagaaugugacaggguaua

SEQ ID NO: 60157 - RNA, 19 nt, Artificial Sequence
  Description of Artificial Sequence: Synthetic oligonucleotide
  Antisense strand to SEQ ID NO: 60076
uauacccugucacauucuc

SEQ ID NO: 60158 - RNA, 19 nt, Artificial Sequence
  Description of Artificial Sequence: Synthetic oligonucleotide
  Sense strand starting at position 3676 of SEQ ID NO: 739
uucuguggagaguaucuua

SEQ ID NO: 60159 - RNA, 19 nt, Artificial Sequence
  Description of Artificial Sequence: Synthetic oligonucleotide
  Antisense strand to SEQ ID NO: 60078
uaagauacucuccacagaa

SEQ ID NO: 60160 - RNA, 19 nt, Artificial Sequence
  Description of Artificial Sequence: Synthetic oligonucleotide
  Sense strand starting at position 3621 of SEQ ID NO: 739
uugggaguaagcuaguaaa

SEQ ID NO: 60161 - RNA, 19 nt, Artificial Sequence
  Description of Artificial Sequence: Synthetic oligonucleotide
  Antisense strand to SEQ ID NO: 60080
uuuacuagcuuacucccaa

SEQ ID NO: 60162 - RNA, 19 nt, Artificial Sequence
  Description of Artificial Sequence: Synthetic oligonucleotide
  Sense strand starting at position 3616 of SEQ ID NO: 739
gcaaguugggaguaagcua

SEQ ID NO: 60163 - RNA, 19 nt, Artificial Sequence
  Description of Artificial Sequence: Synthetic oligonucleotide
  Antisense strand to SEQ ID NO: 60082
uagcuuacucccaacuugc

SEQ ID NO: 60164 - RNA, 19 nt, Artificial Sequence
  Description of Artificial Sequence: Synthetic oligonucleotide
  Sense strand starting at position 3507 of SEQ ID NO: 739
gccauagugguugcuaguu

SEQ ID NO: 60165 - RNA, 19 nt, Artificial Sequence
  Description of Artificial Sequence: Synthetic oligonucleotide
  Antisense strand to SEQ ID NO: 60084
aacuagcaaccacuauggc

SEQ ID NO: 60166 - RNA, 19 nt, Artificial Sequence
  Description of Artificial Sequence: Synthetic oligonucleotide
  Sense strand starting at position 3449 of SEQ ID NO: 739
gaagaauguuucccagagc

SEQ ID NO: 60167 - RNA, 19 nt, Artificial Sequence
  Description of Artificial Sequence: Synthetic oligonucleotide
  Antisense strand to SEQ ID NO: 60086
gcucugggaaacauucuuc

SEQ ID NO: 60168 - RNA, 19 nt, Artificial Sequence
  Description of Artificial Sequence: Synthetic oligonucleotide
  Sense strand starting at position 3395 of SEQ ID NO: 739
guauuuagugggugguauu

SEQ ID NO: 60169 - RNA, 19 nt, Artificial Sequence
  Description of Artificial Sequence: Synthetic oligonucleotide
  Antisense strand to SEQ ID NO: 60088
aauaccacccacuaaauac

SEQ ID NO: 60170 - RNA, 19 nt, Artificial Sequence
  Description of Artificial Sequence: Synthetic oligonucleotide
  Sense strand starting at position 3394 of SEQ ID NO: 739
uguauuuagugggugguau

SEQ ID NO: 60171 - RNA, 19 nt, Artificial Sequence
  Description of Artificial Sequence: Synthetic oligonucleotide
  Antisense strand to SEQ ID NO: 60090
auaccacccacuaaauaca

SEQ ID NO: 60172 - RNA, 19 nt, Artificial Sequence
  Description of Artificial Sequence: Synthetic oligonucleotide
  Sense strand starting at position 3393 of SEQ ID NO: 739
cuguauuuaguggguggua

SEQ ID NO: 60173 - RNA, 19 nt, Artificial Sequence
  Description of Artificial Sequence: Synthetic oligonucleotide
  Antisense strand to SEQ ID NO: 60092
uaccacccacuaaauacag

SEQ ID NO: 60174 - RNA, 19 nt, Artificial Sequence
  Description of Artificial Sequence: Synthetic oligonucleotide
  Sense strand starting at position 3360 of SEQ ID NO: 739
uauggaugggccugugaga

SEQ ID NO: 60175 - RNA, 19 nt, Artificial Sequence
  Description of Artificial Sequence: Synthetic oligonucleotide
  Antisense strand to SEQ ID NO: 60094
ucucacaggcccauccaua

SEQ ID NO: 60176 - RNA, 19 nt, Artificial Sequence
  Description of Artificial Sequence: Synthetic oligonucleotide
  Sense strand starting at position 3227 of SEQ ID NO: 739
uaguaacugccuuauagag

SEQ ID NO: 60177 - RNA, 19 nt, Artificial Sequence
  Description of Artificial Sequence: Synthetic oligonucleotide
  Antisense strand to SEQ ID NO: 60096
cucuauaaggcaguuacua

SEQ ID NO: 60178 - RNA, 19 nt, Artificial Sequence
  Description of Artificial Sequence: Synthetic oligonucleotide
  Sense strand starting at position 3054 of SEQ ID NO: 739
uauuguagcguauaaggaa

SEQ ID NO: 60179 - RNA, 19 nt, Artificial Sequence
  Description of Artificial Sequence: Synthetic oligonucleotide
  Antisense strand to SEQ ID NO: 60098
uuccuuauacgcuacaaua

SEQ ID NO: 60180 - RNA, 19 nt, Artificial Sequence
  Description of Artificial Sequence: Synthetic oligonucleotide
  Sense strand starting at position 2948 of SEQ ID NO: 739
auuugaaauuuguaagccu

SEQ ID NO: 60181 - RNA, 19 nt, Artificial Sequence
  Description of Artificial Sequence: Synthetic oligonucleotide
  Antisense strand to SEQ ID NO: 60100
aggcuuacaaauuucaaau

SEQ ID NO: 60182 - RNA, 19 nt, Artificial Sequence
  Description of Artificial Sequence: Synthetic oligonucleotide
  Sense strand starting at position 2895 of SEQ ID NO: 739
gguuauaaauuggcaaaca

SEQ ID NO: 60183 - RNA, 19 nt, Artificial Sequence
  Description of Artificial Sequence: Synthetic oligonucleotide
  Antisense strand to SEQ ID NO: 60102
uguuugccaauuuauaacc

SEQ ID NO: 60184 - RNA, 19 nt, Artificial Sequence
  Description of Artificial Sequence: Synthetic oligonucleotide
  Sense strand starting at position 2894 of SEQ ID NO: 739
ggguuauaaauuggcaaac

SEQ ID NO: 60185 - RNA, 19 nt, Artificial Sequence
  Description of Artificial Sequence: Synthetic oligonucleotide
  Antisense strand to SEQ ID NO: 60104
guuugccaauuuauaaccc

SEQ ID NO: 60186 - RNA, 19 nt, Artificial Sequence
  Description of Artificial Sequence: Synthetic oligonucleotide
  Sense strand starting at position 2647 of SEQ ID NO: 739
gaagauaauguccagcuau

SEQ ID NO: 60187 - RNA, 19 nt, Artificial Sequence
  Description of Artificial Sequence: Synthetic oligonucleotide
  Antisense strand to SEQ ID NO: 60106
auagcuggacauuaucuuc

SEQ ID NO: 60188 - RNA, 19 nt, Artificial Sequence
  Description of Artificial Sequence: Synthetic oligonucleotide
  Sense strand starting at position 2646 of SEQ ID NO: 739
agaagauaauguccagcua

SEQ ID NO: 60189 - RNA, 19 nt, Artificial Sequence
  Description of Artificial Sequence: Synthetic oligonucleotide
  Antisense strand to SEQ ID NO: 60108
uagcuggacauuaucuucu

SEQ ID NO: 60190 - RNA, 19 nt, Artificial Sequence
  Description of Artificial Sequence: Synthetic oligonucleotide
  Sense strand starting at position 2090 of SEQ ID NO: 739
uugagucugcuuuauagau

SEQ ID NO: 60191 - RNA, 19 nt, Artificial Sequence
  Description of Artificial Sequence: Synthetic oligonucleotide
  Antisense strand to SEQ ID NO: 60110
aucuauaaagcagacucaa

SEQ ID NO: 60192 - RNA, 19 nt, Artificial Sequence
  Description of Artificial Sequence: Synthetic oligonucleotide
  Sense strand starting at position 2079 of SEQ ID NO: 739
ccaguuaggaguugagucu

SEQ ID NO: 60193 - RNA, 19 nt, Artificial Sequence
  Description of Artificial Sequence: Synthetic oligonucleotide
  Antisense strand to SEQ ID NO: 60112
agacucaacuccuaacugg

SEQ ID NO: 60194 - RNA, 19 nt, Artificial Sequence
  Description of Artificial Sequence: Synthetic oligonucleotide
  Sense strand starting at position 2030 of SEQ ID NO: 739
gcugucgucaguccucaau

SEQ ID NO: 60195 - RNA, 19 nt, Artificial Sequence
  Description of Artificial Sequence: Synthetic oligonucleotide
  Antisense strand to SEQ ID NO: 60114
auugaggacugacgacagc

SEQ ID NO: 60196 - RNA, 19 nt, Artificial Sequence
  Description of Artificial Sequence: Synthetic oligonucleotide
  Sense strand starting at position 2029 of SEQ ID NO: 739
agcugucgucaguccucaa

SEQ ID NO: 60197 - RNA, 19 nt, Artificial Sequence
  Description of Artificial Sequence: Synthetic oligonucleotide
  Antisense strand to SEQ ID NO: 60116
uugaggacugacgacagcu

SEQ ID NO: 60198 - RNA, 19 nt, Artificial Sequence
  Description of Artificial Sequence: Synthetic oligonucleotide
  Sense strand starting at position 1662 of SEQ ID NO: 739
uggacuuuccagggacuau

SEQ ID NO: 60199 - RNA, 19 nt, Artificial Sequence
  Description of Artificial Sequence: Synthetic oligonucleotide
  Antisense strand to SEQ ID NO: 60118
auagucccuggaaagucca

SEQ ID NO: 60200 - RNA, 19 nt, Artificial Sequence
  Description of Artificial Sequence: Synthetic oligonucleotide
  Sense strand starting at position 1647 of SEQ ID NO: 739
auguuuggugcagaaugga

SEQ ID NO: 60201 - RNA, 19 nt, Artificial Sequence
  Description of Artificial Sequence: Synthetic oligonucleotide
  Antisense strand to SEQ ID NO: 60120
uccauucugcaccaaacau

SEQ ID NO: 60202 - RNA, 19 nt, Artificial Sequence
  Description of Artificial Sequence: Synthetic oligonucleotide
  Sense strand starting at position 1645 of SEQ ID NO: 739
gaauguuuggugcagaaug

SEQ ID NO: 60203 - RNA, 19 nt, Artificial Sequence
  Description of Artificial Sequence: Synthetic oligonucleotide
  Antisense strand to SEQ ID NO: 60122
cauucugcaccaaacauuc

SEQ ID NO: 60204 - RNA, 19 nt, Artificial Sequence
  Description of Artificial Sequence: Synthetic oligonucleotide
  Sense strand starting at position 1642 of SEQ ID NO: 739
caugaauguuuggugcaga

SEQ ID NO: 60205 - RNA, 19 nt, Artificial Sequence
  Description of Artificial Sequence: Synthetic oligonucleotide
  Antisense strand to SEQ ID NO: 60124
ucugcaccaaacauucaug

SEQ ID NO: 60206 - RNA, 19 nt, Artificial Sequence
  Description of Artificial Sequence: Synthetic oligonucleotide
  Sense strand starting at position 1481 of SEQ ID NO: 739
aauuuagcugcguauguga

SEQ ID NO: 60207 - RNA, 19 nt, Artificial Sequence
  Description of Artificial Sequence: Synthetic oligonucleotide
  Antisense strand to SEQ ID NO: 60126
ucacauacgcagcuaaauu

SEQ ID NO: 60208 - RNA, 19 nt, Artificial Sequence
  Description of Artificial Sequence: Synthetic oligonucleotide
  Sense strand starting at position 1479 of SEQ ID NO: 739
caaauuuagcugcguaugu

SEQ ID NO: 60209 - RNA, 19 nt, Artificial Sequence
  Description of Artificial Sequence: Synthetic oligonucleotide
  Antisense strand to SEQ ID NO: 60128
acauacgcagcuaaauuug

SEQ ID NO: 60210 - RNA, 19 nt, Artificial Sequence
  Description of Artificial Sequence: Synthetic oligonucleotide
  Sense strand starting at position 1229 of SEQ ID NO: 739
gggucuucaguggaucuaa

SEQ ID NO: 60211 - RNA, 19 nt, Artificial Sequence
  Description of Artificial Sequence: Synthetic oligonucleotide
  Antisense strand to SEQ ID NO: 60130
uuagauccacugaagaccc

SEQ ID NO: 60212 - RNA, 19 nt, Artificial Sequence
  Description of Artificial Sequence: Synthetic oligonucleotide
  Sense strand starting at position 750 of SEQ ID NO: 739
gcaaaccucugucuguaaa

SEQ ID NO: 60213 - RNA, 19 nt, Artificial Sequence
  Description of Artificial Sequence: Synthetic oligonucleotide
  Antisense strand to SEQ ID NO: 60132
uuuacagacagagguuugc

SEQ ID NO: 60214 - RNA, 19 nt, Artificial Sequence
  Description of Artificial Sequence: Synthetic oligonucleotide
  Sense strand starting at position 557 of SEQ ID NO: 739
cuguuuguggccucguaac

SEQ ID NO: 60215 - RNA, 19 nt, Artificial Sequence
  Description of Artificial Sequence: Synthetic oligonucleotide
  Antisense strand to SEQ ID NO: 60134
guuacgaggccacaaacag

SEQ ID NO: 60216 - RNA, 19 nt, Artificial Sequence
  Description of Artificial Sequence: Synthetic oligonucleotide
  Sense strand starting at position 556 of SEQ ID NO: 739
gcuguuuguggccucguaa

SEQ ID NO: 60217 - RNA, 19 nt, Artificial Sequence
  Description of Artificial Sequence: Synthetic oligonucleotide
  Antisense strand to SEQ ID NO: 60136
uuacgaggccacaaacagc

SEQ ID NO: 60218 - RNA, 19 nt, Artificial Sequence
  Description of Artificial Sequence: Synthetic oligonucleotide
  Sense strand starting at position 449 of SEQ ID NO: 739
agagccuuuagaggucuau

SEQ ID NO: 60219 - RNA, 19 nt, Artificial Sequence
  Description of Artificial Sequence: Synthetic oligonucleotide
  Antisense strand to SEQ ID NO: 60138
auagaccucuaaaggcucu

SEQ ID NO: 60220 - RNA, 19 nt, Artificial Sequence
  Description of Artificial Sequence: Synthetic oligonucleotide
  Sense strand starting at position 270 of SEQ ID NO: 739
acgugacuccuuuaauuaa

SEQ ID NO: 60221 - RNA, 19 nt, Artificial Sequence
  Description of Artificial Sequence: Synthetic oligonucleotide
  Antisense strand to SEQ ID NO: 60140
uuaauuaaaggagucacgu

SEQ ID NO: 60222 - RNA, 19 nt, Artificial Sequence
  Description of Artificial Sequence: Synthetic oligonucleotide
  Sense strand starting at position 268 of SEQ ID NO: 739
ucacgugacuccuuuaauu

SEQ ID NO: 60223 - RNA, 19 nt, Artificial Sequence
  Description of Artificial Sequence: Synthetic oligonucleotide
  Antisense strand to SEQ ID NO: 60142
aauuaaaggagucacguga

SEQ ID NO: 60224 - RNA, 19 nt, Artificial Sequence
  Description of Artificial Sequence: Synthetic oligonucleotide
  Sense strand starting at position 257 of SEQ ID NO: 739
gcuaaaucagaucacguga

SEQ ID NO: 60225 - RNA, 19 nt, Artificial Sequence
  Description of Artificial Sequence: Synthetic oligonucleotide
  Antisense strand to SEQ ID NO: 60144
ucacgugaucugauuuagc

SEQ ID NO: 60226 - RNA, 19 nt, Artificial Sequence
  Description of Artificial Sequence: Synthetic oligonucleotide
  Sense strand starting at position 237 of SEQ ID NO: 739
cugucagauguuuacauaa

SEQ ID NO: 60227 - RNA, 19 nt, Artificial Sequence
  Description of Artificial Sequence: Synthetic oligonucleotide
  Antisense strand to SEQ ID NO: 60146
uuauguaaacaucugacag

SEQ ID NO: 60228 - RNA, 19 nt, Artificial Sequence
  Description of Artificial Sequence: Synthetic oligonucleotide
  Sense strand starting at position 236 of SEQ ID NO: 739
acugucagauguuuacaua

SEQ ID NO: 60229 - RNA, 19 nt, Artificial Sequence
  Description of Artificial Sequence: Synthetic oligonucleotide
  Antisense strand to SEQ ID NO: 60148
uauguaaacaucugacagu

SEQ ID NO: 60230 - RNA, 19 nt, Artificial Sequence
  Description of Artificial Sequence: Synthetic oligonucleotide
  Sense strand starting at position 3742 of SEQ ID NO: 740
cugucuugcucucgguaaa

SEQ ID NO: 60231 - RNA, 19 nt, Artificial Sequence
  Description of Artificial Sequence: Synthetic oligonucleotide
  Antisense strand to SEQ ID NO: 60150
uuuaccgagagcaagacag

SEQ ID NO: 60232 - RNA, 19 nt, Artificial Sequence
  Description of Artificial Sequence: Synthetic oligonucleotide
  Sense strand starting at position 3741 of SEQ ID NO: 740
gcugucuugcucucgguaa

SEQ ID NO: 60233 - RNA, 19 nt, Artificial Sequence
  Description of Artificial Sequence: Synthetic oligonucleotide
  Antisense strand to SEQ ID NO: 60152
uuaccgagagcaagacagc

SEQ ID NO: 60234 - RNA, 19 nt, Artificial Sequence
  Description of Artificial Sequence: Synthetic oligonucleotide
  Sense strand starting at position 3027 of SEQ ID NO: 740
ggugaaugcuaguucucuu

SEQ ID NO: 60235 - RNA, 19 nt, Artificial Sequence
  Description of Artificial Sequence: Synthetic oligonucleotide
  Antisense strand to SEQ ID NO: 60154
aagagaacuagcauucacc

SEQ ID NO: 60236 - RNA, 19 nt, Artificial Sequence
  Description of Artificial Sequence: Synthetic oligonucleotide
  Sense strand starting at position 3015 of SEQ ID NO: 740
ucguggguguccggugaau

SEQ ID NO: 60237 - RNA, 19 nt, Artificial Sequence
  Description of Artificial Sequence: Synthetic oligonucleotide
  Antisense strand to SEQ ID NO: 60156
auucaccggacacccacga

SEQ ID NO: 60238 - RNA, 19 nt, Artificial Sequence
  Description of Artificial Sequence: Synthetic oligonucleotide
  Sense strand starting at position 3770 of SEQ ID NO: 741
uugucuugcucucgguaaa

SEQ ID NO: 60239 - RNA, 19 nt, Artificial Sequence
  Description of Artificial Sequence: Synthetic oligonucleotide
  Antisense strand to SEQ ID NO: 60158
uuuaccgagagcaagacaa

SEQ ID NO: 60240 - RNA, 19 nt, Artificial Sequence
  Description of Artificial Sequence: Synthetic oligonucleotide
  Sense strand starting at position 3768 of SEQ ID NO: 741
uauugucuugcucucggua

SEQ ID NO: 60241 - RNA, 19 nt, Artificial Sequence
  Description of Artificial Sequence: Synthetic oligonucleotide
  Antisense strand to SEQ ID NO: 60160
uaccgagagcaagacaaua

SEQ ID NO: 60242 - RNA, 19 nt, Artificial Sequence
  Description of Artificial Sequence: Synthetic oligonucleotide
  Sense strand starting at position 3055 of SEQ ID NO: 741
agugaaugcuaguucucuu

SEQ ID NO: 60243 - RNA, 19 nt, Artificial Sequence
  Description of Artificial Sequence: Synthetic oligonucleotide
  Antisense strand to SEQ ID NO: 60162
aagagaacuagcauucacu

SEQ ID NO: 60244 - RNA, 19 nt, Artificial Sequence
  Description of Artificial Sequence: Synthetic oligonucleotide
  Sense strand starting at position 176 of SEQ ID NO: 742
gcagcaguccuauaucuac

SEQ ID NO: 60245 - RNA, 19 nt, Artificial Sequence
  Description of Artificial Sequence: Synthetic oligonucleotide
  Antisense strand to SEQ ID NO: 60164
guagauauaggacugcugc

SEQ ID NO: 60246 - RNA, 19 nt, Artificial Sequence
  Description of Artificial Sequence: Synthetic oligonucleotide
  Sense strand starting at position 183 of SEQ ID NO: 742
uccuauaucuacugucuga

SEQ ID NO: 60247 - RNA, 19 nt, Artificial Sequence
  Description of Artificial Sequence: Synthetic oligonucleotide
  Antisense strand to SEQ ID NO: 60166
ucagacaguagauauagga

SEQ ID NO: 60248 - RNA, 19 nt, Artificial Sequence
  Description of Artificial Sequence: Synthetic oligonucleotide
  Sense strand starting at position 516 of SEQ ID NO: 742
ggcucucauugugaaacca

SEQ ID NO: 60249 - RNA, 19 nt, Artificial Sequence
  Description of Artificial Sequence: Synthetic oligonucleotide
  Antisense strand to SEQ ID NO: 60168
ugguuucacaaugagagcc

SEQ ID NO: 60250 - RNA, 19 nt, Artificial Sequence
  Description of Artificial Sequence: Synthetic oligonucleotide
  Sense strand starting at position 1413 of SEQ ID NO: 742
uuugguuccacagagugau

SEQ ID NO: 60251 - RNA, 19 nt, Artificial Sequence
  Description of Artificial Sequence: Synthetic oligonucleotide
  Antisense strand to SEQ ID NO: 60170
aucacucuguggaaccaaa

SEQ ID NO: 60252 - RNA, 19 nt, Artificial Sequence
  Description of Artificial Sequence: Synthetic oligonucleotide
  Sense strand starting at position 1425 of SEQ ID NO: 742
gagugauucugggacccag

SEQ ID NO: 60253 - RNA, 19 nt, Artificial Sequence
  Description of Artificial Sequence: Synthetic oligonucleotide
  Antisense strand to SEQ ID NO: 60172
cugggucccagaaucacuc

SEQ ID NO: 60254 - RNA, 19 nt, Artificial Sequence
  Description of Artificial Sequence: Synthetic oligonucleotide
  Sense strand starting at position 1458 of SEQ ID NO: 742
uggccucacucaugaguau

SEQ ID NO: 60255 - RNA, 19 nt, Artificial Sequence
  Description of Artificial Sequence: Synthetic oligonucleotide
  Antisense strand to SEQ ID NO: 60174
auacucaugagugaggcca

SEQ ID NO: 60256 - RNA, 19 nt, Artificial Sequence
  Description of Artificial Sequence: Synthetic oligonucleotide
  Sense strand starting at position 1854 of SEQ ID NO: 742
ucugacuucucagucugaa

SEQ ID NO: 60257 - RNA, 19 nt, Artificial Sequence
  Description of Artificial Sequence: Synthetic oligonucleotide
  Antisense strand to SEQ ID NO: 60176
uucagacugagaagucaga

SEQ ID NO: 60258 - RNA, 19 nt, Artificial Sequence
  Description of Artificial Sequence: Synthetic oligonucleotide
  Sense strand starting at position 2790 of SEQ ID NO: 742
ggucucaccuggcuuagaa

SEQ ID NO: 60259 - RNA, 19 nt, Artificial Sequence
  Description of Artificial Sequence: Synthetic oligonucleotide
  Antisense strand to SEQ ID NO: 60178
uucuaagccaggugagacc

SEQ ID NO: 60260 - RNA, 19 nt, Artificial Sequence
  Description of Artificial Sequence: Synthetic oligonucleotide
  Sense strand starting at position 3083 of SEQ ID NO: 742
ggcccuuggauuggacaau

SEQ ID NO: 60261 - RNA, 19 nt, Artificial Sequence
  Description of Artificial Sequence: Synthetic oligonucleotide
  Antisense strand to SEQ ID NO: 60180
auuguccaauccaagggcc

SEQ ID NO: 60262 - RNA, 19 nt, Artificial Sequence
  Description of Artificial Sequence: Synthetic oligonucleotide
  Sense strand starting at position 3186 of SEQ ID NO: 742
cuuaaaguuccuugcugua

SEQ ID NO: 60263 - RNA, 19 nt, Artificial Sequence
  Description of Artificial Sequence: Synthetic oligonucleotide
  Antisense strand to SEQ ID NO: 60182
uacagcaaggaacuuuaag

SEQ ID NO: 60264 - RNA, 19 nt, Artificial Sequence
  Description of Artificial Sequence: Synthetic oligonucleotide
  Sense strand starting at position 3210 of SEQ ID NO: 742
ucggaugcuuaucugggaa

SEQ ID NO: 60265 - RNA, 19 nt, Artificial Sequence
  Description of Artificial Sequence: Synthetic oligonucleotide
  Antisense strand to SEQ ID NO: 60184
uucccagauaagcauccga

SEQ ID NO: 60266 - RNA, 19 nt, Artificial Sequence
  Description of Artificial Sequence: Synthetic oligonucleotide
  Sense strand starting at position 3212 of SEQ ID NO: 742
ggaugcuuaucugggaaac

SEQ ID NO: 60267 - RNA, 19 nt, Artificial Sequence
  Description of Artificial Sequence: Synthetic oligonucleotide
  Antisense strand to SEQ ID NO: 60186
guuucccagauaagcaucc

SEQ ID NO: 60268 - RNA, 19 nt, Artificial Sequence
  Description of Artificial Sequence: Synthetic oligonucleotide
  Sense strand starting at position 3214 of SEQ ID NO: 742
augcuuaucugggaaaccu

SEQ ID NO: 60269 - RNA, 19 nt, Artificial Sequence
  Description of Artificial Sequence: Synthetic oligonucleotide
  Antisense strand to SEQ ID NO: 60188
agguuucccagauaagcau

SEQ ID NO: 60270 - RNA, 19 nt, Artificial Sequence
  Description of Artificial Sequence: Synthetic oligonucleotide
  Sense strand starting at position 3560 of SEQ ID NO: 742
ucucaaauugaguguuguu

SEQ ID NO: 60271 - RNA, 19 nt, Artificial Sequence
  Description of Artificial Sequence: Synthetic oligonucleotide
  Antisense strand to SEQ ID NO: 60190
aacaacacucaauuugaga

SEQ ID NO: 60272 - RNA, 19 nt, Artificial Sequence
  Description of Artificial Sequence: Synthetic oligonucleotide
  Sense strand starting at position 3563 of SEQ ID NO: 742
caaauugaguguuguugga

SEQ ID NO: 60273 - RNA, 19 nt, Artificial Sequence
  Description of Artificial Sequence: Synthetic oligonucleotide
  Antisense strand to SEQ ID NO: 60192
uccaacaacacucaauuug

SEQ ID NO: 60274 - RNA, 19 nt, Artificial Sequence
  Description of Artificial Sequence: Synthetic oligonucleotide
  Sense strand starting at position 3565 of SEQ ID NO: 742
aauugaguguuguuggauu

SEQ ID NO: 60275 - RNA, 19 nt, Artificial Sequence
  Description of Artificial Sequence: Synthetic oligonucleotide
  Antisense strand to SEQ ID NO: 60194
aauccaacaacacucaauu

SEQ ID NO: 60276 - RNA, 19 nt, Artificial Sequence
  Description of Artificial Sequence: Synthetic oligonucleotide
  Sense strand starting at position 3577 of SEQ ID NO: 742
uuggauuucuaaggguuaa

SEQ ID NO: 60277 - RNA, 19 nt, Artificial Sequence
  Description of Artificial Sequence: Synthetic oligonucleotide
  Antisense strand to SEQ ID NO: 60196
uuaacccuuagaaauccaa

SEQ ID NO: 60278 - RNA, 19 nt, Artificial Sequence
  Description of Artificial Sequence: Synthetic oligonucleotide
  Sense strand starting at position 818 of SEQ ID NO: 743
uuugguuccacagagugau

SEQ ID NO: 60279 - RNA, 19 nt, Artificial Sequence
  Description of Artificial Sequence: Synthetic oligonucleotide
  Antisense strand to SEQ ID NO: 60198
aucacucuguggaaccaaa

SEQ ID NO: 60280 - RNA, 19 nt, Artificial Sequence
  Description of Artificial Sequence: Synthetic oligonucleotide
  Sense strand starting at position 830 of SEQ ID NO: 743
gagugauucugggacccag

SEQ ID NO: 60281 - RNA, 19 nt, Artificial Sequence
  Description of Artificial Sequence: Synthetic oligonucleotide
  Antisense strand to SEQ ID NO: 60200
cugggucccagaaucacuc

SEQ ID NO: 60282 - RNA, 19 nt, Artificial Sequence
  Description of Artificial Sequence: Synthetic oligonucleotide
  Sense strand starting at position 863 of SEQ ID NO: 743
uggccucacucaugaguau

SEQ ID NO: 60283 - RNA, 19 nt, Artificial Sequence
  Description of Artificial Sequence: Synthetic oligonucleotide
  Antisense strand to SEQ ID NO: 60202
auacucaugagugaggcca

SEQ ID NO: 60284 - RNA, 19 nt, Artificial Sequence
  Description of Artificial Sequence: Synthetic oligonucleotide
  Sense strand starting at position 1259 of SEQ ID NO: 743
ucugacuucucagucugaa

SEQ ID NO: 60285 - RNA, 19 nt, Artificial Sequence
  Description of Artificial Sequence: Synthetic oligonucleotide
  Antisense strand to SEQ ID NO: 60204
uucagacugagaagucaga

SEQ ID NO: 60286 - RNA, 19 nt, Artificial Sequence
  Description of Artificial Sequence: Synthetic oligonucleotide
  Sense strand starting at position 2195 of SEQ ID NO: 743
ggucucaccuggcuuagaa

SEQ ID NO: 60287 - RNA, 19 nt, Artificial Sequence
  Description of Artificial Sequence: Synthetic oligonucleotide
  Antisense strand to SEQ ID NO: 60206
uucuaagccaggugagacc

SEQ ID NO: 60288 - RNA, 19 nt, Artificial Sequence
  Description of Artificial Sequence: Synthetic oligonucleotide
  Sense strand starting at position 2488 of SEQ ID NO: 743
ggcccuuggauuggacaau

SEQ ID NO: 60289 - RNA, 19 nt, Artificial Sequence
  Description of Artificial Sequence: Synthetic oligonucleotide
  Antisense strand to SEQ ID NO: 60208
auuguccaauccaagggcc

SEQ ID NO: 60290 - RNA, 19 nt, Artificial Sequence
  Description of Artificial Sequence: Synthetic oligonucleotide
  Sense strand starting at position 2591 of SEQ ID NO: 743
cuuaaaguuccuugcugua

SEQ ID NO: 60291 - RNA, 19 nt, Artificial Sequence
  Description of Artificial Sequence: Synthetic oligonucleotide
  Antisense strand to SEQ ID NO: 60210
uacagcaaggaacuuuaag

SEQ ID NO: 60292 - RNA, 19 nt, Artificial Sequence
  Description of Artificial Sequence: Synthetic oligonucleotide
  Sense strand starting at position 2615 of SEQ ID NO: 743
ucggaugcuuaucugggaa

SEQ ID NO: 60293 - RNA, 19 nt, Artificial Sequence
  Description of Artificial Sequence: Synthetic oligonucleotide
  Antisense strand to SEQ ID NO: 60212
uucccagauaagcauccga

SEQ ID NO: 60294 - RNA, 19 nt, Artificial Sequence
  Description of Artificial Sequence: Synthetic oligonucleotide
  Sense strand starting at position 2617 of SEQ ID NO: 743
ggaugcuuaucugggaaac

SEQ ID NO: 60295 - RNA, 19 nt, Artificial Sequence
  Description of Artificial Sequence: Synthetic oligonucleotide
  Antisense strand to SEQ ID NO: 60214
guuucccagauaagcaucc

SEQ ID NO: 60296 - RNA, 19 nt, Artificial Sequence
  Description of Artificial Sequence: Synthetic oligonucleotide
  Sense strand starting at position 2619 of SEQ ID NO: 743
augcuuaucugggaaaccu

SEQ ID NO: 60297 - RNA, 19 nt, Artificial Sequence
  Description of Artificial Sequence: Synthetic oligonucleotide
  Antisense strand to SEQ ID NO: 60216
agguuucccagauaagcau

SEQ ID NO: 60298 - RNA, 19 nt, Artificial Sequence
  Description of Artificial Sequence: Synthetic oligonucleotide
  Sense strand starting at position 2965 of SEQ ID NO: 743
ucucaaauugaguguuguu

SEQ ID NO: 60299 - RNA, 19 nt, Artificial Sequence
  Description of Artificial Sequence: Synthetic oligonucleotide
  Antisense strand to SEQ ID NO: 60218
aacaacacucaauuugaga

SEQ ID NO: 60300 - RNA, 19 nt, Artificial Sequence
  Description of Artificial Sequence: Synthetic oligonucleotide
  Sense strand starting at position 2968 of SEQ ID NO: 743
caaauugaguguuguugga

SEQ ID NO: 60301 - RNA, 19 nt, Artificial Sequence
  Description of Artificial Sequence: Synthetic oligonucleotide
  Antisense strand to SEQ ID NO: 60220
uccaacaacacucaauuug

SEQ ID NO: 60302 - RNA, 19 nt, Artificial Sequence
  Description of Artificial Sequence: Synthetic oligonucleotide
  Sense strand starting at position 2970 of SEQ ID NO: 743
aauugaguguuguuggauu

SEQ ID NO: 60303 - RNA, 19 nt, Artificial Sequence
  Description of Artificial Sequence: Synthetic oligonucleotide
  Antisense strand to SEQ ID NO: 60222
aauccaacaacacucaauu

SEQ ID NO: 60304 - RNA, 19 nt, Artificial Sequence
  Description of Artificial Sequence: Synthetic oligonucleotide
  Sense strand starting at position 2982 of SEQ ID NO: 743
uuggauuucuaaggguuaa

SEQ ID NO: 60305 - RNA, 19 nt, Artificial Sequence
  Description of Artificial Sequence: Synthetic oligonucleotide
  Antisense strand to SEQ ID NO: 60224
uuaacccuuagaaauccaa

SEQ ID NO: 60306 - RNA, 19 nt, Artificial Sequence
  Description of Artificial Sequence: Synthetic oligonucleotide
  Sense strand starting at position 3506 of SEQ ID NO: 743
aguugauugucauccucua

SEQ ID NO: 60307 - RNA, 19 nt, Artificial Sequence
  Description of Artificial Sequence: Synthetic oligonucleotide
  Antisense strand to SEQ ID NO: 60226
uagaggaugacaaucaacu

SEQ ID NO: 60308 - RNA, 19 nt, Artificial Sequence
  Description of Artificial Sequence: Synthetic oligonucleotide
  Sense strand starting at position 3 of SEQ ID NO: 745
gucacacuguccuucucaa

SEQ ID NO: 60309 - RNA, 19 nt, Artificial Sequence
  Description of Artificial Sequence: Synthetic oligonucleotide
  Antisense strand to SEQ ID NO: 60228
uugagaaggacagugugac

SEQ ID NO: 60310 - RNA, 19 nt, Artificial Sequence
  Description of Artificial Sequence: Synthetic oligonucleotide
  Sense strand starting at position 881 of SEQ ID NO: 745
uggccucacucaugacuau

SEQ ID NO: 60311 - RNA, 19 nt, Artificial Sequence
  Description of Artificial Sequence: Synthetic oligonucleotide
  Antisense strand to SEQ ID NO: 60230
auagucaugagugaggcca

SEQ ID NO: 60312 - RNA, 19 nt, Artificial Sequence
  Description of Artificial Sequence: Synthetic oligonucleotide
  Sense strand starting at position 989 of SEQ ID NO: 745
gucccaucccuuuguggga

SEQ ID NO: 60313 - RNA, 19 nt, Artificial Sequence
  Description of Artificial Sequence: Synthetic oligonucleotide
  Antisense strand to SEQ ID NO: 60232
ucccacaaagggaugggac

SEQ ID NO: 60314 - RNA, 19 nt, Artificial Sequence
  Description of Artificial Sequence: Synthetic oligonucleotide
  Sense strand starting at position 1075 of SEQ ID NO: 745
gggagauccugacuuaccu

SEQ ID NO: 60315 - RNA, 19 nt, Artificial Sequence
  Description of Artificial Sequence: Synthetic oligonucleotide
  Antisense strand to SEQ ID NO: 60234
agguaagucaggaucuccc

SEQ ID NO: 60316 - RNA, 19 nt, Artificial Sequence
  Description of Artificial Sequence: Synthetic oligonucleotide
  Sense strand starting at position 1290 of SEQ ID NO: 745
ucugaagucucgcaaugga

SEQ ID NO: 60317 - RNA, 19 nt, Artificial Sequence
  Description of Artificial Sequence: Synthetic oligonucleotide
  Antisense strand to SEQ ID NO: 60236
uccauugcgagacuucaga

SEQ ID NO: 60318 - RNA, 19 nt, Artificial Sequence
  Description of Artificial Sequence: Synthetic oligonucleotide
  Sense strand starting at position 1436 of SEQ ID NO: 745
cccucagcuuucccaggau

SEQ ID NO: 60319 - RNA, 19 nt, Artificial Sequence
  Description of Artificial Sequence: Synthetic oligonucleotide
  Antisense strand to SEQ ID NO: 60238
auccugggaaagcugaggg

SEQ ID NO: 60320 - RNA, 19 nt, Artificial Sequence
  Description of Artificial Sequence: Synthetic oligonucleotide
  Sense strand starting at position 1440 of SEQ ID NO: 745
cagcuuucccaggaugcuu

SEQ ID NO: 60321 - RNA, 19 nt, Artificial Sequence
  Description of Artificial Sequence: Synthetic oligonucleotide
  Antisense strand to SEQ ID NO: 60240
aagcauccugggaaagcug

SEQ ID NO: 60322 - RNA, 19 nt, Artificial Sequence
  Description of Artificial Sequence: Synthetic oligonucleotide
  Sense strand starting at position 2217 of SEQ ID NO: 745
aggucucacuuggcuuaga

SEQ ID NO: 60323 - RNA, 19 nt, Artificial Sequence
  Description of Artificial Sequence: Synthetic oligonucleotide
  Antisense strand to SEQ ID NO: 60242
ucuaagccaagugagaccu

SEQ ID NO: 60324 - RNA, 19 nt, Artificial Sequence
  Description of Artificial Sequence: Synthetic oligonucleotide
  Sense strand starting at position 2218 of SEQ ID NO: 745
ggucucacuuggcuuagaa

SEQ ID NO: 60325 - RNA, 19 nt, Artificial Sequence
  Description of Artificial Sequence: Synthetic oligonucleotide
  Antisense strand to SEQ ID NO: 60244
uucuaagccaagugagacc

SEQ ID NO: 60326 - RNA, 19 nt, Artificial Sequence
  Description of Artificial Sequence: Synthetic oligonucleotide
  Sense strand starting at position 2614 of SEQ ID NO: 745
cuugaaguuccuugcugua

SEQ ID NO: 60327 - RNA, 19 nt, Artificial Sequence
  Description of Artificial Sequence: Synthetic oligonucleotide
  Antisense strand to SEQ ID NO: 60246
uacagcaaggaacuucaag

SEQ ID NO: 60328 - RNA, 19 nt, Artificial Sequence
  Description of Artificial Sequence: Synthetic oligonucleotide
  Sense strand starting at position 2829 of SEQ ID NO: 745
uccucuuuggucugugacu

SEQ ID NO: 60329 - RNA, 19 nt, Artificial Sequence
  Description of Artificial Sequence: Synthetic oligonucleotide
  Antisense strand to SEQ ID NO: 60248
agucacagaccaaagagga

SEQ ID NO: 60330 - RNA, 19 nt, Artificial Sequence
  Description of Artificial Sequence: Synthetic oligonucleotide
  Sense strand starting at position 2978 of SEQ ID NO: 745
guugaacaauucucgaauu

SEQ ID NO: 60331 - RNA, 19 nt, Artificial Sequence
  Description of Artificial Sequence: Synthetic oligonucleotide
  Antisense strand to SEQ ID NO: 60250
aauucgagaauuguucaac

SEQ ID NO: 60332 - RNA, 19 nt, Artificial Sequence
  Description of Artificial Sequence: Synthetic oligonucleotide
  Sense strand starting at position 2979 of SEQ ID NO: 745
uugaacaauucucgaauug

SEQ ID NO: 60333 - RNA, 19 nt, Artificial Sequence
  Description of Artificial Sequence: Synthetic oligonucleotide
  Antisense strand to SEQ ID NO: 60252
caauucgagaauuguucaa

SEQ ID NO: 60334 - RNA, 19 nt, Artificial Sequence
  Description of Artificial Sequence: Synthetic oligonucleotide
  Sense strand starting at position 2988 of SEQ ID NO: 745
ucucgaauugaguguuguu

SEQ ID NO: 60335 - RNA, 19 nt, Artificial Sequence
  Description of Artificial Sequence: Synthetic oligonucleotide
  Antisense strand to SEQ ID NO: 60254
aacaacacucaauucgaga

SEQ ID NO: 60336 - RNA, 19 nt, Artificial Sequence
  Description of Artificial Sequence: Synthetic oligonucleotide
  Sense strand starting at position 2993 of SEQ ID NO: 745
aauugaguguuguuggguu

SEQ ID NO: 60337 - RNA, 19 nt, Artificial Sequence
  Description of Artificial Sequence: Synthetic oligonucleotide
  Antisense strand to SEQ ID NO: 60256
aacccaacaacacucaauu

SEQ ID NO: 60338 - RNA, 19 nt, Artificial Sequence
  Description of Artificial Sequence: Synthetic oligonucleotide
  Sense strand starting at position 2997 of SEQ ID NO: 745
gaguguuguuggguuugua

SEQ ID NO: 60339 - RNA, 19 nt, Artificial Sequence
  Description of Artificial Sequence: Synthetic oligonucleotide
  Antisense strand to SEQ ID NO: 60258
uacaaacccaacaacacuc

SEQ ID NO: 60340 - RNA, 19 nt, Artificial Sequence
  Description of Artificial Sequence: Synthetic oligonucleotide
  Sense strand starting at position 3005 of SEQ ID NO: 745
uuggguuuguaaggguuaa

SEQ ID NO: 60341 - RNA, 19 nt, Artificial Sequence
  Description of Artificial Sequence: Synthetic oligonucleotide
  Antisense strand to SEQ ID NO: 60260
uuaacccuuacaaacccaa

SEQ ID NO: 60342 - RNA, 19 nt, Artificial Sequence
  Description of Artificial Sequence: Synthetic oligonucleotide
  Sense strand starting at position 3006 of SEQ ID NO: 745
uggguuuguaaggguuaau

SEQ ID NO: 60343 - RNA, 19 nt, Artificial Sequence
  Description of Artificial Sequence: Synthetic oligonucleotide
  Antisense strand to SEQ ID NO: 60262
auuaacccuuacaaaccca

SEQ ID NO: 60344 - RNA, 19 nt, Artificial Sequence
  Description of Artificial Sequence: Synthetic oligonucleotide
  Sense strand starting at position 3528 of SEQ ID NO: 745
agucgauugucauccucua

SEQ ID NO: 60345 - RNA, 19 nt, Artificial Sequence
  Description of Artificial Sequence: Synthetic oligonucleotide
  Antisense strand to SEQ ID NO: 60264
uagaggaugacaaucgacu

SEQ ID NO: 60346 - RNA, 19 nt, Artificial Sequence
  Description of Artificial Sequence: Synthetic oligonucleotide
  Sense strand starting at position 106 of SEQ ID NO: 744
gccuauaucuacugucuga

SEQ ID NO: 60347 - RNA, 19 nt, Artificial Sequence
  Description of Artificial Sequence: Synthetic oligonucleotide
  Antisense strand to SEQ ID NO: 60266
ucagacaguagauauaggc

SEQ ID NO: 60348 - RNA, 19 nt, Artificial Sequence
  Description of Artificial Sequence: Synthetic oligonucleotide
  Sense strand starting at position 436 of SEQ ID NO: 744
ugagguucucauugugaaa

SEQ ID NO: 60349 - RNA, 19 nt, Artificial Sequence
  Description of Artificial Sequence: Synthetic oligonucleotide
  Antisense strand to SEQ ID NO: 60268
uuucacaaugagaaccuca

SEQ ID NO: 60350 - RNA, 19 nt, Artificial Sequence
  Description of Artificial Sequence: Synthetic oligonucleotide
  Sense strand starting at position 439 of SEQ ID NO: 744
gguucucauugugaaacca

SEQ ID NO: 60351 - RNA, 19 nt, Artificial Sequence
  Description of Artificial Sequence: Synthetic oligonucleotide
  Antisense strand to SEQ ID NO: 60270
ugguuucacaaugagaacc

SEQ ID NO: 60352 - RNA, 19 nt, Artificial Sequence
  Description of Artificial Sequence: Synthetic oligonucleotide
  Sense strand starting at position 504 of SEQ ID NO: 744
gucacacuguccuucucaa

SEQ ID NO: 60353 - RNA, 19 nt, Artificial Sequence
  Description of Artificial Sequence: Synthetic oligonucleotide
  Antisense strand to SEQ ID NO: 60272
uugagaaggacagugugac

SEQ ID NO: 60354 - RNA, 19 nt, Artificial Sequence
  Description of Artificial Sequence: Synthetic oligonucleotide
  Sense strand starting at position 1382 of SEQ ID NO: 744
uggccucacucaugacuau

SEQ ID NO: 60355 - RNA, 19 nt, Artificial Sequence
  Description of Artificial Sequence: Synthetic oligonucleotide
  Antisense strand to SEQ ID NO: 60274
auagucaugagugaggcca

SEQ ID NO: 60356 - RNA, 19 nt, Artificial Sequence
  Description of Artificial Sequence: Synthetic oligonucleotide
  Sense strand starting at position 1490 of SEQ ID NO: 744
gucccaucccuuuguggga

SEQ ID NO: 60357 - RNA, 19 nt, Artificial Sequence
  Description of Artificial Sequence: Synthetic oligonucleotide
  Antisense strand to SEQ ID NO: 60276
ucccacaaagggaugggac

SEQ ID NO: 60358 - RNA, 19 nt, Artificial Sequence
  Description of Artificial Sequence: Synthetic oligonucleotide
  Sense strand starting at position 1576 of SEQ ID NO: 744
gggagauccugacuuaccu

SEQ ID NO: 60359 - RNA, 19 nt, Artificial Sequence
  Description of Artificial Sequence: Synthetic oligonucleotide
  Antisense strand to SEQ ID NO: 60278
agguaagucaggaucuccc

SEQ ID NO: 60360 - RNA, 19 nt, Artificial Sequence
  Description of Artificial Sequence: Synthetic oligonucleotide
  Sense strand starting at position 1791 of SEQ ID NO: 744
ucugaagucucgcaaugga

SEQ ID NO: 60361 - RNA, 19 nt, Artificial Sequence
  Description of Artificial Sequence: Synthetic oligonucleotide
  Antisense strand to SEQ ID NO: 60280
uccauugcgagacuucaga

SEQ ID NO: 60362 - RNA, 19 nt, Artificial Sequence
  Description of Artificial Sequence: Synthetic oligonucleotide
  Sense strand starting at position 1937 of SEQ ID NO: 744
cccucagcuuucccaggau

SEQ ID NO: 60363 - RNA, 19 nt, Artificial Sequence
  Description of Artificial Sequence: Synthetic oligonucleotide
  Antisense strand to SEQ ID NO: 60282
auccugggaaagcugaggg

SEQ ID NO: 60364 - RNA, 19 nt, Artificial Sequence
  Description of Artificial Sequence: Synthetic oligonucleotide
  Sense strand starting at position 1941 of SEQ ID NO: 744
cagcuuucccaggaugcuu

SEQ ID NO: 60365 - RNA, 19 nt, Artificial Sequence
  Description of Artificial Sequence: Synthetic oligonucleotide
  Antisense strand to SEQ ID NO: 60284
aagcauccugggaaagcug

SEQ ID NO: 60366 - RNA, 19 nt, Artificial Sequence
  Description of Artificial Sequence: Synthetic oligonucleotide
  Sense strand starting at position 2718 of SEQ ID NO: 744
aggucucacuuggcuuaga

SEQ ID NO: 60367 - RNA, 19 nt, Artificial Sequence
  Description of Artificial Sequence: Synthetic oligonucleotide
  Antisense strand to SEQ ID NO: 60286
ucuaagccaagugagaccu

SEQ ID NO: 60368 - RNA, 19 nt, Artificial Sequence
  Description of Artificial Sequence: Synthetic oligonucleotide
  Sense strand starting at position 2719 of SEQ ID NO: 744
ggucucacuuggcuuagaa

SEQ ID NO: 60369 - RNA, 19 nt, Artificial Sequence
  Description of Artificial Sequence: Synthetic oligonucleotide
  Antisense strand to SEQ ID NO: 60288
uucuaagccaagugagacc

SEQ ID NO: 60370 - RNA, 19 nt, Artificial Sequence
  Description of Artificial Sequence: Synthetic oligonucleotide
  Sense strand starting at position 3115 of SEQ ID NO: 744
cuugaaguuccuugcugua

SEQ ID NO: 60371 - RNA, 19 nt, Artificial Sequence
  Description of Artificial Sequence: Synthetic oligonucleotide
  Antisense strand to SEQ ID NO: 60290
uacagcaaggaacuucaag

SEQ ID NO: 60372 - RNA, 19 nt, Artificial Sequence
  Description of Artificial Sequence: Synthetic oligonucleotide
  Sense strand starting at position 3330 of SEQ ID NO: 744
uccucuuuggucugugacu

SEQ ID NO: 60373 - RNA, 19 nt, Artificial Sequence
  Description of Artificial Sequence: Synthetic oligonucleotide
  Antisense strand to SEQ ID NO: 60292
agucacagaccaaagagga

SEQ ID NO: 60374 - RNA, 19 nt, Artificial Sequence
  Description of Artificial Sequence: Synthetic oligonucleotide
  Sense strand starting at position 3479 of SEQ ID NO: 744
guugaacaauucucgaauu

SEQ ID NO: 60375 - RNA, 19 nt, Artificial Sequence
  Description of Artificial Sequence: Synthetic oligonucleotide
  Antisense strand to SEQ ID NO: 60294
aauucgagaauuguucaac

SEQ ID NO: 60376 - RNA, 19 nt, Artificial Sequence
  Description of Artificial Sequence: Synthetic oligonucleotide
  Sense strand starting at position 3480 of SEQ ID NO: 744
uugaacaauucucgaauug

SEQ ID NO: 60377 - RNA, 19 nt, Artificial Sequence
  Description of Artificial Sequence: Synthetic oligonucleotide
  Antisense strand to SEQ ID NO: 60296
caauucgagaauuguucaa

SEQ ID NO: 60378 - RNA, 19 nt, Artificial Sequence
  Description of Artificial Sequence: Synthetic oligonucleotide
  Sense strand starting at position 3489 of SEQ ID NO: 744
ucucgaauugaguguuguu

SEQ ID NO: 60379 - RNA, 19 nt, Artificial Sequence
  Description of Artificial Sequence: Synthetic oligonucleotide
  Antisense strand to SEQ ID NO: 60298
aacaacacucaauucgaga

SEQ ID NO: 60380 - RNA, 19 nt, Artificial Sequence
  Description of Artificial Sequence: Synthetic oligonucleotide
  Sense strand starting at position 3494 of SEQ ID NO: 744
aauugaguguuguuggguu

SEQ ID NO: 60381 - RNA, 19 nt, Artificial Sequence
  Description of Artificial Sequence: Synthetic oligonucleotide
  Antisense strand to SEQ ID NO: 60300
aacccaacaacacucaauu

SEQ ID NO: 60382 - RNA, 19 nt, Artificial Sequence
  Description of Artificial Sequence: Synthetic oligonucleotide
  Sense strand starting at position 3498 of SEQ ID NO: 744
gaguguuguuggguuugua

SEQ ID NO: 60383 - RNA, 19 nt, Artificial Sequence
  Description of Artificial Sequence: Synthetic oligonucleotide
  Antisense strand to SEQ ID NO: 60302
uacaaacccaacaacacuc

SEQ ID NO: 60384 - RNA, 19 nt, Artificial Sequence
  Description of Artificial Sequence: Synthetic oligonucleotide
  Sense strand starting at position 3506 of SEQ ID NO: 744
uuggguuuguaaggguuaa

SEQ ID NO: 60385 - RNA, 19 nt, Artificial Sequence
  Description of Artificial Sequence: Synthetic oligonucleotide
  Antisense strand to SEQ ID NO: 60304
uuaacccuuacaaacccaa

SEQ ID NO: 60386 - RNA, 19 nt, Artificial Sequence
  Description of Artificial Sequence: Synthetic oligonucleotide
  Sense strand starting at position 3507 of SEQ ID NO: 744
uggguuuguaaggguuaau

SEQ ID NO: 60387 - RNA, 19 nt, Artificial Sequence
  Description of Artificial Sequence: Synthetic oligonucleotide
  Antisense strand to SEQ ID NO: 60306
auuaacccuuacaaaccca

SEQ ID NO: 60388 - RNA, 19 nt, Artificial Sequence
  Description of Artificial Sequence: Synthetic oligonucleotide
  Sense strand starting at position 285 of SEQ ID NO: 746
gcuggagaaucacuacaac

SEQ ID NO: 60389 - RNA, 19 nt, Artificial Sequence
  Description of Artificial Sequence: Synthetic oligonucleotide
  Antisense strand to SEQ ID NO: 60308
guuguagugauucuccagc

SEQ ID NO: 60390 - RNA, 19 nt, Artificial Sequence
  Description of Artificial Sequence: Synthetic oligonucleotide
  Sense strand starting at position 329 of SEQ ID NO: 746
cucagauugccgcauugca

SEQ ID NO: 60391 - RNA, 19 nt, Artificial Sequence
  Description of Artificial Sequence: Synthetic oligonucleotide
  Antisense strand to SEQ ID NO: 60310
ugcaaugcggcaaucugag

SEQ ID NO: 60392 - RNA, 19 nt, Artificial Sequence
  Description of Artificial Sequence: Synthetic oligonucleotide
  Sense strand starting at position 521 of SEQ ID NO: 746
gccuauaucuacugucuga

SEQ ID NO: 60393 - RNA, 19 nt, Artificial Sequence
  Description of Artificial Sequence: Synthetic oligonucleotide
  Antisense strand to SEQ ID NO: 60312
ucagacaguagauauaggc

SEQ ID NO: 60394 - RNA, 19 nt, Artificial Sequence
  Description of Artificial Sequence: Synthetic oligonucleotide
  Sense strand starting at position 851 of SEQ ID NO: 746
ugagguucucauugugaaa

SEQ ID NO: 60395 - RNA, 19 nt, Artificial Sequence
  Description of Artificial Sequence: Synthetic oligonucleotide
  Antisense strand to SEQ ID NO: 60314
uuucacaaugagaaccuca

SEQ ID NO: 60396 - RNA, 19 nt, Artificial Sequence
  Description of Artificial Sequence: Synthetic oligonucleotide
  Sense strand starting at position 854 of SEQ ID NO: 746
gguucucauugugaaacca

SEQ ID NO: 60397 - RNA, 19 nt, Artificial Sequence
  Description of Artificial Sequence: Synthetic oligonucleotide
  Antisense strand to SEQ ID NO: 60316
ugguuucacaaugagaacc

SEQ ID NO: 60398 - RNA, 19 nt, Artificial Sequence
  Description of Artificial Sequence: Synthetic oligonucleotide
  Sense strand starting at position 919 of SEQ ID NO: 746
gucacacuguccuucucaa

SEQ ID NO: 60399 - RNA, 19 nt, Artificial Sequence
  Description of Artificial Sequence: Synthetic oligonucleotide
  Antisense strand to SEQ ID NO: 60318
uugagaaggacagugugac

SEQ ID NO: 60400 - RNA, 19 nt, Artificial Sequence
  Description of Artificial Sequence: Synthetic oligonucleotide
  Sense strand starting at position 1797 of SEQ ID NO: 746
uggccucacucaugacuau

SEQ ID NO: 60401 - RNA, 19 nt, Artificial Sequence
  Description of Artificial Sequence: Synthetic oligonucleotide
  Antisense strand to SEQ ID NO: 60320
auagucaugagugaggcca

SEQ ID NO: 60402 - RNA, 19 nt, Artificial Sequence
  Description of Artificial Sequence: Synthetic oligonucleotide
  Sense strand starting at position 1905 of SEQ ID NO: 746
gucccaucccuuuguggga

SEQ ID NO: 60403 - RNA, 19 nt, Artificial Sequence
  Description of Artificial Sequence: Synthetic oligonucleotide
  Antisense strand to SEQ ID NO: 60322
ucccacaaagggaugggac

SEQ ID NO: 60404 - RNA, 19 nt, Artificial Sequence
  Description of Artificial Sequence: Synthetic oligonucleotide
  Sense strand starting at position 1991 of SEQ ID NO: 746
gggagauccugacuuaccu

SEQ ID NO: 60405 - RNA, 19 nt, Artificial Sequence
  Description of Artificial Sequence: Synthetic oligonucleotide
  Antisense strand to SEQ ID NO: 60324
agguaagucaggaucuccc

SEQ ID NO: 60406 - RNA, 19 nt, Artificial Sequence
  Description of Artificial Sequence: Synthetic oligonucleotide
  Sense strand starting at position 2206 of SEQ ID NO: 746
ucugaagucucgcaaugga

SEQ ID NO: 60407 - RNA, 19 nt, Artificial Sequence
  Description of Artificial Sequence: Synthetic oligonucleotide
  Antisense strand to SEQ ID NO: 60326
uccauugcgagacuucaga

SEQ ID NO: 60408 - RNA, 19 nt, Artificial Sequence
  Description of Artificial Sequence: Synthetic oligonucleotide
  Sense strand starting at position 2352 of SEQ ID NO: 746
cccucagcuuucccaggau

SEQ ID NO: 60409 - RNA, 19 nt, Artificial Sequence
  Description of Artificial Sequence: Synthetic oligonucleotide
  Antisense strand to SEQ ID NO: 60328
auccugggaaagcugaggg

SEQ ID NO: 60410 - RNA, 19 nt, Artificial Sequence
  Description of Artificial Sequence: Synthetic oligonucleotide
  Sense strand starting at position 2356 of SEQ ID NO: 746
cagcuuucccaggaugcuu

SEQ ID NO: 60411 - RNA, 19 nt, Artificial Sequence
  Description of Artificial Sequence: Synthetic oligonucleotide
  Antisense strand to SEQ ID NO: 60330
aagcauccugggaaagcug

SEQ ID NO: 60412 - RNA, 19 nt, Artificial Sequence
  Description of Artificial Sequence: Synthetic oligonucleotide
  Sense strand starting at position 3133 of SEQ ID NO: 746
aggucucacuuggcuuaga

SEQ ID NO: 60413 - RNA, 19 nt, Artificial Sequence
  Description of Artificial Sequence: Synthetic oligonucleotide
  Antisense strand to SEQ ID NO: 60332
ucuaagccaagugagaccu

SEQ ID NO: 60414 - RNA, 19 nt, Artificial Sequence
  Description of Artificial Sequence: Synthetic oligonucleotide
  Sense strand starting at position 3134 of SEQ ID NO: 746
ggucucacuuggcuuagaa

SEQ ID NO: 60415 - RNA, 19 nt, Artificial Sequence
  Description of Artificial Sequence: Synthetic oligonucleotide
  Antisense strand to SEQ ID NO: 60334
uucuaagccaagugagacc

SEQ ID NO: 60416 - RNA, 19 nt, Artificial Sequence
  Description of Artificial Sequence: Synthetic oligonucleotide
  Sense strand starting at position 3530 of SEQ ID NO: 746
cuugaaguuccuugcugua

SEQ ID NO: 60417 - RNA, 19 nt, Artificial Sequence
  Description of Artificial Sequence: Synthetic oligonucleotide
  Antisense strand to SEQ ID NO: 60336
uacagcaaggaacuucaag

SEQ ID NO: 60418 - RNA, 19 nt, Artificial Sequence
  Description of Artificial Sequence: Synthetic oligonucleotide
  Sense strand starting at position 3745 of SEQ ID NO: 746
uccucuuuggucugugacu

SEQ ID NO: 60419 - RNA, 19 nt, Artificial Sequence
  Description of Artificial Sequence: Synthetic oligonucleotide
  Antisense strand to SEQ ID NO: 60338
agucacagaccaaagagga

SEQ ID NO: 60420 - RNA, 19 nt, Artificial Sequence
  Description of Artificial Sequence: Synthetic oligonucleotide
  Sense strand starting at position 3894 of SEQ ID NO: 746
guugaacaauucucgaauu

SEQ ID NO: 60421 - RNA, 19 nt, Artificial Sequence
  Description of Artificial Sequence: Synthetic oligonucleotide
  Antisense strand to SEQ ID NO: 60340
aauucgagaauuguucaac

SEQ ID NO: 60422 - RNA, 19 nt, Artificial Sequence
  Description of Artificial Sequence: Synthetic oligonucleotide
  Sense strand starting at position 3895 of SEQ ID NO: 746
uugaacaauucucgaauug

SEQ ID NO: 60423 - RNA, 19 nt, Artificial Sequence
  Description of Artificial Sequence: Synthetic oligonucleotide
  Antisense strand to SEQ ID NO: 60342
caauucgagaauuguucaa

SEQ ID NO: 60424 - RNA, 19 nt, Artificial Sequence
  Description of Artificial Sequence: Synthetic oligonucleotide
  Sense strand starting at position 3904 of SEQ ID NO: 746
ucucgaauugaguguuguu

SEQ ID NO: 60425 - RNA, 19 nt, Artificial Sequence
  Description of Artificial Sequence: Synthetic oligonucleotide
  Antisense strand to SEQ ID NO: 60344
aacaacacucaauucgaga

SEQ ID NO: 60426 - RNA, 19 nt, Artificial Sequence
  Description of Artificial Sequence: Synthetic oligonucleotide
  Sense strand starting at position 3909 of SEQ ID NO: 746
aauugaguguuguuggguu

SEQ ID NO: 60427 - RNA, 19 nt, Artificial Sequence
  Description of Artificial Sequence: Synthetic oligonucleotide
  Antisense strand to SEQ ID NO: 60346
aacccaacaacacucaauu

SEQ ID NO: 60428 - RNA, 19 nt, Artificial Sequence
  Description of Artificial Sequence: Synthetic oligonucleotide
  Sense strand starting at position 3913 of SEQ ID NO: 746
gaguguuguuggguuugua

SEQ ID NO: 60429 - RNA, 19 nt, Artificial Sequence
  Description of Artificial Sequence: Synthetic oligonucleotide
  Antisense strand to SEQ ID NO: 60348
uacaaacccaacaacacuc

SEQ ID NO: 60430 - RNA, 19 nt, Artificial Sequence
  Description of Artificial Sequence: Synthetic oligonucleotide
  Sense strand starting at position 3921 of SEQ ID NO: 746
uuggguuuguaaggguuaa

SEQ ID NO: 60431 - RNA, 19 nt, Artificial Sequence
  Description of Artificial Sequence: Synthetic oligonucleotide
  Antisense strand to SEQ ID NO: 60350
uuaacccuuacaaacccaa

SEQ ID NO: 60432 - RNA, 19 nt, Artificial Sequence
  Description of Artificial Sequence: Synthetic oligonucleotide
  Sense strand starting at position 3922 of SEQ ID NO: 746
uggguuuguaaggguuaau

SEQ ID NO: 60433 - RNA, 19 nt, Artificial Sequence
  Description of Artificial Sequence: Synthetic oligonucleotide
  Antisense strand to SEQ ID NO: 60352
auuaacccuuacaaaccca

SEQ ID NO: 60434 - RNA, 19 nt, Artificial Sequence
  Description of Artificial Sequence: Synthetic oligonucleotide
  Sense strand starting at position 145 of SEQ ID NO: 747
cugugaagcccucauacuu

SEQ ID NO: 60435 - RNA, 19 nt, Artificial Sequence
  Description of Artificial Sequence: Synthetic oligonucleotide
  Antisense strand to SEQ ID NO: 60354
aaguaugagggcuucacag

SEQ ID NO: 60436 - RNA, 19 nt, Artificial Sequence
  Description of Artificial Sequence: Synthetic oligonucleotide
  Sense strand starting at position 187 of SEQ ID NO: 747
cuaaacauuugucagugaa

SEQ ID NO: 60437 - RNA, 19 nt, Artificial Sequence
  Description of Artificial Sequence: Synthetic oligonucleotide
  Antisense strand to SEQ ID NO: 60356
uucacugacaaauguuuag

SEQ ID NO: 60438 - RNA, 19 nt, Artificial Sequence
  Description of Artificial Sequence: Synthetic oligonucleotide
  Sense strand starting at position 579 of SEQ ID NO: 747
ggaggaucuuggccacacu

SEQ ID NO: 60439 - RNA, 19 nt, Artificial Sequence
  Description of Artificial Sequence: Synthetic oligonucleotide
  Antisense strand to SEQ ID NO: 60358
aguguggccaagauccucc

SEQ ID NO: 60440 - RNA, 19 nt, Artificial Sequence
  Description of Artificial Sequence: Synthetic oligonucleotide
  Sense strand starting at position 711 of SEQ ID NO: 747
ggaugaguguuggcucuga

SEQ ID NO: 60441 - RNA, 19 nt, Artificial Sequence
  Description of Artificial Sequence: Synthetic oligonucleotide
  Antisense strand to SEQ ID NO: 60360
ucagagccaacacucaucc

SEQ ID NO: 60442 - RNA, 19 nt, Artificial Sequence
  Description of Artificial Sequence: Synthetic oligonucleotide
  Sense strand starting at position 1036 of SEQ ID NO: 747
cugugagagagccaucaua

SEQ ID NO: 60443 - RNA, 19 nt, Artificial Sequence
  Description of Artificial Sequence: Synthetic oligonucleotide
  Antisense strand to SEQ ID NO: 60362
uaugauggcucucucacag

SEQ ID NO: 60444 - RNA, 19 nt, Artificial Sequence
  Description of Artificial Sequence: Synthetic oligonucleotide
  Sense strand starting at position 1176 of SEQ ID NO: 747
ccagguggcccugaaauca

SEQ ID NO: 60445 - RNA, 19 nt, Artificial Sequence
  Description of Artificial Sequence: Synthetic oligonucleotide
  Antisense strand to SEQ ID NO: 60364
ugauuucagggccaccugg

SEQ ID NO: 60446 - RNA, 19 nt, Artificial Sequence
  Description of Artificial Sequence: Synthetic oligonucleotide
  Sense strand starting at position 1298 of SEQ ID NO: 747
ugugauugcgggcaaauau

SEQ ID NO: 60447 - RNA, 19 nt, Artificial Sequence
  Description of Artificial Sequence: Synthetic oligonucleotide
  Antisense strand to SEQ ID NO: 60366
auauuugcccgcaaucaca

SEQ ID NO: 60448 - RNA, 19 nt, Artificial Sequence
  Description of Artificial Sequence: Synthetic oligonucleotide
  Sense strand starting at position 1373 of SEQ ID NO: 747
ccuggcagaguugaucuua

SEQ ID NO: 60449 - RNA, 19 nt, Artificial Sequence
  Description of Artificial Sequence: Synthetic oligonucleotide
  Antisense strand to SEQ ID NO: 60368
uaagaucaacucugccagg

SEQ ID NO: 60450 - RNA, 19 nt, Artificial Sequence
  Description of Artificial Sequence: Synthetic oligonucleotide
  Sense strand starting at position 1915 of SEQ ID NO: 747
ggguguuccugggucuuca

SEQ ID NO: 60451 - RNA, 19 nt, Artificial Sequence
  Description of Artificial Sequence: Synthetic oligonucleotide
  Antisense strand to SEQ ID NO: 60370
ugaagacccaggaacaccc

SEQ ID NO: 60452 - RNA, 19 nt, Artificial Sequence
  Description of Artificial Sequence: Synthetic oligonucleotide
  Sense strand starting at position 2155 of SEQ ID NO: 747
gggcauuaucccugcccua

SEQ ID NO: 60453 - RNA, 19 nt, Artificial Sequence
  Description of Artificial Sequence: Synthetic oligonucleotide
  Antisense strand to SEQ ID NO: 60372
uagggcagggauaaugccc

SEQ ID NO: 60454 - RNA, 19 nt, Artificial Sequence
  Description of Artificial Sequence: Synthetic oligonucleotide
  Sense strand starting at position 2598 of SEQ ID NO: 747
agucgucucuaccugugaa

SEQ ID NO: 60455 - RNA, 19 nt, Artificial Sequence
  Description of Artificial Sequence: Synthetic oligonucleotide
  Antisense strand to SEQ ID NO: 60374
uucacagguagagacgacu

SEQ ID NO: 60456 - RNA, 19 nt, Artificial Sequence
  Description of Artificial Sequence: Synthetic oligonucleotide
  Sense strand starting at position 2619 of SEQ ID NO: 747
cccaucuguccaugaaggu

SEQ ID NO: 60457 - RNA, 19 nt, Artificial Sequence
  Description of Artificial Sequence: Synthetic oligonucleotide
  Antisense strand to SEQ ID NO: 60376
accuucauggacagauggg

SEQ ID NO: 60458 - RNA, 19 nt, Artificial Sequence
  Description of Artificial Sequence: Synthetic oligonucleotide
  Sense strand starting at position 2648 of SEQ ID NO: 747
agccaucuccacugggaau

SEQ ID NO: 60459 - RNA, 19 nt, Artificial Sequence
  Description of Artificial Sequence: Synthetic oligonucleotide
  Antisense strand to SEQ ID NO: 60378
auucccaguggagauggcu

SEQ ID NO: 60460 - RNA, 19 nt, Artificial Sequence
  Description of Artificial Sequence: Synthetic oligonucleotide
  Sense strand starting at position 2660 of SEQ ID NO: 747
ugggaauccuucccugauc

SEQ ID NO: 60461 - RNA, 19 nt, Artificial Sequence
  Description of Artificial Sequence: Synthetic oligonucleotide
  Antisense strand to SEQ ID NO: 60380
gaucagggaaggauuccca

SEQ ID NO: 60462 - RNA, 19 nt, Artificial Sequence
  Description of Artificial Sequence: Synthetic oligonucleotide
  Sense strand starting at position 2662 of SEQ ID NO: 747
ggaauccuucccugauccu

SEQ ID NO: 60463 - RNA, 19 nt, Artificial Sequence
  Description of Artificial Sequence: Synthetic oligonucleotide
  Antisense strand to SEQ ID NO: 60382
aggaucagggaaggauucc

SEQ ID NO: 60464 - RNA, 19 nt, Artificial Sequence
  Description of Artificial Sequence: Synthetic oligonucleotide
  Sense strand starting at position 2675 of SEQ ID NO: 747
gauccuugucaaugcuaug

SEQ ID NO: 60465 - RNA, 19 nt, Artificial Sequence
  Description of Artificial Sequence: Synthetic oligonucleotide
  Antisense strand to SEQ ID NO: 60384
cauagcauugacaaggauc

SEQ ID NO: 60466 - RNA, 19 nt, Artificial Sequence
  Description of Artificial Sequence: Synthetic oligonucleotide
  Sense strand starting at position 2680 of SEQ ID NO: 747
uugucaaugcuaugaauag

SEQ ID NO: 60467 - RNA, 19 nt, Artificial Sequence
  Description of Artificial Sequence: Synthetic oligonucleotide
  Antisense strand to SEQ ID NO: 60386
cuauucauagcauugacaa

SEQ ID NO: 60468 - RNA, 19 nt, Artificial Sequence
  Description of Artificial Sequence: Synthetic oligonucleotide
  Sense strand starting at position 2797 of SEQ ID NO: 747
gcauuaugggccugguaca

SEQ ID NO: 60469 - RNA, 19 nt, Artificial Sequence
  Description of Artificial Sequence: Synthetic oligonucleotide
  Antisense strand to SEQ ID NO: 60388
uguaccaggcccauaaugc

SEQ ID NO: 60470 - RNA, 19 nt, Artificial Sequence
  Description of Artificial Sequence: Synthetic oligonucleotide
  Sense strand starting at position 2798 of SEQ ID NO: 747
cauuaugggccugguacaa

SEQ ID NO: 60471 - RNA, 19 nt, Artificial Sequence
  Description of Artificial Sequence: Synthetic oligonucleotide
  Antisense strand to SEQ ID NO: 60390
uuguaccaggcccauaaug

SEQ ID NO: 60472 - RNA, 19 nt, Artificial Sequence
  Description of Artificial Sequence: Synthetic oligonucleotide
  Sense strand starting at position 2818 of SEQ ID NO: 747
augggugcucaguaagaaa

SEQ ID NO: 60473 - RNA, 19 nt, Artificial Sequence
  Description of Artificial Sequence: Synthetic oligonucleotide
  Antisense strand to SEQ ID NO: 60392
uuucuuacugagcacccau

SEQ ID NO: 60474 - RNA, 19 nt, Artificial Sequence
  Description of Artificial Sequence: Synthetic oligonucleotide
  Sense strand starting at position 2900 of SEQ ID NO: 747
ggccacuuauaugcugaga

SEQ ID NO: 60475 - RNA, 19 nt, Artificial Sequence
  Description of Artificial Sequence: Synthetic oligonucleotide
  Antisense strand to SEQ ID NO: 60394
ucucagcauauaaguggcc

SEQ ID NO: 60476 - RNA, 19 nt, Artificial Sequence
  Description of Artificial Sequence: Synthetic oligonucleotide
  Sense strand starting at position 2903 of SEQ ID NO: 747
cacuuauaugcugagagca

SEQ ID NO: 60477 - RNA, 19 nt, Artificial Sequence
  Description of Artificial Sequence: Synthetic oligonucleotide
  Antisense strand to SEQ ID NO: 60396
ugcucucagcauauaagug

SEQ ID NO: 60478 - RNA, 19 nt, Artificial Sequence
  Description of Artificial Sequence: Synthetic oligonucleotide
  Sense strand starting at position 3004 of SEQ ID NO: 747
gccuguaaucccgggauuu

SEQ ID NO: 60479 - RNA, 19 nt, Artificial Sequence
  Description of Artificial Sequence: Synthetic oligonucleotide
  Antisense strand to SEQ ID NO: 60398
aaaucccgggauuacaggc

SEQ ID NO: 60480 - RNA, 19 nt, Artificial Sequence
  Description of Artificial Sequence: Synthetic oligonucleotide
  Sense strand starting at position 3303 of SEQ ID NO: 747
ucccgugaggcuuaggaaa

SEQ ID NO: 60481 - RNA, 19 nt, Artificial Sequence
  Description of Artificial Sequence: Synthetic oligonucleotide
  Antisense strand to SEQ ID NO: 60400
uuuccuaagccucacggga

SEQ ID NO: 60482 - RNA, 19 nt, Artificial Sequence
  Description of Artificial Sequence: Synthetic oligonucleotide
  Sense strand starting at position 3327 of SEQ ID NO: 747
gcuaauguacgccaauuga

SEQ ID NO: 60483 - RNA, 19 nt, Artificial Sequence
  Description of Artificial Sequence: Synthetic oligonucleotide
  Antisense strand to SEQ ID NO: 60402
ucaauuggcguacauuagc

SEQ ID NO: 60484 - RNA, 19 nt, Artificial Sequence
  Description of Artificial Sequence: Synthetic oligonucleotide
  Sense strand starting at position 3580 of SEQ ID NO: 747
caguguuugccugacagga

SEQ ID NO: 60485 - RNA, 19 nt, Artificial Sequence
  Description of Artificial Sequence: Synthetic oligonucleotide
  Antisense strand to SEQ ID NO: 60404
uccugucaggcaaacacug

SEQ ID NO: 60486 - RNA, 19 nt, Artificial Sequence
  Description of Artificial Sequence: Synthetic oligonucleotide
  Sense strand starting at position 3593 of SEQ ID NO: 747
acaggauguguccgcgaga

SEQ ID NO: 60487 - RNA, 19 nt, Artificial Sequence
  Description of Artificial Sequence: Synthetic oligonucleotide
  Antisense strand to SEQ ID NO: 60406
ucucgcggacacauccugu

SEQ ID NO: 60488 - RNA, 19 nt, Artificial Sequence
  Description of Artificial Sequence: Synthetic oligonucleotide
  Sense strand starting at position 3631 of SEQ ID NO: 747
auuccaguucuaggaaucu

SEQ ID NO: 60489 - RNA, 19 nt, Artificial Sequence
  Description of Artificial Sequence: Synthetic oligonucleotide
  Antisense strand to SEQ ID NO: 60408
agauuccuagaacuggaau

SEQ ID NO: 60490 - RNA, 19 nt, Artificial Sequence
  Description of Artificial Sequence: Synthetic oligonucleotide
  Sense strand starting at position 3658 of SEQ ID NO: 747
cagacugucccacgaguau

SEQ ID NO: 60491 - RNA, 19 nt, Artificial Sequence
  Description of Artificial Sequence: Synthetic oligonucleotide
  Antisense strand to SEQ ID NO: 60410
auacucgugggacagucug

SEQ ID NO: 60492 - RNA, 19 nt, Artificial Sequence
  Description of Artificial Sequence: Synthetic oligonucleotide
  Sense strand starting at position 3676 of SEQ ID NO: 747
ugccaagaucugcagacaa

SEQ ID NO: 60493 - RNA, 19 nt, Artificial Sequence
  Description of Artificial Sequence: Synthetic oligonucleotide
  Antisense strand to SEQ ID NO: 60412
uugucugcagaucuuggca

SEQ ID NO: 60494 - RNA, 19 nt, Artificial Sequence
  Description of Artificial Sequence: Synthetic oligonucleotide
  Sense strand starting at position 3689 of SEQ ID NO: 747
agacaagccuguuuaccau

SEQ ID NO: 60495 - RNA, 19 nt, Artificial Sequence
  Description of Artificial Sequence: Synthetic oligonucleotide
  Antisense strand to SEQ ID NO: 60414
augguaaacaggcuugucu

SEQ ID NO: 60496 - RNA, 19 nt, Artificial Sequence
  Description of Artificial Sequence: Synthetic oligonucleotide
  Sense strand starting at position 3711 of SEQ ID NO: 747
gcuguuuguaagcaucagu

SEQ ID NO: 60497 - RNA, 19 nt, Artificial Sequence
  Description of Artificial Sequence: Synthetic oligonucleotide
  Antisense strand to SEQ ID NO: 60416
acugaugcuuacaaacagc

SEQ ID NO: 60498 - RNA, 19 nt, Artificial Sequence
  Description of Artificial Sequence: Synthetic oligonucleotide
  Sense strand starting at position 3719 of SEQ ID NO: 747
uaagcaucaguguggaaau

SEQ ID NO: 60499 - RNA, 19 nt, Artificial Sequence
  Description of Artificial Sequence: Synthetic oligonucleotide
  Antisense strand to SEQ ID NO: 60418
auuuccacacugaugcuua

SEQ ID NO: 60500 - RNA, 19 nt, Artificial Sequence
  Description of Artificial Sequence: Synthetic oligonucleotide
  Sense strand starting at position 3721 of SEQ ID NO: 747
agcaucaguguggaaauga

SEQ ID NO: 60501 - RNA, 19 nt, Artificial Sequence
  Description of Artificial Sequence: Synthetic oligonucleotide
  Antisense strand to SEQ ID NO: 60420
ucauuuccacacugaugcu

SEQ ID NO: 60502 - RNA, 19 nt, Artificial Sequence
  Description of Artificial Sequence: Synthetic oligonucleotide
  Sense strand starting at position 3871 of SEQ ID NO: 747
aaaugcuagagguguguau

SEQ ID NO: 60503 - RNA, 19 nt, Artificial Sequence
  Description of Artificial Sequence: Synthetic oligonucleotide
  Antisense strand to SEQ ID NO: 60422
auacacaccucuagcauuu

SEQ ID NO: 60504 - RNA, 19 nt, Artificial Sequence
  Description of Artificial Sequence: Synthetic oligonucleotide
  Sense strand starting at position 3873 of SEQ ID NO: 747
augcuagagguguguauau

SEQ ID NO: 60505 - RNA, 19 nt, Artificial Sequence
  Description of Artificial Sequence: Synthetic oligonucleotide
  Antisense strand to SEQ ID NO: 60424
auauacacaccucuagcau

SEQ ID NO: 60506 - RNA, 19 nt, Artificial Sequence
  Description of Artificial Sequence: Synthetic oligonucleotide
  Sense strand starting at position 3929 of SEQ ID NO: 747
gaccuugugaacugugguu

SEQ ID NO: 60507 - RNA, 19 nt, Artificial Sequence
  Description of Artificial Sequence: Synthetic oligonucleotide
  Antisense strand to SEQ ID NO: 60426
aaccacaguucacaagguc

SEQ ID NO: 60508 - RNA, 19 nt, Artificial Sequence
  Description of Artificial Sequence: Synthetic oligonucleotide
  Sense strand starting at position 3931 of SEQ ID NO: 747
ccuugugaacugugguuau

SEQ ID NO: 60509 - RNA, 19 nt, Artificial Sequence
  Description of Artificial Sequence: Synthetic oligonucleotide
  Antisense strand to SEQ ID NO: 60428
auaaccacaguucacaagg

SEQ ID NO: 60510 - RNA, 19 nt, Artificial Sequence
  Description of Artificial Sequence: Synthetic oligonucleotide
  Sense strand starting at position 3934 of SEQ ID NO: 747
ugugaacugugguuauuuc

SEQ ID NO: 60511 - RNA, 19 nt, Artificial Sequence
  Description of Artificial Sequence: Synthetic oligonucleotide
  Antisense strand to SEQ ID NO: 60430
gaaauaaccacaguucaca

SEQ ID NO: 60512 - RNA, 19 nt, Artificial Sequence
  Description of Artificial Sequence: Synthetic oligonucleotide
  Sense strand starting at position 3941 of SEQ ID NO: 747
ugugguuauuucuggagag

SEQ ID NO: 60513 - RNA, 19 nt, Artificial Sequence
  Description of Artificial Sequence: Synthetic oligonucleotide
  Antisense strand to SEQ ID NO: 60432
cucuccagaaauaaccaca

SEQ ID NO: 60514 - RNA, 19 nt, Artificial Sequence
  Description of Artificial Sequence: Synthetic oligonucleotide
  Sense strand starting at position 85 of SEQ ID NO: 748
ccaagacagcaucaaugua

SEQ ID NO: 60515 - RNA, 19 nt, Artificial Sequence
  Description of Artificial Sequence: Synthetic oligonucleotide
  Antisense strand to SEQ ID NO: 60434
uacauugaugcugucuugg

SEQ ID NO: 60516 - RNA, 19 nt, Artificial Sequence
  Description of Artificial Sequence: Synthetic oligonucleotide
  Sense strand starting at position 230 of SEQ ID NO: 748
uguuaaaugaaaugaggua

SEQ ID NO: 60517 - RNA, 19 nt, Artificial Sequence
  Description of Artificial Sequence: Synthetic oligonucleotide
  Antisense strand to SEQ ID NO: 60436
uaccucauuucauuuaaca

SEQ ID NO: 60518 - RNA, 19 nt, Artificial Sequence
  Description of Artificial Sequence: Synthetic oligonucleotide
  Sense strand starting at position 258 of SEQ ID NO: 748
ugacaaguacugcauuauc

SEQ ID NO: 60519 - RNA, 19 nt, Artificial Sequence
  Description of Artificial Sequence: Synthetic oligonucleotide
  Antisense strand to SEQ ID NO: 60438
gauaaugcaguacuuguca

SEQ ID NO: 60520 - RNA, 19 nt, Artificial Sequence
  Description of Artificial Sequence: Synthetic oligonucleotide
  Sense strand starting at position 322 of SEQ ID NO: 748
gcagaaucaugguuacaag

SEQ ID NO: 60521 - RNA, 19 nt, Artificial Sequence
  Description of Artificial Sequence: Synthetic oligonucleotide
  Antisense strand to SEQ ID NO: 60440
cuuguaaccaugauucugc

SEQ ID NO: 60522 - RNA, 19 nt, Artificial Sequence
  Description of Artificial Sequence: Synthetic oligonucleotide
  Sense strand starting at position 334 of SEQ ID NO: 748
uuacaagaagcuuggguaa

SEQ ID NO: 60523 - RNA, 19 nt, Artificial Sequence
  Description of Artificial Sequence: Synthetic oligonucleotide
  Antisense strand to SEQ ID NO: 60442
uuacccaagcuucuuguaa

SEQ ID NO: 60524 - RNA, 19 nt, Artificial Sequence
  Description of Artificial Sequence: Synthetic oligonucleotide
  Sense strand starting at position 379 of SEQ ID NO: 748
uguugcucaagggauauau

SEQ ID NO: 60525 - RNA, 19 nt, Artificial Sequence
  Description of Artificial Sequence: Synthetic oligonucleotide
  Antisense strand to SEQ ID NO: 60444
auauaucccuugagcaaca

SEQ ID NO: 60526 - RNA, 19 nt, Artificial Sequence
  Description of Artificial Sequence: Synthetic oligonucleotide
  Sense strand starting at position 419 of SEQ ID NO: 748
guguguccagaauagacaa

SEQ ID NO: 60527 - RNA, 19 nt, Artificial Sequence
  Description of Artificial Sequence: Synthetic oligonucleotide
  Antisense strand to SEQ ID NO: 60446
uugucuauucuggacacac

SEQ ID NO: 60528 - RNA, 19 nt, Artificial Sequence
  Description of Artificial Sequence: Synthetic oligonucleotide
  Sense strand starting at position 629 of SEQ ID NO: 748
uggauugcauaacuuaaau

SEQ ID NO: 60529 - RNA, 19 nt, Artificial Sequence
  Description of Artificial Sequence: Synthetic oligonucleotide
  Antisense strand to SEQ ID NO: 60448
auuuaaguuaugcaaucca

SEQ ID NO: 60530 - RNA, 19 nt, Artificial Sequence
  Description of Artificial Sequence: Synthetic oligonucleotide
  Sense strand starting at position 812 of SEQ ID NO: 748
uggagagucuugucaucaa

SEQ ID NO: 60531 - RNA, 19 nt, Artificial Sequence
  Description of Artificial Sequence: Synthetic oligonucleotide
  Antisense strand to SEQ ID NO: 60450
uugaugacaagacucucca

SEQ ID NO: 60532 - RNA, 19 nt, Artificial Sequence
  Description of Artificial Sequence: Synthetic oligonucleotide
  Sense strand starting at position 1009 of SEQ ID NO: 748
caggauaagguaugcaaua

SEQ ID NO: 60533 - RNA, 19 nt, Artificial Sequence
  Description of Artificial Sequence: Synthetic oligonucleotide
  Antisense strand to SEQ ID NO: 60452
uauugcauaccuuauccug

SEQ ID NO: 60534 - RNA, 19 nt, Artificial Sequence
  Description of Artificial Sequence: Synthetic oligonucleotide
  Sense strand starting at position 1011 of SEQ ID NO: 748
ggauaagguaugcaauagu

SEQ ID NO: 60535 - RNA, 19 nt, Artificial Sequence
  Description of Artificial Sequence: Synthetic oligonucleotide
  Antisense strand to SEQ ID NO: 60454
acuauugcauaccuuaucc

SEQ ID NO: 60536 - RNA, 19 nt, Artificial Sequence
  Description of Artificial Sequence: Synthetic oligonucleotide
  Sense strand starting at position 1014 of SEQ ID NO: 748
uaagguaugcaauagugau

SEQ ID NO: 60537 - RNA, 19 nt, Artificial Sequence
  Description of Artificial Sequence: Synthetic oligonucleotide
  Antisense strand to SEQ ID NO: 60456
aucacuauugcauaccuua

SEQ ID NO: 60538 - RNA, 19 nt, Artificial Sequence
  Description of Artificial Sequence: Synthetic oligonucleotide
  Sense strand starting at position 1018 of SEQ ID NO: 748
guaugcaauagugauaaug

SEQ ID NO: 60539 - RNA, 19 nt, Artificial Sequence
  Description of Artificial Sequence: Synthetic oligonucleotide
  Antisense strand to SEQ ID NO: 60458
cauuaucacuauugcauac

SEQ ID NO: 60540 - RNA, 19 nt, Artificial Sequence
  Description of Artificial Sequence: Synthetic oligonucleotide
  Sense strand starting at position 1040 of SEQ ID NO: 748
caacauggacugugaacau

SEQ ID NO: 60541 - RNA, 19 nt, Artificial Sequence
  Description of Artificial Sequence: Synthetic oligonucleotide
  Antisense strand to SEQ ID NO: 60460
auguucacaguccauguug

SEQ ID NO: 60542 - RNA, 19 nt, Artificial Sequence
  Description of Artificial Sequence: Synthetic oligonucleotide
  Sense strand starting at position 1050 of SEQ ID NO: 748
ugugaacauguaggauaau

SEQ ID NO: 60543 - RNA, 19 nt, Artificial Sequence
  Description of Artificial Sequence: Synthetic oligonucleotide
  Antisense strand to SEQ ID NO: 60462
auuauccuacauguucaca

SEQ ID NO: 60544 - RNA, 19 nt, Artificial Sequence
  Description of Artificial Sequence: Synthetic oligonucleotide
  Sense strand starting at position 1169 of SEQ ID NO: 748
guuuauguccaggagugaa

SEQ ID NO: 60545 - RNA, 19 nt, Artificial Sequence
  Description of Artificial Sequence: Synthetic oligonucleotide
  Antisense strand to SEQ ID NO: 60464
uucacuccuggacauaaac

SEQ ID NO: 60546 - RNA, 19 nt, Artificial Sequence
  Description of Artificial Sequence: Synthetic oligonucleotide
  Sense strand starting at position 1179 of SEQ ID NO: 748
aggagugaagcaugcagaa

SEQ ID NO: 60547 - RNA, 19 nt, Artificial Sequence
  Description of Artificial Sequence: Synthetic oligonucleotide
  Antisense strand to SEQ ID NO: 60466
uucugcaugcuucacuccu

SEQ ID NO: 60548 - RNA, 19 nt, Artificial Sequence
  Description of Artificial Sequence: Synthetic oligonucleotide
  Sense strand starting at position 1314 of SEQ ID NO: 748
aguguaguuacugauaaug

SEQ ID NO: 60549 - RNA, 19 nt, Artificial Sequence
  Description of Artificial Sequence: Synthetic oligonucleotide
  Antisense strand to SEQ ID NO: 60468
cauuaucaguaacuacacu

SEQ ID NO: 60550 - RNA, 19 nt, Artificial Sequence
  Description of Artificial Sequence: Synthetic oligonucleotide
  Sense strand starting at position 1354 of SEQ ID NO: 748
ugaagucauguuggaaaua

SEQ ID NO: 60551 - RNA, 19 nt, Artificial Sequence
  Description of Artificial Sequence: Synthetic oligonucleotide
  Antisense strand to SEQ ID NO: 60470
uauuuccaacaugacuuca

SEQ ID NO: 60552 - RNA, 19 nt, Artificial Sequence
  Description of Artificial Sequence: Synthetic oligonucleotide
  Sense strand starting at position 1440 of SEQ ID NO: 748
gagugaugauaaguucuaa

SEQ ID NO: 60553 - RNA, 19 nt, Artificial Sequence
  Description of Artificial Sequence: Synthetic oligonucleotide
  Antisense strand to SEQ ID NO: 60472
uuagaacuuaucaucacuc

SEQ ID NO: 60554 - RNA, 19 nt, Artificial Sequence
  Description of Artificial Sequence: Synthetic oligonucleotide
  Sense strand starting at position 1457 of SEQ ID NO: 748
aagguuugacugugggaau

SEQ ID NO: 60555 - RNA, 19 nt, Artificial Sequence
  Description of Artificial Sequence: Synthetic oligonucleotide
  Antisense strand to SEQ ID NO: 60474
auucccacagucaaaccuu

SEQ ID NO: 60556 - RNA, 19 nt, Artificial Sequence
  Description of Artificial Sequence: Synthetic oligonucleotide
  Sense strand starting at position 1975 of SEQ ID NO: 748
guuugaggaaguugauauc

SEQ ID NO: 60557 - RNA, 19 nt, Artificial Sequence
  Description of Artificial Sequence: Synthetic oligonucleotide
  Antisense strand to SEQ ID NO: 60476
gauaucaacuuccucaaac

SEQ ID NO: 60558 - RNA, 19 nt, Artificial Sequence
  Description of Artificial Sequence: Synthetic oligonucleotide
  Sense strand starting at position 2059 of SEQ ID NO: 748
uucuaugaagucugagaaa

SEQ ID NO: 60559 - RNA, 19 nt, Artificial Sequence
  Description of Artificial Sequence: Synthetic oligonucleotide
  Antisense strand to SEQ ID NO: 60478
uuucucagacuucauagaa

SEQ ID NO: 60560 - RNA, 19 nt, Artificial Sequence
  Description of Artificial Sequence: Synthetic oligonucleotide
  Sense strand starting at position 2286 of SEQ ID NO: 748
ggaugucuccuggauuguu

SEQ ID NO: 60561 - RNA, 19 nt, Artificial Sequence
  Description of Artificial Sequence: Synthetic oligonucleotide
  Antisense strand to SEQ ID NO: 60480
aacaauccaggagacaucc

SEQ ID NO: 60562 - RNA, 19 nt, Artificial Sequence
  Description of Artificial Sequence: Synthetic oligonucleotide
  Sense strand starting at position 2445 of SEQ ID NO: 748
gcugcauaugaugacuuau

SEQ ID NO: 60563 - RNA, 19 nt, Artificial Sequence
  Description of Artificial Sequence: Synthetic oligonucleotide
  Antisense strand to SEQ ID NO: 60482
auaagucaucauaugcagc

SEQ ID NO: 60564 - RNA, 19 nt, Artificial Sequence
  Description of Artificial Sequence: Synthetic oligonucleotide
  Sense strand starting at position 2523 of SEQ ID NO: 748
aguaaaugagcaugaaauc

SEQ ID NO: 60565 - RNA, 19 nt, Artificial Sequence
  Description of Artificial Sequence: Synthetic oligonucleotide
  Antisense strand to SEQ ID NO: 60484
gauuucaugcucauuuacu

SEQ ID NO: 60566 - RNA, 19 nt, Artificial Sequence
  Description of Artificial Sequence: Synthetic oligonucleotide
  Sense strand starting at position 2730 of SEQ ID NO: 748
ccuuuagcacauuagggau

SEQ ID NO: 60567 - RNA, 19 nt, Artificial Sequence
  Description of Artificial Sequence: Synthetic oligonucleotide
  Antisense strand to SEQ ID NO: 60486
aucccuaaugugcuaaagg

SEQ ID NO: 60568 - RNA, 19 nt, Artificial Sequence
  Description of Artificial Sequence: Synthetic oligonucleotide
  Sense strand starting at position 2736 of SEQ ID NO: 748
gcacauuagggauaccagu

SEQ ID NO: 60569 - RNA, 19 nt, Artificial Sequence
  Description of Artificial Sequence: Synthetic oligonucleotide
  Antisense strand to SEQ ID NO: 60488
acugguaucccuaaugugc

SEQ ID NO: 60570 - RNA, 19 nt, Artificial Sequence
  Description of Artificial Sequence: Synthetic oligonucleotide
  Sense strand starting at position 2749 of SEQ ID NO: 748
accaguucuaggcaaguga

SEQ ID NO: 60571 - RNA, 19 nt, Artificial Sequence
  Description of Artificial Sequence: Synthetic oligonucleotide
  Antisense strand to SEQ ID NO: 60490
ucacuugccuagaacuggu

SEQ ID NO: 60572 - RNA, 19 nt, Artificial Sequence
  Description of Artificial Sequence: Synthetic oligonucleotide
  Sense strand starting at position 2760 of SEQ ID NO: 748
gcaagugaagccuagauua

SEQ ID NO: 60573 - RNA, 19 nt, Artificial Sequence
  Description of Artificial Sequence: Synthetic oligonucleotide
  Antisense strand to SEQ ID NO: 60492
uaaucuaggcuucacuugc

SEQ ID NO: 60574 - RNA, 19 nt, Artificial Sequence
  Description of Artificial Sequence: Synthetic oligonucleotide
  Sense strand starting at position 2848 of SEQ ID NO: 748
auaacuagaauguguggaa

SEQ ID NO: 60575 - RNA, 19 nt, Artificial Sequence
  Description of Artificial Sequence: Synthetic oligonucleotide
  Antisense strand to SEQ ID NO: 60494
uuccacacauucuaguuau

SEQ ID NO: 60576 - RNA, 19 nt, Artificial Sequence
  Description of Artificial Sequence: Synthetic oligonucleotide
  Sense strand starting at position 2849 of SEQ ID NO: 748
uaacuagaauguguggaaa

SEQ ID NO: 60577 - RNA, 19 nt, Artificial Sequence
  Description of Artificial Sequence: Synthetic oligonucleotide
  Antisense strand to SEQ ID NO: 60496
uuuccacacauucuaguua

SEQ ID NO: 60578 - RNA, 19 nt, Artificial Sequence
  Description of Artificial Sequence: Synthetic oligonucleotide
  Sense strand starting at position 2852 of SEQ ID NO: 748
cuagaauguguggaaagua

SEQ ID NO: 60579 - RNA, 19 nt, Artificial Sequence
  Description of Artificial Sequence: Synthetic oligonucleotide
  Antisense strand to SEQ ID NO: 60498
uacuuuccacacauucuag

SEQ ID NO: 60580 - RNA, 19 nt, Artificial Sequence
  Description of Artificial Sequence: Synthetic oligonucleotide
  Sense strand starting at position 2860 of SEQ ID NO: 748
uguggaaaguaaccuauua

SEQ ID NO: 60581 - RNA, 19 nt, Artificial Sequence
  Description of Artificial Sequence: Synthetic oligonucleotide
  Antisense strand to SEQ ID NO: 60500
uaauagguuacuuuccaca

SEQ ID NO: 60582 - RNA, 19 nt, Artificial Sequence
  Description of Artificial Sequence: Synthetic oligonucleotide
  Sense strand starting at position 2902 of SEQ ID NO: 748
gaugucuaaguccagguau

SEQ ID NO: 60583 - RNA, 19 nt, Artificial Sequence
  Description of Artificial Sequence: Synthetic oligonucleotide
  Antisense strand to SEQ ID NO: 60502
auaccuggacuuagacauc

SEQ ID NO: 60584 - RNA, 19 nt, Artificial Sequence
  Description of Artificial Sequence: Synthetic oligonucleotide
  Sense strand starting at position 3031 of SEQ ID NO: 748
auagguauuccauagcuuu

SEQ ID NO: 60585 - RNA, 19 nt, Artificial Sequence
  Description of Artificial Sequence: Synthetic oligonucleotide
  Antisense strand to SEQ ID NO: 60504
aaagcuauggaauaccuau

SEQ ID NO: 60586 - RNA, 19 nt, Artificial Sequence
  Description of Artificial Sequence: Synthetic oligonucleotide
  Sense strand starting at position 3147 of SEQ ID NO: 748
cuuuaaauccaggguguaa

SEQ ID NO: 60587 - RNA, 19 nt, Artificial Sequence
  Description of Artificial Sequence: Synthetic oligonucleotide
  Antisense strand to SEQ ID NO: 60506
uuacacccuggauuuaaag

SEQ ID NO: 60588 - RNA, 19 nt, Artificial Sequence
  Description of Artificial Sequence: Synthetic oligonucleotide
  Sense strand starting at position 3301 of SEQ ID NO: 748
auauauguuguacagugau

SEQ ID NO: 60589 - RNA, 19 nt, Artificial Sequence
  Description of Artificial Sequence: Synthetic oligonucleotide
  Antisense strand to SEQ ID NO: 60508
aucacuguacaacauauau

SEQ ID NO: 60590 - RNA, 19 nt, Artificial Sequence
  Description of Artificial Sequence: Synthetic oligonucleotide
  Sense strand starting at position 3319 of SEQ ID NO: 748
ugaucaaaucagggugguu

SEQ ID NO: 60591 - RNA, 19 nt, Artificial Sequence
  Description of Artificial Sequence: Synthetic oligonucleotide
  Antisense strand to SEQ ID NO: 60510
aaccacccugauuugauca

SEQ ID NO: 60592 - RNA, 19 nt, Artificial Sequence
  Description of Artificial Sequence: Synthetic oligonucleotide
  Sense strand starting at position 3800 of SEQ ID NO: 748
guugauucucaucacaucu

SEQ ID NO: 60593 - RNA, 19 nt, Artificial Sequence
  Description of Artificial Sequence: Synthetic oligonucleotide
  Antisense strand to SEQ ID NO: 60512
agaugugaugagaaucaac

SEQ ID NO: 60594 - RNA, 19 nt, Artificial Sequence
  Description of Artificial Sequence: Synthetic oligonucleotide
  Sense strand starting at position 51 of SEQ ID NO: 749
uccucauucguuuacauau

SEQ ID NO: 60595 - RNA, 19 nt, Artificial Sequence
  Description of Artificial Sequence: Synthetic oligonucleotide
  Antisense strand to SEQ ID NO: 60514
auauguaaacgaaugagga

SEQ ID NO: 60596 - RNA, 19 nt, Artificial Sequence
  Description of Artificial Sequence: Synthetic oligonucleotide
  Sense strand starting at position 176 of SEQ ID NO: 749
gcugauuccugagcuagag

SEQ ID NO: 60597 - RNA, 19 nt, Artificial Sequence
  Description of Artificial Sequence: Synthetic oligonucleotide
  Antisense strand to SEQ ID NO: 60516
cucuagcucaggaaucagc

SEQ ID NO: 60598 - RNA, 19 nt, Artificial Sequence
  Description of Artificial Sequence: Synthetic oligonucleotide
  Sense strand starting at position 220 of SEQ ID NO: 749
uuauucugacccugcagaa

SEQ ID NO: 60599 - RNA, 19 nt, Artificial Sequence
  Description of Artificial Sequence: Synthetic oligonucleotide
  Antisense strand to SEQ ID NO: 60518
uucugcagggucagaauaa

SEQ ID NO: 60600 - RNA, 19 nt, Artificial Sequence
  Description of Artificial Sequence: Synthetic oligonucleotide
  Sense strand starting at position 475 of SEQ ID NO: 749
gcaagugguguuggaaaca

SEQ ID NO: 60601 - RNA, 19 nt, Artificial Sequence
  Description of Artificial Sequence: Synthetic oligonucleotide
  Antisense strand to SEQ ID NO: 60520
uguuuccaacaccacuugc

SEQ ID NO: 60602 - RNA, 19 nt, Artificial Sequence
  Description of Artificial Sequence: Synthetic oligonucleotide
  Sense strand starting at position 520 of SEQ ID NO: 749
ccuagagggcaguaauauu

SEQ ID NO: 60603 - RNA, 19 nt, Artificial Sequence
  Description of Artificial Sequence: Synthetic oligonucleotide
  Antisense strand to SEQ ID NO: 60522
aauauuacugcccucuagg

SEQ ID NO: 60604 - RNA, 19 nt, Artificial Sequence
  Description of Artificial Sequence: Synthetic oligonucleotide
  Sense strand starting at position 592 of SEQ ID NO: 749
gggugacugauaugccaga

SEQ ID NO: 60605 - RNA, 19 nt, Artificial Sequence
  Description of Artificial Sequence: Synthetic oligonucleotide
  Antisense strand to SEQ ID NO: 60524
ucuggcauaucagucaccc

SEQ ID NO: 60606 - RNA, 19 nt, Artificial Sequence
  Description of Artificial Sequence: Synthetic oligonucleotide
  Sense strand starting at position 654 of SEQ ID NO: 749
gugacugcaucugugagga

SEQ ID NO: 60607 - RNA, 19 nt, Artificial Sequence
  Description of Artificial Sequence: Synthetic oligonucleotide
  Antisense strand to SEQ ID NO: 60526
uccucacagaugcagucac

SEQ ID NO: 60608 - RNA, 19 nt, Artificial Sequence
  Description of Artificial Sequence: Synthetic oligonucleotide
  Sense strand starting at position 894 of SEQ ID NO: 749
cgagaauacccauguugga

SEQ ID NO: 60609 - RNA, 19 nt, Artificial Sequence
  Description of Artificial Sequence: Synthetic oligonucleotide
  Antisense strand to SEQ ID NO: 60528
uccaacauggguauucucg

SEQ ID NO: 60610 - RNA, 19 nt, Artificial Sequence
  Description of Artificial Sequence: Synthetic oligonucleotide
  Sense strand starting at position 915 of SEQ ID NO: 749
uuuagugacucuccuugau

SEQ ID NO: 60611 - RNA, 19 nt, Artificial Sequence
  Description of Artificial Sequence: Synthetic oligonucleotide
  Antisense strand to SEQ ID NO: 60530
aucaaggagagucacuaaa

SEQ ID NO: 60612 - RNA, 19 nt, Artificial Sequence
  Description of Artificial Sequence: Synthetic oligonucleotide
  Sense strand starting at position 1427 of SEQ ID NO: 749
gcacucacccaggaaucuu

SEQ ID NO: 60613 - RNA, 19 nt, Artificial Sequence
  Description of Artificial Sequence: Synthetic oligonucleotide
  Antisense strand to SEQ ID NO: 60532
aagauuccugggugagugc

SEQ ID NO: 60614 - RNA, 19 nt, Artificial Sequence
  Description of Artificial Sequence: Synthetic oligonucleotide
  Sense strand starting at position 1471 of SEQ ID NO: 749
ccucauuguccacgauuaa

SEQ ID NO: 60615 - RNA, 19 nt, Artificial Sequence
  Description of Artificial Sequence: Synthetic oligonucleotide
  Antisense strand to SEQ ID NO: 60534
uuaaucguggacaaugagg

SEQ ID NO: 60616 - RNA, 19 nt, Artificial Sequence
  Description of Artificial Sequence: Synthetic oligonucleotide
  Sense strand starting at position 1472 of SEQ ID NO: 749
cucauuguccacgauuaaa

SEQ ID NO: 60617 - RNA, 19 nt, Artificial Sequence
  Description of Artificial Sequence: Synthetic oligonucleotide
  Antisense strand to SEQ ID NO: 60536
uuuaaucguggacaaugag

SEQ ID NO: 60618 - RNA, 19 nt, Artificial Sequence
  Description of Artificial Sequence: Synthetic oligonucleotide
  Sense strand starting at position 1574 of SEQ ID NO: 749
ggagaagggcauugcuaaa

SEQ ID NO: 60619 - RNA, 19 nt, Artificial Sequence
  Description of Artificial Sequence: Synthetic oligonucleotide
  Antisense strand to SEQ ID NO: 60538
uuuagcaaugcccuucucc

SEQ ID NO: 60620 - RNA, 19 nt, Artificial Sequence
  Description of Artificial Sequence: Synthetic oligonucleotide
  Sense strand starting at position 1686 of SEQ ID NO: 749
agugguccaccuugaacau

SEQ ID NO: 60621 - RNA, 19 nt, Artificial Sequence
  Description of Artificial Sequence: Synthetic oligonucleotide
  Antisense strand to SEQ ID NO: 60540
auguucaagguggaccacu

SEQ ID NO: 60622 - RNA, 19 nt, Artificial Sequence
  Description of Artificial Sequence: Synthetic oligonucleotide
  Sense strand starting at position 1687 of SEQ ID NO: 749
gugguccaccuugaacauu

SEQ ID NO: 60623 - RNA, 19 nt, Artificial Sequence
  Description of Artificial Sequence: Synthetic oligonucleotide
  Antisense strand to SEQ ID NO: 60542
aauguucaagguggaccac

SEQ ID NO: 60624 - RNA, 19 nt, Artificial Sequence
  Description of Artificial Sequence: Synthetic oligonucleotide
  Sense strand starting at position 1713 of SEQ ID NO: 749
gugcuuaaugcuuaaugga

SEQ ID NO: 60625 - RNA, 19 nt, Artificial Sequence
  Description of Artificial Sequence: Synthetic oligonucleotide
  Antisense strand to SEQ ID NO: 60544
uccauuaagcauuaagcac

SEQ ID NO: 60626 - RNA, 19 nt, Artificial Sequence
  Description of Artificial Sequence: Synthetic oligonucleotide
  Sense strand starting at position 1819 of SEQ ID NO: 749
gucccugggcuccaauaaa

SEQ ID NO: 60627 - RNA, 19 nt, Artificial Sequence
  Description of Artificial Sequence: Synthetic oligonucleotide
  Antisense strand to SEQ ID NO: 60546
uuuauuggagcccagggac

SEQ ID NO: 60628 - RNA, 19 nt, Artificial Sequence
  Description of Artificial Sequence: Synthetic oligonucleotide
  Sense strand starting at position 1971 of SEQ ID NO: 749
auguacucuuggucaccaa

SEQ ID NO: 60629 - RNA, 19 nt, Artificial Sequence
  Description of Artificial Sequence: Synthetic oligonucleotide
  Antisense strand to SEQ ID NO: 60548
uuggugaccaagaguacau

SEQ ID NO: 60630 - RNA, 19 nt, Artificial Sequence
  Description of Artificial Sequence: Synthetic oligonucleotide
  Sense strand starting at position 2083 of SEQ ID NO: 749
ccauuaucuuuguccugga

SEQ ID NO: 60631 - RNA, 19 nt, Artificial Sequence
  Description of Artificial Sequence: Synthetic oligonucleotide
  Antisense strand to SEQ ID NO: 60550
uccaggacaaagauaaugg

SEQ ID NO: 60632 - RNA, 19 nt, Artificial Sequence
  Description of Artificial Sequence: Synthetic oligonucleotide
  Sense strand starting at position 2453 of SEQ ID NO: 749
agggccuguuucucauaga

SEQ ID NO: 60633 - RNA, 19 nt, Artificial Sequence
  Description of Artificial Sequence: Synthetic oligonucleotide
  Antisense strand to SEQ ID NO: 60552
ucuaugagaaacaggcccu

SEQ ID NO: 60634 - RNA, 19 nt, Artificial Sequence
  Description of Artificial Sequence: Synthetic oligonucleotide
  Sense strand starting at position 2466 of SEQ ID NO: 749
cauagaugguguccucuau

SEQ ID NO: 60635 - RNA, 19 nt, Artificial Sequence
  Description of Artificial Sequence: Synthetic oligonucleotide
  Antisense strand to SEQ ID NO: 60554
auagaggacaccaucuaug

SEQ ID NO: 60636 - RNA, 19 nt, Artificial Sequence
  Description of Artificial Sequence: Synthetic oligonucleotide
  Sense strand starting at position 2615 of SEQ ID NO: 749
uuacuauugcauugaggau

SEQ ID NO: 60637 - RNA, 19 nt, Artificial Sequence
  Description of Artificial Sequence: Synthetic oligonucleotide
  Antisense strand to SEQ ID NO: 60556
auccucaaugcaauaguaa

SEQ ID NO: 60638 - RNA, 19 nt, Artificial Sequence
  Description of Artificial Sequence: Synthetic oligonucleotide
  Sense strand starting at position 2622 of SEQ ID NO: 749
ugcauugaggauuaaguau

SEQ ID NO: 60639 - RNA, 19 nt, Artificial Sequence
  Description of Artificial Sequence: Synthetic oligonucleotide
  Antisense strand to SEQ ID NO: 60558
auacuuaauccucaaugca

SEQ ID NO: 60640 - RNA, 19 nt, Artificial Sequence
  Description of Artificial Sequence: Synthetic oligonucleotide
  Sense strand starting at position 2695 of SEQ ID NO: 749
ugaccaagaucagcuuaau

SEQ ID NO: 60641 - RNA, 19 nt, Artificial Sequence
  Description of Artificial Sequence: Synthetic oligonucleotide
  Antisense strand to SEQ ID NO: 60560
auuaagcugaucuugguca

SEQ ID NO: 60642 - RNA, 19 nt, Artificial Sequence
  Description of Artificial Sequence: Synthetic oligonucleotide
  Sense strand starting at position 2712 of SEQ ID NO: 749
aucaauuucuaguaguaac

SEQ ID NO: 60643 - RNA, 19 nt, Artificial Sequence
  Description of Artificial Sequence: Synthetic oligonucleotide
  Antisense strand to SEQ ID NO: 60562
guuacuacuagaaauugau

SEQ ID NO: 60644 - RNA, 19 nt, Artificial Sequence
  Description of Artificial Sequence: Synthetic oligonucleotide
  Sense strand starting at position 2802 of SEQ ID NO: 749
auauauugcuucucaaggu

SEQ ID NO: 60645 - RNA, 19 nt, Artificial Sequence
  Description of Artificial Sequence: Synthetic oligonucleotide
  Antisense strand to SEQ ID NO: 60564
accuugagaagcaauauau

SEQ ID NO: 60646 - RNA, 19 nt, Artificial Sequence
  Description of Artificial Sequence: Synthetic oligonucleotide
  Sense strand starting at position 2881 of SEQ ID NO: 749
gucauucgaugacuuucua

SEQ ID NO: 60647 - RNA, 19 nt, Artificial Sequence
  Description of Artificial Sequence: Synthetic oligonucleotide
  Antisense strand to SEQ ID NO: 60566
uagaaagucaucgaaugac

SEQ ID NO: 60648 - RNA, 19 nt, Artificial Sequence
  Description of Artificial Sequence: Synthetic oligonucleotide
  Sense strand starting at position 3046 of SEQ ID NO: 749
aaagcaaagcgcguguuau

SEQ ID NO: 60649 - RNA, 19 nt, Artificial Sequence
  Description of Artificial Sequence: Synthetic oligonucleotide
  Antisense strand to SEQ ID NO: 60568
auaacacgcgcuuugcuuu

SEQ ID NO: 60650 - RNA, 19 nt, Artificial Sequence
  Description of Artificial Sequence: Synthetic oligonucleotide
  Sense strand starting at position 3058 of SEQ ID NO: 749
guguuaugugaacaccuau

SEQ ID NO: 60651 - RNA, 19 nt, Artificial Sequence
  Description of Artificial Sequence: Synthetic oligonucleotide
  Antisense strand to SEQ ID NO: 60570
auagguguucacauaacac

SEQ ID NO: 60652 - RNA, 19 nt, Artificial Sequence
  Description of Artificial Sequence: Synthetic oligonucleotide
  Sense strand starting at position 3082 of SEQ ID NO: 749
ugcucacuuugauuagaug

SEQ ID NO: 60653 - RNA, 19 nt, Artificial Sequence
  Description of Artificial Sequence: Synthetic oligonucleotide
  Antisense strand to SEQ ID NO: 60572
caucuaaucaaagugagca

SEQ ID NO: 60654 - RNA, 19 nt, Artificial Sequence
  Description of Artificial Sequence: Synthetic oligonucleotide
  Sense strand starting at position 3083 of SEQ ID NO: 749
gcucacuuugauuagaugu

SEQ ID NO: 60655 - RNA, 19 nt, Artificial Sequence
  Description of Artificial Sequence: Synthetic oligonucleotide
  Antisense strand to SEQ ID NO: 60574
acaucuaaucaaagugagc

SEQ ID NO: 60656 - RNA, 19 nt, Artificial Sequence
  Description of Artificial Sequence: Synthetic oligonucleotide
  Sense strand starting at position 3108 of SEQ ID NO: 749
aguagauguugucucauca

SEQ ID NO: 60657 - RNA, 19 nt, Artificial Sequence
  Description of Artificial Sequence: Synthetic oligonucleotide
  Antisense strand to SEQ ID NO: 60576
ugaugagacaacaucuacu

SEQ ID NO: 60658 - RNA, 19 nt, Artificial Sequence
  Description of Artificial Sequence: Synthetic oligonucleotide
  Sense strand starting at position 3129 of SEQ ID NO: 749
gaaccuuaugcaggaugaa

SEQ ID NO: 60659 - RNA, 19 nt, Artificial Sequence
  Description of Artificial Sequence: Synthetic oligonucleotide
  Antisense strand to SEQ ID NO: 60578
uucauccugcauaagguuc

SEQ ID NO: 60660 - RNA, 19 nt, Artificial Sequence
  Description of Artificial Sequence: Synthetic oligonucleotide
  Sense strand starting at position 3163 of SEQ ID NO: 749
aucacaggugcuuauaaau

SEQ ID NO: 60661 - RNA, 19 nt, Artificial Sequence
  Description of Artificial Sequence: Synthetic oligonucleotide
  Antisense strand to SEQ ID NO: 60580
auuuauaagcaccugugau

SEQ ID NO: 60662 - RNA, 19 nt, Artificial Sequence
  Description of Artificial Sequence: Synthetic oligonucleotide
  Sense strand starting at position 3169 of SEQ ID NO: 749
ggugcuuauaaaugaggga

SEQ ID NO: 60663 - RNA, 19 nt, Artificial Sequence
  Description of Artificial Sequence: Synthetic oligonucleotide
  Antisense strand to SEQ ID NO: 60582
ucccucauuuauaagcacc

SEQ ID NO: 60664 - RNA, 19 nt, Artificial Sequence
  Description of Artificial Sequence: Synthetic oligonucleotide
  Sense strand starting at position 3332 of SEQ ID NO: 749
uuuauaugugauggucauu

SEQ ID NO: 60665 - RNA, 19 nt, Artificial Sequence
  Description of Artificial Sequence: Synthetic oligonucleotide
  Antisense strand to SEQ ID NO: 60584
aaugaccaucacauauaaa

SEQ ID NO: 60666 - RNA, 19 nt, Artificial Sequence
  Description of Artificial Sequence: Synthetic oligonucleotide
  Sense strand starting at position 3337 of SEQ ID NO: 749
augugauggucauuaaagc

SEQ ID NO: 60667 - RNA, 19 nt, Artificial Sequence
  Description of Artificial Sequence: Synthetic oligonucleotide
  Antisense strand to SEQ ID NO: 60586
gcuuuaaugaccaucacau

SEQ ID NO: 60668 - RNA, 19 nt, Artificial Sequence
  Description of Artificial Sequence: Synthetic oligonucleotide
  Sense strand starting at position 3399 of SEQ ID NO: 749
caaggagagauguguguua

SEQ ID NO: 60669 - RNA, 19 nt, Artificial Sequence
  Description of Artificial Sequence: Synthetic oligonucleotide
  Antisense strand to SEQ ID NO: 60588
uaacacacaucucuccuug

SEQ ID NO: 60670 - RNA, 19 nt, Artificial Sequence
  Description of Artificial Sequence: Synthetic oligonucleotide
  Sense strand starting at position 3401 of SEQ ID NO: 749
aggagagauguguguuaaa

SEQ ID NO: 60671 - RNA, 19 nt, Artificial Sequence
  Description of Artificial Sequence: Synthetic oligonucleotide
  Antisense strand to SEQ ID NO: 60590
uuuaacacacaucucuccu

SEQ ID NO: 60672 - RNA, 19 nt, Artificial Sequence
  Description of Artificial Sequence: Synthetic oligonucleotide
  Sense strand starting at position 3922 of SEQ ID NO: 749
accacagaguuacuguaau

SEQ ID NO: 60673 - RNA, 19 nt, Artificial Sequence
  Description of Artificial Sequence: Synthetic oligonucleotide
  Antisense strand to SEQ ID NO: 60592
auuacaguaacucuguggu

SEQ ID NO: 60674 - RNA, 19 nt, Artificial Sequence
  Description of Artificial Sequence: Synthetic oligonucleotide
  Sense strand starting at position 34 of SEQ ID NO: 750
gugauuugccauugggcaa

SEQ ID NO: 60675 - RNA, 19 nt, Artificial Sequence
  Description of Artificial Sequence: Synthetic oligonucleotide
  Antisense strand to SEQ ID NO: 60594
uugcccaauggcaaaucac

SEQ ID NO: 60676 - RNA, 19 nt, Artificial Sequence
  Description of Artificial Sequence: Synthetic oligonucleotide
  Sense strand starting at position 74 of SEQ ID NO: 750
guggcugauccugaaauuc

SEQ ID NO: 60677 - RNA, 19 nt, Artificial Sequence
  Description of Artificial Sequence: Synthetic oligonucleotide
  Antisense strand to SEQ ID NO: 60596
gaauuucaggaucagccac

SEQ ID NO: 60678 - RNA, 19 nt, Artificial Sequence
  Description of Artificial Sequence: Synthetic oligonucleotide
  Sense strand starting at position 124 of SEQ ID NO: 750
gugaaccugggauguauau

SEQ ID NO: 60679 - RNA, 19 nt, Artificial Sequence
  Description of Artificial Sequence: Synthetic oligonucleotide
  Antisense strand to SEQ ID NO: 60598
auauacaucccagguucac

SEQ ID NO: 60680 - RNA, 19 nt, Artificial Sequence
  Description of Artificial Sequence: Synthetic oligonucleotide
  Sense strand starting at position 133 of SEQ ID NO: 750
ggauguauauaccucagaa

SEQ ID NO: 60681 - RNA, 19 nt, Artificial Sequence
  Description of Artificial Sequence: Synthetic oligonucleotide
  Antisense strand to SEQ ID NO: 60600
uucugagguauauacaucc

SEQ ID NO: 60682 - RNA, 19 nt, Artificial Sequence
  Description of Artificial Sequence: Synthetic oligonucleotide
  Sense strand starting at position 135 of SEQ ID NO: 750
auguauauaccucagaagu

SEQ ID NO: 60683 - RNA, 19 nt, Artificial Sequence
  Description of Artificial Sequence: Synthetic oligonucleotide
  Antisense strand to SEQ ID NO: 60602
acuucugagguauauacau

SEQ ID NO: 60684 - RNA, 19 nt, Artificial Sequence
  Description of Artificial Sequence: Synthetic oligonucleotide
  Sense strand starting at position 333 of SEQ ID NO: 750
gaggauggguugccugaga

SEQ ID NO: 60685 - RNA, 19 nt, Artificial Sequence
  Description of Artificial Sequence: Synthetic oligonucleotide
  Antisense strand to SEQ ID NO: 60604
ucucaggcaacccauccuc

SEQ ID NO: 60686 - RNA, 19 nt, Artificial Sequence
  Description of Artificial Sequence: Synthetic oligonucleotide
  Sense strand starting at position 353 of SEQ ID NO: 750
gucagacuuguguauggaa

SEQ ID NO: 60687 - RNA, 19 nt, Artificial Sequence
  Description of Artificial Sequence: Synthetic oligonucleotide
  Antisense strand to SEQ ID NO: 60606
uuccauacacaagucugac

SEQ ID NO: 60688 - RNA, 19 nt, Artificial Sequence
  Description of Artificial Sequence: Synthetic oligonucleotide
  Sense strand starting at position 425 of SEQ ID NO: 750
uuuggagauuuauaaggau

SEQ ID NO: 60689 - RNA, 19 nt, Artificial Sequence
  Description of Artificial Sequence: Synthetic oligonucleotide
  Antisense strand to SEQ ID NO: 60608
auccuuauaaaucuccaaa

SEQ ID NO: 60690 - RNA, 19 nt, Artificial Sequence
  Description of Artificial Sequence: Synthetic oligonucleotide
  Sense strand starting at position 622 of SEQ ID NO: 750
gaggaauaccgguaaugua

SEQ ID NO: 60691 - RNA, 19 nt, Artificial Sequence
  Description of Artificial Sequence: Synthetic oligonucleotide
  Antisense strand to SEQ ID NO: 60610
uacauuaccgguauuccuc

SEQ ID NO: 60692 - RNA, 19 nt, Artificial Sequence
  Description of Artificial Sequence: Synthetic oligonucleotide
  Sense strand starting at position 629 of SEQ ID NO: 750
accgguaauguagggagaa

SEQ ID NO: 60693 - RNA, 19 nt, Artificial Sequence
  Description of Artificial Sequence: Synthetic oligonucleotide
  Antisense strand to SEQ ID NO: 60612
uucucccuacauuaccggu

SEQ ID NO: 60694 - RNA, 19 nt, Artificial Sequence
  Description of Artificial Sequence: Synthetic oligonucleotide
  Sense strand starting at position 1056 of SEQ ID NO: 750
gcuauuauuuacuuggcca

SEQ ID NO: 60695 - RNA, 19 nt, Artificial Sequence
  Description of Artificial Sequence: Synthetic oligonucleotide
  Antisense strand to SEQ ID NO: 60614
uggccaaguaaauaauagc

SEQ ID NO: 60696 - RNA, 19 nt, Artificial Sequence
  Description of Artificial Sequence: Synthetic oligonucleotide
  Sense strand starting at position 1273 of SEQ ID NO: 750
gaaguaacugcucaucuga

SEQ ID NO: 60697 - RNA, 19 nt, Artificial Sequence
  Description of Artificial Sequence: Synthetic oligonucleotide
  Antisense strand to SEQ ID NO: 60616
ucagaugagcaguuacuuc

SEQ ID NO: 60698 - RNA, 19 nt, Artificial Sequence
  Description of Artificial Sequence: Synthetic oligonucleotide
  Sense strand starting at position 1338 of SEQ ID NO: 750
ugugguuuggcagaaggaa

SEQ ID NO: 60699 - RNA, 19 nt, Artificial Sequence
  Description of Artificial Sequence: Synthetic oligonucleotide
  Antisense strand to SEQ ID NO: 60618
uuccuucugccaaaccaca

SEQ ID NO: 60700 - RNA, 19 nt, Artificial Sequence
  Description of Artificial Sequence: Synthetic oligonucleotide
  Sense strand starting at position 1366 of SEQ ID NO: 750
uuuccuaugaggugagaaa

SEQ ID NO: 60701 - RNA, 19 nt, Artificial Sequence
  Description of Artificial Sequence: Synthetic oligonucleotide
  Antisense strand to SEQ ID NO: 60620
uuucucaccucauaggaaa

SEQ ID NO: 60702 - RNA, 19 nt, Artificial Sequence
  Description of Artificial Sequence: Synthetic oligonucleotide
  Sense strand starting at position 1656 of SEQ ID NO: 750
gggaaagucugucucacca

SEQ ID NO: 60703 - RNA, 19 nt, Artificial Sequence
  Description of Artificial Sequence: Synthetic oligonucleotide
  Antisense strand to SEQ ID NO: 60622
uggugagacagacuuuccc

SEQ ID NO: 60704 - RNA, 19 nt, Artificial Sequence
  Description of Artificial Sequence: Synthetic oligonucleotide
  Sense strand starting at position 1679 of SEQ ID NO: 750
cccgacuuaucuccaagaa

SEQ ID NO: 60705 - RNA, 19 nt, Artificial Sequence
  Description of Artificial Sequence: Synthetic oligonucleotide
  Antisense strand to SEQ ID NO: 60624
uucuuggagauaagucggg

SEQ ID NO: 60706 - RNA, 19 nt, Artificial Sequence
  Description of Artificial Sequence: Synthetic oligonucleotide
  Sense strand starting at position 1718 of SEQ ID NO: 750
ucagaugagaccugcaaga

SEQ ID NO: 60707 - RNA, 19 nt, Artificial Sequence
  Description of Artificial Sequence: Synthetic oligonucleotide
  Antisense strand to SEQ ID NO: 60626
ucuugcaggucucaucuga

SEQ ID NO: 60708 - RNA, 19 nt, Artificial Sequence
  Description of Artificial Sequence: Synthetic oligonucleotide
  Sense strand starting at position 1891 of SEQ ID NO: 750
ggaguaaugucuccaagac

SEQ ID NO: 60709 - RNA, 19 nt, Artificial Sequence
  Description of Artificial Sequence: Synthetic oligonucleotide
  Antisense strand to SEQ ID NO: 60628
gucuuggagacauuacucc

SEQ ID NO: 60710 - RNA, 19 nt, Artificial Sequence
  Description of Artificial Sequence: Synthetic oligonucleotide
  Sense strand starting at position 1892 of SEQ ID NO: 750
gaguaaugucuccaagacu

SEQ ID NO: 60711 - RNA, 19 nt, Artificial Sequence
  Description of Artificial Sequence: Synthetic oligonucleotide
  Antisense strand to SEQ ID NO: 60630
agucuuggagacauuacuc

SEQ ID NO: 60712 - RNA, 19 nt, Artificial Sequence
  Description of Artificial Sequence: Synthetic oligonucleotide
  Sense strand starting at position 2206 of SEQ ID NO: 750
gagauaaaucagcaagcgu

SEQ ID NO: 60713 - RNA, 19 nt, Artificial Sequence
  Description of Artificial Sequence: Synthetic oligonucleotide
  Antisense strand to SEQ ID NO: 60632
acgcuugcugauuuaucuc

SEQ ID NO: 60714 - RNA, 19 nt, Artificial Sequence
  Description of Artificial Sequence: Synthetic oligonucleotide
  Sense strand starting at position 2260 of SEQ ID NO: 750
gggcuuugcaaucaaagag

SEQ ID NO: 60715 - RNA, 19 nt, Artificial Sequence
  Description of Artificial Sequence: Synthetic oligonucleotide
  Antisense strand to SEQ ID NO: 60634
cucuuugauugcaaagccc

SEQ ID NO: 60716 - RNA, 19 nt, Artificial Sequence
  Description of Artificial Sequence: Synthetic oligonucleotide
  Sense strand starting at position 2625 of SEQ ID NO: 750
uguuuaugugcugcaugua

SEQ ID NO: 60717 - RNA, 19 nt, Artificial Sequence
  Description of Artificial Sequence: Synthetic oligonucleotide
  Antisense strand to SEQ ID NO: 60636
uacaugcagcacauaaaca

SEQ ID NO: 60718 - RNA, 19 nt, Artificial Sequence
  Description of Artificial Sequence: Synthetic oligonucleotide
  Sense strand starting at position 2717 of SEQ ID NO: 750
gauauaacuucuguuagga

SEQ ID NO: 60719 - RNA, 19 nt, Artificial Sequence
  Description of Artificial Sequence: Synthetic oligonucleotide
  Antisense strand to SEQ ID NO: 60638
uccuaacagaaguuauauc

SEQ ID NO: 60720 - RNA, 19 nt, Artificial Sequence
  Description of Artificial Sequence: Synthetic oligonucleotide
  Sense strand starting at position 2957 of SEQ ID NO: 750
ucucuauauguuuauguga

SEQ ID NO: 60721 - RNA, 19 nt, Artificial Sequence
  Description of Artificial Sequence: Synthetic oligonucleotide
  Antisense strand to SEQ ID NO: 60640
ucacauaaacauauagaga

SEQ ID NO: 60722 - RNA, 19 nt, Artificial Sequence
  Description of Artificial Sequence: Synthetic oligonucleotide
  Sense strand starting at position 3096 of SEQ ID NO: 750
ggacuugccaaaugaacga

SEQ ID NO: 60723 - RNA, 19 nt, Artificial Sequence
  Description of Artificial Sequence: Synthetic oligonucleotide
  Antisense strand to SEQ ID NO: 60642
ucguucauuuggcaagucc

SEQ ID NO: 60724 - RNA, 19 nt, Artificial Sequence
  Description of Artificial Sequence: Synthetic oligonucleotide
  Sense strand starting at position 3150 of SEQ ID NO: 750
aggauuggauguguuucaa

SEQ ID NO: 60725 - RNA, 19 nt, Artificial Sequence
  Description of Artificial Sequence: Synthetic oligonucleotide
  Antisense strand to SEQ ID NO: 60644
uugaaacacauccaauccu

SEQ ID NO: 60726 - RNA, 19 nt, Artificial Sequence
  Description of Artificial Sequence: Synthetic oligonucleotide
  Sense strand starting at position 3178 of SEQ ID NO: 750
agucauuccugguuagaga

SEQ ID NO: 60727 - RNA, 19 nt, Artificial Sequence
  Description of Artificial Sequence: Synthetic oligonucleotide
  Antisense strand to SEQ ID NO: 60646
ucucuaaccaggaaugacu

SEQ ID NO: 60728 - RNA, 19 nt, Artificial Sequence
  Description of Artificial Sequence: Synthetic oligonucleotide
  Sense strand starting at position 3179 of SEQ ID NO: 750
gucauuccugguuagagau

SEQ ID NO: 60729 - RNA, 19 nt, Artificial Sequence
  Description of Artificial Sequence: Synthetic oligonucleotide
  Antisense strand to SEQ ID NO: 60648
aucucuaaccaggaaugac

SEQ ID NO: 60730 - RNA, 19 nt, Artificial Sequence
  Description of Artificial Sequence: Synthetic oligonucleotide
  Sense strand starting at position 3289 of SEQ ID NO: 750
acuacagggucuuuguaaa

SEQ ID NO: 60731 - RNA, 19 nt, Artificial Sequence
  Description of Artificial Sequence: Synthetic oligonucleotide
  Antisense strand to SEQ ID NO: 60650
uuuacaaagacccuguagu

SEQ ID NO: 60732 - RNA, 19 nt, Artificial Sequence
  Description of Artificial Sequence: Synthetic oligonucleotide
  Sense strand starting at position 3308 of SEQ ID NO: 750
cuuguaauuguagaguaug

SEQ ID NO: 60733 - RNA, 19 nt, Artificial Sequence
  Description of Artificial Sequence: Synthetic oligonucleotide
  Antisense strand to SEQ ID NO: 60652
cauacucuacaauuacaag

SEQ ID NO: 60734 - RNA, 19 nt, Artificial Sequence
  Description of Artificial Sequence: Synthetic oligonucleotide
  Sense strand starting at position 3329 of SEQ ID NO: 750
gccacaucuacugagaggu

SEQ ID NO: 60735 - RNA, 19 nt, Artificial Sequence
  Description of Artificial Sequence: Synthetic oligonucleotide
  Antisense strand to SEQ ID NO: 60654
accucucaguagauguggc

SEQ ID NO: 60736 - RNA, 19 nt, Artificial Sequence
  Description of Artificial Sequence: Synthetic oligonucleotide
  Sense strand starting at position 3342 of SEQ ID NO: 750
agagguauucucugaccuc

SEQ ID NO: 60737 - RNA, 19 nt, Artificial Sequence
  Description of Artificial Sequence: Synthetic oligonucleotide
  Antisense strand to SEQ ID NO: 60656
gaggucagagaauaccucu

SEQ ID NO: 60738 - RNA, 19 nt, Artificial Sequence
  Description of Artificial Sequence: Synthetic oligonucleotide
  Sense strand starting at position 3463 of SEQ ID NO: 750
gguauuccucaaugaucua

SEQ ID NO: 60739 - RNA, 19 nt, Artificial Sequence
  Description of Artificial Sequence: Synthetic oligonucleotide
  Antisense strand to SEQ ID NO: 60658
uagaucauugaggaauacc

SEQ ID NO: 60740 - RNA, 19 nt, Artificial Sequence
  Description of Artificial Sequence: Synthetic oligonucleotide
  Sense strand starting at position 3477 of SEQ ID NO: 750
aucuaaguaucuuuaggga

SEQ ID NO: 60741 - RNA, 19 nt, Artificial Sequence
  Description of Artificial Sequence: Synthetic oligonucleotide
  Antisense strand to SEQ ID NO: 60660
ucccuaaagauacuuagau

SEQ ID NO: 60742 - RNA, 19 nt, Artificial Sequence
  Description of Artificial Sequence: Synthetic oligonucleotide
  Sense strand starting at position 3552 of SEQ ID NO: 750
aaggaagguucagugggau

SEQ ID NO: 60743 - RNA, 19 nt, Artificial Sequence
  Description of Artificial Sequence: Synthetic oligonucleotide
  Antisense strand to SEQ ID NO: 60662
aucccacugaaccuuccuu

SEQ ID NO: 60744 - RNA, 19 nt, Artificial Sequence
  Description of Artificial Sequence: Synthetic oligonucleotide
  Sense strand starting at position 3555 of SEQ ID NO: 750
gaagguucagugggauaug

SEQ ID NO: 60745 - RNA, 19 nt, Artificial Sequence
  Description of Artificial Sequence: Synthetic oligonucleotide
  Antisense strand to SEQ ID NO: 60664
cauaucccacugaaccuuc

SEQ ID NO: 60746 - RNA, 19 nt, Artificial Sequence
  Description of Artificial Sequence: Synthetic oligonucleotide
  Sense strand starting at position 3694 of SEQ ID NO: 750
uuggaaagauaugcucaga

SEQ ID NO: 60747 - RNA, 19 nt, Artificial Sequence
  Description of Artificial Sequence: Synthetic oligonucleotide
  Antisense strand to SEQ ID NO: 60666
ucugagcauaucuuuccaa

SEQ ID NO: 60748 - RNA, 19 nt, Artificial Sequence
  Description of Artificial Sequence: Synthetic oligonucleotide
  Sense strand starting at position 3840 of SEQ ID NO: 750
aguagaggauugccagaua

SEQ ID NO: 60749 - RNA, 19 nt, Artificial Sequence
  Description of Artificial Sequence: Synthetic oligonucleotide
  Antisense strand to SEQ ID NO: 60668
uaucuggcaauccucuacu

SEQ ID NO: 60750 - RNA, 19 nt, Artificial Sequence
  Description of Artificial Sequence: Synthetic oligonucleotide
  Sense strand starting at position 3934 of SEQ ID NO: 750
auacuugggauauguauga

SEQ ID NO: 60751 - RNA, 19 nt, Artificial Sequence
  Description of Artificial Sequence: Synthetic oligonucleotide
  Antisense strand to SEQ ID NO: 60670
ucauacauaucccaaguau

SEQ ID NO: 60752 - RNA, 19 nt, Artificial Sequence
  Description of Artificial Sequence: Synthetic oligonucleotide
  Sense strand starting at position 3980 of SEQ ID NO: 750
guaacaagacugggcaauu

SEQ ID NO: 60753 - RNA, 19 nt, Artificial Sequence
  Description of Artificial Sequence: Synthetic oligonucleotide
  Antisense strand to SEQ ID NO: 60672
aauugcccagucuuguuac

SEQ ID NO: 60754 - RNA, 19 nt, Artificial Sequence
  Description of Artificial Sequence: Synthetic oligonucleotide
  Sense strand starting at position 196 of SEQ ID NO: 751
uaguuauuaggguaucuag

SEQ ID NO: 60755 - RNA, 19 nt, Artificial Sequence
  Description of Artificial Sequence: Synthetic oligonucleotide
  Antisense strand to SEQ ID NO: 60674
cuagauacccuaauaacua

SEQ ID NO: 60756 - RNA, 19 nt, Artificial Sequence
  Description of Artificial Sequence: Synthetic oligonucleotide
  Sense strand starting at position 199 of SEQ ID NO: 751
uuauuaggguaucuagaga

SEQ ID NO: 60757 - RNA, 19 nt, Artificial Sequence
  Description of Artificial Sequence: Synthetic oligonucleotide
  Antisense strand to SEQ ID NO: 60676
ucucuagauacccuaauaa

SEQ ID NO: 60758 - RNA, 19 nt, Artificial Sequence
  Description of Artificial Sequence: Synthetic oligonucleotide
  Sense strand starting at position 244 of SEQ ID NO: 751
uuaccagauuguccacaga

SEQ ID NO: 60759 - RNA, 19 nt, Artificial Sequence
  Description of Artificial Sequence: Synthetic oligonucleotide
  Antisense strand to SEQ ID NO: 60678
ucuguggacaaucugguaa

SEQ ID NO: 60760 - RNA, 19 nt, Artificial Sequence
  Description of Artificial Sequence: Synthetic oligonucleotide
  Sense strand starting at position 443 of SEQ ID NO: 751
cagacagucugguuugaau

SEQ ID NO: 60761 - RNA, 19 nt, Artificial Sequence
  Description of Artificial Sequence: Synthetic oligonucleotide
  Antisense strand to SEQ ID NO: 60680
auucaaaccagacugucug

SEQ ID NO: 60762 - RNA, 19 nt, Artificial Sequence
  Description of Artificial Sequence: Synthetic oligonucleotide
  Sense strand starting at position 467 of SEQ ID NO: 751
cuguaugacccagggcaaa

SEQ ID NO: 60763 - RNA, 19 nt, Artificial Sequence
  Description of Artificial Sequence: Synthetic oligonucleotide
  Antisense strand to SEQ ID NO: 60682
uuugcccugggucauacag

SEQ ID NO: 60764 - RNA, 19 nt, Artificial Sequence
  Description of Artificial Sequence: Synthetic oligonucleotide
  Sense strand starting at position 563 of SEQ ID NO: 751
ugaguuagaucaguaaggu

SEQ ID NO: 60765 - RNA, 19 nt, Artificial Sequence
  Description of Artificial Sequence: Synthetic oligonucleotide
  Antisense strand to SEQ ID NO: 60684
accuuacugaucuaacuca

SEQ ID NO: 60766 - RNA, 19 nt, Artificial Sequence
  Description of Artificial Sequence: Synthetic oligonucleotide
  Sense strand starting at position 564 of SEQ ID NO: 751
gaguuagaucaguaagguu

SEQ ID NO: 60767 - RNA, 19 nt, Artificial Sequence
  Description of Artificial Sequence: Synthetic oligonucleotide
  Antisense strand to SEQ ID NO: 60686
aaccuuacugaucuaacuc

SEQ ID NO: 60768 - RNA, 19 nt, Artificial Sequence
  Description of Artificial Sequence: Synthetic oligonucleotide
  Sense strand starting at position 732 of SEQ ID NO: 751
guuagauuauggguucgaa

SEQ ID NO: 60769 - RNA, 19 nt, Artificial Sequence
  Description of Artificial Sequence: Synthetic oligonucleotide
  Antisense strand to SEQ ID NO: 60688
uucgaacccauaaucuaac

SEQ ID NO: 60770 - RNA, 19 nt, Artificial Sequence
  Description of Artificial Sequence: Synthetic oligonucleotide
  Sense strand starting at position 959 of SEQ ID NO: 751
uccuguaacuauuugugua

SEQ ID NO: 60771 - RNA, 19 nt, Artificial Sequence
  Description of Artificial Sequence: Synthetic oligonucleotide
  Antisense strand to SEQ ID NO: 60690
uacacaaauaguuacagga

SEQ ID NO: 60772 - RNA, 19 nt, Artificial Sequence
  Description of Artificial Sequence: Synthetic oligonucleotide
  Sense strand starting at position 961 of SEQ ID NO: 751
cuguaacuauuuguguaau

SEQ ID NO: 60773 - RNA, 19 nt, Artificial Sequence
  Description of Artificial Sequence: Synthetic oligonucleotide
  Antisense strand to SEQ ID NO: 60692
auuacacaaauaguuacag

SEQ ID NO: 60774 - RNA, 19 nt, Artificial Sequence
  Description of Artificial Sequence: Synthetic oligonucleotide
  Sense strand starting at position 1034 of SEQ ID NO: 751
uugagaaugucaccucuug

SEQ ID NO: 60775 - RNA, 19 nt, Artificial Sequence
  Description of Artificial Sequence: Synthetic oligonucleotide
  Antisense strand to SEQ ID NO: 60694
caagaggugacauucucaa

SEQ ID NO: 60776 - RNA, 19 nt, Artificial Sequence
  Description of Artificial Sequence: Synthetic oligonucleotide
  Sense strand starting at position 1209 of SEQ ID NO: 751
cuagacaaauacgcuuaau

SEQ ID NO: 60777 - RNA, 19 nt, Artificial Sequence
  Description of Artificial Sequence: Synthetic oligonucleotide
  Antisense strand to SEQ ID NO: 60696
auuaagcguauuugucuag

SEQ ID NO: 60778 - RNA, 19 nt, Artificial Sequence
  Description of Artificial Sequence: Synthetic oligonucleotide
  Sense strand starting at position 1284 of SEQ ID NO: 751
ggaaauccgugccucauuu

SEQ ID NO: 60779 - RNA, 19 nt, Artificial Sequence
  Description of Artificial Sequence: Synthetic oligonucleotide
  Antisense strand to SEQ ID NO: 60698
aaaugaggcacggauuucc

SEQ ID NO: 60780 - RNA, 19 nt, Artificial Sequence
  Description of Artificial Sequence: Synthetic oligonucleotide
  Sense strand starting at position 1394 of SEQ ID NO: 751
ucagaacagguuugaacuu

SEQ ID NO: 60781 - RNA, 19 nt, Artificial Sequence
  Description of Artificial Sequence: Synthetic oligonucleotide
  Antisense strand to SEQ ID NO: 60700
aaguucaaaccuguucuga

SEQ ID NO: 60782 - RNA, 19 nt, Artificial Sequence
  Description of Artificial Sequence: Synthetic oligonucleotide
  Sense strand starting at position 1432 of SEQ ID NO: 751
aacuauucucagcagguga

SEQ ID NO: 60783 - RNA, 19 nt, Artificial Sequence
  Description of Artificial Sequence: Synthetic oligonucleotide
  Antisense strand to SEQ ID NO: 60702
ucaccugcugagaauaguu

SEQ ID NO: 60784 - RNA, 19 nt, Artificial Sequence
  Description of Artificial Sequence: Synthetic oligonucleotide
  Sense strand starting at position 1747 of SEQ ID NO: 751
ccaugauugcagcagcaga

SEQ ID NO: 60785 - RNA, 19 nt, Artificial Sequence
  Description of Artificial Sequence: Synthetic oligonucleotide
  Antisense strand to SEQ ID NO: 60704
ucugcugcugcaaucaugg

SEQ ID NO: 60786 - RNA, 19 nt, Artificial Sequence
  Description of Artificial Sequence: Synthetic oligonucleotide
  Sense strand starting at position 1865 of SEQ ID NO: 751
ggaagccugcuccaggauu

SEQ ID NO: 60787 - RNA, 19 nt, Artificial Sequence
  Description of Artificial Sequence: Synthetic oligonucleotide
  Antisense strand to SEQ ID NO: 60706
aauccuggagcaggcuucc

SEQ ID NO: 60788 - RNA, 19 nt, Artificial Sequence
  Description of Artificial Sequence: Synthetic oligonucleotide
  Sense strand starting at position 1984 of SEQ ID NO: 751
gcauaaagcugauugagau

SEQ ID NO: 60789 - RNA, 19 nt, Artificial Sequence
  Description of Artificial Sequence: Synthetic oligonucleotide
  Antisense strand to SEQ ID NO: 60708
aucucaaucagcuuuaugc

SEQ ID NO: 60790 - RNA, 19 nt, Artificial Sequence
  Description of Artificial Sequence: Synthetic oligonucleotide
  Sense strand starting at position 2267 of SEQ ID NO: 751
uaaggaugucccugaauau

SEQ ID NO: 60791 - RNA, 19 nt, Artificial Sequence
  Description of Artificial Sequence: Synthetic oligonucleotide
  Antisense strand to SEQ ID NO: 60710
auauucagggacauccuua

SEQ ID NO: 60792 - RNA, 19 nt, Artificial Sequence
  Description of Artificial Sequence: Synthetic oligonucleotide
  Sense strand starting at position 2336 of SEQ ID NO: 751
cgcugauaccucuacugga

SEQ ID NO: 60793 - RNA, 19 nt, Artificial Sequence
  Description of Artificial Sequence: Synthetic oligonucleotide
  Antisense strand to SEQ ID NO: 60712
uccaguagagguaucagcg

SEQ ID NO: 60794 - RNA, 19 nt, Artificial Sequence
  Description of Artificial Sequence: Synthetic oligonucleotide
  Sense strand starting at position 2408 of SEQ ID NO: 751
acucucaccuugucugaua

SEQ ID NO: 60795 - RNA, 19 nt, Artificial Sequence
  Description of Artificial Sequence: Synthetic oligonucleotide
  Antisense strand to SEQ ID NO: 60714
uaucagacaaggugagagu

SEQ ID NO: 60796 - RNA, 19 nt, Artificial Sequence
  Description of Artificial Sequence: Synthetic oligonucleotide
  Sense strand starting at position 2528 of SEQ ID NO: 751
ccuagauaauaggccauaa

SEQ ID NO: 60797 - RNA, 19 nt, Artificial Sequence
  Description of Artificial Sequence: Synthetic oligonucleotide
  Antisense strand to SEQ ID NO: 60716
uuauggccuauuaucuagg

SEQ ID NO: 60798 - RNA, 19 nt, Artificial Sequence
  Description of Artificial Sequence: Synthetic oligonucleotide
  Sense strand starting at position 2584 of SEQ ID NO: 751
caggaaugucuuggcaaau

SEQ ID NO: 60799 - RNA, 19 nt, Artificial Sequence
  Description of Artificial Sequence: Synthetic oligonucleotide
  Antisense strand to SEQ ID NO: 60718
auuugccaagacauuccug

SEQ ID NO: 60800 - RNA, 19 nt, Artificial Sequence
  Description of Artificial Sequence: Synthetic oligonucleotide
  Sense strand starting at position 2585 of SEQ ID NO: 751
aggaaugucuuggcaaaua

SEQ ID NO: 60801 - RNA, 19 nt, Artificial Sequence
  Description of Artificial Sequence: Synthetic oligonucleotide
  Antisense strand to SEQ ID NO: 60720
uauuugccaagacauuccu

SEQ ID NO: 60802 - RNA, 19 nt, Artificial Sequence
  Description of Artificial Sequence: Synthetic oligonucleotide
  Sense strand starting at position 2643 of SEQ ID NO: 751
gagagaagaaguugugauu

SEQ ID NO: 60803 - RNA, 19 nt, Artificial Sequence
  Description of Artificial Sequence: Synthetic oligonucleotide
  Antisense strand to SEQ ID NO: 60722
aaucacaacuucuucucuc

SEQ ID NO: 60804 - RNA, 19 nt, Artificial Sequence
  Description of Artificial Sequence: Synthetic oligonucleotide
  Sense strand starting at position 2696 of SEQ ID NO: 751
auaugauggcuuuagccuu

SEQ ID NO: 60805 - RNA, 19 nt, Artificial Sequence
  Description of Artificial Sequence: Synthetic oligonucleotide
  Antisense strand to SEQ ID NO: 60724
aaggcuaaagccaucauau

SEQ ID NO: 60806 - RNA, 19 nt, Artificial Sequence
  Description of Artificial Sequence: Synthetic oligonucleotide
  Sense strand starting at position 2733 of SEQ ID NO: 751
ggaagucagaguggguauu

SEQ ID NO: 60807 - RNA, 19 nt, Artificial Sequence
  Description of Artificial Sequence: Synthetic oligonucleotide
  Antisense strand to SEQ ID NO: 60726
aauacccacucugacuucc

SEQ ID NO: 60808 - RNA, 19 nt, Artificial Sequence
  Description of Artificial Sequence: Synthetic oligonucleotide
  Sense strand starting at position 2957 of SEQ ID NO: 751
ugguauguauaacucuuua

SEQ ID NO: 60809 - RNA, 19 nt, Artificial Sequence
  Description of Artificial Sequence: Synthetic oligonucleotide
  Antisense strand to SEQ ID NO: 60728
uaaagaguuauacauacca

SEQ ID NO: 60810 - RNA, 19 nt, Artificial Sequence
  Description of Artificial Sequence: Synthetic oligonucleotide
  Sense strand starting at position 3115 of SEQ ID NO: 751
cuggaaguacaguguuaau

SEQ ID NO: 60811 - RNA, 19 nt, Artificial Sequence
  Description of Artificial Sequence: Synthetic oligonucleotide
  Antisense strand to SEQ ID NO: 60730
auuaacacuguacuuccag

SEQ ID NO: 60812 - RNA, 19 nt, Artificial Sequence
  Description of Artificial Sequence: Synthetic oligonucleotide
  Sense strand starting at position 3149 of SEQ ID NO: 751
uuucauucugguggagaag

SEQ ID NO: 60813 - RNA, 19 nt, Artificial Sequence
  Description of Artificial Sequence: Synthetic oligonucleotide
  Antisense strand to SEQ ID NO: 60732
cuucuccaccagaaugaaa

SEQ ID NO: 60814 - RNA, 19 nt, Artificial Sequence
  Description of Artificial Sequence: Synthetic oligonucleotide
  Sense strand starting at position 3191 of SEQ ID NO: 751
auagaagugaauuguaugu

SEQ ID NO: 60815 - RNA, 19 nt, Artificial Sequence
  Description of Artificial Sequence: Synthetic oligonucleotide
  Antisense strand to SEQ ID NO: 60734
acauacaauucacuucuau

SEQ ID NO: 60816 - RNA, 19 nt, Artificial Sequence
  Description of Artificial Sequence: Synthetic oligonucleotide
  Sense strand starting at position 3231 of SEQ ID NO: 751
agggaaaucugacccaguu

SEQ ID NO: 60817 - RNA, 19 nt, Artificial Sequence
  Description of Artificial Sequence: Synthetic oligonucleotide
  Antisense strand to SEQ ID NO: 60736
aacugggucagauuucccu

SEQ ID NO: 60818 - RNA, 19 nt, Artificial Sequence
  Description of Artificial Sequence: Synthetic oligonucleotide
  Sense strand starting at position 3317 of SEQ ID NO: 751
gagagaugagcaugcacua

SEQ ID NO: 60819 - RNA, 19 nt, Artificial Sequence
  Description of Artificial Sequence: Synthetic oligonucleotide
  Antisense strand to SEQ ID NO: 60738
uagugcaugcucaucucuc

SEQ ID NO: 60820 - RNA, 19 nt, Artificial Sequence
  Description of Artificial Sequence: Synthetic oligonucleotide
  Sense strand starting at position 3372 of SEQ ID NO: 751
ucaagauaucugugaauag

SEQ ID NO: 60821 - RNA, 19 nt, Artificial Sequence
  Description of Artificial Sequence: Synthetic oligonucleotide
  Antisense strand to SEQ ID NO: 60740
cuauucacagauaucuuga

SEQ ID NO: 60822 - RNA, 19 nt, Artificial Sequence
  Description of Artificial Sequence: Synthetic oligonucleotide
  Sense strand starting at position 3408 of SEQ ID NO: 751
gauuaagaguggucuguau

SEQ ID NO: 60823 - RNA, 19 nt, Artificial Sequence
  Description of Artificial Sequence: Synthetic oligonucleotide
  Antisense strand to SEQ ID NO: 60742
auacagaccacucuuaauc

SEQ ID NO: 60824 - RNA, 19 nt, Artificial Sequence
  Description of Artificial Sequence: Synthetic oligonucleotide
  Sense strand starting at position 3410 of SEQ ID NO: 751
uuaagaguggucuguauuu

SEQ ID NO: 60825 - RNA, 19 nt, Artificial Sequence
  Description of Artificial Sequence: Synthetic oligonucleotide
  Antisense strand to SEQ ID NO: 60744
aaauacagaccacucuuaa

SEQ ID NO: 60826 - RNA, 19 nt, Artificial Sequence
  Description of Artificial Sequence: Synthetic oligonucleotide
  Sense strand starting at position 3514 of SEQ ID NO: 751
uguccauggccuuagaaga

SEQ ID NO: 60827 - RNA, 19 nt, Artificial Sequence
  Description of Artificial Sequence: Synthetic oligonucleotide
  Antisense strand to SEQ ID NO: 60746
ucuucuaaggccauggaca

SEQ ID NO: 60828 - RNA, 19 nt, Artificial Sequence
  Description of Artificial Sequence: Synthetic oligonucleotide
  Sense strand starting at position 3744 of SEQ ID NO: 751
agaaccugaucugcagaau

SEQ ID NO: 60829 - RNA, 19 nt, Artificial Sequence
  Description of Artificial Sequence: Synthetic oligonucleotide
  Antisense strand to SEQ ID NO: 60748
auucugcagaucagguucu

SEQ ID NO: 60830 - RNA, 19 nt, Artificial Sequence
  Description of Artificial Sequence: Synthetic oligonucleotide
  Sense strand starting at position 3918 of SEQ ID NO: 751
auagaacucucagcuuagu

SEQ ID NO: 60831 - RNA, 19 nt, Artificial Sequence
  Description of Artificial Sequence: Synthetic oligonucleotide
  Antisense strand to SEQ ID NO: 60750
acuaagcugagaguucuau

SEQ ID NO: 60832 - RNA, 19 nt, Artificial Sequence
  Description of Artificial Sequence: Synthetic oligonucleotide
  Sense strand starting at position 3934 of SEQ ID NO: 751
agucccuaugcugagaacu

SEQ ID NO: 60833 - RNA, 19 nt, Artificial Sequence
  Description of Artificial Sequence: Synthetic oligonucleotide
  Antisense strand to SEQ ID NO: 60752
aguucucagcauagggacu

SEQ ID NO: 60834 - RNA, 19 nt, Artificial Sequence
  Description of Artificial Sequence: Synthetic oligonucleotide
  Sense strand starting at position 94 of SEQ ID NO: 752
cuaugagaccuaggacuuu

SEQ ID NO: 60835 - RNA, 19 nt, Artificial Sequence
  Description of Artificial Sequence: Synthetic oligonucleotide
  Antisense strand to SEQ ID NO: 60754
aaaguccuaggucucauag

SEQ ID NO: 60836 - RNA, 19 nt, Artificial Sequence
  Description of Artificial Sequence: Synthetic oligonucleotide
  Sense strand starting at position 137 of SEQ ID NO: 752
aggaccuauaacggugaau

SEQ ID NO: 60837 - RNA, 19 nt, Artificial Sequence
  Description of Artificial Sequence: Synthetic oligonucleotide
  Antisense strand to SEQ ID NO: 60756
auucaccguuauagguccu

SEQ ID NO: 60838 - RNA, 19 nt, Artificial Sequence
  Description of Artificial Sequence: Synthetic oligonucleotide
  Sense strand starting at position 302 of SEQ ID NO: 752
agguuuaucaauugaguag

SEQ ID NO: 60839 - RNA, 19 nt, Artificial Sequence
  Description of Artificial Sequence: Synthetic oligonucleotide
  Antisense strand to SEQ ID NO: 60758
cuacucaauugauaaaccu

SEQ ID NO: 60840 - RNA, 19 nt, Artificial Sequence
  Description of Artificial Sequence: Synthetic oligonucleotide
  Sense strand starting at position 305 of SEQ ID NO: 752
uuuaucaauugaguaggua

SEQ ID NO: 60841 - RNA, 19 nt, Artificial Sequence
  Description of Artificial Sequence: Synthetic oligonucleotide
  Antisense strand to SEQ ID NO: 60760
uaccuacucaauugauaaa

SEQ ID NO: 60842 - RNA, 19 nt, Artificial Sequence
  Description of Artificial Sequence: Synthetic oligonucleotide
  Sense strand starting at position 306 of SEQ ID NO: 752
uuaucaauugaguagguau

SEQ ID NO: 60843 - RNA, 19 nt, Artificial Sequence
  Description of Artificial Sequence: Synthetic oligonucleotide
  Antisense strand to SEQ ID NO: 60762
auaccuacucaauugauaa

SEQ ID NO: 60844 - RNA, 19 nt, Artificial Sequence
  Description of Artificial Sequence: Synthetic oligonucleotide
  Sense strand starting at position 392 of SEQ ID NO: 752
aauagaaauccaggagugu

SEQ ID NO: 60845 - RNA, 19 nt, Artificial Sequence
  Description of Artificial Sequence: Synthetic oligonucleotide
  Antisense strand to SEQ ID NO: 60764
acacuccuggauuucuauu

SEQ ID NO: 60846 - RNA, 19 nt, Artificial Sequence
  Description of Artificial Sequence: Synthetic oligonucleotide
  Sense strand starting at position 407 of SEQ ID NO: 752
gugugugagagacaaauca

SEQ ID NO: 60847 - RNA, 19 nt, Artificial Sequence
  Description of Artificial Sequence: Synthetic oligonucleotide
  Antisense strand to SEQ ID NO: 60766
ugauuugucucucacacac

SEQ ID NO: 60848 - RNA, 19 nt, Artificial Sequence
  Description of Artificial Sequence: Synthetic oligonucleotide
  Sense strand starting at position 570 of SEQ ID NO: 752
uucuauauggucugcauuu

SEQ ID NO: 60849 - RNA, 19 nt, Artificial Sequence
  Description of Artificial Sequence: Synthetic oligonucleotide
  Antisense strand to SEQ ID NO: 60768
aaaugcagaccauauagaa

SEQ ID NO: 60850 - RNA, 19 nt, Artificial Sequence
  Description of Artificial Sequence: Synthetic oligonucleotide
  Sense strand starting at position 571 of SEQ ID NO: 752
ucuauauggucugcauuua

SEQ ID NO: 60851 - RNA, 19 nt, Artificial Sequence
  Description of Artificial Sequence: Synthetic oligonucleotide
  Antisense strand to SEQ ID NO: 60770
uaaaugcagaccauauaga

SEQ ID NO: 60852 - RNA, 19 nt, Artificial Sequence
  Description of Artificial Sequence: Synthetic oligonucleotide
  Sense strand starting at position 580 of SEQ ID NO: 752
ucugcauuuacguagguua

SEQ ID NO: 60853 - RNA, 19 nt, Artificial Sequence
  Description of Artificial Sequence: Synthetic oligonucleotide
  Antisense strand to SEQ ID NO: 60772
uaaccuacguaaaugcaga

SEQ ID NO: 60854 - RNA, 19 nt, Artificial Sequence
  Description of Artificial Sequence: Synthetic oligonucleotide
  Sense strand starting at position 628 of SEQ ID NO: 752
agguaagcacuaggauuaa

SEQ ID NO: 60855 - RNA, 19 nt, Artificial Sequence
  Description of Artificial Sequence: Synthetic oligonucleotide
  Antisense strand to SEQ ID NO: 60774
uuaauccuagugcuuaccu

SEQ ID NO: 60856 - RNA, 19 nt, Artificial Sequence
  Description of Artificial Sequence: Synthetic oligonucleotide
  Sense strand starting at position 815 of SEQ ID NO: 752
ggaauuauaguccaugcac

SEQ ID NO: 60857 - RNA, 19 nt, Artificial Sequence
  Description of Artificial Sequence: Synthetic oligonucleotide
  Antisense strand to SEQ ID NO: 60776
gugcauggacuauaauucc

SEQ ID NO: 60858 - RNA, 19 nt, Artificial Sequence
  Description of Artificial Sequence: Synthetic oligonucleotide
  Sense strand starting at position 1057 of SEQ ID NO: 752
ugucaugacuuuccagaac

SEQ ID NO: 60859 - RNA, 19 nt, Artificial Sequence
  Description of Artificial Sequence: Synthetic oligonucleotide
  Antisense strand to SEQ ID NO: 60778
guucuggaaagucaugaca

SEQ ID NO: 60860 - RNA, 19 nt, Artificial Sequence
  Description of Artificial Sequence: Synthetic oligonucleotide
  Sense strand starting at position 1208 of SEQ ID NO: 752
gcacauaugaguugauaga

SEQ ID NO: 60861 - RNA, 19 nt, Artificial Sequence
  Description of Artificial Sequence: Synthetic oligonucleotide
  Antisense strand to SEQ ID NO: 60780
ucuaucaacucauaugugc

SEQ ID NO: 60862 - RNA, 19 nt, Artificial Sequence
  Description of Artificial Sequence: Synthetic oligonucleotide
  Sense strand starting at position 1426 of SEQ ID NO: 752
ggccuugucauacaaggaa

SEQ ID NO: 60863 - RNA, 19 nt, Artificial Sequence
  Description of Artificial Sequence: Synthetic oligonucleotide
  Antisense strand to SEQ ID NO: 60782
uuccuuguaugacaaggcc

SEQ ID NO: 60864 - RNA, 19 nt, Artificial Sequence
  Description of Artificial Sequence: Synthetic oligonucleotide
  Sense strand starting at position 1514 of SEQ ID NO: 752
ugaaacauucucuggacuu

SEQ ID NO: 60865 - RNA, 19 nt, Artificial Sequence
  Description of Artificial Sequence: Synthetic oligonucleotide
  Antisense strand to SEQ ID NO: 60784
aaguccagagaauguuuca

SEQ ID NO: 60866 - RNA, 19 nt, Artificial Sequence
  Description of Artificial Sequence: Synthetic oligonucleotide
  Sense strand starting at position 1649 of SEQ ID NO: 752
aagagaaagcccugagcua

SEQ ID NO: 60867 - RNA, 19 nt, Artificial Sequence
  Description of Artificial Sequence: Synthetic oligonucleotide
  Antisense strand to SEQ ID NO: 60786
uagcucagggcuuucucuu

SEQ ID NO: 60868 - RNA, 19 nt, Artificial Sequence
  Description of Artificial Sequence: Synthetic oligonucleotide
  Sense strand starting at position 1661 of SEQ ID NO: 752
ugagcuacagaguaaaguu

SEQ ID NO: 60869 - RNA, 19 nt, Artificial Sequence
  Description of Artificial Sequence: Synthetic oligonucleotide
  Antisense strand to SEQ ID NO: 60788
aacuuuacucuguagcuca

SEQ ID NO: 60870 - RNA, 19 nt, Artificial Sequence
  Description of Artificial Sequence: Synthetic oligonucleotide
  Sense strand starting at position 1691 of SEQ ID NO: 752
ucuccuaauguaggagaga

SEQ ID NO: 60871 - RNA, 19 nt, Artificial Sequence
  Description of Artificial Sequence: Synthetic oligonucleotide
  Antisense strand to SEQ ID NO: 60790
ucucuccuacauuaggaga

SEQ ID NO: 60872 - RNA, 19 nt, Artificial Sequence
  Description of Artificial Sequence: Synthetic oligonucleotide
  Sense strand starting at position 1875 of SEQ ID NO: 752
agagaaguuuccucaauuc

SEQ ID NO: 60873 - RNA, 19 nt, Artificial Sequence
  Description of Artificial Sequence: Synthetic oligonucleotide
  Antisense strand to SEQ ID NO: 60792
gaauugaggaaacuucucu

SEQ ID NO: 60874 - RNA, 19 nt, Artificial Sequence
  Description of Artificial Sequence: Synthetic oligonucleotide
  Sense strand starting at position 1980 of SEQ ID NO: 752
agcagaaugcauuagugaa

SEQ ID NO: 60875 - RNA, 19 nt, Artificial Sequence
  Description of Artificial Sequence: Synthetic oligonucleotide
  Antisense strand to SEQ ID NO: 60794
uucacuaaugcauucugcu

SEQ ID NO: 60876 - RNA, 19 nt, Artificial Sequence
  Description of Artificial Sequence: Synthetic oligonucleotide
  Sense strand starting at position 1982 of SEQ ID NO: 752
cagaaugcauuagugaauu

SEQ ID NO: 60877 - RNA, 19 nt, Artificial Sequence
  Description of Artificial Sequence: Synthetic oligonucleotide
  Antisense strand to SEQ ID NO: 60796
aauucacuaaugcauucug

SEQ ID NO: 60878 - RNA, 19 nt, Artificial Sequence
  Description of Artificial Sequence: Synthetic oligonucleotide
  Sense strand starting at position 2291 of SEQ ID NO: 752
gguaaaucugaacaugcca

SEQ ID NO: 60879 - RNA, 19 nt, Artificial Sequence
  Description of Artificial Sequence: Synthetic oligonucleotide
  Antisense strand to SEQ ID NO: 60798
uggcauguucagauuuacc

SEQ ID NO: 60880 - RNA, 19 nt, Artificial Sequence
  Description of Artificial Sequence: Synthetic oligonucleotide
  Sense strand starting at position 2315 of SEQ ID NO: 752
ggaagaccaccuuguuuga

SEQ ID NO: 60881 - RNA, 19 nt, Artificial Sequence
  Description of Artificial Sequence: Synthetic oligonucleotide
  Antisense strand to SEQ ID NO: 60800
ucaaacaagguggucuucc

SEQ ID NO: 60882 - RNA, 19 nt, Artificial Sequence
  Description of Artificial Sequence: Synthetic oligonucleotide
  Sense strand starting at position 2376 of SEQ ID NO: 752
uuaucccauuggguaaaua

SEQ ID NO: 60883 - RNA, 19 nt, Artificial Sequence
  Description of Artificial Sequence: Synthetic oligonucleotide
  Antisense strand to SEQ ID NO: 60802
uauuuacccaaugggauaa

SEQ ID NO: 60884 - RNA, 19 nt, Artificial Sequence
  Description of Artificial Sequence: Synthetic oligonucleotide
  Sense strand starting at position 2518 of SEQ ID NO: 752
uauguauuucuguaccguu

SEQ ID NO: 60885 - RNA, 19 nt, Artificial Sequence
  Description of Artificial Sequence: Synthetic oligonucleotide
  Antisense strand to SEQ ID NO: 60804
aacgguacagaaauacaua

SEQ ID NO: 60886 - RNA, 19 nt, Artificial Sequence
  Description of Artificial Sequence: Synthetic oligonucleotide
  Sense strand starting at position 2748 of SEQ ID NO: 752
ugcacaucaccuuagguau

SEQ ID NO: 60887 - RNA, 19 nt, Artificial Sequence
  Description of Artificial Sequence: Synthetic oligonucleotide
  Antisense strand to SEQ ID NO: 60806
auaccuaaggugaugugca

SEQ ID NO: 60888 - RNA, 19 nt, Artificial Sequence
  Description of Artificial Sequence: Synthetic oligonucleotide
  Sense strand starting at position 2751 of SEQ ID NO: 752
acaucaccuuagguauauu

SEQ ID NO: 60889 - RNA, 19 nt, Artificial Sequence
  Description of Artificial Sequence: Synthetic oligonucleotide
  Antisense strand to SEQ ID NO: 60808
aauauaccuaaggugaugu

SEQ ID NO: 60890 - RNA, 19 nt, Artificial Sequence
  Description of Artificial Sequence: Synthetic oligonucleotide
  Sense strand starting at position 3071 of SEQ ID NO: 752
ccaaccaauguaugagagu

SEQ ID NO: 60891 - RNA, 19 nt, Artificial Sequence
  Description of Artificial Sequence: Synthetic oligonucleotide
  Antisense strand to SEQ ID NO: 60810
acucucauacauugguugg

SEQ ID NO: 60892 - RNA, 19 nt, Artificial Sequence
  Description of Artificial Sequence: Synthetic oligonucleotide
  Sense strand starting at position 3120 of SEQ ID NO: 752
gguauugucaucuaguaaa

SEQ ID NO: 60893 - RNA, 19 nt, Artificial Sequence
  Description of Artificial Sequence: Synthetic oligonucleotide
  Antisense strand to SEQ ID NO: 60812
uuuacuagaugacaauacc

SEQ ID NO: 60894 - RNA, 19 nt, Artificial Sequence
  Description of Artificial Sequence: Synthetic oligonucleotide
  Sense strand starting at position 3178 of SEQ ID NO: 752
auuuguaugucucugguga

SEQ ID NO: 60895 - RNA, 19 nt, Artificial Sequence
  Description of Artificial Sequence: Synthetic oligonucleotide
  Antisense strand to SEQ ID NO: 60814
ucaccagagacauacaaau

SEQ ID NO: 60896 - RNA, 19 nt, Artificial Sequence
  Description of Artificial Sequence: Synthetic oligonucleotide
  Sense strand starting at position 3191 of SEQ ID NO: 752
uggugaauuugagaaugag

SEQ ID NO: 60897 - RNA, 19 nt, Artificial Sequence
  Description of Artificial Sequence: Synthetic oligonucleotide
  Antisense strand to SEQ ID NO: 60816
cucauucucaaauucacca

SEQ ID NO: 60898 - RNA, 19 nt, Artificial Sequence
  Description of Artificial Sequence: Synthetic oligonucleotide
  Sense strand starting at position 3221 of SEQ ID NO: 752
agucuaauuggugauguag

SEQ ID NO: 60899 - RNA, 19 nt, Artificial Sequence
  Description of Artificial Sequence: Synthetic oligonucleotide
  Antisense strand to SEQ ID NO: 60818
cuacaucaccaauuagacu

SEQ ID NO: 60900 - RNA, 19 nt, Artificial Sequence
  Description of Artificial Sequence: Synthetic oligonucleotide
  Sense strand starting at position 3229 of SEQ ID NO: 752
uggugauguagauauccuu

SEQ ID NO: 60901 - RNA, 19 nt, Artificial Sequence
  Description of Artificial Sequence: Synthetic oligonucleotide
  Antisense strand to SEQ ID NO: 60820
aaggauaucuacaucacca

SEQ ID NO: 60902 - RNA, 19 nt, Artificial Sequence
  Description of Artificial Sequence: Synthetic oligonucleotide
  Sense strand starting at position 3442 of SEQ ID NO: 752
uuugacauaguccaguuua

SEQ ID NO: 60903 - RNA, 19 nt, Artificial Sequence
  Description of Artificial Sequence: Synthetic oligonucleotide
  Antisense strand to SEQ ID NO: 60822
uaaacuggacuaugucaaa

SEQ ID NO: 60904 - RNA, 19 nt, Artificial Sequence
  Description of Artificial Sequence: Synthetic oligonucleotide
  Sense strand starting at position 3469 of SEQ ID NO: 752
cuccuuugugguuagagau

SEQ ID NO: 60905 - RNA, 19 nt, Artificial Sequence
  Description of Artificial Sequence: Synthetic oligonucleotide
  Antisense strand to SEQ ID NO: 60824
aucucuaaccacaaaggag

SEQ ID NO: 60906 - RNA, 19 nt, Artificial Sequence
  Description of Artificial Sequence: Synthetic oligonucleotide
  Sense strand starting at position 3501 of SEQ ID NO: 752
cuaagaaaguuagucuacu

SEQ ID NO: 60907 - RNA, 19 nt, Artificial Sequence
  Description of Artificial Sequence: Synthetic oligonucleotide
  Antisense strand to SEQ ID NO: 60826
aguagacuaacuuucuuag

SEQ ID NO: 60908 - RNA, 19 nt, Artificial Sequence
  Description of Artificial Sequence: Synthetic oligonucleotide
  Sense strand starting at position 3509 of SEQ ID NO: 752
guuagucuacuccaagauc

SEQ ID NO: 60909 - RNA, 19 nt, Artificial Sequence
  Description of Artificial Sequence: Synthetic oligonucleotide
  Antisense strand to SEQ ID NO: 60828
gaucuuggaguagacuaac

SEQ ID NO: 60910 - RNA, 19 nt, Artificial Sequence
  Description of Artificial Sequence: Synthetic oligonucleotide
  Sense strand starting at position 3545 of SEQ ID NO: 752
gguuaucuucuagaaacuu

SEQ ID NO: 60911 - RNA, 19 nt, Artificial Sequence
  Description of Artificial Sequence: Synthetic oligonucleotide
  Antisense strand to SEQ ID NO: 60830
aaguuucuagaagauaacc

SEQ ID NO: 60912 - RNA, 19 nt, Artificial Sequence
  Description of Artificial Sequence: Synthetic oligonucleotide
  Sense strand starting at position 3852 of SEQ ID NO: 752
cugauaguuuaagucauaa

SEQ ID NO: 60913 - RNA, 19 nt, Artificial Sequence
  Description of Artificial Sequence: Synthetic oligonucleotide
  Antisense strand to SEQ ID NO: 60832
uuaugacuuaaacuaucag

SEQ ID NO: 60914 - RNA, 19 nt, Artificial Sequence
  Description of Artificial Sequence: Synthetic oligonucleotide
  Sense strand starting at position 3921 of SEQ ID NO: 754
gcaaguggucuagcuugca

SEQ ID NO: 60915 - RNA, 19 nt, Artificial Sequence
  Description of Artificial Sequence: Synthetic oligonucleotide
  Antisense strand to SEQ ID NO: 60834
ugcaagcuagaccacuugc

SEQ ID NO: 60916 - RNA, 19 nt, Artificial Sequence
  Description of Artificial Sequence: Synthetic oligonucleotide
  Sense strand starting at position 3698 of SEQ ID NO: 754
ugacucaguuguuuaggaa

SEQ ID NO: 60917 - RNA, 19 nt, Artificial Sequence
  Description of Artificial Sequence: Synthetic oligonucleotide
  Antisense strand to SEQ ID NO: 60836
uuccuaaacaacugaguca

SEQ ID NO: 60918 - RNA, 19 nt, Artificial Sequence
  Description of Artificial Sequence: Synthetic oligonucleotide
  Sense strand starting at position 3548 of SEQ ID NO: 754
ugagaaguucuacauaguc

SEQ ID NO: 60919 - RNA, 19 nt, Artificial Sequence
  Description of Artificial Sequence: Synthetic oligonucleotide
  Antisense strand to SEQ ID NO: 60838
gacuauguagaacuucuca

SEQ ID NO: 60920 - RNA, 19 nt, Artificial Sequence
  Description of Artificial Sequence: Synthetic oligonucleotide
  Sense strand starting at position 3276 of SEQ ID NO: 754
gggaguucacggugaaaca

SEQ ID NO: 60921 - RNA, 19 nt, Artificial Sequence
  Description of Artificial Sequence: Synthetic oligonucleotide
  Antisense strand to SEQ ID NO: 60840
uguuucaccgugaacuccc

SEQ ID NO: 60922 - RNA, 19 nt, Artificial Sequence
  Description of Artificial Sequence: Synthetic oligonucleotide
  Sense strand starting at position 3274 of SEQ ID NO: 754
augggaguucacggugaaa

SEQ ID NO: 60923 - RNA, 19 nt, Artificial Sequence
  Description of Artificial Sequence: Synthetic oligonucleotide
  Antisense strand to SEQ ID NO: 60842
uuucaccgugaacucccau

SEQ ID NO: 60924 - RNA, 19 nt, Artificial Sequence
  Description of Artificial Sequence: Synthetic oligonucleotide
  Sense strand starting at position 3048 of SEQ ID NO: 754
aauggcuuggcagaaucua

SEQ ID NO: 60925 - RNA, 19 nt, Artificial Sequence
  Description of Artificial Sequence: Synthetic oligonucleotide
  Antisense strand to SEQ ID NO: 60844
uagauucugccaagccauu

SEQ ID NO: 60926 - RNA, 19 nt, Artificial Sequence
  Description of Artificial Sequence: Synthetic oligonucleotide
  Sense strand starting at position 3030 of SEQ ID NO: 754
uugguacagucacuagaaa

SEQ ID NO: 60927 - RNA, 19 nt, Artificial Sequence
  Description of Artificial Sequence: Synthetic oligonucleotide
  Antisense strand to SEQ ID NO: 60846
uuucuagugacuguaccaa

SEQ ID NO: 60928 - RNA, 19 nt, Artificial Sequence
  Description of Artificial Sequence: Synthetic oligonucleotide
  Sense strand starting at position 3008 of SEQ ID NO: 754
acaccacuagugggaauau

SEQ ID NO: 60929 - RNA, 19 nt, Artificial Sequence
  Description of Artificial Sequence: Synthetic oligonucleotide
  Antisense strand to SEQ ID NO: 60848
auauucccacuaguggugu

SEQ ID NO: 60930 - RNA, 19 nt, Artificial Sequence
  Description of Artificial Sequence: Synthetic oligonucleotide
  Sense strand starting at position 2966 of SEQ ID NO: 754
uacugaguauuggugagga

SEQ ID NO: 60931 - RNA, 19 nt, Artificial Sequence
  Description of Artificial Sequence: Synthetic oligonucleotide
  Antisense strand to SEQ ID NO: 60850
uccucaccaauacucagua

SEQ ID NO: 60932 - RNA, 19 nt, Artificial Sequence
  Description of Artificial Sequence: Synthetic oligonucleotide
  Sense strand starting at position 2903 of SEQ ID NO: 754
agugauaccagcugagacu

SEQ ID NO: 60933 - RNA, 19 nt, Artificial Sequence
  Description of Artificial Sequence: Synthetic oligonucleotide
  Antisense strand to SEQ ID NO: 60852
agucucagcugguaucacu

SEQ ID NO: 60934 - RNA, 19 nt, Artificial Sequence
  Description of Artificial Sequence: Synthetic oligonucleotide
  Sense strand starting at position 2834 of SEQ ID NO: 754
auaaaucaccguggaaaug

SEQ ID NO: 60935 - RNA, 19 nt, Artificial Sequence
  Description of Artificial Sequence: Synthetic oligonucleotide
  Antisense strand to SEQ ID NO: 60854
cauuuccacggugauuuau

SEQ ID NO: 60936 - RNA, 19 nt, Artificial Sequence
  Description of Artificial Sequence: Synthetic oligonucleotide
  Sense strand starting at position 2833 of SEQ ID NO: 754
cauaaaucaccguggaaau

SEQ ID NO: 60937 - RNA, 19 nt, Artificial Sequence
  Description of Artificial Sequence: Synthetic oligonucleotide
  Antisense strand to SEQ ID NO: 60856
auuuccacggugauuuaug

SEQ ID NO: 60938 - RNA, 19 nt, Artificial Sequence
  Description of Artificial Sequence: Synthetic oligonucleotide
  Sense strand starting at position 2831 of SEQ ID NO: 754
aucauaaaucaccguggaa

SEQ ID NO: 60939 - RNA, 19 nt, Artificial Sequence
  Description of Artificial Sequence: Synthetic oligonucleotide
  Antisense strand to SEQ ID NO: 60858
uuccacggugauuuaugau

SEQ ID NO: 60940 - RNA, 19 nt, Artificial Sequence
  Description of Artificial Sequence: Synthetic oligonucleotide
  Sense strand starting at position 2799 of SEQ ID NO: 754
gugucaaaucaacauagca

SEQ ID NO: 60941 - RNA, 19 nt, Artificial Sequence
  Description of Artificial Sequence: Synthetic oligonucleotide
  Antisense strand to SEQ ID NO: 60860
ugcuauguugauuugacac

SEQ ID NO: 60942 - RNA, 19 nt, Artificial Sequence
  Description of Artificial Sequence: Synthetic oligonucleotide
  Sense strand starting at position 2710 of SEQ ID NO: 754
ucugcaagucaguaagaaa

SEQ ID NO: 60943 - RNA, 19 nt, Artificial Sequence
  Description of Artificial Sequence: Synthetic oligonucleotide
  Antisense strand to SEQ ID NO: 60862
uuucuuacugacuugcaga

SEQ ID NO: 60944 - RNA, 19 nt, Artificial Sequence
  Description of Artificial Sequence: Synthetic oligonucleotide
  Sense strand starting at position 2517 of SEQ ID NO: 754
aucagacaucgaugagucu

SEQ ID NO: 60945 - RNA, 19 nt, Artificial Sequence
  Description of Artificial Sequence: Synthetic oligonucleotide
  Antisense strand to SEQ ID NO: 60864
agacucaucgaugucugau

SEQ ID NO: 60946 - RNA, 19 nt, Artificial Sequence
  Description of Artificial Sequence: Synthetic oligonucleotide
  Sense strand starting at position 2245 of SEQ ID NO: 754
agccuaugccagggaacua

SEQ ID NO: 60947 - RNA, 19 nt, Artificial Sequence
  Description of Artificial Sequence: Synthetic oligonucleotide
  Antisense strand to SEQ ID NO: 60866
uaguucccuggcauaggcu

SEQ ID NO: 60948 - RNA, 19 nt, Artificial Sequence
  Description of Artificial Sequence: Synthetic oligonucleotide
  Sense strand starting at position 2198 of SEQ ID NO: 754
gucgguaaaucacuaauaa

SEQ ID NO: 60949 - RNA, 19 nt, Artificial Sequence
  Description of Artificial Sequence: Synthetic oligonucleotide
  Antisense strand to SEQ ID NO: 60868
uuauuagugauuuaccgac

SEQ ID NO: 60950 - RNA, 19 nt, Artificial Sequence
  Description of Artificial Sequence: Synthetic oligonucleotide
  Sense strand starting at position 2189 of SEQ ID NO: 754
uaugaaggagucgguaaau

SEQ ID NO: 60951 - RNA, 19 nt, Artificial Sequence
  Description of Artificial Sequence: Synthetic oligonucleotide
  Antisense strand to SEQ ID NO: 60870
auuuaccgacuccuucaua

SEQ ID NO: 60952 - RNA, 19 nt, Artificial Sequence
  Description of Artificial Sequence: Synthetic oligonucleotide
  Sense strand starting at position 2188 of SEQ ID NO: 754
guaugaaggagucgguaaa

SEQ ID NO: 60953 - RNA, 19 nt, Artificial Sequence
  Description of Artificial Sequence: Synthetic oligonucleotide
  Antisense strand to SEQ ID NO: 60872
uuuaccgacuccuucauac

SEQ ID NO: 60954 - RNA, 19 nt, Artificial Sequence
  Description of Artificial Sequence: Synthetic oligonucleotide
  Sense strand starting at position 2137 of SEQ ID NO: 754
uuccucuuugguugaagaa

SEQ ID NO: 60955 - RNA, 19 nt, Artificial Sequence
  Description of Artificial Sequence: Synthetic oligonucleotide
  Antisense strand to SEQ ID NO: 60874
uucuucaaccaaagaggaa

SEQ ID NO: 60956 - RNA, 19 nt, Artificial Sequence
  Description of Artificial Sequence: Synthetic oligonucleotide
  Sense strand starting at position 2136 of SEQ ID NO: 754
uuuccucuuugguugaaga

SEQ ID NO: 60957 - RNA, 19 nt, Artificial Sequence
  Description of Artificial Sequence: Synthetic oligonucleotide
  Antisense strand to SEQ ID NO: 60876
ucuucaaccaaagaggaaa

SEQ ID NO: 60958 - RNA, 19 nt, Artificial Sequence
  Description of Artificial Sequence: Synthetic oligonucleotide
  Sense strand starting at position 1916 of SEQ ID NO: 754
cucguugacuuaccaaaga

SEQ ID NO: 60959 - RNA, 19 nt, Artificial Sequence
  Description of Artificial Sequence: Synthetic oligonucleotide
  Antisense strand to SEQ ID NO: 60878
ucuuugguaagucaacgag

SEQ ID NO: 60960 - RNA, 19 nt, Artificial Sequence
  Description of Artificial Sequence: Synthetic oligonucleotide
  Sense strand starting at position 1864 of SEQ ID NO: 754
gugucucagggaugacuua

SEQ ID NO: 60961 - RNA, 19 nt, Artificial Sequence
  Description of Artificial Sequence: Synthetic oligonucleotide
  Antisense strand to SEQ ID NO: 60880
uaagucaucccugagacac

SEQ ID NO: 60962 - RNA, 19 nt, Artificial Sequence
  Description of Artificial Sequence: Synthetic oligonucleotide
  Sense strand starting at position 1862 of SEQ ID NO: 754
uggugucucagggaugacu

SEQ ID NO: 60963 - RNA, 19 nt, Artificial Sequence
  Description of Artificial Sequence: Synthetic oligonucleotide
  Antisense strand to SEQ ID NO: 60882
agucaucccugagacacca

SEQ ID NO: 60964 - RNA, 19 nt, Artificial Sequence
  Description of Artificial Sequence: Synthetic oligonucleotide
  Sense strand starting at position 1629 of SEQ ID NO: 754
agaaaugucauugggaagu

SEQ ID NO: 60965 - RNA, 19 nt, Artificial Sequence
  Description of Artificial Sequence: Synthetic oligonucleotide
  Antisense strand to SEQ ID NO: 60884
acuucccaaugacauuucu

SEQ ID NO: 60966 - RNA, 19 nt, Artificial Sequence
  Description of Artificial Sequence: Synthetic oligonucleotide
  Sense strand starting at position 1627 of SEQ ID NO: 754
guagaaaugucauugggaa

SEQ ID NO: 60967 - RNA, 19 nt, Artificial Sequence
  Description of Artificial Sequence: Synthetic oligonucleotide
  Antisense strand to SEQ ID NO: 60886
uucccaaugacauuucuac

SEQ ID NO: 60968 - RNA, 19 nt, Artificial Sequence
  Description of Artificial Sequence: Synthetic oligonucleotide
  Sense strand starting at position 1590 of SEQ ID NO: 754
gacagcucugauuaguauu

SEQ ID NO: 60969 - RNA, 19 nt, Artificial Sequence
  Description of Artificial Sequence: Synthetic oligonucleotide
  Antisense strand to SEQ ID NO: 60888
aauacuaaucagagcuguc

SEQ ID NO: 60970 - RNA, 19 nt, Artificial Sequence
  Description of Artificial Sequence: Synthetic oligonucleotide
  Sense strand starting at position 1586 of SEQ ID NO: 754
uugagacagcucugauuag

SEQ ID NO: 60971 - RNA, 19 nt, Artificial Sequence
  Description of Artificial Sequence: Synthetic oligonucleotide
  Antisense strand to SEQ ID NO: 60890
cuaaucagagcugucucaa

SEQ ID NO: 60972 - RNA, 19 nt, Artificial Sequence
  Description of Artificial Sequence: Synthetic oligonucleotide
  Sense strand starting at position 1480 of SEQ ID NO: 754
ccucccauugcugagcaaa

SEQ ID NO: 60973 - RNA, 19 nt, Artificial Sequence
  Description of Artificial Sequence: Synthetic oligonucleotide
  Antisense strand to SEQ ID NO: 60892
uuugcucagcaaugggagg

SEQ ID NO: 60974 - RNA, 19 nt, Artificial Sequence
  Description of Artificial Sequence: Synthetic oligonucleotide
  Sense strand starting at position 1267 of SEQ ID NO: 754
agacaauggaguugauucu

SEQ ID NO: 60975 - RNA, 19 nt, Artificial Sequence
  Description of Artificial Sequence: Synthetic oligonucleotide
  Antisense strand to SEQ ID NO: 60894
agaaucaacuccauugucu

SEQ ID NO: 60976 - RNA, 19 nt, Artificial Sequence
  Description of Artificial Sequence: Synthetic oligonucleotide
  Sense strand starting at position 1214 of SEQ ID NO: 754
acaaguagccugcaugaga

SEQ ID NO: 60977 - RNA, 19 nt, Artificial Sequence
  Description of Artificial Sequence: Synthetic oligonucleotide
  Antisense strand to SEQ ID NO: 60896
ucucaugcaggcuacuugu

SEQ ID NO: 60978 - RNA, 19 nt, Artificial Sequence
  Description of Artificial Sequence: Synthetic oligonucleotide
  Sense strand starting at position 970 of SEQ ID NO: 754
agguuauauuuaggaacag

SEQ ID NO: 60979 - RNA, 19 nt, Artificial Sequence
  Description of Artificial Sequence: Synthetic oligonucleotide
  Antisense strand to SEQ ID NO: 60898
cuguuccuaaauauaaccu

SEQ ID NO: 60980 - RNA, 19 nt, Artificial Sequence
  Description of Artificial Sequence: Synthetic oligonucleotide
  Sense strand starting at position 959 of SEQ ID NO: 754
uguccaggaagagguuaua

SEQ ID NO: 60981 - RNA, 19 nt, Artificial Sequence
  Description of Artificial Sequence: Synthetic oligonucleotide
  Antisense strand to SEQ ID NO: 60900
uauaaccucuuccuggaca

SEQ ID NO: 60982 - RNA, 19 nt, Artificial Sequence
  Description of Artificial Sequence: Synthetic oligonucleotide
  Sense strand starting at position 790 of SEQ ID NO: 754
ggaguauauccaggcauua

SEQ ID NO: 60983 - RNA, 19 nt, Artificial Sequence
  Description of Artificial Sequence: Synthetic oligonucleotide
  Antisense strand to SEQ ID NO: 60902
uaaugccuggauauacucc

SEQ ID NO: 60984 - RNA, 19 nt, Artificial Sequence
  Description of Artificial Sequence: Synthetic oligonucleotide
  Sense strand starting at position 655 of SEQ ID NO: 754
cucauuugcugucugucau

SEQ ID NO: 60985 - RNA, 19 nt, Artificial Sequence
  Description of Artificial Sequence: Synthetic oligonucleotide
  Antisense strand to SEQ ID NO: 60904
augacagacagcaaaugag

SEQ ID NO: 60986 - RNA, 19 nt, Artificial Sequence
  Description of Artificial Sequence: Synthetic oligonucleotide
  Sense strand starting at position 505 of SEQ ID NO: 754
agauaaauguugcuacaca

SEQ ID NO: 60987 - RNA, 19 nt, Artificial Sequence
  Description of Artificial Sequence: Synthetic oligonucleotide
  Antisense strand to SEQ ID NO: 60906
uguguagcaacauuuaucu

SEQ ID NO: 60988 - RNA, 19 nt, Artificial Sequence
  Description of Artificial Sequence: Synthetic oligonucleotide
  Sense strand starting at position 384 of SEQ ID NO: 754
gcucaaugucaggauuccu

SEQ ID NO: 60989 - RNA, 19 nt, Artificial Sequence
  Description of Artificial Sequence: Synthetic oligonucleotide
  Antisense strand to SEQ ID NO: 60908
aggaauccugacauugagc

SEQ ID NO: 60990 - RNA, 19 nt, Artificial Sequence
  Description of Artificial Sequence: Synthetic oligonucleotide
  Sense strand starting at position 292 of SEQ ID NO: 754
agggaaguuggcuaauguu

SEQ ID NO: 60991 - RNA, 19 nt, Artificial Sequence
  Description of Artificial Sequence: Synthetic oligonucleotide
  Antisense strand to SEQ ID NO: 60910
aacauuagccaacuucccu

SEQ ID NO: 60992 - RNA, 19 nt, Artificial Sequence
  Description of Artificial Sequence: Synthetic oligonucleotide
  Sense strand starting at position 291 of SEQ ID NO: 754
gagggaaguuggcuaaugu

SEQ ID NO: 60993 - RNA, 19 nt, Artificial Sequence
  Description of Artificial Sequence: Synthetic oligonucleotide
  Antisense strand to SEQ ID NO: 60912
acauuagccaacuucccuc

SEQ ID NO: 60994 - RNA, 19 nt, Artificial Sequence
  Description of Artificial Sequence: Synthetic oligonucleotide
  Sense strand starting at position 3668 of SEQ ID NO: 753
caggaauugacgggccuau

SEQ ID NO: 60995 - RNA, 19 nt, Artificial Sequence
  Description of Artificial Sequence: Synthetic oligonucleotide
  Antisense strand to SEQ ID NO: 60914
auaggcccgucaauuccug

SEQ ID NO: 60996 - RNA, 19 nt, Artificial Sequence
  Description of Artificial Sequence: Synthetic oligonucleotide
  Sense strand starting at position 3135 of SEQ ID NO: 753
ugaaguaauuuguacaaag

SEQ ID NO: 60997 - RNA, 19 nt, Artificial Sequence
  Description of Artificial Sequence: Synthetic oligonucleotide
  Antisense strand to SEQ ID NO: 60916
cuuuguacaaauuacuuca

SEQ ID NO: 60998 - RNA, 19 nt, Artificial Sequence
  Description of Artificial Sequence: Synthetic oligonucleotide
  Sense strand starting at position 3123 of SEQ ID NO: 753
gucccagaaagaugaagua

SEQ ID NO: 60999 - RNA, 19 nt, Artificial Sequence
  Description of Artificial Sequence: Synthetic oligonucleotide
  Antisense strand to SEQ ID NO: 60918
uacuucaucuuucugggac

SEQ ID NO: 61000 - RNA, 19 nt, Artificial Sequence
  Description of Artificial Sequence: Synthetic oligonucleotide
  Sense strand starting at position 2867 of SEQ ID NO: 753
gccacagagagcuauuaag

SEQ ID NO: 61001 - RNA, 19 nt, Artificial Sequence
  Description of Artificial Sequence: Synthetic oligonucleotide
  Antisense strand to SEQ ID NO: 60920
cuuaauagcucucuguggc

SEQ ID NO: 61002 - RNA, 19 nt, Artificial Sequence
  Description of Artificial Sequence: Synthetic oligonucleotide
  Sense strand starting at position 2750 of SEQ ID NO: 753
aucauaggguugcuaugaa

SEQ ID NO: 61003 - RNA, 19 nt, Artificial Sequence
  Description of Artificial Sequence: Synthetic oligonucleotide
  Antisense strand to SEQ ID NO: 60922
uucauagcaacccuaugau

SEQ ID NO: 61004 - RNA, 19 nt, Artificial Sequence
  Description of Artificial Sequence: Synthetic oligonucleotide
  Sense strand starting at position 2712 of SEQ ID NO: 753
gguccuuaucucuaaagug

SEQ ID NO: 61005 - RNA, 19 nt, Artificial Sequence
  Description of Artificial Sequence: Synthetic oligonucleotide
  Antisense strand to SEQ ID NO: 60924
cacuuuagagauaaggacc

SEQ ID NO: 61006 - RNA, 19 nt, Artificial Sequence
  Description of Artificial Sequence: Synthetic oligonucleotide
  Sense strand starting at position 2672 of SEQ ID NO: 753
agagaccuuggguaaguuu

SEQ ID NO: 61007 - RNA, 19 nt, Artificial Sequence
  Description of Artificial Sequence: Synthetic oligonucleotide
  Antisense strand to SEQ ID NO: 60926
aaacuuacccaaggucucu

SEQ ID NO: 61008 - RNA, 19 nt, Artificial Sequence
  Description of Artificial Sequence: Synthetic oligonucleotide
  Sense strand starting at position 2671 of SEQ ID NO: 753
gagagaccuuggguaaguu

SEQ ID NO: 61009 - RNA, 19 nt, Artificial Sequence
  Description of Artificial Sequence: Synthetic oligonucleotide
  Antisense strand to SEQ ID NO: 60928
aacuuacccaaggucucuc

SEQ ID NO: 61010 - RNA, 19 nt, Artificial Sequence
  Description of Artificial Sequence: Synthetic oligonucleotide
  Sense strand starting at position 2669 of SEQ ID NO: 753
gugagagaccuuggguaag

SEQ ID NO: 61011 - RNA, 19 nt, Artificial Sequence
  Description of Artificial Sequence: Synthetic oligonucleotide
  Antisense strand to SEQ ID NO: 60930
cuuacccaaggucucucac

SEQ ID NO: 61012 - RNA, 19 nt, Artificial Sequence
  Description of Artificial Sequence: Synthetic oligonucleotide
  Sense strand starting at position 2640 of SEQ ID NO: 753
cuugaauccucacucugga

SEQ ID NO: 61013 - RNA, 19 nt, Artificial Sequence
  Description of Artificial Sequence: Synthetic oligonucleotide
  Antisense strand to SEQ ID NO: 60932
uccagagugaggauucaag

SEQ ID NO: 61014 - RNA, 19 nt, Artificial Sequence
  Description of Artificial Sequence: Synthetic oligonucleotide
  Sense strand starting at position 2627 of SEQ ID NO: 753
ccaaauaucugagcuugaa

SEQ ID NO: 61015 - RNA, 19 nt, Artificial Sequence
  Description of Artificial Sequence: Synthetic oligonucleotide
  Antisense strand to SEQ ID NO: 60934
uucaagcucagauauuugg

SEQ ID NO: 61016 - RNA, 19 nt, Artificial Sequence
  Description of Artificial Sequence: Synthetic oligonucleotide
  Sense strand starting at position 2598 of SEQ ID NO: 753
gggacagcucugcauggua

SEQ ID NO: 61017 - RNA, 19 nt, Artificial Sequence
  Description of Artificial Sequence: Synthetic oligonucleotide
  Antisense strand to SEQ ID NO: 60936
uaccaugcagagcuguccc

SEQ ID NO: 61018 - RNA, 19 nt, Artificial Sequence
  Description of Artificial Sequence: Synthetic oligonucleotide
  Sense strand starting at position 2540 of SEQ ID NO: 753
caggauaagucauuccagu

SEQ ID NO: 61019 - RNA, 19 nt, Artificial Sequence
  Description of Artificial Sequence: Synthetic oligonucleotide
  Antisense strand to SEQ ID NO: 60938
acuggaaugacuuauccug

SEQ ID NO: 61020 - RNA, 19 nt, Artificial Sequence
  Description of Artificial Sequence: Synthetic oligonucleotide
  Sense strand starting at position 2509 of SEQ ID NO: 753
gcaguagucagggacaaug

SEQ ID NO: 61021 - RNA, 19 nt, Artificial Sequence
  Description of Artificial Sequence: Synthetic oligonucleotide
  Antisense strand to SEQ ID NO: 60940
cauugucccugacuacugc

SEQ ID NO: 61022 - RNA, 19 nt, Artificial Sequence
  Description of Artificial Sequence: Synthetic oligonucleotide
  Sense strand starting at position 2508 of SEQ ID NO: 753
ggcaguagucagggacaau

SEQ ID NO: 61023 - RNA, 19 nt, Artificial Sequence
  Description of Artificial Sequence: Synthetic oligonucleotide
  Antisense strand to SEQ ID NO: 60942
auugucccugacuacugcc

SEQ ID NO: 61024 - RNA, 19 nt, Artificial Sequence
  Description of Artificial Sequence: Synthetic oligonucleotide
  Sense strand starting at position 2471 of SEQ ID NO: 753
aggugcucucaucacucaa

SEQ ID NO: 61025 - RNA, 19 nt, Artificial Sequence
  Description of Artificial Sequence: Synthetic oligonucleotide
  Antisense strand to SEQ ID NO: 60944
uugagugaugagagcaccu

SEQ ID NO: 61026 - RNA, 19 nt, Artificial Sequence
  Description of Artificial Sequence: Synthetic oligonucleotide
  Sense strand starting at position 2438 of SEQ ID NO: 753
uguggauccucauccagaa

SEQ ID NO: 61027 - RNA, 19 nt, Artificial Sequence
  Description of Artificial Sequence: Synthetic oligonucleotide
  Antisense strand to SEQ ID NO: 60946
uucuggaugaggauccaca

SEQ ID NO: 61028 - RNA, 19 nt, Artificial Sequence
  Description of Artificial Sequence: Synthetic oligonucleotide
  Sense strand starting at position 2305 of SEQ ID NO: 753
uggaaucuuccaggacuca

SEQ ID NO: 61029 - RNA, 19 nt, Artificial Sequence
  Description of Artificial Sequence: Synthetic oligonucleotide
  Antisense strand to SEQ ID NO: 60948
ugaguccuggaagauucca

SEQ ID NO: 61030 - RNA, 19 nt, Artificial Sequence
  Description of Artificial Sequence: Synthetic oligonucleotide
  Sense strand starting at position 2141 of SEQ ID NO: 753
gagugugaacugcaucuga

SEQ ID NO: 61031 - RNA, 19 nt, Artificial Sequence
  Description of Artificial Sequence: Synthetic oligonucleotide
  Antisense strand to SEQ ID NO: 60950
ucagaugcaguucacacuc

SEQ ID NO: 61032 - RNA, 19 nt, Artificial Sequence
  Description of Artificial Sequence: Synthetic oligonucleotide
  Sense strand starting at position 2049 of SEQ ID NO: 753
gcaaguggucuagcuugca

SEQ ID NO: 61033 - RNA, 19 nt, Artificial Sequence
  Description of Artificial Sequence: Synthetic oligonucleotide
  Antisense strand to SEQ ID NO: 60952
ugcaagcuagaccacuugc

SEQ ID NO: 61034 - RNA, 19 nt, Artificial Sequence
  Description of Artificial Sequence: Synthetic oligonucleotide
  Sense strand starting at position 1826 of SEQ ID NO: 753
ugacucaguuguuuaggaa

SEQ ID NO: 61035 - RNA, 19 nt, Artificial Sequence
  Description of Artificial Sequence: Synthetic oligonucleotide
  Antisense strand to SEQ ID NO: 60954
uuccuaaacaacugaguca

SEQ ID NO: 61036 - RNA, 19 nt, Artificial Sequence
  Description of Artificial Sequence: Synthetic oligonucleotide
  Sense strand starting at position 1676 of SEQ ID NO: 753
ugagaaguucuacauaguc

SEQ ID NO: 61037 - RNA, 19 nt, Artificial Sequence
  Description of Artificial Sequence: Synthetic oligonucleotide
  Antisense strand to SEQ ID NO: 60956
gacuauguagaacuucuca

SEQ ID NO: 61038 - RNA, 19 nt, Artificial Sequence
  Description of Artificial Sequence: Synthetic oligonucleotide
  Sense strand starting at position 1404 of SEQ ID NO: 753
gggaguucacggugaaaca

SEQ ID NO: 61039 - RNA, 19 nt, Artificial Sequence
  Description of Artificial Sequence: Synthetic oligonucleotide
  Antisense strand to SEQ ID NO: 60958
uguuucaccgugaacuccc

SEQ ID NO: 61040 - RNA, 19 nt, Artificial Sequence
  Description of Artificial Sequence: Synthetic oligonucleotide
  Sense strand starting at position 1402 of SEQ ID NO: 753
augggaguucacggugaaa

SEQ ID NO: 61041 - RNA, 19 nt, Artificial Sequence
  Description of Artificial Sequence: Synthetic oligonucleotide
  Antisense strand to SEQ ID NO: 60960
uuucaccgugaacucccau

SEQ ID NO: 61042 - RNA, 19 nt, Artificial Sequence
  Description of Artificial Sequence: Synthetic oligonucleotide
  Sense strand starting at position 1176 of SEQ ID NO: 753
aauggcuuggcagaaucua

SEQ ID NO: 61043 - RNA, 19 nt, Artificial Sequence
  Description of Artificial Sequence: Synthetic oligonucleotide
  Antisense strand to SEQ ID NO: 60962
uagauucugccaagccauu

SEQ ID NO: 61044 - RNA, 19 nt, Artificial Sequence
  Description of Artificial Sequence: Synthetic oligonucleotide
  Sense strand starting at position 1158 of SEQ ID NO: 753
uugguacagucacuagaaa

SEQ ID NO: 61045 - RNA, 19 nt, Artificial Sequence
  Description of Artificial Sequence: Synthetic oligonucleotide
  Antisense strand to SEQ ID NO: 60964
uuucuagugacuguaccaa

SEQ ID NO: 61046 - RNA, 19 nt, Artificial Sequence
  Description of Artificial Sequence: Synthetic oligonucleotide
  Sense strand starting at position 1136 of SEQ ID NO: 753
acaccacuagugggaauau

SEQ ID NO: 61047 - RNA, 19 nt, Artificial Sequence
  Description of Artificial Sequence: Synthetic oligonucleotide
  Antisense strand to SEQ ID NO: 60966
auauucccacuaguggugu

SEQ ID NO: 61048 - RNA, 19 nt, Artificial Sequence
  Description of Artificial Sequence: Synthetic oligonucleotide
  Sense strand starting at position 1094 of SEQ ID NO: 753
uacugaguauuggugagga

SEQ ID NO: 61049 - RNA, 19 nt, Artificial Sequence
  Description of Artificial Sequence: Synthetic oligonucleotide
  Antisense strand to SEQ ID NO: 60968
uccucaccaauacucagua

SEQ ID NO: 61050 - RNA, 19 nt, Artificial Sequence
  Description of Artificial Sequence: Synthetic oligonucleotide
  Sense strand starting at position 1031 of SEQ ID NO: 753
agugauaccagcugagacu

SEQ ID NO: 61051 - RNA, 19 nt, Artificial Sequence
  Description of Artificial Sequence: Synthetic oligonucleotide
  Antisense strand to SEQ ID NO: 60970
agucucagcugguaucacu

SEQ ID NO: 61052 - RNA, 19 nt, Artificial Sequence
  Description of Artificial Sequence: Synthetic oligonucleotide
  Sense strand starting at position 962 of SEQ ID NO: 753
auaaaucaccguggaaaug

SEQ ID NO: 61053 - RNA, 19 nt, Artificial Sequence
  Description of Artificial Sequence: Synthetic oligonucleotide
  Antisense strand to SEQ ID NO: 60972
cauuuccacggugauuuau

SEQ ID NO: 61054 - RNA, 19 nt, Artificial Sequence
  Description of Artificial Sequence: Synthetic oligonucleotide
  Sense strand starting at position 961 of SEQ ID NO: 753
cauaaaucaccguggaaau

SEQ ID NO: 61055 - RNA, 19 nt, Artificial Sequence
  Description of Artificial Sequence: Synthetic oligonucleotide
  Antisense strand to SEQ ID NO: 60974
auuuccacggugauuuaug

SEQ ID NO: 61056 - RNA, 19 nt, Artificial Sequence
  Description of Artificial Sequence: Synthetic oligonucleotide
  Sense strand starting at position 959 of SEQ ID NO: 753
aucauaaaucaccguggaa

SEQ ID NO: 61057 - RNA, 19 nt, Artificial Sequence
  Description of Artificial Sequence: Synthetic oligonucleotide
  Antisense strand to SEQ ID NO: 60976
uuccacggugauuuaugau

SEQ ID NO: 61058 - RNA, 19 nt, Artificial Sequence
  Description of Artificial Sequence: Synthetic oligonucleotide
  Sense strand starting at position 927 of SEQ ID NO: 753
gugucaaaucaacauagca

SEQ ID NO: 61059 - RNA, 19 nt, Artificial Sequence
  Description of Artificial Sequence: Synthetic oligonucleotide
  Antisense strand to SEQ ID NO: 60978
ugcuauguugauuugacac

SEQ ID NO: 61060 - RNA, 19 nt, Artificial Sequence
  Description of Artificial Sequence: Synthetic oligonucleotide
  Sense strand starting at position 838 of SEQ ID NO: 753
ucugcaagucaguaagaaa

SEQ ID NO: 61061 - RNA, 19 nt, Artificial Sequence
  Description of Artificial Sequence: Synthetic oligonucleotide
  Antisense strand to SEQ ID NO: 60980
uuucuuacugacuugcaga

SEQ ID NO: 61062 - RNA, 19 nt, Artificial Sequence
  Description of Artificial Sequence: Synthetic oligonucleotide
  Sense strand starting at position 645 of SEQ ID NO: 753
aucagacaucgaugagucu

SEQ ID NO: 61063 - RNA, 19 nt, Artificial Sequence
  Description of Artificial Sequence: Synthetic oligonucleotide
  Antisense strand to SEQ ID NO: 60982
agacucaucgaugucugau

SEQ ID NO: 61064 - RNA, 19 nt, Artificial Sequence
  Description of Artificial Sequence: Synthetic oligonucleotide
  Sense strand starting at position 326 of SEQ ID NO: 753
gucgguaaaucacuaauaa

SEQ ID NO: 61065 - RNA, 19 nt, Artificial Sequence
  Description of Artificial Sequence: Synthetic oligonucleotide
  Antisense strand to SEQ ID NO: 60984
uuauuagugauuuaccgac

SEQ ID NO: 61066 - RNA, 19 nt, Artificial Sequence
  Description of Artificial Sequence: Synthetic oligonucleotide
  Sense strand starting at position 317 of SEQ ID NO: 753
uaugaaggagucgguaaau

SEQ ID NO: 61067 - RNA, 19 nt, Artificial Sequence
  Description of Artificial Sequence: Synthetic oligonucleotide
  Antisense strand to SEQ ID NO: 60986
auuuaccgacuccuucaua

SEQ ID NO: 61068 - RNA, 19 nt, Artificial Sequence
  Description of Artificial Sequence: Synthetic oligonucleotide
  Sense strand starting at position 265 of SEQ ID NO: 753
uuccucuuugguugaagaa

SEQ ID NO: 61069 - RNA, 19 nt, Artificial Sequence
  Description of Artificial Sequence: Synthetic oligonucleotide
  Antisense strand to SEQ ID NO: 60988
uucuucaaccaaagaggaa

SEQ ID NO: 61070 - RNA, 19 nt, Artificial Sequence
  Description of Artificial Sequence: Synthetic oligonucleotide
  Sense strand starting at position 264 of SEQ ID NO: 753
uuuccucuuugguugaaga

SEQ ID NO: 61071 - RNA, 19 nt, Artificial Sequence
  Description of Artificial Sequence: Synthetic oligonucleotide
  Antisense strand to SEQ ID NO: 60990
ucuucaaccaaagaggaaa

SEQ ID NO: 61072 - RNA, 19 nt, Artificial Sequence
  Description of Artificial Sequence: Synthetic oligonucleotide
  Sense strand starting at position 44 of SEQ ID NO: 753
cucguugacuuaccaaaga

SEQ ID NO: 61073 - RNA, 19 nt, Artificial Sequence
  Description of Artificial Sequence: Synthetic oligonucleotide
  Antisense strand to SEQ ID NO: 60992
ucuuugguaagucaacgag

SEQ ID NO: 61074 - RNA, 19 nt, Artificial Sequence
  Description of Artificial Sequence: Synthetic oligonucleotide
  Sense strand starting at position 3826 of SEQ ID NO: 755
agcaucuuaccuggauaga

SEQ ID NO: 61075 - RNA, 19 nt, Artificial Sequence
  Description of Artificial Sequence: Synthetic oligonucleotide
  Antisense strand to SEQ ID NO: 60994
ucuauccagguaagaugcu

SEQ ID NO: 61076 - RNA, 19 nt, Artificial Sequence
  Description of Artificial Sequence: Synthetic oligonucleotide
  Sense strand starting at position 3824 of SEQ ID NO: 755
auagcaucuuaccuggaua

SEQ ID NO: 61077 - RNA, 19 nt, Artificial Sequence
  Description of Artificial Sequence: Synthetic oligonucleotide
  Antisense strand to SEQ ID NO: 60996
uauccagguaagaugcuau

SEQ ID NO: 61078 - RNA, 19 nt, Artificial Sequence
  Description of Artificial Sequence: Synthetic oligonucleotide
  Sense strand starting at position 3657 of SEQ ID NO: 755
auuacagguguacgaauua

SEQ ID NO: 61079 - RNA, 19 nt, Artificial Sequence
  Description of Artificial Sequence: Synthetic oligonucleotide
  Antisense strand to SEQ ID NO: 60998
uaauucguacaccuguaau

SEQ ID NO: 61080 - RNA, 19 nt, Artificial Sequence
  Description of Artificial Sequence: Synthetic oligonucleotide
  Sense strand starting at position 3655 of SEQ ID NO: 755
ggauuacagguguacgaau

SEQ ID NO: 61081 - RNA, 19 nt, Artificial Sequence
  Description of Artificial Sequence: Synthetic oligonucleotide
  Antisense strand to SEQ ID NO: 61000
auucguacaccuguaaucc

SEQ ID NO: 61082 - RNA, 19 nt, Artificial Sequence
  Description of Artificial Sequence: Synthetic oligonucleotide
  Sense strand starting at position 3239 of SEQ ID NO: 755
ccauuaucgagaggcauac

SEQ ID NO: 61083 - RNA, 19 nt, Artificial Sequence
  Description of Artificial Sequence: Synthetic oligonucleotide
  Antisense strand to SEQ ID NO: 61002
guaugccucucgauaaugg

SEQ ID NO: 61084 - RNA, 19 nt, Artificial Sequence
  Description of Artificial Sequence: Synthetic oligonucleotide
  Sense strand starting at position 3237 of SEQ ID NO: 755
uuccauuaucgagaggcau

SEQ ID NO: 61085 - RNA, 19 nt, Artificial Sequence
  Description of Artificial Sequence: Synthetic oligonucleotide
  Antisense strand to SEQ ID NO: 61004
augccucucgauaauggaa

SEQ ID NO: 61086 - RNA, 19 nt, Artificial Sequence
  Description of Artificial Sequence: Synthetic oligonucleotide
  Sense strand starting at position 3198 of SEQ ID NO: 755
ggaucuuucugagucuaaa

SEQ ID NO: 61087 - RNA, 19 nt, Artificial Sequence
  Description of Artificial Sequence: Synthetic oligonucleotide
  Antisense strand to SEQ ID NO: 61006
uuuagacucagaaagaucc

SEQ ID NO: 61088 - RNA, 19 nt, Artificial Sequence
  Description of Artificial Sequence: Synthetic oligonucleotide
  Sense strand starting at position 3192 of SEQ ID NO: 755
gagaguggaucuuucugag

SEQ ID NO: 61089 - RNA, 19 nt, Artificial Sequence
  Description of Artificial Sequence: Synthetic oligonucleotide
  Antisense strand to SEQ ID NO: 61008
cucagaaagauccacucuc

SEQ ID NO: 61090 - RNA, 19 nt, Artificial Sequence
  Description of Artificial Sequence: Synthetic oligonucleotide
  Sense strand starting at position 3186 of SEQ ID NO: 755
gcauaagagaguggaucuu

SEQ ID NO: 61091 - RNA, 19 nt, Artificial Sequence
  Description of Artificial Sequence: Synthetic oligonucleotide
  Antisense strand to SEQ ID NO: 61010
aagauccacucucuuaugc

SEQ ID NO: 61092 - RNA, 19 nt, Artificial Sequence
  Description of Artificial Sequence: Synthetic oligonucleotide
  Sense strand starting at position 2616 of SEQ ID NO: 755
uuguuugaggccuacuuaa

SEQ ID NO: 61093 - RNA, 19 nt, Artificial Sequence
  Description of Artificial Sequence: Synthetic oligonucleotide
  Antisense strand to SEQ ID NO: 61012
uuaaguaggccucaaacaa

SEQ ID NO: 61094 - RNA, 19 nt, Artificial Sequence
  Description of Artificial Sequence: Synthetic oligonucleotide
  Sense strand starting at position 2599 of SEQ ID NO: 755
cucugaauguuugcuauuu

SEQ ID NO: 61095 - RNA, 19 nt, Artificial Sequence
  Description of Artificial Sequence: Synthetic oligonucleotide
  Antisense strand to SEQ ID NO: 61014
aaauagcaaacauucagag

SEQ ID NO: 61096 - RNA, 19 nt, Artificial Sequence
  Description of Artificial Sequence: Synthetic oligonucleotide
  Sense strand starting at position 2490 of SEQ ID NO: 755
ggcauccgauaucuugaga

SEQ ID NO: 61097 - RNA, 19 nt, Artificial Sequence
  Description of Artificial Sequence: Synthetic oligonucleotide
  Antisense strand to SEQ ID NO: 61016
ucucaagauaucggaugcc

SEQ ID NO: 61098 - RNA, 19 nt, Artificial Sequence
  Description of Artificial Sequence: Synthetic oligonucleotide
  Sense strand starting at position 2487 of SEQ ID NO: 755
ggaggcauccgauaucuug

SEQ ID NO: 61099 - RNA, 19 nt, Artificial Sequence
  Description of Artificial Sequence: Synthetic oligonucleotide
  Antisense strand to SEQ ID NO: 61018
caagauaucggaugccucc

SEQ ID NO: 61100 - RNA, 19 nt, Artificial Sequence
  Description of Artificial Sequence: Synthetic oligonucleotide
  Sense strand starting at position 2484 of SEQ ID NO: 755
auaggaggcauccgauauc

SEQ ID NO: 61101 - RNA, 19 nt, Artificial Sequence
  Description of Artificial Sequence: Synthetic oligonucleotide
  Antisense strand to SEQ ID NO: 61020
gauaucggaugccuccuau

SEQ ID NO: 61102 - RNA, 19 nt, Artificial Sequence
  Description of Artificial Sequence: Synthetic oligonucleotide
  Sense strand starting at position 2332 of SEQ ID NO: 755
ucagucucaguggaaauau

SEQ ID NO: 61103 - RNA, 19 nt, Artificial Sequence
  Description of Artificial Sequence: Synthetic oligonucleotide
  Antisense strand to SEQ ID NO: 61022
auauuuccacugagacuga

SEQ ID NO: 61104 - RNA, 19 nt, Artificial Sequence
  Description of Artificial Sequence: Synthetic oligonucleotide
  Sense strand starting at position 2294 of SEQ ID NO: 755
gugucagcucucuauuucu

SEQ ID NO: 61105 - RNA, 19 nt, Artificial Sequence
  Description of Artificial Sequence: Synthetic oligonucleotide
  Antisense strand to SEQ ID NO: 61024
agaaauagagagcugacac

SEQ ID NO: 61106 - RNA, 19 nt, Artificial Sequence
  Description of Artificial Sequence: Synthetic oligonucleotide
  Sense strand starting at position 2238 of SEQ ID NO: 755
guaggcucugacuauccaa

SEQ ID NO: 61107 - RNA, 19 nt, Artificial Sequence
  Description of Artificial Sequence: Synthetic oligonucleotide
  Antisense strand to SEQ ID NO: 61026
uuggauagucagagccuac

SEQ ID NO: 61108 - RNA, 19 nt, Artificial Sequence
  Description of Artificial Sequence: Synthetic oligonucleotide
  Sense strand starting at position 2223 of SEQ ID NO: 755
ucagauuagucucuaguag

SEQ ID NO: 61109 - RNA, 19 nt, Artificial Sequence
  Description of Artificial Sequence: Synthetic oligonucleotide
  Antisense strand to SEQ ID NO: 61028
cuacuagagacuaaucuga

SEQ ID NO: 61110 - RNA, 19 nt, Artificial Sequence
  Description of Artificial Sequence: Synthetic oligonucleotide
  Sense strand starting at position 2081 of SEQ ID NO: 755
uuguuugaaggccaauaga

SEQ ID NO: 61111 - RNA, 19 nt, Artificial Sequence
  Description of Artificial Sequence: Synthetic oligonucleotide
  Antisense strand to SEQ ID NO: 61030
ucuauuggccuucaaacaa

SEQ ID NO: 61112 - RNA, 19 nt, Artificial Sequence
  Description of Artificial Sequence: Synthetic oligonucleotide
  Sense strand starting at position 2016 of SEQ ID NO: 755
gggaaaggucagugcaaca

SEQ ID NO: 61113 - RNA, 19 nt, Artificial Sequence
  Description of Artificial Sequence: Synthetic oligonucleotide
  Antisense strand to SEQ ID NO: 61032
uguugcacugaccuuuccc

SEQ ID NO: 61114 - RNA, 19 nt, Artificial Sequence
  Description of Artificial Sequence: Synthetic oligonucleotide
  Sense strand starting at position 2003 of SEQ ID NO: 755
ucauguacacucugggaaa

SEQ ID NO: 61115 - RNA, 19 nt, Artificial Sequence
  Description of Artificial Sequence: Synthetic oligonucleotide
  Antisense strand to SEQ ID NO: 61034
uuucccagaguguacauga

SEQ ID NO: 61116 - RNA, 19 nt, Artificial Sequence
  Description of Artificial Sequence: Synthetic oligonucleotide
  Sense strand starting at position 1538 of SEQ ID NO: 755
ccagaauuaguccauguuu

SEQ ID NO: 61117 - RNA, 19 nt, Artificial Sequence
  Description of Artificial Sequence: Synthetic oligonucleotide
  Antisense strand to SEQ ID NO: 61036
aaacauggacuaauucugg

SEQ ID NO: 61118 - RNA, 19 nt, Artificial Sequence
  Description of Artificial Sequence: Synthetic oligonucleotide
  Sense strand starting at position 1238 of SEQ ID NO: 755
agucaauauagagaucguu

SEQ ID NO: 61119 - RNA, 19 nt, Artificial Sequence
  Description of Artificial Sequence: Synthetic oligonucleotide
  Antisense strand to SEQ ID NO: 61038
aacgaucucuauauugacu

SEQ ID NO: 61120 - RNA, 19 nt, Artificial Sequence
  Description of Artificial Sequence: Synthetic oligonucleotide
  Sense strand starting at position 1143 of SEQ ID NO: 755
gguaguagagaaugcaaga

SEQ ID NO: 61121 - RNA, 19 nt, Artificial Sequence
  Description of Artificial Sequence: Synthetic oligonucleotide
  Antisense strand to SEQ ID NO: 61040
ucuugcauucucuacuacc

SEQ ID NO: 61122 - RNA, 19 nt, Artificial Sequence
  Description of Artificial Sequence: Synthetic oligonucleotide
  Sense strand starting at position 1095 of SEQ ID NO: 755
aagagaaguccauguagua

SEQ ID NO: 61123 - RNA, 19 nt, Artificial Sequence
  Description of Artificial Sequence: Synthetic oligonucleotide
  Antisense strand to SEQ ID NO: 61042
uacuacauggacuucucuu

SEQ ID NO: 61124 - RNA, 19 nt, Artificial Sequence
  Description of Artificial Sequence: Synthetic oligonucleotide
  Sense strand starting at position 1027 of SEQ ID NO: 755
gaggcaaggcuauaacuau

SEQ ID NO: 61125 - RNA, 19 nt, Artificial Sequence
  Description of Artificial Sequence: Synthetic oligonucleotide
  Antisense strand to SEQ ID NO: 61044
auaguuauagccuugccuc

SEQ ID NO: 61126 - RNA, 19 nt, Artificial Sequence
  Description of Artificial Sequence: Synthetic oligonucleotide
  Sense strand starting at position 993 of SEQ ID NO: 755
caugaaggagauuguguaa

SEQ ID NO: 61127 - RNA, 19 nt, Artificial Sequence
  Description of Artificial Sequence: Synthetic oligonucleotide
  Antisense strand to SEQ ID NO: 61046
uuacacaaucuccuucaug

SEQ ID NO: 61128 - RNA, 19 nt, Artificial Sequence
  Description of Artificial Sequence: Synthetic oligonucleotide
  Sense strand starting at position 876 of SEQ ID NO: 755
ugguaugaagcuugauauu

SEQ ID NO: 61129 - RNA, 19 nt, Artificial Sequence
  Description of Artificial Sequence: Synthetic oligonucleotide
  Antisense strand to SEQ ID NO: 61048
aauaucaagcuucauacca

SEQ ID NO: 61130 - RNA, 19 nt, Artificial Sequence
  Description of Artificial Sequence: Synthetic oligonucleotide
  Sense strand starting at position 853 of SEQ ID NO: 755
ugagauauguagguagaua

SEQ ID NO: 61131 - RNA, 19 nt, Artificial Sequence
  Description of Artificial Sequence: Synthetic oligonucleotide
  Antisense strand to SEQ ID NO: 61050
uaucuaccuacauaucuca

SEQ ID NO: 61132 - RNA, 19 nt, Artificial Sequence
  Description of Artificial Sequence: Synthetic oligonucleotide
  Sense strand starting at position 852 of SEQ ID NO: 755
gugagauauguagguagau

SEQ ID NO: 61133 - RNA, 19 nt, Artificial Sequence
  Description of Artificial Sequence: Synthetic oligonucleotide
  Antisense strand to SEQ ID NO: 61052
aucuaccuacauaucucac

SEQ ID NO: 61134 - RNA, 19 nt, Artificial Sequence
  Description of Artificial Sequence: Synthetic oligonucleotide
  Sense strand starting at position 839 of SEQ ID NO: 755
ugcagagacacuugugaga

SEQ ID NO: 61135 - RNA, 19 nt, Artificial Sequence
  Description of Artificial Sequence: Synthetic oligonucleotide
  Antisense strand to SEQ ID NO: 61054
ucucacaagugucucugca

SEQ ID NO: 61136 - RNA, 19 nt, Artificial Sequence
  Description of Artificial Sequence: Synthetic oligonucleotide
  Sense strand starting at position 752 of SEQ ID NO: 755
gugucauuagcugagauca

SEQ ID NO: 61137 - RNA, 19 nt, Artificial Sequence
  Description of Artificial Sequence: Synthetic oligonucleotide
  Antisense strand to SEQ ID NO: 61056
ugaucucagcuaaugacac

SEQ ID NO: 61138 - RNA, 19 nt, Artificial Sequence
  Description of Artificial Sequence: Synthetic oligonucleotide
  Sense strand starting at position 633 of SEQ ID NO: 755
augaacaauuuagaaggua

SEQ ID NO: 61139 - RNA, 19 nt, Artificial Sequence
  Description of Artificial Sequence: Synthetic oligonucleotide
  Antisense strand to SEQ ID NO: 61058
uaccuucuaaauuguucau

SEQ ID NO: 61140 - RNA, 19 nt, Artificial Sequence
  Description of Artificial Sequence: Synthetic oligonucleotide
  Sense strand starting at position 591 of SEQ ID NO: 755
guccuaagacauuagugau

SEQ ID NO: 61141 - RNA, 19 nt, Artificial Sequence
  Description of Artificial Sequence: Synthetic oligonucleotide
  Antisense strand to SEQ ID NO: 61060
aucacuaaugucuuaggac

SEQ ID NO: 61142 - RNA, 19 nt, Artificial Sequence
  Description of Artificial Sequence: Synthetic oligonucleotide
  Sense strand starting at position 546 of SEQ ID NO: 755
uuaggaauuuacuggaaua

SEQ ID NO: 61143 - RNA, 19 nt, Artificial Sequence
  Description of Artificial Sequence: Synthetic oligonucleotide
  Antisense strand to SEQ ID NO: 61062
uauuccaguaaauuccuaa

SEQ ID NO: 61144 - RNA, 19 nt, Artificial Sequence
  Description of Artificial Sequence: Synthetic oligonucleotide
  Sense strand starting at position 538 of SEQ ID NO: 755
gagauuaguuaggaauuua

SEQ ID NO: 61145 - RNA, 19 nt, Artificial Sequence
  Description of Artificial Sequence: Synthetic oligonucleotide
  Antisense strand to SEQ ID NO: 61064
uaaauuccuaacuaaucuc

SEQ ID NO: 61146 - RNA, 19 nt, Artificial Sequence
  Description of Artificial Sequence: Synthetic oligonucleotide
  Sense strand starting at position 525 of SEQ ID NO: 755
agguuuggacgaggagauu

SEQ ID NO: 61147 - RNA, 19 nt, Artificial Sequence
  Description of Artificial Sequence: Synthetic oligonucleotide
  Antisense strand to SEQ ID NO: 61066
aaucuccucguccaaaccu

SEQ ID NO: 61148 - RNA, 19 nt, Artificial Sequence
  Description of Artificial Sequence: Synthetic oligonucleotide
  Sense strand starting at position 375 of SEQ ID NO: 755
ugagauuuauuagagcaua

SEQ ID NO: 61149 - RNA, 19 nt, Artificial Sequence
  Description of Artificial Sequence: Synthetic oligonucleotide
  Antisense strand to SEQ ID NO: 61068
uaugcucuaauaaaucuca

SEQ ID NO: 61150 - RNA, 19 nt, Artificial Sequence
  Description of Artificial Sequence: Synthetic oligonucleotide
  Sense strand starting at position 299 of SEQ ID NO: 755
gguagagauagugguauaa

SEQ ID NO: 61151 - RNA, 19 nt, Artificial Sequence
  Description of Artificial Sequence: Synthetic oligonucleotide
  Antisense strand to SEQ ID NO: 61070
uuauaccacuaucucuacc

SEQ ID NO: 61152 - RNA, 19 nt, Artificial Sequence
  Description of Artificial Sequence: Synthetic oligonucleotide
  Sense strand starting at position 3 of SEQ ID NO: 755
aggaguaucugauuccaag

SEQ ID NO: 61153 - RNA, 19 nt, Artificial Sequence
  Description of Artificial Sequence: Synthetic oligonucleotide
  Antisense strand to SEQ ID NO: 61072
cuuggaaucagauacuccu

SEQ ID NO: 61154 - RNA, 19 nt, Artificial Sequence
  Description of Artificial Sequence: Synthetic oligonucleotide
  Sense strand starting at position 3964 of SEQ ID NO: 756
uugugagggcuggaugaau

SEQ ID NO: 61155 - RNA, 19 nt, Artificial Sequence
  Description of Artificial Sequence: Synthetic oligonucleotide
  Antisense strand to SEQ ID NO: 61074
auucauccagcccucacaa

SEQ ID NO: 61156 - RNA, 19 nt, Artificial Sequence
  Description of Artificial Sequence: Synthetic oligonucleotide
  Sense strand starting at position 3962 of SEQ ID NO: 756
uauugugagggcuggauga

SEQ ID NO: 61157 - RNA, 19 nt, Artificial Sequence
  Description of Artificial Sequence: Synthetic oligonucleotide
  Antisense strand to SEQ ID NO: 61076
ucauccagcccucacaaua

SEQ ID NO: 61158 - RNA, 19 nt, Artificial Sequence
  Description of Artificial Sequence: Synthetic oligonucleotide
  Sense strand starting at position 3945 of SEQ ID NO: 756
auggacuucuugguacaua

SEQ ID NO: 61159 - RNA, 19 nt, Artificial Sequence
  Description of Artificial Sequence: Synthetic oligonucleotide
  Antisense strand to SEQ ID NO: 61078
uauguaccaagaaguccau

SEQ ID NO: 61160 - RNA, 19 nt, Artificial Sequence
  Description of Artificial Sequence: Synthetic oligonucleotide
  Sense strand starting at position 3944 of SEQ ID NO: 756
aauggacuucuugguacau

SEQ ID NO: 61161 - RNA, 19 nt, Artificial Sequence
  Description of Artificial Sequence: Synthetic oligonucleotide
  Antisense strand to SEQ ID NO: 61080
auguaccaagaaguccauu

SEQ ID NO: 61162 - RNA, 19 nt, Artificial Sequence
  Description of Artificial Sequence: Synthetic oligonucleotide
  Sense strand starting at position 3841 of SEQ ID NO: 756
agccaugacugcccuaaua

SEQ ID NO: 61163 - RNA, 19 nt, Artificial Sequence
  Description of Artificial Sequence: Synthetic oligonucleotide
  Antisense strand to SEQ ID NO: 61082
uauuagggcagucauggcu

SEQ ID NO: 61164 - RNA, 19 nt, Artificial Sequence
  Description of Artificial Sequence: Synthetic oligonucleotide
  Sense strand starting at position 3132 of SEQ ID NO: 756
cauuauuggucuuugcaag

SEQ ID NO: 61165 - RNA, 19 nt, Artificial Sequence
  Description of Artificial Sequence: Synthetic oligonucleotide
  Antisense strand to SEQ ID NO: 61084
cuugcaaagaccaauaaug

SEQ ID NO: 61166 - RNA, 19 nt, Artificial Sequence
  Description of Artificial Sequence: Synthetic oligonucleotide
  Sense strand starting at position 3080 of SEQ ID NO: 756
cucuuaucucucugauugu

SEQ ID NO: 61167 - RNA, 19 nt, Artificial Sequence
  Description of Artificial Sequence: Synthetic oligonucleotide
  Antisense strand to SEQ ID NO: 61086
acaaucagagagauaagag

SEQ ID NO: 61168 - RNA, 19 nt, Artificial Sequence
  Description of Artificial Sequence: Synthetic oligonucleotide
  Sense strand starting at position 3077 of SEQ ID NO: 756
guucucuuaucucucugau

SEQ ID NO: 61169 - RNA, 19 nt, Artificial Sequence
  Description of Artificial Sequence: Synthetic oligonucleotide
  Antisense strand to SEQ ID NO: 61088
aucagagagauaagagaac

SEQ ID NO: 61170 - RNA, 19 nt, Artificial Sequence
  Description of Artificial Sequence: Synthetic oligonucleotide
  Sense strand starting at position 3054 of SEQ ID NO: 756
auagaagucugucuccaaa

SEQ ID NO: 61171 - RNA, 19 nt, Artificial Sequence
  Description of Artificial Sequence: Synthetic oligonucleotide
  Antisense strand to SEQ ID NO: 61090
uuuggagacagacuucuau

SEQ ID NO: 61172 - RNA, 19 nt, Artificial Sequence
  Description of Artificial Sequence: Synthetic oligonucleotide
  Sense strand starting at position 3035 of SEQ ID NO: 756
ugaugaaacugggauuuga

SEQ ID NO: 61173 - RNA, 19 nt, Artificial Sequence
  Description of Artificial Sequence: Synthetic oligonucleotide
  Antisense strand to SEQ ID NO: 61092
ucaaaucccaguuucauca

SEQ ID NO: 61174 - RNA, 19 nt, Artificial Sequence
  Description of Artificial Sequence: Synthetic oligonucleotide
  Sense strand starting at position 2896 of SEQ ID NO: 756
gaugacagcucacuuuagu

SEQ ID NO: 61175 - RNA, 19 nt, Artificial Sequence
  Description of Artificial Sequence: Synthetic oligonucleotide
  Antisense strand to SEQ ID NO: 61094
acuaaagugagcugucauc

SEQ ID NO: 61176 - RNA, 19 nt, Artificial Sequence
  Description of Artificial Sequence: Synthetic oligonucleotide
  Sense strand starting at position 2849 of SEQ ID NO: 756
aguguucucagugauaauu

SEQ ID NO: 61177 - RNA, 19 nt, Artificial Sequence
  Description of Artificial Sequence: Synthetic oligonucleotide
  Antisense strand to SEQ ID NO: 61096
aauuaucacugagaacacu

SEQ ID NO: 61178 - RNA, 19 nt, Artificial Sequence
  Description of Artificial Sequence: Synthetic oligonucleotide
  Sense strand starting at position 2848 of SEQ ID NO: 756
aaguguucucagugauaau

SEQ ID NO: 61179 - RNA, 19 nt, Artificial Sequence
  Description of Artificial Sequence: Synthetic oligonucleotide
  Antisense strand to SEQ ID NO: 61098
auuaucacugagaacacuu

SEQ ID NO: 61180 - RNA, 19 nt, Artificial Sequence
  Description of Artificial Sequence: Synthetic oligonucleotide
  Sense strand starting at position 2844 of SEQ ID NO: 756
gauaaaguguucucaguga

SEQ ID NO: 61181 - RNA, 19 nt, Artificial Sequence
  Description of Artificial Sequence: Synthetic oligonucleotide
  Antisense strand to SEQ ID NO: 61100
ucacugagaacacuuuauc

SEQ ID NO: 61182 - RNA, 19 nt, Artificial Sequence
  Description of Artificial Sequence: Synthetic oligonucleotide
  Sense strand starting at position 2819 of SEQ ID NO: 756
gucaccauuugauaagcau

SEQ ID NO: 61183 - RNA, 19 nt, Artificial Sequence
  Description of Artificial Sequence: Synthetic oligonucleotide
  Antisense strand to SEQ ID NO: 61102
augcuuaucaaauggugac

SEQ ID NO: 61184 - RNA, 19 nt, Artificial Sequence
  Description of Artificial Sequence: Synthetic oligonucleotide
  Sense strand starting at position 2763 of SEQ ID NO: 756
uuguaacuugagcaauuau

SEQ ID NO: 61185 - RNA, 19 nt, Artificial Sequence
  Description of Artificial Sequence: Synthetic oligonucleotide
  Antisense strand to SEQ ID NO: 61104
auaauugcucaaguuacaa

SEQ ID NO: 61186 - RNA, 19 nt, Artificial Sequence
  Description of Artificial Sequence: Synthetic oligonucleotide
  Sense strand starting at position 2762 of SEQ ID NO: 756
uuuguaacuugagcaauua

SEQ ID NO: 61187 - RNA, 19 nt, Artificial Sequence
  Description of Artificial Sequence: Synthetic oligonucleotide
  Antisense strand to SEQ ID NO: 61106
uaauugcucaaguuacaaa

SEQ ID NO: 61188 - RNA, 19 nt, Artificial Sequence
  Description of Artificial Sequence: Synthetic oligonucleotide
  Sense strand starting at position 2592 of SEQ ID NO: 756
uuauacagugcucagaauu

SEQ ID NO: 61189 - RNA, 19 nt, Artificial Sequence
  Description of Artificial Sequence: Synthetic oligonucleotide
  Antisense strand to SEQ ID NO: 61108
aauucugagcacuguauaa

SEQ ID NO: 61190 - RNA, 19 nt, Artificial Sequence
  Description of Artificial Sequence: Synthetic oligonucleotide
  Sense strand starting at position 2591 of SEQ ID NO: 756
auuauacagugcucagaau

SEQ ID NO: 61191 - RNA, 19 nt, Artificial Sequence
  Description of Artificial Sequence: Synthetic oligonucleotide
  Antisense strand to SEQ ID NO: 61110
auucugagcacuguauaau

SEQ ID NO: 61192 - RNA, 19 nt, Artificial Sequence
  Description of Artificial Sequence: Synthetic oligonucleotide
  Sense strand starting at position 2547 of SEQ ID NO: 756
uauagucgucccuagaaac

SEQ ID NO: 61193 - RNA, 19 nt, Artificial Sequence
  Description of Artificial Sequence: Synthetic oligonucleotide
  Antisense strand to SEQ ID NO: 61112
guuucuagggacgacuaua

SEQ ID NO: 61194 - RNA, 19 nt, Artificial Sequence
  Description of Artificial Sequence: Synthetic oligonucleotide
  Sense strand starting at position 2535 of SEQ ID NO: 756
cuuugugaacuguauaguc

SEQ ID NO: 61195 - RNA, 19 nt, Artificial Sequence
  Description of Artificial Sequence: Synthetic oligonucleotide
  Antisense strand to SEQ ID NO: 61114
gacuauacaguucacaaag

SEQ ID NO: 61196 - RNA, 19 nt, Artificial Sequence
  Description of Artificial Sequence: Synthetic oligonucleotide
  Sense strand starting at position 2372 of SEQ ID NO: 756
gucugacuucugcaccaag

SEQ ID NO: 61197 - RNA, 19 nt, Artificial Sequence
  Description of Artificial Sequence: Synthetic oligonucleotide
  Antisense strand to SEQ ID NO: 61116
cuuggugcagaagucagac

SEQ ID NO: 61198 - RNA, 19 nt, Artificial Sequence
  Description of Artificial Sequence: Synthetic oligonucleotide
  Sense strand starting at position 2189 of SEQ ID NO: 756
ugacaaugugcccaagagu

SEQ ID NO: 61199 - RNA, 19 nt, Artificial Sequence
  Description of Artificial Sequence: Synthetic oligonucleotide
  Antisense strand to SEQ ID NO: 61118
acucuugggcacauuguca

SEQ ID NO: 61200 - RNA, 19 nt, Artificial Sequence
  Description of Artificial Sequence: Synthetic oligonucleotide
  Sense strand starting at position 2180 of SEQ ID NO: 756
ggacauauuugacaaugug

SEQ ID NO: 61201 - RNA, 19 nt, Artificial Sequence
  Description of Artificial Sequence: Synthetic oligonucleotide
  Antisense strand to SEQ ID NO: 61120
cacauugucaaauaugucc

SEQ ID NO: 61202 - RNA, 19 nt, Artificial Sequence
  Description of Artificial Sequence: Synthetic oligonucleotide
  Sense strand starting at position 2094 of SEQ ID NO: 756
uuaaauuaugcuggucacu

SEQ ID NO: 61203 - RNA, 19 nt, Artificial Sequence
  Description of Artificial Sequence: Synthetic oligonucleotide
  Antisense strand to SEQ ID NO: 61122
agugaccagcauaauuuaa

SEQ ID NO: 61204 - RNA, 19 nt, Artificial Sequence
  Description of Artificial Sequence: Synthetic oligonucleotide
  Sense strand starting at position 2001 of SEQ ID NO: 756
gaaguuccacucugagagu

SEQ ID NO: 61205 - RNA, 19 nt, Artificial Sequence
  Description of Artificial Sequence: Synthetic oligonucleotide
  Antisense strand to SEQ ID NO: 61124
acucucagaguggaacuuc

SEQ ID NO: 61206 - RNA, 19 nt, Artificial Sequence
  Description of Artificial Sequence: Synthetic oligonucleotide
  Sense strand starting at position 1783 of SEQ ID NO: 756
gaccguaccugagcaauga

SEQ ID NO: 61207 - RNA, 19 nt, Artificial Sequence
  Description of Artificial Sequence: Synthetic oligonucleotide
  Antisense strand to SEQ ID NO: 61126
ucauugcucagguacgguc

SEQ ID NO: 61208 - RNA, 19 nt, Artificial Sequence
  Description of Artificial Sequence: Synthetic oligonucleotide
  Sense strand starting at position 1518 of SEQ ID NO: 756
cugaaaucuugaguucuca

SEQ ID NO: 61209 - RNA, 19 nt, Artificial Sequence
  Description of Artificial Sequence: Synthetic oligonucleotide
  Antisense strand to SEQ ID NO: 61128
ugagaacucaagauuucag

SEQ ID NO: 61210 - RNA, 19 nt, Artificial Sequence
  Description of Artificial Sequence: Synthetic oligonucleotide
  Sense strand starting at position 1516 of SEQ ID NO: 756
uccugaaaucuugaguucu

SEQ ID NO: 61211 - RNA, 19 nt, Artificial Sequence
  Description of Artificial Sequence: Synthetic oligonucleotide
  Antisense strand to SEQ ID NO: 61130
agaacucaagauuucagga

SEQ ID NO: 61212 - RNA, 19 nt, Artificial Sequence
  Description of Artificial Sequence: Synthetic oligonucleotide
  Sense strand starting at position 1484 of SEQ ID NO: 756
auagaaaugcaauguguuu

SEQ ID NO: 61213 - RNA, 19 nt, Artificial Sequence
  Description of Artificial Sequence: Synthetic oligonucleotide
  Antisense strand to SEQ ID NO: 61132
aaacacauugcauuucuau

SEQ ID NO: 61214 - RNA, 19 nt, Artificial Sequence
  Description of Artificial Sequence: Synthetic oligonucleotide
  Sense strand starting at position 1301 of SEQ ID NO: 756
gccucauguccuuaaggac

SEQ ID NO: 61215 - RNA, 19 nt, Artificial Sequence
  Description of Artificial Sequence: Synthetic oligonucleotide
  Antisense strand to SEQ ID NO: 61134
guccuuaaggacaugaggc

SEQ ID NO: 61216 - RNA, 19 nt, Artificial Sequence
  Description of Artificial Sequence: Synthetic oligonucleotide
  Sense strand starting at position 1300 of SEQ ID NO: 756
ggccucauguccuuaagga

SEQ ID NO: 61217 - RNA, 19 nt, Artificial Sequence
  Description of Artificial Sequence: Synthetic oligonucleotide
  Antisense strand to SEQ ID NO: 61136
uccuuaaggacaugaggcc

SEQ ID NO: 61218 - RNA, 19 nt, Artificial Sequence
  Description of Artificial Sequence: Synthetic oligonucleotide
  Sense strand starting at position 999 of SEQ ID NO: 756
cuccuaguuccugaagaua

SEQ ID NO: 61219 - RNA, 19 nt, Artificial Sequence
  Description of Artificial Sequence: Synthetic oligonucleotide
  Antisense strand to SEQ ID NO: 61138
uaucuucaggaacuaggag

SEQ ID NO: 61220 - RNA, 19 nt, Artificial Sequence
  Description of Artificial Sequence: Synthetic oligonucleotide
  Sense strand starting at position 680 of SEQ ID NO: 756
uuucccaagcucugagaaa

SEQ ID NO: 61221 - RNA, 19 nt, Artificial Sequence
  Description of Artificial Sequence: Synthetic oligonucleotide
  Antisense strand to SEQ ID NO: 61140
uuucucagagcuugggaaa

SEQ ID NO: 61222 - RNA, 19 nt, Artificial Sequence
  Description of Artificial Sequence: Synthetic oligonucleotide
  Sense strand starting at position 635 of SEQ ID NO: 756
aaggcugaauggucccaaa

SEQ ID NO: 61223 - RNA, 19 nt, Artificial Sequence
  Description of Artificial Sequence: Synthetic oligonucleotide
  Antisense strand to SEQ ID NO: 61142
uuugggaccauucagccuu

SEQ ID NO: 61224 - RNA, 19 nt, Artificial Sequence
  Description of Artificial Sequence: Synthetic oligonucleotide
  Sense strand starting at position 594 of SEQ ID NO: 756
gaauauuggcgaugagagg

SEQ ID NO: 61225 - RNA, 19 nt, Artificial Sequence
  Description of Artificial Sequence: Synthetic oligonucleotide
  Antisense strand to SEQ ID NO: 61144
ccucucaucgccaauauuc

SEQ ID NO: 61226 - RNA, 19 nt, Artificial Sequence
  Description of Artificial Sequence: Synthetic oligonucleotide
  Sense strand starting at position 590 of SEQ ID NO: 756
aggagaauauuggcgauga

SEQ ID NO: 61227 - RNA, 19 nt, Artificial Sequence
  Description of Artificial Sequence: Synthetic oligonucleotide
  Antisense strand to SEQ ID NO: 61146
ucaucgccaauauucuccu

SEQ ID NO: 61228 - RNA, 19 nt, Artificial Sequence
  Description of Artificial Sequence: Synthetic oligonucleotide
  Sense strand starting at position 488 of SEQ ID NO: 756
uggaguggaagcuguagaa

SEQ ID NO: 61229 - RNA, 19 nt, Artificial Sequence
  Description of Artificial Sequence: Synthetic oligonucleotide
  Antisense strand to SEQ ID NO: 61148
uucuacagcuuccacucca

SEQ ID NO: 61230 - RNA, 19 nt, Artificial Sequence
  Description of Artificial Sequence: Synthetic oligonucleotide
  Sense strand starting at position 245 of SEQ ID NO: 756
acgaccugaguuugggaaa

SEQ ID NO: 61231 - RNA, 19 nt, Artificial Sequence
  Description of Artificial Sequence: Synthetic oligonucleotide
  Antisense strand to SEQ ID NO: 61150
uuucccaaacucaggucgu

SEQ ID NO: 61232 - RNA, 19 nt, Artificial Sequence
  Description of Artificial Sequence: Synthetic oligonucleotide
  Sense strand starting at position 226 of SEQ ID NO: 756
aggugaggugcccaaagaa

SEQ ID NO: 61233 - RNA, 19 nt, Artificial Sequence
  Description of Artificial Sequence: Synthetic oligonucleotide
  Antisense strand to SEQ ID NO: 61152
uucuuugggcaccucaccu

SEQ ID NO: 61234 - RNA, 19 nt, Artificial Sequence
  Description of Artificial Sequence: Synthetic oligonucleotide
  Sense strand starting at position 3958 of SEQ ID NO: 757
aguguucucagugauaauu

SEQ ID NO: 61235 - RNA, 19 nt, Artificial Sequence
  Description of Artificial Sequence: Synthetic oligonucleotide
  Antisense strand to SEQ ID NO: 61154
aauuaucacugagaacacu

SEQ ID NO: 61236 - RNA, 19 nt, Artificial Sequence
  Description of Artificial Sequence: Synthetic oligonucleotide
  Sense strand starting at position 3957 of SEQ ID NO: 757
aaguguucucagugauaau

SEQ ID NO: 61237 - RNA, 19 nt, Artificial Sequence
  Description of Artificial Sequence: Synthetic oligonucleotide
  Antisense strand to SEQ ID NO: 61156
auuaucacugagaacacuu

SEQ ID NO: 61238 - RNA, 19 nt, Artificial Sequence
  Description of Artificial Sequence: Synthetic oligonucleotide
  Sense strand starting at position 3953 of SEQ ID NO: 757
gauaaaguguucucaguga

SEQ ID NO: 61239 - RNA, 19 nt, Artificial Sequence
  Description of Artificial Sequence: Synthetic oligonucleotide
  Antisense strand to SEQ ID NO: 61158
ucacugagaacacuuuauc

SEQ ID NO: 61240 - RNA, 19 nt, Artificial Sequence
  Description of Artificial Sequence: Synthetic oligonucleotide
  Sense strand starting at position 3872 of SEQ ID NO: 757
uuguaacuugagcaauuau

SEQ ID NO: 61241 - RNA, 19 nt, Artificial Sequence
  Description of Artificial Sequence: Synthetic oligonucleotide
  Antisense strand to SEQ ID NO: 61160
auaauugcucaaguuacaa

SEQ ID NO: 61242 - RNA, 19 nt, Artificial Sequence
  Description of Artificial Sequence: Synthetic oligonucleotide
  Sense strand starting at position 3871 of SEQ ID NO: 757
uuuguaacuugagcaauua

SEQ ID NO: 61243 - RNA, 19 nt, Artificial Sequence
  Description of Artificial Sequence: Synthetic oligonucleotide
  Antisense strand to SEQ ID NO: 61162
uaauugcucaaguuacaaa

SEQ ID NO: 61244 - RNA, 19 nt, Artificial Sequence
  Description of Artificial Sequence: Synthetic oligonucleotide
  Sense strand starting at position 3701 of SEQ ID NO: 757
uuauacagugcucagaauu

SEQ ID NO: 61245 - RNA, 19 nt, Artificial Sequence
  Description of Artificial Sequence: Synthetic oligonucleotide
  Antisense strand to SEQ ID NO: 61164
aauucugagcacuguauaa

SEQ ID NO: 61246 - RNA, 19 nt, Artificial Sequence
  Description of Artificial Sequence: Synthetic oligonucleotide
  Sense strand starting at position 3700 of SEQ ID NO: 757
auuauacagugcucagaau

SEQ ID NO: 61247 - RNA, 19 nt, Artificial Sequence
  Description of Artificial Sequence: Synthetic oligonucleotide
  Antisense strand to SEQ ID NO: 61166
auucugagcacuguauaau

SEQ ID NO: 61248 - RNA, 19 nt, Artificial Sequence
  Description of Artificial Sequence: Synthetic oligonucleotide
  Sense strand starting at position 3656 of SEQ ID NO: 757
uauagucgucccuagaaac

SEQ ID NO: 61249 - RNA, 19 nt, Artificial Sequence
  Description of Artificial Sequence: Synthetic oligonucleotide
  Antisense strand to SEQ ID NO: 61168
guuucuagggacgacuaua

SEQ ID NO: 61250 - RNA, 19 nt, Artificial Sequence
  Description of Artificial Sequence: Synthetic oligonucleotide
  Sense strand starting at position 3644 of SEQ ID NO: 757
cuuugugaacuguauaguc

SEQ ID NO: 61251 - RNA, 19 nt, Artificial Sequence
  Description of Artificial Sequence: Synthetic oligonucleotide
  Antisense strand to SEQ ID NO: 61170
gacuauacaguucacaaag

SEQ ID NO: 61252 - RNA, 19 nt, Artificial Sequence
  Description of Artificial Sequence: Synthetic oligonucleotide
  Sense strand starting at position 3481 of SEQ ID NO: 757
gucugacuucugcaccaag

SEQ ID NO: 61253 - RNA, 19 nt, Artificial Sequence
  Description of Artificial Sequence: Synthetic oligonucleotide
  Antisense strand to SEQ ID NO: 61172
cuuggugcagaagucagac

SEQ ID NO: 61254 - RNA, 19 nt, Artificial Sequence
  Description of Artificial Sequence: Synthetic oligonucleotide
  Sense strand starting at position 3298 of SEQ ID NO: 757
ugacaaugugcccaagagu

SEQ ID NO: 61255 - RNA, 19 nt, Artificial Sequence
  Description of Artificial Sequence: Synthetic oligonucleotide
  Antisense strand to SEQ ID NO: 61174
acucuugggcacauuguca

SEQ ID NO: 61256 - RNA, 19 nt, Artificial Sequence
  Description of Artificial Sequence: Synthetic oligonucleotide
  Sense strand starting at position 3289 of SEQ ID NO: 757
ggacauauuugacaaugug

SEQ ID NO: 61257 - RNA, 19 nt, Artificial Sequence
  Description of Artificial Sequence: Synthetic oligonucleotide
  Antisense strand to SEQ ID NO: 61176
cacauugucaaauaugucc

SEQ ID NO: 61258 - RNA, 19 nt, Artificial Sequence
  Description of Artificial Sequence: Synthetic oligonucleotide
  Sense strand starting at position 3203 of SEQ ID NO: 757
uuaaauuaugcuggucacu

SEQ ID NO: 61259 - RNA, 19 nt, Artificial Sequence
  Description of Artificial Sequence: Synthetic oligonucleotide
  Antisense strand to SEQ ID NO: 61178
agugaccagcauaauuuaa

SEQ ID NO: 61260 - RNA, 19 nt, Artificial Sequence
  Description of Artificial Sequence: Synthetic oligonucleotide
  Sense strand starting at position 3110 of SEQ ID NO: 757
gaaguuccacucugagagu

SEQ ID NO: 61261 - RNA, 19 nt, Artificial Sequence
  Description of Artificial Sequence: Synthetic oligonucleotide
  Antisense strand to SEQ ID NO: 61180
acucucagaguggaacuuc

SEQ ID NO: 61262 - RNA, 19 nt, Artificial Sequence
  Description of Artificial Sequence: Synthetic oligonucleotide
  Sense strand starting at position 2892 of SEQ ID NO: 757
gaccguaccugagcaauga

SEQ ID NO: 61263 - RNA, 19 nt, Artificial Sequence
  Description of Artificial Sequence: Synthetic oligonucleotide
  Antisense strand to SEQ ID NO: 61182
ucauugcucagguacgguc

SEQ ID NO: 61264 - RNA, 19 nt, Artificial Sequence
  Description of Artificial Sequence: Synthetic oligonucleotide
  Sense strand starting at position 2627 of SEQ ID NO: 757
cugaaaucuugaguucuca

SEQ ID NO: 61265 - RNA, 19 nt, Artificial Sequence
  Description of Artificial Sequence: Synthetic oligonucleotide
  Antisense strand to SEQ ID NO: 61184
ugagaacucaagauuucag

SEQ ID NO: 61266 - RNA, 19 nt, Artificial Sequence
  Description of Artificial Sequence: Synthetic oligonucleotide
  Sense strand starting at position 2625 of SEQ ID NO: 757
uccugaaaucuugaguucu

SEQ ID NO: 61267 - RNA, 19 nt, Artificial Sequence
  Description of Artificial Sequence: Synthetic oligonucleotide
  Antisense strand to SEQ ID NO: 61186
agaacucaagauuucagga

SEQ ID NO: 61268 - RNA, 19 nt, Artificial Sequence
  Description of Artificial Sequence: Synthetic oligonucleotide
  Sense strand starting at position 2593 of SEQ ID NO: 757
auagaaaugcaauguguuu

SEQ ID NO: 61269 - RNA, 19 nt, Artificial Sequence
  Description of Artificial Sequence: Synthetic oligonucleotide
  Antisense strand to SEQ ID NO: 61188
aaacacauugcauuucuau

SEQ ID NO: 61270 - RNA, 19 nt, Artificial Sequence
  Description of Artificial Sequence: Synthetic oligonucleotide
  Sense strand starting at position 2410 of SEQ ID NO: 757
gccucauguccuuaaggac

SEQ ID NO: 61271 - RNA, 19 nt, Artificial Sequence
  Description of Artificial Sequence: Synthetic oligonucleotide
  Antisense strand to SEQ ID NO: 61190
guccuuaaggacaugaggc

SEQ ID NO: 61272 - RNA, 19 nt, Artificial Sequence
  Description of Artificial Sequence: Synthetic oligonucleotide
  Sense strand starting at position 2409 of SEQ ID NO: 757
ggccucauguccuuaagga

SEQ ID NO: 61273 - RNA, 19 nt, Artificial Sequence
  Description of Artificial Sequence: Synthetic oligonucleotide
  Antisense strand to SEQ ID NO: 61192
uccuuaaggacaugaggcc

SEQ ID NO: 61274 - RNA, 19 nt, Artificial Sequence
  Description of Artificial Sequence: Synthetic oligonucleotide
  Sense strand starting at position 2108 of SEQ ID NO: 757
cuccuaguuccugaagaua

SEQ ID NO: 61275 - RNA, 19 nt, Artificial Sequence
  Description of Artificial Sequence: Synthetic oligonucleotide
  Antisense strand to SEQ ID NO: 61194
uaucuucaggaacuaggag

SEQ ID NO: 61276 - RNA, 19 nt, Artificial Sequence
  Description of Artificial Sequence: Synthetic oligonucleotide
  Sense strand starting at position 1789 of SEQ ID NO: 757
uuucccaagcucugagaaa

SEQ ID NO: 61277 - RNA, 19 nt, Artificial Sequence
  Description of Artificial Sequence: Synthetic oligonucleotide
  Antisense strand to SEQ ID NO: 61196
uuucucagagcuugggaaa

SEQ ID NO: 61278 - RNA, 19 nt, Artificial Sequence
  Description of Artificial Sequence: Synthetic oligonucleotide
  Sense strand starting at position 1744 of SEQ ID NO: 757
aaggcugaauggucccaaa

SEQ ID NO: 61279 - RNA, 19 nt, Artificial Sequence
  Description of Artificial Sequence: Synthetic oligonucleotide
  Antisense strand to SEQ ID NO: 61198
uuugggaccauucagccuu

SEQ ID NO: 61280 - RNA, 19 nt, Artificial Sequence
  Description of Artificial Sequence: Synthetic oligonucleotide
  Sense strand starting at position 1703 of SEQ ID NO: 757
gaauauuggcgaugagagg

SEQ ID NO: 61281 - RNA, 19 nt, Artificial Sequence
  Description of Artificial Sequence: Synthetic oligonucleotide
  Antisense strand to SEQ ID NO: 61200
ccucucaucgccaauauuc

SEQ ID NO: 61282 - RNA, 19 nt, Artificial Sequence
  Description of Artificial Sequence: Synthetic oligonucleotide
  Sense strand starting at position 1699 of SEQ ID NO: 757
aggagaauauuggcgauga

SEQ ID NO: 61283 - RNA, 19 nt, Artificial Sequence
  Description of Artificial Sequence: Synthetic oligonucleotide
  Antisense strand to SEQ ID NO: 61202
ucaucgccaauauucuccu

SEQ ID NO: 61284 - RNA, 19 nt, Artificial Sequence
  Description of Artificial Sequence: Synthetic oligonucleotide
  Sense strand starting at position 1597 of SEQ ID NO: 757
uggaguggaagcuguagaa

SEQ ID NO: 61285 - RNA, 19 nt, Artificial Sequence
  Description of Artificial Sequence: Synthetic oligonucleotide
  Antisense strand to SEQ ID NO: 61204
uucuacagcuuccacucca

SEQ ID NO: 61286 - RNA, 19 nt, Artificial Sequence
  Description of Artificial Sequence: Synthetic oligonucleotide
  Sense strand starting at position 1354 of SEQ ID NO: 757
acgaccugaguuugggaaa

SEQ ID NO: 61287 - RNA, 19 nt, Artificial Sequence
  Description of Artificial Sequence: Synthetic oligonucleotide
  Antisense strand to SEQ ID NO: 61206
uuucccaaacucaggucgu

SEQ ID NO: 61288 - RNA, 19 nt, Artificial Sequence
  Description of Artificial Sequence: Synthetic oligonucleotide
  Sense strand starting at position 1335 of SEQ ID NO: 757
aggugaggugcccaaagaa

SEQ ID NO: 61289 - RNA, 19 nt, Artificial Sequence
  Description of Artificial Sequence: Synthetic oligonucleotide
  Antisense strand to SEQ ID NO: 61208
uucuuugggcaccucaccu

SEQ ID NO: 61290 - RNA, 19 nt, Artificial Sequence
  Description of Artificial Sequence: Synthetic oligonucleotide
  Sense strand starting at position 979 of SEQ ID NO: 757
aguauugccagaggagaca

SEQ ID NO: 61291 - RNA, 19 nt, Artificial Sequence
  Description of Artificial Sequence: Synthetic oligonucleotide
  Antisense strand to SEQ ID NO: 61210
ugucuccucuggcaauacu

SEQ ID NO: 61292 - RNA, 19 nt, Artificial Sequence
  Description of Artificial Sequence: Synthetic oligonucleotide
  Sense strand starting at position 942 of SEQ ID NO: 757
uugggauuggcccaguguu

SEQ ID NO: 61293 - RNA, 19 nt, Artificial Sequence
  Description of Artificial Sequence: Synthetic oligonucleotide
  Antisense strand to SEQ ID NO: 61212
aacacugggccaaucccaa

SEQ ID NO: 61294 - RNA, 19 nt, Artificial Sequence
  Description of Artificial Sequence: Synthetic oligonucleotide
  Sense strand starting at position 887 of SEQ ID NO: 757
cuaccugcuccagagacuu

SEQ ID NO: 61295 - RNA, 19 nt, Artificial Sequence
  Description of Artificial Sequence: Synthetic oligonucleotide
  Antisense strand to SEQ ID NO: 61214
aagucucuggagcagguag

SEQ ID NO: 61296 - RNA, 19 nt, Artificial Sequence
  Description of Artificial Sequence: Synthetic oligonucleotide
  Sense strand starting at position 637 of SEQ ID NO: 757
cuugaucuaugcucagacu

SEQ ID NO: 61297 - RNA, 19 nt, Artificial Sequence
  Description of Artificial Sequence: Synthetic oligonucleotide
  Antisense strand to SEQ ID NO: 61216
agucugagcauagaucaag

SEQ ID NO: 61298 - RNA, 19 nt, Artificial Sequence
  Description of Artificial Sequence: Synthetic oligonucleotide
  Sense strand starting at position 627 of SEQ ID NO: 757
agaguagauccuugaucua

SEQ ID NO: 61299 - RNA, 19 nt, Artificial Sequence
  Description of Artificial Sequence: Synthetic oligonucleotide
  Antisense strand to SEQ ID NO: 61218
uagaucaaggaucuacucu

SEQ ID NO: 61300 - RNA, 19 nt, Artificial Sequence
  Description of Artificial Sequence: Synthetic oligonucleotide
  Sense strand starting at position 626 of SEQ ID NO: 757
gagaguagauccuugaucu

SEQ ID NO: 61301 - RNA, 19 nt, Artificial Sequence
  Description of Artificial Sequence: Synthetic oligonucleotide
  Antisense strand to SEQ ID NO: 61220
agaucaaggaucuacucuc

SEQ ID NO: 61302 - RNA, 19 nt, Artificial Sequence
  Description of Artificial Sequence: Synthetic oligonucleotide
  Sense strand starting at position 566 of SEQ ID NO: 757
auugucccuucuuuacaga

SEQ ID NO: 61303 - RNA, 19 nt, Artificial Sequence
  Description of Artificial Sequence: Synthetic oligonucleotide
  Antisense strand to SEQ ID NO: 61222
ucuguaaagaagggacaau

SEQ ID NO: 61304 - RNA, 19 nt, Artificial Sequence
  Description of Artificial Sequence: Synthetic oligonucleotide
  Sense strand starting at position 449 of SEQ ID NO: 757
auauacacgucugcaauaa

SEQ ID NO: 61305 - RNA, 19 nt, Artificial Sequence
  Description of Artificial Sequence: Synthetic oligonucleotide
  Antisense strand to SEQ ID NO: 61224
uuauugcagacguguauau

SEQ ID NO: 61306 - RNA, 19 nt, Artificial Sequence
  Description of Artificial Sequence: Synthetic oligonucleotide
  Sense strand starting at position 405 of SEQ ID NO: 757
caagcaucucgagaaucag

SEQ ID NO: 61307 - RNA, 19 nt, Artificial Sequence
  Description of Artificial Sequence: Synthetic oligonucleotide
  Antisense strand to SEQ ID NO: 61226
cugauucucgagaugcuug

SEQ ID NO: 61308 - RNA, 19 nt, Artificial Sequence
  Description of Artificial Sequence: Synthetic oligonucleotide
  Sense strand starting at position 80 of SEQ ID NO: 757
acaaauuguggcuaggagu

SEQ ID NO: 61309 - RNA, 19 nt, Artificial Sequence
  Description of Artificial Sequence: Synthetic oligonucleotide
  Antisense strand to SEQ ID NO: 61228
acuccuagccacaauuugu

SEQ ID NO: 61310 - RNA, 19 nt, Artificial Sequence
  Description of Artificial Sequence: Synthetic oligonucleotide
  Sense strand starting at position 56 of SEQ ID NO: 757
agugaugugcuuuaaauuc

SEQ ID NO: 61311 - RNA, 19 nt, Artificial Sequence
  Description of Artificial Sequence: Synthetic oligonucleotide
  Antisense strand to SEQ ID NO: 61230
gaauuuaaagcacaucacu

SEQ ID NO: 61312 - RNA, 19 nt, Artificial Sequence
  Description of Artificial Sequence: Synthetic oligonucleotide
  Sense strand starting at position 42 of SEQ ID NO: 757
uaaucugaacauugaguga

SEQ ID NO: 61313 - RNA, 19 nt, Artificial Sequence
  Description of Artificial Sequence: Synthetic oligonucleotide
  Antisense strand to SEQ ID NO: 61232
ucacucaauguucagauua

SEQ ID NO: 61314 - RNA, 19 nt, Artificial Sequence
  Description of Artificial Sequence: Synthetic oligonucleotide
  Sense strand starting at position 3619 of SEQ ID NO: 758
uaugauuccguguauauaa

SEQ ID NO: 61315 - RNA, 19 nt, Artificial Sequence
  Description of Artificial Sequence: Synthetic oligonucleotide
  Antisense strand to SEQ ID NO: 61234
uuauauacacggaaucaua

SEQ ID NO: 61316 - RNA, 19 nt, Artificial Sequence
  Description of Artificial Sequence: Synthetic oligonucleotide
  Sense strand starting at position 3570 of SEQ ID NO: 758
ugacaauuaugcuaaguga

SEQ ID NO: 61317 - RNA, 19 nt, Artificial Sequence
  Description of Artificial Sequence: Synthetic oligonucleotide
  Antisense strand to SEQ ID NO: 61236
ucacuuagcauaauuguca

SEQ ID NO: 61318 - RNA, 19 nt, Artificial Sequence
  Description of Artificial Sequence: Synthetic oligonucleotide
  Sense strand starting at position 3433 of SEQ ID NO: 758
ccuguaucuugagccaauc

SEQ ID NO: 61319 - RNA, 19 nt, Artificial Sequence
  Description of Artificial Sequence: Synthetic oligonucleotide
  Antisense strand to SEQ ID NO: 61238
gauuggcucaagauacagg

SEQ ID NO: 61320 - RNA, 19 nt, Artificial Sequence
  Description of Artificial Sequence: Synthetic oligonucleotide
  Sense strand starting at position 3323 of SEQ ID NO: 758
ggaguauagcguugaagac

SEQ ID NO: 61321 - RNA, 19 nt, Artificial Sequence
  Description of Artificial Sequence: Synthetic oligonucleotide
  Antisense strand to SEQ ID NO: 61240
gucuucaacgcuauacucc

SEQ ID NO: 61322 - RNA, 19 nt, Artificial Sequence
  Description of Artificial Sequence: Synthetic oligonucleotide
  Sense strand starting at position 3311 of SEQ ID NO: 758
cagcaugugguaggaguau

SEQ ID NO: 61323 - RNA, 19 nt, Artificial Sequence
  Description of Artificial Sequence: Synthetic oligonucleotide
  Antisense strand to SEQ ID NO: 61242
auacuccuaccacaugcug

SEQ ID NO: 61324 - RNA, 19 nt, Artificial Sequence
  Description of Artificial Sequence: Synthetic oligonucleotide
  Sense strand starting at position 3297 of SEQ ID NO: 758
cccugaugucgacacagca

SEQ ID NO: 61325 - RNA, 19 nt, Artificial Sequence
  Description of Artificial Sequence: Synthetic oligonucleotide
  Antisense strand to SEQ ID NO: 61244
ugcugugucgacaucaggg

SEQ ID NO: 61326 - RNA, 19 nt, Artificial Sequence
  Description of Artificial Sequence: Synthetic oligonucleotide
  Sense strand starting at position 3287 of SEQ ID NO: 758
acaguuaacucccugaugu

SEQ ID NO: 61327 - RNA, 19 nt, Artificial Sequence
  Description of Artificial Sequence: Synthetic oligonucleotide
  Antisense strand to SEQ ID NO: 61246
acaucagggaguuaacugu

SEQ ID NO: 61328 - RNA, 19 nt, Artificial Sequence
  Description of Artificial Sequence: Synthetic oligonucleotide
  Sense strand starting at position 3267 of SEQ ID NO: 758
cucugcuuuguagaccaua

SEQ ID NO: 61329 - RNA, 19 nt, Artificial Sequence
  Description of Artificial Sequence: Synthetic oligonucleotide
  Antisense strand to SEQ ID NO: 61248
uauggucuacaaagcagag

SEQ ID NO: 61330 - RNA, 19 nt, Artificial Sequence
  Description of Artificial Sequence: Synthetic oligonucleotide
  Sense strand starting at position 3044 of SEQ ID NO: 758
gugauucuccuggauuaca

SEQ ID NO: 61331 - RNA, 19 nt, Artificial Sequence
  Description of Artificial Sequence: Synthetic oligonucleotide
  Antisense strand to SEQ ID NO: 61250
uguaauccaggagaaucac

SEQ ID NO: 61332 - RNA, 19 nt, Artificial Sequence
  Description of Artificial Sequence: Synthetic oligonucleotide
  Sense strand starting at position 3043 of SEQ ID NO: 758
agugauucuccuggauuac

SEQ ID NO: 61333 - RNA, 19 nt, Artificial Sequence
  Description of Artificial Sequence: Synthetic oligonucleotide
  Antisense strand to SEQ ID NO: 61252
guaauccaggagaaucacu

SEQ ID NO: 61334 - RNA, 19 nt, Artificial Sequence
  Description of Artificial Sequence: Synthetic oligonucleotide
  Sense strand starting at position 3042 of SEQ ID NO: 758
aagugauucuccuggauua

SEQ ID NO: 61335 - RNA, 19 nt, Artificial Sequence
  Description of Artificial Sequence: Synthetic oligonucleotide
  Antisense strand to SEQ ID NO: 61254
uaauccaggagaaucacuu

SEQ ID NO: 61336 - RNA, 19 nt, Artificial Sequence
  Description of Artificial Sequence: Synthetic oligonucleotide
  Sense strand starting at position 2984 of SEQ ID NO: 758
gcugguccgcgccuuaauu

SEQ ID NO: 61337 - RNA, 19 nt, Artificial Sequence
  Description of Artificial Sequence: Synthetic oligonucleotide
  Antisense strand to SEQ ID NO: 61256
aauuaaggcgcggaccagc

SEQ ID NO: 61338 - RNA, 19 nt, Artificial Sequence
  Description of Artificial Sequence: Synthetic oligonucleotide
  Sense strand starting at position 2528 of SEQ ID NO: 758
gcuuaagaaagaugagucu

SEQ ID NO: 61339 - RNA, 19 nt, Artificial Sequence
  Description of Artificial Sequence: Synthetic oligonucleotide
  Antisense strand to SEQ ID NO: 61258
agacucaucuuucuuaagc

SEQ ID NO: 61340 - RNA, 19 nt, Artificial Sequence
  Description of Artificial Sequence: Synthetic oligonucleotide
  Sense strand starting at position 2519 of SEQ ID NO: 758
gcuuuaagggcuuaagaaa

SEQ ID NO: 61341 - RNA, 19 nt, Artificial Sequence
  Description of Artificial Sequence: Synthetic oligonucleotide
  Antisense strand to SEQ ID NO: 61260
uuucuuaagcccuuaaagc

SEQ ID NO: 61342 - RNA, 19 nt, Artificial Sequence
  Description of Artificial Sequence: Synthetic oligonucleotide
  Sense strand starting at position 2501 of SEQ ID NO: 758
agguaaugugugcaaagug

SEQ ID NO: 61343 - RNA, 19 nt, Artificial Sequence
  Description of Artificial Sequence: Synthetic oligonucleotide
  Antisense strand to SEQ ID NO: 61262
cacuuugcacacauuaccu

SEQ ID NO: 61344 - RNA, 19 nt, Artificial Sequence
  Description of Artificial Sequence: Synthetic oligonucleotide
  Sense strand starting at position 2500 of SEQ ID NO: 758
gagguaaugugugcaaagu

SEQ ID NO: 61345 - RNA, 19 nt, Artificial Sequence
  Description of Artificial Sequence: Synthetic oligonucleotide
  Antisense strand to SEQ ID NO: 61264
acuuugcacacauuaccuc

SEQ ID NO: 61346 - RNA, 19 nt, Artificial Sequence
  Description of Artificial Sequence: Synthetic oligonucleotide
  Sense strand starting at position 2499 of SEQ ID NO: 758
ugagguaaugugugcaaag

SEQ ID NO: 61347 - RNA, 19 nt, Artificial Sequence
  Description of Artificial Sequence: Synthetic oligonucleotide
  Antisense strand to SEQ ID NO: 61266
cuuugcacacauuaccuca

SEQ ID NO: 61348 - RNA, 19 nt, Artificial Sequence
  Description of Artificial Sequence: Synthetic oligonucleotide
  Sense strand starting at position 2490 of SEQ ID NO: 758
guaauaccaugagguaaug

SEQ ID NO: 61349 - RNA, 19 nt, Artificial Sequence
  Description of Artificial Sequence: Synthetic oligonucleotide
  Antisense strand to SEQ ID NO: 61268
cauuaccucaugguauuac

SEQ ID NO: 61350 - RNA, 19 nt, Artificial Sequence
  Description of Artificial Sequence: Synthetic oligonucleotide
  Sense strand starting at position 2487 of SEQ ID NO: 758
gugguaauaccaugaggua

SEQ ID NO: 61351 - RNA, 19 nt, Artificial Sequence
  Description of Artificial Sequence: Synthetic oligonucleotide
  Antisense strand to SEQ ID NO: 61270
uaccucaugguauuaccac

SEQ ID NO: 61352 - RNA, 19 nt, Artificial Sequence
  Description of Artificial Sequence: Synthetic oligonucleotide
  Sense strand starting at position 2477 of SEQ ID NO: 758
uugaaugagggugguaaua

SEQ ID NO: 61353 - RNA, 19 nt, Artificial Sequence
  Description of Artificial Sequence: Synthetic oligonucleotide
  Antisense strand to SEQ ID NO: 61272
uauuaccacccucauucaa

SEQ ID NO: 61354 - RNA, 19 nt, Artificial Sequence
  Description of Artificial Sequence: Synthetic oligonucleotide
  Sense strand starting at position 2476 of SEQ ID NO: 758
guugaaugagggugguaau

SEQ ID NO: 61355 - RNA, 19 nt, Artificial Sequence
  Description of Artificial Sequence: Synthetic oligonucleotide
  Antisense strand to SEQ ID NO: 61274
auuaccacccucauucaac

SEQ ID NO: 61356 - RNA, 19 nt, Artificial Sequence
  Description of Artificial Sequence: Synthetic oligonucleotide
  Sense strand starting at position 2452 of SEQ ID NO: 758
gcuugaaacuagcuuuccu

SEQ ID NO: 61357 - RNA, 19 nt, Artificial Sequence
  Description of Artificial Sequence: Synthetic oligonucleotide
  Antisense strand to SEQ ID NO: 61276
aggaaagcuaguuucaagc

SEQ ID NO: 61358 - RNA, 19 nt, Artificial Sequence
  Description of Artificial Sequence: Synthetic oligonucleotide
  Sense strand starting at position 2444 of SEQ ID NO: 758
gugaacuugcuugaaacua

SEQ ID NO: 61359 - RNA, 19 nt, Artificial Sequence
  Description of Artificial Sequence: Synthetic oligonucleotide
  Antisense strand to SEQ ID NO: 61278
uaguuucaagcaaguucac

SEQ ID NO: 61360 - RNA, 19 nt, Artificial Sequence
  Description of Artificial Sequence: Synthetic oligonucleotide
  Sense strand starting at position 2443 of SEQ ID NO: 758
agugaacuugcuugaaacu

SEQ ID NO: 61361 - RNA, 19 nt, Artificial Sequence
  Description of Artificial Sequence: Synthetic oligonucleotide
  Antisense strand to SEQ ID NO: 61280
aguuucaagcaaguucacu

SEQ ID NO: 61362 - RNA, 19 nt, Artificial Sequence
  Description of Artificial Sequence: Synthetic oligonucleotide
  Sense strand starting at position 2442 of SEQ ID NO: 758
cagugaacuugcuugaaac

SEQ ID NO: 61363 - RNA, 19 nt, Artificial Sequence
  Description of Artificial Sequence: Synthetic oligonucleotide
  Antisense strand to SEQ ID NO: 61282
guuucaagcaaguucacug

SEQ ID NO: 61364 - RNA, 19 nt, Artificial Sequence
  Description of Artificial Sequence: Synthetic oligonucleotide
  Sense strand starting at position 2433 of SEQ ID NO: 758
ucugauccucagugaacuu

SEQ ID NO: 61365 - RNA, 19 nt, Artificial Sequence
  Description of Artificial Sequence: Synthetic oligonucleotide
  Antisense strand to SEQ ID NO: 61284
aaguucacugaggaucaga

SEQ ID NO: 61366 - RNA, 19 nt, Artificial Sequence
  Description of Artificial Sequence: Synthetic oligonucleotide
  Sense strand starting at position 2432 of SEQ ID NO: 758
cucugauccucagugaacu

SEQ ID NO: 61367 - RNA, 19 nt, Artificial Sequence
  Description of Artificial Sequence: Synthetic oligonucleotide
  Antisense strand to SEQ ID NO: 61286
aguucacugaggaucagag

SEQ ID NO: 61368 - RNA, 19 nt, Artificial Sequence
  Description of Artificial Sequence: Synthetic oligonucleotide
  Sense strand starting at position 2430 of SEQ ID NO: 758
gucucugauccucagugaa

SEQ ID NO: 61369 - RNA, 19 nt, Artificial Sequence
  Description of Artificial Sequence: Synthetic oligonucleotide
  Antisense strand to SEQ ID NO: 61288
uucacugaggaucagagac

SEQ ID NO: 61370 - RNA, 19 nt, Artificial Sequence
  Description of Artificial Sequence: Synthetic oligonucleotide
  Sense strand starting at position 2429 of SEQ ID NO: 758
cgucucugauccucaguga

SEQ ID NO: 61371 - RNA, 19 nt, Artificial Sequence
  Description of Artificial Sequence: Synthetic oligonucleotide
  Antisense strand to SEQ ID NO: 61290
ucacugaggaucagagacg

SEQ ID NO: 61372 - RNA, 19 nt, Artificial Sequence
  Description of Artificial Sequence: Synthetic oligonucleotide
  Sense strand starting at position 2401 of SEQ ID NO: 758
guucucuaacuuuaggcaa

SEQ ID NO: 61373 - RNA, 19 nt, Artificial Sequence
  Description of Artificial Sequence: Synthetic oligonucleotide
  Antisense strand to SEQ ID NO: 61292
uugccuaaaguuagagaac

SEQ ID NO: 61374 - RNA, 19 nt, Artificial Sequence
  Description of Artificial Sequence: Synthetic oligonucleotide
  Sense strand starting at position 2379 of SEQ ID NO: 758
ggacuagcuuucucacuua

SEQ ID NO: 61375 - RNA, 19 nt, Artificial Sequence
  Description of Artificial Sequence: Synthetic oligonucleotide
  Antisense strand to SEQ ID NO: 61294
uaagugagaaagcuagucc

SEQ ID NO: 61376 - RNA, 19 nt, Artificial Sequence
  Description of Artificial Sequence: Synthetic oligonucleotide
  Sense strand starting at position 2378 of SEQ ID NO: 758
aggacuagcuuucucacuu

SEQ ID NO: 61377 - RNA, 19 nt, Artificial Sequence
  Description of Artificial Sequence: Synthetic oligonucleotide
  Antisense strand to SEQ ID NO: 61296
aagugagaaagcuaguccu

SEQ ID NO: 61378 - RNA, 19 nt, Artificial Sequence
  Description of Artificial Sequence: Synthetic oligonucleotide
  Sense strand starting at position 2349 of SEQ ID NO: 758
agcugauuggcacguuagu

SEQ ID NO: 61379 - RNA, 19 nt, Artificial Sequence
  Description of Artificial Sequence: Synthetic oligonucleotide
  Antisense strand to SEQ ID NO: 61298
acuaacgugccaaucagcu

SEQ ID NO: 61380 - RNA, 19 nt, Artificial Sequence
  Description of Artificial Sequence: Synthetic oligonucleotide
  Sense strand starting at position 1590 of SEQ ID NO: 758
gaagcauuggagcgagaac

SEQ ID NO: 61381 - RNA, 19 nt, Artificial Sequence
  Description of Artificial Sequence: Synthetic oligonucleotide
  Antisense strand to SEQ ID NO: 61300
guucucgcuccaaugcuuc

SEQ ID NO: 61382 - RNA, 19 nt, Artificial Sequence
  Description of Artificial Sequence: Synthetic oligonucleotide
  Sense strand starting at position 1555 of SEQ ID NO: 758
gugcccagggucugaguua

SEQ ID NO: 61383 - RNA, 19 nt, Artificial Sequence
  Description of Artificial Sequence: Synthetic oligonucleotide
  Antisense strand to SEQ ID NO: 61302
uaacucagacccugggcac

SEQ ID NO: 61384 - RNA, 19 nt, Artificial Sequence
  Description of Artificial Sequence: Synthetic oligonucleotide
  Sense strand starting at position 1401 of SEQ ID NO: 758
ggcgguacagaguaaagua

SEQ ID NO: 61385 - RNA, 19 nt, Artificial Sequence
  Description of Artificial Sequence: Synthetic oligonucleotide
  Antisense strand to SEQ ID NO: 61304
uacuuuacucuguaccgcc

SEQ ID NO: 61386 - RNA, 19 nt, Artificial Sequence
  Description of Artificial Sequence: Synthetic oligonucleotide
  Sense strand starting at position 1301 of SEQ ID NO: 758
aaaguauggcugggugacu

SEQ ID NO: 61387 - RNA, 19 nt, Artificial Sequence
  Description of Artificial Sequence: Synthetic oligonucleotide
  Antisense strand to SEQ ID NO: 61306
agucacccagccauacuuu

SEQ ID NO: 61388 - RNA, 19 nt, Artificial Sequence
  Description of Artificial Sequence: Synthetic oligonucleotide
  Sense strand starting at position 276 of SEQ ID NO: 758
acucgagucccucagguaa

SEQ ID NO: 61389 - RNA, 19 nt, Artificial Sequence
  Description of Artificial Sequence: Synthetic oligonucleotide
  Antisense strand to SEQ ID NO: 61308
uuaccugagggacucgagu

SEQ ID NO: 61390 - RNA, 19 nt, Artificial Sequence
  Description of Artificial Sequence: Synthetic oligonucleotide
  Sense strand starting at position 140 of SEQ ID NO: 758
aucuaagacuugccagguu

SEQ ID NO: 61391 - RNA, 19 nt, Artificial Sequence
  Description of Artificial Sequence: Synthetic oligonucleotide
  Antisense strand to SEQ ID NO: 61310
aaccuggcaagucuuagau

SEQ ID NO: 61392 - RNA, 19 nt, Artificial Sequence
  Description of Artificial Sequence: Synthetic oligonucleotide
  Sense strand starting at position 28 of SEQ ID NO: 758
gguuucuaaugauacaaua

SEQ ID NO: 61393 - RNA, 19 nt, Artificial Sequence
  Description of Artificial Sequence: Synthetic oligonucleotide
  Antisense strand to SEQ ID NO: 61312
uauuguaucauuagaaacc

SEQ ID NO: 61394 - RNA, 19 nt, Artificial Sequence
  Description of Artificial Sequence: Synthetic oligonucleotide
  Sense strand starting at position 3453 of SEQ ID NO: 759
uaugauuccguguauauaa

SEQ ID NO: 61395 - RNA, 19 nt, Artificial Sequence
  Description of Artificial Sequence: Synthetic oligonucleotide
  Antisense strand to SEQ ID NO: 61314
uuauauacacggaaucaua

SEQ ID NO: 61396 - RNA, 19 nt, Artificial Sequence
  Description of Artificial Sequence: Synthetic oligonucleotide
  Sense strand starting at position 3404 of SEQ ID NO: 759
ugacaauuaugcuaaguga

SEQ ID NO: 61397 - RNA, 19 nt, Artificial Sequence
  Description of Artificial Sequence: Synthetic oligonucleotide
  Antisense strand to SEQ ID NO: 61316
ucacuuagcauaauuguca

SEQ ID NO: 61398 - RNA, 19 nt, Artificial Sequence
  Description of Artificial Sequence: Synthetic oligonucleotide
  Sense strand starting at position 3395 of SEQ ID NO: 759
acgcaccucugacaauuau

SEQ ID NO: 61399 - RNA, 19 nt, Artificial Sequence
  Description of Artificial Sequence: Synthetic oligonucleotide
  Antisense strand to SEQ ID NO: 61318
auaauugucagaggugcgu

SEQ ID NO: 61400 - RNA, 19 nt, Artificial Sequence
  Description of Artificial Sequence: Synthetic oligonucleotide
  Sense strand starting at position 3393 of SEQ ID NO: 759
ucacgcaccucugacaauu

SEQ ID NO: 61401 - RNA, 19 nt, Artificial Sequence
  Description of Artificial Sequence: Synthetic oligonucleotide
  Antisense strand to SEQ ID NO: 61320
aauugucagaggugcguga

SEQ ID NO: 61402 - RNA, 19 nt, Artificial Sequence
  Description of Artificial Sequence: Synthetic oligonucleotide
  Sense strand starting at position 3267 of SEQ ID NO: 759
ccuguaucuugagccaauc

SEQ ID NO: 61403 - RNA, 19 nt, Artificial Sequence
  Description of Artificial Sequence: Synthetic oligonucleotide
  Antisense strand to SEQ ID NO: 61322
gauuggcucaagauacagg

SEQ ID NO: 61404 - RNA, 19 nt, Artificial Sequence
  Description of Artificial Sequence: Synthetic oligonucleotide
  Sense strand starting at position 3157 of SEQ ID NO: 759
ggaguauagcguugaagac

SEQ ID NO: 61405 - RNA, 19 nt, Artificial Sequence
  Description of Artificial Sequence: Synthetic oligonucleotide
  Antisense strand to SEQ ID NO: 61324
gucuucaacgcuauacucc

SEQ ID NO: 61406 - RNA, 19 nt, Artificial Sequence
  Description of Artificial Sequence: Synthetic oligonucleotide
  Sense strand starting at position 3145 of SEQ ID NO: 759
cagcaugugguaggaguau

SEQ ID NO: 61407 - RNA, 19 nt, Artificial Sequence
  Description of Artificial Sequence: Synthetic oligonucleotide
  Antisense strand to SEQ ID NO: 61326
auacuccuaccacaugcug

SEQ ID NO: 61408 - RNA, 19 nt, Artificial Sequence
  Description of Artificial Sequence: Synthetic oligonucleotide
  Sense strand starting at position 3131 of SEQ ID NO: 759
cccugaugucgacacagca

SEQ ID NO: 61409 - RNA, 19 nt, Artificial Sequence
  Description of Artificial Sequence: Synthetic oligonucleotide
  Antisense strand to SEQ ID NO: 61328
ugcugugucgacaucaggg

SEQ ID NO: 61410 - RNA, 19 nt, Artificial Sequence
  Description of Artificial Sequence: Synthetic oligonucleotide
  Sense strand starting at position 3121 of SEQ ID NO: 759
acaguuaacucccugaugu

SEQ ID NO: 61411 - RNA, 19 nt, Artificial Sequence
  Description of Artificial Sequence: Synthetic oligonucleotide
  Antisense strand to SEQ ID NO: 61330
acaucagggaguuaacugu

SEQ ID NO: 61412 - RNA, 19 nt, Artificial Sequence
  Description of Artificial Sequence: Synthetic oligonucleotide
  Sense strand starting at position 3101 of SEQ ID NO: 759
cucugcuuuguagaccaua

SEQ ID NO: 61413 - RNA, 19 nt, Artificial Sequence
  Description of Artificial Sequence: Synthetic oligonucleotide
  Antisense strand to SEQ ID NO: 61332
uauggucuacaaagcagag

SEQ ID NO: 61414 - RNA, 19 nt, Artificial Sequence
  Description of Artificial Sequence: Synthetic oligonucleotide
  Sense strand starting at position 2878 of SEQ ID NO: 759
gugauucuccuggauuaca

SEQ ID NO: 61415 - RNA, 19 nt, Artificial Sequence
  Description of Artificial Sequence: Synthetic oligonucleotide
  Antisense strand to SEQ ID NO: 61334
uguaauccaggagaaucac

SEQ ID NO: 61416 - RNA, 19 nt, Artificial Sequence
  Description of Artificial Sequence: Synthetic oligonucleotide
  Sense strand starting at position 2877 of SEQ ID NO: 759
agugauucuccuggauuac

SEQ ID NO: 61417 - RNA, 19 nt, Artificial Sequence
  Description of Artificial Sequence: Synthetic oligonucleotide
  Antisense strand to SEQ ID NO: 61336
guaauccaggagaaucacu

SEQ ID NO: 61418 - RNA, 19 nt, Artificial Sequence
  Description of Artificial Sequence: Synthetic oligonucleotide
  Sense strand starting at position 2876 of SEQ ID NO: 759
aagugauucuccuggauua

SEQ ID NO: 61419 - RNA, 19 nt, Artificial Sequence
  Description of Artificial Sequence: Synthetic oligonucleotide
  Antisense strand to SEQ ID NO: 61338
uaauccaggagaaucacuu

SEQ ID NO: 61420 - RNA, 19 nt, Artificial Sequence
  Description of Artificial Sequence: Synthetic oligonucleotide
  Sense strand starting at position 2818 of SEQ ID NO: 759
gcugguccgcgccuuaauu

SEQ ID NO: 61421 - RNA, 19 nt, Artificial Sequence
  Description of Artificial Sequence: Synthetic oligonucleotide
  Antisense strand to SEQ ID NO: 61340
aauuaaggcgcggaccagc

SEQ ID NO: 61422 - RNA, 19 nt, Artificial Sequence
  Description of Artificial Sequence: Synthetic oligonucleotide
  Sense strand starting at position 2362 of SEQ ID NO: 759
gcuuaagaaagaugagucu

SEQ ID NO: 61423 - RNA, 19 nt, Artificial Sequence
  Description of Artificial Sequence: Synthetic oligonucleotide
  Antisense strand to SEQ ID NO: 61342
agacucaucuuucuuaagc

SEQ ID NO: 61424 - RNA, 19 nt, Artificial Sequence
  Description of Artificial Sequence: Synthetic oligonucleotide
  Sense strand starting at position 2353 of SEQ ID NO: 759
gcuuuaagggcuuaagaaa

SEQ ID NO: 61425 - RNA, 19 nt, Artificial Sequence
  Description of Artificial Sequence: Synthetic oligonucleotide
  Antisense strand to SEQ ID NO: 61344
uuucuuaagcccuuaaagc

SEQ ID NO: 61426 - RNA, 19 nt, Artificial Sequence
  Description of Artificial Sequence: Synthetic oligonucleotide
  Sense strand starting at position 2335 of SEQ ID NO: 759
agguaaugugugcaaagug

SEQ ID NO: 61427 - RNA, 19 nt, Artificial Sequence
  Description of Artificial Sequence: Synthetic oligonucleotide
  Antisense strand to SEQ ID NO: 61346
cacuuugcacacauuaccu

SEQ ID NO: 61428 - RNA, 19 nt, Artificial Sequence
  Description of Artificial Sequence: Synthetic oligonucleotide
  Sense strand starting at position 2334 of SEQ ID NO: 759
gagguaaugugugcaaagu

SEQ ID NO: 61429 - RNA, 19 nt, Artificial Sequence
  Description of Artificial Sequence: Synthetic oligonucleotide
  Antisense strand to SEQ ID NO: 61348
acuuugcacacauuaccuc

SEQ ID NO: 61430 - RNA, 19 nt, Artificial Sequence
  Description of Artificial Sequence: Synthetic oligonucleotide
  Sense strand starting at position 2333 of SEQ ID NO: 759
ugagguaaugugugcaaag

SEQ ID NO: 61431 - RNA, 19 nt, Artificial Sequence
  Description of Artificial Sequence: Synthetic oligonucleotide
  Antisense strand to SEQ ID NO: 61350
cuuugcacacauuaccuca

SEQ ID NO: 61432 - RNA, 19 nt, Artificial Sequence
  Description of Artificial Sequence: Synthetic oligonucleotide
  Sense strand starting at position 2324 of SEQ ID NO: 759
guaauaccaugagguaaug

SEQ ID NO: 61433 - RNA, 19 nt, Artificial Sequence
  Description of Artificial Sequence: Synthetic oligonucleotide
  Antisense strand to SEQ ID NO: 61352
cauuaccucaugguauuac

SEQ ID NO: 61434 - RNA, 19 nt, Artificial Sequence
  Description of Artificial Sequence: Synthetic oligonucleotide
  Sense strand starting at position 2321 of SEQ ID NO: 759
gugguaauaccaugaggua

SEQ ID NO: 61435 - RNA, 19 nt, Artificial Sequence
  Description of Artificial Sequence: Synthetic oligonucleotide
  Antisense strand to SEQ ID NO: 61354
uaccucaugguauuaccac

SEQ ID NO: 61436 - RNA, 19 nt, Artificial Sequence
  Description of Artificial Sequence: Synthetic oligonucleotide
  Sense strand starting at position 2311 of SEQ ID NO: 759
uugaaugagggugguaaua

SEQ ID NO: 61437 - RNA, 19 nt, Artificial Sequence
  Description of Artificial Sequence: Synthetic oligonucleotide
  Antisense strand to SEQ ID NO: 61356
uauuaccacccucauucaa

SEQ ID NO: 61438 - RNA, 19 nt, Artificial Sequence
  Description of Artificial Sequence: Synthetic oligonucleotide
  Sense strand starting at position 2310 of SEQ ID NO: 759
guugaaugagggugguaau

SEQ ID NO: 61439 - RNA, 19 nt, Artificial Sequence
  Description of Artificial Sequence: Synthetic oligonucleotide
  Antisense strand to SEQ ID NO: 61358
auuaccacccucauucaac

SEQ ID NO: 61440 - RNA, 19 nt, Artificial Sequence
  Description of Artificial Sequence: Synthetic oligonucleotide
  Sense strand starting at position 2286 of SEQ ID NO: 759
gcuugaaacuagcuuuccu

SEQ ID NO: 61441 - RNA, 19 nt, Artificial Sequence
  Description of Artificial Sequence: Synthetic oligonucleotide
  Antisense strand to SEQ ID NO: 61360
aggaaagcuaguuucaagc

SEQ ID NO: 61442 - RNA, 19 nt, Artificial Sequence
  Description of Artificial Sequence: Synthetic oligonucleotide
  Sense strand starting at position 2278 of SEQ ID NO: 759
gugaacuugcuugaaacua

SEQ ID NO: 61443 - RNA, 19 nt, Artificial Sequence
  Description of Artificial Sequence: Synthetic oligonucleotide
  Antisense strand to SEQ ID NO: 61362
uaguuucaagcaaguucac

SEQ ID NO: 61444 - RNA, 19 nt, Artificial Sequence
  Description of Artificial Sequence: Synthetic oligonucleotide
  Sense strand starting at position 2277 of SEQ ID NO: 759
agugaacuugcuugaaacu

SEQ ID NO: 61445 - RNA, 19 nt, Artificial Sequence
  Description of Artificial Sequence: Synthetic oligonucleotide
  Antisense strand to SEQ ID NO: 61364
aguuucaagcaaguucacu

SEQ ID NO: 61446 - RNA, 19 nt, Artificial Sequence
  Description of Artificial Sequence: Synthetic oligonucleotide
  Sense strand starting at position 2276 of SEQ ID NO: 759
cagugaacuugcuugaaac

SEQ ID NO: 61447 - RNA, 19 nt, Artificial Sequence
  Description of Artificial Sequence: Synthetic oligonucleotide
  Antisense strand to SEQ ID NO: 61366
guuucaagcaaguucacug

SEQ ID NO: 61448 - RNA, 19 nt, Artificial Sequence
  Description of Artificial Sequence: Synthetic oligonucleotide
  Sense strand starting at position 2267 of SEQ ID NO: 759
ucugauccucagugaacuu

SEQ ID NO: 61449 - RNA, 19 nt, Artificial Sequence
  Description of Artificial Sequence: Synthetic oligonucleotide
  Antisense strand to SEQ ID NO: 61368
aaguucacugaggaucaga

SEQ ID NO: 61450 - RNA, 19 nt, Artificial Sequence
  Description of Artificial Sequence: Synthetic oligonucleotide
  Sense strand starting at position 2266 of SEQ ID NO: 759
cucugauccucagugaacu

SEQ ID NO: 61451 - RNA, 19 nt, Artificial Sequence
  Description of Artificial Sequence: Synthetic oligonucleotide
  Antisense strand to SEQ ID NO: 61370
aguucacugaggaucagag

SEQ ID NO: 61452 - RNA, 19 nt, Artificial Sequence
  Description of Artificial Sequence: Synthetic oligonucleotide
  Sense strand starting at position 2264 of SEQ ID NO: 759
gucucugauccucagugaa

SEQ ID NO: 61453 - RNA, 19 nt, Artificial Sequence
  Description of Artificial Sequence: Synthetic oligonucleotide
  Antisense strand to SEQ ID NO: 61372
uucacugaggaucagagac

SEQ ID NO: 61454 - RNA, 19 nt, Artificial Sequence
  Description of Artificial Sequence: Synthetic oligonucleotide
  Sense strand starting at position 2263 of SEQ ID NO: 759
cgucucugauccucaguga

SEQ ID NO: 61455 - RNA, 19 nt, Artificial Sequence
  Description of Artificial Sequence: Synthetic oligonucleotide
  Antisense strand to SEQ ID NO: 61374
ucacugaggaucagagacg

SEQ ID NO: 61456 - RNA, 19 nt, Artificial Sequence
  Description of Artificial Sequence: Synthetic oligonucleotide
  Sense strand starting at position 2235 of SEQ ID NO: 759
guucucuaacuuuaggcaa

SEQ ID NO: 61457 - RNA, 19 nt, Artificial Sequence
  Description of Artificial Sequence: Synthetic oligonucleotide
  Antisense strand to SEQ ID NO: 61376
uugccuaaaguuagagaac

SEQ ID NO: 61458 - RNA, 19 nt, Artificial Sequence
  Description of Artificial Sequence: Synthetic oligonucleotide
  Sense strand starting at position 2213 of SEQ ID NO: 759
ggacuagcuuucucacuua

SEQ ID NO: 61459 - RNA, 19 nt, Artificial Sequence
  Description of Artificial Sequence: Synthetic oligonucleotide
  Antisense strand to SEQ ID NO: 61378
uaagugagaaagcuagucc

SEQ ID NO: 61460 - RNA, 19 nt, Artificial Sequence
  Description of Artificial Sequence: Synthetic oligonucleotide
  Sense strand starting at position 2212 of SEQ ID NO: 759
aggacuagcuuucucacuu

SEQ ID NO: 61461 - RNA, 19 nt, Artificial Sequence
  Description of Artificial Sequence: Synthetic oligonucleotide
  Antisense strand to SEQ ID NO: 61380
aagugagaaagcuaguccu

SEQ ID NO: 61462 - RNA, 19 nt, Artificial Sequence
  Description of Artificial Sequence: Synthetic oligonucleotide
  Sense strand starting at position 2183 of SEQ ID NO: 759
agcugauuggcacguuagu

SEQ ID NO: 61463 - RNA, 19 nt, Artificial Sequence
  Description of Artificial Sequence: Synthetic oligonucleotide
  Antisense strand to SEQ ID NO: 61382
acuaacgugccaaucagcu

SEQ ID NO: 61464 - RNA, 19 nt, Artificial Sequence
  Description of Artificial Sequence: Synthetic oligonucleotide
  Sense strand starting at position 1424 of SEQ ID NO: 759
gaagcauuggagcgagaac

SEQ ID NO: 61465 - RNA, 19 nt, Artificial Sequence
  Description of Artificial Sequence: Synthetic oligonucleotide
  Antisense strand to SEQ ID NO: 61384
guucucgcuccaaugcuuc

SEQ ID NO: 61466 - RNA, 19 nt, Artificial Sequence
  Description of Artificial Sequence: Synthetic oligonucleotide
  Sense strand starting at position 1389 of SEQ ID NO: 759
gugcccagggucugaguua

SEQ ID NO: 61467 - RNA, 19 nt, Artificial Sequence
  Description of Artificial Sequence: Synthetic oligonucleotide
  Antisense strand to SEQ ID NO: 61386
uaacucagacccugggcac

SEQ ID NO: 61468 - RNA, 19 nt, Artificial Sequence
  Description of Artificial Sequence: Synthetic oligonucleotide
  Sense strand starting at position 1235 of SEQ ID NO: 759
ggcgguacagaguaaagua

SEQ ID NO: 61469 - RNA, 19 nt, Artificial Sequence
  Description of Artificial Sequence: Synthetic oligonucleotide
  Antisense strand to SEQ ID NO: 61388
uacuuuacucuguaccgcc

SEQ ID NO: 61470 - RNA, 19 nt, Artificial Sequence
  Description of Artificial Sequence: Synthetic oligonucleotide
  Sense strand starting at position 1135 of SEQ ID NO: 759
aaaguauggcugggugacu

SEQ ID NO: 61471 - RNA, 19 nt, Artificial Sequence
  Description of Artificial Sequence: Synthetic oligonucleotide
  Antisense strand to SEQ ID NO: 61390
agucacccagccauacuuu

SEQ ID NO: 61472 - RNA, 19 nt, Artificial Sequence
  Description of Artificial Sequence: Synthetic oligonucleotide
  Sense strand starting at position 110 of SEQ ID NO: 759
acucgagucccucagguaa

SEQ ID NO: 61473 - RNA, 19 nt, Artificial Sequence
  Description of Artificial Sequence: Synthetic oligonucleotide
  Antisense strand to SEQ ID NO: 61392
uuaccugagggacucgagu

SEQ ID NO: 61474 - RNA, 19 nt, Artificial Sequence
  Description of Artificial Sequence: Synthetic oligonucleotide
  Sense strand starting at position 3750 of SEQ ID NO: 761
gaaagaagcguggauuccu

SEQ ID NO: 61475 - RNA, 19 nt, Artificial Sequence
  Description of Artificial Sequence: Synthetic oligonucleotide
  Antisense strand to SEQ ID NO: 61394
aggaauccacgcuucuuuc

SEQ ID NO: 61476 - RNA, 19 nt, Artificial Sequence
  Description of Artificial Sequence: Synthetic oligonucleotide
  Sense strand starting at position 3691 of SEQ ID NO: 761
cguguugaaccaugaaagg

SEQ ID NO: 61477 - RNA, 19 nt, Artificial Sequence
  Description of Artificial Sequence: Synthetic oligonucleotide
  Antisense strand to SEQ ID NO: 61396
ccuuucaugguucaacacg

SEQ ID NO: 61478 - RNA, 19 nt, Artificial Sequence
  Description of Artificial Sequence: Synthetic oligonucleotide
  Sense strand starting at position 3589 of SEQ ID NO: 761
ucaucuuggcuagacuuga

SEQ ID NO: 61479 - RNA, 19 nt, Artificial Sequence
  Description of Artificial Sequence: Synthetic oligonucleotide
  Antisense strand to SEQ ID NO: 61398
ucaagucuagccaagauga

SEQ ID NO: 61480 - RNA, 19 nt, Artificial Sequence
  Description of Artificial Sequence: Synthetic oligonucleotide
  Sense strand starting at position 3587 of SEQ ID NO: 761
ucucaucuuggcuagacuu

SEQ ID NO: 61481 - RNA, 19 nt, Artificial Sequence
  Description of Artificial Sequence: Synthetic oligonucleotide
  Antisense strand to SEQ ID NO: 61400
aagucuagccaagaugaga

SEQ ID NO: 61482 - RNA, 19 nt, Artificial Sequence
  Description of Artificial Sequence: Synthetic oligonucleotide
  Sense strand starting at position 3552 of SEQ ID NO: 761
ggaauaugcugguuucaug

SEQ ID NO: 61483 - RNA, 19 nt, Artificial Sequence
  Description of Artificial Sequence: Synthetic oligonucleotide
  Antisense strand to SEQ ID NO: 61402
caugaaaccagcauauucc

SEQ ID NO: 61484 - RNA, 19 nt, Artificial Sequence
  Description of Artificial Sequence: Synthetic oligonucleotide
  Sense strand starting at position 3500 of SEQ ID NO: 761
agaagacauugcuuccaga

SEQ ID NO: 61485 - RNA, 19 nt, Artificial Sequence
  Description of Artificial Sequence: Synthetic oligonucleotide
  Antisense strand to SEQ ID NO: 61404
ucuggaagcaaugucuucu

SEQ ID NO: 61486 - RNA, 19 nt, Artificial Sequence
  Description of Artificial Sequence: Synthetic oligonucleotide
  Sense strand starting at position 3480 of SEQ ID NO: 761
guguuagaugcuuaauaca

SEQ ID NO: 61487 - RNA, 19 nt, Artificial Sequence
  Description of Artificial Sequence: Synthetic oligonucleotide
  Antisense strand to SEQ ID NO: 61406
uguauuaagcaucuaacac

SEQ ID NO: 61488 - RNA, 19 nt, Artificial Sequence
  Description of Artificial Sequence: Synthetic oligonucleotide
  Sense strand starting at position 3354 of SEQ ID NO: 761
uggaaucuguuacuuagca

SEQ ID NO: 61489 - RNA, 19 nt, Artificial Sequence
  Description of Artificial Sequence: Synthetic oligonucleotide
  Antisense strand to SEQ ID NO: 61408
ugcuaaguaacagauucca

SEQ ID NO: 61490 - RNA, 19 nt, Artificial Sequence
  Description of Artificial Sequence: Synthetic oligonucleotide
  Sense strand starting at position 3343 of SEQ ID NO: 761
uauagacucguuggaaucu

SEQ ID NO: 61491 - RNA, 19 nt, Artificial Sequence
  Description of Artificial Sequence: Synthetic oligonucleotide
  Antisense strand to SEQ ID NO: 61410
agauuccaacgagucuaua

SEQ ID NO: 61492 - RNA, 19 nt, Artificial Sequence
  Description of Artificial Sequence: Synthetic oligonucleotide
  Sense strand starting at position 3170 of SEQ ID NO: 761
cucuuaucuuggucuuaca

SEQ ID NO: 61493 - RNA, 19 nt, Artificial Sequence
  Description of Artificial Sequence: Synthetic oligonucleotide
  Antisense strand to SEQ ID NO: 61412
uguaagaccaagauaagag

SEQ ID NO: 61494 - RNA, 19 nt, Artificial Sequence
  Description of Artificial Sequence: Synthetic oligonucleotide
  Sense strand starting at position 2995 of SEQ ID NO: 761
agucgcugaguccaaacau

SEQ ID NO: 61495 - RNA, 19 nt, Artificial Sequence
  Description of Artificial Sequence: Synthetic oligonucleotide
  Antisense strand to SEQ ID NO: 61414
auguuuggacucagcgacu

SEQ ID NO: 61496 - RNA, 19 nt, Artificial Sequence
  Description of Artificial Sequence: Synthetic oligonucleotide
  Sense strand starting at position 2972 of SEQ ID NO: 761
cgagguuugggagacaguu

SEQ ID NO: 61497 - RNA, 19 nt, Artificial Sequence
  Description of Artificial Sequence: Synthetic oligonucleotide
  Antisense strand to SEQ ID NO: 61416
aacugucucccaaaccucg

SEQ ID NO: 61498 - RNA, 19 nt, Artificial Sequence
  Description of Artificial Sequence: Synthetic oligonucleotide
  Sense strand starting at position 2967 of SEQ ID NO: 761
gaguucgagguuugggaga

SEQ ID NO: 61499 - RNA, 19 nt, Artificial Sequence
  Description of Artificial Sequence: Synthetic oligonucleotide
  Antisense strand to SEQ ID NO: 61418
ucucccaaaccucgaacuc

SEQ ID NO: 61500 - RNA, 19 nt, Artificial Sequence
  Description of Artificial Sequence: Synthetic oligonucleotide
  Sense strand starting at position 2828 of SEQ ID NO: 761
aucccuauucuacagaugu

SEQ ID NO: 61501 - RNA, 19 nt, Artificial Sequence
  Description of Artificial Sequence: Synthetic oligonucleotide
  Antisense strand to SEQ ID NO: 61420
acaucuguagaauagggau

SEQ ID NO: 61502 - RNA, 19 nt, Artificial Sequence
  Description of Artificial Sequence: Synthetic oligonucleotide
  Sense strand starting at position 2806 of SEQ ID NO: 761
ucuaauaagcugcauguua

SEQ ID NO: 61503 - RNA, 19 nt, Artificial Sequence
  Description of Artificial Sequence: Synthetic oligonucleotide
  Antisense strand to SEQ ID NO: 61422
uaacaugcagcuuauuaga

SEQ ID NO: 61504 - RNA, 19 nt, Artificial Sequence
  Description of Artificial Sequence: Synthetic oligonucleotide
  Sense strand starting at position 2695 of SEQ ID NO: 761
guaugacauucuguaaauc

SEQ ID NO: 61505 - RNA, 19 nt, Artificial Sequence
  Description of Artificial Sequence: Synthetic oligonucleotide
  Antisense strand to SEQ ID NO: 61424
gauuuacagaaugucauac

SEQ ID NO: 61506 - RNA, 19 nt, Artificial Sequence
  Description of Artificial Sequence: Synthetic oligonucleotide
  Sense strand starting at position 2609 of SEQ ID NO: 761
guuacaauucuugaaugcu

SEQ ID NO: 61507 - RNA, 19 nt, Artificial Sequence
  Description of Artificial Sequence: Synthetic oligonucleotide
  Antisense strand to SEQ ID NO: 61426
agcauucaagaauuguaac

SEQ ID NO: 61508 - RNA, 19 nt, Artificial Sequence
  Description of Artificial Sequence: Synthetic oligonucleotide
  Sense strand starting at position 2607 of SEQ ID NO: 761
ugguuacaauucuugaaug

SEQ ID NO: 61509 - RNA, 19 nt, Artificial Sequence
  Description of Artificial Sequence: Synthetic oligonucleotide
  Antisense strand to SEQ ID NO: 61428
cauucaagaauuguaacca

SEQ ID NO: 61510 - RNA, 19 nt, Artificial Sequence
  Description of Artificial Sequence: Synthetic oligonucleotide
  Sense strand starting at position 2596 of SEQ ID NO: 761
agaauauugcaugguuaca

SEQ ID NO: 61511 - RNA, 19 nt, Artificial Sequence
  Description of Artificial Sequence: Synthetic oligonucleotide
  Antisense strand to SEQ ID NO: 61430
uguaaccaugcaauauucu

SEQ ID NO: 61512 - RNA, 19 nt, Artificial Sequence
  Description of Artificial Sequence: Synthetic oligonucleotide
  Sense strand starting at position 2595 of SEQ ID NO: 761
aagaauauugcaugguuac

SEQ ID NO: 61513 - RNA, 19 nt, Artificial Sequence
  Description of Artificial Sequence: Synthetic oligonucleotide
  Antisense strand to SEQ ID NO: 61432
guaaccaugcaauauucuu

SEQ ID NO: 61514 - RNA, 19 nt, Artificial Sequence
  Description of Artificial Sequence: Synthetic oligonucleotide
  Sense strand starting at position 1715 of SEQ ID NO: 761
acggguuccagacaccuaa

SEQ ID NO: 61515 - RNA, 19 nt, Artificial Sequence
  Description of Artificial Sequence: Synthetic oligonucleotide
  Antisense strand to SEQ ID NO: 61434
uuaggugucuggaacccgu

SEQ ID NO: 61516 - RNA, 19 nt, Artificial Sequence
  Description of Artificial Sequence: Synthetic oligonucleotide
  Sense strand starting at position 1611 of SEQ ID NO: 761
auuaaaggcuccucaaaug

SEQ ID NO: 61517 - RNA, 19 nt, Artificial Sequence
  Description of Artificial Sequence: Synthetic oligonucleotide
  Antisense strand to SEQ ID NO: 61436
cauuugaggagccuuuaau

SEQ ID NO: 61518 - RNA, 19 nt, Artificial Sequence
  Description of Artificial Sequence: Synthetic oligonucleotide
  Sense strand starting at position 1597 of SEQ ID NO: 761
guagccagacgugaauuaa

SEQ ID NO: 61519 - RNA, 19 nt, Artificial Sequence
  Description of Artificial Sequence: Synthetic oligonucleotide
  Antisense strand to SEQ ID NO: 61438
uuaauucacgucuggcuac

SEQ ID NO: 61520 - RNA, 19 nt, Artificial Sequence
  Description of Artificial Sequence: Synthetic oligonucleotide
  Sense strand starting at position 1556 of SEQ ID NO: 761
cguuuaaaucuacaagcaa

SEQ ID NO: 61521 - RNA, 19 nt, Artificial Sequence
  Description of Artificial Sequence: Synthetic oligonucleotide
  Antisense strand to SEQ ID NO: 61440
uugcuuguagauuuaaacg

SEQ ID NO: 61522 - RNA, 19 nt, Artificial Sequence
  Description of Artificial Sequence: Synthetic oligonucleotide
  Sense strand starting at position 1082 of SEQ ID NO: 761
gcccaugaugagggaaauu

SEQ ID NO: 61523 - RNA, 19 nt, Artificial Sequence
  Description of Artificial Sequence: Synthetic oligonucleotide
  Antisense strand to SEQ ID NO: 61442
aauuucccucaucaugggc

SEQ ID NO: 61524 - RNA, 19 nt, Artificial Sequence
  Description of Artificial Sequence: Synthetic oligonucleotide
  Sense strand starting at position 1060 of SEQ ID NO: 761
agaagugcuuuaguggaaa

SEQ ID NO: 61525 - RNA, 19 nt, Artificial Sequence
  Description of Artificial Sequence: Synthetic oligonucleotide
  Antisense strand to SEQ ID NO: 61444
uuuccacuaaagcacuucu

SEQ ID NO: 61526 - RNA, 19 nt, Artificial Sequence
  Description of Artificial Sequence: Synthetic oligonucleotide
  Sense strand starting at position 1058 of SEQ ID NO: 761
acagaagugcuuuagugga

SEQ ID NO: 61527 - RNA, 19 nt, Artificial Sequence
  Description of Artificial Sequence: Synthetic oligonucleotide
  Antisense strand to SEQ ID NO: 61446
uccacuaaagcacuucugu

SEQ ID NO: 61528 - RNA, 19 nt, Artificial Sequence
  Description of Artificial Sequence: Synthetic oligonucleotide
  Sense strand starting at position 1047 of SEQ ID NO: 761
uguguuaagacacagaagu

SEQ ID NO: 61529 - RNA, 19 nt, Artificial Sequence
  Description of Artificial Sequence: Synthetic oligonucleotide
  Antisense strand to SEQ ID NO: 61448
acuucugugucuuaacaca

SEQ ID NO: 61530 - RNA, 19 nt, Artificial Sequence
  Description of Artificial Sequence: Synthetic oligonucleotide
  Sense strand starting at position 1040 of SEQ ID NO: 761
agaaauuuguguuaagaca

SEQ ID NO: 61531 - RNA, 19 nt, Artificial Sequence
  Description of Artificial Sequence: Synthetic oligonucleotide
  Antisense strand to SEQ ID NO: 61450
ugucuuaacacaaauuucu

SEQ ID NO: 61532 - RNA, 19 nt, Artificial Sequence
  Description of Artificial Sequence: Synthetic oligonucleotide
  Sense strand starting at position 1003 of SEQ ID NO: 761
ucagacuuuggucauguca

SEQ ID NO: 61533 - RNA, 19 nt, Artificial Sequence
  Description of Artificial Sequence: Synthetic oligonucleotide
  Antisense strand to SEQ ID NO: 61452
ugacaugaccaaagucuga

SEQ ID NO: 61534 - RNA, 19 nt, Artificial Sequence
  Description of Artificial Sequence: Synthetic oligonucleotide
  Sense strand starting at position 290 of SEQ ID NO: 761
guaauugacugugauuuaa

SEQ ID NO: 61535 - RNA, 19 nt, Artificial Sequence
  Description of Artificial Sequence: Synthetic oligonucleotide
  Antisense strand to SEQ ID NO: 61454
uuaaaucacagucaauuac

SEQ ID NO: 61536 - RNA, 19 nt, Artificial Sequence
  Description of Artificial Sequence: Synthetic oligonucleotide
  Sense strand starting at position 287 of SEQ ID NO: 761
cugguaauugacugugauu

SEQ ID NO: 61537 - RNA, 19 nt, Artificial Sequence
  Description of Artificial Sequence: Synthetic oligonucleotide
  Antisense strand to SEQ ID NO: 61456
aaucacagucaauuaccag

SEQ ID NO: 61538 - RNA, 19 nt, Artificial Sequence
  Description of Artificial Sequence: Synthetic oligonucleotide
  Sense strand starting at position 228 of SEQ ID NO: 761
ccacucuggcuaggagauu

SEQ ID NO: 61539 - RNA, 19 nt, Artificial Sequence
  Description of Artificial Sequence: Synthetic oligonucleotide
  Antisense strand to SEQ ID NO: 61458
aaucuccuagccagagugg

SEQ ID NO: 61540 - RNA, 19 nt, Artificial Sequence
  Description of Artificial Sequence: Synthetic oligonucleotide
  Sense strand starting at position 152 of SEQ ID NO: 761
gaagguaagugaucucugu

SEQ ID NO: 61541 - RNA, 19 nt, Artificial Sequence
  Description of Artificial Sequence: Synthetic oligonucleotide
  Antisense strand to SEQ ID NO: 61460
acagagaucacuuaccuuc

SEQ ID NO: 61542 - RNA, 19 nt, Artificial Sequence
  Description of Artificial Sequence: Synthetic oligonucleotide
  Sense strand starting at position 148 of SEQ ID NO: 761
gugagaagguaagugaucu

SEQ ID NO: 61543 - RNA, 19 nt, Artificial Sequence
  Description of Artificial Sequence: Synthetic oligonucleotide
  Antisense strand to SEQ ID NO: 61462
agaucacuuaccuucucac

SEQ ID NO: 61544 - RNA, 19 nt, Artificial Sequence
  Description of Artificial Sequence: Synthetic oligonucleotide
  Sense strand starting at position 84 of SEQ ID NO: 761
uuuggaugaucucugacac

SEQ ID NO: 61545 - RNA, 19 nt, Artificial Sequence
  Description of Artificial Sequence: Synthetic oligonucleotide
  Antisense strand to SEQ ID NO: 61464
gugucagagaucauccaaa

SEQ ID NO: 61546 - RNA, 19 nt, Artificial Sequence
  Description of Artificial Sequence: Synthetic oligonucleotide
  Sense strand starting at position 39 of SEQ ID NO: 761
guauguggacaagaugagu

SEQ ID NO: 61547 - RNA, 19 nt, Artificial Sequence
  Description of Artificial Sequence: Synthetic oligonucleotide
  Antisense strand to SEQ ID NO: 61466
acucaucuuguccacauac

SEQ ID NO: 61548 - RNA, 19 nt, Artificial Sequence
  Description of Artificial Sequence: Synthetic oligonucleotide
  Sense strand starting at position 32 of SEQ ID NO: 761
gcccaaaguauguggacaa

SEQ ID NO: 61549 - RNA, 19 nt, Artificial Sequence
  Description of Artificial Sequence: Synthetic oligonucleotide
  Antisense strand to SEQ ID NO: 61468
uuguccacauacuuugggc

SEQ ID NO: 61550 - RNA, 19 nt, Artificial Sequence
  Description of Artificial Sequence: Synthetic oligonucleotide
  Sense strand starting at position 23 of SEQ ID NO: 761
caguucugggcccaaagua

SEQ ID NO: 61551 - RNA, 19 nt, Artificial Sequence
  Description of Artificial Sequence: Synthetic oligonucleotide
  Antisense strand to SEQ ID NO: 61470
uacuuugggcccagaacug

SEQ ID NO: 61552 - RNA, 19 nt, Artificial Sequence
  Description of Artificial Sequence: Synthetic oligonucleotide
  Sense strand starting at position 1 of SEQ ID NO: 761
ugcacuuucccagagacua

SEQ ID NO: 61553 - RNA, 19 nt, Artificial Sequence
  Description of Artificial Sequence: Synthetic oligonucleotide
  Antisense strand to SEQ ID NO: 61472
uagucucugggaaagugca

SEQ ID NO: 61554 - RNA, 19 nt, Artificial Sequence
  Description of Artificial Sequence: Synthetic oligonucleotide
  Sense strand starting at position 3718 of SEQ ID NO: 760
uugaacugugcuuaguaua

SEQ ID NO: 61555 - RNA, 19 nt, Artificial Sequence
  Description of Artificial Sequence: Synthetic oligonucleotide
  Antisense strand to SEQ ID NO: 61474
uauacuaagcacaguucaa

SEQ ID NO: 61556 - RNA, 19 nt, Artificial Sequence
  Description of Artificial Sequence: Synthetic oligonucleotide
  Sense strand starting at position 3707 of SEQ ID NO: 760
ucuguauugaguugaacug

SEQ ID NO: 61557 - RNA, 19 nt, Artificial Sequence
  Description of Artificial Sequence: Synthetic oligonucleotide
  Antisense strand to SEQ ID NO: 61476
caguucaacucaauacaga

SEQ ID NO: 61558 - RNA, 19 nt, Artificial Sequence
  Description of Artificial Sequence: Synthetic oligonucleotide
  Sense strand starting at position 3696 of SEQ ID NO: 760
ggaagaccuucucuguauu

SEQ ID NO: 61559 - RNA, 19 nt, Artificial Sequence
  Description of Artificial Sequence: Synthetic oligonucleotide
  Antisense strand to SEQ ID NO: 61478
aauacagagaaggucuucc

SEQ ID NO: 61560 - RNA, 19 nt, Artificial Sequence
  Description of Artificial Sequence: Synthetic oligonucleotide
  Sense strand starting at position 3655 of SEQ ID NO: 760
gucugaauguucucaauga

SEQ ID NO: 61561 - RNA, 19 nt, Artificial Sequence
  Description of Artificial Sequence: Synthetic oligonucleotide
  Antisense strand to SEQ ID NO: 61480
ucauugagaacauucagac

SEQ ID NO: 61562 - RNA, 19 nt, Artificial Sequence
  Description of Artificial Sequence: Synthetic oligonucleotide
  Sense strand starting at position 3517 of SEQ ID NO: 760
ugagaaccacuguauugua

SEQ ID NO: 61563 - RNA, 19 nt, Artificial Sequence
  Description of Artificial Sequence: Synthetic oligonucleotide
  Antisense strand to SEQ ID NO: 61482
uacaauacagugguucuca

SEQ ID NO: 61564 - RNA, 19 nt, Artificial Sequence
  Description of Artificial Sequence: Synthetic oligonucleotide
  Sense strand starting at position 3505 of SEQ ID NO: 760
gaugcuagaguuugagaac

SEQ ID NO: 61565 - RNA, 19 nt, Artificial Sequence
  Description of Artificial Sequence: Synthetic oligonucleotide
  Antisense strand to SEQ ID NO: 61484
guucucaaacucuagcauc

SEQ ID NO: 61566 - RNA, 19 nt, Artificial Sequence
  Description of Artificial Sequence: Synthetic oligonucleotide
  Sense strand starting at position 3493 of SEQ ID NO: 760
gugauuccgauggaugcua

SEQ ID NO: 61567 - RNA, 19 nt, Artificial Sequence
  Description of Artificial Sequence: Synthetic oligonucleotide
  Antisense strand to SEQ ID NO: 61486
uagcauccaucggaaucac

SEQ ID NO: 61568 - RNA, 19 nt, Artificial Sequence
  Description of Artificial Sequence: Synthetic oligonucleotide
  Sense strand starting at position 3381 of SEQ ID NO: 760
uaguaucaccagggaacuu

SEQ ID NO: 61569 - RNA, 19 nt, Artificial Sequence
  Description of Artificial Sequence: Synthetic oligonucleotide
  Antisense strand to SEQ ID NO: 61488
aaguucccuggugauacua

SEQ ID NO: 61570 - RNA, 19 nt, Artificial Sequence
  Description of Artificial Sequence: Synthetic oligonucleotide
  Sense strand starting at position 3380 of SEQ ID NO: 760
uuaguaucaccagggaacu

SEQ ID NO: 61571 - RNA, 19 nt, Artificial Sequence
  Description of Artificial Sequence: Synthetic oligonucleotide
  Antisense strand to SEQ ID NO: 61490
aguucccuggugauacuaa

SEQ ID NO: 61572 - RNA, 19 nt, Artificial Sequence
  Description of Artificial Sequence: Synthetic oligonucleotide
  Sense strand starting at position 3377 of SEQ ID NO: 760
gcauuaguaucaccaggga

SEQ ID NO: 61573 - RNA, 19 nt, Artificial Sequence
  Description of Artificial Sequence: Synthetic oligonucleotide
  Antisense strand to SEQ ID NO: 61492
ucccuggugauacuaaugc

SEQ ID NO: 61574 - RNA, 19 nt, Artificial Sequence
  Description of Artificial Sequence: Synthetic oligonucleotide
  Sense strand starting at position 3352 of SEQ ID NO: 760
auucguggucucuagaaga

SEQ ID NO: 61575 - RNA, 19 nt, Artificial Sequence
  Description of Artificial Sequence: Synthetic oligonucleotide
  Antisense strand to SEQ ID NO: 61494
ucuucuagagaccacgaau

SEQ ID NO: 61576 - RNA, 19 nt, Artificial Sequence
  Description of Artificial Sequence: Synthetic oligonucleotide
  Sense strand starting at position 3223 of SEQ ID NO: 760
caaguucuuggaugauaca

SEQ ID NO: 61577 - RNA, 19 nt, Artificial Sequence
  Description of Artificial Sequence: Synthetic oligonucleotide
  Antisense strand to SEQ ID NO: 61496
uguaucauccaagaacuug

SEQ ID NO: 61578 - RNA, 19 nt, Artificial Sequence
  Description of Artificial Sequence: Synthetic oligonucleotide
  Sense strand starting at position 3220 of SEQ ID NO: 760
aagcaaguucuuggaugau

SEQ ID NO: 61579 - RNA, 19 nt, Artificial Sequence
  Description of Artificial Sequence: Synthetic oligonucleotide
  Antisense strand to SEQ ID NO: 61498
aucauccaagaacuugcuu

SEQ ID NO: 61580 - RNA, 19 nt, Artificial Sequence
  Description of Artificial Sequence: Synthetic oligonucleotide
  Sense strand starting at position 3165 of SEQ ID NO: 760
guagcuguugaaugagaaa

SEQ ID NO: 61581 - RNA, 19 nt, Artificial Sequence
  Description of Artificial Sequence: Synthetic oligonucleotide
  Antisense strand to SEQ ID NO: 61500
uuucucauucaacagcuac

SEQ ID NO: 61582 - RNA, 19 nt, Artificial Sequence
  Description of Artificial Sequence: Synthetic oligonucleotide
  Sense strand starting at position 2928 of SEQ ID NO: 760
ugauucuaucuuugauaga

SEQ ID NO: 61583 - RNA, 19 nt, Artificial Sequence
  Description of Artificial Sequence: Synthetic oligonucleotide
  Antisense strand to SEQ ID NO: 61502
ucuaucaaagauagaauca

SEQ ID NO: 61584 - RNA, 19 nt, Artificial Sequence
  Description of Artificial Sequence: Synthetic oligonucleotide
  Sense strand starting at position 2927 of SEQ ID NO: 760
gugauucuaucuuugauag

SEQ ID NO: 61585 - RNA, 19 nt, Artificial Sequence
  Description of Artificial Sequence: Synthetic oligonucleotide
  Antisense strand to SEQ ID NO: 61504
cuaucaaagauagaaucac

SEQ ID NO: 61586 - RNA, 19 nt, Artificial Sequence
  Description of Artificial Sequence: Synthetic oligonucleotide
  Sense strand starting at position 2788 of SEQ ID NO: 760
acaaauaguguaggaauau

SEQ ID NO: 61587 - RNA, 19 nt, Artificial Sequence
  Description of Artificial Sequence: Synthetic oligonucleotide
  Antisense strand to SEQ ID NO: 61506
auauuccuacacuauuugu

SEQ ID NO: 61588 - RNA, 19 nt, Artificial Sequence
  Description of Artificial Sequence: Synthetic oligonucleotide
  Sense strand starting at position 2059 of SEQ ID NO: 760
uguuuaccaguuuaugaag

SEQ ID NO: 61589 - RNA, 19 nt, Artificial Sequence
  Description of Artificial Sequence: Synthetic oligonucleotide
  Antisense strand to SEQ ID NO: 61508
cuucauaaacugguaaaca

SEQ ID NO: 61590 - RNA, 19 nt, Artificial Sequence
  Description of Artificial Sequence: Synthetic oligonucleotide
  Sense strand starting at position 1753 of SEQ ID NO: 760
gcuguugauuugcugacau

SEQ ID NO: 61591 - RNA, 19 nt, Artificial Sequence
  Description of Artificial Sequence: Synthetic oligonucleotide
  Antisense strand to SEQ ID NO: 61510
augucagcaaaucaacagc

SEQ ID NO: 61592 - RNA, 19 nt, Artificial Sequence
  Description of Artificial Sequence: Synthetic oligonucleotide
  Sense strand starting at position 1752 of SEQ ID NO: 760
ugcuguugauuugcugaca

SEQ ID NO: 61593 - RNA, 19 nt, Artificial Sequence
  Description of Artificial Sequence: Synthetic oligonucleotide
  Antisense strand to SEQ ID NO: 61512
ugucagcaaaucaacagca

SEQ ID NO: 61594 - RNA, 19 nt, Artificial Sequence
  Description of Artificial Sequence: Synthetic oligonucleotide
  Sense strand starting at position 1679 of SEQ ID NO: 760
accucucuuugaguucuga

SEQ ID NO: 61595 - RNA, 19 nt, Artificial Sequence
  Description of Artificial Sequence: Synthetic oligonucleotide
  Antisense strand to SEQ ID NO: 61514
ucagaacucaaagagaggu

SEQ ID NO: 61596 - RNA, 19 nt, Artificial Sequence
  Description of Artificial Sequence: Synthetic oligonucleotide
  Sense strand starting at position 1668 of SEQ ID NO: 760
gugaauuccugaccucucu

SEQ ID NO: 61597 - RNA, 19 nt, Artificial Sequence
  Description of Artificial Sequence: Synthetic oligonucleotide
  Antisense strand to SEQ ID NO: 61516
agagaggucaggaauucac

SEQ ID NO: 61598 - RNA, 19 nt, Artificial Sequence
  Description of Artificial Sequence: Synthetic oligonucleotide
  Sense strand starting at position 1666 of SEQ ID NO: 760
augugaauuccugaccucu

SEQ ID NO: 61599 - RNA, 19 nt, Artificial Sequence
  Description of Artificial Sequence: Synthetic oligonucleotide
  Antisense strand to SEQ ID NO: 61518
agaggucaggaauucacau

SEQ ID NO: 61600 - RNA, 19 nt, Artificial Sequence
  Description of Artificial Sequence: Synthetic oligonucleotide
  Sense strand starting at position 1632 of SEQ ID NO: 760
augauuuguucuuacauag

SEQ ID NO: 61601 - RNA, 19 nt, Artificial Sequence
  Description of Artificial Sequence: Synthetic oligonucleotide
  Antisense strand to SEQ ID NO: 61520
cuauguaagaacaaaucau

SEQ ID NO: 61602 - RNA, 19 nt, Artificial Sequence
  Description of Artificial Sequence: Synthetic oligonucleotide
  Sense strand starting at position 1546 of SEQ ID NO: 760
uucuaaaugcaggguuauu

SEQ ID NO: 61603 - RNA, 19 nt, Artificial Sequence
  Description of Artificial Sequence: Synthetic oligonucleotide
  Antisense strand to SEQ ID NO: 61522
aauaacccugcauuuagaa

SEQ ID NO: 61604 - RNA, 19 nt, Artificial Sequence
  Description of Artificial Sequence: Synthetic oligonucleotide
  Sense strand starting at position 1464 of SEQ ID NO: 760
augugauaguuucuuacuc

SEQ ID NO: 61605 - RNA, 19 nt, Artificial Sequence
  Description of Artificial Sequence: Synthetic oligonucleotide
  Antisense strand to SEQ ID NO: 61524
gaguaagaaacuaucacau

SEQ ID NO: 61606 - RNA, 19 nt, Artificial Sequence
  Description of Artificial Sequence: Synthetic oligonucleotide
  Sense strand starting at position 1435 of SEQ ID NO: 760
cccugaguucucuaaaugc

SEQ ID NO: 61607 - RNA, 19 nt, Artificial Sequence
  Description of Artificial Sequence: Synthetic oligonucleotide
  Antisense strand to SEQ ID NO: 61526
gcauuuagagaacucaggg

SEQ ID NO: 61608 - RNA, 19 nt, Artificial Sequence
  Description of Artificial Sequence: Synthetic oligonucleotide
  Sense strand starting at position 1404 of SEQ ID NO: 760
gucaguccaucuucuacaa

SEQ ID NO: 61609 - RNA, 19 nt, Artificial Sequence
  Description of Artificial Sequence: Synthetic oligonucleotide
  Antisense strand to SEQ ID NO: 61528
uuguagaagauggacugac

SEQ ID NO: 61610 - RNA, 19 nt, Artificial Sequence
  Description of Artificial Sequence: Synthetic oligonucleotide
  Sense strand starting at position 1234 of SEQ ID NO: 760
gaguucuagcagcauuaug

SEQ ID NO: 61611 - RNA, 19 nt, Artificial Sequence
  Description of Artificial Sequence: Synthetic oligonucleotide
  Antisense strand to SEQ ID NO: 61530
cauaaugcugcuagaacuc

SEQ ID NO: 61612 - RNA, 19 nt, Artificial Sequence
  Description of Artificial Sequence: Synthetic oligonucleotide
  Sense strand starting at position 1136 of SEQ ID NO: 760
gaauuacuggguugugaag

SEQ ID NO: 61613 - RNA, 19 nt, Artificial Sequence
  Description of Artificial Sequence: Synthetic oligonucleotide
  Antisense strand to SEQ ID NO: 61532
cuucacaacccaguaauuc

SEQ ID NO: 61614 - RNA, 19 nt, Artificial Sequence
  Description of Artificial Sequence: Synthetic oligonucleotide
  Sense strand starting at position 1134 of SEQ ID NO: 760
gggaauuacuggguuguga

SEQ ID NO: 61615 - RNA, 19 nt, Artificial Sequence
  Description of Artificial Sequence: Synthetic oligonucleotide
  Antisense strand to SEQ ID NO: 61534
ucacaacccaguaauuccc

SEQ ID NO: 61616 - RNA, 19 nt, Artificial Sequence
  Description of Artificial Sequence: Synthetic oligonucleotide
  Sense strand starting at position 1100 of SEQ ID NO: 760
guaugagcacaauguauug

SEQ ID NO: 61617 - RNA, 19 nt, Artificial Sequence
  Description of Artificial Sequence: Synthetic oligonucleotide
  Antisense strand to SEQ ID NO: 61536
caauacauugugcucauac

SEQ ID NO: 61618 - RNA, 19 nt, Artificial Sequence
  Description of Artificial Sequence: Synthetic oligonucleotide
  Sense strand starting at position 1097 of SEQ ID NO: 760
cuuguaugagcacaaugua

SEQ ID NO: 61619 - RNA, 19 nt, Artificial Sequence
  Description of Artificial Sequence: Synthetic oligonucleotide
  Antisense strand to SEQ ID NO: 61538
uacauugugcucauacaag

SEQ ID NO: 61620 - RNA, 19 nt, Artificial Sequence
  Description of Artificial Sequence: Synthetic oligonucleotide
  Sense strand starting at position 1094 of SEQ ID NO: 760
uuccuuguaugagcacaau

SEQ ID NO: 61621 - RNA, 19 nt, Artificial Sequence
  Description of Artificial Sequence: Synthetic oligonucleotide
  Antisense strand to SEQ ID NO: 61540
auugugcucauacaaggaa

SEQ ID NO: 61622 - RNA, 19 nt, Artificial Sequence
  Description of Artificial Sequence: Synthetic oligonucleotide
  Sense strand starting at position 1041 of SEQ ID NO: 760
aauccuacugugggaaaca

SEQ ID NO: 61623 - RNA, 19 nt, Artificial Sequence
  Description of Artificial Sequence: Synthetic oligonucleotide
  Antisense strand to SEQ ID NO: 61542
uguuucccacaguaggauu

SEQ ID NO: 61624 - RNA, 19 nt, Artificial Sequence
  Description of Artificial Sequence: Synthetic oligonucleotide
  Sense strand starting at position 1039 of SEQ ID NO: 760
uaaauccuacugugggaaa

SEQ ID NO: 61625 - RNA, 19 nt, Artificial Sequence
  Description of Artificial Sequence: Synthetic oligonucleotide
  Antisense strand to SEQ ID NO: 61544
uuucccacaguaggauuua

SEQ ID NO: 61626 - RNA, 19 nt, Artificial Sequence
  Description of Artificial Sequence: Synthetic oligonucleotide
  Sense strand starting at position 1025 of SEQ ID NO: 760
accugaugucacgauaaau

SEQ ID NO: 61627 - RNA, 19 nt, Artificial Sequence
  Description of Artificial Sequence: Synthetic oligonucleotide
  Antisense strand to SEQ ID NO: 61546
auuuaucgugacaucaggu

SEQ ID NO: 61628 - RNA, 19 nt, Artificial Sequence
  Description of Artificial Sequence: Synthetic oligonucleotide
  Sense strand starting at position 989 of SEQ ID NO: 760
agaaaugccuucuccauga

SEQ ID NO: 61629 - RNA, 19 nt, Artificial Sequence
  Description of Artificial Sequence: Synthetic oligonucleotide
  Antisense strand to SEQ ID NO: 61548
ucauggagaaggcauuucu

SEQ ID NO: 61630 - RNA, 19 nt, Artificial Sequence
  Description of Artificial Sequence: Synthetic oligonucleotide
  Sense strand starting at position 847 of SEQ ID NO: 760
uguuaucagccagagcuga

SEQ ID NO: 61631 - RNA, 19 nt, Artificial Sequence
  Description of Artificial Sequence: Synthetic oligonucleotide
  Antisense strand to SEQ ID NO: 61550
ucagcucuggcugauaaca

SEQ ID NO: 61632 - RNA, 19 nt, Artificial Sequence
  Description of Artificial Sequence: Synthetic oligonucleotide
  Sense strand starting at position 711 of SEQ ID NO: 760
agucaauaggugcaguaaa

SEQ ID NO: 61633 - RNA, 19 nt, Artificial Sequence
  Description of Artificial Sequence: Synthetic oligonucleotide
  Antisense strand to SEQ ID NO: 61552
uuuacugcaccuauugacu

SEQ ID NO: 61634 - RNA, 19 nt, Artificial Sequence
  Description of Artificial Sequence: Synthetic oligonucleotide
  Sense strand starting at position 3958 of SEQ ID NO: 762
uccuguucucaaggaguuc

SEQ ID NO: 61635 - RNA, 19 nt, Artificial Sequence
  Description of Artificial Sequence: Synthetic oligonucleotide
  Antisense strand to SEQ ID NO: 61554
gaacuccuugagaacagga

SEQ ID NO: 61636 - RNA, 19 nt, Artificial Sequence
  Description of Artificial Sequence: Synthetic oligonucleotide
  Sense strand starting at position 3790 of SEQ ID NO: 762
uuaauaauccguugcauaa

SEQ ID NO: 61637 - RNA, 19 nt, Artificial Sequence
  Description of Artificial Sequence: Synthetic oligonucleotide
  Antisense strand to SEQ ID NO: 61556
uuaugcaacggauuauuaa

SEQ ID NO: 61638 - RNA, 19 nt, Artificial Sequence
  Description of Artificial Sequence: Synthetic oligonucleotide
  Sense strand starting at position 3788 of SEQ ID NO: 762
auuuaauaauccguugcau

SEQ ID NO: 61639 - RNA, 19 nt, Artificial Sequence
  Description of Artificial Sequence: Synthetic oligonucleotide
  Antisense strand to SEQ ID NO: 61558
augcaacggauuauuaaau

SEQ ID NO: 61640 - RNA, 19 nt, Artificial Sequence
  Description of Artificial Sequence: Synthetic oligonucleotide
  Sense strand starting at position 3762 of SEQ ID NO: 762
ccauguaguauguagaaca

SEQ ID NO: 61641 - RNA, 19 nt, Artificial Sequence
  Description of Artificial Sequence: Synthetic oligonucleotide
  Antisense strand to SEQ ID NO: 61560
uguucuacauacuacaugg

SEQ ID NO: 61642 - RNA, 19 nt, Artificial Sequence
  Description of Artificial Sequence: Synthetic oligonucleotide
  Sense strand starting at position 3760 of SEQ ID NO: 762
auccauguaguauguagaa

SEQ ID NO: 61643 - RNA, 19 nt, Artificial Sequence
  Description of Artificial Sequence: Synthetic oligonucleotide
  Antisense strand to SEQ ID NO: 61562
uucuacauacuacauggau

SEQ ID NO: 61644 - RNA, 19 nt, Artificial Sequence
  Description of Artificial Sequence: Synthetic oligonucleotide
  Sense strand starting at position 3753 of SEQ ID NO: 762
ucuggaaauccauguagua

SEQ ID NO: 61645 - RNA, 19 nt, Artificial Sequence
  Description of Artificial Sequence: Synthetic oligonucleotide
  Antisense strand to SEQ ID NO: 61564
uacuacauggauuuccaga

SEQ ID NO: 61646 - RNA, 19 nt, Artificial Sequence
  Description of Artificial Sequence: Synthetic oligonucleotide
  Sense strand starting at position 3743 of SEQ ID NO: 762
gcgauccugcucuggaaau

SEQ ID NO: 61647 - RNA, 19 nt, Artificial Sequence
  Description of Artificial Sequence: Synthetic oligonucleotide
  Antisense strand to SEQ ID NO: 61566
auuuccagagcaggaucgc

SEQ ID NO: 61648 - RNA, 19 nt, Artificial Sequence
  Description of Artificial Sequence: Synthetic oligonucleotide
  Sense strand starting at position 3732 of SEQ ID NO: 762
gauugaugagagcgauccu

SEQ ID NO: 61649 - RNA, 19 nt, Artificial Sequence
  Description of Artificial Sequence: Synthetic oligonucleotide
  Antisense strand to SEQ ID NO: 61568
aggaucgcucucaucaauc

SEQ ID NO: 61650 - RNA, 19 nt, Artificial Sequence
  Description of Artificial Sequence: Synthetic oligonucleotide
  Sense strand starting at position 3663 of SEQ ID NO: 762
guuuacuaauucuuaggca

SEQ ID NO: 61651 - RNA, 19 nt, Artificial Sequence
  Description of Artificial Sequence: Synthetic oligonucleotide
  Antisense strand to SEQ ID NO: 61570
ugccuaagaauuaguaaac

SEQ ID NO: 61652 - RNA, 19 nt, Artificial Sequence
  Description of Artificial Sequence: Synthetic oligonucleotide
  Sense strand starting at position 3656 of SEQ ID NO: 762
augaguuguuuacuaauuc

SEQ ID NO: 61653 - RNA, 19 nt, Artificial Sequence
  Description of Artificial Sequence: Synthetic oligonucleotide
  Antisense strand to SEQ ID NO: 61572
gaauuaguaaacaacucau

SEQ ID NO: 61654 - RNA, 19 nt, Artificial Sequence
  Description of Artificial Sequence: Synthetic oligonucleotide
  Sense strand starting at position 3512 of SEQ ID NO: 762
cucucugugcuuguaugua

SEQ ID NO: 61655 - RNA, 19 nt, Artificial Sequence
  Description of Artificial Sequence: Synthetic oligonucleotide
  Antisense strand to SEQ ID NO: 61574
uacauacaagcacagagag

SEQ ID NO: 61656 - RNA, 19 nt, Artificial Sequence
  Description of Artificial Sequence: Synthetic oligonucleotide
  Sense strand starting at position 3453 of SEQ ID NO: 762
cuggaaugucaggauugcu

SEQ ID NO: 61657 - RNA, 19 nt, Artificial Sequence
  Description of Artificial Sequence: Synthetic oligonucleotide
  Antisense strand to SEQ ID NO: 61576
agcaauccugacauuccag

SEQ ID NO: 61658 - RNA, 19 nt, Artificial Sequence
  Description of Artificial Sequence: Synthetic oligonucleotide
  Sense strand starting at position 3355 of SEQ ID NO: 762
gugauugucacccagguag

SEQ ID NO: 61659 - RNA, 19 nt, Artificial Sequence
  Description of Artificial Sequence: Synthetic oligonucleotide
  Antisense strand to SEQ ID NO: 61578
cuaccugggugacaaucac

SEQ ID NO: 61660 - RNA, 19 nt, Artificial Sequence
  Description of Artificial Sequence: Synthetic oligonucleotide
  Sense strand starting at position 3353 of SEQ ID NO: 762
aagugauugucacccaggu

SEQ ID NO: 61661 - RNA, 19 nt, Artificial Sequence
  Description of Artificial Sequence: Synthetic oligonucleotide
  Antisense strand to SEQ ID NO: 61580
accugggugacaaucacuu

SEQ ID NO: 61662 - RNA, 19 nt, Artificial Sequence
  Description of Artificial Sequence: Synthetic oligonucleotide
  Sense strand starting at position 3214 of SEQ ID NO: 762
uagugaguccugggcagaa

SEQ ID NO: 61663 - RNA, 19 nt, Artificial Sequence
  Description of Artificial Sequence: Synthetic oligonucleotide
  Antisense strand to SEQ ID NO: 61582
uucugcccaggacucacua

SEQ ID NO: 61664 - RNA, 19 nt, Artificial Sequence
  Description of Artificial Sequence: Synthetic oligonucleotide
  Sense strand starting at position 3155 of SEQ ID NO: 762
gaacaucucuguuuaggaa

SEQ ID NO: 61665 - RNA, 19 nt, Artificial Sequence
  Description of Artificial Sequence: Synthetic oligonucleotide
  Antisense strand to SEQ ID NO: 61584
uuccuaaacagagauguuc

SEQ ID NO: 61666 - RNA, 19 nt, Artificial Sequence
  Description of Artificial Sequence: Synthetic oligonucleotide
  Sense strand starting at position 3034 of SEQ ID NO: 762
gauacaacucuguggagau

SEQ ID NO: 61667 - RNA, 19 nt, Artificial Sequence
  Description of Artificial Sequence: Synthetic oligonucleotide
  Antisense strand to SEQ ID NO: 61586
aucuccacagaguuguauc

SEQ ID NO: 61668 - RNA, 19 nt, Artificial Sequence
  Description of Artificial Sequence: Synthetic oligonucleotide
  Sense strand starting at position 2644 of SEQ ID NO: 762
augagcuuguuacccagua

SEQ ID NO: 61669 - RNA, 19 nt, Artificial Sequence
  Description of Artificial Sequence: Synthetic oligonucleotide
  Antisense strand to SEQ ID NO: 61588
uacuggguaacaagcucau

SEQ ID NO: 61670 - RNA, 19 nt, Artificial Sequence
  Description of Artificial Sequence: Synthetic oligonucleotide
  Sense strand starting at position 2331 of SEQ ID NO: 762
acagccauuccaggagaaa

SEQ ID NO: 61671 - RNA, 19 nt, Artificial Sequence
  Description of Artificial Sequence: Synthetic oligonucleotide
  Antisense strand to SEQ ID NO: 61590
uuucuccuggaauggcugu

SEQ ID NO: 61672 - RNA, 19 nt, Artificial Sequence
  Description of Artificial Sequence: Synthetic oligonucleotide
  Sense strand starting at position 2063 of SEQ ID NO: 762
uaaguuaguugagauuuga

SEQ ID NO: 61673 - RNA, 19 nt, Artificial Sequence
  Description of Artificial Sequence: Synthetic oligonucleotide
  Antisense strand to SEQ ID NO: 61592
ucaaaucucaacuaacuua

SEQ ID NO: 61674 - RNA, 19 nt, Artificial Sequence
  Description of Artificial Sequence: Synthetic oligonucleotide
  Sense strand starting at position 2059 of SEQ ID NO: 762
gauauaaguuaguugagau

SEQ ID NO: 61675 - RNA, 19 nt, Artificial Sequence
  Description of Artificial Sequence: Synthetic oligonucleotide
  Antisense strand to SEQ ID NO: 61594
aucucaacuaacuuauauc

SEQ ID NO: 61676 - RNA, 19 nt, Artificial Sequence
  Description of Artificial Sequence: Synthetic oligonucleotide
  Sense strand starting at position 2058 of SEQ ID NO: 762
agauauaaguuaguugaga

SEQ ID NO: 61677 - RNA, 19 nt, Artificial Sequence
  Description of Artificial Sequence: Synthetic oligonucleotide
  Antisense strand to SEQ ID NO: 61596
ucucaacuaacuuauaucu

SEQ ID NO: 61678 - RNA, 19 nt, Artificial Sequence
  Description of Artificial Sequence: Synthetic oligonucleotide
  Sense strand starting at position 1592 of SEQ ID NO: 762
acccgucaucauggacuau

SEQ ID NO: 61679 - RNA, 19 nt, Artificial Sequence
  Description of Artificial Sequence: Synthetic oligonucleotide
  Antisense strand to SEQ ID NO: 61598
auaguccaugaugacgggu

SEQ ID NO: 61680 - RNA, 19 nt, Artificial Sequence
  Description of Artificial Sequence: Synthetic oligonucleotide
  Sense strand starting at position 1586 of SEQ ID NO: 762
guaucaacccgucaucaug

SEQ ID NO: 61681 - RNA, 19 nt, Artificial Sequence
  Description of Artificial Sequence: Synthetic oligonucleotide
  Antisense strand to SEQ ID NO: 61600
caugaugacggguugauac

SEQ ID NO: 61682 - RNA, 19 nt, Artificial Sequence
  Description of Artificial Sequence: Synthetic oligonucleotide
  Sense strand starting at position 1574 of SEQ ID NO: 762
uuaaguaagucuguaucaa

SEQ ID NO: 61683 - RNA, 19 nt, Artificial Sequence
  Description of Artificial Sequence: Synthetic oligonucleotide
  Antisense strand to SEQ ID NO: 61602
uugauacagacuuacuuaa

SEQ ID NO: 61684 - RNA, 19 nt, Artificial Sequence
  Description of Artificial Sequence: Synthetic oligonucleotide
  Sense strand starting at position 1255 of SEQ ID NO: 762
uggacuuugccugacuugu

SEQ ID NO: 61685 - RNA, 19 nt, Artificial Sequence
  Description of Artificial Sequence: Synthetic oligonucleotide
  Antisense strand to SEQ ID NO: 61604
acaagucaggcaaagucca

SEQ ID NO: 61686 - RNA, 19 nt, Artificial Sequence
  Description of Artificial Sequence: Synthetic oligonucleotide
  Sense strand starting at position 1171 of SEQ ID NO: 762
gggauuagcugucccaaac

SEQ ID NO: 61687 - RNA, 19 nt, Artificial Sequence
  Description of Artificial Sequence: Synthetic oligonucleotide
  Antisense strand to SEQ ID NO: 61606
guuugggacagcuaauccc

SEQ ID NO: 61688 - RNA, 19 nt, Artificial Sequence
  Description of Artificial Sequence: Synthetic oligonucleotide
  Sense strand starting at position 1014 of SEQ ID NO: 762
uagugaauccugcauucug

SEQ ID NO: 61689 - RNA, 19 nt, Artificial Sequence
  Description of Artificial Sequence: Synthetic oligonucleotide
  Antisense strand to SEQ ID NO: 61608
cagaaugcaggauucacua

SEQ ID NO: 61690 - RNA, 19 nt, Artificial Sequence
  Description of Artificial Sequence: Synthetic oligonucleotide
  Sense strand starting at position 977 of SEQ ID NO: 762
ggcuauuacugaccucaac

SEQ ID NO: 61691 - RNA, 19 nt, Artificial Sequence
  Description of Artificial Sequence: Synthetic oligonucleotide
  Antisense strand to SEQ ID NO: 61610
guugaggucaguaauagcc

SEQ ID NO: 61692 - RNA, 19 nt, Artificial Sequence
  Description of Artificial Sequence: Synthetic oligonucleotide
  Sense strand starting at position 968 of SEQ ID NO: 762
aguucuugaggcuauuacu

SEQ ID NO: 61693 - RNA, 19 nt, Artificial Sequence
  Description of Artificial Sequence: Synthetic oligonucleotide
  Antisense strand to SEQ ID NO: 61612
aguaauagccucaagaacu

SEQ ID NO: 61694 - RNA, 19 nt, Artificial Sequence
  Description of Artificial Sequence: Synthetic oligonucleotide
  Sense strand starting at position 963 of SEQ ID NO: 762
uagccaguucuugaggcua

SEQ ID NO: 61695 - RNA, 19 nt, Artificial Sequence
  Description of Artificial Sequence: Synthetic oligonucleotide
  Antisense strand to SEQ ID NO: 61614
uagccucaagaacuggcua

SEQ ID NO: 61696 - RNA, 19 nt, Artificial Sequence
  Description of Artificial Sequence: Synthetic oligonucleotide
  Sense strand starting at position 916 of SEQ ID NO: 762
cugugucuguacuugacau

SEQ ID NO: 61697 - RNA, 19 nt, Artificial Sequence
  Description of Artificial Sequence: Synthetic oligonucleotide
  Antisense strand to SEQ ID NO: 61616
augucaaguacagacacag

SEQ ID NO: 61698 - RNA, 19 nt, Artificial Sequence
  Description of Artificial Sequence: Synthetic oligonucleotide
  Sense strand starting at position 732 of SEQ ID NO: 762
cucccuugggaaugaaagu

SEQ ID NO: 61699 - RNA, 19 nt, Artificial Sequence
  Description of Artificial Sequence: Synthetic oligonucleotide
  Antisense strand to SEQ ID NO: 61618
acuuucauucccaagggag

SEQ ID NO: 61700 - RNA, 19 nt, Artificial Sequence
  Description of Artificial Sequence: Synthetic oligonucleotide
  Sense strand starting at position 571 of SEQ ID NO: 762
cugucugcuggagaacuua

SEQ ID NO: 61701 - RNA, 19 nt, Artificial Sequence
  Description of Artificial Sequence: Synthetic oligonucleotide
  Antisense strand to SEQ ID NO: 61620
uaaguucuccagcagacag

SEQ ID NO: 61702 - RNA, 19 nt, Artificial Sequence
  Description of Artificial Sequence: Synthetic oligonucleotide
  Sense strand starting at position 569 of SEQ ID NO: 762
gacugucugcuggagaacu

SEQ ID NO: 61703 - RNA, 19 nt, Artificial Sequence
  Description of Artificial Sequence: Synthetic oligonucleotide
  Antisense strand to SEQ ID NO: 61622
aguucuccagcagacaguc

SEQ ID NO: 61704 - RNA, 19 nt, Artificial Sequence
  Description of Artificial Sequence: Synthetic oligonucleotide
  Sense strand starting at position 440 of SEQ ID NO: 762
gggugcuggagccaagaaa

SEQ ID NO: 61705 - RNA, 19 nt, Artificial Sequence
  Description of Artificial Sequence: Synthetic oligonucleotide
  Antisense strand to SEQ ID NO: 61624
uuucuuggcuccagcaccc

SEQ ID NO: 61706 - RNA, 19 nt, Artificial Sequence
  Description of Artificial Sequence: Synthetic oligonucleotide
  Sense strand starting at position 404 of SEQ ID NO: 762
cagaaaucagguuguuauu

SEQ ID NO: 61707 - RNA, 19 nt, Artificial Sequence
  Description of Artificial Sequence: Synthetic oligonucleotide
  Antisense strand to SEQ ID NO: 61626
aauaacaaccugauuucug

SEQ ID NO: 61708 - RNA, 19 nt, Artificial Sequence
  Description of Artificial Sequence: Synthetic oligonucleotide
  Sense strand starting at position 77 of SEQ ID NO: 762
gucugucugccagauaaga

SEQ ID NO: 61709 - RNA, 19 nt, Artificial Sequence
  Description of Artificial Sequence: Synthetic oligonucleotide
  Antisense strand to SEQ ID NO: 61628
ucuuaucuggcagacagac

SEQ ID NO: 61710 - RNA, 19 nt, Artificial Sequence
  Description of Artificial Sequence: Synthetic oligonucleotide
  Sense strand starting at position 73 of SEQ ID NO: 762
aggagucugucugccagau

SEQ ID NO: 61711 - RNA, 19 nt, Artificial Sequence
  Description of Artificial Sequence: Synthetic oligonucleotide
  Antisense strand to SEQ ID NO: 61630
aucuggcagacagacuccu

SEQ ID NO: 61712 - RNA, 19 nt, Artificial Sequence
  Description of Artificial Sequence: Synthetic oligonucleotide
  Sense strand starting at position 4 of SEQ ID NO: 762
uuaagucaacuugggaagu

SEQ ID NO: 61713 - RNA, 19 nt, Artificial Sequence
  Description of Artificial Sequence: Synthetic oligonucleotide
  Antisense strand to SEQ ID NO: 61632
acuucccaaguugacuuaa

SEQ ID NO: 61714 - RNA, 19 nt, Artificial Sequence
  Description of Artificial Sequence: Synthetic oligonucleotide
  Sense strand starting at position 5 of SEQ ID NO: 764
cagguuuguguguauacga

SEQ ID NO: 61715 - RNA, 19 nt, Artificial Sequence
  Description of Artificial Sequence: Synthetic oligonucleotide
  Antisense strand to SEQ ID NO: 61634
ucguauacacacaaaccug

SEQ ID NO: 61716 - RNA, 19 nt, Artificial Sequence
  Description of Artificial Sequence: Synthetic oligonucleotide
  Sense strand starting at position 12 of SEQ ID NO: 764
guguguauacgagagugua

SEQ ID NO: 61717 - RNA, 19 nt, Artificial Sequence
  Description of Artificial Sequence: Synthetic oligonucleotide
  Antisense strand to SEQ ID NO: 61636
uacacucucguauacacac

SEQ ID NO: 61718 - RNA, 19 nt, Artificial Sequence
  Description of Artificial Sequence: Synthetic oligonucleotide
  Sense strand starting at position 13 of SEQ ID NO: 764
uguguauacgagaguguau

SEQ ID NO: 61719 - RNA, 19 nt, Artificial Sequence
  Description of Artificial Sequence: Synthetic oligonucleotide
  Antisense strand to SEQ ID NO: 61638
auacacucucguauacaca

SEQ ID NO: 61720 - RNA, 19 nt, Artificial Sequence
  Description of Artificial Sequence: Synthetic oligonucleotide
  Sense strand starting at position 15 of SEQ ID NO: 764
uguauacgagaguguauaa

SEQ ID NO: 61721 - RNA, 19 nt, Artificial Sequence
  Description of Artificial Sequence: Synthetic oligonucleotide
  Antisense strand to SEQ ID NO: 61640
uuauacacucucguauaca

SEQ ID NO: 61722 - RNA, 19 nt, Artificial Sequence
  Description of Artificial Sequence: Synthetic oligonucleotide
  Sense strand starting at position 48 of SEQ ID NO: 764
guguuuggcugcaugugua

SEQ ID NO: 61723 - RNA, 19 nt, Artificial Sequence
  Description of Artificial Sequence: Synthetic oligonucleotide
  Antisense strand to SEQ ID NO: 61642
uacacaugcagccaaacac

SEQ ID NO: 61724 - RNA, 19 nt, Artificial Sequence
  Description of Artificial Sequence: Synthetic oligonucleotide
  Sense strand starting at position 61 of SEQ ID NO: 764
uguguauaugucuguaaga

SEQ ID NO: 61725 - RNA, 19 nt, Artificial Sequence
  Description of Artificial Sequence: Synthetic oligonucleotide
  Antisense strand to SEQ ID NO: 61644
ucuuacagacauauacaca

SEQ ID NO: 61726 - RNA, 19 nt, Artificial Sequence
  Description of Artificial Sequence: Synthetic oligonucleotide
  Sense strand starting at position 62 of SEQ ID NO: 764
guguauaugucuguaagac

SEQ ID NO: 61727 - RNA, 19 nt, Artificial Sequence
  Description of Artificial Sequence: Synthetic oligonucleotide
  Antisense strand to SEQ ID NO: 61646
gucuuacagacauauacac

SEQ ID NO: 61728 - RNA, 19 nt, Artificial Sequence
  Description of Artificial Sequence: Synthetic oligonucleotide
  Sense strand starting at position 63 of SEQ ID NO: 764
uguauaugucuguaagacc

SEQ ID NO: 61729 - RNA, 19 nt, Artificial Sequence
  Description of Artificial Sequence: Synthetic oligonucleotide
  Antisense strand to SEQ ID NO: 61648
ggucuuacagacauauaca

SEQ ID NO: 61730 - RNA, 19 nt, Artificial Sequence
  Description of Artificial Sequence: Synthetic oligonucleotide
  Sense strand starting at position 169 of SEQ ID NO: 764
caccuaucucuguguggga

SEQ ID NO: 61731 - RNA, 19 nt, Artificial Sequence
  Description of Artificial Sequence: Synthetic oligonucleotide
  Antisense strand to SEQ ID NO: 61650
ucccacacagagauaggug

SEQ ID NO: 61732 - RNA, 19 nt, Artificial Sequence
  Description of Artificial Sequence: Synthetic oligonucleotide
  Sense strand starting at position 205 of SEQ ID NO: 764
ggauguguguaucucugca

SEQ ID NO: 61733 - RNA, 19 nt, Artificial Sequence
  Description of Artificial Sequence: Synthetic oligonucleotide
  Antisense strand to SEQ ID NO: 61652
ugcagagauacacacaucc

SEQ ID NO: 61734 - RNA, 19 nt, Artificial Sequence
  Description of Artificial Sequence: Synthetic oligonucleotide
  Sense strand starting at position 217 of SEQ ID NO: 764
cucugcauguaugucuaua

SEQ ID NO: 61735 - RNA, 19 nt, Artificial Sequence
  Description of Artificial Sequence: Synthetic oligonucleotide
  Antisense strand to SEQ ID NO: 61654
uauagacauacaugcagag

SEQ ID NO: 61736 - RNA, 19 nt, Artificial Sequence
  Description of Artificial Sequence: Synthetic oligonucleotide
  Sense strand starting at position 219 of SEQ ID NO: 764
cugcauguaugucuauaua

SEQ ID NO: 61737 - RNA, 19 nt, Artificial Sequence
  Description of Artificial Sequence: Synthetic oligonucleotide
  Antisense strand to SEQ ID NO: 61656
uauauagacauacaugcag

SEQ ID NO: 61738 - RNA, 19 nt, Artificial Sequence
  Description of Artificial Sequence: Synthetic oligonucleotide
  Sense strand starting at position 232 of SEQ ID NO: 764
uauauaucugcgcauguuu

SEQ ID NO: 61739 - RNA, 19 nt, Artificial Sequence
  Description of Artificial Sequence: Synthetic oligonucleotide
  Antisense strand to SEQ ID NO: 61658
aaacaugcgcagauauaua

SEQ ID NO: 61740 - RNA, 19 nt, Artificial Sequence
  Description of Artificial Sequence: Synthetic oligonucleotide
  Sense strand starting at position 452 of SEQ ID NO: 764
ccuguuuccugacccugaa

SEQ ID NO: 61741 - RNA, 19 nt, Artificial Sequence
  Description of Artificial Sequence: Synthetic oligonucleotide
  Antisense strand to SEQ ID NO: 61660
uucagggucaggaaacagg

SEQ ID NO: 61742 - RNA, 19 nt, Artificial Sequence
  Description of Artificial Sequence: Synthetic oligonucleotide
  Sense strand starting at position 583 of SEQ ID NO: 764
agaugaagucucugccaau

SEQ ID NO: 61743 - RNA, 19 nt, Artificial Sequence
  Description of Artificial Sequence: Synthetic oligonucleotide
  Antisense strand to SEQ ID NO: 61662
auuggcagagacuucaucu

SEQ ID NO: 61744 - RNA, 19 nt, Artificial Sequence
  Description of Artificial Sequence: Synthetic oligonucleotide
  Sense strand starting at position 584 of SEQ ID NO: 764
gaugaagucucugccaaug

SEQ ID NO: 61745 - RNA, 19 nt, Artificial Sequence
  Description of Artificial Sequence: Synthetic oligonucleotide
  Antisense strand to SEQ ID NO: 61664
cauuggcagagacuucauc

SEQ ID NO: 61746 - RNA, 19 nt, Artificial Sequence
  Description of Artificial Sequence: Synthetic oligonucleotide
  Sense strand starting at position 812 of SEQ ID NO: 764
agcauauauuugcaugagu

SEQ ID NO: 61747 - RNA, 19 nt, Artificial Sequence
  Description of Artificial Sequence: Synthetic oligonucleotide
  Antisense strand to SEQ ID NO: 61666
acucaugcaaauauaugcu

SEQ ID NO: 61748 - RNA, 19 nt, Artificial Sequence
  Description of Artificial Sequence: Synthetic oligonucleotide
  Sense strand starting at position 814 of SEQ ID NO: 764
cauauauuugcaugagugu

SEQ ID NO: 61749 - RNA, 19 nt, Artificial Sequence
  Description of Artificial Sequence: Synthetic oligonucleotide
  Antisense strand to SEQ ID NO: 61668
acacucaugcaaauauaug

SEQ ID NO: 61750 - RNA, 19 nt, Artificial Sequence
  Description of Artificial Sequence: Synthetic oligonucleotide
  Sense strand starting at position 1418 of SEQ ID NO: 764
ccaugugguggcugaguga

SEQ ID NO: 61751 - RNA, 19 nt, Artificial Sequence
  Description of Artificial Sequence: Synthetic oligonucleotide
  Antisense strand to SEQ ID NO: 61670
ucacucagccaccacaugg

SEQ ID NO: 61752 - RNA, 19 nt, Artificial Sequence
  Description of Artificial Sequence: Synthetic oligonucleotide
  Sense strand starting at position 1557 of SEQ ID NO: 764
agcgguauccucugagcaa

SEQ ID NO: 61753 - RNA, 19 nt, Artificial Sequence
  Description of Artificial Sequence: Synthetic oligonucleotide
  Antisense strand to SEQ ID NO: 61672
uugcucagaggauaccgcu

SEQ ID NO: 61754 - RNA, 19 nt, Artificial Sequence
  Description of Artificial Sequence: Synthetic oligonucleotide
  Sense strand starting at position 1663 of SEQ ID NO: 764
agggcuugguuuccuaaga

SEQ ID NO: 61755 - RNA, 19 nt, Artificial Sequence
  Description of Artificial Sequence: Synthetic oligonucleotide
  Antisense strand to SEQ ID NO: 61674
ucuuaggaaaccaagcccu

SEQ ID NO: 61756 - RNA, 19 nt, Artificial Sequence
  Description of Artificial Sequence: Synthetic oligonucleotide
  Sense strand starting at position 1664 of SEQ ID NO: 764
gggcuugguuuccuaagau

SEQ ID NO: 61757 - RNA, 19 nt, Artificial Sequence
  Description of Artificial Sequence: Synthetic oligonucleotide
  Antisense strand to SEQ ID NO: 61676
aucuuaggaaaccaagccc

SEQ ID NO: 61758 - RNA, 19 nt, Artificial Sequence
  Description of Artificial Sequence: Synthetic oligonucleotide
  Sense strand starting at position 1670 of SEQ ID NO: 764
gguuuccuaagaugugaga

SEQ ID NO: 61759 - RNA, 19 nt, Artificial Sequence
  Description of Artificial Sequence: Synthetic oligonucleotide
  Antisense strand to SEQ ID NO: 61678
ucucacaucuuaggaaacc

SEQ ID NO: 61760 - RNA, 19 nt, Artificial Sequence
  Description of Artificial Sequence: Synthetic oligonucleotide
  Sense strand starting at position 1673 of SEQ ID NO: 764
uuccuaagaugugagaaug

SEQ ID NO: 61761 - RNA, 19 nt, Artificial Sequence
  Description of Artificial Sequence: Synthetic oligonucleotide
  Antisense strand to SEQ ID NO: 61680
cauucucacaucuuaggaa

SEQ ID NO: 61762 - RNA, 19 nt, Artificial Sequence
  Description of Artificial Sequence: Synthetic oligonucleotide
  Sense strand starting at position 1794 of SEQ ID NO: 764
uccagucauccuuacagau

SEQ ID NO: 61763 - RNA, 19 nt, Artificial Sequence
  Description of Artificial Sequence: Synthetic oligonucleotide
  Antisense strand to SEQ ID NO: 61682
aucuguaaggaugacugga

SEQ ID NO: 61764 - RNA, 19 nt, Artificial Sequence
  Description of Artificial Sequence: Synthetic oligonucleotide
  Sense strand starting at position 1871 of SEQ ID NO: 764
cagaaagucuuccuggauc

SEQ ID NO: 61765 - RNA, 19 nt, Artificial Sequence
  Description of Artificial Sequence: Synthetic oligonucleotide
  Antisense strand to SEQ ID NO: 61684
gauccaggaagacuuucug

SEQ ID NO: 61766 - RNA, 19 nt, Artificial Sequence
  Description of Artificial Sequence: Synthetic oligonucleotide
  Sense strand starting at position 1974 of SEQ ID NO: 764
ugcucuaagugaucucuca

SEQ ID NO: 61767 - RNA, 19 nt, Artificial Sequence
  Description of Artificial Sequence: Synthetic oligonucleotide
  Antisense strand to SEQ ID NO: 61686
ugagagaucacuuagagca

SEQ ID NO: 61768 - RNA, 19 nt, Artificial Sequence
  Description of Artificial Sequence: Synthetic oligonucleotide
  Sense strand starting at position 1983 of SEQ ID NO: 764
ugaucucucauguguguau

SEQ ID NO: 61769 - RNA, 19 nt, Artificial Sequence
  Description of Artificial Sequence: Synthetic oligonucleotide
  Antisense strand to SEQ ID NO: 61688
auacacacaugagagauca

SEQ ID NO: 61770 - RNA, 19 nt, Artificial Sequence
  Description of Artificial Sequence: Synthetic oligonucleotide
  Sense strand starting at position 1984 of SEQ ID NO: 764
gaucucucauguguguauu

SEQ ID NO: 61771 - RNA, 19 nt, Artificial Sequence
  Description of Artificial Sequence: Synthetic oligonucleotide
  Antisense strand to SEQ ID NO: 61690
aauacacacaugagagauc

SEQ ID NO: 61772 - RNA, 19 nt, Artificial Sequence
  Description of Artificial Sequence: Synthetic oligonucleotide
  Sense strand starting at position 2129 of SEQ ID NO: 764
ggaugaaaccacugugucu

SEQ ID NO: 61773 - RNA, 19 nt, Artificial Sequence
  Description of Artificial Sequence: Synthetic oligonucleotide
  Antisense strand to SEQ ID NO: 61692
agacacagugguuucaucc

SEQ ID NO: 61774 - RNA, 19 nt, Artificial Sequence
  Description of Artificial Sequence: Synthetic oligonucleotide
  Sense strand starting at position 2131 of SEQ ID NO: 764
augaaaccacugugucuaa

SEQ ID NO: 61775 - RNA, 19 nt, Artificial Sequence
  Description of Artificial Sequence: Synthetic oligonucleotide
  Antisense strand to SEQ ID NO: 61694
uuagacacagugguuucau

SEQ ID NO: 61776 - RNA, 19 nt, Artificial Sequence
  Description of Artificial Sequence: Synthetic oligonucleotide
  Sense strand starting at position 2132 of SEQ ID NO: 764
ugaaaccacugugucuaaa

SEQ ID NO: 61777 - RNA, 19 nt, Artificial Sequence
  Description of Artificial Sequence: Synthetic oligonucleotide
  Antisense strand to SEQ ID NO: 61696
uuuagacacagugguuuca

SEQ ID NO: 61778 - RNA, 19 nt, Artificial Sequence
  Description of Artificial Sequence: Synthetic oligonucleotide
  Sense strand starting at position 2311 of SEQ ID NO: 764
ccugcuaucccaggacuuu

SEQ ID NO: 61779 - RNA, 19 nt, Artificial Sequence
  Description of Artificial Sequence: Synthetic oligonucleotide
  Antisense strand to SEQ ID NO: 61698
aaaguccugggauagcagg

SEQ ID NO: 61780 - RNA, 19 nt, Artificial Sequence
  Description of Artificial Sequence: Synthetic oligonucleotide
  Sense strand starting at position 2599 of SEQ ID NO: 764
aaccaagggugagaauaaa

SEQ ID NO: 61781 - RNA, 19 nt, Artificial Sequence
  Description of Artificial Sequence: Synthetic oligonucleotide
  Antisense strand to SEQ ID NO: 61700
uuuauucucacccuugguu

SEQ ID NO: 61782 - RNA, 19 nt, Artificial Sequence
  Description of Artificial Sequence: Synthetic oligonucleotide
  Sense strand starting at position 2817 of SEQ ID NO: 764
ccucauccgucugcacaua

SEQ ID NO: 61783 - RNA, 19 nt, Artificial Sequence
  Description of Artificial Sequence: Synthetic oligonucleotide
  Antisense strand to SEQ ID NO: 61702
uaugugcagacggaugagg

SEQ ID NO: 61784 - RNA, 19 nt, Artificial Sequence
  Description of Artificial Sequence: Synthetic oligonucleotide
  Sense strand starting at position 2832 of SEQ ID NO: 764
cauagaugugcaugcacau

SEQ ID NO: 61785 - RNA, 19 nt, Artificial Sequence
  Description of Artificial Sequence: Synthetic oligonucleotide
  Antisense strand to SEQ ID NO: 61704
augugcaugcacaucuaug

SEQ ID NO: 61786 - RNA, 19 nt, Artificial Sequence
  Description of Artificial Sequence: Synthetic oligonucleotide
  Sense strand starting at position 3761 of SEQ ID NO: 764
aggccacagacaugaugua

SEQ ID NO: 61787 - RNA, 19 nt, Artificial Sequence
  Description of Artificial Sequence: Synthetic oligonucleotide
  Antisense strand to SEQ ID NO: 61706
uacaucaugucuguggccu

SEQ ID NO: 61788 - RNA, 19 nt, Artificial Sequence
  Description of Artificial Sequence: Synthetic oligonucleotide
  Sense strand starting at position 3762 of SEQ ID NO: 764
ggccacagacaugauguau

SEQ ID NO: 61789 - RNA, 19 nt, Artificial Sequence
  Description of Artificial Sequence: Synthetic oligonucleotide
  Antisense strand to SEQ ID NO: 61708
auacaucaugucuguggcc

SEQ ID NO: 61790 - RNA, 19 nt, Artificial Sequence
  Description of Artificial Sequence: Synthetic oligonucleotide
  Sense strand starting at position 3781 of SEQ ID NO: 764
ccugguguuuggcuccaga

SEQ ID NO: 61791 - RNA, 19 nt, Artificial Sequence
  Description of Artificial Sequence: Synthetic oligonucleotide
  Antisense strand to SEQ ID NO: 61710
ucuggagccaaacaccagg

SEQ ID NO: 61792 - RNA, 19 nt, Artificial Sequence
  Description of Artificial Sequence: Synthetic oligonucleotide
  Sense strand starting at position 3784 of SEQ ID NO: 764
gguguuuggcuccagaauc

SEQ ID NO: 61793 - RNA, 19 nt, Artificial Sequence
  Description of Artificial Sequence: Synthetic oligonucleotide
  Antisense strand to SEQ ID NO: 61712
gauucuggagccaaacacc

SEQ ID NO: 61794 - RNA, 19 nt, Artificial Sequence
  Description of Artificial Sequence: Synthetic oligonucleotide
  Sense strand starting at position 212 of SEQ ID NO: 765
ggguccuauugcuuugaua

SEQ ID NO: 61795 - RNA, 19 nt, Artificial Sequence
  Description of Artificial Sequence: Synthetic oligonucleotide
  Antisense strand to SEQ ID NO: 61714
uaucaaagcaauaggaccc

SEQ ID NO: 61796 - RNA, 19 nt, Artificial Sequence
  Description of Artificial Sequence: Synthetic oligonucleotide
  Sense strand starting at position 214 of SEQ ID NO: 765
guccuauugcuuugauaug

SEQ ID NO: 61797 - RNA, 19 nt, Artificial Sequence
  Description of Artificial Sequence: Synthetic oligonucleotide
  Antisense strand to SEQ ID NO: 61716
cauaucaaagcaauaggac

SEQ ID NO: 61798 - RNA, 19 nt, Artificial Sequence
  Description of Artificial Sequence: Synthetic oligonucleotide
  Sense strand starting at position 272 of SEQ ID NO: 765
cgucuuugugugucucuaa

SEQ ID NO: 61799 - RNA, 19 nt, Artificial Sequence
  Description of Artificial Sequence: Synthetic oligonucleotide
  Antisense strand to SEQ ID NO: 61718
uuagagacacacaaagacg

SEQ ID NO: 61800 - RNA, 19 nt, Artificial Sequence
  Description of Artificial Sequence: Synthetic oligonucleotide
  Sense strand starting at position 284 of SEQ ID NO: 765
ucucuaaguaugggugagu

SEQ ID NO: 61801 - RNA, 19 nt, Artificial Sequence
  Description of Artificial Sequence: Synthetic oligonucleotide
  Antisense strand to SEQ ID NO: 61720
acucacccauacuuagaga

SEQ ID NO: 61802 - RNA, 19 nt, Artificial Sequence
  Description of Artificial Sequence: Synthetic oligonucleotide
  Sense strand starting at position 285 of SEQ ID NO: 765
cucuaaguaugggugaguu

SEQ ID NO: 61803 - RNA, 19 nt, Artificial Sequence
  Description of Artificial Sequence: Synthetic oligonucleotide
  Antisense strand to SEQ ID NO: 61722
aacucacccauacuuagag

SEQ ID NO: 61804 - RNA, 19 nt, Artificial Sequence
  Description of Artificial Sequence: Synthetic oligonucleotide
  Sense strand starting at position 360 of SEQ ID NO: 765
cagguuuguguguauacga

SEQ ID NO: 61805 - RNA, 19 nt, Artificial Sequence
  Description of Artificial Sequence: Synthetic oligonucleotide
  Antisense strand to SEQ ID NO: 61724
ucguauacacacaaaccug

SEQ ID NO: 61806 - RNA, 19 nt, Artificial Sequence
  Description of Artificial Sequence: Synthetic oligonucleotide
  Sense strand starting at position 367 of SEQ ID NO: 765
guguguauacgagagugua

SEQ ID NO: 61807 - RNA, 19 nt, Artificial Sequence
  Description of Artificial Sequence: Synthetic oligonucleotide
  Antisense strand to SEQ ID NO: 61726
uacacucucguauacacac

SEQ ID NO: 61808 - RNA, 19 nt, Artificial Sequence
  Description of Artificial Sequence: Synthetic oligonucleotide
  Sense strand starting at position 368 of SEQ ID NO: 765
uguguauacgagaguguau

SEQ ID NO: 61809 - RNA, 19 nt, Artificial Sequence
  Description of Artificial Sequence: Synthetic oligonucleotide
  Antisense strand to SEQ ID NO: 61728
auacacucucguauacaca

SEQ ID NO: 61810 - RNA, 19 nt, Artificial Sequence
  Description of Artificial Sequence: Synthetic oligonucleotide
  Sense strand starting at position 370 of SEQ ID NO: 765
uguauacgagaguguauaa

SEQ ID NO: 61811 - RNA, 19 nt, Artificial Sequence
  Description of Artificial Sequence: Synthetic oligonucleotide
  Antisense strand to SEQ ID NO: 61730
uuauacacucucguauaca

SEQ ID NO: 61812 - RNA, 19 nt, Artificial Sequence
  Description of Artificial Sequence: Synthetic oligonucleotide
  Sense strand starting at position 403 of SEQ ID NO: 765
guguuuggcugcaugugua

SEQ ID NO: 61813 - RNA, 19 nt, Artificial Sequence
  Description of Artificial Sequence: Synthetic oligonucleotide
  Antisense strand to SEQ ID NO: 61732
uacacaugcagccaaacac

SEQ ID NO: 61814 - RNA, 19 nt, Artificial Sequence
  Description of Artificial Sequence: Synthetic oligonucleotide
  Sense strand starting at position 416 of SEQ ID NO: 765
uguguauaugucuguaaga

SEQ ID NO: 61815 - RNA, 19 nt, Artificial Sequence
  Description of Artificial Sequence: Synthetic oligonucleotide
  Antisense strand to SEQ ID NO: 61734
ucuuacagacauauacaca

SEQ ID NO: 61816 - RNA, 19 nt, Artificial Sequence
  Description of Artificial Sequence: Synthetic oligonucleotide
  Sense strand starting at position 417 of SEQ ID NO: 765
guguauaugucuguaagac

SEQ ID NO: 61817 - RNA, 19 nt, Artificial Sequence
  Description of Artificial Sequence: Synthetic oligonucleotide
  Antisense strand to SEQ ID NO: 61736
gucuuacagacauauacac

SEQ ID NO: 61818 - RNA, 19 nt, Artificial Sequence
  Description of Artificial Sequence: Synthetic oligonucleotide
  Sense strand starting at position 418 of SEQ ID NO: 765
uguauaugucuguaagacc

SEQ ID NO: 61819 - RNA, 19 nt, Artificial Sequence
  Description of Artificial Sequence: Synthetic oligonucleotide
  Antisense strand to SEQ ID NO: 61738
ggucuuacagacauauaca

SEQ ID NO: 61820 - RNA, 19 nt, Artificial Sequence
  Description of Artificial Sequence: Synthetic oligonucleotide
  Sense strand starting at position 524 of SEQ ID NO: 765
caccuaucucuguguggga

SEQ ID NO: 61821 - RNA, 19 nt, Artificial Sequence
  Description of Artificial Sequence: Synthetic oligonucleotide
  Antisense strand to SEQ ID NO: 61740
ucccacacagagauaggug

SEQ ID NO: 61822 - RNA, 19 nt, Artificial Sequence
  Description of Artificial Sequence: Synthetic oligonucleotide
  Sense strand starting at position 560 of SEQ ID NO: 765
ggauguguguaucucugca

SEQ ID NO: 61823 - RNA, 19 nt, Artificial Sequence
  Description of Artificial Sequence: Synthetic oligonucleotide
  Antisense strand to SEQ ID NO: 61742
ugcagagauacacacaucc

SEQ ID NO: 61824 - RNA, 19 nt, Artificial Sequence
  Description of Artificial Sequence: Synthetic oligonucleotide
  Sense strand starting at position 572 of SEQ ID NO: 765
cucugcauguaugucuaua

SEQ ID NO: 61825 - RNA, 19 nt, Artificial Sequence
  Description of Artificial Sequence: Synthetic oligonucleotide
  Antisense strand to SEQ ID NO: 61744
uauagacauacaugcagag

SEQ ID NO: 61826 - RNA, 19 nt, Artificial Sequence
  Description of Artificial Sequence: Synthetic oligonucleotide
  Sense strand starting at position 574 of SEQ ID NO: 765
cugcauguaugucuauaua

SEQ ID NO: 61827 - RNA, 19 nt, Artificial Sequence
  Description of Artificial Sequence: Synthetic oligonucleotide
  Antisense strand to SEQ ID NO: 61746
uauauagacauacaugcag

SEQ ID NO: 61828 - RNA, 19 nt, Artificial Sequence
  Description of Artificial Sequence: Synthetic oligonucleotide
  Sense strand starting at position 587 of SEQ ID NO: 765
uauauaucugcgcauguuu

SEQ ID NO: 61829 - RNA, 19 nt, Artificial Sequence
  Description of Artificial Sequence: Synthetic oligonucleotide
  Antisense strand to SEQ ID NO: 61748
aaacaugcgcagauauaua

SEQ ID NO: 61830 - RNA, 19 nt, Artificial Sequence
  Description of Artificial Sequence: Synthetic oligonucleotide
  Sense strand starting at position 807 of SEQ ID NO: 765
ccuguuuccugacccugaa

SEQ ID NO: 61831 - RNA, 19 nt, Artificial Sequence
  Description of Artificial Sequence: Synthetic oligonucleotide
  Antisense strand to SEQ ID NO: 61750
uucagggucaggaaacagg

SEQ ID NO: 61832 - RNA, 19 nt, Artificial Sequence
  Description of Artificial Sequence: Synthetic oligonucleotide
  Sense strand starting at position 938 of SEQ ID NO: 765
agaugaagucucugccaau

SEQ ID NO: 61833 - RNA, 19 nt, Artificial Sequence
  Description of Artificial Sequence: Synthetic oligonucleotide
  Antisense strand to SEQ ID NO: 61752
auuggcagagacuucaucu

SEQ ID NO: 61834 - RNA, 19 nt, Artificial Sequence
  Description of Artificial Sequence: Synthetic oligonucleotide
  Sense strand starting at position 939 of SEQ ID NO: 765
gaugaagucucugccaaug

SEQ ID NO: 61835 - RNA, 19 nt, Artificial Sequence
  Description of Artificial Sequence: Synthetic oligonucleotide
  Antisense strand to SEQ ID NO: 61754
cauuggcagagacuucauc

SEQ ID NO: 61836 - RNA, 19 nt, Artificial Sequence
  Description of Artificial Sequence: Synthetic oligonucleotide
  Sense strand starting at position 1167 of SEQ ID NO: 765
agcauauauuugcaugagu

SEQ ID NO: 61837 - RNA, 19 nt, Artificial Sequence
  Description of Artificial Sequence: Synthetic oligonucleotide
  Antisense strand to SEQ ID NO: 61756
acucaugcaaauauaugcu

SEQ ID NO: 61838 - RNA, 19 nt, Artificial Sequence
  Description of Artificial Sequence: Synthetic oligonucleotide
  Sense strand starting at position 1169 of SEQ ID NO: 765
cauauauuugcaugagugu

SEQ ID NO: 61839 - RNA, 19 nt, Artificial Sequence
  Description of Artificial Sequence: Synthetic oligonucleotide
  Antisense strand to SEQ ID NO: 61758
acacucaugcaaauauaug

SEQ ID NO: 61840 - RNA, 19 nt, Artificial Sequence
  Description of Artificial Sequence: Synthetic oligonucleotide
  Sense strand starting at position 1773 of SEQ ID NO: 765
ccaugugguggcugaguga

SEQ ID NO: 61841 - RNA, 19 nt, Artificial Sequence
  Description of Artificial Sequence: Synthetic oligonucleotide
  Antisense strand to SEQ ID NO: 61760
ucacucagccaccacaugg

SEQ ID NO: 61842 - RNA, 19 nt, Artificial Sequence
  Description of Artificial Sequence: Synthetic oligonucleotide
  Sense strand starting at position 1912 of SEQ ID NO: 765
agcgguauccucugagcaa

SEQ ID NO: 61843 - RNA, 19 nt, Artificial Sequence
  Description of Artificial Sequence: Synthetic oligonucleotide
  Antisense strand to SEQ ID NO: 61762
uugcucagaggauaccgcu

SEQ ID NO: 61844 - RNA, 19 nt, Artificial Sequence
  Description of Artificial Sequence: Synthetic oligonucleotide
  Sense strand starting at position 2018 of SEQ ID NO: 765
agggcuugguuuccuaaga

SEQ ID NO: 61845 - RNA, 19 nt, Artificial Sequence
  Description of Artificial Sequence: Synthetic oligonucleotide
  Antisense strand to SEQ ID NO: 61764
ucuuaggaaaccaagcccu

SEQ ID NO: 61846 - RNA, 19 nt, Artificial Sequence
  Description of Artificial Sequence: Synthetic oligonucleotide
  Sense strand starting at position 2019 of SEQ ID NO: 765
gggcuugguuuccuaagau

SEQ ID NO: 61847 - RNA, 19 nt, Artificial Sequence
  Description of Artificial Sequence: Synthetic oligonucleotide
  Antisense strand to SEQ ID NO: 61766
aucuuaggaaaccaagccc

SEQ ID NO: 61848 - RNA, 19 nt, Artificial Sequence
  Description of Artificial Sequence: Synthetic oligonucleotide
  Sense strand starting at position 2025 of SEQ ID NO: 765
gguuuccuaagaugugaga

SEQ ID NO: 61849 - RNA, 19 nt, Artificial Sequence
  Description of Artificial Sequence: Synthetic oligonucleotide
  Antisense strand to SEQ ID NO: 61768
ucucacaucuuaggaaacc

SEQ ID NO: 61850 - RNA, 19 nt, Artificial Sequence
  Description of Artificial Sequence: Synthetic oligonucleotide
  Sense strand starting at position 2149 of SEQ ID NO: 765
uccagucauccuuacagau

SEQ ID NO: 61851 - RNA, 19 nt, Artificial Sequence
  Description of Artificial Sequence: Synthetic oligonucleotide
  Antisense strand to SEQ ID NO: 61770
aucuguaaggaugacugga

SEQ ID NO: 61852 - RNA, 19 nt, Artificial Sequence
  Description of Artificial Sequence: Synthetic oligonucleotide
  Sense strand starting at position 2226 of SEQ ID NO: 765
cagaaagucuuccuggauc

SEQ ID NO: 61853 - RNA, 19 nt, Artificial Sequence
  Description of Artificial Sequence: Synthetic oligonucleotide
  Antisense strand to SEQ ID NO: 61772
gauccaggaagacuuucug

SEQ ID NO: 61854 - RNA, 19 nt, Artificial Sequence
  Description of Artificial Sequence: Synthetic oligonucleotide
  Sense strand starting at position 2329 of SEQ ID NO: 765
ugcucuaagugaucucuca

SEQ ID NO: 61855 - RNA, 19 nt, Artificial Sequence
  Description of Artificial Sequence: Synthetic oligonucleotide
  Antisense strand to SEQ ID NO: 61774
ugagagaucacuuagagca

SEQ ID NO: 61856 - RNA, 19 nt, Artificial Sequence
  Description of Artificial Sequence: Synthetic oligonucleotide
  Sense strand starting at position 2338 of SEQ ID NO: 765
ugaucucucauguguguau

SEQ ID NO: 61857 - RNA, 19 nt, Artificial Sequence
  Description of Artificial Sequence: Synthetic oligonucleotide
  Antisense strand to SEQ ID NO: 61776
auacacacaugagagauca

SEQ ID NO: 61858 - RNA, 19 nt, Artificial Sequence
  Description of Artificial Sequence: Synthetic oligonucleotide
  Sense strand starting at position 2339 of SEQ ID NO: 765
gaucucucauguguguauu

SEQ ID NO: 61859 - RNA, 19 nt, Artificial Sequence
  Description of Artificial Sequence: Synthetic oligonucleotide
  Antisense strand to SEQ ID NO: 61778
aauacacacaugagagauc

SEQ ID NO: 61860 - RNA, 19 nt, Artificial Sequence
  Description of Artificial Sequence: Synthetic oligonucleotide
  Sense strand starting at position 2484 of SEQ ID NO: 765
ggaugaaaccacugugucu

SEQ ID NO: 61861 - RNA, 19 nt, Artificial Sequence
  Description of Artificial Sequence: Synthetic oligonucleotide
  Antisense strand to SEQ ID NO: 61780
agacacagugguuucaucc

SEQ ID NO: 61862 - RNA, 19 nt, Artificial Sequence
  Description of Artificial Sequence: Synthetic oligonucleotide
  Sense strand starting at position 2486 of SEQ ID NO: 765
augaaaccacugugucuaa

SEQ ID NO: 61863 - RNA, 19 nt, Artificial Sequence
  Description of Artificial Sequence: Synthetic oligonucleotide
  Antisense strand to SEQ ID NO: 61782
uuagacacagugguuucau

SEQ ID NO: 61864 - RNA, 19 nt, Artificial Sequence
  Description of Artificial Sequence: Synthetic oligonucleotide
  Sense strand starting at position 2487 of SEQ ID NO: 765
ugaaaccacugugucuaaa

SEQ ID NO: 61865 - RNA, 19 nt, Artificial Sequence
  Description of Artificial Sequence: Synthetic oligonucleotide
  Antisense strand to SEQ ID NO: 61784
uuuagacacagugguuuca

SEQ ID NO: 61866 - RNA, 19 nt, Artificial Sequence
  Description of Artificial Sequence: Synthetic oligonucleotide
  Sense strand starting at position 2666 of SEQ ID NO: 765
ccugcuaucccaggacuuu

SEQ ID NO: 61867 - RNA, 19 nt, Artificial Sequence
  Description of Artificial Sequence: Synthetic oligonucleotide
  Antisense strand to SEQ ID NO: 61786
aaaguccugggauagcagg

SEQ ID NO: 61868 - RNA, 19 nt, Artificial Sequence
  Description of Artificial Sequence: Synthetic oligonucleotide
  Sense strand starting at position 2954 of SEQ ID NO: 765
aaccaagggugagaauaaa

SEQ ID NO: 61869 - RNA, 19 nt, Artificial Sequence
  Description of Artificial Sequence: Synthetic oligonucleotide
  Antisense strand to SEQ ID NO: 61788
uuuauucucacccuugguu

SEQ ID NO: 61870 - RNA, 19 nt, Artificial Sequence
  Description of Artificial Sequence: Synthetic oligonucleotide
  Sense strand starting at position 3172 of SEQ ID NO: 765
ccucauccgucugcacaua

SEQ ID NO: 61871 - RNA, 19 nt, Artificial Sequence
  Description of Artificial Sequence: Synthetic oligonucleotide
  Antisense strand to SEQ ID NO: 61790
uaugugcagacggaugagg

SEQ ID NO: 61872 - RNA, 19 nt, Artificial Sequence
  Description of Artificial Sequence: Synthetic oligonucleotide
  Sense strand starting at position 3187 of SEQ ID NO: 765
cauagaugugcaugcacau

SEQ ID NO: 61873 - RNA, 19 nt, Artificial Sequence
  Description of Artificial Sequence: Synthetic oligonucleotide
  Antisense strand to SEQ ID NO: 61792
augugcaugcacaucuaug

SEQ ID NO: 61874 - RNA, 19 nt, Artificial Sequence
  Description of Artificial Sequence: Synthetic oligonucleotide
  Sense strand starting at position 15 of SEQ ID NO: 763
acgagauguccuggaauuc

SEQ ID NO: 61875 - RNA, 19 nt, Artificial Sequence
  Description of Artificial Sequence: Synthetic oligonucleotide
  Antisense strand to SEQ ID NO: 61794
gaauuccaggacaucucgu

SEQ ID NO: 61876 - RNA, 19 nt, Artificial Sequence
  Description of Artificial Sequence: Synthetic oligonucleotide
  Sense strand starting at position 16 of SEQ ID NO: 763
cgagauguccuggaauucu

SEQ ID NO: 61877 - RNA, 19 nt, Artificial Sequence
  Description of Artificial Sequence: Synthetic oligonucleotide
  Antisense strand to SEQ ID NO: 61796
agaauuccaggacaucucg

SEQ ID NO: 61878 - RNA, 19 nt, Artificial Sequence
  Description of Artificial Sequence: Synthetic oligonucleotide
  Sense strand starting at position 25 of SEQ ID NO: 763
cuggaauucuggucccuac

SEQ ID NO: 61879 - RNA, 19 nt, Artificial Sequence
  Description of Artificial Sequence: Synthetic oligonucleotide
  Antisense strand to SEQ ID NO: 61798
guagggaccagaauuccag

SEQ ID NO: 61880 - RNA, 19 nt, Artificial Sequence
  Description of Artificial Sequence: Synthetic oligonucleotide
  Sense strand starting at position 28 of SEQ ID NO: 763
gaauucuggucccuacugu

SEQ ID NO: 61881 - RNA, 19 nt, Artificial Sequence
  Description of Artificial Sequence: Synthetic oligonucleotide
  Antisense strand to SEQ ID NO: 61800
acaguagggaccagaauuc

SEQ ID NO: 61882 - RNA, 19 nt, Artificial Sequence
  Description of Artificial Sequence: Synthetic oligonucleotide
  Sense strand starting at position 360 of SEQ ID NO: 763
uguuguuguuuacagacaa

SEQ ID NO: 61883 - RNA, 19 nt, Artificial Sequence
  Description of Artificial Sequence: Synthetic oligonucleotide
  Antisense strand to SEQ ID NO: 61802
uugucuguaaacaacaaca

SEQ ID NO: 61884 - RNA, 19 nt, Artificial Sequence
  Description of Artificial Sequence: Synthetic oligonucleotide
  Sense strand starting at position 491 of SEQ ID NO: 763
ccagccuucuggcuaacua

SEQ ID NO: 61885 - RNA, 19 nt, Artificial Sequence
  Description of Artificial Sequence: Synthetic oligonucleotide
  Antisense strand to SEQ ID NO: 61804
uaguuagccagaaggcugg

SEQ ID NO: 61886 - RNA, 19 nt, Artificial Sequence
  Description of Artificial Sequence: Synthetic oligonucleotide
  Sense strand starting at position 595 of SEQ ID NO: 763
gcucgcugagucagggaua

SEQ ID NO: 61887 - RNA, 19 nt, Artificial Sequence
  Description of Artificial Sequence: Synthetic oligonucleotide
  Antisense strand to SEQ ID NO: 61806
uaucccugacucagcgagc

SEQ ID NO: 61888 - RNA, 19 nt, Artificial Sequence
  Description of Artificial Sequence: Synthetic oligonucleotide
  Sense strand starting at position 772 of SEQ ID NO: 763
ggcccagucuugcuaagaa

SEQ ID NO: 61889 - RNA, 19 nt, Artificial Sequence
  Description of Artificial Sequence: Synthetic oligonucleotide
  Antisense strand to SEQ ID NO: 61808
uucuuagcaagacugggcc

SEQ ID NO: 61890 - RNA, 19 nt, Artificial Sequence
  Description of Artificial Sequence: Synthetic oligonucleotide
  Sense strand starting at position 1041 of SEQ ID NO: 763
gcagcaauucccggaucca

SEQ ID NO: 61891 - RNA, 19 nt, Artificial Sequence
  Description of Artificial Sequence: Synthetic oligonucleotide
  Antisense strand to SEQ ID NO: 61810
uggauccgggaauugcugc

SEQ ID NO: 61892 - RNA, 19 nt, Artificial Sequence
  Description of Artificial Sequence: Synthetic oligonucleotide
  Sense strand starting at position 1334 of SEQ ID NO: 763
gguucuccguccuccagaa

SEQ ID NO: 61893 - RNA, 19 nt, Artificial Sequence
  Description of Artificial Sequence: Synthetic oligonucleotide
  Antisense strand to SEQ ID NO: 61812
uucuggaggacggagaacc

SEQ ID NO: 61894 - RNA, 19 nt, Artificial Sequence
  Description of Artificial Sequence: Synthetic oligonucleotide
  Sense strand starting at position 1631 of SEQ ID NO: 763
cccucuccuccagguuuau

SEQ ID NO: 61895 - RNA, 19 nt, Artificial Sequence
  Description of Artificial Sequence: Synthetic oligonucleotide
  Antisense strand to SEQ ID NO: 61814
auaaaccuggaggagaggg

SEQ ID NO: 61896 - RNA, 19 nt, Artificial Sequence
  Description of Artificial Sequence: Synthetic oligonucleotide
  Sense strand starting at position 1985 of SEQ ID NO: 763
ucggacuucucuuauugca

SEQ ID NO: 61897 - RNA, 19 nt, Artificial Sequence
  Description of Artificial Sequence: Synthetic oligonucleotide
  Antisense strand to SEQ ID NO: 61816
ugcaauaagagaaguccga

SEQ ID NO: 61898 - RNA, 19 nt, Artificial Sequence
  Description of Artificial Sequence: Synthetic oligonucleotide
  Sense strand starting at position 1987 of SEQ ID NO: 763
ggacuucucuuauugcagu

SEQ ID NO: 61899 - RNA, 19 nt, Artificial Sequence
  Description of Artificial Sequence: Synthetic oligonucleotide
  Antisense strand to SEQ ID NO: 61818
acugcaauaagagaagucc

SEQ ID NO: 61900 - RNA, 19 nt, Artificial Sequence
  Description of Artificial Sequence: Synthetic oligonucleotide
  Sense strand starting at position 2240 of SEQ ID NO: 763
ggaucauugaauuggaggu

SEQ ID NO: 61901 - RNA, 19 nt, Artificial Sequence
  Description of Artificial Sequence: Synthetic oligonucleotide
  Antisense strand to SEQ ID NO: 61820
accuccaauucaaugaucc

SEQ ID NO: 61902 - RNA, 19 nt, Artificial Sequence
  Description of Artificial Sequence: Synthetic oligonucleotide
  Sense strand starting at position 2732 of SEQ ID NO: 763
guggaaggaucccucgagu

SEQ ID NO: 61903 - RNA, 19 nt, Artificial Sequence
  Description of Artificial Sequence: Synthetic oligonucleotide
  Antisense strand to SEQ ID NO: 61822
acucgagggauccuuccac

SEQ ID NO: 61904 - RNA, 19 nt, Artificial Sequence
  Description of Artificial Sequence: Synthetic oligonucleotide
  Sense strand starting at position 2735 of SEQ ID NO: 763
gaaggaucccucgagucag

SEQ ID NO: 61905 - RNA, 19 nt, Artificial Sequence
  Description of Artificial Sequence: Synthetic oligonucleotide
  Antisense strand to SEQ ID NO: 61824
cugacucgagggauccuuc

SEQ ID NO: 61906 - RNA, 19 nt, Artificial Sequence
  Description of Artificial Sequence: Synthetic oligonucleotide
  Sense strand starting at position 3218 of SEQ ID NO: 763
cugaguaucuuagaacaug

SEQ ID NO: 61907 - RNA, 19 nt, Artificial Sequence
  Description of Artificial Sequence: Synthetic oligonucleotide
  Antisense strand to SEQ ID NO: 61826
cauguucuaagauacucag

SEQ ID NO: 61908 - RNA, 19 nt, Artificial Sequence
  Description of Artificial Sequence: Synthetic oligonucleotide
  Sense strand starting at position 3270 of SEQ ID NO: 763
gguagcauccucuaucagu

SEQ ID NO: 61909 - RNA, 19 nt, Artificial Sequence
  Description of Artificial Sequence: Synthetic oligonucleotide
  Antisense strand to SEQ ID NO: 61828
acugauagaggaugcuacc

SEQ ID NO: 61910 - RNA, 19 nt, Artificial Sequence
  Description of Artificial Sequence: Synthetic oligonucleotide
  Sense strand starting at position 3295 of SEQ ID NO: 763
cucucugucugauagggau

SEQ ID NO: 61911 - RNA, 19 nt, Artificial Sequence
  Description of Artificial Sequence: Synthetic oligonucleotide
  Antisense strand to SEQ ID NO: 61830
aucccuaucagacagagag

SEQ ID NO: 61912 - RNA, 19 nt, Artificial Sequence
  Description of Artificial Sequence: Synthetic oligonucleotide
  Sense strand starting at position 3375 of SEQ ID NO: 763
aagcaagaacccggaauau

SEQ ID NO: 61913 - RNA, 19 nt, Artificial Sequence
  Description of Artificial Sequence: Synthetic oligonucleotide
  Antisense strand to SEQ ID NO: 61832
auauuccggguucuugcuu

SEQ ID NO: 61914 - RNA, 19 nt, Artificial Sequence
  Description of Artificial Sequence: Synthetic oligonucleotide
  Sense strand starting at position 3429 of SEQ ID NO: 763
agggcuguuugguggagaa

SEQ ID NO: 61915 - RNA, 19 nt, Artificial Sequence
  Description of Artificial Sequence: Synthetic oligonucleotide
  Antisense strand to SEQ ID NO: 61834
uucuccaccaaacagcccu

SEQ ID NO: 61916 - RNA, 19 nt, Artificial Sequence
  Description of Artificial Sequence: Synthetic oligonucleotide
  Sense strand starting at position 3441 of SEQ ID NO: 763
uggagaaggaugugucugu

SEQ ID NO: 61917 - RNA, 19 nt, Artificial Sequence
  Description of Artificial Sequence: Synthetic oligonucleotide
  Antisense strand to SEQ ID NO: 61836
acagacacauccuucucca

SEQ ID NO: 61918 - RNA, 19 nt, Artificial Sequence
  Description of Artificial Sequence: Synthetic oligonucleotide
  Sense strand starting at position 3442 of SEQ ID NO: 763
ggagaaggaugugucuguu

SEQ ID NO: 61919 - RNA, 19 nt, Artificial Sequence
  Description of Artificial Sequence: Synthetic oligonucleotide
  Antisense strand to SEQ ID NO: 61838
aacagacacauccuucucc

SEQ ID NO: 61920 - RNA, 19 nt, Artificial Sequence
  Description of Artificial Sequence: Synthetic oligonucleotide
  Sense strand starting at position 3446 of SEQ ID NO: 763
aaggaugugucuguuggga

SEQ ID NO: 61921 - RNA, 19 nt, Artificial Sequence
  Description of Artificial Sequence: Synthetic oligonucleotide
  Antisense strand to SEQ ID NO: 61840
ucccaacagacacauccuu

SEQ ID NO: 61922 - RNA, 19 nt, Artificial Sequence
  Description of Artificial Sequence: Synthetic oligonucleotide
  Sense strand starting at position 3448 of SEQ ID NO: 763
ggaugugucuguugggaug

SEQ ID NO: 61923 - RNA, 19 nt, Artificial Sequence
  Description of Artificial Sequence: Synthetic oligonucleotide
  Antisense strand to SEQ ID NO: 61842
caucccaacagacacaucc

SEQ ID NO: 61924 - RNA, 19 nt, Artificial Sequence
  Description of Artificial Sequence: Synthetic oligonucleotide
  Sense strand starting at position 3479 of SEQ ID NO: 763
gggagagugugcguaaaca

SEQ ID NO: 61925 - RNA, 19 nt, Artificial Sequence
  Description of Artificial Sequence: Synthetic oligonucleotide
  Antisense strand to SEQ ID NO: 61844
uguuuacgcacacucuccc

SEQ ID NO: 61926 - RNA, 19 nt, Artificial Sequence
  Description of Artificial Sequence: Synthetic oligonucleotide
  Sense strand starting at position 3603 of SEQ ID NO: 763
gcaaguguguuucuuugua

SEQ ID NO: 61927 - RNA, 19 nt, Artificial Sequence
  Description of Artificial Sequence: Synthetic oligonucleotide
  Antisense strand to SEQ ID NO: 61846
uacaaagaaacacacuugc

SEQ ID NO: 61928 - RNA, 19 nt, Artificial Sequence
  Description of Artificial Sequence: Synthetic oligonucleotide
  Sense strand starting at position 3605 of SEQ ID NO: 763
aaguguguuucuuuguaug

SEQ ID NO: 61929 - RNA, 19 nt, Artificial Sequence
  Description of Artificial Sequence: Synthetic oligonucleotide
  Antisense strand to SEQ ID NO: 61848
cauacaaagaaacacacuu

SEQ ID NO: 61930 - RNA, 19 nt, Artificial Sequence
  Description of Artificial Sequence: Synthetic oligonucleotide
  Sense strand starting at position 3891 of SEQ ID NO: 763
cguuuauaauugugucuua

SEQ ID NO: 61931 - RNA, 19 nt, Artificial Sequence
  Description of Artificial Sequence: Synthetic oligonucleotide
  Antisense strand to SEQ ID NO: 61850
uaagacacaauuauaaacg

SEQ ID NO: 61932 - RNA, 19 nt, Artificial Sequence
  Description of Artificial Sequence: Synthetic oligonucleotide
  Sense strand starting at position 3892 of SEQ ID NO: 763
guuuauaauugugucuuag

SEQ ID NO: 61933 - RNA, 19 nt, Artificial Sequence
  Description of Artificial Sequence: Synthetic oligonucleotide
  Antisense strand to SEQ ID NO: 61852
cuaagacacaauuauaaac

SEQ ID NO: 61934 - RNA, 19 nt, Artificial Sequence
  Description of Artificial Sequence: Synthetic oligonucleotide
  Sense strand starting at position 3894 of SEQ ID NO: 763
uuauaauugugucuuaggu

SEQ ID NO: 61935 - RNA, 19 nt, Artificial Sequence
  Description of Artificial Sequence: Synthetic oligonucleotide
  Antisense strand to SEQ ID NO: 61854
accuaagacacaauuauaa

SEQ ID NO: 61936 - RNA, 19 nt, Artificial Sequence
  Description of Artificial Sequence: Synthetic oligonucleotide
  Sense strand starting at position 42 of SEQ ID NO: 766
cuaccaagucaguaucaca

SEQ ID NO: 61937 - RNA, 19 nt, Artificial Sequence
  Description of Artificial Sequence: Synthetic oligonucleotide
  Antisense strand to SEQ ID NO: 61856
ugugauacugacuugguag

SEQ ID NO: 61938 - RNA, 19 nt, Artificial Sequence
  Description of Artificial Sequence: Synthetic oligonucleotide
  Sense strand starting at position 233 of SEQ ID NO: 766
uagggacugucuuauuuac

SEQ ID NO: 61939 - RNA, 19 nt, Artificial Sequence
  Description of Artificial Sequence: Synthetic oligonucleotide
  Antisense strand to SEQ ID NO: 61858
guaaauaagacagucccua

SEQ ID NO: 61940 - RNA, 19 nt, Artificial Sequence
  Description of Artificial Sequence: Synthetic oligonucleotide
  Sense strand starting at position 301 of SEQ ID NO: 766
ugaauuuguauguguucuu

SEQ ID NO: 61941 - RNA, 19 nt, Artificial Sequence
  Description of Artificial Sequence: Synthetic oligonucleotide
  Antisense strand to SEQ ID NO: 61860
aagaacacauacaaauuca

SEQ ID NO: 61942 - RNA, 19 nt, Artificial Sequence
  Description of Artificial Sequence: Synthetic oligonucleotide
  Sense strand starting at position 302 of SEQ ID NO: 766
gaauuuguauguguucuuu

SEQ ID NO: 61943 - RNA, 19 nt, Artificial Sequence
  Description of Artificial Sequence: Synthetic oligonucleotide
  Antisense strand to SEQ ID NO: 61862
aaagaacacauacaaauuc

SEQ ID NO: 61944 - RNA, 19 nt, Artificial Sequence
  Description of Artificial Sequence: Synthetic oligonucleotide
  Sense strand starting at position 340 of SEQ ID NO: 766
ggcaucaaggguuauguga

SEQ ID NO: 61945 - RNA, 19 nt, Artificial Sequence
  Description of Artificial Sequence: Synthetic oligonucleotide
  Antisense strand to SEQ ID NO: 61864
ucacauaacccuugaugcc

SEQ ID NO: 61946 - RNA, 19 nt, Artificial Sequence
  Description of Artificial Sequence: Synthetic oligonucleotide
  Sense strand starting at position 653 of SEQ ID NO: 766
cagggaguucgaggaauac

SEQ ID NO: 61947 - RNA, 19 nt, Artificial Sequence
  Description of Artificial Sequence: Synthetic oligonucleotide
  Antisense strand to SEQ ID NO: 61866
guauuccucgaacucccug

SEQ ID NO: 61948 - RNA, 19 nt, Artificial Sequence
  Description of Artificial Sequence: Synthetic oligonucleotide
  Sense strand starting at position 677 of SEQ ID NO: 766
aucucugauucuguaguau

SEQ ID NO: 61949 - RNA, 19 nt, Artificial Sequence
  Description of Artificial Sequence: Synthetic oligonucleotide
  Antisense strand to SEQ ID NO: 61868
auacuacagaaucagagau

SEQ ID NO: 61950 - RNA, 19 nt, Artificial Sequence
  Description of Artificial Sequence: Synthetic oligonucleotide
  Sense strand starting at position 708 of SEQ ID NO: 766
uagguauagugacccaauc

SEQ ID NO: 61951 - RNA, 19 nt, Artificial Sequence
  Description of Artificial Sequence: Synthetic oligonucleotide
  Antisense strand to SEQ ID NO: 61870
gauugggucacuauaccua

SEQ ID NO: 61952 - RNA, 19 nt, Artificial Sequence
  Description of Artificial Sequence: Synthetic oligonucleotide
  Sense strand starting at position 1061 of SEQ ID NO: 766
gaacuuggaucuuuaaguu

SEQ ID NO: 61953 - RNA, 19 nt, Artificial Sequence
  Description of Artificial Sequence: Synthetic oligonucleotide
  Antisense strand to SEQ ID NO: 61872
aacuuaaagauccaaguuc

SEQ ID NO: 61954 - RNA, 19 nt, Artificial Sequence
  Description of Artificial Sequence: Synthetic oligonucleotide
  Sense strand starting at position 1065 of SEQ ID NO: 766
uuggaucuuuaaguucuua

SEQ ID NO: 61955 - RNA, 19 nt, Artificial Sequence
  Description of Artificial Sequence: Synthetic oligonucleotide
  Antisense strand to SEQ ID NO: 61874
uaagaacuuaaagauccaa

SEQ ID NO: 61956 - RNA, 19 nt, Artificial Sequence
  Description of Artificial Sequence: Synthetic oligonucleotide
  Sense strand starting at position 1161 of SEQ ID NO: 766
gguauucggaauugaagag

SEQ ID NO: 61957 - RNA, 19 nt, Artificial Sequence
  Description of Artificial Sequence: Synthetic oligonucleotide
  Antisense strand to SEQ ID NO: 61876
cucuucaauuccgaauacc

SEQ ID NO: 61958 - RNA, 19 nt, Artificial Sequence
  Description of Artificial Sequence: Synthetic oligonucleotide
  Sense strand starting at position 1162 of SEQ ID NO: 766
guauucggaauugaagagu

SEQ ID NO: 61959 - RNA, 19 nt, Artificial Sequence
  Description of Artificial Sequence: Synthetic oligonucleotide
  Antisense strand to SEQ ID NO: 61878
acucuucaauuccgaauac

SEQ ID NO: 61960 - RNA, 19 nt, Artificial Sequence
  Description of Artificial Sequence: Synthetic oligonucleotide
  Sense strand starting at position 1944 of SEQ ID NO: 766
gagggagcuuggguagaau

SEQ ID NO: 61961 - RNA, 19 nt, Artificial Sequence
  Description of Artificial Sequence: Synthetic oligonucleotide
  Antisense strand to SEQ ID NO: 61880
auucuacccaagcucccuc

SEQ ID NO: 61962 - RNA, 19 nt, Artificial Sequence
  Description of Artificial Sequence: Synthetic oligonucleotide
  Sense strand starting at position 1956 of SEQ ID NO: 766
guagaauuucugggcggcu

SEQ ID NO: 61963 - RNA, 19 nt, Artificial Sequence
  Description of Artificial Sequence: Synthetic oligonucleotide
  Antisense strand to SEQ ID NO: 61882
agccgcccagaaauucuac

SEQ ID NO: 61964 - RNA, 19 nt, Artificial Sequence
  Description of Artificial Sequence: Synthetic oligonucleotide
  Sense strand starting at position 1991 of SEQ ID NO: 766
gccgguugucagaaaccgu

SEQ ID NO: 61965 - RNA, 19 nt, Artificial Sequence
  Description of Artificial Sequence: Synthetic oligonucleotide
  Antisense strand to SEQ ID NO: 61884
acgguuucugacaaccggc

SEQ ID NO: 61966 - RNA, 19 nt, Artificial Sequence
  Description of Artificial Sequence: Synthetic oligonucleotide
  Sense strand starting at position 2073 of SEQ ID NO: 766
aaucgugaaugaccaguaa

SEQ ID NO: 61967 - RNA, 19 nt, Artificial Sequence
  Description of Artificial Sequence: Synthetic oligonucleotide
  Antisense strand to SEQ ID NO: 61886
uuacuggucauucacgauu

SEQ ID NO: 61968 - RNA, 19 nt, Artificial Sequence
  Description of Artificial Sequence: Synthetic oligonucleotide
  Sense strand starting at position 2104 of SEQ ID NO: 766
cggguuaacuuucuaguag

SEQ ID NO: 61969 - RNA, 19 nt, Artificial Sequence
  Description of Artificial Sequence: Synthetic oligonucleotide
  Antisense strand to SEQ ID NO: 61888
cuacuagaaaguuaacccg

SEQ ID NO: 61970 - RNA, 19 nt, Artificial Sequence
  Description of Artificial Sequence: Synthetic oligonucleotide
  Sense strand starting at position 2168 of SEQ ID NO: 766
agggaauuaugggaaagga

SEQ ID NO: 61971 - RNA, 19 nt, Artificial Sequence
  Description of Artificial Sequence: Synthetic oligonucleotide
  Antisense strand to SEQ ID NO: 61890
uccuuucccauaauucccu

SEQ ID NO: 61972 - RNA, 19 nt, Artificial Sequence
  Description of Artificial Sequence: Synthetic oligonucleotide
  Sense strand starting at position 2231 of SEQ ID NO: 766
guuagaaggcgggaguauu

SEQ ID NO: 61973 - RNA, 19 nt, Artificial Sequence
  Description of Artificial Sequence: Synthetic oligonucleotide
  Antisense strand to SEQ ID NO: 61892
aauacucccgccuucuaac

SEQ ID NO: 61974 - RNA, 19 nt, Artificial Sequence
  Description of Artificial Sequence: Synthetic oligonucleotide
  Sense strand starting at position 2240 of SEQ ID NO: 766
cgggaguauuaguugguga

SEQ ID NO: 61975 - RNA, 19 nt, Artificial Sequence
  Description of Artificial Sequence: Synthetic oligonucleotide
  Antisense strand to SEQ ID NO: 61894
ucaccaacuaauacucccg

SEQ ID NO: 61976 - RNA, 19 nt, Artificial Sequence
  Description of Artificial Sequence: Synthetic oligonucleotide
  Sense strand starting at position 2241 of SEQ ID NO: 766
gggaguauuaguuggugaa

SEQ ID NO: 61977 - RNA, 19 nt, Artificial Sequence
  Description of Artificial Sequence: Synthetic oligonucleotide
  Antisense strand to SEQ ID NO: 61896
uucaccaacuaauacuccc

SEQ ID NO: 61978 - RNA, 19 nt, Artificial Sequence
  Description of Artificial Sequence: Synthetic oligonucleotide
  Sense strand starting at position 2242 of SEQ ID NO: 766
ggaguauuaguuggugaau

SEQ ID NO: 61979 - RNA, 19 nt, Artificial Sequence
  Description of Artificial Sequence: Synthetic oligonucleotide
  Antisense strand to SEQ ID NO: 61898
auucaccaacuaauacucc

SEQ ID NO: 61980 - RNA, 19 nt, Artificial Sequence
  Description of Artificial Sequence: Synthetic oligonucleotide
  Sense strand starting at position 2243 of SEQ ID NO: 766
gaguauuaguuggugaauc

SEQ ID NO: 61981 - RNA, 19 nt, Artificial Sequence
  Description of Artificial Sequence: Synthetic oligonucleotide
  Antisense strand to SEQ ID NO: 61900
gauucaccaacuaauacuc

SEQ ID NO: 61982 - RNA, 19 nt, Artificial Sequence
  Description of Artificial Sequence: Synthetic oligonucleotide
  Sense strand starting at position 2245 of SEQ ID NO: 766
guauuaguuggugaaucag

SEQ ID NO: 61983 - RNA, 19 nt, Artificial Sequence
  Description of Artificial Sequence: Synthetic oligonucleotide
  Antisense strand to SEQ ID NO: 61902
cugauucaccaacuaauac

SEQ ID NO: 61984 - RNA, 19 nt, Artificial Sequence
  Description of Artificial Sequence: Synthetic oligonucleotide
  Sense strand starting at position 2321 of SEQ ID NO: 766
guaaucacucauuacacgu

SEQ ID NO: 61985 - RNA, 19 nt, Artificial Sequence
  Description of Artificial Sequence: Synthetic oligonucleotide
  Antisense strand to SEQ ID NO: 61904
acguguaaugagugauuac

SEQ ID NO: 61986 - RNA, 19 nt, Artificial Sequence
  Description of Artificial Sequence: Synthetic oligonucleotide
  Sense strand starting at position 2567 of SEQ ID NO: 766
guggaagacguacacaauu

SEQ ID NO: 61987 - RNA, 19 nt, Artificial Sequence
  Description of Artificial Sequence: Synthetic oligonucleotide
  Antisense strand to SEQ ID NO: 61906
aauuguguacgucuuccac

SEQ ID NO: 61988 - RNA, 19 nt, Artificial Sequence
  Description of Artificial Sequence: Synthetic oligonucleotide
  Sense strand starting at position 2786 of SEQ ID NO: 766
gagagagcgaucggauguu

SEQ ID NO: 61989 - RNA, 19 nt, Artificial Sequence
  Description of Artificial Sequence: Synthetic oligonucleotide
  Antisense strand to SEQ ID NO: 61908
aacauccgaucgcucucuc

SEQ ID NO: 61990 - RNA, 19 nt, Artificial Sequence
  Description of Artificial Sequence: Synthetic oligonucleotide
  Sense strand starting at position 2833 of SEQ ID NO: 766
agccaaauuuaugagucaa

SEQ ID NO: 61991 - RNA, 19 nt, Artificial Sequence
  Description of Artificial Sequence: Synthetic oligonucleotide
  Antisense strand to SEQ ID NO: 61910
uugacucauaaauuuggcu

SEQ ID NO: 61992 - RNA, 19 nt, Artificial Sequence
  Description of Artificial Sequence: Synthetic oligonucleotide
  Sense strand starting at position 3008 of SEQ ID NO: 766
cuaauaauggaaugacguu

SEQ ID NO: 61993 - RNA, 19 nt, Artificial Sequence
  Description of Artificial Sequence: Synthetic oligonucleotide
  Antisense strand to SEQ ID NO: 61912
aacgucauuccauuauuag

SEQ ID NO: 61994 - RNA, 19 nt, Artificial Sequence
  Description of Artificial Sequence: Synthetic oligonucleotide
  Sense strand starting at position 3052 of SEQ ID NO: 766
cagguaucauuauugugua

SEQ ID NO: 61995 - RNA, 19 nt, Artificial Sequence
  Description of Artificial Sequence: Synthetic oligonucleotide
  Antisense strand to SEQ ID NO: 61914
uacacaauaaugauaccug

SEQ ID NO: 61996 - RNA, 19 nt, Artificial Sequence
  Description of Artificial Sequence: Synthetic oligonucleotide
  Sense strand starting at position 3163 of SEQ ID NO: 766
uuuacuguugcauaauuga

SEQ ID NO: 61997 - RNA, 19 nt, Artificial Sequence
  Description of Artificial Sequence: Synthetic oligonucleotide
  Antisense strand to SEQ ID NO: 61916
ucaauuaugcaacaguaaa

SEQ ID NO: 61998 - RNA, 19 nt, Artificial Sequence
  Description of Artificial Sequence: Synthetic oligonucleotide
  Sense strand starting at position 3196 of SEQ ID NO: 766
agauauagccaugaucuuu

SEQ ID NO: 61999 - RNA, 19 nt, Artificial Sequence
  Description of Artificial Sequence: Synthetic oligonucleotide
  Antisense strand to SEQ ID NO: 61918
aaagaucauggcuauaucu

SEQ ID NO: 62000 - RNA, 19 nt, Artificial Sequence
  Description of Artificial Sequence: Synthetic oligonucleotide
  Sense strand starting at position 3445 of SEQ ID NO: 766
cuauuauuugccugcugua

SEQ ID NO: 62001 - RNA, 19 nt, Artificial Sequence
  Description of Artificial Sequence: Synthetic oligonucleotide
  Antisense strand to SEQ ID NO: 61920
uacagcaggcaaauaauag

SEQ ID NO: 62002 - RNA, 19 nt, Artificial Sequence
  Description of Artificial Sequence: Synthetic oligonucleotide
  Sense strand starting at position 3503 of SEQ ID NO: 766
ucgagcaugucucuuauuu

SEQ ID NO: 62003 - RNA, 19 nt, Artificial Sequence
  Description of Artificial Sequence: Synthetic oligonucleotide
  Antisense strand to SEQ ID NO: 61922
aaauaagagacaugcucga

SEQ ID NO: 62004 - RNA, 19 nt, Artificial Sequence
  Description of Artificial Sequence: Synthetic oligonucleotide
  Sense strand starting at position 3507 of SEQ ID NO: 766
gcaugucucuuauuucuac

SEQ ID NO: 62005 - RNA, 19 nt, Artificial Sequence
  Description of Artificial Sequence: Synthetic oligonucleotide
  Antisense strand to SEQ ID NO: 61924
guagaaauaagagacaugc

SEQ ID NO: 62006 - RNA, 19 nt, Artificial Sequence
  Description of Artificial Sequence: Synthetic oligonucleotide
  Sense strand starting at position 3646 of SEQ ID NO: 766
auguauuaauucuuggaac

SEQ ID NO: 62007 - RNA, 19 nt, Artificial Sequence
  Description of Artificial Sequence: Synthetic oligonucleotide
  Antisense strand to SEQ ID NO: 61926
guuccaagaauuaauacau

SEQ ID NO: 62008 - RNA, 19 nt, Artificial Sequence
  Description of Artificial Sequence: Synthetic oligonucleotide
  Sense strand starting at position 3648 of SEQ ID NO: 766
guauuaauucuuggaacac

SEQ ID NO: 62009 - RNA, 19 nt, Artificial Sequence
  Description of Artificial Sequence: Synthetic oligonucleotide
  Antisense strand to SEQ ID NO: 61928
guguuccaagaauuaauac

SEQ ID NO: 62010 - RNA, 19 nt, Artificial Sequence
  Description of Artificial Sequence: Synthetic oligonucleotide
  Sense strand starting at position 3696 of SEQ ID NO: 766
uuauuauuccuguacauag

SEQ ID NO: 62011 - RNA, 19 nt, Artificial Sequence
  Description of Artificial Sequence: Synthetic oligonucleotide
  Antisense strand to SEQ ID NO: 61930
cuauguacaggaauaauaa

SEQ ID NO: 62012 - RNA, 19 nt, Artificial Sequence
  Description of Artificial Sequence: Synthetic oligonucleotide
  Sense strand starting at position 3799 of SEQ ID NO: 766
gcaguaguaauaugaaguu

SEQ ID NO: 62013 - RNA, 19 nt, Artificial Sequence
  Description of Artificial Sequence: Synthetic oligonucleotide
  Antisense strand to SEQ ID NO: 61932
aacuucauauuacuacugc

SEQ ID NO: 62014 - RNA, 19 nt, Artificial Sequence
  Description of Artificial Sequence: Synthetic oligonucleotide
  Sense strand starting at position 3895 of SEQ ID NO: 766
aggaaauauuaacuuagcu

SEQ ID NO: 62015 - RNA, 19 nt, Artificial Sequence
  Description of Artificial Sequence: Synthetic oligonucleotide
  Antisense strand to SEQ ID NO: 61934
agcuaaguuaauauuuccu

SEQ ID NO: 62016 - RNA, 19 nt, Artificial Sequence
  Description of Artificial Sequence: Synthetic oligonucleotide
  Sense strand starting at position 3614 of SEQ ID NO: 767
gaaagauucuaggcguaaa

SEQ ID NO: 62017 - RNA, 19 nt, Artificial Sequence
  Description of Artificial Sequence: Synthetic oligonucleotide
  Antisense strand to SEQ ID NO: 61936
uuuacgccuagaaucuuuc

SEQ ID NO: 62018 - RNA, 19 nt, Artificial Sequence
  Description of Artificial Sequence: Synthetic oligonucleotide
  Sense strand starting at position 3583 of SEQ ID NO: 767
agguucugccuggaucagu

SEQ ID NO: 62019 - RNA, 19 nt, Artificial Sequence
  Description of Artificial Sequence: Synthetic oligonucleotide
  Antisense strand to SEQ ID NO: 61938
acugauccaggcagaaccu

SEQ ID NO: 62020 - RNA, 19 nt, Artificial Sequence
  Description of Artificial Sequence: Synthetic oligonucleotide
  Sense strand starting at position 3581 of SEQ ID NO: 767
gaagguucugccuggauca

SEQ ID NO: 62021 - RNA, 19 nt, Artificial Sequence
  Description of Artificial Sequence: Synthetic oligonucleotide
  Antisense strand to SEQ ID NO: 61940
ugauccaggcagaaccuuc

SEQ ID NO: 62022 - RNA, 19 nt, Artificial Sequence
  Description of Artificial Sequence: Synthetic oligonucleotide
  Sense strand starting at position 3569 of SEQ ID NO: 767
gcccucagucuggaagguu

SEQ ID NO: 62023 - RNA, 19 nt, Artificial Sequence
  Description of Artificial Sequence: Synthetic oligonucleotide
  Antisense strand to SEQ ID NO: 61942
aaccuuccagacugagggc

SEQ ID NO: 62024 - RNA, 19 nt, Artificial Sequence
  Description of Artificial Sequence: Synthetic oligonucleotide
  Sense strand starting at position 3541 of SEQ ID NO: 767
ggagccugucccuacaaau

SEQ ID NO: 62025 - RNA, 19 nt, Artificial Sequence
  Description of Artificial Sequence: Synthetic oligonucleotide
  Antisense strand to SEQ ID NO: 61944
auuuguagggacaggcucc

SEQ ID NO: 62026 - RNA, 19 nt, Artificial Sequence
  Description of Artificial Sequence: Synthetic oligonucleotide
  Sense strand starting at position 3484 of SEQ ID NO: 767
uugcaacaagcuugacaaa

SEQ ID NO: 62027 - RNA, 19 nt, Artificial Sequence
  Description of Artificial Sequence: Synthetic oligonucleotide
  Antisense strand to SEQ ID NO: 61946
uuugucaagcuuguugcaa

SEQ ID NO: 62028 - RNA, 19 nt, Artificial Sequence
  Description of Artificial Sequence: Synthetic oligonucleotide
  Sense strand starting at position 3478 of SEQ ID NO: 767
gugcauuugcaacaagcuu

SEQ ID NO: 62029 - RNA, 19 nt, Artificial Sequence
  Description of Artificial Sequence: Synthetic oligonucleotide
  Antisense strand to SEQ ID NO: 61948
aagcuuguugcaaaugcac

SEQ ID NO: 62030 - RNA, 19 nt, Artificial Sequence
  Description of Artificial Sequence: Synthetic oligonucleotide
  Sense strand starting at position 3405 of SEQ ID NO: 767
uuuagaaaugcggacuucu

SEQ ID NO: 62031 - RNA, 19 nt, Artificial Sequence
  Description of Artificial Sequence: Synthetic oligonucleotide
  Antisense strand to SEQ ID NO: 61950
agaaguccgcauuucuaaa

SEQ ID NO: 62032 - RNA, 19 nt, Artificial Sequence
  Description of Artificial Sequence: Synthetic oligonucleotide
  Sense strand starting at position 3375 of SEQ ID NO: 767
agugaagaugcucaaacgu

SEQ ID NO: 62033 - RNA, 19 nt, Artificial Sequence
  Description of Artificial Sequence: Synthetic oligonucleotide
  Antisense strand to SEQ ID NO: 61952
acguuugagcaucuucacu

SEQ ID NO: 62034 - RNA, 19 nt, Artificial Sequence
  Description of Artificial Sequence: Synthetic oligonucleotide
  Sense strand starting at position 2909 of SEQ ID NO: 767
ugaacuauggcacauucua

SEQ ID NO: 62035 - RNA, 19 nt, Artificial Sequence
  Description of Artificial Sequence: Synthetic oligonucleotide
  Antisense strand to SEQ ID NO: 61954
uagaaugugccauaguuca

SEQ ID NO: 62036 - RNA, 19 nt, Artificial Sequence
  Description of Artificial Sequence: Synthetic oligonucleotide
  Sense strand starting at position 2827 of SEQ ID NO: 767
ccuggagagugauuccuuu

SEQ ID NO: 62037 - RNA, 19 nt, Artificial Sequence
  Description of Artificial Sequence: Synthetic oligonucleotide
  Antisense strand to SEQ ID NO: 61956
aaaggaaucacucuccagg

SEQ ID NO: 62038 - RNA, 19 nt, Artificial Sequence
  Description of Artificial Sequence: Synthetic oligonucleotide
  Sense strand starting at position 2818 of SEQ ID NO: 767
cugacucuaccuggagagu

SEQ ID NO: 62039 - RNA, 19 nt, Artificial Sequence
  Description of Artificial Sequence: Synthetic oligonucleotide
  Antisense strand to SEQ ID NO: 61958
acucuccagguagagucag

SEQ ID NO: 62040 - RNA, 19 nt, Artificial Sequence
  Description of Artificial Sequence: Synthetic oligonucleotide
  Sense strand starting at position 2698 of SEQ ID NO: 767
aguuacuguccuuaagaaa

SEQ ID NO: 62041 - RNA, 19 nt, Artificial Sequence
  Description of Artificial Sequence: Synthetic oligonucleotide
  Antisense strand to SEQ ID NO: 61960
uuucuuaaggacaguaacu

SEQ ID NO: 62042 - RNA, 19 nt, Artificial Sequence
  Description of Artificial Sequence: Synthetic oligonucleotide
  Sense strand starting at position 2653 of SEQ ID NO: 767
gaguccuaugagugucaca

SEQ ID NO: 62043 - RNA, 19 nt, Artificial Sequence
  Description of Artificial Sequence: Synthetic oligonucleotide
  Antisense strand to SEQ ID NO: 61962
ugugacacucauaggacuc

SEQ ID NO: 62044 - RNA, 19 nt, Artificial Sequence
  Description of Artificial Sequence: Synthetic oligonucleotide
  Sense strand starting at position 2594 of SEQ ID NO: 767
uguuaagagugacauuuau

SEQ ID NO: 62045 - RNA, 19 nt, Artificial Sequence
  Description of Artificial Sequence: Synthetic oligonucleotide
  Antisense strand to SEQ ID NO: 61964
auaaaugucacucuuaaca

SEQ ID NO: 62046 - RNA, 19 nt, Artificial Sequence
  Description of Artificial Sequence: Synthetic oligonucleotide
  Sense strand starting at position 2591 of SEQ ID NO: 767
cccuguuaagagugacauu

SEQ ID NO: 62047 - RNA, 19 nt, Artificial Sequence
  Description of Artificial Sequence: Synthetic oligonucleotide
  Antisense strand to SEQ ID NO: 61966
aaugucacucuuaacaggg

SEQ ID NO: 62048 - RNA, 19 nt, Artificial Sequence
  Description of Artificial Sequence: Synthetic oligonucleotide
  Sense strand starting at position 2527 of SEQ ID NO: 767
ggauuucuuccaugugcug

SEQ ID NO: 62049 - RNA, 19 nt, Artificial Sequence
  Description of Artificial Sequence: Synthetic oligonucleotide
  Antisense strand to SEQ ID NO: 61968
cagcacauggaagaaaucc

SEQ ID NO: 62050 - RNA, 19 nt, Artificial Sequence
  Description of Artificial Sequence: Synthetic oligonucleotide
  Sense strand starting at position 1499 of SEQ ID NO: 767
uguuguauuugggaaggga

SEQ ID NO: 62051 - RNA, 19 nt, Artificial Sequence
  Description of Artificial Sequence: Synthetic oligonucleotide
  Antisense strand to SEQ ID NO: 61970
ucccuucccaaauacaaca

SEQ ID NO: 62052 - RNA, 19 nt, Artificial Sequence
  Description of Artificial Sequence: Synthetic oligonucleotide
  Sense strand starting at position 1486 of SEQ ID NO: 767
agaaauuccucaguguugu

SEQ ID NO: 62053 - RNA, 19 nt, Artificial Sequence
  Description of Artificial Sequence: Synthetic oligonucleotide
  Antisense strand to SEQ ID NO: 61972
acaacacugaggaauuucu

SEQ ID NO: 62054 - RNA, 19 nt, Artificial Sequence
  Description of Artificial Sequence: Synthetic oligonucleotide
  Sense strand starting at position 1484 of SEQ ID NO: 767
cuagaaauuccucaguguu

SEQ ID NO: 62055 - RNA, 19 nt, Artificial Sequence
  Description of Artificial Sequence: Synthetic oligonucleotide
  Antisense strand to SEQ ID NO: 61974
aacacugaggaauuucuag

SEQ ID NO: 62056 - RNA, 19 nt, Artificial Sequence
  Description of Artificial Sequence: Synthetic oligonucleotide
  Sense strand starting at position 1483 of SEQ ID NO: 767
ccuagaaauuccucagugu

SEQ ID NO: 62057 - RNA, 19 nt, Artificial Sequence
  Description of Artificial Sequence: Synthetic oligonucleotide
  Antisense strand to SEQ ID NO: 61976
acacugaggaauuucuagg

SEQ ID NO: 62058 - RNA, 19 nt, Artificial Sequence
  Description of Artificial Sequence: Synthetic oligonucleotide
  Sense strand starting at position 1412 of SEQ ID NO: 767
auaggucacaagugagaua

SEQ ID NO: 62059 - RNA, 19 nt, Artificial Sequence
  Description of Artificial Sequence: Synthetic oligonucleotide
  Antisense strand to SEQ ID NO: 61978
uaucucacuugugaccuau

SEQ ID NO: 62060 - RNA, 19 nt, Artificial Sequence
  Description of Artificial Sequence: Synthetic oligonucleotide
  Sense strand starting at position 1406 of SEQ ID NO: 767
cugcuuauaggucacaagu

SEQ ID NO: 62061 - RNA, 19 nt, Artificial Sequence
  Description of Artificial Sequence: Synthetic oligonucleotide
  Antisense strand to SEQ ID NO: 61980
acuugugaccuauaagcag

SEQ ID NO: 62062 - RNA, 19 nt, Artificial Sequence
  Description of Artificial Sequence: Synthetic oligonucleotide
  Sense strand starting at position 1333 of SEQ ID NO: 767
ucuguaaauuaguucuaag

SEQ ID NO: 62063 - RNA, 19 nt, Artificial Sequence
  Description of Artificial Sequence: Synthetic oligonucleotide
  Antisense strand to SEQ ID NO: 61982
cuuagaacuaauuuacaga

SEQ ID NO: 62064 - RNA, 19 nt, Artificial Sequence
  Description of Artificial Sequence: Synthetic oligonucleotide
  Sense strand starting at position 1332 of SEQ ID NO: 767
cucuguaaauuaguucuaa

SEQ ID NO: 62065 - RNA, 19 nt, Artificial Sequence
  Description of Artificial Sequence: Synthetic oligonucleotide
  Antisense strand to SEQ ID NO: 61984
uuagaacuaauuuacagag

SEQ ID NO: 62066 - RNA, 19 nt, Artificial Sequence
  Description of Artificial Sequence: Synthetic oligonucleotide
  Sense strand starting at position 1325 of SEQ ID NO: 767
cguuaaacucuguaaauua

SEQ ID NO: 62067 - RNA, 19 nt, Artificial Sequence
  Description of Artificial Sequence: Synthetic oligonucleotide
  Antisense strand to SEQ ID NO: 61986
uaauuuacagaguuuaacg

SEQ ID NO: 62068 - RNA, 19 nt, Artificial Sequence
  Description of Artificial Sequence: Synthetic oligonucleotide
  Sense strand starting at position 1306 of SEQ ID NO: 767
uguagaaagugauuagaug

SEQ ID NO: 62069 - RNA, 19 nt, Artificial Sequence
  Description of Artificial Sequence: Synthetic oligonucleotide
  Antisense strand to SEQ ID NO: 61988
caucuaaucacuuucuaca

SEQ ID NO: 62070 - RNA, 19 nt, Artificial Sequence
  Description of Artificial Sequence: Synthetic oligonucleotide
  Sense strand starting at position 1074 of SEQ ID NO: 767
aguggugcucaguaaauca

SEQ ID NO: 62071 - RNA, 19 nt, Artificial Sequence
  Description of Artificial Sequence: Synthetic oligonucleotide
  Antisense strand to SEQ ID NO: 61990
ugauuuacugagcaccacu

SEQ ID NO: 62072 - RNA, 19 nt, Artificial Sequence
  Description of Artificial Sequence: Synthetic oligonucleotide
  Sense strand starting at position 1071 of SEQ ID NO: 767
cauaguggugcucaguaaa

SEQ ID NO: 62073 - RNA, 19 nt, Artificial Sequence
  Description of Artificial Sequence: Synthetic oligonucleotide
  Antisense strand to SEQ ID NO: 61992
uuuacugagcaccacuaug

SEQ ID NO: 62074 - RNA, 19 nt, Artificial Sequence
  Description of Artificial Sequence: Synthetic oligonucleotide
  Sense strand starting at position 1007 of SEQ ID NO: 767
cuuugcauuuccucacagu

SEQ ID NO: 62075 - RNA, 19 nt, Artificial Sequence
  Description of Artificial Sequence: Synthetic oligonucleotide
  Antisense strand to SEQ ID NO: 61994
acugugaggaaaugcaaag

SEQ ID NO: 62076 - RNA, 19 nt, Artificial Sequence
  Description of Artificial Sequence: Synthetic oligonucleotide
  Sense strand starting at position 890 of SEQ ID NO: 767
cugugcugugaguaauaac

SEQ ID NO: 62077 - RNA, 19 nt, Artificial Sequence
  Description of Artificial Sequence: Synthetic oligonucleotide
  Antisense strand to SEQ ID NO: 61996
guuauuacucacagcacag

SEQ ID NO: 62078 - RNA, 19 nt, Artificial Sequence
  Description of Artificial Sequence: Synthetic oligonucleotide
  Sense strand starting at position 771 of SEQ ID NO: 767
guuccuuagcugggaaaca

SEQ ID NO: 62079 - RNA, 19 nt, Artificial Sequence
  Description of Artificial Sequence: Synthetic oligonucleotide
  Antisense strand to SEQ ID NO: 61998
uguuucccagcuaaggaac

SEQ ID NO: 62080 - RNA, 19 nt, Artificial Sequence
  Description of Artificial Sequence: Synthetic oligonucleotide
  Sense strand starting at position 769 of SEQ ID NO: 767
ggguuccuuagcugggaaa

SEQ ID NO: 62081 - RNA, 19 nt, Artificial Sequence
  Description of Artificial Sequence: Synthetic oligonucleotide
  Antisense strand to SEQ ID NO: 62000
uuucccagcuaaggaaccc

SEQ ID NO: 62082 - RNA, 19 nt, Artificial Sequence
  Description of Artificial Sequence: Synthetic oligonucleotide
  Sense strand starting at position 636 of SEQ ID NO: 767
cucuaucuagcuugggaga

SEQ ID NO: 62083 - RNA, 19 nt, Artificial Sequence
  Description of Artificial Sequence: Synthetic oligonucleotide
  Antisense strand to SEQ ID NO: 62002
ucucccaagcuagauagag

SEQ ID NO: 62084 - RNA, 19 nt, Artificial Sequence
  Description of Artificial Sequence: Synthetic oligonucleotide
  Sense strand starting at position 330 of SEQ ID NO: 767
gggauagugucccuaucca

SEQ ID NO: 62085 - RNA, 19 nt, Artificial Sequence
  Description of Artificial Sequence: Synthetic oligonucleotide
  Antisense strand to SEQ ID NO: 62004
uggauagggacacuauccc

SEQ ID NO: 62086 - RNA, 19 nt, Artificial Sequence
  Description of Artificial Sequence: Synthetic oligonucleotide
  Sense strand starting at position 328 of SEQ ID NO: 767
uagggauagugucccuauc

SEQ ID NO: 62087 - RNA, 19 nt, Artificial Sequence
  Description of Artificial Sequence: Synthetic oligonucleotide
  Antisense strand to SEQ ID NO: 62006
gauagggacacuaucccua

SEQ ID NO: 62088 - RNA, 19 nt, Artificial Sequence
  Description of Artificial Sequence: Synthetic oligonucleotide
  Sense strand starting at position 299 of SEQ ID NO: 767
acaucuguagggcaaauau

SEQ ID NO: 62089 - RNA, 19 nt, Artificial Sequence
  Description of Artificial Sequence: Synthetic oligonucleotide
  Antisense strand to SEQ ID NO: 62008
auauuugcccuacagaugu

SEQ ID NO: 62090 - RNA, 19 nt, Artificial Sequence
  Description of Artificial Sequence: Synthetic oligonucleotide
  Sense strand starting at position 296 of SEQ ID NO: 767
aggacaucuguagggcaaa

SEQ ID NO: 62091 - RNA, 19 nt, Artificial Sequence
  Description of Artificial Sequence: Synthetic oligonucleotide
  Antisense strand to SEQ ID NO: 62010
uuugcccuacagauguccu

SEQ ID NO: 62092 - RNA, 19 nt, Artificial Sequence
  Description of Artificial Sequence: Synthetic oligonucleotide
  Sense strand starting at position 214 of SEQ ID NO: 767
cucaauucuccauggguuu

SEQ ID NO: 62093 - RNA, 19 nt, Artificial Sequence
  Description of Artificial Sequence: Synthetic oligonucleotide
  Antisense strand to SEQ ID NO: 62012
aaacccauggagaauugag

SEQ ID NO: 62094 - RNA, 19 nt, Artificial Sequence
  Description of Artificial Sequence: Synthetic oligonucleotide
  Sense strand starting at position 62 of SEQ ID NO: 767
cuuuguugucuagcuagca

SEQ ID NO: 62095 - RNA, 19 nt, Artificial Sequence
  Description of Artificial Sequence: Synthetic oligonucleotide
  Antisense strand to SEQ ID NO: 62014
ugcuagcuagacaacaaag

SEQ ID NO: 62096 - RNA, 19 nt, Artificial Sequence
  Description of Artificial Sequence: Synthetic oligonucleotide
  Sense strand starting at position 7 of SEQ ID NO: 768
gccugacucuaguaagcuu

SEQ ID NO: 62097 - RNA, 19 nt, Artificial Sequence
  Description of Artificial Sequence: Synthetic oligonucleotide
  Antisense strand to SEQ ID NO: 62016
aagcuuacuagagucaggc

SEQ ID NO: 62098 - RNA, 19 nt, Artificial Sequence
  Description of Artificial Sequence: Synthetic oligonucleotide
  Sense strand starting at position 21 of SEQ ID NO: 768
agcuuaacucuugagaucu

SEQ ID NO: 62099 - RNA, 19 nt, Artificial Sequence
  Description of Artificial Sequence: Synthetic oligonucleotide
  Antisense strand to SEQ ID NO: 62018
agaucucaagaguuaagcu

SEQ ID NO: 62100 - RNA, 19 nt, Artificial Sequence
  Description of Artificial Sequence: Synthetic oligonucleotide
  Sense strand starting at position 32 of SEQ ID NO: 768
ugagaucucucaugcaggu

SEQ ID NO: 62101 - RNA, 19 nt, Artificial Sequence
  Description of Artificial Sequence: Synthetic oligonucleotide
  Antisense strand to SEQ ID NO: 62020
accugcaugagagaucuca

SEQ ID NO: 62102 - RNA, 19 nt, Artificial Sequence
  Description of Artificial Sequence: Synthetic oligonucleotide
  Sense strand starting at position 364 of SEQ ID NO: 768
agcugcuagcccugugauu

SEQ ID NO: 62103 - RNA, 19 nt, Artificial Sequence
  Description of Artificial Sequence: Synthetic oligonucleotide
  Antisense strand to SEQ ID NO: 62022
aaucacagggcuagcagcu

SEQ ID NO: 62104 - RNA, 19 nt, Artificial Sequence
  Description of Artificial Sequence: Synthetic oligonucleotide
  Sense strand starting at position 370 of SEQ ID NO: 768
uagcccugugauuggaaga

SEQ ID NO: 62105 - RNA, 19 nt, Artificial Sequence
  Description of Artificial Sequence: Synthetic oligonucleotide
  Antisense strand to SEQ ID NO: 62024
ucuuccaaucacagggcua

SEQ ID NO: 62106 - RNA, 19 nt, Artificial Sequence
  Description of Artificial Sequence: Synthetic oligonucleotide
  Sense strand starting at position 803 of SEQ ID NO: 768
ggcucuucuugaucucgaa

SEQ ID NO: 62107 - RNA, 19 nt, Artificial Sequence
  Description of Artificial Sequence: Synthetic oligonucleotide
  Antisense strand to SEQ ID NO: 62026
uucgagaucaagaagagcc

SEQ ID NO: 62108 - RNA, 19 nt, Artificial Sequence
  Description of Artificial Sequence: Synthetic oligonucleotide
  Sense strand starting at position 806 of SEQ ID NO: 768
ucuucuugaucucgaacuu

SEQ ID NO: 62109 - RNA, 19 nt, Artificial Sequence
  Description of Artificial Sequence: Synthetic oligonucleotide
  Antisense strand to SEQ ID NO: 62028
aaguucgagaucaagaaga

SEQ ID NO: 62110 - RNA, 19 nt, Artificial Sequence
  Description of Artificial Sequence: Synthetic oligonucleotide
  Sense strand starting at position 807 of SEQ ID NO: 768
cuucuugaucucgaacuua

SEQ ID NO: 62111 - RNA, 19 nt, Artificial Sequence
  Description of Artificial Sequence: Synthetic oligonucleotide
  Antisense strand to SEQ ID NO: 62030
uaaguucgagaucaagaag

SEQ ID NO: 62112 - RNA, 19 nt, Artificial Sequence
  Description of Artificial Sequence: Synthetic oligonucleotide
  Sense strand starting at position 1089 of SEQ ID NO: 768
ggcccaugccucuguggau

SEQ ID NO: 62113 - RNA, 19 nt, Artificial Sequence
  Description of Artificial Sequence: Synthetic oligonucleotide
  Antisense strand to SEQ ID NO: 62032
auccacagaggcaugggcc

SEQ ID NO: 62114 - RNA, 19 nt, Artificial Sequence
  Description of Artificial Sequence: Synthetic oligonucleotide
  Sense strand starting at position 1118 of SEQ ID NO: 768
ggucucuucuugucuacau

SEQ ID NO: 62115 - RNA, 19 nt, Artificial Sequence
  Description of Artificial Sequence: Synthetic oligonucleotide
  Antisense strand to SEQ ID NO: 62034
auguagacaagaagagacc

SEQ ID NO: 62116 - RNA, 19 nt, Artificial Sequence
  Description of Artificial Sequence: Synthetic oligonucleotide
  Sense strand starting at position 1212 of SEQ ID NO: 768
cugaaugucucugucucua

SEQ ID NO: 62117 - RNA, 19 nt, Artificial Sequence
  Description of Artificial Sequence: Synthetic oligonucleotide
  Antisense strand to SEQ ID NO: 62036
uagagacagagacauucag

SEQ ID NO: 62118 - RNA, 19 nt, Artificial Sequence
  Description of Artificial Sequence: Synthetic oligonucleotide
  Sense strand starting at position 1214 of SEQ ID NO: 768
gaaugucucugucucuagu

SEQ ID NO: 62119 - RNA, 19 nt, Artificial Sequence
  Description of Artificial Sequence: Synthetic oligonucleotide
  Antisense strand to SEQ ID NO: 62038
acuagagacagagacauuc

SEQ ID NO: 62120 - RNA, 19 nt, Artificial Sequence
  Description of Artificial Sequence: Synthetic oligonucleotide
  Sense strand starting at position 1446 of SEQ ID NO: 768
uguuucaguggucucggua

SEQ ID NO: 62121 - RNA, 19 nt, Artificial Sequence
  Description of Artificial Sequence: Synthetic oligonucleotide
  Antisense strand to SEQ ID NO: 62040
uaccgagaccacugaaaca

SEQ ID NO: 62122 - RNA, 19 nt, Artificial Sequence
  Description of Artificial Sequence: Synthetic oligonucleotide
  Sense strand starting at position 2255 of SEQ ID NO: 768
gagggagacugcuguauuc

SEQ ID NO: 62123 - RNA, 19 nt, Artificial Sequence
  Description of Artificial Sequence: Synthetic oligonucleotide
  Antisense strand to SEQ ID NO: 62042
gaauacagcagucucccuc

SEQ ID NO: 62124 - RNA, 19 nt, Artificial Sequence
  Description of Artificial Sequence: Synthetic oligonucleotide
  Sense strand starting at position 2257 of SEQ ID NO: 768
gggagacugcuguauucca

SEQ ID NO: 62125 - RNA, 19 nt, Artificial Sequence
  Description of Artificial Sequence: Synthetic oligonucleotide
  Antisense strand to SEQ ID NO: 62044
uggaauacagcagucuccc

SEQ ID NO: 62126 - RNA, 19 nt, Artificial Sequence
  Description of Artificial Sequence: Synthetic oligonucleotide
  Sense strand starting at position 2445 of SEQ ID NO: 768
gcaccaagguguucucuga

SEQ ID NO: 62127 - RNA, 19 nt, Artificial Sequence
  Description of Artificial Sequence: Synthetic oligonucleotide
  Antisense strand to SEQ ID NO: 62046
ucagagaacaccuuggugc

SEQ ID NO: 62128 - RNA, 19 nt, Artificial Sequence
  Description of Artificial Sequence: Synthetic oligonucleotide
  Sense strand starting at position 2527 of SEQ ID NO: 768
ccacaacuuugaguagcaa

SEQ ID NO: 62129 - RNA, 19 nt, Artificial Sequence
  Description of Artificial Sequence: Synthetic oligonucleotide
  Antisense strand to SEQ ID NO: 62048
uugcuacucaaaguugugg

SEQ ID NO: 62130 - RNA, 19 nt, Artificial Sequence
  Description of Artificial Sequence: Synthetic oligonucleotide
  Sense strand starting at position 2617 of SEQ ID NO: 768
cgcagugcccaggaauagu

SEQ ID NO: 62131 - RNA, 19 nt, Artificial Sequence
  Description of Artificial Sequence: Synthetic oligonucleotide
  Antisense strand to SEQ ID NO: 62050
acuauuccugggcacugcg

SEQ ID NO: 62132 - RNA, 19 nt, Artificial Sequence
  Description of Artificial Sequence: Synthetic oligonucleotide
  Sense strand starting at position 2677 of SEQ ID NO: 768
caugaucuuugggcuucua

SEQ ID NO: 62133 - RNA, 19 nt, Artificial Sequence
  Description of Artificial Sequence: Synthetic oligonucleotide
  Antisense strand to SEQ ID NO: 62052
uagaagcccaaagaucaug

SEQ ID NO: 62134 - RNA, 19 nt, Artificial Sequence
  Description of Artificial Sequence: Synthetic oligonucleotide
  Sense strand starting at position 2873 of SEQ ID NO: 768
ucaggcuugucacuaggaa

SEQ ID NO: 62135 - RNA, 19 nt, Artificial Sequence
  Description of Artificial Sequence: Synthetic oligonucleotide
  Antisense strand to SEQ ID NO: 62054
uuccuagugacaagccuga

SEQ ID NO: 62136 - RNA, 19 nt, Artificial Sequence
  Description of Artificial Sequence: Synthetic oligonucleotide
  Sense strand starting at position 2874 of SEQ ID NO: 768
caggcuugucacuaggaau

SEQ ID NO: 62137 - RNA, 19 nt, Artificial Sequence
  Description of Artificial Sequence: Synthetic oligonucleotide
  Antisense strand to SEQ ID NO: 62056
auuccuagugacaagccug

SEQ ID NO: 62138 - RNA, 19 nt, Artificial Sequence
  Description of Artificial Sequence: Synthetic oligonucleotide
  Sense strand starting at position 2877 of SEQ ID NO: 768
gcuugucacuaggaauaaa

SEQ ID NO: 62139 - RNA, 19 nt, Artificial Sequence
  Description of Artificial Sequence: Synthetic oligonucleotide
  Antisense strand to SEQ ID NO: 62058
uuuauuccuagugacaagc

SEQ ID NO: 62140 - RNA, 19 nt, Artificial Sequence
  Description of Artificial Sequence: Synthetic oligonucleotide
  Sense strand starting at position 2943 of SEQ ID NO: 768
uacugugcuguuuguggaa

SEQ ID NO: 62141 - RNA, 19 nt, Artificial Sequence
  Description of Artificial Sequence: Synthetic oligonucleotide
  Antisense strand to SEQ ID NO: 62060
uuccacaaacagcacagua

SEQ ID NO: 62142 - RNA, 19 nt, Artificial Sequence
  Description of Artificial Sequence: Synthetic oligonucleotide
  Sense strand starting at position 2946 of SEQ ID NO: 768
ugugcuguuuguggaaaca

SEQ ID NO: 62143 - RNA, 19 nt, Artificial Sequence
  Description of Artificial Sequence: Synthetic oligonucleotide
  Antisense strand to SEQ ID NO: 62062
uguuuccacaaacagcaca

SEQ ID NO: 62144 - RNA, 19 nt, Artificial Sequence
  Description of Artificial Sequence: Synthetic oligonucleotide
  Sense strand starting at position 2983 of SEQ ID NO: 768
ccggaauaaccuuagcauc

SEQ ID NO: 62145 - RNA, 19 nt, Artificial Sequence
  Description of Artificial Sequence: Synthetic oligonucleotide
  Antisense strand to SEQ ID NO: 62064
gaugcuaagguuauuccgg

SEQ ID NO: 62146 - RNA, 19 nt, Artificial Sequence
  Description of Artificial Sequence: Synthetic oligonucleotide
  Sense strand starting at position 2985 of SEQ ID NO: 768
ggaauaaccuuagcaucua

SEQ ID NO: 62147 - RNA, 19 nt, Artificial Sequence
  Description of Artificial Sequence: Synthetic oligonucleotide
  Antisense strand to SEQ ID NO: 62066
uagaugcuaagguuauucc

SEQ ID NO: 62148 - RNA, 19 nt, Artificial Sequence
  Description of Artificial Sequence: Synthetic oligonucleotide
  Sense strand starting at position 2995 of SEQ ID NO: 768
uagcaucuagagugaagau

SEQ ID NO: 62149 - RNA, 19 nt, Artificial Sequence
  Description of Artificial Sequence: Synthetic oligonucleotide
  Antisense strand to SEQ ID NO: 62068
aucuucacucuagaugcua

SEQ ID NO: 62150 - RNA, 19 nt, Artificial Sequence
  Description of Artificial Sequence: Synthetic oligonucleotide
  Sense strand starting at position 3058 of SEQ ID NO: 768
cagagcucucacggaggaa

SEQ ID NO: 62151 - RNA, 19 nt, Artificial Sequence
  Description of Artificial Sequence: Synthetic oligonucleotide
  Antisense strand to SEQ ID NO: 62070
uuccuccgugagagcucug

SEQ ID NO: 62152 - RNA, 19 nt, Artificial Sequence
  Description of Artificial Sequence: Synthetic oligonucleotide
  Sense strand starting at position 3265 of SEQ ID NO: 768
acugccuucucaguacuua

SEQ ID NO: 62153 - RNA, 19 nt, Artificial Sequence
  Description of Artificial Sequence: Synthetic oligonucleotide
  Antisense strand to SEQ ID NO: 62072
uaaguacugagaaggcagu

SEQ ID NO: 62154 - RNA, 19 nt, Artificial Sequence
  Description of Artificial Sequence: Synthetic oligonucleotide
  Sense strand starting at position 3285 of SEQ ID NO: 768
uccaauauccggcacauaa

SEQ ID NO: 62155 - RNA, 19 nt, Artificial Sequence
  Description of Artificial Sequence: Synthetic oligonucleotide
  Antisense strand to SEQ ID NO: 62074
uuaugugccggauauugga

SEQ ID NO: 62156 - RNA, 19 nt, Artificial Sequence
  Description of Artificial Sequence: Synthetic oligonucleotide
  Sense strand starting at position 3358 of SEQ ID NO: 768
cuaacauccucgguuugga

SEQ ID NO: 62157 - RNA, 19 nt, Artificial Sequence
  Description of Artificial Sequence: Synthetic oligonucleotide
  Antisense strand to SEQ ID NO: 62076
uccaaaccgaggauguuag

SEQ ID NO: 62158 - RNA, 19 nt, Artificial Sequence
  Description of Artificial Sequence: Synthetic oligonucleotide
  Sense strand starting at position 3764 of SEQ ID NO: 768
cagccucucugggauguau

SEQ ID NO: 62159 - RNA, 19 nt, Artificial Sequence
  Description of Artificial Sequence: Synthetic oligonucleotide
  Antisense strand to SEQ ID NO: 62078
auacaucccagagaggcug

SEQ ID NO: 62160 - RNA, 19 nt, Artificial Sequence
  Description of Artificial Sequence: Synthetic oligonucleotide
  Sense strand starting at position 3773 of SEQ ID NO: 768
ugggauguaucuugcaggu

SEQ ID NO: 62161 - RNA, 19 nt, Artificial Sequence
  Description of Artificial Sequence: Synthetic oligonucleotide
  Antisense strand to SEQ ID NO: 62080
accugcaagauacauccca

SEQ ID NO: 62162 - RNA, 19 nt, Artificial Sequence
  Description of Artificial Sequence: Synthetic oligonucleotide
  Sense strand starting at position 3775 of SEQ ID NO: 768
ggauguaucuugcaggugu

SEQ ID NO: 62163 - RNA, 19 nt, Artificial Sequence
  Description of Artificial Sequence: Synthetic oligonucleotide
  Antisense strand to SEQ ID NO: 62082
acaccugcaagauacaucc

SEQ ID NO: 62164 - RNA, 19 nt, Artificial Sequence
  Description of Artificial Sequence: Synthetic oligonucleotide
  Sense strand starting at position 3777 of SEQ ID NO: 768
auguaucuugcagguguaa

SEQ ID NO: 62165 - RNA, 19 nt, Artificial Sequence
  Description of Artificial Sequence: Synthetic oligonucleotide
  Antisense strand to SEQ ID NO: 62084
uuacaccugcaagauacau

SEQ ID NO: 62166 - RNA, 19 nt, Artificial Sequence
  Description of Artificial Sequence: Synthetic oligonucleotide
  Sense strand starting at position 3779 of SEQ ID NO: 768
guaucuugcagguguaaga

SEQ ID NO: 62167 - RNA, 19 nt, Artificial Sequence
  Description of Artificial Sequence: Synthetic oligonucleotide
  Antisense strand to SEQ ID NO: 62086
ucuuacaccugcaagauac

SEQ ID NO: 62168 - RNA, 19 nt, Artificial Sequence
  Description of Artificial Sequence: Synthetic oligonucleotide
  Sense strand starting at position 3915 of SEQ ID NO: 768
gguuaugagugaguacaga

SEQ ID NO: 62169 - RNA, 19 nt, Artificial Sequence
  Description of Artificial Sequence: Synthetic oligonucleotide
  Antisense strand to SEQ ID NO: 62088
ucuguacucacucauaacc

SEQ ID NO: 62170 - RNA, 19 nt, Artificial Sequence
  Description of Artificial Sequence: Synthetic oligonucleotide
  Sense strand starting at position 3959 of SEQ ID NO: 768
uggaaucucuguucuugau

SEQ ID NO: 62171 - RNA, 19 nt, Artificial Sequence
  Description of Artificial Sequence: Synthetic oligonucleotide
  Antisense strand to SEQ ID NO: 62090
aucaagaacagagauucca

SEQ ID NO: 62172 - RNA, 19 nt, Artificial Sequence
  Description of Artificial Sequence: Synthetic oligonucleotide
  Sense strand starting at position 3963 of SEQ ID NO: 768
aucucuguucuugaugcau

SEQ ID NO: 62173 - RNA, 19 nt, Artificial Sequence
  Description of Artificial Sequence: Synthetic oligonucleotide
  Antisense strand to SEQ ID NO: 62092
augcaucaagaacagagau

SEQ ID NO: 62174 - RNA, 19 nt, Artificial Sequence
  Description of Artificial Sequence: Synthetic oligonucleotide
  Sense strand starting at position 3972 of SEQ ID NO: 768
cuugaugcauggcucuaau

SEQ ID NO: 62175 - RNA, 19 nt, Artificial Sequence
  Description of Artificial Sequence: Synthetic oligonucleotide
  Antisense strand to SEQ ID NO: 62094
auuagagccaugcaucaag

SEQ ID NO: 62176 - RNA, 19 nt, Artificial Sequence
  Description of Artificial Sequence: Synthetic oligonucleotide
  Sense strand starting at position 3308 of SEQ ID NO: 769
uugcuugaguucucucaau

SEQ ID NO: 62177 - RNA, 19 nt, Artificial Sequence
  Description of Artificial Sequence: Synthetic oligonucleotide
  Antisense strand to SEQ ID NO: 62096
auugagagaacucaagcaa

SEQ ID NO: 62178 - RNA, 19 nt, Artificial Sequence
  Description of Artificial Sequence: Synthetic oligonucleotide
  Sense strand starting at position 3302 of SEQ ID NO: 769
ggaggauugcuugaguucu

SEQ ID NO: 62179 - RNA, 19 nt, Artificial Sequence
  Description of Artificial Sequence: Synthetic oligonucleotide
  Antisense strand to SEQ ID NO: 62098
agaacucaagcaauccucc

SEQ ID NO: 62180 - RNA, 19 nt, Artificial Sequence
  Description of Artificial Sequence: Synthetic oligonucleotide
  Sense strand starting at position 3217 of SEQ ID NO: 769
cuuuguaggacugguaaac

SEQ ID NO: 62181 - RNA, 19 nt, Artificial Sequence
  Description of Artificial Sequence: Synthetic oligonucleotide
  Antisense strand to SEQ ID NO: 62100
guuuaccaguccuacaaag

SEQ ID NO: 62182 - RNA, 19 nt, Artificial Sequence
  Description of Artificial Sequence: Synthetic oligonucleotide
  Sense strand starting at position 2846 of SEQ ID NO: 769
cccacugcucuauggacua

SEQ ID NO: 62183 - RNA, 19 nt, Artificial Sequence
  Description of Artificial Sequence: Synthetic oligonucleotide
  Antisense strand to SEQ ID NO: 62102
uaguccauagagcaguggg

SEQ ID NO: 62184 - RNA, 19 nt, Artificial Sequence
  Description of Artificial Sequence: Synthetic oligonucleotide
  Sense strand starting at position 2839 of SEQ ID NO: 769
uggugaucccacugcucua

SEQ ID NO: 62185 - RNA, 19 nt, Artificial Sequence
  Description of Artificial Sequence: Synthetic oligonucleotide
  Antisense strand to SEQ ID NO: 62104
uagagcagugggaucacca

SEQ ID NO: 62186 - RNA, 19 nt, Artificial Sequence
  Description of Artificial Sequence: Synthetic oligonucleotide
  Sense strand starting at position 2833 of SEQ ID NO: 769
augugauggugaucccacu

SEQ ID NO: 62187 - RNA, 19 nt, Artificial Sequence
  Description of Artificial Sequence: Synthetic oligonucleotide
  Antisense strand to SEQ ID NO: 62106
agugggaucaccaucacau

SEQ ID NO: 62188 - RNA, 19 nt, Artificial Sequence
  Description of Artificial Sequence: Synthetic oligonucleotide
  Sense strand starting at position 2816 of SEQ ID NO: 769
gcauuuagcuaguucccau

SEQ ID NO: 62189 - RNA, 19 nt, Artificial Sequence
  Description of Artificial Sequence: Synthetic oligonucleotide
  Antisense strand to SEQ ID NO: 62108
augggaacuagcuaaaugc

SEQ ID NO: 62190 - RNA, 19 nt, Artificial Sequence
  Description of Artificial Sequence: Synthetic oligonucleotide
  Sense strand starting at position 2708 of SEQ ID NO: 769
ucaguugccuuuguucuaa

SEQ ID NO: 62191 - RNA, 19 nt, Artificial Sequence
  Description of Artificial Sequence: Synthetic oligonucleotide
  Antisense strand to SEQ ID NO: 62110
uuagaacaaaggcaacuga

SEQ ID NO: 62192 - RNA, 19 nt, Artificial Sequence
  Description of Artificial Sequence: Synthetic oligonucleotide
  Sense strand starting at position 2661 of SEQ ID NO: 769
uuacauguuuacucuggau

SEQ ID NO: 62193 - RNA, 19 nt, Artificial Sequence
  Description of Artificial Sequence: Synthetic oligonucleotide
  Antisense strand to SEQ ID NO: 62112
auccagaguaaacauguaa

SEQ ID NO: 62194 - RNA, 19 nt, Artificial Sequence
  Description of Artificial Sequence: Synthetic oligonucleotide
  Sense strand starting at position 2650 of SEQ ID NO: 769
uagggagugccuuacaugu

SEQ ID NO: 62195 - RNA, 19 nt, Artificial Sequence
  Description of Artificial Sequence: Synthetic oligonucleotide
  Antisense strand to SEQ ID NO: 62114
acauguaaggcacucccua

SEQ ID NO: 62196 - RNA, 19 nt, Artificial Sequence
  Description of Artificial Sequence: Synthetic oligonucleotide
  Sense strand starting at position 2620 of SEQ ID NO: 769
uggucuuguaggugcaaau

SEQ ID NO: 62197 - RNA, 19 nt, Artificial Sequence
  Description of Artificial Sequence: Synthetic oligonucleotide
  Antisense strand to SEQ ID NO: 62116
auuugcaccuacaagacca

SEQ ID NO: 62198 - RNA, 19 nt, Artificial Sequence
  Description of Artificial Sequence: Synthetic oligonucleotide
  Sense strand starting at position 2611 of SEQ ID NO: 769
cccaguaauuggucuugua

SEQ ID NO: 62199 - RNA, 19 nt, Artificial Sequence
  Description of Artificial Sequence: Synthetic oligonucleotide
  Antisense strand to SEQ ID NO: 62118
uacaagaccaauuacuggg

SEQ ID NO: 62200 - RNA, 19 nt, Artificial Sequence
  Description of Artificial Sequence: Synthetic oligonucleotide
  Sense strand starting at position 2604 of SEQ ID NO: 769
gaccuuucccaguaauugg

SEQ ID NO: 62201 - RNA, 19 nt, Artificial Sequence
  Description of Artificial Sequence: Synthetic oligonucleotide
  Antisense strand to SEQ ID NO: 62120
ccaauuacugggaaagguc

SEQ ID NO: 62202 - RNA, 19 nt, Artificial Sequence
  Description of Artificial Sequence: Synthetic oligonucleotide
  Sense strand starting at position 2496 of SEQ ID NO: 769
uuaucucuaguauaguaga

SEQ ID NO: 62203 - RNA, 19 nt, Artificial Sequence
  Description of Artificial Sequence: Synthetic oligonucleotide
  Antisense strand to SEQ ID NO: 62122
ucuacuauacuagagauaa

SEQ ID NO: 62204 - RNA, 19 nt, Artificial Sequence
  Description of Artificial Sequence: Synthetic oligonucleotide
  Sense strand starting at position 2437 of SEQ ID NO: 769
cugucugucggauaugaag

SEQ ID NO: 62205 - RNA, 19 nt, Artificial Sequence
  Description of Artificial Sequence: Synthetic oligonucleotide
  Antisense strand to SEQ ID NO: 62124
cuucauauccgacagacag

SEQ ID NO: 62206 - RNA, 19 nt, Artificial Sequence
  Description of Artificial Sequence: Synthetic oligonucleotide
  Sense strand starting at position 2382 of SEQ ID NO: 769
gcaucuuauuuauagcaga

SEQ ID NO: 62207 - RNA, 19 nt, Artificial Sequence
  Description of Artificial Sequence: Synthetic oligonucleotide
  Antisense strand to SEQ ID NO: 62126
ucugcuauaaauaagaugc

SEQ ID NO: 62208 - RNA, 19 nt, Artificial Sequence
  Description of Artificial Sequence: Synthetic oligonucleotide
  Sense strand starting at position 2304 of SEQ ID NO: 769
ucaguuagccaugguuuaa

SEQ ID NO: 62209 - RNA, 19 nt, Artificial Sequence
  Description of Artificial Sequence: Synthetic oligonucleotide
  Antisense strand to SEQ ID NO: 62128
uuaaaccauggcuaacuga

SEQ ID NO: 62210 - RNA, 19 nt, Artificial Sequence
  Description of Artificial Sequence: Synthetic oligonucleotide
  Sense strand starting at position 2303 of SEQ ID NO: 769
gucaguuagccaugguuua

SEQ ID NO: 62211 - RNA, 19 nt, Artificial Sequence
  Description of Artificial Sequence: Synthetic oligonucleotide
  Antisense strand to SEQ ID NO: 62130
uaaaccauggcuaacugac

SEQ ID NO: 62212 - RNA, 19 nt, Artificial Sequence
  Description of Artificial Sequence: Synthetic oligonucleotide
  Sense strand starting at position 2301 of SEQ ID NO: 769
gggucaguuagccaugguu

SEQ ID NO: 62213 - RNA, 19 nt, Artificial Sequence
  Description of Artificial Sequence: Synthetic oligonucleotide
  Antisense strand to SEQ ID NO: 62132
aaccauggcuaacugaccc

SEQ ID NO: 62214 - RNA, 19 nt, Artificial Sequence
  Description of Artificial Sequence: Synthetic oligonucleotide
  Sense strand starting at position 2293 of SEQ ID NO: 769
uguuuaaugggucaguuag

SEQ ID NO: 62215 - RNA, 19 nt, Artificial Sequence
  Description of Artificial Sequence: Synthetic oligonucleotide
  Antisense strand to SEQ ID NO: 62134
cuaacugacccauuaaaca

SEQ ID NO: 62216 - RNA, 19 nt, Artificial Sequence
  Description of Artificial Sequence: Synthetic oligonucleotide
  Sense strand starting at position 2291 of SEQ ID NO: 769
uuuguuuaaugggucaguu

SEQ ID NO: 62217 - RNA, 19 nt, Artificial Sequence
  Description of Artificial Sequence: Synthetic oligonucleotide
  Antisense strand to SEQ ID NO: 62136
aacugacccauuaaacaaa

SEQ ID NO: 62218 - RNA, 19 nt, Artificial Sequence
  Description of Artificial Sequence: Synthetic oligonucleotide
  Sense strand starting at position 2183 of SEQ ID NO: 769
gggaguuuagggcgggaaa

SEQ ID NO: 62219 - RNA, 19 nt, Artificial Sequence
  Description of Artificial Sequence: Synthetic oligonucleotide
  Antisense strand to SEQ ID NO: 62138
uuucccgcccuaaacuccc

SEQ ID NO: 62220 - RNA, 19 nt, Artificial Sequence
  Description of Artificial Sequence: Synthetic oligonucleotide
  Sense strand starting at position 2173 of SEQ ID NO: 769
gcgggaccucgggaguuua

SEQ ID NO: 62221 - RNA, 19 nt, Artificial Sequence
  Description of Artificial Sequence: Synthetic oligonucleotide
  Antisense strand to SEQ ID NO: 62140
uaaacucccgaggucccgc

SEQ ID NO: 62222 - RNA, 19 nt, Artificial Sequence
  Description of Artificial Sequence: Synthetic oligonucleotide
  Sense strand starting at position 2124 of SEQ ID NO: 769
cacuucucgcccggaaaua

SEQ ID NO: 62223 - RNA, 19 nt, Artificial Sequence
  Description of Artificial Sequence: Synthetic oligonucleotide
  Antisense strand to SEQ ID NO: 62142
uauuuccgggcgagaagug

SEQ ID NO: 62224 - RNA, 19 nt, Artificial Sequence
  Description of Artificial Sequence: Synthetic oligonucleotide
  Sense strand starting at position 2123 of SEQ ID NO: 769
ucacuucucgcccggaaau

SEQ ID NO: 62225 - RNA, 19 nt, Artificial Sequence
  Description of Artificial Sequence: Synthetic oligonucleotide
  Antisense strand to SEQ ID NO: 62144
auuuccgggcgagaaguga

SEQ ID NO: 62226 - RNA, 19 nt, Artificial Sequence
  Description of Artificial Sequence: Synthetic oligonucleotide
  Sense strand starting at position 2095 of SEQ ID NO: 769
cggauuguuauaggcgaca

SEQ ID NO: 62227 - RNA, 19 nt, Artificial Sequence
  Description of Artificial Sequence: Synthetic oligonucleotide
  Antisense strand to SEQ ID NO: 62146
ugucgccuauaacaauccg

SEQ ID NO: 62228 - RNA, 19 nt, Artificial Sequence
  Description of Artificial Sequence: Synthetic oligonucleotide
  Sense strand starting at position 1991 of SEQ ID NO: 769
cugacauugaauggugauu

SEQ ID NO: 62229 - RNA, 19 nt, Artificial Sequence
  Description of Artificial Sequence: Synthetic oligonucleotide
  Antisense strand to SEQ ID NO: 62148
aaucaccauucaaugucag

SEQ ID NO: 62230 - RNA, 19 nt, Artificial Sequence
  Description of Artificial Sequence: Synthetic oligonucleotide
  Sense strand starting at position 1990 of SEQ ID NO: 769
gcugacauugaauggugau

SEQ ID NO: 62231 - RNA, 19 nt, Artificial Sequence
  Description of Artificial Sequence: Synthetic oligonucleotide
  Antisense strand to SEQ ID NO: 62150
aucaccauucaaugucagc

SEQ ID NO: 62232 - RNA, 19 nt, Artificial Sequence
  Description of Artificial Sequence: Synthetic oligonucleotide
  Sense strand starting at position 1060 of SEQ ID NO: 769
uugaaagaaugaggguuaa

SEQ ID NO: 62233 - RNA, 19 nt, Artificial Sequence
  Description of Artificial Sequence: Synthetic oligonucleotide
  Antisense strand to SEQ ID NO: 62152
uuaacccucauucuuucaa

SEQ ID NO: 62234 - RNA, 19 nt, Artificial Sequence
  Description of Artificial Sequence: Synthetic oligonucleotide
  Sense strand starting at position 1048 of SEQ ID NO: 769
ucaguagaguaauugaaag

SEQ ID NO: 62235 - RNA, 19 nt, Artificial Sequence
  Description of Artificial Sequence: Synthetic oligonucleotide
  Antisense strand to SEQ ID NO: 62154
cuuucaauuacucuacuga

SEQ ID NO: 62236 - RNA, 19 nt, Artificial Sequence
  Description of Artificial Sequence: Synthetic oligonucleotide
  Sense strand starting at position 1028 of SEQ ID NO: 769
gggacuuugcuacaaguuu

SEQ ID NO: 62237 - RNA, 19 nt, Artificial Sequence
  Description of Artificial Sequence: Synthetic oligonucleotide
  Antisense strand to SEQ ID NO: 62156
aaacuuguagcaaaguccc

SEQ ID NO: 62238 - RNA, 19 nt, Artificial Sequence
  Description of Artificial Sequence: Synthetic oligonucleotide
  Sense strand starting at position 962 of SEQ ID NO: 769
gguaaauugcaaugaccuu

SEQ ID NO: 62239 - RNA, 19 nt, Artificial Sequence
  Description of Artificial Sequence: Synthetic oligonucleotide
  Antisense strand to SEQ ID NO: 62158
aaggucauugcaauuuacc

SEQ ID NO: 62240 - RNA, 19 nt, Artificial Sequence
  Description of Artificial Sequence: Synthetic oligonucleotide
  Sense strand starting at position 951 of SEQ ID NO: 769
ccauacugcuugguaaauu

SEQ ID NO: 62241 - RNA, 19 nt, Artificial Sequence
  Description of Artificial Sequence: Synthetic oligonucleotide
  Antisense strand to SEQ ID NO: 62160
aauuuaccaagcaguaugg

SEQ ID NO: 62242 - RNA, 19 nt, Artificial Sequence
  Description of Artificial Sequence: Synthetic oligonucleotide
  Sense strand starting at position 950 of SEQ ID NO: 769
accauacugcuugguaaau

SEQ ID NO: 62243 - RNA, 19 nt, Artificial Sequence
  Description of Artificial Sequence: Synthetic oligonucleotide
  Antisense strand to SEQ ID NO: 62162
auuuaccaagcaguauggu

SEQ ID NO: 62244 - RNA, 19 nt, Artificial Sequence
  Description of Artificial Sequence: Synthetic oligonucleotide
  Sense strand starting at position 948 of SEQ ID NO: 769
cuaccauacugcuugguaa

SEQ ID NO: 62245 - RNA, 19 nt, Artificial Sequence
  Description of Artificial Sequence: Synthetic oligonucleotide
  Antisense strand to SEQ ID NO: 62164
uuaccaagcaguaugguag

SEQ ID NO: 62246 - RNA, 19 nt, Artificial Sequence
  Description of Artificial Sequence: Synthetic oligonucleotide
  Sense strand starting at position 523 of SEQ ID NO: 769
cgcugaguaccuugaguca

SEQ ID NO: 62247 - RNA, 19 nt, Artificial Sequence
  Description of Artificial Sequence: Synthetic oligonucleotide
  Antisense strand to SEQ ID NO: 62166
ugacucaagguacucagcg

SEQ ID NO: 62248 - RNA, 19 nt, Artificial Sequence
  Description of Artificial Sequence: Synthetic oligonucleotide
  Sense strand starting at position 437 of SEQ ID NO: 769
uguuauguccucuaguaag

SEQ ID NO: 62249 - RNA, 19 nt, Artificial Sequence
  Description of Artificial Sequence: Synthetic oligonucleotide
  Antisense strand to SEQ ID NO: 62168
cuuacuagaggacauaaca

SEQ ID NO: 62250 - RNA, 19 nt, Artificial Sequence
  Description of Artificial Sequence: Synthetic oligonucleotide
  Sense strand starting at position 435 of SEQ ID NO: 769
ucuguuauguccucuagua

SEQ ID NO: 62251 - RNA, 19 nt, Artificial Sequence
  Description of Artificial Sequence: Synthetic oligonucleotide
  Antisense strand to SEQ ID NO: 62170
uacuagaggacauaacaga

SEQ ID NO: 62252 - RNA, 19 nt, Artificial Sequence
  Description of Artificial Sequence: Synthetic oligonucleotide
  Sense strand starting at position 427 of SEQ ID NO: 769
ccgugucaucuguuauguc

SEQ ID NO: 62253 - RNA, 19 nt, Artificial Sequence
  Description of Artificial Sequence: Synthetic oligonucleotide
  Antisense strand to SEQ ID NO: 62172
gacauaacagaugacacgg

SEQ ID NO: 62254 - RNA, 19 nt, Artificial Sequence
  Description of Artificial Sequence: Synthetic oligonucleotide
  Sense strand starting at position 423 of SEQ ID NO: 769
aaacccgugucaucuguua

SEQ ID NO: 62255 - RNA, 19 nt, Artificial Sequence
  Description of Artificial Sequence: Synthetic oligonucleotide
  Antisense strand to SEQ ID NO: 62174
uaacagaugacacggguuu

SEQ ID NO: 62256 - RNA, 19 nt, Artificial Sequence
  Description of Artificial Sequence: Synthetic oligonucleotide
  Sense strand starting at position 340 of SEQ ID NO: 770
cuuguuaugcacuagggaa

SEQ ID NO: 62257 - RNA, 19 nt, Artificial Sequence
  Description of Artificial Sequence: Synthetic oligonucleotide
  Antisense strand to SEQ ID NO: 62176
uucccuagugcauaacaag

SEQ ID NO: 62258 - RNA, 19 nt, Artificial Sequence
  Description of Artificial Sequence: Synthetic oligonucleotide
  Sense strand starting at position 342 of SEQ ID NO: 770
uguuaugcacuagggaaau

SEQ ID NO: 62259 - RNA, 19 nt, Artificial Sequence
  Description of Artificial Sequence: Synthetic oligonucleotide
  Antisense strand to SEQ ID NO: 62178
auuucccuagugcauaaca

SEQ ID NO: 62260 - RNA, 19 nt, Artificial Sequence
  Description of Artificial Sequence: Synthetic oligonucleotide
  Sense strand starting at position 365 of SEQ ID NO: 770
auugaaauaacgugugaga

SEQ ID NO: 62261 - RNA, 19 nt, Artificial Sequence
  Description of Artificial Sequence: Synthetic oligonucleotide
  Antisense strand to SEQ ID NO: 62180
ucucacacguuauuucaau

SEQ ID NO: 62262 - RNA, 19 nt, Artificial Sequence
  Description of Artificial Sequence: Synthetic oligonucleotide
  Sense strand starting at position 533 of SEQ ID NO: 770
auuguuugacaguaucuaa

SEQ ID NO: 62263 - RNA, 19 nt, Artificial Sequence
  Description of Artificial Sequence: Synthetic oligonucleotide
  Antisense strand to SEQ ID NO: 62182
uuagauacugucaaacaau

SEQ ID NO: 62264 - RNA, 19 nt, Artificial Sequence
  Description of Artificial Sequence: Synthetic oligonucleotide
  Sense strand starting at position 585 of SEQ ID NO: 770
cugaaauauguacauaugu

SEQ ID NO: 62265 - RNA, 19 nt, Artificial Sequence
  Description of Artificial Sequence: Synthetic oligonucleotide
  Antisense strand to SEQ ID NO: 62184
acauauguacauauuucag

SEQ ID NO: 62266 - RNA, 19 nt, Artificial Sequence
  Description of Artificial Sequence: Synthetic oligonucleotide
  Sense strand starting at position 732 of SEQ ID NO: 770
auagucaguguugggagau

SEQ ID NO: 62267 - RNA, 19 nt, Artificial Sequence
  Description of Artificial Sequence: Synthetic oligonucleotide
  Antisense strand to SEQ ID NO: 62186
aucucccaacacugacuau

SEQ ID NO: 62268 - RNA, 19 nt, Artificial Sequence
  Description of Artificial Sequence: Synthetic oligonucleotide
  Sense strand starting at position 829 of SEQ ID NO: 770
acuggacguggugaugaau

SEQ ID NO: 62269 - RNA, 19 nt, Artificial Sequence
  Description of Artificial Sequence: Synthetic oligonucleotide
  Antisense strand to SEQ ID NO: 62188
auucaucaccacguccagu

SEQ ID NO: 62270 - RNA, 19 nt, Artificial Sequence
  Description of Artificial Sequence: Synthetic oligonucleotide
  Sense strand starting at position 838 of SEQ ID NO: 770
ggugaugaaucagugugau

SEQ ID NO: 62271 - RNA, 19 nt, Artificial Sequence
  Description of Artificial Sequence: Synthetic oligonucleotide
  Antisense strand to SEQ ID NO: 62190
aucacacugauucaucacc

SEQ ID NO: 62272 - RNA, 19 nt, Artificial Sequence
  Description of Artificial Sequence: Synthetic oligonucleotide
  Sense strand starting at position 841 of SEQ ID NO: 770
gaugaaucagugugaugag

SEQ ID NO: 62273 - RNA, 19 nt, Artificial Sequence
  Description of Artificial Sequence: Synthetic oligonucleotide
  Antisense strand to SEQ ID NO: 62192
cucaucacacugauucauc

SEQ ID NO: 62274 - RNA, 19 nt, Artificial Sequence
  Description of Artificial Sequence: Synthetic oligonucleotide
  Sense strand starting at position 872 of SEQ ID NO: 770
auggauaacuucuagauuu

SEQ ID NO: 62275 - RNA, 19 nt, Artificial Sequence
  Description of Artificial Sequence: Synthetic oligonucleotide
  Antisense strand to SEQ ID NO: 62194
aaaucuagaaguuauccau

SEQ ID NO: 62276 - RNA, 19 nt, Artificial Sequence
  Description of Artificial Sequence: Synthetic oligonucleotide
  Sense strand starting at position 1217 of SEQ ID NO: 770
ugcucuuugggacaaguuu

SEQ ID NO: 62277 - RNA, 19 nt, Artificial Sequence
  Description of Artificial Sequence: Synthetic oligonucleotide
  Antisense strand to SEQ ID NO: 62196
aaacuugucccaaagagca

SEQ ID NO: 62278 - RNA, 19 nt, Artificial Sequence
  Description of Artificial Sequence: Synthetic oligonucleotide
  Sense strand starting at position 1674 of SEQ ID NO: 770
cugcuaggaguuuauauag

SEQ ID NO: 62279 - RNA, 19 nt, Artificial Sequence
  Description of Artificial Sequence: Synthetic oligonucleotide
  Antisense strand to SEQ ID NO: 62198
cuauauaaacuccuagcag

SEQ ID NO: 62280 - RNA, 19 nt, Artificial Sequence
  Description of Artificial Sequence: Synthetic oligonucleotide
  Sense strand starting at position 1791 of SEQ ID NO: 770
ugaguagcuccauggaaag

SEQ ID NO: 62281 - RNA, 19 nt, Artificial Sequence
  Description of Artificial Sequence: Synthetic oligonucleotide
  Antisense strand to SEQ ID NO: 62200
cuuuccauggagcuacuca

SEQ ID NO: 62282 - RNA, 19 nt, Artificial Sequence
  Description of Artificial Sequence: Synthetic oligonucleotide
  Sense strand starting at position 1944 of SEQ ID NO: 770
gguuaauaguaaguagaca

SEQ ID NO: 62283 - RNA, 19 nt, Artificial Sequence
  Description of Artificial Sequence: Synthetic oligonucleotide
  Antisense strand to SEQ ID NO: 62202
ugucuacuuacuauuaacc

SEQ ID NO: 62284 - RNA, 19 nt, Artificial Sequence
  Description of Artificial Sequence: Synthetic oligonucleotide
  Sense strand starting at position 2007 of SEQ ID NO: 770
uagaauguagccugaagga

SEQ ID NO: 62285 - RNA, 19 nt, Artificial Sequence
  Description of Artificial Sequence: Synthetic oligonucleotide
  Antisense strand to SEQ ID NO: 62204
uccuucaggcuacauucua

SEQ ID NO: 62286 - RNA, 19 nt, Artificial Sequence
  Description of Artificial Sequence: Synthetic oligonucleotide
  Sense strand starting at position 2034 of SEQ ID NO: 770
gguacugaaggcugagaua

SEQ ID NO: 62287 - RNA, 19 nt, Artificial Sequence
  Description of Artificial Sequence: Synthetic oligonucleotide
  Antisense strand to SEQ ID NO: 62206
uaucucagccuucaguacc

SEQ ID NO: 62288 - RNA, 19 nt, Artificial Sequence
  Description of Artificial Sequence: Synthetic oligonucleotide
  Sense strand starting at position 2261 of SEQ ID NO: 770
ggucccuuuggcuaauaca

SEQ ID NO: 62289 - RNA, 19 nt, Artificial Sequence
  Description of Artificial Sequence: Synthetic oligonucleotide
  Antisense strand to SEQ ID NO: 62208
uguauuagccaaagggacc

SEQ ID NO: 62290 - RNA, 19 nt, Artificial Sequence
  Description of Artificial Sequence: Synthetic oligonucleotide
  Sense strand starting at position 2491 of SEQ ID NO: 770
uccaucuuuggguacugaa

SEQ ID NO: 62291 - RNA, 19 nt, Artificial Sequence
  Description of Artificial Sequence: Synthetic oligonucleotide
  Antisense strand to SEQ ID NO: 62210
uucaguacccaaagaugga

SEQ ID NO: 62292 - RNA, 19 nt, Artificial Sequence
  Description of Artificial Sequence: Synthetic oligonucleotide
  Sense strand starting at position 2508 of SEQ ID NO: 770
aagaacuugccaugagaug

SEQ ID NO: 62293 - RNA, 19 nt, Artificial Sequence
  Description of Artificial Sequence: Synthetic oligonucleotide
  Antisense strand to SEQ ID NO: 62212
caucucauggcaaguucuu

SEQ ID NO: 62294 - RNA, 19 nt, Artificial Sequence
  Description of Artificial Sequence: Synthetic oligonucleotide
  Sense strand starting at position 2539 of SEQ ID NO: 770
uagaaauuauggucaguag

SEQ ID NO: 62295 - RNA, 19 nt, Artificial Sequence
  Description of Artificial Sequence: Synthetic oligonucleotide
  Antisense strand to SEQ ID NO: 62214
cuacugaccauaauuucua

SEQ ID NO: 62296 - RNA, 19 nt, Artificial Sequence
  Description of Artificial Sequence: Synthetic oligonucleotide
  Sense strand starting at position 2623 of SEQ ID NO: 770
uggugaucacuaggagcau

SEQ ID NO: 62297 - RNA, 19 nt, Artificial Sequence
  Description of Artificial Sequence: Synthetic oligonucleotide
  Antisense strand to SEQ ID NO: 62216
augcuccuagugaucacca

SEQ ID NO: 62298 - RNA, 19 nt, Artificial Sequence
  Description of Artificial Sequence: Synthetic oligonucleotide
  Sense strand starting at position 2629 of SEQ ID NO: 770
ucacuaggagcaugaguuu

SEQ ID NO: 62299 - RNA, 19 nt, Artificial Sequence
  Description of Artificial Sequence: Synthetic oligonucleotide
  Antisense strand to SEQ ID NO: 62218
aaacucaugcuccuaguga

SEQ ID NO: 62300 - RNA, 19 nt, Artificial Sequence
  Description of Artificial Sequence: Synthetic oligonucleotide
  Sense strand starting at position 2632 of SEQ ID NO: 770
cuaggagcaugaguuuaau

SEQ ID NO: 62301 - RNA, 19 nt, Artificial Sequence
  Description of Artificial Sequence: Synthetic oligonucleotide
  Antisense strand to SEQ ID NO: 62220
auuaaacucaugcuccuag

SEQ ID NO: 62302 - RNA, 19 nt, Artificial Sequence
  Description of Artificial Sequence: Synthetic oligonucleotide
  Sense strand starting at position 2642 of SEQ ID NO: 770
gaguuuaauuaggcaagac

SEQ ID NO: 62303 - RNA, 19 nt, Artificial Sequence
  Description of Artificial Sequence: Synthetic oligonucleotide
  Antisense strand to SEQ ID NO: 62222
gucuugccuaauuaaacuc

SEQ ID NO: 62304 - RNA, 19 nt, Artificial Sequence
  Description of Artificial Sequence: Synthetic oligonucleotide
  Sense strand starting at position 2803 of SEQ ID NO: 770
ugauauacacacuguuaug

SEQ ID NO: 62305 - RNA, 19 nt, Artificial Sequence
  Description of Artificial Sequence: Synthetic oligonucleotide
  Antisense strand to SEQ ID NO: 62224
cauaacaguguguauauca

SEQ ID NO: 62306 - RNA, 19 nt, Artificial Sequence
  Description of Artificial Sequence: Synthetic oligonucleotide
  Sense strand starting at position 2812 of SEQ ID NO: 770
cacuguuauguugagcaga

SEQ ID NO: 62307 - RNA, 19 nt, Artificial Sequence
  Description of Artificial Sequence: Synthetic oligonucleotide
  Antisense strand to SEQ ID NO: 62226
ucugcucaacauaacagug

SEQ ID NO: 62308 - RNA, 19 nt, Artificial Sequence
  Description of Artificial Sequence: Synthetic oligonucleotide
  Sense strand starting at position 2830 of SEQ ID NO: 770
auugcaucuccauauggau

SEQ ID NO: 62309 - RNA, 19 nt, Artificial Sequence
  Description of Artificial Sequence: Synthetic oligonucleotide
  Antisense strand to SEQ ID NO: 62228
auccauauggagaugcaau

SEQ ID NO: 62310 - RNA, 19 nt, Artificial Sequence
  Description of Artificial Sequence: Synthetic oligonucleotide
  Sense strand starting at position 2929 of SEQ ID NO: 770
gcccauauauugguaauga

SEQ ID NO: 62311 - RNA, 19 nt, Artificial Sequence
  Description of Artificial Sequence: Synthetic oligonucleotide
  Antisense strand to SEQ ID NO: 62230
ucauuaccaauauaugggc

SEQ ID NO: 62312 - RNA, 19 nt, Artificial Sequence
  Description of Artificial Sequence: Synthetic oligonucleotide
  Sense strand starting at position 2963 of SEQ ID NO: 770
ggugucucaagcuagacaa

SEQ ID NO: 62313 - RNA, 19 nt, Artificial Sequence
  Description of Artificial Sequence: Synthetic oligonucleotide
  Antisense strand to SEQ ID NO: 62232
uugucuagcuugagacacc

SEQ ID NO: 62314 - RNA, 19 nt, Artificial Sequence
  Description of Artificial Sequence: Synthetic oligonucleotide
  Sense strand starting at position 3268 of SEQ ID NO: 770
uuacaauaggcaugaaucu

SEQ ID NO: 62315 - RNA, 19 nt, Artificial Sequence
  Description of Artificial Sequence: Synthetic oligonucleotide
  Antisense strand to SEQ ID NO: 62234
agauucaugccuauuguaa

SEQ ID NO: 62316 - RNA, 19 nt, Artificial Sequence
  Description of Artificial Sequence: Synthetic oligonucleotide
  Sense strand starting at position 3332 of SEQ ID NO: 770
gucacucuagaaugagcaa

SEQ ID NO: 62317 - RNA, 19 nt, Artificial Sequence
  Description of Artificial Sequence: Synthetic oligonucleotide
  Antisense strand to SEQ ID NO: 62236
uugcucauucuagagugac

SEQ ID NO: 62318 - RNA, 19 nt, Artificial Sequence
  Description of Artificial Sequence: Synthetic oligonucleotide
  Sense strand starting at position 3335 of SEQ ID NO: 770
acucuagaaugagcaauau

SEQ ID NO: 62319 - RNA, 19 nt, Artificial Sequence
  Description of Artificial Sequence: Synthetic oligonucleotide
  Antisense strand to SEQ ID NO: 62238
auauugcucauucuagagu

SEQ ID NO: 62320 - RNA, 19 nt, Artificial Sequence
  Description of Artificial Sequence: Synthetic oligonucleotide
  Sense strand starting at position 3366 of SEQ ID NO: 770
cccauauugguccacuacu

SEQ ID NO: 62321 - RNA, 19 nt, Artificial Sequence
  Description of Artificial Sequence: Synthetic oligonucleotide
  Antisense strand to SEQ ID NO: 62240
aguaguggaccaauauggg

SEQ ID NO: 62322 - RNA, 19 nt, Artificial Sequence
  Description of Artificial Sequence: Synthetic oligonucleotide
  Sense strand starting at position 3410 of SEQ ID NO: 770
ccacuaccuugacuugaga

SEQ ID NO: 62323 - RNA, 19 nt, Artificial Sequence
  Description of Artificial Sequence: Synthetic oligonucleotide
  Antisense strand to SEQ ID NO: 62242
ucucaagucaagguagugg

SEQ ID NO: 62324 - RNA, 19 nt, Artificial Sequence
  Description of Artificial Sequence: Synthetic oligonucleotide
  Sense strand starting at position 3485 of SEQ ID NO: 770
ugcauaaagccuuaccuga

SEQ ID NO: 62325 - RNA, 19 nt, Artificial Sequence
  Description of Artificial Sequence: Synthetic oligonucleotide
  Antisense strand to SEQ ID NO: 62244
ucagguaaggcuuuaugca

SEQ ID NO: 62326 - RNA, 19 nt, Artificial Sequence
  Description of Artificial Sequence: Synthetic oligonucleotide
  Sense strand starting at position 3687 of SEQ ID NO: 770
acagcaaugccugggacau

SEQ ID NO: 62327 - RNA, 19 nt, Artificial Sequence
  Description of Artificial Sequence: Synthetic oligonucleotide
  Antisense strand to SEQ ID NO: 62246
augucccaggcauugcugu

SEQ ID NO: 62328 - RNA, 19 nt, Artificial Sequence
  Description of Artificial Sequence: Synthetic oligonucleotide
  Sense strand starting at position 3693 of SEQ ID NO: 770
augccugggacaugaucaa

SEQ ID NO: 62329 - RNA, 19 nt, Artificial Sequence
  Description of Artificial Sequence: Synthetic oligonucleotide
  Antisense strand to SEQ ID NO: 62248
uugaucaugucccaggcau

SEQ ID NO: 62330 - RNA, 19 nt, Artificial Sequence
  Description of Artificial Sequence: Synthetic oligonucleotide
  Sense strand starting at position 3798 of SEQ ID NO: 770
cguucuuaaccuuauuaga

SEQ ID NO: 62331 - RNA, 19 nt, Artificial Sequence
  Description of Artificial Sequence: Synthetic oligonucleotide
  Antisense strand to SEQ ID NO: 62250
ucuaauaagguuaagaacg

SEQ ID NO: 62332 - RNA, 19 nt, Artificial Sequence
  Description of Artificial Sequence: Synthetic oligonucleotide
  Sense strand starting at position 3836 of SEQ ID NO: 770
uggaguauugguuaacauc

SEQ ID NO: 62333 - RNA, 19 nt, Artificial Sequence
  Description of Artificial Sequence: Synthetic oligonucleotide
  Antisense strand to SEQ ID NO: 62252
gauguuaaccaauacucca

SEQ ID NO: 62334 - RNA, 19 nt, Artificial Sequence
  Description of Artificial Sequence: Synthetic oligonucleotide
  Sense strand starting at position 3844 of SEQ ID NO: 770
ugguuaacaucuguagaac

SEQ ID NO: 62335 - RNA, 19 nt, Artificial Sequence
  Description of Artificial Sequence: Synthetic oligonucleotide
  Antisense strand to SEQ ID NO: 62254
guucuacagauguuaacca

SEQ ID NO: 62336 - RNA, 19 nt, Artificial Sequence
  Description of Artificial Sequence: Synthetic oligonucleotide
  Sense strand starting at position 426 of SEQ ID NO: 771
uccauuugauaggauaauu

SEQ ID NO: 62337 - RNA, 19 nt, Artificial Sequence
  Description of Artificial Sequence: Synthetic oligonucleotide
  Antisense strand to SEQ ID NO: 62256
aauuauccuaucaaaugga

SEQ ID NO: 62338 - RNA, 19 nt, Artificial Sequence
  Description of Artificial Sequence: Synthetic oligonucleotide
  Sense strand starting at position 520 of SEQ ID NO: 771
gagucuaugagguaggagu

SEQ ID NO: 62339 - RNA, 19 nt, Artificial Sequence
  Description of Artificial Sequence: Synthetic oligonucleotide
  Antisense strand to SEQ ID NO: 62258
acuccuaccucauagacuc

SEQ ID NO: 62340 - RNA, 19 nt, Artificial Sequence
  Description of Artificial Sequence: Synthetic oligonucleotide
  Sense strand starting at position 594 of SEQ ID NO: 771
uuaacagacuuucuggcau

SEQ ID NO: 62341 - RNA, 19 nt, Artificial Sequence
  Description of Artificial Sequence: Synthetic oligonucleotide
  Antisense strand to SEQ ID NO: 62260
augccagaaagucuguuaa

SEQ ID NO: 62342 - RNA, 19 nt, Artificial Sequence
  Description of Artificial Sequence: Synthetic oligonucleotide
  Sense strand starting at position 670 of SEQ ID NO: 771
gcugaucugggucauacaa

SEQ ID NO: 62343 - RNA, 19 nt, Artificial Sequence
  Description of Artificial Sequence: Synthetic oligonucleotide
  Antisense strand to SEQ ID NO: 62262
uuguaugacccagaucagc

SEQ ID NO: 62344 - RNA, 19 nt, Artificial Sequence
  Description of Artificial Sequence: Synthetic oligonucleotide
  Sense strand starting at position 754 of SEQ ID NO: 771
ugaagcucuuucuccagaa

SEQ ID NO: 62345 - RNA, 19 nt, Artificial Sequence
  Description of Artificial Sequence: Synthetic oligonucleotide
  Antisense strand to SEQ ID NO: 62264
uucuggagaaagagcuuca

SEQ ID NO: 62346 - RNA, 19 nt, Artificial Sequence
  Description of Artificial Sequence: Synthetic oligonucleotide
  Sense strand starting at position 839 of SEQ ID NO: 771
caucaauuacggugacaac

SEQ ID NO: 62347 - RNA, 19 nt, Artificial Sequence
  Description of Artificial Sequence: Synthetic oligonucleotide
  Antisense strand to SEQ ID NO: 62266
guugucaccguaauugaug

SEQ ID NO: 62348 - RNA, 19 nt, Artificial Sequence
  Description of Artificial Sequence: Synthetic oligonucleotide
  Sense strand starting at position 891 of SEQ ID NO: 771
uuaagugaaccuggacaca

SEQ ID NO: 62349 - RNA, 19 nt, Artificial Sequence
  Description of Artificial Sequence: Synthetic oligonucleotide
  Antisense strand to SEQ ID NO: 62268
uguguccagguucacuuaa

SEQ ID NO: 62350 - RNA, 19 nt, Artificial Sequence
  Description of Artificial Sequence: Synthetic oligonucleotide
  Sense strand starting at position 1143 of SEQ ID NO: 771
gucucuauauuuccuguca

SEQ ID NO: 62351 - RNA, 19 nt, Artificial Sequence
  Description of Artificial Sequence: Synthetic oligonucleotide
  Antisense strand to SEQ ID NO: 62270
ugacaggaaauauagagac

SEQ ID NO: 62352 - RNA, 19 nt, Artificial Sequence
  Description of Artificial Sequence: Synthetic oligonucleotide
  Sense strand starting at position 1445 of SEQ ID NO: 771
aguagaacucaguagagcu

SEQ ID NO: 62353 - RNA, 19 nt, Artificial Sequence
  Description of Artificial Sequence: Synthetic oligonucleotide
  Antisense strand to SEQ ID NO: 62272
agcucuacugaguucuacu

SEQ ID NO: 62354 - RNA, 19 nt, Artificial Sequence
  Description of Artificial Sequence: Synthetic oligonucleotide
  Sense strand starting at position 1523 of SEQ ID NO: 771
agaagagcucagcaaugca

SEQ ID NO: 62355 - RNA, 19 nt, Artificial Sequence
  Description of Artificial Sequence: Synthetic oligonucleotide
  Antisense strand to SEQ ID NO: 62274
ugcauugcugagcucuucu

SEQ ID NO: 62356 - RNA, 19 nt, Artificial Sequence
  Description of Artificial Sequence: Synthetic oligonucleotide
  Sense strand starting at position 1549 of SEQ ID NO: 771
guuuaacuaguggauaauu

SEQ ID NO: 62357 - RNA, 19 nt, Artificial Sequence
  Description of Artificial Sequence: Synthetic oligonucleotide
  Antisense strand to SEQ ID NO: 62276
aauuauccacuaguuaaac

SEQ ID NO: 62358 - RNA, 19 nt, Artificial Sequence
  Description of Artificial Sequence: Synthetic oligonucleotide
  Sense strand starting at position 1920 of SEQ ID NO: 771
auaaauguagcuggaugaa

SEQ ID NO: 62359 - RNA, 19 nt, Artificial Sequence
  Description of Artificial Sequence: Synthetic oligonucleotide
  Antisense strand to SEQ ID NO: 62278
uucauccagcuacauuuau

SEQ ID NO: 62360 - RNA, 19 nt, Artificial Sequence
  Description of Artificial Sequence: Synthetic oligonucleotide
  Sense strand starting at position 1971 of SEQ ID NO: 771
uaggauaaagccugaugca

SEQ ID NO: 62361 - RNA, 19 nt, Artificial Sequence
  Description of Artificial Sequence: Synthetic oligonucleotide
  Antisense strand to SEQ ID NO: 62280
ugcaucaggcuuuauccua

SEQ ID NO: 62362 - RNA, 19 nt, Artificial Sequence
  Description of Artificial Sequence: Synthetic oligonucleotide
  Sense strand starting at position 2010 of SEQ ID NO: 771
uugggauaaugacccuuau

SEQ ID NO: 62363 - RNA, 19 nt, Artificial Sequence
  Description of Artificial Sequence: Synthetic oligonucleotide
  Antisense strand to SEQ ID NO: 62282
auaagggucauuaucccaa

SEQ ID NO: 62364 - RNA, 19 nt, Artificial Sequence
  Description of Artificial Sequence: Synthetic oligonucleotide
  Sense strand starting at position 2032 of SEQ ID NO: 771
gcuuauagugauuauagug

SEQ ID NO: 62365 - RNA, 19 nt, Artificial Sequence
  Description of Artificial Sequence: Synthetic oligonucleotide
  Antisense strand to SEQ ID NO: 62284
cacuauaaucacuauaagc

SEQ ID NO: 62366 - RNA, 19 nt, Artificial Sequence
  Description of Artificial Sequence: Synthetic oligonucleotide
  Sense strand starting at position 2111 of SEQ ID NO: 771
ucacauuguuaucuacaga

SEQ ID NO: 62367 - RNA, 19 nt, Artificial Sequence
  Description of Artificial Sequence: Synthetic oligonucleotide
  Antisense strand to SEQ ID NO: 62286
ucuguagauaacaauguga

SEQ ID NO: 62368 - RNA, 19 nt, Artificial Sequence
  Description of Artificial Sequence: Synthetic oligonucleotide
  Sense strand starting at position 2122 of SEQ ID NO: 771
ucuacagaugauugcagaa

SEQ ID NO: 62369 - RNA, 19 nt, Artificial Sequence
  Description of Artificial Sequence: Synthetic oligonucleotide
  Antisense strand to SEQ ID NO: 62288
uucugcaaucaucuguaga

SEQ ID NO: 62370 - RNA, 19 nt, Artificial Sequence
  Description of Artificial Sequence: Synthetic oligonucleotide
  Sense strand starting at position 2202 of SEQ ID NO: 771
gggucauauacaugugaaa

SEQ ID NO: 62371 - RNA, 19 nt, Artificial Sequence
  Description of Artificial Sequence: Synthetic oligonucleotide
  Antisense strand to SEQ ID NO: 62290
uuucacauguauaugaccc

SEQ ID NO: 62372 - RNA, 19 nt, Artificial Sequence
  Description of Artificial Sequence: Synthetic oligonucleotide
  Sense strand starting at position 2282 of SEQ ID NO: 771
aguagcagaguguaagaua

SEQ ID NO: 62373 - RNA, 19 nt, Artificial Sequence
  Description of Artificial Sequence: Synthetic oligonucleotide
  Antisense strand to SEQ ID NO: 62292
uaucuuacacucugcuacu

SEQ ID NO: 62374 - RNA, 19 nt, Artificial Sequence
  Description of Artificial Sequence: Synthetic oligonucleotide
  Sense strand starting at position 2290 of SEQ ID NO: 771
aguguaagauacuuggaag

SEQ ID NO: 62375 - RNA, 19 nt, Artificial Sequence
  Description of Artificial Sequence: Synthetic oligonucleotide
  Antisense strand to SEQ ID NO: 62294
cuuccaaguaucuuacacu

SEQ ID NO: 62376 - RNA, 19 nt, Artificial Sequence
  Description of Artificial Sequence: Synthetic oligonucleotide
  Sense strand starting at position 2467 of SEQ ID NO: 771
uuuaguuauggguacauag

SEQ ID NO: 62377 - RNA, 19 nt, Artificial Sequence
  Description of Artificial Sequence: Synthetic oligonucleotide
  Antisense strand to SEQ ID NO: 62296
cuauguacccauaacuaaa

SEQ ID NO: 62378 - RNA, 19 nt, Artificial Sequence
  Description of Artificial Sequence: Synthetic oligonucleotide
  Sense strand starting at position 2469 of SEQ ID NO: 771
uaguuauggguacauaguu

SEQ ID NO: 62379 - RNA, 19 nt, Artificial Sequence
  Description of Artificial Sequence: Synthetic oligonucleotide
  Antisense strand to SEQ ID NO: 62298
aacuauguacccauaacua

SEQ ID NO: 62380 - RNA, 19 nt, Artificial Sequence
  Description of Artificial Sequence: Synthetic oligonucleotide
  Sense strand starting at position 2489 of SEQ ID NO: 771
uauauaauuguuggguaca

SEQ ID NO: 62381 - RNA, 19 nt, Artificial Sequence
  Description of Artificial Sequence: Synthetic oligonucleotide
  Antisense strand to SEQ ID NO: 62300
uguacccaacaauuauaua

SEQ ID NO: 62382 - RNA, 19 nt, Artificial Sequence
  Description of Artificial Sequence: Synthetic oligonucleotide
  Sense strand starting at position 2575 of SEQ ID NO: 771
ucaagcauuucuuuguagu

SEQ ID NO: 62383 - RNA, 19 nt, Artificial Sequence
  Description of Artificial Sequence: Synthetic oligonucleotide
  Antisense strand to SEQ ID NO: 62302
acuacaaagaaaugcuuga

SEQ ID NO: 62384 - RNA, 19 nt, Artificial Sequence
  Description of Artificial Sequence: Synthetic oligonucleotide
  Sense strand starting at position 2644 of SEQ ID NO: 771
aguuaacuauaguuaccau

SEQ ID NO: 62385 - RNA, 19 nt, Artificial Sequence
  Description of Artificial Sequence: Synthetic oligonucleotide
  Antisense strand to SEQ ID NO: 62304
augguaacuauaguuaacu

SEQ ID NO: 62386 - RNA, 19 nt, Artificial Sequence
  Description of Artificial Sequence: Synthetic oligonucleotide
  Sense strand starting at position 2765 of SEQ ID NO: 771
gcauaaggaucuucuccaa

SEQ ID NO: 62387 - RNA, 19 nt, Artificial Sequence
  Description of Artificial Sequence: Synthetic oligonucleotide
  Antisense strand to SEQ ID NO: 62306
uuggagaagauccuuaugc

SEQ ID NO: 62388 - RNA, 19 nt, Artificial Sequence
  Description of Artificial Sequence: Synthetic oligonucleotide
  Sense strand starting at position 2843 of SEQ ID NO: 771
gcuguuuaccauuauacua

SEQ ID NO: 62389 - RNA, 19 nt, Artificial Sequence
  Description of Artificial Sequence: Synthetic oligonucleotide
  Antisense strand to SEQ ID NO: 62308
uaguauaaugguaaacagc

SEQ ID NO: 62390 - RNA, 19 nt, Artificial Sequence
  Description of Artificial Sequence: Synthetic oligonucleotide
  Sense strand starting at position 2921 of SEQ ID NO: 771
gaguguaaggcccacucaa

SEQ ID NO: 62391 - RNA, 19 nt, Artificial Sequence
  Description of Artificial Sequence: Synthetic oligonucleotide
  Antisense strand to SEQ ID NO: 62310
uugagugggccuuacacuc

SEQ ID NO: 62392 - RNA, 19 nt, Artificial Sequence
  Description of Artificial Sequence: Synthetic oligonucleotide
  Sense strand starting at position 2994 of SEQ ID NO: 771
auucucugaccuugugaag

SEQ ID NO: 62393 - RNA, 19 nt, Artificial Sequence
  Description of Artificial Sequence: Synthetic oligonucleotide
  Antisense strand to SEQ ID NO: 62312
cuucacaaggucagagaau

SEQ ID NO: 62394 - RNA, 19 nt, Artificial Sequence
  Description of Artificial Sequence: Synthetic oligonucleotide
  Sense strand starting at position 3033 of SEQ ID NO: 771
aguguaauuggcuauauau

SEQ ID NO: 62395 - RNA, 19 nt, Artificial Sequence
  Description of Artificial Sequence: Synthetic oligonucleotide
  Antisense strand to SEQ ID NO: 62314
auauauagccaauuacacu

SEQ ID NO: 62396 - RNA, 19 nt, Artificial Sequence
  Description of Artificial Sequence: Synthetic oligonucleotide
  Sense strand starting at position 3067 of SEQ ID NO: 771
agauauguucagggugaau

SEQ ID NO: 62397 - RNA, 19 nt, Artificial Sequence
  Description of Artificial Sequence: Synthetic oligonucleotide
  Antisense strand to SEQ ID NO: 62316
auucacccugaacauaucu

SEQ ID NO: 62398 - RNA, 19 nt, Artificial Sequence
  Description of Artificial Sequence: Synthetic oligonucleotide
  Sense strand starting at position 3215 of SEQ ID NO: 771
aucagagagcuguaagucu

SEQ ID NO: 62399 - RNA, 19 nt, Artificial Sequence
  Description of Artificial Sequence: Synthetic oligonucleotide
  Antisense strand to SEQ ID NO: 62318
agacuuacagcucucugau

SEQ ID NO: 62400 - RNA, 19 nt, Artificial Sequence
  Description of Artificial Sequence: Synthetic oligonucleotide
  Sense strand starting at position 3408 of SEQ ID NO: 771
agcauagagcaauguaaac

SEQ ID NO: 62401 - RNA, 19 nt, Artificial Sequence
  Description of Artificial Sequence: Synthetic oligonucleotide
  Antisense strand to SEQ ID NO: 62320
guuuacauugcucuaugcu

SEQ ID NO: 62402 - RNA, 19 nt, Artificial Sequence
  Description of Artificial Sequence: Synthetic oligonucleotide
  Sense strand starting at position 3654 of SEQ ID NO: 771
ugaauaggcccuugaaaua

SEQ ID NO: 62403 - RNA, 19 nt, Artificial Sequence
  Description of Artificial Sequence: Synthetic oligonucleotide
  Antisense strand to SEQ ID NO: 62322
uauuucaagggccuauuca

SEQ ID NO: 62404 - RNA, 19 nt, Artificial Sequence
  Description of Artificial Sequence: Synthetic oligonucleotide
  Sense strand starting at position 3672 of SEQ ID NO: 771
augucaauugcucacauag

SEQ ID NO: 62405 - RNA, 19 nt, Artificial Sequence
  Description of Artificial Sequence: Synthetic oligonucleotide
  Antisense strand to SEQ ID NO: 62324
cuaugugagcaauugacau

SEQ ID NO: 62406 - RNA, 19 nt, Artificial Sequence
  Description of Artificial Sequence: Synthetic oligonucleotide
  Sense strand starting at position 3869 of SEQ ID NO: 771
cugucacuccagcauuaua

SEQ ID NO: 62407 - RNA, 19 nt, Artificial Sequence
  Description of Artificial Sequence: Synthetic oligonucleotide
  Antisense strand to SEQ ID NO: 62326
uauaaugcuggagugacag

SEQ ID NO: 62408 - RNA, 19 nt, Artificial Sequence
  Description of Artificial Sequence: Synthetic oligonucleotide
  Sense strand starting at position 3877 of SEQ ID NO: 771
ccagcauuauaguugagaa

SEQ ID NO: 62409 - RNA, 19 nt, Artificial Sequence
  Description of Artificial Sequence: Synthetic oligonucleotide
  Antisense strand to SEQ ID NO: 62328
uucucaacuauaaugcugg

SEQ ID NO: 62410 - RNA, 19 nt, Artificial Sequence
  Description of Artificial Sequence: Synthetic oligonucleotide
  Sense strand starting at position 3879 of SEQ ID NO: 771
agcauuauaguugagaacu

SEQ ID NO: 62411 - RNA, 19 nt, Artificial Sequence
  Description of Artificial Sequence: Synthetic oligonucleotide
  Antisense strand to SEQ ID NO: 62330
aguucucaacuauaaugcu

SEQ ID NO: 62412 - RNA, 19 nt, Artificial Sequence
  Description of Artificial Sequence: Synthetic oligonucleotide
  Sense strand starting at position 3887 of SEQ ID NO: 771
aguugagaacucugaaacu

SEQ ID NO: 62413 - RNA, 19 nt, Artificial Sequence
  Description of Artificial Sequence: Synthetic oligonucleotide
  Antisense strand to SEQ ID NO: 62332
aguuucagaguucucaacu

SEQ ID NO: 62414 - RNA, 19 nt, Artificial Sequence
  Description of Artificial Sequence: Synthetic oligonucleotide
  Sense strand starting at position 3975 of SEQ ID NO: 771
acuugcuuagcauaaugga

SEQ ID NO: 62415 - RNA, 19 nt, Artificial Sequence
  Description of Artificial Sequence: Synthetic oligonucleotide
  Antisense strand to SEQ ID NO: 62334
uccauuaugcuaagcaagu

SEQ ID NO: 62416 - RNA, 19 nt, Artificial Sequence
  Description of Artificial Sequence: Synthetic oligonucleotide
  Sense strand starting at position 3983 of SEQ ID NO: 772
uuggccaaacuguauaaau

SEQ ID NO: 62417 - RNA, 19 nt, Artificial Sequence
  Description of Artificial Sequence: Synthetic oligonucleotide
  Antisense strand to SEQ ID NO: 62336
auuuauacaguuuggccaa

SEQ ID NO: 62418 - RNA, 19 nt, Artificial Sequence
  Description of Artificial Sequence: Synthetic oligonucleotide
  Sense strand starting at position 3927 of SEQ ID NO: 772
ggugaaaugcuacauguuc

SEQ ID NO: 62419 - RNA, 19 nt, Artificial Sequence
  Description of Artificial Sequence: Synthetic oligonucleotide
  Antisense strand to SEQ ID NO: 62338
gaacauguagcauuucacc

SEQ ID NO: 62420 - RNA, 19 nt, Artificial Sequence
  Description of Artificial Sequence: Synthetic oligonucleotide
  Sense strand starting at position 3887 of SEQ ID NO: 772
uuuggucauguaugaaaua

SEQ ID NO: 62421 - RNA, 19 nt, Artificial Sequence
  Description of Artificial Sequence: Synthetic oligonucleotide
  Antisense strand to SEQ ID NO: 62340
uauuucauacaugaccaaa

SEQ ID NO: 62422 - RNA, 19 nt, Artificial Sequence
  Description of Artificial Sequence: Synthetic oligonucleotide
  Sense strand starting at position 3830 of SEQ ID NO: 772
ugcugauaucuagaacccu

SEQ ID NO: 62423 - RNA, 19 nt, Artificial Sequence
  Description of Artificial Sequence: Synthetic oligonucleotide
  Antisense strand to SEQ ID NO: 62342
aggguucuagauaucagca

SEQ ID NO: 62424 - RNA, 19 nt, Artificial Sequence
  Description of Artificial Sequence: Synthetic oligonucleotide
  Sense strand starting at position 3777 of SEQ ID NO: 772
aaacuagguguauauagua

SEQ ID NO: 62425 - RNA, 19 nt, Artificial Sequence
  Description of Artificial Sequence: Synthetic oligonucleotide
  Antisense strand to SEQ ID NO: 62344
uacuauauacaccuaguuu

SEQ ID NO: 62426 - RNA, 19 nt, Artificial Sequence
  Description of Artificial Sequence: Synthetic oligonucleotide
  Sense strand starting at position 3747 of SEQ ID NO: 772
uccaaagaguuuguuauua

SEQ ID NO: 62427 - RNA, 19 nt, Artificial Sequence
  Description of Artificial Sequence: Synthetic oligonucleotide
  Antisense strand to SEQ ID NO: 62346
uaauaacaaacucuuugga

SEQ ID NO: 62428 - RNA, 19 nt, Artificial Sequence
  Description of Artificial Sequence: Synthetic oligonucleotide
  Sense strand starting at position 3746 of SEQ ID NO: 772
cuccaaagaguuuguuauu

SEQ ID NO: 62429 - RNA, 19 nt, Artificial Sequence
  Description of Artificial Sequence: Synthetic oligonucleotide
  Antisense strand to SEQ ID NO: 62348
aauaacaaacucuuuggag

SEQ ID NO: 62430 - RNA, 19 nt, Artificial Sequence
  Description of Artificial Sequence: Synthetic oligonucleotide
  Sense strand starting at position 3703 of SEQ ID NO: 772
ggaagcuauguuugggaaa

SEQ ID NO: 62431 - RNA, 19 nt, Artificial Sequence
  Description of Artificial Sequence: Synthetic oligonucleotide
  Antisense strand to SEQ ID NO: 62350
uuucccaaacauagcuucc

SEQ ID NO: 62432 - RNA, 19 nt, Artificial Sequence
  Description of Artificial Sequence: Synthetic oligonucleotide
  Sense strand starting at position 3591 of SEQ ID NO: 772
cgucuugagaucuggagaa

SEQ ID NO: 62433 - RNA, 19 nt, Artificial Sequence
  Description of Artificial Sequence: Synthetic oligonucleotide
  Antisense strand to SEQ ID NO: 62352
uucuccagaucucaagacg

SEQ ID NO: 62434 - RNA, 19 nt, Artificial Sequence
  Description of Artificial Sequence: Synthetic oligonucleotide
  Sense strand starting at position 3569 of SEQ ID NO: 772
uugaaugguaugugccaga

SEQ ID NO: 62435 - RNA, 19 nt, Artificial Sequence
  Description of Artificial Sequence: Synthetic oligonucleotide
  Antisense strand to SEQ ID NO: 62354
ucuggcacauaccauucaa

SEQ ID NO: 62436 - RNA, 19 nt, Artificial Sequence
  Description of Artificial Sequence: Synthetic oligonucleotide
  Sense strand starting at position 3563 of SEQ ID NO: 772
cuuguauugaaugguaugu

SEQ ID NO: 62437 - RNA, 19 nt, Artificial Sequence
  Description of Artificial Sequence: Synthetic oligonucleotide
  Antisense strand to SEQ ID NO: 62356
acauaccauucaauacaag

SEQ ID NO: 62438 - RNA, 19 nt, Artificial Sequence
  Description of Artificial Sequence: Synthetic oligonucleotide
  Sense strand starting at position 3544 of SEQ ID NO: 772
guggguuccagguaccaaa

SEQ ID NO: 62439 - RNA, 19 nt, Artificial Sequence
  Description of Artificial Sequence: Synthetic oligonucleotide
  Antisense strand to SEQ ID NO: 62358
uuugguaccuggaacccac

SEQ ID NO: 62440 - RNA, 19 nt, Artificial Sequence
  Description of Artificial Sequence: Synthetic oligonucleotide
  Sense strand starting at position 3515 of SEQ ID NO: 772
aguuaauaguuacuggaca

SEQ ID NO: 62441 - RNA, 19 nt, Artificial Sequence
  Description of Artificial Sequence: Synthetic oligonucleotide
  Antisense strand to SEQ ID NO: 62360
uguccaguaacuauuaacu

SEQ ID NO: 62442 - RNA, 19 nt, Artificial Sequence
  Description of Artificial Sequence: Synthetic oligonucleotide
  Sense strand starting at position 3513 of SEQ ID NO: 772
guaguuaauaguuacugga

SEQ ID NO: 62443 - RNA, 19 nt, Artificial Sequence
  Description of Artificial Sequence: Synthetic oligonucleotide
  Antisense strand to SEQ ID NO: 62362
uccaguaacuauuaacuac

SEQ ID NO: 62444 - RNA, 19 nt, Artificial Sequence
  Description of Artificial Sequence: Synthetic oligonucleotide
  Sense strand starting at position 3390 of SEQ ID NO: 772
gaaaucugcccuugugaag

SEQ ID NO: 62445 - RNA, 19 nt, Artificial Sequence
  Description of Artificial Sequence: Synthetic oligonucleotide
  Antisense strand to SEQ ID NO: 62364
cuucacaagggcagauuuc

SEQ ID NO: 62446 - RNA, 19 nt, Artificial Sequence
  Description of Artificial Sequence: Synthetic oligonucleotide
  Sense strand starting at position 3387 of SEQ ID NO: 772
ugagaaaucugcccuugug

SEQ ID NO: 62447 - RNA, 19 nt, Artificial Sequence
  Description of Artificial Sequence: Synthetic oligonucleotide
  Antisense strand to SEQ ID NO: 62366
cacaagggcagauuucuca

SEQ ID NO: 62448 - RNA, 19 nt, Artificial Sequence
  Description of Artificial Sequence: Synthetic oligonucleotide
  Sense strand starting at position 2909 of SEQ ID NO: 772
cgcagacuuggugggagau

SEQ ID NO: 62449 - RNA, 19 nt, Artificial Sequence
  Description of Artificial Sequence: Synthetic oligonucleotide
  Antisense strand to SEQ ID NO: 62368
aucucccaccaagucugcg

SEQ ID NO: 62450 - RNA, 19 nt, Artificial Sequence
  Description of Artificial Sequence: Synthetic oligonucleotide
  Sense strand starting at position 2899 of SEQ ID NO: 772
uggacaauuccgcagacuu

SEQ ID NO: 62451 - RNA, 19 nt, Artificial Sequence
  Description of Artificial Sequence: Synthetic oligonucleotide
  Antisense strand to SEQ ID NO: 62370
aagucugcggaauugucca

SEQ ID NO: 62452 - RNA, 19 nt, Artificial Sequence
  Description of Artificial Sequence: Synthetic oligonucleotide
  Sense strand starting at position 2546 of SEQ ID NO: 772
ugacguuaucucugaguag

SEQ ID NO: 62453 - RNA, 19 nt, Artificial Sequence
  Description of Artificial Sequence: Synthetic oligonucleotide
  Antisense strand to SEQ ID NO: 62372
cuacucagagauaacguca

SEQ ID NO: 62454 - RNA, 19 nt, Artificial Sequence
  Description of Artificial Sequence: Synthetic oligonucleotide
  Sense strand starting at position 2504 of SEQ ID NO: 772
gugcacuaaugaccauuaa

SEQ ID NO: 62455 - RNA, 19 nt, Artificial Sequence
  Description of Artificial Sequence: Synthetic oligonucleotide
  Antisense strand to SEQ ID NO: 62374
uuaauggucauuagugcac

SEQ ID NO: 62456 - RNA, 19 nt, Artificial Sequence
  Description of Artificial Sequence: Synthetic oligonucleotide
  Sense strand starting at position 2474 of SEQ ID NO: 772
ugaugugcccacuaaaggu

SEQ ID NO: 62457 - RNA, 19 nt, Artificial Sequence
  Description of Artificial Sequence: Synthetic oligonucleotide
  Antisense strand to SEQ ID NO: 62376
accuuuagugggcacauca

SEQ ID NO: 62458 - RNA, 19 nt, Artificial Sequence
  Description of Artificial Sequence: Synthetic oligonucleotide
  Sense strand starting at position 2471 of SEQ ID NO: 772
ugcugaugugcccacuaaa

SEQ ID NO: 62459 - RNA, 19 nt, Artificial Sequence
  Description of Artificial Sequence: Synthetic oligonucleotide
  Antisense strand to SEQ ID NO: 62378
uuuagugggcacaucagca

SEQ ID NO: 62460 - RNA, 19 nt, Artificial Sequence
  Description of Artificial Sequence: Synthetic oligonucleotide
  Sense strand starting at position 2454 of SEQ ID NO: 772
ugauuaaucguggaaugug

SEQ ID NO: 62461 - RNA, 19 nt, Artificial Sequence
  Description of Artificial Sequence: Synthetic oligonucleotide
  Antisense strand to SEQ ID NO: 62380
cacauuccacgauuaauca

SEQ ID NO: 62462 - RNA, 19 nt, Artificial Sequence
  Description of Artificial Sequence: Synthetic oligonucleotide
  Sense strand starting at position 2446 of SEQ ID NO: 772
aggagcugugauuaaucgu

SEQ ID NO: 62463 - RNA, 19 nt, Artificial Sequence
  Description of Artificial Sequence: Synthetic oligonucleotide
  Antisense strand to SEQ ID NO: 62382
acgauuaaucacagcuccu

SEQ ID NO: 62464 - RNA, 19 nt, Artificial Sequence
  Description of Artificial Sequence: Synthetic oligonucleotide
  Sense strand starting at position 2373 of SEQ ID NO: 772
gagugcaaguccucagacu

SEQ ID NO: 62465 - RNA, 19 nt, Artificial Sequence
  Description of Artificial Sequence: Synthetic oligonucleotide
  Antisense strand to SEQ ID NO: 62384
agucugaggacuugcacuc

SEQ ID NO: 62466 - RNA, 19 nt, Artificial Sequence
  Description of Artificial Sequence: Synthetic oligonucleotide
  Sense strand starting at position 2357 of SEQ ID NO: 772
aaucuacuccguuagagag

SEQ ID NO: 62467 - RNA, 19 nt, Artificial Sequence
  Description of Artificial Sequence: Synthetic oligonucleotide
  Antisense strand to SEQ ID NO: 62386
cucucuaacggaguagauu

SEQ ID NO: 62468 - RNA, 19 nt, Artificial Sequence
  Description of Artificial Sequence: Synthetic oligonucleotide
  Sense strand starting at position 2355 of SEQ ID NO: 772
ggaaucuacuccguuagag

SEQ ID NO: 62469 - RNA, 19 nt, Artificial Sequence
  Description of Artificial Sequence: Synthetic oligonucleotide
  Antisense strand to SEQ ID NO: 62388
cucuaacggaguagauucc

SEQ ID NO: 62470 - RNA, 19 nt, Artificial Sequence
  Description of Artificial Sequence: Synthetic oligonucleotide
  Sense strand starting at position 2354 of SEQ ID NO: 772
uggaaucuacuccguuaga

SEQ ID NO: 62471 - RNA, 19 nt, Artificial Sequence
  Description of Artificial Sequence: Synthetic oligonucleotide
  Antisense strand to SEQ ID NO: 62390
ucuaacggaguagauucca

SEQ ID NO: 62472 - RNA, 19 nt, Artificial Sequence
  Description of Artificial Sequence: Synthetic oligonucleotide
  Sense strand starting at position 2352 of SEQ ID NO: 772
auuggaaucuacuccguua

SEQ ID NO: 62473 - RNA, 19 nt, Artificial Sequence
  Description of Artificial Sequence: Synthetic oligonucleotide
  Antisense strand to SEQ ID NO: 62392
uaacggaguagauuccaau

SEQ ID NO: 62474 - RNA, 19 nt, Artificial Sequence
  Description of Artificial Sequence: Synthetic oligonucleotide
  Sense strand starting at position 2341 of SEQ ID NO: 772
gaagcaaguuuauuggaau

SEQ ID NO: 62475 - RNA, 19 nt, Artificial Sequence
  Description of Artificial Sequence: Synthetic oligonucleotide
  Antisense strand to SEQ ID NO: 62394
auuccaauaaacuugcuuc

SEQ ID NO: 62476 - RNA, 19 nt, Artificial Sequence
  Description of Artificial Sequence: Synthetic oligonucleotide
  Sense strand starting at position 2305 of SEQ ID NO: 772
ggaagaauuggaggcgagu

SEQ ID NO: 62477 - RNA, 19 nt, Artificial Sequence
  Description of Artificial Sequence: Synthetic oligonucleotide
  Antisense strand to SEQ ID NO: 62396
acucgccuccaauucuucc

SEQ ID NO: 62478 - RNA, 19 nt, Artificial Sequence
  Description of Artificial Sequence: Synthetic oligonucleotide
  Sense strand starting at position 2282 of SEQ ID NO: 772
gaggguucuugggucuacu

SEQ ID NO: 62479 - RNA, 19 nt, Artificial Sequence
  Description of Artificial Sequence: Synthetic oligonucleotide
  Antisense strand to SEQ ID NO: 62398
aguagacccaagaacccuc

SEQ ID NO: 62480 - RNA, 19 nt, Artificial Sequence
  Description of Artificial Sequence: Synthetic oligonucleotide
  Sense strand starting at position 2236 of SEQ ID NO: 772
gcggguuguguugcuggaa

SEQ ID NO: 62481 - RNA, 19 nt, Artificial Sequence
  Description of Artificial Sequence: Synthetic oligonucleotide
  Antisense strand to SEQ ID NO: 62400
uuccagcaacacaacccgc

SEQ ID NO: 62482 - RNA, 19 nt, Artificial Sequence
  Description of Artificial Sequence: Synthetic oligonucleotide
  Sense strand starting at position 856 of SEQ ID NO: 772
augacaaggucguuuggaa

SEQ ID NO: 62483 - RNA, 19 nt, Artificial Sequence
  Description of Artificial Sequence: Synthetic oligonucleotide
  Antisense strand to SEQ ID NO: 62402
uuccaaacgaccuugucau

SEQ ID NO: 62484 - RNA, 19 nt, Artificial Sequence
  Description of Artificial Sequence: Synthetic oligonucleotide
  Sense strand starting at position 463 of SEQ ID NO: 772
ccauguuaggcauacacaa

SEQ ID NO: 62485 - RNA, 19 nt, Artificial Sequence
  Description of Artificial Sequence: Synthetic oligonucleotide
  Antisense strand to SEQ ID NO: 62404
uuguguaugccuaacaugg

SEQ ID NO: 62486 - RNA, 19 nt, Artificial Sequence
  Description of Artificial Sequence: Synthetic oligonucleotide
  Sense strand starting at position 460 of SEQ ID NO: 772
uuuccauguuaggcauaca

SEQ ID NO: 62487 - RNA, 19 nt, Artificial Sequence
  Description of Artificial Sequence: Synthetic oligonucleotide
  Antisense strand to SEQ ID NO: 62406
uguaugccuaacauggaaa

SEQ ID NO: 62488 - RNA, 19 nt, Artificial Sequence
  Description of Artificial Sequence: Synthetic oligonucleotide
  Sense strand starting at position 440 of SEQ ID NO: 772
ucguuacugcauugacaaa

SEQ ID NO: 62489 - RNA, 19 nt, Artificial Sequence
  Description of Artificial Sequence: Synthetic oligonucleotide
  Antisense strand to SEQ ID NO: 62408
uuugucaaugcaguaacga

SEQ ID NO: 62490 - RNA, 19 nt, Artificial Sequence
  Description of Artificial Sequence: Synthetic oligonucleotide
  Sense strand starting at position 277 of SEQ ID NO: 772
auuuaugugucccuuaugu

SEQ ID NO: 62491 - RNA, 19 nt, Artificial Sequence
  Description of Artificial Sequence: Synthetic oligonucleotide
  Antisense strand to SEQ ID NO: 62410
acauaagggacacauaaau

SEQ ID NO: 62492 - RNA, 19 nt, Artificial Sequence
  Description of Artificial Sequence: Synthetic oligonucleotide
  Sense strand starting at position 275 of SEQ ID NO: 772
ucauuuaugugucccuuau

SEQ ID NO: 62493 - RNA, 19 nt, Artificial Sequence
  Description of Artificial Sequence: Synthetic oligonucleotide
  Antisense strand to SEQ ID NO: 62412
auaagggacacauaaauga

SEQ ID NO: 62494 - RNA, 19 nt, Artificial Sequence
  Description of Artificial Sequence: Synthetic oligonucleotide
  Sense strand starting at position 268 of SEQ ID NO: 772
uuagcagucauuuaugugu

SEQ ID NO: 62495 - RNA, 19 nt, Artificial Sequence
  Description of Artificial Sequence: Synthetic oligonucleotide
  Antisense strand to SEQ ID NO: 62414
acacauaaaugacugcuaa

SEQ ID NO: 62496 - RNA, 19 nt, Artificial Sequence
  Description of Artificial Sequence: Synthetic oligonucleotide
  Sense strand starting at position 3884 of SEQ ID NO: 773
cagagaggcuaagagauuu

SEQ ID NO: 62497 - RNA, 19 nt, Artificial Sequence
  Description of Artificial Sequence: Synthetic oligonucleotide
  Antisense strand to SEQ ID NO: 62416
aaaucucuuagccucucug

SEQ ID NO: 62498 - RNA, 19 nt, Artificial Sequence
  Description of Artificial Sequence: Synthetic oligonucleotide
  Sense strand starting at position 3835 of SEQ ID NO: 773
acacauaggugcucuuaac

SEQ ID NO: 62499 - RNA, 19 nt, Artificial Sequence
  Description of Artificial Sequence: Synthetic oligonucleotide
  Antisense strand to SEQ ID NO: 62418
guuaagagcaccuaugugu

SEQ ID NO: 62500 - RNA, 19 nt, Artificial Sequence
  Description of Artificial Sequence: Synthetic oligonucleotide
  Sense strand starting at position 3814 of SEQ ID NO: 773
ucacaaguguggguaucaa

SEQ ID NO: 62501 - RNA, 19 nt, Artificial Sequence
  Description of Artificial Sequence: Synthetic oligonucleotide
  Antisense strand to SEQ ID NO: 62420
uugauacccacacuuguga

SEQ ID NO: 62502 - RNA, 19 nt, Artificial Sequence
  Description of Artificial Sequence: Synthetic oligonucleotide
  Sense strand starting at position 3765 of SEQ ID NO: 773
caggucacagcugacaaau

SEQ ID NO: 62503 - RNA, 19 nt, Artificial Sequence
  Description of Artificial Sequence: Synthetic oligonucleotide
  Antisense strand to SEQ ID NO: 62422
auuugucagcugugaccug

SEQ ID NO: 62504 - RNA, 19 nt, Artificial Sequence
  Description of Artificial Sequence: Synthetic oligonucleotide
  Sense strand starting at position 3764 of SEQ ID NO: 773
gcaggucacagcugacaaa

SEQ ID NO: 62505 - RNA, 19 nt, Artificial Sequence
  Description of Artificial Sequence: Synthetic oligonucleotide
  Antisense strand to SEQ ID NO: 62424
uuugucagcugugaccugc

SEQ ID NO: 62506 - RNA, 19 nt, Artificial Sequence
  Description of Artificial Sequence: Synthetic oligonucleotide
  Sense strand starting at position 3626 of SEQ ID NO: 773
gaacgucuuugauucugaa

SEQ ID NO: 62507 - RNA, 19 nt, Artificial Sequence
  Description of Artificial Sequence: Synthetic oligonucleotide
  Antisense strand to SEQ ID NO: 62426
uucagaaucaaagacguuc

SEQ ID NO: 62508 - RNA, 19 nt, Artificial Sequence
  Description of Artificial Sequence: Synthetic oligonucleotide
  Sense strand starting at position 3623 of SEQ ID NO: 773
gcagaacgucuuugauucu

SEQ ID NO: 62509 - RNA, 19 nt, Artificial Sequence
  Description of Artificial Sequence: Synthetic oligonucleotide
  Antisense strand to SEQ ID NO: 62428
agaaucaaagacguucugc

SEQ ID NO: 62510 - RNA, 19 nt, Artificial Sequence
  Description of Artificial Sequence: Synthetic oligonucleotide
  Sense strand starting at position 3622 of SEQ ID NO: 773
agcagaacgucuuugauuc

SEQ ID NO: 62511 - RNA, 19 nt, Artificial Sequence
  Description of Artificial Sequence: Synthetic oligonucleotide
  Antisense strand to SEQ ID NO: 62430
gaaucaaagacguucugcu

SEQ ID NO: 62512 - RNA, 19 nt, Artificial Sequence
  Description of Artificial Sequence: Synthetic oligonucleotide
  Sense strand starting at position 3611 of SEQ ID NO: 773
gcucuuucuuuagcagaac

SEQ ID NO: 62513 - RNA, 19 nt, Artificial Sequence
  Description of Artificial Sequence: Synthetic oligonucleotide
  Antisense strand to SEQ ID NO: 62432
guucugcuaaagaaagagc

SEQ ID NO: 62514 - RNA, 19 nt, Artificial Sequence
  Description of Artificial Sequence: Synthetic oligonucleotide
  Sense strand starting at position 3609 of SEQ ID NO: 773
uugcucuuucuuuagcaga

SEQ ID NO: 62515 - RNA, 19 nt, Artificial Sequence
  Description of Artificial Sequence: Synthetic oligonucleotide
  Antisense strand to SEQ ID NO: 62434
ucugcuaaagaaagagcaa

SEQ ID NO: 62516 - RNA, 19 nt, Artificial Sequence
  Description of Artificial Sequence: Synthetic oligonucleotide
  Sense strand starting at position 3542 of SEQ ID NO: 773
acaauuugccugcagcuau

SEQ ID NO: 62517 - RNA, 19 nt, Artificial Sequence
  Description of Artificial Sequence: Synthetic oligonucleotide
  Antisense strand to SEQ ID NO: 62436
auagcugcaggcaaauugu

SEQ ID NO: 62518 - RNA, 19 nt, Artificial Sequence
  Description of Artificial Sequence: Synthetic oligonucleotide
  Sense strand starting at position 3540 of SEQ ID NO: 773
gcacaauuugccugcagcu

SEQ ID NO: 62519 - RNA, 19 nt, Artificial Sequence
  Description of Artificial Sequence: Synthetic oligonucleotide
  Antisense strand to SEQ ID NO: 62438
agcugcaggcaaauugugc

SEQ ID NO: 62520 - RNA, 19 nt, Artificial Sequence
  Description of Artificial Sequence: Synthetic oligonucleotide
  Sense strand starting at position 3452 of SEQ ID NO: 773
gcaauuccggaguacauga

SEQ ID NO: 62521 - RNA, 19 nt, Artificial Sequence
  Description of Artificial Sequence: Synthetic oligonucleotide
  Antisense strand to SEQ ID NO: 62440
ucauguacuccggaauugc

SEQ ID NO: 62522 - RNA, 19 nt, Artificial Sequence
  Description of Artificial Sequence: Synthetic oligonucleotide
  Sense strand starting at position 3449 of SEQ ID NO: 773
caagcaauuccggaguaca

SEQ ID NO: 62523 - RNA, 19 nt, Artificial Sequence
  Description of Artificial Sequence: Synthetic oligonucleotide
  Antisense strand to SEQ ID NO: 62442
uguacuccggaauugcuug

SEQ ID NO: 62524 - RNA, 19 nt, Artificial Sequence
  Description of Artificial Sequence: Synthetic oligonucleotide
  Sense strand starting at position 3420 of SEQ ID NO: 773
uaacuuugccaggguuaua

SEQ ID NO: 62525 - RNA, 19 nt, Artificial Sequence
  Description of Artificial Sequence: Synthetic oligonucleotide
  Antisense strand to SEQ ID NO: 62444
uauaacccuggcaaaguua

SEQ ID NO: 62526 - RNA, 19 nt, Artificial Sequence
  Description of Artificial Sequence: Synthetic oligonucleotide
  Sense strand starting at position 3419 of SEQ ID NO: 773
auaacuuugccaggguuau

SEQ ID NO: 62527 - RNA, 19 nt, Artificial Sequence
  Description of Artificial Sequence: Synthetic oligonucleotide
  Antisense strand to SEQ ID NO: 62446
auaacccuggcaaaguuau

SEQ ID NO: 62528 - RNA, 19 nt, Artificial Sequence
  Description of Artificial Sequence: Synthetic oligonucleotide
  Sense strand starting at position 3388 of SEQ ID NO: 773
ucgaguaaaugcuuuagag

SEQ ID NO: 62529 - RNA, 19 nt, Artificial Sequence
  Description of Artificial Sequence: Synthetic oligonucleotide
  Antisense strand to SEQ ID NO: 62448
cucuaaagcauuuacucga

SEQ ID NO: 62530 - RNA, 19 nt, Artificial Sequence
  Description of Artificial Sequence: Synthetic oligonucleotide
  Sense strand starting at position 3381 of SEQ ID NO: 773
ggcccuuucgaguaaaugc

SEQ ID NO: 62531 - RNA, 19 nt, Artificial Sequence
  Description of Artificial Sequence: Synthetic oligonucleotide
  Antisense strand to SEQ ID NO: 62450
gcauuuacucgaaagggcc

SEQ ID NO: 62532 - RNA, 19 nt, Artificial Sequence
  Description of Artificial Sequence: Synthetic oligonucleotide
  Sense strand starting at position 3354 of SEQ ID NO: 773
agggcaguuagccaguuau

SEQ ID NO: 62533 - RNA, 19 nt, Artificial Sequence
  Description of Artificial Sequence: Synthetic oligonucleotide
  Antisense strand to SEQ ID NO: 62452
auaacuggcuaacugcccu

SEQ ID NO: 62534 - RNA, 19 nt, Artificial Sequence
  Description of Artificial Sequence: Synthetic oligonucleotide
  Sense strand starting at position 3296 of SEQ ID NO: 773
guaagucuuugguuacuaa

SEQ ID NO: 62535 - RNA, 19 nt, Artificial Sequence
  Description of Artificial Sequence: Synthetic oligonucleotide
  Antisense strand to SEQ ID NO: 62454
uuaguaaccaaagacuuac

SEQ ID NO: 62536 - RNA, 19 nt, Artificial Sequence
  Description of Artificial Sequence: Synthetic oligonucleotide
  Sense strand starting at position 3222 of SEQ ID NO: 773
caagcaaauguguagucuu

SEQ ID NO: 62537 - RNA, 19 nt, Artificial Sequence
  Description of Artificial Sequence: Synthetic oligonucleotide
  Antisense strand to SEQ ID NO: 62456
aagacuacacauuugcuug

SEQ ID NO: 62538 - RNA, 19 nt, Artificial Sequence
  Description of Artificial Sequence: Synthetic oligonucleotide
  Sense strand starting at position 3063 of SEQ ID NO: 773
ugagauuaaaguggcauua

SEQ ID NO: 62539 - RNA, 19 nt, Artificial Sequence
  Description of Artificial Sequence: Synthetic oligonucleotide
  Antisense strand to SEQ ID NO: 62458
uaaugccacuuuaaucuca

SEQ ID NO: 62540 - RNA, 19 nt, Artificial Sequence
  Description of Artificial Sequence: Synthetic oligonucleotide
  Sense strand starting at position 3062 of SEQ ID NO: 773
cugagauuaaaguggcauu

SEQ ID NO: 62541 - RNA, 19 nt, Artificial Sequence
  Description of Artificial Sequence: Synthetic oligonucleotide
  Antisense strand to SEQ ID NO: 62460
aaugccacuuuaaucucag

SEQ ID NO: 62542 - RNA, 19 nt, Artificial Sequence
  Description of Artificial Sequence: Synthetic oligonucleotide
  Sense strand starting at position 2916 of SEQ ID NO: 773
uaacguucuggccacaaua

SEQ ID NO: 62543 - RNA, 19 nt, Artificial Sequence
  Description of Artificial Sequence: Synthetic oligonucleotide
  Antisense strand to SEQ ID NO: 62462
uauuguggccagaacguua

SEQ ID NO: 62544 - RNA, 19 nt, Artificial Sequence
  Description of Artificial Sequence: Synthetic oligonucleotide
  Sense strand starting at position 2841 of SEQ ID NO: 773
aucagauguuaugcuauaa

SEQ ID NO: 62545 - RNA, 19 nt, Artificial Sequence
  Description of Artificial Sequence: Synthetic oligonucleotide
  Antisense strand to SEQ ID NO: 62464
uuauagcauaacaucugau

SEQ ID NO: 62546 - RNA, 19 nt, Artificial Sequence
  Description of Artificial Sequence: Synthetic oligonucleotide
  Sense strand starting at position 2777 of SEQ ID NO: 773
uauuguggcugccuauaaa

SEQ ID NO: 62547 - RNA, 19 nt, Artificial Sequence
  Description of Artificial Sequence: Synthetic oligonucleotide
  Antisense strand to SEQ ID NO: 62466
uuuauaggcagccacaaua

SEQ ID NO: 62548 - RNA, 19 nt, Artificial Sequence
  Description of Artificial Sequence: Synthetic oligonucleotide
  Sense strand starting at position 2764 of SEQ ID NO: 773
uuaaacaugucacuauugu

SEQ ID NO: 62549 - RNA, 19 nt, Artificial Sequence
  Description of Artificial Sequence: Synthetic oligonucleotide
  Antisense strand to SEQ ID NO: 62468
acaauagugacauguuuaa

SEQ ID NO: 62550 - RNA, 19 nt, Artificial Sequence
  Description of Artificial Sequence: Synthetic oligonucleotide
  Sense strand starting at position 2674 of SEQ ID NO: 773
auucuauguguuuaccaua

SEQ ID NO: 62551 - RNA, 19 nt, Artificial Sequence
  Description of Artificial Sequence: Synthetic oligonucleotide
  Antisense strand to SEQ ID NO: 62470
uaugguaaacacauagaau

SEQ ID NO: 62552 - RNA, 19 nt, Artificial Sequence
  Description of Artificial Sequence: Synthetic oligonucleotide
  Sense strand starting at position 2669 of SEQ ID NO: 773
uccaaauucuauguguuua

SEQ ID NO: 62553 - RNA, 19 nt, Artificial Sequence
  Description of Artificial Sequence: Synthetic oligonucleotide
  Antisense strand to SEQ ID NO: 62472
uaaacacauagaauuugga

SEQ ID NO: 62554 - RNA, 19 nt, Artificial Sequence
  Description of Artificial Sequence: Synthetic oligonucleotide
  Sense strand starting at position 2668 of SEQ ID NO: 773
cuccaaauucuauguguuu

SEQ ID NO: 62555 - RNA, 19 nt, Artificial Sequence
  Description of Artificial Sequence: Synthetic oligonucleotide
  Antisense strand to SEQ ID NO: 62474
aaacacauagaauuuggag

SEQ ID NO: 62556 - RNA, 19 nt, Artificial Sequence
  Description of Artificial Sequence: Synthetic oligonucleotide
  Sense strand starting at position 2553 of SEQ ID NO: 773
agaggacauuagcugucau

SEQ ID NO: 62557 - RNA, 19 nt, Artificial Sequence
  Description of Artificial Sequence: Synthetic oligonucleotide
  Antisense strand to SEQ ID NO: 62476
augacagcuaauguccucu

SEQ ID NO: 62558 - RNA, 19 nt, Artificial Sequence
  Description of Artificial Sequence: Synthetic oligonucleotide
  Sense strand starting at position 2491 of SEQ ID NO: 773
aggagagguuacuacacau

SEQ ID NO: 62559 - RNA, 19 nt, Artificial Sequence
  Description of Artificial Sequence: Synthetic oligonucleotide
  Antisense strand to SEQ ID NO: 62478
auguguaguaaccucuccu

SEQ ID NO: 62560 - RNA, 19 nt, Artificial Sequence
  Description of Artificial Sequence: Synthetic oligonucleotide
  Sense strand starting at position 2485 of SEQ ID NO: 773
ugguuuaggagagguuacu

SEQ ID NO: 62561 - RNA, 19 nt, Artificial Sequence
  Description of Artificial Sequence: Synthetic oligonucleotide
  Antisense strand to SEQ ID NO: 62480
aguaaccucuccuaaacca

SEQ ID NO: 62562 - RNA, 19 nt, Artificial Sequence
  Description of Artificial Sequence: Synthetic oligonucleotide
  Sense strand starting at position 2466 of SEQ ID NO: 773
guuaaugugcuugagcaua

SEQ ID NO: 62563 - RNA, 19 nt, Artificial Sequence
  Description of Artificial Sequence: Synthetic oligonucleotide
  Antisense strand to SEQ ID NO: 62482
uaugcucaagcacauuaac

SEQ ID NO: 62564 - RNA, 19 nt, Artificial Sequence
  Description of Artificial Sequence: Synthetic oligonucleotide
  Sense strand starting at position 2430 of SEQ ID NO: 773
cuguuucuugaauaauuga

SEQ ID NO: 62565 - RNA, 19 nt, Artificial Sequence
  Description of Artificial Sequence: Synthetic oligonucleotide
  Antisense strand to SEQ ID NO: 62484
ucaauuauucaagaaacag

SEQ ID NO: 62566 - RNA, 19 nt, Artificial Sequence
  Description of Artificial Sequence: Synthetic oligonucleotide
  Sense strand starting at position 2220 of SEQ ID NO: 773
gagaucgucagcuggaaga

SEQ ID NO: 62567 - RNA, 19 nt, Artificial Sequence
  Description of Artificial Sequence: Synthetic oligonucleotide
  Antisense strand to SEQ ID NO: 62486
ucuuccagcugacgaucuc

SEQ ID NO: 62568 - RNA, 19 nt, Artificial Sequence
  Description of Artificial Sequence: Synthetic oligonucleotide
  Sense strand starting at position 2218 of SEQ ID NO: 773
aagagaucgucagcuggaa

SEQ ID NO: 62569 - RNA, 19 nt, Artificial Sequence
  Description of Artificial Sequence: Synthetic oligonucleotide
  Antisense strand to SEQ ID NO: 62488
uuccagcugacgaucucuu

SEQ ID NO: 62570 - RNA, 19 nt, Artificial Sequence
  Description of Artificial Sequence: Synthetic oligonucleotide
  Sense strand starting at position 2178 of SEQ ID NO: 773
uaaucuccaccgugcgaau

SEQ ID NO: 62571 - RNA, 19 nt, Artificial Sequence
  Description of Artificial Sequence: Synthetic oligonucleotide
  Antisense strand to SEQ ID NO: 62490
auucgcacgguggagauua

SEQ ID NO: 62572 - RNA, 19 nt, Artificial Sequence
  Description of Artificial Sequence: Synthetic oligonucleotide
  Sense strand starting at position 2024 of SEQ ID NO: 773
cgaacaugcucagugcaga

SEQ ID NO: 62573 - RNA, 19 nt, Artificial Sequence
  Description of Artificial Sequence: Synthetic oligonucleotide
  Antisense strand to SEQ ID NO: 62492
ucugcacugagcauguucg

SEQ ID NO: 62574 - RNA, 19 nt, Artificial Sequence
  Description of Artificial Sequence: Synthetic oligonucleotide
  Sense strand starting at position 152 of SEQ ID NO: 773
gcgcgcucaccugugaaca

SEQ ID NO: 62575 - RNA, 19 nt, Artificial Sequence
  Description of Artificial Sequence: Synthetic oligonucleotide
  Antisense strand to SEQ ID NO: 62494
uguucacaggugagcgcgc

SEQ ID NO: 62576 - RNA, 19 nt, Artificial Sequence
  Description of Artificial Sequence: Synthetic oligonucleotide
  Sense strand starting at position 3544 of SEQ ID NO: 774
augagucaacuuggugaua

SEQ ID NO: 62577 - RNA, 19 nt, Artificial Sequence
  Description of Artificial Sequence: Synthetic oligonucleotide
  Antisense strand to SEQ ID NO: 62496
uaucaccaaguugacucau

SEQ ID NO: 62578 - RNA, 19 nt, Artificial Sequence
  Description of Artificial Sequence: Synthetic oligonucleotide
  Sense strand starting at position 3478 of SEQ ID NO: 774
uagagaggcaguugugaag

SEQ ID NO: 62579 - RNA, 19 nt, Artificial Sequence
  Description of Artificial Sequence: Synthetic oligonucleotide
  Antisense strand to SEQ ID NO: 62498
cuucacaacugccucucua

SEQ ID NO: 62580 - RNA, 19 nt, Artificial Sequence
  Description of Artificial Sequence: Synthetic oligonucleotide
  Sense strand starting at position 3226 of SEQ ID NO: 774
gucuuaacuguagagacua

SEQ ID NO: 62581 - RNA, 19 nt, Artificial Sequence
  Description of Artificial Sequence: Synthetic oligonucleotide
  Antisense strand to SEQ ID NO: 62500
uagucucuacaguuaagac

SEQ ID NO: 62582 - RNA, 19 nt, Artificial Sequence
  Description of Artificial Sequence: Synthetic oligonucleotide
  Sense strand starting at position 3224 of SEQ ID NO: 774
uagucuuaacuguagagac

SEQ ID NO: 62583 - RNA, 19 nt, Artificial Sequence
  Description of Artificial Sequence: Synthetic oligonucleotide
  Antisense strand to SEQ ID NO: 62502
gucucuacaguuaagacua

SEQ ID NO: 62584 - RNA, 19 nt, Artificial Sequence
  Description of Artificial Sequence: Synthetic oligonucleotide
  Sense strand starting at position 3123 of SEQ ID NO: 774
ggugaauucucuucucaaa

SEQ ID NO: 62585 - RNA, 19 nt, Artificial Sequence
  Description of Artificial Sequence: Synthetic oligonucleotide
  Antisense strand to SEQ ID NO: 62504
uuugagaagagaauucacc

SEQ ID NO: 62586 - RNA, 19 nt, Artificial Sequence
  Description of Artificial Sequence: Synthetic oligonucleotide
  Sense strand starting at position 2994 of SEQ ID NO: 774
ucacuaaauuaugugaugu

SEQ ID NO: 62587 - RNA, 19 nt, Artificial Sequence
  Description of Artificial Sequence: Synthetic oligonucleotide
  Antisense strand to SEQ ID NO: 62506
acaucacauaauuuaguga

SEQ ID NO: 62588 - RNA, 19 nt, Artificial Sequence
  Description of Artificial Sequence: Synthetic oligonucleotide
  Sense strand starting at position 2963 of SEQ ID NO: 774
uagcauuucuggucaguag

SEQ ID NO: 62589 - RNA, 19 nt, Artificial Sequence
  Description of Artificial Sequence: Synthetic oligonucleotide
  Antisense strand to SEQ ID NO: 62508
cuacugaccagaaaugcua

SEQ ID NO: 62590 - RNA, 19 nt, Artificial Sequence
  Description of Artificial Sequence: Synthetic oligonucleotide
  Sense strand starting at position 2868 of SEQ ID NO: 774
ugcucaguagcuguaaguu

SEQ ID NO: 62591 - RNA, 19 nt, Artificial Sequence
  Description of Artificial Sequence: Synthetic oligonucleotide
  Antisense strand to SEQ ID NO: 62510
aacuuacagcuacugagca

SEQ ID NO: 62592 - RNA, 19 nt, Artificial Sequence
  Description of Artificial Sequence: Synthetic oligonucleotide
  Sense strand starting at position 2807 of SEQ ID NO: 774
gugagaaucaagugaguua

SEQ ID NO: 62593 - RNA, 19 nt, Artificial Sequence
  Description of Artificial Sequence: Synthetic oligonucleotide
  Antisense strand to SEQ ID NO: 62512
uaacucacuugauucucac

SEQ ID NO: 62594 - RNA, 19 nt, Artificial Sequence
  Description of Artificial Sequence: Synthetic oligonucleotide
  Sense strand starting at position 2782 of SEQ ID NO: 774
aauaguagcuuccuugaag

SEQ ID NO: 62595 - RNA, 19 nt, Artificial Sequence
  Description of Artificial Sequence: Synthetic oligonucleotide
  Antisense strand to SEQ ID NO: 62514
cuucaaggaagcuacuauu

SEQ ID NO: 62596 - RNA, 19 nt, Artificial Sequence
  Description of Artificial Sequence: Synthetic oligonucleotide
  Sense strand starting at position 2728 of SEQ ID NO: 774
caguguaaucuuggacaga

SEQ ID NO: 62597 - RNA, 19 nt, Artificial Sequence
  Description of Artificial Sequence: Synthetic oligonucleotide
  Antisense strand to SEQ ID NO: 62516
ucuguccaagauuacacug

SEQ ID NO: 62598 - RNA, 19 nt, Artificial Sequence
  Description of Artificial Sequence: Synthetic oligonucleotide
  Sense strand starting at position 2656 of SEQ ID NO: 774
gagugcauugauuaagcaa

SEQ ID NO: 62599 - RNA, 19 nt, Artificial Sequence
  Description of Artificial Sequence: Synthetic oligonucleotide
  Antisense strand to SEQ ID NO: 62518
uugcuuaaucaaugcacuc

SEQ ID NO: 62600 - RNA, 19 nt, Artificial Sequence
  Description of Artificial Sequence: Synthetic oligonucleotide
  Sense strand starting at position 2652 of SEQ ID NO: 774
aacagagugcauugauuaa

SEQ ID NO: 62601 - RNA, 19 nt, Artificial Sequence
  Description of Artificial Sequence: Synthetic oligonucleotide
  Antisense strand to SEQ ID NO: 62520
uuaaucaaugcacucuguu

SEQ ID NO: 62602 - RNA, 19 nt, Artificial Sequence
  Description of Artificial Sequence: Synthetic oligonucleotide
  Sense strand starting at position 2487 of SEQ ID NO: 774
ggguuugugguagaaaggu

SEQ ID NO: 62603 - RNA, 19 nt, Artificial Sequence
  Description of Artificial Sequence: Synthetic oligonucleotide
  Antisense strand to SEQ ID NO: 62522
accuuucuaccacaaaccc

SEQ ID NO: 62604 - RNA, 19 nt, Artificial Sequence
  Description of Artificial Sequence: Synthetic oligonucleotide
  Sense strand starting at position 2446 of SEQ ID NO: 774
gauggucaccagugggaga

SEQ ID NO: 62605 - RNA, 19 nt, Artificial Sequence
  Description of Artificial Sequence: Synthetic oligonucleotide
  Antisense strand to SEQ ID NO: 62524
ucucccacuggugaccauc

SEQ ID NO: 62606 - RNA, 19 nt, Artificial Sequence
  Description of Artificial Sequence: Synthetic oligonucleotide
  Sense strand starting at position 2212 of SEQ ID NO: 774
aaggucaccuugucagaca

SEQ ID NO: 62607 - RNA, 19 nt, Artificial Sequence
  Description of Artificial Sequence: Synthetic oligonucleotide
  Antisense strand to SEQ ID NO: 62526
ugucugacaaggugaccuu

SEQ ID NO: 62608 - RNA, 19 nt, Artificial Sequence
  Description of Artificial Sequence: Synthetic oligonucleotide
  Sense strand starting at position 2189 of SEQ ID NO: 774
ugcauagaucagcagacua

SEQ ID NO: 62609 - RNA, 19 nt, Artificial Sequence
  Description of Artificial Sequence: Synthetic oligonucleotide
  Antisense strand to SEQ ID NO: 62528
uagucugcugaucuaugca

SEQ ID NO: 62610 - RNA, 19 nt, Artificial Sequence
  Description of Artificial Sequence: Synthetic oligonucleotide
  Sense strand starting at position 2179 of SEQ ID NO: 774
gcccuagaacugcauagau

SEQ ID NO: 62611 - RNA, 19 nt, Artificial Sequence
  Description of Artificial Sequence: Synthetic oligonucleotide
  Antisense strand to SEQ ID NO: 62530
aucuaugcaguucuagggc

SEQ ID NO: 62612 - RNA, 19 nt, Artificial Sequence
  Description of Artificial Sequence: Synthetic oligonucleotide
  Sense strand starting at position 1677 of SEQ ID NO: 774
cagauaaaguuguugaaac

SEQ ID NO: 62613 - RNA, 19 nt, Artificial Sequence
  Description of Artificial Sequence: Synthetic oligonucleotide
  Antisense strand to SEQ ID NO: 62532
guuucaacaacuuuaucug

SEQ ID NO: 62614 - RNA, 19 nt, Artificial Sequence
  Description of Artificial Sequence: Synthetic oligonucleotide
  Sense strand starting at position 1661 of SEQ ID NO: 774
gccauucuccaauagacag

SEQ ID NO: 62615 - RNA, 19 nt, Artificial Sequence
  Description of Artificial Sequence: Synthetic oligonucleotide
  Antisense strand to SEQ ID NO: 62534
cugucuauuggagaauggc

SEQ ID NO: 62616 - RNA, 19 nt, Artificial Sequence
  Description of Artificial Sequence: Synthetic oligonucleotide
  Sense strand starting at position 1490 of SEQ ID NO: 774
cuagauaaaguguacaagu

SEQ ID NO: 62617 - RNA, 19 nt, Artificial Sequence
  Description of Artificial Sequence: Synthetic oligonucleotide
  Antisense strand to SEQ ID NO: 62536
acuuguacacuuuaucuag

SEQ ID NO: 62618 - RNA, 19 nt, Artificial Sequence
  Description of Artificial Sequence: Synthetic oligonucleotide
  Sense strand starting at position 1229 of SEQ ID NO: 774
gauuauggagcucauccua

SEQ ID NO: 62619 - RNA, 19 nt, Artificial Sequence
  Description of Artificial Sequence: Synthetic oligonucleotide
  Antisense strand to SEQ ID NO: 62538
uaggaugagcuccauaauc

SEQ ID NO: 62620 - RNA, 19 nt, Artificial Sequence
  Description of Artificial Sequence: Synthetic oligonucleotide
  Sense strand starting at position 1219 of SEQ ID NO: 774
gcaggaccuugauuaugga

SEQ ID NO: 62621 - RNA, 19 nt, Artificial Sequence
  Description of Artificial Sequence: Synthetic oligonucleotide
  Antisense strand to SEQ ID NO: 62540
uccauaaucaagguccugc

SEQ ID NO: 62622 - RNA, 19 nt, Artificial Sequence
  Description of Artificial Sequence: Synthetic oligonucleotide
  Sense strand starting at position 1216 of SEQ ID NO: 774
ucagcaggaccuugauuau

SEQ ID NO: 62623 - RNA, 19 nt, Artificial Sequence
  Description of Artificial Sequence: Synthetic oligonucleotide
  Antisense strand to SEQ ID NO: 62542
auaaucaagguccugcuga

SEQ ID NO: 62624 - RNA, 19 nt, Artificial Sequence
  Description of Artificial Sequence: Synthetic oligonucleotide
  Sense strand starting at position 1132 of SEQ ID NO: 774
ucuucugcucagggaauaa

SEQ ID NO: 62625 - RNA, 19 nt, Artificial Sequence
  Description of Artificial Sequence: Synthetic oligonucleotide
  Antisense strand to SEQ ID NO: 62544
uuauucccugagcagaaga

SEQ ID NO: 62626 - RNA, 19 nt, Artificial Sequence
  Description of Artificial Sequence: Synthetic oligonucleotide
  Sense strand starting at position 904 of SEQ ID NO: 774
cuggaaagauuugaugcaa

SEQ ID NO: 62627 - RNA, 19 nt, Artificial Sequence
  Description of Artificial Sequence: Synthetic oligonucleotide
  Antisense strand to SEQ ID NO: 62546
uugcaucaaaucuuuccag

SEQ ID NO: 62628 - RNA, 19 nt, Artificial Sequence
  Description of Artificial Sequence: Synthetic oligonucleotide
  Sense strand starting at position 853 of SEQ ID NO: 774
uuuaaagcucaugggaaau

SEQ ID NO: 62629 - RNA, 19 nt, Artificial Sequence
  Description of Artificial Sequence: Synthetic oligonucleotide
  Antisense strand to SEQ ID NO: 62548
auuucccaugagcuuuaaa

SEQ ID NO: 62630 - RNA, 19 nt, Artificial Sequence
  Description of Artificial Sequence: Synthetic oligonucleotide
  Sense strand starting at position 687 of SEQ ID NO: 774
uuuacucacugagcuagaa

SEQ ID NO: 62631 - RNA, 19 nt, Artificial Sequence
  Description of Artificial Sequence: Synthetic oligonucleotide
  Antisense strand to SEQ ID NO: 62550
uucuagcucagugaguaaa

SEQ ID NO: 62632 - RNA, 19 nt, Artificial Sequence
  Description of Artificial Sequence: Synthetic oligonucleotide
  Sense strand starting at position 642 of SEQ ID NO: 774
gcuggaggacugugacuaa

SEQ ID NO: 62633 - RNA, 19 nt, Artificial Sequence
  Description of Artificial Sequence: Synthetic oligonucleotide
  Antisense strand to SEQ ID NO: 62552
uuagucacaguccuccagc

SEQ ID NO: 62634 - RNA, 19 nt, Artificial Sequence
  Description of Artificial Sequence: Synthetic oligonucleotide
  Sense strand starting at position 571 of SEQ ID NO: 774
augcauugaugaucacauu

SEQ ID NO: 62635 - RNA, 19 nt, Artificial Sequence
  Description of Artificial Sequence: Synthetic oligonucleotide
  Antisense strand to SEQ ID NO: 62554
aaugugaucaucaaugcau

SEQ ID NO: 62636 - RNA, 19 nt, Artificial Sequence
  Description of Artificial Sequence: Synthetic oligonucleotide
  Sense strand starting at position 569 of SEQ ID NO: 774
ccaugcauugaugaucaca

SEQ ID NO: 62637 - RNA, 19 nt, Artificial Sequence
  Description of Artificial Sequence: Synthetic oligonucleotide
  Antisense strand to SEQ ID NO: 62556
ugugaucaucaaugcaugg

SEQ ID NO: 62638 - RNA, 19 nt, Artificial Sequence
  Description of Artificial Sequence: Synthetic oligonucleotide
  Sense strand starting at position 513 of SEQ ID NO: 774
gugguuugauuccugagaa

SEQ ID NO: 62639 - RNA, 19 nt, Artificial Sequence
  Description of Artificial Sequence: Synthetic oligonucleotide
  Antisense strand to SEQ ID NO: 62558
uucucaggaaucaaaccac

SEQ ID NO: 62640 - RNA, 19 nt, Artificial Sequence
  Description of Artificial Sequence: Synthetic oligonucleotide
  Sense strand starting at position 505 of SEQ ID NO: 774
gaacauaugugguuugauu

SEQ ID NO: 62641 - RNA, 19 nt, Artificial Sequence
  Description of Artificial Sequence: Synthetic oligonucleotide
  Antisense strand to SEQ ID NO: 62560
aaucaaaccacauauguuc

SEQ ID NO: 62642 - RNA, 19 nt, Artificial Sequence
  Description of Artificial Sequence: Synthetic oligonucleotide
  Sense strand starting at position 433 of SEQ ID NO: 774
uaauaaugucuucgaugga

SEQ ID NO: 62643 - RNA, 19 nt, Artificial Sequence
  Description of Artificial Sequence: Synthetic oligonucleotide
  Antisense strand to SEQ ID NO: 62562
uccaucgaagacauuauua

SEQ ID NO: 62644 - RNA, 19 nt, Artificial Sequence
  Description of Artificial Sequence: Synthetic oligonucleotide
  Sense strand starting at position 430 of SEQ ID NO: 774
ugauaauaaugucuucgau

SEQ ID NO: 62645 - RNA, 19 nt, Artificial Sequence
  Description of Artificial Sequence: Synthetic oligonucleotide
  Antisense strand to SEQ ID NO: 62564
aucgaagacauuauuauca

SEQ ID NO: 62646 - RNA, 19 nt, Artificial Sequence
  Description of Artificial Sequence: Synthetic oligonucleotide
  Sense strand starting at position 417 of SEQ ID NO: 774
aaggcaucauguuugauaa

SEQ ID NO: 62647 - RNA, 19 nt, Artificial Sequence
  Description of Artificial Sequence: Synthetic oligonucleotide
  Antisense strand to SEQ ID NO: 62566
uuaucaaacaugaugccuu

SEQ ID NO: 62648 - RNA, 19 nt, Artificial Sequence
  Description of Artificial Sequence: Synthetic oligonucleotide
  Sense strand starting at position 350 of SEQ ID NO: 774
gacccugacugauuaggua

SEQ ID NO: 62649 - RNA, 19 nt, Artificial Sequence
  Description of Artificial Sequence: Synthetic oligonucleotide
  Antisense strand to SEQ ID NO: 62568
uaccuaaucagucaggguc

SEQ ID NO: 62650 - RNA, 19 nt, Artificial Sequence
  Description of Artificial Sequence: Synthetic oligonucleotide
  Sense strand starting at position 346 of SEQ ID NO: 774
uccugacccugacugauua

SEQ ID NO: 62651 - RNA, 19 nt, Artificial Sequence
  Description of Artificial Sequence: Synthetic oligonucleotide
  Antisense strand to SEQ ID NO: 62570
uaaucagucagggucagga

SEQ ID NO: 62652 - RNA, 19 nt, Artificial Sequence
  Description of Artificial Sequence: Synthetic oligonucleotide
  Sense strand starting at position 307 of SEQ ID NO: 774
cggcuaauuuaguuaggca

SEQ ID NO: 62653 - RNA, 19 nt, Artificial Sequence
  Description of Artificial Sequence: Synthetic oligonucleotide
  Antisense strand to SEQ ID NO: 62572
ugccuaacuaaauuagccg

SEQ ID NO: 62654 - RNA, 19 nt, Artificial Sequence
  Description of Artificial Sequence: Synthetic oligonucleotide
  Sense strand starting at position 280 of SEQ ID NO: 774
gacugagauuacuuuaguc

SEQ ID NO: 62655 - RNA, 19 nt, Artificial Sequence
  Description of Artificial Sequence: Synthetic oligonucleotide
  Antisense strand to SEQ ID NO: 62574
gacuaaaguaaucucaguc

SEQ ID NO: 62656 - RNA, 19 nt, Artificial Sequence
  Description of Artificial Sequence: Synthetic oligonucleotide
  Sense strand starting at position 3959 of SEQ ID NO: 775
cagauaaggugucuugauu

SEQ ID NO: 62657 - RNA, 19 nt, Artificial Sequence
  Description of Artificial Sequence: Synthetic oligonucleotide
  Antisense strand to SEQ ID NO: 62576
aaucaagacaccuuaucug

SEQ ID NO: 62658 - RNA, 19 nt, Artificial Sequence
  Description of Artificial Sequence: Synthetic oligonucleotide
  Sense strand starting at position 3895 of SEQ ID NO: 775
guaaauacuguguaugauu

SEQ ID NO: 62659 - RNA, 19 nt, Artificial Sequence
  Description of Artificial Sequence: Synthetic oligonucleotide
  Antisense strand to SEQ ID NO: 62578
aaucauacacaguauuuac

SEQ ID NO: 62660 - RNA, 19 nt, Artificial Sequence
  Description of Artificial Sequence: Synthetic oligonucleotide
  Sense strand starting at position 3894 of SEQ ID NO: 775
aguaaauacuguguaugau

SEQ ID NO: 62661 - RNA, 19 nt, Artificial Sequence
  Description of Artificial Sequence: Synthetic oligonucleotide
  Antisense strand to SEQ ID NO: 62580
aucauacacaguauuuacu

SEQ ID NO: 62662 - RNA, 19 nt, Artificial Sequence
  Description of Artificial Sequence: Synthetic oligonucleotide
  Sense strand starting at position 3509 of SEQ ID NO: 775
agugaaguaacuugggagu

SEQ ID NO: 62663 - RNA, 19 nt, Artificial Sequence
  Description of Artificial Sequence: Synthetic oligonucleotide
  Antisense strand to SEQ ID NO: 62582
acucccaaguuacuucacu

SEQ ID NO: 62664 - RNA, 19 nt, Artificial Sequence
  Description of Artificial Sequence: Synthetic oligonucleotide
  Sense strand starting at position 3490 of SEQ ID NO: 775
guugcagaccauuauccua

SEQ ID NO: 62665 - RNA, 19 nt, Artificial Sequence
  Description of Artificial Sequence: Synthetic oligonucleotide
  Antisense strand to SEQ ID NO: 62584
uaggauaauggucugcaac

SEQ ID NO: 62666 - RNA, 19 nt, Artificial Sequence
  Description of Artificial Sequence: Synthetic oligonucleotide
  Sense strand starting at position 3406 of SEQ ID NO: 775
uaauucgugguauauacau

SEQ ID NO: 62667 - RNA, 19 nt, Artificial Sequence
  Description of Artificial Sequence: Synthetic oligonucleotide
  Antisense strand to SEQ ID NO: 62586
auguauauaccacgaauua

SEQ ID NO: 62668 - RNA, 19 nt, Artificial Sequence
  Description of Artificial Sequence: Synthetic oligonucleotide
  Sense strand starting at position 3399 of SEQ ID NO: 775
ggauaaauaauucguggua

SEQ ID NO: 62669 - RNA, 19 nt, Artificial Sequence
  Description of Artificial Sequence: Synthetic oligonucleotide
  Antisense strand to SEQ ID NO: 62588
uaccacgaauuauuuaucc

SEQ ID NO: 62670 - RNA, 19 nt, Artificial Sequence
  Description of Artificial Sequence: Synthetic oligonucleotide
  Sense strand starting at position 3191 of SEQ ID NO: 775
ugacuauuagccugagaaa

SEQ ID NO: 62671 - RNA, 19 nt, Artificial Sequence
  Description of Artificial Sequence: Synthetic oligonucleotide
  Antisense strand to SEQ ID NO: 62590
uuucucaggcuaauaguca

SEQ ID NO: 62672 - RNA, 19 nt, Artificial Sequence
  Description of Artificial Sequence: Synthetic oligonucleotide
  Sense strand starting at position 3189 of SEQ ID NO: 775
uuugacuauuagccugaga

SEQ ID NO: 62673 - RNA, 19 nt, Artificial Sequence
  Description of Artificial Sequence: Synthetic oligonucleotide
  Antisense strand to SEQ ID NO: 62592
ucucaggcuaauagucaaa

SEQ ID NO: 62674 - RNA, 19 nt, Artificial Sequence
  Description of Artificial Sequence: Synthetic oligonucleotide
  Sense strand starting at position 2792 of SEQ ID NO: 775
agaaguacugcaugaacau

SEQ ID NO: 62675 - RNA, 19 nt, Artificial Sequence
  Description of Artificial Sequence: Synthetic oligonucleotide
  Antisense strand to SEQ ID NO: 62594
auguucaugcaguacuucu

SEQ ID NO: 62676 - RNA, 19 nt, Artificial Sequence
  Description of Artificial Sequence: Synthetic oligonucleotide
  Sense strand starting at position 2684 of SEQ ID NO: 775
aacgacagauuguuggaaa

SEQ ID NO: 62677 - RNA, 19 nt, Artificial Sequence
  Description of Artificial Sequence: Synthetic oligonucleotide
  Antisense strand to SEQ ID NO: 62596
uuuccaacaaucugucguu

SEQ ID NO: 62678 - RNA, 19 nt, Artificial Sequence
  Description of Artificial Sequence: Synthetic oligonucleotide
  Sense strand starting at position 2679 of SEQ ID NO: 775
ugguuaacgacagauuguu

SEQ ID NO: 62679 - RNA, 19 nt, Artificial Sequence
  Description of Artificial Sequence: Synthetic oligonucleotide
  Antisense strand to SEQ ID NO: 62598
aacaaucugucguuaacca

SEQ ID NO: 62680 - RNA, 19 nt, Artificial Sequence
  Description of Artificial Sequence: Synthetic oligonucleotide
  Sense strand starting at position 2671 of SEQ ID NO: 775
cuuugaaaugguuaacgac

SEQ ID NO: 62681 - RNA, 19 nt, Artificial Sequence
  Description of Artificial Sequence: Synthetic oligonucleotide
  Antisense strand to SEQ ID NO: 62600
gucguuaaccauuucaaag

SEQ ID NO: 62682 - RNA, 19 nt, Artificial Sequence
  Description of Artificial Sequence: Synthetic oligonucleotide
  Sense strand starting at position 2627 of SEQ ID NO: 775
guuacacagcauuaugaau

SEQ ID NO: 62683 - RNA, 19 nt, Artificial Sequence
  Description of Artificial Sequence: Synthetic oligonucleotide
  Antisense strand to SEQ ID NO: 62602
auucauaaugcuguguaac

SEQ ID NO: 62684 - RNA, 19 nt, Artificial Sequence
  Description of Artificial Sequence: Synthetic oligonucleotide
  Sense strand starting at position 2420 of SEQ ID NO: 775
ucgaguauugcguucacca

SEQ ID NO: 62685 - RNA, 19 nt, Artificial Sequence
  Description of Artificial Sequence: Synthetic oligonucleotide
  Antisense strand to SEQ ID NO: 62604
uggugaacgcaauacucga

SEQ ID NO: 62686 - RNA, 19 nt, Artificial Sequence
  Description of Artificial Sequence: Synthetic oligonucleotide
  Sense strand starting at position 2388 of SEQ ID NO: 775
gagucugaucuugggaauc

SEQ ID NO: 62687 - RNA, 19 nt, Artificial Sequence
  Description of Artificial Sequence: Synthetic oligonucleotide
  Antisense strand to SEQ ID NO: 62606
gauucccaagaucagacuc

SEQ ID NO: 62688 - RNA, 19 nt, Artificial Sequence
  Description of Artificial Sequence: Synthetic oligonucleotide
  Sense strand starting at position 2082 of SEQ ID NO: 775
ugauauguacuuuagacuc

SEQ ID NO: 62689 - RNA, 19 nt, Artificial Sequence
  Description of Artificial Sequence: Synthetic oligonucleotide
  Antisense strand to SEQ ID NO: 62608
gagucuaaaguacauauca

SEQ ID NO: 62690 - RNA, 19 nt, Artificial Sequence
  Description of Artificial Sequence: Synthetic oligonucleotide
  Sense strand starting at position 2080 of SEQ ID NO: 775
ggugauauguacuuuagac

SEQ ID NO: 62691 - RNA, 19 nt, Artificial Sequence
  Description of Artificial Sequence: Synthetic oligonucleotide
  Antisense strand to SEQ ID NO: 62610
gucuaaaguacauaucacc

SEQ ID NO: 62692 - RNA, 19 nt, Artificial Sequence
  Description of Artificial Sequence: Synthetic oligonucleotide
  Sense strand starting at position 2053 of SEQ ID NO: 775
agcgaaaugcuaggagaaa

SEQ ID NO: 62693 - RNA, 19 nt, Artificial Sequence
  Description of Artificial Sequence: Synthetic oligonucleotide
  Antisense strand to SEQ ID NO: 62612
uuucuccuagcauuucgcu

SEQ ID NO: 62694 - RNA, 19 nt, Artificial Sequence
  Description of Artificial Sequence: Synthetic oligonucleotide
  Sense strand starting at position 2040 of SEQ ID NO: 775
ugauuaaugcaacagcgaa

SEQ ID NO: 62695 - RNA, 19 nt, Artificial Sequence
  Description of Artificial Sequence: Synthetic oligonucleotide
  Antisense strand to SEQ ID NO: 62614
uucgcuguugcauuaauca

SEQ ID NO: 62696 - RNA, 19 nt, Artificial Sequence
  Description of Artificial Sequence: Synthetic oligonucleotide
  Sense strand starting at position 1830 of SEQ ID NO: 775
auuauaucugguuacuuac

SEQ ID NO: 62697 - RNA, 19 nt, Artificial Sequence
  Description of Artificial Sequence: Synthetic oligonucleotide
  Antisense strand to SEQ ID NO: 62616
guaaguaaccagauauaau

SEQ ID NO: 62698 - RNA, 19 nt, Artificial Sequence
  Description of Artificial Sequence: Synthetic oligonucleotide
  Sense strand starting at position 1825 of SEQ ID NO: 775
cagagauuauaucugguua

SEQ ID NO: 62699 - RNA, 19 nt, Artificial Sequence
  Description of Artificial Sequence: Synthetic oligonucleotide
  Antisense strand to SEQ ID NO: 62618
uaaccagauauaaucucug

SEQ ID NO: 62700 - RNA, 19 nt, Artificial Sequence
  Description of Artificial Sequence: Synthetic oligonucleotide
  Sense strand starting at position 1757 of SEQ ID NO: 775
gguucuucccuggagcaca

SEQ ID NO: 62701 - RNA, 19 nt, Artificial Sequence
  Description of Artificial Sequence: Synthetic oligonucleotide
  Antisense strand to SEQ ID NO: 62620
ugugcuccagggaagaacc

SEQ ID NO: 62702 - RNA, 19 nt, Artificial Sequence
  Description of Artificial Sequence: Synthetic oligonucleotide
  Sense strand starting at position 1624 of SEQ ID NO: 775
uuauuaagugguugaauca

SEQ ID NO: 62703 - RNA, 19 nt, Artificial Sequence
  Description of Artificial Sequence: Synthetic oligonucleotide
  Antisense strand to SEQ ID NO: 62622
ugauucaaccacuuaauaa

SEQ ID NO: 62704 - RNA, 19 nt, Artificial Sequence
  Description of Artificial Sequence: Synthetic oligonucleotide
  Sense strand starting at position 1623 of SEQ ID NO: 775
auuauuaagugguugaauc

SEQ ID NO: 62705 - RNA, 19 nt, Artificial Sequence
  Description of Artificial Sequence: Synthetic oligonucleotide
  Antisense strand to SEQ ID NO: 62624
gauucaaccacuuaauaau

SEQ ID NO: 62706 - RNA, 19 nt, Artificial Sequence
  Description of Artificial Sequence: Synthetic oligonucleotide
  Sense strand starting at position 1621 of SEQ ID NO: 775
agauuauuaagugguugaa

SEQ ID NO: 62707 - RNA, 19 nt, Artificial Sequence
  Description of Artificial Sequence: Synthetic oligonucleotide
  Antisense strand to SEQ ID NO: 62626
uucaaccacuuaauaaucu

SEQ ID NO: 62708 - RNA, 19 nt, Artificial Sequence
  Description of Artificial Sequence: Synthetic oligonucleotide
  Sense strand starting at position 1608 of SEQ ID NO: 775
uauacugcuggguagauua

SEQ ID NO: 62709 - RNA, 19 nt, Artificial Sequence
  Description of Artificial Sequence: Synthetic oligonucleotide
  Antisense strand to SEQ ID NO: 62628
uaaucuacccagcaguaua

SEQ ID NO: 62710 - RNA, 19 nt, Artificial Sequence
  Description of Artificial Sequence: Synthetic oligonucleotide
  Sense strand starting at position 1453 of SEQ ID NO: 775
gaucucagacaauguuaga

SEQ ID NO: 62711 - RNA, 19 nt, Artificial Sequence
  Description of Artificial Sequence: Synthetic oligonucleotide
  Antisense strand to SEQ ID NO: 62630
ucuaacauugucugagauc

SEQ ID NO: 62712 - RNA, 19 nt, Artificial Sequence
  Description of Artificial Sequence: Synthetic oligonucleotide
  Sense strand starting at position 1272 of SEQ ID NO: 775
ugccaaucacauggaaauc

SEQ ID NO: 62713 - RNA, 19 nt, Artificial Sequence
  Description of Artificial Sequence: Synthetic oligonucleotide
  Antisense strand to SEQ ID NO: 62632
gauuuccaugugauuggca

SEQ ID NO: 62714 - RNA, 19 nt, Artificial Sequence
  Description of Artificial Sequence: Synthetic oligonucleotide
  Sense strand starting at position 1109 of SEQ ID NO: 775
auagcagauucccuaggau

SEQ ID NO: 62715 - RNA, 19 nt, Artificial Sequence
  Description of Artificial Sequence: Synthetic oligonucleotide
  Antisense strand to SEQ ID NO: 62634
auccuagggaaucugcuau

SEQ ID NO: 62716 - RNA, 19 nt, Artificial Sequence
  Description of Artificial Sequence: Synthetic oligonucleotide
  Sense strand starting at position 1015 of SEQ ID NO: 775
agcagcagcuccucauuua

SEQ ID NO: 62717 - RNA, 19 nt, Artificial Sequence
  Description of Artificial Sequence: Synthetic oligonucleotide
  Antisense strand to SEQ ID NO: 62636
uaaaugaggagcugcugcu

SEQ ID NO: 62718 - RNA, 19 nt, Artificial Sequence
  Description of Artificial Sequence: Synthetic oligonucleotide
  Sense strand starting at position 816 of SEQ ID NO: 775
gaauacugguuggcacaga

SEQ ID NO: 62719 - RNA, 19 nt, Artificial Sequence
  Description of Artificial Sequence: Synthetic oligonucleotide
  Antisense strand to SEQ ID NO: 62638
ucugugccaaccaguauuc

SEQ ID NO: 62720 - RNA, 19 nt, Artificial Sequence
  Description of Artificial Sequence: Synthetic oligonucleotide
  Sense strand starting at position 814 of SEQ ID NO: 775
cagaauacugguuggcaca

SEQ ID NO: 62721 - RNA, 19 nt, Artificial Sequence
  Description of Artificial Sequence: Synthetic oligonucleotide
  Antisense strand to SEQ ID NO: 62640
ugugccaaccaguauucug

SEQ ID NO: 62722 - RNA, 19 nt, Artificial Sequence
  Description of Artificial Sequence: Synthetic oligonucleotide
  Sense strand starting at position 641 of SEQ ID NO: 775
gugacucaccuaugcauuu

SEQ ID NO: 62723 - RNA, 19 nt, Artificial Sequence
  Description of Artificial Sequence: Synthetic oligonucleotide
  Antisense strand to SEQ ID NO: 62642
aaaugcauaggugagucac

SEQ ID NO: 62724 - RNA, 19 nt, Artificial Sequence
  Description of Artificial Sequence: Synthetic oligonucleotide
  Sense strand starting at position 379 of SEQ ID NO: 775
acuacaaaguuguuagaac

SEQ ID NO: 62725 - RNA, 19 nt, Artificial Sequence
  Description of Artificial Sequence: Synthetic oligonucleotide
  Antisense strand to SEQ ID NO: 62644
guucuaacaacuuuguagu

SEQ ID NO: 62726 - RNA, 19 nt, Artificial Sequence
  Description of Artificial Sequence: Synthetic oligonucleotide
  Sense strand starting at position 176 of SEQ ID NO: 775
ugacaauugcuaugacaaa

SEQ ID NO: 62727 - RNA, 19 nt, Artificial Sequence
  Description of Artificial Sequence: Synthetic oligonucleotide
  Antisense strand to SEQ ID NO: 62646
uuugucauagcaauuguca

SEQ ID NO: 62728 - RNA, 19 nt, Artificial Sequence
  Description of Artificial Sequence: Synthetic oligonucleotide
  Sense strand starting at position 86 of SEQ ID NO: 775
uaaguauuagcugaaagua

SEQ ID NO: 62729 - RNA, 19 nt, Artificial Sequence
  Description of Artificial Sequence: Synthetic oligonucleotide
  Antisense strand to SEQ ID NO: 62648
uacuuucagcuaauacuua

SEQ ID NO: 62730 - RNA, 19 nt, Artificial Sequence
  Description of Artificial Sequence: Synthetic oligonucleotide
  Sense strand starting at position 69 of SEQ ID NO: 775
ucaguugaacacuaugcua

SEQ ID NO: 62731 - RNA, 19 nt, Artificial Sequence
  Description of Artificial Sequence: Synthetic oligonucleotide
  Antisense strand to SEQ ID NO: 62650
uagcauaguguucaacuga

SEQ ID NO: 62732 - RNA, 19 nt, Artificial Sequence
  Description of Artificial Sequence: Synthetic oligonucleotide
  Sense strand starting at position 48 of SEQ ID NO: 775
gaagcacagugauucuuga

SEQ ID NO: 62733 - RNA, 19 nt, Artificial Sequence
  Description of Artificial Sequence: Synthetic oligonucleotide
  Antisense strand to SEQ ID NO: 62652
ucaagaaucacugugcuuc

SEQ ID NO: 62734 - RNA, 19 nt, Artificial Sequence
  Description of Artificial Sequence: Synthetic oligonucleotide
  Sense strand starting at position 45 of SEQ ID NO: 775
gaagaagcacagugauucu

SEQ ID NO: 62735 - RNA, 19 nt, Artificial Sequence
  Description of Artificial Sequence: Synthetic oligonucleotide
  Antisense strand to SEQ ID NO: 62654
agaaucacugugcuucuuc

SEQ ID NO: 62736 - RNA, 19 nt, Artificial Sequence
  Description of Artificial Sequence: Synthetic oligonucleotide
  Sense strand starting at position 3882 of SEQ ID NO: 776
guuauccuccagggauaac

SEQ ID NO: 62737 - RNA, 19 nt, Artificial Sequence
  Description of Artificial Sequence: Synthetic oligonucleotide
  Antisense strand to SEQ ID NO: 62656
guuaucccuggaggauaac

SEQ ID NO: 62738 - RNA, 19 nt, Artificial Sequence
  Description of Artificial Sequence: Synthetic oligonucleotide
  Sense strand starting at position 3881 of SEQ ID NO: 776
aguuauccuccagggauaa

SEQ ID NO: 62739 - RNA, 19 nt, Artificial Sequence
  Description of Artificial Sequence: Synthetic oligonucleotide
  Antisense strand to SEQ ID NO: 62658
uuaucccuggaggauaacu

SEQ ID NO: 62740 - RNA, 19 nt, Artificial Sequence
  Description of Artificial Sequence: Synthetic oligonucleotide
  Sense strand starting at position 3879 of SEQ ID NO: 776
uuaguuauccuccagggau

SEQ ID NO: 62741 - RNA, 19 nt, Artificial Sequence
  Description of Artificial Sequence: Synthetic oligonucleotide
  Antisense strand to SEQ ID NO: 62660
aucccuggaggauaacuaa

SEQ ID NO: 62742 - RNA, 19 nt, Artificial Sequence
  Description of Artificial Sequence: Synthetic oligonucleotide
  Sense strand starting at position 3385 of SEQ ID NO: 776
cuaggaguucaaggucaga

SEQ ID NO: 62743 - RNA, 19 nt, Artificial Sequence
  Description of Artificial Sequence: Synthetic oligonucleotide
  Antisense strand to SEQ ID NO: 62662
ucugaccuugaacuccuag

SEQ ID NO: 62744 - RNA, 19 nt, Artificial Sequence
  Description of Artificial Sequence: Synthetic oligonucleotide
  Sense strand starting at position 3224 of SEQ ID NO: 776
gcagcaacucuaugacaag

SEQ ID NO: 62745 - RNA, 19 nt, Artificial Sequence
  Description of Artificial Sequence: Synthetic oligonucleotide
  Antisense strand to SEQ ID NO: 62664
cuugucauagaguugcugc

SEQ ID NO: 62746 - RNA, 19 nt, Artificial Sequence
  Description of Artificial Sequence: Synthetic oligonucleotide
  Sense strand starting at position 3181 of SEQ ID NO: 776
aaauaaauuggucgugaua

SEQ ID NO: 62747 - RNA, 19 nt, Artificial Sequence
  Description of Artificial Sequence: Synthetic oligonucleotide
  Antisense strand to SEQ ID NO: 62666
uaucacgaccaauuuauuu

SEQ ID NO: 62748 - RNA, 19 nt, Artificial Sequence
  Description of Artificial Sequence: Synthetic oligonucleotide
  Sense strand starting at position 3138 of SEQ ID NO: 776
caaauaagguguucuagaa

SEQ ID NO: 62749 - RNA, 19 nt, Artificial Sequence
  Description of Artificial Sequence: Synthetic oligonucleotide
  Antisense strand to SEQ ID NO: 62668
uucuagaacaccuuauuug

SEQ ID NO: 62750 - RNA, 19 nt, Artificial Sequence
  Description of Artificial Sequence: Synthetic oligonucleotide
  Sense strand starting at position 3009 of SEQ ID NO: 776
uuacuuuguaguugaggga

SEQ ID NO: 62751 - RNA, 19 nt, Artificial Sequence
  Description of Artificial Sequence: Synthetic oligonucleotide
  Antisense strand to SEQ ID NO: 62670
ucccucaacuacaaaguaa

SEQ ID NO: 62752 - RNA, 19 nt, Artificial Sequence
  Description of Artificial Sequence: Synthetic oligonucleotide
  Sense strand starting at position 2862 of SEQ ID NO: 776
agaccaguuucucuaagga

SEQ ID NO: 62753 - RNA, 19 nt, Artificial Sequence
  Description of Artificial Sequence: Synthetic oligonucleotide
  Antisense strand to SEQ ID NO: 62672
uccuuagagaaacuggucu

SEQ ID NO: 62754 - RNA, 19 nt, Artificial Sequence
  Description of Artificial Sequence: Synthetic oligonucleotide
  Sense strand starting at position 2749 of SEQ ID NO: 776
aguuauuaggguuaacauu

SEQ ID NO: 62755 - RNA, 19 nt, Artificial Sequence
  Description of Artificial Sequence: Synthetic oligonucleotide
  Antisense strand to SEQ ID NO: 62674
aauguuaacccuaauaacu

SEQ ID NO: 62756 - RNA, 19 nt, Artificial Sequence
  Description of Artificial Sequence: Synthetic oligonucleotide
  Sense strand starting at position 2521 of SEQ ID NO: 776
uuguguucuggcuuaguuu

SEQ ID NO: 62757 - RNA, 19 nt, Artificial Sequence
  Description of Artificial Sequence: Synthetic oligonucleotide
  Antisense strand to SEQ ID NO: 62676
aaacuaagccagaacacaa

SEQ ID NO: 62758 - RNA, 19 nt, Artificial Sequence
  Description of Artificial Sequence: Synthetic oligonucleotide
  Sense strand starting at position 2486 of SEQ ID NO: 776
gacagauuauguuccugau

SEQ ID NO: 62759 - RNA, 19 nt, Artificial Sequence
  Description of Artificial Sequence: Synthetic oligonucleotide
  Antisense strand to SEQ ID NO: 62678
aucaggaacauaaucuguc

SEQ ID NO: 62760 - RNA, 19 nt, Artificial Sequence
  Description of Artificial Sequence: Synthetic oligonucleotide
  Sense strand starting at position 2349 of SEQ ID NO: 776
aucaauauuguguaccuau

SEQ ID NO: 62761 - RNA, 19 nt, Artificial Sequence
  Description of Artificial Sequence: Synthetic oligonucleotide
  Antisense strand to SEQ ID NO: 62680
auagguacacaauauugau

SEQ ID NO: 62762 - RNA, 19 nt, Artificial Sequence
  Description of Artificial Sequence: Synthetic oligonucleotide
  Sense strand starting at position 2342 of SEQ ID NO: 776
cuaguauaucaauauugug

SEQ ID NO: 62763 - RNA, 19 nt, Artificial Sequence
  Description of Artificial Sequence: Synthetic oligonucleotide
  Antisense strand to SEQ ID NO: 62682
cacaauauugauauacuag

SEQ ID NO: 62764 - RNA, 19 nt, Artificial Sequence
  Description of Artificial Sequence: Synthetic oligonucleotide
  Sense strand starting at position 2070 of SEQ ID NO: 776
augcaaugucuuuacagua

SEQ ID NO: 62765 - RNA, 19 nt, Artificial Sequence
  Description of Artificial Sequence: Synthetic oligonucleotide
  Antisense strand to SEQ ID NO: 62684
uacuguaaagacauugcau

SEQ ID NO: 62766 - RNA, 19 nt, Artificial Sequence
  Description of Artificial Sequence: Synthetic oligonucleotide
  Sense strand starting at position 2053 of SEQ ID NO: 776
ugaggucaacaguaguaau

SEQ ID NO: 62767 - RNA, 19 nt, Artificial Sequence
  Description of Artificial Sequence: Synthetic oligonucleotide
  Antisense strand to SEQ ID NO: 62686
auuacuacuguugaccuca

SEQ ID NO: 62768 - RNA, 19 nt, Artificial Sequence
  Description of Artificial Sequence: Synthetic oligonucleotide
  Sense strand starting at position 2050 of SEQ ID NO: 776
cucugaggucaacaguagu

SEQ ID NO: 62769 - RNA, 19 nt, Artificial Sequence
  Description of Artificial Sequence: Synthetic oligonucleotide
  Antisense strand to SEQ ID NO: 62688
acuacuguugaccucagag

SEQ ID NO: 62770 - RNA, 19 nt, Artificial Sequence
  Description of Artificial Sequence: Synthetic oligonucleotide
  Sense strand starting at position 2004 of SEQ ID NO: 776
uccaaagacuuaguuagga

SEQ ID NO: 62771 - RNA, 19 nt, Artificial Sequence
  Description of Artificial Sequence: Synthetic oligonucleotide
  Antisense strand to SEQ ID NO: 62690
uccuaacuaagucuuugga

SEQ ID NO: 62772 - RNA, 19 nt, Artificial Sequence
  Description of Artificial Sequence: Synthetic oligonucleotide
  Sense strand starting at position 1573 of SEQ ID NO: 776
gguaauuggcuuuaaacau

SEQ ID NO: 62773 - RNA, 19 nt, Artificial Sequence
  Description of Artificial Sequence: Synthetic oligonucleotide
  Antisense strand to SEQ ID NO: 62692
auguuuaaagccaauuacc

SEQ ID NO: 62774 - RNA, 19 nt, Artificial Sequence
  Description of Artificial Sequence: Synthetic oligonucleotide
  Sense strand starting at position 1570 of SEQ ID NO: 776
ucagguaauuggcuuuaaa

SEQ ID NO: 62775 - RNA, 19 nt, Artificial Sequence
  Description of Artificial Sequence: Synthetic oligonucleotide
  Antisense strand to SEQ ID NO: 62694
uuuaaagccaauuaccuga

SEQ ID NO: 62776 - RNA, 19 nt, Artificial Sequence
  Description of Artificial Sequence: Synthetic oligonucleotide
  Sense strand starting at position 1559 of SEQ ID NO: 776
uuaugaugugcucagguaa

SEQ ID NO: 62777 - RNA, 19 nt, Artificial Sequence
  Description of Artificial Sequence: Synthetic oligonucleotide
  Antisense strand to SEQ ID NO: 62696
uuaccugagcacaucauaa

SEQ ID NO: 62778 - RNA, 19 nt, Artificial Sequence
  Description of Artificial Sequence: Synthetic oligonucleotide
  Sense strand starting at position 1547 of SEQ ID NO: 776
guaagagaauccuuaugau

SEQ ID NO: 62779 - RNA, 19 nt, Artificial Sequence
  Description of Artificial Sequence: Synthetic oligonucleotide
  Antisense strand to SEQ ID NO: 62698
aucauaaggauucucuuac

SEQ ID NO: 62780 - RNA, 19 nt, Artificial Sequence
  Description of Artificial Sequence: Synthetic oligonucleotide
  Sense strand starting at position 1502 of SEQ ID NO: 776
cugucaaggaguugaucaa

SEQ ID NO: 62781 - RNA, 19 nt, Artificial Sequence
  Description of Artificial Sequence: Synthetic oligonucleotide
  Antisense strand to SEQ ID NO: 62700
uugaucaacuccuugacag

SEQ ID NO: 62782 - RNA, 19 nt, Artificial Sequence
  Description of Artificial Sequence: Synthetic oligonucleotide
  Sense strand starting at position 1498 of SEQ ID NO: 776
gcuccugucaaggaguuga

SEQ ID NO: 62783 - RNA, 19 nt, Artificial Sequence
  Description of Artificial Sequence: Synthetic oligonucleotide
  Antisense strand to SEQ ID NO: 62702
ucaacuccuugacaggagc

SEQ ID NO: 62784 - RNA, 19 nt, Artificial Sequence
  Description of Artificial Sequence: Synthetic oligonucleotide
  Sense strand starting at position 1104 of SEQ ID NO: 776
aaguaugggcuguaagaca

SEQ ID NO: 62785 - RNA, 19 nt, Artificial Sequence
  Description of Artificial Sequence: Synthetic oligonucleotide
  Antisense strand to SEQ ID NO: 62704
ugucuuacagcccauacuu

SEQ ID NO: 62786 - RNA, 19 nt, Artificial Sequence
  Description of Artificial Sequence: Synthetic oligonucleotide
  Sense strand starting at position 1102 of SEQ ID NO: 776
agaaguaugggcuguaaga

SEQ ID NO: 62787 - RNA, 19 nt, Artificial Sequence
  Description of Artificial Sequence: Synthetic oligonucleotide
  Antisense strand to SEQ ID NO: 62706
ucuuacagcccauacuucu

SEQ ID NO: 62788 - RNA, 19 nt, Artificial Sequence
  Description of Artificial Sequence: Synthetic oligonucleotide
  Sense strand starting at position 1100 of SEQ ID NO: 776
acagaaguaugggcuguaa

SEQ ID NO: 62789 - RNA, 19 nt, Artificial Sequence
  Description of Artificial Sequence: Synthetic oligonucleotide
  Antisense strand to SEQ ID NO: 62708
uuacagcccauacuucugu

SEQ ID NO: 62790 - RNA, 19 nt, Artificial Sequence
  Description of Artificial Sequence: Synthetic oligonucleotide
  Sense strand starting at position 1099 of SEQ ID NO: 776
gacagaaguaugggcugua

SEQ ID NO: 62791 - RNA, 19 nt, Artificial Sequence
  Description of Artificial Sequence: Synthetic oligonucleotide
  Antisense strand to SEQ ID NO: 62710
uacagcccauacuucuguc

SEQ ID NO: 62792 - RNA, 19 nt, Artificial Sequence
  Description of Artificial Sequence: Synthetic oligonucleotide
  Sense strand starting at position 1086 of SEQ ID NO: 776
cguauuaaagaaugacaga

SEQ ID NO: 62793 - RNA, 19 nt, Artificial Sequence
  Description of Artificial Sequence: Synthetic oligonucleotide
  Antisense strand to SEQ ID NO: 62712
ucugucauucuuuaauacg

SEQ ID NO: 62794 - RNA, 19 nt, Artificial Sequence
  Description of Artificial Sequence: Synthetic oligonucleotide
  Sense strand starting at position 1035 of SEQ ID NO: 776
ugagaagaaucccuguuac

SEQ ID NO: 62795 - RNA, 19 nt, Artificial Sequence
  Description of Artificial Sequence: Synthetic oligonucleotide
  Antisense strand to SEQ ID NO: 62714
guaacagggauucuucuca

SEQ ID NO: 62796 - RNA, 19 nt, Artificial Sequence
  Description of Artificial Sequence: Synthetic oligonucleotide
  Sense strand starting at position 976 of SEQ ID NO: 776
auaagagcauggucucuaa

SEQ ID NO: 62797 - RNA, 19 nt, Artificial Sequence
  Description of Artificial Sequence: Synthetic oligonucleotide
  Antisense strand to SEQ ID NO: 62716
uuagagaccaugcucuuau

SEQ ID NO: 62798 - RNA, 19 nt, Artificial Sequence
  Description of Artificial Sequence: Synthetic oligonucleotide
  Sense strand starting at position 923 of SEQ ID NO: 776
ugauaaagcucaguaaaca

SEQ ID NO: 62799 - RNA, 19 nt, Artificial Sequence
  Description of Artificial Sequence: Synthetic oligonucleotide
  Antisense strand to SEQ ID NO: 62718
uguuuacugagcuuuauca

SEQ ID NO: 62800 - RNA, 19 nt, Artificial Sequence
  Description of Artificial Sequence: Synthetic oligonucleotide
  Sense strand starting at position 905 of SEQ ID NO: 776
guuauacuagaaugucauu

SEQ ID NO: 62801 - RNA, 19 nt, Artificial Sequence
  Description of Artificial Sequence: Synthetic oligonucleotide
  Antisense strand to SEQ ID NO: 62720
aaugacauucuaguauaac

SEQ ID NO: 62802 - RNA, 19 nt, Artificial Sequence
  Description of Artificial Sequence: Synthetic oligonucleotide
  Sense strand starting at position 902 of SEQ ID NO: 776
gcaguuauacuagaauguc

SEQ ID NO: 62803 - RNA, 19 nt, Artificial Sequence
  Description of Artificial Sequence: Synthetic oligonucleotide
  Antisense strand to SEQ ID NO: 62722
gacauucuaguauaacugc

SEQ ID NO: 62804 - RNA, 19 nt, Artificial Sequence
  Description of Artificial Sequence: Synthetic oligonucleotide
  Sense strand starting at position 382 of SEQ ID NO: 776
guaagcuacuaccuauuga

SEQ ID NO: 62805 - RNA, 19 nt, Artificial Sequence
  Description of Artificial Sequence: Synthetic oligonucleotide
  Antisense strand to SEQ ID NO: 62724
ucaauagguaguagcuuac

SEQ ID NO: 62806 - RNA, 19 nt, Artificial Sequence
  Description of Artificial Sequence: Synthetic oligonucleotide
  Sense strand starting at position 345 of SEQ ID NO: 776
guaaauaacuugcucaaga

SEQ ID NO: 62807 - RNA, 19 nt, Artificial Sequence
  Description of Artificial Sequence: Synthetic oligonucleotide
  Antisense strand to SEQ ID NO: 62726
ucuugagcaaguuauuuac

SEQ ID NO: 62808 - RNA, 19 nt, Artificial Sequence
  Description of Artificial Sequence: Synthetic oligonucleotide
  Sense strand starting at position 212 of SEQ ID NO: 776
acucuaugaguccggaacu

SEQ ID NO: 62809 - RNA, 19 nt, Artificial Sequence
  Description of Artificial Sequence: Synthetic oligonucleotide
  Antisense strand to SEQ ID NO: 62728
aguuccggacucauagagu

SEQ ID NO: 62810 - RNA, 19 nt, Artificial Sequence
  Description of Artificial Sequence: Synthetic oligonucleotide
  Sense strand starting at position 204 of SEQ ID NO: 776
uuuauugaacucuaugagu

SEQ ID NO: 62811 - RNA, 19 nt, Artificial Sequence
  Description of Artificial Sequence: Synthetic oligonucleotide
  Antisense strand to SEQ ID NO: 62730
acucauagaguucaauaaa

SEQ ID NO: 62812 - RNA, 19 nt, Artificial Sequence
  Description of Artificial Sequence: Synthetic oligonucleotide
  Sense strand starting at position 63 of SEQ ID NO: 776
gggcuuaucuguuuagaag

SEQ ID NO: 62813 - RNA, 19 nt, Artificial Sequence
  Description of Artificial Sequence: Synthetic oligonucleotide
  Antisense strand to SEQ ID NO: 62732
cuucuaaacagauaagccc

SEQ ID NO: 62814 - RNA, 19 nt, Artificial Sequence
  Description of Artificial Sequence: Synthetic oligonucleotide
  Sense strand starting at position 26 of SEQ ID NO: 776
ugagcaagaaugcaaguua

SEQ ID NO: 62815 - RNA, 19 nt, Artificial Sequence
  Description of Artificial Sequence: Synthetic oligonucleotide
  Antisense strand to SEQ ID NO: 62734
uaacuugcauucuugcuca

SEQ ID NO: 62816 - RNA, 19 nt, Artificial Sequence
  Description of Artificial Sequence: Synthetic oligonucleotide
  Sense strand starting at position 3948 of SEQ ID NO: 777
ugcuguguuuauuuccaaa

SEQ ID NO: 62817 - RNA, 19 nt, Artificial Sequence
  Description of Artificial Sequence: Synthetic oligonucleotide
  Antisense strand to SEQ ID NO: 62736
uuuggaaauaaacacagca

SEQ ID NO: 62818 - RNA, 19 nt, Artificial Sequence
  Description of Artificial Sequence: Synthetic oligonucleotide
  Sense strand starting at position 3941 of SEQ ID NO: 777
agaggaaugcuguguuuau

SEQ ID NO: 62819 - RNA, 19 nt, Artificial Sequence
  Description of Artificial Sequence: Synthetic oligonucleotide
  Antisense strand to SEQ ID NO: 62738
auaaacacagcauuccucu

SEQ ID NO: 62820 - RNA, 19 nt, Artificial Sequence
  Description of Artificial Sequence: Synthetic oligonucleotide
  Sense strand starting at position 3824 of SEQ ID NO: 777
ucguaaagaaucgagugaa

SEQ ID NO: 62821 - RNA, 19 nt, Artificial Sequence
  Description of Artificial Sequence: Synthetic oligonucleotide
  Antisense strand to SEQ ID NO: 62740
uucacucgauucuuuacga

SEQ ID NO: 62822 - RNA, 19 nt, Artificial Sequence
  Description of Artificial Sequence: Synthetic oligonucleotide
  Sense strand starting at position 3823 of SEQ ID NO: 777
cucguaaagaaucgaguga

SEQ ID NO: 62823 - RNA, 19 nt, Artificial Sequence
  Description of Artificial Sequence: Synthetic oligonucleotide
  Antisense strand to SEQ ID NO: 62742
ucacucgauucuuuacgag

SEQ ID NO: 62824 - RNA, 19 nt, Artificial Sequence
  Description of Artificial Sequence: Synthetic oligonucleotide
  Sense strand starting at position 3811 of SEQ ID NO: 777
ugaagcuaauaucucguaa

SEQ ID NO: 62825 - RNA, 19 nt, Artificial Sequence
  Description of Artificial Sequence: Synthetic oligonucleotide
  Antisense strand to SEQ ID NO: 62744
uuacgagauauuagcuuca

SEQ ID NO: 62826 - RNA, 19 nt, Artificial Sequence
  Description of Artificial Sequence: Synthetic oligonucleotide
  Sense strand starting at position 3755 of SEQ ID NO: 777
ucaucaaagcuaugaugga

SEQ ID NO: 62827 - RNA, 19 nt, Artificial Sequence
  Description of Artificial Sequence: Synthetic oligonucleotide
  Antisense strand to SEQ ID NO: 62746
uccaucauagcuuugauga

SEQ ID NO: 62828 - RNA, 19 nt, Artificial Sequence
  Description of Artificial Sequence: Synthetic oligonucleotide
  Sense strand starting at position 3688 of SEQ ID NO: 777
ucugaugaugcauaacagu

SEQ ID NO: 62829 - RNA, 19 nt, Artificial Sequence
  Description of Artificial Sequence: Synthetic oligonucleotide
  Antisense strand to SEQ ID NO: 62748
acuguuaugcaucaucaga

SEQ ID NO: 62830 - RNA, 19 nt, Artificial Sequence
  Description of Artificial Sequence: Synthetic oligonucleotide
  Sense strand starting at position 3655 of SEQ ID NO: 777
aggcauauaucucuuguga

SEQ ID NO: 62831 - RNA, 19 nt, Artificial Sequence
  Description of Artificial Sequence: Synthetic oligonucleotide
  Antisense strand to SEQ ID NO: 62750
ucacaagagauauaugccu

SEQ ID NO: 62832 - RNA, 19 nt, Artificial Sequence
  Description of Artificial Sequence: Synthetic oligonucleotide
  Sense strand starting at position 3583 of SEQ ID NO: 777
guucucuugcucuauauuu

SEQ ID NO: 62833 - RNA, 19 nt, Artificial Sequence
  Description of Artificial Sequence: Synthetic oligonucleotide
  Antisense strand to SEQ ID NO: 62752
aaauauagagcaagagaac

SEQ ID NO: 62834 - RNA, 19 nt, Artificial Sequence
  Description of Artificial Sequence: Synthetic oligonucleotide
  Sense strand starting at position 3548 of SEQ ID NO: 777
gcuguuggaggauaugagu

SEQ ID NO: 62835 - RNA, 19 nt, Artificial Sequence
  Description of Artificial Sequence: Synthetic oligonucleotide
  Antisense strand to SEQ ID NO: 62754
acucauauccuccaacagc

SEQ ID NO: 62836 - RNA, 19 nt, Artificial Sequence
  Description of Artificial Sequence: Synthetic oligonucleotide
  Sense strand starting at position 3523 of SEQ ID NO: 777
ccuggaugguugcuagauu

SEQ ID NO: 62837 - RNA, 19 nt, Artificial Sequence
  Description of Artificial Sequence: Synthetic oligonucleotide
  Antisense strand to SEQ ID NO: 62756
aaucuagcaaccauccagg

SEQ ID NO: 62838 - RNA, 19 nt, Artificial Sequence
  Description of Artificial Sequence: Synthetic oligonucleotide
  Sense strand starting at position 3335 of SEQ ID NO: 777
guaucugaagucgacacau

SEQ ID NO: 62839 - RNA, 19 nt, Artificial Sequence
  Description of Artificial Sequence: Synthetic oligonucleotide
  Antisense strand to SEQ ID NO: 62758
augugucgacuucagauac

SEQ ID NO: 62840 - RNA, 19 nt, Artificial Sequence
  Description of Artificial Sequence: Synthetic oligonucleotide
  Sense strand starting at position 3327 of SEQ ID NO: 777
acaagaauguaucugaagu

SEQ ID NO: 62841 - RNA, 19 nt, Artificial Sequence
  Description of Artificial Sequence: Synthetic oligonucleotide
  Antisense strand to SEQ ID NO: 62760
acuucagauacauucuugu

SEQ ID NO: 62842 - RNA, 19 nt, Artificial Sequence
  Description of Artificial Sequence: Synthetic oligonucleotide
  Sense strand starting at position 3282 of SEQ ID NO: 777
aucucucuaggaggugaaa

SEQ ID NO: 62843 - RNA, 19 nt, Artificial Sequence
  Description of Artificial Sequence: Synthetic oligonucleotide
  Antisense strand to SEQ ID NO: 62762
uuucaccuccuagagagau

SEQ ID NO: 62844 - RNA, 19 nt, Artificial Sequence
  Description of Artificial Sequence: Synthetic oligonucleotide
  Sense strand starting at position 3023 of SEQ ID NO: 777
gcaaaugugacuuguagau

SEQ ID NO: 62845 - RNA, 19 nt, Artificial Sequence
  Description of Artificial Sequence: Synthetic oligonucleotide
  Antisense strand to SEQ ID NO: 62764
aucuacaagucacauuugc

SEQ ID NO: 62846 - RNA, 19 nt, Artificial Sequence
  Description of Artificial Sequence: Synthetic oligonucleotide
  Sense strand starting at position 3021 of SEQ ID NO: 777
gagcaaaugugacuuguag

SEQ ID NO: 62847 - RNA, 19 nt, Artificial Sequence
  Description of Artificial Sequence: Synthetic oligonucleotide
  Antisense strand to SEQ ID NO: 62766
cuacaagucacauuugcuc

SEQ ID NO: 62848 - RNA, 19 nt, Artificial Sequence
  Description of Artificial Sequence: Synthetic oligonucleotide
  Sense strand starting at position 2946 of SEQ ID NO: 777
agaggauuaaaggguaugu

SEQ ID NO: 62849 - RNA, 19 nt, Artificial Sequence
  Description of Artificial Sequence: Synthetic oligonucleotide
  Antisense strand to SEQ ID NO: 62768
acauacccuuuaauccucu

SEQ ID NO: 62850 - RNA, 19 nt, Artificial Sequence
  Description of Artificial Sequence: Synthetic oligonucleotide
  Sense strand starting at position 2859 of SEQ ID NO: 777
cuuuccaaucguugauuua

SEQ ID NO: 62851 - RNA, 19 nt, Artificial Sequence
  Description of Artificial Sequence: Synthetic oligonucleotide
  Antisense strand to SEQ ID NO: 62770
uaaaucaacgauuggaaag

SEQ ID NO: 62852 - RNA, 19 nt, Artificial Sequence
  Description of Artificial Sequence: Synthetic oligonucleotide
  Sense strand starting at position 2858 of SEQ ID NO: 777
ccuuuccaaucguugauuu

SEQ ID NO: 62853 - RNA, 19 nt, Artificial Sequence
  Description of Artificial Sequence: Synthetic oligonucleotide
  Antisense strand to SEQ ID NO: 62772
aaaucaacgauuggaaagg

SEQ ID NO: 62854 - RNA, 19 nt, Artificial Sequence
  Description of Artificial Sequence: Synthetic oligonucleotide
  Sense strand starting at position 2787 of SEQ ID NO: 777
aucucugaagugugaguau

SEQ ID NO: 62855 - RNA, 19 nt, Artificial Sequence
  Description of Artificial Sequence: Synthetic oligonucleotide
  Antisense strand to SEQ ID NO: 62774
auacucacacuucagagau

SEQ ID NO: 62856 - RNA, 19 nt, Artificial Sequence
  Description of Artificial Sequence: Synthetic oligonucleotide
  Sense strand starting at position 2717 of SEQ ID NO: 777
cuuaguguaaacugguaua

SEQ ID NO: 62857 - RNA, 19 nt, Artificial Sequence
  Description of Artificial Sequence: Synthetic oligonucleotide
  Antisense strand to SEQ ID NO: 62776
uauaccaguuuacacuaag

SEQ ID NO: 62858 - RNA, 19 nt, Artificial Sequence
  Description of Artificial Sequence: Synthetic oligonucleotide
  Sense strand starting at position 2709 of SEQ ID NO: 777
aagugauacuuaguguaaa

SEQ ID NO: 62859 - RNA, 19 nt, Artificial Sequence
  Description of Artificial Sequence: Synthetic oligonucleotide
  Antisense strand to SEQ ID NO: 62778
uuuacacuaaguaucacuu

SEQ ID NO: 62860 - RNA, 19 nt, Artificial Sequence
  Description of Artificial Sequence: Synthetic oligonucleotide
  Sense strand starting at position 2707 of SEQ ID NO: 777
gcaagugauacuuagugua

SEQ ID NO: 62861 - RNA, 19 nt, Artificial Sequence
  Description of Artificial Sequence: Synthetic oligonucleotide
  Antisense strand to SEQ ID NO: 62780
uacacuaaguaucacuugc

SEQ ID NO: 62862 - RNA, 19 nt, Artificial Sequence
  Description of Artificial Sequence: Synthetic oligonucleotide
  Sense strand starting at position 2423 of SEQ ID NO: 777
gggucaaaggccuguauuu

SEQ ID NO: 62863 - RNA, 19 nt, Artificial Sequence
  Description of Artificial Sequence: Synthetic oligonucleotide
  Antisense strand to SEQ ID NO: 62782
aaauacaggccuuugaccc

SEQ ID NO: 62864 - RNA, 19 nt, Artificial Sequence
  Description of Artificial Sequence: Synthetic oligonucleotide
  Sense strand starting at position 2342 of SEQ ID NO: 777
uuagcuacuuaauugagau

SEQ ID NO: 62865 - RNA, 19 nt, Artificial Sequence
  Description of Artificial Sequence: Synthetic oligonucleotide
  Antisense strand to SEQ ID NO: 62784
aucucaauuaaguagcuaa

SEQ ID NO: 62866 - RNA, 19 nt, Artificial Sequence
  Description of Artificial Sequence: Synthetic oligonucleotide
  Sense strand starting at position 2334 of SEQ ID NO: 777
guagaaacuuagcuacuua

SEQ ID NO: 62867 - RNA, 19 nt, Artificial Sequence
  Description of Artificial Sequence: Synthetic oligonucleotide
  Antisense strand to SEQ ID NO: 62786
uaaguagcuaaguuucuac

SEQ ID NO: 62868 - RNA, 19 nt, Artificial Sequence
  Description of Artificial Sequence: Synthetic oligonucleotide
  Sense strand starting at position 2333 of SEQ ID NO: 777
uguagaaacuuagcuacuu

SEQ ID NO: 62869 - RNA, 19 nt, Artificial Sequence
  Description of Artificial Sequence: Synthetic oligonucleotide
  Antisense strand to SEQ ID NO: 62788
aaguagcuaaguuucuaca

SEQ ID NO: 62870 - RNA, 19 nt, Artificial Sequence
  Description of Artificial Sequence: Synthetic oligonucleotide
  Sense strand starting at position 2314 of SEQ ID NO: 777
auaguaguccuccaaauac

SEQ ID NO: 62871 - RNA, 19 nt, Artificial Sequence
  Description of Artificial Sequence: Synthetic oligonucleotide
  Antisense strand to SEQ ID NO: 62790
guauuuggaggacuacuau

SEQ ID NO: 62872 - RNA, 19 nt, Artificial Sequence
  Description of Artificial Sequence: Synthetic oligonucleotide
  Sense strand starting at position 2232 of SEQ ID NO: 777
gcaguucuguacuccauuu

SEQ ID NO: 62873 - RNA, 19 nt, Artificial Sequence
  Description of Artificial Sequence: Synthetic oligonucleotide
  Antisense strand to SEQ ID NO: 62792
aaauggaguacagaacugc

SEQ ID NO: 62874 - RNA, 19 nt, Artificial Sequence
  Description of Artificial Sequence: Synthetic oligonucleotide
  Sense strand starting at position 1497 of SEQ ID NO: 777
ccgugauucccagaaacaa

SEQ ID NO: 62875 - RNA, 19 nt, Artificial Sequence
  Description of Artificial Sequence: Synthetic oligonucleotide
  Antisense strand to SEQ ID NO: 62794
uuguuucugggaaucacgg

SEQ ID NO: 62876 - RNA, 19 nt, Artificial Sequence
  Description of Artificial Sequence: Synthetic oligonucleotide
  Sense strand starting at position 1487 of SEQ ID NO: 777
acaucaugauccgugauuc

SEQ ID NO: 62877 - RNA, 19 nt, Artificial Sequence
  Description of Artificial Sequence: Synthetic oligonucleotide
  Antisense strand to SEQ ID NO: 62796
gaaucacggaucaugaugu

SEQ ID NO: 62878 - RNA, 19 nt, Artificial Sequence
  Description of Artificial Sequence: Synthetic oligonucleotide
  Sense strand starting at position 1453 of SEQ ID NO: 777
auagcuaugcagggaaaua

SEQ ID NO: 62879 - RNA, 19 nt, Artificial Sequence
  Description of Artificial Sequence: Synthetic oligonucleotide
  Antisense strand to SEQ ID NO: 62798
uauuucccugcauagcuau

SEQ ID NO: 62880 - RNA, 19 nt, Artificial Sequence
  Description of Artificial Sequence: Synthetic oligonucleotide
  Sense strand starting at position 1452 of SEQ ID NO: 777
cauagcuaugcagggaaau

SEQ ID NO: 62881 - RNA, 19 nt, Artificial Sequence
  Description of Artificial Sequence: Synthetic oligonucleotide
  Antisense strand to SEQ ID NO: 62800
auuucccugcauagcuaug

SEQ ID NO: 62882 - RNA, 19 nt, Artificial Sequence
  Description of Artificial Sequence: Synthetic oligonucleotide
  Sense strand starting at position 1155 of SEQ ID NO: 777
gggauuauauaguccuguu

SEQ ID NO: 62883 - RNA, 19 nt, Artificial Sequence
  Description of Artificial Sequence: Synthetic oligonucleotide
  Antisense strand to SEQ ID NO: 62802
aacaggacuauauaauccc

SEQ ID NO: 62884 - RNA, 19 nt, Artificial Sequence
  Description of Artificial Sequence: Synthetic oligonucleotide
  Sense strand starting at position 1144 of SEQ ID NO: 777
ccagcuacucugggauuau

SEQ ID NO: 62885 - RNA, 19 nt, Artificial Sequence
  Description of Artificial Sequence: Synthetic oligonucleotide
  Antisense strand to SEQ ID NO: 62804
auaaucccagaguagcugg

SEQ ID NO: 62886 - RNA, 19 nt, Artificial Sequence
  Description of Artificial Sequence: Synthetic oligonucleotide
  Sense strand starting at position 1121 of SEQ ID NO: 777
guaaauggugcauaccuau

SEQ ID NO: 62887 - RNA, 19 nt, Artificial Sequence
  Description of Artificial Sequence: Synthetic oligonucleotide
  Antisense strand to SEQ ID NO: 62806
auagguaugcaccauuuac

SEQ ID NO: 62888 - RNA, 19 nt, Artificial Sequence
  Description of Artificial Sequence: Synthetic oligonucleotide
  Sense strand starting at position 900 of SEQ ID NO: 777
acauacauaugccuguaua

SEQ ID NO: 62889 - RNA, 19 nt, Artificial Sequence
  Description of Artificial Sequence: Synthetic oligonucleotide
  Antisense strand to SEQ ID NO: 62808
uauacaggcauauguaugu

SEQ ID NO: 62890 - RNA, 19 nt, Artificial Sequence
  Description of Artificial Sequence: Synthetic oligonucleotide
  Sense strand starting at position 810 of SEQ ID NO: 777
cuuugucauuuacugucua

SEQ ID NO: 62891 - RNA, 19 nt, Artificial Sequence
  Description of Artificial Sequence: Synthetic oligonucleotide
  Antisense strand to SEQ ID NO: 62810
uagacaguaaaugacaaag

SEQ ID NO: 62892 - RNA, 19 nt, Artificial Sequence
  Description of Artificial Sequence: Synthetic oligonucleotide
  Sense strand starting at position 240 of SEQ ID NO: 777
agagaacauuuccaguaac

SEQ ID NO: 62893 - RNA, 19 nt, Artificial Sequence
  Description of Artificial Sequence: Synthetic oligonucleotide
  Antisense strand to SEQ ID NO: 62812
guuacuggaaauguucucu

SEQ ID NO: 62894 - RNA, 19 nt, Artificial Sequence
  Description of Artificial Sequence: Synthetic oligonucleotide
  Sense strand starting at position 217 of SEQ ID NO: 777
caugguaaccugugcaaag

SEQ ID NO: 62895 - RNA, 19 nt, Artificial Sequence
  Description of Artificial Sequence: Synthetic oligonucleotide
  Antisense strand to SEQ ID NO: 62814
cuuugcacagguuaccaug

SEQ ID NO: 62896 - RNA, 19 nt, Artificial Sequence
  Description of Artificial Sequence: Synthetic oligonucleotide
  Sense strand starting at position 3979 of SEQ ID NO: 778
uugagaauugcgcaaugac

SEQ ID NO: 62897 - RNA, 19 nt, Artificial Sequence
  Description of Artificial Sequence: Synthetic oligonucleotide
  Antisense strand to SEQ ID NO: 62816
gucauugcgcaauucucaa

SEQ ID NO: 62898 - RNA, 19 nt, Artificial Sequence
  Description of Artificial Sequence: Synthetic oligonucleotide
  Sense strand starting at position 3676 of SEQ ID NO: 778
guuucugucuuaucagaau

SEQ ID NO: 62899 - RNA, 19 nt, Artificial Sequence
  Description of Artificial Sequence: Synthetic oligonucleotide
  Antisense strand to SEQ ID NO: 62818
auucugauaagacagaaac

SEQ ID NO: 62900 - RNA, 19 nt, Artificial Sequence
  Description of Artificial Sequence: Synthetic oligonucleotide
  Sense strand starting at position 3425 of SEQ ID NO: 778
aaauauuguguccagaguu

SEQ ID NO: 62901 - RNA, 19 nt, Artificial Sequence
  Description of Artificial Sequence: Synthetic oligonucleotide
  Antisense strand to SEQ ID NO: 62820
aacucuggacacaauauuu

SEQ ID NO: 62902 - RNA, 19 nt, Artificial Sequence
  Description of Artificial Sequence: Synthetic oligonucleotide
  Sense strand starting at position 3033 of SEQ ID NO: 778
uucuguuggcagcaaauau

SEQ ID NO: 62903 - RNA, 19 nt, Artificial Sequence
  Description of Artificial Sequence: Synthetic oligonucleotide
  Antisense strand to SEQ ID NO: 62822
auauuugcugccaacagaa

SEQ ID NO: 62904 - RNA, 19 nt, Artificial Sequence
  Description of Artificial Sequence: Synthetic oligonucleotide
  Sense strand starting at position 2825 of SEQ ID NO: 778
uuugcuugugacuacacau

SEQ ID NO: 62905 - RNA, 19 nt, Artificial Sequence
  Description of Artificial Sequence: Synthetic oligonucleotide
  Antisense strand to SEQ ID NO: 62824
auguguagucacaagcaaa

SEQ ID NO: 62906 - RNA, 19 nt, Artificial Sequence
  Description of Artificial Sequence: Synthetic oligonucleotide
  Sense strand starting at position 2819 of SEQ ID NO: 778
accacauuugcuugugacu

SEQ ID NO: 62907 - RNA, 19 nt, Artificial Sequence
  Description of Artificial Sequence: Synthetic oligonucleotide
  Antisense strand to SEQ ID NO: 62826
agucacaagcaaauguggu

SEQ ID NO: 62908 - RNA, 19 nt, Artificial Sequence
  Description of Artificial Sequence: Synthetic oligonucleotide
  Sense strand starting at position 2766 of SEQ ID NO: 778
uaggacuuguguuuaggga

SEQ ID NO: 62909 - RNA, 19 nt, Artificial Sequence
  Description of Artificial Sequence: Synthetic oligonucleotide
  Antisense strand to SEQ ID NO: 62828
ucccuaaacacaaguccua

SEQ ID NO: 62910 - RNA, 19 nt, Artificial Sequence
  Description of Artificial Sequence: Synthetic oligonucleotide
  Sense strand starting at position 2688 of SEQ ID NO: 778
gaagcuguggcagaaauag

SEQ ID NO: 62911 - RNA, 19 nt, Artificial Sequence
  Description of Artificial Sequence: Synthetic oligonucleotide
  Antisense strand to SEQ ID NO: 62830
cuauuucugccacagcuuc

SEQ ID NO: 62912 - RNA, 19 nt, Artificial Sequence
  Description of Artificial Sequence: Synthetic oligonucleotide
  Sense strand starting at position 2615 of SEQ ID NO: 778
gugaaauguguuugagaaa

SEQ ID NO: 62913 - RNA, 19 nt, Artificial Sequence
  Description of Artificial Sequence: Synthetic oligonucleotide
  Antisense strand to SEQ ID NO: 62832
uuucucaaacacauuucac

SEQ ID NO: 62914 - RNA, 19 nt, Artificial Sequence
  Description of Artificial Sequence: Synthetic oligonucleotide
  Sense strand starting at position 2614 of SEQ ID NO: 778
ggugaaauguguuugagaa

SEQ ID NO: 62915 - RNA, 19 nt, Artificial Sequence
  Description of Artificial Sequence: Synthetic oligonucleotide
  Antisense strand to SEQ ID NO: 62834
uucucaaacacauuucacc

SEQ ID NO: 62916 - RNA, 19 nt, Artificial Sequence
  Description of Artificial Sequence: Synthetic oligonucleotide
  Sense strand starting at position 2438 of SEQ ID NO: 778
ucuugcuuggauuaccaua

SEQ ID NO: 62917 - RNA, 19 nt, Artificial Sequence
  Description of Artificial Sequence: Synthetic oligonucleotide
  Antisense strand to SEQ ID NO: 62836
uaugguaauccaagcaaga

SEQ ID NO: 62918 - RNA, 19 nt, Artificial Sequence
  Description of Artificial Sequence: Synthetic oligonucleotide
  Sense strand starting at position 2433 of SEQ ID NO: 778
cugacucuugcuuggauua

SEQ ID NO: 62919 - RNA, 19 nt, Artificial Sequence
  Description of Artificial Sequence: Synthetic oligonucleotide
  Antisense strand to SEQ ID NO: 62838
uaauccaagcaagagucag

SEQ ID NO: 62920 - RNA, 19 nt, Artificial Sequence
  Description of Artificial Sequence: Synthetic oligonucleotide
  Sense strand starting at position 2431 of SEQ ID NO: 778
cccugacucuugcuuggau

SEQ ID NO: 62921 - RNA, 19 nt, Artificial Sequence
  Description of Artificial Sequence: Synthetic oligonucleotide
  Antisense strand to SEQ ID NO: 62840
auccaagcaagagucaggg

SEQ ID NO: 62922 - RNA, 19 nt, Artificial Sequence
  Description of Artificial Sequence: Synthetic oligonucleotide
  Sense strand starting at position 2382 of SEQ ID NO: 778
agcuuucucagcgaaacag

SEQ ID NO: 62923 - RNA, 19 nt, Artificial Sequence
  Description of Artificial Sequence: Synthetic oligonucleotide
  Antisense strand to SEQ ID NO: 62842
cuguuucgcugagaaagcu

SEQ ID NO: 62924 - RNA, 19 nt, Artificial Sequence
  Description of Artificial Sequence: Synthetic oligonucleotide
  Sense strand starting at position 2301 of SEQ ID NO: 778
gcccuaaagcuaugggaag

SEQ ID NO: 62925 - RNA, 19 nt, Artificial Sequence
  Description of Artificial Sequence: Synthetic oligonucleotide
  Antisense strand to SEQ ID NO: 62844
cuucccauagcuuuagggc

SEQ ID NO: 62926 - RNA, 19 nt, Artificial Sequence
  Description of Artificial Sequence: Synthetic oligonucleotide
  Sense strand starting at position 2226 of SEQ ID NO: 778
agcuguuggauuggcagaa

SEQ ID NO: 62927 - RNA, 19 nt, Artificial Sequence
  Description of Artificial Sequence: Synthetic oligonucleotide
  Antisense strand to SEQ ID NO: 62846
uucugccaauccaacagcu

SEQ ID NO: 62928 - RNA, 19 nt, Artificial Sequence
  Description of Artificial Sequence: Synthetic oligonucleotide
  Sense strand starting at position 2217 of SEQ ID NO: 778
uuagaauacagcuguugga

SEQ ID NO: 62929 - RNA, 19 nt, Artificial Sequence
  Description of Artificial Sequence: Synthetic oligonucleotide
  Antisense strand to SEQ ID NO: 62848
uccaacagcuguauucuaa

SEQ ID NO: 62930 - RNA, 19 nt, Artificial Sequence
  Description of Artificial Sequence: Synthetic oligonucleotide
  Sense strand starting at position 2204 of SEQ ID NO: 778
gcggaauggugaguuagaa

SEQ ID NO: 62931 - RNA, 19 nt, Artificial Sequence
  Description of Artificial Sequence: Synthetic oligonucleotide
  Antisense strand to SEQ ID NO: 62850
uucuaacucaccauuccgc

SEQ ID NO: 62932 - RNA, 19 nt, Artificial Sequence
  Description of Artificial Sequence: Synthetic oligonucleotide
  Sense strand starting at position 2180 of SEQ ID NO: 778
auacuuccgugaucuuaag

SEQ ID NO: 62933 - RNA, 19 nt, Artificial Sequence
  Description of Artificial Sequence: Synthetic oligonucleotide
  Antisense strand to SEQ ID NO: 62852
cuuaagaucacggaaguau

SEQ ID NO: 62934 - RNA, 19 nt, Artificial Sequence
  Description of Artificial Sequence: Synthetic oligonucleotide
  Sense strand starting at position 2178 of SEQ ID NO: 778
ugauacuuccgugaucuua

SEQ ID NO: 62935 - RNA, 19 nt, Artificial Sequence
  Description of Artificial Sequence: Synthetic oligonucleotide
  Antisense strand to SEQ ID NO: 62854
uaagaucacggaaguauca

SEQ ID NO: 62936 - RNA, 19 nt, Artificial Sequence
  Description of Artificial Sequence: Synthetic oligonucleotide
  Sense strand starting at position 2167 of SEQ ID NO: 778
agaggcaagcgugauacuu

SEQ ID NO: 62937 - RNA, 19 nt, Artificial Sequence
  Description of Artificial Sequence: Synthetic oligonucleotide
  Antisense strand to SEQ ID NO: 62856
aaguaucacgcuugccucu

SEQ ID NO: 62938 - RNA, 19 nt, Artificial Sequence
  Description of Artificial Sequence: Synthetic oligonucleotide
  Sense strand starting at position 1984 of SEQ ID NO: 778
aaggaaaguguuugucuuu

SEQ ID NO: 62939 - RNA, 19 nt, Artificial Sequence
  Description of Artificial Sequence: Synthetic oligonucleotide
  Antisense strand to SEQ ID NO: 62858
aaagacaaacacuuuccuu

SEQ ID NO: 62940 - RNA, 19 nt, Artificial Sequence
  Description of Artificial Sequence: Synthetic oligonucleotide
  Sense strand starting at position 1931 of SEQ ID NO: 778
uuaccuugguuagcauaga

SEQ ID NO: 62941 - RNA, 19 nt, Artificial Sequence
  Description of Artificial Sequence: Synthetic oligonucleotide
  Antisense strand to SEQ ID NO: 62860
ucuaugcuaaccaagguaa

SEQ ID NO: 62942 - RNA, 19 nt, Artificial Sequence
  Description of Artificial Sequence: Synthetic oligonucleotide
  Sense strand starting at position 1927 of SEQ ID NO: 778
acacuuaccuugguuagca

SEQ ID NO: 62943 - RNA, 19 nt, Artificial Sequence
  Description of Artificial Sequence: Synthetic oligonucleotide
  Antisense strand to SEQ ID NO: 62862
ugcuaaccaagguaagugu

SEQ ID NO: 62944 - RNA, 19 nt, Artificial Sequence
  Description of Artificial Sequence: Synthetic oligonucleotide
  Sense strand starting at position 1722 of SEQ ID NO: 778
ugguucuguccacaacaua

SEQ ID NO: 62945 - RNA, 19 nt, Artificial Sequence
  Description of Artificial Sequence: Synthetic oligonucleotide
  Antisense strand to SEQ ID NO: 62864
uauguuguggacagaacca

SEQ ID NO: 62946 - RNA, 19 nt, Artificial Sequence
  Description of Artificial Sequence: Synthetic oligonucleotide
  Sense strand starting at position 1720 of SEQ ID NO: 778
gaugguucuguccacaaca

SEQ ID NO: 62947 - RNA, 19 nt, Artificial Sequence
  Description of Artificial Sequence: Synthetic oligonucleotide
  Antisense strand to SEQ ID NO: 62866
uguuguggacagaaccauc

SEQ ID NO: 62948 - RNA, 19 nt, Artificial Sequence
  Description of Artificial Sequence: Synthetic oligonucleotide
  Sense strand starting at position 1717 of SEQ ID NO: 778
uuggaugguucuguccaca

SEQ ID NO: 62949 - RNA, 19 nt, Artificial Sequence
  Description of Artificial Sequence: Synthetic oligonucleotide
  Antisense strand to SEQ ID NO: 62868
uguggacagaaccauccaa

SEQ ID NO: 62950 - RNA, 19 nt, Artificial Sequence
  Description of Artificial Sequence: Synthetic oligonucleotide
  Sense strand starting at position 1692 of SEQ ID NO: 778
uguuuaucucacugacacu

SEQ ID NO: 62951 - RNA, 19 nt, Artificial Sequence
  Description of Artificial Sequence: Synthetic oligonucleotide
  Antisense strand to SEQ ID NO: 62870
agugucagugagauaaaca

SEQ ID NO: 62952 - RNA, 19 nt, Artificial Sequence
  Description of Artificial Sequence: Synthetic oligonucleotide
  Sense strand starting at position 1691 of SEQ ID NO: 778
cuguuuaucucacugacac

SEQ ID NO: 62953 - RNA, 19 nt, Artificial Sequence
  Description of Artificial Sequence: Synthetic oligonucleotide
  Antisense strand to SEQ ID NO: 62872
gugucagugagauaaacag

SEQ ID NO: 62954 - RNA, 19 nt, Artificial Sequence
  Description of Artificial Sequence: Synthetic oligonucleotide
  Sense strand starting at position 1683 of SEQ ID NO: 778
ucaugauucuguuuaucuc

SEQ ID NO: 62955 - RNA, 19 nt, Artificial Sequence
  Description of Artificial Sequence: Synthetic oligonucleotide
  Antisense strand to SEQ ID NO: 62874
gagauaaacagaaucauga

SEQ ID NO: 62956 - RNA, 19 nt, Artificial Sequence
  Description of Artificial Sequence: Synthetic oligonucleotide
  Sense strand starting at position 1681 of SEQ ID NO: 778
ucucaugauucuguuuauc

SEQ ID NO: 62957 - RNA, 19 nt, Artificial Sequence
  Description of Artificial Sequence: Synthetic oligonucleotide
  Antisense strand to SEQ ID NO: 62876
gauaaacagaaucaugaga

SEQ ID NO: 62958 - RNA, 19 nt, Artificial Sequence
  Description of Artificial Sequence: Synthetic oligonucleotide
  Sense strand starting at position 1394 of SEQ ID NO: 778
accuuuguacaacgggaaa

SEQ ID NO: 62959 - RNA, 19 nt, Artificial Sequence
  Description of Artificial Sequence: Synthetic oligonucleotide
  Antisense strand to SEQ ID NO: 62878
uuucccguuguacaaaggu

SEQ ID NO: 62960 - RNA, 19 nt, Artificial Sequence
  Description of Artificial Sequence: Synthetic oligonucleotide
  Sense strand starting at position 1352 of SEQ ID NO: 778
uuuagucccuuggcagaaa

SEQ ID NO: 62961 - RNA, 19 nt, Artificial Sequence
  Description of Artificial Sequence: Synthetic oligonucleotide
  Antisense strand to SEQ ID NO: 62880
uuucugccaagggacuaaa

SEQ ID NO: 62962 - RNA, 19 nt, Artificial Sequence
  Description of Artificial Sequence: Synthetic oligonucleotide
  Sense strand starting at position 974 of SEQ ID NO: 778
gugcaaacucugcaaacua

SEQ ID NO: 62963 - RNA, 19 nt, Artificial Sequence
  Description of Artificial Sequence: Synthetic oligonucleotide
  Antisense strand to SEQ ID NO: 62882
uaguuugcagaguuugcac

SEQ ID NO: 62964 - RNA, 19 nt, Artificial Sequence
  Description of Artificial Sequence: Synthetic oligonucleotide
  Sense strand starting at position 937 of SEQ ID NO: 778
gagaauacugcaggcuuga

SEQ ID NO: 62965 - RNA, 19 nt, Artificial Sequence
  Description of Artificial Sequence: Synthetic oligonucleotide
  Antisense strand to SEQ ID NO: 62884
ucaagccugcaguauucuc

SEQ ID NO: 62966 - RNA, 19 nt, Artificial Sequence
  Description of Artificial Sequence: Synthetic oligonucleotide
  Sense strand starting at position 867 of SEQ ID NO: 778
gacuguucuuaugucugaa

SEQ ID NO: 62967 - RNA, 19 nt, Artificial Sequence
  Description of Artificial Sequence: Synthetic oligonucleotide
  Antisense strand to SEQ ID NO: 62886
uucagacauaagaacaguc

SEQ ID NO: 62968 - RNA, 19 nt, Artificial Sequence
  Description of Artificial Sequence: Synthetic oligonucleotide
  Sense strand starting at position 858 of SEQ ID NO: 778
gcuugaaaggacuguucuu

SEQ ID NO: 62969 - RNA, 19 nt, Artificial Sequence
  Description of Artificial Sequence: Synthetic oligonucleotide
  Antisense strand to SEQ ID NO: 62888
aagaacaguccuuucaagc

SEQ ID NO: 62970 - RNA, 19 nt, Artificial Sequence
  Description of Artificial Sequence: Synthetic oligonucleotide
  Sense strand starting at position 761 of SEQ ID NO: 778
gcuuguaacccuggacaca

SEQ ID NO: 62971 - RNA, 19 nt, Artificial Sequence
  Description of Artificial Sequence: Synthetic oligonucleotide
  Antisense strand to SEQ ID NO: 62890
uguguccaggguuacaagc

SEQ ID NO: 62972 - RNA, 19 nt, Artificial Sequence
  Description of Artificial Sequence: Synthetic oligonucleotide
  Sense strand starting at position 493 of SEQ ID NO: 778
ugucuagagaccuaguuag

SEQ ID NO: 62973 - RNA, 19 nt, Artificial Sequence
  Description of Artificial Sequence: Synthetic oligonucleotide
  Antisense strand to SEQ ID NO: 62892
cuaacuaggucucuagaca

SEQ ID NO: 62974 - RNA, 19 nt, Artificial Sequence
  Description of Artificial Sequence: Synthetic oligonucleotide
  Sense strand starting at position 443 of SEQ ID NO: 778
gcaugcucuaggcaugaau

SEQ ID NO: 62975 - RNA, 19 nt, Artificial Sequence
  Description of Artificial Sequence: Synthetic oligonucleotide
  Antisense strand to SEQ ID NO: 62894
auucaugccuagagcaugc

SEQ ID NO: 62976 - RNA, 19 nt, Artificial Sequence
  Description of Artificial Sequence: Synthetic oligonucleotide
  Sense strand starting at position 252 of SEQ ID NO: 779
gacuguuguccuggacuga

SEQ ID NO: 62977 - RNA, 19 nt, Artificial Sequence
  Description of Artificial Sequence: Synthetic oligonucleotide
  Antisense strand to SEQ ID NO: 62896
ucaguccaggacaacaguc

SEQ ID NO: 62978 - RNA, 19 nt, Artificial Sequence
  Description of Artificial Sequence: Synthetic oligonucleotide
  Sense strand starting at position 367 of SEQ ID NO: 779
gacucagcugguggugauu

SEQ ID NO: 62979 - RNA, 19 nt, Artificial Sequence
  Description of Artificial Sequence: Synthetic oligonucleotide
  Antisense strand to SEQ ID NO: 62898
aaucaccaccagcugaguc

SEQ ID NO: 62980 - RNA, 19 nt, Artificial Sequence
  Description of Artificial Sequence: Synthetic oligonucleotide
  Sense strand starting at position 460 of SEQ ID NO: 779
cauuaucaagggugaggua

SEQ ID NO: 62981 - RNA, 19 nt, Artificial Sequence
  Description of Artificial Sequence: Synthetic oligonucleotide
  Antisense strand to SEQ ID NO: 62900
uaccucacccuugauaaug

SEQ ID NO: 62982 - RNA, 19 nt, Artificial Sequence
  Description of Artificial Sequence: Synthetic oligonucleotide
  Sense strand starting at position 476 of SEQ ID NO: 779
guaagauugggaugucuag

SEQ ID NO: 62983 - RNA, 19 nt, Artificial Sequence
  Description of Artificial Sequence: Synthetic oligonucleotide
  Antisense strand to SEQ ID NO: 62902
cuagacaucccaaucuuac

SEQ ID NO: 62984 - RNA, 19 nt, Artificial Sequence
  Description of Artificial Sequence: Synthetic oligonucleotide
  Sense strand starting at position 603 of SEQ ID NO: 779
ugaugagauucgcugccaa

SEQ ID NO: 62985 - RNA, 19 nt, Artificial Sequence
  Description of Artificial Sequence: Synthetic oligonucleotide
  Antisense strand to SEQ ID NO: 62904
uuggcagcgaaucucauca

SEQ ID NO: 62986 - RNA, 19 nt, Artificial Sequence
  Description of Artificial Sequence: Synthetic oligonucleotide
  Sense strand starting at position 640 of SEQ ID NO: 779
gguccuaaaucuguggguu

SEQ ID NO: 62987 - RNA, 19 nt, Artificial Sequence
  Description of Artificial Sequence: Synthetic oligonucleotide
  Antisense strand to SEQ ID NO: 62906
aacccacagauuuaggacc

SEQ ID NO: 62988 - RNA, 19 nt, Artificial Sequence
  Description of Artificial Sequence: Synthetic oligonucleotide
  Sense strand starting at position 641 of SEQ ID NO: 779
guccuaaaucuguggguuu

SEQ ID NO: 62989 - RNA, 19 nt, Artificial Sequence
  Description of Artificial Sequence: Synthetic oligonucleotide
  Antisense strand to SEQ ID NO: 62908
aaacccacagauuuaggac

SEQ ID NO: 62990 - RNA, 19 nt, Artificial Sequence
  Description of Artificial Sequence: Synthetic oligonucleotide
  Sense strand starting at position 643 of SEQ ID NO: 779
ccuaaaucuguggguuuga

SEQ ID NO: 62991 - RNA, 19 nt, Artificial Sequence
  Description of Artificial Sequence: Synthetic oligonucleotide
  Antisense strand to SEQ ID NO: 62910
ucaaacccacagauuuagg

SEQ ID NO: 62992 - RNA, 19 nt, Artificial Sequence
  Description of Artificial Sequence: Synthetic oligonucleotide
  Sense strand starting at position 644 of SEQ ID NO: 779
cuaaaucuguggguuugaa

SEQ ID NO: 62993 - RNA, 19 nt, Artificial Sequence
  Description of Artificial Sequence: Synthetic oligonucleotide
  Antisense strand to SEQ ID NO: 62912
uucaaacccacagauuuag

SEQ ID NO: 62994 - RNA, 19 nt, Artificial Sequence
  Description of Artificial Sequence: Synthetic oligonucleotide
  Sense strand starting at position 654 of SEQ ID NO: 779
ggguuugaaucaccaaagu

SEQ ID NO: 62995 - RNA, 19 nt, Artificial Sequence
  Description of Artificial Sequence: Synthetic oligonucleotide
  Antisense strand to SEQ ID NO: 62914
acuuuggugauucaaaccc

SEQ ID NO: 62996 - RNA, 19 nt, Artificial Sequence
  Description of Artificial Sequence: Synthetic oligonucleotide
  Sense strand starting at position 801 of SEQ ID NO: 779
caaugcaugucaguuugga

SEQ ID NO: 62997 - RNA, 19 nt, Artificial Sequence
  Description of Artificial Sequence: Synthetic oligonucleotide
  Antisense strand to SEQ ID NO: 62916
uccaaacugacaugcauug

SEQ ID NO: 62998 - RNA, 19 nt, Artificial Sequence
  Description of Artificial Sequence: Synthetic oligonucleotide
  Sense strand starting at position 824 of SEQ ID NO: 779
aauaaagguggcugguauu

SEQ ID NO: 62999 - RNA, 19 nt, Artificial Sequence
  Description of Artificial Sequence: Synthetic oligonucleotide
  Antisense strand to SEQ ID NO: 62918
aauaccagccaccuuuauu

SEQ ID NO: 63000 - RNA, 19 nt, Artificial Sequence
  Description of Artificial Sequence: Synthetic oligonucleotide
  Sense strand starting at position 834 of SEQ ID NO: 779
gcugguauucuuuggaaua

SEQ ID NO: 63001 - RNA, 19 nt, Artificial Sequence
  Description of Artificial Sequence: Synthetic oligonucleotide
  Antisense strand to SEQ ID NO: 62920
uauuccaaagaauaccagc

SEQ ID NO: 63002 - RNA, 19 nt, Artificial Sequence
  Description of Artificial Sequence: Synthetic oligonucleotide
  Sense strand starting at position 1236 of SEQ ID NO: 779
gggacuaggagauguaugu

SEQ ID NO: 63003 - RNA, 19 nt, Artificial Sequence
  Description of Artificial Sequence: Synthetic oligonucleotide
  Antisense strand to SEQ ID NO: 62922
acauacaucuccuaguccc

SEQ ID NO: 63004 - RNA, 19 nt, Artificial Sequence
  Description of Artificial Sequence: Synthetic oligonucleotide
  Sense strand starting at position 1385 of SEQ ID NO: 779
uagucauggucucccgaga

SEQ ID NO: 63005 - RNA, 19 nt, Artificial Sequence
  Description of Artificial Sequence: Synthetic oligonucleotide
  Antisense strand to SEQ ID NO: 62924
ucucgggagaccaugacua

SEQ ID NO: 63006 - RNA, 19 nt, Artificial Sequence
  Description of Artificial Sequence: Synthetic oligonucleotide
  Sense strand starting at position 1415 of SEQ ID NO: 779
uagugucgccuguccuaaa

SEQ ID NO: 63007 - RNA, 19 nt, Artificial Sequence
  Description of Artificial Sequence: Synthetic oligonucleotide
  Antisense strand to SEQ ID NO: 62926
uuuaggacaggcgacacua

SEQ ID NO: 63008 - RNA, 19 nt, Artificial Sequence
  Description of Artificial Sequence: Synthetic oligonucleotide
  Sense strand starting at position 1457 of SEQ ID NO: 779
gcacacaucgguuaacauu

SEQ ID NO: 63009 - RNA, 19 nt, Artificial Sequence
  Description of Artificial Sequence: Synthetic oligonucleotide
  Antisense strand to SEQ ID NO: 62928
aauguuaaccgaugugugc

SEQ ID NO: 63010 - RNA, 19 nt, Artificial Sequence
  Description of Artificial Sequence: Synthetic oligonucleotide
  Sense strand starting at position 1496 of SEQ ID NO: 779
guggcauucgaauaaauuc

SEQ ID NO: 63011 - RNA, 19 nt, Artificial Sequence
  Description of Artificial Sequence: Synthetic oligonucleotide
  Antisense strand to SEQ ID NO: 62930
gaauuuauucgaaugccac

SEQ ID NO: 63012 - RNA, 19 nt, Artificial Sequence
  Description of Artificial Sequence: Synthetic oligonucleotide
  Sense strand starting at position 1504 of SEQ ID NO: 779
cgaauaaauucuguacaag

SEQ ID NO: 63013 - RNA, 19 nt, Artificial Sequence
  Description of Artificial Sequence: Synthetic oligonucleotide
  Antisense strand to SEQ ID NO: 62932
cuuguacagaauuuauucg

SEQ ID NO: 63014 - RNA, 19 nt, Artificial Sequence
  Description of Artificial Sequence: Synthetic oligonucleotide
  Sense strand starting at position 1521 of SEQ ID NO: 779
agaggugucuugaggagga

SEQ ID NO: 63015 - RNA, 19 nt, Artificial Sequence
  Description of Artificial Sequence: Synthetic oligonucleotide
  Antisense strand to SEQ ID NO: 62934
uccuccucaagacaccucu

SEQ ID NO: 63016 - RNA, 19 nt, Artificial Sequence
  Description of Artificial Sequence: Synthetic oligonucleotide
  Sense strand starting at position 1525 of SEQ ID NO: 779
gugucuugaggaggacaga

SEQ ID NO: 63017 - RNA, 19 nt, Artificial Sequence
  Description of Artificial Sequence: Synthetic oligonucleotide
  Antisense strand to SEQ ID NO: 62936
ucuguccuccucaagacac

SEQ ID NO: 63018 - RNA, 19 nt, Artificial Sequence
  Description of Artificial Sequence: Synthetic oligonucleotide
  Sense strand starting at position 1655 of SEQ ID NO: 779
uccugaagcgcucaacaga

SEQ ID NO: 63019 - RNA, 19 nt, Artificial Sequence
  Description of Artificial Sequence: Synthetic oligonucleotide
  Antisense strand to SEQ ID NO: 62938
ucuguugagcgcuucagga

SEQ ID NO: 63020 - RNA, 19 nt, Artificial Sequence
  Description of Artificial Sequence: Synthetic oligonucleotide
  Sense strand starting at position 2285 of SEQ ID NO: 779
agggucgugauacaucaaa

SEQ ID NO: 63021 - RNA, 19 nt, Artificial Sequence
  Description of Artificial Sequence: Synthetic oligonucleotide
  Antisense strand to SEQ ID NO: 62940
uuugauguaucacgacccu

SEQ ID NO: 63022 - RNA, 19 nt, Artificial Sequence
  Description of Artificial Sequence: Synthetic oligonucleotide
  Sense strand starting at position 2508 of SEQ ID NO: 779
ugucuugugaacgaggcaa

SEQ ID NO: 63023 - RNA, 19 nt, Artificial Sequence
  Description of Artificial Sequence: Synthetic oligonucleotide
  Antisense strand to SEQ ID NO: 62942
uugccucguucacaagaca

SEQ ID NO: 63024 - RNA, 19 nt, Artificial Sequence
  Description of Artificial Sequence: Synthetic oligonucleotide
  Sense strand starting at position 2558 of SEQ ID NO: 779
uggucuccuuccuuaagau

SEQ ID NO: 63025 - RNA, 19 nt, Artificial Sequence
  Description of Artificial Sequence: Synthetic oligonucleotide
  Antisense strand to SEQ ID NO: 62944
aucuuaaggaaggagacca

SEQ ID NO: 63026 - RNA, 19 nt, Artificial Sequence
  Description of Artificial Sequence: Synthetic oligonucleotide
  Sense strand starting at position 2559 of SEQ ID NO: 779
ggucuccuuccuuaagaug

SEQ ID NO: 63027 - RNA, 19 nt, Artificial Sequence
  Description of Artificial Sequence: Synthetic oligonucleotide
  Antisense strand to SEQ ID NO: 62946
caucuuaaggaaggagacc

SEQ ID NO: 63028 - RNA, 19 nt, Artificial Sequence
  Description of Artificial Sequence: Synthetic oligonucleotide
  Sense strand starting at position 2694 of SEQ ID NO: 779
agcugagugcuggaguaua

SEQ ID NO: 63029 - RNA, 19 nt, Artificial Sequence
  Description of Artificial Sequence: Synthetic oligonucleotide
  Antisense strand to SEQ ID NO: 62948
uauacuccagcacucagcu

SEQ ID NO: 63030 - RNA, 19 nt, Artificial Sequence
  Description of Artificial Sequence: Synthetic oligonucleotide
  Sense strand starting at position 2711 of SEQ ID NO: 779
uagugaggaauguauuguu

SEQ ID NO: 63031 - RNA, 19 nt, Artificial Sequence
  Description of Artificial Sequence: Synthetic oligonucleotide
  Antisense strand to SEQ ID NO: 62950
aacaauacauuccucacua

SEQ ID NO: 63032 - RNA, 19 nt, Artificial Sequence
  Description of Artificial Sequence: Synthetic oligonucleotide
  Sense strand starting at position 2716 of SEQ ID NO: 779
aggaauguauuguuuccua

SEQ ID NO: 63033 - RNA, 19 nt, Artificial Sequence
  Description of Artificial Sequence: Synthetic oligonucleotide
  Antisense strand to SEQ ID NO: 62952
uaggaaacaauacauuccu

SEQ ID NO: 63034 - RNA, 19 nt, Artificial Sequence
  Description of Artificial Sequence: Synthetic oligonucleotide
  Sense strand starting at position 2720 of SEQ ID NO: 779
auguauuguuuccuacuca

SEQ ID NO: 63035 - RNA, 19 nt, Artificial Sequence
  Description of Artificial Sequence: Synthetic oligonucleotide
  Antisense strand to SEQ ID NO: 62954
ugaguaggaaacaauacau

SEQ ID NO: 63036 - RNA, 19 nt, Artificial Sequence
  Description of Artificial Sequence: Synthetic oligonucleotide
  Sense strand starting at position 2742 of SEQ ID NO: 779
gggcuuacagauuagugga

SEQ ID NO: 63037 - RNA, 19 nt, Artificial Sequence
  Description of Artificial Sequence: Synthetic oligonucleotide
  Antisense strand to SEQ ID NO: 62956
uccacuaaucuguaagccc

SEQ ID NO: 63038 - RNA, 19 nt, Artificial Sequence
  Description of Artificial Sequence: Synthetic oligonucleotide
  Sense strand starting at position 2823 of SEQ ID NO: 779
acaguuauauuaguaacca

SEQ ID NO: 63039 - RNA, 19 nt, Artificial Sequence
  Description of Artificial Sequence: Synthetic oligonucleotide
  Antisense strand to SEQ ID NO: 62958
ugguuacuaauauaacugu

SEQ ID NO: 63040 - RNA, 19 nt, Artificial Sequence
  Description of Artificial Sequence: Synthetic oligonucleotide
  Sense strand starting at position 2955 of SEQ ID NO: 779
agacaaggguucuauuuga

SEQ ID NO: 63041 - RNA, 19 nt, Artificial Sequence
  Description of Artificial Sequence: Synthetic oligonucleotide
  Antisense strand to SEQ ID NO: 62960
ucaaauagaacccuugucu

SEQ ID NO: 63042 - RNA, 19 nt, Artificial Sequence
  Description of Artificial Sequence: Synthetic oligonucleotide
  Sense strand starting at position 2960 of SEQ ID NO: 779
aggguucuauuugacagau

SEQ ID NO: 63043 - RNA, 19 nt, Artificial Sequence
  Description of Artificial Sequence: Synthetic oligonucleotide
  Antisense strand to SEQ ID NO: 62962
aucugucaaauagaacccu

SEQ ID NO: 63044 - RNA, 19 nt, Artificial Sequence
  Description of Artificial Sequence: Synthetic oligonucleotide
  Sense strand starting at position 2962 of SEQ ID NO: 779
gguucuauuugacagaugu

SEQ ID NO: 63045 - RNA, 19 nt, Artificial Sequence
  Description of Artificial Sequence: Synthetic oligonucleotide
  Antisense strand to SEQ ID NO: 62964
acaucugucaaauagaacc

SEQ ID NO: 63046 - RNA, 19 nt, Artificial Sequence
  Description of Artificial Sequence: Synthetic oligonucleotide
  Sense strand starting at position 2985 of SEQ ID NO: 779
gguuguaagaggcauggau

SEQ ID NO: 63047 - RNA, 19 nt, Artificial Sequence
  Description of Artificial Sequence: Synthetic oligonucleotide
  Antisense strand to SEQ ID NO: 62966
auccaugccucuuacaacc

SEQ ID NO: 63048 - RNA, 19 nt, Artificial Sequence
  Description of Artificial Sequence: Synthetic oligonucleotide
  Sense strand starting at position 3075 of SEQ ID NO: 779
ccugcuaaucuuggacuuu

SEQ ID NO: 63049 - RNA, 19 nt, Artificial Sequence
  Description of Artificial Sequence: Synthetic oligonucleotide
  Antisense strand to SEQ ID NO: 62968
aaaguccaagauuagcagg

SEQ ID NO: 63050 - RNA, 19 nt, Artificial Sequence
  Description of Artificial Sequence: Synthetic oligonucleotide
  Sense strand starting at position 3097 of SEQ ID NO: 779
augagaggcaacugauauu

SEQ ID NO: 63051 - RNA, 19 nt, Artificial Sequence
  Description of Artificial Sequence: Synthetic oligonucleotide
  Antisense strand to SEQ ID NO: 62970
aauaucaguugccucucau

SEQ ID NO: 63052 - RNA, 19 nt, Artificial Sequence
  Description of Artificial Sequence: Synthetic oligonucleotide
  Sense strand starting at position 3185 of SEQ ID NO: 779
uuuggaacugucgaacuuu

SEQ ID NO: 63053 - RNA, 19 nt, Artificial Sequence
  Description of Artificial Sequence: Synthetic oligonucleotide
  Antisense strand to SEQ ID NO: 62972
aaaguucgacaguuccaaa

SEQ ID NO: 63054 - RNA, 19 nt, Artificial Sequence
  Description of Artificial Sequence: Synthetic oligonucleotide
  Sense strand starting at position 3928 of SEQ ID NO: 779
gcugacaauuugcaaguaa

SEQ ID NO: 63055 - RNA, 19 nt, Artificial Sequence
  Description of Artificial Sequence: Synthetic oligonucleotide
  Antisense strand to SEQ ID NO: 62974
uuacuugcaaauugucagc

SEQ ID NO: 63056 - RNA, 19 nt, Artificial Sequence
  Description of Artificial Sequence: Synthetic oligonucleotide
  Sense strand starting at position 2 of SEQ ID NO: 780
agaggaaaugugggucuga

SEQ ID NO: 63057 - RNA, 19 nt, Artificial Sequence
  Description of Artificial Sequence: Synthetic oligonucleotide
  Antisense strand to SEQ ID NO: 62976
ucagacccacauuuccucu

SEQ ID NO: 63058 - RNA, 19 nt, Artificial Sequence
  Description of Artificial Sequence: Synthetic oligonucleotide
  Sense strand starting at position 3 of SEQ ID NO: 780
gaggaaaugugggucugau

SEQ ID NO: 63059 - RNA, 19 nt, Artificial Sequence
  Description of Artificial Sequence: Synthetic oligonucleotide
  Antisense strand to SEQ ID NO: 62978
aucagacccacauuuccuc

SEQ ID NO: 63060 - RNA, 19 nt, Artificial Sequence
  Description of Artificial Sequence: Synthetic oligonucleotide
  Sense strand starting at position 86 of SEQ ID NO: 780
ccugguuaccuauagccaa

SEQ ID NO: 63061 - RNA, 19 nt, Artificial Sequence
  Description of Artificial Sequence: Synthetic oligonucleotide
  Antisense strand to SEQ ID NO: 62980
uuggcuauagguaaccagg

SEQ ID NO: 63062 - RNA, 19 nt, Artificial Sequence
  Description of Artificial Sequence: Synthetic oligonucleotide
  Sense strand starting at position 97 of SEQ ID NO: 780
auagccaaugcaugacaua

SEQ ID NO: 63063 - RNA, 19 nt, Artificial Sequence
  Description of Artificial Sequence: Synthetic oligonucleotide
  Antisense strand to SEQ ID NO: 62982
uaugucaugcauuggcuau

SEQ ID NO: 63064 - RNA, 19 nt, Artificial Sequence
  Description of Artificial Sequence: Synthetic oligonucleotide
  Sense strand starting at position 110 of SEQ ID NO: 780
gacauacuccugugagcag

SEQ ID NO: 63065 - RNA, 19 nt, Artificial Sequence
  Description of Artificial Sequence: Synthetic oligonucleotide
  Antisense strand to SEQ ID NO: 62984
cugcucacaggaguauguc

SEQ ID NO: 63066 - RNA, 19 nt, Artificial Sequence
  Description of Artificial Sequence: Synthetic oligonucleotide
  Sense strand starting at position 159 of SEQ ID NO: 780
agagaaaccuuagaaucuu

SEQ ID NO: 63067 - RNA, 19 nt, Artificial Sequence
  Description of Artificial Sequence: Synthetic oligonucleotide
  Antisense strand to SEQ ID NO: 62986
aagauucuaagguuucucu

SEQ ID NO: 63068 - RNA, 19 nt, Artificial Sequence
  Description of Artificial Sequence: Synthetic oligonucleotide
  Sense strand starting at position 171 of SEQ ID NO: 780
gaaucuuucuuggccugga

SEQ ID NO: 63069 - RNA, 19 nt, Artificial Sequence
  Description of Artificial Sequence: Synthetic oligonucleotide
  Antisense strand to SEQ ID NO: 62988
uccaggccaagaaagauuc

SEQ ID NO: 63070 - RNA, 19 nt, Artificial Sequence
  Description of Artificial Sequence: Synthetic oligonucleotide
  Sense strand starting at position 468 of SEQ ID NO: 780
gacaaagagccacaguguu

SEQ ID NO: 63071 - RNA, 19 nt, Artificial Sequence
  Description of Artificial Sequence: Synthetic oligonucleotide
  Antisense strand to SEQ ID NO: 62990
aacacuguggcucuuuguc

SEQ ID NO: 63072 - RNA, 19 nt, Artificial Sequence
  Description of Artificial Sequence: Synthetic oligonucleotide
  Sense strand starting at position 852 of SEQ ID NO: 780
aggguugcauagucuuaca

SEQ ID NO: 63073 - RNA, 19 nt, Artificial Sequence
  Description of Artificial Sequence: Synthetic oligonucleotide
  Antisense strand to SEQ ID NO: 62992
uguaagacuaugcaacccu

SEQ ID NO: 63074 - RNA, 19 nt, Artificial Sequence
  Description of Artificial Sequence: Synthetic oligonucleotide
  Sense strand starting at position 901 of SEQ ID NO: 780
ugcucagaguuucuguaag

SEQ ID NO: 63075 - RNA, 19 nt, Artificial Sequence
  Description of Artificial Sequence: Synthetic oligonucleotide
  Antisense strand to SEQ ID NO: 62994
cuuacagaaacucugagca

SEQ ID NO: 63076 - RNA, 19 nt, Artificial Sequence
  Description of Artificial Sequence: Synthetic oligonucleotide
  Sense strand starting at position 903 of SEQ ID NO: 780
cucagaguuucuguaaggu

SEQ ID NO: 63077 - RNA, 19 nt, Artificial Sequence
  Description of Artificial Sequence: Synthetic oligonucleotide
  Antisense strand to SEQ ID NO: 62996
accuuacagaaacucugag

SEQ ID NO: 63078 - RNA, 19 nt, Artificial Sequence
  Description of Artificial Sequence: Synthetic oligonucleotide
  Sense strand starting at position 911 of SEQ ID NO: 780
uucuguaaggucgaaaguu

SEQ ID NO: 63079 - RNA, 19 nt, Artificial Sequence
  Description of Artificial Sequence: Synthetic oligonucleotide
  Antisense strand to SEQ ID NO: 62998
aacuuucgaccuuacagaa

SEQ ID NO: 63080 - RNA, 19 nt, Artificial Sequence
  Description of Artificial Sequence: Synthetic oligonucleotide
  Sense strand starting at position 1017 of SEQ ID NO: 780
cccuccuaucaguggagaa

SEQ ID NO: 63081 - RNA, 19 nt, Artificial Sequence
  Description of Artificial Sequence: Synthetic oligonucleotide
  Antisense strand to SEQ ID NO: 63000
uucuccacugauaggaggg

SEQ ID NO: 63082 - RNA, 19 nt, Artificial Sequence
  Description of Artificial Sequence: Synthetic oligonucleotide
  Sense strand starting at position 1018 of SEQ ID NO: 780
ccuccuaucaguggagaag

SEQ ID NO: 63083 - RNA, 19 nt, Artificial Sequence
  Description of Artificial Sequence: Synthetic oligonucleotide
  Antisense strand to SEQ ID NO: 63002
cuucuccacugauaggagg

SEQ ID NO: 63084 - RNA, 19 nt, Artificial Sequence
  Description of Artificial Sequence: Synthetic oligonucleotide
  Sense strand starting at position 1237 of SEQ ID NO: 780
gagagauugcagggacauc

SEQ ID NO: 63085 - RNA, 19 nt, Artificial Sequence
  Description of Artificial Sequence: Synthetic oligonucleotide
  Antisense strand to SEQ ID NO: 63004
gaugucccugcaaucucuc

SEQ ID NO: 63086 - RNA, 19 nt, Artificial Sequence
  Description of Artificial Sequence: Synthetic oligonucleotide
  Sense strand starting at position 1319 of SEQ ID NO: 780
ggaagaagcuucccuagac

SEQ ID NO: 63087 - RNA, 19 nt, Artificial Sequence
  Description of Artificial Sequence: Synthetic oligonucleotide
  Antisense strand to SEQ ID NO: 63006
gucuagggaagcuucuucc

SEQ ID NO: 63088 - RNA, 19 nt, Artificial Sequence
  Description of Artificial Sequence: Synthetic oligonucleotide
  Sense strand starting at position 1591 of SEQ ID NO: 780
cgacuauacuuaccucaag

SEQ ID NO: 63089 - RNA, 19 nt, Artificial Sequence
  Description of Artificial Sequence: Synthetic oligonucleotide
  Antisense strand to SEQ ID NO: 63008
cuugagguaaguauagucg

SEQ ID NO: 63090 - RNA, 19 nt, Artificial Sequence
  Description of Artificial Sequence: Synthetic oligonucleotide
  Sense strand starting at position 1647 of SEQ ID NO: 780
gccuccuuggguuggagaa

SEQ ID NO: 63091 - RNA, 19 nt, Artificial Sequence
  Description of Artificial Sequence: Synthetic oligonucleotide
  Antisense strand to SEQ ID NO: 63010
uucuccaacccaaggaggc

SEQ ID NO: 63092 - RNA, 19 nt, Artificial Sequence
  Description of Artificial Sequence: Synthetic oligonucleotide
  Sense strand starting at position 1658 of SEQ ID NO: 780
uuggagaacgugugagaga

SEQ ID NO: 63093 - RNA, 19 nt, Artificial Sequence
  Description of Artificial Sequence: Synthetic oligonucleotide
  Antisense strand to SEQ ID NO: 63012
ucucucacacguucuccaa

SEQ ID NO: 63094 - RNA, 19 nt, Artificial Sequence
  Description of Artificial Sequence: Synthetic oligonucleotide
  Sense strand starting at position 1920 of SEQ ID NO: 780
gggucccuuucugcugaau

SEQ ID NO: 63095 - RNA, 19 nt, Artificial Sequence
  Description of Artificial Sequence: Synthetic oligonucleotide
  Antisense strand to SEQ ID NO: 63014
auucagcagaaagggaccc

SEQ ID NO: 63096 - RNA, 19 nt, Artificial Sequence
  Description of Artificial Sequence: Synthetic oligonucleotide
  Sense strand starting at position 1926 of SEQ ID NO: 780
cuuucugcugaaugaguua

SEQ ID NO: 63097 - RNA, 19 nt, Artificial Sequence
  Description of Artificial Sequence: Synthetic oligonucleotide
  Antisense strand to SEQ ID NO: 63016
uaacucauucagcagaaag

SEQ ID NO: 63098 - RNA, 19 nt, Artificial Sequence
  Description of Artificial Sequence: Synthetic oligonucleotide
  Sense strand starting at position 1963 of SEQ ID NO: 780
uuuguacagucucuuauga

SEQ ID NO: 63099 - RNA, 19 nt, Artificial Sequence
  Description of Artificial Sequence: Synthetic oligonucleotide
  Antisense strand to SEQ ID NO: 63018
ucauaagagacuguacaaa

SEQ ID NO: 63100 - RNA, 19 nt, Artificial Sequence
  Description of Artificial Sequence: Synthetic oligonucleotide
  Sense strand starting at position 1976 of SEQ ID NO: 780
uuaugaagcgccuggauuu

SEQ ID NO: 63101 - RNA, 19 nt, Artificial Sequence
  Description of Artificial Sequence: Synthetic oligonucleotide
  Antisense strand to SEQ ID NO: 63020
aaauccaggcgcuucauaa

SEQ ID NO: 63102 - RNA, 19 nt, Artificial Sequence
  Description of Artificial Sequence: Synthetic oligonucleotide
  Sense strand starting at position 1983 of SEQ ID NO: 780
gcgccuggauuucucauua

SEQ ID NO: 63103 - RNA, 19 nt, Artificial Sequence
  Description of Artificial Sequence: Synthetic oligonucleotide
  Antisense strand to SEQ ID NO: 63022
uaaugagaaauccaggcgc

SEQ ID NO: 63104 - RNA, 19 nt, Artificial Sequence
  Description of Artificial Sequence: Synthetic oligonucleotide
  Sense strand starting at position 2094 of SEQ ID NO: 780
cgagaacucgcgcuucuca

SEQ ID NO: 63105 - RNA, 19 nt, Artificial Sequence
  Description of Artificial Sequence: Synthetic oligonucleotide
  Antisense strand to SEQ ID NO: 63024
ugagaagcgcgaguucucg

SEQ ID NO: 63106 - RNA, 19 nt, Artificial Sequence
  Description of Artificial Sequence: Synthetic oligonucleotide
  Sense strand starting at position 2378 of SEQ ID NO: 780
gacuguaucaggugaugug

SEQ ID NO: 63107 - RNA, 19 nt, Artificial Sequence
  Description of Artificial Sequence: Synthetic oligonucleotide
  Antisense strand to SEQ ID NO: 63026
cacaucaccugauacaguc

SEQ ID NO: 63108 - RNA, 19 nt, Artificial Sequence
  Description of Artificial Sequence: Synthetic oligonucleotide
  Sense strand starting at position 3018 of SEQ ID NO: 780
ggaucugauuugcauggga

SEQ ID NO: 63109 - RNA, 19 nt, Artificial Sequence
  Description of Artificial Sequence: Synthetic oligonucleotide
  Antisense strand to SEQ ID NO: 63028
ucccaugcaaaucagaucc

SEQ ID NO: 63110 - RNA, 19 nt, Artificial Sequence
  Description of Artificial Sequence: Synthetic oligonucleotide
  Sense strand starting at position 3023 of SEQ ID NO: 780
ugauuugcaugggaucuaa

SEQ ID NO: 63111 - RNA, 19 nt, Artificial Sequence
  Description of Artificial Sequence: Synthetic oligonucleotide
  Antisense strand to SEQ ID NO: 63030
uuagaucccaugcaaauca

SEQ ID NO: 63112 - RNA, 19 nt, Artificial Sequence
  Description of Artificial Sequence: Synthetic oligonucleotide
  Sense strand starting at position 3141 of SEQ ID NO: 780
gcagauuggacuggugcaa

SEQ ID NO: 63113 - RNA, 19 nt, Artificial Sequence
  Description of Artificial Sequence: Synthetic oligonucleotide
  Antisense strand to SEQ ID NO: 63032
uugcaccaguccaaucugc

SEQ ID NO: 63114 - RNA, 19 nt, Artificial Sequence
  Description of Artificial Sequence: Synthetic oligonucleotide
  Sense strand starting at position 3268 of SEQ ID NO: 780
gguaacauuucuugacaug

SEQ ID NO: 63115 - RNA, 19 nt, Artificial Sequence
  Description of Artificial Sequence: Synthetic oligonucleotide
  Antisense strand to SEQ ID NO: 63034
caugucaagaaauguuacc

SEQ ID NO: 63116 - RNA, 19 nt, Artificial Sequence
  Description of Artificial Sequence: Synthetic oligonucleotide
  Sense strand starting at position 3447 of SEQ ID NO: 780
cauuauaaugugggucaca

SEQ ID NO: 63117 - RNA, 19 nt, Artificial Sequence
  Description of Artificial Sequence: Synthetic oligonucleotide
  Antisense strand to SEQ ID NO: 63036
ugugacccacauuauaaug

SEQ ID NO: 63118 - RNA, 19 nt, Artificial Sequence
  Description of Artificial Sequence: Synthetic oligonucleotide
  Sense strand starting at position 3504 of SEQ ID NO: 780
auguucucuccucaaguau

SEQ ID NO: 63119 - RNA, 19 nt, Artificial Sequence
  Description of Artificial Sequence: Synthetic oligonucleotide
  Antisense strand to SEQ ID NO: 63038
auacuugaggagagaacau

SEQ ID NO: 63120 - RNA, 19 nt, Artificial Sequence
  Description of Artificial Sequence: Synthetic oligonucleotide
  Sense strand starting at position 3530 of SEQ ID NO: 780
ggcuuaugccaacaucaaa

SEQ ID NO: 63121 - RNA, 19 nt, Artificial Sequence
  Description of Artificial Sequence: Synthetic oligonucleotide
  Antisense strand to SEQ ID NO: 63040
uuugauguuggcauaagcc

SEQ ID NO: 63122 - RNA, 19 nt, Artificial Sequence
  Description of Artificial Sequence: Synthetic oligonucleotide
  Sense strand starting at position 3580 of SEQ ID NO: 780
gagaaacccugagaugacu

SEQ ID NO: 63123 - RNA, 19 nt, Artificial Sequence
  Description of Artificial Sequence: Synthetic oligonucleotide
  Antisense strand to SEQ ID NO: 63042
agucaucucaggguuucuc

SEQ ID NO: 63124 - RNA, 19 nt, Artificial Sequence
  Description of Artificial Sequence: Synthetic oligonucleotide
  Sense strand starting at position 3594 of SEQ ID NO: 780
ugacuugaauuugaagaau

SEQ ID NO: 63125 - RNA, 19 nt, Artificial Sequence
  Description of Artificial Sequence: Synthetic oligonucleotide
  Antisense strand to SEQ ID NO: 63044
auucuucaaauucaaguca

SEQ ID NO: 63126 - RNA, 19 nt, Artificial Sequence
  Description of Artificial Sequence: Synthetic oligonucleotide
  Sense strand starting at position 3641 of SEQ ID NO: 780
ugguuucuccaauagguuu

SEQ ID NO: 63127 - RNA, 19 nt, Artificial Sequence
  Description of Artificial Sequence: Synthetic oligonucleotide
  Antisense strand to SEQ ID NO: 63046
aaaccuauuggagaaacca

SEQ ID NO: 63128 - RNA, 19 nt, Artificial Sequence
  Description of Artificial Sequence: Synthetic oligonucleotide
  Sense strand starting at position 3647 of SEQ ID NO: 780
cuccaauagguuugagcuu

SEQ ID NO: 63129 - RNA, 19 nt, Artificial Sequence
  Description of Artificial Sequence: Synthetic oligonucleotide
  Antisense strand to SEQ ID NO: 63048
aagcucaaaccuauuggag

SEQ ID NO: 63130 - RNA, 19 nt, Artificial Sequence
  Description of Artificial Sequence: Synthetic oligonucleotide
  Sense strand starting at position 3674 of SEQ ID NO: 780
gcgugugggcugucagaaa

SEQ ID NO: 63131 - RNA, 19 nt, Artificial Sequence
  Description of Artificial Sequence: Synthetic oligonucleotide
  Antisense strand to SEQ ID NO: 63050
uuucugacagcccacacgc

SEQ ID NO: 63132 - RNA, 19 nt, Artificial Sequence
  Description of Artificial Sequence: Synthetic oligonucleotide
  Sense strand starting at position 3694 of SEQ ID NO: 780
ggccuugucagggacccau

SEQ ID NO: 63133 - RNA, 19 nt, Artificial Sequence
  Description of Artificial Sequence: Synthetic oligonucleotide
  Antisense strand to SEQ ID NO: 63052
augggucccugacaaggcc

SEQ ID NO: 63134 - RNA, 19 nt, Artificial Sequence
  Description of Artificial Sequence: Synthetic oligonucleotide
  Sense strand starting at position 3791 of SEQ ID NO: 780
ugguuuacuuauguuauca

SEQ ID NO: 63135 - RNA, 19 nt, Artificial Sequence
  Description of Artificial Sequence: Synthetic oligonucleotide
  Antisense strand to SEQ ID NO: 63054
ugauaacauaaguaaacca

SEQ ID NO: 63136 - RNA, 19 nt, Artificial Sequence
  Description of Artificial Sequence: Synthetic oligonucleotide
  Sense strand starting at position 3919 of SEQ ID NO: 781
gucauuauuuagcaccaca

SEQ ID NO: 63137 - RNA, 19 nt, Artificial Sequence
  Description of Artificial Sequence: Synthetic oligonucleotide
  Antisense strand to SEQ ID NO: 63056
uguggugcuaaauaaugac

SEQ ID NO: 63138 - RNA, 19 nt, Artificial Sequence
  Description of Artificial Sequence: Synthetic oligonucleotide
  Sense strand starting at position 3906 of SEQ ID NO: 781
uuauuaaaugggugucauu

SEQ ID NO: 63139 - RNA, 19 nt, Artificial Sequence
  Description of Artificial Sequence: Synthetic oligonucleotide
  Antisense strand to SEQ ID NO: 63058
aaugacacccauuuaauaa

SEQ ID NO: 63140 - RNA, 19 nt, Artificial Sequence
  Description of Artificial Sequence: Synthetic oligonucleotide
  Sense strand starting at position 3905 of SEQ ID NO: 781
uuuauuaaaugggugucau

SEQ ID NO: 63141 - RNA, 19 nt, Artificial Sequence
  Description of Artificial Sequence: Synthetic oligonucleotide
  Antisense strand to SEQ ID NO: 63060
augacacccauuuaauaaa

SEQ ID NO: 63142 - RNA, 19 nt, Artificial Sequence
  Description of Artificial Sequence: Synthetic oligonucleotide
  Sense strand starting at position 3211 of SEQ ID NO: 781
ccgcuuaauccguauucuu

SEQ ID NO: 63143 - RNA, 19 nt, Artificial Sequence
  Description of Artificial Sequence: Synthetic oligonucleotide
  Antisense strand to SEQ ID NO: 63062
aagaauacggauuaagcgg

SEQ ID NO: 63144 - RNA, 19 nt, Artificial Sequence
  Description of Artificial Sequence: Synthetic oligonucleotide
  Sense strand starting at position 3154 of SEQ ID NO: 781
cuuugucagcauugaaacu

SEQ ID NO: 63145 - RNA, 19 nt, Artificial Sequence
  Description of Artificial Sequence: Synthetic oligonucleotide
  Antisense strand to SEQ ID NO: 63064
aguuucaaugcugacaaag

SEQ ID NO: 63146 - RNA, 19 nt, Artificial Sequence
  Description of Artificial Sequence: Synthetic oligonucleotide
  Sense strand starting at position 3151 of SEQ ID NO: 781
guucuuugucagcauugaa

SEQ ID NO: 63147 - RNA, 19 nt, Artificial Sequence
  Description of Artificial Sequence: Synthetic oligonucleotide
  Antisense strand to SEQ ID NO: 63066
uucaaugcugacaaagaac

SEQ ID NO: 63148 - RNA, 19 nt, Artificial Sequence
  Description of Artificial Sequence: Synthetic oligonucleotide
  Sense strand starting at position 3150 of SEQ ID NO: 781
gguucuuugucagcauuga

SEQ ID NO: 63149 - RNA, 19 nt, Artificial Sequence
  Description of Artificial Sequence: Synthetic oligonucleotide
  Antisense strand to SEQ ID NO: 63068
ucaaugcugacaaagaacc

SEQ ID NO: 63150 - RNA, 19 nt, Artificial Sequence
  Description of Artificial Sequence: Synthetic oligonucleotide
  Sense strand starting at position 3147 of SEQ ID NO: 781
acggguucuuugucagcau

SEQ ID NO: 63151 - RNA, 19 nt, Artificial Sequence
  Description of Artificial Sequence: Synthetic oligonucleotide
  Antisense strand to SEQ ID NO: 63070
augcugacaaagaacccgu

SEQ ID NO: 63152 - RNA, 19 nt, Artificial Sequence
  Description of Artificial Sequence: Synthetic oligonucleotide
  Sense strand starting at position 3102 of SEQ ID NO: 781
uccucagugcgucaugaca

SEQ ID NO: 63153 - RNA, 19 nt, Artificial Sequence
  Description of Artificial Sequence: Synthetic oligonucleotide
  Antisense strand to SEQ ID NO: 63072
ugucaugacgcacugagga

SEQ ID NO: 63154 - RNA, 19 nt, Artificial Sequence
  Description of Artificial Sequence: Synthetic oligonucleotide
  Sense strand starting at position 3082 of SEQ ID NO: 781
acagucaacuaguagagua

SEQ ID NO: 63155 - RNA, 19 nt, Artificial Sequence
  Description of Artificial Sequence: Synthetic oligonucleotide
  Antisense strand to SEQ ID NO: 63074
uacucuacuaguugacugu

SEQ ID NO: 63156 - RNA, 19 nt, Artificial Sequence
  Description of Artificial Sequence: Synthetic oligonucleotide
  Sense strand starting at position 2979 of SEQ ID NO: 781
ggugcuacuagauaucaag

SEQ ID NO: 63157 - RNA, 19 nt, Artificial Sequence
  Description of Artificial Sequence: Synthetic oligonucleotide
  Antisense strand to SEQ ID NO: 63076
cuugauaucuaguagcacc

SEQ ID NO: 63158 - RNA, 19 nt, Artificial Sequence
  Description of Artificial Sequence: Synthetic oligonucleotide
  Sense strand starting at position 2941 of SEQ ID NO: 781
ggccuaucuccauggaaag

SEQ ID NO: 63159 - RNA, 19 nt, Artificial Sequence
  Description of Artificial Sequence: Synthetic oligonucleotide
  Antisense strand to SEQ ID NO: 63078
cuuuccauggagauaggcc

SEQ ID NO: 63160 - RNA, 19 nt, Artificial Sequence
  Description of Artificial Sequence: Synthetic oligonucleotide
  Sense strand starting at position 2929 of SEQ ID NO: 781
gagcuacuuccuggccuau

SEQ ID NO: 63161 - RNA, 19 nt, Artificial Sequence
  Description of Artificial Sequence: Synthetic oligonucleotide
  Antisense strand to SEQ ID NO: 63080
auaggccaggaaguagcuc

SEQ ID NO: 63162 - RNA, 19 nt, Artificial Sequence
  Description of Artificial Sequence: Synthetic oligonucleotide
  Sense strand starting at position 2840 of SEQ ID NO: 781
guaaacagcuuauucggaa

SEQ ID NO: 63163 - RNA, 19 nt, Artificial Sequence
  Description of Artificial Sequence: Synthetic oligonucleotide
  Antisense strand to SEQ ID NO: 63082
uuccgaauaagcuguuuac

SEQ ID NO: 63164 - RNA, 19 nt, Artificial Sequence
  Description of Artificial Sequence: Synthetic oligonucleotide
  Sense strand starting at position 2740 of SEQ ID NO: 781
agcugucaccugcggaaga

SEQ ID NO: 63165 - RNA, 19 nt, Artificial Sequence
  Description of Artificial Sequence: Synthetic oligonucleotide
  Antisense strand to SEQ ID NO: 63084
ucuuccgcaggugacagcu

SEQ ID NO: 63166 - RNA, 19 nt, Artificial Sequence
  Description of Artificial Sequence: Synthetic oligonucleotide
  Sense strand starting at position 2738 of SEQ ID NO: 781
cgagcugucaccugcggaa

SEQ ID NO: 63167 - RNA, 19 nt, Artificial Sequence
  Description of Artificial Sequence: Synthetic oligonucleotide
  Antisense strand to SEQ ID NO: 63086
uuccgcaggugacagcucg

SEQ ID NO: 63168 - RNA, 19 nt, Artificial Sequence
  Description of Artificial Sequence: Synthetic oligonucleotide
  Sense strand starting at position 2680 of SEQ ID NO: 781
aguaaucauuuagguaugu

SEQ ID NO: 63169 - RNA, 19 nt, Artificial Sequence
  Description of Artificial Sequence: Synthetic oligonucleotide
  Antisense strand to SEQ ID NO: 63088
acauaccuaaaugauuacu

SEQ ID NO: 63170 - RNA, 19 nt, Artificial Sequence
  Description of Artificial Sequence: Synthetic oligonucleotide
  Sense strand starting at position 2665 of SEQ ID NO: 781
agaggcagcucuuccagua

SEQ ID NO: 63171 - RNA, 19 nt, Artificial Sequence
  Description of Artificial Sequence: Synthetic oligonucleotide
  Antisense strand to SEQ ID NO: 63090
uacuggaagagcugccucu

SEQ ID NO: 63172 - RNA, 19 nt, Artificial Sequence
  Description of Artificial Sequence: Synthetic oligonucleotide
  Sense strand starting at position 2636 of SEQ ID NO: 781
uuuauaaauucugucagga

SEQ ID NO: 63173 - RNA, 19 nt, Artificial Sequence
  Description of Artificial Sequence: Synthetic oligonucleotide
  Antisense strand to SEQ ID NO: 63092
uccugacagaauuuauaaa

SEQ ID NO: 63174 - RNA, 19 nt, Artificial Sequence
  Description of Artificial Sequence: Synthetic oligonucleotide
  Sense strand starting at position 2607 of SEQ ID NO: 781
cgauucugucuuuaauuaa

SEQ ID NO: 63175 - RNA, 19 nt, Artificial Sequence
  Description of Artificial Sequence: Synthetic oligonucleotide
  Antisense strand to SEQ ID NO: 63094
uuaauuaaagacagaaucg

SEQ ID NO: 63176 - RNA, 19 nt, Artificial Sequence
  Description of Artificial Sequence: Synthetic oligonucleotide
  Sense strand starting at position 2606 of SEQ ID NO: 781
ccgauucugucuuuaauua

SEQ ID NO: 63177 - RNA, 19 nt, Artificial Sequence
  Description of Artificial Sequence: Synthetic oligonucleotide
  Antisense strand to SEQ ID NO: 63096
uaauuaaagacagaaucgg

SEQ ID NO: 63178 - RNA, 19 nt, Artificial Sequence
  Description of Artificial Sequence: Synthetic oligonucleotide
  Sense strand starting at position 2538 of SEQ ID NO: 781
gcaugacgauucuugggaa

SEQ ID NO: 63179 - RNA, 19 nt, Artificial Sequence
  Description of Artificial Sequence: Synthetic oligonucleotide
  Antisense strand to SEQ ID NO: 63098
uucccaagaaucgucaugc

SEQ ID NO: 63180 - RNA, 19 nt, Artificial Sequence
  Description of Artificial Sequence: Synthetic oligonucleotide
  Sense strand starting at position 2530 of SEQ ID NO: 781
augcuuuggcaugacgauu

SEQ ID NO: 63181 - RNA, 19 nt, Artificial Sequence
  Description of Artificial Sequence: Synthetic oligonucleotide
  Antisense strand to SEQ ID NO: 63100
aaucgucaugccaaagcau

SEQ ID NO: 63182 - RNA, 19 nt, Artificial Sequence
  Description of Artificial Sequence: Synthetic oligonucleotide
  Sense strand starting at position 2529 of SEQ ID NO: 781
gaugcuuuggcaugacgau

SEQ ID NO: 63183 - RNA, 19 nt, Artificial Sequence
  Description of Artificial Sequence: Synthetic oligonucleotide
  Antisense strand to SEQ ID NO: 63102
aucgucaugccaaagcauc

SEQ ID NO: 63184 - RNA, 19 nt, Artificial Sequence
  Description of Artificial Sequence: Synthetic oligonucleotide
  Sense strand starting at position 2491 of SEQ ID NO: 781
aaaucuugaugcuuaaggu

SEQ ID NO: 63185 - RNA, 19 nt, Artificial Sequence
  Description of Artificial Sequence: Synthetic oligonucleotide
  Antisense strand to SEQ ID NO: 63104
accuuaagcaucaagauuu

SEQ ID NO: 63186 - RNA, 19 nt, Artificial Sequence
  Description of Artificial Sequence: Synthetic oligonucleotide
  Sense strand starting at position 2456 of SEQ ID NO: 781
aguuuagacugaggagagu

SEQ ID NO: 63187 - RNA, 19 nt, Artificial Sequence
  Description of Artificial Sequence: Synthetic oligonucleotide
  Antisense strand to SEQ ID NO: 63106
acucuccucagucuaaacu

SEQ ID NO: 63188 - RNA, 19 nt, Artificial Sequence
  Description of Artificial Sequence: Synthetic oligonucleotide
  Sense strand starting at position 2432 of SEQ ID NO: 781
agggaagcgucauccaaau

SEQ ID NO: 63189 - RNA, 19 nt, Artificial Sequence
  Description of Artificial Sequence: Synthetic oligonucleotide
  Antisense strand to SEQ ID NO: 63108
auuuggaugacgcuucccu

SEQ ID NO: 63190 - RNA, 19 nt, Artificial Sequence
  Description of Artificial Sequence: Synthetic oligonucleotide
  Sense strand starting at position 1102 of SEQ ID NO: 781
ccucaucgaucacucgauu

SEQ ID NO: 63191 - RNA, 19 nt, Artificial Sequence
  Description of Artificial Sequence: Synthetic oligonucleotide
  Antisense strand to SEQ ID NO: 63110
aaucgagugaucgaugagg

SEQ ID NO: 63192 - RNA, 19 nt, Artificial Sequence
  Description of Artificial Sequence: Synthetic oligonucleotide
  Sense strand starting at position 1095 of SEQ ID NO: 781
uuagcuuccucaucgauca

SEQ ID NO: 63193 - RNA, 19 nt, Artificial Sequence
  Description of Artificial Sequence: Synthetic oligonucleotide
  Antisense strand to SEQ ID NO: 63112
ugaucgaugaggaagcuaa

SEQ ID NO: 63194 - RNA, 19 nt, Artificial Sequence
  Description of Artificial Sequence: Synthetic oligonucleotide
  Sense strand starting at position 904 of SEQ ID NO: 781
ggagcaaauucuccgaccu

SEQ ID NO: 63195 - RNA, 19 nt, Artificial Sequence
  Description of Artificial Sequence: Synthetic oligonucleotide
  Antisense strand to SEQ ID NO: 63114
aggucggagaauuugcucc

SEQ ID NO: 63196 - RNA, 19 nt, Artificial Sequence
  Description of Artificial Sequence: Synthetic oligonucleotide
  Sense strand starting at position 713 of SEQ ID NO: 781
cgagauccucgcgaacaaa

SEQ ID NO: 63197 - RNA, 19 nt, Artificial Sequence
  Description of Artificial Sequence: Synthetic oligonucleotide
  Antisense strand to SEQ ID NO: 63116
uuuguucgcgaggaucucg

SEQ ID NO: 63198 - RNA, 19 nt, Artificial Sequence
  Description of Artificial Sequence: Synthetic oligonucleotide
  Sense strand starting at position 581 of SEQ ID NO: 781
ccaaucuaugaguagacgu

SEQ ID NO: 63199 - RNA, 19 nt, Artificial Sequence
  Description of Artificial Sequence: Synthetic oligonucleotide
  Antisense strand to SEQ ID NO: 63118
acgucuacucauagauugg

SEQ ID NO: 63200 - RNA, 19 nt, Artificial Sequence
  Description of Artificial Sequence: Synthetic oligonucleotide
  Sense strand starting at position 578 of SEQ ID NO: 781
uucccaaucuaugaguaga

SEQ ID NO: 63201 - RNA, 19 nt, Artificial Sequence
  Description of Artificial Sequence: Synthetic oligonucleotide
  Antisense strand to SEQ ID NO: 63120
ucuacucauagauugggaa

SEQ ID NO: 63202 - RNA, 19 nt, Artificial Sequence
  Description of Artificial Sequence: Synthetic oligonucleotide
  Sense strand starting at position 497 of SEQ ID NO: 781
uacagaauguugcacaaga

SEQ ID NO: 63203 - RNA, 19 nt, Artificial Sequence
  Description of Artificial Sequence: Synthetic oligonucleotide
  Antisense strand to SEQ ID NO: 63122
ucuugugcaacauucugua

SEQ ID NO: 63204 - RNA, 19 nt, Artificial Sequence
  Description of Artificial Sequence: Synthetic oligonucleotide
  Sense strand starting at position 483 of SEQ ID NO: 781
uggguaagcacuuguacag

SEQ ID NO: 63205 - RNA, 19 nt, Artificial Sequence
  Description of Artificial Sequence: Synthetic oligonucleotide
  Antisense strand to SEQ ID NO: 63124
cuguacaagugcuuaccca

SEQ ID NO: 63206 - RNA, 19 nt, Artificial Sequence
  Description of Artificial Sequence: Synthetic oligonucleotide
  Sense strand starting at position 324 of SEQ ID NO: 781
gccaauaaugccugagaaa

SEQ ID NO: 63207 - RNA, 19 nt, Artificial Sequence
  Description of Artificial Sequence: Synthetic oligonucleotide
  Antisense strand to SEQ ID NO: 63126
uuucucaggcauuauuggc

SEQ ID NO: 63208 - RNA, 19 nt, Artificial Sequence
  Description of Artificial Sequence: Synthetic oligonucleotide
  Sense strand starting at position 323 of SEQ ID NO: 781
ggccaauaaugccugagaa

SEQ ID NO: 63209 - RNA, 19 nt, Artificial Sequence
  Description of Artificial Sequence: Synthetic oligonucleotide
  Antisense strand to SEQ ID NO: 63128
uucucaggcauuauuggcc

SEQ ID NO: 63210 - RNA, 19 nt, Artificial Sequence
  Description of Artificial Sequence: Synthetic oligonucleotide
  Sense strand starting at position 126 of SEQ ID NO: 781
uuuaguuuccuuugaagca

SEQ ID NO: 63211 - RNA, 19 nt, Artificial Sequence
  Description of Artificial Sequence: Synthetic oligonucleotide
  Antisense strand to SEQ ID NO: 63130
ugcuucaaaggaaacuaaa

SEQ ID NO: 63212 - RNA, 19 nt, Artificial Sequence
  Description of Artificial Sequence: Synthetic oligonucleotide
  Sense strand starting at position 17 of SEQ ID NO: 781
ucuuuagugugauacaaag

SEQ ID NO: 63213 - RNA, 19 nt, Artificial Sequence
  Description of Artificial Sequence: Synthetic oligonucleotide
  Antisense strand to SEQ ID NO: 63132
cuuuguaucacacuaaaga

SEQ ID NO: 63214 - RNA, 19 nt, Artificial Sequence
  Description of Artificial Sequence: Synthetic oligonucleotide
  Sense strand starting at position 11 of SEQ ID NO: 781
uguuauucuuuagugugau

SEQ ID NO: 63215 - RNA, 19 nt, Artificial Sequence
  Description of Artificial Sequence: Synthetic oligonucleotide
  Antisense strand to SEQ ID NO: 63134
aucacacuaaagaauaaca

SEQ ID NO: 63216 - RNA, 19 nt, Artificial Sequence
  Description of Artificial Sequence: Synthetic oligonucleotide
  Sense strand starting at position 62 of SEQ ID NO: 782
gcauuaccugcugggagau

SEQ ID NO: 63217 - RNA, 19 nt, Artificial Sequence
  Description of Artificial Sequence: Synthetic oligonucleotide
  Antisense strand to SEQ ID NO: 63136
aucucccagcagguaaugc

SEQ ID NO: 63218 - RNA, 19 nt, Artificial Sequence
  Description of Artificial Sequence: Synthetic oligonucleotide
  Sense strand starting at position 78 of SEQ ID NO: 782
gauggcaaauccgaugaca

SEQ ID NO: 63219 - RNA, 19 nt, Artificial Sequence
  Description of Artificial Sequence: Synthetic oligonucleotide
  Antisense strand to SEQ ID NO: 63138
ugucaucggauuugccauc

SEQ ID NO: 63220 - RNA, 19 nt, Artificial Sequence
  Description of Artificial Sequence: Synthetic oligonucleotide
  Sense strand starting at position 80 of SEQ ID NO: 782
uggcaaauccgaugacaac

SEQ ID NO: 63221 - RNA, 19 nt, Artificial Sequence
  Description of Artificial Sequence: Synthetic oligonucleotide
  Antisense strand to SEQ ID NO: 63140
guugucaucggauuugcca

SEQ ID NO: 63222 - RNA, 19 nt, Artificial Sequence
  Description of Artificial Sequence: Synthetic oligonucleotide
  Sense strand starting at position 238 of SEQ ID NO: 782
cccacugucucauaaguaa

SEQ ID NO: 63223 - RNA, 19 nt, Artificial Sequence
  Description of Artificial Sequence: Synthetic oligonucleotide
  Antisense strand to SEQ ID NO: 63142
uuacuuaugagacaguggg

SEQ ID NO: 63224 - RNA, 19 nt, Artificial Sequence
  Description of Artificial Sequence: Synthetic oligonucleotide
  Sense strand starting at position 241 of SEQ ID NO: 782
acugucucauaaguaagaa

SEQ ID NO: 63225 - RNA, 19 nt, Artificial Sequence
  Description of Artificial Sequence: Synthetic oligonucleotide
  Antisense strand to SEQ ID NO: 63144
uucuuacuuaugagacagu

SEQ ID NO: 63226 - RNA, 19 nt, Artificial Sequence
  Description of Artificial Sequence: Synthetic oligonucleotide
  Sense strand starting at position 338 of SEQ ID NO: 782
agcucuucaguggguugaa

SEQ ID NO: 63227 - RNA, 19 nt, Artificial Sequence
  Description of Artificial Sequence: Synthetic oligonucleotide
  Antisense strand to SEQ ID NO: 63146
uucaacccacugaagagcu

SEQ ID NO: 63228 - RNA, 19 nt, Artificial Sequence
  Description of Artificial Sequence: Synthetic oligonucleotide
  Sense strand starting at position 341 of SEQ ID NO: 782
ucuucaguggguugaagaa

SEQ ID NO: 63229 - RNA, 19 nt, Artificial Sequence
  Description of Artificial Sequence: Synthetic oligonucleotide
  Antisense strand to SEQ ID NO: 63148
uucuucaacccacugaaga

SEQ ID NO: 63230 - RNA, 19 nt, Artificial Sequence
  Description of Artificial Sequence: Synthetic oligonucleotide
  Sense strand starting at position 478 of SEQ ID NO: 782
agggaugggugguuagagu

SEQ ID NO: 63231 - RNA, 19 nt, Artificial Sequence
  Description of Artificial Sequence: Synthetic oligonucleotide
  Antisense strand to SEQ ID NO: 63150
acucuaaccacccaucccu

SEQ ID NO: 63232 - RNA, 19 nt, Artificial Sequence
  Description of Artificial Sequence: Synthetic oligonucleotide
  Sense strand starting at position 479 of SEQ ID NO: 782
gggaugggugguuagaguu

SEQ ID NO: 63233 - RNA, 19 nt, Artificial Sequence
  Description of Artificial Sequence: Synthetic oligonucleotide
  Antisense strand to SEQ ID NO: 63152
aacucuaaccacccauccc

SEQ ID NO: 63234 - RNA, 19 nt, Artificial Sequence
  Description of Artificial Sequence: Synthetic oligonucleotide
  Sense strand starting at position 489 of SEQ ID NO: 782
guuagaguuguggagagag

SEQ ID NO: 63235 - RNA, 19 nt, Artificial Sequence
  Description of Artificial Sequence: Synthetic oligonucleotide
  Antisense strand to SEQ ID NO: 63154
cucucuccacaacucuaac

SEQ ID NO: 63236 - RNA, 19 nt, Artificial Sequence
  Description of Artificial Sequence: Synthetic oligonucleotide
  Sense strand starting at position 491 of SEQ ID NO: 782
uagaguuguggagagaguu

SEQ ID NO: 63237 - RNA, 19 nt, Artificial Sequence
  Description of Artificial Sequence: Synthetic oligonucleotide
  Antisense strand to SEQ ID NO: 63156
aacucucuccacaacucua

SEQ ID NO: 63238 - RNA, 19 nt, Artificial Sequence
  Description of Artificial Sequence: Synthetic oligonucleotide
  Sense strand starting at position 600 of SEQ ID NO: 782
ugcccuguccaaugaguga

SEQ ID NO: 63239 - RNA, 19 nt, Artificial Sequence
  Description of Artificial Sequence: Synthetic oligonucleotide
  Antisense strand to SEQ ID NO: 63158
ucacucauuggacagggca

SEQ ID NO: 63240 - RNA, 19 nt, Artificial Sequence
  Description of Artificial Sequence: Synthetic oligonucleotide
  Sense strand starting at position 639 of SEQ ID NO: 782
cccagagaucgagaagugu

SEQ ID NO: 63241 - RNA, 19 nt, Artificial Sequence
  Description of Artificial Sequence: Synthetic oligonucleotide
  Antisense strand to SEQ ID NO: 63160
acacuucucgaucucuggg

SEQ ID NO: 63242 - RNA, 19 nt, Artificial Sequence
  Description of Artificial Sequence: Synthetic oligonucleotide
  Sense strand starting at position 727 of SEQ ID NO: 782
cagaauaaagccugcggaa

SEQ ID NO: 63243 - RNA, 19 nt, Artificial Sequence
  Description of Artificial Sequence: Synthetic oligonucleotide
  Antisense strand to SEQ ID NO: 63162
uuccgcaggcuuuauucug

SEQ ID NO: 63244 - RNA, 19 nt, Artificial Sequence
  Description of Artificial Sequence: Synthetic oligonucleotide
  Sense strand starting at position 729 of SEQ ID NO: 782
gaauaaagccugcggaaga

SEQ ID NO: 63245 - RNA, 19 nt, Artificial Sequence
  Description of Artificial Sequence: Synthetic oligonucleotide
  Antisense strand to SEQ ID NO: 63164
ucuuccgcaggcuuuauuc

SEQ ID NO: 63246 - RNA, 19 nt, Artificial Sequence
  Description of Artificial Sequence: Synthetic oligonucleotide
  Sense strand starting at position 739 of SEQ ID NO: 782
ugcggaagagucuguguga

SEQ ID NO: 63247 - RNA, 19 nt, Artificial Sequence
  Description of Artificial Sequence: Synthetic oligonucleotide
  Antisense strand to SEQ ID NO: 63166
ucacacagacucuuccgca

SEQ ID NO: 63248 - RNA, 19 nt, Artificial Sequence
  Description of Artificial Sequence: Synthetic oligonucleotide
  Sense strand starting at position 922 of SEQ ID NO: 782
gggugagagugauagggau

SEQ ID NO: 63249 - RNA, 19 nt, Artificial Sequence
  Description of Artificial Sequence: Synthetic oligonucleotide
  Antisense strand to SEQ ID NO: 63168
aucccuaucacucucaccc

SEQ ID NO: 63250 - RNA, 19 nt, Artificial Sequence
  Description of Artificial Sequence: Synthetic oligonucleotide
  Sense strand starting at position 988 of SEQ ID NO: 782
acauaaggcucaguaucuu

SEQ ID NO: 63251 - RNA, 19 nt, Artificial Sequence
  Description of Artificial Sequence: Synthetic oligonucleotide
  Antisense strand to SEQ ID NO: 63170
aagauacugagccuuaugu

SEQ ID NO: 63252 - RNA, 19 nt, Artificial Sequence
  Description of Artificial Sequence: Synthetic oligonucleotide
  Sense strand starting at position 1719 of SEQ ID NO: 782
agcaguguuugggccgaga

SEQ ID NO: 63253 - RNA, 19 nt, Artificial Sequence
  Description of Artificial Sequence: Synthetic oligonucleotide
  Antisense strand to SEQ ID NO: 63172
ucucggcccaaacacugcu

SEQ ID NO: 63254 - RNA, 19 nt, Artificial Sequence
  Description of Artificial Sequence: Synthetic oligonucleotide
  Sense strand starting at position 1721 of SEQ ID NO: 782
caguguuugggccgagaca

SEQ ID NO: 63255 - RNA, 19 nt, Artificial Sequence
  Description of Artificial Sequence: Synthetic oligonucleotide
  Antisense strand to SEQ ID NO: 63174
ugucucggcccaaacacug

SEQ ID NO: 63256 - RNA, 19 nt, Artificial Sequence
  Description of Artificial Sequence: Synthetic oligonucleotide
  Sense strand starting at position 2374 of SEQ ID NO: 782
ugcccuuucccaggguaga

SEQ ID NO: 63257 - RNA, 19 nt, Artificial Sequence
  Description of Artificial Sequence: Synthetic oligonucleotide
  Antisense strand to SEQ ID NO: 63176
ucuacccugggaaagggca

SEQ ID NO: 63258 - RNA, 19 nt, Artificial Sequence
  Description of Artificial Sequence: Synthetic oligonucleotide
  Sense strand starting at position 2610 of SEQ ID NO: 782
ugcucugucucacuggaga

SEQ ID NO: 63259 - RNA, 19 nt, Artificial Sequence
  Description of Artificial Sequence: Synthetic oligonucleotide
  Antisense strand to SEQ ID NO: 63178
ucuccagugagacagagca

SEQ ID NO: 63260 - RNA, 19 nt, Artificial Sequence
  Description of Artificial Sequence: Synthetic oligonucleotide
  Sense strand starting at position 2612 of SEQ ID NO: 782
cucugucucacuggagagu

SEQ ID NO: 63261 - RNA, 19 nt, Artificial Sequence
  Description of Artificial Sequence: Synthetic oligonucleotide
  Antisense strand to SEQ ID NO: 63180
acucuccagugagacagag

SEQ ID NO: 63262 - RNA, 19 nt, Artificial Sequence
  Description of Artificial Sequence: Synthetic oligonucleotide
  Sense strand starting at position 2721 of SEQ ID NO: 782
ugcugagcuuucuuugcau

SEQ ID NO: 63263 - RNA, 19 nt, Artificial Sequence
  Description of Artificial Sequence: Synthetic oligonucleotide
  Antisense strand to SEQ ID NO: 63182
augcaaagaaagcucagca

SEQ ID NO: 63264 - RNA, 19 nt, Artificial Sequence
  Description of Artificial Sequence: Synthetic oligonucleotide
  Sense strand starting at position 2723 of SEQ ID NO: 782
cugagcuuucuuugcauua

SEQ ID NO: 63265 - RNA, 19 nt, Artificial Sequence
  Description of Artificial Sequence: Synthetic oligonucleotide
  Antisense strand to SEQ ID NO: 63184
uaaugcaaagaaagcucag

SEQ ID NO: 63266 - RNA, 19 nt, Artificial Sequence
  Description of Artificial Sequence: Synthetic oligonucleotide
  Sense strand starting at position 2724 of SEQ ID NO: 782
ugagcuuucuuugcauuau

SEQ ID NO: 63267 - RNA, 19 nt, Artificial Sequence
  Description of Artificial Sequence: Synthetic oligonucleotide
  Antisense strand to SEQ ID NO: 63186
auaaugcaaagaaagcuca

SEQ ID NO: 63268 - RNA, 19 nt, Artificial Sequence
  Description of Artificial Sequence: Synthetic oligonucleotide
  Sense strand starting at position 2735 of SEQ ID NO: 782
ugcauuauguggcuuaauu

SEQ ID NO: 63269 - RNA, 19 nt, Artificial Sequence
  Description of Artificial Sequence: Synthetic oligonucleotide
  Antisense strand to SEQ ID NO: 63188
aauuaagccacauaaugca

SEQ ID NO: 63270 - RNA, 19 nt, Artificial Sequence
  Description of Artificial Sequence: Synthetic oligonucleotide
  Sense strand starting at position 2772 of SEQ ID NO: 782
agucauacucugcacacuu

SEQ ID NO: 63271 - RNA, 19 nt, Artificial Sequence
  Description of Artificial Sequence: Synthetic oligonucleotide
  Antisense strand to SEQ ID NO: 63190
aagugugcagaguaugacu

SEQ ID NO: 63272 - RNA, 19 nt, Artificial Sequence
  Description of Artificial Sequence: Synthetic oligonucleotide
  Sense strand starting at position 2880 of SEQ ID NO: 782
cucccaaagcugugcuuaa

SEQ ID NO: 63273 - RNA, 19 nt, Artificial Sequence
  Description of Artificial Sequence: Synthetic oligonucleotide
  Antisense strand to SEQ ID NO: 63192
uuaagcacagcuuugggag

SEQ ID NO: 63274 - RNA, 19 nt, Artificial Sequence
  Description of Artificial Sequence: Synthetic oligonucleotide
  Sense strand starting at position 2884 of SEQ ID NO: 782
caaagcugugcuuaacuga

SEQ ID NO: 63275 - RNA, 19 nt, Artificial Sequence
  Description of Artificial Sequence: Synthetic oligonucleotide
  Antisense strand to SEQ ID NO: 63194
ucaguuaagcacagcuuug

SEQ ID NO: 63276 - RNA, 19 nt, Artificial Sequence
  Description of Artificial Sequence: Synthetic oligonucleotide
  Sense strand starting at position 2937 of SEQ ID NO: 782
ggagauucgugagacucua

SEQ ID NO: 63277 - RNA, 19 nt, Artificial Sequence
  Description of Artificial Sequence: Synthetic oligonucleotide
  Antisense strand to SEQ ID NO: 63196
uagagucucacgaaucucc

SEQ ID NO: 63278 - RNA, 19 nt, Artificial Sequence
  Description of Artificial Sequence: Synthetic oligonucleotide
  Sense strand starting at position 3008 of SEQ ID NO: 782
cuaagagcaucucugagaa

SEQ ID NO: 63279 - RNA, 19 nt, Artificial Sequence
  Description of Artificial Sequence: Synthetic oligonucleotide
  Antisense strand to SEQ ID NO: 63198
uucucagagaugcucuuag

SEQ ID NO: 63280 - RNA, 19 nt, Artificial Sequence
  Description of Artificial Sequence: Synthetic oligonucleotide
  Sense strand starting at position 3141 of SEQ ID NO: 782
ccacgacuauccgaaauuc

SEQ ID NO: 63281 - RNA, 19 nt, Artificial Sequence
  Description of Artificial Sequence: Synthetic oligonucleotide
  Antisense strand to SEQ ID NO: 63200
gaauuucggauagucgugg

SEQ ID NO: 63282 - RNA, 19 nt, Artificial Sequence
  Description of Artificial Sequence: Synthetic oligonucleotide
  Sense strand starting at position 3173 of SEQ ID NO: 782
gcauuccuuugggucuuaa

SEQ ID NO: 63283 - RNA, 19 nt, Artificial Sequence
  Description of Artificial Sequence: Synthetic oligonucleotide
  Antisense strand to SEQ ID NO: 63202
uuaagacccaaaggaaugc

SEQ ID NO: 63284 - RNA, 19 nt, Artificial Sequence
  Description of Artificial Sequence: Synthetic oligonucleotide
  Sense strand starting at position 3258 of SEQ ID NO: 782
acagaaacgucuucagggu

SEQ ID NO: 63285 - RNA, 19 nt, Artificial Sequence
  Description of Artificial Sequence: Synthetic oligonucleotide
  Antisense strand to SEQ ID NO: 63204
acccugaagacguuucugu

SEQ ID NO: 63286 - RNA, 19 nt, Artificial Sequence
  Description of Artificial Sequence: Synthetic oligonucleotide
  Sense strand starting at position 3308 of SEQ ID NO: 782
ggaagugaggucuaccgau

SEQ ID NO: 63287 - RNA, 19 nt, Artificial Sequence
  Description of Artificial Sequence: Synthetic oligonucleotide
  Antisense strand to SEQ ID NO: 63206
aucgguagaccucacuucc

SEQ ID NO: 63288 - RNA, 19 nt, Artificial Sequence
  Description of Artificial Sequence: Synthetic oligonucleotide
  Sense strand starting at position 3315 of SEQ ID NO: 782
aggucuaccgaugggaaga

SEQ ID NO: 63289 - RNA, 19 nt, Artificial Sequence
  Description of Artificial Sequence: Synthetic oligonucleotide
  Antisense strand to SEQ ID NO: 63208
ucuucccaucgguagaccu

SEQ ID NO: 63290 - RNA, 19 nt, Artificial Sequence
  Description of Artificial Sequence: Synthetic oligonucleotide
  Sense strand starting at position 3420 of SEQ ID NO: 782
cuguguuccuccuugguca

SEQ ID NO: 63291 - RNA, 19 nt, Artificial Sequence
  Description of Artificial Sequence: Synthetic oligonucleotide
  Antisense strand to SEQ ID NO: 63210
ugaccaaggaggaacacag

SEQ ID NO: 63292 - RNA, 19 nt, Artificial Sequence
  Description of Artificial Sequence: Synthetic oligonucleotide
  Sense strand starting at position 3473 of SEQ ID NO: 782
gcucuuguugagcagcaga

SEQ ID NO: 63293 - RNA, 19 nt, Artificial Sequence
  Description of Artificial Sequence: Synthetic oligonucleotide
  Antisense strand to SEQ ID NO: 63212
ucugcugcucaacaagagc

SEQ ID NO: 63294 - RNA, 19 nt, Artificial Sequence
  Description of Artificial Sequence: Synthetic oligonucleotide
  Sense strand starting at position 3476 of SEQ ID NO: 782
cuuguugagcagcagaauu

SEQ ID NO: 63295 - RNA, 19 nt, Artificial Sequence
  Description of Artificial Sequence: Synthetic oligonucleotide
  Antisense strand to SEQ ID NO: 63214
aauucugcugcucaacaag

SEQ ID NO: 63296 - RNA, 19 nt, Artificial Sequence
  Description of Artificial Sequence: Synthetic oligonucleotide
  Sense strand starting at position 40 of SEQ ID NO: 783
agcaguguuugggccgaga

SEQ ID NO: 63297 - RNA, 19 nt, Artificial Sequence
  Description of Artificial Sequence: Synthetic oligonucleotide
  Antisense strand to SEQ ID NO: 63216
ucucggcccaaacacugcu

SEQ ID NO: 63298 - RNA, 19 nt, Artificial Sequence
  Description of Artificial Sequence: Synthetic oligonucleotide
  Sense strand starting at position 42 of SEQ ID NO: 783
caguguuugggccgagaca

SEQ ID NO: 63299 - RNA, 19 nt, Artificial Sequence
  Description of Artificial Sequence: Synthetic oligonucleotide
  Antisense strand to SEQ ID NO: 63218
ugucucggcccaaacacug

SEQ ID NO: 63300 - RNA, 19 nt, Artificial Sequence
  Description of Artificial Sequence: Synthetic oligonucleotide
  Sense strand starting at position 695 of SEQ ID NO: 783
ugcccuuucccaggguaga

SEQ ID NO: 63301 - RNA, 19 nt, Artificial Sequence
  Description of Artificial Sequence: Synthetic oligonucleotide
  Antisense strand to SEQ ID NO: 63220
ucuacccugggaaagggca

SEQ ID NO: 63302 - RNA, 19 nt, Artificial Sequence
  Description of Artificial Sequence: Synthetic oligonucleotide
  Sense strand starting at position 931 of SEQ ID NO: 783
ugcucugucucacuggaga

SEQ ID NO: 63303 - RNA, 19 nt, Artificial Sequence
  Description of Artificial Sequence: Synthetic oligonucleotide
  Antisense strand to SEQ ID NO: 63222
ucuccagugagacagagca

SEQ ID NO: 63304 - RNA, 19 nt, Artificial Sequence
  Description of Artificial Sequence: Synthetic oligonucleotide
  Sense strand starting at position 933 of SEQ ID NO: 783
cucugucucacuggagagu

SEQ ID NO: 63305 - RNA, 19 nt, Artificial Sequence
  Description of Artificial Sequence: Synthetic oligonucleotide
  Antisense strand to SEQ ID NO: 63224
acucuccagugagacagag

SEQ ID NO: 63306 - RNA, 19 nt, Artificial Sequence
  Description of Artificial Sequence: Synthetic oligonucleotide
  Sense strand starting at position 1044 of SEQ ID NO: 783
cugagcuuucuuugcauua

SEQ ID NO: 63307 - RNA, 19 nt, Artificial Sequence
  Description of Artificial Sequence: Synthetic oligonucleotide
  Antisense strand to SEQ ID NO: 63226
uaaugcaaagaaagcucag

SEQ ID NO: 63308 - RNA, 19 nt, Artificial Sequence
  Description of Artificial Sequence: Synthetic oligonucleotide
  Sense strand starting at position 1045 of SEQ ID NO: 783
ugagcuuucuuugcauuau

SEQ ID NO: 63309 - RNA, 19 nt, Artificial Sequence
  Description of Artificial Sequence: Synthetic oligonucleotide
  Antisense strand to SEQ ID NO: 63228
auaaugcaaagaaagcuca

SEQ ID NO: 63310 - RNA, 19 nt, Artificial Sequence
  Description of Artificial Sequence: Synthetic oligonucleotide
  Sense strand starting at position 1056 of SEQ ID NO: 783
ugcauuauguggcuuaauu

SEQ ID NO: 63311 - RNA, 19 nt, Artificial Sequence
  Description of Artificial Sequence: Synthetic oligonucleotide
  Antisense strand to SEQ ID NO: 63230
aauuaagccacauaaugca

SEQ ID NO: 63312 - RNA, 19 nt, Artificial Sequence
  Description of Artificial Sequence: Synthetic oligonucleotide
  Sense strand starting at position 1093 of SEQ ID NO: 783
agucauacucugcacacuu

SEQ ID NO: 63313 - RNA, 19 nt, Artificial Sequence
  Description of Artificial Sequence: Synthetic oligonucleotide
  Antisense strand to SEQ ID NO: 63232
aagugugcagaguaugacu

SEQ ID NO: 63314 - RNA, 19 nt, Artificial Sequence
  Description of Artificial Sequence: Synthetic oligonucleotide
  Sense strand starting at position 1201 of SEQ ID NO: 783
cucccaaagcugugcuuaa

SEQ ID NO: 63315 - RNA, 19 nt, Artificial Sequence
  Description of Artificial Sequence: Synthetic oligonucleotide
  Antisense strand to SEQ ID NO: 63234
uuaagcacagcuuugggag

SEQ ID NO: 63316 - RNA, 19 nt, Artificial Sequence
  Description of Artificial Sequence: Synthetic oligonucleotide
  Sense strand starting at position 1205 of SEQ ID NO: 783
caaagcugugcuuaacuga

SEQ ID NO: 63317 - RNA, 19 nt, Artificial Sequence
  Description of Artificial Sequence: Synthetic oligonucleotide
  Antisense strand to SEQ ID NO: 63236
ucaguuaagcacagcuuug

SEQ ID NO: 63318 - RNA, 19 nt, Artificial Sequence
  Description of Artificial Sequence: Synthetic oligonucleotide
  Sense strand starting at position 1329 of SEQ ID NO: 783
cuaagagcaucucugagaa

SEQ ID NO: 63319 - RNA, 19 nt, Artificial Sequence
  Description of Artificial Sequence: Synthetic oligonucleotide
  Antisense strand to SEQ ID NO: 63238
uucucagagaugcucuuag

SEQ ID NO: 63320 - RNA, 19 nt, Artificial Sequence
  Description of Artificial Sequence: Synthetic oligonucleotide
  Sense strand starting at position 1494 of SEQ ID NO: 783
gcauuccuuugggucuuaa

SEQ ID NO: 63321 - RNA, 19 nt, Artificial Sequence
  Description of Artificial Sequence: Synthetic oligonucleotide
  Antisense strand to SEQ ID NO: 63240
uuaagacccaaaggaaugc

SEQ ID NO: 63322 - RNA, 19 nt, Artificial Sequence
  Description of Artificial Sequence: Synthetic oligonucleotide
  Sense strand starting at position 1579 of SEQ ID NO: 783
acagaaacgucuucagggu

SEQ ID NO: 63323 - RNA, 19 nt, Artificial Sequence
  Description of Artificial Sequence: Synthetic oligonucleotide
  Antisense strand to SEQ ID NO: 63242
acccugaagacguuucugu

SEQ ID NO: 63324 - RNA, 19 nt, Artificial Sequence
  Description of Artificial Sequence: Synthetic oligonucleotide
  Sense strand starting at position 1629 of SEQ ID NO: 783
ggaagugaggucuaccgau

SEQ ID NO: 63325 - RNA, 19 nt, Artificial Sequence
  Description of Artificial Sequence: Synthetic oligonucleotide
  Antisense strand to SEQ ID NO: 63244
aucgguagaccucacuucc

SEQ ID NO: 63326 - RNA, 19 nt, Artificial Sequence
  Description of Artificial Sequence: Synthetic oligonucleotide
  Sense strand starting at position 1636 of SEQ ID NO: 783
aggucuaccgaugggaaga

SEQ ID NO: 63327 - RNA, 19 nt, Artificial Sequence
  Description of Artificial Sequence: Synthetic oligonucleotide
  Antisense strand to SEQ ID NO: 63246
ucuucccaucgguagaccu

SEQ ID NO: 63328 - RNA, 19 nt, Artificial Sequence
  Description of Artificial Sequence: Synthetic oligonucleotide
  Sense strand starting at position 1741 of SEQ ID NO: 783
cuguguuccuccuugguca

SEQ ID NO: 63329 - RNA, 19 nt, Artificial Sequence
  Description of Artificial Sequence: Synthetic oligonucleotide
  Antisense strand to SEQ ID NO: 63248
ugaccaaggaggaacacag

SEQ ID NO: 63330 - RNA, 19 nt, Artificial Sequence
  Description of Artificial Sequence: Synthetic oligonucleotide
  Sense strand starting at position 1794 of SEQ ID NO: 783
gcucuuguugagcagcaga

SEQ ID NO: 63331 - RNA, 19 nt, Artificial Sequence
  Description of Artificial Sequence: Synthetic oligonucleotide
  Antisense strand to SEQ ID NO: 63250
ucugcugcucaacaagagc

SEQ ID NO: 63332 - RNA, 19 nt, Artificial Sequence
  Description of Artificial Sequence: Synthetic oligonucleotide
  Sense strand starting at position 1797 of SEQ ID NO: 783
cuuguugagcagcagaauu

SEQ ID NO: 63333 - RNA, 19 nt, Artificial Sequence
  Description of Artificial Sequence: Synthetic oligonucleotide
  Antisense strand to SEQ ID NO: 63252
aauucugcugcucaacaag

SEQ ID NO: 63334 - RNA, 19 nt, Artificial Sequence
  Description of Artificial Sequence: Synthetic oligonucleotide
  Sense strand starting at position 2347 of SEQ ID NO: 783
uagauagauguagggcauu

SEQ ID NO: 63335 - RNA, 19 nt, Artificial Sequence
  Description of Artificial Sequence: Synthetic oligonucleotide
  Antisense strand to SEQ ID NO: 63254
aaugcccuacaucuaucua

SEQ ID NO: 63336 - RNA, 19 nt, Artificial Sequence
  Description of Artificial Sequence: Synthetic oligonucleotide
  Sense strand starting at position 2463 of SEQ ID NO: 783
ccuucucaguccucaugau

SEQ ID NO: 63337 - RNA, 19 nt, Artificial Sequence
  Description of Artificial Sequence: Synthetic oligonucleotide
  Antisense strand to SEQ ID NO: 63256
aucaugaggacugagaagg

SEQ ID NO: 63338 - RNA, 19 nt, Artificial Sequence
  Description of Artificial Sequence: Synthetic oligonucleotide
  Sense strand starting at position 2467 of SEQ ID NO: 783
cucaguccucaugaugcau

SEQ ID NO: 63339 - RNA, 19 nt, Artificial Sequence
  Description of Artificial Sequence: Synthetic oligonucleotide
  Antisense strand to SEQ ID NO: 63258
augcaucaugaggacugag

SEQ ID NO: 63340 - RNA, 19 nt, Artificial Sequence
  Description of Artificial Sequence: Synthetic oligonucleotide
  Sense strand starting at position 2489 of SEQ ID NO: 783
gugcuugggccuuaauucu

SEQ ID NO: 63341 - RNA, 19 nt, Artificial Sequence
  Description of Artificial Sequence: Synthetic oligonucleotide
  Antisense strand to SEQ ID NO: 63260
agaauuaaggcccaagcac

SEQ ID NO: 63342 - RNA, 19 nt, Artificial Sequence
  Description of Artificial Sequence: Synthetic oligonucleotide
  Sense strand starting at position 2953 of SEQ ID NO: 783
gggcucauuaaaugauugu

SEQ ID NO: 63343 - RNA, 19 nt, Artificial Sequence
  Description of Artificial Sequence: Synthetic oligonucleotide
  Antisense strand to SEQ ID NO: 63262
acaaucauuuaaugagccc

SEQ ID NO: 63344 - RNA, 19 nt, Artificial Sequence
  Description of Artificial Sequence: Synthetic oligonucleotide
  Sense strand starting at position 2957 of SEQ ID NO: 783
ucauuaaaugauuguugac

SEQ ID NO: 63345 - RNA, 19 nt, Artificial Sequence
  Description of Artificial Sequence: Synthetic oligonucleotide
  Antisense strand to SEQ ID NO: 63264
gucaacaaucauuuaauga

SEQ ID NO: 63346 - RNA, 19 nt, Artificial Sequence
  Description of Artificial Sequence: Synthetic oligonucleotide
  Sense strand starting at position 2966 of SEQ ID NO: 783
gauuguugacuguauggaa

SEQ ID NO: 63347 - RNA, 19 nt, Artificial Sequence
  Description of Artificial Sequence: Synthetic oligonucleotide
  Antisense strand to SEQ ID NO: 63266
uuccauacagucaacaauc

SEQ ID NO: 63348 - RNA, 19 nt, Artificial Sequence
  Description of Artificial Sequence: Synthetic oligonucleotide
  Sense strand starting at position 2998 of SEQ ID NO: 783
uccaucauauguuuauuga

SEQ ID NO: 63349 - RNA, 19 nt, Artificial Sequence
  Description of Artificial Sequence: Synthetic oligonucleotide
  Antisense strand to SEQ ID NO: 63268
ucaauaaacauaugaugga

SEQ ID NO: 63350 - RNA, 19 nt, Artificial Sequence
  Description of Artificial Sequence: Synthetic oligonucleotide
  Sense strand starting at position 2999 of SEQ ID NO: 783
ccaucauauguuuauugag

SEQ ID NO: 63351 - RNA, 19 nt, Artificial Sequence
  Description of Artificial Sequence: Synthetic oligonucleotide
  Antisense strand to SEQ ID NO: 63270
cucaauaaacauaugaugg

SEQ ID NO: 63352 - RNA, 19 nt, Artificial Sequence
  Description of Artificial Sequence: Synthetic oligonucleotide
  Sense strand starting at position 3001 of SEQ ID NO: 783
aucauauguuuauugagca

SEQ ID NO: 63353 - RNA, 19 nt, Artificial Sequence
  Description of Artificial Sequence: Synthetic oligonucleotide
  Antisense strand to SEQ ID NO: 63272
ugcucaauaaacauaugau

SEQ ID NO: 63354 - RNA, 19 nt, Artificial Sequence
  Description of Artificial Sequence: Synthetic oligonucleotide
  Sense strand starting at position 3031 of SEQ ID NO: 783
ccaggcccuguguaauauu

SEQ ID NO: 63355 - RNA, 19 nt, Artificial Sequence
  Description of Artificial Sequence: Synthetic oligonucleotide
  Antisense strand to SEQ ID NO: 63274
aauauuacacagggccugg

SEQ ID NO: 63356 - RNA, 19 nt, Artificial Sequence
  Description of Artificial Sequence: Synthetic oligonucleotide
  Sense strand starting at position 3141 of SEQ ID NO: 783
gggcuucauuuggaggacu

SEQ ID NO: 63357 - RNA, 19 nt, Artificial Sequence
  Description of Artificial Sequence: Synthetic oligonucleotide
  Antisense strand to SEQ ID NO: 63276
aguccuccaaaugaagccc

SEQ ID NO: 63358 - RNA, 19 nt, Artificial Sequence
  Description of Artificial Sequence: Synthetic oligonucleotide
  Sense strand starting at position 3299 of SEQ ID NO: 783
cauuuagaauaggaaguuu

SEQ ID NO: 63359 - RNA, 19 nt, Artificial Sequence
  Description of Artificial Sequence: Synthetic oligonucleotide
  Antisense strand to SEQ ID NO: 63278
aaacuuccuauucuaaaug

SEQ ID NO: 63360 - RNA, 19 nt, Artificial Sequence
  Description of Artificial Sequence: Synthetic oligonucleotide
  Sense strand starting at position 3755 of SEQ ID NO: 783
cccggacuuuauccauguu

SEQ ID NO: 63361 - RNA, 19 nt, Artificial Sequence
  Description of Artificial Sequence: Synthetic oligonucleotide
  Antisense strand to SEQ ID NO: 63280
aacauggauaaaguccggg

SEQ ID NO: 63362 - RNA, 19 nt, Artificial Sequence
  Description of Artificial Sequence: Synthetic oligonucleotide
  Sense strand starting at position 3758 of SEQ ID NO: 783
ggacuuuauccauguuauu

SEQ ID NO: 63363 - RNA, 19 nt, Artificial Sequence
  Description of Artificial Sequence: Synthetic oligonucleotide
  Antisense strand to SEQ ID NO: 63282
aauaacauggauaaagucc

SEQ ID NO: 63364 - RNA, 19 nt, Artificial Sequence
  Description of Artificial Sequence: Synthetic oligonucleotide
  Sense strand starting at position 3779 of SEQ ID NO: 783
gagucuuaggcugguaugu

SEQ ID NO: 63365 - RNA, 19 nt, Artificial Sequence
  Description of Artificial Sequence: Synthetic oligonucleotide
  Antisense strand to SEQ ID NO: 63284
acauaccagccuaagacuc

SEQ ID NO: 63366 - RNA, 19 nt, Artificial Sequence
  Description of Artificial Sequence: Synthetic oligonucleotide
  Sense strand starting at position 3785 of SEQ ID NO: 783
uaggcugguaugugucauu

SEQ ID NO: 63367 - RNA, 19 nt, Artificial Sequence
  Description of Artificial Sequence: Synthetic oligonucleotide
  Antisense strand to SEQ ID NO: 63286
aaugacacauaccagccua

SEQ ID NO: 63368 - RNA, 19 nt, Artificial Sequence
  Description of Artificial Sequence: Synthetic oligonucleotide
  Sense strand starting at position 3790 of SEQ ID NO: 783
ugguaugugucauuaacuu

SEQ ID NO: 63369 - RNA, 19 nt, Artificial Sequence
  Description of Artificial Sequence: Synthetic oligonucleotide
  Antisense strand to SEQ ID NO: 63288
aaguuaaugacacauacca

SEQ ID NO: 63370 - RNA, 19 nt, Artificial Sequence
  Description of Artificial Sequence: Synthetic oligonucleotide
  Sense strand starting at position 3848 of SEQ ID NO: 783
ggacuugcccugugucaca

SEQ ID NO: 63371 - RNA, 19 nt, Artificial Sequence
  Description of Artificial Sequence: Synthetic oligonucleotide
  Antisense strand to SEQ ID NO: 63290
ugugacacagggcaagucc

SEQ ID NO: 63372 - RNA, 19 nt, Artificial Sequence
  Description of Artificial Sequence: Synthetic oligonucleotide
  Sense strand starting at position 3882 of SEQ ID NO: 783
agagacaugucucaaauua

SEQ ID NO: 63373 - RNA, 19 nt, Artificial Sequence
  Description of Artificial Sequence: Synthetic oligonucleotide
  Antisense strand to SEQ ID NO: 63292
uaauuugagacaugucucu

SEQ ID NO: 63374 - RNA, 19 nt, Artificial Sequence
  Description of Artificial Sequence: Synthetic oligonucleotide
  Sense strand starting at position 3900 of SEQ ID NO: 783
aaauuaugcggcugcaagu

SEQ ID NO: 63375 - RNA, 19 nt, Artificial Sequence
  Description of Artificial Sequence: Synthetic oligonucleotide
  Antisense strand to SEQ ID NO: 63294
acuugcagccgcauaauuu

SEQ ID NO: 63376 - RNA, 19 nt, Artificial Sequence
  Description of Artificial Sequence: Synthetic oligonucleotide
  Sense strand starting at position 3623 of SEQ ID NO: 784
aucacuagucauuagcaga

SEQ ID NO: 63377 - RNA, 19 nt, Artificial Sequence
  Description of Artificial Sequence: Synthetic oligonucleotide
  Antisense strand to SEQ ID NO: 63296
ucugcuaaugacuagugau

SEQ ID NO: 63378 - RNA, 19 nt, Artificial Sequence
  Description of Artificial Sequence: Synthetic oligonucleotide
  Sense strand starting at position 3577 of SEQ ID NO: 784
agaagacauacucguggaa

SEQ ID NO: 63379 - RNA, 19 nt, Artificial Sequence
  Description of Artificial Sequence: Synthetic oligonucleotide
  Antisense strand to SEQ ID NO: 63298
uuccacgaguaugucuucu

SEQ ID NO: 63380 - RNA, 19 nt, Artificial Sequence
  Description of Artificial Sequence: Synthetic oligonucleotide
  Sense strand starting at position 3409 of SEQ ID NO: 784
ugaagaauaucugcacuau

SEQ ID NO: 63381 - RNA, 19 nt, Artificial Sequence
  Description of Artificial Sequence: Synthetic oligonucleotide
  Antisense strand to SEQ ID NO: 63300
auagugcagauauucuuca

SEQ ID NO: 63382 - RNA, 19 nt, Artificial Sequence
  Description of Artificial Sequence: Synthetic oligonucleotide
  Sense strand starting at position 2978 of SEQ ID NO: 784
cgucccugacuuuaagauu

SEQ ID NO: 63383 - RNA, 19 nt, Artificial Sequence
  Description of Artificial Sequence: Synthetic oligonucleotide
  Antisense strand to SEQ ID NO: 63302
aaucuuaaagucagggacg

SEQ ID NO: 63384 - RNA, 19 nt, Artificial Sequence
  Description of Artificial Sequence: Synthetic oligonucleotide
  Sense strand starting at position 2912 of SEQ ID NO: 784
gcaucagucugauuucuac

SEQ ID NO: 63385 - RNA, 19 nt, Artificial Sequence
  Description of Artificial Sequence: Synthetic oligonucleotide
  Antisense strand to SEQ ID NO: 63304
guagaaaucagacugaugc

SEQ ID NO: 63386 - RNA, 19 nt, Artificial Sequence
  Description of Artificial Sequence: Synthetic oligonucleotide
  Sense strand starting at position 2529 of SEQ ID NO: 784
gugagaggucccuggugag

SEQ ID NO: 63387 - RNA, 19 nt, Artificial Sequence
  Description of Artificial Sequence: Synthetic oligonucleotide
  Antisense strand to SEQ ID NO: 63306
cucaccagggaccucucac

SEQ ID NO: 63388 - RNA, 19 nt, Artificial Sequence
  Description of Artificial Sequence: Synthetic oligonucleotide
  Sense strand starting at position 2434 of SEQ ID NO: 784
guaagugauugguccuacu

SEQ ID NO: 63389 - RNA, 19 nt, Artificial Sequence
  Description of Artificial Sequence: Synthetic oligonucleotide
  Antisense strand to SEQ ID NO: 63308
aguaggaccaaucacuuac

SEQ ID NO: 63390 - RNA, 19 nt, Artificial Sequence
  Description of Artificial Sequence: Synthetic oligonucleotide
  Sense strand starting at position 2339 of SEQ ID NO: 784
guugaugugguagaauaau

SEQ ID NO: 63391 - RNA, 19 nt, Artificial Sequence
  Description of Artificial Sequence: Synthetic oligonucleotide
  Antisense strand to SEQ ID NO: 63310
auuauucuaccacaucaac

SEQ ID NO: 63392 - RNA, 19 nt, Artificial Sequence
  Description of Artificial Sequence: Synthetic oligonucleotide
  Sense strand starting at position 2328 of SEQ ID NO: 784
cacagaaaguuguugaugu

SEQ ID NO: 63393 - RNA, 19 nt, Artificial Sequence
  Description of Artificial Sequence: Synthetic oligonucleotide
  Antisense strand to SEQ ID NO: 63312
acaucaacaacuuucugug

SEQ ID NO: 63394 - RNA, 19 nt, Artificial Sequence
  Description of Artificial Sequence: Synthetic oligonucleotide
  Sense strand starting at position 2326 of SEQ ID NO: 784
ugcacagaaaguuguugau

SEQ ID NO: 63395 - RNA, 19 nt, Artificial Sequence
  Description of Artificial Sequence: Synthetic oligonucleotide
  Antisense strand to SEQ ID NO: 63314
aucaacaacuuucugugca

SEQ ID NO: 63396 - RNA, 19 nt, Artificial Sequence
  Description of Artificial Sequence: Synthetic oligonucleotide
  Sense strand starting at position 2316 of SEQ ID NO: 784
uuuagaaagcugcacagaa

SEQ ID NO: 63397 - RNA, 19 nt, Artificial Sequence
  Description of Artificial Sequence: Synthetic oligonucleotide
  Antisense strand to SEQ ID NO: 63316
uucugugcagcuuucuaaa

SEQ ID NO: 63398 - RNA, 19 nt, Artificial Sequence
  Description of Artificial Sequence: Synthetic oligonucleotide
  Sense strand starting at position 2096 of SEQ ID NO: 784
ggcugugaugcugggaaga

SEQ ID NO: 63399 - RNA, 19 nt, Artificial Sequence
  Description of Artificial Sequence: Synthetic oligonucleotide
  Antisense strand to SEQ ID NO: 63318
ucuucccagcaucacagcc

SEQ ID NO: 63400 - RNA, 19 nt, Artificial Sequence
  Description of Artificial Sequence: Synthetic oligonucleotide
  Sense strand starting at position 1999 of SEQ ID NO: 784
cauccuguuggacauagua

SEQ ID NO: 63401 - RNA, 19 nt, Artificial Sequence
  Description of Artificial Sequence: Synthetic oligonucleotide
  Antisense strand to SEQ ID NO: 63320
uacuauguccaacaggaug

SEQ ID NO: 63402 - RNA, 19 nt, Artificial Sequence
  Description of Artificial Sequence: Synthetic oligonucleotide
  Sense strand starting at position 1996 of SEQ ID NO: 784
agccauccuguuggacaua

SEQ ID NO: 63403 - RNA, 19 nt, Artificial Sequence
  Description of Artificial Sequence: Synthetic oligonucleotide
  Antisense strand to SEQ ID NO: 63322
uauguccaacaggauggcu

SEQ ID NO: 63404 - RNA, 19 nt, Artificial Sequence
  Description of Artificial Sequence: Synthetic oligonucleotide
  Sense strand starting at position 1913 of SEQ ID NO: 784
guggguaguuggaaugaug

SEQ ID NO: 63405 - RNA, 19 nt, Artificial Sequence
  Description of Artificial Sequence: Synthetic oligonucleotide
  Antisense strand to SEQ ID NO: 63324
caucauuccaacuacccac

SEQ ID NO: 63406 - RNA, 19 nt, Artificial Sequence
  Description of Artificial Sequence: Synthetic oligonucleotide
  Sense strand starting at position 1694 of SEQ ID NO: 784
ucaguagcugcugacagau

SEQ ID NO: 63407 - RNA, 19 nt, Artificial Sequence
  Description of Artificial Sequence: Synthetic oligonucleotide
  Antisense strand to SEQ ID NO: 63326
aucugucagcagcuacuga

SEQ ID NO: 63408 - RNA, 19 nt, Artificial Sequence
  Description of Artificial Sequence: Synthetic oligonucleotide
  Sense strand starting at position 1670 of SEQ ID NO: 784
uuugaaucugccuauugaa

SEQ ID NO: 63409 - RNA, 19 nt, Artificial Sequence
  Description of Artificial Sequence: Synthetic oligonucleotide
  Antisense strand to SEQ ID NO: 63328
uucaauaggcagauucaaa

SEQ ID NO: 63410 - RNA, 19 nt, Artificial Sequence
  Description of Artificial Sequence: Synthetic oligonucleotide
  Sense strand starting at position 1669 of SEQ ID NO: 784
cuuugaaucugccuauuga

SEQ ID NO: 63411 - RNA, 19 nt, Artificial Sequence
  Description of Artificial Sequence: Synthetic oligonucleotide
  Antisense strand to SEQ ID NO: 63330
ucaauaggcagauucaaag

SEQ ID NO: 63412 - RNA, 19 nt, Artificial Sequence
  Description of Artificial Sequence: Synthetic oligonucleotide
  Sense strand starting at position 1637 of SEQ ID NO: 784
ggcagaucccauuacuauu

SEQ ID NO: 63413 - RNA, 19 nt, Artificial Sequence
  Description of Artificial Sequence: Synthetic oligonucleotide
  Antisense strand to SEQ ID NO: 63332
aauaguaaugggaucugcc

SEQ ID NO: 63414 - RNA, 19 nt, Artificial Sequence
  Description of Artificial Sequence: Synthetic oligonucleotide
  Sense strand starting at position 1330 of SEQ ID NO: 784
aggguagcccgugaauuaa

SEQ ID NO: 63415 - RNA, 19 nt, Artificial Sequence
  Description of Artificial Sequence: Synthetic oligonucleotide
  Antisense strand to SEQ ID NO: 63334
uuaauucacgggcuacccu

SEQ ID NO: 63416 - RNA, 19 nt, Artificial Sequence
  Description of Artificial Sequence: Synthetic oligonucleotide
  Sense strand starting at position 1273 of SEQ ID NO: 784
cagugugagugcucagaaa

SEQ ID NO: 63417 - RNA, 19 nt, Artificial Sequence
  Description of Artificial Sequence: Synthetic oligonucleotide
  Antisense strand to SEQ ID NO: 63336
uuucugagcacucacacug

SEQ ID NO: 63418 - RNA, 19 nt, Artificial Sequence
  Description of Artificial Sequence: Synthetic oligonucleotide
  Sense strand starting at position 1217 of SEQ ID NO: 784
auuuauuugucuuaccagu

SEQ ID NO: 63419 - RNA, 19 nt, Artificial Sequence
  Description of Artificial Sequence: Synthetic oligonucleotide
  Antisense strand to SEQ ID NO: 63338
acugguaagacaaauaaau

SEQ ID NO: 63420 - RNA, 19 nt, Artificial Sequence
  Description of Artificial Sequence: Synthetic oligonucleotide
  Sense strand starting at position 1147 of SEQ ID NO: 784
cuacauggcucuguacauu

SEQ ID NO: 63421 - RNA, 19 nt, Artificial Sequence
  Description of Artificial Sequence: Synthetic oligonucleotide
  Antisense strand to SEQ ID NO: 63340
aauguacagagccauguag

SEQ ID NO: 63422 - RNA, 19 nt, Artificial Sequence
  Description of Artificial Sequence: Synthetic oligonucleotide
  Sense strand starting at position 1120 of SEQ ID NO: 784
gcuaaccguauaugagaaa

SEQ ID NO: 63423 - RNA, 19 nt, Artificial Sequence
  Description of Artificial Sequence: Synthetic oligonucleotide
  Antisense strand to SEQ ID NO: 63342
uuucucauauacgguuagc

SEQ ID NO: 63424 - RNA, 19 nt, Artificial Sequence
  Description of Artificial Sequence: Synthetic oligonucleotide
  Sense strand starting at position 1118 of SEQ ID NO: 784
uggcuaaccguauaugaga

SEQ ID NO: 63425 - RNA, 19 nt, Artificial Sequence
  Description of Artificial Sequence: Synthetic oligonucleotide
  Antisense strand to SEQ ID NO: 63344
ucucauauacgguuagcca

SEQ ID NO: 63426 - RNA, 19 nt, Artificial Sequence
  Description of Artificial Sequence: Synthetic oligonucleotide
  Sense strand starting at position 1116 of SEQ ID NO: 784
cauggcuaaccguauauga

SEQ ID NO: 63427 - RNA, 19 nt, Artificial Sequence
  Description of Artificial Sequence: Synthetic oligonucleotide
  Antisense strand to SEQ ID NO: 63346
ucauauacgguuagccaug

SEQ ID NO: 63428 - RNA, 19 nt, Artificial Sequence
  Description of Artificial Sequence: Synthetic oligonucleotide
  Sense strand starting at position 1089 of SEQ ID NO: 784
gaaugaugaucauuguaau

SEQ ID NO: 63429 - RNA, 19 nt, Artificial Sequence
  Description of Artificial Sequence: Synthetic oligonucleotide
  Antisense strand to SEQ ID NO: 63348
auuacaaugaucaucauuc

SEQ ID NO: 63430 - RNA, 19 nt, Artificial Sequence
  Description of Artificial Sequence: Synthetic oligonucleotide
  Sense strand starting at position 1086 of SEQ ID NO: 784
cuggaaugaugaucauugu

SEQ ID NO: 63431 - RNA, 19 nt, Artificial Sequence
  Description of Artificial Sequence: Synthetic oligonucleotide
  Antisense strand to SEQ ID NO: 63350
acaaugaucaucauuccag

SEQ ID NO: 63432 - RNA, 19 nt, Artificial Sequence
  Description of Artificial Sequence: Synthetic oligonucleotide
  Sense strand starting at position 918 of SEQ ID NO: 784
agugacuauugucuauauu

SEQ ID NO: 63433 - RNA, 19 nt, Artificial Sequence
  Description of Artificial Sequence: Synthetic oligonucleotide
  Antisense strand to SEQ ID NO: 63352
aauauagacaauagucacu

SEQ ID NO: 63434 - RNA, 19 nt, Artificial Sequence
  Description of Artificial Sequence: Synthetic oligonucleotide
  Sense strand starting at position 917 of SEQ ID NO: 784
gagugacuauugucuauau

SEQ ID NO: 63435 - RNA, 19 nt, Artificial Sequence
  Description of Artificial Sequence: Synthetic oligonucleotide
  Antisense strand to SEQ ID NO: 63354
auauagacaauagucacuc

SEQ ID NO: 63436 - RNA, 19 nt, Artificial Sequence
  Description of Artificial Sequence: Synthetic oligonucleotide
  Sense strand starting at position 853 of SEQ ID NO: 784
ucgguuaucuacucaagaa

SEQ ID NO: 63437 - RNA, 19 nt, Artificial Sequence
  Description of Artificial Sequence: Synthetic oligonucleotide
  Antisense strand to SEQ ID NO: 63356
uucuugaguagauaaccga

SEQ ID NO: 63438 - RNA, 19 nt, Artificial Sequence
  Description of Artificial Sequence: Synthetic oligonucleotide
  Sense strand starting at position 743 of SEQ ID NO: 784
gugguuccuacagauaagu

SEQ ID NO: 63439 - RNA, 19 nt, Artificial Sequence
  Description of Artificial Sequence: Synthetic oligonucleotide
  Antisense strand to SEQ ID NO: 63358
acuuaucuguaggaaccac

SEQ ID NO: 63440 - RNA, 19 nt, Artificial Sequence
  Description of Artificial Sequence: Synthetic oligonucleotide
  Sense strand starting at position 735 of SEQ ID NO: 784
gauauuaugugguuccuac

SEQ ID NO: 63441 - RNA, 19 nt, Artificial Sequence
  Description of Artificial Sequence: Synthetic oligonucleotide
  Antisense strand to SEQ ID NO: 63360
guaggaaccacauaauauc

SEQ ID NO: 63442 - RNA, 19 nt, Artificial Sequence
  Description of Artificial Sequence: Synthetic oligonucleotide
  Sense strand starting at position 723 of SEQ ID NO: 784
ggugauaugguugauauua

SEQ ID NO: 63443 - RNA, 19 nt, Artificial Sequence
  Description of Artificial Sequence: Synthetic oligonucleotide
  Antisense strand to SEQ ID NO: 63362
uaauaucaaccauaucacc

SEQ ID NO: 63444 - RNA, 19 nt, Artificial Sequence
  Description of Artificial Sequence: Synthetic oligonucleotide
  Sense strand starting at position 722 of SEQ ID NO: 784
cggugauaugguugauauu

SEQ ID NO: 63445 - RNA, 19 nt, Artificial Sequence
  Description of Artificial Sequence: Synthetic oligonucleotide
  Antisense strand to SEQ ID NO: 63364
aauaucaaccauaucaccg

SEQ ID NO: 63446 - RNA, 19 nt, Artificial Sequence
  Description of Artificial Sequence: Synthetic oligonucleotide
  Sense strand starting at position 699 of SEQ ID NO: 784
guugaaucacuaugagaau

SEQ ID NO: 63447 - RNA, 19 nt, Artificial Sequence
  Description of Artificial Sequence: Synthetic oligonucleotide
  Antisense strand to SEQ ID NO: 63366
auucucauagugauucaac

SEQ ID NO: 63448 - RNA, 19 nt, Artificial Sequence
  Description of Artificial Sequence: Synthetic oligonucleotide
  Sense strand starting at position 604 of SEQ ID NO: 784
agacauguaucuguaucaa

SEQ ID NO: 63449 - RNA, 19 nt, Artificial Sequence
  Description of Artificial Sequence: Synthetic oligonucleotide
  Antisense strand to SEQ ID NO: 63368
uugauacagauacaugucu

SEQ ID NO: 63450 - RNA, 19 nt, Artificial Sequence
  Description of Artificial Sequence: Synthetic oligonucleotide
  Sense strand starting at position 599 of SEQ ID NO: 784
ggcucagacauguaucugu

SEQ ID NO: 63451 - RNA, 19 nt, Artificial Sequence
  Description of Artificial Sequence: Synthetic oligonucleotide
  Antisense strand to SEQ ID NO: 63370
acagauacaugucugagcc

SEQ ID NO: 63452 - RNA, 19 nt, Artificial Sequence
  Description of Artificial Sequence: Synthetic oligonucleotide
  Sense strand starting at position 531 of SEQ ID NO: 784
gguaccuggccaggaaaua

SEQ ID NO: 63453 - RNA, 19 nt, Artificial Sequence
  Description of Artificial Sequence: Synthetic oligonucleotide
  Antisense strand to SEQ ID NO: 63372
uauuuccuggccagguacc

SEQ ID NO: 63454 - RNA, 19 nt, Artificial Sequence
  Description of Artificial Sequence: Synthetic oligonucleotide
  Sense strand starting at position 2 of SEQ ID NO: 784
guuagauucuguccaccca

SEQ ID NO: 63455 - RNA, 19 nt, Artificial Sequence
  Description of Artificial Sequence: Synthetic oligonucleotide
  Antisense strand to SEQ ID NO: 63374
uggguggacagaaucuaac

SEQ ID NO: 63456 - RNA, 19 nt, Artificial Sequence
  Description of Artificial Sequence: Synthetic oligonucleotide
  Sense strand starting at position 3962 of SEQ ID NO: 785
cccgcagauuucucuaauu

SEQ ID NO: 63457 - RNA, 19 nt, Artificial Sequence
  Description of Artificial Sequence: Synthetic oligonucleotide
  Antisense strand to SEQ ID NO: 63376
aauuagagaaaucugcggg

SEQ ID NO: 63458 - RNA, 19 nt, Artificial Sequence
  Description of Artificial Sequence: Synthetic oligonucleotide
  Sense strand starting at position 3961 of SEQ ID NO: 785
gcccgcagauuucucuaau

SEQ ID NO: 63459 - RNA, 19 nt, Artificial Sequence
  Description of Artificial Sequence: Synthetic oligonucleotide
  Antisense strand to SEQ ID NO: 63378
auuagagaaaucugcgggc

SEQ ID NO: 63460 - RNA, 19 nt, Artificial Sequence
  Description of Artificial Sequence: Synthetic oligonucleotide
  Sense strand starting at position 3954 of SEQ ID NO: 785
gaacuacgcccgcagauuu

SEQ ID NO: 63461 - RNA, 19 nt, Artificial Sequence
  Description of Artificial Sequence: Synthetic oligonucleotide
  Antisense strand to SEQ ID NO: 63380
aaaucugcgggcguaguuc

SEQ ID NO: 63462 - RNA, 19 nt, Artificial Sequence
  Description of Artificial Sequence: Synthetic oligonucleotide
  Sense strand starting at position 3850 of SEQ ID NO: 785
ggaguuuguccugaggcac

SEQ ID NO: 63463 - RNA, 19 nt, Artificial Sequence
  Description of Artificial Sequence: Synthetic oligonucleotide
  Antisense strand to SEQ ID NO: 63382
gugccucaggacaaacucc

SEQ ID NO: 63464 - RNA, 19 nt, Artificial Sequence
  Description of Artificial Sequence: Synthetic oligonucleotide
  Sense strand starting at position 3849 of SEQ ID NO: 785
cggaguuuguccugaggca

SEQ ID NO: 63465 - RNA, 19 nt, Artificial Sequence
  Description of Artificial Sequence: Synthetic oligonucleotide
  Antisense strand to SEQ ID NO: 63384
ugccucaggacaaacuccg

SEQ ID NO: 63466 - RNA, 19 nt, Artificial Sequence
  Description of Artificial Sequence: Synthetic oligonucleotide
  Sense strand starting at position 3805 of SEQ ID NO: 785
uuaagucaaucaggaaacu

SEQ ID NO: 63467 - RNA, 19 nt, Artificial Sequence
  Description of Artificial Sequence: Synthetic oligonucleotide
  Antisense strand to SEQ ID NO: 63386
aguuuccugauugacuuaa

SEQ ID NO: 63468 - RNA, 19 nt, Artificial Sequence
  Description of Artificial Sequence: Synthetic oligonucleotide
  Sense strand starting at position 3794 of SEQ ID NO: 785
ugcggaucuaauuaaguca

SEQ ID NO: 63469 - RNA, 19 nt, Artificial Sequence
  Description of Artificial Sequence: Synthetic oligonucleotide
  Antisense strand to SEQ ID NO: 63388
ugacuuaauuagauccgca

SEQ ID NO: 63470 - RNA, 19 nt, Artificial Sequence
  Description of Artificial Sequence: Synthetic oligonucleotide
  Sense strand starting at position 3786 of SEQ ID NO: 785
agcgauuaugcggaucuaa

SEQ ID NO: 63471 - RNA, 19 nt, Artificial Sequence
  Description of Artificial Sequence: Synthetic oligonucleotide
  Antisense strand to SEQ ID NO: 63390
uuagauccgcauaaucgcu

SEQ ID NO: 63472 - RNA, 19 nt, Artificial Sequence
  Description of Artificial Sequence: Synthetic oligonucleotide
  Sense strand starting at position 3755 of SEQ ID NO: 785
uguucucggcucugggaaa

SEQ ID NO: 63473 - RNA, 19 nt, Artificial Sequence
  Description of Artificial Sequence: Synthetic oligonucleotide
  Antisense strand to SEQ ID NO: 63392
uuucccagagccgagaaca

SEQ ID NO: 63474 - RNA, 19 nt, Artificial Sequence
  Description of Artificial Sequence: Synthetic oligonucleotide
  Sense strand starting at position 3686 of SEQ ID NO: 785
agaguacguugcuaucagu

SEQ ID NO: 63475 - RNA, 19 nt, Artificial Sequence
  Description of Artificial Sequence: Synthetic oligonucleotide
  Antisense strand to SEQ ID NO: 63394
acugauagcaacguacucu

SEQ ID NO: 63476 - RNA, 19 nt, Artificial Sequence
  Description of Artificial Sequence: Synthetic oligonucleotide
  Sense strand starting at position 3683 of SEQ ID NO: 785
cgaagaguacguugcuauc

SEQ ID NO: 63477 - RNA, 19 nt, Artificial Sequence
  Description of Artificial Sequence: Synthetic oligonucleotide
  Antisense strand to SEQ ID NO: 63396
gauagcaacguacucuucg

SEQ ID NO: 63478 - RNA, 19 nt, Artificial Sequence
  Description of Artificial Sequence: Synthetic oligonucleotide
  Sense strand starting at position 3659 of SEQ ID NO: 785
ccacuaguuacugaguguu

SEQ ID NO: 63479 - RNA, 19 nt, Artificial Sequence
  Description of Artificial Sequence: Synthetic oligonucleotide
  Antisense strand to SEQ ID NO: 63398
aacacucaguaacuagugg

SEQ ID NO: 63480 - RNA, 19 nt, Artificial Sequence
  Description of Artificial Sequence: Synthetic oligonucleotide
  Sense strand starting at position 3441 of SEQ ID NO: 785
ccuggacucuuucccagaa

SEQ ID NO: 63481 - RNA, 19 nt, Artificial Sequence
  Description of Artificial Sequence: Synthetic oligonucleotide
  Antisense strand to SEQ ID NO: 63400
uucugggaaagaguccagg

SEQ ID NO: 63482 - RNA, 19 nt, Artificial Sequence
  Description of Artificial Sequence: Synthetic oligonucleotide
  Sense strand starting at position 3258 of SEQ ID NO: 785
ucaacagugucaggaguaa

SEQ ID NO: 63483 - RNA, 19 nt, Artificial Sequence
  Description of Artificial Sequence: Synthetic oligonucleotide
  Antisense strand to SEQ ID NO: 63402
uuacuccugacacuguuga

SEQ ID NO: 63484 - RNA, 19 nt, Artificial Sequence
  Description of Artificial Sequence: Synthetic oligonucleotide
  Sense strand starting at position 3188 of SEQ ID NO: 785
gagcuccucucuguauaga

SEQ ID NO: 63485 - RNA, 19 nt, Artificial Sequence
  Description of Artificial Sequence: Synthetic oligonucleotide
  Antisense strand to SEQ ID NO: 63404
ucuauacagagaggagcuc

SEQ ID NO: 63486 - RNA, 19 nt, Artificial Sequence
  Description of Artificial Sequence: Synthetic oligonucleotide
  Sense strand starting at position 3186 of SEQ ID NO: 785
ccgagcuccucucuguaua

SEQ ID NO: 63487 - RNA, 19 nt, Artificial Sequence
  Description of Artificial Sequence: Synthetic oligonucleotide
  Antisense strand to SEQ ID NO: 63406
uauacagagaggagcucgg

SEQ ID NO: 63488 - RNA, 19 nt, Artificial Sequence
  Description of Artificial Sequence: Synthetic oligonucleotide
  Sense strand starting at position 3126 of SEQ ID NO: 785
cuacguguccggguuccua

SEQ ID NO: 63489 - RNA, 19 nt, Artificial Sequence
  Description of Artificial Sequence: Synthetic oligonucleotide
  Antisense strand to SEQ ID NO: 63408
uaggaacccggacacguag

SEQ ID NO: 63490 - RNA, 19 nt, Artificial Sequence
  Description of Artificial Sequence: Synthetic oligonucleotide
  Sense strand starting at position 3081 of SEQ ID NO: 785
cauguuacuugucaggcuu

SEQ ID NO: 63491 - RNA, 19 nt, Artificial Sequence
  Description of Artificial Sequence: Synthetic oligonucleotide
  Antisense strand to SEQ ID NO: 63410
aagccugacaaguaacaug

SEQ ID NO: 63492 - RNA, 19 nt, Artificial Sequence
  Description of Artificial Sequence: Synthetic oligonucleotide
  Sense strand starting at position 3080 of SEQ ID NO: 785
ucauguuacuugucaggcu

SEQ ID NO: 63493 - RNA, 19 nt, Artificial Sequence
  Description of Artificial Sequence: Synthetic oligonucleotide
  Antisense strand to SEQ ID NO: 63412
agccugacaaguaacauga

SEQ ID NO: 63494 - RNA, 19 nt, Artificial Sequence
  Description of Artificial Sequence: Synthetic oligonucleotide
  Sense strand starting at position 3076 of SEQ ID NO: 785
gagaucauguuacuuguca

SEQ ID NO: 63495 - RNA, 19 nt, Artificial Sequence
  Description of Artificial Sequence: Synthetic oligonucleotide
  Antisense strand to SEQ ID NO: 63414
ugacaaguaacaugaucuc

SEQ ID NO: 63496 - RNA, 19 nt, Artificial Sequence
  Description of Artificial Sequence: Synthetic oligonucleotide
  Sense strand starting at position 3074 of SEQ ID NO: 785
aggagaucauguuacuugu

SEQ ID NO: 63497 - RNA, 19 nt, Artificial Sequence
  Description of Artificial Sequence: Synthetic oligonucleotide
  Antisense strand to SEQ ID NO: 63416
acaaguaacaugaucuccu

SEQ ID NO: 63498 - RNA, 19 nt, Artificial Sequence
  Description of Artificial Sequence: Synthetic oligonucleotide
  Sense strand starting at position 3069 of SEQ ID NO: 785
gguccaggagaucauguua

SEQ ID NO: 63499 - RNA, 19 nt, Artificial Sequence
  Description of Artificial Sequence: Synthetic oligonucleotide
  Antisense strand to SEQ ID NO: 63418
uaacaugaucuccuggacc

SEQ ID NO: 63500 - RNA, 19 nt, Artificial Sequence
  Description of Artificial Sequence: Synthetic oligonucleotide
  Sense strand starting at position 2856 of SEQ ID NO: 785
gcacuugcugcccaaauuu

SEQ ID NO: 63501 - RNA, 19 nt, Artificial Sequence
  Description of Artificial Sequence: Synthetic oligonucleotide
  Antisense strand to SEQ ID NO: 63420
aaauuugggcagcaagugc

SEQ ID NO: 63502 - RNA, 19 nt, Artificial Sequence
  Description of Artificial Sequence: Synthetic oligonucleotide
  Sense strand starting at position 2855 of SEQ ID NO: 785
ggcacuugcugcccaaauu

SEQ ID NO: 63503 - RNA, 19 nt, Artificial Sequence
  Description of Artificial Sequence: Synthetic oligonucleotide
  Antisense strand to SEQ ID NO: 63422
aauuugggcagcaagugcc

SEQ ID NO: 63504 - RNA, 19 nt, Artificial Sequence
  Description of Artificial Sequence: Synthetic oligonucleotide
  Sense strand starting at position 2828 of SEQ ID NO: 785
ggcuuuggucagggugaga

SEQ ID NO: 63505 - RNA, 19 nt, Artificial Sequence
  Description of Artificial Sequence: Synthetic oligonucleotide
  Antisense strand to SEQ ID NO: 63424
ucucacccugaccaaagcc

SEQ ID NO: 63506 - RNA, 19 nt, Artificial Sequence
  Description of Artificial Sequence: Synthetic oligonucleotide
  Sense strand starting at position 2751 of SEQ ID NO: 785
ccugaauguccucguuucu

SEQ ID NO: 63507 - RNA, 19 nt, Artificial Sequence
  Description of Artificial Sequence: Synthetic oligonucleotide
  Antisense strand to SEQ ID NO: 63426
agaaacgaggacauucagg

SEQ ID NO: 63508 - RNA, 19 nt, Artificial Sequence
  Description of Artificial Sequence: Synthetic oligonucleotide
  Sense strand starting at position 2750 of SEQ ID NO: 785
gccugaauguccucguuuc

SEQ ID NO: 63509 - RNA, 19 nt, Artificial Sequence
  Description of Artificial Sequence: Synthetic oligonucleotide
  Antisense strand to SEQ ID NO: 63428
gaaacgaggacauucaggc

SEQ ID NO: 63510 - RNA, 19 nt, Artificial Sequence
  Description of Artificial Sequence: Synthetic oligonucleotide
  Sense strand starting at position 2510 of SEQ ID NO: 785
gccugaucucagcagcuca

SEQ ID NO: 63511 - RNA, 19 nt, Artificial Sequence
  Description of Artificial Sequence: Synthetic oligonucleotide
  Antisense strand to SEQ ID NO: 63430
ugagcugcugagaucaggc

SEQ ID NO: 63512 - RNA, 19 nt, Artificial Sequence
  Description of Artificial Sequence: Synthetic oligonucleotide
  Sense strand starting at position 2388 of SEQ ID NO: 785
gcgucauccuacuccauuu

SEQ ID NO: 63513 - RNA, 19 nt, Artificial Sequence
  Description of Artificial Sequence: Synthetic oligonucleotide
  Antisense strand to SEQ ID NO: 63432
aaauggaguaggaugacgc

SEQ ID NO: 63514 - RNA, 19 nt, Artificial Sequence
  Description of Artificial Sequence: Synthetic oligonucleotide
  Sense strand starting at position 2380 of SEQ ID NO: 785
caguguuggcgucauccua

SEQ ID NO: 63515 - RNA, 19 nt, Artificial Sequence
  Description of Artificial Sequence: Synthetic oligonucleotide
  Antisense strand to SEQ ID NO: 63434
uaggaugacgccaacacug

SEQ ID NO: 63516 - RNA, 19 nt, Artificial Sequence
  Description of Artificial Sequence: Synthetic oligonucleotide
  Sense strand starting at position 2341 of SEQ ID NO: 785
gcucaacucugcuaguauc

SEQ ID NO: 63517 - RNA, 19 nt, Artificial Sequence
  Description of Artificial Sequence: Synthetic oligonucleotide
  Antisense strand to SEQ ID NO: 63436
gauacuagcagaguugagc

SEQ ID NO: 63518 - RNA, 19 nt, Artificial Sequence
  Description of Artificial Sequence: Synthetic oligonucleotide
  Sense strand starting at position 2266 of SEQ ID NO: 785
ggauaucugucucacacuc

SEQ ID NO: 63519 - RNA, 19 nt, Artificial Sequence
  Description of Artificial Sequence: Synthetic oligonucleotide
  Antisense strand to SEQ ID NO: 63438
gagugugagacagauaucc

SEQ ID NO: 63520 - RNA, 19 nt, Artificial Sequence
  Description of Artificial Sequence: Synthetic oligonucleotide
  Sense strand starting at position 2188 of SEQ ID NO: 785
uaccuaggguugcuagauu

SEQ ID NO: 63521 - RNA, 19 nt, Artificial Sequence
  Description of Artificial Sequence: Synthetic oligonucleotide
  Antisense strand to SEQ ID NO: 63440
aaucuagcaacccuaggua

SEQ ID NO: 63522 - RNA, 19 nt, Artificial Sequence
  Description of Artificial Sequence: Synthetic oligonucleotide
  Sense strand starting at position 2165 of SEQ ID NO: 785
gcaugaguccaaggaaacu

SEQ ID NO: 63523 - RNA, 19 nt, Artificial Sequence
  Description of Artificial Sequence: Synthetic oligonucleotide
  Antisense strand to SEQ ID NO: 63442
aguuuccuuggacucaugc

SEQ ID NO: 63524 - RNA, 19 nt, Artificial Sequence
  Description of Artificial Sequence: Synthetic oligonucleotide
  Sense strand starting at position 2162 of SEQ ID NO: 785
cuugcaugaguccaaggaa

SEQ ID NO: 63525 - RNA, 19 nt, Artificial Sequence
  Description of Artificial Sequence: Synthetic oligonucleotide
  Antisense strand to SEQ ID NO: 63444
uuccuuggacucaugcaag

SEQ ID NO: 63526 - RNA, 19 nt, Artificial Sequence
  Description of Artificial Sequence: Synthetic oligonucleotide
  Sense strand starting at position 2154 of SEQ ID NO: 785
agaagcuucuugcaugagu

SEQ ID NO: 63527 - RNA, 19 nt, Artificial Sequence
  Description of Artificial Sequence: Synthetic oligonucleotide
  Antisense strand to SEQ ID NO: 63446
acucaugcaagaagcuucu

SEQ ID NO: 63528 - RNA, 19 nt, Artificial Sequence
  Description of Artificial Sequence: Synthetic oligonucleotide
  Sense strand starting at position 2152 of SEQ ID NO: 785
agagaagcuucuugcauga

SEQ ID NO: 63529 - RNA, 19 nt, Artificial Sequence
  Description of Artificial Sequence: Synthetic oligonucleotide
  Antisense strand to SEQ ID NO: 63448
ucaugcaagaagcuucucu

SEQ ID NO: 63530 - RNA, 19 nt, Artificial Sequence
  Description of Artificial Sequence: Synthetic oligonucleotide
  Sense strand starting at position 2151 of SEQ ID NO: 785
gagagaagcuucuugcaug

SEQ ID NO: 63531 - RNA, 19 nt, Artificial Sequence
  Description of Artificial Sequence: Synthetic oligonucleotide
  Antisense strand to SEQ ID NO: 63450
caugcaagaagcuucucuc

SEQ ID NO: 63532 - RNA, 19 nt, Artificial Sequence
  Description of Artificial Sequence: Synthetic oligonucleotide
  Sense strand starting at position 2047 of SEQ ID NO: 785
agagaaaucucguccucaa

SEQ ID NO: 63533 - RNA, 19 nt, Artificial Sequence
  Description of Artificial Sequence: Synthetic oligonucleotide
  Antisense strand to SEQ ID NO: 63452
uugaggacgagauuucucu

SEQ ID NO: 63534 - RNA, 19 nt, Artificial Sequence
  Description of Artificial Sequence: Synthetic oligonucleotide
  Sense strand starting at position 2024 of SEQ ID NO: 785
agcauaaacugucauugga

SEQ ID NO: 63535 - RNA, 19 nt, Artificial Sequence
  Description of Artificial Sequence: Synthetic oligonucleotide
  Antisense strand to SEQ ID NO: 63454
uccaaugacaguuuaugcu

SEQ ID NO: 63536 - RNA, 19 nt, Artificial Sequence
  Description of Artificial Sequence: Synthetic oligonucleotide
  Sense strand starting at position 3817 of SEQ ID NO: 786
ugcucuugacgcggugaau

SEQ ID NO: 63537 - RNA, 19 nt, Artificial Sequence
  Description of Artificial Sequence: Synthetic oligonucleotide
  Antisense strand to SEQ ID NO: 63456
auucaccgcgucaagagca

SEQ ID NO: 63538 - RNA, 19 nt, Artificial Sequence
  Description of Artificial Sequence: Synthetic oligonucleotide
  Sense strand starting at position 3816 of SEQ ID NO: 786
gugcucuugacgcggugaa

SEQ ID NO: 63539 - RNA, 19 nt, Artificial Sequence
  Description of Artificial Sequence: Synthetic oligonucleotide
  Antisense strand to SEQ ID NO: 63458
uucaccgcgucaagagcac

SEQ ID NO: 63540 - RNA, 19 nt, Artificial Sequence
  Description of Artificial Sequence: Synthetic oligonucleotide
  Sense strand starting at position 3808 of SEQ ID NO: 786
gaaagucagugcucuugac

SEQ ID NO: 63541 - RNA, 19 nt, Artificial Sequence
  Description of Artificial Sequence: Synthetic oligonucleotide
  Antisense strand to SEQ ID NO: 63460
gucaagagcacugacuuuc

SEQ ID NO: 63542 - RNA, 19 nt, Artificial Sequence
  Description of Artificial Sequence: Synthetic oligonucleotide
  Sense strand starting at position 3805 of SEQ ID NO: 786
aaggaaagucagugcucuu

SEQ ID NO: 63543 - RNA, 19 nt, Artificial Sequence
  Description of Artificial Sequence: Synthetic oligonucleotide
  Antisense strand to SEQ ID NO: 63462
aagagcacugacuuuccuu

SEQ ID NO: 63544 - RNA, 19 nt, Artificial Sequence
  Description of Artificial Sequence: Synthetic oligonucleotide
  Sense strand starting at position 3724 of SEQ ID NO: 786
ggauuucacugggacugga

SEQ ID NO: 63545 - RNA, 19 nt, Artificial Sequence
  Description of Artificial Sequence: Synthetic oligonucleotide
  Antisense strand to SEQ ID NO: 63464
uccagucccagugaaaucc

SEQ ID NO: 63546 - RNA, 19 nt, Artificial Sequence
  Description of Artificial Sequence: Synthetic oligonucleotide
  Sense strand starting at position 3692 of SEQ ID NO: 786
aggcaagucagugauagua

SEQ ID NO: 63547 - RNA, 19 nt, Artificial Sequence
  Description of Artificial Sequence: Synthetic oligonucleotide
  Antisense strand to SEQ ID NO: 63466
uacuaucacugacuugccu

SEQ ID NO: 63548 - RNA, 19 nt, Artificial Sequence
  Description of Artificial Sequence: Synthetic oligonucleotide
  Sense strand starting at position 3691 of SEQ ID NO: 786
aaggcaagucagugauagu

SEQ ID NO: 63549 - RNA, 19 nt, Artificial Sequence
  Description of Artificial Sequence: Synthetic oligonucleotide
  Antisense strand to SEQ ID NO: 63468
acuaucacugacuugccuu

SEQ ID NO: 63550 - RNA, 19 nt, Artificial Sequence
  Description of Artificial Sequence: Synthetic oligonucleotide
  Sense strand starting at position 3659 of SEQ ID NO: 786
gcgaggauguguggccaau

SEQ ID NO: 63551 - RNA, 19 nt, Artificial Sequence
  Description of Artificial Sequence: Synthetic oligonucleotide
  Antisense strand to SEQ ID NO: 63470
auuggccacacauccucgc

SEQ ID NO: 63552 - RNA, 19 nt, Artificial Sequence
  Description of Artificial Sequence: Synthetic oligonucleotide
  Sense strand starting at position 3589 of SEQ ID NO: 786
cucuuaagguguggacaaa

SEQ ID NO: 63553 - RNA, 19 nt, Artificial Sequence
  Description of Artificial Sequence: Synthetic oligonucleotide
  Antisense strand to SEQ ID NO: 63472
uuuguccacaccuuaagag

SEQ ID NO: 63554 - RNA, 19 nt, Artificial Sequence
  Description of Artificial Sequence: Synthetic oligonucleotide
  Sense strand starting at position 3588 of SEQ ID NO: 786
ucucuuaagguguggacaa

SEQ ID NO: 63555 - RNA, 19 nt, Artificial Sequence
  Description of Artificial Sequence: Synthetic oligonucleotide
  Antisense strand to SEQ ID NO: 63474
uuguccacaccuuaagaga

SEQ ID NO: 63556 - RNA, 19 nt, Artificial Sequence
  Description of Artificial Sequence: Synthetic oligonucleotide
  Sense strand starting at position 3392 of SEQ ID NO: 786
cuggguaagucgaguggau

SEQ ID NO: 63557 - RNA, 19 nt, Artificial Sequence
  Description of Artificial Sequence: Synthetic oligonucleotide
  Antisense strand to SEQ ID NO: 63476
auccacucgacuuacccag

SEQ ID NO: 63558 - RNA, 19 nt, Artificial Sequence
  Description of Artificial Sequence: Synthetic oligonucleotide
  Sense strand starting at position 3310 of SEQ ID NO: 786
gcuacuuggaguuguuaaa

SEQ ID NO: 63559 - RNA, 19 nt, Artificial Sequence
  Description of Artificial Sequence: Synthetic oligonucleotide
  Antisense strand to SEQ ID NO: 63478
uuuaacaacuccaaguagc

SEQ ID NO: 63560 - RNA, 19 nt, Artificial Sequence
  Description of Artificial Sequence: Synthetic oligonucleotide
  Sense strand starting at position 3241 of SEQ ID NO: 786
aauaguugccgagagaaau

SEQ ID NO: 63561 - RNA, 19 nt, Artificial Sequence
  Description of Artificial Sequence: Synthetic oligonucleotide
  Antisense strand to SEQ ID NO: 63480
auuucucucggcaacuauu

SEQ ID NO: 63562 - RNA, 19 nt, Artificial Sequence
  Description of Artificial Sequence: Synthetic oligonucleotide
  Sense strand starting at position 3238 of SEQ ID NO: 786
uagaauaguugccgagaga

SEQ ID NO: 63563 - RNA, 19 nt, Artificial Sequence
  Description of Artificial Sequence: Synthetic oligonucleotide
  Antisense strand to SEQ ID NO: 63482
ucucucggcaacuauucua

SEQ ID NO: 63564 - RNA, 19 nt, Artificial Sequence
  Description of Artificial Sequence: Synthetic oligonucleotide
  Sense strand starting at position 3218 of SEQ ID NO: 786
auggcuauugauuaaucua

SEQ ID NO: 63565 - RNA, 19 nt, Artificial Sequence
  Description of Artificial Sequence: Synthetic oligonucleotide
  Antisense strand to SEQ ID NO: 63484
uagauuaaucaauagccau

SEQ ID NO: 63566 - RNA, 19 nt, Artificial Sequence
  Description of Artificial Sequence: Synthetic oligonucleotide
  Sense strand starting at position 3136 of SEQ ID NO: 786
gcuugaugcgggcguguuu

SEQ ID NO: 63567 - RNA, 19 nt, Artificial Sequence
  Description of Artificial Sequence: Synthetic oligonucleotide
  Antisense strand to SEQ ID NO: 63486
aaacacgcccgcaucaagc

SEQ ID NO: 63568 - RNA, 19 nt, Artificial Sequence
  Description of Artificial Sequence: Synthetic oligonucleotide
  Sense strand starting at position 3124 of SEQ ID NO: 786
ugcucuuucccggcuugau

SEQ ID NO: 63569 - RNA, 19 nt, Artificial Sequence
  Description of Artificial Sequence: Synthetic oligonucleotide
  Antisense strand to SEQ ID NO: 63488
aucaagccgggaaagagca

SEQ ID NO: 63570 - RNA, 19 nt, Artificial Sequence
  Description of Artificial Sequence: Synthetic oligonucleotide
  Sense strand starting at position 2871 of SEQ ID NO: 786
uugucacacuccuuagaca

SEQ ID NO: 63571 - RNA, 19 nt, Artificial Sequence
  Description of Artificial Sequence: Synthetic oligonucleotide
  Antisense strand to SEQ ID NO: 63490
ugucuaaggagugugacaa

SEQ ID NO: 63572 - RNA, 19 nt, Artificial Sequence
  Description of Artificial Sequence: Synthetic oligonucleotide
  Sense strand starting at position 2489 of SEQ ID NO: 786
uaaggacuggccugauaga

SEQ ID NO: 63573 - RNA, 19 nt, Artificial Sequence
  Description of Artificial Sequence: Synthetic oligonucleotide
  Antisense strand to SEQ ID NO: 63492
ucuaucaggccaguccuua

SEQ ID NO: 63574 - RNA, 19 nt, Artificial Sequence
  Description of Artificial Sequence: Synthetic oligonucleotide
  Sense strand starting at position 3979 of SEQ ID NO: 787
acagacaacugccaguuau

SEQ ID NO: 63575 - RNA, 19 nt, Artificial Sequence
  Description of Artificial Sequence: Synthetic oligonucleotide
  Antisense strand to SEQ ID NO: 63494
auaacuggcaguugucugu

SEQ ID NO: 63576 - RNA, 19 nt, Artificial Sequence
  Description of Artificial Sequence: Synthetic oligonucleotide
  Sense strand starting at position 3961 of SEQ ID NO: 787
ucgaaaucugguggagaga

SEQ ID NO: 63577 - RNA, 19 nt, Artificial Sequence
  Description of Artificial Sequence: Synthetic oligonucleotide
  Antisense strand to SEQ ID NO: 63496
ucucuccaccagauuucga

SEQ ID NO: 63578 - RNA, 19 nt, Artificial Sequence
  Description of Artificial Sequence: Synthetic oligonucleotide
  Sense strand starting at position 3960 of SEQ ID NO: 787
cucgaaaucugguggagag

SEQ ID NO: 63579 - RNA, 19 nt, Artificial Sequence
  Description of Artificial Sequence: Synthetic oligonucleotide
  Antisense strand to SEQ ID NO: 63498
cucuccaccagauuucgag

SEQ ID NO: 63580 - RNA, 19 nt, Artificial Sequence
  Description of Artificial Sequence: Synthetic oligonucleotide
  Sense strand starting at position 3929 of SEQ ID NO: 787
gcaagugcuccaggcaaga

SEQ ID NO: 63581 - RNA, 19 nt, Artificial Sequence
  Description of Artificial Sequence: Synthetic oligonucleotide
  Antisense strand to SEQ ID NO: 63500
ucuugccuggagcacuugc

SEQ ID NO: 63582 - RNA, 19 nt, Artificial Sequence
  Description of Artificial Sequence: Synthetic oligonucleotide
  Sense strand starting at position 3904 of SEQ ID NO: 787
cgaguacuucugggccagu

SEQ ID NO: 63583 - RNA, 19 nt, Artificial Sequence
  Description of Artificial Sequence: Synthetic oligonucleotide
  Antisense strand to SEQ ID NO: 63502
acuggcccagaaguacucg

SEQ ID NO: 63584 - RNA, 19 nt, Artificial Sequence
  Description of Artificial Sequence: Synthetic oligonucleotide
  Sense strand starting at position 3829 of SEQ ID NO: 787
ccgucaauuccacaugggu

SEQ ID NO: 63585 - RNA, 19 nt, Artificial Sequence
  Description of Artificial Sequence: Synthetic oligonucleotide
  Antisense strand to SEQ ID NO: 63504
acccauguggaauugacgg

SEQ ID NO: 63586 - RNA, 19 nt, Artificial Sequence
  Description of Artificial Sequence: Synthetic oligonucleotide
  Sense strand starting at position 3819 of SEQ ID NO: 787
gugccaagucccgucaauu

SEQ ID NO: 63587 - RNA, 19 nt, Artificial Sequence
  Description of Artificial Sequence: Synthetic oligonucleotide
  Antisense strand to SEQ ID NO: 63506
aauugacgggacuuggcac

SEQ ID NO: 63588 - RNA, 19 nt, Artificial Sequence
  Description of Artificial Sequence: Synthetic oligonucleotide
  Sense strand starting at position 3755 of SEQ ID NO: 787
augaaagugugguuaucau

SEQ ID NO: 63589 - RNA, 19 nt, Artificial Sequence
  Description of Artificial Sequence: Synthetic oligonucleotide
  Antisense strand to SEQ ID NO: 63508
augauaaccacacuuucau

SEQ ID NO: 63590 - RNA, 19 nt, Artificial Sequence
  Description of Artificial Sequence: Synthetic oligonucleotide
  Sense strand starting at position 3753 of SEQ ID NO: 787
agaugaaagugugguuauc

SEQ ID NO: 63591 - RNA, 19 nt, Artificial Sequence
  Description of Artificial Sequence: Synthetic oligonucleotide
  Antisense strand to SEQ ID NO: 63510
gauaaccacacuuucaucu

SEQ ID NO: 63592 - RNA, 19 nt, Artificial Sequence
  Description of Artificial Sequence: Synthetic oligonucleotide
  Sense strand starting at position 3750 of SEQ ID NO: 787
accagaugaaagugugguu

SEQ ID NO: 63593 - RNA, 19 nt, Artificial Sequence
  Description of Artificial Sequence: Synthetic oligonucleotide
  Antisense strand to SEQ ID NO: 63512
aaccacacuuucaucuggu

SEQ ID NO: 63594 - RNA, 19 nt, Artificial Sequence
  Description of Artificial Sequence: Synthetic oligonucleotide
  Sense strand starting at position 3593 of SEQ ID NO: 787
gcauaaccacauggauauu

SEQ ID NO: 63595 - RNA, 19 nt, Artificial Sequence
  Description of Artificial Sequence: Synthetic oligonucleotide
  Antisense strand to SEQ ID NO: 63514
aauauccaugugguuaugc

SEQ ID NO: 63596 - RNA, 19 nt, Artificial Sequence
  Description of Artificial Sequence: Synthetic oligonucleotide
  Sense strand starting at position 3413 of SEQ ID NO: 787
ggaauuaaaugugaaguuc

SEQ ID NO: 63597 - RNA, 19 nt, Artificial Sequence
  Description of Artificial Sequence: Synthetic oligonucleotide
  Antisense strand to SEQ ID NO: 63516
gaacuucacauuuaauucc

SEQ ID NO: 63598 - RNA, 19 nt, Artificial Sequence
  Description of Artificial Sequence: Synthetic oligonucleotide
  Sense strand starting at position 3412 of SEQ ID NO: 787
uggaauuaaaugugaaguu

SEQ ID NO: 63599 - RNA, 19 nt, Artificial Sequence
  Description of Artificial Sequence: Synthetic oligonucleotide
  Antisense strand to SEQ ID NO: 63518
aacuucacauuuaauucca

SEQ ID NO: 63600 - RNA, 19 nt, Artificial Sequence
  Description of Artificial Sequence: Synthetic oligonucleotide
  Sense strand starting at position 3410 of SEQ ID NO: 787
gcuggaauuaaaugugaag

SEQ ID NO: 63601 - RNA, 19 nt, Artificial Sequence
  Description of Artificial Sequence: Synthetic oligonucleotide
  Antisense strand to SEQ ID NO: 63520
cuucacauuuaauuccagc

SEQ ID NO: 63602 - RNA, 19 nt, Artificial Sequence
  Description of Artificial Sequence: Synthetic oligonucleotide
  Sense strand starting at position 3402 of SEQ ID NO: 787
gugguagagcuggaauuaa

SEQ ID NO: 63603 - RNA, 19 nt, Artificial Sequence
  Description of Artificial Sequence: Synthetic oligonucleotide
  Antisense strand to SEQ ID NO: 63522
uuaauuccagcucuaccac

SEQ ID NO: 63604 - RNA, 19 nt, Artificial Sequence
  Description of Artificial Sequence: Synthetic oligonucleotide
  Sense strand starting at position 3401 of SEQ ID NO: 787
agugguagagcuggaauua

SEQ ID NO: 63605 - RNA, 19 nt, Artificial Sequence
  Description of Artificial Sequence: Synthetic oligonucleotide
  Antisense strand to SEQ ID NO: 63524
uaauuccagcucuaccacu

SEQ ID NO: 63606 - RNA, 19 nt, Artificial Sequence
  Description of Artificial Sequence: Synthetic oligonucleotide
  Sense strand starting at position 3391 of SEQ ID NO: 787
gcuaguaguaagugguaga

SEQ ID NO: 63607 - RNA, 19 nt, Artificial Sequence
  Description of Artificial Sequence: Synthetic oligonucleotide
  Antisense strand to SEQ ID NO: 63526
ucuaccacuuacuacuagc

SEQ ID NO: 63608 - RNA, 19 nt, Artificial Sequence
  Description of Artificial Sequence: Synthetic oligonucleotide
  Sense strand starting at position 3365 of SEQ ID NO: 787
uuaagugguuucccugacu

SEQ ID NO: 63609 - RNA, 19 nt, Artificial Sequence
  Description of Artificial Sequence: Synthetic oligonucleotide
  Antisense strand to SEQ ID NO: 63528
agucagggaaaccacuuaa

SEQ ID NO: 63610 - RNA, 19 nt, Artificial Sequence
  Description of Artificial Sequence: Synthetic oligonucleotide
  Sense strand starting at position 3361 of SEQ ID NO: 787
gagguuaagugguuucccu

SEQ ID NO: 63611 - RNA, 19 nt, Artificial Sequence
  Description of Artificial Sequence: Synthetic oligonucleotide
  Antisense strand to SEQ ID NO: 63530
agggaaaccacuuaaccuc

SEQ ID NO: 63612 - RNA, 19 nt, Artificial Sequence
  Description of Artificial Sequence: Synthetic oligonucleotide
  Sense strand starting at position 3306 of SEQ ID NO: 787
ugaagugaguacuguuauu

SEQ ID NO: 63613 - RNA, 19 nt, Artificial Sequence
  Description of Artificial Sequence: Synthetic oligonucleotide
  Antisense strand to SEQ ID NO: 63532
aauaacaguacucacuuca

SEQ ID NO: 63614 - RNA, 19 nt, Artificial Sequence
  Description of Artificial Sequence: Synthetic oligonucleotide
  Sense strand starting at position 3303 of SEQ ID NO: 787
ccgugaagugaguacuguu

SEQ ID NO: 63615 - RNA, 19 nt, Artificial Sequence
  Description of Artificial Sequence: Synthetic oligonucleotide
  Antisense strand to SEQ ID NO: 63534
aacaguacucacuucacgg

SEQ ID NO: 63616 - RNA, 19 nt, Artificial Sequence
  Description of Artificial Sequence: Synthetic oligonucleotide
  Sense strand starting at position 3261 of SEQ ID NO: 787
guaaacacuuuauguacau

SEQ ID NO: 63617 - RNA, 19 nt, Artificial Sequence
  Description of Artificial Sequence: Synthetic oligonucleotide
  Antisense strand to SEQ ID NO: 63536
auguacauaaaguguuuac

SEQ ID NO: 63618 - RNA, 19 nt, Artificial Sequence
  Description of Artificial Sequence: Synthetic oligonucleotide
  Sense strand starting at position 3087 of SEQ ID NO: 787
uauagagugucccuaggua

SEQ ID NO: 63619 - RNA, 19 nt, Artificial Sequence
  Description of Artificial Sequence: Synthetic oligonucleotide
  Antisense strand to SEQ ID NO: 63538
uaccuagggacacucuaua

SEQ ID NO: 63620 - RNA, 19 nt, Artificial Sequence
  Description of Artificial Sequence: Synthetic oligonucleotide
  Sense strand starting at position 2961 of SEQ ID NO: 787
gccugaggugcugaguuua

SEQ ID NO: 63621 - RNA, 19 nt, Artificial Sequence
  Description of Artificial Sequence: Synthetic oligonucleotide
  Antisense strand to SEQ ID NO: 63540
uaaacucagcaccucaggc

SEQ ID NO: 63622 - RNA, 19 nt, Artificial Sequence
  Description of Artificial Sequence: Synthetic oligonucleotide
  Sense strand starting at position 2867 of SEQ ID NO: 787
ggagccuugucuuaaagug

SEQ ID NO: 63623 - RNA, 19 nt, Artificial Sequence
  Description of Artificial Sequence: Synthetic oligonucleotide
  Antisense strand to SEQ ID NO: 63542
cacuuuaagacaaggcucc

SEQ ID NO: 63624 - RNA, 19 nt, Artificial Sequence
  Description of Artificial Sequence: Synthetic oligonucleotide
  Sense strand starting at position 2864 of SEQ ID NO: 787
gaaggagccuugucuuaaa

SEQ ID NO: 63625 - RNA, 19 nt, Artificial Sequence
  Description of Artificial Sequence: Synthetic oligonucleotide
  Antisense strand to SEQ ID NO: 63544
uuuaagacaaggcuccuuc

SEQ ID NO: 63626 - RNA, 19 nt, Artificial Sequence
  Description of Artificial Sequence: Synthetic oligonucleotide
  Sense strand starting at position 2802 of SEQ ID NO: 787
ugggaaacuucuucuccca

SEQ ID NO: 63627 - RNA, 19 nt, Artificial Sequence
  Description of Artificial Sequence: Synthetic oligonucleotide
  Antisense strand to SEQ ID NO: 63546
ugggagaagaaguuuccca

SEQ ID NO: 63628 - RNA, 19 nt, Artificial Sequence
  Description of Artificial Sequence: Synthetic oligonucleotide
  Sense strand starting at position 2739 of SEQ ID NO: 787
aacucagucugagaaguuc

SEQ ID NO: 63629 - RNA, 19 nt, Artificial Sequence
  Description of Artificial Sequence: Synthetic oligonucleotide
  Antisense strand to SEQ ID NO: 63548
gaacuucucagacugaguu

SEQ ID NO: 63630 - RNA, 19 nt, Artificial Sequence
  Description of Artificial Sequence: Synthetic oligonucleotide
  Sense strand starting at position 2720 of SEQ ID NO: 787
uuuggcaguguuuguuaaa

SEQ ID NO: 63631 - RNA, 19 nt, Artificial Sequence
  Description of Artificial Sequence: Synthetic oligonucleotide
  Antisense strand to SEQ ID NO: 63550
uuuaacaaacacugccaaa

SEQ ID NO: 63632 - RNA, 19 nt, Artificial Sequence
  Description of Artificial Sequence: Synthetic oligonucleotide
  Sense strand starting at position 2716 of SEQ ID NO: 787
ggucuuuggcaguguuugu

SEQ ID NO: 63633 - RNA, 19 nt, Artificial Sequence
  Description of Artificial Sequence: Synthetic oligonucleotide
  Antisense strand to SEQ ID NO: 63552
acaaacacugccaaagacc

SEQ ID NO: 63634 - RNA, 19 nt, Artificial Sequence
  Description of Artificial Sequence: Synthetic oligonucleotide
  Sense strand starting at position 2483 of SEQ ID NO: 787
uggugcggccgcuuuaaau

SEQ ID NO: 63635 - RNA, 19 nt, Artificial Sequence
  Description of Artificial Sequence: Synthetic oligonucleotide
  Antisense strand to SEQ ID NO: 63554
auuuaaagcggccgcacca

SEQ ID NO: 63636 - RNA, 19 nt, Artificial Sequence
  Description of Artificial Sequence: Synthetic oligonucleotide
  Sense strand starting at position 2482 of SEQ ID NO: 787
guggugcggccgcuuuaaa

SEQ ID NO: 63637 - RNA, 19 nt, Artificial Sequence
  Description of Artificial Sequence: Synthetic oligonucleotide
  Antisense strand to SEQ ID NO: 63556
uuuaaagcggccgcaccac

SEQ ID NO: 63638 - RNA, 19 nt, Artificial Sequence
  Description of Artificial Sequence: Synthetic oligonucleotide
  Sense strand starting at position 2446 of SEQ ID NO: 787
uugagagcauucucugaaa

SEQ ID NO: 63639 - RNA, 19 nt, Artificial Sequence
  Description of Artificial Sequence: Synthetic oligonucleotide
  Antisense strand to SEQ ID NO: 63558
uuucagagaaugcucucaa

SEQ ID NO: 63640 - RNA, 19 nt, Artificial Sequence
  Description of Artificial Sequence: Synthetic oligonucleotide
  Sense strand starting at position 2361 of SEQ ID NO: 787
guuugacugcuccagauca

SEQ ID NO: 63641 - RNA, 19 nt, Artificial Sequence
  Description of Artificial Sequence: Synthetic oligonucleotide
  Antisense strand to SEQ ID NO: 63560
ugaucuggagcagucaaac

SEQ ID NO: 63642 - RNA, 19 nt, Artificial Sequence
  Description of Artificial Sequence: Synthetic oligonucleotide
  Sense strand starting at position 2359 of SEQ ID NO: 787
auguuugacugcuccagau

SEQ ID NO: 63643 - RNA, 19 nt, Artificial Sequence
  Description of Artificial Sequence: Synthetic oligonucleotide
  Antisense strand to SEQ ID NO: 63562
aucuggagcagucaaacau

SEQ ID NO: 63644 - RNA, 19 nt, Artificial Sequence
  Description of Artificial Sequence: Synthetic oligonucleotide
  Sense strand starting at position 2353 of SEQ ID NO: 787
gggagaauguuugacugcu

SEQ ID NO: 63645 - RNA, 19 nt, Artificial Sequence
  Description of Artificial Sequence: Synthetic oligonucleotide
  Antisense strand to SEQ ID NO: 63564
agcagucaaacauucuccc

SEQ ID NO: 63646 - RNA, 19 nt, Artificial Sequence
  Description of Artificial Sequence: Synthetic oligonucleotide
  Sense strand starting at position 2345 of SEQ ID NO: 787
uugucucugggagaauguu

SEQ ID NO: 63647 - RNA, 19 nt, Artificial Sequence
  Description of Artificial Sequence: Synthetic oligonucleotide
  Antisense strand to SEQ ID NO: 63566
aacauucucccagagacaa

SEQ ID NO: 63648 - RNA, 19 nt, Artificial Sequence
  Description of Artificial Sequence: Synthetic oligonucleotide
  Sense strand starting at position 128 of SEQ ID NO: 791
agugaauggcucuaacuca

SEQ ID NO: 63649 - RNA, 19 nt, Artificial Sequence
  Description of Artificial Sequence: Synthetic oligonucleotide
  Antisense strand to SEQ ID NO: 63568
ugaguuagagccauucacu

SEQ ID NO: 63650 - RNA, 19 nt, Artificial Sequence
  Description of Artificial Sequence: Synthetic oligonucleotide
  Sense strand starting at position 259 of SEQ ID NO: 791
cugaaugcaucgguagcaa

SEQ ID NO: 63651 - RNA, 19 nt, Artificial Sequence
  Description of Artificial Sequence: Synthetic oligonucleotide
  Antisense strand to SEQ ID NO: 63570
uugcuaccgaugcauucag

SEQ ID NO: 63652 - RNA, 19 nt, Artificial Sequence
  Description of Artificial Sequence: Synthetic oligonucleotide
  Sense strand starting at position 278 of SEQ ID NO: 791
gcgcuuauucucuauaauu

SEQ ID NO: 63653 - RNA, 19 nt, Artificial Sequence
  Description of Artificial Sequence: Synthetic oligonucleotide
  Antisense strand to SEQ ID NO: 63572
aauuauagagaauaagcgc

SEQ ID NO: 63654 - RNA, 19 nt, Artificial Sequence
  Description of Artificial Sequence: Synthetic oligonucleotide
  Sense strand starting at position 352 of SEQ ID NO: 791
gaaacuaagcccuguuaug

SEQ ID NO: 63655 - RNA, 19 nt, Artificial Sequence
  Description of Artificial Sequence: Synthetic oligonucleotide
  Antisense strand to SEQ ID NO: 63574
cauaacagggcuuaguuuc

SEQ ID NO: 63656 - RNA, 19 nt, Artificial Sequence
  Description of Artificial Sequence: Synthetic oligonucleotide
  Sense strand starting at position 394 of SEQ ID NO: 791
aguacaacucucgauucuu

SEQ ID NO: 63657 - RNA, 19 nt, Artificial Sequence
  Description of Artificial Sequence: Synthetic oligonucleotide
  Antisense strand to SEQ ID NO: 63576
aagaaucgagaguuguacu

SEQ ID NO: 63658 - RNA, 19 nt, Artificial Sequence
  Description of Artificial Sequence: Synthetic oligonucleotide
  Sense strand starting at position 1496 of SEQ ID NO: 791
caaguagugcccugagacu

SEQ ID NO: 63659 - RNA, 19 nt, Artificial Sequence
  Description of Artificial Sequence: Synthetic oligonucleotide
  Antisense strand to SEQ ID NO: 63578
agucucagggcacuacuug

SEQ ID NO: 63660 - RNA, 19 nt, Artificial Sequence
  Description of Artificial Sequence: Synthetic oligonucleotide
  Sense strand starting at position 1876 of SEQ ID NO: 791
ucaugagucccaggugcua

SEQ ID NO: 63661 - RNA, 19 nt, Artificial Sequence
  Description of Artificial Sequence: Synthetic oligonucleotide
  Antisense strand to SEQ ID NO: 63580
uagcaccugggacucauga

SEQ ID NO: 63662 - RNA, 19 nt, Artificial Sequence
  Description of Artificial Sequence: Synthetic oligonucleotide
  Sense strand starting at position 2032 of SEQ ID NO: 791
aggguaguuuggucgacga

SEQ ID NO: 63663 - RNA, 19 nt, Artificial Sequence
  Description of Artificial Sequence: Synthetic oligonucleotide
  Antisense strand to SEQ ID NO: 63582
ucgucgaccaaacuacccu

SEQ ID NO: 63664 - RNA, 19 nt, Artificial Sequence
  Description of Artificial Sequence: Synthetic oligonucleotide
  Sense strand starting at position 2035 of SEQ ID NO: 791
guaguuuggucgacgagug

SEQ ID NO: 63665 - RNA, 19 nt, Artificial Sequence
  Description of Artificial Sequence: Synthetic oligonucleotide
  Antisense strand to SEQ ID NO: 63584
cacucgucgaccaaacuac

SEQ ID NO: 63666 - RNA, 19 nt, Artificial Sequence
  Description of Artificial Sequence: Synthetic oligonucleotide
  Sense strand starting at position 2037 of SEQ ID NO: 791
aguuuggucgacgagugaa

SEQ ID NO: 63667 - RNA, 19 nt, Artificial Sequence
  Description of Artificial Sequence: Synthetic oligonucleotide
  Antisense strand to SEQ ID NO: 63586
uucacucgucgaccaaacu

SEQ ID NO: 63668 - RNA, 19 nt, Artificial Sequence
  Description of Artificial Sequence: Synthetic oligonucleotide
  Sense strand starting at position 2047 of SEQ ID NO: 791
acgagugaacuuuggaauu

SEQ ID NO: 63669 - RNA, 19 nt, Artificial Sequence
  Description of Artificial Sequence: Synthetic oligonucleotide
  Antisense strand to SEQ ID NO: 63588
aauuccaaaguucacucgu

SEQ ID NO: 63670 - RNA, 19 nt, Artificial Sequence
  Description of Artificial Sequence: Synthetic oligonucleotide
  Sense strand starting at position 2049 of SEQ ID NO: 791
gagugaacuuuggaauuua

SEQ ID NO: 63671 - RNA, 19 nt, Artificial Sequence
  Description of Artificial Sequence: Synthetic oligonucleotide
  Antisense strand to SEQ ID NO: 63590
uaaauuccaaaguucacuc

SEQ ID NO: 63672 - RNA, 19 nt, Artificial Sequence
  Description of Artificial Sequence: Synthetic oligonucleotide
  Sense strand starting at position 2060 of SEQ ID NO: 791
ggaauuuacuucuacguca

SEQ ID NO: 63673 - RNA, 19 nt, Artificial Sequence
  Description of Artificial Sequence: Synthetic oligonucleotide
  Antisense strand to SEQ ID NO: 63592
ugacguagaaguaaauucc

SEQ ID NO: 63674 - RNA, 19 nt, Artificial Sequence
  Description of Artificial Sequence: Synthetic oligonucleotide
  Sense strand starting at position 2142 of SEQ ID NO: 791
auuacauuccaguguagua

SEQ ID NO: 63675 - RNA, 19 nt, Artificial Sequence
  Description of Artificial Sequence: Synthetic oligonucleotide
  Antisense strand to SEQ ID NO: 63594
uacuacacuggaauguaau

SEQ ID NO: 63676 - RNA, 19 nt, Artificial Sequence
  Description of Artificial Sequence: Synthetic oligonucleotide
  Sense strand starting at position 2144 of SEQ ID NO: 791
uacauuccaguguaguauu

SEQ ID NO: 63677 - RNA, 19 nt, Artificial Sequence
  Description of Artificial Sequence: Synthetic oligonucleotide
  Antisense strand to SEQ ID NO: 63596
aauacuacacuggaaugua

SEQ ID NO: 63678 - RNA, 19 nt, Artificial Sequence
  Description of Artificial Sequence: Synthetic oligonucleotide
  Sense strand starting at position 2170 of SEQ ID NO: 791
gcuucauucgcguuaguca

SEQ ID NO: 63679 - RNA, 19 nt, Artificial Sequence
  Description of Artificial Sequence: Synthetic oligonucleotide
  Antisense strand to SEQ ID NO: 63598
ugacuaacgcgaaugaagc

SEQ ID NO: 63680 - RNA, 19 nt, Artificial Sequence
  Description of Artificial Sequence: Synthetic oligonucleotide
  Sense strand starting at position 2225 of SEQ ID NO: 791
cacaauggguggcucaaua

SEQ ID NO: 63681 - RNA, 19 nt, Artificial Sequence
  Description of Artificial Sequence: Synthetic oligonucleotide
  Antisense strand to SEQ ID NO: 63600
uauugagccacccauugug

SEQ ID NO: 63682 - RNA, 19 nt, Artificial Sequence
  Description of Artificial Sequence: Synthetic oligonucleotide
  Sense strand starting at position 2235 of SEQ ID NO: 791
ggcucaauauuuggagacu

SEQ ID NO: 63683 - RNA, 19 nt, Artificial Sequence
  Description of Artificial Sequence: Synthetic oligonucleotide
  Antisense strand to SEQ ID NO: 63602
agucuccaaauauugagcc

SEQ ID NO: 63684 - RNA, 19 nt, Artificial Sequence
  Description of Artificial Sequence: Synthetic oligonucleotide
  Sense strand starting at position 2236 of SEQ ID NO: 791
gcucaauauuuggagacuu

SEQ ID NO: 63685 - RNA, 19 nt, Artificial Sequence
  Description of Artificial Sequence: Synthetic oligonucleotide
  Antisense strand to SEQ ID NO: 63604
aagucuccaaauauugagc

SEQ ID NO: 63686 - RNA, 19 nt, Artificial Sequence
  Description of Artificial Sequence: Synthetic oligonucleotide
  Sense strand starting at position 2244 of SEQ ID NO: 791
uuuggagacuuagauauuu

SEQ ID NO: 63687 - RNA, 19 nt, Artificial Sequence
  Description of Artificial Sequence: Synthetic oligonucleotide
  Antisense strand to SEQ ID NO: 63606
aaauaucuaagucuccaaa

SEQ ID NO: 63688 - RNA, 19 nt, Artificial Sequence
  Description of Artificial Sequence: Synthetic oligonucleotide
  Sense strand starting at position 2267 of SEQ ID NO: 791
gaugaauacuaggcugauu

SEQ ID NO: 63689 - RNA, 19 nt, Artificial Sequence
  Description of Artificial Sequence: Synthetic oligonucleotide
  Antisense strand to SEQ ID NO: 63608
aaucagccuaguauucauc

SEQ ID NO: 63690 - RNA, 19 nt, Artificial Sequence
  Description of Artificial Sequence: Synthetic oligonucleotide
  Sense strand starting at position 2312 of SEQ ID NO: 791
gugaauuggcccuggguac

SEQ ID NO: 63691 - RNA, 19 nt, Artificial Sequence
  Description of Artificial Sequence: Synthetic oligonucleotide
  Antisense strand to SEQ ID NO: 63610
guacccagggccaauucac

SEQ ID NO: 63692 - RNA, 19 nt, Artificial Sequence
  Description of Artificial Sequence: Synthetic oligonucleotide
  Sense strand starting at position 2371 of SEQ ID NO: 791
agcagaucugagcacacaa

SEQ ID NO: 63693 - RNA, 19 nt, Artificial Sequence
  Description of Artificial Sequence: Synthetic oligonucleotide
  Antisense strand to SEQ ID NO: 63612
uugugugcucagaucugcu

SEQ ID NO: 63694 - RNA, 19 nt, Artificial Sequence
  Description of Artificial Sequence: Synthetic oligonucleotide
  Sense strand starting at position 2431 of SEQ ID NO: 791
uuucuaggcacuggagauu

SEQ ID NO: 63695 - RNA, 19 nt, Artificial Sequence
  Description of Artificial Sequence: Synthetic oligonucleotide
  Antisense strand to SEQ ID NO: 63614
aaucuccagugccuagaaa

SEQ ID NO: 63696 - RNA, 19 nt, Artificial Sequence
  Description of Artificial Sequence: Synthetic oligonucleotide
  Sense strand starting at position 2539 of SEQ ID NO: 791
cuacuaagguugccagaca

SEQ ID NO: 63697 - RNA, 19 nt, Artificial Sequence
  Description of Artificial Sequence: Synthetic oligonucleotide
  Antisense strand to SEQ ID NO: 63616
ugucuggcaaccuuaguag

SEQ ID NO: 63698 - RNA, 19 nt, Artificial Sequence
  Description of Artificial Sequence: Synthetic oligonucleotide
  Sense strand starting at position 2564 of SEQ ID NO: 791
uagugcuugggauguauca

SEQ ID NO: 63699 - RNA, 19 nt, Artificial Sequence
  Description of Artificial Sequence: Synthetic oligonucleotide
  Antisense strand to SEQ ID NO: 63618
ugauacaucccaagcacua

SEQ ID NO: 63700 - RNA, 19 nt, Artificial Sequence
  Description of Artificial Sequence: Synthetic oligonucleotide
  Sense strand starting at position 2571 of SEQ ID NO: 791
ugggauguaucaguaaaca

SEQ ID NO: 63701 - RNA, 19 nt, Artificial Sequence
  Description of Artificial Sequence: Synthetic oligonucleotide
  Antisense strand to SEQ ID NO: 63620
uguuuacugauacauccca

SEQ ID NO: 63702 - RNA, 19 nt, Artificial Sequence
  Description of Artificial Sequence: Synthetic oligonucleotide
  Sense strand starting at position 2645 of SEQ ID NO: 791
ggagaaagaugauaaaugu

SEQ ID NO: 63703 - RNA, 19 nt, Artificial Sequence
  Description of Artificial Sequence: Synthetic oligonucleotide
  Antisense strand to SEQ ID NO: 63622
acauuuaucaucuuucucc

SEQ ID NO: 63704 - RNA, 19 nt, Artificial Sequence
  Description of Artificial Sequence: Synthetic oligonucleotide
  Sense strand starting at position 3200 of SEQ ID NO: 791
agccucgggaaguguuaaa

SEQ ID NO: 63705 - RNA, 19 nt, Artificial Sequence
  Description of Artificial Sequence: Synthetic oligonucleotide
  Antisense strand to SEQ ID NO: 63624
uuuaacacuucccgaggcu

SEQ ID NO: 63706 - RNA, 19 nt, Artificial Sequence
  Description of Artificial Sequence: Synthetic oligonucleotide
  Sense strand starting at position 3239 of SEQ ID NO: 791
gguuggagccgugagcaaa

SEQ ID NO: 63707 - RNA, 19 nt, Artificial Sequence
  Description of Artificial Sequence: Synthetic oligonucleotide
  Antisense strand to SEQ ID NO: 63626
uuugcucacggcuccaacc

SEQ ID NO: 63708 - RNA, 19 nt, Artificial Sequence
  Description of Artificial Sequence: Synthetic oligonucleotide
  Sense strand starting at position 3240 of SEQ ID NO: 791
guuggagccgugagcaaau

SEQ ID NO: 63709 - RNA, 19 nt, Artificial Sequence
  Description of Artificial Sequence: Synthetic oligonucleotide
  Antisense strand to SEQ ID NO: 63628
auuugcucacggcuccaac

SEQ ID NO: 63710 - RNA, 19 nt, Artificial Sequence
  Description of Artificial Sequence: Synthetic oligonucleotide
  Sense strand starting at position 3311 of SEQ ID NO: 791
guaggaaucuuggcugaaa

SEQ ID NO: 63711 - RNA, 19 nt, Artificial Sequence
  Description of Artificial Sequence: Synthetic oligonucleotide
  Antisense strand to SEQ ID NO: 63630
uuucagccaagauuccuac

SEQ ID NO: 63712 - RNA, 19 nt, Artificial Sequence
  Description of Artificial Sequence: Synthetic oligonucleotide
  Sense strand starting at position 3312 of SEQ ID NO: 791
uaggaaucuuggcugaaac

SEQ ID NO: 63713 - RNA, 19 nt, Artificial Sequence
  Description of Artificial Sequence: Synthetic oligonucleotide
  Antisense strand to SEQ ID NO: 63632
guuucagccaagauuccua

SEQ ID NO: 63714 - RNA, 19 nt, Artificial Sequence
  Description of Artificial Sequence: Synthetic oligonucleotide
  Sense strand starting at position 3313 of SEQ ID NO: 791
aggaaucuuggcugaaaca

SEQ ID NO: 63715 - RNA, 19 nt, Artificial Sequence
  Description of Artificial Sequence: Synthetic oligonucleotide
  Antisense strand to SEQ ID NO: 63634
uguuucagccaagauuccu

SEQ ID NO: 63716 - RNA, 19 nt, Artificial Sequence
  Description of Artificial Sequence: Synthetic oligonucleotide
  Sense strand starting at position 3405 of SEQ ID NO: 791
gugcuaagagcagaacuaa

SEQ ID NO: 63717 - RNA, 19 nt, Artificial Sequence
  Description of Artificial Sequence: Synthetic oligonucleotide
  Antisense strand to SEQ ID NO: 63636
uuaguucugcucuuagcac

SEQ ID NO: 63718 - RNA, 19 nt, Artificial Sequence
  Description of Artificial Sequence: Synthetic oligonucleotide
  Sense strand starting at position 3463 of SEQ ID NO: 791
acagaaugauggcuugaac

SEQ ID NO: 63719 - RNA, 19 nt, Artificial Sequence
  Description of Artificial Sequence: Synthetic oligonucleotide
  Antisense strand to SEQ ID NO: 63638
guucaagccaucauucugu

SEQ ID NO: 63720 - RNA, 19 nt, Artificial Sequence
  Description of Artificial Sequence: Synthetic oligonucleotide
  Sense strand starting at position 3472 of SEQ ID NO: 791
uggcuugaacuagauagua

SEQ ID NO: 63721 - RNA, 19 nt, Artificial Sequence
  Description of Artificial Sequence: Synthetic oligonucleotide
  Antisense strand to SEQ ID NO: 63640
uacuaucuaguucaagcca

SEQ ID NO: 63722 - RNA, 19 nt, Artificial Sequence
  Description of Artificial Sequence: Synthetic oligonucleotide
  Sense strand starting at position 3538 of SEQ ID NO: 791
gcuugacuguaaucccagu

SEQ ID NO: 63723 - RNA, 19 nt, Artificial Sequence
  Description of Artificial Sequence: Synthetic oligonucleotide
  Antisense strand to SEQ ID NO: 63642
acugggauuacagucaagc

SEQ ID NO: 63724 - RNA, 19 nt, Artificial Sequence
  Description of Artificial Sequence: Synthetic oligonucleotide
  Sense strand starting at position 3666 of SEQ ID NO: 791
ugucuauggucucccaaca

SEQ ID NO: 63725 - RNA, 19 nt, Artificial Sequence
  Description of Artificial Sequence: Synthetic oligonucleotide
  Antisense strand to SEQ ID NO: 63644
uguugggagaccauagaca

SEQ ID NO: 63726 - RNA, 19 nt, Artificial Sequence
  Description of Artificial Sequence: Synthetic oligonucleotide
  Sense strand starting at position 3698 of SEQ ID NO: 791
ggaagauugcgugagcaca

SEQ ID NO: 63727 - RNA, 19 nt, Artificial Sequence
  Description of Artificial Sequence: Synthetic oligonucleotide
  Antisense strand to SEQ ID NO: 63646
ugugcucacgcaaucuucc

SEQ ID NO: 63728 - RNA, 19 nt, Artificial Sequence
  Description of Artificial Sequence: Synthetic oligonucleotide
  Sense strand starting at position 1 of SEQ ID NO: 789
cuguucuuucgauauaagu

SEQ ID NO: 63729 - RNA, 19 nt, Artificial Sequence
  Description of Artificial Sequence: Synthetic oligonucleotide
  Antisense strand to SEQ ID NO: 63648
acuuauaucgaaagaacag

SEQ ID NO: 63730 - RNA, 19 nt, Artificial Sequence
  Description of Artificial Sequence: Synthetic oligonucleotide
  Sense strand starting at position 3 of SEQ ID NO: 789
guucuuucgauauaaguug

SEQ ID NO: 63731 - RNA, 19 nt, Artificial Sequence
  Description of Artificial Sequence: Synthetic oligonucleotide
  Antisense strand to SEQ ID NO: 63650
caacuuauaucgaaagaac

SEQ ID NO: 63732 - RNA, 19 nt, Artificial Sequence
  Description of Artificial Sequence: Synthetic oligonucleotide
  Sense strand starting at position 9 of SEQ ID NO: 789
ucgauauaaguugaagcuu

SEQ ID NO: 63733 - RNA, 19 nt, Artificial Sequence
  Description of Artificial Sequence: Synthetic oligonucleotide
  Antisense strand to SEQ ID NO: 63652
aagcuucaacuuauaucga

SEQ ID NO: 63734 - RNA, 19 nt, Artificial Sequence
  Description of Artificial Sequence: Synthetic oligonucleotide
  Sense strand starting at position 17 of SEQ ID NO: 789
aguugaagcuuuccaagag

SEQ ID NO: 63735 - RNA, 19 nt, Artificial Sequence
  Description of Artificial Sequence: Synthetic oligonucleotide
  Antisense strand to SEQ ID NO: 63654
cucuuggaaagcuucaacu

SEQ ID NO: 63736 - RNA, 19 nt, Artificial Sequence
  Description of Artificial Sequence: Synthetic oligonucleotide
  Sense strand starting at position 74 of SEQ ID NO: 789
cauagauaacucgguacuu

SEQ ID NO: 63737 - RNA, 19 nt, Artificial Sequence
  Description of Artificial Sequence: Synthetic oligonucleotide
  Antisense strand to SEQ ID NO: 63656
aaguaccgaguuaucuaug

SEQ ID NO: 63738 - RNA, 19 nt, Artificial Sequence
  Description of Artificial Sequence: Synthetic oligonucleotide
  Sense strand starting at position 75 of SEQ ID NO: 789
auagauaacucgguacuuu

SEQ ID NO: 63739 - RNA, 19 nt, Artificial Sequence
  Description of Artificial Sequence: Synthetic oligonucleotide
  Antisense strand to SEQ ID NO: 63658
aaaguaccgaguuaucuau

SEQ ID NO: 63740 - RNA, 19 nt, Artificial Sequence
  Description of Artificial Sequence: Synthetic oligonucleotide
  Sense strand starting at position 76 of SEQ ID NO: 789
uagauaacucgguacuuua

SEQ ID NO: 63741 - RNA, 19 nt, Artificial Sequence
  Description of Artificial Sequence: Synthetic oligonucleotide
  Antisense strand to SEQ ID NO: 63660
uaaaguaccgaguuaucua

SEQ ID NO: 63742 - RNA, 19 nt, Artificial Sequence
  Description of Artificial Sequence: Synthetic oligonucleotide
  Sense strand starting at position 354 of SEQ ID NO: 789
ucuaguaagugacuuugaa

SEQ ID NO: 63743 - RNA, 19 nt, Artificial Sequence
  Description of Artificial Sequence: Synthetic oligonucleotide
  Antisense strand to SEQ ID NO: 63662
uucaaagucacuuacuaga

SEQ ID NO: 63744 - RNA, 19 nt, Artificial Sequence
  Description of Artificial Sequence: Synthetic oligonucleotide
  Sense strand starting at position 429 of SEQ ID NO: 789
acguucuagccucauccaa

SEQ ID NO: 63745 - RNA, 19 nt, Artificial Sequence
  Description of Artificial Sequence: Synthetic oligonucleotide
  Antisense strand to SEQ ID NO: 63664
uuggaugaggcuagaacgu

SEQ ID NO: 63746 - RNA, 19 nt, Artificial Sequence
  Description of Artificial Sequence: Synthetic oligonucleotide
  Sense strand starting at position 466 of SEQ ID NO: 789
augagaaacuucccaguuu

SEQ ID NO: 63747 - RNA, 19 nt, Artificial Sequence
  Description of Artificial Sequence: Synthetic oligonucleotide
  Antisense strand to SEQ ID NO: 63666
aaacugggaaguuucucau

SEQ ID NO: 63748 - RNA, 19 nt, Artificial Sequence
  Description of Artificial Sequence: Synthetic oligonucleotide
  Sense strand starting at position 663 of SEQ ID NO: 789
ggaauaggcuucucucacu

SEQ ID NO: 63749 - RNA, 19 nt, Artificial Sequence
  Description of Artificial Sequence: Synthetic oligonucleotide
  Antisense strand to SEQ ID NO: 63668
agugagagaagccuauucc

SEQ ID NO: 63750 - RNA, 19 nt, Artificial Sequence
  Description of Artificial Sequence: Synthetic oligonucleotide
  Sense strand starting at position 668 of SEQ ID NO: 789
aggcuucucucacuguuau

SEQ ID NO: 63751 - RNA, 19 nt, Artificial Sequence
  Description of Artificial Sequence: Synthetic oligonucleotide
  Antisense strand to SEQ ID NO: 63670
auaacagugagagaagccu

SEQ ID NO: 63752 - RNA, 19 nt, Artificial Sequence
  Description of Artificial Sequence: Synthetic oligonucleotide
  Sense strand starting at position 679 of SEQ ID NO: 789
acuguuauugcgggaacaa

SEQ ID NO: 63753 - RNA, 19 nt, Artificial Sequence
  Description of Artificial Sequence: Synthetic oligonucleotide
  Antisense strand to SEQ ID NO: 63672
uuguucccgcaauaacagu

SEQ ID NO: 63754 - RNA, 19 nt, Artificial Sequence
  Description of Artificial Sequence: Synthetic oligonucleotide
  Sense strand starting at position 680 of SEQ ID NO: 789
cuguuauugcgggaacaau

SEQ ID NO: 63755 - RNA, 19 nt, Artificial Sequence
  Description of Artificial Sequence: Synthetic oligonucleotide
  Antisense strand to SEQ ID NO: 63674
auuguucccgcaauaacag

SEQ ID NO: 63756 - RNA, 19 nt, Artificial Sequence
  Description of Artificial Sequence: Synthetic oligonucleotide
  Sense strand starting at position 1040 of SEQ ID NO: 789
agugaauggcucuaacuca

SEQ ID NO: 63757 - RNA, 19 nt, Artificial Sequence
  Description of Artificial Sequence: Synthetic oligonucleotide
  Antisense strand to SEQ ID NO: 63676
ugaguuagagccauucacu

SEQ ID NO: 63758 - RNA, 19 nt, Artificial Sequence
  Description of Artificial Sequence: Synthetic oligonucleotide
  Sense strand starting at position 1190 of SEQ ID NO: 789
gcgcuuauucucuauaauu

SEQ ID NO: 63759 - RNA, 19 nt, Artificial Sequence
  Description of Artificial Sequence: Synthetic oligonucleotide
  Antisense strand to SEQ ID NO: 63678
aauuauagagaauaagcgc

SEQ ID NO: 63760 - RNA, 19 nt, Artificial Sequence
  Description of Artificial Sequence: Synthetic oligonucleotide
  Sense strand starting at position 1264 of SEQ ID NO: 789
gaaacuaagcccuguuaug

SEQ ID NO: 63761 - RNA, 19 nt, Artificial Sequence
  Description of Artificial Sequence: Synthetic oligonucleotide
  Antisense strand to SEQ ID NO: 63680
cauaacagggcuuaguuuc

SEQ ID NO: 63762 - RNA, 19 nt, Artificial Sequence
  Description of Artificial Sequence: Synthetic oligonucleotide
  Sense strand starting at position 1306 of SEQ ID NO: 789
aguacaacucucgauucuu

SEQ ID NO: 63763 - RNA, 19 nt, Artificial Sequence
  Description of Artificial Sequence: Synthetic oligonucleotide
  Antisense strand to SEQ ID NO: 63682
aagaaucgagaguuguacu

SEQ ID NO: 63764 - RNA, 19 nt, Artificial Sequence
  Description of Artificial Sequence: Synthetic oligonucleotide
  Sense strand starting at position 2408 of SEQ ID NO: 789
caaguagugcccugagacu

SEQ ID NO: 63765 - RNA, 19 nt, Artificial Sequence
  Description of Artificial Sequence: Synthetic oligonucleotide
  Antisense strand to SEQ ID NO: 63684
agucucagggcacuacuug

SEQ ID NO: 63766 - RNA, 19 nt, Artificial Sequence
  Description of Artificial Sequence: Synthetic oligonucleotide
  Sense strand starting at position 2788 of SEQ ID NO: 789
ucaugagucccaggugcua

SEQ ID NO: 63767 - RNA, 19 nt, Artificial Sequence
  Description of Artificial Sequence: Synthetic oligonucleotide
  Antisense strand to SEQ ID NO: 63686
uagcaccugggacucauga

SEQ ID NO: 63768 - RNA, 19 nt, Artificial Sequence
  Description of Artificial Sequence: Synthetic oligonucleotide
  Sense strand starting at position 2947 of SEQ ID NO: 789
guaguuuggucgacgagug

SEQ ID NO: 63769 - RNA, 19 nt, Artificial Sequence
  Description of Artificial Sequence: Synthetic oligonucleotide
  Antisense strand to SEQ ID NO: 63688
cacucgucgaccaaacuac

SEQ ID NO: 63770 - RNA, 19 nt, Artificial Sequence
  Description of Artificial Sequence: Synthetic oligonucleotide
  Sense strand starting at position 2949 of SEQ ID NO: 789
aguuuggucgacgagugaa

SEQ ID NO: 63771 - RNA, 19 nt, Artificial Sequence
  Description of Artificial Sequence: Synthetic oligonucleotide
  Antisense strand to SEQ ID NO: 63690
uucacucgucgaccaaacu

SEQ ID NO: 63772 - RNA, 19 nt, Artificial Sequence
  Description of Artificial Sequence: Synthetic oligonucleotide
  Sense strand starting at position 2959 of SEQ ID NO: 789
acgagugaacuuuggaauu

SEQ ID NO: 63773 - RNA, 19 nt, Artificial Sequence
  Description of Artificial Sequence: Synthetic oligonucleotide
  Antisense strand to SEQ ID NO: 63692
aauuccaaaguucacucgu

SEQ ID NO: 63774 - RNA, 19 nt, Artificial Sequence
  Description of Artificial Sequence: Synthetic oligonucleotide
  Sense strand starting at position 2961 of SEQ ID NO: 789
gagugaacuuuggaauuua

SEQ ID NO: 63775 - RNA, 19 nt, Artificial Sequence
  Description of Artificial Sequence: Synthetic oligonucleotide
  Antisense strand to SEQ ID NO: 63694
uaaauuccaaaguucacuc

SEQ ID NO: 63776 - RNA, 19 nt, Artificial Sequence
  Description of Artificial Sequence: Synthetic oligonucleotide
  Sense strand starting at position 2972 of SEQ ID NO: 789
ggaauuuacuucuacguca

SEQ ID NO: 63777 - RNA, 19 nt, Artificial Sequence
  Description of Artificial Sequence: Synthetic oligonucleotide
  Antisense strand to SEQ ID NO: 63696
ugacguagaaguaaauucc

SEQ ID NO: 63778 - RNA, 19 nt, Artificial Sequence
  Description of Artificial Sequence: Synthetic oligonucleotide
  Sense strand starting at position 3054 of SEQ ID NO: 789
auuacauuccaguguagua

SEQ ID NO: 63779 - RNA, 19 nt, Artificial Sequence
  Description of Artificial Sequence: Synthetic oligonucleotide
  Antisense strand to SEQ ID NO: 63698
uacuacacuggaauguaau

SEQ ID NO: 63780 - RNA, 19 nt, Artificial Sequence
  Description of Artificial Sequence: Synthetic oligonucleotide
  Sense strand starting at position 3056 of SEQ ID NO: 789
uacauuccaguguaguauu

SEQ ID NO: 63781 - RNA, 19 nt, Artificial Sequence
  Description of Artificial Sequence: Synthetic oligonucleotide
  Antisense strand to SEQ ID NO: 63700
aauacuacacuggaaugua

SEQ ID NO: 63782 - RNA, 19 nt, Artificial Sequence
  Description of Artificial Sequence: Synthetic oligonucleotide
  Sense strand starting at position 3082 of SEQ ID NO: 789
gcuucauucgcguuaguca

SEQ ID NO: 63783 - RNA, 19 nt, Artificial Sequence
  Description of Artificial Sequence: Synthetic oligonucleotide
  Antisense strand to SEQ ID NO: 63702
ugacuaacgcgaaugaagc

SEQ ID NO: 63784 - RNA, 19 nt, Artificial Sequence
  Description of Artificial Sequence: Synthetic oligonucleotide
  Sense strand starting at position 3137 of SEQ ID NO: 789
cacaauggguggcucaaua

SEQ ID NO: 63785 - RNA, 19 nt, Artificial Sequence
  Description of Artificial Sequence: Synthetic oligonucleotide
  Antisense strand to SEQ ID NO: 63704
uauugagccacccauugug

SEQ ID NO: 63786 - RNA, 19 nt, Artificial Sequence
  Description of Artificial Sequence: Synthetic oligonucleotide
  Sense strand starting at position 3147 of SEQ ID NO: 789
ggcucaauauuuggagacu

SEQ ID NO: 63787 - RNA, 19 nt, Artificial Sequence
  Description of Artificial Sequence: Synthetic oligonucleotide
  Antisense strand to SEQ ID NO: 63706
agucuccaaauauugagcc

SEQ ID NO: 63788 - RNA, 19 nt, Artificial Sequence
  Description of Artificial Sequence: Synthetic oligonucleotide
  Sense strand starting at position 3148 of SEQ ID NO: 789
gcucaauauuuggagacuu

SEQ ID NO: 63789 - RNA, 19 nt, Artificial Sequence
  Description of Artificial Sequence: Synthetic oligonucleotide
  Antisense strand to SEQ ID NO: 63708
aagucuccaaauauugagc

SEQ ID NO: 63790 - RNA, 19 nt, Artificial Sequence
  Description of Artificial Sequence: Synthetic oligonucleotide
  Sense strand starting at position 3156 of SEQ ID NO: 789
uuuggagacuuagauauuu

SEQ ID NO: 63791 - RNA, 19 nt, Artificial Sequence
  Description of Artificial Sequence: Synthetic oligonucleotide
  Antisense strand to SEQ ID NO: 63710
aaauaucuaagucuccaaa

SEQ ID NO: 63792 - RNA, 19 nt, Artificial Sequence
  Description of Artificial Sequence: Synthetic oligonucleotide
  Sense strand starting at position 3179 of SEQ ID NO: 789
gaugaauacuaggcugauu

SEQ ID NO: 63793 - RNA, 19 nt, Artificial Sequence
  Description of Artificial Sequence: Synthetic oligonucleotide
  Antisense strand to SEQ ID NO: 63712
aaucagccuaguauucauc

SEQ ID NO: 63794 - RNA, 19 nt, Artificial Sequence
  Description of Artificial Sequence: Synthetic oligonucleotide
  Sense strand starting at position 3224 of SEQ ID NO: 789
gugaauuggcccuggguac

SEQ ID NO: 63795 - RNA, 19 nt, Artificial Sequence
  Description of Artificial Sequence: Synthetic oligonucleotide
  Antisense strand to SEQ ID NO: 63714
guacccagggccaauucac

SEQ ID NO: 63796 - RNA, 19 nt, Artificial Sequence
  Description of Artificial Sequence: Synthetic oligonucleotide
  Sense strand starting at position 3283 of SEQ ID NO: 789
agcagaucugagcacacaa

SEQ ID NO: 63797 - RNA, 19 nt, Artificial Sequence
  Description of Artificial Sequence: Synthetic oligonucleotide
  Antisense strand to SEQ ID NO: 63716
uugugugcucagaucugcu

SEQ ID NO: 63798 - RNA, 19 nt, Artificial Sequence
  Description of Artificial Sequence: Synthetic oligonucleotide
  Sense strand starting at position 3343 of SEQ ID NO: 789
uuucuaggcacuggagauu

SEQ ID NO: 63799 - RNA, 19 nt, Artificial Sequence
  Description of Artificial Sequence: Synthetic oligonucleotide
  Antisense strand to SEQ ID NO: 63718
aaucuccagugccuagaaa

SEQ ID NO: 63800 - RNA, 19 nt, Artificial Sequence
  Description of Artificial Sequence: Synthetic oligonucleotide
  Sense strand starting at position 3451 of SEQ ID NO: 789
cuacuaagguugccagaca

SEQ ID NO: 63801 - RNA, 19 nt, Artificial Sequence
  Description of Artificial Sequence: Synthetic oligonucleotide
  Antisense strand to SEQ ID NO: 63720
ugucuggcaaccuuaguag

SEQ ID NO: 63802 - RNA, 19 nt, Artificial Sequence
  Description of Artificial Sequence: Synthetic oligonucleotide
  Sense strand starting at position 3476 of SEQ ID NO: 789
uagugcuugggauguauca

SEQ ID NO: 63803 - RNA, 19 nt, Artificial Sequence
  Description of Artificial Sequence: Synthetic oligonucleotide
  Antisense strand to SEQ ID NO: 63722
ugauacaucccaagcacua

SEQ ID NO: 63804 - RNA, 19 nt, Artificial Sequence
  Description of Artificial Sequence: Synthetic oligonucleotide
  Sense strand starting at position 3483 of SEQ ID NO: 789
ugggauguaucaguaaaca

SEQ ID NO: 63805 - RNA, 19 nt, Artificial Sequence
  Description of Artificial Sequence: Synthetic oligonucleotide
  Antisense strand to SEQ ID NO: 63724
uguuuacugauacauccca

SEQ ID NO: 63806 - RNA, 19 nt, Artificial Sequence
  Description of Artificial Sequence: Synthetic oligonucleotide
  Sense strand starting at position 3557 of SEQ ID NO: 789
ggagaaagaugauaaaugu

SEQ ID NO: 63807 - RNA, 19 nt, Artificial Sequence
  Description of Artificial Sequence: Synthetic oligonucleotide
  Antisense strand to SEQ ID NO: 63726
acauuuaucaucuuucucc

SEQ ID NO: 63808 - RNA, 19 nt, Artificial Sequence
  Description of Artificial Sequence: Synthetic oligonucleotide
  Sense strand starting at position 104 of SEQ ID NO: 790
ucuaguaagugacuuugaa

SEQ ID NO: 63809 - RNA, 19 nt, Artificial Sequence
  Description of Artificial Sequence: Synthetic oligonucleotide
  Antisense strand to SEQ ID NO: 63728
uucaaagucacuuacuaga

SEQ ID NO: 63810 - RNA, 19 nt, Artificial Sequence
  Description of Artificial Sequence: Synthetic oligonucleotide
  Sense strand starting at position 179 of SEQ ID NO: 790
acguucuagccucauccaa

SEQ ID NO: 63811 - RNA, 19 nt, Artificial Sequence
  Description of Artificial Sequence: Synthetic oligonucleotide
  Antisense strand to SEQ ID NO: 63730
uuggaugaggcuagaacgu

SEQ ID NO: 63812 - RNA, 19 nt, Artificial Sequence
  Description of Artificial Sequence: Synthetic oligonucleotide
  Sense strand starting at position 208 of SEQ ID NO: 790
augaaagcaugagaaacuu

SEQ ID NO: 63813 - RNA, 19 nt, Artificial Sequence
  Description of Artificial Sequence: Synthetic oligonucleotide
  Antisense strand to SEQ ID NO: 63732
aaguuucucaugcuuucau

SEQ ID NO: 63814 - RNA, 19 nt, Artificial Sequence
  Description of Artificial Sequence: Synthetic oligonucleotide
  Sense strand starting at position 216 of SEQ ID NO: 790
augagaaacuucccaguuu

SEQ ID NO: 63815 - RNA, 19 nt, Artificial Sequence
  Description of Artificial Sequence: Synthetic oligonucleotide
  Antisense strand to SEQ ID NO: 63734
aaacugggaaguuucucau

SEQ ID NO: 63816 - RNA, 19 nt, Artificial Sequence
  Description of Artificial Sequence: Synthetic oligonucleotide
  Sense strand starting at position 413 of SEQ ID NO: 790
ggaauaggcuucucucacu

SEQ ID NO: 63817 - RNA, 19 nt, Artificial Sequence
  Description of Artificial Sequence: Synthetic oligonucleotide
  Antisense strand to SEQ ID NO: 63736
agugagagaagccuauucc

SEQ ID NO: 63818 - RNA, 19 nt, Artificial Sequence
  Description of Artificial Sequence: Synthetic oligonucleotide
  Sense strand starting at position 418 of SEQ ID NO: 790
aggcuucucucacuguuau

SEQ ID NO: 63819 - RNA, 19 nt, Artificial Sequence
  Description of Artificial Sequence: Synthetic oligonucleotide
  Antisense strand to SEQ ID NO: 63738
auaacagugagagaagccu

SEQ ID NO: 63820 - RNA, 19 nt, Artificial Sequence
  Description of Artificial Sequence: Synthetic oligonucleotide
  Sense strand starting at position 429 of SEQ ID NO: 790
acuguuauugcgggaacaa

SEQ ID NO: 63821 - RNA, 19 nt, Artificial Sequence
  Description of Artificial Sequence: Synthetic oligonucleotide
  Antisense strand to SEQ ID NO: 63740
uuguucccgcaauaacagu

SEQ ID NO: 63822 - RNA, 19 nt, Artificial Sequence
  Description of Artificial Sequence: Synthetic oligonucleotide
  Sense strand starting at position 430 of SEQ ID NO: 790
cuguuauugcgggaacaau

SEQ ID NO: 63823 - RNA, 19 nt, Artificial Sequence
  Description of Artificial Sequence: Synthetic oligonucleotide
  Antisense strand to SEQ ID NO: 63742
auuguucccgcaauaacag

SEQ ID NO: 63824 - RNA, 19 nt, Artificial Sequence
  Description of Artificial Sequence: Synthetic oligonucleotide
  Sense strand starting at position 790 of SEQ ID NO: 790
agugaauggcucuaacuca

SEQ ID NO: 63825 - RNA, 19 nt, Artificial Sequence
  Description of Artificial Sequence: Synthetic oligonucleotide
  Antisense strand to SEQ ID NO: 63744
ugaguuagagccauucacu

SEQ ID NO: 63826 - RNA, 19 nt, Artificial Sequence
  Description of Artificial Sequence: Synthetic oligonucleotide
  Sense strand starting at position 940 of SEQ ID NO: 790
gcgcuuauucucuauaauu

SEQ ID NO: 63827 - RNA, 19 nt, Artificial Sequence
  Description of Artificial Sequence: Synthetic oligonucleotide
  Antisense strand to SEQ ID NO: 63746
aauuauagagaauaagcgc

SEQ ID NO: 63828 - RNA, 19 nt, Artificial Sequence
  Description of Artificial Sequence: Synthetic oligonucleotide
  Sense strand starting at position 1014 of SEQ ID NO: 790
gaaacuaagcccuguuaug

SEQ ID NO: 63829 - RNA, 19 nt, Artificial Sequence
  Description of Artificial Sequence: Synthetic oligonucleotide
  Antisense strand to SEQ ID NO: 63748
cauaacagggcuuaguuuc

SEQ ID NO: 63830 - RNA, 19 nt, Artificial Sequence
  Description of Artificial Sequence: Synthetic oligonucleotide
  Sense strand starting at position 1056 of SEQ ID NO: 790
aguacaacucucgauucuu

SEQ ID NO: 63831 - RNA, 19 nt, Artificial Sequence
  Description of Artificial Sequence: Synthetic oligonucleotide
  Antisense strand to SEQ ID NO: 63750
aagaaucgagaguuguacu

SEQ ID NO: 63832 - RNA, 19 nt, Artificial Sequence
  Description of Artificial Sequence: Synthetic oligonucleotide
  Sense strand starting at position 2158 of SEQ ID NO: 790
caaguagugcccugagacu

SEQ ID NO: 63833 - RNA, 19 nt, Artificial Sequence
  Description of Artificial Sequence: Synthetic oligonucleotide
  Antisense strand to SEQ ID NO: 63752
agucucagggcacuacuug

SEQ ID NO: 63834 - RNA, 19 nt, Artificial Sequence
  Description of Artificial Sequence: Synthetic oligonucleotide
  Sense strand starting at position 2538 of SEQ ID NO: 790
ucaugagucccaggugcua

SEQ ID NO: 63835 - RNA, 19 nt, Artificial Sequence
  Description of Artificial Sequence: Synthetic oligonucleotide
  Antisense strand to SEQ ID NO: 63754
uagcaccugggacucauga

SEQ ID NO: 63836 - RNA, 19 nt, Artificial Sequence
  Description of Artificial Sequence: Synthetic oligonucleotide
  Sense strand starting at position 2697 of SEQ ID NO: 790
guaguuuggucgacgagug

SEQ ID NO: 63837 - RNA, 19 nt, Artificial Sequence
  Description of Artificial Sequence: Synthetic oligonucleotide
  Antisense strand to SEQ ID NO: 63756
cacucgucgaccaaacuac

SEQ ID NO: 63838 - RNA, 19 nt, Artificial Sequence
  Description of Artificial Sequence: Synthetic oligonucleotide
  Sense strand starting at position 2699 of SEQ ID NO: 790
aguuuggucgacgagugaa

SEQ ID NO: 63839 - RNA, 19 nt, Artificial Sequence
  Description of Artificial Sequence: Synthetic oligonucleotide
  Antisense strand to SEQ ID NO: 63758
uucacucgucgaccaaacu

SEQ ID NO: 63840 - RNA, 19 nt, Artificial Sequence
  Description of Artificial Sequence: Synthetic oligonucleotide
  Sense strand starting at position 2709 of SEQ ID NO: 790
acgagugaacuuuggaauu

SEQ ID NO: 63841 - RNA, 19 nt, Artificial Sequence
  Description of Artificial Sequence: Synthetic oligonucleotide
  Antisense strand to SEQ ID NO: 63760
aauuccaaaguucacucgu

SEQ ID NO: 63842 - RNA, 19 nt, Artificial Sequence
  Description of Artificial Sequence: Synthetic oligonucleotide
  Sense strand starting at position 2711 of SEQ ID NO: 790
gagugaacuuuggaauuua

SEQ ID NO: 63843 - RNA, 19 nt, Artificial Sequence
  Description of Artificial Sequence: Synthetic oligonucleotide
  Antisense strand to SEQ ID NO: 63762
uaaauuccaaaguucacuc

SEQ ID NO: 63844 - RNA, 19 nt, Artificial Sequence
  Description of Artificial Sequence: Synthetic oligonucleotide
  Sense strand starting at position 2722 of SEQ ID NO: 790
ggaauuuacuucuacguca

SEQ ID NO: 63845 - RNA, 19 nt, Artificial Sequence
  Description of Artificial Sequence: Synthetic oligonucleotide
  Antisense strand to SEQ ID NO: 63764
ugacguagaaguaaauucc

SEQ ID NO: 63846 - RNA, 19 nt, Artificial Sequence
  Description of Artificial Sequence: Synthetic oligonucleotide
  Sense strand starting at position 2804 of SEQ ID NO: 790
auuacauuccaguguagua

SEQ ID NO: 63847 - RNA, 19 nt, Artificial Sequence
  Description of Artificial Sequence: Synthetic oligonucleotide
  Antisense strand to SEQ ID NO: 63766
uacuacacuggaauguaau

SEQ ID NO: 63848 - RNA, 19 nt, Artificial Sequence
  Description of Artificial Sequence: Synthetic oligonucleotide
  Sense strand starting at position 2806 of SEQ ID NO: 790
uacauuccaguguaguauu

SEQ ID NO: 63849 - RNA, 19 nt, Artificial Sequence
  Description of Artificial Sequence: Synthetic oligonucleotide
  Antisense strand to SEQ ID NO: 63768
aauacuacacuggaaugua

SEQ ID NO: 63850 - RNA, 19 nt, Artificial Sequence
  Description of Artificial Sequence: Synthetic oligonucleotide
  Sense strand starting at position 2832 of SEQ ID NO: 790
gcuucauucgcguuaguca

SEQ ID NO: 63851 - RNA, 19 nt, Artificial Sequence
  Description of Artificial Sequence: Synthetic oligonucleotide
  Antisense strand to SEQ ID NO: 63770
ugacuaacgcgaaugaagc

SEQ ID NO: 63852 - RNA, 19 nt, Artificial Sequence
  Description of Artificial Sequence: Synthetic oligonucleotide
  Sense strand starting at position 2887 of SEQ ID NO: 790
cacaauggguggcucaaua

SEQ ID NO: 63853 - RNA, 19 nt, Artificial Sequence
  Description of Artificial Sequence: Synthetic oligonucleotide
  Antisense strand to SEQ ID NO: 63772
uauugagccacccauugug

SEQ ID NO: 63854 - RNA, 19 nt, Artificial Sequence
  Description of Artificial Sequence: Synthetic oligonucleotide
  Sense strand starting at position 2897 of SEQ ID NO: 790
ggcucaauauuuggagacu

SEQ ID NO: 63855 - RNA, 19 nt, Artificial Sequence
  Description of Artificial Sequence: Synthetic oligonucleotide
  Antisense strand to SEQ ID NO: 63774
agucuccaaauauugagcc

SEQ ID NO: 63856 - RNA, 19 nt, Artificial Sequence
  Description of Artificial Sequence: Synthetic oligonucleotide
  Sense strand starting at position 2898 of SEQ ID NO: 790
gcucaauauuuggagacuu

SEQ ID NO: 63857 - RNA, 19 nt, Artificial Sequence
  Description of Artificial Sequence: Synthetic oligonucleotide
  Antisense strand to SEQ ID NO: 63776
aagucuccaaauauugagc

SEQ ID NO: 63858 - RNA, 19 nt, Artificial Sequence
  Description of Artificial Sequence: Synthetic oligonucleotide
  Sense strand starting at position 2906 of SEQ ID NO: 790
uuuggagacuuagauauuu

SEQ ID NO: 63859 - RNA, 19 nt, Artificial Sequence
  Description of Artificial Sequence: Synthetic oligonucleotide
  Antisense strand to SEQ ID NO: 63778
aaauaucuaagucuccaaa

SEQ ID NO: 63860 - RNA, 19 nt, Artificial Sequence
  Description of Artificial Sequence: Synthetic oligonucleotide
  Sense strand starting at position 2929 of SEQ ID NO: 790
gaugaauacuaggcugauu

SEQ ID NO: 63861 - RNA, 19 nt, Artificial Sequence
  Description of Artificial Sequence: Synthetic oligonucleotide
  Antisense strand to SEQ ID NO: 63780
aaucagccuaguauucauc

SEQ ID NO: 63862 - RNA, 19 nt, Artificial Sequence
  Description of Artificial Sequence: Synthetic oligonucleotide
  Sense strand starting at position 2974 of SEQ ID NO: 790
gugaauuggcccuggguac

SEQ ID NO: 63863 - RNA, 19 nt, Artificial Sequence
  Description of Artificial Sequence: Synthetic oligonucleotide
  Antisense strand to SEQ ID NO: 63782
guacccagggccaauucac

SEQ ID NO: 63864 - RNA, 19 nt, Artificial Sequence
  Description of Artificial Sequence: Synthetic oligonucleotide
  Sense strand starting at position 3033 of SEQ ID NO: 790
agcagaucugagcacacaa

SEQ ID NO: 63865 - RNA, 19 nt, Artificial Sequence
  Description of Artificial Sequence: Synthetic oligonucleotide
  Antisense strand to SEQ ID NO: 63784
uugugugcucagaucugcu

SEQ ID NO: 63866 - RNA, 19 nt, Artificial Sequence
  Description of Artificial Sequence: Synthetic oligonucleotide
  Sense strand starting at position 3093 of SEQ ID NO: 790
uuucuaggcacuggagauu

SEQ ID NO: 63867 - RNA, 19 nt, Artificial Sequence
  Description of Artificial Sequence: Synthetic oligonucleotide
  Antisense strand to SEQ ID NO: 63786
aaucuccagugccuagaaa

SEQ ID NO: 63868 - RNA, 19 nt, Artificial Sequence
  Description of Artificial Sequence: Synthetic oligonucleotide
  Sense strand starting at position 3201 of SEQ ID NO: 790
cuacuaagguugccagaca

SEQ ID NO: 63869 - RNA, 19 nt, Artificial Sequence
  Description of Artificial Sequence: Synthetic oligonucleotide
  Antisense strand to SEQ ID NO: 63788
ugucuggcaaccuuaguag

SEQ ID NO: 63870 - RNA, 19 nt, Artificial Sequence
  Description of Artificial Sequence: Synthetic oligonucleotide
  Sense strand starting at position 3226 of SEQ ID NO: 790
uagugcuugggauguauca

SEQ ID NO: 63871 - RNA, 19 nt, Artificial Sequence
  Description of Artificial Sequence: Synthetic oligonucleotide
  Antisense strand to SEQ ID NO: 63790
ugauacaucccaagcacua

SEQ ID NO: 63872 - RNA, 19 nt, Artificial Sequence
  Description of Artificial Sequence: Synthetic oligonucleotide
  Sense strand starting at position 3233 of SEQ ID NO: 790
ugggauguaucaguaaaca

SEQ ID NO: 63873 - RNA, 19 nt, Artificial Sequence
  Description of Artificial Sequence: Synthetic oligonucleotide
  Antisense strand to SEQ ID NO: 63792
uguuuacugauacauccca

SEQ ID NO: 63874 - RNA, 19 nt, Artificial Sequence
  Description of Artificial Sequence: Synthetic oligonucleotide
  Sense strand starting at position 3307 of SEQ ID NO: 790
ggagaaagaugauaaaugu

SEQ ID NO: 63875 - RNA, 19 nt, Artificial Sequence
  Description of Artificial Sequence: Synthetic oligonucleotide
  Antisense strand to SEQ ID NO: 63794
acauuuaucaucuuucucc

SEQ ID NO: 63876 - RNA, 19 nt, Artificial Sequence
  Description of Artificial Sequence: Synthetic oligonucleotide
  Sense strand starting at position 3862 of SEQ ID NO: 790
agccucgggaaguguuaaa

SEQ ID NO: 63877 - RNA, 19 nt, Artificial Sequence
  Description of Artificial Sequence: Synthetic oligonucleotide
  Antisense strand to SEQ ID NO: 63796
uuuaacacuucccgaggcu

SEQ ID NO: 63878 - RNA, 19 nt, Artificial Sequence
  Description of Artificial Sequence: Synthetic oligonucleotide
  Sense strand starting at position 3901 of SEQ ID NO: 790
gguuggagccgugagcaaa

SEQ ID NO: 63879 - RNA, 19 nt, Artificial Sequence
  Description of Artificial Sequence: Synthetic oligonucleotide
  Antisense strand to SEQ ID NO: 63798
uuugcucacggcuccaacc

SEQ ID NO: 63880 - RNA, 19 nt, Artificial Sequence
  Description of Artificial Sequence: Synthetic oligonucleotide
  Sense strand starting at position 3902 of SEQ ID NO: 790
guuggagccgugagcaaau

SEQ ID NO: 63881 - RNA, 19 nt, Artificial Sequence
  Description of Artificial Sequence: Synthetic oligonucleotide
  Antisense strand to SEQ ID NO: 63800
auuugcucacggcuccaac

SEQ ID NO: 63882 - RNA, 19 nt, Artificial Sequence
  Description of Artificial Sequence: Synthetic oligonucleotide
  Sense strand starting at position 3973 of SEQ ID NO: 790
guaggaaucuuggcugaaa

SEQ ID NO: 63883 - RNA, 19 nt, Artificial Sequence
  Description of Artificial Sequence: Synthetic oligonucleotide
  Antisense strand to SEQ ID NO: 63802
uuucagccaagauuccuac

SEQ ID NO: 63884 - RNA, 19 nt, Artificial Sequence
  Description of Artificial Sequence: Synthetic oligonucleotide
  Sense strand starting at position 3974 of SEQ ID NO: 790
uaggaaucuuggcugaaac

SEQ ID NO: 63885 - RNA, 19 nt, Artificial Sequence
  Description of Artificial Sequence: Synthetic oligonucleotide
  Antisense strand to SEQ ID NO: 63804
guuucagccaagauuccua

SEQ ID NO: 63886 - RNA, 19 nt, Artificial Sequence
  Description of Artificial Sequence: Synthetic oligonucleotide
  Sense strand starting at position 3975 of SEQ ID NO: 790
aggaaucuuggcugaaaca

SEQ ID NO: 63887 - RNA, 19 nt, Artificial Sequence
  Description of Artificial Sequence: Synthetic oligonucleotide
  Antisense strand to SEQ ID NO: 63806
uguuucagccaagauuccu

SEQ ID NO: 63888 - RNA, 19 nt, Artificial Sequence
  Description of Artificial Sequence: Synthetic oligonucleotide
  Sense strand starting at position 87 of SEQ ID NO: 788
ucuaguaagugacuuugaa

SEQ ID NO: 63889 - RNA, 19 nt, Artificial Sequence
  Description of Artificial Sequence: Synthetic oligonucleotide
  Antisense strand to SEQ ID NO: 63808
uucaaagucacuuacuaga

SEQ ID NO: 63890 - RNA, 19 nt, Artificial Sequence
  Description of Artificial Sequence: Synthetic oligonucleotide
  Sense strand starting at position 162 of SEQ ID NO: 788
acguucuagccucauccaa

SEQ ID NO: 63891 - RNA, 19 nt, Artificial Sequence
  Description of Artificial Sequence: Synthetic oligonucleotide
  Antisense strand to SEQ ID NO: 63810
uuggaugaggcuagaacgu

SEQ ID NO: 63892 - RNA, 19 nt, Artificial Sequence
  Description of Artificial Sequence: Synthetic oligonucleotide
  Sense strand starting at position 191 of SEQ ID NO: 788
augaaagcaugagaaacuu

SEQ ID NO: 63893 - RNA, 19 nt, Artificial Sequence
  Description of Artificial Sequence: Synthetic oligonucleotide
  Antisense strand to SEQ ID NO: 63812
aaguuucucaugcuuucau

SEQ ID NO: 63894 - RNA, 19 nt, Artificial Sequence
  Description of Artificial Sequence: Synthetic oligonucleotide
  Sense strand starting at position 199 of SEQ ID NO: 788
augagaaacuucccaguuu

SEQ ID NO: 63895 - RNA, 19 nt, Artificial Sequence
  Description of Artificial Sequence: Synthetic oligonucleotide
  Antisense strand to SEQ ID NO: 63814
aaacugggaaguuucucau

SEQ ID NO: 63896 - RNA, 19 nt, Artificial Sequence
  Description of Artificial Sequence: Synthetic oligonucleotide
  Sense strand starting at position 396 of SEQ ID NO: 788
ggaauaggcuucucucacu

SEQ ID NO: 63897 - RNA, 19 nt, Artificial Sequence
  Description of Artificial Sequence: Synthetic oligonucleotide
  Antisense strand to SEQ ID NO: 63816
agugagagaagccuauucc

SEQ ID NO: 63898 - RNA, 19 nt, Artificial Sequence
  Description of Artificial Sequence: Synthetic oligonucleotide
  Sense strand starting at position 401 of SEQ ID NO: 788
aggcuucucucacuguuau

SEQ ID NO: 63899 - RNA, 19 nt, Artificial Sequence
  Description of Artificial Sequence: Synthetic oligonucleotide
  Antisense strand to SEQ ID NO: 63818
auaacagugagagaagccu

SEQ ID NO: 63900 - RNA, 19 nt, Artificial Sequence
  Description of Artificial Sequence: Synthetic oligonucleotide
  Sense strand starting at position 412 of SEQ ID NO: 788
acuguuauugcgggaacaa

SEQ ID NO: 63901 - RNA, 19 nt, Artificial Sequence
  Description of Artificial Sequence: Synthetic oligonucleotide
  Antisense strand to SEQ ID NO: 63820
uuguucccgcaauaacagu

SEQ ID NO: 63902 - RNA, 19 nt, Artificial Sequence
  Description of Artificial Sequence: Synthetic oligonucleotide
  Sense strand starting at position 413 of SEQ ID NO: 788
cuguuauugcgggaacaau

SEQ ID NO: 63903 - RNA, 19 nt, Artificial Sequence
  Description of Artificial Sequence: Synthetic oligonucleotide
  Antisense strand to SEQ ID NO: 63822
auuguucccgcaauaacag

SEQ ID NO: 63904 - RNA, 19 nt, Artificial Sequence
  Description of Artificial Sequence: Synthetic oligonucleotide
  Sense strand starting at position 773 of SEQ ID NO: 788
agugaauggcucuaacuca

SEQ ID NO: 63905 - RNA, 19 nt, Artificial Sequence
  Description of Artificial Sequence: Synthetic oligonucleotide
  Antisense strand to SEQ ID NO: 63824
ugaguuagagccauucacu

SEQ ID NO: 63906 - RNA, 19 nt, Artificial Sequence
  Description of Artificial Sequence: Synthetic oligonucleotide
  Sense strand starting at position 923 of SEQ ID NO: 788
gcgcuuauucucuauaauu

SEQ ID NO: 63907 - RNA, 19 nt, Artificial Sequence
  Description of Artificial Sequence: Synthetic oligonucleotide
  Antisense strand to SEQ ID NO: 63826
aauuauagagaauaagcgc

SEQ ID NO: 63908 - RNA, 19 nt, Artificial Sequence
  Description of Artificial Sequence: Synthetic oligonucleotide
  Sense strand starting at position 997 of SEQ ID NO: 788
gaaacuaagcccuguuaug

SEQ ID NO: 63909 - RNA, 19 nt, Artificial Sequence
  Description of Artificial Sequence: Synthetic oligonucleotide
  Antisense strand to SEQ ID NO: 63828
cauaacagggcuuaguuuc

SEQ ID NO: 63910 - RNA, 19 nt, Artificial Sequence
  Description of Artificial Sequence: Synthetic oligonucleotide
  Sense strand starting at position 1039 of SEQ ID NO: 788
aguacaacucucgauucuu

SEQ ID NO: 63911 - RNA, 19 nt, Artificial Sequence
  Description of Artificial Sequence: Synthetic oligonucleotide
  Antisense strand to SEQ ID NO: 63830
aagaaucgagaguuguacu

SEQ ID NO: 63912 - RNA, 19 nt, Artificial Sequence
  Description of Artificial Sequence: Synthetic oligonucleotide
  Sense strand starting at position 2141 of SEQ ID NO: 788
caaguagugcccugagacu

SEQ ID NO: 63913 - RNA, 19 nt, Artificial Sequence
  Description of Artificial Sequence: Synthetic oligonucleotide
  Antisense strand to SEQ ID NO: 63832
agucucagggcacuacuug

SEQ ID NO: 63914 - RNA, 19 nt, Artificial Sequence
  Description of Artificial Sequence: Synthetic oligonucleotide
  Sense strand starting at position 2521 of SEQ ID NO: 788
ucaugagucccaggugcua

SEQ ID NO: 63915 - RNA, 19 nt, Artificial Sequence
  Description of Artificial Sequence: Synthetic oligonucleotide
  Antisense strand to SEQ ID NO: 63834
uagcaccugggacucauga

SEQ ID NO: 63916 - RNA, 19 nt, Artificial Sequence
  Description of Artificial Sequence: Synthetic oligonucleotide
  Sense strand starting at position 2680 of SEQ ID NO: 788
guaguuuggucgacgagug

SEQ ID NO: 63917 - RNA, 19 nt, Artificial Sequence
  Description of Artificial Sequence: Synthetic oligonucleotide
  Antisense strand to SEQ ID NO: 63836
cacucgucgaccaaacuac

SEQ ID NO: 63918 - RNA, 19 nt, Artificial Sequence
  Description of Artificial Sequence: Synthetic oligonucleotide
  Sense strand starting at position 2682 of SEQ ID NO: 788
aguuuggucgacgagugaa

SEQ ID NO: 63919 - RNA, 19 nt, Artificial Sequence
  Description of Artificial Sequence: Synthetic oligonucleotide
  Antisense strand to SEQ ID NO: 63838
uucacucgucgaccaaacu

SEQ ID NO: 63920 - RNA, 19 nt, Artificial Sequence
  Description of Artificial Sequence: Synthetic oligonucleotide
  Sense strand starting at position 2692 of SEQ ID NO: 788
acgagugaacuuuggaauu

SEQ ID NO: 63921 - RNA, 19 nt, Artificial Sequence
  Description of Artificial Sequence: Synthetic oligonucleotide
  Antisense strand to SEQ ID NO: 63840
aauuccaaaguucacucgu

SEQ ID NO: 63922 - RNA, 19 nt, Artificial Sequence
  Description of Artificial Sequence: Synthetic oligonucleotide
  Sense strand starting at position 2694 of SEQ ID NO: 788
gagugaacuuuggaauuua

SEQ ID NO: 63923 - RNA, 19 nt, Artificial Sequence
  Description of Artificial Sequence: Synthetic oligonucleotide
  Antisense strand to SEQ ID NO: 63842
uaaauuccaaaguucacuc

SEQ ID NO: 63924 - RNA, 19 nt, Artificial Sequence
  Description of Artificial Sequence: Synthetic oligonucleotide
  Sense strand starting at position 2705 of SEQ ID NO: 788
ggaauuuacuucuacguca

SEQ ID NO: 63925 - RNA, 19 nt, Artificial Sequence
  Description of Artificial Sequence: Synthetic oligonucleotide
  Antisense strand to SEQ ID NO: 63844
ugacguagaaguaaauucc

SEQ ID NO: 63926 - RNA, 19 nt, Artificial Sequence
  Description of Artificial Sequence: Synthetic oligonucleotide
  Sense strand starting at position 2787 of SEQ ID NO: 788
auuacauuccaguguagua

SEQ ID NO: 63927 - RNA, 19 nt, Artificial Sequence
  Description of Artificial Sequence: Synthetic oligonucleotide
  Antisense strand to SEQ ID NO: 63846
uacuacacuggaauguaau

SEQ ID NO: 63928 - RNA, 19 nt, Artificial Sequence
  Description of Artificial Sequence: Synthetic oligonucleotide
  Sense strand starting at position 2789 of SEQ ID NO: 788
uacauuccaguguaguauu

SEQ ID NO: 63929 - RNA, 19 nt, Artificial Sequence
  Description of Artificial Sequence: Synthetic oligonucleotide
  Antisense strand to SEQ ID NO: 63848
aauacuacacuggaaugua

SEQ ID NO: 63930 - RNA, 19 nt, Artificial Sequence
  Description of Artificial Sequence: Synthetic oligonucleotide
  Sense strand starting at position 2815 of SEQ ID NO: 788
gcuucauucgcguuaguca

SEQ ID NO: 63931 - RNA, 19 nt, Artificial Sequence
  Description of Artificial Sequence: Synthetic oligonucleotide
  Antisense strand to SEQ ID NO: 63850
ugacuaacgcgaaugaagc

SEQ ID NO: 63932 - RNA, 19 nt, Artificial Sequence
  Description of Artificial Sequence: Synthetic oligonucleotide
  Sense strand starting at position 2870 of SEQ ID NO: 788
cacaauggguggcucaaua

SEQ ID NO: 63933 - RNA, 19 nt, Artificial Sequence
  Description of Artificial Sequence: Synthetic oligonucleotide
  Antisense strand to SEQ ID NO: 63852
uauugagccacccauugug

SEQ ID NO: 63934 - RNA, 19 nt, Artificial Sequence
  Description of Artificial Sequence: Synthetic oligonucleotide
  Sense strand starting at position 2880 of SEQ ID NO: 788
ggcucaauauuuggagacu

SEQ ID NO: 63935 - RNA, 19 nt, Artificial Sequence
  Description of Artificial Sequence: Synthetic oligonucleotide
  Antisense strand to SEQ ID NO: 63854
agucuccaaauauugagcc

SEQ ID NO: 63936 - RNA, 19 nt, Artificial Sequence
  Description of Artificial Sequence: Synthetic oligonucleotide
  Sense strand starting at position 2881 of SEQ ID NO: 788
gcucaauauuuggagacuu

SEQ ID NO: 63937 - RNA, 19 nt, Artificial Sequence
  Description of Artificial Sequence: Synthetic oligonucleotide
  Antisense strand to SEQ ID NO: 63856
aagucuccaaauauugagc

SEQ ID NO: 63938 - RNA, 19 nt, Artificial Sequence
  Description of Artificial Sequence: Synthetic oligonucleotide
  Sense strand starting at position 2889 of SEQ ID NO: 788
uuuggagacuuagauauuu

SEQ ID NO: 63939 - RNA, 19 nt, Artificial Sequence
  Description of Artificial Sequence: Synthetic oligonucleotide
  Antisense strand to SEQ ID NO: 63858
aaauaucuaagucuccaaa

SEQ ID NO: 63940 - RNA, 19 nt, Artificial Sequence
  Description of Artificial Sequence: Synthetic oligonucleotide
  Sense strand starting at position 2912 of SEQ ID NO: 788
gaugaauacuaggcugauu

SEQ ID NO: 63941 - RNA, 19 nt, Artificial Sequence
  Description of Artificial Sequence: Synthetic oligonucleotide
  Antisense strand to SEQ ID NO: 63860
aaucagccuaguauucauc

SEQ ID NO: 63942 - RNA, 19 nt, Artificial Sequence
  Description of Artificial Sequence: Synthetic oligonucleotide
  Sense strand starting at position 2957 of SEQ ID NO: 788
gugaauuggcccuggguac

SEQ ID NO: 63943 - RNA, 19 nt, Artificial Sequence
  Description of Artificial Sequence: Synthetic oligonucleotide
  Antisense strand to SEQ ID NO: 63862
guacccagggccaauucac

SEQ ID NO: 63944 - RNA, 19 nt, Artificial Sequence
  Description of Artificial Sequence: Synthetic oligonucleotide
  Sense strand starting at position 3016 of SEQ ID NO: 788
agcagaucugagcacacaa

SEQ ID NO: 63945 - RNA, 19 nt, Artificial Sequence
  Description of Artificial Sequence: Synthetic oligonucleotide
  Antisense strand to SEQ ID NO: 63864
uugugugcucagaucugcu

SEQ ID NO: 63946 - RNA, 19 nt, Artificial Sequence
  Description of Artificial Sequence: Synthetic oligonucleotide
  Sense strand starting at position 3076 of SEQ ID NO: 788
uuucuaggcacuggagauu

SEQ ID NO: 63947 - RNA, 19 nt, Artificial Sequence
  Description of Artificial Sequence: Synthetic oligonucleotide
  Antisense strand to SEQ ID NO: 63866
aaucuccagugccuagaaa

SEQ ID NO: 63948 - RNA, 19 nt, Artificial Sequence
  Description of Artificial Sequence: Synthetic oligonucleotide
  Sense strand starting at position 3184 of SEQ ID NO: 788
cuacuaagguugccagaca

SEQ ID NO: 63949 - RNA, 19 nt, Artificial Sequence
  Description of Artificial Sequence: Synthetic oligonucleotide
  Antisense strand to SEQ ID NO: 63868
ugucuggcaaccuuaguag

SEQ ID NO: 63950 - RNA, 19 nt, Artificial Sequence
  Description of Artificial Sequence: Synthetic oligonucleotide
  Sense strand starting at position 3209 of SEQ ID NO: 788
uagugcuugggauguauca

SEQ ID NO: 63951 - RNA, 19 nt, Artificial Sequence
  Description of Artificial Sequence: Synthetic oligonucleotide
  Antisense strand to SEQ ID NO: 63870
ugauacaucccaagcacua

SEQ ID NO: 63952 - RNA, 19 nt, Artificial Sequence
  Description of Artificial Sequence: Synthetic oligonucleotide
  Sense strand starting at position 3216 of SEQ ID NO: 788
ugggauguaucaguaaaca

SEQ ID NO: 63953 - RNA, 19 nt, Artificial Sequence
  Description of Artificial Sequence: Synthetic oligonucleotide
  Antisense strand to SEQ ID NO: 63872
uguuuacugauacauccca

SEQ ID NO: 63954 - RNA, 19 nt, Artificial Sequence
  Description of Artificial Sequence: Synthetic oligonucleotide
  Sense strand starting at position 3290 of SEQ ID NO: 788
ggagaaagaugauaaaugu

SEQ ID NO: 63955 - RNA, 19 nt, Artificial Sequence
  Description of Artificial Sequence: Synthetic oligonucleotide
  Antisense strand to SEQ ID NO: 63874
acauuuaucaucuuucucc

SEQ ID NO: 63956 - RNA, 19 nt, Artificial Sequence
  Description of Artificial Sequence: Synthetic oligonucleotide
  Sense strand starting at position 3845 of SEQ ID NO: 788
agccucgggaaguguuaaa

SEQ ID NO: 63957 - RNA, 19 nt, Artificial Sequence
  Description of Artificial Sequence: Synthetic oligonucleotide
  Antisense strand to SEQ ID NO: 63876
uuuaacacuucccgaggcu

SEQ ID NO: 63958 - RNA, 19 nt, Artificial Sequence
  Description of Artificial Sequence: Synthetic oligonucleotide
  Sense strand starting at position 3884 of SEQ ID NO: 788
gguuggagccgugagcaaa

SEQ ID NO: 63959 - RNA, 19 nt, Artificial Sequence
  Description of Artificial Sequence: Synthetic oligonucleotide
  Antisense strand to SEQ ID NO: 63878
uuugcucacggcuccaacc

SEQ ID NO: 63960 - RNA, 19 nt, Artificial Sequence
  Description of Artificial Sequence: Synthetic oligonucleotide
  Sense strand starting at position 3885 of SEQ ID NO: 788
guuggagccgugagcaaau

SEQ ID NO: 63961 - RNA, 19 nt, Artificial Sequence
  Description of Artificial Sequence: Synthetic oligonucleotide
  Antisense strand to SEQ ID NO: 63880
auuugcucacggcuccaac

SEQ ID NO: 63962 - RNA, 19 nt, Artificial Sequence
  Description of Artificial Sequence: Synthetic oligonucleotide
  Sense strand starting at position 3956 of SEQ ID NO: 788
guaggaaucuuggcugaaa

SEQ ID NO: 63963 - RNA, 19 nt, Artificial Sequence
  Description of Artificial Sequence: Synthetic oligonucleotide
  Antisense strand to SEQ ID NO: 63882
uuucagccaagauuccuac

SEQ ID NO: 63964 - RNA, 19 nt, Artificial Sequence
  Description of Artificial Sequence: Synthetic oligonucleotide
  Sense strand starting at position 3957 of SEQ ID NO: 788
uaggaaucuuggcugaaac

SEQ ID NO: 63965 - RNA, 19 nt, Artificial Sequence
  Description of Artificial Sequence: Synthetic oligonucleotide
  Antisense strand to SEQ ID NO: 63884
guuucagccaagauuccua

SEQ ID NO: 63966 - RNA, 19 nt, Artificial Sequence
  Description of Artificial Sequence: Synthetic oligonucleotide
  Sense strand starting at position 3958 of SEQ ID NO: 788
aggaaucuuggcugaaaca

SEQ ID NO: 63967 - RNA, 19 nt, Artificial Sequence
  Description of Artificial Sequence: Synthetic oligonucleotide
  Antisense strand to SEQ ID NO: 63886
uguuucagccaagauuccu

SEQ ID NO: 63968 - RNA, 19 nt, Artificial Sequence
  Description of Artificial Sequence: Synthetic oligonucleotide
  Sense strand starting at position 3877 of SEQ ID NO: 792
ccagaaugagcaggugauu

SEQ ID NO: 63969 - RNA, 19 nt, Artificial Sequence
  Description of Artificial Sequence: Synthetic oligonucleotide
  Antisense strand to SEQ ID NO: 63888
aaucaccugcucauucugg

SEQ ID NO: 63970 - RNA, 19 nt, Artificial Sequence
  Description of Artificial Sequence: Synthetic oligonucleotide
  Sense strand starting at position 3723 of SEQ ID NO: 792
ccgugcaaaugucaacuua

SEQ ID NO: 63971 - RNA, 19 nt, Artificial Sequence
  Description of Artificial Sequence: Synthetic oligonucleotide
  Antisense strand to SEQ ID NO: 63890
uaaguugacauuugcacgg

SEQ ID NO: 63972 - RNA, 19 nt, Artificial Sequence
  Description of Artificial Sequence: Synthetic oligonucleotide
  Sense strand starting at position 3716 of SEQ ID NO: 792
caaagcuccgugcaaaugu

SEQ ID NO: 63973 - RNA, 19 nt, Artificial Sequence
  Description of Artificial Sequence: Synthetic oligonucleotide
  Antisense strand to SEQ ID NO: 63892
acauuugcacggagcuuug

SEQ ID NO: 63974 - RNA, 19 nt, Artificial Sequence
  Description of Artificial Sequence: Synthetic oligonucleotide
  Sense strand starting at position 3632 of SEQ ID NO: 792
ggccuucgcucaggguauu

SEQ ID NO: 63975 - RNA, 19 nt, Artificial Sequence
  Description of Artificial Sequence: Synthetic oligonucleotide
  Antisense strand to SEQ ID NO: 63894
aauacccugagcgaaggcc

SEQ ID NO: 63976 - RNA, 19 nt, Artificial Sequence
  Description of Artificial Sequence: Synthetic oligonucleotide
  Sense strand starting at position 3599 of SEQ ID NO: 792
gagcuagguuucccaguca

SEQ ID NO: 63977 - RNA, 19 nt, Artificial Sequence
  Description of Artificial Sequence: Synthetic oligonucleotide
  Antisense strand to SEQ ID NO: 63896
ugacugggaaaccuagcuc

SEQ ID NO: 63978 - RNA, 19 nt, Artificial Sequence
  Description of Artificial Sequence: Synthetic oligonucleotide
  Sense strand starting at position 3509 of SEQ ID NO: 792
gucagaugcuaaucagauc

SEQ ID NO: 63979 - RNA, 19 nt, Artificial Sequence
  Description of Artificial Sequence: Synthetic oligonucleotide
  Antisense strand to SEQ ID NO: 63898
gaucugauuagcaucugac

SEQ ID NO: 63980 - RNA, 19 nt, Artificial Sequence
  Description of Artificial Sequence: Synthetic oligonucleotide
  Sense strand starting at position 3503 of SEQ ID NO: 792
ucaggagucagaugcuaau

SEQ ID NO: 63981 - RNA, 19 nt, Artificial Sequence
  Description of Artificial Sequence: Synthetic oligonucleotide
  Antisense strand to SEQ ID NO: 63900
auuagcaucugacuccuga

SEQ ID NO: 63982 - RNA, 19 nt, Artificial Sequence
  Description of Artificial Sequence: Synthetic oligonucleotide
  Sense strand starting at position 3390 of SEQ ID NO: 792
cucaaucaguuccuggaua

SEQ ID NO: 63983 - RNA, 19 nt, Artificial Sequence
  Description of Artificial Sequence: Synthetic oligonucleotide
  Antisense strand to SEQ ID NO: 63902
uauccaggaacugauugag

SEQ ID NO: 63984 - RNA, 19 nt, Artificial Sequence
  Description of Artificial Sequence: Synthetic oligonucleotide
  Sense strand starting at position 3380 of SEQ ID NO: 792
ggagaugcuucucaaucag

SEQ ID NO: 63985 - RNA, 19 nt, Artificial Sequence
  Description of Artificial Sequence: Synthetic oligonucleotide
  Antisense strand to SEQ ID NO: 63904
cugauugagaagcaucucc

SEQ ID NO: 63986 - RNA, 19 nt, Artificial Sequence
  Description of Artificial Sequence: Synthetic oligonucleotide
  Sense strand starting at position 3379 of SEQ ID NO: 792
gggagaugcuucucaauca

SEQ ID NO: 63987 - RNA, 19 nt, Artificial Sequence
  Description of Artificial Sequence: Synthetic oligonucleotide
  Antisense strand to SEQ ID NO: 63906
ugauugagaagcaucuccc

SEQ ID NO: 63988 - RNA, 19 nt, Artificial Sequence
  Description of Artificial Sequence: Synthetic oligonucleotide
  Sense strand starting at position 3348 of SEQ ID NO: 792
acaagcacuugucuaaagu

SEQ ID NO: 63989 - RNA, 19 nt, Artificial Sequence
  Description of Artificial Sequence: Synthetic oligonucleotide
  Antisense strand to SEQ ID NO: 63908
acuuuagacaagugcuugu

SEQ ID NO: 63990 - RNA, 19 nt, Artificial Sequence
  Description of Artificial Sequence: Synthetic oligonucleotide
  Sense strand starting at position 3270 of SEQ ID NO: 792
ccaggugaugcacgagaga

SEQ ID NO: 63991 - RNA, 19 nt, Artificial Sequence
  Description of Artificial Sequence: Synthetic oligonucleotide
  Antisense strand to SEQ ID NO: 63910
ucucucgugcaucaccugg

SEQ ID NO: 63992 - RNA, 19 nt, Artificial Sequence
  Description of Artificial Sequence: Synthetic oligonucleotide
  Sense strand starting at position 3181 of SEQ ID NO: 792
gcuuguuaacauugcugga

SEQ ID NO: 63993 - RNA, 19 nt, Artificial Sequence
  Description of Artificial Sequence: Synthetic oligonucleotide
  Antisense strand to SEQ ID NO: 63912
uccagcaauguuaacaagc

SEQ ID NO: 63994 - RNA, 19 nt, Artificial Sequence
  Description of Artificial Sequence: Synthetic oligonucleotide
  Sense strand starting at position 3175 of SEQ ID NO: 792
ccuagagcuuguuaacauu

SEQ ID NO: 63995 - RNA, 19 nt, Artificial Sequence
  Description of Artificial Sequence: Synthetic oligonucleotide
  Antisense strand to SEQ ID NO: 63914
aauguuaacaagcucuagg

SEQ ID NO: 63996 - RNA, 19 nt, Artificial Sequence
  Description of Artificial Sequence: Synthetic oligonucleotide
  Sense strand starting at position 3135 of SEQ ID NO: 792
agcuccaguucucaaaguu

SEQ ID NO: 63997 - RNA, 19 nt, Artificial Sequence
  Description of Artificial Sequence: Synthetic oligonucleotide
  Antisense strand to SEQ ID NO: 63916
aacuuugagaacuggagcu

SEQ ID NO: 63998 - RNA, 19 nt, Artificial Sequence
  Description of Artificial Sequence: Synthetic oligonucleotide
  Sense strand starting at position 3134 of SEQ ID NO: 792
gagcuccaguucucaaagu

SEQ ID NO: 63999 - RNA, 19 nt, Artificial Sequence
  Description of Artificial Sequence: Synthetic oligonucleotide
  Antisense strand to SEQ ID NO: 63918
acuuugagaacuggagcuc

SEQ ID NO: 64000 - RNA, 19 nt, Artificial Sequence
  Description of Artificial Sequence: Synthetic oligonucleotide
  Sense strand starting at position 3112 of SEQ ID NO: 792
ggugccuguggucauaguu

SEQ ID NO: 64001 - RNA, 19 nt, Artificial Sequence
  Description of Artificial Sequence: Synthetic oligonucleotide
  Antisense strand to SEQ ID NO: 63920
aacuaugaccacaggcacc

SEQ ID NO: 64002 - RNA, 19 nt, Artificial Sequence
  Description of Artificial Sequence: Synthetic oligonucleotide
  Sense strand starting at position 3109 of SEQ ID NO: 792
cauggugccuguggucaua

SEQ ID NO: 64003 - RNA, 19 nt, Artificial Sequence
  Description of Artificial Sequence: Synthetic oligonucleotide
  Antisense strand to SEQ ID NO: 63922
uaugaccacaggcaccaug

SEQ ID NO: 64004 - RNA, 19 nt, Artificial Sequence
  Description of Artificial Sequence: Synthetic oligonucleotide
  Sense strand starting at position 3041 of SEQ ID NO: 792
caagaauaccuggguucua

SEQ ID NO: 64005 - RNA, 19 nt, Artificial Sequence
  Description of Artificial Sequence: Synthetic oligonucleotide
  Antisense strand to SEQ ID NO: 63924
uagaacccagguauucuug

SEQ ID NO: 64006 - RNA, 19 nt, Artificial Sequence
  Description of Artificial Sequence: Synthetic oligonucleotide
  Sense strand starting at position 3040 of SEQ ID NO: 792
ucaagaauaccuggguucu

SEQ ID NO: 64007 - RNA, 19 nt, Artificial Sequence
  Description of Artificial Sequence: Synthetic oligonucleotide
  Antisense strand to SEQ ID NO: 63926
agaacccagguauucuuga

SEQ ID NO: 64008 - RNA, 19 nt, Artificial Sequence
  Description of Artificial Sequence: Synthetic oligonucleotide
  Sense strand starting at position 2931 of SEQ ID NO: 792
uuuguagacuccugacguu

SEQ ID NO: 64009 - RNA, 19 nt, Artificial Sequence
  Description of Artificial Sequence: Synthetic oligonucleotide
  Antisense strand to SEQ ID NO: 63928
aacgucaggagucuacaaa

SEQ ID NO: 64010 - RNA, 19 nt, Artificial Sequence
  Description of Artificial Sequence: Synthetic oligonucleotide
  Sense strand starting at position 2820 of SEQ ID NO: 792
gcgcgucaccgguuauugu

SEQ ID NO: 64011 - RNA, 19 nt, Artificial Sequence
  Description of Artificial Sequence: Synthetic oligonucleotide
  Antisense strand to SEQ ID NO: 63930
acaauaaccggugacgcgc

SEQ ID NO: 64012 - RNA, 19 nt, Artificial Sequence
  Description of Artificial Sequence: Synthetic oligonucleotide
  Sense strand starting at position 2818 of SEQ ID NO: 792
aagcgcgucaccgguuauu

SEQ ID NO: 64013 - RNA, 19 nt, Artificial Sequence
  Description of Artificial Sequence: Synthetic oligonucleotide
  Antisense strand to SEQ ID NO: 63932
aauaaccggugacgcgcuu

SEQ ID NO: 64014 - RNA, 19 nt, Artificial Sequence
  Description of Artificial Sequence: Synthetic oligonucleotide
  Sense strand starting at position 1163 of SEQ ID NO: 792
ucauuauuccagcgcucua

SEQ ID NO: 64015 - RNA, 19 nt, Artificial Sequence
  Description of Artificial Sequence: Synthetic oligonucleotide
  Antisense strand to SEQ ID NO: 63934
uagagcgcuggaauaauga

SEQ ID NO: 64016 - RNA, 19 nt, Artificial Sequence
  Description of Artificial Sequence: Synthetic oligonucleotide
  Sense strand starting at position 1162 of SEQ ID NO: 792
gucauuauuccagcgcucu

SEQ ID NO: 64017 - RNA, 19 nt, Artificial Sequence
  Description of Artificial Sequence: Synthetic oligonucleotide
  Antisense strand to SEQ ID NO: 63936
agagcgcuggaauaaugac

SEQ ID NO: 64018 - RNA, 19 nt, Artificial Sequence
  Description of Artificial Sequence: Synthetic oligonucleotide
  Sense strand starting at position 1111 of SEQ ID NO: 792
caggaagcgcaaugauaga

SEQ ID NO: 64019 - RNA, 19 nt, Artificial Sequence
  Description of Artificial Sequence: Synthetic oligonucleotide
  Antisense strand to SEQ ID NO: 63938
ucuaucauugcgcuuccug

SEQ ID NO: 64020 - RNA, 19 nt, Artificial Sequence
  Description of Artificial Sequence: Synthetic oligonucleotide
  Sense strand starting at position 609 of SEQ ID NO: 792
gcugacaguucgccuccua

SEQ ID NO: 64021 - RNA, 19 nt, Artificial Sequence
  Description of Artificial Sequence: Synthetic oligonucleotide
  Antisense strand to SEQ ID NO: 63940
uaggaggcgaacugucagc

SEQ ID NO: 64022 - RNA, 19 nt, Artificial Sequence
  Description of Artificial Sequence: Synthetic oligonucleotide
  Sense strand starting at position 193 of SEQ ID NO: 792
cucuguacccuugaggaca

SEQ ID NO: 64023 - RNA, 19 nt, Artificial Sequence
  Description of Artificial Sequence: Synthetic oligonucleotide
  Antisense strand to SEQ ID NO: 63942
uguccucaaggguacagag

SEQ ID NO: 64024 - RNA, 19 nt, Artificial Sequence
  Description of Artificial Sequence: Synthetic oligonucleotide
  Sense strand starting at position 135 of SEQ ID NO: 792
ggaguccuaagcuagcuaa

SEQ ID NO: 64025 - RNA, 19 nt, Artificial Sequence
  Description of Artificial Sequence: Synthetic oligonucleotide
  Antisense strand to SEQ ID NO: 63944
uuagcuagcuuaggacucc

SEQ ID NO: 64026 - RNA, 19 nt, Artificial Sequence
  Description of Artificial Sequence: Synthetic oligonucleotide
  Sense strand starting at position 22 of SEQ ID NO: 792
acagaaugguucugacacu

SEQ ID NO: 64027 - RNA, 19 nt, Artificial Sequence
  Description of Artificial Sequence: Synthetic oligonucleotide
  Antisense strand to SEQ ID NO: 63946
agugucagaaccauucugu

SEQ ID NO: 64028 - RNA, 19 nt, Artificial Sequence
  Description of Artificial Sequence: Synthetic oligonucleotide
  Sense strand starting at position 3773 of SEQ ID NO: 793
ugggaauugucagcaagaa

SEQ ID NO: 64029 - RNA, 19 nt, Artificial Sequence
  Description of Artificial Sequence: Synthetic oligonucleotide
  Antisense strand to SEQ ID NO: 63948
uucuugcugacaauuccca

SEQ ID NO: 64030 - RNA, 19 nt, Artificial Sequence
  Description of Artificial Sequence: Synthetic oligonucleotide
  Sense strand starting at position 3722 of SEQ ID NO: 793
uacauacgagucuagaauu

SEQ ID NO: 64031 - RNA, 19 nt, Artificial Sequence
  Description of Artificial Sequence: Synthetic oligonucleotide
  Antisense strand to SEQ ID NO: 63950
aauucuagacucguaugua

SEQ ID NO: 64032 - RNA, 19 nt, Artificial Sequence
  Description of Artificial Sequence: Synthetic oligonucleotide
  Sense strand starting at position 3676 of SEQ ID NO: 793
ugaauauguaauggaaguu

SEQ ID NO: 64033 - RNA, 19 nt, Artificial Sequence
  Description of Artificial Sequence: Synthetic oligonucleotide
  Antisense strand to SEQ ID NO: 63952
aacuuccauuacauauuca

SEQ ID NO: 64034 - RNA, 19 nt, Artificial Sequence
  Description of Artificial Sequence: Synthetic oligonucleotide
  Sense strand starting at position 3589 of SEQ ID NO: 793
uaaguuuccgacugaggaa

SEQ ID NO: 64035 - RNA, 19 nt, Artificial Sequence
  Description of Artificial Sequence: Synthetic oligonucleotide
  Antisense strand to SEQ ID NO: 63954
uuccucagucggaaacuua

SEQ ID NO: 64036 - RNA, 19 nt, Artificial Sequence
  Description of Artificial Sequence: Synthetic oligonucleotide
  Sense strand starting at position 3576 of SEQ ID NO: 793
caauuaagauggguaaguu

SEQ ID NO: 64037 - RNA, 19 nt, Artificial Sequence
  Description of Artificial Sequence: Synthetic oligonucleotide
  Antisense strand to SEQ ID NO: 63956
aacuuacccaucuuaauug

SEQ ID NO: 64038 - RNA, 19 nt, Artificial Sequence
  Description of Artificial Sequence: Synthetic oligonucleotide
  Sense strand starting at position 3575 of SEQ ID NO: 793
ucaauuaagauggguaagu

SEQ ID NO: 64039 - RNA, 19 nt, Artificial Sequence
  Description of Artificial Sequence: Synthetic oligonucleotide
  Antisense strand to SEQ ID NO: 63958
acuuacccaucuuaauuga

SEQ ID NO: 64040 - RNA, 19 nt, Artificial Sequence
  Description of Artificial Sequence: Synthetic oligonucleotide
  Sense strand starting at position 3547 of SEQ ID NO: 793
aaaugacugccuugggaug

SEQ ID NO: 64041 - RNA, 19 nt, Artificial Sequence
  Description of Artificial Sequence: Synthetic oligonucleotide
  Antisense strand to SEQ ID NO: 63960
caucccaaggcagucauuu

SEQ ID NO: 64042 - RNA, 19 nt, Artificial Sequence
  Description of Artificial Sequence: Synthetic oligonucleotide
  Sense strand starting at position 3515 of SEQ ID NO: 793
ggguguggacuguaagaga

SEQ ID NO: 64043 - RNA, 19 nt, Artificial Sequence
  Description of Artificial Sequence: Synthetic oligonucleotide
  Antisense strand to SEQ ID NO: 63962
ucucuuacaguccacaccc

SEQ ID NO: 64044 - RNA, 19 nt, Artificial Sequence
  Description of Artificial Sequence: Synthetic oligonucleotide
  Sense strand starting at position 3506 of SEQ ID NO: 793
ggaauuaauggguguggac

SEQ ID NO: 64045 - RNA, 19 nt, Artificial Sequence
  Description of Artificial Sequence: Synthetic oligonucleotide
  Antisense strand to SEQ ID NO: 63964
guccacacccauuaauucc

SEQ ID NO: 64046 - RNA, 19 nt, Artificial Sequence
  Description of Artificial Sequence: Synthetic oligonucleotide
  Sense strand starting at position 3494 of SEQ ID NO: 793
aaaugugcugauggaauua

SEQ ID NO: 64047 - RNA, 19 nt, Artificial Sequence
  Description of Artificial Sequence: Synthetic oligonucleotide
  Antisense strand to SEQ ID NO: 63966
uaauuccaucagcacauuu

SEQ ID NO: 64048 - RNA, 19 nt, Artificial Sequence
  Description of Artificial Sequence: Synthetic oligonucleotide
  Sense strand starting at position 3447 of SEQ ID NO: 793
ugagaaguuggucagauuc

SEQ ID NO: 64049 - RNA, 19 nt, Artificial Sequence
  Description of Artificial Sequence: Synthetic oligonucleotide
  Antisense strand to SEQ ID NO: 63968
gaaucugaccaacuucuca

SEQ ID NO: 64050 - RNA, 19 nt, Artificial Sequence
  Description of Artificial Sequence: Synthetic oligonucleotide
  Sense strand starting at position 3415 of SEQ ID NO: 793
aggcuugaccaggauggua

SEQ ID NO: 64051 - RNA, 19 nt, Artificial Sequence
  Description of Artificial Sequence: Synthetic oligonucleotide
  Antisense strand to SEQ ID NO: 63970
uaccauccuggucaagccu

SEQ ID NO: 64052 - RNA, 19 nt, Artificial Sequence
  Description of Artificial Sequence: Synthetic oligonucleotide
  Sense strand starting at position 3291 of SEQ ID NO: 793
uuggcuuauguuuaaagag

SEQ ID NO: 64053 - RNA, 19 nt, Artificial Sequence
  Description of Artificial Sequence: Synthetic oligonucleotide
  Antisense strand to SEQ ID NO: 63972
cucuuuaaacauaagccaa

SEQ ID NO: 64054 - RNA, 19 nt, Artificial Sequence
  Description of Artificial Sequence: Synthetic oligonucleotide
  Sense strand starting at position 3160 of SEQ ID NO: 793
cagagacuugagugaaagu

SEQ ID NO: 64055 - RNA, 19 nt, Artificial Sequence
  Description of Artificial Sequence: Synthetic oligonucleotide
  Antisense strand to SEQ ID NO: 63974
acuuucacucaagucucug

SEQ ID NO: 64056 - RNA, 19 nt, Artificial Sequence
  Description of Artificial Sequence: Synthetic oligonucleotide
  Sense strand starting at position 3072 of SEQ ID NO: 793
ggcagauuagauuacucuu

SEQ ID NO: 64057 - RNA, 19 nt, Artificial Sequence
  Description of Artificial Sequence: Synthetic oligonucleotide
  Antisense strand to SEQ ID NO: 63976
aagaguaaucuaaucugcc

SEQ ID NO: 64058 - RNA, 19 nt, Artificial Sequence
  Description of Artificial Sequence: Synthetic oligonucleotide
  Sense strand starting at position 2956 of SEQ ID NO: 793
ucauuagguacguagacau

SEQ ID NO: 64059 - RNA, 19 nt, Artificial Sequence
  Description of Artificial Sequence: Synthetic oligonucleotide
  Antisense strand to SEQ ID NO: 63978
augucuacguaccuaauga

SEQ ID NO: 64060 - RNA, 19 nt, Artificial Sequence
  Description of Artificial Sequence: Synthetic oligonucleotide
  Sense strand starting at position 2815 of SEQ ID NO: 793
agagaauagugaguuaguc

SEQ ID NO: 64061 - RNA, 19 nt, Artificial Sequence
  Description of Artificial Sequence: Synthetic oligonucleotide
  Antisense strand to SEQ ID NO: 63980
gacuaacucacuauucucu

SEQ ID NO: 64062 - RNA, 19 nt, Artificial Sequence
  Description of Artificial Sequence: Synthetic oligonucleotide
  Sense strand starting at position 2749 of SEQ ID NO: 793
guuauagaacacgagguuu

SEQ ID NO: 64063 - RNA, 19 nt, Artificial Sequence
  Description of Artificial Sequence: Synthetic oligonucleotide
  Antisense strand to SEQ ID NO: 63982
aaaccucguguucuauaac

SEQ ID NO: 64064 - RNA, 19 nt, Artificial Sequence
  Description of Artificial Sequence: Synthetic oligonucleotide
  Sense strand starting at position 2654 of SEQ ID NO: 793
guauaugcagauuaaucua

SEQ ID NO: 64065 - RNA, 19 nt, Artificial Sequence
  Description of Artificial Sequence: Synthetic oligonucleotide
  Antisense strand to SEQ ID NO: 63984
uagauuaaucugcauauac

SEQ ID NO: 64066 - RNA, 19 nt, Artificial Sequence
  Description of Artificial Sequence: Synthetic oligonucleotide
  Sense strand starting at position 2600 of SEQ ID NO: 793
gcaaccaggcuccaaauau

SEQ ID NO: 64067 - RNA, 19 nt, Artificial Sequence
  Description of Artificial Sequence: Synthetic oligonucleotide
  Antisense strand to SEQ ID NO: 63986
auauuuggagccugguugc

SEQ ID NO: 64068 - RNA, 19 nt, Artificial Sequence
  Description of Artificial Sequence: Synthetic oligonucleotide
  Sense strand starting at position 2563 of SEQ ID NO: 793
caaauagugucuuugaaag

SEQ ID NO: 64069 - RNA, 19 nt, Artificial Sequence
  Description of Artificial Sequence: Synthetic oligonucleotide
  Antisense strand to SEQ ID NO: 63988
cuuucaaagacacuauuug

SEQ ID NO: 64070 - RNA, 19 nt, Artificial Sequence
  Description of Artificial Sequence: Synthetic oligonucleotide
  Sense strand starting at position 2141 of SEQ ID NO: 793
cccagcgauuugucugacu

SEQ ID NO: 64071 - RNA, 19 nt, Artificial Sequence
  Description of Artificial Sequence: Synthetic oligonucleotide
  Antisense strand to SEQ ID NO: 63990
agucagacaaaucgcuggg

SEQ ID NO: 64072 - RNA, 19 nt, Artificial Sequence
  Description of Artificial Sequence: Synthetic oligonucleotide
  Sense strand starting at position 1815 of SEQ ID NO: 793
ugcauugcccaggagaacu

SEQ ID NO: 64073 - RNA, 19 nt, Artificial Sequence
  Description of Artificial Sequence: Synthetic oligonucleotide
  Antisense strand to SEQ ID NO: 63992
aguucuccugggcaaugca

SEQ ID NO: 64074 - RNA, 19 nt, Artificial Sequence
  Description of Artificial Sequence: Synthetic oligonucleotide
  Sense strand starting at position 1737 of SEQ ID NO: 793
gucauaggccuacagauga

SEQ ID NO: 64075 - RNA, 19 nt, Artificial Sequence
  Description of Artificial Sequence: Synthetic oligonucleotide
  Antisense strand to SEQ ID NO: 63994
ucaucuguaggccuaugac

SEQ ID NO: 64076 - RNA, 19 nt, Artificial Sequence
  Description of Artificial Sequence: Synthetic oligonucleotide
  Sense strand starting at position 1455 of SEQ ID NO: 793
aguagaugaacguaaugua

SEQ ID NO: 64077 - RNA, 19 nt, Artificial Sequence
  Description of Artificial Sequence: Synthetic oligonucleotide
  Antisense strand to SEQ ID NO: 63996
uacauuacguucaucuacu

SEQ ID NO: 64078 - RNA, 19 nt, Artificial Sequence
  Description of Artificial Sequence: Synthetic oligonucleotide
  Sense strand starting at position 1334 of SEQ ID NO: 793
acagguguacagggauuaa

SEQ ID NO: 64079 - RNA, 19 nt, Artificial Sequence
  Description of Artificial Sequence: Synthetic oligonucleotide
  Antisense strand to SEQ ID NO: 63998
uuaaucccuguacaccugu

SEQ ID NO: 64080 - RNA, 19 nt, Artificial Sequence
  Description of Artificial Sequence: Synthetic oligonucleotide
  Sense strand starting at position 1327 of SEQ ID NO: 793
uuauuagacagguguacag

SEQ ID NO: 64081 - RNA, 19 nt, Artificial Sequence
  Description of Artificial Sequence: Synthetic oligonucleotide
  Antisense strand to SEQ ID NO: 64000
cuguacaccugucuaauaa

SEQ ID NO: 64082 - RNA, 19 nt, Artificial Sequence
  Description of Artificial Sequence: Synthetic oligonucleotide
  Sense strand starting at position 1241 of SEQ ID NO: 793
ucuaauaguccugaaaguu

SEQ ID NO: 64083 - RNA, 19 nt, Artificial Sequence
  Description of Artificial Sequence: Synthetic oligonucleotide
  Antisense strand to SEQ ID NO: 64002
aacuuucaggacuauuaga

SEQ ID NO: 64084 - RNA, 19 nt, Artificial Sequence
  Description of Artificial Sequence: Synthetic oligonucleotide
  Sense strand starting at position 1226 of SEQ ID NO: 793
acuugucagcuagaaucua

SEQ ID NO: 64085 - RNA, 19 nt, Artificial Sequence
  Description of Artificial Sequence: Synthetic oligonucleotide
  Antisense strand to SEQ ID NO: 64004
uagauucuagcugacaagu

SEQ ID NO: 64086 - RNA, 19 nt, Artificial Sequence
  Description of Artificial Sequence: Synthetic oligonucleotide
  Sense strand starting at position 1222 of SEQ ID NO: 793
cagaacuugucagcuagaa

SEQ ID NO: 64087 - RNA, 19 nt, Artificial Sequence
  Description of Artificial Sequence: Synthetic oligonucleotide
  Antisense strand to SEQ ID NO: 64006
uucuagcugacaaguucug

SEQ ID NO: 64088 - RNA, 19 nt, Artificial Sequence
  Description of Artificial Sequence: Synthetic oligonucleotide
  Sense strand starting at position 1156 of SEQ ID NO: 793
uuaguagacaguuggaauc

SEQ ID NO: 64089 - RNA, 19 nt, Artificial Sequence
  Description of Artificial Sequence: Synthetic oligonucleotide
  Antisense strand to SEQ ID NO: 64008
gauuccaacugucuacuaa

SEQ ID NO: 64090 - RNA, 19 nt, Artificial Sequence
  Description of Artificial Sequence: Synthetic oligonucleotide
  Sense strand starting at position 1016 of SEQ ID NO: 793
uauaaauguggguacuuua

SEQ ID NO: 64091 - RNA, 19 nt, Artificial Sequence
  Description of Artificial Sequence: Synthetic oligonucleotide
  Antisense strand to SEQ ID NO: 64010
uaaaguacccacauuuaua

SEQ ID NO: 64092 - RNA, 19 nt, Artificial Sequence
  Description of Artificial Sequence: Synthetic oligonucleotide
  Sense strand starting at position 959 of SEQ ID NO: 793
guguuaggugacuaagaaa

SEQ ID NO: 64093 - RNA, 19 nt, Artificial Sequence
  Description of Artificial Sequence: Synthetic oligonucleotide
  Antisense strand to SEQ ID NO: 64012
uuucuuagucaccuaacac

SEQ ID NO: 64094 - RNA, 19 nt, Artificial Sequence
  Description of Artificial Sequence: Synthetic oligonucleotide
  Sense strand starting at position 827 of SEQ ID NO: 793
aauguuucuugauuaagag

SEQ ID NO: 64095 - RNA, 19 nt, Artificial Sequence
  Description of Artificial Sequence: Synthetic oligonucleotide
  Antisense strand to SEQ ID NO: 64014
cucuuaaucaagaaacauu

SEQ ID NO: 64096 - RNA, 19 nt, Artificial Sequence
  Description of Artificial Sequence: Synthetic oligonucleotide
  Sense strand starting at position 620 of SEQ ID NO: 793
ugagaaagaugauaaagaa

SEQ ID NO: 64097 - RNA, 19 nt, Artificial Sequence
  Description of Artificial Sequence: Synthetic oligonucleotide
  Antisense strand to SEQ ID NO: 64016
uucuuuaucaucuuucuca

SEQ ID NO: 64098 - RNA, 19 nt, Artificial Sequence
  Description of Artificial Sequence: Synthetic oligonucleotide
  Sense strand starting at position 537 of SEQ ID NO: 793
gcuacaaguuugccuauuu

SEQ ID NO: 64099 - RNA, 19 nt, Artificial Sequence
  Description of Artificial Sequence: Synthetic oligonucleotide
  Antisense strand to SEQ ID NO: 64018
aaauaggcaaacuuguagc

SEQ ID NO: 64100 - RNA, 19 nt, Artificial Sequence
  Description of Artificial Sequence: Synthetic oligonucleotide
  Sense strand starting at position 280 of SEQ ID NO: 793
gguagagauaugcagcuua

SEQ ID NO: 64101 - RNA, 19 nt, Artificial Sequence
  Description of Artificial Sequence: Synthetic oligonucleotide
  Antisense strand to SEQ ID NO: 64020
uaagcugcauaucucuacc

SEQ ID NO: 64102 - RNA, 19 nt, Artificial Sequence
  Description of Artificial Sequence: Synthetic oligonucleotide
  Sense strand starting at position 270 of SEQ ID NO: 793
uaaagcuguggguagagau

SEQ ID NO: 64103 - RNA, 19 nt, Artificial Sequence
  Description of Artificial Sequence: Synthetic oligonucleotide
  Antisense strand to SEQ ID NO: 64022
aucucuacccacagcuuua

SEQ ID NO: 64104 - RNA, 19 nt, Artificial Sequence
  Description of Artificial Sequence: Synthetic oligonucleotide
  Sense strand starting at position 163 of SEQ ID NO: 793
aguaacauucuggaaguuu

SEQ ID NO: 64105 - RNA, 19 nt, Artificial Sequence
  Description of Artificial Sequence: Synthetic oligonucleotide
  Antisense strand to SEQ ID NO: 64024
aaacuuccagaauguuacu

SEQ ID NO: 64106 - RNA, 19 nt, Artificial Sequence
  Description of Artificial Sequence: Synthetic oligonucleotide
  Sense strand starting at position 41 of SEQ ID NO: 793
auguaaauugcuggaggaa

SEQ ID NO: 64107 - RNA, 19 nt, Artificial Sequence
  Description of Artificial Sequence: Synthetic oligonucleotide
  Antisense strand to SEQ ID NO: 64026
uuccuccagcaauuuacau

SEQ ID NO: 64108 - RNA, 19 nt, Artificial Sequence
  Description of Artificial Sequence: Synthetic oligonucleotide
  Sense strand starting at position 3773 of SEQ ID NO: 793
ugggaauugucagcaagaa

SEQ ID NO: 64109 - RNA, 19 nt, Artificial Sequence
  Description of Artificial Sequence: Synthetic oligonucleotide
  Antisense strand to SEQ ID NO: 64028
uucuugcugacaauuccca

SEQ ID NO: 64110 - RNA, 19 nt, Artificial Sequence
  Description of Artificial Sequence: Synthetic oligonucleotide
  Sense strand starting at position 3722 of SEQ ID NO: 793
uacauacgagucuagaauu

SEQ ID NO: 64111 - RNA, 19 nt, Artificial Sequence
  Description of Artificial Sequence: Synthetic oligonucleotide
  Antisense strand to SEQ ID NO: 64030
aauucuagacucguaugua

SEQ ID NO: 64112 - RNA, 19 nt, Artificial Sequence
  Description of Artificial Sequence: Synthetic oligonucleotide
  Sense strand starting at position 3676 of SEQ ID NO: 793
ugaauauguaauggaaguu

SEQ ID NO: 64113 - RNA, 19 nt, Artificial Sequence
  Description of Artificial Sequence: Synthetic oligonucleotide
  Antisense strand to SEQ ID NO: 64032
aacuuccauuacauauuca

SEQ ID NO: 64114 - RNA, 19 nt, Artificial Sequence
  Description of Artificial Sequence: Synthetic oligonucleotide
  Sense strand starting at position 3589 of SEQ ID NO: 793
uaaguuuccgacugaggaa

SEQ ID NO: 64115 - RNA, 19 nt, Artificial Sequence
  Description of Artificial Sequence: Synthetic oligonucleotide
  Antisense strand to SEQ ID NO: 64034
uuccucagucggaaacuua

SEQ ID NO: 64116 - RNA, 19 nt, Artificial Sequence
  Description of Artificial Sequence: Synthetic oligonucleotide
  Sense strand starting at position 3576 of SEQ ID NO: 793
caauuaagauggguaaguu

SEQ ID NO: 64117 - RNA, 19 nt, Artificial Sequence
  Description of Artificial Sequence: Synthetic oligonucleotide
  Antisense strand to SEQ ID NO: 64036
aacuuacccaucuuaauug

SEQ ID NO: 64118 - RNA, 19 nt, Artificial Sequence
  Description of Artificial Sequence: Synthetic oligonucleotide
  Sense strand starting at position 3575 of SEQ ID NO: 793
ucaauuaagauggguaagu

SEQ ID NO: 64119 - RNA, 19 nt, Artificial Sequence
  Description of Artificial Sequence: Synthetic oligonucleotide
  Antisense strand to SEQ ID NO: 64038
acuuacccaucuuaauuga

SEQ ID NO: 64120 - RNA, 19 nt, Artificial Sequence
  Description of Artificial Sequence: Synthetic oligonucleotide
  Sense strand starting at position 3547 of SEQ ID NO: 793
aaaugacugccuugggaug

SEQ ID NO: 64121 - RNA, 19 nt, Artificial Sequence
  Description of Artificial Sequence: Synthetic oligonucleotide
  Antisense strand to SEQ ID NO: 64040
caucccaaggcagucauuu

SEQ ID NO: 64122 - RNA, 19 nt, Artificial Sequence
  Description of Artificial Sequence: Synthetic oligonucleotide
  Sense strand starting at position 3515 of SEQ ID NO: 793
ggguguggacuguaagaga

SEQ ID NO: 64123 - RNA, 19 nt, Artificial Sequence
  Description of Artificial Sequence: Synthetic oligonucleotide
  Antisense strand to SEQ ID NO: 64042
ucucuuacaguccacaccc

SEQ ID NO: 64124 - RNA, 19 nt, Artificial Sequence
  Description of Artificial Sequence: Synthetic oligonucleotide
  Sense strand starting at position 3506 of SEQ ID NO: 793
ggaauuaauggguguggac

SEQ ID NO: 64125 - RNA, 19 nt, Artificial Sequence
  Description of Artificial Sequence: Synthetic oligonucleotide
  Antisense strand to SEQ ID NO: 64044
guccacacccauuaauucc

SEQ ID NO: 64126 - RNA, 19 nt, Artificial Sequence
  Description of Artificial Sequence: Synthetic oligonucleotide
  Sense strand starting at position 3494 of SEQ ID NO: 793
aaaugugcugauggaauua

SEQ ID NO: 64127 - RNA, 19 nt, Artificial Sequence
  Description of Artificial Sequence: Synthetic oligonucleotide
  Antisense strand to SEQ ID NO: 64046
uaauuccaucagcacauuu

SEQ ID NO: 64128 - RNA, 19 nt, Artificial Sequence
  Description of Artificial Sequence: Synthetic oligonucleotide
  Sense strand starting at position 3447 of SEQ ID NO: 793
ugagaaguuggucagauuc

SEQ ID NO: 64129 - RNA, 19 nt, Artificial Sequence
  Description of Artificial Sequence: Synthetic oligonucleotide
  Antisense strand to SEQ ID NO: 64048
gaaucugaccaacuucuca

SEQ ID NO: 64130 - RNA, 19 nt, Artificial Sequence
  Description of Artificial Sequence: Synthetic oligonucleotide
  Sense strand starting at position 3415 of SEQ ID NO: 793
aggcuugaccaggauggua

SEQ ID NO: 64131 - RNA, 19 nt, Artificial Sequence
  Description of Artificial Sequence: Synthetic oligonucleotide
  Antisense strand to SEQ ID NO: 64050
uaccauccuggucaagccu

SEQ ID NO: 64132 - RNA, 19 nt, Artificial Sequence
  Description of Artificial Sequence: Synthetic oligonucleotide
  Sense strand starting at position 3291 of SEQ ID NO: 793
uuggcuuauguuuaaagag

SEQ ID NO: 64133 - RNA, 19 nt, Artificial Sequence
  Description of Artificial Sequence: Synthetic oligonucleotide
  Antisense strand to SEQ ID NO: 64052
cucuuuaaacauaagccaa

SEQ ID NO: 64134 - RNA, 19 nt, Artificial Sequence
  Description of Artificial Sequence: Synthetic oligonucleotide
  Sense strand starting at position 3160 of SEQ ID NO: 793
cagagacuugagugaaagu

SEQ ID NO: 64135 - RNA, 19 nt, Artificial Sequence
  Description of Artificial Sequence: Synthetic oligonucleotide
  Antisense strand to SEQ ID NO: 64054
acuuucacucaagucucug

SEQ ID NO: 64136 - RNA, 19 nt, Artificial Sequence
  Description of Artificial Sequence: Synthetic oligonucleotide
  Sense strand starting at position 3072 of SEQ ID NO: 793
ggcagauuagauuacucuu

SEQ ID NO: 64137 - RNA, 19 nt, Artificial Sequence
  Description of Artificial Sequence: Synthetic oligonucleotide
  Antisense strand to SEQ ID NO: 64056
aagaguaaucuaaucugcc

SEQ ID NO: 64138 - RNA, 19 nt, Artificial Sequence
  Description of Artificial Sequence: Synthetic oligonucleotide
  Sense strand starting at position 2956 of SEQ ID NO: 793
ucauuagguacguagacau

SEQ ID NO: 64139 - RNA, 19 nt, Artificial Sequence
  Description of Artificial Sequence: Synthetic oligonucleotide
  Antisense strand to SEQ ID NO: 64058
augucuacguaccuaauga

SEQ ID NO: 64140 - RNA, 19 nt, Artificial Sequence
  Description of Artificial Sequence: Synthetic oligonucleotide
  Sense strand starting at position 2815 of SEQ ID NO: 793
agagaauagugaguuaguc

SEQ ID NO: 64141 - RNA, 19 nt, Artificial Sequence
  Description of Artificial Sequence: Synthetic oligonucleotide
  Antisense strand to SEQ ID NO: 64060
gacuaacucacuauucucu

SEQ ID NO: 64142 - RNA, 19 nt, Artificial Sequence
  Description of Artificial Sequence: Synthetic oligonucleotide
  Sense strand starting at position 2749 of SEQ ID NO: 793
guuauagaacacgagguuu

SEQ ID NO: 64143 - RNA, 19 nt, Artificial Sequence
  Description of Artificial Sequence: Synthetic oligonucleotide
  Antisense strand to SEQ ID NO: 64062
aaaccucguguucuauaac

SEQ ID NO: 64144 - RNA, 19 nt, Artificial Sequence
  Description of Artificial Sequence: Synthetic oligonucleotide
  Sense strand starting at position 2654 of SEQ ID NO: 793
guauaugcagauuaaucua

SEQ ID NO: 64145 - RNA, 19 nt, Artificial Sequence
  Description of Artificial Sequence: Synthetic oligonucleotide
  Antisense strand to SEQ ID NO: 64064
uagauuaaucugcauauac

SEQ ID NO: 64146 - RNA, 19 nt, Artificial Sequence
  Description of Artificial Sequence: Synthetic oligonucleotide
  Sense strand starting at position 2600 of SEQ ID NO: 793
gcaaccaggcuccaaauau

SEQ ID NO: 64147 - RNA, 19 nt, Artificial Sequence
  Description of Artificial Sequence: Synthetic oligonucleotide
  Antisense strand to SEQ ID NO: 64066
auauuuggagccugguugc

SEQ ID NO: 64148 - RNA, 19 nt, Artificial Sequence
  Description of Artificial Sequence: Synthetic oligonucleotide
  Sense strand starting at position 2563 of SEQ ID NO: 793
caaauagugucuuugaaag

SEQ ID NO: 64149 - RNA, 19 nt, Artificial Sequence
  Description of Artificial Sequence: Synthetic oligonucleotide
  Antisense strand to SEQ ID NO: 64068
cuuucaaagacacuauuug

SEQ ID NO: 64150 - RNA, 19 nt, Artificial Sequence
  Description of Artificial Sequence: Synthetic oligonucleotide
  Sense strand starting at position 2141 of SEQ ID NO: 793
cccagcgauuugucugacu

SEQ ID NO: 64151 - RNA, 19 nt, Artificial Sequence
  Description of Artificial Sequence: Synthetic oligonucleotide
  Antisense strand to SEQ ID NO: 64070
agucagacaaaucgcuggg

SEQ ID NO: 64152 - RNA, 19 nt, Artificial Sequence
  Description of Artificial Sequence: Synthetic oligonucleotide
  Sense strand starting at position 1815 of SEQ ID NO: 793
ugcauugcccaggagaacu

SEQ ID NO: 64153 - RNA, 19 nt, Artificial Sequence
  Description of Artificial Sequence: Synthetic oligonucleotide
  Antisense strand to SEQ ID NO: 64072
aguucuccugggcaaugca

SEQ ID NO: 64154 - RNA, 19 nt, Artificial Sequence
  Description of Artificial Sequence: Synthetic oligonucleotide
  Sense strand starting at position 1737 of SEQ ID NO: 793
gucauaggccuacagauga

SEQ ID NO: 64155 - RNA, 19 nt, Artificial Sequence
  Description of Artificial Sequence: Synthetic oligonucleotide
  Antisense strand to SEQ ID NO: 64074
ucaucuguaggccuaugac

SEQ ID NO: 64156 - RNA, 19 nt, Artificial Sequence
  Description of Artificial Sequence: Synthetic oligonucleotide
  Sense strand starting at position 1455 of SEQ ID NO: 793
aguagaugaacguaaugua

SEQ ID NO: 64157 - RNA, 19 nt, Artificial Sequence
  Description of Artificial Sequence: Synthetic oligonucleotide
  Antisense strand to SEQ ID NO: 64076
uacauuacguucaucuacu

SEQ ID NO: 64158 - RNA, 19 nt, Artificial Sequence
  Description of Artificial Sequence: Synthetic oligonucleotide
  Sense strand starting at position 1334 of SEQ ID NO: 793
acagguguacagggauuaa

SEQ ID NO: 64159 - RNA, 19 nt, Artificial Sequence
  Description of Artificial Sequence: Synthetic oligonucleotide
  Antisense strand to SEQ ID NO: 64078
uuaaucccuguacaccugu

SEQ ID NO: 64160 - RNA, 19 nt, Artificial Sequence
  Description of Artificial Sequence: Synthetic oligonucleotide
  Sense strand starting at position 1327 of SEQ ID NO: 793
uuauuagacagguguacag

SEQ ID NO: 64161 - RNA, 19 nt, Artificial Sequence
  Description of Artificial Sequence: Synthetic oligonucleotide
  Antisense strand to SEQ ID NO: 64080
cuguacaccugucuaauaa

SEQ ID NO: 64162 - RNA, 19 nt, Artificial Sequence
  Description of Artificial Sequence: Synthetic oligonucleotide
  Sense strand starting at position 1241 of SEQ ID NO: 793
ucuaauaguccugaaaguu

SEQ ID NO: 64163 - RNA, 19 nt, Artificial Sequence
  Description of Artificial Sequence: Synthetic oligonucleotide
  Antisense strand to SEQ ID NO: 64082
aacuuucaggacuauuaga

SEQ ID NO: 64164 - RNA, 19 nt, Artificial Sequence
  Description of Artificial Sequence: Synthetic oligonucleotide
  Sense strand starting at position 1226 of SEQ ID NO: 793
acuugucagcuagaaucua

SEQ ID NO: 64165 - RNA, 19 nt, Artificial Sequence
  Description of Artificial Sequence: Synthetic oligonucleotide
  Antisense strand to SEQ ID NO: 64084
uagauucuagcugacaagu

SEQ ID NO: 64166 - RNA, 19 nt, Artificial Sequence
  Description of Artificial Sequence: Synthetic oligonucleotide
  Sense strand starting at position 1222 of SEQ ID NO: 793
cagaacuugucagcuagaa

SEQ ID NO: 64167 - RNA, 19 nt, Artificial Sequence
  Description of Artificial Sequence: Synthetic oligonucleotide
  Antisense strand to SEQ ID NO: 64086
uucuagcugacaaguucug

SEQ ID NO: 64168 - RNA, 19 nt, Artificial Sequence
  Description of Artificial Sequence: Synthetic oligonucleotide
  Sense strand starting at position 1156 of SEQ ID NO: 793
uuaguagacaguuggaauc

SEQ ID NO: 64169 - RNA, 19 nt, Artificial Sequence
  Description of Artificial Sequence: Synthetic oligonucleotide
  Antisense strand to SEQ ID NO: 64088
gauuccaacugucuacuaa

SEQ ID NO: 64170 - RNA, 19 nt, Artificial Sequence
  Description of Artificial Sequence: Synthetic oligonucleotide
  Sense strand starting at position 1016 of SEQ ID NO: 793
uauaaauguggguacuuua

SEQ ID NO: 64171 - RNA, 19 nt, Artificial Sequence
  Description of Artificial Sequence: Synthetic oligonucleotide
  Antisense strand to SEQ ID NO: 64090
uaaaguacccacauuuaua

SEQ ID NO: 64172 - RNA, 19 nt, Artificial Sequence
  Description of Artificial Sequence: Synthetic oligonucleotide
  Sense strand starting at position 959 of SEQ ID NO: 793
guguuaggugacuaagaaa

SEQ ID NO: 64173 - RNA, 19 nt, Artificial Sequence
  Description of Artificial Sequence: Synthetic oligonucleotide
  Antisense strand to SEQ ID NO: 64092
uuucuuagucaccuaacac

SEQ ID NO: 64174 - RNA, 19 nt, Artificial Sequence
  Description of Artificial Sequence: Synthetic oligonucleotide
  Sense strand starting at position 827 of SEQ ID NO: 793
aauguuucuugauuaagag

SEQ ID NO: 64175 - RNA, 19 nt, Artificial Sequence
  Description of Artificial Sequence: Synthetic oligonucleotide
  Antisense strand to SEQ ID NO: 64094
cucuuaaucaagaaacauu

SEQ ID NO: 64176 - RNA, 19 nt, Artificial Sequence
  Description of Artificial Sequence: Synthetic oligonucleotide
  Sense strand starting at position 620 of SEQ ID NO: 793
ugagaaagaugauaaagaa

SEQ ID NO: 64177 - RNA, 19 nt, Artificial Sequence
  Description of Artificial Sequence: Synthetic oligonucleotide
  Antisense strand to SEQ ID NO: 64096
uucuuuaucaucuuucuca

SEQ ID NO: 64178 - RNA, 19 nt, Artificial Sequence
  Description of Artificial Sequence: Synthetic oligonucleotide
  Sense strand starting at position 537 of SEQ ID NO: 793
gcuacaaguuugccuauuu

SEQ ID NO: 64179 - RNA, 19 nt, Artificial Sequence
  Description of Artificial Sequence: Synthetic oligonucleotide
  Antisense strand to SEQ ID NO: 64098
aaauaggcaaacuuguagc

SEQ ID NO: 64180 - RNA, 19 nt, Artificial Sequence
  Description of Artificial Sequence: Synthetic oligonucleotide
  Sense strand starting at position 280 of SEQ ID NO: 793
gguagagauaugcagcuua

SEQ ID NO: 64181 - RNA, 19 nt, Artificial Sequence
  Description of Artificial Sequence: Synthetic oligonucleotide
  Antisense strand to SEQ ID NO: 64100
uaagcugcauaucucuacc

SEQ ID NO: 64182 - RNA, 19 nt, Artificial Sequence
  Description of Artificial Sequence: Synthetic oligonucleotide
  Sense strand starting at position 270 of SEQ ID NO: 793
uaaagcuguggguagagau

SEQ ID NO: 64183 - RNA, 19 nt, Artificial Sequence
  Description of Artificial Sequence: Synthetic oligonucleotide
  Antisense strand to SEQ ID NO: 64102
aucucuacccacagcuuua

SEQ ID NO: 64184 - RNA, 19 nt, Artificial Sequence
  Description of Artificial Sequence: Synthetic oligonucleotide
  Sense strand starting at position 163 of SEQ ID NO: 793
aguaacauucuggaaguuu

SEQ ID NO: 64185 - RNA, 19 nt, Artificial Sequence
  Description of Artificial Sequence: Synthetic oligonucleotide
  Antisense strand to SEQ ID NO: 64104
aaacuuccagaauguuacu

SEQ ID NO: 64186 - RNA, 19 nt, Artificial Sequence
  Description of Artificial Sequence: Synthetic oligonucleotide
  Sense strand starting at position 41 of SEQ ID NO: 793
auguaaauugcuggaggaa

SEQ ID NO: 64187 - RNA, 19 nt, Artificial Sequence
  Description of Artificial Sequence: Synthetic oligonucleotide
  Antisense strand to SEQ ID NO: 64106
uuccuccagcaauuuacau

SEQ ID NO: 64188 - RNA, 19 nt, Artificial Sequence
  Description of Artificial Sequence: Synthetic oligonucleotide
  Sense strand starting at position 132 of SEQ ID NO: 794
acaguuaagcaaggauuau

SEQ ID NO: 64189 - RNA, 19 nt, Artificial Sequence
  Description of Artificial Sequence: Synthetic oligonucleotide
  Antisense strand to SEQ ID NO: 64108
auaauccuugcuuaacugu

SEQ ID NO: 64190 - RNA, 19 nt, Artificial Sequence
  Description of Artificial Sequence: Synthetic oligonucleotide
  Sense strand starting at position 224 of SEQ ID NO: 794
cuugcuaaacguuaacaaa

SEQ ID NO: 64191 - RNA, 19 nt, Artificial Sequence
  Description of Artificial Sequence: Synthetic oligonucleotide
  Antisense strand to SEQ ID NO: 64110
uuuguuaacguuuagcaag

SEQ ID NO: 64192 - RNA, 19 nt, Artificial Sequence
  Description of Artificial Sequence: Synthetic oligonucleotide
  Sense strand starting at position 280 of SEQ ID NO: 794
auaauuauugagugcauuc

SEQ ID NO: 64193 - RNA, 19 nt, Artificial Sequence
  Description of Artificial Sequence: Synthetic oligonucleotide
  Antisense strand to SEQ ID NO: 64112
gaaugcacucaauaauuau

SEQ ID NO: 64194 - RNA, 19 nt, Artificial Sequence
  Description of Artificial Sequence: Synthetic oligonucleotide
  Sense strand starting at position 359 of SEQ ID NO: 794
agacaugaaucugcauguu

SEQ ID NO: 64195 - RNA, 19 nt, Artificial Sequence
  Description of Artificial Sequence: Synthetic oligonucleotide
  Antisense strand to SEQ ID NO: 64114
aacaugcagauucaugucu

SEQ ID NO: 64196 - RNA, 19 nt, Artificial Sequence
  Description of Artificial Sequence: Synthetic oligonucleotide
  Sense strand starting at position 362 of SEQ ID NO: 794
caugaaucugcauguuaag

SEQ ID NO: 64197 - RNA, 19 nt, Artificial Sequence
  Description of Artificial Sequence: Synthetic oligonucleotide
  Antisense strand to SEQ ID NO: 64116
cuuaacaugcagauucaug

SEQ ID NO: 64198 - RNA, 19 nt, Artificial Sequence
  Description of Artificial Sequence: Synthetic oligonucleotide
  Sense strand starting at position 672 of SEQ ID NO: 794
uuugaaggugguuagauau

SEQ ID NO: 64199 - RNA, 19 nt, Artificial Sequence
  Description of Artificial Sequence: Synthetic oligonucleotide
  Antisense strand to SEQ ID NO: 64118
auaucuaaccaccuucaaa

SEQ ID NO: 64200 - RNA, 19 nt, Artificial Sequence
  Description of Artificial Sequence: Synthetic oligonucleotide
  Sense strand starting at position 793 of SEQ ID NO: 794
gucaacuacuguccuauga

SEQ ID NO: 64201 - RNA, 19 nt, Artificial Sequence
  Description of Artificial Sequence: Synthetic oligonucleotide
  Antisense strand to SEQ ID NO: 64120
ucauaggacaguaguugac

SEQ ID NO: 64202 - RNA, 19 nt, Artificial Sequence
  Description of Artificial Sequence: Synthetic oligonucleotide
  Sense strand starting at position 797 of SEQ ID NO: 794
acuacuguccuaugauaca

SEQ ID NO: 64203 - RNA, 19 nt, Artificial Sequence
  Description of Artificial Sequence: Synthetic oligonucleotide
  Antisense strand to SEQ ID NO: 64122
uguaucauaggacaguagu

SEQ ID NO: 64204 - RNA, 19 nt, Artificial Sequence
  Description of Artificial Sequence: Synthetic oligonucleotide
  Sense strand starting at position 814 of SEQ ID NO: 794
caaugaaguguauggacuu

SEQ ID NO: 64205 - RNA, 19 nt, Artificial Sequence
  Description of Artificial Sequence: Synthetic oligonucleotide
  Antisense strand to SEQ ID NO: 64124
aaguccauacacuucauug

SEQ ID NO: 64206 - RNA, 19 nt, Artificial Sequence
  Description of Artificial Sequence: Synthetic oligonucleotide
  Sense strand starting at position 821 of SEQ ID NO: 794
guguauggacuuugaaaua

SEQ ID NO: 64207 - RNA, 19 nt, Artificial Sequence
  Description of Artificial Sequence: Synthetic oligonucleotide
  Antisense strand to SEQ ID NO: 64126
uauuucaaaguccauacac

SEQ ID NO: 64208 - RNA, 19 nt, Artificial Sequence
  Description of Artificial Sequence: Synthetic oligonucleotide
  Sense strand starting at position 850 of SEQ ID NO: 794
agguuugaaucuguccauu

SEQ ID NO: 64209 - RNA, 19 nt, Artificial Sequence
  Description of Artificial Sequence: Synthetic oligonucleotide
  Antisense strand to SEQ ID NO: 64128
aauggacagauucaaaccu

SEQ ID NO: 64210 - RNA, 19 nt, Artificial Sequence
  Description of Artificial Sequence: Synthetic oligonucleotide
  Sense strand starting at position 852 of SEQ ID NO: 794
guuugaaucuguccauuaa

SEQ ID NO: 64211 - RNA, 19 nt, Artificial Sequence
  Description of Artificial Sequence: Synthetic oligonucleotide
  Antisense strand to SEQ ID NO: 64130
uuaauggacagauucaaac

SEQ ID NO: 64212 - RNA, 19 nt, Artificial Sequence
  Description of Artificial Sequence: Synthetic oligonucleotide
  Sense strand starting at position 891 of SEQ ID NO: 794
cauagugacccuggacaaa

SEQ ID NO: 64213 - RNA, 19 nt, Artificial Sequence
  Description of Artificial Sequence: Synthetic oligonucleotide
  Antisense strand to SEQ ID NO: 64132
uuuguccagggucacuaug

SEQ ID NO: 64214 - RNA, 19 nt, Artificial Sequence
  Description of Artificial Sequence: Synthetic oligonucleotide
  Sense strand starting at position 964 of SEQ ID NO: 794
auaucaauggcuugcauga

SEQ ID NO: 64215 - RNA, 19 nt, Artificial Sequence
  Description of Artificial Sequence: Synthetic oligonucleotide
  Antisense strand to SEQ ID NO: 64134
ucaugcaagccauugauau

SEQ ID NO: 64216 - RNA, 19 nt, Artificial Sequence
  Description of Artificial Sequence: Synthetic oligonucleotide
  Sense strand starting at position 969 of SEQ ID NO: 794
aauggcuugcaugaggauu

SEQ ID NO: 64217 - RNA, 19 nt, Artificial Sequence
  Description of Artificial Sequence: Synthetic oligonucleotide
  Antisense strand to SEQ ID NO: 64136
aauccucaugcaagccauu

SEQ ID NO: 64218 - RNA, 19 nt, Artificial Sequence
  Description of Artificial Sequence: Synthetic oligonucleotide
  Sense strand starting at position 1067 of SEQ ID NO: 794
uuggauucuugccuaauuc

SEQ ID NO: 64219 - RNA, 19 nt, Artificial Sequence
  Description of Artificial Sequence: Synthetic oligonucleotide
  Antisense strand to SEQ ID NO: 64138
gaauuaggcaagaauccaa

SEQ ID NO: 64220 - RNA, 19 nt, Artificial Sequence
  Description of Artificial Sequence: Synthetic oligonucleotide
  Sense strand starting at position 1177 of SEQ ID NO: 794
uugguaaaccucuggauau

SEQ ID NO: 64221 - RNA, 19 nt, Artificial Sequence
  Description of Artificial Sequence: Synthetic oligonucleotide
  Antisense strand to SEQ ID NO: 64140
auauccagagguuuaccaa

SEQ ID NO: 64222 - RNA, 19 nt, Artificial Sequence
  Description of Artificial Sequence: Synthetic oligonucleotide
  Sense strand starting at position 1271 of SEQ ID NO: 794
gugauuguuaugugaauuu

SEQ ID NO: 64223 - RNA, 19 nt, Artificial Sequence
  Description of Artificial Sequence: Synthetic oligonucleotide
  Antisense strand to SEQ ID NO: 64142
aaauucacauaacaaucac

SEQ ID NO: 64224 - RNA, 19 nt, Artificial Sequence
  Description of Artificial Sequence: Synthetic oligonucleotide
  Sense strand starting at position 1312 of SEQ ID NO: 794
agcugacaggugugaaaca

SEQ ID NO: 64225 - RNA, 19 nt, Artificial Sequence
  Description of Artificial Sequence: Synthetic oligonucleotide
  Antisense strand to SEQ ID NO: 64144
uguuucacaccugucagcu

SEQ ID NO: 64226 - RNA, 19 nt, Artificial Sequence
  Description of Artificial Sequence: Synthetic oligonucleotide
  Sense strand starting at position 1473 of SEQ ID NO: 794
guucuaucccaguauaaua

SEQ ID NO: 64227 - RNA, 19 nt, Artificial Sequence
  Description of Artificial Sequence: Synthetic oligonucleotide
  Antisense strand to SEQ ID NO: 64146
uauuauacugggauagaac

SEQ ID NO: 64228 - RNA, 19 nt, Artificial Sequence
  Description of Artificial Sequence: Synthetic oligonucleotide
  Sense strand starting at position 2186 of SEQ ID NO: 794
aaaguuuagcuauguuaag

SEQ ID NO: 64229 - RNA, 19 nt, Artificial Sequence
  Description of Artificial Sequence: Synthetic oligonucleotide
  Antisense strand to SEQ ID NO: 64148
cuuaacauagcuaaacuuu

SEQ ID NO: 64230 - RNA, 19 nt, Artificial Sequence
  Description of Artificial Sequence: Synthetic oligonucleotide
  Sense strand starting at position 2187 of SEQ ID NO: 794
aaguuuagcuauguuaaga

SEQ ID NO: 64231 - RNA, 19 nt, Artificial Sequence
  Description of Artificial Sequence: Synthetic oligonucleotide
  Antisense strand to SEQ ID NO: 64150
ucuuaacauagcuaaacuu

SEQ ID NO: 64232 - RNA, 19 nt, Artificial Sequence
  Description of Artificial Sequence: Synthetic oligonucleotide
  Sense strand starting at position 2250 of SEQ ID NO: 794
ccuuuagggcaguaugaca

SEQ ID NO: 64233 - RNA, 19 nt, Artificial Sequence
  Description of Artificial Sequence: Synthetic oligonucleotide
  Antisense strand to SEQ ID NO: 64152
ugucauacugcccuaaagg

SEQ ID NO: 64234 - RNA, 19 nt, Artificial Sequence
  Description of Artificial Sequence: Synthetic oligonucleotide
  Sense strand starting at position 2280 of SEQ ID NO: 794
aaauaagugcagugauaac

SEQ ID NO: 64235 - RNA, 19 nt, Artificial Sequence
  Description of Artificial Sequence: Synthetic oligonucleotide
  Antisense strand to SEQ ID NO: 64154
guuaucacugcacuuauuu

SEQ ID NO: 64236 - RNA, 19 nt, Artificial Sequence
  Description of Artificial Sequence: Synthetic oligonucleotide
  Sense strand starting at position 2309 of SEQ ID NO: 794
ccuggagucuuucugaaau

SEQ ID NO: 64237 - RNA, 19 nt, Artificial Sequence
  Description of Artificial Sequence: Synthetic oligonucleotide
  Antisense strand to SEQ ID NO: 64156
auuucagaaagacuccagg

SEQ ID NO: 64238 - RNA, 19 nt, Artificial Sequence
  Description of Artificial Sequence: Synthetic oligonucleotide
  Sense strand starting at position 2311 of SEQ ID NO: 794
uggagucuuucugaaauuu

SEQ ID NO: 64239 - RNA, 19 nt, Artificial Sequence
  Description of Artificial Sequence: Synthetic oligonucleotide
  Antisense strand to SEQ ID NO: 64158
aaauuucagaaagacucca

SEQ ID NO: 64240 - RNA, 19 nt, Artificial Sequence
  Description of Artificial Sequence: Synthetic oligonucleotide
  Sense strand starting at position 2411 of SEQ ID NO: 794
gguucuaagugacccugau

SEQ ID NO: 64241 - RNA, 19 nt, Artificial Sequence
  Description of Artificial Sequence: Synthetic oligonucleotide
  Antisense strand to SEQ ID NO: 64160
aucagggucacuuagaacc

SEQ ID NO: 64242 - RNA, 19 nt, Artificial Sequence
  Description of Artificial Sequence: Synthetic oligonucleotide
  Sense strand starting at position 2581 of SEQ ID NO: 794
ggaauuaaagcuuguuagu

SEQ ID NO: 64243 - RNA, 19 nt, Artificial Sequence
  Description of Artificial Sequence: Synthetic oligonucleotide
  Antisense strand to SEQ ID NO: 64162
acuaacaagcuuuaauucc

SEQ ID NO: 64244 - RNA, 19 nt, Artificial Sequence
  Description of Artificial Sequence: Synthetic oligonucleotide
  Sense strand starting at position 2619 of SEQ ID NO: 794
aaccuaacucguuagugaa

SEQ ID NO: 64245 - RNA, 19 nt, Artificial Sequence
  Description of Artificial Sequence: Synthetic oligonucleotide
  Antisense strand to SEQ ID NO: 64164
uucacuaacgaguuagguu

SEQ ID NO: 64246 - RNA, 19 nt, Artificial Sequence
  Description of Artificial Sequence: Synthetic oligonucleotide
  Sense strand starting at position 2626 of SEQ ID NO: 794
cucguuagugaacacucau

SEQ ID NO: 64247 - RNA, 19 nt, Artificial Sequence
  Description of Artificial Sequence: Synthetic oligonucleotide
  Antisense strand to SEQ ID NO: 64166
augaguguucacuaacgag

SEQ ID NO: 64248 - RNA, 19 nt, Artificial Sequence
  Description of Artificial Sequence: Synthetic oligonucleotide
  Sense strand starting at position 2633 of SEQ ID NO: 794
gugaacacucauuagcuca

SEQ ID NO: 64249 - RNA, 19 nt, Artificial Sequence
  Description of Artificial Sequence: Synthetic oligonucleotide
  Antisense strand to SEQ ID NO: 64168
ugagcuaaugaguguucac

SEQ ID NO: 64250 - RNA, 19 nt, Artificial Sequence
  Description of Artificial Sequence: Synthetic oligonucleotide
  Sense strand starting at position 2741 of SEQ ID NO: 794
gucgcuaagcuggauuuga

SEQ ID NO: 64251 - RNA, 19 nt, Artificial Sequence
  Description of Artificial Sequence: Synthetic oligonucleotide
  Antisense strand to SEQ ID NO: 64170
ucaaauccagcuuagcgac

SEQ ID NO: 64252 - RNA, 19 nt, Artificial Sequence
  Description of Artificial Sequence: Synthetic oligonucleotide
  Sense strand starting at position 2802 of SEQ ID NO: 794
cgugacacuuaccuugaga

SEQ ID NO: 64253 - RNA, 19 nt, Artificial Sequence
  Description of Artificial Sequence: Synthetic oligonucleotide
  Antisense strand to SEQ ID NO: 64172
ucucaagguaagugucacg

SEQ ID NO: 64254 - RNA, 19 nt, Artificial Sequence
  Description of Artificial Sequence: Synthetic oligonucleotide
  Sense strand starting at position 2890 of SEQ ID NO: 794
caguuaagccuugagccaa

SEQ ID NO: 64255 - RNA, 19 nt, Artificial Sequence
  Description of Artificial Sequence: Synthetic oligonucleotide
  Antisense strand to SEQ ID NO: 64174
uuggcucaaggcuuaacug

SEQ ID NO: 64256 - RNA, 19 nt, Artificial Sequence
  Description of Artificial Sequence: Synthetic oligonucleotide
  Sense strand starting at position 3088 of SEQ ID NO: 794
auaccuguucuauaauagu

SEQ ID NO: 64257 - RNA, 19 nt, Artificial Sequence
  Description of Artificial Sequence: Synthetic oligonucleotide
  Antisense strand to SEQ ID NO: 64176
acuauuauagaacagguau

SEQ ID NO: 64258 - RNA, 19 nt, Artificial Sequence
  Description of Artificial Sequence: Synthetic oligonucleotide
  Sense strand starting at position 3175 of SEQ ID NO: 794
ugcagugugaaugauauaa

SEQ ID NO: 64259 - RNA, 19 nt, Artificial Sequence
  Description of Artificial Sequence: Synthetic oligonucleotide
  Antisense strand to SEQ ID NO: 64178
uuauaucauucacacugca

SEQ ID NO: 64260 - RNA, 19 nt, Artificial Sequence
  Description of Artificial Sequence: Synthetic oligonucleotide
  Sense strand starting at position 3179 of SEQ ID NO: 794
gugugaaugauauaaugca

SEQ ID NO: 64261 - RNA, 19 nt, Artificial Sequence
  Description of Artificial Sequence: Synthetic oligonucleotide
  Antisense strand to SEQ ID NO: 64180
ugcauuauaucauucacac

SEQ ID NO: 64262 - RNA, 19 nt, Artificial Sequence
  Description of Artificial Sequence: Synthetic oligonucleotide
  Sense strand starting at position 3426 of SEQ ID NO: 794
ucagaccuugagugacauu

SEQ ID NO: 64263 - RNA, 19 nt, Artificial Sequence
  Description of Artificial Sequence: Synthetic oligonucleotide
  Antisense strand to SEQ ID NO: 64182
aaugucacucaaggucuga

SEQ ID NO: 64264 - RNA, 19 nt, Artificial Sequence
  Description of Artificial Sequence: Synthetic oligonucleotide
  Sense strand starting at position 3979 of SEQ ID NO: 794
gagugcuaauuggucagau

SEQ ID NO: 64265 - RNA, 19 nt, Artificial Sequence
  Description of Artificial Sequence: Synthetic oligonucleotide
  Antisense strand to SEQ ID NO: 64184
aucugaccaauuagcacuc

SEQ ID NO: 64266 - RNA, 19 nt, Artificial Sequence
  Description of Artificial Sequence: Synthetic oligonucleotide
  Sense strand starting at position 3981 of SEQ ID NO: 794
gugcuaauuggucagauug

SEQ ID NO: 64267 - RNA, 19 nt, Artificial Sequence
  Description of Artificial Sequence: Synthetic oligonucleotide
  Antisense strand to SEQ ID NO: 64186
caaucugaccaauuagcac

SEQ ID NO: 64268 - RNA, 19 nt, Artificial Sequence
  Description of Artificial Sequence: Synthetic oligonucleotide
  Sense strand starting at position 75 of SEQ ID NO: 795
cauagcuucuuaguaggaa

SEQ ID NO: 64269 - RNA, 19 nt, Artificial Sequence
  Description of Artificial Sequence: Synthetic oligonucleotide
  Antisense strand to SEQ ID NO: 64188
uuccuacuaagaagcuaug

SEQ ID NO: 64270 - RNA, 19 nt, Artificial Sequence
  Description of Artificial Sequence: Synthetic oligonucleotide
  Sense strand starting at position 465 of SEQ ID NO: 795
uacagugugcgauaccaau

SEQ ID NO: 64271 - RNA, 19 nt, Artificial Sequence
  Description of Artificial Sequence: Synthetic oligonucleotide
  Antisense strand to SEQ ID NO: 64190
auugguaucgcacacugua

SEQ ID NO: 64272 - RNA, 19 nt, Artificial Sequence
  Description of Artificial Sequence: Synthetic oligonucleotide
  Sense strand starting at position 578 of SEQ ID NO: 795
cuaagaguguuugucauag

SEQ ID NO: 64273 - RNA, 19 nt, Artificial Sequence
  Description of Artificial Sequence: Synthetic oligonucleotide
  Antisense strand to SEQ ID NO: 64192
cuaugacaaacacucuuag

SEQ ID NO: 64274 - RNA, 19 nt, Artificial Sequence
  Description of Artificial Sequence: Synthetic oligonucleotide
  Sense strand starting at position 599 of SEQ ID NO: 795
auaugcuuguugcuaaaca

SEQ ID NO: 64275 - RNA, 19 nt, Artificial Sequence
  Description of Artificial Sequence: Synthetic oligonucleotide
  Antisense strand to SEQ ID NO: 64194
uguuuagcaacaagcauau

SEQ ID NO: 64276 - RNA, 19 nt, Artificial Sequence
  Description of Artificial Sequence: Synthetic oligonucleotide
  Sense strand starting at position 628 of SEQ ID NO: 795
uucuuaaauuacguggaaa

SEQ ID NO: 64277 - RNA, 19 nt, Artificial Sequence
  Description of Artificial Sequence: Synthetic oligonucleotide
  Antisense strand to SEQ ID NO: 64196
uuuccacguaauuuaagaa

SEQ ID NO: 64278 - RNA, 19 nt, Artificial Sequence
  Description of Artificial Sequence: Synthetic oligonucleotide
  Sense strand starting at position 688 of SEQ ID NO: 795
cuccuaguauuucugguua

SEQ ID NO: 64279 - RNA, 19 nt, Artificial Sequence
  Description of Artificial Sequence: Synthetic oligonucleotide
  Antisense strand to SEQ ID NO: 64198
uaaccagaaauacuaggag

SEQ ID NO: 64280 - RNA, 19 nt, Artificial Sequence
  Description of Artificial Sequence: Synthetic oligonucleotide
  Sense strand starting at position 716 of SEQ ID NO: 795
acagguacauguuuauaau

SEQ ID NO: 64281 - RNA, 19 nt, Artificial Sequence
  Description of Artificial Sequence: Synthetic oligonucleotide
  Antisense strand to SEQ ID NO: 64200
auuauaaacauguaccugu

SEQ ID NO: 64282 - RNA, 19 nt, Artificial Sequence
  Description of Artificial Sequence: Synthetic oligonucleotide
  Sense strand starting at position 717 of SEQ ID NO: 795
cagguacauguuuauaaug

SEQ ID NO: 64283 - RNA, 19 nt, Artificial Sequence
  Description of Artificial Sequence: Synthetic oligonucleotide
  Antisense strand to SEQ ID NO: 64202
cauuauaaacauguaccug

SEQ ID NO: 64284 - RNA, 19 nt, Artificial Sequence
  Description of Artificial Sequence: Synthetic oligonucleotide
  Sense strand starting at position 851 of SEQ ID NO: 795
gcacaacacugguuucuaa

SEQ ID NO: 64285 - RNA, 19 nt, Artificial Sequence
  Description of Artificial Sequence: Synthetic oligonucleotide
  Antisense strand to SEQ ID NO: 64204
uuagaaaccaguguugugc

SEQ ID NO: 64286 - RNA, 19 nt, Artificial Sequence
  Description of Artificial Sequence: Synthetic oligonucleotide
  Sense strand starting at position 861 of SEQ ID NO: 795
gguuucuaauuaucauuag

SEQ ID NO: 64287 - RNA, 19 nt, Artificial Sequence
  Description of Artificial Sequence: Synthetic oligonucleotide
  Antisense strand to SEQ ID NO: 64206
cuaaugauaauuagaaacc

SEQ ID NO: 64288 - RNA, 19 nt, Artificial Sequence
  Description of Artificial Sequence: Synthetic oligonucleotide
  Sense strand starting at position 1075 of SEQ ID NO: 795
acagcuuucgucugggaaa

SEQ ID NO: 64289 - RNA, 19 nt, Artificial Sequence
  Description of Artificial Sequence: Synthetic oligonucleotide
  Antisense strand to SEQ ID NO: 64208
uuucccagacgaaagcugu

SEQ ID NO: 64290 - RNA, 19 nt, Artificial Sequence
  Description of Artificial Sequence: Synthetic oligonucleotide
  Sense strand starting at position 1291 of SEQ ID NO: 795
cuuccuuguagagguguga

SEQ ID NO: 64291 - RNA, 19 nt, Artificial Sequence
  Description of Artificial Sequence: Synthetic oligonucleotide
  Antisense strand to SEQ ID NO: 64210
ucacaccucuacaaggaag

SEQ ID NO: 64292 - RNA, 19 nt, Artificial Sequence
  Description of Artificial Sequence: Synthetic oligonucleotide
  Sense strand starting at position 1359 of SEQ ID NO: 795
agcuguaaaggcuacuuua

SEQ ID NO: 64293 - RNA, 19 nt, Artificial Sequence
  Description of Artificial Sequence: Synthetic oligonucleotide
  Antisense strand to SEQ ID NO: 64212
uaaaguagccuuuacagcu

SEQ ID NO: 64294 - RNA, 19 nt, Artificial Sequence
  Description of Artificial Sequence: Synthetic oligonucleotide
  Sense strand starting at position 1362 of SEQ ID NO: 795
uguaaaggcuacuuuaaug

SEQ ID NO: 64295 - RNA, 19 nt, Artificial Sequence
  Description of Artificial Sequence: Synthetic oligonucleotide
  Antisense strand to SEQ ID NO: 64214
cauuaaaguagccuuuaca

SEQ ID NO: 64296 - RNA, 19 nt, Artificial Sequence
  Description of Artificial Sequence: Synthetic oligonucleotide
  Sense strand starting at position 1395 of SEQ ID NO: 795
uugcuauggcuccaggaca

SEQ ID NO: 64297 - RNA, 19 nt, Artificial Sequence
  Description of Artificial Sequence: Synthetic oligonucleotide
  Antisense strand to SEQ ID NO: 64216
uguccuggagccauagcaa

SEQ ID NO: 64298 - RNA, 19 nt, Artificial Sequence
  Description of Artificial Sequence: Synthetic oligonucleotide
  Sense strand starting at position 1451 of SEQ ID NO: 795
ccauuaaauugugugaaac

SEQ ID NO: 64299 - RNA, 19 nt, Artificial Sequence
  Description of Artificial Sequence: Synthetic oligonucleotide
  Antisense strand to SEQ ID NO: 64218
guuucacacaauuuaaugg

SEQ ID NO: 64300 - RNA, 19 nt, Artificial Sequence
  Description of Artificial Sequence: Synthetic oligonucleotide
  Sense strand starting at position 1805 of SEQ ID NO: 795
ugcagugcaucuuugaaag

SEQ ID NO: 64301 - RNA, 19 nt, Artificial Sequence
  Description of Artificial Sequence: Synthetic oligonucleotide
  Antisense strand to SEQ ID NO: 64220
cuuucaaagaugcacugca

SEQ ID NO: 64302 - RNA, 19 nt, Artificial Sequence
  Description of Artificial Sequence: Synthetic oligonucleotide
  Sense strand starting at position 1988 of SEQ ID NO: 795
ggccgucgaagcucuauua

SEQ ID NO: 64303 - RNA, 19 nt, Artificial Sequence
  Description of Artificial Sequence: Synthetic oligonucleotide
  Antisense strand to SEQ ID NO: 64222
uaauagagcuucgacggcc

SEQ ID NO: 64304 - RNA, 19 nt, Artificial Sequence
  Description of Artificial Sequence: Synthetic oligonucleotide
  Sense strand starting at position 2016 of SEQ ID NO: 795
gcgaccaucgugccguaaa

SEQ ID NO: 64305 - RNA, 19 nt, Artificial Sequence
  Description of Artificial Sequence: Synthetic oligonucleotide
  Antisense strand to SEQ ID NO: 64224
uuuacggcacgauggucgc

SEQ ID NO: 64306 - RNA, 19 nt, Artificial Sequence
  Description of Artificial Sequence: Synthetic oligonucleotide
  Sense strand starting at position 2090 of SEQ ID NO: 795
guggguuagggcugagaaa

SEQ ID NO: 64307 - RNA, 19 nt, Artificial Sequence
  Description of Artificial Sequence: Synthetic oligonucleotide
  Antisense strand to SEQ ID NO: 64226
uuucucagcccuaacccac

SEQ ID NO: 64308 - RNA, 19 nt, Artificial Sequence
  Description of Artificial Sequence: Synthetic oligonucleotide
  Sense strand starting at position 2121 of SEQ ID NO: 795
cagagacgucgcgaggauu

SEQ ID NO: 64309 - RNA, 19 nt, Artificial Sequence
  Description of Artificial Sequence: Synthetic oligonucleotide
  Antisense strand to SEQ ID NO: 64228
aauccucgcgacgucucug

SEQ ID NO: 64310 - RNA, 19 nt, Artificial Sequence
  Description of Artificial Sequence: Synthetic oligonucleotide
  Sense strand starting at position 2142 of SEQ ID NO: 795
guuuaagacuucgcgagaa

SEQ ID NO: 64311 - RNA, 19 nt, Artificial Sequence
  Description of Artificial Sequence: Synthetic oligonucleotide
  Antisense strand to SEQ ID NO: 64230
uucucgcgaagucuuaaac

SEQ ID NO: 64312 - RNA, 19 nt, Artificial Sequence
  Description of Artificial Sequence: Synthetic oligonucleotide
  Sense strand starting at position 2144 of SEQ ID NO: 795
uuaagacuucgcgagaaca

SEQ ID NO: 64313 - RNA, 19 nt, Artificial Sequence
  Description of Artificial Sequence: Synthetic oligonucleotide
  Antisense strand to SEQ ID NO: 64232
uguucucgcgaagucuuaa

SEQ ID NO: 64314 - RNA, 19 nt, Artificial Sequence
  Description of Artificial Sequence: Synthetic oligonucleotide
  Sense strand starting at position 2146 of SEQ ID NO: 795
aagacuucgcgagaacaga

SEQ ID NO: 64315 - RNA, 19 nt, Artificial Sequence
  Description of Artificial Sequence: Synthetic oligonucleotide
  Antisense strand to SEQ ID NO: 64234
ucuguucucgcgaagucuu

SEQ ID NO: 64316 - RNA, 19 nt, Artificial Sequence
  Description of Artificial Sequence: Synthetic oligonucleotide
  Sense strand starting at position 2234 of SEQ ID NO: 795
ggugauaguggccaguuga

SEQ ID NO: 64317 - RNA, 19 nt, Artificial Sequence
  Description of Artificial Sequence: Synthetic oligonucleotide
  Antisense strand to SEQ ID NO: 64236
ucaacuggccacuaucacc

SEQ ID NO: 64318 - RNA, 19 nt, Artificial Sequence
  Description of Artificial Sequence: Synthetic oligonucleotide
  Sense strand starting at position 2320 of SEQ ID NO: 795
gagguagugcgguagaauu

SEQ ID NO: 64319 - RNA, 19 nt, Artificial Sequence
  Description of Artificial Sequence: Synthetic oligonucleotide
  Antisense strand to SEQ ID NO: 64238
aauucuaccgcacuaccuc

SEQ ID NO: 64320 - RNA, 19 nt, Artificial Sequence
  Description of Artificial Sequence: Synthetic oligonucleotide
  Sense strand starting at position 2502 of SEQ ID NO: 795
gcgggaacccagcaugauu

SEQ ID NO: 64321 - RNA, 19 nt, Artificial Sequence
  Description of Artificial Sequence: Synthetic oligonucleotide
  Antisense strand to SEQ ID NO: 64240
aaucaugcuggguucccgc

SEQ ID NO: 64322 - RNA, 19 nt, Artificial Sequence
  Description of Artificial Sequence: Synthetic oligonucleotide
  Sense strand starting at position 2614 of SEQ ID NO: 795
cuguuaguucucgaccaua

SEQ ID NO: 64323 - RNA, 19 nt, Artificial Sequence
  Description of Artificial Sequence: Synthetic oligonucleotide
  Antisense strand to SEQ ID NO: 64242
uauggucgagaacuaacag

SEQ ID NO: 64324 - RNA, 19 nt, Artificial Sequence
  Description of Artificial Sequence: Synthetic oligonucleotide
  Sense strand starting at position 2702 of SEQ ID NO: 795
aaacgugauuguucuuaaa

SEQ ID NO: 64325 - RNA, 19 nt, Artificial Sequence
  Description of Artificial Sequence: Synthetic oligonucleotide
  Antisense strand to SEQ ID NO: 64244
uuuaagaacaaucacguuu

SEQ ID NO: 64326 - RNA, 19 nt, Artificial Sequence
  Description of Artificial Sequence: Synthetic oligonucleotide
  Sense strand starting at position 3089 of SEQ ID NO: 795
cuguuaaggucucuuaagu

SEQ ID NO: 64327 - RNA, 19 nt, Artificial Sequence
  Description of Artificial Sequence: Synthetic oligonucleotide
  Antisense strand to SEQ ID NO: 64246
acuuaagagaccuuaacag

SEQ ID NO: 64328 - RNA, 19 nt, Artificial Sequence
  Description of Artificial Sequence: Synthetic oligonucleotide
  Sense strand starting at position 3094 of SEQ ID NO: 795
aaggucucuuaaguuaaga

SEQ ID NO: 64329 - RNA, 19 nt, Artificial Sequence
  Description of Artificial Sequence: Synthetic oligonucleotide
  Antisense strand to SEQ ID NO: 64248
ucuuaacuuaagagaccuu

SEQ ID NO: 64330 - RNA, 19 nt, Artificial Sequence
  Description of Artificial Sequence: Synthetic oligonucleotide
  Sense strand starting at position 3181 of SEQ ID NO: 795
uggguacucaaauguaaga

SEQ ID NO: 64331 - RNA, 19 nt, Artificial Sequence
  Description of Artificial Sequence: Synthetic oligonucleotide
  Antisense strand to SEQ ID NO: 64250
ucuuacauuugaguaccca

SEQ ID NO: 64332 - RNA, 19 nt, Artificial Sequence
  Description of Artificial Sequence: Synthetic oligonucleotide
  Sense strand starting at position 3194 of SEQ ID NO: 795
guaagaucauauucugaau

SEQ ID NO: 64333 - RNA, 19 nt, Artificial Sequence
  Description of Artificial Sequence: Synthetic oligonucleotide
  Antisense strand to SEQ ID NO: 64252
auucagaauaugaucuuac

SEQ ID NO: 64334 - RNA, 19 nt, Artificial Sequence
  Description of Artificial Sequence: Synthetic oligonucleotide
  Sense strand starting at position 3206 of SEQ ID NO: 795
ucugaauugucaucacagg

SEQ ID NO: 64335 - RNA, 19 nt, Artificial Sequence
  Description of Artificial Sequence: Synthetic oligonucleotide
  Antisense strand to SEQ ID NO: 64254
ccugugaugacaauucaga

SEQ ID NO: 64336 - RNA, 19 nt, Artificial Sequence
  Description of Artificial Sequence: Synthetic oligonucleotide
  Sense strand starting at position 3360 of SEQ ID NO: 795
gcauguaauuuacuguguu

SEQ ID NO: 64337 - RNA, 19 nt, Artificial Sequence
  Description of Artificial Sequence: Synthetic oligonucleotide
  Antisense strand to SEQ ID NO: 64256
aacacaguaaauuacaugc

SEQ ID NO: 64338 - RNA, 19 nt, Artificial Sequence
  Description of Artificial Sequence: Synthetic oligonucleotide
  Sense strand starting at position 3382 of SEQ ID NO: 795
aguaguaagcuccaggaau

SEQ ID NO: 64339 - RNA, 19 nt, Artificial Sequence
  Description of Artificial Sequence: Synthetic oligonucleotide
  Antisense strand to SEQ ID NO: 64258
auuccuggagcuuacuacu

SEQ ID NO: 64340 - RNA, 19 nt, Artificial Sequence
  Description of Artificial Sequence: Synthetic oligonucleotide
  Sense strand starting at position 3400 of SEQ ID NO: 795
ucgugaggauacuuuagaa

SEQ ID NO: 64341 - RNA, 19 nt, Artificial Sequence
  Description of Artificial Sequence: Synthetic oligonucleotide
  Antisense strand to SEQ ID NO: 64260
uucuaaaguauccucacga

SEQ ID NO: 64342 - RNA, 19 nt, Artificial Sequence
  Description of Artificial Sequence: Synthetic oligonucleotide
  Sense strand starting at position 3438 of SEQ ID NO: 795
aguauaucacagugacuuu

SEQ ID NO: 64343 - RNA, 19 nt, Artificial Sequence
  Description of Artificial Sequence: Synthetic oligonucleotide
  Antisense strand to SEQ ID NO: 64262
aaagucacugugauauacu

SEQ ID NO: 64344 - RNA, 19 nt, Artificial Sequence
  Description of Artificial Sequence: Synthetic oligonucleotide
  Sense strand starting at position 3532 of SEQ ID NO: 795
uuacuugguuaggucuaaa

SEQ ID NO: 64345 - RNA, 19 nt, Artificial Sequence
  Description of Artificial Sequence: Synthetic oligonucleotide
  Antisense strand to SEQ ID NO: 64264
uuuagaccuaaccaaguaa

SEQ ID NO: 64346 - RNA, 19 nt, Artificial Sequence
  Description of Artificial Sequence: Synthetic oligonucleotide
  Sense strand starting at position 3730 of SEQ ID NO: 795
auuuauagcucugaugauc

SEQ ID NO: 64347 - RNA, 19 nt, Artificial Sequence
  Description of Artificial Sequence: Synthetic oligonucleotide
  Antisense strand to SEQ ID NO: 64266
gaucaucagagcuauaaau

SEQ ID NO: 64348 - RNA, 19 nt, Artificial Sequence
  Description of Artificial Sequence: Synthetic oligonucleotide
  Sense strand starting at position 18 of SEQ ID NO: 796
ucucauuuauuauagaggu

SEQ ID NO: 64349 - RNA, 19 nt, Artificial Sequence
  Description of Artificial Sequence: Synthetic oligonucleotide
  Antisense strand to SEQ ID NO: 64268
accucuauaauaaaugaga

SEQ ID NO: 64350 - RNA, 19 nt, Artificial Sequence
  Description of Artificial Sequence: Synthetic oligonucleotide
  Sense strand starting at position 128 of SEQ ID NO: 796
gguaaugcacuuuaugguu

SEQ ID NO: 64351 - RNA, 19 nt, Artificial Sequence
  Description of Artificial Sequence: Synthetic oligonucleotide
  Antisense strand to SEQ ID NO: 64270
aaccauaaagugcauuacc

SEQ ID NO: 64352 - RNA, 19 nt, Artificial Sequence
  Description of Artificial Sequence: Synthetic oligonucleotide
  Sense strand starting at position 146 of SEQ ID NO: 796
ucaaucauuggccagagua

SEQ ID NO: 64353 - RNA, 19 nt, Artificial Sequence
  Description of Artificial Sequence: Synthetic oligonucleotide
  Antisense strand to SEQ ID NO: 64272
uacucuggccaaugauuga

SEQ ID NO: 64354 - RNA, 19 nt, Artificial Sequence
  Description of Artificial Sequence: Synthetic oligonucleotide
  Sense strand starting at position 217 of SEQ ID NO: 796
cauuccucucuguagugua

SEQ ID NO: 64355 - RNA, 19 nt, Artificial Sequence
  Description of Artificial Sequence: Synthetic oligonucleotide
  Antisense strand to SEQ ID NO: 64274
uacacuacagagaggaaug

SEQ ID NO: 64356 - RNA, 19 nt, Artificial Sequence
  Description of Artificial Sequence: Synthetic oligonucleotide
  Sense strand starting at position 359 of SEQ ID NO: 796
caaccuugacgucaugaga

SEQ ID NO: 64357 - RNA, 19 nt, Artificial Sequence
  Description of Artificial Sequence: Synthetic oligonucleotide
  Antisense strand to SEQ ID NO: 64276
ucucaugacgucaagguug

SEQ ID NO: 64358 - RNA, 19 nt, Artificial Sequence
  Description of Artificial Sequence: Synthetic oligonucleotide
  Sense strand starting at position 406 of SEQ ID NO: 796
cucucuuugggccagucau

SEQ ID NO: 64359 - RNA, 19 nt, Artificial Sequence
  Description of Artificial Sequence: Synthetic oligonucleotide
  Antisense strand to SEQ ID NO: 64278
augacuggcccaaagagag

SEQ ID NO: 64360 - RNA, 19 nt, Artificial Sequence
  Description of Artificial Sequence: Synthetic oligonucleotide
  Sense strand starting at position 417 of SEQ ID NO: 796
ccagucaucucauccauga

SEQ ID NO: 64361 - RNA, 19 nt, Artificial Sequence
  Description of Artificial Sequence: Synthetic oligonucleotide
  Antisense strand to SEQ ID NO: 64280
ucauggaugagaugacugg

SEQ ID NO: 64362 - RNA, 19 nt, Artificial Sequence
  Description of Artificial Sequence: Synthetic oligonucleotide
  Sense strand starting at position 453 of SEQ ID NO: 796
gagguuaucucccagauuu

SEQ ID NO: 64363 - RNA, 19 nt, Artificial Sequence
  Description of Artificial Sequence: Synthetic oligonucleotide
  Antisense strand to SEQ ID NO: 64282
aaaucugggagauaaccuc

SEQ ID NO: 64364 - RNA, 19 nt, Artificial Sequence
  Description of Artificial Sequence: Synthetic oligonucleotide
  Sense strand starting at position 584 of SEQ ID NO: 796
aguuguaacuucucuuuag

SEQ ID NO: 64365 - RNA, 19 nt, Artificial Sequence
  Description of Artificial Sequence: Synthetic oligonucleotide
  Antisense strand to SEQ ID NO: 64284
cuaaagagaaguuacaacu

SEQ ID NO: 64366 - RNA, 19 nt, Artificial Sequence
  Description of Artificial Sequence: Synthetic oligonucleotide
  Sense strand starting at position 593 of SEQ ID NO: 796
uucucuuuaguacaaguga

SEQ ID NO: 64367 - RNA, 19 nt, Artificial Sequence
  Description of Artificial Sequence: Synthetic oligonucleotide
  Antisense strand to SEQ ID NO: 64286
ucacuuguacuaaagagaa

SEQ ID NO: 64368 - RNA, 19 nt, Artificial Sequence
  Description of Artificial Sequence: Synthetic oligonucleotide
  Sense strand starting at position 670 of SEQ ID NO: 796
ggaagacugcucuaagcca

SEQ ID NO: 64369 - RNA, 19 nt, Artificial Sequence
  Description of Artificial Sequence: Synthetic oligonucleotide
  Antisense strand to SEQ ID NO: 64288
uggcuuagagcagucuucc

SEQ ID NO: 64370 - RNA, 19 nt, Artificial Sequence
  Description of Artificial Sequence: Synthetic oligonucleotide
  Sense strand starting at position 752 of SEQ ID NO: 796
ccgaaugaaucuuucuaga

SEQ ID NO: 64371 - RNA, 19 nt, Artificial Sequence
  Description of Artificial Sequence: Synthetic oligonucleotide
  Antisense strand to SEQ ID NO: 64290
ucuagaaagauucauucgg

SEQ ID NO: 64372 - RNA, 19 nt, Artificial Sequence
  Description of Artificial Sequence: Synthetic oligonucleotide
  Sense strand starting at position 763 of SEQ ID NO: 796
uuucuagaagcugauagua

SEQ ID NO: 64373 - RNA, 19 nt, Artificial Sequence
  Description of Artificial Sequence: Synthetic oligonucleotide
  Antisense strand to SEQ ID NO: 64292
uacuaucagcuucuagaaa

SEQ ID NO: 64374 - RNA, 19 nt, Artificial Sequence
  Description of Artificial Sequence: Synthetic oligonucleotide
  Sense strand starting at position 934 of SEQ ID NO: 796
uuccaacaguucucagaga

SEQ ID NO: 64375 - RNA, 19 nt, Artificial Sequence
  Description of Artificial Sequence: Synthetic oligonucleotide
  Antisense strand to SEQ ID NO: 64294
ucucugagaacuguuggaa

SEQ ID NO: 64376 - RNA, 19 nt, Artificial Sequence
  Description of Artificial Sequence: Synthetic oligonucleotide
  Sense strand starting at position 998 of SEQ ID NO: 796
ggagcaaacgaaugacuau

SEQ ID NO: 64377 - RNA, 19 nt, Artificial Sequence
  Description of Artificial Sequence: Synthetic oligonucleotide
  Antisense strand to SEQ ID NO: 64296
auagucauucguuugcucc

SEQ ID NO: 64378 - RNA, 19 nt, Artificial Sequence
  Description of Artificial Sequence: Synthetic oligonucleotide
  Sense strand starting at position 1005 of SEQ ID NO: 796
acgaaugacuaucuguacu

SEQ ID NO: 64379 - RNA, 19 nt, Artificial Sequence
  Description of Artificial Sequence: Synthetic oligonucleotide
  Antisense strand to SEQ ID NO: 64298
aguacagauagucauucgu

SEQ ID NO: 64380 - RNA, 19 nt, Artificial Sequence
  Description of Artificial Sequence: Synthetic oligonucleotide
  Sense strand starting at position 1007 of SEQ ID NO: 796
gaaugacuaucuguacugu

SEQ ID NO: 64381 - RNA, 19 nt, Artificial Sequence
  Description of Artificial Sequence: Synthetic oligonucleotide
  Antisense strand to SEQ ID NO: 64300
acaguacagauagucauuc

SEQ ID NO: 64382 - RNA, 19 nt, Artificial Sequence
  Description of Artificial Sequence: Synthetic oligonucleotide
  Sense strand starting at position 1017 of SEQ ID NO: 796
cuguacuguugcccaaaua

SEQ ID NO: 64383 - RNA, 19 nt, Artificial Sequence
  Description of Artificial Sequence: Synthetic oligonucleotide
  Antisense strand to SEQ ID NO: 64302
uauuugggcaacaguacag

SEQ ID NO: 64384 - RNA, 19 nt, Artificial Sequence
  Description of Artificial Sequence: Synthetic oligonucleotide
  Sense strand starting at position 1089 of SEQ ID NO: 796
aggguuguauccuuauaua

SEQ ID NO: 64385 - RNA, 19 nt, Artificial Sequence
  Description of Artificial Sequence: Synthetic oligonucleotide
  Antisense strand to SEQ ID NO: 64304
uauauaaggauacaacccu

SEQ ID NO: 64386 - RNA, 19 nt, Artificial Sequence
  Description of Artificial Sequence: Synthetic oligonucleotide
  Sense strand starting at position 1247 of SEQ ID NO: 796
ucagguauggccuaacuca

SEQ ID NO: 64387 - RNA, 19 nt, Artificial Sequence
  Description of Artificial Sequence: Synthetic oligonucleotide
  Antisense strand to SEQ ID NO: 64306
ugaguuaggccauaccuga

SEQ ID NO: 64388 - RNA, 19 nt, Artificial Sequence
  Description of Artificial Sequence: Synthetic oligonucleotide
  Sense strand starting at position 1626 of SEQ ID NO: 796
gguaguugucgcgcaugaa

SEQ ID NO: 64389 - RNA, 19 nt, Artificial Sequence
  Description of Artificial Sequence: Synthetic oligonucleotide
  Antisense strand to SEQ ID NO: 64308
uucaugcgcgacaacuacc

SEQ ID NO: 64390 - RNA, 19 nt, Artificial Sequence
  Description of Artificial Sequence: Synthetic oligonucleotide
  Sense strand starting at position 1989 of SEQ ID NO: 796
acgauuggcccggaaggaa

SEQ ID NO: 64391 - RNA, 19 nt, Artificial Sequence
  Description of Artificial Sequence: Synthetic oligonucleotide
  Antisense strand to SEQ ID NO: 64310
uuccuuccgggccaaucgu

SEQ ID NO: 64392 - RNA, 19 nt, Artificial Sequence
  Description of Artificial Sequence: Synthetic oligonucleotide
  Sense strand starting at position 2149 of SEQ ID NO: 796
gggacuuaacugcgagguu

SEQ ID NO: 64393 - RNA, 19 nt, Artificial Sequence
  Description of Artificial Sequence: Synthetic oligonucleotide
  Antisense strand to SEQ ID NO: 64312
aaccucgcaguuaaguccc

SEQ ID NO: 64394 - RNA, 19 nt, Artificial Sequence
  Description of Artificial Sequence: Synthetic oligonucleotide
  Sense strand starting at position 2152 of SEQ ID NO: 796
acuuaacugcgagguuaaa

SEQ ID NO: 64395 - RNA, 19 nt, Artificial Sequence
  Description of Artificial Sequence: Synthetic oligonucleotide
  Antisense strand to SEQ ID NO: 64314
uuuaaccucgcaguuaagu

SEQ ID NO: 64396 - RNA, 19 nt, Artificial Sequence
  Description of Artificial Sequence: Synthetic oligonucleotide
  Sense strand starting at position 2163 of SEQ ID NO: 796
agguuaaaucguggaggug

SEQ ID NO: 64397 - RNA, 19 nt, Artificial Sequence
  Description of Artificial Sequence: Synthetic oligonucleotide
  Antisense strand to SEQ ID NO: 64316
caccuccacgauuuaaccu

SEQ ID NO: 64398 - RNA, 19 nt, Artificial Sequence
  Description of Artificial Sequence: Synthetic oligonucleotide
  Sense strand starting at position 2164 of SEQ ID NO: 796
gguuaaaucguggagguga

SEQ ID NO: 64399 - RNA, 19 nt, Artificial Sequence
  Description of Artificial Sequence: Synthetic oligonucleotide
  Antisense strand to SEQ ID NO: 64318
ucaccuccacgauuuaacc

SEQ ID NO: 64400 - RNA, 19 nt, Artificial Sequence
  Description of Artificial Sequence: Synthetic oligonucleotide
  Sense strand starting at position 2314 of SEQ ID NO: 796
agacuagccugucucuaua

SEQ ID NO: 64401 - RNA, 19 nt, Artificial Sequence
  Description of Artificial Sequence: Synthetic oligonucleotide
  Antisense strand to SEQ ID NO: 64320
uauagagacaggcuagucu

SEQ ID NO: 64402 - RNA, 19 nt, Artificial Sequence
  Description of Artificial Sequence: Synthetic oligonucleotide
  Sense strand starting at position 2567 of SEQ ID NO: 796
ugaguuguccuguagcaca

SEQ ID NO: 64403 - RNA, 19 nt, Artificial Sequence
  Description of Artificial Sequence: Synthetic oligonucleotide
  Antisense strand to SEQ ID NO: 64322
ugugcuacaggacaacuca

SEQ ID NO: 64404 - RNA, 19 nt, Artificial Sequence
  Description of Artificial Sequence: Synthetic oligonucleotide
  Sense strand starting at position 2650 of SEQ ID NO: 796
gagggaugaugggaagaaa

SEQ ID NO: 64405 - RNA, 19 nt, Artificial Sequence
  Description of Artificial Sequence: Synthetic oligonucleotide
  Antisense strand to SEQ ID NO: 64324
uuucuucccaucaucccuc

SEQ ID NO: 64406 - RNA, 19 nt, Artificial Sequence
  Description of Artificial Sequence: Synthetic oligonucleotide
  Sense strand starting at position 2742 of SEQ ID NO: 796
gguauuuacugagcuuucu

SEQ ID NO: 64407 - RNA, 19 nt, Artificial Sequence
  Description of Artificial Sequence: Synthetic oligonucleotide
  Antisense strand to SEQ ID NO: 64326
agaaagcucaguaaauacc

SEQ ID NO: 64408 - RNA, 19 nt, Artificial Sequence
  Description of Artificial Sequence: Synthetic oligonucleotide
  Sense strand starting at position 2780 of SEQ ID NO: 796
ucaaauagcuuaguuugua

SEQ ID NO: 64409 - RNA, 19 nt, Artificial Sequence
  Description of Artificial Sequence: Synthetic oligonucleotide
  Antisense strand to SEQ ID NO: 64328
uacaaacuaagcuauuuga

SEQ ID NO: 64410 - RNA, 19 nt, Artificial Sequence
  Description of Artificial Sequence: Synthetic oligonucleotide
  Sense strand starting at position 2789 of SEQ ID NO: 796
uuaguuuguaccgagauac

SEQ ID NO: 64411 - RNA, 19 nt, Artificial Sequence
  Description of Artificial Sequence: Synthetic oligonucleotide
  Antisense strand to SEQ ID NO: 64330
guaucucgguacaaacuaa

SEQ ID NO: 64412 - RNA, 19 nt, Artificial Sequence
  Description of Artificial Sequence: Synthetic oligonucleotide
  Sense strand starting at position 3001 of SEQ ID NO: 796
ggccauuagcgagggaaau

SEQ ID NO: 64413 - RNA, 19 nt, Artificial Sequence
  Description of Artificial Sequence: Synthetic oligonucleotide
  Antisense strand to SEQ ID NO: 64332
auuucccucgcuaauggcc

SEQ ID NO: 64414 - RNA, 19 nt, Artificial Sequence
  Description of Artificial Sequence: Synthetic oligonucleotide
  Sense strand starting at position 3002 of SEQ ID NO: 796
gccauuagcgagggaaaua

SEQ ID NO: 64415 - RNA, 19 nt, Artificial Sequence
  Description of Artificial Sequence: Synthetic oligonucleotide
  Antisense strand to SEQ ID NO: 64334
uauuucccucgcuaauggc

SEQ ID NO: 64416 - RNA, 19 nt, Artificial Sequence
  Description of Artificial Sequence: Synthetic oligonucleotide
  Sense strand starting at position 3026 of SEQ ID NO: 796
gucagaagucucugaacag

SEQ ID NO: 64417 - RNA, 19 nt, Artificial Sequence
  Description of Artificial Sequence: Synthetic oligonucleotide
  Antisense strand to SEQ ID NO: 64336
cuguucagagacuucugac

SEQ ID NO: 64418 - RNA, 19 nt, Artificial Sequence
  Description of Artificial Sequence: Synthetic oligonucleotide
  Sense strand starting at position 3390 of SEQ ID NO: 796
cccacaugccagugagaga

SEQ ID NO: 64419 - RNA, 19 nt, Artificial Sequence
  Description of Artificial Sequence: Synthetic oligonucleotide
  Antisense strand to SEQ ID NO: 64338
ucucucacuggcauguggg

SEQ ID NO: 64420 - RNA, 19 nt, Artificial Sequence
  Description of Artificial Sequence: Synthetic oligonucleotide
  Sense strand starting at position 3533 of SEQ ID NO: 796
gcuaguuugagucagaggu

SEQ ID NO: 64421 - RNA, 19 nt, Artificial Sequence
  Description of Artificial Sequence: Synthetic oligonucleotide
  Antisense strand to SEQ ID NO: 64340
accucugacucaaacuagc

SEQ ID NO: 64422 - RNA, 19 nt, Artificial Sequence
  Description of Artificial Sequence: Synthetic oligonucleotide
  Sense strand starting at position 3537 of SEQ ID NO: 796
guuugagucagagguggga

SEQ ID NO: 64423 - RNA, 19 nt, Artificial Sequence
  Description of Artificial Sequence: Synthetic oligonucleotide
  Antisense strand to SEQ ID NO: 64342
ucccaccucugacucaaac

SEQ ID NO: 64424 - RNA, 19 nt, Artificial Sequence
  Description of Artificial Sequence: Synthetic oligonucleotide
  Sense strand starting at position 3608 of SEQ ID NO: 796
uuucuugcaccucaugaga

SEQ ID NO: 64425 - RNA, 19 nt, Artificial Sequence
  Description of Artificial Sequence: Synthetic oligonucleotide
  Antisense strand to SEQ ID NO: 64344
ucucaugaggugcaagaaa

SEQ ID NO: 64426 - RNA, 19 nt, Artificial Sequence
  Description of Artificial Sequence: Synthetic oligonucleotide
  Sense strand starting at position 3628 of SEQ ID NO: 796
gucagagccuauguugaca

SEQ ID NO: 64427 - RNA, 19 nt, Artificial Sequence
  Description of Artificial Sequence: Synthetic oligonucleotide
  Antisense strand to SEQ ID NO: 64346
ugucaacauaggcucugac

SEQ ID NO: 64428 - RNA, 19 nt, Artificial Sequence
  Description of Artificial Sequence: Synthetic oligonucleotide
  Sense strand starting at position 3865 of SEQ ID NO: 797
gaaauugacugguccagua

SEQ ID NO: 64429 - RNA, 19 nt, Artificial Sequence
  Description of Artificial Sequence: Synthetic oligonucleotide
  Antisense strand to SEQ ID NO: 64348
uacuggaccagucaauuuc

SEQ ID NO: 64430 - RNA, 19 nt, Artificial Sequence
  Description of Artificial Sequence: Synthetic oligonucleotide
  Sense strand starting at position 3862 of SEQ ID NO: 797
ucugaaauugacuggucca

SEQ ID NO: 64431 - RNA, 19 nt, Artificial Sequence
  Description of Artificial Sequence: Synthetic oligonucleotide
  Antisense strand to SEQ ID NO: 64350
uggaccagucaauuucaga

SEQ ID NO: 64432 - RNA, 19 nt, Artificial Sequence
  Description of Artificial Sequence: Synthetic oligonucleotide
  Sense strand starting at position 3560 of SEQ ID NO: 797
uugauuauuccuggaggac

SEQ ID NO: 64433 - RNA, 19 nt, Artificial Sequence
  Description of Artificial Sequence: Synthetic oligonucleotide
  Antisense strand to SEQ ID NO: 64352
guccuccaggaauaaucaa

SEQ ID NO: 64434 - RNA, 19 nt, Artificial Sequence
  Description of Artificial Sequence: Synthetic oligonucleotide
  Sense strand starting at position 3519 of SEQ ID NO: 797
agaauuuagucugagugaa

SEQ ID NO: 64435 - RNA, 19 nt, Artificial Sequence
  Description of Artificial Sequence: Synthetic oligonucleotide
  Antisense strand to SEQ ID NO: 64354
uucacucagacuaaauucu

SEQ ID NO: 64436 - RNA, 19 nt, Artificial Sequence
  Description of Artificial Sequence: Synthetic oligonucleotide
  Sense strand starting at position 3477 of SEQ ID NO: 797
ggucaagguuaucuaaaua

SEQ ID NO: 64437 - RNA, 19 nt, Artificial Sequence
  Description of Artificial Sequence: Synthetic oligonucleotide
  Antisense strand to SEQ ID NO: 64356
uauuuagauaaccuugacc

SEQ ID NO: 64438 - RNA, 19 nt, Artificial Sequence
  Description of Artificial Sequence: Synthetic oligonucleotide
  Sense strand starting at position 3476 of SEQ ID NO: 797
uggucaagguuaucuaaau

SEQ ID NO: 64439 - RNA, 19 nt, Artificial Sequence
  Description of Artificial Sequence: Synthetic oligonucleotide
  Antisense strand to SEQ ID NO: 64358
auuuagauaaccuugacca

SEQ ID NO: 64440 - RNA, 19 nt, Artificial Sequence
  Description of Artificial Sequence: Synthetic oligonucleotide
  Sense strand starting at position 3471 of SEQ ID NO: 797
gagaauggucaagguuauc

SEQ ID NO: 64441 - RNA, 19 nt, Artificial Sequence
  Description of Artificial Sequence: Synthetic oligonucleotide
  Antisense strand to SEQ ID NO: 64360
gauaaccuugaccauucuc

SEQ ID NO: 64442 - RNA, 19 nt, Artificial Sequence
  Description of Artificial Sequence: Synthetic oligonucleotide
  Sense strand starting at position 3312 of SEQ ID NO: 797
ggcugucucagggaucaaa

SEQ ID NO: 64443 - RNA, 19 nt, Artificial Sequence
  Description of Artificial Sequence: Synthetic oligonucleotide
  Antisense strand to SEQ ID NO: 64362
uuugaucccugagacagcc

SEQ ID NO: 64444 - RNA, 19 nt, Artificial Sequence
  Description of Artificial Sequence: Synthetic oligonucleotide
  Sense strand starting at position 3119 of SEQ ID NO: 797
uggccaaaggguuagcaaa

SEQ ID NO: 64445 - RNA, 19 nt, Artificial Sequence
  Description of Artificial Sequence: Synthetic oligonucleotide
  Antisense strand to SEQ ID NO: 64364
uuugcuaacccuuuggcca

SEQ ID NO: 64446 - RNA, 19 nt, Artificial Sequence
  Description of Artificial Sequence: Synthetic oligonucleotide
  Sense strand starting at position 3068 of SEQ ID NO: 797
ugguuauggauaugcuaga

SEQ ID NO: 64447 - RNA, 19 nt, Artificial Sequence
  Description of Artificial Sequence: Synthetic oligonucleotide
  Antisense strand to SEQ ID NO: 64366
ucuagcauauccauaacca

SEQ ID NO: 64448 - RNA, 19 nt, Artificial Sequence
  Description of Artificial Sequence: Synthetic oligonucleotide
  Sense strand starting at position 3066 of SEQ ID NO: 797
uuugguuauggauaugcua

SEQ ID NO: 64449 - RNA, 19 nt, Artificial Sequence
  Description of Artificial Sequence: Synthetic oligonucleotide
  Antisense strand to SEQ ID NO: 64368
uagcauauccauaaccaaa

SEQ ID NO: 64450 - RNA, 19 nt, Artificial Sequence
  Description of Artificial Sequence: Synthetic oligonucleotide
  Sense strand starting at position 3060 of SEQ ID NO: 797
uuuggcuuugguuauggau

SEQ ID NO: 64451 - RNA, 19 nt, Artificial Sequence
  Description of Artificial Sequence: Synthetic oligonucleotide
  Antisense strand to SEQ ID NO: 64370
auccauaaccaaagccaaa

SEQ ID NO: 64452 - RNA, 19 nt, Artificial Sequence
  Description of Artificial Sequence: Synthetic oligonucleotide
  Sense strand starting at position 3049 of SEQ ID NO: 797
gagcguucuaguuuggcuu

SEQ ID NO: 64453 - RNA, 19 nt, Artificial Sequence
  Description of Artificial Sequence: Synthetic oligonucleotide
  Antisense strand to SEQ ID NO: 64372
aagccaaacuagaacgcuc

SEQ ID NO: 64454 - RNA, 19 nt, Artificial Sequence
  Description of Artificial Sequence: Synthetic oligonucleotide
  Sense strand starting at position 3018 of SEQ ID NO: 797
caggguuagcuguaaucac

SEQ ID NO: 64455 - RNA, 19 nt, Artificial Sequence
  Description of Artificial Sequence: Synthetic oligonucleotide
  Antisense strand to SEQ ID NO: 64374
gugauuacagcuaacccug

SEQ ID NO: 64456 - RNA, 19 nt, Artificial Sequence
  Description of Artificial Sequence: Synthetic oligonucleotide
  Sense strand starting at position 2992 of SEQ ID NO: 797
ugugaagauguaggauuga

SEQ ID NO: 64457 - RNA, 19 nt, Artificial Sequence
  Description of Artificial Sequence: Synthetic oligonucleotide
  Antisense strand to SEQ ID NO: 64376
ucaauccuacaucuucaca

SEQ ID NO: 64458 - RNA, 19 nt, Artificial Sequence
  Description of Artificial Sequence: Synthetic oligonucleotide
  Sense strand starting at position 2948 of SEQ ID NO: 797
uagacagcuuagguaagaa

SEQ ID NO: 64459 - RNA, 19 nt, Artificial Sequence
  Description of Artificial Sequence: Synthetic oligonucleotide
  Antisense strand to SEQ ID NO: 64378
uucuuaccuaagcugucua

SEQ ID NO: 64460 - RNA, 19 nt, Artificial Sequence
  Description of Artificial Sequence: Synthetic oligonucleotide
  Sense strand starting at position 2741 of SEQ ID NO: 797
ccacuugagaaguggaguu

SEQ ID NO: 64461 - RNA, 19 nt, Artificial Sequence
  Description of Artificial Sequence: Synthetic oligonucleotide
  Antisense strand to SEQ ID NO: 64380
aacuccacuucucaagugg

SEQ ID NO: 64462 - RNA, 19 nt, Artificial Sequence
  Description of Artificial Sequence: Synthetic oligonucleotide
  Sense strand starting at position 2735 of SEQ ID NO: 797
ucacuuccacuugagaagu

SEQ ID NO: 64463 - RNA, 19 nt, Artificial Sequence
  Description of Artificial Sequence: Synthetic oligonucleotide
  Antisense strand to SEQ ID NO: 64382
acuucucaaguggaaguga

SEQ ID NO: 64464 - RNA, 19 nt, Artificial Sequence
  Description of Artificial Sequence: Synthetic oligonucleotide
  Sense strand starting at position 2672 of SEQ ID NO: 797
cugcgagcuguuuccuuau

SEQ ID NO: 64465 - RNA, 19 nt, Artificial Sequence
  Description of Artificial Sequence: Synthetic oligonucleotide
  Antisense strand to SEQ ID NO: 64384
auaaggaaacagcucgcag

SEQ ID NO: 64466 - RNA, 19 nt, Artificial Sequence
  Description of Artificial Sequence: Synthetic oligonucleotide
  Sense strand starting at position 2534 of SEQ ID NO: 797
acuagagucaguugauaga

SEQ ID NO: 64467 - RNA, 19 nt, Artificial Sequence
  Description of Artificial Sequence: Synthetic oligonucleotide
  Antisense strand to SEQ ID NO: 64386
ucuaucaacugacucuagu

SEQ ID NO: 64468 - RNA, 19 nt, Artificial Sequence
  Description of Artificial Sequence: Synthetic oligonucleotide
  Sense strand starting at position 2532 of SEQ ID NO: 797
uaacuagagucaguugaua

SEQ ID NO: 64469 - RNA, 19 nt, Artificial Sequence
  Description of Artificial Sequence: Synthetic oligonucleotide
  Antisense strand to SEQ ID NO: 64388
uaucaacugacucuaguua

SEQ ID NO: 64470 - RNA, 19 nt, Artificial Sequence
  Description of Artificial Sequence: Synthetic oligonucleotide
  Sense strand starting at position 2516 of SEQ ID NO: 797
gagguacaugcauguauaa

SEQ ID NO: 64471 - RNA, 19 nt, Artificial Sequence
  Description of Artificial Sequence: Synthetic oligonucleotide
  Antisense strand to SEQ ID NO: 64390
uuauacaugcauguaccuc

SEQ ID NO: 64472 - RNA, 19 nt, Artificial Sequence
  Description of Artificial Sequence: Synthetic oligonucleotide
  Sense strand starting at position 758 of SEQ ID NO: 797
acagacuuauaugcaugua

SEQ ID NO: 64473 - RNA, 19 nt, Artificial Sequence
  Description of Artificial Sequence: Synthetic oligonucleotide
  Antisense strand to SEQ ID NO: 64392
uacaugcauauaagucugu

SEQ ID NO: 64474 - RNA, 19 nt, Artificial Sequence
  Description of Artificial Sequence: Synthetic oligonucleotide
  Sense strand starting at position 655 of SEQ ID NO: 797
cucagaaguugaucuaccu

SEQ ID NO: 64475 - RNA, 19 nt, Artificial Sequence
  Description of Artificial Sequence: Synthetic oligonucleotide
  Antisense strand to SEQ ID NO: 64394
agguagaucaacuucugag

SEQ ID NO: 64476 - RNA, 19 nt, Artificial Sequence
  Description of Artificial Sequence: Synthetic oligonucleotide
  Sense strand starting at position 562 of SEQ ID NO: 797
agguaucagccaugggaac

SEQ ID NO: 64477 - RNA, 19 nt, Artificial Sequence
  Description of Artificial Sequence: Synthetic oligonucleotide
  Antisense strand to SEQ ID NO: 64396
guucccauggcugauaccu

SEQ ID NO: 64478 - RNA, 19 nt, Artificial Sequence
  Description of Artificial Sequence: Synthetic oligonucleotide
  Sense strand starting at position 400 of SEQ ID NO: 797
gagcuagacucaucaucug

SEQ ID NO: 64479 - RNA, 19 nt, Artificial Sequence
  Description of Artificial Sequence: Synthetic oligonucleotide
  Antisense strand to SEQ ID NO: 64398
cagaugaugagucuagcuc

SEQ ID NO: 64480 - RNA, 19 nt, Artificial Sequence
  Description of Artificial Sequence: Synthetic oligonucleotide
  Sense strand starting at position 394 of SEQ ID NO: 797
uggguagagcuagacucau

SEQ ID NO: 64481 - RNA, 19 nt, Artificial Sequence
  Description of Artificial Sequence: Synthetic oligonucleotide
  Antisense strand to SEQ ID NO: 64400
augagucuagcucuaccca

SEQ ID NO: 64482 - RNA, 19 nt, Artificial Sequence
  Description of Artificial Sequence: Synthetic oligonucleotide
  Sense strand starting at position 359 of SEQ ID NO: 797
uucuuacuaugaucuggau

SEQ ID NO: 64483 - RNA, 19 nt, Artificial Sequence
  Description of Artificial Sequence: Synthetic oligonucleotide
  Antisense strand to SEQ ID NO: 64402
auccagaucauaguaagaa

SEQ ID NO: 64484 - RNA, 19 nt, Artificial Sequence
  Description of Artificial Sequence: Synthetic oligonucleotide
  Sense strand starting at position 283 of SEQ ID NO: 797
agaugaagcucuguacacu

SEQ ID NO: 64485 - RNA, 19 nt, Artificial Sequence
  Description of Artificial Sequence: Synthetic oligonucleotide
  Antisense strand to SEQ ID NO: 64404
aguguacagagcuucaucu

SEQ ID NO: 64486 - RNA, 19 nt, Artificial Sequence
  Description of Artificial Sequence: Synthetic oligonucleotide
  Sense strand starting at position 260 of SEQ ID NO: 797
gucacugaauuagcuauua

SEQ ID NO: 64487 - RNA, 19 nt, Artificial Sequence
  Description of Artificial Sequence: Synthetic oligonucleotide
  Antisense strand to SEQ ID NO: 64406
uaauagcuaauucagugac

SEQ ID NO: 64488 - RNA, 19 nt, Artificial Sequence
  Description of Artificial Sequence: Synthetic oligonucleotide
  Sense strand starting at position 252 of SEQ ID NO: 797
ccuauagagucacugaauu

SEQ ID NO: 64489 - RNA, 19 nt, Artificial Sequence
  Description of Artificial Sequence: Synthetic oligonucleotide
  Antisense strand to SEQ ID NO: 64408
aauucagugacucuauagg

SEQ ID NO: 64490 - RNA, 19 nt, Artificial Sequence
  Description of Artificial Sequence: Synthetic oligonucleotide
  Sense strand starting at position 213 of SEQ ID NO: 797
uggcuacuucuuuaaaguu

SEQ ID NO: 64491 - RNA, 19 nt, Artificial Sequence
  Description of Artificial Sequence: Synthetic oligonucleotide
  Antisense strand to SEQ ID NO: 64410
aacuuuaaagaaguagcca

SEQ ID NO: 64492 - RNA, 19 nt, Artificial Sequence
  Description of Artificial Sequence: Synthetic oligonucleotide
  Sense strand starting at position 211 of SEQ ID NO: 797
ccuggcuacuucuuuaaag

SEQ ID NO: 64493 - RNA, 19 nt, Artificial Sequence
  Description of Artificial Sequence: Synthetic oligonucleotide
  Antisense strand to SEQ ID NO: 64412
cuuuaaagaaguagccagg

SEQ ID NO: 64494 - RNA, 19 nt, Artificial Sequence
  Description of Artificial Sequence: Synthetic oligonucleotide
  Sense strand starting at position 128 of SEQ ID NO: 797
aaaggaguaaagugucagu

SEQ ID NO: 64495 - RNA, 19 nt, Artificial Sequence
  Description of Artificial Sequence: Synthetic oligonucleotide
  Antisense strand to SEQ ID NO: 64414
acugacacuuuacuccuuu

SEQ ID NO: 64496 - RNA, 19 nt, Artificial Sequence
  Description of Artificial Sequence: Synthetic oligonucleotide
  Sense strand starting at position 112 of SEQ ID NO: 797
ugcauagcuguugaugaaa

SEQ ID NO: 64497 - RNA, 19 nt, Artificial Sequence
  Description of Artificial Sequence: Synthetic oligonucleotide
  Antisense strand to SEQ ID NO: 64416
uuucaucaacagcuaugca

SEQ ID NO: 64498 - RNA, 19 nt, Artificial Sequence
  Description of Artificial Sequence: Synthetic oligonucleotide
  Sense strand starting at position 79 of SEQ ID NO: 797
aauggugugagccagugau

SEQ ID NO: 64499 - RNA, 19 nt, Artificial Sequence
  Description of Artificial Sequence: Synthetic oligonucleotide
  Antisense strand to SEQ ID NO: 64418
aucacuggcucacaccauu

SEQ ID NO: 64500 - RNA, 19 nt, Artificial Sequence
  Description of Artificial Sequence: Synthetic oligonucleotide
  Sense strand starting at position 24 of SEQ ID NO: 797
augaaauggagaugugugu

SEQ ID NO: 64501 - RNA, 19 nt, Artificial Sequence
  Description of Artificial Sequence: Synthetic oligonucleotide
  Antisense strand to SEQ ID NO: 64420
acacacaucuccauuucau

SEQ ID NO: 64502 - RNA, 19 nt, Artificial Sequence
  Description of Artificial Sequence: Synthetic oligonucleotide
  Sense strand starting at position 6 of SEQ ID NO: 797
ggaauugaguuggcagaaa

SEQ ID NO: 64503 - RNA, 19 nt, Artificial Sequence
  Description of Artificial Sequence: Synthetic oligonucleotide
  Antisense strand to SEQ ID NO: 64422
uuucugccaacucaauucc

SEQ ID NO: 64504 - RNA, 19 nt, Artificial Sequence
  Description of Artificial Sequence: Synthetic oligonucleotide
  Sense strand starting at position 5 of SEQ ID NO: 797
aggaauugaguuggcagaa

SEQ ID NO: 64505 - RNA, 19 nt, Artificial Sequence
  Description of Artificial Sequence: Synthetic oligonucleotide
  Antisense strand to SEQ ID NO: 64424
uucugccaacucaauuccu

SEQ ID NO: 64506 - RNA, 19 nt, Artificial Sequence
  Description of Artificial Sequence: Synthetic oligonucleotide
  Sense strand starting at position 4 of SEQ ID NO: 797
uaggaauugaguuggcaga

SEQ ID NO: 64507 - RNA, 19 nt, Artificial Sequence
  Description of Artificial Sequence: Synthetic oligonucleotide
  Antisense strand to SEQ ID NO: 64426
ucugccaacucaauuccua

SEQ ID NO: 64508 - RNA, 19 nt, Artificial Sequence
  Description of Artificial Sequence: Synthetic oligonucleotide
  Sense strand starting at position 3574 of SEQ ID NO: 798
guaccugucucccuaacua

SEQ ID NO: 64509 - RNA, 19 nt, Artificial Sequence
  Description of Artificial Sequence: Synthetic oligonucleotide
  Antisense strand to SEQ ID NO: 64428
uaguuagggagacagguac

SEQ ID NO: 64510 - RNA, 19 nt, Artificial Sequence
  Description of Artificial Sequence: Synthetic oligonucleotide
  Sense strand starting at position 3541 of SEQ ID NO: 798
guugguagucagugggcaa

SEQ ID NO: 64511 - RNA, 19 nt, Artificial Sequence
  Description of Artificial Sequence: Synthetic oligonucleotide
  Antisense strand to SEQ ID NO: 64430
uugcccacugacuaccaac

SEQ ID NO: 64512 - RNA, 19 nt, Artificial Sequence
  Description of Artificial Sequence: Synthetic oligonucleotide
  Sense strand starting at position 3533 of SEQ ID NO: 798
aauauaauguugguaguca

SEQ ID NO: 64513 - RNA, 19 nt, Artificial Sequence
  Description of Artificial Sequence: Synthetic oligonucleotide
  Antisense strand to SEQ ID NO: 64432
ugacuaccaacauuauauu

SEQ ID NO: 64514 - RNA, 19 nt, Artificial Sequence
  Description of Artificial Sequence: Synthetic oligonucleotide
  Sense strand starting at position 3493 of SEQ ID NO: 798
ucguuuaucuucuuaggca

SEQ ID NO: 64515 - RNA, 19 nt, Artificial Sequence
  Description of Artificial Sequence: Synthetic oligonucleotide
  Antisense strand to SEQ ID NO: 64434
ugccuaagaagauaaacga

SEQ ID NO: 64516 - RNA, 19 nt, Artificial Sequence
  Description of Artificial Sequence: Synthetic oligonucleotide
  Sense strand starting at position 3488 of SEQ ID NO: 798
ugaauucguuuaucuucuu

SEQ ID NO: 64517 - RNA, 19 nt, Artificial Sequence
  Description of Artificial Sequence: Synthetic oligonucleotide
  Antisense strand to SEQ ID NO: 64436
aagaagauaaacgaauuca

SEQ ID NO: 64518 - RNA, 19 nt, Artificial Sequence
  Description of Artificial Sequence: Synthetic oligonucleotide
  Sense strand starting at position 3486 of SEQ ID NO: 798
agugaauucguuuaucuuc

SEQ ID NO: 64519 - RNA, 19 nt, Artificial Sequence
  Description of Artificial Sequence: Synthetic oligonucleotide
  Antisense strand to SEQ ID NO: 64438
gaagauaaacgaauucacu

SEQ ID NO: 64520 - RNA, 19 nt, Artificial Sequence
  Description of Artificial Sequence: Synthetic oligonucleotide
  Sense strand starting at position 3483 of SEQ ID NO: 798
uugagugaauucguuuauc

SEQ ID NO: 64521 - RNA, 19 nt, Artificial Sequence
  Description of Artificial Sequence: Synthetic oligonucleotide
  Antisense strand to SEQ ID NO: 64440
gauaaacgaauucacucaa

SEQ ID NO: 64522 - RNA, 19 nt, Artificial Sequence
  Description of Artificial Sequence: Synthetic oligonucleotide
  Sense strand starting at position 3473 of SEQ ID NO: 798
gauaacauauuugagugaa

SEQ ID NO: 64523 - RNA, 19 nt, Artificial Sequence
  Description of Artificial Sequence: Synthetic oligonucleotide
  Antisense strand to SEQ ID NO: 64442
uucacucaaauauguuauc

SEQ ID NO: 64524 - RNA, 19 nt, Artificial Sequence
  Description of Artificial Sequence: Synthetic oligonucleotide
  Sense strand starting at position 3388 of SEQ ID NO: 798
guuggagucuugucucauu

SEQ ID NO: 64525 - RNA, 19 nt, Artificial Sequence
  Description of Artificial Sequence: Synthetic oligonucleotide
  Antisense strand to SEQ ID NO: 64444
aaugagacaagacuccaac

SEQ ID NO: 64526 - RNA, 19 nt, Artificial Sequence
  Description of Artificial Sequence: Synthetic oligonucleotide
  Sense strand starting at position 3347 of SEQ ID NO: 798
cuguccuauccauauuggu

SEQ ID NO: 64527 - RNA, 19 nt, Artificial Sequence
  Description of Artificial Sequence: Synthetic oligonucleotide
  Antisense strand to SEQ ID NO: 64446
accaauauggauaggacag

SEQ ID NO: 64528 - RNA, 19 nt, Artificial Sequence
  Description of Artificial Sequence: Synthetic oligonucleotide
  Sense strand starting at position 3308 of SEQ ID NO: 798
gguauagugucauccuuau

SEQ ID NO: 64529 - RNA, 19 nt, Artificial Sequence
  Description of Artificial Sequence: Synthetic oligonucleotide
  Antisense strand to SEQ ID NO: 64448
auaaggaugacacuauacc

SEQ ID NO: 64530 - RNA, 19 nt, Artificial Sequence
  Description of Artificial Sequence: Synthetic oligonucleotide
  Sense strand starting at position 3211 of SEQ ID NO: 798
cugggaccgucuuuagaug

SEQ ID NO: 64531 - RNA, 19 nt, Artificial Sequence
  Description of Artificial Sequence: Synthetic oligonucleotide
  Antisense strand to SEQ ID NO: 64450
caucuaaagacggucccag

SEQ ID NO: 64532 - RNA, 19 nt, Artificial Sequence
  Description of Artificial Sequence: Synthetic oligonucleotide
  Sense strand starting at position 3044 of SEQ ID NO: 798
gagcaugaguuugcaaauc

SEQ ID NO: 64533 - RNA, 19 nt, Artificial Sequence
  Description of Artificial Sequence: Synthetic oligonucleotide
  Antisense strand to SEQ ID NO: 64452
gauuugcaaacucaugcuc

SEQ ID NO: 64534 - RNA, 19 nt, Artificial Sequence
  Description of Artificial Sequence: Synthetic oligonucleotide
  Sense strand starting at position 3043 of SEQ ID NO: 798
ggagcaugaguuugcaaau

SEQ ID NO: 64535 - RNA, 19 nt, Artificial Sequence
  Description of Artificial Sequence: Synthetic oligonucleotide
  Antisense strand to SEQ ID NO: 64454
auuugcaaacucaugcucc

SEQ ID NO: 64536 - RNA, 19 nt, Artificial Sequence
  Description of Artificial Sequence: Synthetic oligonucleotide
  Sense strand starting at position 3037 of SEQ ID NO: 798
gaggauggagcaugaguuu

SEQ ID NO: 64537 - RNA, 19 nt, Artificial Sequence
  Description of Artificial Sequence: Synthetic oligonucleotide
  Antisense strand to SEQ ID NO: 64456
aaacucaugcuccauccuc

SEQ ID NO: 64538 - RNA, 19 nt, Artificial Sequence
  Description of Artificial Sequence: Synthetic oligonucleotide
  Sense strand starting at position 3004 of SEQ ID NO: 798
cggccugagucauuucuuu

SEQ ID NO: 64539 - RNA, 19 nt, Artificial Sequence
  Description of Artificial Sequence: Synthetic oligonucleotide
  Antisense strand to SEQ ID NO: 64458
aaagaaaugacucaggccg

SEQ ID NO: 64540 - RNA, 19 nt, Artificial Sequence
  Description of Artificial Sequence: Synthetic oligonucleotide
  Sense strand starting at position 2357 of SEQ ID NO: 798
ccaagcugucagugagaac

SEQ ID NO: 64541 - RNA, 19 nt, Artificial Sequence
  Description of Artificial Sequence: Synthetic oligonucleotide
  Antisense strand to SEQ ID NO: 64460
guucucacugacagcuugg

SEQ ID NO: 64542 - RNA, 19 nt, Artificial Sequence
  Description of Artificial Sequence: Synthetic oligonucleotide
  Sense strand starting at position 2297 of SEQ ID NO: 798
gguucuggugccugaugga

SEQ ID NO: 64543 - RNA, 19 nt, Artificial Sequence
  Description of Artificial Sequence: Synthetic oligonucleotide
  Antisense strand to SEQ ID NO: 64462
uccaucaggcaccagaacc

SEQ ID NO: 64544 - RNA, 19 nt, Artificial Sequence
  Description of Artificial Sequence: Synthetic oligonucleotide
  Sense strand starting at position 2228 of SEQ ID NO: 798
aggaaagccucguuuccuu

SEQ ID NO: 64545 - RNA, 19 nt, Artificial Sequence
  Description of Artificial Sequence: Synthetic oligonucleotide
  Antisense strand to SEQ ID NO: 64464
aaggaaacgaggcuuuccu

SEQ ID NO: 64546 - RNA, 19 nt, Artificial Sequence
  Description of Artificial Sequence: Synthetic oligonucleotide
  Sense strand starting at position 2154 of SEQ ID NO: 798
gcgucagucaugcagauug

SEQ ID NO: 64547 - RNA, 19 nt, Artificial Sequence
  Description of Artificial Sequence: Synthetic oligonucleotide
  Antisense strand to SEQ ID NO: 64466
caaucugcaugacugacgc

SEQ ID NO: 64548 - RNA, 19 nt, Artificial Sequence
  Description of Artificial Sequence: Synthetic oligonucleotide
  Sense strand starting at position 2153 of SEQ ID NO: 798
ugcgucagucaugcagauu

SEQ ID NO: 64549 - RNA, 19 nt, Artificial Sequence
  Description of Artificial Sequence: Synthetic oligonucleotide
  Antisense strand to SEQ ID NO: 64468
aaucugcaugacugacgca

SEQ ID NO: 64550 - RNA, 19 nt, Artificial Sequence
  Description of Artificial Sequence: Synthetic oligonucleotide
  Sense strand starting at position 2058 of SEQ ID NO: 798
uaucuugcgcgucugaaua

SEQ ID NO: 64551 - RNA, 19 nt, Artificial Sequence
  Description of Artificial Sequence: Synthetic oligonucleotide
  Antisense strand to SEQ ID NO: 64470
uauucagacgcgcaagaua

SEQ ID NO: 64552 - RNA, 19 nt, Artificial Sequence
  Description of Artificial Sequence: Synthetic oligonucleotide
  Sense strand starting at position 2057 of SEQ ID NO: 798
guaucuugcgcgucugaau

SEQ ID NO: 64553 - RNA, 19 nt, Artificial Sequence
  Description of Artificial Sequence: Synthetic oligonucleotide
  Antisense strand to SEQ ID NO: 64472
auucagacgcgcaagauac

SEQ ID NO: 64554 - RNA, 19 nt, Artificial Sequence
  Description of Artificial Sequence: Synthetic oligonucleotide
  Sense strand starting at position 2056 of SEQ ID NO: 798
cguaucuugcgcgucugaa

SEQ ID NO: 64555 - RNA, 19 nt, Artificial Sequence
  Description of Artificial Sequence: Synthetic oligonucleotide
  Antisense strand to SEQ ID NO: 64474
uucagacgcgcaagauacg

SEQ ID NO: 64556 - RNA, 19 nt, Artificial Sequence
  Description of Artificial Sequence: Synthetic oligonucleotide
  Sense strand starting at position 2041 of SEQ ID NO: 798
gaggacugcugguuacgua

SEQ ID NO: 64557 - RNA, 19 nt, Artificial Sequence
  Description of Artificial Sequence: Synthetic oligonucleotide
  Antisense strand to SEQ ID NO: 64476
uacguaaccagcaguccuc

SEQ ID NO: 64558 - RNA, 19 nt, Artificial Sequence
  Description of Artificial Sequence: Synthetic oligonucleotide
  Sense strand starting at position 1597 of SEQ ID NO: 798
gugacuucucacggcacuu

SEQ ID NO: 64559 - RNA, 19 nt, Artificial Sequence
  Description of Artificial Sequence: Synthetic oligonucleotide
  Antisense strand to SEQ ID NO: 64478
aagugccgugagaagucac

SEQ ID NO: 64560 - RNA, 19 nt, Artificial Sequence
  Description of Artificial Sequence: Synthetic oligonucleotide
  Sense strand starting at position 1555 of SEQ ID NO: 798
gaggucugcacccagaagu

SEQ ID NO: 64561 - RNA, 19 nt, Artificial Sequence
  Description of Artificial Sequence: Synthetic oligonucleotide
  Antisense strand to SEQ ID NO: 64480
acuucugggugcagaccuc

SEQ ID NO: 64562 - RNA, 19 nt, Artificial Sequence
  Description of Artificial Sequence: Synthetic oligonucleotide
  Sense strand starting at position 1290 of SEQ ID NO: 798
accaaugucugucugaaag

SEQ ID NO: 64563 - RNA, 19 nt, Artificial Sequence
  Description of Artificial Sequence: Synthetic oligonucleotide
  Antisense strand to SEQ ID NO: 64482
cuuucagacagacauuggu

SEQ ID NO: 64564 - RNA, 19 nt, Artificial Sequence
  Description of Artificial Sequence: Synthetic oligonucleotide
  Sense strand starting at position 1288 of SEQ ID NO: 798
acaccaaugucugucugaa

SEQ ID NO: 64565 - RNA, 19 nt, Artificial Sequence
  Description of Artificial Sequence: Synthetic oligonucleotide
  Antisense strand to SEQ ID NO: 64484
uucagacagacauuggugu

SEQ ID NO: 64566 - RNA, 19 nt, Artificial Sequence
  Description of Artificial Sequence: Synthetic oligonucleotide
  Sense strand starting at position 1253 of SEQ ID NO: 798
cguuucccucucuaucaua

SEQ ID NO: 64567 - RNA, 19 nt, Artificial Sequence
  Description of Artificial Sequence: Synthetic oligonucleotide
  Antisense strand to SEQ ID NO: 64486
uaugauagagagggaaacg

SEQ ID NO: 64568 - RNA, 19 nt, Artificial Sequence
  Description of Artificial Sequence: Synthetic oligonucleotide
  Sense strand starting at position 1252 of SEQ ID NO: 798
ccguuucccucucuaucau

SEQ ID NO: 64569 - RNA, 19 nt, Artificial Sequence
  Description of Artificial Sequence: Synthetic oligonucleotide
  Antisense strand to SEQ ID NO: 64488
augauagagagggaaacgg

SEQ ID NO: 64570 - RNA, 19 nt, Artificial Sequence
  Description of Artificial Sequence: Synthetic oligonucleotide
  Sense strand starting at position 1226 of SEQ ID NO: 798
uuauuugggucagauaaug

SEQ ID NO: 64571 - RNA, 19 nt, Artificial Sequence
  Description of Artificial Sequence: Synthetic oligonucleotide
  Antisense strand to SEQ ID NO: 64490
cauuaucugacccaaauaa

SEQ ID NO: 64572 - RNA, 19 nt, Artificial Sequence
  Description of Artificial Sequence: Synthetic oligonucleotide
  Sense strand starting at position 1221 of SEQ ID NO: 798
ggucauuauuugggucaga

SEQ ID NO: 64573 - RNA, 19 nt, Artificial Sequence
  Description of Artificial Sequence: Synthetic oligonucleotide
  Antisense strand to SEQ ID NO: 64492
ucugacccaaauaaugacc

SEQ ID NO: 64574 - RNA, 19 nt, Artificial Sequence
  Description of Artificial Sequence: Synthetic oligonucleotide
  Sense strand starting at position 697 of SEQ ID NO: 798
ggcucaaggaaguauguga

SEQ ID NO: 64575 - RNA, 19 nt, Artificial Sequence
  Description of Artificial Sequence: Synthetic oligonucleotide
  Antisense strand to SEQ ID NO: 64494
ucacauacuuccuugagcc

SEQ ID NO: 64576 - RNA, 19 nt, Artificial Sequence
  Description of Artificial Sequence: Synthetic oligonucleotide
  Sense strand starting at position 582 of SEQ ID NO: 798
uguuacaucguugauagua

SEQ ID NO: 64577 - RNA, 19 nt, Artificial Sequence
  Description of Artificial Sequence: Synthetic oligonucleotide
  Antisense strand to SEQ ID NO: 64496
uacuaucaacgauguaaca

SEQ ID NO: 64578 - RNA, 19 nt, Artificial Sequence
  Description of Artificial Sequence: Synthetic oligonucleotide
  Sense strand starting at position 581 of SEQ ID NO: 798
uuguuacaucguugauagu

SEQ ID NO: 64579 - RNA, 19 nt, Artificial Sequence
  Description of Artificial Sequence: Synthetic oligonucleotide
  Antisense strand to SEQ ID NO: 64498
acuaucaacgauguaacaa

SEQ ID NO: 64580 - RNA, 19 nt, Artificial Sequence
  Description of Artificial Sequence: Synthetic oligonucleotide
  Sense strand starting at position 580 of SEQ ID NO: 798
uuuguuacaucguugauag

SEQ ID NO: 64581 - RNA, 19 nt, Artificial Sequence
  Description of Artificial Sequence: Synthetic oligonucleotide
  Antisense strand to SEQ ID NO: 64500
cuaucaacgauguaacaaa

SEQ ID NO: 64582 - RNA, 19 nt, Artificial Sequence
  Description of Artificial Sequence: Synthetic oligonucleotide
  Sense strand starting at position 415 of SEQ ID NO: 798
ccaagauaauuagaguaau

SEQ ID NO: 64583 - RNA, 19 nt, Artificial Sequence
  Description of Artificial Sequence: Synthetic oligonucleotide
  Antisense strand to SEQ ID NO: 64502
auuacucuaauuaucuugg

SEQ ID NO: 64584 - RNA, 19 nt, Artificial Sequence
  Description of Artificial Sequence: Synthetic oligonucleotide
  Sense strand starting at position 387 of SEQ ID NO: 798
agcucuugacaacaaagua

SEQ ID NO: 64585 - RNA, 19 nt, Artificial Sequence
  Description of Artificial Sequence: Synthetic oligonucleotide
  Antisense strand to SEQ ID NO: 64504
uacuuuguugucaagagcu

SEQ ID NO: 64586 - RNA, 19 nt, Artificial Sequence
  Description of Artificial Sequence: Synthetic oligonucleotide
  Sense strand starting at position 382 of SEQ ID NO: 798
gcuugagcucuugacaaca

SEQ ID NO: 64587 - RNA, 19 nt, Artificial Sequence
  Description of Artificial Sequence: Synthetic oligonucleotide
  Antisense strand to SEQ ID NO: 64506
uguugucaagagcucaagc

SEQ ID NO: 64588 - RNA, 19 nt, Artificial Sequence
  Description of Artificial Sequence: Synthetic oligonucleotide
  Sense strand starting at position 3817 of SEQ ID NO: 799
gcugaucaccucugagaag

SEQ ID NO: 64589 - RNA, 19 nt, Artificial Sequence
  Description of Artificial Sequence: Synthetic oligonucleotide
  Antisense strand to SEQ ID NO: 64508
cuucucagaggugaucagc

SEQ ID NO: 64590 - RNA, 19 nt, Artificial Sequence
  Description of Artificial Sequence: Synthetic oligonucleotide
  Sense strand starting at position 3803 of SEQ ID NO: 799
gaggauaucuuggugcuga

SEQ ID NO: 64591 - RNA, 19 nt, Artificial Sequence
  Description of Artificial Sequence: Synthetic oligonucleotide
  Antisense strand to SEQ ID NO: 64510
ucagcaccaagauauccuc

SEQ ID NO: 64592 - RNA, 19 nt, Artificial Sequence
  Description of Artificial Sequence: Synthetic oligonucleotide
  Sense strand starting at position 3794 of SEQ ID NO: 799
agcuuaucugaggauaucu

SEQ ID NO: 64593 - RNA, 19 nt, Artificial Sequence
  Description of Artificial Sequence: Synthetic oligonucleotide
  Antisense strand to SEQ ID NO: 64512
agauauccucagauaagcu

SEQ ID NO: 64594 - RNA, 19 nt, Artificial Sequence
  Description of Artificial Sequence: Synthetic oligonucleotide
  Sense strand starting at position 3793 of SEQ ID NO: 799
gagcuuaucugaggauauc

SEQ ID NO: 64595 - RNA, 19 nt, Artificial Sequence
  Description of Artificial Sequence: Synthetic oligonucleotide
  Antisense strand to SEQ ID NO: 64514
gauauccucagauaagcuc

SEQ ID NO: 64596 - RNA, 19 nt, Artificial Sequence
  Description of Artificial Sequence: Synthetic oligonucleotide
  Sense strand starting at position 3791 of SEQ ID NO: 799
aagagcuuaucugaggaua

SEQ ID NO: 64597 - RNA, 19 nt, Artificial Sequence
  Description of Artificial Sequence: Synthetic oligonucleotide
  Antisense strand to SEQ ID NO: 64516
uauccucagauaagcucuu

SEQ ID NO: 64598 - RNA, 19 nt, Artificial Sequence
  Description of Artificial Sequence: Synthetic oligonucleotide
  Sense strand starting at position 3789 of SEQ ID NO: 799
cgaagagcuuaucugagga

SEQ ID NO: 64599 - RNA, 19 nt, Artificial Sequence
  Description of Artificial Sequence: Synthetic oligonucleotide
  Antisense strand to SEQ ID NO: 64518
uccucagauaagcucuucg

SEQ ID NO: 64600 - RNA, 19 nt, Artificial Sequence
  Description of Artificial Sequence: Synthetic oligonucleotide
  Sense strand starting at position 3786 of SEQ ID NO: 799
cugcgaagagcuuaucuga

SEQ ID NO: 64601 - RNA, 19 nt, Artificial Sequence
  Description of Artificial Sequence: Synthetic oligonucleotide
  Antisense strand to SEQ ID NO: 64520
ucagauaagcucuucgcag

SEQ ID NO: 64602 - RNA, 19 nt, Artificial Sequence
  Description of Artificial Sequence: Synthetic oligonucleotide
  Sense strand starting at position 3781 of SEQ ID NO: 799
aauaucugcgaagagcuua

SEQ ID NO: 64603 - RNA, 19 nt, Artificial Sequence
  Description of Artificial Sequence: Synthetic oligonucleotide
  Antisense strand to SEQ ID NO: 64522
uaagcucuucgcagauauu

SEQ ID NO: 64604 - RNA, 19 nt, Artificial Sequence
  Description of Artificial Sequence: Synthetic oligonucleotide
  Sense strand starting at position 3756 of SEQ ID NO: 799
agugguucauggucgcaau

SEQ ID NO: 64605 - RNA, 19 nt, Artificial Sequence
  Description of Artificial Sequence: Synthetic oligonucleotide
  Antisense strand to SEQ ID NO: 64524
auugcgaccaugaaccacu

SEQ ID NO: 64606 - RNA, 19 nt, Artificial Sequence
  Description of Artificial Sequence: Synthetic oligonucleotide
  Sense strand starting at position 3740 of SEQ ID NO: 799
ggaacuaagcagugagagu

SEQ ID NO: 64607 - RNA, 19 nt, Artificial Sequence
  Description of Artificial Sequence: Synthetic oligonucleotide
  Antisense strand to SEQ ID NO: 64526
acucucacugcuuaguucc

SEQ ID NO: 64608 - RNA, 19 nt, Artificial Sequence
  Description of Artificial Sequence: Synthetic oligonucleotide
  Sense strand starting at position 3729 of SEQ ID NO: 799
uccugagcuuuggaacuaa

SEQ ID NO: 64609 - RNA, 19 nt, Artificial Sequence
  Description of Artificial Sequence: Synthetic oligonucleotide
  Antisense strand to SEQ ID NO: 64528
uuaguuccaaagcucagga

SEQ ID NO: 64610 - RNA, 19 nt, Artificial Sequence
  Description of Artificial Sequence: Synthetic oligonucleotide
  Sense strand starting at position 3727 of SEQ ID NO: 799
cuuccugagcuuuggaacu

SEQ ID NO: 64611 - RNA, 19 nt, Artificial Sequence
  Description of Artificial Sequence: Synthetic oligonucleotide
  Antisense strand to SEQ ID NO: 64530
aguuccaaagcucaggaag

SEQ ID NO: 64612 - RNA, 19 nt, Artificial Sequence
  Description of Artificial Sequence: Synthetic oligonucleotide
  Sense strand starting at position 3606 of SEQ ID NO: 799
gaaguaggugcucagcaaa

SEQ ID NO: 64613 - RNA, 19 nt, Artificial Sequence
  Description of Artificial Sequence: Synthetic oligonucleotide
  Antisense strand to SEQ ID NO: 64532
uuugcugagcaccuacuuc

SEQ ID NO: 64614 - RNA, 19 nt, Artificial Sequence
  Description of Artificial Sequence: Synthetic oligonucleotide
  Sense strand starting at position 3594 of SEQ ID NO: 799
gguguauuggaugaaguag

SEQ ID NO: 64615 - RNA, 19 nt, Artificial Sequence
  Description of Artificial Sequence: Synthetic oligonucleotide
  Antisense strand to SEQ ID NO: 64534
cuacuucauccaauacacc

SEQ ID NO: 64616 - RNA, 19 nt, Artificial Sequence
  Description of Artificial Sequence: Synthetic oligonucleotide
  Sense strand starting at position 3593 of SEQ ID NO: 799
ugguguauuggaugaagua

SEQ ID NO: 64617 - RNA, 19 nt, Artificial Sequence
  Description of Artificial Sequence: Synthetic oligonucleotide
  Antisense strand to SEQ ID NO: 64536
uacuucauccaauacacca

SEQ ID NO: 64618 - RNA, 19 nt, Artificial Sequence
  Description of Artificial Sequence: Synthetic oligonucleotide
  Sense strand starting at position 3591 of SEQ ID NO: 799
ggugguguauuggaugaag

SEQ ID NO: 64619 - RNA, 19 nt, Artificial Sequence
  Description of Artificial Sequence: Synthetic oligonucleotide
  Antisense strand to SEQ ID NO: 64538
cuucauccaauacaccacc

SEQ ID NO: 64620 - RNA, 19 nt, Artificial Sequence
  Description of Artificial Sequence: Synthetic oligonucleotide
  Sense strand starting at position 3526 of SEQ ID NO: 799
cccggugagaggcauuauu

SEQ ID NO: 64621 - RNA, 19 nt, Artificial Sequence
  Description of Artificial Sequence: Synthetic oligonucleotide
  Antisense strand to SEQ ID NO: 64540
aauaaugccucucaccggg

SEQ ID NO: 64622 - RNA, 19 nt, Artificial Sequence
  Description of Artificial Sequence: Synthetic oligonucleotide
  Sense strand starting at position 3474 of SEQ ID NO: 799
ggauuaauuuaggaguuaa

SEQ ID NO: 64623 - RNA, 19 nt, Artificial Sequence
  Description of Artificial Sequence: Synthetic oligonucleotide
  Antisense strand to SEQ ID NO: 64542
uuaacuccuaaauuaaucc

SEQ ID NO: 64624 - RNA, 19 nt, Artificial Sequence
  Description of Artificial Sequence: Synthetic oligonucleotide
  Sense strand starting at position 3473 of SEQ ID NO: 799
uggauuaauuuaggaguua

SEQ ID NO: 64625 - RNA, 19 nt, Artificial Sequence
  Description of Artificial Sequence: Synthetic oligonucleotide
  Antisense strand to SEQ ID NO: 64544
uaacuccuaaauuaaucca

SEQ ID NO: 64626 - RNA, 19 nt, Artificial Sequence
  Description of Artificial Sequence: Synthetic oligonucleotide
  Sense strand starting at position 3462 of SEQ ID NO: 799
ugucccuuccauggauuaa

SEQ ID NO: 64627 - RNA, 19 nt, Artificial Sequence
  Description of Artificial Sequence: Synthetic oligonucleotide
  Antisense strand to SEQ ID NO: 64546
uuaauccauggaagggaca

SEQ ID NO: 64628 - RNA, 19 nt, Artificial Sequence
  Description of Artificial Sequence: Synthetic oligonucleotide
  Sense strand starting at position 3461 of SEQ ID NO: 799
gugucccuuccauggauua

SEQ ID NO: 64629 - RNA, 19 nt, Artificial Sequence
  Description of Artificial Sequence: Synthetic oligonucleotide
  Antisense strand to SEQ ID NO: 64548
uaauccauggaagggacac

SEQ ID NO: 64630 - RNA, 19 nt, Artificial Sequence
  Description of Artificial Sequence: Synthetic oligonucleotide
  Sense strand starting at position 3374 of SEQ ID NO: 799
ggguccuuuggguacagaa

SEQ ID NO: 64631 - RNA, 19 nt, Artificial Sequence
  Description of Artificial Sequence: Synthetic oligonucleotide
  Antisense strand to SEQ ID NO: 64550
uucuguacccaaaggaccc

SEQ ID NO: 64632 - RNA, 19 nt, Artificial Sequence
  Description of Artificial Sequence: Synthetic oligonucleotide
  Sense strand starting at position 3271 of SEQ ID NO: 799
gcccuagccugcuuucuua

SEQ ID NO: 64633 - RNA, 19 nt, Artificial Sequence
  Description of Artificial Sequence: Synthetic oligonucleotide
  Antisense strand to SEQ ID NO: 64552
uaagaaagcaggcuagggc

SEQ ID NO: 64634 - RNA, 19 nt, Artificial Sequence
  Description of Artificial Sequence: Synthetic oligonucleotide
  Sense strand starting at position 2919 of SEQ ID NO: 799
ccaguuugcuugcuuuauu

SEQ ID NO: 64635 - RNA, 19 nt, Artificial Sequence
  Description of Artificial Sequence: Synthetic oligonucleotide
  Antisense strand to SEQ ID NO: 64554
aauaaagcaagcaaacugg

SEQ ID NO: 64636 - RNA, 19 nt, Artificial Sequence
  Description of Artificial Sequence: Synthetic oligonucleotide
  Sense strand starting at position 2905 of SEQ ID NO: 799
gaaugaggcugguuccagu

SEQ ID NO: 64637 - RNA, 19 nt, Artificial Sequence
  Description of Artificial Sequence: Synthetic oligonucleotide
  Antisense strand to SEQ ID NO: 64556
acuggaaccagccucauuc

SEQ ID NO: 64638 - RNA, 19 nt, Artificial Sequence
  Description of Artificial Sequence: Synthetic oligonucleotide
  Sense strand starting at position 2857 of SEQ ID NO: 799
ggauuugcuucggaauuuc

SEQ ID NO: 64639 - RNA, 19 nt, Artificial Sequence
  Description of Artificial Sequence: Synthetic oligonucleotide
  Antisense strand to SEQ ID NO: 64558
gaaauuccgaagcaaaucc

SEQ ID NO: 64640 - RNA, 19 nt, Artificial Sequence
  Description of Artificial Sequence: Synthetic oligonucleotide
  Sense strand starting at position 2856 of SEQ ID NO: 799
gggauuugcuucggaauuu

SEQ ID NO: 64641 - RNA, 19 nt, Artificial Sequence
  Description of Artificial Sequence: Synthetic oligonucleotide
  Antisense strand to SEQ ID NO: 64560
aaauuccgaagcaaauccc

SEQ ID NO: 64642 - RNA, 19 nt, Artificial Sequence
  Description of Artificial Sequence: Synthetic oligonucleotide
  Sense strand starting at position 2694 of SEQ ID NO: 799
auuguugugucaguuauuc

SEQ ID NO: 64643 - RNA, 19 nt, Artificial Sequence
  Description of Artificial Sequence: Synthetic oligonucleotide
  Antisense strand to SEQ ID NO: 64562
gaauaacugacacaacaau

SEQ ID NO: 64644 - RNA, 19 nt, Artificial Sequence
  Description of Artificial Sequence: Synthetic oligonucleotide
  Sense strand starting at position 2690 of SEQ ID NO: 799
aaucauuguugugucaguu

SEQ ID NO: 64645 - RNA, 19 nt, Artificial Sequence
  Description of Artificial Sequence: Synthetic oligonucleotide
  Antisense strand to SEQ ID NO: 64564
aacugacacaacaaugauu

SEQ ID NO: 64646 - RNA, 19 nt, Artificial Sequence
  Description of Artificial Sequence: Synthetic oligonucleotide
  Sense strand starting at position 2667 of SEQ ID NO: 799
uccugaagcugcucacaaa

SEQ ID NO: 64647 - RNA, 19 nt, Artificial Sequence
  Description of Artificial Sequence: Synthetic oligonucleotide
  Antisense strand to SEQ ID NO: 64566
uuugugagcagcuucagga

SEQ ID NO: 64648 - RNA, 19 nt, Artificial Sequence
  Description of Artificial Sequence: Synthetic oligonucleotide
  Sense strand starting at position 2456 of SEQ ID NO: 799
ggcgacuuugggagcaagu

SEQ ID NO: 64649 - RNA, 19 nt, Artificial Sequence
  Description of Artificial Sequence: Synthetic oligonucleotide
  Antisense strand to SEQ ID NO: 64568
acuugcucccaaagucgcc

SEQ ID NO: 64650 - RNA, 19 nt, Artificial Sequence
  Description of Artificial Sequence: Synthetic oligonucleotide
  Sense strand starting at position 1278 of SEQ ID NO: 799
gaguucugcccacgccauu

SEQ ID NO: 64651 - RNA, 19 nt, Artificial Sequence
  Description of Artificial Sequence: Synthetic oligonucleotide
  Antisense strand to SEQ ID NO: 64570
aauggcgugggcagaacuc

SEQ ID NO: 64652 - RNA, 19 nt, Artificial Sequence
  Description of Artificial Sequence: Synthetic oligonucleotide
  Sense strand starting at position 1276 of SEQ ID NO: 799
aggaguucugcccacgcca

SEQ ID NO: 64653 - RNA, 19 nt, Artificial Sequence
  Description of Artificial Sequence: Synthetic oligonucleotide
  Antisense strand to SEQ ID NO: 64572
uggcgugggcagaacuccu

SEQ ID NO: 64654 - RNA, 19 nt, Artificial Sequence
  Description of Artificial Sequence: Synthetic oligonucleotide
  Sense strand starting at position 1023 of SEQ ID NO: 799
ucucgugacuccuagggaa

SEQ ID NO: 64655 - RNA, 19 nt, Artificial Sequence
  Description of Artificial Sequence: Synthetic oligonucleotide
  Antisense strand to SEQ ID NO: 64574
uucccuaggagucacgaga

SEQ ID NO: 64656 - RNA, 19 nt, Artificial Sequence
  Description of Artificial Sequence: Synthetic oligonucleotide
  Sense strand starting at position 979 of SEQ ID NO: 799
agucuuugcacugagguga

SEQ ID NO: 64657 - RNA, 19 nt, Artificial Sequence
  Description of Artificial Sequence: Synthetic oligonucleotide
  Antisense strand to SEQ ID NO: 64576
ucaccucagugcaaagacu

SEQ ID NO: 64658 - RNA, 19 nt, Artificial Sequence
  Description of Artificial Sequence: Synthetic oligonucleotide
  Sense strand starting at position 931 of SEQ ID NO: 799
cucugagauccugaaugcu

SEQ ID NO: 64659 - RNA, 19 nt, Artificial Sequence
  Description of Artificial Sequence: Synthetic oligonucleotide
  Antisense strand to SEQ ID NO: 64578
agcauucaggaucucagag

SEQ ID NO: 64660 - RNA, 19 nt, Artificial Sequence
  Description of Artificial Sequence: Synthetic oligonucleotide
  Sense strand starting at position 550 of SEQ ID NO: 799
uucagagccgucuggauuu

SEQ ID NO: 64661 - RNA, 19 nt, Artificial Sequence
  Description of Artificial Sequence: Synthetic oligonucleotide
  Antisense strand to SEQ ID NO: 64580
aaauccagacggcucugaa

SEQ ID NO: 64662 - RNA, 19 nt, Artificial Sequence
  Description of Artificial Sequence: Synthetic oligonucleotide
  Sense strand starting at position 459 of SEQ ID NO: 799
uaauaaagaugagaagagu

SEQ ID NO: 64663 - RNA, 19 nt, Artificial Sequence
  Description of Artificial Sequence: Synthetic oligonucleotide
  Antisense strand to SEQ ID NO: 64582
acucuucucaucuuuauua

SEQ ID NO: 64664 - RNA, 19 nt, Artificial Sequence
  Description of Artificial Sequence: Synthetic oligonucleotide
  Sense strand starting at position 423 of SEQ ID NO: 799
gcaggaaguguauauaaau

SEQ ID NO: 64665 - RNA, 19 nt, Artificial Sequence
  Description of Artificial Sequence: Synthetic oligonucleotide
  Antisense strand to SEQ ID NO: 64584
auuuauauacacuuccugc

SEQ ID NO: 64666 - RNA, 19 nt, Artificial Sequence
  Description of Artificial Sequence: Synthetic oligonucleotide
  Sense strand starting at position 274 of SEQ ID NO: 799
agcuuuccugcccaaggaa

SEQ ID NO: 64667 - RNA, 19 nt, Artificial Sequence
  Description of Artificial Sequence: Synthetic oligonucleotide
  Antisense strand to SEQ ID NO: 64586
uuccuugggcaggaaagcu

SEQ ID NO: 64668 - RNA, 19 nt, Artificial Sequence
  Description of Artificial Sequence: Synthetic oligonucleotide
  Sense strand starting at position 3881 of SEQ ID NO: 800
ugaauagaauuugagaguu

SEQ ID NO: 64669 - RNA, 19 nt, Artificial Sequence
  Description of Artificial Sequence: Synthetic oligonucleotide
  Antisense strand to SEQ ID NO: 64588
aacucucaaauucuauuca

SEQ ID NO: 64670 - RNA, 19 nt, Artificial Sequence
  Description of Artificial Sequence: Synthetic oligonucleotide
  Sense strand starting at position 3869 of SEQ ID NO: 800
gguuuauugaguugaauag

SEQ ID NO: 64671 - RNA, 19 nt, Artificial Sequence
  Description of Artificial Sequence: Synthetic oligonucleotide
  Antisense strand to SEQ ID NO: 64590
cuauucaacucaauaaacc

SEQ ID NO: 64672 - RNA, 19 nt, Artificial Sequence
  Description of Artificial Sequence: Synthetic oligonucleotide
  Sense strand starting at position 3867 of SEQ ID NO: 800
aagguuuauugaguugaau

SEQ ID NO: 64673 - RNA, 19 nt, Artificial Sequence
  Description of Artificial Sequence: Synthetic oligonucleotide
  Antisense strand to SEQ ID NO: 64592
auucaacucaauaaaccuu

SEQ ID NO: 64674 - RNA, 19 nt, Artificial Sequence
  Description of Artificial Sequence: Synthetic oligonucleotide
  Sense strand starting at position 3780 of SEQ ID NO: 800
ucaugugaguuucuugaca

SEQ ID NO: 64675 - RNA, 19 nt, Artificial Sequence
  Description of Artificial Sequence: Synthetic oligonucleotide
  Antisense strand to SEQ ID NO: 64594
ugucaagaaacucacauga

SEQ ID NO: 64676 - RNA, 19 nt, Artificial Sequence
  Description of Artificial Sequence: Synthetic oligonucleotide
  Sense strand starting at position 3776 of SEQ ID NO: 800
ggaaucaugugaguuucuu

SEQ ID NO: 64677 - RNA, 19 nt, Artificial Sequence
  Description of Artificial Sequence: Synthetic oligonucleotide
  Antisense strand to SEQ ID NO: 64596
aagaaacucacaugauucc

SEQ ID NO: 64678 - RNA, 19 nt, Artificial Sequence
  Description of Artificial Sequence: Synthetic oligonucleotide
  Sense strand starting at position 3773 of SEQ ID NO: 800
uagggaaucaugugaguuu

SEQ ID NO: 64679 - RNA, 19 nt, Artificial Sequence
  Description of Artificial Sequence: Synthetic oligonucleotide
  Antisense strand to SEQ ID NO: 64598
aaacucacaugauucccua

SEQ ID NO: 64680 - RNA, 19 nt, Artificial Sequence
  Description of Artificial Sequence: Synthetic oligonucleotide
  Sense strand starting at position 3702 of SEQ ID NO: 800
gguucuauccacuaggcau

SEQ ID NO: 64681 - RNA, 19 nt, Artificial Sequence
  Description of Artificial Sequence: Synthetic oligonucleotide
  Antisense strand to SEQ ID NO: 64600
augccuaguggauagaacc

SEQ ID NO: 64682 - RNA, 19 nt, Artificial Sequence
  Description of Artificial Sequence: Synthetic oligonucleotide
  Sense strand starting at position 3690 of SEQ ID NO: 800
guggaacuccaagguucua

SEQ ID NO: 64683 - RNA, 19 nt, Artificial Sequence
  Description of Artificial Sequence: Synthetic oligonucleotide
  Antisense strand to SEQ ID NO: 64602
uagaaccuuggaguuccac

SEQ ID NO: 64684 - RNA, 19 nt, Artificial Sequence
  Description of Artificial Sequence: Synthetic oligonucleotide
  Sense strand starting at position 3664 of SEQ ID NO: 800
ucauuuggcgauuguuaau

SEQ ID NO: 64685 - RNA, 19 nt, Artificial Sequence
  Description of Artificial Sequence: Synthetic oligonucleotide
  Antisense strand to SEQ ID NO: 64604
auuaacaaucgccaaauga

SEQ ID NO: 64686 - RNA, 19 nt, Artificial Sequence
  Description of Artificial Sequence: Synthetic oligonucleotide
  Sense strand starting at position 3657 of SEQ ID NO: 800
ugagucaucauuuggcgau

SEQ ID NO: 64687 - RNA, 19 nt, Artificial Sequence
  Description of Artificial Sequence: Synthetic oligonucleotide
  Antisense strand to SEQ ID NO: 64606
aucgccaaaugaugacuca

SEQ ID NO: 64688 - RNA, 19 nt, Artificial Sequence
  Description of Artificial Sequence: Synthetic oligonucleotide
  Sense strand starting at position 3646 of SEQ ID NO: 800
acaaucuagccugagucau

SEQ ID NO: 64689 - RNA, 19 nt, Artificial Sequence
  Description of Artificial Sequence: Synthetic oligonucleotide
  Antisense strand to SEQ ID NO: 64608
augacucaggcuagauugu

SEQ ID NO: 64690 - RNA, 19 nt, Artificial Sequence
  Description of Artificial Sequence: Synthetic oligonucleotide
  Sense strand starting at position 3557 of SEQ ID NO: 800
uuugaugucuuucuuaaag

SEQ ID NO: 64691 - RNA, 19 nt, Artificial Sequence
  Description of Artificial Sequence: Synthetic oligonucleotide
  Antisense strand to SEQ ID NO: 64610
cuuuaagaaagacaucaaa

SEQ ID NO: 64692 - RNA, 19 nt, Artificial Sequence
  Description of Artificial Sequence: Synthetic oligonucleotide
  Sense strand starting at position 3518 of SEQ ID NO: 800
augacuauguaucucauau

SEQ ID NO: 64693 - RNA, 19 nt, Artificial Sequence
  Description of Artificial Sequence: Synthetic oligonucleotide
  Antisense strand to SEQ ID NO: 64612
auaugagauacauagucau

SEQ ID NO: 64694 - RNA, 19 nt, Artificial Sequence
  Description of Artificial Sequence: Synthetic oligonucleotide
  Sense strand starting at position 3482 of SEQ ID NO: 800
agaaauggucauggucagu

SEQ ID NO: 64695 - RNA, 19 nt, Artificial Sequence
  Description of Artificial Sequence: Synthetic oligonucleotide
  Antisense strand to SEQ ID NO: 64614
acugaccaugaccauuucu

SEQ ID NO: 64696 - RNA, 19 nt, Artificial Sequence
  Description of Artificial Sequence: Synthetic oligonucleotide
  Sense strand starting at position 3464 of SEQ ID NO: 800
uggacaacauuugaguaaa

SEQ ID NO: 64697 - RNA, 19 nt, Artificial Sequence
  Description of Artificial Sequence: Synthetic oligonucleotide
  Antisense strand to SEQ ID NO: 64616
uuuacucaaauguugucca

SEQ ID NO: 64698 - RNA, 19 nt, Artificial Sequence
  Description of Artificial Sequence: Synthetic oligonucleotide
  Sense strand starting at position 3244 of SEQ ID NO: 800
cagugcuugcauuauuaag

SEQ ID NO: 64699 - RNA, 19 nt, Artificial Sequence
  Description of Artificial Sequence: Synthetic oligonucleotide
  Antisense strand to SEQ ID NO: 64618
cuuaauaaugcaagcacug

SEQ ID NO: 64700 - RNA, 19 nt, Artificial Sequence
  Description of Artificial Sequence: Synthetic oligonucleotide
  Sense strand starting at position 3067 of SEQ ID NO: 800
ugcaaaugguaguuacaca

SEQ ID NO: 64701 - RNA, 19 nt, Artificial Sequence
  Description of Artificial Sequence: Synthetic oligonucleotide
  Antisense strand to SEQ ID NO: 64620
uguguaacuaccauuugca

SEQ ID NO: 64702 - RNA, 19 nt, Artificial Sequence
  Description of Artificial Sequence: Synthetic oligonucleotide
  Sense strand starting at position 3034 of SEQ ID NO: 800
gcaacuuguagguggaaag

SEQ ID NO: 64703 - RNA, 19 nt, Artificial Sequence
  Description of Artificial Sequence: Synthetic oligonucleotide
  Antisense strand to SEQ ID NO: 64622
cuuuccaccuacaaguugc

SEQ ID NO: 64704 - RNA, 19 nt, Artificial Sequence
  Description of Artificial Sequence: Synthetic oligonucleotide
  Sense strand starting at position 3033 of SEQ ID NO: 800
ggcaacuuguagguggaaa

SEQ ID NO: 64705 - RNA, 19 nt, Artificial Sequence
  Description of Artificial Sequence: Synthetic oligonucleotide
  Antisense strand to SEQ ID NO: 64624
uuuccaccuacaaguugcc

SEQ ID NO: 64706 - RNA, 19 nt, Artificial Sequence
  Description of Artificial Sequence: Synthetic oligonucleotide
  Sense strand starting at position 2956 of SEQ ID NO: 800
auguuagaugcugaaucau

SEQ ID NO: 64707 - RNA, 19 nt, Artificial Sequence
  Description of Artificial Sequence: Synthetic oligonucleotide
  Antisense strand to SEQ ID NO: 64626
augauucagcaucuaacau

SEQ ID NO: 64708 - RNA, 19 nt, Artificial Sequence
  Description of Artificial Sequence: Synthetic oligonucleotide
  Sense strand starting at position 2952 of SEQ ID NO: 800
auugauguuagaugcugaa

SEQ ID NO: 64709 - RNA, 19 nt, Artificial Sequence
  Description of Artificial Sequence: Synthetic oligonucleotide
  Antisense strand to SEQ ID NO: 64628
uucagcaucuaacaucaau

SEQ ID NO: 64710 - RNA, 19 nt, Artificial Sequence
  Description of Artificial Sequence: Synthetic oligonucleotide
  Sense strand starting at position 2941 of SEQ ID NO: 800
cacugugaauuauugaugu

SEQ ID NO: 64711 - RNA, 19 nt, Artificial Sequence
  Description of Artificial Sequence: Synthetic oligonucleotide
  Antisense strand to SEQ ID NO: 64630
acaucaauaauucacagug

SEQ ID NO: 64712 - RNA, 19 nt, Artificial Sequence
  Description of Artificial Sequence: Synthetic oligonucleotide
  Sense strand starting at position 2934 of SEQ ID NO: 800
augaucucacugugaauua

SEQ ID NO: 64713 - RNA, 19 nt, Artificial Sequence
  Description of Artificial Sequence: Synthetic oligonucleotide
  Antisense strand to SEQ ID NO: 64632
uaauucacagugagaucau

SEQ ID NO: 64714 - RNA, 19 nt, Artificial Sequence
  Description of Artificial Sequence: Synthetic oligonucleotide
  Sense strand starting at position 2932 of SEQ ID NO: 800
cuaugaucucacugugaau

SEQ ID NO: 64715 - RNA, 19 nt, Artificial Sequence
  Description of Artificial Sequence: Synthetic oligonucleotide
  Antisense strand to SEQ ID NO: 64634
auucacagugagaucauag

SEQ ID NO: 64716 - RNA, 19 nt, Artificial Sequence
  Description of Artificial Sequence: Synthetic oligonucleotide
  Sense strand starting at position 2681 of SEQ ID NO: 800
cccgguguaacugggaaau

SEQ ID NO: 64717 - RNA, 19 nt, Artificial Sequence
  Description of Artificial Sequence: Synthetic oligonucleotide
  Antisense strand to SEQ ID NO: 64636
auuucccaguuacaccggg

SEQ ID NO: 64718 - RNA, 19 nt, Artificial Sequence
  Description of Artificial Sequence: Synthetic oligonucleotide
  Sense strand starting at position 2525 of SEQ ID NO: 800
guauuauuucggugcccug

SEQ ID NO: 64719 - RNA, 19 nt, Artificial Sequence
  Description of Artificial Sequence: Synthetic oligonucleotide
  Antisense strand to SEQ ID NO: 64638
cagggcaccgaaauaauac

SEQ ID NO: 64720 - RNA, 19 nt, Artificial Sequence
  Description of Artificial Sequence: Synthetic oligonucleotide
  Sense strand starting at position 2478 of SEQ ID NO: 800
agaaguguuguuuaucuaa

SEQ ID NO: 64721 - RNA, 19 nt, Artificial Sequence
  Description of Artificial Sequence: Synthetic oligonucleotide
  Antisense strand to SEQ ID NO: 64640
uuagauaaacaacacuucu

SEQ ID NO: 64722 - RNA, 19 nt, Artificial Sequence
  Description of Artificial Sequence: Synthetic oligonucleotide
  Sense strand starting at position 2463 of SEQ ID NO: 800
ggcaaaguuuaccucagaa

SEQ ID NO: 64723 - RNA, 19 nt, Artificial Sequence
  Description of Artificial Sequence: Synthetic oligonucleotide
  Antisense strand to SEQ ID NO: 64642
uucugagguaaacuuugcc

SEQ ID NO: 64724 - RNA, 19 nt, Artificial Sequence
  Description of Artificial Sequence: Synthetic oligonucleotide
  Sense strand starting at position 2462 of SEQ ID NO: 800
gggcaaaguuuaccucaga

SEQ ID NO: 64725 - RNA, 19 nt, Artificial Sequence
  Description of Artificial Sequence: Synthetic oligonucleotide
  Antisense strand to SEQ ID NO: 64644
ucugagguaaacuuugccc

SEQ ID NO: 64726 - RNA, 19 nt, Artificial Sequence
  Description of Artificial Sequence: Synthetic oligonucleotide
  Sense strand starting at position 2405 of SEQ ID NO: 800
gaagucuaguaauuauuag

SEQ ID NO: 64727 - RNA, 19 nt, Artificial Sequence
  Description of Artificial Sequence: Synthetic oligonucleotide
  Antisense strand to SEQ ID NO: 64646
cuaauaauuacuagacuuc

SEQ ID NO: 64728 - RNA, 19 nt, Artificial Sequence
  Description of Artificial Sequence: Synthetic oligonucleotide
  Sense strand starting at position 2399 of SEQ ID NO: 800
ugcacugaagucuaguaau

SEQ ID NO: 64729 - RNA, 19 nt, Artificial Sequence
  Description of Artificial Sequence: Synthetic oligonucleotide
  Antisense strand to SEQ ID NO: 64648
auuacuagacuucagugca

SEQ ID NO: 64730 - RNA, 19 nt, Artificial Sequence
  Description of Artificial Sequence: Synthetic oligonucleotide
  Sense strand starting at position 2393 of SEQ ID NO: 800
gguuaaugcacugaagucu

SEQ ID NO: 64731 - RNA, 19 nt, Artificial Sequence
  Description of Artificial Sequence: Synthetic oligonucleotide
  Antisense strand to SEQ ID NO: 64650
agacuucagugcauuaacc

SEQ ID NO: 64732 - RNA, 19 nt, Artificial Sequence
  Description of Artificial Sequence: Synthetic oligonucleotide
  Sense strand starting at position 1603 of SEQ ID NO: 800
agaaguucgggccggaaga

SEQ ID NO: 64733 - RNA, 19 nt, Artificial Sequence
  Description of Artificial Sequence: Synthetic oligonucleotide
  Antisense strand to SEQ ID NO: 64652
ucuuccggcccgaacuucu

SEQ ID NO: 64734 - RNA, 19 nt, Artificial Sequence
  Description of Artificial Sequence: Synthetic oligonucleotide
  Sense strand starting at position 1347 of SEQ ID NO: 800
gugagaagucccgagagug

SEQ ID NO: 64735 - RNA, 19 nt, Artificial Sequence
  Description of Artificial Sequence: Synthetic oligonucleotide
  Antisense strand to SEQ ID NO: 64654
cacucucgggacuucucac

SEQ ID NO: 64736 - RNA, 19 nt, Artificial Sequence
  Description of Artificial Sequence: Synthetic oligonucleotide
  Sense strand starting at position 1264 of SEQ ID NO: 800
gcaccugggcucuacgaaa

SEQ ID NO: 64737 - RNA, 19 nt, Artificial Sequence
  Description of Artificial Sequence: Synthetic oligonucleotide
  Antisense strand to SEQ ID NO: 64656
uuucguagagcccaggugc

SEQ ID NO: 64738 - RNA, 19 nt, Artificial Sequence
  Description of Artificial Sequence: Synthetic oligonucleotide
  Sense strand starting at position 459 of SEQ ID NO: 800
cacacucuagucggacaaa

SEQ ID NO: 64739 - RNA, 19 nt, Artificial Sequence
  Description of Artificial Sequence: Synthetic oligonucleotide
  Antisense strand to SEQ ID NO: 64658
uuuguccgacuagagugug

SEQ ID NO: 64740 - RNA, 19 nt, Artificial Sequence
  Description of Artificial Sequence: Synthetic oligonucleotide
  Sense strand starting at position 394 of SEQ ID NO: 800
agacauguucuguaccaca

SEQ ID NO: 64741 - RNA, 19 nt, Artificial Sequence
  Description of Artificial Sequence: Synthetic oligonucleotide
  Antisense strand to SEQ ID NO: 64660
ugugguacagaacaugucu

SEQ ID NO: 64742 - RNA, 19 nt, Artificial Sequence
  Description of Artificial Sequence: Synthetic oligonucleotide
  Sense strand starting at position 293 of SEQ ID NO: 800
gaauuagucacgggaggca

SEQ ID NO: 64743 - RNA, 19 nt, Artificial Sequence
  Description of Artificial Sequence: Synthetic oligonucleotide
  Antisense strand to SEQ ID NO: 64662
ugccucccgugacuaauuc

SEQ ID NO: 64744 - RNA, 19 nt, Artificial Sequence
  Description of Artificial Sequence: Synthetic oligonucleotide
  Sense strand starting at position 177 of SEQ ID NO: 800
guuugucuccuacacaauu

SEQ ID NO: 64745 - RNA, 19 nt, Artificial Sequence
  Description of Artificial Sequence: Synthetic oligonucleotide
  Antisense strand to SEQ ID NO: 64664
aauuguguaggagacaaac

SEQ ID NO: 64746 - RNA, 19 nt, Artificial Sequence
  Description of Artificial Sequence: Synthetic oligonucleotide
  Sense strand starting at position 164 of SEQ ID NO: 800
gggaauuaacaagguuugu

SEQ ID NO: 64747 - RNA, 19 nt, Artificial Sequence
  Description of Artificial Sequence: Synthetic oligonucleotide
  Antisense strand to SEQ ID NO: 64666
acaaaccuuguuaauuccc

SEQ ID NO: 64748 - RNA, 19 nt, Artificial Sequence
  Description of Artificial Sequence: Synthetic oligonucleotide
  Sense strand starting at position 355 of SEQ ID NO: 801
uauggaaguuaucgaugac

SEQ ID NO: 64749 - RNA, 19 nt, Artificial Sequence
  Description of Artificial Sequence: Synthetic oligonucleotide
  Antisense strand to SEQ ID NO: 64668
gucaucgauaacuuccaua

SEQ ID NO: 64750 - RNA, 19 nt, Artificial Sequence
  Description of Artificial Sequence: Synthetic oligonucleotide
  Sense strand starting at position 358 of SEQ ID NO: 801
ggaaguuaucgaugaccac

SEQ ID NO: 64751 - RNA, 19 nt, Artificial Sequence
  Description of Artificial Sequence: Synthetic oligonucleotide
  Antisense strand to SEQ ID NO: 64670
guggucaucgauaacuucc

SEQ ID NO: 64752 - RNA, 19 nt, Artificial Sequence
  Description of Artificial Sequence: Synthetic oligonucleotide
  Sense strand starting at position 612 of SEQ ID NO: 801
gggcaagucuggguaccau

SEQ ID NO: 64753 - RNA, 19 nt, Artificial Sequence
  Description of Artificial Sequence: Synthetic oligonucleotide
  Antisense strand to SEQ ID NO: 64672
augguacccagacuugccc

SEQ ID NO: 64754 - RNA, 19 nt, Artificial Sequence
  Description of Artificial Sequence: Synthetic oligonucleotide
  Sense strand starting at position 639 of SEQ ID NO: 801
ggccuuaggcuuuggaaau

SEQ ID NO: 64755 - RNA, 19 nt, Artificial Sequence
  Description of Artificial Sequence: Synthetic oligonucleotide
  Antisense strand to SEQ ID NO: 64674
auuuccaaagccuaaggcc

SEQ ID NO: 64756 - RNA, 19 nt, Artificial Sequence
  Description of Artificial Sequence: Synthetic oligonucleotide
  Sense strand starting at position 674 of SEQ ID NO: 801
cucaguuucuaucucugua

SEQ ID NO: 64757 - RNA, 19 nt, Artificial Sequence
  Description of Artificial Sequence: Synthetic oligonucleotide
  Antisense strand to SEQ ID NO: 64676
uacagagauagaaacugag

SEQ ID NO: 64758 - RNA, 19 nt, Artificial Sequence
  Description of Artificial Sequence: Synthetic oligonucleotide
  Sense strand starting at position 837 of SEQ ID NO: 801
gauggaaucugaggaucca

SEQ ID NO: 64759 - RNA, 19 nt, Artificial Sequence
  Description of Artificial Sequence: Synthetic oligonucleotide
  Antisense strand to SEQ ID NO: 64678
uggauccucagauuccauc

SEQ ID NO: 64760 - RNA, 19 nt, Artificial Sequence
  Description of Artificial Sequence: Synthetic oligonucleotide
  Sense strand starting at position 884 of SEQ ID NO: 801
uggagaguccugggcagaa

SEQ ID NO: 64761 - RNA, 19 nt, Artificial Sequence
  Description of Artificial Sequence: Synthetic oligonucleotide
  Antisense strand to SEQ ID NO: 64680
uucugcccaggacucucca

SEQ ID NO: 64762 - RNA, 19 nt, Artificial Sequence
  Description of Artificial Sequence: Synthetic oligonucleotide
  Sense strand starting at position 982 of SEQ ID NO: 801
ccgccuucgcuagguguaa

SEQ ID NO: 64763 - RNA, 19 nt, Artificial Sequence
  Description of Artificial Sequence: Synthetic oligonucleotide
  Antisense strand to SEQ ID NO: 64682
uuacaccuagcgaaggcgg

SEQ ID NO: 64764 - RNA, 19 nt, Artificial Sequence
  Description of Artificial Sequence: Synthetic oligonucleotide
  Sense strand starting at position 983 of SEQ ID NO: 801
cgccuucgcuagguguaaa

SEQ ID NO: 64765 - RNA, 19 nt, Artificial Sequence
  Description of Artificial Sequence: Synthetic oligonucleotide
  Antisense strand to SEQ ID NO: 64684
uuuacaccuagcgaaggcg

SEQ ID NO: 64766 - RNA, 19 nt, Artificial Sequence
  Description of Artificial Sequence: Synthetic oligonucleotide
  Sense strand starting at position 984 of SEQ ID NO: 801
gccuucgcuagguguaaac

SEQ ID NO: 64767 - RNA, 19 nt, Artificial Sequence
  Description of Artificial Sequence: Synthetic oligonucleotide
  Antisense strand to SEQ ID NO: 64686
guuuacaccuagcgaaggc

SEQ ID NO: 64768 - RNA, 19 nt, Artificial Sequence
  Description of Artificial Sequence: Synthetic oligonucleotide
  Sense strand starting at position 1236 of SEQ ID NO: 801
cuggcucagaguuaggaau

SEQ ID NO: 64769 - RNA, 19 nt, Artificial Sequence
  Description of Artificial Sequence: Synthetic oligonucleotide
  Antisense strand to SEQ ID NO: 64688
auuccuaacucugagccag

SEQ ID NO: 64770 - RNA, 19 nt, Artificial Sequence
  Description of Artificial Sequence: Synthetic oligonucleotide
  Sense strand starting at position 1327 of SEQ ID NO: 801
acaaacucugcggguagua

SEQ ID NO: 64771 - RNA, 19 nt, Artificial Sequence
  Description of Artificial Sequence: Synthetic oligonucleotide
  Antisense strand to SEQ ID NO: 64690
uacuacccgcagaguuugu

SEQ ID NO: 64772 - RNA, 19 nt, Artificial Sequence
  Description of Artificial Sequence: Synthetic oligonucleotide
  Sense strand starting at position 1524 of SEQ ID NO: 801
ccagcaucucggugagaca

SEQ ID NO: 64773 - RNA, 19 nt, Artificial Sequence
  Description of Artificial Sequence: Synthetic oligonucleotide
  Antisense strand to SEQ ID NO: 64692
ugucucaccgagaugcugg

SEQ ID NO: 64774 - RNA, 19 nt, Artificial Sequence
  Description of Artificial Sequence: Synthetic oligonucleotide
  Sense strand starting at position 1531 of SEQ ID NO: 801
cucggugagacagguguua

SEQ ID NO: 64775 - RNA, 19 nt, Artificial Sequence
  Description of Artificial Sequence: Synthetic oligonucleotide
  Antisense strand to SEQ ID NO: 64694
uaacaccugucucaccgag

SEQ ID NO: 64776 - RNA, 19 nt, Artificial Sequence
  Description of Artificial Sequence: Synthetic oligonucleotide
  Sense strand starting at position 1533 of SEQ ID NO: 801
cggugagacagguguuauc

SEQ ID NO: 64777 - RNA, 19 nt, Artificial Sequence
  Description of Artificial Sequence: Synthetic oligonucleotide
  Antisense strand to SEQ ID NO: 64696
gauaacaccugucucaccg

SEQ ID NO: 64778 - RNA, 19 nt, Artificial Sequence
  Description of Artificial Sequence: Synthetic oligonucleotide
  Sense strand starting at position 1536 of SEQ ID NO: 801
ugagacagguguuaucacu

SEQ ID NO: 64779 - RNA, 19 nt, Artificial Sequence
  Description of Artificial Sequence: Synthetic oligonucleotide
  Antisense strand to SEQ ID NO: 64698
agugauaacaccugucuca

SEQ ID NO: 64780 - RNA, 19 nt, Artificial Sequence
  Description of Artificial Sequence: Synthetic oligonucleotide
  Sense strand starting at position 1542 of SEQ ID NO: 801
agguguuaucacuggcacu

SEQ ID NO: 64781 - RNA, 19 nt, Artificial Sequence
  Description of Artificial Sequence: Synthetic oligonucleotide
  Antisense strand to SEQ ID NO: 64700
agugccagugauaacaccu

SEQ ID NO: 64782 - RNA, 19 nt, Artificial Sequence
  Description of Artificial Sequence: Synthetic oligonucleotide
  Sense strand starting at position 1543 of SEQ ID NO: 801
gguguuaucacuggcacuu

SEQ ID NO: 64783 - RNA, 19 nt, Artificial Sequence
  Description of Artificial Sequence: Synthetic oligonucleotide
  Antisense strand to SEQ ID NO: 64702
aagugccagugauaacacc

SEQ ID NO: 64784 - RNA, 19 nt, Artificial Sequence
  Description of Artificial Sequence: Synthetic oligonucleotide
  Sense strand starting at position 1875 of SEQ ID NO: 801
gucugucuguuggagggaa

SEQ ID NO: 64785 - RNA, 19 nt, Artificial Sequence
  Description of Artificial Sequence: Synthetic oligonucleotide
  Antisense strand to SEQ ID NO: 64704
uucccuccaacagacagac

SEQ ID NO: 64786 - RNA, 19 nt, Artificial Sequence
  Description of Artificial Sequence: Synthetic oligonucleotide
  Sense strand starting at position 2675 of SEQ ID NO: 801
ggaaguccaguuugcaaau

SEQ ID NO: 64787 - RNA, 19 nt, Artificial Sequence
  Description of Artificial Sequence: Synthetic oligonucleotide
  Antisense strand to SEQ ID NO: 64706
auuugcaaacuggacuucc

SEQ ID NO: 64788 - RNA, 19 nt, Artificial Sequence
  Description of Artificial Sequence: Synthetic oligonucleotide
  Sense strand starting at position 2676 of SEQ ID NO: 801
gaaguccaguuugcaaaua

SEQ ID NO: 64789 - RNA, 19 nt, Artificial Sequence
  Description of Artificial Sequence: Synthetic oligonucleotide
  Antisense strand to SEQ ID NO: 64708
uauuugcaaacuggacuuc

SEQ ID NO: 64790 - RNA, 19 nt, Artificial Sequence
  Description of Artificial Sequence: Synthetic oligonucleotide
  Sense strand starting at position 2872 of SEQ ID NO: 801
gugacauccugcgugauga

SEQ ID NO: 64791 - RNA, 19 nt, Artificial Sequence
  Description of Artificial Sequence: Synthetic oligonucleotide
  Antisense strand to SEQ ID NO: 64710
ucaucacgcaggaugucac

SEQ ID NO: 64792 - RNA, 19 nt, Artificial Sequence
  Description of Artificial Sequence: Synthetic oligonucleotide
  Sense strand starting at position 2873 of SEQ ID NO: 801
ugacauccugcgugaugaa

SEQ ID NO: 64793 - RNA, 19 nt, Artificial Sequence
  Description of Artificial Sequence: Synthetic oligonucleotide
  Antisense strand to SEQ ID NO: 64712
uucaucacgcaggauguca

SEQ ID NO: 64794 - RNA, 19 nt, Artificial Sequence
  Description of Artificial Sequence: Synthetic oligonucleotide
  Sense strand starting at position 2874 of SEQ ID NO: 801
gacauccugcgugaugaaa

SEQ ID NO: 64795 - RNA, 19 nt, Artificial Sequence
  Description of Artificial Sequence: Synthetic oligonucleotide
  Antisense strand to SEQ ID NO: 64714
uuucaucacgcaggauguc

SEQ ID NO: 64796 - RNA, 19 nt, Artificial Sequence
  Description of Artificial Sequence: Synthetic oligonucleotide
  Sense strand starting at position 3091 of SEQ ID NO: 801
aggcaaagcucagaaacaa

SEQ ID NO: 64797 - RNA, 19 nt, Artificial Sequence
  Description of Artificial Sequence: Synthetic oligonucleotide
  Antisense strand to SEQ ID NO: 64716
uuguuucugagcuuugccu

SEQ ID NO: 64798 - RNA, 19 nt, Artificial Sequence
  Description of Artificial Sequence: Synthetic oligonucleotide
  Sense strand starting at position 3269 of SEQ ID NO: 801
agugcaacaugguaaagua

SEQ ID NO: 64799 - RNA, 19 nt, Artificial Sequence
  Description of Artificial Sequence: Synthetic oligonucleotide
  Antisense strand to SEQ ID NO: 64718
uacuuuaccauguugcacu

SEQ ID NO: 64800 - RNA, 19 nt, Artificial Sequence
  Description of Artificial Sequence: Synthetic oligonucleotide
  Sense strand starting at position 3326 of SEQ ID NO: 801
aaccgaaugcuggaauuau

SEQ ID NO: 64801 - RNA, 19 nt, Artificial Sequence
  Description of Artificial Sequence: Synthetic oligonucleotide
  Antisense strand to SEQ ID NO: 64720
auaauuccagcauucgguu

SEQ ID NO: 64802 - RNA, 19 nt, Artificial Sequence
  Description of Artificial Sequence: Synthetic oligonucleotide
  Sense strand starting at position 3335 of SEQ ID NO: 801
cuggaauuaugaugugcca

SEQ ID NO: 64803 - RNA, 19 nt, Artificial Sequence
  Description of Artificial Sequence: Synthetic oligonucleotide
  Antisense strand to SEQ ID NO: 64722
uggcacaucauaauuccag

SEQ ID NO: 64804 - RNA, 19 nt, Artificial Sequence
  Description of Artificial Sequence: Synthetic oligonucleotide
  Sense strand starting at position 3337 of SEQ ID NO: 801
ggaauuaugaugugccauu

SEQ ID NO: 64805 - RNA, 19 nt, Artificial Sequence
  Description of Artificial Sequence: Synthetic oligonucleotide
  Antisense strand to SEQ ID NO: 64724
aauggcacaucauaauucc

SEQ ID NO: 64806 - RNA, 19 nt, Artificial Sequence
  Description of Artificial Sequence: Synthetic oligonucleotide
  Sense strand starting at position 3388 of SEQ ID NO: 801
ucacauucagcguggagau

SEQ ID NO: 64807 - RNA, 19 nt, Artificial Sequence
  Description of Artificial Sequence: Synthetic oligonucleotide
  Antisense strand to SEQ ID NO: 64726
aucuccacgcugaauguga

SEQ ID NO: 64808 - RNA, 19 nt, Artificial Sequence
  Description of Artificial Sequence: Synthetic oligonucleotide
  Sense strand starting at position 3495 of SEQ ID NO: 801
ugaccuguguccugagaag

SEQ ID NO: 64809 - RNA, 19 nt, Artificial Sequence
  Description of Artificial Sequence: Synthetic oligonucleotide
  Antisense strand to SEQ ID NO: 64728
cuucucaggacacagguca

SEQ ID NO: 64810 - RNA, 19 nt, Artificial Sequence
  Description of Artificial Sequence: Synthetic oligonucleotide
  Sense strand starting at position 3582 of SEQ ID NO: 801
gcggauuccauccagagag

SEQ ID NO: 64811 - RNA, 19 nt, Artificial Sequence
  Description of Artificial Sequence: Synthetic oligonucleotide
  Antisense strand to SEQ ID NO: 64730
cucucuggauggaauccgc

SEQ ID NO: 64812 - RNA, 19 nt, Artificial Sequence
  Description of Artificial Sequence: Synthetic oligonucleotide
  Sense strand starting at position 3607 of SEQ ID NO: 801
caaggaucaugcuaaguag

SEQ ID NO: 64813 - RNA, 19 nt, Artificial Sequence
  Description of Artificial Sequence: Synthetic oligonucleotide
  Antisense strand to SEQ ID NO: 64732
cuacuuagcaugauccuug

SEQ ID NO: 64814 - RNA, 19 nt, Artificial Sequence
  Description of Artificial Sequence: Synthetic oligonucleotide
  Sense strand starting at position 3610 of SEQ ID NO: 801
ggaucaugcuaaguaggga

SEQ ID NO: 64815 - RNA, 19 nt, Artificial Sequence
  Description of Artificial Sequence: Synthetic oligonucleotide
  Antisense strand to SEQ ID NO: 64734
ucccuacuuagcaugaucc

SEQ ID NO: 64816 - RNA, 19 nt, Artificial Sequence
  Description of Artificial Sequence: Synthetic oligonucleotide
  Sense strand starting at position 3769 of SEQ ID NO: 801
ugcuuucugccaggagaga

SEQ ID NO: 64817 - RNA, 19 nt, Artificial Sequence
  Description of Artificial Sequence: Synthetic oligonucleotide
  Antisense strand to SEQ ID NO: 64736
ucucuccuggcagaaagca

SEQ ID NO: 64818 - RNA, 19 nt, Artificial Sequence
  Description of Artificial Sequence: Synthetic oligonucleotide
  Sense strand starting at position 3780 of SEQ ID NO: 801
aggagagaccucuguguag

SEQ ID NO: 64819 - RNA, 19 nt, Artificial Sequence
  Description of Artificial Sequence: Synthetic oligonucleotide
  Antisense strand to SEQ ID NO: 64738
cuacacagaggucucuccu

SEQ ID NO: 64820 - RNA, 19 nt, Artificial Sequence
  Description of Artificial Sequence: Synthetic oligonucleotide
  Sense strand starting at position 3782 of SEQ ID NO: 801
gagagaccucuguguagag

SEQ ID NO: 64821 - RNA, 19 nt, Artificial Sequence
  Description of Artificial Sequence: Synthetic oligonucleotide
  Antisense strand to SEQ ID NO: 64740
cucuacacagaggucucuc

SEQ ID NO: 64822 - RNA, 19 nt, Artificial Sequence
  Description of Artificial Sequence: Synthetic oligonucleotide
  Sense strand starting at position 3854 of SEQ ID NO: 801
ccaugaaucaucugugugu

SEQ ID NO: 64823 - RNA, 19 nt, Artificial Sequence
  Description of Artificial Sequence: Synthetic oligonucleotide
  Antisense strand to SEQ ID NO: 64742
acacacagaugauucaugg

SEQ ID NO: 64824 - RNA, 19 nt, Artificial Sequence
  Description of Artificial Sequence: Synthetic oligonucleotide
  Sense strand starting at position 3962 of SEQ ID NO: 801
cuguucagggcuugacaga

SEQ ID NO: 64825 - RNA, 19 nt, Artificial Sequence
  Description of Artificial Sequence: Synthetic oligonucleotide
  Antisense strand to SEQ ID NO: 64744
ucugucaagcccugaacag

SEQ ID NO: 64826 - RNA, 19 nt, Artificial Sequence
  Description of Artificial Sequence: Synthetic oligonucleotide
  Sense strand starting at position 3963 of SEQ ID NO: 801
uguucagggcuugacagau

SEQ ID NO: 64827 - RNA, 19 nt, Artificial Sequence
  Description of Artificial Sequence: Synthetic oligonucleotide
  Antisense strand to SEQ ID NO: 64746
aucugucaagcccugaaca

SEQ ID NO: 64828 - RNA, 19 nt, Artificial Sequence
  Description of Artificial Sequence: Synthetic oligonucleotide
  Sense strand starting at position 95 of SEQ ID NO: 802
uauggaaguuaucgaugac

SEQ ID NO: 64829 - RNA, 19 nt, Artificial Sequence
  Description of Artificial Sequence: Synthetic oligonucleotide
  Antisense strand to SEQ ID NO: 64748
gucaucgauaacuuccaua

SEQ ID NO: 64830 - RNA, 19 nt, Artificial Sequence
  Description of Artificial Sequence: Synthetic oligonucleotide
  Sense strand starting at position 98 of SEQ ID NO: 802
ggaaguuaucgaugaccac

SEQ ID NO: 64831 - RNA, 19 nt, Artificial Sequence
  Description of Artificial Sequence: Synthetic oligonucleotide
  Antisense strand to SEQ ID NO: 64750
guggucaucgauaacuucc

SEQ ID NO: 64832 - RNA, 19 nt, Artificial Sequence
  Description of Artificial Sequence: Synthetic oligonucleotide
  Sense strand starting at position 352 of SEQ ID NO: 802
gggcaagucuggguaccau

SEQ ID NO: 64833 - RNA, 19 nt, Artificial Sequence
  Description of Artificial Sequence: Synthetic oligonucleotide
  Antisense strand to SEQ ID NO: 64752
augguacccagacuugccc

SEQ ID NO: 64834 - RNA, 19 nt, Artificial Sequence
  Description of Artificial Sequence: Synthetic oligonucleotide
  Sense strand starting at position 379 of SEQ ID NO: 802
ggccuuaggcuuuggaaau

SEQ ID NO: 64835 - RNA, 19 nt, Artificial Sequence
  Description of Artificial Sequence: Synthetic oligonucleotide
  Antisense strand to SEQ ID NO: 64754
auuuccaaagccuaaggcc

SEQ ID NO: 64836 - RNA, 19 nt, Artificial Sequence
  Description of Artificial Sequence: Synthetic oligonucleotide
  Sense strand starting at position 414 of SEQ ID NO: 802
cucaguuucuaucucugua

SEQ ID NO: 64837 - RNA, 19 nt, Artificial Sequence
  Description of Artificial Sequence: Synthetic oligonucleotide
  Antisense strand to SEQ ID NO: 64756
uacagagauagaaacugag

SEQ ID NO: 64838 - RNA, 19 nt, Artificial Sequence
  Description of Artificial Sequence: Synthetic oligonucleotide
  Sense strand starting at position 577 of SEQ ID NO: 802
gauggaaucugaggaucca

SEQ ID NO: 64839 - RNA, 19 nt, Artificial Sequence
  Description of Artificial Sequence: Synthetic oligonucleotide
  Antisense strand to SEQ ID NO: 64758
uggauccucagauuccauc

SEQ ID NO: 64840 - RNA, 19 nt, Artificial Sequence
  Description of Artificial Sequence: Synthetic oligonucleotide
  Sense strand starting at position 624 of SEQ ID NO: 802
uggagaguccugggcagaa

SEQ ID NO: 64841 - RNA, 19 nt, Artificial Sequence
  Description of Artificial Sequence: Synthetic oligonucleotide
  Antisense strand to SEQ ID NO: 64760
uucugcccaggacucucca

SEQ ID NO: 64842 - RNA, 19 nt, Artificial Sequence
  Description of Artificial Sequence: Synthetic oligonucleotide
  Sense strand starting at position 723 of SEQ ID NO: 802
cgccuucgcuagguguaaa

SEQ ID NO: 64843 - RNA, 19 nt, Artificial Sequence
  Description of Artificial Sequence: Synthetic oligonucleotide
  Antisense strand to SEQ ID NO: 64762
uuuacaccuagcgaaggcg

SEQ ID NO: 64844 - RNA, 19 nt, Artificial Sequence
  Description of Artificial Sequence: Synthetic oligonucleotide
  Sense strand starting at position 724 of SEQ ID NO: 802
gccuucgcuagguguaaac

SEQ ID NO: 64845 - RNA, 19 nt, Artificial Sequence
  Description of Artificial Sequence: Synthetic oligonucleotide
  Antisense strand to SEQ ID NO: 64764
guuuacaccuagcgaaggc

SEQ ID NO: 64846 - RNA, 19 nt, Artificial Sequence
  Description of Artificial Sequence: Synthetic oligonucleotide
  Sense strand starting at position 976 of SEQ ID NO: 802
cuggcucagaguuaggaau

SEQ ID NO: 64847 - RNA, 19 nt, Artificial Sequence
  Description of Artificial Sequence: Synthetic oligonucleotide
  Antisense strand to SEQ ID NO: 64766
auuccuaacucugagccag

SEQ ID NO: 64848 - RNA, 19 nt, Artificial Sequence
  Description of Artificial Sequence: Synthetic oligonucleotide
  Sense strand starting at position 1067 of SEQ ID NO: 802
acaaacucugcggguagua

SEQ ID NO: 64849 - RNA, 19 nt, Artificial Sequence
  Description of Artificial Sequence: Synthetic oligonucleotide
  Antisense strand to SEQ ID NO: 64768
uacuacccgcagaguuugu

SEQ ID NO: 64850 - RNA, 19 nt, Artificial Sequence
  Description of Artificial Sequence: Synthetic oligonucleotide
  Sense strand starting at position 1264 of SEQ ID NO: 802
ccagcaucucggugagaca

SEQ ID NO: 64851 - RNA, 19 nt, Artificial Sequence
  Description of Artificial Sequence: Synthetic oligonucleotide
  Antisense strand to SEQ ID NO: 64770
ugucucaccgagaugcugg

SEQ ID NO: 64852 - RNA, 19 nt, Artificial Sequence
  Description of Artificial Sequence: Synthetic oligonucleotide
  Sense strand starting at position 1271 of SEQ ID NO: 802
cucggugagacagguguua

SEQ ID NO: 64853 - RNA, 19 nt, Artificial Sequence
  Description of Artificial Sequence: Synthetic oligonucleotide
  Antisense strand to SEQ ID NO: 64772
uaacaccugucucaccgag

SEQ ID NO: 64854 - RNA, 19 nt, Artificial Sequence
  Description of Artificial Sequence: Synthetic oligonucleotide
  Sense strand starting at position 1273 of SEQ ID NO: 802
cggugagacagguguuauc

SEQ ID NO: 64855 - RNA, 19 nt, Artificial Sequence
  Description of Artificial Sequence: Synthetic oligonucleotide
  Antisense strand to SEQ ID NO: 64774
gauaacaccugucucaccg

SEQ ID NO: 64856 - RNA, 19 nt, Artificial Sequence
  Description of Artificial Sequence: Synthetic oligonucleotide
  Sense strand starting at position 1276 of SEQ ID NO: 802
ugagacagguguuaucacu

SEQ ID NO: 64857 - RNA, 19 nt, Artificial Sequence
  Description of Artificial Sequence: Synthetic oligonucleotide
  Antisense strand to SEQ ID NO: 64776
agugauaacaccugucuca

SEQ ID NO: 64858 - RNA, 19 nt, Artificial Sequence
  Description of Artificial Sequence: Synthetic oligonucleotide
  Sense strand starting at position 1282 of SEQ ID NO: 802
agguguuaucacuggcacu

SEQ ID NO: 64859 - RNA, 19 nt, Artificial Sequence
  Description of Artificial Sequence: Synthetic oligonucleotide
  Antisense strand to SEQ ID NO: 64778
agugccagugauaacaccu

SEQ ID NO: 64860 - RNA, 19 nt, Artificial Sequence
  Description of Artificial Sequence: Synthetic oligonucleotide
  Sense strand starting at position 1283 of SEQ ID NO: 802
gguguuaucacuggcacuu

SEQ ID NO: 64861 - RNA, 19 nt, Artificial Sequence
  Description of Artificial Sequence: Synthetic oligonucleotide
  Antisense strand to SEQ ID NO: 64780
aagugccagugauaacacc

SEQ ID NO: 64862 - RNA, 19 nt, Artificial Sequence
  Description of Artificial Sequence: Synthetic oligonucleotide
  Sense strand starting at position 1615 of SEQ ID NO: 802
gucugucuguuggagggaa

SEQ ID NO: 64863 - RNA, 19 nt, Artificial Sequence
  Description of Artificial Sequence: Synthetic oligonucleotide
  Antisense strand to SEQ ID NO: 64782
uucccuccaacagacagac

SEQ ID NO: 64864 - RNA, 19 nt, Artificial Sequence
  Description of Artificial Sequence: Synthetic oligonucleotide
  Sense strand starting at position 2415 of SEQ ID NO: 802
ggaaguccaguuugcaaau

SEQ ID NO: 64865 - RNA, 19 nt, Artificial Sequence
  Description of Artificial Sequence: Synthetic oligonucleotide
  Antisense strand to SEQ ID NO: 64784
auuugcaaacuggacuucc

SEQ ID NO: 64866 - RNA, 19 nt, Artificial Sequence
  Description of Artificial Sequence: Synthetic oligonucleotide
  Sense strand starting at position 2416 of SEQ ID NO: 802
gaaguccaguuugcaaaua

SEQ ID NO: 64867 - RNA, 19 nt, Artificial Sequence
  Description of Artificial Sequence: Synthetic oligonucleotide
  Antisense strand to SEQ ID NO: 64786
uauuugcaaacuggacuuc

SEQ ID NO: 64868 - RNA, 19 nt, Artificial Sequence
  Description of Artificial Sequence: Synthetic oligonucleotide
  Sense strand starting at position 2612 of SEQ ID NO: 802
gugacauccugcgugauga

SEQ ID NO: 64869 - RNA, 19 nt, Artificial Sequence
  Description of Artificial Sequence: Synthetic oligonucleotide
  Antisense strand to SEQ ID NO: 64788
ucaucacgcaggaugucac

SEQ ID NO: 64870 - RNA, 19 nt, Artificial Sequence
  Description of Artificial Sequence: Synthetic oligonucleotide
  Sense strand starting at position 2613 of SEQ ID NO: 802
ugacauccugcgugaugaa

SEQ ID NO: 64871 - RNA, 19 nt, Artificial Sequence
  Description of Artificial Sequence: Synthetic oligonucleotide
  Antisense strand to SEQ ID NO: 64790
uucaucacgcaggauguca

SEQ ID NO: 64872 - RNA, 19 nt, Artificial Sequence
  Description of Artificial Sequence: Synthetic oligonucleotide
  Sense strand starting at position 2614 of SEQ ID NO: 802
gacauccugcgugaugaaa

SEQ ID NO: 64873 - RNA, 19 nt, Artificial Sequence
  Description of Artificial Sequence: Synthetic oligonucleotide
  Antisense strand to SEQ ID NO: 64792
uuucaucacgcaggauguc

SEQ ID NO: 64874 - RNA, 19 nt, Artificial Sequence
  Description of Artificial Sequence: Synthetic oligonucleotide
  Sense strand starting at position 2831 of SEQ ID NO: 802
aggcaaagcucagaaacaa

SEQ ID NO: 64875 - RNA, 19 nt, Artificial Sequence
  Description of Artificial Sequence: Synthetic oligonucleotide
  Antisense strand to SEQ ID NO: 64794
uuguuucugagcuuugccu

SEQ ID NO: 64876 - RNA, 19 nt, Artificial Sequence
  Description of Artificial Sequence: Synthetic oligonucleotide
  Sense strand starting at position 3009 of SEQ ID NO: 802
agugcaacaugguaaagua

SEQ ID NO: 64877 - RNA, 19 nt, Artificial Sequence
  Description of Artificial Sequence: Synthetic oligonucleotide
  Antisense strand to SEQ ID NO: 64796
uacuuuaccauguugcacu

SEQ ID NO: 64878 - RNA, 19 nt, Artificial Sequence
  Description of Artificial Sequence: Synthetic oligonucleotide
  Sense strand starting at position 3066 of SEQ ID NO: 802
aaccgaaugcuggaauuau

SEQ ID NO: 64879 - RNA, 19 nt, Artificial Sequence
  Description of Artificial Sequence: Synthetic oligonucleotide
  Antisense strand to SEQ ID NO: 64798
auaauuccagcauucgguu

SEQ ID NO: 64880 - RNA, 19 nt, Artificial Sequence
  Description of Artificial Sequence: Synthetic oligonucleotide
  Sense strand starting at position 3077 of SEQ ID NO: 802
ggaauuaugaugugccauu

SEQ ID NO: 64881 - RNA, 19 nt, Artificial Sequence
  Description of Artificial Sequence: Synthetic oligonucleotide
  Antisense strand to SEQ ID NO: 64800
aauggcacaucauaauucc

SEQ ID NO: 64882 - RNA, 19 nt, Artificial Sequence
  Description of Artificial Sequence: Synthetic oligonucleotide
  Sense strand starting at position 3128 of SEQ ID NO: 802
ucacauucagcguggagau

SEQ ID NO: 64883 - RNA, 19 nt, Artificial Sequence
  Description of Artificial Sequence: Synthetic oligonucleotide
  Antisense strand to SEQ ID NO: 64802
aucuccacgcugaauguga

SEQ ID NO: 64884 - RNA, 19 nt, Artificial Sequence
  Description of Artificial Sequence: Synthetic oligonucleotide
  Sense strand starting at position 3322 of SEQ ID NO: 802
gcggauuccauccagagag

SEQ ID NO: 64885 - RNA, 19 nt, Artificial Sequence
  Description of Artificial Sequence: Synthetic oligonucleotide
  Antisense strand to SEQ ID NO: 64804
cucucuggauggaauccgc

SEQ ID NO: 64886 - RNA, 19 nt, Artificial Sequence
  Description of Artificial Sequence: Synthetic oligonucleotide
  Sense strand starting at position 3347 of SEQ ID NO: 802
caaggaucaugcuaaguag

SEQ ID NO: 64887 - RNA, 19 nt, Artificial Sequence
  Description of Artificial Sequence: Synthetic oligonucleotide
  Antisense strand to SEQ ID NO: 64806
cuacuuagcaugauccuug

SEQ ID NO: 64888 - RNA, 19 nt, Artificial Sequence
  Description of Artificial Sequence: Synthetic oligonucleotide
  Sense strand starting at position 3350 of SEQ ID NO: 802
ggaucaugcuaaguaggga

SEQ ID NO: 64889 - RNA, 19 nt, Artificial Sequence
  Description of Artificial Sequence: Synthetic oligonucleotide
  Antisense strand to SEQ ID NO: 64808
ucccuacuuagcaugaucc

SEQ ID NO: 64890 - RNA, 19 nt, Artificial Sequence
  Description of Artificial Sequence: Synthetic oligonucleotide
  Sense strand starting at position 3509 of SEQ ID NO: 802
ugcuuucugccaggagaga

SEQ ID NO: 64891 - RNA, 19 nt, Artificial Sequence
  Description of Artificial Sequence: Synthetic oligonucleotide
  Antisense strand to SEQ ID NO: 64810
ucucuccuggcagaaagca

SEQ ID NO: 64892 - RNA, 19 nt, Artificial Sequence
  Description of Artificial Sequence: Synthetic oligonucleotide
  Sense strand starting at position 3520 of SEQ ID NO: 802
aggagagaccucuguguag

SEQ ID NO: 64893 - RNA, 19 nt, Artificial Sequence
  Description of Artificial Sequence: Synthetic oligonucleotide
  Antisense strand to SEQ ID NO: 64812
cuacacagaggucucuccu

SEQ ID NO: 64894 - RNA, 19 nt, Artificial Sequence
  Description of Artificial Sequence: Synthetic oligonucleotide
  Sense strand starting at position 3522 of SEQ ID NO: 802
gagagaccucuguguagag

SEQ ID NO: 64895 - RNA, 19 nt, Artificial Sequence
  Description of Artificial Sequence: Synthetic oligonucleotide
  Antisense strand to SEQ ID NO: 64814
cucuacacagaggucucuc

SEQ ID NO: 64896 - RNA, 19 nt, Artificial Sequence
  Description of Artificial Sequence: Synthetic oligonucleotide
  Sense strand starting at position 3594 of SEQ ID NO: 802
ccaugaaucaucugugugu

SEQ ID NO: 64897 - RNA, 19 nt, Artificial Sequence
  Description of Artificial Sequence: Synthetic oligonucleotide
  Antisense strand to SEQ ID NO: 64816
acacacagaugauucaugg

SEQ ID NO: 64898 - RNA, 19 nt, Artificial Sequence
  Description of Artificial Sequence: Synthetic oligonucleotide
  Sense strand starting at position 3702 of SEQ ID NO: 802
cuguucagggcuugacaga

SEQ ID NO: 64899 - RNA, 19 nt, Artificial Sequence
  Description of Artificial Sequence: Synthetic oligonucleotide
  Antisense strand to SEQ ID NO: 64818
ucugucaagcccugaacag

SEQ ID NO: 64900 - RNA, 19 nt, Artificial Sequence
  Description of Artificial Sequence: Synthetic oligonucleotide
  Sense strand starting at position 3703 of SEQ ID NO: 802
uguucagggcuugacagau

SEQ ID NO: 64901 - RNA, 19 nt, Artificial Sequence
  Description of Artificial Sequence: Synthetic oligonucleotide
  Antisense strand to SEQ ID NO: 64820
aucugucaagcccugaaca

SEQ ID NO: 64902 - RNA, 19 nt, Artificial Sequence
  Description of Artificial Sequence: Synthetic oligonucleotide
  Sense strand starting at position 3831 of SEQ ID NO: 802
gacagacaacugugauacu

SEQ ID NO: 64903 - RNA, 19 nt, Artificial Sequence
  Description of Artificial Sequence: Synthetic oligonucleotide
  Antisense strand to SEQ ID NO: 64822
aguaucacaguugucuguc

SEQ ID NO: 64904 - RNA, 19 nt, Artificial Sequence
  Description of Artificial Sequence: Synthetic oligonucleotide
  Sense strand starting at position 3931 of SEQ ID NO: 802
cuggguuauuccucugacu

SEQ ID NO: 64905 - RNA, 19 nt, Artificial Sequence
  Description of Artificial Sequence: Synthetic oligonucleotide
  Antisense strand to SEQ ID NO: 64824
agucagaggaauaacccag

SEQ ID NO: 64906 - RNA, 19 nt, Artificial Sequence
  Description of Artificial Sequence: Synthetic oligonucleotide
  Sense strand starting at position 3933 of SEQ ID NO: 802
ggguuauuccucugacucc

SEQ ID NO: 64907 - RNA, 19 nt, Artificial Sequence
  Description of Artificial Sequence: Synthetic oligonucleotide
  Antisense strand to SEQ ID NO: 64826
ggagucagaggaauaaccc

SEQ ID NO: 64908 - RNA, 19 nt, Artificial Sequence
  Description of Artificial Sequence: Synthetic oligonucleotide
  Sense strand starting at position 71 of SEQ ID NO: 803
cccugaggaguccaucgau

SEQ ID NO: 64909 - RNA, 19 nt, Artificial Sequence
  Description of Artificial Sequence: Synthetic oligonucleotide
  Antisense strand to SEQ ID NO: 64828
aucgauggacuccucaggg

SEQ ID NO: 64910 - RNA, 19 nt, Artificial Sequence
  Description of Artificial Sequence: Synthetic oligonucleotide
  Sense strand starting at position 74 of SEQ ID NO: 803
ugaggaguccaucgaucag

SEQ ID NO: 64911 - RNA, 19 nt, Artificial Sequence
  Description of Artificial Sequence: Synthetic oligonucleotide
  Antisense strand to SEQ ID NO: 64830
cugaucgauggacuccuca

SEQ ID NO: 64912 - RNA, 19 nt, Artificial Sequence
  Description of Artificial Sequence: Synthetic oligonucleotide
  Sense strand starting at position 136 of SEQ ID NO: 803
ggcacaggucccggaucau

SEQ ID NO: 64913 - RNA, 19 nt, Artificial Sequence
  Description of Artificial Sequence: Synthetic oligonucleotide
  Antisense strand to SEQ ID NO: 64832
augauccgggaccugugcc

SEQ ID NO: 64914 - RNA, 19 nt, Artificial Sequence
  Description of Artificial Sequence: Synthetic oligonucleotide
  Sense strand starting at position 145 of SEQ ID NO: 803
cccggaucauuuccucgau

SEQ ID NO: 64915 - RNA, 19 nt, Artificial Sequence
  Description of Artificial Sequence: Synthetic oligonucleotide
  Antisense strand to SEQ ID NO: 64834
aucgaggaaaugauccggg

SEQ ID NO: 64916 - RNA, 19 nt, Artificial Sequence
  Description of Artificial Sequence: Synthetic oligonucleotide
  Sense strand starting at position 160 of SEQ ID NO: 803
cgaugaagaacuuggacuu

SEQ ID NO: 64917 - RNA, 19 nt, Artificial Sequence
  Description of Artificial Sequence: Synthetic oligonucleotide
  Antisense strand to SEQ ID NO: 64836
aaguccaaguucuucaucg

SEQ ID NO: 64918 - RNA, 19 nt, Artificial Sequence
  Description of Artificial Sequence: Synthetic oligonucleotide
  Sense strand starting at position 178 of SEQ ID NO: 803
ugccguaaggguugguaca

SEQ ID NO: 64919 - RNA, 19 nt, Artificial Sequence
  Description of Artificial Sequence: Synthetic oligonucleotide
  Antisense strand to SEQ ID NO: 64838
uguaccaacccuuacggca

SEQ ID NO: 64920 - RNA, 19 nt, Artificial Sequence
  Description of Artificial Sequence: Synthetic oligonucleotide
  Sense strand starting at position 179 of SEQ ID NO: 803
gccguaaggguugguacaa

SEQ ID NO: 64921 - RNA, 19 nt, Artificial Sequence
  Description of Artificial Sequence: Synthetic oligonucleotide
  Antisense strand to SEQ ID NO: 64840
uuguaccaacccuuacggc

SEQ ID NO: 64922 - RNA, 19 nt, Artificial Sequence
  Description of Artificial Sequence: Synthetic oligonucleotide
  Sense strand starting at position 298 of SEQ ID NO: 803
ugaucuggccguggagaga

SEQ ID NO: 64923 - RNA, 19 nt, Artificial Sequence
  Description of Artificial Sequence: Synthetic oligonucleotide
  Antisense strand to SEQ ID NO: 64842
ucucuccacggccagauca

SEQ ID NO: 64924 - RNA, 19 nt, Artificial Sequence
  Description of Artificial Sequence: Synthetic oligonucleotide
  Sense strand starting at position 570 of SEQ ID NO: 803
ucagguuaacucuguaaua

SEQ ID NO: 64925 - RNA, 19 nt, Artificial Sequence
  Description of Artificial Sequence: Synthetic oligonucleotide
  Antisense strand to SEQ ID NO: 64844
uauuacagaguuaaccuga

SEQ ID NO: 64926 - RNA, 19 nt, Artificial Sequence
  Description of Artificial Sequence: Synthetic oligonucleotide
  Sense strand starting at position 572 of SEQ ID NO: 803
agguuaacucuguaauaau

SEQ ID NO: 64927 - RNA, 19 nt, Artificial Sequence
  Description of Artificial Sequence: Synthetic oligonucleotide
  Antisense strand to SEQ ID NO: 64846
auuauuacagaguuaaccu

SEQ ID NO: 64928 - RNA, 19 nt, Artificial Sequence
  Description of Artificial Sequence: Synthetic oligonucleotide
  Sense strand starting at position 582 of SEQ ID NO: 803
uguaauaauccagaggcuu

SEQ ID NO: 64929 - RNA, 19 nt, Artificial Sequence
  Description of Artificial Sequence: Synthetic oligonucleotide
  Antisense strand to SEQ ID NO: 64848
aagccucuggauuauuaca

SEQ ID NO: 64930 - RNA, 19 nt, Artificial Sequence
  Description of Artificial Sequence: Synthetic oligonucleotide
  Sense strand starting at position 639 of SEQ ID NO: 803
ggaugaccgccauaaagcu

SEQ ID NO: 64931 - RNA, 19 nt, Artificial Sequence
  Description of Artificial Sequence: Synthetic oligonucleotide
  Antisense strand to SEQ ID NO: 64850
agcuuuauggcggucaucc

SEQ ID NO: 64932 - RNA, 19 nt, Artificial Sequence
  Description of Artificial Sequence: Synthetic oligonucleotide
  Sense strand starting at position 1329 of SEQ ID NO: 803
uauggaaguuaucgaugac

SEQ ID NO: 64933 - RNA, 19 nt, Artificial Sequence
  Description of Artificial Sequence: Synthetic oligonucleotide
  Antisense strand to SEQ ID NO: 64852
gucaucgauaacuuccaua

SEQ ID NO: 64934 - RNA, 19 nt, Artificial Sequence
  Description of Artificial Sequence: Synthetic oligonucleotide
  Sense strand starting at position 1332 of SEQ ID NO: 803
ggaaguuaucgaugaccac

SEQ ID NO: 64935 - RNA, 19 nt, Artificial Sequence
  Description of Artificial Sequence: Synthetic oligonucleotide
  Antisense strand to SEQ ID NO: 64854
guggucaucgauaacuucc

SEQ ID NO: 64936 - RNA, 19 nt, Artificial Sequence
  Description of Artificial Sequence: Synthetic oligonucleotide
  Sense strand starting at position 1586 of SEQ ID NO: 803
gggcaagucuggguaccau

SEQ ID NO: 64937 - RNA, 19 nt, Artificial Sequence
  Description of Artificial Sequence: Synthetic oligonucleotide
  Antisense strand to SEQ ID NO: 64856
augguacccagacuugccc

SEQ ID NO: 64938 - RNA, 19 nt, Artificial Sequence
  Description of Artificial Sequence: Synthetic oligonucleotide
  Sense strand starting at position 1613 of SEQ ID NO: 803
ggccuuaggcuuuggaaau

SEQ ID NO: 64939 - RNA, 19 nt, Artificial Sequence
  Description of Artificial Sequence: Synthetic oligonucleotide
  Antisense strand to SEQ ID NO: 64858
auuuccaaagccuaaggcc

SEQ ID NO: 64940 - RNA, 19 nt, Artificial Sequence
  Description of Artificial Sequence: Synthetic oligonucleotide
  Sense strand starting at position 1648 of SEQ ID NO: 803
cucaguuucuaucucugua

SEQ ID NO: 64941 - RNA, 19 nt, Artificial Sequence
  Description of Artificial Sequence: Synthetic oligonucleotide
  Antisense strand to SEQ ID NO: 64860
uacagagauagaaacugag

SEQ ID NO: 64942 - RNA, 19 nt, Artificial Sequence
  Description of Artificial Sequence: Synthetic oligonucleotide
  Sense strand starting at position 1811 of SEQ ID NO: 803
gauggaaucugaggaucca

SEQ ID NO: 64943 - RNA, 19 nt, Artificial Sequence
  Description of Artificial Sequence: Synthetic oligonucleotide
  Antisense strand to SEQ ID NO: 64862
uggauccucagauuccauc

SEQ ID NO: 64944 - RNA, 19 nt, Artificial Sequence
  Description of Artificial Sequence: Synthetic oligonucleotide
  Sense strand starting at position 1858 of SEQ ID NO: 803
uggagaguccugggcagaa

SEQ ID NO: 64945 - RNA, 19 nt, Artificial Sequence
  Description of Artificial Sequence: Synthetic oligonucleotide
  Antisense strand to SEQ ID NO: 64864
uucugcccaggacucucca

SEQ ID NO: 64946 - RNA, 19 nt, Artificial Sequence
  Description of Artificial Sequence: Synthetic oligonucleotide
  Sense strand starting at position 1956 of SEQ ID NO: 803
ccgccuucgcuagguguaa

SEQ ID NO: 64947 - RNA, 19 nt, Artificial Sequence
  Description of Artificial Sequence: Synthetic oligonucleotide
  Antisense strand to SEQ ID NO: 64866
uuacaccuagcgaaggcgg

SEQ ID NO: 64948 - RNA, 19 nt, Artificial Sequence
  Description of Artificial Sequence: Synthetic oligonucleotide
  Sense strand starting at position 1957 of SEQ ID NO: 803
cgccuucgcuagguguaaa

SEQ ID NO: 64949 - RNA, 19 nt, Artificial Sequence
  Description of Artificial Sequence: Synthetic oligonucleotide
  Antisense strand to SEQ ID NO: 64868
uuuacaccuagcgaaggcg

SEQ ID NO: 64950 - RNA, 19 nt, Artificial Sequence
  Description of Artificial Sequence: Synthetic oligonucleotide
  Sense strand starting at position 1958 of SEQ ID NO: 803
gccuucgcuagguguaaac

SEQ ID NO: 64951 - RNA, 19 nt, Artificial Sequence
  Description of Artificial Sequence: Synthetic oligonucleotide
  Antisense strand to SEQ ID NO: 64870
guuuacaccuagcgaaggc

SEQ ID NO: 64952 - RNA, 19 nt, Artificial Sequence
  Description of Artificial Sequence: Synthetic oligonucleotide
  Sense strand starting at position 2210 of SEQ ID NO: 803
cuggcucagaguuaggaau

SEQ ID NO: 64953 - RNA, 19 nt, Artificial Sequence
  Description of Artificial Sequence: Synthetic oligonucleotide
  Antisense strand to SEQ ID NO: 64872
auuccuaacucugagccag

SEQ ID NO: 64954 - RNA, 19 nt, Artificial Sequence
  Description of Artificial Sequence: Synthetic oligonucleotide
  Sense strand starting at position 2301 of SEQ ID NO: 803
acaaacucugcggguagua

SEQ ID NO: 64955 - RNA, 19 nt, Artificial Sequence
  Description of Artificial Sequence: Synthetic oligonucleotide
  Antisense strand to SEQ ID NO: 64874
uacuacccgcagaguuugu

SEQ ID NO: 64956 - RNA, 19 nt, Artificial Sequence
  Description of Artificial Sequence: Synthetic oligonucleotide
  Sense strand starting at position 2498 of SEQ ID NO: 803
ccagcaucucggugagaca

SEQ ID NO: 64957 - RNA, 19 nt, Artificial Sequence
  Description of Artificial Sequence: Synthetic oligonucleotide
  Antisense strand to SEQ ID NO: 64876
ugucucaccgagaugcugg

SEQ ID NO: 64958 - RNA, 19 nt, Artificial Sequence
  Description of Artificial Sequence: Synthetic oligonucleotide
  Sense strand starting at position 2505 of SEQ ID NO: 803
cucggugagacagguguua

SEQ ID NO: 64959 - RNA, 19 nt, Artificial Sequence
  Description of Artificial Sequence: Synthetic oligonucleotide
  Antisense strand to SEQ ID NO: 64878
uaacaccugucucaccgag

SEQ ID NO: 64960 - RNA, 19 nt, Artificial Sequence
  Description of Artificial Sequence: Synthetic oligonucleotide
  Sense strand starting at position 2507 of SEQ ID NO: 803
cggugagacagguguuauc

SEQ ID NO: 64961 - RNA, 19 nt, Artificial Sequence
  Description of Artificial Sequence: Synthetic oligonucleotide
  Antisense strand to SEQ ID NO: 64880
gauaacaccugucucaccg

SEQ ID NO: 64962 - RNA, 19 nt, Artificial Sequence
  Description of Artificial Sequence: Synthetic oligonucleotide
  Sense strand starting at position 2510 of SEQ ID NO: 803
ugagacagguguuaucacu

SEQ ID NO: 64963 - RNA, 19 nt, Artificial Sequence
  Description of Artificial Sequence: Synthetic oligonucleotide
  Antisense strand to SEQ ID NO: 64882
agugauaacaccugucuca

SEQ ID NO: 64964 - RNA, 19 nt, Artificial Sequence
  Description of Artificial Sequence: Synthetic oligonucleotide
  Sense strand starting at position 2516 of SEQ ID NO: 803
agguguuaucacuggcacu

SEQ ID NO: 64965 - RNA, 19 nt, Artificial Sequence
  Description of Artificial Sequence: Synthetic oligonucleotide
  Antisense strand to SEQ ID NO: 64884
agugccagugauaacaccu

SEQ ID NO: 64966 - RNA, 19 nt, Artificial Sequence
  Description of Artificial Sequence: Synthetic oligonucleotide
  Sense strand starting at position 2517 of SEQ ID NO: 803
gguguuaucacuggcacuu

SEQ ID NO: 64967 - RNA, 19 nt, Artificial Sequence
  Description of Artificial Sequence: Synthetic oligonucleotide
  Antisense strand to SEQ ID NO: 64886
aagugccagugauaacacc

SEQ ID NO: 64968 - RNA, 19 nt, Artificial Sequence
  Description of Artificial Sequence: Synthetic oligonucleotide
  Sense strand starting at position 2849 of SEQ ID NO: 803
gucugucuguuggagggaa

SEQ ID NO: 64969 - RNA, 19 nt, Artificial Sequence
  Description of Artificial Sequence: Synthetic oligonucleotide
  Antisense strand to SEQ ID NO: 64888
uucccuccaacagacagac

SEQ ID NO: 64970 - RNA, 19 nt, Artificial Sequence
  Description of Artificial Sequence: Synthetic oligonucleotide
  Sense strand starting at position 3649 of SEQ ID NO: 803
ggaaguccaguuugcaaau

SEQ ID NO: 64971 - RNA, 19 nt, Artificial Sequence
  Description of Artificial Sequence: Synthetic oligonucleotide
  Antisense strand to SEQ ID NO: 64890
auuugcaaacuggacuucc

SEQ ID NO: 64972 - RNA, 19 nt, Artificial Sequence
  Description of Artificial Sequence: Synthetic oligonucleotide
  Sense strand starting at position 3650 of SEQ ID NO: 803
gaaguccaguuugcaaaua

SEQ ID NO: 64973 - RNA, 19 nt, Artificial Sequence
  Description of Artificial Sequence: Synthetic oligonucleotide
  Antisense strand to SEQ ID NO: 64892
uauuugcaaacuggacuuc

SEQ ID NO: 64974 - RNA, 19 nt, Artificial Sequence
  Description of Artificial Sequence: Synthetic oligonucleotide
  Sense strand starting at position 3846 of SEQ ID NO: 803
gugacauccugcgugauga

SEQ ID NO: 64975 - RNA, 19 nt, Artificial Sequence
  Description of Artificial Sequence: Synthetic oligonucleotide
  Antisense strand to SEQ ID NO: 64894
ucaucacgcaggaugucac

SEQ ID NO: 64976 - RNA, 19 nt, Artificial Sequence
  Description of Artificial Sequence: Synthetic oligonucleotide
  Sense strand starting at position 3847 of SEQ ID NO: 803
ugacauccugcgugaugaa

SEQ ID NO: 64977 - RNA, 19 nt, Artificial Sequence
  Description of Artificial Sequence: Synthetic oligonucleotide
  Antisense strand to SEQ ID NO: 64896
uucaucacgcaggauguca

SEQ ID NO: 64978 - RNA, 19 nt, Artificial Sequence
  Description of Artificial Sequence: Synthetic oligonucleotide
  Sense strand starting at position 3848 of SEQ ID NO: 803
gacauccugcgugaugaaa

SEQ ID NO: 64979 - RNA, 19 nt, Artificial Sequence
  Description of Artificial Sequence: Synthetic oligonucleotide
  Antisense strand to SEQ ID NO: 64898
uuucaucacgcaggauguc

SEQ ID NO: 64980 - RNA, 19 nt, Artificial Sequence
  Description of Artificial Sequence: Synthetic oligonucleotide
  Sense strand starting at position 3979 of SEQ ID NO: 805
gacgaugggccaugagaaa

SEQ ID NO: 64981 - RNA, 19 nt, Artificial Sequence
  Description of Artificial Sequence: Synthetic oligonucleotide
  Antisense strand to SEQ ID NO: 64900
uuucucauggcccaucguc

SEQ ID NO: 64982 - RNA, 19 nt, Artificial Sequence
  Description of Artificial Sequence: Synthetic oligonucleotide
  Sense strand starting at position 3956 of SEQ ID NO: 805
cuggaugagucuguagaca

SEQ ID NO: 64983 - RNA, 19 nt, Artificial Sequence
  Description of Artificial Sequence: Synthetic oligonucleotide
  Antisense strand to SEQ ID NO: 64902
ugucuacagacucauccag

SEQ ID NO: 64984 - RNA, 19 nt, Artificial Sequence
  Description of Artificial Sequence: Synthetic oligonucleotide
  Sense strand starting at position 3901 of SEQ ID NO: 805
ugcagagguaagugauaga

SEQ ID NO: 64985 - RNA, 19 nt, Artificial Sequence
  Description of Artificial Sequence: Synthetic oligonucleotide
  Antisense strand to SEQ ID NO: 64904
ucuaucacuuaccucugca

SEQ ID NO: 64986 - RNA, 19 nt, Artificial Sequence
  Description of Artificial Sequence: Synthetic oligonucleotide
  Sense strand starting at position 3893 of SEQ ID NO: 805
uugaccuuugcagagguaa

SEQ ID NO: 64987 - RNA, 19 nt, Artificial Sequence
  Description of Artificial Sequence: Synthetic oligonucleotide
  Antisense strand to SEQ ID NO: 64906
uuaccucugcaaaggucaa

SEQ ID NO: 64988 - RNA, 19 nt, Artificial Sequence
  Description of Artificial Sequence: Synthetic oligonucleotide
  Sense strand starting at position 3883 of SEQ ID NO: 805
ggaugaaugcuugaccuuu

SEQ ID NO: 64989 - RNA, 19 nt, Artificial Sequence
  Description of Artificial Sequence: Synthetic oligonucleotide
  Antisense strand to SEQ ID NO: 64908
aaaggucaagcauucaucc

SEQ ID NO: 64990 - RNA, 19 nt, Artificial Sequence
  Description of Artificial Sequence: Synthetic oligonucleotide
  Sense strand starting at position 3865 of SEQ ID NO: 805
gaauuaggucauuguuaag

SEQ ID NO: 64991 - RNA, 19 nt, Artificial Sequence
  Description of Artificial Sequence: Synthetic oligonucleotide
  Antisense strand to SEQ ID NO: 64910
cuuaacaaugaccuaauuc

SEQ ID NO: 64992 - RNA, 19 nt, Artificial Sequence
  Description of Artificial Sequence: Synthetic oligonucleotide
  Sense strand starting at position 3864 of SEQ ID NO: 805
agaauuaggucauuguuaa

SEQ ID NO: 64993 - RNA, 19 nt, Artificial Sequence
  Description of Artificial Sequence: Synthetic oligonucleotide
  Antisense strand to SEQ ID NO: 64912
uuaacaaugaccuaauucu

SEQ ID NO: 64994 - RNA, 19 nt, Artificial Sequence
  Description of Artificial Sequence: Synthetic oligonucleotide
  Sense strand starting at position 3862 of SEQ ID NO: 805
gcagaauuaggucauuguu

SEQ ID NO: 64995 - RNA, 19 nt, Artificial Sequence
  Description of Artificial Sequence: Synthetic oligonucleotide
  Antisense strand to SEQ ID NO: 64914
aacaaugaccuaauucugc

SEQ ID NO: 64996 - RNA, 19 nt, Artificial Sequence
  Description of Artificial Sequence: Synthetic oligonucleotide
  Sense strand starting at position 3409 of SEQ ID NO: 805
cagacauuguagccagaca

SEQ ID NO: 64997 - RNA, 19 nt, Artificial Sequence
  Description of Artificial Sequence: Synthetic oligonucleotide
  Antisense strand to SEQ ID NO: 64916
ugucuggcuacaaugucug

SEQ ID NO: 64998 - RNA, 19 nt, Artificial Sequence
  Description of Artificial Sequence: Synthetic oligonucleotide
  Sense strand starting at position 3133 of SEQ ID NO: 805
augaccuagcaaugaaagu

SEQ ID NO: 64999 - RNA, 19 nt, Artificial Sequence
  Description of Artificial Sequence: Synthetic oligonucleotide
  Antisense strand to SEQ ID NO: 64918
acuuucauugcuaggucau

SEQ ID NO: 65000 - RNA, 19 nt, Artificial Sequence
  Description of Artificial Sequence: Synthetic oligonucleotide
  Sense strand starting at position 3105 of SEQ ID NO: 805
guucuugaugucuacaacu

SEQ ID NO: 65001 - RNA, 19 nt, Artificial Sequence
  Description of Artificial Sequence: Synthetic oligonucleotide
  Antisense strand to SEQ ID NO: 64920
aguuguagacaucaagaac

SEQ ID NO: 65002 - RNA, 19 nt, Artificial Sequence
  Description of Artificial Sequence: Synthetic oligonucleotide
  Sense strand starting at position 3099 of SEQ ID NO: 805
gguaaaguucuugaugucu

SEQ ID NO: 65003 - RNA, 19 nt, Artificial Sequence
  Description of Artificial Sequence: Synthetic oligonucleotide
  Antisense strand to SEQ ID NO: 64922
agacaucaagaacuuuacc

SEQ ID NO: 65004 - RNA, 19 nt, Artificial Sequence
  Description of Artificial Sequence: Synthetic oligonucleotide
  Sense strand starting at position 3039 of SEQ ID NO: 805
uauugugguuacuuagaaa

SEQ ID NO: 65005 - RNA, 19 nt, Artificial Sequence
  Description of Artificial Sequence: Synthetic oligonucleotide
  Antisense strand to SEQ ID NO: 64924
uuucuaaguaaccacaaua

SEQ ID NO: 65006 - RNA, 19 nt, Artificial Sequence
  Description of Artificial Sequence: Synthetic oligonucleotide
  Sense strand starting at position 2849 of SEQ ID NO: 805
uuaugugaacuguacaucu

SEQ ID NO: 65007 - RNA, 19 nt, Artificial Sequence
  Description of Artificial Sequence: Synthetic oligonucleotide
  Antisense strand to SEQ ID NO: 64926
agauguacaguucacauaa

SEQ ID NO: 65008 - RNA, 19 nt, Artificial Sequence
  Description of Artificial Sequence: Synthetic oligonucleotide
  Sense strand starting at position 2770 of SEQ ID NO: 805
ccuggucuacccuagaaac

SEQ ID NO: 65009 - RNA, 19 nt, Artificial Sequence
  Description of Artificial Sequence: Synthetic oligonucleotide
  Antisense strand to SEQ ID NO: 64928
guuucuaggguagaccagg

SEQ ID NO: 65010 - RNA, 19 nt, Artificial Sequence
  Description of Artificial Sequence: Synthetic oligonucleotide
  Sense strand starting at position 2760 of SEQ ID NO: 805
ugaugauggaccuggucua

SEQ ID NO: 65011 - RNA, 19 nt, Artificial Sequence
  Description of Artificial Sequence: Synthetic oligonucleotide
  Antisense strand to SEQ ID NO: 64930
uagaccagguccaucauca

SEQ ID NO: 65012 - RNA, 19 nt, Artificial Sequence
  Description of Artificial Sequence: Synthetic oligonucleotide
  Sense strand starting at position 2598 of SEQ ID NO: 805
uccauuugccaaugcaagu

SEQ ID NO: 65013 - RNA, 19 nt, Artificial Sequence
  Description of Artificial Sequence: Synthetic oligonucleotide
  Antisense strand to SEQ ID NO: 64932
acuugcauuggcaaaugga

SEQ ID NO: 65014 - RNA, 19 nt, Artificial Sequence
  Description of Artificial Sequence: Synthetic oligonucleotide
  Sense strand starting at position 2495 of SEQ ID NO: 805
gcagaucuuggagagcuuu

SEQ ID NO: 65015 - RNA, 19 nt, Artificial Sequence
  Description of Artificial Sequence: Synthetic oligonucleotide
  Antisense strand to SEQ ID NO: 64934
aaagcucuccaagaucugc

SEQ ID NO: 65016 - RNA, 19 nt, Artificial Sequence
  Description of Artificial Sequence: Synthetic oligonucleotide
  Sense strand starting at position 2330 of SEQ ID NO: 805
gaaagucucucguuuauuu

SEQ ID NO: 65017 - RNA, 19 nt, Artificial Sequence
  Description of Artificial Sequence: Synthetic oligonucleotide
  Antisense strand to SEQ ID NO: 64936
aaauaaacgagagacuuuc

SEQ ID NO: 65018 - RNA, 19 nt, Artificial Sequence
  Description of Artificial Sequence: Synthetic oligonucleotide
  Sense strand starting at position 2313 of SEQ ID NO: 805
gcacauagauguucugaga

SEQ ID NO: 65019 - RNA, 19 nt, Artificial Sequence
  Description of Artificial Sequence: Synthetic oligonucleotide
  Antisense strand to SEQ ID NO: 64938
ucucagaacaucuaugugc

SEQ ID NO: 65020 - RNA, 19 nt, Artificial Sequence
  Description of Artificial Sequence: Synthetic oligonucleotide
  Sense strand starting at position 2110 of SEQ ID NO: 805
ucaugaggugcauauuacu

SEQ ID NO: 65021 - RNA, 19 nt, Artificial Sequence
  Description of Artificial Sequence: Synthetic oligonucleotide
  Antisense strand to SEQ ID NO: 64940
aguaauaugcaccucauga

SEQ ID NO: 65022 - RNA, 19 nt, Artificial Sequence
  Description of Artificial Sequence: Synthetic oligonucleotide
  Sense strand starting at position 2108 of SEQ ID NO: 805
ucucaugaggugcauauua

SEQ ID NO: 65023 - RNA, 19 nt, Artificial Sequence
  Description of Artificial Sequence: Synthetic oligonucleotide
  Antisense strand to SEQ ID NO: 64942
uaauaugcaccucaugaga

SEQ ID NO: 65024 - RNA, 19 nt, Artificial Sequence
  Description of Artificial Sequence: Synthetic oligonucleotide
  Sense strand starting at position 2024 of SEQ ID NO: 805
gggcucuugggugaacuua

SEQ ID NO: 65025 - RNA, 19 nt, Artificial Sequence
  Description of Artificial Sequence: Synthetic oligonucleotide
  Antisense strand to SEQ ID NO: 64944
uaaguucacccaagagccc

SEQ ID NO: 65026 - RNA, 19 nt, Artificial Sequence
  Description of Artificial Sequence: Synthetic oligonucleotide
  Sense strand starting at position 1675 of SEQ ID NO: 805
aggacauacguguacuuua

SEQ ID NO: 65027 - RNA, 19 nt, Artificial Sequence
  Description of Artificial Sequence: Synthetic oligonucleotide
  Antisense strand to SEQ ID NO: 64946
uaaaguacacguauguccu

SEQ ID NO: 65028 - RNA, 19 nt, Artificial Sequence
  Description of Artificial Sequence: Synthetic oligonucleotide
  Sense strand starting at position 1573 of SEQ ID NO: 805
cugagugagccugagaguu

SEQ ID NO: 65029 - RNA, 19 nt, Artificial Sequence
  Description of Artificial Sequence: Synthetic oligonucleotide
  Antisense strand to SEQ ID NO: 64948
aacucucaggcucacucag

SEQ ID NO: 65030 - RNA, 19 nt, Artificial Sequence
  Description of Artificial Sequence: Synthetic oligonucleotide
  Sense strand starting at position 1484 of SEQ ID NO: 805
ucaggcucccagggaauau

SEQ ID NO: 65031 - RNA, 19 nt, Artificial Sequence
  Description of Artificial Sequence: Synthetic oligonucleotide
  Antisense strand to SEQ ID NO: 64950
auauucccugggagccuga

SEQ ID NO: 65032 - RNA, 19 nt, Artificial Sequence
  Description of Artificial Sequence: Synthetic oligonucleotide
  Sense strand starting at position 1097 of SEQ ID NO: 805
aucgauugcccugaacaua

SEQ ID NO: 65033 - RNA, 19 nt, Artificial Sequence
  Description of Artificial Sequence: Synthetic oligonucleotide
  Antisense strand to SEQ ID NO: 64952
uauguucagggcaaucgau

SEQ ID NO: 65034 - RNA, 19 nt, Artificial Sequence
  Description of Artificial Sequence: Synthetic oligonucleotide
  Sense strand starting at position 1046 of SEQ ID NO: 805
cuugaauugugacugagaa

SEQ ID NO: 65035 - RNA, 19 nt, Artificial Sequence
  Description of Artificial Sequence: Synthetic oligonucleotide
  Antisense strand to SEQ ID NO: 64954
uucucagucacaauucaag

SEQ ID NO: 65036 - RNA, 19 nt, Artificial Sequence
  Description of Artificial Sequence: Synthetic oligonucleotide
  Sense strand starting at position 1033 of SEQ ID NO: 805
agaaauugcuuggcuugaa

SEQ ID NO: 65037 - RNA, 19 nt, Artificial Sequence
  Description of Artificial Sequence: Synthetic oligonucleotide
  Antisense strand to SEQ ID NO: 64956
uucaagccaagcaauuucu

SEQ ID NO: 65038 - RNA, 19 nt, Artificial Sequence
  Description of Artificial Sequence: Synthetic oligonucleotide
  Sense strand starting at position 1022 of SEQ ID NO: 805
gcugucuucccagaaauug

SEQ ID NO: 65039 - RNA, 19 nt, Artificial Sequence
  Description of Artificial Sequence: Synthetic oligonucleotide
  Antisense strand to SEQ ID NO: 64958
caauuucugggaagacagc

SEQ ID NO: 65040 - RNA, 19 nt, Artificial Sequence
  Description of Artificial Sequence: Synthetic oligonucleotide
  Sense strand starting at position 626 of SEQ ID NO: 805
ugugacuuugcacaauaga

SEQ ID NO: 65041 - RNA, 19 nt, Artificial Sequence
  Description of Artificial Sequence: Synthetic oligonucleotide
  Antisense strand to SEQ ID NO: 64960
ucuauugugcaaagucaca

SEQ ID NO: 65042 - RNA, 19 nt, Artificial Sequence
  Description of Artificial Sequence: Synthetic oligonucleotide
  Sense strand starting at position 548 of SEQ ID NO: 805
agcguuucugcugccaauu

SEQ ID NO: 65043 - RNA, 19 nt, Artificial Sequence
  Description of Artificial Sequence: Synthetic oligonucleotide
  Antisense strand to SEQ ID NO: 64962
aauuggcagcagaaacgcu

SEQ ID NO: 65044 - RNA, 19 nt, Artificial Sequence
  Description of Artificial Sequence: Synthetic oligonucleotide
  Sense strand starting at position 521 of SEQ ID NO: 805
uuuguagcagcacauaaau

SEQ ID NO: 65045 - RNA, 19 nt, Artificial Sequence
  Description of Artificial Sequence: Synthetic oligonucleotide
  Antisense strand to SEQ ID NO: 64964
auuuaugugcugcuacaaa

SEQ ID NO: 65046 - RNA, 19 nt, Artificial Sequence
  Description of Artificial Sequence: Synthetic oligonucleotide
  Sense strand starting at position 493 of SEQ ID NO: 805
uguauaguacaguaagaau

SEQ ID NO: 65047 - RNA, 19 nt, Artificial Sequence
  Description of Artificial Sequence: Synthetic oligonucleotide
  Antisense strand to SEQ ID NO: 64966
auucuuacuguacuauaca

SEQ ID NO: 65048 - RNA, 19 nt, Artificial Sequence
  Description of Artificial Sequence: Synthetic oligonucleotide
  Sense strand starting at position 434 of SEQ ID NO: 805
ggcugucauuuaucaaugu

SEQ ID NO: 65049 - RNA, 19 nt, Artificial Sequence
  Description of Artificial Sequence: Synthetic oligonucleotide
  Antisense strand to SEQ ID NO: 64968
acauugauaaaugacagcc

SEQ ID NO: 65050 - RNA, 19 nt, Artificial Sequence
  Description of Artificial Sequence: Synthetic oligonucleotide
  Sense strand starting at position 350 of SEQ ID NO: 805
aguguuuacagguaaggua

SEQ ID NO: 65051 - RNA, 19 nt, Artificial Sequence
  Description of Artificial Sequence: Synthetic oligonucleotide
  Antisense strand to SEQ ID NO: 64970
uaccuuaccuguaaacacu

SEQ ID NO: 65052 - RNA, 19 nt, Artificial Sequence
  Description of Artificial Sequence: Synthetic oligonucleotide
  Sense strand starting at position 149 of SEQ ID NO: 805
ucauucugcugauuagaua

SEQ ID NO: 65053 - RNA, 19 nt, Artificial Sequence
  Description of Artificial Sequence: Synthetic oligonucleotide
  Antisense strand to SEQ ID NO: 64972
uaucuaaucagcagaauga

SEQ ID NO: 65054 - RNA, 19 nt, Artificial Sequence
  Description of Artificial Sequence: Synthetic oligonucleotide
  Sense strand starting at position 131 of SEQ ID NO: 805
uauggugacccugaaguuu

SEQ ID NO: 65055 - RNA, 19 nt, Artificial Sequence
  Description of Artificial Sequence: Synthetic oligonucleotide
  Antisense strand to SEQ ID NO: 64974
aaacuucagggucaccaua

SEQ ID NO: 65056 - RNA, 19 nt, Artificial Sequence
  Description of Artificial Sequence: Synthetic oligonucleotide
  Sense strand starting at position 127 of SEQ ID NO: 805
gcaauauggugacccugaa

SEQ ID NO: 65057 - RNA, 19 nt, Artificial Sequence
  Description of Artificial Sequence: Synthetic oligonucleotide
  Antisense strand to SEQ ID NO: 64976
uucagggucaccauauugc

SEQ ID NO: 65058 - RNA, 19 nt, Artificial Sequence
  Description of Artificial Sequence: Synthetic oligonucleotide
  Sense strand starting at position 30 of SEQ ID NO: 805
ggcgagucuggguaaagga

SEQ ID NO: 65059 - RNA, 19 nt, Artificial Sequence
  Description of Artificial Sequence: Synthetic oligonucleotide
  Antisense strand to SEQ ID NO: 64978
uccuuuacccagacucgcc

SEQ ID NO: 65060 - RNA, 19 nt, Artificial Sequence
  Description of Artificial Sequence: Synthetic oligonucleotide
  Sense strand starting at position 3954 of SEQ ID NO: 804
acugaagaauggcaagaaa

SEQ ID NO: 65061 - RNA, 19 nt, Artificial Sequence
  Description of Artificial Sequence: Synthetic oligonucleotide
  Antisense strand to SEQ ID NO: 64980
uuucuugccauucuucagu

SEQ ID NO: 65062 - RNA, 19 nt, Artificial Sequence
  Description of Artificial Sequence: Synthetic oligonucleotide
  Sense strand starting at position 3766 of SEQ ID NO: 804
acacauaucuaggauaaga

SEQ ID NO: 65063 - RNA, 19 nt, Artificial Sequence
  Description of Artificial Sequence: Synthetic oligonucleotide
  Antisense strand to SEQ ID NO: 64982
ucuuauccuagauaugugu

SEQ ID NO: 65064 - RNA, 19 nt, Artificial Sequence
  Description of Artificial Sequence: Synthetic oligonucleotide
  Sense strand starting at position 3733 of SEQ ID NO: 804
gugucacguauuuguauac

SEQ ID NO: 65065 - RNA, 19 nt, Artificial Sequence
  Description of Artificial Sequence: Synthetic oligonucleotide
  Antisense strand to SEQ ID NO: 64984
guauacaaauacgugacac

SEQ ID NO: 65066 - RNA, 19 nt, Artificial Sequence
  Description of Artificial Sequence: Synthetic oligonucleotide
  Sense strand starting at position 3732 of SEQ ID NO: 804
agugucacguauuuguaua

SEQ ID NO: 65067 - RNA, 19 nt, Artificial Sequence
  Description of Artificial Sequence: Synthetic oligonucleotide
  Antisense strand to SEQ ID NO: 64986
uauacaaauacgugacacu

SEQ ID NO: 65068 - RNA, 19 nt, Artificial Sequence
  Description of Artificial Sequence: Synthetic oligonucleotide
  Sense strand starting at position 3703 of SEQ ID NO: 804
auuguaauaccacauguca

SEQ ID NO: 65069 - RNA, 19 nt, Artificial Sequence
  Description of Artificial Sequence: Synthetic oligonucleotide
  Antisense strand to SEQ ID NO: 64988
ugacaugugguauuacaau

SEQ ID NO: 65070 - RNA, 19 nt, Artificial Sequence
  Description of Artificial Sequence: Synthetic oligonucleotide
  Sense strand starting at position 3326 of SEQ ID NO: 804
ggagccuuguuucugggaa

SEQ ID NO: 65071 - RNA, 19 nt, Artificial Sequence
  Description of Artificial Sequence: Synthetic oligonucleotide
  Antisense strand to SEQ ID NO: 64990
uucccagaaacaaggcucc

SEQ ID NO: 65072 - RNA, 19 nt, Artificial Sequence
  Description of Artificial Sequence: Synthetic oligonucleotide
  Sense strand starting at position 3260 of SEQ ID NO: 804
ucaggugccuuauugauca

SEQ ID NO: 65073 - RNA, 19 nt, Artificial Sequence
  Description of Artificial Sequence: Synthetic oligonucleotide
  Antisense strand to SEQ ID NO: 64992
ugaucaauaaggcaccuga

SEQ ID NO: 65074 - RNA, 19 nt, Artificial Sequence
  Description of Artificial Sequence: Synthetic oligonucleotide
  Sense strand starting at position 3202 of SEQ ID NO: 804
guugucaccucuuuauaaa

SEQ ID NO: 65075 - RNA, 19 nt, Artificial Sequence
  Description of Artificial Sequence: Synthetic oligonucleotide
  Antisense strand to SEQ ID NO: 64994
uuuauaaagaggugacaac

SEQ ID NO: 65076 - RNA, 19 nt, Artificial Sequence
  Description of Artificial Sequence: Synthetic oligonucleotide
  Sense strand starting at position 3175 of SEQ ID NO: 804
uugccaaggacuuaaguga

SEQ ID NO: 65077 - RNA, 19 nt, Artificial Sequence
  Description of Artificial Sequence: Synthetic oligonucleotide
  Antisense strand to SEQ ID NO: 64996
ucacuuaaguccuuggcaa

SEQ ID NO: 65078 - RNA, 19 nt, Artificial Sequence
  Description of Artificial Sequence: Synthetic oligonucleotide
  Sense strand starting at position 3045 of SEQ ID NO: 804
guacccauauccucaacga

SEQ ID NO: 65079 - RNA, 19 nt, Artificial Sequence
  Description of Artificial Sequence: Synthetic oligonucleotide
  Antisense strand to SEQ ID NO: 64998
ucguugaggauauggguac

SEQ ID NO: 65080 - RNA, 19 nt, Artificial Sequence
  Description of Artificial Sequence: Synthetic oligonucleotide
  Sense strand starting at position 3034 of SEQ ID NO: 804
gauauaaguccguacccau

SEQ ID NO: 65081 - RNA, 19 nt, Artificial Sequence
  Description of Artificial Sequence: Synthetic oligonucleotide
  Antisense strand to SEQ ID NO: 65000
auggguacggacuuauauc

SEQ ID NO: 65082 - RNA, 19 nt, Artificial Sequence
  Description of Artificial Sequence: Synthetic oligonucleotide
  Sense strand starting at position 3033 of SEQ ID NO: 804
ugauauaaguccguaccca

SEQ ID NO: 65083 - RNA, 19 nt, Artificial Sequence
  Description of Artificial Sequence: Synthetic oligonucleotide
  Antisense strand to SEQ ID NO: 65002
uggguacggacuuauauca

SEQ ID NO: 65084 - RNA, 19 nt, Artificial Sequence
  Description of Artificial Sequence: Synthetic oligonucleotide
  Sense strand starting at position 3000 of SEQ ID NO: 804
gagcuucucggucagagga

SEQ ID NO: 65085 - RNA, 19 nt, Artificial Sequence
  Description of Artificial Sequence: Synthetic oligonucleotide
  Antisense strand to SEQ ID NO: 65004
uccucugaccgagaagcuc

SEQ ID NO: 65086 - RNA, 19 nt, Artificial Sequence
  Description of Artificial Sequence: Synthetic oligonucleotide
  Sense strand starting at position 2937 of SEQ ID NO: 804
cuuccaguguuccuaagaa

SEQ ID NO: 65087 - RNA, 19 nt, Artificial Sequence
  Description of Artificial Sequence: Synthetic oligonucleotide
  Antisense strand to SEQ ID NO: 65006
uucuuaggaacacuggaag

SEQ ID NO: 65088 - RNA, 19 nt, Artificial Sequence
  Description of Artificial Sequence: Synthetic oligonucleotide
  Sense strand starting at position 2900 of SEQ ID NO: 804
cuauguaaccuuggugaug

SEQ ID NO: 65089 - RNA, 19 nt, Artificial Sequence
  Description of Artificial Sequence: Synthetic oligonucleotide
  Antisense strand to SEQ ID NO: 65008
caucaccaagguuacauag

SEQ ID NO: 65090 - RNA, 19 nt, Artificial Sequence
  Description of Artificial Sequence: Synthetic oligonucleotide
  Sense strand starting at position 2887 of SEQ ID NO: 804
cuuguaacauaaucuaugu

SEQ ID NO: 65091 - RNA, 19 nt, Artificial Sequence
  Description of Artificial Sequence: Synthetic oligonucleotide
  Antisense strand to SEQ ID NO: 65010
acauagauuauguuacaag

SEQ ID NO: 65092 - RNA, 19 nt, Artificial Sequence
  Description of Artificial Sequence: Synthetic oligonucleotide
  Sense strand starting at position 2826 of SEQ ID NO: 804
auucguugcguucuuuaaa

SEQ ID NO: 65093 - RNA, 19 nt, Artificial Sequence
  Description of Artificial Sequence: Synthetic oligonucleotide
  Antisense strand to SEQ ID NO: 65012
uuuaaagaacgcaacgaau

SEQ ID NO: 65094 - RNA, 19 nt, Artificial Sequence
  Description of Artificial Sequence: Synthetic oligonucleotide
  Sense strand starting at position 2824 of SEQ ID NO: 804
ucauucguugcguucuuua

SEQ ID NO: 65095 - RNA, 19 nt, Artificial Sequence
  Description of Artificial Sequence: Synthetic oligonucleotide
  Antisense strand to SEQ ID NO: 65014
uaaagaacgcaacgaauga

SEQ ID NO: 65096 - RNA, 19 nt, Artificial Sequence
  Description of Artificial Sequence: Synthetic oligonucleotide
  Sense strand starting at position 2738 of SEQ ID NO: 804
cuaucaaugguagaguugu

SEQ ID NO: 65097 - RNA, 19 nt, Artificial Sequence
  Description of Artificial Sequence: Synthetic oligonucleotide
  Antisense strand to SEQ ID NO: 65016
acaacucuaccauugauag

SEQ ID NO: 65098 - RNA, 19 nt, Artificial Sequence
  Description of Artificial Sequence: Synthetic oligonucleotide
  Sense strand starting at position 2734 of SEQ ID NO: 804
agagcuaucaaugguagag

SEQ ID NO: 65099 - RNA, 19 nt, Artificial Sequence
  Description of Artificial Sequence: Synthetic oligonucleotide
  Antisense strand to SEQ ID NO: 65018
cucuaccauugauagcucu

SEQ ID NO: 65100 - RNA, 19 nt, Artificial Sequence
  Description of Artificial Sequence: Synthetic oligonucleotide
  Sense strand starting at position 2733 of SEQ ID NO: 804
cagagcuaucaaugguaga

SEQ ID NO: 65101 - RNA, 19 nt, Artificial Sequence
  Description of Artificial Sequence: Synthetic oligonucleotide
  Antisense strand to SEQ ID NO: 65020
ucuaccauugauagcucug

SEQ ID NO: 65102 - RNA, 19 nt, Artificial Sequence
  Description of Artificial Sequence: Synthetic oligonucleotide
  Sense strand starting at position 2528 of SEQ ID NO: 804
ggccaacugaccugaguuu

SEQ ID NO: 65103 - RNA, 19 nt, Artificial Sequence
  Description of Artificial Sequence: Synthetic oligonucleotide
  Antisense strand to SEQ ID NO: 65022
aaacucaggucaguuggcc

SEQ ID NO: 65104 - RNA, 19 nt, Artificial Sequence
  Description of Artificial Sequence: Synthetic oligonucleotide
  Sense strand starting at position 2519 of SEQ ID NO: 804
gcucuuauuggccaacuga

SEQ ID NO: 65105 - RNA, 19 nt, Artificial Sequence
  Description of Artificial Sequence: Synthetic oligonucleotide
  Antisense strand to SEQ ID NO: 65024
ucaguuggccaauaagagc

SEQ ID NO: 65106 - RNA, 19 nt, Artificial Sequence
  Description of Artificial Sequence: Synthetic oligonucleotide
  Sense strand starting at position 1520 of SEQ ID NO: 804
ucgaauuacgacgagcaga

SEQ ID NO: 65107 - RNA, 19 nt, Artificial Sequence
  Description of Artificial Sequence: Synthetic oligonucleotide
  Antisense strand to SEQ ID NO: 65026
ucugcucgucguaauucga

SEQ ID NO: 65108 - RNA, 19 nt, Artificial Sequence
  Description of Artificial Sequence: Synthetic oligonucleotide
  Sense strand starting at position 1509 of SEQ ID NO: 804
ccggacaagacucgaauua

SEQ ID NO: 65109 - RNA, 19 nt, Artificial Sequence
  Description of Artificial Sequence: Synthetic oligonucleotide
  Antisense strand to SEQ ID NO: 65028
uaauucgagucuuguccgg

SEQ ID NO: 65110 - RNA, 19 nt, Artificial Sequence
  Description of Artificial Sequence: Synthetic oligonucleotide
  Sense strand starting at position 1444 of SEQ ID NO: 804
cccuuuguguuucccaaca

SEQ ID NO: 65111 - RNA, 19 nt, Artificial Sequence
  Description of Artificial Sequence: Synthetic oligonucleotide
  Antisense strand to SEQ ID NO: 65030
uguugggaaacacaaaggg

SEQ ID NO: 65112 - RNA, 19 nt, Artificial Sequence
  Description of Artificial Sequence: Synthetic oligonucleotide
  Sense strand starting at position 1036 of SEQ ID NO: 804
gagggauucucccugaagc

SEQ ID NO: 65113 - RNA, 19 nt, Artificial Sequence
  Description of Artificial Sequence: Synthetic oligonucleotide
  Antisense strand to SEQ ID NO: 65032
gcuucagggagaaucccuc

SEQ ID NO: 65114 - RNA, 19 nt, Artificial Sequence
  Description of Artificial Sequence: Synthetic oligonucleotide
  Sense strand starting at position 726 of SEQ ID NO: 804
cacaguaacgaggguuaca

SEQ ID NO: 65115 - RNA, 19 nt, Artificial Sequence
  Description of Artificial Sequence: Synthetic oligonucleotide
  Antisense strand to SEQ ID NO: 65034
uguaacccucguuacugug

SEQ ID NO: 65116 - RNA, 19 nt, Artificial Sequence
  Description of Artificial Sequence: Synthetic oligonucleotide
  Sense strand starting at position 671 of SEQ ID NO: 804
cguaguccaucuccauuaa

SEQ ID NO: 65117 - RNA, 19 nt, Artificial Sequence
  Description of Artificial Sequence: Synthetic oligonucleotide
  Antisense strand to SEQ ID NO: 65036
uuaauggagauggacuacg

SEQ ID NO: 65118 - RNA, 19 nt, Artificial Sequence
  Description of Artificial Sequence: Synthetic oligonucleotide
  Sense strand starting at position 505 of SEQ ID NO: 804
caucuucggcuaugaauga

SEQ ID NO: 65119 - RNA, 19 nt, Artificial Sequence
  Description of Artificial Sequence: Synthetic oligonucleotide
  Antisense strand to SEQ ID NO: 65038
ucauucauagccgaagaug

SEQ ID NO: 65120 - RNA, 19 nt, Artificial Sequence
  Description of Artificial Sequence: Synthetic oligonucleotide
  Sense strand starting at position 501 of SEQ ID NO: 804
cuaacaucuucggcuauga

SEQ ID NO: 65121 - RNA, 19 nt, Artificial Sequence
  Description of Artificial Sequence: Synthetic oligonucleotide
  Antisense strand to SEQ ID NO: 65040
ucauagccgaagauguuag

SEQ ID NO: 65122 - RNA, 19 nt, Artificial Sequence
  Description of Artificial Sequence: Synthetic oligonucleotide
  Sense strand starting at position 379 of SEQ ID NO: 804
aguacaaugucagcucaga

SEQ ID NO: 65123 - RNA, 19 nt, Artificial Sequence
  Description of Artificial Sequence: Synthetic oligonucleotide
  Antisense strand to SEQ ID NO: 65042
ucugagcugacauuguacu

SEQ ID NO: 65124 - RNA, 19 nt, Artificial Sequence
  Description of Artificial Sequence: Synthetic oligonucleotide
  Sense strand starting at position 256 of SEQ ID NO: 804
cgauuauaucucugaaugg

SEQ ID NO: 65125 - RNA, 19 nt, Artificial Sequence
  Description of Artificial Sequence: Synthetic oligonucleotide
  Antisense strand to SEQ ID NO: 65044
ccauucagagauauaaucg

SEQ ID NO: 65126 - RNA, 19 nt, Artificial Sequence
  Description of Artificial Sequence: Synthetic oligonucleotide
  Sense strand starting at position 255 of SEQ ID NO: 804
acgauuauaucucugaaug

SEQ ID NO: 65127 - RNA, 19 nt, Artificial Sequence
  Description of Artificial Sequence: Synthetic oligonucleotide
  Antisense strand to SEQ ID NO: 65046
cauucagagauauaaucgu

SEQ ID NO: 65128 - RNA, 19 nt, Artificial Sequence
  Description of Artificial Sequence: Synthetic oligonucleotide
  Sense strand starting at position 253 of SEQ ID NO: 804
acacgauuauaucucugaa

SEQ ID NO: 65129 - RNA, 19 nt, Artificial Sequence
  Description of Artificial Sequence: Synthetic oligonucleotide
  Antisense strand to SEQ ID NO: 65048
uucagagauauaaucgugu

SEQ ID NO: 65130 - RNA, 19 nt, Artificial Sequence
  Description of Artificial Sequence: Synthetic oligonucleotide
  Sense strand starting at position 210 of SEQ ID NO: 804
acaguuuaccgggaagcaa

SEQ ID NO: 65131 - RNA, 19 nt, Artificial Sequence
  Description of Artificial Sequence: Synthetic oligonucleotide
  Antisense strand to SEQ ID NO: 65050
uugcuucccgguaaacugu

SEQ ID NO: 65132 - RNA, 19 nt, Artificial Sequence
  Description of Artificial Sequence: Synthetic oligonucleotide
  Sense strand starting at position 209 of SEQ ID NO: 804
cacaguuuaccgggaagca

SEQ ID NO: 65133 - RNA, 19 nt, Artificial Sequence
  Description of Artificial Sequence: Synthetic oligonucleotide
  Antisense strand to SEQ ID NO: 65052
ugcuucccgguaaacugug

SEQ ID NO: 65134 - RNA, 19 nt, Artificial Sequence
  Description of Artificial Sequence: Synthetic oligonucleotide
  Sense strand starting at position 120 of SEQ ID NO: 804
guggcuuauguguuugguu

SEQ ID NO: 65135 - RNA, 19 nt, Artificial Sequence
  Description of Artificial Sequence: Synthetic oligonucleotide
  Antisense strand to SEQ ID NO: 65054
aaccaaacacauaagccac

SEQ ID NO: 65136 - RNA, 19 nt, Artificial Sequence
  Description of Artificial Sequence: Synthetic oligonucleotide
  Sense strand starting at position 66 of SEQ ID NO: 804
ucuaaucacguguacuaau

SEQ ID NO: 65137 - RNA, 19 nt, Artificial Sequence
  Description of Artificial Sequence: Synthetic oligonucleotide
  Antisense strand to SEQ ID NO: 65056
auuaguacacgugauuaga

SEQ ID NO: 65138 - RNA, 19 nt, Artificial Sequence
  Description of Artificial Sequence: Synthetic oligonucleotide
  Sense strand starting at position 52 of SEQ ID NO: 804
gcacgcuugcucuuucuaa

SEQ ID NO: 65139 - RNA, 19 nt, Artificial Sequence
  Description of Artificial Sequence: Synthetic oligonucleotide
  Antisense strand to SEQ ID NO: 65058
uuagaaagagcaagcgugc

SEQ ID NO: 65140 - RNA, 19 nt, Artificial Sequence
  Description of Artificial Sequence: Synthetic oligonucleotide
  Sense strand starting at position 88 of SEQ ID NO: 806
ccaacuaaguacugacaga

SEQ ID NO: 65141 - RNA, 19 nt, Artificial Sequence
  Description of Artificial Sequence: Synthetic oligonucleotide
  Antisense strand to SEQ ID NO: 65060
ucugucaguacuuaguugg

SEQ ID NO: 65142 - RNA, 19 nt, Artificial Sequence
  Description of Artificial Sequence: Synthetic oligonucleotide
  Sense strand starting at position 211 of SEQ ID NO: 806
gcaauaaaguuagcacuaa

SEQ ID NO: 65143 - RNA, 19 nt, Artificial Sequence
  Description of Artificial Sequence: Synthetic oligonucleotide
  Antisense strand to SEQ ID NO: 65062
uuagugcuaacuuuauugc

SEQ ID NO: 65144 - RNA, 19 nt, Artificial Sequence
  Description of Artificial Sequence: Synthetic oligonucleotide
  Sense strand starting at position 290 of SEQ ID NO: 806
aaagucaucugugcuagga

SEQ ID NO: 65145 - RNA, 19 nt, Artificial Sequence
  Description of Artificial Sequence: Synthetic oligonucleotide
  Antisense strand to SEQ ID NO: 65064
uccuagcacagaugacuuu

SEQ ID NO: 65146 - RNA, 19 nt, Artificial Sequence
  Description of Artificial Sequence: Synthetic oligonucleotide
  Sense strand starting at position 510 of SEQ ID NO: 806
uuugcagucuggccugaaa

SEQ ID NO: 65147 - RNA, 19 nt, Artificial Sequence
  Description of Artificial Sequence: Synthetic oligonucleotide
  Antisense strand to SEQ ID NO: 65066
uuucaggccagacugcaaa

SEQ ID NO: 65148 - RNA, 19 nt, Artificial Sequence
  Description of Artificial Sequence: Synthetic oligonucleotide
  Sense strand starting at position 538 of SEQ ID NO: 806
uugcccuuugcugaaauau

SEQ ID NO: 65149 - RNA, 19 nt, Artificial Sequence
  Description of Artificial Sequence: Synthetic oligonucleotide
  Antisense strand to SEQ ID NO: 65068
auauuucagcaaagggcaa

SEQ ID NO: 65150 - RNA, 19 nt, Artificial Sequence
  Description of Artificial Sequence: Synthetic oligonucleotide
  Sense strand starting at position 679 of SEQ ID NO: 806
acugguucucaggaggcua

SEQ ID NO: 65151 - RNA, 19 nt, Artificial Sequence
  Description of Artificial Sequence: Synthetic oligonucleotide
  Antisense strand to SEQ ID NO: 65070
uagccuccugagaaccagu

SEQ ID NO: 65152 - RNA, 19 nt, Artificial Sequence
  Description of Artificial Sequence: Synthetic oligonucleotide
  Sense strand starting at position 807 of SEQ ID NO: 806
cuaacaucuuguguuugga

SEQ ID NO: 65153 - RNA, 19 nt, Artificial Sequence
  Description of Artificial Sequence: Synthetic oligonucleotide
  Antisense strand to SEQ ID NO: 65072
uccaaacacaagauguuag

SEQ ID NO: 65154 - RNA, 19 nt, Artificial Sequence
  Description of Artificial Sequence: Synthetic oligonucleotide
  Sense strand starting at position 810 of SEQ ID NO: 806
acaucuuguguuuggaagu

SEQ ID NO: 65155 - RNA, 19 nt, Artificial Sequence
  Description of Artificial Sequence: Synthetic oligonucleotide
  Antisense strand to SEQ ID NO: 65074
acuuccaaacacaagaugu

SEQ ID NO: 65156 - RNA, 19 nt, Artificial Sequence
  Description of Artificial Sequence: Synthetic oligonucleotide
  Sense strand starting at position 932 of SEQ ID NO: 806
cucgcuccucaauguaauu

SEQ ID NO: 65157 - RNA, 19 nt, Artificial Sequence
  Description of Artificial Sequence: Synthetic oligonucleotide
  Antisense strand to SEQ ID NO: 65076
aauuacauugaggagcgag

SEQ ID NO: 65158 - RNA, 19 nt, Artificial Sequence
  Description of Artificial Sequence: Synthetic oligonucleotide
  Sense strand starting at position 1073 of SEQ ID NO: 806
gaagcuaagugcccacaua

SEQ ID NO: 65159 - RNA, 19 nt, Artificial Sequence
  Description of Artificial Sequence: Synthetic oligonucleotide
  Antisense strand to SEQ ID NO: 65078
uaugugggcacuuagcuuc

SEQ ID NO: 65160 - RNA, 19 nt, Artificial Sequence
  Description of Artificial Sequence: Synthetic oligonucleotide
  Sense strand starting at position 2095 of SEQ ID NO: 806
cggccaugccaguagaaga

SEQ ID NO: 65161 - RNA, 19 nt, Artificial Sequence
  Description of Artificial Sequence: Synthetic oligonucleotide
  Antisense strand to SEQ ID NO: 65080
ucuucuacuggcauggccg

SEQ ID NO: 65162 - RNA, 19 nt, Artificial Sequence
  Description of Artificial Sequence: Synthetic oligonucleotide
  Sense strand starting at position 2145 of SEQ ID NO: 806
gaaugaguggccggagaag

SEQ ID NO: 65163 - RNA, 19 nt, Artificial Sequence
  Description of Artificial Sequence: Synthetic oligonucleotide
  Antisense strand to SEQ ID NO: 65082
cuucuccggccacucauuc

SEQ ID NO: 65164 - RNA, 19 nt, Artificial Sequence
  Description of Artificial Sequence: Synthetic oligonucleotide
  Sense strand starting at position 2164 of SEQ ID NO: 806
ugaugauuggcgugcuuaa

SEQ ID NO: 65165 - RNA, 19 nt, Artificial Sequence
  Description of Artificial Sequence: Synthetic oligonucleotide
  Antisense strand to SEQ ID NO: 65084
uuaagcacgccaaucauca

SEQ ID NO: 65166 - RNA, 19 nt, Artificial Sequence
  Description of Artificial Sequence: Synthetic oligonucleotide
  Sense strand starting at position 2311 of SEQ ID NO: 806
gcugcaacuuuaccuuaga

SEQ ID NO: 65167 - RNA, 19 nt, Artificial Sequence
  Description of Artificial Sequence: Synthetic oligonucleotide
  Antisense strand to SEQ ID NO: 65086
ucuaagguaaaguugcagc

SEQ ID NO: 65168 - RNA, 19 nt, Artificial Sequence
  Description of Artificial Sequence: Synthetic oligonucleotide
  Sense strand starting at position 2314 of SEQ ID NO: 806
gcaacuuuaccuuagagac

SEQ ID NO: 65169 - RNA, 19 nt, Artificial Sequence
  Description of Artificial Sequence: Synthetic oligonucleotide
  Antisense strand to SEQ ID NO: 65088
gucucuaagguaaaguugc

SEQ ID NO: 65170 - RNA, 19 nt, Artificial Sequence
  Description of Artificial Sequence: Synthetic oligonucleotide
  Sense strand starting at position 2316 of SEQ ID NO: 806
aacuuuaccuuagagacgu

SEQ ID NO: 65171 - RNA, 19 nt, Artificial Sequence
  Description of Artificial Sequence: Synthetic oligonucleotide
  Antisense strand to SEQ ID NO: 65090
acgucucuaagguaaaguu

SEQ ID NO: 65172 - RNA, 19 nt, Artificial Sequence
  Description of Artificial Sequence: Synthetic oligonucleotide
  Sense strand starting at position 2542 of SEQ ID NO: 806
ccugucuccgucugccaaa

SEQ ID NO: 65173 - RNA, 19 nt, Artificial Sequence
  Description of Artificial Sequence: Synthetic oligonucleotide
  Antisense strand to SEQ ID NO: 65092
uuuggcagacggagacagg

SEQ ID NO: 65174 - RNA, 19 nt, Artificial Sequence
  Description of Artificial Sequence: Synthetic oligonucleotide
  Sense strand starting at position 2554 of SEQ ID NO: 806
ugccaaaggcuuugagcuu

SEQ ID NO: 65175 - RNA, 19 nt, Artificial Sequence
  Description of Artificial Sequence: Synthetic oligonucleotide
  Antisense strand to SEQ ID NO: 65094
aagcucaaagccuuuggca

SEQ ID NO: 65176 - RNA, 19 nt, Artificial Sequence
  Description of Artificial Sequence: Synthetic oligonucleotide
  Sense strand starting at position 2597 of SEQ ID NO: 806
ugguccugucgugacuaaa

SEQ ID NO: 65177 - RNA, 19 nt, Artificial Sequence
  Description of Artificial Sequence: Synthetic oligonucleotide
  Antisense strand to SEQ ID NO: 65096
uuuagucacgacaggacca

SEQ ID NO: 65178 - RNA, 19 nt, Artificial Sequence
  Description of Artificial Sequence: Synthetic oligonucleotide
  Sense strand starting at position 2647 of SEQ ID NO: 806
agccaaguugcugaggaau

SEQ ID NO: 65179 - RNA, 19 nt, Artificial Sequence
  Description of Artificial Sequence: Synthetic oligonucleotide
  Antisense strand to SEQ ID NO: 65098
auuccucagcaacuuggcu

SEQ ID NO: 65180 - RNA, 19 nt, Artificial Sequence
  Description of Artificial Sequence: Synthetic oligonucleotide
  Sense strand starting at position 2659 of SEQ ID NO: 806
gaggaauuacggugugcag

SEQ ID NO: 65181 - RNA, 19 nt, Artificial Sequence
  Description of Artificial Sequence: Synthetic oligonucleotide
  Antisense strand to SEQ ID NO: 65100
cugcacaccguaauuccuc

SEQ ID NO: 65182 - RNA, 19 nt, Artificial Sequence
  Description of Artificial Sequence: Synthetic oligonucleotide
  Sense strand starting at position 2700 of SEQ ID NO: 806
gggaacuccuggucugguu

SEQ ID NO: 65183 - RNA, 19 nt, Artificial Sequence
  Description of Artificial Sequence: Synthetic oligonucleotide
  Antisense strand to SEQ ID NO: 65102
aaccagaccaggaguuccc

SEQ ID NO: 65184 - RNA, 19 nt, Artificial Sequence
  Description of Artificial Sequence: Synthetic oligonucleotide
  Sense strand starting at position 2713 of SEQ ID NO: 806
cugguuagguucucagcga

SEQ ID NO: 65185 - RNA, 19 nt, Artificial Sequence
  Description of Artificial Sequence: Synthetic oligonucleotide
  Antisense strand to SEQ ID NO: 65104
ucgcugagaaccuaaccag

SEQ ID NO: 65186 - RNA, 19 nt, Artificial Sequence
  Description of Artificial Sequence: Synthetic oligonucleotide
  Sense strand starting at position 2717 of SEQ ID NO: 806
uuagguucucagcgaggaa

SEQ ID NO: 65187 - RNA, 19 nt, Artificial Sequence
  Description of Artificial Sequence: Synthetic oligonucleotide
  Antisense strand to SEQ ID NO: 65106
uuccucgcugagaaccuaa

SEQ ID NO: 65188 - RNA, 19 nt, Artificial Sequence
  Description of Artificial Sequence: Synthetic oligonucleotide
  Sense strand starting at position 2718 of SEQ ID NO: 806
uagguucucagcgaggaaa

SEQ ID NO: 65189 - RNA, 19 nt, Artificial Sequence
  Description of Artificial Sequence: Synthetic oligonucleotide
  Antisense strand to SEQ ID NO: 65108
uuuccucgcugagaaccua

SEQ ID NO: 65190 - RNA, 19 nt, Artificial Sequence
  Description of Artificial Sequence: Synthetic oligonucleotide
  Sense strand starting at position 2720 of SEQ ID NO: 806
gguucucagcgaggaaaca

SEQ ID NO: 65191 - RNA, 19 nt, Artificial Sequence
  Description of Artificial Sequence: Synthetic oligonucleotide
  Antisense strand to SEQ ID NO: 65110
uguuuccucgcugagaacc

SEQ ID NO: 65192 - RNA, 19 nt, Artificial Sequence
  Description of Artificial Sequence: Synthetic oligonucleotide
  Sense strand starting at position 2814 of SEQ ID NO: 806
gcaguuaggcccgccuaaa

SEQ ID NO: 65193 - RNA, 19 nt, Artificial Sequence
  Description of Artificial Sequence: Synthetic oligonucleotide
  Antisense strand to SEQ ID NO: 65112
uuuaggcgggccuaacugc

SEQ ID NO: 65194 - RNA, 19 nt, Artificial Sequence
  Description of Artificial Sequence: Synthetic oligonucleotide
  Sense strand starting at position 2886 of SEQ ID NO: 806
ggguguuaagguuaugaua

SEQ ID NO: 65195 - RNA, 19 nt, Artificial Sequence
  Description of Artificial Sequence: Synthetic oligonucleotide
  Antisense strand to SEQ ID NO: 65114
uaucauaaccuuaacaccc

SEQ ID NO: 65196 - RNA, 19 nt, Artificial Sequence
  Description of Artificial Sequence: Synthetic oligonucleotide
  Sense strand starting at position 2894 of SEQ ID NO: 806
agguuaugauaguaguuaa

SEQ ID NO: 65197 - RNA, 19 nt, Artificial Sequence
  Description of Artificial Sequence: Synthetic oligonucleotide
  Antisense strand to SEQ ID NO: 65116
uuaacuacuaucauaaccu

SEQ ID NO: 65198 - RNA, 19 nt, Artificial Sequence
  Description of Artificial Sequence: Synthetic oligonucleotide
  Sense strand starting at position 2897 of SEQ ID NO: 806
uuaugauaguaguuaacgu

SEQ ID NO: 65199 - RNA, 19 nt, Artificial Sequence
  Description of Artificial Sequence: Synthetic oligonucleotide
  Antisense strand to SEQ ID NO: 65118
acguuaacuacuaucauaa

SEQ ID NO: 65200 - RNA, 19 nt, Artificial Sequence
  Description of Artificial Sequence: Synthetic oligonucleotide
  Sense strand starting at position 2946 of SEQ ID NO: 806
cuaagaacuuuacaugaag

SEQ ID NO: 65201 - RNA, 19 nt, Artificial Sequence
  Description of Artificial Sequence: Synthetic oligonucleotide
  Antisense strand to SEQ ID NO: 65120
cuucauguaaaguucuuag

SEQ ID NO: 65202 - RNA, 19 nt, Artificial Sequence
  Description of Artificial Sequence: Synthetic oligonucleotide
  Sense strand starting at position 2966 of SEQ ID NO: 806
auuuauuccucaugacugu

SEQ ID NO: 65203 - RNA, 19 nt, Artificial Sequence
  Description of Artificial Sequence: Synthetic oligonucleotide
  Antisense strand to SEQ ID NO: 65122
acagucaugaggaauaaau

SEQ ID NO: 65204 - RNA, 19 nt, Artificial Sequence
  Description of Artificial Sequence: Synthetic oligonucleotide
  Sense strand starting at position 2972 of SEQ ID NO: 806
uccucaugacugugaggua

SEQ ID NO: 65205 - RNA, 19 nt, Artificial Sequence
  Description of Artificial Sequence: Synthetic oligonucleotide
  Antisense strand to SEQ ID NO: 65124
uaccucacagucaugagga

SEQ ID NO: 65206 - RNA, 19 nt, Artificial Sequence
  Description of Artificial Sequence: Synthetic oligonucleotide
  Sense strand starting at position 3140 of SEQ ID NO: 806
gcuaguuagugacuaagca

SEQ ID NO: 65207 - RNA, 19 nt, Artificial Sequence
  Description of Artificial Sequence: Synthetic oligonucleotide
  Antisense strand to SEQ ID NO: 65126
ugcuuagucacuaacuagc

SEQ ID NO: 65208 - RNA, 19 nt, Artificial Sequence
  Description of Artificial Sequence: Synthetic oligonucleotide
  Sense strand starting at position 3148 of SEQ ID NO: 806
gugacuaagcagugguuua

SEQ ID NO: 65209 - RNA, 19 nt, Artificial Sequence
  Description of Artificial Sequence: Synthetic oligonucleotide
  Antisense strand to SEQ ID NO: 65128
uaaaccacugcuuagucac

SEQ ID NO: 65210 - RNA, 19 nt, Artificial Sequence
  Description of Artificial Sequence: Synthetic oligonucleotide
  Sense strand starting at position 3149 of SEQ ID NO: 806
ugacuaagcagugguuuaa

SEQ ID NO: 65211 - RNA, 19 nt, Artificial Sequence
  Description of Artificial Sequence: Synthetic oligonucleotide
  Antisense strand to SEQ ID NO: 65130
uuaaaccacugcuuaguca

SEQ ID NO: 65212 - RNA, 19 nt, Artificial Sequence
  Description of Artificial Sequence: Synthetic oligonucleotide
  Sense strand starting at position 3517 of SEQ ID NO: 806
caugcugugcaauggaaau

SEQ ID NO: 65213 - RNA, 19 nt, Artificial Sequence
  Description of Artificial Sequence: Synthetic oligonucleotide
  Antisense strand to SEQ ID NO: 65132
auuuccauugcacagcaug

SEQ ID NO: 65214 - RNA, 19 nt, Artificial Sequence
  Description of Artificial Sequence: Synthetic oligonucleotide
  Sense strand starting at position 3534 of SEQ ID NO: 806
augaaauuauaauggagga

SEQ ID NO: 65215 - RNA, 19 nt, Artificial Sequence
  Description of Artificial Sequence: Synthetic oligonucleotide
  Antisense strand to SEQ ID NO: 65134
uccuccauuauaauuucau

SEQ ID NO: 65216 - RNA, 19 nt, Artificial Sequence
  Description of Artificial Sequence: Synthetic oligonucleotide
  Sense strand starting at position 3570 of SEQ ID NO: 806
guagguagauccuacacaa

SEQ ID NO: 65217 - RNA, 19 nt, Artificial Sequence
  Description of Artificial Sequence: Synthetic oligonucleotide
  Antisense strand to SEQ ID NO: 65136
uuguguaggaucuaccuac

SEQ ID NO: 65218 - RNA, 19 nt, Artificial Sequence
  Description of Artificial Sequence: Synthetic oligonucleotide
  Sense strand starting at position 3931 of SEQ ID NO: 806
uuaaauuagcgaugagguc

SEQ ID NO: 65219 - RNA, 19 nt, Artificial Sequence
  Description of Artificial Sequence: Synthetic oligonucleotide
  Antisense strand to SEQ ID NO: 65138
gaccucaucgcuaauuuaa

SEQ ID NO: 65220 - RNA, 19 nt, Artificial Sequence
  Description of Artificial Sequence: Synthetic oligonucleotide
  Sense strand starting at position 220 of SEQ ID NO: 807
uccugucucgccgacagaa

SEQ ID NO: 65221 - RNA, 19 nt, Artificial Sequence
  Description of Artificial Sequence: Synthetic oligonucleotide
  Antisense strand to SEQ ID NO: 65140
uucugucggcgagacagga

SEQ ID NO: 65222 - RNA, 19 nt, Artificial Sequence
  Description of Artificial Sequence: Synthetic oligonucleotide
  Sense strand starting at position 354 of SEQ ID NO: 807
cgauuuaaguagcaaauuu

SEQ ID NO: 65223 - RNA, 19 nt, Artificial Sequence
  Description of Artificial Sequence: Synthetic oligonucleotide
  Antisense strand to SEQ ID NO: 65142
aaauuugcuacuuaaaucg

SEQ ID NO: 65224 - RNA, 19 nt, Artificial Sequence
  Description of Artificial Sequence: Synthetic oligonucleotide
  Sense strand starting at position 524 of SEQ ID NO: 807
cgggaaacuccauggugau

SEQ ID NO: 65225 - RNA, 19 nt, Artificial Sequence
  Description of Artificial Sequence: Synthetic oligonucleotide
  Antisense strand to SEQ ID NO: 65144
aucaccauggaguuucccg

SEQ ID NO: 65226 - RNA, 19 nt, Artificial Sequence
  Description of Artificial Sequence: Synthetic oligonucleotide
  Sense strand starting at position 525 of SEQ ID NO: 807
gggaaacuccauggugauc

SEQ ID NO: 65227 - RNA, 19 nt, Artificial Sequence
  Description of Artificial Sequence: Synthetic oligonucleotide
  Antisense strand to SEQ ID NO: 65146
gaucaccauggaguuuccc

SEQ ID NO: 65228 - RNA, 19 nt, Artificial Sequence
  Description of Artificial Sequence: Synthetic oligonucleotide
  Sense strand starting at position 606 of SEQ ID NO: 807
accugugcccgugugauua

SEQ ID NO: 65229 - RNA, 19 nt, Artificial Sequence
  Description of Artificial Sequence: Synthetic oligonucleotide
  Antisense strand to SEQ ID NO: 65148
uaaucacacgggcacaggu

SEQ ID NO: 65230 - RNA, 19 nt, Artificial Sequence
  Description of Artificial Sequence: Synthetic oligonucleotide
  Sense strand starting at position 614 of SEQ ID NO: 807
ccgugugauuagccuggau

SEQ ID NO: 65231 - RNA, 19 nt, Artificial Sequence
  Description of Artificial Sequence: Synthetic oligonucleotide
  Antisense strand to SEQ ID NO: 65150
auccaggcuaaucacacgg

SEQ ID NO: 65232 - RNA, 19 nt, Artificial Sequence
  Description of Artificial Sequence: Synthetic oligonucleotide
  Sense strand starting at position 716 of SEQ ID NO: 807
ggucaaaggagucacagua

SEQ ID NO: 65233 - RNA, 19 nt, Artificial Sequence
  Description of Artificial Sequence: Synthetic oligonucleotide
  Antisense strand to SEQ ID NO: 65152
uacugugacuccuuugacc

SEQ ID NO: 65234 - RNA, 19 nt, Artificial Sequence
  Description of Artificial Sequence: Synthetic oligonucleotide
  Sense strand starting at position 821 of SEQ ID NO: 807
cagagugaggucugaugaa

SEQ ID NO: 65235 - RNA, 19 nt, Artificial Sequence
  Description of Artificial Sequence: Synthetic oligonucleotide
  Antisense strand to SEQ ID NO: 65154
uucaucagaccucacucug

SEQ ID NO: 65236 - RNA, 19 nt, Artificial Sequence
  Description of Artificial Sequence: Synthetic oligonucleotide
  Sense strand starting at position 852 of SEQ ID NO: 807
ggacacaucugcuaggaga

SEQ ID NO: 65237 - RNA, 19 nt, Artificial Sequence
  Description of Artificial Sequence: Synthetic oligonucleotide
  Antisense strand to SEQ ID NO: 65156
ucuccuagcagaugugucc

SEQ ID NO: 65238 - RNA, 19 nt, Artificial Sequence
  Description of Artificial Sequence: Synthetic oligonucleotide
  Sense strand starting at position 854 of SEQ ID NO: 807
acacaucugcuaggagaga

SEQ ID NO: 65239 - RNA, 19 nt, Artificial Sequence
  Description of Artificial Sequence: Synthetic oligonucleotide
  Antisense strand to SEQ ID NO: 65158
ucucuccuagcagaugugu

SEQ ID NO: 65240 - RNA, 19 nt, Artificial Sequence
  Description of Artificial Sequence: Synthetic oligonucleotide
  Sense strand starting at position 1836 of SEQ ID NO: 807
cccucagggucauuagaug

SEQ ID NO: 65241 - RNA, 19 nt, Artificial Sequence
  Description of Artificial Sequence: Synthetic oligonucleotide
  Antisense strand to SEQ ID NO: 65160
caucuaaugacccugaggg

SEQ ID NO: 65242 - RNA, 19 nt, Artificial Sequence
  Description of Artificial Sequence: Synthetic oligonucleotide
  Sense strand starting at position 1949 of SEQ ID NO: 807
agguuagcccugcaaguaa

SEQ ID NO: 65243 - RNA, 19 nt, Artificial Sequence
  Description of Artificial Sequence: Synthetic oligonucleotide
  Antisense strand to SEQ ID NO: 65162
uuacuugcagggcuaaccu

SEQ ID NO: 65244 - RNA, 19 nt, Artificial Sequence
  Description of Artificial Sequence: Synthetic oligonucleotide
  Sense strand starting at position 2058 of SEQ ID NO: 807
gcaauuggcuuccucucau

SEQ ID NO: 65245 - RNA, 19 nt, Artificial Sequence
  Description of Artificial Sequence: Synthetic oligonucleotide
  Antisense strand to SEQ ID NO: 65164
augagaggaagccaauugc

SEQ ID NO: 65246 - RNA, 19 nt, Artificial Sequence
  Description of Artificial Sequence: Synthetic oligonucleotide
  Sense strand starting at position 2064 of SEQ ID NO: 807
ggcuuccucucaucuguua

SEQ ID NO: 65247 - RNA, 19 nt, Artificial Sequence
  Description of Artificial Sequence: Synthetic oligonucleotide
  Antisense strand to SEQ ID NO: 65166
uaacagaugagaggaagcc

SEQ ID NO: 65248 - RNA, 19 nt, Artificial Sequence
  Description of Artificial Sequence: Synthetic oligonucleotide
  Sense strand starting at position 2111 of SEQ ID NO: 807
gggcauguaugggugacaa

SEQ ID NO: 65249 - RNA, 19 nt, Artificial Sequence
  Description of Artificial Sequence: Synthetic oligonucleotide
  Antisense strand to SEQ ID NO: 65168
uugucacccauacaugccc

SEQ ID NO: 65250 - RNA, 19 nt, Artificial Sequence
  Description of Artificial Sequence: Synthetic oligonucleotide
  Sense strand starting at position 2113 of SEQ ID NO: 807
gcauguaugggugacaacu

SEQ ID NO: 65251 - RNA, 19 nt, Artificial Sequence
  Description of Artificial Sequence: Synthetic oligonucleotide
  Antisense strand to SEQ ID NO: 65170
aguugucacccauacaugc

SEQ ID NO: 65252 - RNA, 19 nt, Artificial Sequence
  Description of Artificial Sequence: Synthetic oligonucleotide
  Sense strand starting at position 2319 of SEQ ID NO: 807
gacagucuuugcccuauag

SEQ ID NO: 65253 - RNA, 19 nt, Artificial Sequence
  Description of Artificial Sequence: Synthetic oligonucleotide
  Antisense strand to SEQ ID NO: 65172
cuauagggcaaagacuguc

SEQ ID NO: 65254 - RNA, 19 nt, Artificial Sequence
  Description of Artificial Sequence: Synthetic oligonucleotide
  Sense strand starting at position 2329 of SEQ ID NO: 807
gcccuauagagguguguga

SEQ ID NO: 65255 - RNA, 19 nt, Artificial Sequence
  Description of Artificial Sequence: Synthetic oligonucleotide
  Antisense strand to SEQ ID NO: 65174
ucacacaccucuauagggc

SEQ ID NO: 65256 - RNA, 19 nt, Artificial Sequence
  Description of Artificial Sequence: Synthetic oligonucleotide
  Sense strand starting at position 2338 of SEQ ID NO: 807
aggugugugaggcauggaa

SEQ ID NO: 65257 - RNA, 19 nt, Artificial Sequence
  Description of Artificial Sequence: Synthetic oligonucleotide
  Antisense strand to SEQ ID NO: 65176
uuccaugccucacacaccu

SEQ ID NO: 65258 - RNA, 19 nt, Artificial Sequence
  Description of Artificial Sequence: Synthetic oligonucleotide
  Sense strand starting at position 2340 of SEQ ID NO: 807
gugugugaggcauggaagu

SEQ ID NO: 65259 - RNA, 19 nt, Artificial Sequence
  Description of Artificial Sequence: Synthetic oligonucleotide
  Antisense strand to SEQ ID NO: 65178
acuuccaugccucacacac

SEQ ID NO: 65260 - RNA, 19 nt, Artificial Sequence
  Description of Artificial Sequence: Synthetic oligonucleotide
  Sense strand starting at position 2449 of SEQ ID NO: 807
gggaauuauccaggauggc

SEQ ID NO: 65261 - RNA, 19 nt, Artificial Sequence
  Description of Artificial Sequence: Synthetic oligonucleotide
  Antisense strand to SEQ ID NO: 65180
gccauccuggauaauuccc

SEQ ID NO: 65262 - RNA, 19 nt, Artificial Sequence
  Description of Artificial Sequence: Synthetic oligonucleotide
  Sense strand starting at position 2606 of SEQ ID NO: 807
aucagaugcagaugguaau

SEQ ID NO: 65263 - RNA, 19 nt, Artificial Sequence
  Description of Artificial Sequence: Synthetic oligonucleotide
  Antisense strand to SEQ ID NO: 65182
auuaccaucugcaucugau

SEQ ID NO: 65264 - RNA, 19 nt, Artificial Sequence
  Description of Artificial Sequence: Synthetic oligonucleotide
  Sense strand starting at position 2607 of SEQ ID NO: 807
ucagaugcagaugguaaua

SEQ ID NO: 65265 - RNA, 19 nt, Artificial Sequence
  Description of Artificial Sequence: Synthetic oligonucleotide
  Antisense strand to SEQ ID NO: 65184
uauuaccaucugcaucuga

SEQ ID NO: 65266 - RNA, 19 nt, Artificial Sequence
  Description of Artificial Sequence: Synthetic oligonucleotide
  Sense strand starting at position 2619 of SEQ ID NO: 807
gguaauaacuguucuuccu

SEQ ID NO: 65267 - RNA, 19 nt, Artificial Sequence
  Description of Artificial Sequence: Synthetic oligonucleotide
  Antisense strand to SEQ ID NO: 65186
aggaagaacaguuauuacc

SEQ ID NO: 65268 - RNA, 19 nt, Artificial Sequence
  Description of Artificial Sequence: Synthetic oligonucleotide
  Sense strand starting at position 2692 of SEQ ID NO: 807
aagccauauccucagugga

SEQ ID NO: 65269 - RNA, 19 nt, Artificial Sequence
  Description of Artificial Sequence: Synthetic oligonucleotide
  Antisense strand to SEQ ID NO: 65188
uccacugaggauauggcuu

SEQ ID NO: 65270 - RNA, 19 nt, Artificial Sequence
  Description of Artificial Sequence: Synthetic oligonucleotide
  Sense strand starting at position 2694 of SEQ ID NO: 807
gccauauccucaguggaca

SEQ ID NO: 65271 - RNA, 19 nt, Artificial Sequence
  Description of Artificial Sequence: Synthetic oligonucleotide
  Antisense strand to SEQ ID NO: 65190
uguccacugaggauauggc

SEQ ID NO: 65272 - RNA, 19 nt, Artificial Sequence
  Description of Artificial Sequence: Synthetic oligonucleotide
  Sense strand starting at position 2716 of SEQ ID NO: 807
ggaggaagcuguccauggu

SEQ ID NO: 65273 - RNA, 19 nt, Artificial Sequence
  Description of Artificial Sequence: Synthetic oligonucleotide
  Antisense strand to SEQ ID NO: 65192
accauggacagcuuccucc

SEQ ID NO: 65274 - RNA, 19 nt, Artificial Sequence
  Description of Artificial Sequence: Synthetic oligonucleotide
  Sense strand starting at position 2866 of SEQ ID NO: 807
uacugcagucagugaggua

SEQ ID NO: 65275 - RNA, 19 nt, Artificial Sequence
  Description of Artificial Sequence: Synthetic oligonucleotide
  Antisense strand to SEQ ID NO: 65194
uaccucacugacugcagua

SEQ ID NO: 65276 - RNA, 19 nt, Artificial Sequence
  Description of Artificial Sequence: Synthetic oligonucleotide
  Sense strand starting at position 2867 of SEQ ID NO: 807
acugcagucagugagguaa

SEQ ID NO: 65277 - RNA, 19 nt, Artificial Sequence
  Description of Artificial Sequence: Synthetic oligonucleotide
  Antisense strand to SEQ ID NO: 65196
uuaccucacugacugcagu

SEQ ID NO: 65278 - RNA, 19 nt, Artificial Sequence
  Description of Artificial Sequence: Synthetic oligonucleotide
  Sense strand starting at position 2923 of SEQ ID NO: 807
acuugucucuuguuuguau

SEQ ID NO: 65279 - RNA, 19 nt, Artificial Sequence
  Description of Artificial Sequence: Synthetic oligonucleotide
  Antisense strand to SEQ ID NO: 65198
auacaaacaagagacaagu

SEQ ID NO: 65280 - RNA, 19 nt, Artificial Sequence
  Description of Artificial Sequence: Synthetic oligonucleotide
  Sense strand starting at position 3190 of SEQ ID NO: 807
ugccuugguauccgaaagu

SEQ ID NO: 65281 - RNA, 19 nt, Artificial Sequence
  Description of Artificial Sequence: Synthetic oligonucleotide
  Antisense strand to SEQ ID NO: 65200
acuuucggauaccaaggca

SEQ ID NO: 65282 - RNA, 19 nt, Artificial Sequence
  Description of Artificial Sequence: Synthetic oligonucleotide
  Sense strand starting at position 3263 of SEQ ID NO: 807
uuuaaaugaucucagugaa

SEQ ID NO: 65283 - RNA, 19 nt, Artificial Sequence
  Description of Artificial Sequence: Synthetic oligonucleotide
  Antisense strand to SEQ ID NO: 65202
uucacugagaucauuuaaa

SEQ ID NO: 65284 - RNA, 19 nt, Artificial Sequence
  Description of Artificial Sequence: Synthetic oligonucleotide
  Sense strand starting at position 3276 of SEQ ID NO: 807
agugaagucuuucuagaua

SEQ ID NO: 65285 - RNA, 19 nt, Artificial Sequence
  Description of Artificial Sequence: Synthetic oligonucleotide
  Antisense strand to SEQ ID NO: 65204
uaucuagaaagacuucacu

SEQ ID NO: 65286 - RNA, 19 nt, Artificial Sequence
  Description of Artificial Sequence: Synthetic oligonucleotide
  Sense strand starting at position 3322 of SEQ ID NO: 807
cuucuagguuccuccagua

SEQ ID NO: 65287 - RNA, 19 nt, Artificial Sequence
  Description of Artificial Sequence: Synthetic oligonucleotide
  Antisense strand to SEQ ID NO: 65206
uacuggaggaaccuagaag

SEQ ID NO: 65288 - RNA, 19 nt, Artificial Sequence
  Description of Artificial Sequence: Synthetic oligonucleotide
  Sense strand starting at position 3399 of SEQ ID NO: 807
gugugaucucggcucaagc

SEQ ID NO: 65289 - RNA, 19 nt, Artificial Sequence
  Description of Artificial Sequence: Synthetic oligonucleotide
  Antisense strand to SEQ ID NO: 65208
gcuugagccgagaucacac

SEQ ID NO: 65290 - RNA, 19 nt, Artificial Sequence
  Description of Artificial Sequence: Synthetic oligonucleotide
  Sense strand starting at position 3401 of SEQ ID NO: 807
gugaucucggcucaagcaa

SEQ ID NO: 65291 - RNA, 19 nt, Artificial Sequence
  Description of Artificial Sequence: Synthetic oligonucleotide
  Antisense strand to SEQ ID NO: 65210
uugcuugagccgagaucac

SEQ ID NO: 65292 - RNA, 19 nt, Artificial Sequence
  Description of Artificial Sequence: Synthetic oligonucleotide
  Sense strand starting at position 3576 of SEQ ID NO: 807
agguguugggauuauagca

SEQ ID NO: 65293 - RNA, 19 nt, Artificial Sequence
  Description of Artificial Sequence: Synthetic oligonucleotide
  Antisense strand to SEQ ID NO: 65212
ugcuauaaucccaacaccu

SEQ ID NO: 65294 - RNA, 19 nt, Artificial Sequence
  Description of Artificial Sequence: Synthetic oligonucleotide
  Sense strand starting at position 3610 of SEQ ID NO: 807
cggucccuccaguaauuaa

SEQ ID NO: 65295 - RNA, 19 nt, Artificial Sequence
  Description of Artificial Sequence: Synthetic oligonucleotide
  Antisense strand to SEQ ID NO: 65214
uuaauuacuggagggaccg

SEQ ID NO: 65296 - RNA, 19 nt, Artificial Sequence
  Description of Artificial Sequence: Synthetic oligonucleotide
  Sense strand starting at position 3617 of SEQ ID NO: 807
uccaguaauuaaguacagu

SEQ ID NO: 65297 - RNA, 19 nt, Artificial Sequence
  Description of Artificial Sequence: Synthetic oligonucleotide
  Antisense strand to SEQ ID NO: 65216
acuguacuuaauuacugga

SEQ ID NO: 65298 - RNA, 19 nt, Artificial Sequence
  Description of Artificial Sequence: Synthetic oligonucleotide
  Sense strand starting at position 3874 of SEQ ID NO: 807
uucuaaguauccucguaga

SEQ ID NO: 65299 - RNA, 19 nt, Artificial Sequence
  Description of Artificial Sequence: Synthetic oligonucleotide
  Antisense strand to SEQ ID NO: 65218
ucuacgaggauacuuagaa

SEQ ID NO: 65300 - RNA, 19 nt, Artificial Sequence
  Description of Artificial Sequence: Synthetic oligonucleotide
  Sense strand starting at position 26 of SEQ ID NO: 808
cggucccuccaguaauuaa

SEQ ID NO: 65301 - RNA, 19 nt, Artificial Sequence
  Description of Artificial Sequence: Synthetic oligonucleotide
  Antisense strand to SEQ ID NO: 65220
uuaauuacuggagggaccg

SEQ ID NO: 65302 - RNA, 19 nt, Artificial Sequence
  Description of Artificial Sequence: Synthetic oligonucleotide
  Sense strand starting at position 33 of SEQ ID NO: 808
uccaguaauuaaguacagu

SEQ ID NO: 65303 - RNA, 19 nt, Artificial Sequence
  Description of Artificial Sequence: Synthetic oligonucleotide
  Antisense strand to SEQ ID NO: 65222
acuguacuuaauuacugga

SEQ ID NO: 65304 - RNA, 19 nt, Artificial Sequence
  Description of Artificial Sequence: Synthetic oligonucleotide
  Sense strand starting at position 425 of SEQ ID NO: 808
cuggguagggcagguaaua

SEQ ID NO: 65305 - RNA, 19 nt, Artificial Sequence
  Description of Artificial Sequence: Synthetic oligonucleotide
  Antisense strand to SEQ ID NO: 65224
uauuaccugcccuacccag

SEQ ID NO: 65306 - RNA, 19 nt, Artificial Sequence
  Description of Artificial Sequence: Synthetic oligonucleotide
  Sense strand starting at position 519 of SEQ ID NO: 808
cucuauugaguuuagaagu

SEQ ID NO: 65307 - RNA, 19 nt, Artificial Sequence
  Description of Artificial Sequence: Synthetic oligonucleotide
  Antisense strand to SEQ ID NO: 65226
acuucuaaacucaauagag

SEQ ID NO: 65308 - RNA, 19 nt, Artificial Sequence
  Description of Artificial Sequence: Synthetic oligonucleotide
  Sense strand starting at position 655 of SEQ ID NO: 808
aguguaguagcuugauuuc

SEQ ID NO: 65309 - RNA, 19 nt, Artificial Sequence
  Description of Artificial Sequence: Synthetic oligonucleotide
  Antisense strand to SEQ ID NO: 65228
gaaaucaagcuacuacacu

SEQ ID NO: 65310 - RNA, 19 nt, Artificial Sequence
  Description of Artificial Sequence: Synthetic oligonucleotide
  Sense strand starting at position 1086 of SEQ ID NO: 808
ccgggcuccgugaauguuu

SEQ ID NO: 65311 - RNA, 19 nt, Artificial Sequence
  Description of Artificial Sequence: Synthetic oligonucleotide
  Antisense strand to SEQ ID NO: 65230
aaacauucacggagcccgg

SEQ ID NO: 65312 - RNA, 19 nt, Artificial Sequence
  Description of Artificial Sequence: Synthetic oligonucleotide
  Sense strand starting at position 1102 of SEQ ID NO: 808
uuugucacaugucugaaga

SEQ ID NO: 65313 - RNA, 19 nt, Artificial Sequence
  Description of Artificial Sequence: Synthetic oligonucleotide
  Antisense strand to SEQ ID NO: 65232
ucuucagacaugugacaaa

SEQ ID NO: 65314 - RNA, 19 nt, Artificial Sequence
  Description of Artificial Sequence: Synthetic oligonucleotide
  Sense strand starting at position 1103 of SEQ ID NO: 808
uugucacaugucugaagaa

SEQ ID NO: 65315 - RNA, 19 nt, Artificial Sequence
  Description of Artificial Sequence: Synthetic oligonucleotide
  Antisense strand to SEQ ID NO: 65234
uucuucagacaugugacaa

SEQ ID NO: 65316 - RNA, 19 nt, Artificial Sequence
  Description of Artificial Sequence: Synthetic oligonucleotide
  Sense strand starting at position 1112 of SEQ ID NO: 808
gucugaagaacguaugaau

SEQ ID NO: 65317 - RNA, 19 nt, Artificial Sequence
  Description of Artificial Sequence: Synthetic oligonucleotide
  Antisense strand to SEQ ID NO: 65236
auucauacguucuucagac

SEQ ID NO: 65318 - RNA, 19 nt, Artificial Sequence
  Description of Artificial Sequence: Synthetic oligonucleotide
  Sense strand starting at position 1485 of SEQ ID NO: 808
ccaagaaggcgccauuaca

SEQ ID NO: 65319 - RNA, 19 nt, Artificial Sequence
  Description of Artificial Sequence: Synthetic oligonucleotide
  Antisense strand to SEQ ID NO: 65238
uguaauggcgccuucuugg

SEQ ID NO: 65320 - RNA, 19 nt, Artificial Sequence
  Description of Artificial Sequence: Synthetic oligonucleotide
  Sense strand starting at position 1608 of SEQ ID NO: 808
cuaagauccaaaggucgaa

SEQ ID NO: 65321 - RNA, 19 nt, Artificial Sequence
  Description of Artificial Sequence: Synthetic oligonucleotide
  Antisense strand to SEQ ID NO: 65240
uucgaccuuuggaucuuag

SEQ ID NO: 65322 - RNA, 19 nt, Artificial Sequence
  Description of Artificial Sequence: Synthetic oligonucleotide
  Sense strand starting at position 1611 of SEQ ID NO: 808
agauccaaaggucgaaaua

SEQ ID NO: 65323 - RNA, 19 nt, Artificial Sequence
  Description of Artificial Sequence: Synthetic oligonucleotide
  Antisense strand to SEQ ID NO: 65242
uauuucgaccuuuggaucu

SEQ ID NO: 65324 - RNA, 19 nt, Artificial Sequence
  Description of Artificial Sequence: Synthetic oligonucleotide
  Sense strand starting at position 1888 of SEQ ID NO: 808
ggucaaguugaacgaacaa

SEQ ID NO: 65325 - RNA, 19 nt, Artificial Sequence
  Description of Artificial Sequence: Synthetic oligonucleotide
  Antisense strand to SEQ ID NO: 65244
uuguucguucaacuugacc

SEQ ID NO: 65326 - RNA, 19 nt, Artificial Sequence
  Description of Artificial Sequence: Synthetic oligonucleotide
  Sense strand starting at position 2138 of SEQ ID NO: 808
uuuagagagccucagguua

SEQ ID NO: 65327 - RNA, 19 nt, Artificial Sequence
  Description of Artificial Sequence: Synthetic oligonucleotide
  Antisense strand to SEQ ID NO: 65246
uaaccugaggcucucuaaa

SEQ ID NO: 65328 - RNA, 19 nt, Artificial Sequence
  Description of Artificial Sequence: Synthetic oligonucleotide
  Sense strand starting at position 2187 of SEQ ID NO: 808
ugggaaucccauuguccau

SEQ ID NO: 65329 - RNA, 19 nt, Artificial Sequence
  Description of Artificial Sequence: Synthetic oligonucleotide
  Antisense strand to SEQ ID NO: 65248
auggacaaugggauuccca

SEQ ID NO: 65330 - RNA, 19 nt, Artificial Sequence
  Description of Artificial Sequence: Synthetic oligonucleotide
  Sense strand starting at position 2258 of SEQ ID NO: 808
uguuaugaugcugaauuau

SEQ ID NO: 65331 - RNA, 19 nt, Artificial Sequence
  Description of Artificial Sequence: Synthetic oligonucleotide
  Antisense strand to SEQ ID NO: 65250
auaauucagcaucauaaca

SEQ ID NO: 65332 - RNA, 19 nt, Artificial Sequence
  Description of Artificial Sequence: Synthetic oligonucleotide
  Sense strand starting at position 2419 of SEQ ID NO: 808
aacgaauguuuguugagga

SEQ ID NO: 65333 - RNA, 19 nt, Artificial Sequence
  Description of Artificial Sequence: Synthetic oligonucleotide
  Antisense strand to SEQ ID NO: 65252
uccucaacaaacauucguu

SEQ ID NO: 65334 - RNA, 19 nt, Artificial Sequence
  Description of Artificial Sequence: Synthetic oligonucleotide
  Sense strand starting at position 2435 of SEQ ID NO: 808
ggaccuacugaguguuaga

SEQ ID NO: 65335 - RNA, 19 nt, Artificial Sequence
  Description of Artificial Sequence: Synthetic oligonucleotide
  Antisense strand to SEQ ID NO: 65254
ucuaacacucaguaggucc

SEQ ID NO: 65336 - RNA, 19 nt, Artificial Sequence
  Description of Artificial Sequence: Synthetic oligonucleotide
  Sense strand starting at position 2543 of SEQ ID NO: 808
gugauacaugcugaaacca

SEQ ID NO: 65337 - RNA, 19 nt, Artificial Sequence
  Description of Artificial Sequence: Synthetic oligonucleotide
  Antisense strand to SEQ ID NO: 65256
ugguuucagcauguaucac

SEQ ID NO: 65338 - RNA, 19 nt, Artificial Sequence
  Description of Artificial Sequence: Synthetic oligonucleotide
  Sense strand starting at position 2924 of SEQ ID NO: 808
gggauugggugcucacuga

SEQ ID NO: 65339 - RNA, 19 nt, Artificial Sequence
  Description of Artificial Sequence: Synthetic oligonucleotide
  Antisense strand to SEQ ID NO: 65258
ucagugagcacccaauccc

SEQ ID NO: 65340 - RNA, 19 nt, Artificial Sequence
  Description of Artificial Sequence: Synthetic oligonucleotide
  Sense strand starting at position 2934 of SEQ ID NO: 808
gcucacugaaauggugaga

SEQ ID NO: 65341 - RNA, 19 nt, Artificial Sequence
  Description of Artificial Sequence: Synthetic oligonucleotide
  Antisense strand to SEQ ID NO: 65260
ucucaccauuucagugagc

SEQ ID NO: 65342 - RNA, 19 nt, Artificial Sequence
  Description of Artificial Sequence: Synthetic oligonucleotide
  Sense strand starting at position 2964 of SEQ ID NO: 808
accugauauuaggugauag

SEQ ID NO: 65343 - RNA, 19 nt, Artificial Sequence
  Description of Artificial Sequence: Synthetic oligonucleotide
  Antisense strand to SEQ ID NO: 65262
cuaucaccuaauaucaggu

SEQ ID NO: 65344 - RNA, 19 nt, Artificial Sequence
  Description of Artificial Sequence: Synthetic oligonucleotide
  Sense strand starting at position 2966 of SEQ ID NO: 808
cugauauuaggugauagca

SEQ ID NO: 65345 - RNA, 19 nt, Artificial Sequence
  Description of Artificial Sequence: Synthetic oligonucleotide
  Antisense strand to SEQ ID NO: 65264
ugcuaucaccuaauaucag

SEQ ID NO: 65346 - RNA, 19 nt, Artificial Sequence
  Description of Artificial Sequence: Synthetic oligonucleotide
  Sense strand starting at position 3001 of SEQ ID NO: 808
aggguuucaugcuuggaaa

SEQ ID NO: 65347 - RNA, 19 nt, Artificial Sequence
  Description of Artificial Sequence: Synthetic oligonucleotide
  Antisense strand to SEQ ID NO: 65266
uuuccaagcaugaaacccu

SEQ ID NO: 65348 - RNA, 19 nt, Artificial Sequence
  Description of Artificial Sequence: Synthetic oligonucleotide
  Sense strand starting at position 3090 of SEQ ID NO: 808
gaccauagucucugggagu

SEQ ID NO: 65349 - RNA, 19 nt, Artificial Sequence
  Description of Artificial Sequence: Synthetic oligonucleotide
  Antisense strand to SEQ ID NO: 65268
acucccagagacuaugguc

SEQ ID NO: 65350 - RNA, 19 nt, Artificial Sequence
  Description of Artificial Sequence: Synthetic oligonucleotide
  Sense strand starting at position 3101 of SEQ ID NO: 808
cugggaguuuggagaugau

SEQ ID NO: 65351 - RNA, 19 nt, Artificial Sequence
  Description of Artificial Sequence: Synthetic oligonucleotide
  Antisense strand to SEQ ID NO: 65270
aucaucuccaaacucccag

SEQ ID NO: 65352 - RNA, 19 nt, Artificial Sequence
  Description of Artificial Sequence: Synthetic oligonucleotide
  Sense strand starting at position 3104 of SEQ ID NO: 808
ggaguuuggagaugauucu

SEQ ID NO: 65353 - RNA, 19 nt, Artificial Sequence
  Description of Artificial Sequence: Synthetic oligonucleotide
  Antisense strand to SEQ ID NO: 65272
agaaucaucuccaaacucc

SEQ ID NO: 65354 - RNA, 19 nt, Artificial Sequence
  Description of Artificial Sequence: Synthetic oligonucleotide
  Sense strand starting at position 3278 of SEQ ID NO: 808
gugggauguggaugaauuc

SEQ ID NO: 65355 - RNA, 19 nt, Artificial Sequence
  Description of Artificial Sequence: Synthetic oligonucleotide
  Antisense strand to SEQ ID NO: 65274
gaauucauccacaucccac

SEQ ID NO: 65356 - RNA, 19 nt, Artificial Sequence
  Description of Artificial Sequence: Synthetic oligonucleotide
  Sense strand starting at position 3484 of SEQ ID NO: 808
cagacaugcugaguuggau

SEQ ID NO: 65357 - RNA, 19 nt, Artificial Sequence
  Description of Artificial Sequence: Synthetic oligonucleotide
  Antisense strand to SEQ ID NO: 65276
auccaacucagcaugucug

SEQ ID NO: 65358 - RNA, 19 nt, Artificial Sequence
  Description of Artificial Sequence: Synthetic oligonucleotide
  Sense strand starting at position 3519 of SEQ ID NO: 808
caaggcuggaguuauggau

SEQ ID NO: 65359 - RNA, 19 nt, Artificial Sequence
  Description of Artificial Sequence: Synthetic oligonucleotide
  Antisense strand to SEQ ID NO: 65278
auccauaacuccagccuug

SEQ ID NO: 65360 - RNA, 19 nt, Artificial Sequence
  Description of Artificial Sequence: Synthetic oligonucleotide
  Sense strand starting at position 3523 of SEQ ID NO: 808
gcuggaguuauggauuaac

SEQ ID NO: 65361 - RNA, 19 nt, Artificial Sequence
  Description of Artificial Sequence: Synthetic oligonucleotide
  Antisense strand to SEQ ID NO: 65280
guuaauccauaacuccagc

SEQ ID NO: 65362 - RNA, 19 nt, Artificial Sequence
  Description of Artificial Sequence: Synthetic oligonucleotide
  Sense strand starting at position 3719 of SEQ ID NO: 808
ugcugauuauggguauuaa

SEQ ID NO: 65363 - RNA, 19 nt, Artificial Sequence
  Description of Artificial Sequence: Synthetic oligonucleotide
  Antisense strand to SEQ ID NO: 65282
uuaauacccauaaucagca

SEQ ID NO: 65364 - RNA, 19 nt, Artificial Sequence
  Description of Artificial Sequence: Synthetic oligonucleotide
  Sense strand starting at position 3720 of SEQ ID NO: 808
gcugauuauggguauuaau

SEQ ID NO: 65365 - RNA, 19 nt, Artificial Sequence
  Description of Artificial Sequence: Synthetic oligonucleotide
  Antisense strand to SEQ ID NO: 65284
auuaauacccauaaucagc

SEQ ID NO: 65366 - RNA, 19 nt, Artificial Sequence
  Description of Artificial Sequence: Synthetic oligonucleotide
  Sense strand starting at position 3795 of SEQ ID NO: 808
cacuguggucacuggaaag

SEQ ID NO: 65367 - RNA, 19 nt, Artificial Sequence
  Description of Artificial Sequence: Synthetic oligonucleotide
  Antisense strand to SEQ ID NO: 65286
cuuuccagugaccacagug

SEQ ID NO: 65368 - RNA, 19 nt, Artificial Sequence
  Description of Artificial Sequence: Synthetic oligonucleotide
  Sense strand starting at position 3807 of SEQ ID NO: 808
uggaaaguuuggucagagc

SEQ ID NO: 65369 - RNA, 19 nt, Artificial Sequence
  Description of Artificial Sequence: Synthetic oligonucleotide
  Antisense strand to SEQ ID NO: 65288
gcucugaccaaacuuucca

SEQ ID NO: 65370 - RNA, 19 nt, Artificial Sequence
  Description of Artificial Sequence: Synthetic oligonucleotide
  Sense strand starting at position 3883 of SEQ ID NO: 808
auguuuaacaguggaggga

SEQ ID NO: 65371 - RNA, 19 nt, Artificial Sequence
  Description of Artificial Sequence: Synthetic oligonucleotide
  Antisense strand to SEQ ID NO: 65290
ucccuccacuguuaaacau

SEQ ID NO: 65372 - RNA, 19 nt, Artificial Sequence
  Description of Artificial Sequence: Synthetic oligonucleotide
  Sense strand starting at position 3943 of SEQ ID NO: 808
uacaauuagugguuggaaa

SEQ ID NO: 65373 - RNA, 19 nt, Artificial Sequence
  Description of Artificial Sequence: Synthetic oligonucleotide
  Antisense strand to SEQ ID NO: 65292
uuuccaaccacuaauugua

SEQ ID NO: 65374 - RNA, 19 nt, Artificial Sequence
  Description of Artificial Sequence: Synthetic oligonucleotide
  Sense strand starting at position 3944 of SEQ ID NO: 808
acaauuagugguuggaaag

SEQ ID NO: 65375 - RNA, 19 nt, Artificial Sequence
  Description of Artificial Sequence: Synthetic oligonucleotide
  Antisense strand to SEQ ID NO: 65294
cuuuccaaccacuaauugu

SEQ ID NO: 65376 - RNA, 19 nt, Artificial Sequence
  Description of Artificial Sequence: Synthetic oligonucleotide
  Sense strand starting at position 3945 of SEQ ID NO: 808
caauuagugguuggaaaga

SEQ ID NO: 65377 - RNA, 19 nt, Artificial Sequence
  Description of Artificial Sequence: Synthetic oligonucleotide
  Antisense strand to SEQ ID NO: 65296
ucuuuccaaccacuaauug

SEQ ID NO: 65378 - RNA, 19 nt, Artificial Sequence
  Description of Artificial Sequence: Synthetic oligonucleotide
  Sense strand starting at position 3956 of SEQ ID NO: 808
uggaaagagugucuugaaa

SEQ ID NO: 65379 - RNA, 19 nt, Artificial Sequence
  Description of Artificial Sequence: Synthetic oligonucleotide
  Antisense strand to SEQ ID NO: 65298
uuucaagacacucuuucca

SEQ ID NO: 65380 - RNA, 19 nt, Artificial Sequence
  Description of Artificial Sequence: Synthetic oligonucleotide
  Sense strand starting at position 223 of SEQ ID NO: 809
uccugucucgccgacagaa

SEQ ID NO: 65381 - RNA, 19 nt, Artificial Sequence
  Description of Artificial Sequence: Synthetic oligonucleotide
  Antisense strand to SEQ ID NO: 65300
uucugucggcgagacagga

SEQ ID NO: 65382 - RNA, 19 nt, Artificial Sequence
  Description of Artificial Sequence: Synthetic oligonucleotide
  Sense strand starting at position 357 of SEQ ID NO: 809
cgauuuaaguagcaaauuu

SEQ ID NO: 65383 - RNA, 19 nt, Artificial Sequence
  Description of Artificial Sequence: Synthetic oligonucleotide
  Antisense strand to SEQ ID NO: 65302
aaauuugcuacuuaaaucg

SEQ ID NO: 65384 - RNA, 19 nt, Artificial Sequence
  Description of Artificial Sequence: Synthetic oligonucleotide
  Sense strand starting at position 527 of SEQ ID NO: 809
cgggaaacuccauggugau

SEQ ID NO: 65385 - RNA, 19 nt, Artificial Sequence
  Description of Artificial Sequence: Synthetic oligonucleotide
  Antisense strand to SEQ ID NO: 65304
aucaccauggaguuucccg

SEQ ID NO: 65386 - RNA, 19 nt, Artificial Sequence
  Description of Artificial Sequence: Synthetic oligonucleotide
  Sense strand starting at position 528 of SEQ ID NO: 809
gggaaacuccauggugauc

SEQ ID NO: 65387 - RNA, 19 nt, Artificial Sequence
  Description of Artificial Sequence: Synthetic oligonucleotide
  Antisense strand to SEQ ID NO: 65306
gaucaccauggaguuuccc

SEQ ID NO: 65388 - RNA, 19 nt, Artificial Sequence
  Description of Artificial Sequence: Synthetic oligonucleotide
  Sense strand starting at position 609 of SEQ ID NO: 809
accugugcccgugugauua

SEQ ID NO: 65389 - RNA, 19 nt, Artificial Sequence
  Description of Artificial Sequence: Synthetic oligonucleotide
  Antisense strand to SEQ ID NO: 65308
uaaucacacgggcacaggu

SEQ ID NO: 65390 - RNA, 19 nt, Artificial Sequence
  Description of Artificial Sequence: Synthetic oligonucleotide
  Sense strand starting at position 617 of SEQ ID NO: 809
ccgugugauuagccuggau

SEQ ID NO: 65391 - RNA, 19 nt, Artificial Sequence
  Description of Artificial Sequence: Synthetic oligonucleotide
  Antisense strand to SEQ ID NO: 65310
auccaggcuaaucacacgg

SEQ ID NO: 65392 - RNA, 19 nt, Artificial Sequence
  Description of Artificial Sequence: Synthetic oligonucleotide
  Sense strand starting at position 719 of SEQ ID NO: 809
ggucaaaggagucacagua

SEQ ID NO: 65393 - RNA, 19 nt, Artificial Sequence
  Description of Artificial Sequence: Synthetic oligonucleotide
  Antisense strand to SEQ ID NO: 65312
uacugugacuccuuugacc

SEQ ID NO: 65394 - RNA, 19 nt, Artificial Sequence
  Description of Artificial Sequence: Synthetic oligonucleotide
  Sense strand starting at position 824 of SEQ ID NO: 809
cagagugaggucugaugaa

SEQ ID NO: 65395 - RNA, 19 nt, Artificial Sequence
  Description of Artificial Sequence: Synthetic oligonucleotide
  Antisense strand to SEQ ID NO: 65314
uucaucagaccucacucug

SEQ ID NO: 65396 - RNA, 19 nt, Artificial Sequence
  Description of Artificial Sequence: Synthetic oligonucleotide
  Sense strand starting at position 855 of SEQ ID NO: 809
ggacacaucugcuaggaga

SEQ ID NO: 65397 - RNA, 19 nt, Artificial Sequence
  Description of Artificial Sequence: Synthetic oligonucleotide
  Antisense strand to SEQ ID NO: 65316
ucuccuagcagaugugucc

SEQ ID NO: 65398 - RNA, 19 nt, Artificial Sequence
  Description of Artificial Sequence: Synthetic oligonucleotide
  Sense strand starting at position 857 of SEQ ID NO: 809
acacaucugcuaggagaga

SEQ ID NO: 65399 - RNA, 19 nt, Artificial Sequence
  Description of Artificial Sequence: Synthetic oligonucleotide
  Antisense strand to SEQ ID NO: 65318
ucucuccuagcagaugugu

SEQ ID NO: 65400 - RNA, 19 nt, Artificial Sequence
  Description of Artificial Sequence: Synthetic oligonucleotide
  Sense strand starting at position 1839 of SEQ ID NO: 809
cccucagggucauuagaug

SEQ ID NO: 65401 - RNA, 19 nt, Artificial Sequence
  Description of Artificial Sequence: Synthetic oligonucleotide
  Antisense strand to SEQ ID NO: 65320
caucuaaugacccugaggg

SEQ ID NO: 65402 - RNA, 19 nt, Artificial Sequence
  Description of Artificial Sequence: Synthetic oligonucleotide
  Sense strand starting at position 1952 of SEQ ID NO: 809
agguuagcccugcaaguaa

SEQ ID NO: 65403 - RNA, 19 nt, Artificial Sequence
  Description of Artificial Sequence: Synthetic oligonucleotide
  Antisense strand to SEQ ID NO: 65322
uuacuugcagggcuaaccu

SEQ ID NO: 65404 - RNA, 19 nt, Artificial Sequence
  Description of Artificial Sequence: Synthetic oligonucleotide
  Sense strand starting at position 2061 of SEQ ID NO: 809
gcaauuggcuuccucucau

SEQ ID NO: 65405 - RNA, 19 nt, Artificial Sequence
  Description of Artificial Sequence: Synthetic oligonucleotide
  Antisense strand to SEQ ID NO: 65324
augagaggaagccaauugc

SEQ ID NO: 65406 - RNA, 19 nt, Artificial Sequence
  Description of Artificial Sequence: Synthetic oligonucleotide
  Sense strand starting at position 2067 of SEQ ID NO: 809
ggcuuccucucaucuguua

SEQ ID NO: 65407 - RNA, 19 nt, Artificial Sequence
  Description of Artificial Sequence: Synthetic oligonucleotide
  Antisense strand to SEQ ID NO: 65326
uaacagaugagaggaagcc

SEQ ID NO: 65408 - RNA, 19 nt, Artificial Sequence
  Description of Artificial Sequence: Synthetic oligonucleotide
  Sense strand starting at position 2114 of SEQ ID NO: 809
gggcauguaugggugacaa

SEQ ID NO: 65409 - RNA, 19 nt, Artificial Sequence
  Description of Artificial Sequence: Synthetic oligonucleotide
  Antisense strand to SEQ ID NO: 65328
uugucacccauacaugccc

SEQ ID NO: 65410 - RNA, 19 nt, Artificial Sequence
  Description of Artificial Sequence: Synthetic oligonucleotide
  Sense strand starting at position 2116 of SEQ ID NO: 809
gcauguaugggugacaacu

SEQ ID NO: 65411 - RNA, 19 nt, Artificial Sequence
  Description of Artificial Sequence: Synthetic oligonucleotide
  Antisense strand to SEQ ID NO: 65330
aguugucacccauacaugc

SEQ ID NO: 65412 - RNA, 19 nt, Artificial Sequence
  Description of Artificial Sequence: Synthetic oligonucleotide
  Sense strand starting at position 2322 of SEQ ID NO: 809
gacagucuuugcccuauag

SEQ ID NO: 65413 - RNA, 19 nt, Artificial Sequence
  Description of Artificial Sequence: Synthetic oligonucleotide
  Antisense strand to SEQ ID NO: 65332
cuauagggcaaagacuguc

SEQ ID NO: 65414 - RNA, 19 nt, Artificial Sequence
  Description of Artificial Sequence: Synthetic oligonucleotide
  Sense strand starting at position 2332 of SEQ ID NO: 809
gcccuauagagguguguga

SEQ ID NO: 65415 - RNA, 19 nt, Artificial Sequence
  Description of Artificial Sequence: Synthetic oligonucleotide
  Antisense strand to SEQ ID NO: 65334
ucacacaccucuauagggc

SEQ ID NO: 65416 - RNA, 19 nt, Artificial Sequence
  Description of Artificial Sequence: Synthetic oligonucleotide
  Sense strand starting at position 2341 of SEQ ID NO: 809
aggugugugaggcauggaa

SEQ ID NO: 65417 - RNA, 19 nt, Artificial Sequence
  Description of Artificial Sequence: Synthetic oligonucleotide
  Antisense strand to SEQ ID NO: 65336
uuccaugccucacacaccu

SEQ ID NO: 65418 - RNA, 19 nt, Artificial Sequence
  Description of Artificial Sequence: Synthetic oligonucleotide
  Sense strand starting at position 2343 of SEQ ID NO: 809
gugugugaggcauggaagu

SEQ ID NO: 65419 - RNA, 19 nt, Artificial Sequence
  Description of Artificial Sequence: Synthetic oligonucleotide
  Antisense strand to SEQ ID NO: 65338
acuuccaugccucacacac

SEQ ID NO: 65420 - RNA, 19 nt, Artificial Sequence
  Description of Artificial Sequence: Synthetic oligonucleotide
  Sense strand starting at position 2452 of SEQ ID NO: 809
gggaauuauccaggauggc

SEQ ID NO: 65421 - RNA, 19 nt, Artificial Sequence
  Description of Artificial Sequence: Synthetic oligonucleotide
  Antisense strand to SEQ ID NO: 65340
gccauccuggauaauuccc

SEQ ID NO: 65422 - RNA, 19 nt, Artificial Sequence
  Description of Artificial Sequence: Synthetic oligonucleotide
  Sense strand starting at position 2609 of SEQ ID NO: 809
aucagaugcagaugguaau

SEQ ID NO: 65423 - RNA, 19 nt, Artificial Sequence
  Description of Artificial Sequence: Synthetic oligonucleotide
  Antisense strand to SEQ ID NO: 65342
auuaccaucugcaucugau

SEQ ID NO: 65424 - RNA, 19 nt, Artificial Sequence
  Description of Artificial Sequence: Synthetic oligonucleotide
  Sense strand starting at position 2610 of SEQ ID NO: 809
ucagaugcagaugguaaua

SEQ ID NO: 65425 - RNA, 19 nt, Artificial Sequence
  Description of Artificial Sequence: Synthetic oligonucleotide
  Antisense strand to SEQ ID NO: 65344
uauuaccaucugcaucuga

SEQ ID NO: 65426 - RNA, 19 nt, Artificial Sequence
  Description of Artificial Sequence: Synthetic oligonucleotide
  Sense strand starting at position 2622 of SEQ ID NO: 809
gguaauaacuguucuuccu

SEQ ID NO: 65427 - RNA, 19 nt, Artificial Sequence
  Description of Artificial Sequence: Synthetic oligonucleotide
  Antisense strand to SEQ ID NO: 65346
aggaagaacaguuauuacc

SEQ ID NO: 65428 - RNA, 19 nt, Artificial Sequence
  Description of Artificial Sequence: Synthetic oligonucleotide
  Sense strand starting at position 2695 of SEQ ID NO: 809
aagccauauccucagugga

SEQ ID NO: 65429 - RNA, 19 nt, Artificial Sequence
  Description of Artificial Sequence: Synthetic oligonucleotide
  Antisense strand to SEQ ID NO: 65348
uccacugaggauauggcuu

SEQ ID NO: 65430 - RNA, 19 nt, Artificial Sequence
  Description of Artificial Sequence: Synthetic oligonucleotide
  Sense strand starting at position 2697 of SEQ ID NO: 809
gccauauccucaguggaca

SEQ ID NO: 65431 - RNA, 19 nt, Artificial Sequence
  Description of Artificial Sequence: Synthetic oligonucleotide
  Antisense strand to SEQ ID NO: 65350
uguccacugaggauauggc

SEQ ID NO: 65432 - RNA, 19 nt, Artificial Sequence
  Description of Artificial Sequence: Synthetic oligonucleotide
  Sense strand starting at position 2719 of SEQ ID NO: 809
ggaggaagcuguccauggu

SEQ ID NO: 65433 - RNA, 19 nt, Artificial Sequence
  Description of Artificial Sequence: Synthetic oligonucleotide
  Antisense strand to SEQ ID NO: 65352
accauggacagcuuccucc

SEQ ID NO: 65434 - RNA, 19 nt, Artificial Sequence
  Description of Artificial Sequence: Synthetic oligonucleotide
  Sense strand starting at position 2869 of SEQ ID NO: 809
uacugcagucagugaggua

SEQ ID NO: 65435 - RNA, 19 nt, Artificial Sequence
  Description of Artificial Sequence: Synthetic oligonucleotide
  Antisense strand to SEQ ID NO: 65354
uaccucacugacugcagua

SEQ ID NO: 65436 - RNA, 19 nt, Artificial Sequence
  Description of Artificial Sequence: Synthetic oligonucleotide
  Sense strand starting at position 2870 of SEQ ID NO: 809
acugcagucagugagguaa

SEQ ID NO: 65437 - RNA, 19 nt, Artificial Sequence
  Description of Artificial Sequence: Synthetic oligonucleotide
  Antisense strand to SEQ ID NO: 65356
uuaccucacugacugcagu

SEQ ID NO: 65438 - RNA, 19 nt, Artificial Sequence
  Description of Artificial Sequence: Synthetic oligonucleotide
  Sense strand starting at position 2926 of SEQ ID NO: 809
acuugucucuuguuuguau

SEQ ID NO: 65439 - RNA, 19 nt, Artificial Sequence
  Description of Artificial Sequence: Synthetic oligonucleotide
  Antisense strand to SEQ ID NO: 65358
auacaaacaagagacaagu

SEQ ID NO: 65440 - RNA, 19 nt, Artificial Sequence
  Description of Artificial Sequence: Synthetic oligonucleotide
  Sense strand starting at position 3193 of SEQ ID NO: 809
ugccuugguauccgaaagu

SEQ ID NO: 65441 - RNA, 19 nt, Artificial Sequence
  Description of Artificial Sequence: Synthetic oligonucleotide
  Antisense strand to SEQ ID NO: 65360
acuuucggauaccaaggca

SEQ ID NO: 65442 - RNA, 19 nt, Artificial Sequence
  Description of Artificial Sequence: Synthetic oligonucleotide
  Sense strand starting at position 3266 of SEQ ID NO: 809
uuuaaaugaucucagugaa

SEQ ID NO: 65443 - RNA, 19 nt, Artificial Sequence
  Description of Artificial Sequence: Synthetic oligonucleotide
  Antisense strand to SEQ ID NO: 65362
uucacugagaucauuuaaa

SEQ ID NO: 65444 - RNA, 19 nt, Artificial Sequence
  Description of Artificial Sequence: Synthetic oligonucleotide
  Sense strand starting at position 3279 of SEQ ID NO: 809
agugaagucuuucuagaua

SEQ ID NO: 65445 - RNA, 19 nt, Artificial Sequence
  Description of Artificial Sequence: Synthetic oligonucleotide
  Antisense strand to SEQ ID NO: 65364
uaucuagaaagacuucacu

SEQ ID NO: 65446 - RNA, 19 nt, Artificial Sequence
  Description of Artificial Sequence: Synthetic oligonucleotide
  Sense strand starting at position 3325 of SEQ ID NO: 809
cuucuagguuccuccagua

SEQ ID NO: 65447 - RNA, 19 nt, Artificial Sequence
  Description of Artificial Sequence: Synthetic oligonucleotide
  Antisense strand to SEQ ID NO: 65366
uacuggaggaaccuagaag

SEQ ID NO: 65448 - RNA, 19 nt, Artificial Sequence
  Description of Artificial Sequence: Synthetic oligonucleotide
  Sense strand starting at position 3402 of SEQ ID NO: 809
gugugaucucggcucaagc

SEQ ID NO: 65449 - RNA, 19 nt, Artificial Sequence
  Description of Artificial Sequence: Synthetic oligonucleotide
  Antisense strand to SEQ ID NO: 65368
gcuugagccgagaucacac

SEQ ID NO: 65450 - RNA, 19 nt, Artificial Sequence
  Description of Artificial Sequence: Synthetic oligonucleotide
  Sense strand starting at position 3404 of SEQ ID NO: 809
gugaucucggcucaagcaa

SEQ ID NO: 65451 - RNA, 19 nt, Artificial Sequence
  Description of Artificial Sequence: Synthetic oligonucleotide
  Antisense strand to SEQ ID NO: 65370
uugcuugagccgagaucac

SEQ ID NO: 65452 - RNA, 19 nt, Artificial Sequence
  Description of Artificial Sequence: Synthetic oligonucleotide
  Sense strand starting at position 3579 of SEQ ID NO: 809
agguguugggauuauagca

SEQ ID NO: 65453 - RNA, 19 nt, Artificial Sequence
  Description of Artificial Sequence: Synthetic oligonucleotide
  Antisense strand to SEQ ID NO: 65372
ugcuauaaucccaacaccu

SEQ ID NO: 65454 - RNA, 19 nt, Artificial Sequence
  Description of Artificial Sequence: Synthetic oligonucleotide
  Sense strand starting at position 3613 of SEQ ID NO: 809
cggucccuccaguaauuaa

SEQ ID NO: 65455 - RNA, 19 nt, Artificial Sequence
  Description of Artificial Sequence: Synthetic oligonucleotide
  Antisense strand to SEQ ID NO: 65374
uuaauuacuggagggaccg

SEQ ID NO: 65456 - RNA, 19 nt, Artificial Sequence
  Description of Artificial Sequence: Synthetic oligonucleotide
  Sense strand starting at position 3620 of SEQ ID NO: 809
uccaguaauuaaguacagu

SEQ ID NO: 65457 - RNA, 19 nt, Artificial Sequence
  Description of Artificial Sequence: Synthetic oligonucleotide
  Antisense strand to SEQ ID NO: 65376
acuguacuuaauuacugga

SEQ ID NO: 65458 - RNA, 19 nt, Artificial Sequence
  Description of Artificial Sequence: Synthetic oligonucleotide
  Sense strand starting at position 3877 of SEQ ID NO: 809
uucuaaguauccucguaga

SEQ ID NO: 65459 - RNA, 19 nt, Artificial Sequence
  Description of Artificial Sequence: Synthetic oligonucleotide
  Antisense strand to SEQ ID NO: 65378
ucuacgaggauacuuagaa

SEQ ID NO: 65460 - RNA, 19 nt, Artificial Sequence
  Description of Artificial Sequence: Synthetic oligonucleotide
  Sense strand starting at position 16 of SEQ ID NO: 810
ucuguaucauuugagaaag

SEQ ID NO: 65461 - RNA, 19 nt, Artificial Sequence
  Description of Artificial Sequence: Synthetic oligonucleotide
  Antisense strand to SEQ ID NO: 65380
cuuucucaaaugauacaga

SEQ ID NO: 65462 - RNA, 19 nt, Artificial Sequence
  Description of Artificial Sequence: Synthetic oligonucleotide
  Sense strand starting at position 37 of SEQ ID NO: 810
auggaaguauugucaaagu

SEQ ID NO: 65463 - RNA, 19 nt, Artificial Sequence
  Description of Artificial Sequence: Synthetic oligonucleotide
  Antisense strand to SEQ ID NO: 65382
acuuugacaauacuuccau

SEQ ID NO: 65464 - RNA, 19 nt, Artificial Sequence
  Description of Artificial Sequence: Synthetic oligonucleotide
  Sense strand starting at position 48 of SEQ ID NO: 810
gucaaaguagcucauuaug

SEQ ID NO: 65465 - RNA, 19 nt, Artificial Sequence
  Description of Artificial Sequence: Synthetic oligonucleotide
  Antisense strand to SEQ ID NO: 65384
cauaaugagcuacuuugac

SEQ ID NO: 65466 - RNA, 19 nt, Artificial Sequence
  Description of Artificial Sequence: Synthetic oligonucleotide
  Sense strand starting at position 74 of SEQ ID NO: 810
uuagcaugacagugacuua

SEQ ID NO: 65467 - RNA, 19 nt, Artificial Sequence
  Description of Artificial Sequence: Synthetic oligonucleotide
  Antisense strand to SEQ ID NO: 65386
uaagucacugucaugcuaa

SEQ ID NO: 65468 - RNA, 19 nt, Artificial Sequence
  Description of Artificial Sequence: Synthetic oligonucleotide
  Sense strand starting at position 77 of SEQ ID NO: 810
gcaugacagugacuuauca

SEQ ID NO: 65469 - RNA, 19 nt, Artificial Sequence
  Description of Artificial Sequence: Synthetic oligonucleotide
  Antisense strand to SEQ ID NO: 65388
ugauaagucacugucaugc

SEQ ID NO: 65470 - RNA, 19 nt, Artificial Sequence
  Description of Artificial Sequence: Synthetic oligonucleotide
  Sense strand starting at position 317 of SEQ ID NO: 810
uuugauguuuacccuuaga

SEQ ID NO: 65471 - RNA, 19 nt, Artificial Sequence
  Description of Artificial Sequence: Synthetic oligonucleotide
  Antisense strand to SEQ ID NO: 65390
ucuaaggguaaacaucaaa

SEQ ID NO: 65472 - RNA, 19 nt, Artificial Sequence
  Description of Artificial Sequence: Synthetic oligonucleotide
  Sense strand starting at position 581 of SEQ ID NO: 810
acgauaagauagcuucuaa

SEQ ID NO: 65473 - RNA, 19 nt, Artificial Sequence
  Description of Artificial Sequence: Synthetic oligonucleotide
  Antisense strand to SEQ ID NO: 65392
uuagaagcuaucuuaucgu

SEQ ID NO: 65474 - RNA, 19 nt, Artificial Sequence
  Description of Artificial Sequence: Synthetic oligonucleotide
  Sense strand starting at position 594 of SEQ ID NO: 810
uucuaagucacugagggua

SEQ ID NO: 65475 - RNA, 19 nt, Artificial Sequence
  Description of Artificial Sequence: Synthetic oligonucleotide
  Antisense strand to SEQ ID NO: 65394
uacccucagugacuuagaa

SEQ ID NO: 65476 - RNA, 19 nt, Artificial Sequence
  Description of Artificial Sequence: Synthetic oligonucleotide
  Sense strand starting at position 632 of SEQ ID NO: 810
acugaauguuuccuccaga

SEQ ID NO: 65477 - RNA, 19 nt, Artificial Sequence
  Description of Artificial Sequence: Synthetic oligonucleotide
  Antisense strand to SEQ ID NO: 65396
ucuggaggaaacauucagu

SEQ ID NO: 65478 - RNA, 19 nt, Artificial Sequence
  Description of Artificial Sequence: Synthetic oligonucleotide
  Sense strand starting at position 633 of SEQ ID NO: 810
cugaauguuuccuccagau

SEQ ID NO: 65479 - RNA, 19 nt, Artificial Sequence
  Description of Artificial Sequence: Synthetic oligonucleotide
  Antisense strand to SEQ ID NO: 65398
aucuggaggaaacauucag

SEQ ID NO: 65480 - RNA, 19 nt, Artificial Sequence
  Description of Artificial Sequence: Synthetic oligonucleotide
  Sense strand starting at position 684 of SEQ ID NO: 810
gagagcuaccuaggaaguu

SEQ ID NO: 65481 - RNA, 19 nt, Artificial Sequence
  Description of Artificial Sequence: Synthetic oligonucleotide
  Antisense strand to SEQ ID NO: 65400
aacuuccuagguagcucuc

SEQ ID NO: 65482 - RNA, 19 nt, Artificial Sequence
  Description of Artificial Sequence: Synthetic oligonucleotide
  Sense strand starting at position 725 of SEQ ID NO: 810
gcgauacagcuuuaggauu

SEQ ID NO: 65483 - RNA, 19 nt, Artificial Sequence
  Description of Artificial Sequence: Synthetic oligonucleotide
  Antisense strand to SEQ ID NO: 65402
aauccuaaagcuguaucgc

SEQ ID NO: 65484 - RNA, 19 nt, Artificial Sequence
  Description of Artificial Sequence: Synthetic oligonucleotide
  Sense strand starting at position 991 of SEQ ID NO: 810
ggaucaaaguagucugagu

SEQ ID NO: 65485 - RNA, 19 nt, Artificial Sequence
  Description of Artificial Sequence: Synthetic oligonucleotide
  Antisense strand to SEQ ID NO: 65404
acucagacuacuuugaucc

SEQ ID NO: 65486 - RNA, 19 nt, Artificial Sequence
  Description of Artificial Sequence: Synthetic oligonucleotide
  Sense strand starting at position 1007 of SEQ ID NO: 810
agugcauggagagguuaaa

SEQ ID NO: 65487 - RNA, 19 nt, Artificial Sequence
  Description of Artificial Sequence: Synthetic oligonucleotide
  Antisense strand to SEQ ID NO: 65406
uuuaaccucuccaugcacu

SEQ ID NO: 65488 - RNA, 19 nt, Artificial Sequence
  Description of Artificial Sequence: Synthetic oligonucleotide
  Sense strand starting at position 1086 of SEQ ID NO: 810
ggcccugcucucuacuaaa

SEQ ID NO: 65489 - RNA, 19 nt, Artificial Sequence
  Description of Artificial Sequence: Synthetic oligonucleotide
  Antisense strand to SEQ ID NO: 65408
uuuaguagagagcagggcc

SEQ ID NO: 65490 - RNA, 19 nt, Artificial Sequence
  Description of Artificial Sequence: Synthetic oligonucleotide
  Sense strand starting at position 1184 of SEQ ID NO: 810
ggaaauuagugagucugga

SEQ ID NO: 65491 - RNA, 19 nt, Artificial Sequence
  Description of Artificial Sequence: Synthetic oligonucleotide
  Antisense strand to SEQ ID NO: 65410
uccagacucacuaauuucc

SEQ ID NO: 65492 - RNA, 19 nt, Artificial Sequence
  Description of Artificial Sequence: Synthetic oligonucleotide
  Sense strand starting at position 1198 of SEQ ID NO: 810
cuggacuauuucuaaagaa

SEQ ID NO: 65493 - RNA, 19 nt, Artificial Sequence
  Description of Artificial Sequence: Synthetic oligonucleotide
  Antisense strand to SEQ ID NO: 65412
uucuuuagaaauaguccag

SEQ ID NO: 65494 - RNA, 19 nt, Artificial Sequence
  Description of Artificial Sequence: Synthetic oligonucleotide
  Sense strand starting at position 1375 of SEQ ID NO: 810
aaagaacccguuuguaacu

SEQ ID NO: 65495 - RNA, 19 nt, Artificial Sequence
  Description of Artificial Sequence: Synthetic oligonucleotide
  Antisense strand to SEQ ID NO: 65414
aguuacaaacggguucuuu

SEQ ID NO: 65496 - RNA, 19 nt, Artificial Sequence
  Description of Artificial Sequence: Synthetic oligonucleotide
  Sense strand starting at position 1384 of SEQ ID NO: 810
guuuguaacucuuccauuu

SEQ ID NO: 65497 - RNA, 19 nt, Artificial Sequence
  Description of Artificial Sequence: Synthetic oligonucleotide
  Antisense strand to SEQ ID NO: 65416
aaauggaagaguuacaaac

SEQ ID NO: 65498 - RNA, 19 nt, Artificial Sequence
  Description of Artificial Sequence: Synthetic oligonucleotide
  Sense strand starting at position 1431 of SEQ ID NO: 810
caucacugacgauggaaau

SEQ ID NO: 65499 - RNA, 19 nt, Artificial Sequence
  Description of Artificial Sequence: Synthetic oligonucleotide
  Antisense strand to SEQ ID NO: 65418
auuuccaucgucagugaug

SEQ ID NO: 65500 - RNA, 19 nt, Artificial Sequence
  Description of Artificial Sequence: Synthetic oligonucleotide
  Sense strand starting at position 1437 of SEQ ID NO: 810
ugacgauggaaauguaauc

SEQ ID NO: 65501 - RNA, 19 nt, Artificial Sequence
  Description of Artificial Sequence: Synthetic oligonucleotide
  Antisense strand to SEQ ID NO: 65420
gauuacauuuccaucguca

SEQ ID NO: 65502 - RNA, 19 nt, Artificial Sequence
  Description of Artificial Sequence: Synthetic oligonucleotide
  Sense strand starting at position 1448 of SEQ ID NO: 810
auguaaucauaucccuagu

SEQ ID NO: 65503 - RNA, 19 nt, Artificial Sequence
  Description of Artificial Sequence: Synthetic oligonucleotide
  Antisense strand to SEQ ID NO: 65422
acuagggauaugauuacau

SEQ ID NO: 65504 - RNA, 19 nt, Artificial Sequence
  Description of Artificial Sequence: Synthetic oligonucleotide
  Sense strand starting at position 1450 of SEQ ID NO: 810
guaaucauaucccuaguca

SEQ ID NO: 65505 - RNA, 19 nt, Artificial Sequence
  Description of Artificial Sequence: Synthetic oligonucleotide
  Antisense strand to SEQ ID NO: 65424
ugacuagggauaugauuac

SEQ ID NO: 65506 - RNA, 19 nt, Artificial Sequence
  Description of Artificial Sequence: Synthetic oligonucleotide
  Sense strand starting at position 1494 of SEQ ID NO: 810
agacuauccuaguacauuu

SEQ ID NO: 65507 - RNA, 19 nt, Artificial Sequence
  Description of Artificial Sequence: Synthetic oligonucleotide
  Antisense strand to SEQ ID NO: 65426
aaauguacuaggauagucu

SEQ ID NO: 65508 - RNA, 19 nt, Artificial Sequence
  Description of Artificial Sequence: Synthetic oligonucleotide
  Sense strand starting at position 1648 of SEQ ID NO: 810
uaauuugguucugaugaug

SEQ ID NO: 65509 - RNA, 19 nt, Artificial Sequence
  Description of Artificial Sequence: Synthetic oligonucleotide
  Antisense strand to SEQ ID NO: 65428
caucaucagaaccaaauua

SEQ ID NO: 65510 - RNA, 19 nt, Artificial Sequence
  Description of Artificial Sequence: Synthetic oligonucleotide
  Sense strand starting at position 1651 of SEQ ID NO: 810
uuugguucugaugauguuu

SEQ ID NO: 65511 - RNA, 19 nt, Artificial Sequence
  Description of Artificial Sequence: Synthetic oligonucleotide
  Antisense strand to SEQ ID NO: 65430
aaacaucaucagaaccaaa

SEQ ID NO: 65512 - RNA, 19 nt, Artificial Sequence
  Description of Artificial Sequence: Synthetic oligonucleotide
  Sense strand starting at position 1728 of SEQ ID NO: 810
ccauaucacugagcugaga

SEQ ID NO: 65513 - RNA, 19 nt, Artificial Sequence
  Description of Artificial Sequence: Synthetic oligonucleotide
  Antisense strand to SEQ ID NO: 65432
ucucagcucagugauaugg

SEQ ID NO: 65514 - RNA, 19 nt, Artificial Sequence
  Description of Artificial Sequence: Synthetic oligonucleotide
  Sense strand starting at position 1761 of SEQ ID NO: 810
agagaaagcugcuugauga

SEQ ID NO: 65515 - RNA, 19 nt, Artificial Sequence
  Description of Artificial Sequence: Synthetic oligonucleotide
  Antisense strand to SEQ ID NO: 65434
ucaucaagcagcuuucucu

SEQ ID NO: 65516 - RNA, 19 nt, Artificial Sequence
  Description of Artificial Sequence: Synthetic oligonucleotide
  Sense strand starting at position 1762 of SEQ ID NO: 810
gagaaagcugcuugaugag

SEQ ID NO: 65517 - RNA, 19 nt, Artificial Sequence
  Description of Artificial Sequence: Synthetic oligonucleotide
  Antisense strand to SEQ ID NO: 65436
cucaucaagcagcuuucuc

SEQ ID NO: 65518 - RNA, 19 nt, Artificial Sequence
  Description of Artificial Sequence: Synthetic oligonucleotide
  Sense strand starting at position 1937 of SEQ ID NO: 810
gcagauuuguaauggauuu

SEQ ID NO: 65519 - RNA, 19 nt, Artificial Sequence
  Description of Artificial Sequence: Synthetic oligonucleotide
  Antisense strand to SEQ ID NO: 65438
aaauccauuacaaaucugc

SEQ ID NO: 65520 - RNA, 19 nt, Artificial Sequence
  Description of Artificial Sequence: Synthetic oligonucleotide
  Sense strand starting at position 2010 of SEQ ID NO: 810
aauggaauuaguggagugu

SEQ ID NO: 65521 - RNA, 19 nt, Artificial Sequence
  Description of Artificial Sequence: Synthetic oligonucleotide
  Antisense strand to SEQ ID NO: 65440
acacuccacuaauuccauu

SEQ ID NO: 65522 - RNA, 19 nt, Artificial Sequence
  Description of Artificial Sequence: Synthetic oligonucleotide
  Sense strand starting at position 2033 of SEQ ID NO: 810
gugggaggguuuaaagauu

SEQ ID NO: 65523 - RNA, 19 nt, Artificial Sequence
  Description of Artificial Sequence: Synthetic oligonucleotide
  Antisense strand to SEQ ID NO: 65442
aaucuuuaaacccucccac

SEQ ID NO: 65524 - RNA, 19 nt, Artificial Sequence
  Description of Artificial Sequence: Synthetic oligonucleotide
  Sense strand starting at position 2153 of SEQ ID NO: 810
ugucucauggauugaguca

SEQ ID NO: 65525 - RNA, 19 nt, Artificial Sequence
  Description of Artificial Sequence: Synthetic oligonucleotide
  Antisense strand to SEQ ID NO: 65444
ugacucaauccaugagaca

SEQ ID NO: 65526 - RNA, 19 nt, Artificial Sequence
  Description of Artificial Sequence: Synthetic oligonucleotide
  Sense strand starting at position 2154 of SEQ ID NO: 810
gucucauggauugagucaa

SEQ ID NO: 65527 - RNA, 19 nt, Artificial Sequence
  Description of Artificial Sequence: Synthetic oligonucleotide
  Antisense strand to SEQ ID NO: 65446
uugacucaauccaugagac

SEQ ID NO: 65528 - RNA, 19 nt, Artificial Sequence
  Description of Artificial Sequence: Synthetic oligonucleotide
  Sense strand starting at position 2164 of SEQ ID NO: 810
uugagucaauuugagaaac

SEQ ID NO: 65529 - RNA, 19 nt, Artificial Sequence
  Description of Artificial Sequence: Synthetic oligonucleotide
  Antisense strand to SEQ ID NO: 65448
guuucucaaauugacucaa

SEQ ID NO: 65530 - RNA, 19 nt, Artificial Sequence
  Description of Artificial Sequence: Synthetic oligonucleotide
  Sense strand starting at position 2166 of SEQ ID NO: 810
gagucaauuugagaaaccu

SEQ ID NO: 65531 - RNA, 19 nt, Artificial Sequence
  Description of Artificial Sequence: Synthetic oligonucleotide
  Antisense strand to SEQ ID NO: 65450
agguuucucaaauugacuc

SEQ ID NO: 65532 - RNA, 19 nt, Artificial Sequence
  Description of Artificial Sequence: Synthetic oligonucleotide
  Sense strand starting at position 2392 of SEQ ID NO: 810
uacugauggcuuuacauga

SEQ ID NO: 65533 - RNA, 19 nt, Artificial Sequence
  Description of Artificial Sequence: Synthetic oligonucleotide
  Antisense strand to SEQ ID NO: 65452
ucauguaaagccaucagua

SEQ ID NO: 65534 - RNA, 19 nt, Artificial Sequence
  Description of Artificial Sequence: Synthetic oligonucleotide
  Sense strand starting at position 2405 of SEQ ID NO: 810
acaugaaucgcacaacuga

SEQ ID NO: 65535 - RNA, 19 nt, Artificial Sequence
  Description of Artificial Sequence: Synthetic oligonucleotide
  Antisense strand to SEQ ID NO: 65454
ucaguugugcgauucaugu

SEQ ID NO: 65536 - RNA, 19 nt, Artificial Sequence
  Description of Artificial Sequence: Synthetic oligonucleotide
  Sense strand starting at position 3487 of SEQ ID NO: 810
cagauuguccuggaagugu

SEQ ID NO: 65537 - RNA, 19 nt, Artificial Sequence
  Description of Artificial Sequence: Synthetic oligonucleotide
  Antisense strand to SEQ ID NO: 65456
acacuuccaggacaaucug

SEQ ID NO: 65538 - RNA, 19 nt, Artificial Sequence
  Description of Artificial Sequence: Synthetic oligonucleotide
  Sense strand starting at position 3813 of SEQ ID NO: 810
uuuagauacgcauacacau

SEQ ID NO: 65539 - RNA, 19 nt, Artificial Sequence
  Description of Artificial Sequence: Synthetic oligonucleotide
  Antisense strand to SEQ ID NO: 65458
auguguaugcguaucuaaa

SEQ ID NO: 65540 - RNA, 19 nt, Artificial Sequence
  Description of Artificial Sequence: Synthetic oligonucleotide
  Sense strand starting at position 60 of SEQ ID NO: 811
uuuauauugcuauaggagu

SEQ ID NO: 65541 - RNA, 19 nt, Artificial Sequence
  Description of Artificial Sequence: Synthetic oligonucleotide
  Antisense strand to SEQ ID NO: 65460
acuccuauagcaauauaaa

SEQ ID NO: 65542 - RNA, 19 nt, Artificial Sequence
  Description of Artificial Sequence: Synthetic oligonucleotide
  Sense strand starting at position 66 of SEQ ID NO: 811
uugcuauaggaguaacuuu

SEQ ID NO: 65543 - RNA, 19 nt, Artificial Sequence
  Description of Artificial Sequence: Synthetic oligonucleotide
  Antisense strand to SEQ ID NO: 65462
aaaguuacuccuauagcaa

SEQ ID NO: 65544 - RNA, 19 nt, Artificial Sequence
  Description of Artificial Sequence: Synthetic oligonucleotide
  Sense strand starting at position 87 of SEQ ID NO: 811
gauagcauccuauaaguga

SEQ ID NO: 65545 - RNA, 19 nt, Artificial Sequence
  Description of Artificial Sequence: Synthetic oligonucleotide
  Antisense strand to SEQ ID NO: 65464
ucacuuauaggaugcuauc

SEQ ID NO: 65546 - RNA, 19 nt, Artificial Sequence
  Description of Artificial Sequence: Synthetic oligonucleotide
  Sense strand starting at position 90 of SEQ ID NO: 811
agcauccuauaagugagau

SEQ ID NO: 65547 - RNA, 19 nt, Artificial Sequence
  Description of Artificial Sequence: Synthetic oligonucleotide
  Antisense strand to SEQ ID NO: 65466
aucucacuuauaggaugcu

SEQ ID NO: 65548 - RNA, 19 nt, Artificial Sequence
  Description of Artificial Sequence: Synthetic oligonucleotide
  Sense strand starting at position 102 of SEQ ID NO: 811
gugagauugccaggucaaa

SEQ ID NO: 65549 - RNA, 19 nt, Artificial Sequence
  Description of Artificial Sequence: Synthetic oligonucleotide
  Antisense strand to SEQ ID NO: 65468
uuugaccuggcaaucucac

SEQ ID NO: 65550 - RNA, 19 nt, Artificial Sequence
  Description of Artificial Sequence: Synthetic oligonucleotide
  Sense strand starting at position 152 of SEQ ID NO: 811
ccaaguuccucuccagaag

SEQ ID NO: 65551 - RNA, 19 nt, Artificial Sequence
  Description of Artificial Sequence: Synthetic oligonucleotide
  Antisense strand to SEQ ID NO: 65470
cuucuggagaggaacuugg

SEQ ID NO: 65552 - RNA, 19 nt, Artificial Sequence
  Description of Artificial Sequence: Synthetic oligonucleotide
  Sense strand starting at position 171 of SEQ ID NO: 811
gauguaucagguugaauuc

SEQ ID NO: 65553 - RNA, 19 nt, Artificial Sequence
  Description of Artificial Sequence: Synthetic oligonucleotide
  Antisense strand to SEQ ID NO: 65472
gaauucaaccugauacauc

SEQ ID NO: 65554 - RNA, 19 nt, Artificial Sequence
  Description of Artificial Sequence: Synthetic oligonucleotide
  Sense strand starting at position 546 of SEQ ID NO: 811
ggacaucacuuguucuuaa

SEQ ID NO: 65555 - RNA, 19 nt, Artificial Sequence
  Description of Artificial Sequence: Synthetic oligonucleotide
  Antisense strand to SEQ ID NO: 65474
uuaagaacaagugaugucc

SEQ ID NO: 65556 - RNA, 19 nt, Artificial Sequence
  Description of Artificial Sequence: Synthetic oligonucleotide
  Sense strand starting at position 558 of SEQ ID NO: 811
uucuuaauauuugcuguga

SEQ ID NO: 65557 - RNA, 19 nt, Artificial Sequence
  Description of Artificial Sequence: Synthetic oligonucleotide
  Antisense strand to SEQ ID NO: 65476
ucacagcaaauauuaagaa

SEQ ID NO: 65558 - RNA, 19 nt, Artificial Sequence
  Description of Artificial Sequence: Synthetic oligonucleotide
  Sense strand starting at position 698 of SEQ ID NO: 811
cuuuaucaccugcauguau

SEQ ID NO: 65559 - RNA, 19 nt, Artificial Sequence
  Description of Artificial Sequence: Synthetic oligonucleotide
  Antisense strand to SEQ ID NO: 65478
auacaugcaggugauaaag

SEQ ID NO: 65560 - RNA, 19 nt, Artificial Sequence
  Description of Artificial Sequence: Synthetic oligonucleotide
  Sense strand starting at position 856 of SEQ ID NO: 811
uuaaccaggccuugauaau

SEQ ID NO: 65561 - RNA, 19 nt, Artificial Sequence
  Description of Artificial Sequence: Synthetic oligonucleotide
  Antisense strand to SEQ ID NO: 65480
auuaucaaggccugguuaa

SEQ ID NO: 65562 - RNA, 19 nt, Artificial Sequence
  Description of Artificial Sequence: Synthetic oligonucleotide
  Sense strand starting at position 905 of SEQ ID NO: 811
gaagccuuccuguaguaac

SEQ ID NO: 65563 - RNA, 19 nt, Artificial Sequence
  Description of Artificial Sequence: Synthetic oligonucleotide
  Antisense strand to SEQ ID NO: 65482
guuacuacaggaaggcuuc

SEQ ID NO: 65564 - RNA, 19 nt, Artificial Sequence
  Description of Artificial Sequence: Synthetic oligonucleotide
  Sense strand starting at position 919 of SEQ ID NO: 811
guaacaucuuaauuugugu

SEQ ID NO: 65565 - RNA, 19 nt, Artificial Sequence
  Description of Artificial Sequence: Synthetic oligonucleotide
  Antisense strand to SEQ ID NO: 65484
acacaaauuaagauguuac

SEQ ID NO: 65566 - RNA, 19 nt, Artificial Sequence
  Description of Artificial Sequence: Synthetic oligonucleotide
  Sense strand starting at position 1056 of SEQ ID NO: 811
gagugcuuuguuuauaaua

SEQ ID NO: 65567 - RNA, 19 nt, Artificial Sequence
  Description of Artificial Sequence: Synthetic oligonucleotide
  Antisense strand to SEQ ID NO: 65486
uauuauaaacaaagcacuc

SEQ ID NO: 65568 - RNA, 19 nt, Artificial Sequence
  Description of Artificial Sequence: Synthetic oligonucleotide
  Sense strand starting at position 1065 of SEQ ID NO: 811
guuuauaauauggagucga

SEQ ID NO: 65569 - RNA, 19 nt, Artificial Sequence
  Description of Artificial Sequence: Synthetic oligonucleotide
  Antisense strand to SEQ ID NO: 65488
ucgacuccauauuauaaac

SEQ ID NO: 65570 - RNA, 19 nt, Artificial Sequence
  Description of Artificial Sequence: Synthetic oligonucleotide
  Sense strand starting at position 1069 of SEQ ID NO: 811
auaauauggagucgauuac

SEQ ID NO: 65571 - RNA, 19 nt, Artificial Sequence
  Description of Artificial Sequence: Synthetic oligonucleotide
  Antisense strand to SEQ ID NO: 65490
guaaucgacuccauauuau

SEQ ID NO: 65572 - RNA, 19 nt, Artificial Sequence
  Description of Artificial Sequence: Synthetic oligonucleotide
  Sense strand starting at position 1070 of SEQ ID NO: 811
uaauauggagucgauuacu

SEQ ID NO: 65573 - RNA, 19 nt, Artificial Sequence
  Description of Artificial Sequence: Synthetic oligonucleotide
  Antisense strand to SEQ ID NO: 65492
aguaaucgacuccauauua

SEQ ID NO: 65574 - RNA, 19 nt, Artificial Sequence
  Description of Artificial Sequence: Synthetic oligonucleotide
  Sense strand starting at position 1089 of SEQ ID NO: 811
ucugacuugcucugaugaa

SEQ ID NO: 65575 - RNA, 19 nt, Artificial Sequence
  Description of Artificial Sequence: Synthetic oligonucleotide
  Antisense strand to SEQ ID NO: 65494
uucaucagagcaagucaga

SEQ ID NO: 65576 - RNA, 19 nt, Artificial Sequence
  Description of Artificial Sequence: Synthetic oligonucleotide
  Sense strand starting at position 1302 of SEQ ID NO: 811
cugcacaaagacuguauaa

SEQ ID NO: 65577 - RNA, 19 nt, Artificial Sequence
  Description of Artificial Sequence: Synthetic oligonucleotide
  Antisense strand to SEQ ID NO: 65496
uuauacagucuuugugcag

SEQ ID NO: 65578 - RNA, 19 nt, Artificial Sequence
  Description of Artificial Sequence: Synthetic oligonucleotide
  Sense strand starting at position 1401 of SEQ ID NO: 811
ggcaauaaugaaugugaug

SEQ ID NO: 65579 - RNA, 19 nt, Artificial Sequence
  Description of Artificial Sequence: Synthetic oligonucleotide
  Antisense strand to SEQ ID NO: 65498
caucacauucauuauugcc

SEQ ID NO: 65580 - RNA, 19 nt, Artificial Sequence
  Description of Artificial Sequence: Synthetic oligonucleotide
  Sense strand starting at position 1511 of SEQ ID NO: 811
cucucuaugcuggagacua

SEQ ID NO: 65581 - RNA, 19 nt, Artificial Sequence
  Description of Artificial Sequence: Synthetic oligonucleotide
  Antisense strand to SEQ ID NO: 65500
uagucuccagcauagagag

SEQ ID NO: 65582 - RNA, 19 nt, Artificial Sequence
  Description of Artificial Sequence: Synthetic oligonucleotide
  Sense strand starting at position 1629 of SEQ ID NO: 811
uguugugggaauggucaau

SEQ ID NO: 65583 - RNA, 19 nt, Artificial Sequence
  Description of Artificial Sequence: Synthetic oligonucleotide
  Antisense strand to SEQ ID NO: 65502
auugaccauucccacaaca

SEQ ID NO: 65584 - RNA, 19 nt, Artificial Sequence
  Description of Artificial Sequence: Synthetic oligonucleotide
  Sense strand starting at position 1657 of SEQ ID NO: 811
acugaugaacccugguaaa

SEQ ID NO: 65585 - RNA, 19 nt, Artificial Sequence
  Description of Artificial Sequence: Synthetic oligonucleotide
  Antisense strand to SEQ ID NO: 65504
uuuaccaggguucaucagu

SEQ ID NO: 65586 - RNA, 19 nt, Artificial Sequence
  Description of Artificial Sequence: Synthetic oligonucleotide
  Sense strand starting at position 1715 of SEQ ID NO: 811
auccuuuagcacuggaaag

SEQ ID NO: 65587 - RNA, 19 nt, Artificial Sequence
  Description of Artificial Sequence: Synthetic oligonucleotide
  Antisense strand to SEQ ID NO: 65506
cuuuccagugcuaaaggau

SEQ ID NO: 65588 - RNA, 19 nt, Artificial Sequence
  Description of Artificial Sequence: Synthetic oligonucleotide
  Sense strand starting at position 1729 of SEQ ID NO: 811
gaaagaagguuguuccaau

SEQ ID NO: 65589 - RNA, 19 nt, Artificial Sequence
  Description of Artificial Sequence: Synthetic oligonucleotide
  Antisense strand to SEQ ID NO: 65508
auuggaacaaccuucuuuc

SEQ ID NO: 65590 - RNA, 19 nt, Artificial Sequence
  Description of Artificial Sequence: Synthetic oligonucleotide
  Sense strand starting at position 1730 of SEQ ID NO: 811
aaagaagguuguuccaaug

SEQ ID NO: 65591 - RNA, 19 nt, Artificial Sequence
  Description of Artificial Sequence: Synthetic oligonucleotide
  Antisense strand to SEQ ID NO: 65510
cauuggaacaaccuucuuu

SEQ ID NO: 65592 - RNA, 19 nt, Artificial Sequence
  Description of Artificial Sequence: Synthetic oligonucleotide
  Sense strand starting at position 1923 of SEQ ID NO: 811
agagguaaccucugcaaag

SEQ ID NO: 65593 - RNA, 19 nt, Artificial Sequence
  Description of Artificial Sequence: Synthetic oligonucleotide
  Antisense strand to SEQ ID NO: 65512
cuuugcagagguuaccucu

SEQ ID NO: 65594 - RNA, 19 nt, Artificial Sequence
  Description of Artificial Sequence: Synthetic oligonucleotide
  Sense strand starting at position 1924 of SEQ ID NO: 811
gagguaaccucugcaaaga

SEQ ID NO: 65595 - RNA, 19 nt, Artificial Sequence
  Description of Artificial Sequence: Synthetic oligonucleotide
  Antisense strand to SEQ ID NO: 65514
ucuuugcagagguuaccuc

SEQ ID NO: 65596 - RNA, 19 nt, Artificial Sequence
  Description of Artificial Sequence: Synthetic oligonucleotide
  Sense strand starting at position 2021 of SEQ ID NO: 811
guaagaggguuugucauga

SEQ ID NO: 65597 - RNA, 19 nt, Artificial Sequence
  Description of Artificial Sequence: Synthetic oligonucleotide
  Antisense strand to SEQ ID NO: 65516
ucaugacaaacccucuuac

SEQ ID NO: 65598 - RNA, 19 nt, Artificial Sequence
  Description of Artificial Sequence: Synthetic oligonucleotide
  Sense strand starting at position 2139 of SEQ ID NO: 811
agugcuauuuaucucaugu

SEQ ID NO: 65599 - RNA, 19 nt, Artificial Sequence
  Description of Artificial Sequence: Synthetic oligonucleotide
  Antisense strand to SEQ ID NO: 65518
acaugagauaaauagcacu

SEQ ID NO: 65600 - RNA, 19 nt, Artificial Sequence
  Description of Artificial Sequence: Synthetic oligonucleotide
  Sense strand starting at position 2170 of SEQ ID NO: 811
uugagaagcauguggauga

SEQ ID NO: 65601 - RNA, 19 nt, Artificial Sequence
  Description of Artificial Sequence: Synthetic oligonucleotide
  Antisense strand to SEQ ID NO: 65520
ucauccacaugcuucucaa

SEQ ID NO: 65602 - RNA, 19 nt, Artificial Sequence
  Description of Artificial Sequence: Synthetic oligonucleotide
  Sense strand starting at position 2213 of SEQ ID NO: 811
agguccaauuaccuugaau

SEQ ID NO: 65603 - RNA, 19 nt, Artificial Sequence
  Description of Artificial Sequence: Synthetic oligonucleotide
  Antisense strand to SEQ ID NO: 65522
auucaagguaauuggaccu

SEQ ID NO: 65604 - RNA, 19 nt, Artificial Sequence
  Description of Artificial Sequence: Synthetic oligonucleotide
  Sense strand starting at position 2227 of SEQ ID NO: 811
ugaauauuagcuugagcac

SEQ ID NO: 65605 - RNA, 19 nt, Artificial Sequence
  Description of Artificial Sequence: Synthetic oligonucleotide
  Antisense strand to SEQ ID NO: 65524
gugcucaagcuaauauuca

SEQ ID NO: 65606 - RNA, 19 nt, Artificial Sequence
  Description of Artificial Sequence: Synthetic oligonucleotide
  Sense strand starting at position 2260 of SEQ ID NO: 811
agggaauaucuaugucuua

SEQ ID NO: 65607 - RNA, 19 nt, Artificial Sequence
  Description of Artificial Sequence: Synthetic oligonucleotide
  Antisense strand to SEQ ID NO: 65526
uaagacauagauauucccu

SEQ ID NO: 65608 - RNA, 19 nt, Artificial Sequence
  Description of Artificial Sequence: Synthetic oligonucleotide
  Sense strand starting at position 2261 of SEQ ID NO: 811
gggaauaucuaugucuuau

SEQ ID NO: 65609 - RNA, 19 nt, Artificial Sequence
  Description of Artificial Sequence: Synthetic oligonucleotide
  Antisense strand to SEQ ID NO: 65528
auaagacauagauauuccc

SEQ ID NO: 65610 - RNA, 19 nt, Artificial Sequence
  Description of Artificial Sequence: Synthetic oligonucleotide
  Sense strand starting at position 2517 of SEQ ID NO: 811
aacuucugggcuuaaguua

SEQ ID NO: 65611 - RNA, 19 nt, Artificial Sequence
  Description of Artificial Sequence: Synthetic oligonucleotide
  Antisense strand to SEQ ID NO: 65530
uaacuuaagcccagaaguu

SEQ ID NO: 65612 - RNA, 19 nt, Artificial Sequence
  Description of Artificial Sequence: Synthetic oligonucleotide
  Sense strand starting at position 2615 of SEQ ID NO: 811
cgcguaugugugagauaug

SEQ ID NO: 65613 - RNA, 19 nt, Artificial Sequence
  Description of Artificial Sequence: Synthetic oligonucleotide
  Antisense strand to SEQ ID NO: 65532
cauaucucacacauacgcg

SEQ ID NO: 65614 - RNA, 19 nt, Artificial Sequence
  Description of Artificial Sequence: Synthetic oligonucleotide
  Sense strand starting at position 2618 of SEQ ID NO: 811
guaugugugagauaugaag

SEQ ID NO: 65615 - RNA, 19 nt, Artificial Sequence
  Description of Artificial Sequence: Synthetic oligonucleotide
  Antisense strand to SEQ ID NO: 65534
cuucauaucucacacauac

SEQ ID NO: 65616 - RNA, 19 nt, Artificial Sequence
  Description of Artificial Sequence: Synthetic oligonucleotide
  Sense strand starting at position 2955 of SEQ ID NO: 811
uggauucugucccuucuga

SEQ ID NO: 65617 - RNA, 19 nt, Artificial Sequence
  Description of Artificial Sequence: Synthetic oligonucleotide
  Antisense strand to SEQ ID NO: 65536
ucagaagggacagaaucca

SEQ ID NO: 65618 - RNA, 19 nt, Artificial Sequence
  Description of Artificial Sequence: Synthetic oligonucleotide
  Sense strand starting at position 3419 of SEQ ID NO: 811
cccaucacauuaguuagau

SEQ ID NO: 65619 - RNA, 19 nt, Artificial Sequence
  Description of Artificial Sequence: Synthetic oligonucleotide
  Antisense strand to SEQ ID NO: 65538
aucuaacuaaugugauggg

SEQ ID NO: 65620 - RNA, 19 nt, Artificial Sequence
  Description of Artificial Sequence: Synthetic oligonucleotide
  Sense strand starting at position 42 of SEQ ID NO: 812
uaaauauugguaugacagu

SEQ ID NO: 65621 - RNA, 19 nt, Artificial Sequence
  Description of Artificial Sequence: Synthetic oligonucleotide
  Antisense strand to SEQ ID NO: 65540
acugucauaccaauauuua

SEQ ID NO: 65622 - RNA, 19 nt, Artificial Sequence
  Description of Artificial Sequence: Synthetic oligonucleotide
  Sense strand starting at position 48 of SEQ ID NO: 812
uugguaugacaguaacuua

SEQ ID NO: 65623 - RNA, 19 nt, Artificial Sequence
  Description of Artificial Sequence: Synthetic oligonucleotide
  Antisense strand to SEQ ID NO: 65542
uaaguuacugucauaccaa

SEQ ID NO: 65624 - RNA, 19 nt, Artificial Sequence
  Description of Artificial Sequence: Synthetic oligonucleotide
  Sense strand starting at position 51 of SEQ ID NO: 812
guaugacaguaacuuauca

SEQ ID NO: 65625 - RNA, 19 nt, Artificial Sequence
  Description of Artificial Sequence: Synthetic oligonucleotide
  Antisense strand to SEQ ID NO: 65544
ugauaaguuacugucauac

SEQ ID NO: 65626 - RNA, 19 nt, Artificial Sequence
  Description of Artificial Sequence: Synthetic oligonucleotide
  Sense strand starting at position 200 of SEQ ID NO: 812
acauccuggcuauauguaa

SEQ ID NO: 65627 - RNA, 19 nt, Artificial Sequence
  Description of Artificial Sequence: Synthetic oligonucleotide
  Antisense strand to SEQ ID NO: 65546
uuacauauagccaggaugu

SEQ ID NO: 65628 - RNA, 19 nt, Artificial Sequence
  Description of Artificial Sequence: Synthetic oligonucleotide
  Sense strand starting at position 318 of SEQ ID NO: 812
uccagagauuuauaaaugu

SEQ ID NO: 65629 - RNA, 19 nt, Artificial Sequence
  Description of Artificial Sequence: Synthetic oligonucleotide
  Antisense strand to SEQ ID NO: 65548
acauuuauaaaucucugga

SEQ ID NO: 65630 - RNA, 19 nt, Artificial Sequence
  Description of Artificial Sequence: Synthetic oligonucleotide
  Sense strand starting at position 557 of SEQ ID NO: 812
augauaagguagccucuaa

SEQ ID NO: 65631 - RNA, 19 nt, Artificial Sequence
  Description of Artificial Sequence: Synthetic oligonucleotide
  Antisense strand to SEQ ID NO: 65550
uuagaggcuaccuuaucau

SEQ ID NO: 65632 - RNA, 19 nt, Artificial Sequence
  Description of Artificial Sequence: Synthetic oligonucleotide
  Sense strand starting at position 573 of SEQ ID NO: 812
uaacucaguguggguauaa

SEQ ID NO: 65633 - RNA, 19 nt, Artificial Sequence
  Description of Artificial Sequence: Synthetic oligonucleotide
  Antisense strand to SEQ ID NO: 65552
uuauacccacacugaguua

SEQ ID NO: 65634 - RNA, 19 nt, Artificial Sequence
  Description of Artificial Sequence: Synthetic oligonucleotide
  Sense strand starting at position 574 of SEQ ID NO: 812
aacucaguguggguauaaa

SEQ ID NO: 65635 - RNA, 19 nt, Artificial Sequence
  Description of Artificial Sequence: Synthetic oligonucleotide
  Antisense strand to SEQ ID NO: 65554
uuuauacccacacugaguu

SEQ ID NO: 65636 - RNA, 19 nt, Artificial Sequence
  Description of Artificial Sequence: Synthetic oligonucleotide
  Sense strand starting at position 1074 of SEQ ID NO: 812
cgugggagagguuaaagua

SEQ ID NO: 65637 - RNA, 19 nt, Artificial Sequence
  Description of Artificial Sequence: Synthetic oligonucleotide
  Antisense strand to SEQ ID NO: 65556
uacuuuaaccucucccacg

SEQ ID NO: 65638 - RNA, 19 nt, Artificial Sequence
  Description of Artificial Sequence: Synthetic oligonucleotide
  Sense strand starting at position 1125 of SEQ ID NO: 812
acaggaaauucuccuguaa

SEQ ID NO: 65639 - RNA, 19 nt, Artificial Sequence
  Description of Artificial Sequence: Synthetic oligonucleotide
  Antisense strand to SEQ ID NO: 65558
uuacaggagaauuuccugu

SEQ ID NO: 65640 - RNA, 19 nt, Artificial Sequence
  Description of Artificial Sequence: Synthetic oligonucleotide
  Sense strand starting at position 1213 of SEQ ID NO: 812
agaggaagcucuuuagccu

SEQ ID NO: 65641 - RNA, 19 nt, Artificial Sequence
  Description of Artificial Sequence: Synthetic oligonucleotide
  Antisense strand to SEQ ID NO: 65560
aggcuaaagagcuuccucu

SEQ ID NO: 65642 - RNA, 19 nt, Artificial Sequence
  Description of Artificial Sequence: Synthetic oligonucleotide
  Sense strand starting at position 1221 of SEQ ID NO: 812
cucuuuagccuggauuauu

SEQ ID NO: 65643 - RNA, 19 nt, Artificial Sequence
  Description of Artificial Sequence: Synthetic oligonucleotide
  Antisense strand to SEQ ID NO: 65562
aauaauccaggcuaaagag

SEQ ID NO: 65644 - RNA, 19 nt, Artificial Sequence
  Description of Artificial Sequence: Synthetic oligonucleotide
  Sense strand starting at position 1230 of SEQ ID NO: 812
cuggauuauuucuagagaa

SEQ ID NO: 65645 - RNA, 19 nt, Artificial Sequence
  Description of Artificial Sequence: Synthetic oligonucleotide
  Antisense strand to SEQ ID NO: 65564
uucucuagaaauaauccag

SEQ ID NO: 65646 - RNA, 19 nt, Artificial Sequence
  Description of Artificial Sequence: Synthetic oligonucleotide
  Sense strand starting at position 1413 of SEQ ID NO: 812
auuuguagcucuuuccauu

SEQ ID NO: 65647 - RNA, 19 nt, Artificial Sequence
  Description of Artificial Sequence: Synthetic oligonucleotide
  Antisense strand to SEQ ID NO: 65566
aauggaaagagcuacaaau

SEQ ID NO: 65648 - RNA, 19 nt, Artificial Sequence
  Description of Artificial Sequence: Synthetic oligonucleotide
  Sense strand starting at position 1477 of SEQ ID NO: 812
auggaaauguaaucauguc

SEQ ID NO: 65649 - RNA, 19 nt, Artificial Sequence
  Description of Artificial Sequence: Synthetic oligonucleotide
  Antisense strand to SEQ ID NO: 65568
gacaugauuacauuuccau

SEQ ID NO: 65650 - RNA, 19 nt, Artificial Sequence
  Description of Artificial Sequence: Synthetic oligonucleotide
  Sense strand starting at position 1605 of SEQ ID NO: 812
ggcacuuagagccauggua

SEQ ID NO: 65651 - RNA, 19 nt, Artificial Sequence
  Description of Artificial Sequence: Synthetic oligonucleotide
  Antisense strand to SEQ ID NO: 65570
uaccauggcucuaagugcc

SEQ ID NO: 65652 - RNA, 19 nt, Artificial Sequence
  Description of Artificial Sequence: Synthetic oligonucleotide
  Sense strand starting at position 1955 of SEQ ID NO: 812
uuaagcaaccuuuguaaug

SEQ ID NO: 65653 - RNA, 19 nt, Artificial Sequence
  Description of Artificial Sequence: Synthetic oligonucleotide
  Antisense strand to SEQ ID NO: 65572
cauuacaaagguugcuuaa

SEQ ID NO: 65654 - RNA, 19 nt, Artificial Sequence
  Description of Artificial Sequence: Synthetic oligonucleotide
  Sense strand starting at position 2012 of SEQ ID NO: 812
ggaagugacucaguaacca

SEQ ID NO: 65655 - RNA, 19 nt, Artificial Sequence
  Description of Artificial Sequence: Synthetic oligonucleotide
  Antisense strand to SEQ ID NO: 65574
ugguuacugagucacuucc

SEQ ID NO: 65656 - RNA, 19 nt, Artificial Sequence
  Description of Artificial Sequence: Synthetic oligonucleotide
  Sense strand starting at position 2016 of SEQ ID NO: 812
gugacucaguaaccauaaa

SEQ ID NO: 65657 - RNA, 19 nt, Artificial Sequence
  Description of Artificial Sequence: Synthetic oligonucleotide
  Antisense strand to SEQ ID NO: 65576
uuuaugguuacugagucac

SEQ ID NO: 65658 - RNA, 19 nt, Artificial Sequence
  Description of Artificial Sequence: Synthetic oligonucleotide
  Sense strand starting at position 2061 of SEQ ID NO: 812
aggguuuaaagucaaguuu

SEQ ID NO: 65659 - RNA, 19 nt, Artificial Sequence
  Description of Artificial Sequence: Synthetic oligonucleotide
  Antisense strand to SEQ ID NO: 65578
aaacuugacuuuaaacccu

SEQ ID NO: 65660 - RNA, 19 nt, Artificial Sequence
  Description of Artificial Sequence: Synthetic oligonucleotide
  Sense strand starting at position 2174 of SEQ ID NO: 812
uggagaucuguuugagaau

SEQ ID NO: 65661 - RNA, 19 nt, Artificial Sequence
  Description of Artificial Sequence: Synthetic oligonucleotide
  Antisense strand to SEQ ID NO: 65580
auucucaaacagaucucca

SEQ ID NO: 65662 - RNA, 19 nt, Artificial Sequence
  Description of Artificial Sequence: Synthetic oligonucleotide
  Sense strand starting at position 2181 of SEQ ID NO: 812
cuguuugagaauuguagaa

SEQ ID NO: 65663 - RNA, 19 nt, Artificial Sequence
  Description of Artificial Sequence: Synthetic oligonucleotide
  Antisense strand to SEQ ID NO: 65582
uucuacaauucucaaacag

SEQ ID NO: 65664 - RNA, 19 nt, Artificial Sequence
  Description of Artificial Sequence: Synthetic oligonucleotide
  Sense strand starting at position 2194 of SEQ ID NO: 812
guagaauuaggaggcauca

SEQ ID NO: 65665 - RNA, 19 nt, Artificial Sequence
  Description of Artificial Sequence: Synthetic oligonucleotide
  Antisense strand to SEQ ID NO: 65584
ugaugccuccuaauucuac

SEQ ID NO: 65666 - RNA, 19 nt, Artificial Sequence
  Description of Artificial Sequence: Synthetic oligonucleotide
  Sense strand starting at position 2402 of SEQ ID NO: 812
ugcugacugcuuuacauga

SEQ ID NO: 65667 - RNA, 19 nt, Artificial Sequence
  Description of Artificial Sequence: Synthetic oligonucleotide
  Antisense strand to SEQ ID NO: 65586
ucauguaaagcagucagca

SEQ ID NO: 65668 - RNA, 19 nt, Artificial Sequence
  Description of Artificial Sequence: Synthetic oligonucleotide
  Sense strand starting at position 2585 of SEQ ID NO: 812
cuguuuggugagugaauaa

SEQ ID NO: 65669 - RNA, 19 nt, Artificial Sequence
  Description of Artificial Sequence: Synthetic oligonucleotide
  Antisense strand to SEQ ID NO: 65588
uuauucacucaccaaacag

SEQ ID NO: 65670 - RNA, 19 nt, Artificial Sequence
  Description of Artificial Sequence: Synthetic oligonucleotide
  Sense strand starting at position 2592 of SEQ ID NO: 812
gugagugaauaauuguaaa

SEQ ID NO: 65671 - RNA, 19 nt, Artificial Sequence
  Description of Artificial Sequence: Synthetic oligonucleotide
  Antisense strand to SEQ ID NO: 65590
uuuacaauuauucacucac

SEQ ID NO: 65672 - RNA, 19 nt, Artificial Sequence
  Description of Artificial Sequence: Synthetic oligonucleotide
  Sense strand starting at position 2731 of SEQ ID NO: 812
ugcagaauaggugguauua

SEQ ID NO: 65673 - RNA, 19 nt, Artificial Sequence
  Description of Artificial Sequence: Synthetic oligonucleotide
  Antisense strand to SEQ ID NO: 65592
uaauaccaccuauucugca

SEQ ID NO: 65674 - RNA, 19 nt, Artificial Sequence
  Description of Artificial Sequence: Synthetic oligonucleotide
  Sense strand starting at position 3293 of SEQ ID NO: 812
agaguauaucauuguuacu

SEQ ID NO: 65675 - RNA, 19 nt, Artificial Sequence
  Description of Artificial Sequence: Synthetic oligonucleotide
  Antisense strand to SEQ ID NO: 65594
aguaacaaugauauacucu

SEQ ID NO: 65676 - RNA, 19 nt, Artificial Sequence
  Description of Artificial Sequence: Synthetic oligonucleotide
  Sense strand starting at position 3418 of SEQ ID NO: 812
auagcaagagucgauggua

SEQ ID NO: 65677 - RNA, 19 nt, Artificial Sequence
  Description of Artificial Sequence: Synthetic oligonucleotide
  Antisense strand to SEQ ID NO: 65596
uaccaucgacucuugcuau

SEQ ID NO: 65678 - RNA, 19 nt, Artificial Sequence
  Description of Artificial Sequence: Synthetic oligonucleotide
  Sense strand starting at position 3430 of SEQ ID NO: 812
gaugguacuuguuccacaa

SEQ ID NO: 65679 - RNA, 19 nt, Artificial Sequence
  Description of Artificial Sequence: Synthetic oligonucleotide
  Antisense strand to SEQ ID NO: 65598
uuguggaacaaguaccauc

SEQ ID NO: 65680 - RNA, 19 nt, Artificial Sequence
  Description of Artificial Sequence: Synthetic oligonucleotide
  Sense strand starting at position 3537 of SEQ ID NO: 812
ucuuccagucagggauaaa

SEQ ID NO: 65681 - RNA, 19 nt, Artificial Sequence
  Description of Artificial Sequence: Synthetic oligonucleotide
  Antisense strand to SEQ ID NO: 65600
uuuaucccugacuggaaga

SEQ ID NO: 65682 - RNA, 19 nt, Artificial Sequence
  Description of Artificial Sequence: Synthetic oligonucleotide
  Sense strand starting at position 3616 of SEQ ID NO: 812
gaaacuaaauuccugguga

SEQ ID NO: 65683 - RNA, 19 nt, Artificial Sequence
  Description of Artificial Sequence: Synthetic oligonucleotide
  Antisense strand to SEQ ID NO: 65602
ucaccaggaauuuaguuuc

SEQ ID NO: 65684 - RNA, 19 nt, Artificial Sequence
  Description of Artificial Sequence: Synthetic oligonucleotide
  Sense strand starting at position 3618 of SEQ ID NO: 812
aacuaaauuccuggugagu

SEQ ID NO: 65685 - RNA, 19 nt, Artificial Sequence
  Description of Artificial Sequence: Synthetic oligonucleotide
  Antisense strand to SEQ ID NO: 65604
acucaccaggaauuuaguu

SEQ ID NO: 65686 - RNA, 19 nt, Artificial Sequence
  Description of Artificial Sequence: Synthetic oligonucleotide
  Sense strand starting at position 3640 of SEQ ID NO: 812
accagaagucaagggcuuu

SEQ ID NO: 65687 - RNA, 19 nt, Artificial Sequence
  Description of Artificial Sequence: Synthetic oligonucleotide
  Antisense strand to SEQ ID NO: 65606
aaagcccuugacuucuggu

SEQ ID NO: 65688 - RNA, 19 nt, Artificial Sequence
  Description of Artificial Sequence: Synthetic oligonucleotide
  Sense strand starting at position 3738 of SEQ ID NO: 812
gguucauguguagagugga

SEQ ID NO: 65689 - RNA, 19 nt, Artificial Sequence
  Description of Artificial Sequence: Synthetic oligonucleotide
  Antisense strand to SEQ ID NO: 65608
uccacucuacacaugaacc

SEQ ID NO: 65690 - RNA, 19 nt, Artificial Sequence
  Description of Artificial Sequence: Synthetic oligonucleotide
  Sense strand starting at position 3896 of SEQ ID NO: 812
uaccgacuuugguugaaac

SEQ ID NO: 65691 - RNA, 19 nt, Artificial Sequence
  Description of Artificial Sequence: Synthetic oligonucleotide
  Antisense strand to SEQ ID NO: 65610
guuucaaccaaagucggua

SEQ ID NO: 65692 - RNA, 19 nt, Artificial Sequence
  Description of Artificial Sequence: Synthetic oligonucleotide
  Sense strand starting at position 3897 of SEQ ID NO: 812
accgacuuugguugaaaca

SEQ ID NO: 65693 - RNA, 19 nt, Artificial Sequence
  Description of Artificial Sequence: Synthetic oligonucleotide
  Antisense strand to SEQ ID NO: 65612
uguuucaaccaaagucggu

SEQ ID NO: 65694 - RNA, 19 nt, Artificial Sequence
  Description of Artificial Sequence: Synthetic oligonucleotide
  Sense strand starting at position 3898 of SEQ ID NO: 812
ccgacuuugguugaaacaa

SEQ ID NO: 65695 - RNA, 19 nt, Artificial Sequence
  Description of Artificial Sequence: Synthetic oligonucleotide
  Antisense strand to SEQ ID NO: 65614
uuguuucaaccaaagucgg

SEQ ID NO: 65696 - RNA, 19 nt, Artificial Sequence
  Description of Artificial Sequence: Synthetic oligonucleotide
  Sense strand starting at position 3907 of SEQ ID NO: 812
guugaaacaacauguggaa

SEQ ID NO: 65697 - RNA, 19 nt, Artificial Sequence
  Description of Artificial Sequence: Synthetic oligonucleotide
  Antisense strand to SEQ ID NO: 65616
uuccacauguuguuucaac

SEQ ID NO: 65698 - RNA, 19 nt, Artificial Sequence
  Description of Artificial Sequence: Synthetic oligonucleotide
  Sense strand starting at position 3965 of SEQ ID NO: 812
ugaucuacucuaugagcaa

SEQ ID NO: 65699 - RNA, 19 nt, Artificial Sequence
  Description of Artificial Sequence: Synthetic oligonucleotide
  Antisense strand to SEQ ID NO: 65618
uugcucauagaguagauca

SEQ ID NO: 65700 - RNA, 19 nt, Artificial Sequence
  Description of Artificial Sequence: Synthetic oligonucleotide
  Sense strand starting at position 110 of SEQ ID NO: 813
uguuaucacugguuccaag

SEQ ID NO: 65701 - RNA, 19 nt, Artificial Sequence
  Description of Artificial Sequence: Synthetic oligonucleotide
  Antisense strand to SEQ ID NO: 65620
cuuggaaccagugauaaca

SEQ ID NO: 65702 - RNA, 19 nt, Artificial Sequence
  Description of Artificial Sequence: Synthetic oligonucleotide
  Sense strand starting at position 232 of SEQ ID NO: 813
ccaccacgggcugagaaau

SEQ ID NO: 65703 - RNA, 19 nt, Artificial Sequence
  Description of Artificial Sequence: Synthetic oligonucleotide
  Antisense strand to SEQ ID NO: 65622
auuucucagcccguggugg

SEQ ID NO: 65704 - RNA, 19 nt, Artificial Sequence
  Description of Artificial Sequence: Synthetic oligonucleotide
  Sense strand starting at position 612 of SEQ ID NO: 813
ugauucuuacaagaacgcu

SEQ ID NO: 65705 - RNA, 19 nt, Artificial Sequence
  Description of Artificial Sequence: Synthetic oligonucleotide
  Antisense strand to SEQ ID NO: 65624
agcguucuuguaagaauca

SEQ ID NO: 65706 - RNA, 19 nt, Artificial Sequence
  Description of Artificial Sequence: Synthetic oligonucleotide
  Sense strand starting at position 809 of SEQ ID NO: 813
aagaguauugcguaccuac

SEQ ID NO: 65707 - RNA, 19 nt, Artificial Sequence
  Description of Artificial Sequence: Synthetic oligonucleotide
  Antisense strand to SEQ ID NO: 65626
guagguacgcaauacucuu

SEQ ID NO: 65708 - RNA, 19 nt, Artificial Sequence
  Description of Artificial Sequence: Synthetic oligonucleotide
  Sense strand starting at position 901 of SEQ ID NO: 813
uggagcucuauuuguugua

SEQ ID NO: 65709 - RNA, 19 nt, Artificial Sequence
  Description of Artificial Sequence: Synthetic oligonucleotide
  Antisense strand to SEQ ID NO: 65628
uacaacaaauagagcucca

SEQ ID NO: 65710 - RNA, 19 nt, Artificial Sequence
  Description of Artificial Sequence: Synthetic oligonucleotide
  Sense strand starting at position 902 of SEQ ID NO: 813
ggagcucuauuuguuguaa

SEQ ID NO: 65711 - RNA, 19 nt, Artificial Sequence
  Description of Artificial Sequence: Synthetic oligonucleotide
  Antisense strand to SEQ ID NO: 65630
uuacaacaaauagagcucc

SEQ ID NO: 65712 - RNA, 19 nt, Artificial Sequence
  Description of Artificial Sequence: Synthetic oligonucleotide
  Sense strand starting at position 903 of SEQ ID NO: 813
gagcucuauuuguuguaac

SEQ ID NO: 65713 - RNA, 19 nt, Artificial Sequence
  Description of Artificial Sequence: Synthetic oligonucleotide
  Antisense strand to SEQ ID NO: 65632
guuacaacaaauagagcuc

SEQ ID NO: 65714 - RNA, 19 nt, Artificial Sequence
  Description of Artificial Sequence: Synthetic oligonucleotide
  Sense strand starting at position 1178 of SEQ ID NO: 813
auucuaucacaaggugaua

SEQ ID NO: 65715 - RNA, 19 nt, Artificial Sequence
  Description of Artificial Sequence: Synthetic oligonucleotide
  Antisense strand to SEQ ID NO: 65634
uaucaccuugugauagaau

SEQ ID NO: 65716 - RNA, 19 nt, Artificial Sequence
  Description of Artificial Sequence: Synthetic oligonucleotide
  Sense strand starting at position 1204 of SEQ ID NO: 813
ggcuuugggcuuuaucaac

SEQ ID NO: 65717 - RNA, 19 nt, Artificial Sequence
  Description of Artificial Sequence: Synthetic oligonucleotide
  Antisense strand to SEQ ID NO: 65636
guugauaaagcccaaagcc

SEQ ID NO: 65718 - RNA, 19 nt, Artificial Sequence
  Description of Artificial Sequence: Synthetic oligonucleotide
  Sense strand starting at position 1518 of SEQ ID NO: 813
uguguauauguauacuaga

SEQ ID NO: 65719 - RNA, 19 nt, Artificial Sequence
  Description of Artificial Sequence: Synthetic oligonucleotide
  Antisense strand to SEQ ID NO: 65638
ucuaguauacauauacaca

SEQ ID NO: 65720 - RNA, 19 nt, Artificial Sequence
  Description of Artificial Sequence: Synthetic oligonucleotide
  Sense strand starting at position 1739 of SEQ ID NO: 813
gugugaagucuccaacccu

SEQ ID NO: 65721 - RNA, 19 nt, Artificial Sequence
  Description of Artificial Sequence: Synthetic oligonucleotide
  Antisense strand to SEQ ID NO: 65640
aggguuggagacuucacac

SEQ ID NO: 65722 - RNA, 19 nt, Artificial Sequence
  Description of Artificial Sequence: Synthetic oligonucleotide
  Sense strand starting at position 1765 of SEQ ID NO: 813
ugcagucugcgcuugggaa

SEQ ID NO: 65723 - RNA, 19 nt, Artificial Sequence
  Description of Artificial Sequence: Synthetic oligonucleotide
  Antisense strand to SEQ ID NO: 65642
uucccaagcgcagacugca

SEQ ID NO: 65724 - RNA, 19 nt, Artificial Sequence
  Description of Artificial Sequence: Synthetic oligonucleotide
  Sense strand starting at position 1779 of SEQ ID NO: 813
gggaauuuguuguuguuug

SEQ ID NO: 65725 - RNA, 19 nt, Artificial Sequence
  Description of Artificial Sequence: Synthetic oligonucleotide
  Antisense strand to SEQ ID NO: 65644
caaacaacaacaaauuccc

SEQ ID NO: 65726 - RNA, 19 nt, Artificial Sequence
  Description of Artificial Sequence: Synthetic oligonucleotide
  Sense strand starting at position 1868 of SEQ ID NO: 813
agaguucucucacccauug

SEQ ID NO: 65727 - RNA, 19 nt, Artificial Sequence
  Description of Artificial Sequence: Synthetic oligonucleotide
  Antisense strand to SEQ ID NO: 65646
caaugggugagagaacucu

SEQ ID NO: 65728 - RNA, 19 nt, Artificial Sequence
  Description of Artificial Sequence: Synthetic oligonucleotide
  Sense strand starting at position 1917 of SEQ ID NO: 813
aacggacuguucuuagaag

SEQ ID NO: 65729 - RNA, 19 nt, Artificial Sequence
  Description of Artificial Sequence: Synthetic oligonucleotide
  Antisense strand to SEQ ID NO: 65648
cuucuaagaacaguccguu

SEQ ID NO: 65730 - RNA, 19 nt, Artificial Sequence
  Description of Artificial Sequence: Synthetic oligonucleotide
  Sense strand starting at position 1925 of SEQ ID NO: 813
guucuuagaagcugaaagu

SEQ ID NO: 65731 - RNA, 19 nt, Artificial Sequence
  Description of Artificial Sequence: Synthetic oligonucleotide
  Antisense strand to SEQ ID NO: 65650
acuuucagcuucuaagaac

SEQ ID NO: 65732 - RNA, 19 nt, Artificial Sequence
  Description of Artificial Sequence: Synthetic oligonucleotide
  Sense strand starting at position 1965 of SEQ ID NO: 813
caaguaagagucugugaga

SEQ ID NO: 65733 - RNA, 19 nt, Artificial Sequence
  Description of Artificial Sequence: Synthetic oligonucleotide
  Antisense strand to SEQ ID NO: 65652
ucucacagacucuuacuug

SEQ ID NO: 65734 - RNA, 19 nt, Artificial Sequence
  Description of Artificial Sequence: Synthetic oligonucleotide
  Sense strand starting at position 1966 of SEQ ID NO: 813
aaguaagagucugugagaa

SEQ ID NO: 65735 - RNA, 19 nt, Artificial Sequence
  Description of Artificial Sequence: Synthetic oligonucleotide
  Antisense strand to SEQ ID NO: 65654
uucucacagacucuuacuu

SEQ ID NO: 65736 - RNA, 19 nt, Artificial Sequence
  Description of Artificial Sequence: Synthetic oligonucleotide
  Sense strand starting at position 1974 of SEQ ID NO: 813
gucugugagaaccgaaauu

SEQ ID NO: 65737 - RNA, 19 nt, Artificial Sequence
  Description of Artificial Sequence: Synthetic oligonucleotide
  Antisense strand to SEQ ID NO: 65656
aauuucgguucucacagac

SEQ ID NO: 65738 - RNA, 19 nt, Artificial Sequence
  Description of Artificial Sequence: Synthetic oligonucleotide
  Sense strand starting at position 2056 of SEQ ID NO: 813
acuaaaggagcuugaaagu

SEQ ID NO: 65739 - RNA, 19 nt, Artificial Sequence
  Description of Artificial Sequence: Synthetic oligonucleotide
  Antisense strand to SEQ ID NO: 65658
acuuucaagcuccuuuagu

SEQ ID NO: 65740 - RNA, 19 nt, Artificial Sequence
  Description of Artificial Sequence: Synthetic oligonucleotide
  Sense strand starting at position 2341 of SEQ ID NO: 813
ugugucuauggauaucuau

SEQ ID NO: 65741 - RNA, 19 nt, Artificial Sequence
  Description of Artificial Sequence: Synthetic oligonucleotide
  Antisense strand to SEQ ID NO: 65660
auagauauccauagacaca

SEQ ID NO: 65742 - RNA, 19 nt, Artificial Sequence
  Description of Artificial Sequence: Synthetic oligonucleotide
  Sense strand starting at position 2344 of SEQ ID NO: 813
gucuauggauaucuaugua

SEQ ID NO: 65743 - RNA, 19 nt, Artificial Sequence
  Description of Artificial Sequence: Synthetic oligonucleotide
  Antisense strand to SEQ ID NO: 65662
uacauagauauccauagac

SEQ ID NO: 65744 - RNA, 19 nt, Artificial Sequence
  Description of Artificial Sequence: Synthetic oligonucleotide
  Sense strand starting at position 2387 of SEQ ID NO: 813
ugcggugguggcaaguaaa

SEQ ID NO: 65745 - RNA, 19 nt, Artificial Sequence
  Description of Artificial Sequence: Synthetic oligonucleotide
  Antisense strand to SEQ ID NO: 65664
uuuacuugccaccaccgca

SEQ ID NO: 65746 - RNA, 19 nt, Artificial Sequence
  Description of Artificial Sequence: Synthetic oligonucleotide
  Sense strand starting at position 2498 of SEQ ID NO: 813
aggagucuuacccaggcua

SEQ ID NO: 65747 - RNA, 19 nt, Artificial Sequence
  Description of Artificial Sequence: Synthetic oligonucleotide
  Antisense strand to SEQ ID NO: 65666
uagccuggguaagacuccu

SEQ ID NO: 65748 - RNA, 19 nt, Artificial Sequence
  Description of Artificial Sequence: Synthetic oligonucleotide
  Sense strand starting at position 2558 of SEQ ID NO: 813
guuaacagaguuugggaaa

SEQ ID NO: 65749 - RNA, 19 nt, Artificial Sequence
  Description of Artificial Sequence: Synthetic oligonucleotide
  Antisense strand to SEQ ID NO: 65668
uuucccaaacucuguuaac

SEQ ID NO: 65750 - RNA, 19 nt, Artificial Sequence
  Description of Artificial Sequence: Synthetic oligonucleotide
  Sense strand starting at position 2612 of SEQ ID NO: 813
gugccuaucccuuagaucu

SEQ ID NO: 65751 - RNA, 19 nt, Artificial Sequence
  Description of Artificial Sequence: Synthetic oligonucleotide
  Antisense strand to SEQ ID NO: 65670
agaucuaagggauaggcac

SEQ ID NO: 65752 - RNA, 19 nt, Artificial Sequence
  Description of Artificial Sequence: Synthetic oligonucleotide
  Sense strand starting at position 2628 of SEQ ID NO: 813
ucuuccuauuuguuuagua

SEQ ID NO: 65753 - RNA, 19 nt, Artificial Sequence
  Description of Artificial Sequence: Synthetic oligonucleotide
  Antisense strand to SEQ ID NO: 65672
uacuaaacaaauaggaaga

SEQ ID NO: 65754 - RNA, 19 nt, Artificial Sequence
  Description of Artificial Sequence: Synthetic oligonucleotide
  Sense strand starting at position 2632 of SEQ ID NO: 813
ccuauuuguuuaguaaugu

SEQ ID NO: 65755 - RNA, 19 nt, Artificial Sequence
  Description of Artificial Sequence: Synthetic oligonucleotide
  Antisense strand to SEQ ID NO: 65674
acauuacuaaacaaauagg

SEQ ID NO: 65756 - RNA, 19 nt, Artificial Sequence
  Description of Artificial Sequence: Synthetic oligonucleotide
  Sense strand starting at position 2643 of SEQ ID NO: 813
aguaaugucugauuaaaca

SEQ ID NO: 65757 - RNA, 19 nt, Artificial Sequence
  Description of Artificial Sequence: Synthetic oligonucleotide
  Antisense strand to SEQ ID NO: 65676
uguuuaaucagacauuacu

SEQ ID NO: 65758 - RNA, 19 nt, Artificial Sequence
  Description of Artificial Sequence: Synthetic oligonucleotide
  Sense strand starting at position 2917 of SEQ ID NO: 813
ccagguaaauguguuugaa

SEQ ID NO: 65759 - RNA, 19 nt, Artificial Sequence
  Description of Artificial Sequence: Synthetic oligonucleotide
  Antisense strand to SEQ ID NO: 65678
uucaaacacauuuaccugg

SEQ ID NO: 65760 - RNA, 19 nt, Artificial Sequence
  Description of Artificial Sequence: Synthetic oligonucleotide
  Sense strand starting at position 2919 of SEQ ID NO: 813
agguaaauguguuugaaac

SEQ ID NO: 65761 - RNA, 19 nt, Artificial Sequence
  Description of Artificial Sequence: Synthetic oligonucleotide
  Antisense strand to SEQ ID NO: 65680
guuucaaacacauuuaccu

SEQ ID NO: 65762 - RNA, 19 nt, Artificial Sequence
  Description of Artificial Sequence: Synthetic oligonucleotide
  Sense strand starting at position 2920 of SEQ ID NO: 813
gguaaauguguuugaaaca

SEQ ID NO: 65763 - RNA, 19 nt, Artificial Sequence
  Description of Artificial Sequence: Synthetic oligonucleotide
  Antisense strand to SEQ ID NO: 65682
uguuucaaacacauuuacc

SEQ ID NO: 65764 - RNA, 19 nt, Artificial Sequence
  Description of Artificial Sequence: Synthetic oligonucleotide
  Sense strand starting at position 3347 of SEQ ID NO: 813
auguauaaugauugcacau

SEQ ID NO: 65765 - RNA, 19 nt, Artificial Sequence
  Description of Artificial Sequence: Synthetic oligonucleotide
  Antisense strand to SEQ ID NO: 65684
augugcaaucauuauacau

SEQ ID NO: 65766 - RNA, 19 nt, Artificial Sequence
  Description of Artificial Sequence: Synthetic oligonucleotide
  Sense strand starting at position 3407 of SEQ ID NO: 813
gucuguguuacacagauaa

SEQ ID NO: 65767 - RNA, 19 nt, Artificial Sequence
  Description of Artificial Sequence: Synthetic oligonucleotide
  Antisense strand to SEQ ID NO: 65686
uuaucuguguaacacagac

SEQ ID NO: 65768 - RNA, 19 nt, Artificial Sequence
  Description of Artificial Sequence: Synthetic oligonucleotide
  Sense strand starting at position 3672 of SEQ ID NO: 813
aagugcaaugucuauaugu

SEQ ID NO: 65769 - RNA, 19 nt, Artificial Sequence
  Description of Artificial Sequence: Synthetic oligonucleotide
  Antisense strand to SEQ ID NO: 65688
acauauagacauugcacuu

SEQ ID NO: 65770 - RNA, 19 nt, Artificial Sequence
  Description of Artificial Sequence: Synthetic oligonucleotide
  Sense strand starting at position 3798 of SEQ ID NO: 813
gaggaaaugaguugcagau

SEQ ID NO: 65771 - RNA, 19 nt, Artificial Sequence
  Description of Artificial Sequence: Synthetic oligonucleotide
  Antisense strand to SEQ ID NO: 65690
aucugcaacucauuuccuc

SEQ ID NO: 65772 - RNA, 19 nt, Artificial Sequence
  Description of Artificial Sequence: Synthetic oligonucleotide
  Sense strand starting at position 3802 of SEQ ID NO: 813
aaaugaguugcagauguuu

SEQ ID NO: 65773 - RNA, 19 nt, Artificial Sequence
  Description of Artificial Sequence: Synthetic oligonucleotide
  Antisense strand to SEQ ID NO: 65692
aaacaucugcaacucauuu

SEQ ID NO: 65774 - RNA, 19 nt, Artificial Sequence
  Description of Artificial Sequence: Synthetic oligonucleotide
  Sense strand starting at position 3852 of SEQ ID NO: 813
aaguuaugacguuaguaga

SEQ ID NO: 65775 - RNA, 19 nt, Artificial Sequence
  Description of Artificial Sequence: Synthetic oligonucleotide
  Antisense strand to SEQ ID NO: 65694
ucuacuaacgucauaacuu

SEQ ID NO: 65776 - RNA, 19 nt, Artificial Sequence
  Description of Artificial Sequence: Synthetic oligonucleotide
  Sense strand starting at position 3967 of SEQ ID NO: 813
acauucuggagguagugau

SEQ ID NO: 65777 - RNA, 19 nt, Artificial Sequence
  Description of Artificial Sequence: Synthetic oligonucleotide
  Antisense strand to SEQ ID NO: 65696
aucacuaccuccagaaugu

SEQ ID NO: 65778 - RNA, 19 nt, Artificial Sequence
  Description of Artificial Sequence: Synthetic oligonucleotide
  Sense strand starting at position 3977 of SEQ ID NO: 813
gguagugauaagcauauga

SEQ ID NO: 65779 - RNA, 19 nt, Artificial Sequence
  Description of Artificial Sequence: Synthetic oligonucleotide
  Antisense strand to SEQ ID NO: 65698
ucauaugcuuaucacuacc

SEQ ID NO: 65780 - RNA, 19 nt, Artificial Sequence
  Description of Artificial Sequence: Synthetic oligonucleotide
  Sense strand starting at position 60 of SEQ ID NO: 814
aucuuaugauuugggauga

SEQ ID NO: 65781 - RNA, 19 nt, Artificial Sequence
  Description of Artificial Sequence: Synthetic oligonucleotide
  Antisense strand to SEQ ID NO: 65700
ucaucccaaaucauaagau

SEQ ID NO: 65782 - RNA, 19 nt, Artificial Sequence
  Description of Artificial Sequence: Synthetic oligonucleotide
  Sense strand starting at position 93 of SEQ ID NO: 814
agggaaugaaugugucuga

SEQ ID NO: 65783 - RNA, 19 nt, Artificial Sequence
  Description of Artificial Sequence: Synthetic oligonucleotide
  Antisense strand to SEQ ID NO: 65702
ucagacacauucauucccu

SEQ ID NO: 65784 - RNA, 19 nt, Artificial Sequence
  Description of Artificial Sequence: Synthetic oligonucleotide
  Sense strand starting at position 96 of SEQ ID NO: 814
gaaugaaugugucugagug

SEQ ID NO: 65785 - RNA, 19 nt, Artificial Sequence
  Description of Artificial Sequence: Synthetic oligonucleotide
  Antisense strand to SEQ ID NO: 65704
cacucagacacauucauuc

SEQ ID NO: 65786 - RNA, 19 nt, Artificial Sequence
  Description of Artificial Sequence: Synthetic oligonucleotide
  Sense strand starting at position 133 of SEQ ID NO: 814
ugacaauagcauuguauau

SEQ ID NO: 65787 - RNA, 19 nt, Artificial Sequence
  Description of Artificial Sequence: Synthetic oligonucleotide
  Antisense strand to SEQ ID NO: 65706
auauacaaugcuauuguca

SEQ ID NO: 65788 - RNA, 19 nt, Artificial Sequence
  Description of Artificial Sequence: Synthetic oligonucleotide
  Sense strand starting at position 185 of SEQ ID NO: 814
caaugucaucuggauagca

SEQ ID NO: 65789 - RNA, 19 nt, Artificial Sequence
  Description of Artificial Sequence: Synthetic oligonucleotide
  Antisense strand to SEQ ID NO: 65708
ugcuauccagaugacauug

SEQ ID NO: 65790 - RNA, 19 nt, Artificial Sequence
  Description of Artificial Sequence: Synthetic oligonucleotide
  Sense strand starting at position 187 of SEQ ID NO: 814
augucaucuggauagcauc

SEQ ID NO: 65791 - RNA, 19 nt, Artificial Sequence
  Description of Artificial Sequence: Synthetic oligonucleotide
  Antisense strand to SEQ ID NO: 65710
gaugcuauccagaugacau

SEQ ID NO: 65792 - RNA, 19 nt, Artificial Sequence
  Description of Artificial Sequence: Synthetic oligonucleotide
  Sense strand starting at position 295 of SEQ ID NO: 814
auaacuuaguguucuggga

SEQ ID NO: 65793 - RNA, 19 nt, Artificial Sequence
  Description of Artificial Sequence: Synthetic oligonucleotide
  Antisense strand to SEQ ID NO: 65712
ucccagaacacuaaguuau

SEQ ID NO: 65794 - RNA, 19 nt, Artificial Sequence
  Description of Artificial Sequence: Synthetic oligonucleotide
  Sense strand starting at position 309 of SEQ ID NO: 814
ugggaugcauucucccuaa

SEQ ID NO: 65795 - RNA, 19 nt, Artificial Sequence
  Description of Artificial Sequence: Synthetic oligonucleotide
  Antisense strand to SEQ ID NO: 65714
uuagggagaaugcauccca

SEQ ID NO: 65796 - RNA, 19 nt, Artificial Sequence
  Description of Artificial Sequence: Synthetic oligonucleotide
  Sense strand starting at position 330 of SEQ ID NO: 814
gcuugagcccuauaaccuu

SEQ ID NO: 65797 - RNA, 19 nt, Artificial Sequence
  Description of Artificial Sequence: Synthetic oligonucleotide
  Antisense strand to SEQ ID NO: 65716
aagguuauagggcucaagc

SEQ ID NO: 65798 - RNA, 19 nt, Artificial Sequence
  Description of Artificial Sequence: Synthetic oligonucleotide
  Sense strand starting at position 693 of SEQ ID NO: 814
auaugauucuaguuugggu

SEQ ID NO: 65799 - RNA, 19 nt, Artificial Sequence
  Description of Artificial Sequence: Synthetic oligonucleotide
  Antisense strand to SEQ ID NO: 65718
acccaaacuagaaucauau

SEQ ID NO: 65800 - RNA, 19 nt, Artificial Sequence
  Description of Artificial Sequence: Synthetic oligonucleotide
  Sense strand starting at position 720 of SEQ ID NO: 814
ugcauuuguauauguaguu

SEQ ID NO: 65801 - RNA, 19 nt, Artificial Sequence
  Description of Artificial Sequence: Synthetic oligonucleotide
  Antisense strand to SEQ ID NO: 65720
aacuacauauacaaaugca

SEQ ID NO: 65802 - RNA, 19 nt, Artificial Sequence
  Description of Artificial Sequence: Synthetic oligonucleotide
  Sense strand starting at position 765 of SEQ ID NO: 814
cauaguuucugguuugaau

SEQ ID NO: 65803 - RNA, 19 nt, Artificial Sequence
  Description of Artificial Sequence: Synthetic oligonucleotide
  Antisense strand to SEQ ID NO: 65722
auucaaaccagaaacuaug

SEQ ID NO: 65804 - RNA, 19 nt, Artificial Sequence
  Description of Artificial Sequence: Synthetic oligonucleotide
  Sense strand starting at position 918 of SEQ ID NO: 814
gagggauccaguugggcaa

SEQ ID NO: 65805 - RNA, 19 nt, Artificial Sequence
  Description of Artificial Sequence: Synthetic oligonucleotide
  Antisense strand to SEQ ID NO: 65724
uugcccaacuggaucccuc

SEQ ID NO: 65806 - RNA, 19 nt, Artificial Sequence
  Description of Artificial Sequence: Synthetic oligonucleotide
  Sense strand starting at position 1041 of SEQ ID NO: 814
gaauuaagucagggcuauu

SEQ ID NO: 65807 - RNA, 19 nt, Artificial Sequence
  Description of Artificial Sequence: Synthetic oligonucleotide
  Antisense strand to SEQ ID NO: 65726
aauagcccugacuuaauuc

SEQ ID NO: 65808 - RNA, 19 nt, Artificial Sequence
  Description of Artificial Sequence: Synthetic oligonucleotide
  Sense strand starting at position 1132 of SEQ ID NO: 814
cuucucucugggcaacauu

SEQ ID NO: 65809 - RNA, 19 nt, Artificial Sequence
  Description of Artificial Sequence: Synthetic oligonucleotide
  Antisense strand to SEQ ID NO: 65728
aauguugcccagagagaag

SEQ ID NO: 65810 - RNA, 19 nt, Artificial Sequence
  Description of Artificial Sequence: Synthetic oligonucleotide
  Sense strand starting at position 1252 of SEQ ID NO: 814
ugaaguucgagucaguuua

SEQ ID NO: 65811 - RNA, 19 nt, Artificial Sequence
  Description of Artificial Sequence: Synthetic oligonucleotide
  Antisense strand to SEQ ID NO: 65730
uaaacugacucgaacuuca

SEQ ID NO: 65812 - RNA, 19 nt, Artificial Sequence
  Description of Artificial Sequence: Synthetic oligonucleotide
  Sense strand starting at position 1260 of SEQ ID NO: 814
gagucaguuuaaucagauu

SEQ ID NO: 65813 - RNA, 19 nt, Artificial Sequence
  Description of Artificial Sequence: Synthetic oligonucleotide
  Antisense strand to SEQ ID NO: 65732
aaucugauuaaacugacuc

SEQ ID NO: 65814 - RNA, 19 nt, Artificial Sequence
  Description of Artificial Sequence: Synthetic oligonucleotide
  Sense strand starting at position 1292 of SEQ ID NO: 814
agguaacuuaaguggaaau

SEQ ID NO: 65815 - RNA, 19 nt, Artificial Sequence
  Description of Artificial Sequence: Synthetic oligonucleotide
  Antisense strand to SEQ ID NO: 65734
auuuccacuuaaguuaccu

SEQ ID NO: 65816 - RNA, 19 nt, Artificial Sequence
  Description of Artificial Sequence: Synthetic oligonucleotide
  Sense strand starting at position 1293 of SEQ ID NO: 814
gguaacuuaaguggaaauu

SEQ ID NO: 65817 - RNA, 19 nt, Artificial Sequence
  Description of Artificial Sequence: Synthetic oligonucleotide
  Antisense strand to SEQ ID NO: 65736
aauuuccacuuaaguuacc

SEQ ID NO: 65818 - RNA, 19 nt, Artificial Sequence
  Description of Artificial Sequence: Synthetic oligonucleotide
  Sense strand starting at position 1375 of SEQ ID NO: 814
uuaguuuagucaccacaca

SEQ ID NO: 65819 - RNA, 19 nt, Artificial Sequence
  Description of Artificial Sequence: Synthetic oligonucleotide
  Antisense strand to SEQ ID NO: 65738
uguguggugacuaaacuaa

SEQ ID NO: 65820 - RNA, 19 nt, Artificial Sequence
  Description of Artificial Sequence: Synthetic oligonucleotide
  Sense strand starting at position 1424 of SEQ ID NO: 814
acagcugguacuugaugaa

SEQ ID NO: 65821 - RNA, 19 nt, Artificial Sequence
  Description of Artificial Sequence: Synthetic oligonucleotide
  Antisense strand to SEQ ID NO: 65740
uucaucaaguaccagcugu

SEQ ID NO: 65822 - RNA, 19 nt, Artificial Sequence
  Description of Artificial Sequence: Synthetic oligonucleotide
  Sense strand starting at position 1478 of SEQ ID NO: 814
uuuacugaggucugauaua

SEQ ID NO: 65823 - RNA, 19 nt, Artificial Sequence
  Description of Artificial Sequence: Synthetic oligonucleotide
  Antisense strand to SEQ ID NO: 65742
uauaucagaccucaguaaa

SEQ ID NO: 65824 - RNA, 19 nt, Artificial Sequence
  Description of Artificial Sequence: Synthetic oligonucleotide
  Sense strand starting at position 1519 of SEQ ID NO: 814
cuauccuuuguagaauguu

SEQ ID NO: 65825 - RNA, 19 nt, Artificial Sequence
  Description of Artificial Sequence: Synthetic oligonucleotide
  Antisense strand to SEQ ID NO: 65744
aacauucuacaaaggauag

SEQ ID NO: 65826 - RNA, 19 nt, Artificial Sequence
  Description of Artificial Sequence: Synthetic oligonucleotide
  Sense strand starting at position 3410 of SEQ ID NO: 814
aaagaaagcugcuucgaug

SEQ ID NO: 65827 - RNA, 19 nt, Artificial Sequence
  Description of Artificial Sequence: Synthetic oligonucleotide
  Antisense strand to SEQ ID NO: 65746
caucgaagcagcuuucuuu

SEQ ID NO: 65828 - RNA, 19 nt, Artificial Sequence
  Description of Artificial Sequence: Synthetic oligonucleotide
  Sense strand starting at position 3416 of SEQ ID NO: 814
agcugcuucgaugagaacu

SEQ ID NO: 65829 - RNA, 19 nt, Artificial Sequence
  Description of Artificial Sequence: Synthetic oligonucleotide
  Antisense strand to SEQ ID NO: 65748
aguucucaucgaagcagcu

SEQ ID NO: 65830 - RNA, 19 nt, Artificial Sequence
  Description of Artificial Sequence: Synthetic oligonucleotide
  Sense strand starting at position 3429 of SEQ ID NO: 814
agaacuugcugaguucgaa

SEQ ID NO: 65831 - RNA, 19 nt, Artificial Sequence
  Description of Artificial Sequence: Synthetic oligonucleotide
  Antisense strand to SEQ ID NO: 65750
uucgaacucagcaaguucu

SEQ ID NO: 65832 - RNA, 19 nt, Artificial Sequence
  Description of Artificial Sequence: Synthetic oligonucleotide
  Sense strand starting at position 3593 of SEQ ID NO: 814
uugaaaguucucuguagga

SEQ ID NO: 65833 - RNA, 19 nt, Artificial Sequence
  Description of Artificial Sequence: Synthetic oligonucleotide
  Antisense strand to SEQ ID NO: 65752
uccuacagagaacuuucaa

SEQ ID NO: 65834 - RNA, 19 nt, Artificial Sequence
  Description of Artificial Sequence: Synthetic oligonucleotide
  Sense strand starting at position 3597 of SEQ ID NO: 814
aaguucucuguaggaaaua

SEQ ID NO: 65835 - RNA, 19 nt, Artificial Sequence
  Description of Artificial Sequence: Synthetic oligonucleotide
  Antisense strand to SEQ ID NO: 65754
uauuuccuacagagaacuu

SEQ ID NO: 65836 - RNA, 19 nt, Artificial Sequence
  Description of Artificial Sequence: Synthetic oligonucleotide
  Sense strand starting at position 3655 of SEQ ID NO: 814
aagggaauugcccaacugu

SEQ ID NO: 65837 - RNA, 19 nt, Artificial Sequence
  Description of Artificial Sequence: Synthetic oligonucleotide
  Antisense strand to SEQ ID NO: 65756
acaguugggcaauucccuu

SEQ ID NO: 65838 - RNA, 19 nt, Artificial Sequence
  Description of Artificial Sequence: Synthetic oligonucleotide
  Sense strand starting at position 3681 of SEQ ID NO: 814
uguagauaggcuggaugua

SEQ ID NO: 65839 - RNA, 19 nt, Artificial Sequence
  Description of Artificial Sequence: Synthetic oligonucleotide
  Antisense strand to SEQ ID NO: 65758
uacauccagccuaucuaca

SEQ ID NO: 65840 - RNA, 19 nt, Artificial Sequence
  Description of Artificial Sequence: Synthetic oligonucleotide
  Sense strand starting at position 3682 of SEQ ID NO: 814
guagauaggcuggauguau

SEQ ID NO: 65841 - RNA, 19 nt, Artificial Sequence
  Description of Artificial Sequence: Synthetic oligonucleotide
  Antisense strand to SEQ ID NO: 65760
auacauccagccuaucuac

SEQ ID NO: 65842 - RNA, 19 nt, Artificial Sequence
  Description of Artificial Sequence: Synthetic oligonucleotide
  Sense strand starting at position 3702 of SEQ ID NO: 814
ugaccugacuucuuugaaa

SEQ ID NO: 65843 - RNA, 19 nt, Artificial Sequence
  Description of Artificial Sequence: Synthetic oligonucleotide
  Antisense strand to SEQ ID NO: 65762
uuucaaagaagucagguca

SEQ ID NO: 65844 - RNA, 19 nt, Artificial Sequence
  Description of Artificial Sequence: Synthetic oligonucleotide
  Sense strand starting at position 3720 of SEQ ID NO: 814
acugcauguuuccuagaaa

SEQ ID NO: 65845 - RNA, 19 nt, Artificial Sequence
  Description of Artificial Sequence: Synthetic oligonucleotide
  Antisense strand to SEQ ID NO: 65764
uuucuaggaaacaugcagu

SEQ ID NO: 65846 - RNA, 19 nt, Artificial Sequence
  Description of Artificial Sequence: Synthetic oligonucleotide
  Sense strand starting at position 3723 of SEQ ID NO: 814
gcauguuuccuagaaacug

SEQ ID NO: 65847 - RNA, 19 nt, Artificial Sequence
  Description of Artificial Sequence: Synthetic oligonucleotide
  Antisense strand to SEQ ID NO: 65766
caguuucuaggaaacaugc

SEQ ID NO: 65848 - RNA, 19 nt, Artificial Sequence
  Description of Artificial Sequence: Synthetic oligonucleotide
  Sense strand starting at position 3778 of SEQ ID NO: 814
gcuuccauuguuguuguua

SEQ ID NO: 65849 - RNA, 19 nt, Artificial Sequence
  Description of Artificial Sequence: Synthetic oligonucleotide
  Antisense strand to SEQ ID NO: 65768
uaacaacaacaauggaagc

SEQ ID NO: 65850 - RNA, 19 nt, Artificial Sequence
  Description of Artificial Sequence: Synthetic oligonucleotide
  Sense strand starting at position 3802 of SEQ ID NO: 814
agagaaauuugagaucuuu

SEQ ID NO: 65851 - RNA, 19 nt, Artificial Sequence
  Description of Artificial Sequence: Synthetic oligonucleotide
  Antisense strand to SEQ ID NO: 65770
aaagaucucaaauuucucu

SEQ ID NO: 65852 - RNA, 19 nt, Artificial Sequence
  Description of Artificial Sequence: Synthetic oligonucleotide
  Sense strand starting at position 3857 of SEQ ID NO: 814
cuugaaauacguugacauu

SEQ ID NO: 65853 - RNA, 19 nt, Artificial Sequence
  Description of Artificial Sequence: Synthetic oligonucleotide
  Antisense strand to SEQ ID NO: 65772
aaugucaacguauuucaag

SEQ ID NO: 65854 - RNA, 19 nt, Artificial Sequence
  Description of Artificial Sequence: Synthetic oligonucleotide
  Sense strand starting at position 3858 of SEQ ID NO: 814
uugaaauacguugacauuc

SEQ ID NO: 65855 - RNA, 19 nt, Artificial Sequence
  Description of Artificial Sequence: Synthetic oligonucleotide
  Antisense strand to SEQ ID NO: 65774
gaaugucaacguauuucaa

SEQ ID NO: 65856 - RNA, 19 nt, Artificial Sequence
  Description of Artificial Sequence: Synthetic oligonucleotide
  Sense strand starting at position 3930 of SEQ ID NO: 814
auuguugugaaauguuaga

SEQ ID NO: 65857 - RNA, 19 nt, Artificial Sequence
  Description of Artificial Sequence: Synthetic oligonucleotide
  Antisense strand to SEQ ID NO: 65776
ucuaacauuucacaacaau

SEQ ID NO: 65858 - RNA, 19 nt, Artificial Sequence
  Description of Artificial Sequence: Synthetic oligonucleotide
  Sense strand starting at position 3961 of SEQ ID NO: 814
ggacuaaguuuauuacuuu

SEQ ID NO: 65859 - RNA, 19 nt, Artificial Sequence
  Description of Artificial Sequence: Synthetic oligonucleotide
  Antisense strand to SEQ ID NO: 65778
aaaguaauaaacuuagucc

SEQ ID NO: 65860 - RNA, 19 nt, Artificial Sequence
  Description of Artificial Sequence: Synthetic oligonucleotide
  Sense strand starting at position 3883 of SEQ ID NO: 815
gagggauuguucuuacuuu

SEQ ID NO: 65861 - RNA, 19 nt, Artificial Sequence
  Description of Artificial Sequence: Synthetic oligonucleotide
  Antisense strand to SEQ ID NO: 65780
aaaguaagaacaaucccuc

SEQ ID NO: 65862 - RNA, 19 nt, Artificial Sequence
  Description of Artificial Sequence: Synthetic oligonucleotide
  Sense strand starting at position 3845 of SEQ ID NO: 815
acuggcuagcuggaauaau

SEQ ID NO: 65863 - RNA, 19 nt, Artificial Sequence
  Description of Artificial Sequence: Synthetic oligonucleotide
  Antisense strand to SEQ ID NO: 65782
auuauuccagcuagccagu

SEQ ID NO: 65864 - RNA, 19 nt, Artificial Sequence
  Description of Artificial Sequence: Synthetic oligonucleotide
  Sense strand starting at position 3791 of SEQ ID NO: 815
aguaaaugucgagagcaac

SEQ ID NO: 65865 - RNA, 19 nt, Artificial Sequence
  Description of Artificial Sequence: Synthetic oligonucleotide
  Antisense strand to SEQ ID NO: 65784
guugcucucgacauuuacu

SEQ ID NO: 65866 - RNA, 19 nt, Artificial Sequence
  Description of Artificial Sequence: Synthetic oligonucleotide
  Sense strand starting at position 3789 of SEQ ID NO: 815
ggaguaaaugucgagagca

SEQ ID NO: 65867 - RNA, 19 nt, Artificial Sequence
  Description of Artificial Sequence: Synthetic oligonucleotide
  Antisense strand to SEQ ID NO: 65786
ugcucucgacauuuacucc

SEQ ID NO: 65868 - RNA, 19 nt, Artificial Sequence
  Description of Artificial Sequence: Synthetic oligonucleotide
  Sense strand starting at position 3701 of SEQ ID NO: 815
ucuagaguugagggugagu

SEQ ID NO: 65869 - RNA, 19 nt, Artificial Sequence
  Description of Artificial Sequence: Synthetic oligonucleotide
  Antisense strand to SEQ ID NO: 65788
acucacccucaacucuaga

SEQ ID NO: 65870 - RNA, 19 nt, Artificial Sequence
  Description of Artificial Sequence: Synthetic oligonucleotide
  Sense strand starting at position 3693 of SEQ ID NO: 815
uuaguaagucuagaguuga

SEQ ID NO: 65871 - RNA, 19 nt, Artificial Sequence
  Description of Artificial Sequence: Synthetic oligonucleotide
  Antisense strand to SEQ ID NO: 65790
ucaacucuagacuuacuaa

SEQ ID NO: 65872 - RNA, 19 nt, Artificial Sequence
  Description of Artificial Sequence: Synthetic oligonucleotide
  Sense strand starting at position 3678 of SEQ ID NO: 815
accagagacucugauuuag

SEQ ID NO: 65873 - RNA, 19 nt, Artificial Sequence
  Description of Artificial Sequence: Synthetic oligonucleotide
  Antisense strand to SEQ ID NO: 65792
cuaaaucagagucucuggu

SEQ ID NO: 65874 - RNA, 19 nt, Artificial Sequence
  Description of Artificial Sequence: Synthetic oligonucleotide
  Sense strand starting at position 3596 of SEQ ID NO: 815
agacuaaaccagugauucu

SEQ ID NO: 65875 - RNA, 19 nt, Artificial Sequence
  Description of Artificial Sequence: Synthetic oligonucleotide
  Antisense strand to SEQ ID NO: 65794
agaaucacugguuuagucu

SEQ ID NO: 65876 - RNA, 19 nt, Artificial Sequence
  Description of Artificial Sequence: Synthetic oligonucleotide
  Sense strand starting at position 3573 of SEQ ID NO: 815
ggaggccuccuuuagaugu

SEQ ID NO: 65877 - RNA, 19 nt, Artificial Sequence
  Description of Artificial Sequence: Synthetic oligonucleotide
  Antisense strand to SEQ ID NO: 65796
acaucuaaaggaggccucc

SEQ ID NO: 65878 - RNA, 19 nt, Artificial Sequence
  Description of Artificial Sequence: Synthetic oligonucleotide
  Sense strand starting at position 3547 of SEQ ID NO: 815
gcuugucuaaaguaaagag

SEQ ID NO: 65879 - RNA, 19 nt, Artificial Sequence
  Description of Artificial Sequence: Synthetic oligonucleotide
  Antisense strand to SEQ ID NO: 65798
cucuuuacuuuagacaagc

SEQ ID NO: 65880 - RNA, 19 nt, Artificial Sequence
  Description of Artificial Sequence: Synthetic oligonucleotide
  Sense strand starting at position 3541 of SEQ ID NO: 815
accagagcuugucuaaagu

SEQ ID NO: 65881 - RNA, 19 nt, Artificial Sequence
  Description of Artificial Sequence: Synthetic oligonucleotide
  Antisense strand to SEQ ID NO: 65800
acuuuagacaagcucuggu

SEQ ID NO: 65882 - RNA, 19 nt, Artificial Sequence
  Description of Artificial Sequence: Synthetic oligonucleotide
  Sense strand starting at position 3538 of SEQ ID NO: 815
aagaccagagcuugucuaa

SEQ ID NO: 65883 - RNA, 19 nt, Artificial Sequence
  Description of Artificial Sequence: Synthetic oligonucleotide
  Antisense strand to SEQ ID NO: 65802
uuagacaagcucuggucuu

SEQ ID NO: 65884 - RNA, 19 nt, Artificial Sequence
  Description of Artificial Sequence: Synthetic oligonucleotide
  Sense strand starting at position 3436 of SEQ ID NO: 815
aguuaaguggaguauugaa

SEQ ID NO: 65885 - RNA, 19 nt, Artificial Sequence
  Description of Artificial Sequence: Synthetic oligonucleotide
  Antisense strand to SEQ ID NO: 65804
uucaauacuccacuuaacu

SEQ ID NO: 65886 - RNA, 19 nt, Artificial Sequence
  Description of Artificial Sequence: Synthetic oligonucleotide
  Sense strand starting at position 3433 of SEQ ID NO: 815
aagaguuaaguggaguauu

SEQ ID NO: 65887 - RNA, 19 nt, Artificial Sequence
  Description of Artificial Sequence: Synthetic oligonucleotide
  Antisense strand to SEQ ID NO: 65806
aauacuccacuuaacucuu

SEQ ID NO: 65888 - RNA, 19 nt, Artificial Sequence
  Description of Artificial Sequence: Synthetic oligonucleotide
  Sense strand starting at position 3431 of SEQ ID NO: 815
caaagaguuaaguggagua

SEQ ID NO: 65889 - RNA, 19 nt, Artificial Sequence
  Description of Artificial Sequence: Synthetic oligonucleotide
  Antisense strand to SEQ ID NO: 65808
uacuccacuuaacucuuug

SEQ ID NO: 65890 - RNA, 19 nt, Artificial Sequence
  Description of Artificial Sequence: Synthetic oligonucleotide
  Sense strand starting at position 3384 of SEQ ID NO: 815
ugucaugaaugaucuuaaa

SEQ ID NO: 65891 - RNA, 19 nt, Artificial Sequence
  Description of Artificial Sequence: Synthetic oligonucleotide
  Antisense strand to SEQ ID NO: 65810
uuuaagaucauucaugaca

SEQ ID NO: 65892 - RNA, 19 nt, Artificial Sequence
  Description of Artificial Sequence: Synthetic oligonucleotide
  Sense strand starting at position 3375 of SEQ ID NO: 815
ugacuaauuugucaugaau

SEQ ID NO: 65893 - RNA, 19 nt, Artificial Sequence
  Description of Artificial Sequence: Synthetic oligonucleotide
  Antisense strand to SEQ ID NO: 65812
auucaugacaaauuaguca

SEQ ID NO: 65894 - RNA, 19 nt, Artificial Sequence
  Description of Artificial Sequence: Synthetic oligonucleotide
  Sense strand starting at position 2965 of SEQ ID NO: 815
gugguagacuaaucugaau

SEQ ID NO: 65895 - RNA, 19 nt, Artificial Sequence
  Description of Artificial Sequence: Synthetic oligonucleotide
  Antisense strand to SEQ ID NO: 65814
auucagauuagucuaccac

SEQ ID NO: 65896 - RNA, 19 nt, Artificial Sequence
  Description of Artificial Sequence: Synthetic oligonucleotide
  Sense strand starting at position 2959 of SEQ ID NO: 815
gggagugugguagacuaau

SEQ ID NO: 65897 - RNA, 19 nt, Artificial Sequence
  Description of Artificial Sequence: Synthetic oligonucleotide
  Antisense strand to SEQ ID NO: 65816
auuagucuaccacacuccc

SEQ ID NO: 65898 - RNA, 19 nt, Artificial Sequence
  Description of Artificial Sequence: Synthetic oligonucleotide
  Sense strand starting at position 2701 of SEQ ID NO: 815
cacaguuuccauugguuga

SEQ ID NO: 65899 - RNA, 19 nt, Artificial Sequence
  Description of Artificial Sequence: Synthetic oligonucleotide
  Antisense strand to SEQ ID NO: 65818
ucaaccaauggaaacugug

SEQ ID NO: 65900 - RNA, 19 nt, Artificial Sequence
  Description of Artificial Sequence: Synthetic oligonucleotide
  Sense strand starting at position 2670 of SEQ ID NO: 815
acccuugauguggacuauu

SEQ ID NO: 65901 - RNA, 19 nt, Artificial Sequence
  Description of Artificial Sequence: Synthetic oligonucleotide
  Antisense strand to SEQ ID NO: 65820
aauaguccacaucaagggu

SEQ ID NO: 65902 - RNA, 19 nt, Artificial Sequence
  Description of Artificial Sequence: Synthetic oligonucleotide
  Sense strand starting at position 2668 of SEQ ID NO: 815
ggacccuugauguggacua

SEQ ID NO: 65903 - RNA, 19 nt, Artificial Sequence
  Description of Artificial Sequence: Synthetic oligonucleotide
  Antisense strand to SEQ ID NO: 65822
uaguccacaucaagggucc

SEQ ID NO: 65904 - RNA, 19 nt, Artificial Sequence
  Description of Artificial Sequence: Synthetic oligonucleotide
  Sense strand starting at position 2264 of SEQ ID NO: 815
uuuguuagugaagaacuuu

SEQ ID NO: 65905 - RNA, 19 nt, Artificial Sequence
  Description of Artificial Sequence: Synthetic oligonucleotide
  Antisense strand to SEQ ID NO: 65824
aaaguucuucacuaacaaa

SEQ ID NO: 65906 - RNA, 19 nt, Artificial Sequence
  Description of Artificial Sequence: Synthetic oligonucleotide
  Sense strand starting at position 2238 of SEQ ID NO: 815
gugggaauucuugaguucu

SEQ ID NO: 65907 - RNA, 19 nt, Artificial Sequence
  Description of Artificial Sequence: Synthetic oligonucleotide
  Antisense strand to SEQ ID NO: 65826
agaacucaagaauucccac

SEQ ID NO: 65908 - RNA, 19 nt, Artificial Sequence
  Description of Artificial Sequence: Synthetic oligonucleotide
  Sense strand starting at position 2143 of SEQ ID NO: 815
uuaguuuccuaggcacaca

SEQ ID NO: 65909 - RNA, 19 nt, Artificial Sequence
  Description of Artificial Sequence: Synthetic oligonucleotide
  Antisense strand to SEQ ID NO: 65828
ugugugccuaggaaacuaa

SEQ ID NO: 65910 - RNA, 19 nt, Artificial Sequence
  Description of Artificial Sequence: Synthetic oligonucleotide
  Sense strand starting at position 1716 of SEQ ID NO: 815
ggaacuaaguugcauuuaa

SEQ ID NO: 65911 - RNA, 19 nt, Artificial Sequence
  Description of Artificial Sequence: Synthetic oligonucleotide
  Antisense strand to SEQ ID NO: 65830
uuaaaugcaacuuaguucc

SEQ ID NO: 65912 - RNA, 19 nt, Artificial Sequence
  Description of Artificial Sequence: Synthetic oligonucleotide
  Sense strand starting at position 1513 of SEQ ID NO: 815
cacugcuguccugaguuga

SEQ ID NO: 65913 - RNA, 19 nt, Artificial Sequence
  Description of Artificial Sequence: Synthetic oligonucleotide
  Antisense strand to SEQ ID NO: 65832
ucaacucaggacagcagug

SEQ ID NO: 65914 - RNA, 19 nt, Artificial Sequence
  Description of Artificial Sequence: Synthetic oligonucleotide
  Sense strand starting at position 1407 of SEQ ID NO: 815
cgguauaauugccuggaag

SEQ ID NO: 65915 - RNA, 19 nt, Artificial Sequence
  Description of Artificial Sequence: Synthetic oligonucleotide
  Antisense strand to SEQ ID NO: 65834
cuuccaggcaauuauaccg

SEQ ID NO: 65916 - RNA, 19 nt, Artificial Sequence
  Description of Artificial Sequence: Synthetic oligonucleotide
  Sense strand starting at position 1398 of SEQ ID NO: 815
ucucccuuccgguauaauu

SEQ ID NO: 65917 - RNA, 19 nt, Artificial Sequence
  Description of Artificial Sequence: Synthetic oligonucleotide
  Antisense strand to SEQ ID NO: 65836
aauuauaccggaagggaga

SEQ ID NO: 65918 - RNA, 19 nt, Artificial Sequence
  Description of Artificial Sequence: Synthetic oligonucleotide
  Sense strand starting at position 1310 of SEQ ID NO: 815
ggccuaaguuuauuucuac

SEQ ID NO: 65919 - RNA, 19 nt, Artificial Sequence
  Description of Artificial Sequence: Synthetic oligonucleotide
  Antisense strand to SEQ ID NO: 65838
guagaaauaaacuuaggcc

SEQ ID NO: 65920 - RNA, 19 nt, Artificial Sequence
  Description of Artificial Sequence: Synthetic oligonucleotide
  Sense strand starting at position 1290 of SEQ ID NO: 815
aauaaagaccagugaugug

SEQ ID NO: 65921 - RNA, 19 nt, Artificial Sequence
  Description of Artificial Sequence: Synthetic oligonucleotide
  Antisense strand to SEQ ID NO: 65840
cacaucacuggucuuuauu

SEQ ID NO: 65922 - RNA, 19 nt, Artificial Sequence
  Description of Artificial Sequence: Synthetic oligonucleotide
  Sense strand starting at position 1118 of SEQ ID NO: 815
cccagauucccaggccuaa

SEQ ID NO: 65923 - RNA, 19 nt, Artificial Sequence
  Description of Artificial Sequence: Synthetic oligonucleotide
  Antisense strand to SEQ ID NO: 65842
uuaggccugggaaucuggg

SEQ ID NO: 65924 - RNA, 19 nt, Artificial Sequence
  Description of Artificial Sequence: Synthetic oligonucleotide
  Sense strand starting at position 1092 of SEQ ID NO: 815
agaaucaacugagaggauu

SEQ ID NO: 65925 - RNA, 19 nt, Artificial Sequence
  Description of Artificial Sequence: Synthetic oligonucleotide
  Antisense strand to SEQ ID NO: 65844
aauccucucaguugauucu

SEQ ID NO: 65926 - RNA, 19 nt, Artificial Sequence
  Description of Artificial Sequence: Synthetic oligonucleotide
  Sense strand starting at position 709 of SEQ ID NO: 815
accugaucacucugaugau

SEQ ID NO: 65927 - RNA, 19 nt, Artificial Sequence
  Description of Artificial Sequence: Synthetic oligonucleotide
  Antisense strand to SEQ ID NO: 65846
aucaucagagugaucaggu

SEQ ID NO: 65928 - RNA, 19 nt, Artificial Sequence
  Description of Artificial Sequence: Synthetic oligonucleotide
  Sense strand starting at position 540 of SEQ ID NO: 815
aaggcagcucuaggaagau

SEQ ID NO: 65929 - RNA, 19 nt, Artificial Sequence
  Description of Artificial Sequence: Synthetic oligonucleotide
  Antisense strand to SEQ ID NO: 65848
aucuuccuagagcugccuu

SEQ ID NO: 65930 - RNA, 19 nt, Artificial Sequence
  Description of Artificial Sequence: Synthetic oligonucleotide
  Sense strand starting at position 513 of SEQ ID NO: 815
acagucccuucuuuaaagu

SEQ ID NO: 65931 - RNA, 19 nt, Artificial Sequence
  Description of Artificial Sequence: Synthetic oligonucleotide
  Antisense strand to SEQ ID NO: 65850
acuuuaaagaagggacugu

SEQ ID NO: 65932 - RNA, 19 nt, Artificial Sequence
  Description of Artificial Sequence: Synthetic oligonucleotide
  Sense strand starting at position 452 of SEQ ID NO: 815
agugaaaugcauuguaaug

SEQ ID NO: 65933 - RNA, 19 nt, Artificial Sequence
  Description of Artificial Sequence: Synthetic oligonucleotide
  Antisense strand to SEQ ID NO: 65852
cauuacaaugcauuucacu

SEQ ID NO: 65934 - RNA, 19 nt, Artificial Sequence
  Description of Artificial Sequence: Synthetic oligonucleotide
  Sense strand starting at position 215 of SEQ ID NO: 815
guugaauuaaauggagguu

SEQ ID NO: 65935 - RNA, 19 nt, Artificial Sequence
  Description of Artificial Sequence: Synthetic oligonucleotide
  Antisense strand to SEQ ID NO: 65854
aaccuccauuuaauucaac

SEQ ID NO: 65936 - RNA, 19 nt, Artificial Sequence
  Description of Artificial Sequence: Synthetic oligonucleotide
  Sense strand starting at position 214 of SEQ ID NO: 815
uguugaauuaaauggaggu

SEQ ID NO: 65937 - RNA, 19 nt, Artificial Sequence
  Description of Artificial Sequence: Synthetic oligonucleotide
  Antisense strand to SEQ ID NO: 65856
accuccauuuaauucaaca

SEQ ID NO: 65938 - RNA, 19 nt, Artificial Sequence
  Description of Artificial Sequence: Synthetic oligonucleotide
  Sense strand starting at position 101 of SEQ ID NO: 815
gggucugugaguuaaauca

SEQ ID NO: 65939 - RNA, 19 nt, Artificial Sequence
  Description of Artificial Sequence: Synthetic oligonucleotide
  Antisense strand to SEQ ID NO: 65858
ugauuuaacucacagaccc

SEQ ID NO: 65940 - RNA, 19 nt, Artificial Sequence
  Description of Artificial Sequence: Synthetic oligonucleotide
  Sense strand starting at position 61 of SEQ ID NO: 816
cuccuuuauguggauuaua

SEQ ID NO: 65941 - RNA, 19 nt, Artificial Sequence
  Description of Artificial Sequence: Synthetic oligonucleotide
  Antisense strand to SEQ ID NO: 65860
uauaauccacauaaaggag

SEQ ID NO: 65942 - RNA, 19 nt, Artificial Sequence
  Description of Artificial Sequence: Synthetic oligonucleotide
  Sense strand starting at position 207 of SEQ ID NO: 816
ggaguaauuucaggauaga

SEQ ID NO: 65943 - RNA, 19 nt, Artificial Sequence
  Description of Artificial Sequence: Synthetic oligonucleotide
  Antisense strand to SEQ ID NO: 65862
ucuauccugaaauuacucc

SEQ ID NO: 65944 - RNA, 19 nt, Artificial Sequence
  Description of Artificial Sequence: Synthetic oligonucleotide
  Sense strand starting at position 224 of SEQ ID NO: 816
gaguccuaccaacgggauu

SEQ ID NO: 65945 - RNA, 19 nt, Artificial Sequence
  Description of Artificial Sequence: Synthetic oligonucleotide
  Antisense strand to SEQ ID NO: 65864
aaucccguugguaggacuc

SEQ ID NO: 65946 - RNA, 19 nt, Artificial Sequence
  Description of Artificial Sequence: Synthetic oligonucleotide
  Sense strand starting at position 287 of SEQ ID NO: 816
aguuccucuccagaaaguu

SEQ ID NO: 65947 - RNA, 19 nt, Artificial Sequence
  Description of Artificial Sequence: Synthetic oligonucleotide
  Antisense strand to SEQ ID NO: 65866
aacuuucuggagaggaacu

SEQ ID NO: 65948 - RNA, 19 nt, Artificial Sequence
  Description of Artificial Sequence: Synthetic oligonucleotide
  Sense strand starting at position 297 of SEQ ID NO: 816
cagaaaguuguacaagguu

SEQ ID NO: 65949 - RNA, 19 nt, Artificial Sequence
  Description of Artificial Sequence: Synthetic oligonucleotide
  Antisense strand to SEQ ID NO: 65868
aaccuuguacaacuuucug

SEQ ID NO: 65950 - RNA, 19 nt, Artificial Sequence
  Description of Artificial Sequence: Synthetic oligonucleotide
  Sense strand starting at position 437 of SEQ ID NO: 816
agaucuuuggacugagcaa

SEQ ID NO: 65951 - RNA, 19 nt, Artificial Sequence
  Description of Artificial Sequence: Synthetic oligonucleotide
  Antisense strand to SEQ ID NO: 65870
uugcucaguccaaagaucu

SEQ ID NO: 65952 - RNA, 19 nt, Artificial Sequence
  Description of Artificial Sequence: Synthetic oligonucleotide
  Sense strand starting at position 468 of SEQ ID NO: 816
ugagcucauguauauagua

SEQ ID NO: 65953 - RNA, 19 nt, Artificial Sequence
  Description of Artificial Sequence: Synthetic oligonucleotide
  Antisense strand to SEQ ID NO: 65872
uacuauauacaugagcuca

SEQ ID NO: 65954 - RNA, 19 nt, Artificial Sequence
  Description of Artificial Sequence: Synthetic oligonucleotide
  Sense strand starting at position 503 of SEQ ID NO: 816
gggaaacauuguguuauac

SEQ ID NO: 65955 - RNA, 19 nt, Artificial Sequence
  Description of Artificial Sequence: Synthetic oligonucleotide
  Antisense strand to SEQ ID NO: 65874
guauaacacaauguuuccc

SEQ ID NO: 65956 - RNA, 19 nt, Artificial Sequence
  Description of Artificial Sequence: Synthetic oligonucleotide
  Sense strand starting at position 566 of SEQ ID NO: 816
ugguccugauuucuugcaa

SEQ ID NO: 65957 - RNA, 19 nt, Artificial Sequence
  Description of Artificial Sequence: Synthetic oligonucleotide
  Antisense strand to SEQ ID NO: 65876
uugcaagaaaucaggacca

SEQ ID NO: 65958 - RNA, 19 nt, Artificial Sequence
  Description of Artificial Sequence: Synthetic oligonucleotide
  Sense strand starting at position 701 of SEQ ID NO: 816
ugacacuuacucuguugau

SEQ ID NO: 65959 - RNA, 19 nt, Artificial Sequence
  Description of Artificial Sequence: Synthetic oligonucleotide
  Antisense strand to SEQ ID NO: 65878
aucaacagaguaaguguca

SEQ ID NO: 65960 - RNA, 19 nt, Artificial Sequence
  Description of Artificial Sequence: Synthetic oligonucleotide
  Sense strand starting at position 723 of SEQ ID NO: 816
ugacuugauuauguuaaca

SEQ ID NO: 65961 - RNA, 19 nt, Artificial Sequence
  Description of Artificial Sequence: Synthetic oligonucleotide
  Antisense strand to SEQ ID NO: 65880
uguuaacauaaucaaguca

SEQ ID NO: 65962 - RNA, 19 nt, Artificial Sequence
  Description of Artificial Sequence: Synthetic oligonucleotide
  Sense strand starting at position 880 of SEQ ID NO: 816
ugaucucugcuguauagag

SEQ ID NO: 65963 - RNA, 19 nt, Artificial Sequence
  Description of Artificial Sequence: Synthetic oligonucleotide
  Antisense strand to SEQ ID NO: 65882
cucuauacagcagagauca

SEQ ID NO: 65964 - RNA, 19 nt, Artificial Sequence
  Description of Artificial Sequence: Synthetic oligonucleotide
  Sense strand starting at position 889 of SEQ ID NO: 816
cuguauagagaguagcaua

SEQ ID NO: 65965 - RNA, 19 nt, Artificial Sequence
  Description of Artificial Sequence: Synthetic oligonucleotide
  Antisense strand to SEQ ID NO: 65884
uaugcuacucucuauacag

SEQ ID NO: 65966 - RNA, 19 nt, Artificial Sequence
  Description of Artificial Sequence: Synthetic oligonucleotide
  Sense strand starting at position 928 of SEQ ID NO: 816
aucuuuauccagggcuuga

SEQ ID NO: 65967 - RNA, 19 nt, Artificial Sequence
  Description of Artificial Sequence: Synthetic oligonucleotide
  Antisense strand to SEQ ID NO: 65886
ucaagcccuggauaaagau

SEQ ID NO: 65968 - RNA, 19 nt, Artificial Sequence
  Description of Artificial Sequence: Synthetic oligonucleotide
  Sense strand starting at position 932 of SEQ ID NO: 816
uuauccagggcuugauaaa

SEQ ID NO: 65969 - RNA, 19 nt, Artificial Sequence
  Description of Artificial Sequence: Synthetic oligonucleotide
  Antisense strand to SEQ ID NO: 65888
uuuaucaagcccuggauaa

SEQ ID NO: 65970 - RNA, 19 nt, Artificial Sequence
  Description of Artificial Sequence: Synthetic oligonucleotide
  Sense strand starting at position 1140 of SEQ ID NO: 816
auaauaaagagugguuugu

SEQ ID NO: 65971 - RNA, 19 nt, Artificial Sequence
  Description of Artificial Sequence: Synthetic oligonucleotide
  Antisense strand to SEQ ID NO: 65890
acaaaccacucuuuauuau

SEQ ID NO: 65972 - RNA, 19 nt, Artificial Sequence
  Description of Artificial Sequence: Synthetic oligonucleotide
  Sense strand starting at position 1142 of SEQ ID NO: 816
aauaaagagugguuuguuu

SEQ ID NO: 65973 - RNA, 19 nt, Artificial Sequence
  Description of Artificial Sequence: Synthetic oligonucleotide
  Antisense strand to SEQ ID NO: 65892
aaacaaaccacucuuuauu

SEQ ID NO: 65974 - RNA, 19 nt, Artificial Sequence
  Description of Artificial Sequence: Synthetic oligonucleotide
  Sense strand starting at position 1153 of SEQ ID NO: 816
guuuguuuccacuauagag

SEQ ID NO: 65975 - RNA, 19 nt, Artificial Sequence
  Description of Artificial Sequence: Synthetic oligonucleotide
  Antisense strand to SEQ ID NO: 65894
cucuauaguggaaacaaac

SEQ ID NO: 65976 - RNA, 19 nt, Artificial Sequence
  Description of Artificial Sequence: Synthetic oligonucleotide
  Sense strand starting at position 1155 of SEQ ID NO: 816
uuguuuccacuauagaguu

SEQ ID NO: 65977 - RNA, 19 nt, Artificial Sequence
  Description of Artificial Sequence: Synthetic oligonucleotide
  Antisense strand to SEQ ID NO: 65896
aacucuauaguggaaacaa

SEQ ID NO: 65978 - RNA, 19 nt, Artificial Sequence
  Description of Artificial Sequence: Synthetic oligonucleotide
  Sense strand starting at position 1162 of SEQ ID NO: 816
cacuauagaguugguuacu

SEQ ID NO: 65979 - RNA, 19 nt, Artificial Sequence
  Description of Artificial Sequence: Synthetic oligonucleotide
  Antisense strand to SEQ ID NO: 65898
aguaaccaacucuauagug

SEQ ID NO: 65980 - RNA, 19 nt, Artificial Sequence
  Description of Artificial Sequence: Synthetic oligonucleotide
  Sense strand starting at position 1163 of SEQ ID NO: 816
acuauagaguugguuacuu

SEQ ID NO: 65981 - RNA, 19 nt, Artificial Sequence
  Description of Artificial Sequence: Synthetic oligonucleotide
  Antisense strand to SEQ ID NO: 65900
aaguaaccaacucuauagu

SEQ ID NO: 65982 - RNA, 19 nt, Artificial Sequence
  Description of Artificial Sequence: Synthetic oligonucleotide
  Sense strand starting at position 1265 of SEQ ID NO: 816
uucugugaucaugacccau

SEQ ID NO: 65983 - RNA, 19 nt, Artificial Sequence
  Description of Artificial Sequence: Synthetic oligonucleotide
  Antisense strand to SEQ ID NO: 65902
augggucaugaucacagaa

SEQ ID NO: 65984 - RNA, 19 nt, Artificial Sequence
  Description of Artificial Sequence: Synthetic oligonucleotide
  Sense strand starting at position 1388 of SEQ ID NO: 816
gcgucuguccaauucugua

SEQ ID NO: 65985 - RNA, 19 nt, Artificial Sequence
  Description of Artificial Sequence: Synthetic oligonucleotide
  Antisense strand to SEQ ID NO: 65904
uacagaauuggacagacgc

SEQ ID NO: 65986 - RNA, 19 nt, Artificial Sequence
  Description of Artificial Sequence: Synthetic oligonucleotide
  Sense strand starting at position 1463 of SEQ ID NO: 816
guggcacaaagauguuaua

SEQ ID NO: 65987 - RNA, 19 nt, Artificial Sequence
  Description of Artificial Sequence: Synthetic oligonucleotide
  Antisense strand to SEQ ID NO: 65906
uauaacaucuuugugccac

SEQ ID NO: 65988 - RNA, 19 nt, Artificial Sequence
  Description of Artificial Sequence: Synthetic oligonucleotide
  Sense strand starting at position 1477 of SEQ ID NO: 816
uuauaagguccuggauuau

SEQ ID NO: 65989 - RNA, 19 nt, Artificial Sequence
  Description of Artificial Sequence: Synthetic oligonucleotide
  Antisense strand to SEQ ID NO: 65908
auaauccaggaccuuauaa

SEQ ID NO: 65990 - RNA, 19 nt, Artificial Sequence
  Description of Artificial Sequence: Synthetic oligonucleotide
  Sense strand starting at position 1554 of SEQ ID NO: 816
uauaaauguugggcccaau

SEQ ID NO: 65991 - RNA, 19 nt, Artificial Sequence
  Description of Artificial Sequence: Synthetic oligonucleotide
  Antisense strand to SEQ ID NO: 65910
auugggcccaacauuuaua

SEQ ID NO: 65992 - RNA, 19 nt, Artificial Sequence
  Description of Artificial Sequence: Synthetic oligonucleotide
  Sense strand starting at position 1585 of SEQ ID NO: 816
agagccuauuaggcagaua

SEQ ID NO: 65993 - RNA, 19 nt, Artificial Sequence
  Description of Artificial Sequence: Synthetic oligonucleotide
  Antisense strand to SEQ ID NO: 65912
uaucugccuaauaggcucu

SEQ ID NO: 65994 - RNA, 19 nt, Artificial Sequence
  Description of Artificial Sequence: Synthetic oligonucleotide
  Sense strand starting at position 1868 of SEQ ID NO: 816
gucauagucuuacccagag

SEQ ID NO: 65995 - RNA, 19 nt, Artificial Sequence
  Description of Artificial Sequence: Synthetic oligonucleotide
  Antisense strand to SEQ ID NO: 65914
cucuggguaagacuaugac

SEQ ID NO: 65996 - RNA, 19 nt, Artificial Sequence
  Description of Artificial Sequence: Synthetic oligonucleotide
  Sense strand starting at position 1872 of SEQ ID NO: 816
uagucuuacccagaguaga

SEQ ID NO: 65997 - RNA, 19 nt, Artificial Sequence
  Description of Artificial Sequence: Synthetic oligonucleotide
  Antisense strand to SEQ ID NO: 65916
ucuacucuggguaagacua

SEQ ID NO: 65998 - RNA, 19 nt, Artificial Sequence
  Description of Artificial Sequence: Synthetic oligonucleotide
  Sense strand starting at position 1893 of SEQ ID NO: 816
uccucuggacuugguaaga

SEQ ID NO: 65999 - RNA, 19 nt, Artificial Sequence
  Description of Artificial Sequence: Synthetic oligonucleotide
  Antisense strand to SEQ ID NO: 65918
ucuuaccaaguccagagga

SEQ ID NO: 66000 - RNA, 19 nt, Artificial Sequence
  Description of Artificial Sequence: Synthetic oligonucleotide
  Sense strand starting at position 2046 of SEQ ID NO: 816
uuuccagacuuucuagaga

SEQ ID NO: 66001 - RNA, 19 nt, Artificial Sequence
  Description of Artificial Sequence: Synthetic oligonucleotide
  Antisense strand to SEQ ID NO: 65920
ucucuagaaagucuggaaa

SEQ ID NO: 66002 - RNA, 19 nt, Artificial Sequence
  Description of Artificial Sequence: Synthetic oligonucleotide
  Sense strand starting at position 2171 of SEQ ID NO: 816
gugagaggauuugacauaa

SEQ ID NO: 66003 - RNA, 19 nt, Artificial Sequence
  Description of Artificial Sequence: Synthetic oligonucleotide
  Antisense strand to SEQ ID NO: 65922
uuaugucaaauccucucac

SEQ ID NO: 66004 - RNA, 19 nt, Artificial Sequence
  Description of Artificial Sequence: Synthetic oligonucleotide
  Sense strand starting at position 2238 of SEQ ID NO: 816
acagcuugcgauuauuaaa

SEQ ID NO: 66005 - RNA, 19 nt, Artificial Sequence
  Description of Artificial Sequence: Synthetic oligonucleotide
  Antisense strand to SEQ ID NO: 65924
uuuaauaaucgcaagcugu

SEQ ID NO: 66006 - RNA, 19 nt, Artificial Sequence
  Description of Artificial Sequence: Synthetic oligonucleotide
  Sense strand starting at position 2543 of SEQ ID NO: 816
agauuaucccauuguauuc

SEQ ID NO: 66007 - RNA, 19 nt, Artificial Sequence
  Description of Artificial Sequence: Synthetic oligonucleotide
  Antisense strand to SEQ ID NO: 65926
gaauacaaugggauaaucu

SEQ ID NO: 66008 - RNA, 19 nt, Artificial Sequence
  Description of Artificial Sequence: Synthetic oligonucleotide
  Sense strand starting at position 2782 of SEQ ID NO: 816
caagauaaagguuguuuau

SEQ ID NO: 66009 - RNA, 19 nt, Artificial Sequence
  Description of Artificial Sequence: Synthetic oligonucleotide
  Antisense strand to SEQ ID NO: 65928
auaaacaaccuuuaucuug

SEQ ID NO: 66010 - RNA, 19 nt, Artificial Sequence
  Description of Artificial Sequence: Synthetic oligonucleotide
  Sense strand starting at position 2840 of SEQ ID NO: 816
gguaauuaauaugucuaac

SEQ ID NO: 66011 - RNA, 19 nt, Artificial Sequence
  Description of Artificial Sequence: Synthetic oligonucleotide
  Antisense strand to SEQ ID NO: 65930
guuagacauauuaauuacc

SEQ ID NO: 66012 - RNA, 19 nt, Artificial Sequence
  Description of Artificial Sequence: Synthetic oligonucleotide
  Sense strand starting at position 2888 of SEQ ID NO: 816
caaguaauugagcgagauu

SEQ ID NO: 66013 - RNA, 19 nt, Artificial Sequence
  Description of Artificial Sequence: Synthetic oligonucleotide
  Antisense strand to SEQ ID NO: 65932
aaucucgcucaauuacuug

SEQ ID NO: 66014 - RNA, 19 nt, Artificial Sequence
  Description of Artificial Sequence: Synthetic oligonucleotide
  Sense strand starting at position 3065 of SEQ ID NO: 816
gaaaguaaggcaggguuau

SEQ ID NO: 66015 - RNA, 19 nt, Artificial Sequence
  Description of Artificial Sequence: Synthetic oligonucleotide
  Antisense strand to SEQ ID NO: 65934
auaacccugccuuacuuuc

SEQ ID NO: 66016 - RNA, 19 nt, Artificial Sequence
  Description of Artificial Sequence: Synthetic oligonucleotide
  Sense strand starting at position 3066 of SEQ ID NO: 816
aaaguaaggcaggguuauu

SEQ ID NO: 66017 - RNA, 19 nt, Artificial Sequence
  Description of Artificial Sequence: Synthetic oligonucleotide
  Antisense strand to SEQ ID NO: 65936
aauaacccugccuuacuuu

SEQ ID NO: 66018 - RNA, 19 nt, Artificial Sequence
  Description of Artificial Sequence: Synthetic oligonucleotide
  Sense strand starting at position 3561 of SEQ ID NO: 816
uagaguguuucuuuagaga

SEQ ID NO: 66019 - RNA, 19 nt, Artificial Sequence
  Description of Artificial Sequence: Synthetic oligonucleotide
  Antisense strand to SEQ ID NO: 65938
ucucuaaagaaacacucua

SEQ ID NO: 66020 - RNA, 19 nt, Artificial Sequence
  Description of Artificial Sequence: Synthetic oligonucleotide
  Sense strand starting at position 85 of SEQ ID NO: 817
gagucacuacuuuagagua

SEQ ID NO: 66021 - RNA, 19 nt, Artificial Sequence
  Description of Artificial Sequence: Synthetic oligonucleotide
  Antisense strand to SEQ ID NO: 65940
uacucuaaaguagugacuc

SEQ ID NO: 66022 - RNA, 19 nt, Artificial Sequence
  Description of Artificial Sequence: Synthetic oligonucleotide
  Sense strand starting at position 90 of SEQ ID NO: 817
acuacuuuagaguaugcua

SEQ ID NO: 66023 - RNA, 19 nt, Artificial Sequence
  Description of Artificial Sequence: Synthetic oligonucleotide
  Antisense strand to SEQ ID NO: 65942
uagcauacucuaaaguagu

SEQ ID NO: 66024 - RNA, 19 nt, Artificial Sequence
  Description of Artificial Sequence: Synthetic oligonucleotide
  Sense strand starting at position 105 of SEQ ID NO: 817
gcuauugugagauagguaa

SEQ ID NO: 66025 - RNA, 19 nt, Artificial Sequence
  Description of Artificial Sequence: Synthetic oligonucleotide
  Antisense strand to SEQ ID NO: 65944
uuaccuaucucacaauagc

SEQ ID NO: 66026 - RNA, 19 nt, Artificial Sequence
  Description of Artificial Sequence: Synthetic oligonucleotide
  Sense strand starting at position 195 of SEQ ID NO: 817
uuaagagucuauguaccga

SEQ ID NO: 66027 - RNA, 19 nt, Artificial Sequence
  Description of Artificial Sequence: Synthetic oligonucleotide
  Antisense strand to SEQ ID NO: 65946
ucgguacauagacucuuaa

SEQ ID NO: 66028 - RNA, 19 nt, Artificial Sequence
  Description of Artificial Sequence: Synthetic oligonucleotide
  Sense strand starting at position 224 of SEQ ID NO: 817
auuuaucugugggagaaac

SEQ ID NO: 66029 - RNA, 19 nt, Artificial Sequence
  Description of Artificial Sequence: Synthetic oligonucleotide
  Antisense strand to SEQ ID NO: 65948
guuucucccacagauaaau

SEQ ID NO: 66030 - RNA, 19 nt, Artificial Sequence
  Description of Artificial Sequence: Synthetic oligonucleotide
  Sense strand starting at position 246 of SEQ ID NO: 817
caaaguaggugguuuaaau

SEQ ID NO: 66031 - RNA, 19 nt, Artificial Sequence
  Description of Artificial Sequence: Synthetic oligonucleotide
  Antisense strand to SEQ ID NO: 65950
auuuaaaccaccuacuuug

SEQ ID NO: 66032 - RNA, 19 nt, Artificial Sequence
  Description of Artificial Sequence: Synthetic oligonucleotide
  Sense strand starting at position 345 of SEQ ID NO: 817
gaguucucaucucuugaug

SEQ ID NO: 66033 - RNA, 19 nt, Artificial Sequence
  Description of Artificial Sequence: Synthetic oligonucleotide
  Antisense strand to SEQ ID NO: 65952
caucaagagaugagaacuc

SEQ ID NO: 66034 - RNA, 19 nt, Artificial Sequence
  Description of Artificial Sequence: Synthetic oligonucleotide
  Sense strand starting at position 438 of SEQ ID NO: 817
gucuguuaccaacaucuca

SEQ ID NO: 66035 - RNA, 19 nt, Artificial Sequence
  Description of Artificial Sequence: Synthetic oligonucleotide
  Antisense strand to SEQ ID NO: 65954
ugagauguugguaacagac

SEQ ID NO: 66036 - RNA, 19 nt, Artificial Sequence
  Description of Artificial Sequence: Synthetic oligonucleotide
  Sense strand starting at position 549 of SEQ ID NO: 817
auuuaucuuucugauggaa

SEQ ID NO: 66037 - RNA, 19 nt, Artificial Sequence
  Description of Artificial Sequence: Synthetic oligonucleotide
  Antisense strand to SEQ ID NO: 65956
uuccaucagaaagauaaau

SEQ ID NO: 66038 - RNA, 19 nt, Artificial Sequence
  Description of Artificial Sequence: Synthetic oligonucleotide
  Sense strand starting at position 638 of SEQ ID NO: 817
ccugaugaggaagguguua

SEQ ID NO: 66039 - RNA, 19 nt, Artificial Sequence
  Description of Artificial Sequence: Synthetic oligonucleotide
  Antisense strand to SEQ ID NO: 65958
uaacaccuuccucaucagg

SEQ ID NO: 66040 - RNA, 19 nt, Artificial Sequence
  Description of Artificial Sequence: Synthetic oligonucleotide
  Sense strand starting at position 640 of SEQ ID NO: 817
ugaugaggaagguguuauu

SEQ ID NO: 66041 - RNA, 19 nt, Artificial Sequence
  Description of Artificial Sequence: Synthetic oligonucleotide
  Antisense strand to SEQ ID NO: 65960
aauaacaccuuccucauca

SEQ ID NO: 66042 - RNA, 19 nt, Artificial Sequence
  Description of Artificial Sequence: Synthetic oligonucleotide
  Sense strand starting at position 769 of SEQ ID NO: 817
ggaugacuauccgcucaga

SEQ ID NO: 66043 - RNA, 19 nt, Artificial Sequence
  Description of Artificial Sequence: Synthetic oligonucleotide
  Antisense strand to SEQ ID NO: 65962
ucugagcggauagucaucc

SEQ ID NO: 66044 - RNA, 19 nt, Artificial Sequence
  Description of Artificial Sequence: Synthetic oligonucleotide
  Sense strand starting at position 772 of SEQ ID NO: 817
ugacuauccgcucagaaau

SEQ ID NO: 66045 - RNA, 19 nt, Artificial Sequence
  Description of Artificial Sequence: Synthetic oligonucleotide
  Antisense strand to SEQ ID NO: 65964
auuucugagcggauaguca

SEQ ID NO: 66046 - RNA, 19 nt, Artificial Sequence
  Description of Artificial Sequence: Synthetic oligonucleotide
  Sense strand starting at position 802 of SEQ ID NO: 817
agguaacaaguuuguaauu

SEQ ID NO: 66047 - RNA, 19 nt, Artificial Sequence
  Description of Artificial Sequence: Synthetic oligonucleotide
  Antisense strand to SEQ ID NO: 65966
aauuacaaacuuguuaccu

SEQ ID NO: 66048 - RNA, 19 nt, Artificial Sequence
  Description of Artificial Sequence: Synthetic oligonucleotide
  Sense strand starting at position 807 of SEQ ID NO: 817
acaaguuuguaauuccaga

SEQ ID NO: 66049 - RNA, 19 nt, Artificial Sequence
  Description of Artificial Sequence: Synthetic oligonucleotide
  Antisense strand to SEQ ID NO: 65968
ucuggaauuacaaacuugu

SEQ ID NO: 66050 - RNA, 19 nt, Artificial Sequence
  Description of Artificial Sequence: Synthetic oligonucleotide
  Sense strand starting at position 1034 of SEQ ID NO: 817
auguguaaugacuaaaguc

SEQ ID NO: 66051 - RNA, 19 nt, Artificial Sequence
  Description of Artificial Sequence: Synthetic oligonucleotide
  Antisense strand to SEQ ID NO: 65970
gacuuuagucauuacacau

SEQ ID NO: 66052 - RNA, 19 nt, Artificial Sequence
  Description of Artificial Sequence: Synthetic oligonucleotide
  Sense strand starting at position 1118 of SEQ ID NO: 817
gucuaaugucaacauucua

SEQ ID NO: 66053 - RNA, 19 nt, Artificial Sequence
  Description of Artificial Sequence: Synthetic oligonucleotide
  Antisense strand to SEQ ID NO: 65972
uagaauguugacauuagac

SEQ ID NO: 66054 - RNA, 19 nt, Artificial Sequence
  Description of Artificial Sequence: Synthetic oligonucleotide
  Sense strand starting at position 1141 of SEQ ID NO: 817
uuagguguacuaugaauac

SEQ ID NO: 66055 - RNA, 19 nt, Artificial Sequence
  Description of Artificial Sequence: Synthetic oligonucleotide
  Antisense strand to SEQ ID NO: 65974
guauucauaguacaccuaa

SEQ ID NO: 66056 - RNA, 19 nt, Artificial Sequence
  Description of Artificial Sequence: Synthetic oligonucleotide
  Sense strand starting at position 1145 of SEQ ID NO: 817
guguacuaugaauacuacu

SEQ ID NO: 66057 - RNA, 19 nt, Artificial Sequence
  Description of Artificial Sequence: Synthetic oligonucleotide
  Antisense strand to SEQ ID NO: 65976
aguaguauucauaguacac

SEQ ID NO: 66058 - RNA, 19 nt, Artificial Sequence
  Description of Artificial Sequence: Synthetic oligonucleotide
  Sense strand starting at position 2008 of SEQ ID NO: 817
cagaaaucguagccgagaa

SEQ ID NO: 66059 - RNA, 19 nt, Artificial Sequence
  Description of Artificial Sequence: Synthetic oligonucleotide
  Antisense strand to SEQ ID NO: 65978
uucucggcuacgauuucug

SEQ ID NO: 66060 - RNA, 19 nt, Artificial Sequence
  Description of Artificial Sequence: Synthetic oligonucleotide
  Sense strand starting at position 2009 of SEQ ID NO: 817
agaaaucguagccgagaaa

SEQ ID NO: 66061 - RNA, 19 nt, Artificial Sequence
  Description of Artificial Sequence: Synthetic oligonucleotide
  Antisense strand to SEQ ID NO: 65980
uuucucggcuacgauuucu

SEQ ID NO: 66062 - RNA, 19 nt, Artificial Sequence
  Description of Artificial Sequence: Synthetic oligonucleotide
  Sense strand starting at position 2504 of SEQ ID NO: 817
ccguuaaaggucuauugau

SEQ ID NO: 66063 - RNA, 19 nt, Artificial Sequence
  Description of Artificial Sequence: Synthetic oligonucleotide
  Antisense strand to SEQ ID NO: 65982
aucaauagaccuuuaacgg

SEQ ID NO: 66064 - RNA, 19 nt, Artificial Sequence
  Description of Artificial Sequence: Synthetic oligonucleotide
  Sense strand starting at position 2543 of SEQ ID NO: 817
gugugaagucaacgaacaa

SEQ ID NO: 66065 - RNA, 19 nt, Artificial Sequence
  Description of Artificial Sequence: Synthetic oligonucleotide
  Antisense strand to SEQ ID NO: 65984
uuguucguugacuucacac

SEQ ID NO: 66066 - RNA, 19 nt, Artificial Sequence
  Description of Artificial Sequence: Synthetic oligonucleotide
  Sense strand starting at position 2652 of SEQ ID NO: 817
gcaguuauucuccagauga

SEQ ID NO: 66067 - RNA, 19 nt, Artificial Sequence
  Description of Artificial Sequence: Synthetic oligonucleotide
  Antisense strand to SEQ ID NO: 65986
ucaucuggagaauaacugc

SEQ ID NO: 66068 - RNA, 19 nt, Artificial Sequence
  Description of Artificial Sequence: Synthetic oligonucleotide
  Sense strand starting at position 2686 of SEQ ID NO: 817
gacacuugagccggugaga

SEQ ID NO: 66069 - RNA, 19 nt, Artificial Sequence
  Description of Artificial Sequence: Synthetic oligonucleotide
  Antisense strand to SEQ ID NO: 65988
ucucaccggcucaaguguc

SEQ ID NO: 66070 - RNA, 19 nt, Artificial Sequence
  Description of Artificial Sequence: Synthetic oligonucleotide
  Sense strand starting at position 2735 of SEQ ID NO: 817
agagguggucgagauuauu

SEQ ID NO: 66071 - RNA, 19 nt, Artificial Sequence
  Description of Artificial Sequence: Synthetic oligonucleotide
  Antisense strand to SEQ ID NO: 65990
aauaaucucgaccaccucu

SEQ ID NO: 66072 - RNA, 19 nt, Artificial Sequence
  Description of Artificial Sequence: Synthetic oligonucleotide
  Sense strand starting at position 2781 of SEQ ID NO: 817
guggacucgguauaaacau

SEQ ID NO: 66073 - RNA, 19 nt, Artificial Sequence
  Description of Artificial Sequence: Synthetic oligonucleotide
  Antisense strand to SEQ ID NO: 65992
auguuuauaccgaguccac

SEQ ID NO: 66074 - RNA, 19 nt, Artificial Sequence
  Description of Artificial Sequence: Synthetic oligonucleotide
  Sense strand starting at position 2836 of SEQ ID NO: 817
uucacauucguugagguga

SEQ ID NO: 66075 - RNA, 19 nt, Artificial Sequence
  Description of Artificial Sequence: Synthetic oligonucleotide
  Antisense strand to SEQ ID NO: 65994
ucaccucaacgaaugugaa

SEQ ID NO: 66076 - RNA, 19 nt, Artificial Sequence
  Description of Artificial Sequence: Synthetic oligonucleotide
  Sense strand starting at position 2876 of SEQ ID NO: 817
ugagauucucauuauaagc

SEQ ID NO: 66077 - RNA, 19 nt, Artificial Sequence
  Description of Artificial Sequence: Synthetic oligonucleotide
  Antisense strand to SEQ ID NO: 65996
gcuuauaaugagaaucuca

SEQ ID NO: 66078 - RNA, 19 nt, Artificial Sequence
  Description of Artificial Sequence: Synthetic oligonucleotide
  Sense strand starting at position 2896 of SEQ ID NO: 817
gggacaauauagcuauuga

SEQ ID NO: 66079 - RNA, 19 nt, Artificial Sequence
  Description of Artificial Sequence: Synthetic oligonucleotide
  Antisense strand to SEQ ID NO: 65998
ucaauagcuauauuguccc

SEQ ID NO: 66080 - RNA, 19 nt, Artificial Sequence
  Description of Artificial Sequence: Synthetic oligonucleotide
  Sense strand starting at position 2921 of SEQ ID NO: 817
agaugaaccaguugguaaa

SEQ ID NO: 66081 - RNA, 19 nt, Artificial Sequence
  Description of Artificial Sequence: Synthetic oligonucleotide
  Antisense strand to SEQ ID NO: 66000
uuuaccaacugguucaucu

SEQ ID NO: 66082 - RNA, 19 nt, Artificial Sequence
  Description of Artificial Sequence: Synthetic oligonucleotide
  Sense strand starting at position 2970 of SEQ ID NO: 817
aagaucuuucuaggaaguu

SEQ ID NO: 66083 - RNA, 19 nt, Artificial Sequence
  Description of Artificial Sequence: Synthetic oligonucleotide
  Antisense strand to SEQ ID NO: 66002
aacuuccuagaaagaucuu

SEQ ID NO: 66084 - RNA, 19 nt, Artificial Sequence
  Description of Artificial Sequence: Synthetic oligonucleotide
  Sense strand starting at position 2986 of SEQ ID NO: 817
guuagaaauugagccugau

SEQ ID NO: 66085 - RNA, 19 nt, Artificial Sequence
  Description of Artificial Sequence: Synthetic oligonucleotide
  Antisense strand to SEQ ID NO: 66004
aucaggcucaauuucuaac

SEQ ID NO: 66086 - RNA, 19 nt, Artificial Sequence
  Description of Artificial Sequence: Synthetic oligonucleotide
  Sense strand starting at position 2990 of SEQ ID NO: 817
gaaauugagccugauguug

SEQ ID NO: 66087 - RNA, 19 nt, Artificial Sequence
  Description of Artificial Sequence: Synthetic oligonucleotide
  Antisense strand to SEQ ID NO: 66006
caacaucaggcucaauuuc

SEQ ID NO: 66088 - RNA, 19 nt, Artificial Sequence
  Description of Artificial Sequence: Synthetic oligonucleotide
  Sense strand starting at position 2996 of SEQ ID NO: 817
gagccugauguugaguaaa

SEQ ID NO: 66089 - RNA, 19 nt, Artificial Sequence
  Description of Artificial Sequence: Synthetic oligonucleotide
  Antisense strand to SEQ ID NO: 66008
uuuacucaacaucaggcuc

SEQ ID NO: 66090 - RNA, 19 nt, Artificial Sequence
  Description of Artificial Sequence: Synthetic oligonucleotide
  Sense strand starting at position 2999 of SEQ ID NO: 817
ccugauguugaguaaauau

SEQ ID NO: 66091 - RNA, 19 nt, Artificial Sequence
  Description of Artificial Sequence: Synthetic oligonucleotide
  Antisense strand to SEQ ID NO: 66010
auauuuacucaacaucagg

SEQ ID NO: 66092 - RNA, 19 nt, Artificial Sequence
  Description of Artificial Sequence: Synthetic oligonucleotide
  Sense strand starting at position 3039 of SEQ ID NO: 817
guaagaguucauugaacga

SEQ ID NO: 66093 - RNA, 19 nt, Artificial Sequence
  Description of Artificial Sequence: Synthetic oligonucleotide
  Antisense strand to SEQ ID NO: 66012
ucguucaaugaacucuuac

SEQ ID NO: 66094 - RNA, 19 nt, Artificial Sequence
  Description of Artificial Sequence: Synthetic oligonucleotide
  Sense strand starting at position 3149 of SEQ ID NO: 817
uuugaugcacuguaacaua

SEQ ID NO: 66095 - RNA, 19 nt, Artificial Sequence
  Description of Artificial Sequence: Synthetic oligonucleotide
  Antisense strand to SEQ ID NO: 66014
uauguuacagugcaucaaa

SEQ ID NO: 66096 - RNA, 19 nt, Artificial Sequence
  Description of Artificial Sequence: Synthetic oligonucleotide
  Sense strand starting at position 3233 of SEQ ID NO: 817
cgauauaacuaucuucuga

SEQ ID NO: 66097 - RNA, 19 nt, Artificial Sequence
  Description of Artificial Sequence: Synthetic oligonucleotide
  Antisense strand to SEQ ID NO: 66016
ucagaagauaguuauaucg

SEQ ID NO: 66098 - RNA, 19 nt, Artificial Sequence
  Description of Artificial Sequence: Synthetic oligonucleotide
  Sense strand starting at position 3796 of SEQ ID NO: 817
augagaucgcuaggucaaa

SEQ ID NO: 66099 - RNA, 19 nt, Artificial Sequence
  Description of Artificial Sequence: Synthetic oligonucleotide
  Antisense strand to SEQ ID NO: 66018
uuugaccuagcgaucucau

SEQ ID NO: 66100 - RNA, 19 nt, Artificial Sequence
  Description of Artificial Sequence: Synthetic oligonucleotide
  Sense strand starting at position 3956 of SEQ ID NO: 820
cuccucaguucccuggaaa

SEQ ID NO: 66101 - RNA, 19 nt, Artificial Sequence
  Description of Artificial Sequence: Synthetic oligonucleotide
  Antisense strand to SEQ ID NO: 66020
uuuccagggaacugaggag

SEQ ID NO: 66102 - RNA, 19 nt, Artificial Sequence
  Description of Artificial Sequence: Synthetic oligonucleotide
  Sense strand starting at position 3890 of SEQ ID NO: 820
gccacugacugcucacuau

SEQ ID NO: 66103 - RNA, 19 nt, Artificial Sequence
  Description of Artificial Sequence: Synthetic oligonucleotide
  Antisense strand to SEQ ID NO: 66022
auagugagcagucaguggc

SEQ ID NO: 66104 - RNA, 19 nt, Artificial Sequence
  Description of Artificial Sequence: Synthetic oligonucleotide
  Sense strand starting at position 3801 of SEQ ID NO: 820
gucugucaccaaggaagua

SEQ ID NO: 66105 - RNA, 19 nt, Artificial Sequence
  Description of Artificial Sequence: Synthetic oligonucleotide
  Antisense strand to SEQ ID NO: 66024
uacuuccuuggugacagac

SEQ ID NO: 66106 - RNA, 19 nt, Artificial Sequence
  Description of Artificial Sequence: Synthetic oligonucleotide
  Sense strand starting at position 3778 of SEQ ID NO: 820
ccagaauuauaaguucugu

SEQ ID NO: 66107 - RNA, 19 nt, Artificial Sequence
  Description of Artificial Sequence: Synthetic oligonucleotide
  Antisense strand to SEQ ID NO: 66026
acagaacuuauaauucugg

SEQ ID NO: 66108 - RNA, 19 nt, Artificial Sequence
  Description of Artificial Sequence: Synthetic oligonucleotide
  Sense strand starting at position 3766 of SEQ ID NO: 820
agugcuggguuaccagaau

SEQ ID NO: 66109 - RNA, 19 nt, Artificial Sequence
  Description of Artificial Sequence: Synthetic oligonucleotide
  Antisense strand to SEQ ID NO: 66028
auucugguaacccagcacu

SEQ ID NO: 66110 - RNA, 19 nt, Artificial Sequence
  Description of Artificial Sequence: Synthetic oligonucleotide
  Sense strand starting at position 3693 of SEQ ID NO: 820
agcacauugugcucucuua

SEQ ID NO: 66111 - RNA, 19 nt, Artificial Sequence
  Description of Artificial Sequence: Synthetic oligonucleotide
  Antisense strand to SEQ ID NO: 66030
uaagagagcacaaugugcu

SEQ ID NO: 66112 - RNA, 19 nt, Artificial Sequence
  Description of Artificial Sequence: Synthetic oligonucleotide
  Sense strand starting at position 3667 of SEQ ID NO: 820
gccuaagagaguugggauc

SEQ ID NO: 66113 - RNA, 19 nt, Artificial Sequence
  Description of Artificial Sequence: Synthetic oligonucleotide
  Antisense strand to SEQ ID NO: 66032
gaucccaacucucuuaggc

SEQ ID NO: 66114 - RNA, 19 nt, Artificial Sequence
  Description of Artificial Sequence: Synthetic oligonucleotide
  Sense strand starting at position 3554 of SEQ ID NO: 820
guauguuaccucugggcga

SEQ ID NO: 66115 - RNA, 19 nt, Artificial Sequence
  Description of Artificial Sequence: Synthetic oligonucleotide
  Antisense strand to SEQ ID NO: 66034
ucgcccagagguaacauac

SEQ ID NO: 66116 - RNA, 19 nt, Artificial Sequence
  Description of Artificial Sequence: Synthetic oligonucleotide
  Sense strand starting at position 3546 of SEQ ID NO: 820
gacuuaacguauguuaccu

SEQ ID NO: 66117 - RNA, 19 nt, Artificial Sequence
  Description of Artificial Sequence: Synthetic oligonucleotide
  Antisense strand to SEQ ID NO: 66036
agguaacauacguuaaguc

SEQ ID NO: 66118 - RNA, 19 nt, Artificial Sequence
  Description of Artificial Sequence: Synthetic oligonucleotide
  Sense strand starting at position 3303 of SEQ ID NO: 820
gcuugaucucaggagaucu

SEQ ID NO: 66119 - RNA, 19 nt, Artificial Sequence
  Description of Artificial Sequence: Synthetic oligonucleotide
  Antisense strand to SEQ ID NO: 66038
agaucuccugagaucaagc

SEQ ID NO: 66120 - RNA, 19 nt, Artificial Sequence
  Description of Artificial Sequence: Synthetic oligonucleotide
  Sense strand starting at position 3294 of SEQ ID NO: 820
gagagaauugcuugaucuc

SEQ ID NO: 66121 - RNA, 19 nt, Artificial Sequence
  Description of Artificial Sequence: Synthetic oligonucleotide
  Antisense strand to SEQ ID NO: 66040
gagaucaagcaauucucuc

SEQ ID NO: 66122 - RNA, 19 nt, Artificial Sequence
  Description of Artificial Sequence: Synthetic oligonucleotide
  Sense strand starting at position 3004 of SEQ ID NO: 820
guuguuucuuagcucuuaa

SEQ ID NO: 66123 - RNA, 19 nt, Artificial Sequence
  Description of Artificial Sequence: Synthetic oligonucleotide
  Antisense strand to SEQ ID NO: 66042
uuaagagcuaagaaacaac

SEQ ID NO: 66124 - RNA, 19 nt, Artificial Sequence
  Description of Artificial Sequence: Synthetic oligonucleotide
  Sense strand starting at position 3003 of SEQ ID NO: 820
uguuguuucuuagcucuua

SEQ ID NO: 66125 - RNA, 19 nt, Artificial Sequence
  Description of Artificial Sequence: Synthetic oligonucleotide
  Antisense strand to SEQ ID NO: 66044
uaagagcuaagaaacaaca

SEQ ID NO: 66126 - RNA, 19 nt, Artificial Sequence
  Description of Artificial Sequence: Synthetic oligonucleotide
  Sense strand starting at position 2996 of SEQ ID NO: 820
cccaucuuguuguuucuua

SEQ ID NO: 66127 - RNA, 19 nt, Artificial Sequence
  Description of Artificial Sequence: Synthetic oligonucleotide
  Antisense strand to SEQ ID NO: 66046
uaagaaacaacaagauggg

SEQ ID NO: 66128 - RNA, 19 nt, Artificial Sequence
  Description of Artificial Sequence: Synthetic oligonucleotide
  Sense strand starting at position 2836 of SEQ ID NO: 820
gugcguugucuuugauucu

SEQ ID NO: 66129 - RNA, 19 nt, Artificial Sequence
  Description of Artificial Sequence: Synthetic oligonucleotide
  Antisense strand to SEQ ID NO: 66048
agaaucaaagacaacgcac

SEQ ID NO: 66130 - RNA, 19 nt, Artificial Sequence
  Description of Artificial Sequence: Synthetic oligonucleotide
  Sense strand starting at position 2834 of SEQ ID NO: 820
ccgugcguugucuuugauu

SEQ ID NO: 66131 - RNA, 19 nt, Artificial Sequence
  Description of Artificial Sequence: Synthetic oligonucleotide
  Antisense strand to SEQ ID NO: 66050
aaucaaagacaacgcacgg

SEQ ID NO: 66132 - RNA, 19 nt, Artificial Sequence
  Description of Artificial Sequence: Synthetic oligonucleotide
  Sense strand starting at position 2560 of SEQ ID NO: 820
cucuacugugccugucauu

SEQ ID NO: 66133 - RNA, 19 nt, Artificial Sequence
  Description of Artificial Sequence: Synthetic oligonucleotide
  Antisense strand to SEQ ID NO: 66052
aaugacaggcacaguagag

SEQ ID NO: 66134 - RNA, 19 nt, Artificial Sequence
  Description of Artificial Sequence: Synthetic oligonucleotide
  Sense strand starting at position 2423 of SEQ ID NO: 820
guauuuaucuugggcagaa

SEQ ID NO: 66135 - RNA, 19 nt, Artificial Sequence
  Description of Artificial Sequence: Synthetic oligonucleotide
  Antisense strand to SEQ ID NO: 66054
uucugcccaagauaaauac

SEQ ID NO: 66136 - RNA, 19 nt, Artificial Sequence
  Description of Artificial Sequence: Synthetic oligonucleotide
  Sense strand starting at position 2421 of SEQ ID NO: 820
guguauuuaucuugggcag

SEQ ID NO: 66137 - RNA, 19 nt, Artificial Sequence
  Description of Artificial Sequence: Synthetic oligonucleotide
  Antisense strand to SEQ ID NO: 66056
cugcccaagauaaauacac

SEQ ID NO: 66138 - RNA, 19 nt, Artificial Sequence
  Description of Artificial Sequence: Synthetic oligonucleotide
  Sense strand starting at position 2412 of SEQ ID NO: 820
guaggccugguguauuuau

SEQ ID NO: 66139 - RNA, 19 nt, Artificial Sequence
  Description of Artificial Sequence: Synthetic oligonucleotide
  Antisense strand to SEQ ID NO: 66058
auaaauacaccaggccuac

SEQ ID NO: 66140 - RNA, 19 nt, Artificial Sequence
  Description of Artificial Sequence: Synthetic oligonucleotide
  Sense strand starting at position 2408 of SEQ ID NO: 820
cauaguaggccugguguau

SEQ ID NO: 66141 - RNA, 19 nt, Artificial Sequence
  Description of Artificial Sequence: Synthetic oligonucleotide
  Antisense strand to SEQ ID NO: 66060
auacaccaggccuacuaug

SEQ ID NO: 66142 - RNA, 19 nt, Artificial Sequence
  Description of Artificial Sequence: Synthetic oligonucleotide
  Sense strand starting at position 2272 of SEQ ID NO: 820
gauacuucguuggaauuug

SEQ ID NO: 66143 - RNA, 19 nt, Artificial Sequence
  Description of Artificial Sequence: Synthetic oligonucleotide
  Antisense strand to SEQ ID NO: 66062
caaauuccaacgaaguauc

SEQ ID NO: 66144 - RNA, 19 nt, Artificial Sequence
  Description of Artificial Sequence: Synthetic oligonucleotide
  Sense strand starting at position 2270 of SEQ ID NO: 820
aagauacuucguuggaauu

SEQ ID NO: 66145 - RNA, 19 nt, Artificial Sequence
  Description of Artificial Sequence: Synthetic oligonucleotide
  Antisense strand to SEQ ID NO: 66064
aauuccaacgaaguaucuu

SEQ ID NO: 66146 - RNA, 19 nt, Artificial Sequence
  Description of Artificial Sequence: Synthetic oligonucleotide
  Sense strand starting at position 2269 of SEQ ID NO: 820
uaagauacuucguuggaau

SEQ ID NO: 66147 - RNA, 19 nt, Artificial Sequence
  Description of Artificial Sequence: Synthetic oligonucleotide
  Antisense strand to SEQ ID NO: 66066
auuccaacgaaguaucuua

SEQ ID NO: 66148 - RNA, 19 nt, Artificial Sequence
  Description of Artificial Sequence: Synthetic oligonucleotide
  Sense strand starting at position 2268 of SEQ ID NO: 820
auaagauacuucguuggaa

SEQ ID NO: 66149 - RNA, 19 nt, Artificial Sequence
  Description of Artificial Sequence: Synthetic oligonucleotide
  Antisense strand to SEQ ID NO: 66068
uuccaacgaaguaucuuau

SEQ ID NO: 66150 - RNA, 19 nt, Artificial Sequence
  Description of Artificial Sequence: Synthetic oligonucleotide
  Sense strand starting at position 2247 of SEQ ID NO: 820
gucucagggucaccuagaa

SEQ ID NO: 66151 - RNA, 19 nt, Artificial Sequence
  Description of Artificial Sequence: Synthetic oligonucleotide
  Antisense strand to SEQ ID NO: 66070
uucuaggugacccugagac

SEQ ID NO: 66152 - RNA, 19 nt, Artificial Sequence
  Description of Artificial Sequence: Synthetic oligonucleotide
  Sense strand starting at position 2039 of SEQ ID NO: 820
gcagaugggcuccaauguu

SEQ ID NO: 66153 - RNA, 19 nt, Artificial Sequence
  Description of Artificial Sequence: Synthetic oligonucleotide
  Antisense strand to SEQ ID NO: 66072
aacauuggagcccaucugc

SEQ ID NO: 66154 - RNA, 19 nt, Artificial Sequence
  Description of Artificial Sequence: Synthetic oligonucleotide
  Sense strand starting at position 1720 of SEQ ID NO: 820
cagugauaguaagauggua

SEQ ID NO: 66155 - RNA, 19 nt, Artificial Sequence
  Description of Artificial Sequence: Synthetic oligonucleotide
  Antisense strand to SEQ ID NO: 66074
uaccaucuuacuaucacug

SEQ ID NO: 66156 - RNA, 19 nt, Artificial Sequence
  Description of Artificial Sequence: Synthetic oligonucleotide
  Sense strand starting at position 1714 of SEQ ID NO: 820
augacucagugauaguaag

SEQ ID NO: 66157 - RNA, 19 nt, Artificial Sequence
  Description of Artificial Sequence: Synthetic oligonucleotide
  Antisense strand to SEQ ID NO: 66076
cuuacuaucacugagucau

SEQ ID NO: 66158 - RNA, 19 nt, Artificial Sequence
  Description of Artificial Sequence: Synthetic oligonucleotide
  Sense strand starting at position 1710 of SEQ ID NO: 820
agcuaugacucagugauag

SEQ ID NO: 66159 - RNA, 19 nt, Artificial Sequence
  Description of Artificial Sequence: Synthetic oligonucleotide
  Antisense strand to SEQ ID NO: 66078
cuaucacugagucauagcu

SEQ ID NO: 66160 - RNA, 19 nt, Artificial Sequence
  Description of Artificial Sequence: Synthetic oligonucleotide
  Sense strand starting at position 1553 of SEQ ID NO: 820
uaaagucugguauagcuaa

SEQ ID NO: 66161 - RNA, 19 nt, Artificial Sequence
  Description of Artificial Sequence: Synthetic oligonucleotide
  Antisense strand to SEQ ID NO: 66080
uuagcuauaccagacuuua

SEQ ID NO: 66162 - RNA, 19 nt, Artificial Sequence
  Description of Artificial Sequence: Synthetic oligonucleotide
  Sense strand starting at position 1551 of SEQ ID NO: 820
cauaaagucugguauagcu

SEQ ID NO: 66163 - RNA, 19 nt, Artificial Sequence
  Description of Artificial Sequence: Synthetic oligonucleotide
  Antisense strand to SEQ ID NO: 66082
agcuauaccagacuuuaug

SEQ ID NO: 66164 - RNA, 19 nt, Artificial Sequence
  Description of Artificial Sequence: Synthetic oligonucleotide
  Sense strand starting at position 1548 of SEQ ID NO: 820
augcauaaagucugguaua

SEQ ID NO: 66165 - RNA, 19 nt, Artificial Sequence
  Description of Artificial Sequence: Synthetic oligonucleotide
  Antisense strand to SEQ ID NO: 66084
uauaccagacuuuaugcau

SEQ ID NO: 66166 - RNA, 19 nt, Artificial Sequence
  Description of Artificial Sequence: Synthetic oligonucleotide
  Sense strand starting at position 1462 of SEQ ID NO: 820
guguauacaugcuuaacaa

SEQ ID NO: 66167 - RNA, 19 nt, Artificial Sequence
  Description of Artificial Sequence: Synthetic oligonucleotide
  Antisense strand to SEQ ID NO: 66086
uuguuaagcauguauacac

SEQ ID NO: 66168 - RNA, 19 nt, Artificial Sequence
  Description of Artificial Sequence: Synthetic oligonucleotide
  Sense strand starting at position 1420 of SEQ ID NO: 820
uguagaugguggguuaaua

SEQ ID NO: 66169 - RNA, 19 nt, Artificial Sequence
  Description of Artificial Sequence: Synthetic oligonucleotide
  Antisense strand to SEQ ID NO: 66088
uauuaacccaccaucuaca

SEQ ID NO: 66170 - RNA, 19 nt, Artificial Sequence
  Description of Artificial Sequence: Synthetic oligonucleotide
  Sense strand starting at position 1417 of SEQ ID NO: 820
uaauguagaugguggguua

SEQ ID NO: 66171 - RNA, 19 nt, Artificial Sequence
  Description of Artificial Sequence: Synthetic oligonucleotide
  Antisense strand to SEQ ID NO: 66090
uaacccaccaucuacauua

SEQ ID NO: 66172 - RNA, 19 nt, Artificial Sequence
  Description of Artificial Sequence: Synthetic oligonucleotide
  Sense strand starting at position 1312 of SEQ ID NO: 820
auaagugaacguugagaac

SEQ ID NO: 66173 - RNA, 19 nt, Artificial Sequence
  Description of Artificial Sequence: Synthetic oligonucleotide
  Antisense strand to SEQ ID NO: 66092
guucucaacguucacuuau

SEQ ID NO: 66174 - RNA, 19 nt, Artificial Sequence
  Description of Artificial Sequence: Synthetic oligonucleotide
  Sense strand starting at position 209 of SEQ ID NO: 820
ggaacagaaucagaaauaa

SEQ ID NO: 66175 - RNA, 19 nt, Artificial Sequence
  Description of Artificial Sequence: Synthetic oligonucleotide
  Antisense strand to SEQ ID NO: 66094
uuauuucugauucuguucc

SEQ ID NO: 66176 - RNA, 19 nt, Artificial Sequence
  Description of Artificial Sequence: Synthetic oligonucleotide
  Sense strand starting at position 83 of SEQ ID NO: 820
ccaagauguuucuaagcaa

SEQ ID NO: 66177 - RNA, 19 nt, Artificial Sequence
  Description of Artificial Sequence: Synthetic oligonucleotide
  Antisense strand to SEQ ID NO: 66096
uugcuuagaaacaucuugg

SEQ ID NO: 66178 - RNA, 19 nt, Artificial Sequence
  Description of Artificial Sequence: Synthetic oligonucleotide
  Sense strand starting at position 75 of SEQ ID NO: 820
ccaaaucgccaagauguuu

SEQ ID NO: 66179 - RNA, 19 nt, Artificial Sequence
  Description of Artificial Sequence: Synthetic oligonucleotide
  Antisense strand to SEQ ID NO: 66098
aaacaucuuggcgauuugg

SEQ ID NO: 66180 - RNA, 19 nt, Artificial Sequence
  Description of Artificial Sequence: Synthetic oligonucleotide
  Sense strand starting at position 3969 of SEQ ID NO: 818
guuguaucugcagaucuca

SEQ ID NO: 66181 - RNA, 19 nt, Artificial Sequence
  Description of Artificial Sequence: Synthetic oligonucleotide
  Antisense strand to SEQ ID NO: 66100
ugagaucugcagauacaac

SEQ ID NO: 66182 - RNA, 19 nt, Artificial Sequence
  Description of Artificial Sequence: Synthetic oligonucleotide
  Sense strand starting at position 3863 of SEQ ID NO: 818
caguuagaucuggaguuua

SEQ ID NO: 66183 - RNA, 19 nt, Artificial Sequence
  Description of Artificial Sequence: Synthetic oligonucleotide
  Antisense strand to SEQ ID NO: 66102
uaaacuccagaucuaacug

SEQ ID NO: 66184 - RNA, 19 nt, Artificial Sequence
  Description of Artificial Sequence: Synthetic oligonucleotide
  Sense strand starting at position 3826 of SEQ ID NO: 818
aaggguuacugucugauca

SEQ ID NO: 66185 - RNA, 19 nt, Artificial Sequence
  Description of Artificial Sequence: Synthetic oligonucleotide
  Antisense strand to SEQ ID NO: 66104
ugaucagacaguaacccuu

SEQ ID NO: 66186 - RNA, 19 nt, Artificial Sequence
  Description of Artificial Sequence: Synthetic oligonucleotide
  Sense strand starting at position 3710 of SEQ ID NO: 818
guguaaacagaggguuaca

SEQ ID NO: 66187 - RNA, 19 nt, Artificial Sequence
  Description of Artificial Sequence: Synthetic oligonucleotide
  Antisense strand to SEQ ID NO: 66106
uguaacccucuguuuacac

SEQ ID NO: 66188 - RNA, 19 nt, Artificial Sequence
  Description of Artificial Sequence: Synthetic oligonucleotide
  Sense strand starting at position 3626 of SEQ ID NO: 818
aaauguuggcuguacgaau

SEQ ID NO: 66189 - RNA, 19 nt, Artificial Sequence
  Description of Artificial Sequence: Synthetic oligonucleotide
  Antisense strand to SEQ ID NO: 66108
auucguacagccaacauuu

SEQ ID NO: 66190 - RNA, 19 nt, Artificial Sequence
  Description of Artificial Sequence: Synthetic oligonucleotide
  Sense strand starting at position 3568 of SEQ ID NO: 818
ucucgccuauaauuaagaa

SEQ ID NO: 66191 - RNA, 19 nt, Artificial Sequence
  Description of Artificial Sequence: Synthetic oligonucleotide
  Antisense strand to SEQ ID NO: 66110
uucuuaauuauaggcgaga

SEQ ID NO: 66192 - RNA, 19 nt, Artificial Sequence
  Description of Artificial Sequence: Synthetic oligonucleotide
  Sense strand starting at position 3565 of SEQ ID NO: 818
agaucucgccuauaauuaa

SEQ ID NO: 66193 - RNA, 19 nt, Artificial Sequence
  Description of Artificial Sequence: Synthetic oligonucleotide
  Antisense strand to SEQ ID NO: 66112
uuaauuauaggcgagaucu

SEQ ID NO: 66194 - RNA, 19 nt, Artificial Sequence
  Description of Artificial Sequence: Synthetic oligonucleotide
  Sense strand starting at position 3563 of SEQ ID NO: 818
auagaucucgccuauaauu

SEQ ID NO: 66195 - RNA, 19 nt, Artificial Sequence
  Description of Artificial Sequence: Synthetic oligonucleotide
  Antisense strand to SEQ ID NO: 66114
aauuauaggcgagaucuau

SEQ ID NO: 66196 - RNA, 19 nt, Artificial Sequence
  Description of Artificial Sequence: Synthetic oligonucleotide
  Sense strand starting at position 3468 of SEQ ID NO: 818
uaguaaguaugucuuauga

SEQ ID NO: 66197 - RNA, 19 nt, Artificial Sequence
  Description of Artificial Sequence: Synthetic oligonucleotide
  Antisense strand to SEQ ID NO: 66116
ucauaagacauacuuacua

SEQ ID NO: 66198 - RNA, 19 nt, Artificial Sequence
  Description of Artificial Sequence: Synthetic oligonucleotide
  Sense strand starting at position 3437 of SEQ ID NO: 818
uaaucaggaucauuguaga

SEQ ID NO: 66199 - RNA, 19 nt, Artificial Sequence
  Description of Artificial Sequence: Synthetic oligonucleotide
  Antisense strand to SEQ ID NO: 66118
ucuacaaugauccugauua

SEQ ID NO: 66200 - RNA, 19 nt, Artificial Sequence
  Description of Artificial Sequence: Synthetic oligonucleotide
  Sense strand starting at position 3419 of SEQ ID NO: 818
gagaucaguuaagcagaau

SEQ ID NO: 66201 - RNA, 19 nt, Artificial Sequence
  Description of Artificial Sequence: Synthetic oligonucleotide
  Antisense strand to SEQ ID NO: 66120
auucugcuuaacugaucuc

SEQ ID NO: 66202 - RNA, 19 nt, Artificial Sequence
  Description of Artificial Sequence: Synthetic oligonucleotide
  Sense strand starting at position 3265 of SEQ ID NO: 818
cucaaugauuagucugaca

SEQ ID NO: 66203 - RNA, 19 nt, Artificial Sequence
  Description of Artificial Sequence: Synthetic oligonucleotide
  Antisense strand to SEQ ID NO: 66122
ugucagacuaaucauugag

SEQ ID NO: 66204 - RNA, 19 nt, Artificial Sequence
  Description of Artificial Sequence: Synthetic oligonucleotide
  Sense strand starting at position 2825 of SEQ ID NO: 818
gaguuaacuggguagacuu

SEQ ID NO: 66205 - RNA, 19 nt, Artificial Sequence
  Description of Artificial Sequence: Synthetic oligonucleotide
  Antisense strand to SEQ ID NO: 66124
aagucuacccaguuaacuc

SEQ ID NO: 66206 - RNA, 19 nt, Artificial Sequence
  Description of Artificial Sequence: Synthetic oligonucleotide
  Sense strand starting at position 2824 of SEQ ID NO: 818
cgaguuaacuggguagacu

SEQ ID NO: 66207 - RNA, 19 nt, Artificial Sequence
  Description of Artificial Sequence: Synthetic oligonucleotide
  Antisense strand to SEQ ID NO: 66126
agucuacccaguuaacucg

SEQ ID NO: 66208 - RNA, 19 nt, Artificial Sequence
  Description of Artificial Sequence: Synthetic oligonucleotide
  Sense strand starting at position 2808 of SEQ ID NO: 818
cucugaucuagucaagcga

SEQ ID NO: 66209 - RNA, 19 nt, Artificial Sequence
  Description of Artificial Sequence: Synthetic oligonucleotide
  Antisense strand to SEQ ID NO: 66128
ucgcuugacuagaucagag

SEQ ID NO: 66210 - RNA, 19 nt, Artificial Sequence
  Description of Artificial Sequence: Synthetic oligonucleotide
  Sense strand starting at position 2759 of SEQ ID NO: 818
uaaagauauuugugaagag

SEQ ID NO: 66211 - RNA, 19 nt, Artificial Sequence
  Description of Artificial Sequence: Synthetic oligonucleotide
  Antisense strand to SEQ ID NO: 66130
cucuucacaaauaucuuua

SEQ ID NO: 66212 - RNA, 19 nt, Artificial Sequence
  Description of Artificial Sequence: Synthetic oligonucleotide
  Sense strand starting at position 2746 of SEQ ID NO: 818
gcaagacguuaaguaaaga

SEQ ID NO: 66213 - RNA, 19 nt, Artificial Sequence
  Description of Artificial Sequence: Synthetic oligonucleotide
  Antisense strand to SEQ ID NO: 66132
ucuuuacuuaacgucuugc

SEQ ID NO: 66214 - RNA, 19 nt, Artificial Sequence
  Description of Artificial Sequence: Synthetic oligonucleotide
  Sense strand starting at position 2743 of SEQ ID NO: 818
agggcaagacguuaaguaa

SEQ ID NO: 66215 - RNA, 19 nt, Artificial Sequence
  Description of Artificial Sequence: Synthetic oligonucleotide
  Antisense strand to SEQ ID NO: 66134
uuacuuaacgucuugcccu

SEQ ID NO: 66216 - RNA, 19 nt, Artificial Sequence
  Description of Artificial Sequence: Synthetic oligonucleotide
  Sense strand starting at position 2625 of SEQ ID NO: 818
acaggcugcagugauuaga

SEQ ID NO: 66217 - RNA, 19 nt, Artificial Sequence
  Description of Artificial Sequence: Synthetic oligonucleotide
  Antisense strand to SEQ ID NO: 66136
ucuaaucacugcagccugu

SEQ ID NO: 66218 - RNA, 19 nt, Artificial Sequence
  Description of Artificial Sequence: Synthetic oligonucleotide
  Sense strand starting at position 2357 of SEQ ID NO: 818
uuaacuagcacuugggaga

SEQ ID NO: 66219 - RNA, 19 nt, Artificial Sequence
  Description of Artificial Sequence: Synthetic oligonucleotide
  Antisense strand to SEQ ID NO: 66138
ucucccaagugcuaguuaa

SEQ ID NO: 66220 - RNA, 19 nt, Artificial Sequence
  Description of Artificial Sequence: Synthetic oligonucleotide
  Sense strand starting at position 1777 of SEQ ID NO: 818
caguguuguccugaagaga

SEQ ID NO: 66221 - RNA, 19 nt, Artificial Sequence
  Description of Artificial Sequence: Synthetic oligonucleotide
  Antisense strand to SEQ ID NO: 66140
ucucuucaggacaacacug

SEQ ID NO: 66222 - RNA, 19 nt, Artificial Sequence
  Description of Artificial Sequence: Synthetic oligonucleotide
  Sense strand starting at position 1755 of SEQ ID NO: 818
auuauuaauggaugccauu

SEQ ID NO: 66223 - RNA, 19 nt, Artificial Sequence
  Description of Artificial Sequence: Synthetic oligonucleotide
  Antisense strand to SEQ ID NO: 66142
aauggcauccauuaauaau

SEQ ID NO: 66224 - RNA, 19 nt, Artificial Sequence
  Description of Artificial Sequence: Synthetic oligonucleotide
  Sense strand starting at position 1241 of SEQ ID NO: 818
ugcaauuaacuuugaagga

SEQ ID NO: 66225 - RNA, 19 nt, Artificial Sequence
  Description of Artificial Sequence: Synthetic oligonucleotide
  Antisense strand to SEQ ID NO: 66144
uccuucaaaguuaauugca

SEQ ID NO: 66226 - RNA, 19 nt, Artificial Sequence
  Description of Artificial Sequence: Synthetic oligonucleotide
  Sense strand starting at position 1105 of SEQ ID NO: 818
gacauuaccgcucagugga

SEQ ID NO: 66227 - RNA, 19 nt, Artificial Sequence
  Description of Artificial Sequence: Synthetic oligonucleotide
  Antisense strand to SEQ ID NO: 66146
uccacugagcgguaauguc

SEQ ID NO: 66228 - RNA, 19 nt, Artificial Sequence
  Description of Artificial Sequence: Synthetic oligonucleotide
  Sense strand starting at position 1087 of SEQ ID NO: 818
ucuuguaucugaucuaaug

SEQ ID NO: 66229 - RNA, 19 nt, Artificial Sequence
  Description of Artificial Sequence: Synthetic oligonucleotide
  Antisense strand to SEQ ID NO: 66148
cauuagaucagauacaaga

SEQ ID NO: 66230 - RNA, 19 nt, Artificial Sequence
  Description of Artificial Sequence: Synthetic oligonucleotide
  Sense strand starting at position 944 of SEQ ID NO: 818
cagguaacagccugaggaa

SEQ ID NO: 66231 - RNA, 19 nt, Artificial Sequence
  Description of Artificial Sequence: Synthetic oligonucleotide
  Antisense strand to SEQ ID NO: 66150
uuccucaggcuguuaccug

SEQ ID NO: 66232 - RNA, 19 nt, Artificial Sequence
  Description of Artificial Sequence: Synthetic oligonucleotide
  Sense strand starting at position 900 of SEQ ID NO: 818
ugcucuuaggcagauacau

SEQ ID NO: 66233 - RNA, 19 nt, Artificial Sequence
  Description of Artificial Sequence: Synthetic oligonucleotide
  Antisense strand to SEQ ID NO: 66152
auguaucugccuaagagca

SEQ ID NO: 66234 - RNA, 19 nt, Artificial Sequence
  Description of Artificial Sequence: Synthetic oligonucleotide
  Sense strand starting at position 897 of SEQ ID NO: 818
cacugcucuuaggcagaua

SEQ ID NO: 66235 - RNA, 19 nt, Artificial Sequence
  Description of Artificial Sequence: Synthetic oligonucleotide
  Antisense strand to SEQ ID NO: 66154
uaucugccuaagagcagug

SEQ ID NO: 66236 - RNA, 19 nt, Artificial Sequence
  Description of Artificial Sequence: Synthetic oligonucleotide
  Sense strand starting at position 857 of SEQ ID NO: 818
ugauguuguaagugacaua

SEQ ID NO: 66237 - RNA, 19 nt, Artificial Sequence
  Description of Artificial Sequence: Synthetic oligonucleotide
  Antisense strand to SEQ ID NO: 66156
uaugucacuuacaacauca

SEQ ID NO: 66238 - RNA, 19 nt, Artificial Sequence
  Description of Artificial Sequence: Synthetic oligonucleotide
  Sense strand starting at position 724 of SEQ ID NO: 818
uuuauaucgguguaagaaa

SEQ ID NO: 66239 - RNA, 19 nt, Artificial Sequence
  Description of Artificial Sequence: Synthetic oligonucleotide
  Antisense strand to SEQ ID NO: 66158
uuucuuacaccgauauaaa

SEQ ID NO: 66240 - RNA, 19 nt, Artificial Sequence
  Description of Artificial Sequence: Synthetic oligonucleotide
  Sense strand starting at position 675 of SEQ ID NO: 818
uuggaagcuuguuccaaca

SEQ ID NO: 66241 - RNA, 19 nt, Artificial Sequence
  Description of Artificial Sequence: Synthetic oligonucleotide
  Antisense strand to SEQ ID NO: 66160
uguuggaacaagcuuccaa

SEQ ID NO: 66242 - RNA, 19 nt, Artificial Sequence
  Description of Artificial Sequence: Synthetic oligonucleotide
  Sense strand starting at position 662 of SEQ ID NO: 818
acauauggguugcuuggaa

SEQ ID NO: 66243 - RNA, 19 nt, Artificial Sequence
  Description of Artificial Sequence: Synthetic oligonucleotide
  Antisense strand to SEQ ID NO: 66162
uuccaagcaacccauaugu

SEQ ID NO: 66244 - RNA, 19 nt, Artificial Sequence
  Description of Artificial Sequence: Synthetic oligonucleotide
  Sense strand starting at position 564 of SEQ ID NO: 818
gugauuuccuugcucuaca

SEQ ID NO: 66245 - RNA, 19 nt, Artificial Sequence
  Description of Artificial Sequence: Synthetic oligonucleotide
  Antisense strand to SEQ ID NO: 66164
uguagagcaaggaaaucac

SEQ ID NO: 66246 - RNA, 19 nt, Artificial Sequence
  Description of Artificial Sequence: Synthetic oligonucleotide
  Sense strand starting at position 562 of SEQ ID NO: 818
cugugauuuccuugcucua

SEQ ID NO: 66247 - RNA, 19 nt, Artificial Sequence
  Description of Artificial Sequence: Synthetic oligonucleotide
  Antisense strand to SEQ ID NO: 66166
uagagcaaggaaaucacag

SEQ ID NO: 66248 - RNA, 19 nt, Artificial Sequence
  Description of Artificial Sequence: Synthetic oligonucleotide
  Sense strand starting at position 254 of SEQ ID NO: 818
ccuagucacguugacacaa

SEQ ID NO: 66249 - RNA, 19 nt, Artificial Sequence
  Description of Artificial Sequence: Synthetic oligonucleotide
  Antisense strand to SEQ ID NO: 66168
uugugucaacgugacuagg

SEQ ID NO: 66250 - RNA, 19 nt, Artificial Sequence
  Description of Artificial Sequence: Synthetic oligonucleotide
  Sense strand starting at position 221 of SEQ ID NO: 818
acugguguuuaaccaaaua

SEQ ID NO: 66251 - RNA, 19 nt, Artificial Sequence
  Description of Artificial Sequence: Synthetic oligonucleotide
  Antisense strand to SEQ ID NO: 66170
uauuugguuaaacaccagu

SEQ ID NO: 66252 - RNA, 19 nt, Artificial Sequence
  Description of Artificial Sequence: Synthetic oligonucleotide
  Sense strand starting at position 218 of SEQ ID NO: 818
cagacugguguuuaaccaa

SEQ ID NO: 66253 - RNA, 19 nt, Artificial Sequence
  Description of Artificial Sequence: Synthetic oligonucleotide
  Antisense strand to SEQ ID NO: 66172
uugguuaaacaccagucug

SEQ ID NO: 66254 - RNA, 19 nt, Artificial Sequence
  Description of Artificial Sequence: Synthetic oligonucleotide
  Sense strand starting at position 177 of SEQ ID NO: 818
auguuaaugucaucugaaa

SEQ ID NO: 66255 - RNA, 19 nt, Artificial Sequence
  Description of Artificial Sequence: Synthetic oligonucleotide
  Antisense strand to SEQ ID NO: 66174
uuucagaugacauuaacau

SEQ ID NO: 66256 - RNA, 19 nt, Artificial Sequence
  Description of Artificial Sequence: Synthetic oligonucleotide
  Sense strand starting at position 136 of SEQ ID NO: 818
cauggaggguaaucuacuu

SEQ ID NO: 66257 - RNA, 19 nt, Artificial Sequence
  Description of Artificial Sequence: Synthetic oligonucleotide
  Antisense strand to SEQ ID NO: 66176
aaguagauuacccuccaug

SEQ ID NO: 66258 - RNA, 19 nt, Artificial Sequence
  Description of Artificial Sequence: Synthetic oligonucleotide
  Sense strand starting at position 41 of SEQ ID NO: 818
cuugaaagcagauguaaga

SEQ ID NO: 66259 - RNA, 19 nt, Artificial Sequence
  Description of Artificial Sequence: Synthetic oligonucleotide
  Antisense strand to SEQ ID NO: 66178
ucuuacaucugcuuucaag

SEQ ID NO: 66260 - RNA, 19 nt, Artificial Sequence
  Description of Artificial Sequence: Synthetic oligonucleotide
  Sense strand starting at position 3824 of SEQ ID NO: 819
uucucaaugccauguagaa

SEQ ID NO: 66261 - RNA, 19 nt, Artificial Sequence
  Description of Artificial Sequence: Synthetic oligonucleotide
  Antisense strand to SEQ ID NO: 66180
uucuacauggcauugagaa

SEQ ID NO: 66262 - RNA, 19 nt, Artificial Sequence
  Description of Artificial Sequence: Synthetic oligonucleotide
  Sense strand starting at position 3751 of SEQ ID NO: 819
guauccugccauuauuaug

SEQ ID NO: 66263 - RNA, 19 nt, Artificial Sequence
  Description of Artificial Sequence: Synthetic oligonucleotide
  Antisense strand to SEQ ID NO: 66182
cauaauaauggcaggauac

SEQ ID NO: 66264 - RNA, 19 nt, Artificial Sequence
  Description of Artificial Sequence: Synthetic oligonucleotide
  Sense strand starting at position 3655 of SEQ ID NO: 819
cauaaauuggucugguaaa

SEQ ID NO: 66265 - RNA, 19 nt, Artificial Sequence
  Description of Artificial Sequence: Synthetic oligonucleotide
  Antisense strand to SEQ ID NO: 66184
uuuaccagaccaauuuaug

SEQ ID NO: 66266 - RNA, 19 nt, Artificial Sequence
  Description of Artificial Sequence: Synthetic oligonucleotide
  Sense strand starting at position 3653 of SEQ ID NO: 819
agcauaaauuggucuggua

SEQ ID NO: 66267 - RNA, 19 nt, Artificial Sequence
  Description of Artificial Sequence: Synthetic oligonucleotide
  Antisense strand to SEQ ID NO: 66186
uaccagaccaauuuaugcu

SEQ ID NO: 66268 - RNA, 19 nt, Artificial Sequence
  Description of Artificial Sequence: Synthetic oligonucleotide
  Sense strand starting at position 3600 of SEQ ID NO: 819
cacgaaagguuuccaucuu

SEQ ID NO: 66269 - RNA, 19 nt, Artificial Sequence
  Description of Artificial Sequence: Synthetic oligonucleotide
  Antisense strand to SEQ ID NO: 66188
aagauggaaaccuuucgug

SEQ ID NO: 66270 - RNA, 19 nt, Artificial Sequence
  Description of Artificial Sequence: Synthetic oligonucleotide
  Sense strand starting at position 3344 of SEQ ID NO: 819
ugcuguccuugaccagaaa

SEQ ID NO: 66271 - RNA, 19 nt, Artificial Sequence
  Description of Artificial Sequence: Synthetic oligonucleotide
  Antisense strand to SEQ ID NO: 66190
uuucuggucaaggacagca

SEQ ID NO: 66272 - RNA, 19 nt, Artificial Sequence
  Description of Artificial Sequence: Synthetic oligonucleotide
  Sense strand starting at position 3342 of SEQ ID NO: 819
auugcuguccuugaccaga

SEQ ID NO: 66273 - RNA, 19 nt, Artificial Sequence
  Description of Artificial Sequence: Synthetic oligonucleotide
  Antisense strand to SEQ ID NO: 66192
ucuggucaaggacagcaau

SEQ ID NO: 66274 - RNA, 19 nt, Artificial Sequence
  Description of Artificial Sequence: Synthetic oligonucleotide
  Sense strand starting at position 3337 of SEQ ID NO: 819
ccgccauugcuguccuuga

SEQ ID NO: 66275 - RNA, 19 nt, Artificial Sequence
  Description of Artificial Sequence: Synthetic oligonucleotide
  Antisense strand to SEQ ID NO: 66194
ucaaggacagcaauggcgg

SEQ ID NO: 66276 - RNA, 19 nt, Artificial Sequence
  Description of Artificial Sequence: Synthetic oligonucleotide
  Sense strand starting at position 3150 of SEQ ID NO: 819
gugacaaccuauguaccaa

SEQ ID NO: 66277 - RNA, 19 nt, Artificial Sequence
  Description of Artificial Sequence: Synthetic oligonucleotide
  Antisense strand to SEQ ID NO: 66196
uugguacauagguugucac

SEQ ID NO: 66278 - RNA, 19 nt, Artificial Sequence
  Description of Artificial Sequence: Synthetic oligonucleotide
  Sense strand starting at position 3021 of SEQ ID NO: 819
ucuggagugcuuuaucauu

SEQ ID NO: 66279 - RNA, 19 nt, Artificial Sequence
  Description of Artificial Sequence: Synthetic oligonucleotide
  Antisense strand to SEQ ID NO: 66198
aaugauaaagcacuccaga

SEQ ID NO: 66280 - RNA, 19 nt, Artificial Sequence
  Description of Artificial Sequence: Synthetic oligonucleotide
  Sense strand starting at position 2983 of SEQ ID NO: 819
aguuuaauugacuguuaac

SEQ ID NO: 66281 - RNA, 19 nt, Artificial Sequence
  Description of Artificial Sequence: Synthetic oligonucleotide
  Antisense strand to SEQ ID NO: 66200
guuaacagucaauuaaacu

SEQ ID NO: 66282 - RNA, 19 nt, Artificial Sequence
  Description of Artificial Sequence: Synthetic oligonucleotide
  Sense strand starting at position 2980 of SEQ ID NO: 819
ggaaguuuaauugacuguu

SEQ ID NO: 66283 - RNA, 19 nt, Artificial Sequence
  Description of Artificial Sequence: Synthetic oligonucleotide
  Antisense strand to SEQ ID NO: 66202
aacagucaauuaaacuucc

SEQ ID NO: 66284 - RNA, 19 nt, Artificial Sequence
  Description of Artificial Sequence: Synthetic oligonucleotide
  Sense strand starting at position 2837 of SEQ ID NO: 819
augucuccugccgaaggau

SEQ ID NO: 66285 - RNA, 19 nt, Artificial Sequence
  Description of Artificial Sequence: Synthetic oligonucleotide
  Antisense strand to SEQ ID NO: 66204
auccuucggcaggagacau

SEQ ID NO: 66286 - RNA, 19 nt, Artificial Sequence
  Description of Artificial Sequence: Synthetic oligonucleotide
  Sense strand starting at position 2813 of SEQ ID NO: 819
ggagacugaaaucgcuuau

SEQ ID NO: 66287 - RNA, 19 nt, Artificial Sequence
  Description of Artificial Sequence: Synthetic oligonucleotide
  Antisense strand to SEQ ID NO: 66206
auaagcgauuucagucucc

SEQ ID NO: 66288 - RNA, 19 nt, Artificial Sequence
  Description of Artificial Sequence: Synthetic oligonucleotide
  Sense strand starting at position 2732 of SEQ ID NO: 819
gcugguucuagugauaauu

SEQ ID NO: 66289 - RNA, 19 nt, Artificial Sequence
  Description of Artificial Sequence: Synthetic oligonucleotide
  Antisense strand to SEQ ID NO: 66208
aauuaucacuagaaccagc

SEQ ID NO: 66290 - RNA, 19 nt, Artificial Sequence
  Description of Artificial Sequence: Synthetic oligonucleotide
  Sense strand starting at position 2595 of SEQ ID NO: 819
uuaagaagccauuguucug

SEQ ID NO: 66291 - RNA, 19 nt, Artificial Sequence
  Description of Artificial Sequence: Synthetic oligonucleotide
  Antisense strand to SEQ ID NO: 66210
cagaacaauggcuucuuaa

SEQ ID NO: 66292 - RNA, 19 nt, Artificial Sequence
  Description of Artificial Sequence: Synthetic oligonucleotide
  Sense strand starting at position 2592 of SEQ ID NO: 819
agguuaagaagccauuguu

SEQ ID NO: 66293 - RNA, 19 nt, Artificial Sequence
  Description of Artificial Sequence: Synthetic oligonucleotide
  Antisense strand to SEQ ID NO: 66212
aacaauggcuucuuaaccu

SEQ ID NO: 66294 - RNA, 19 nt, Artificial Sequence
  Description of Artificial Sequence: Synthetic oligonucleotide
  Sense strand starting at position 2501 of SEQ ID NO: 819
uccucagaggucugauacu

SEQ ID NO: 66295 - RNA, 19 nt, Artificial Sequence
  Description of Artificial Sequence: Synthetic oligonucleotide
  Antisense strand to SEQ ID NO: 66214
aguaucagaccucugagga

SEQ ID NO: 66296 - RNA, 19 nt, Artificial Sequence
  Description of Artificial Sequence: Synthetic oligonucleotide
  Sense strand starting at position 2331 of SEQ ID NO: 819
gcaaacugcucauuacaga

SEQ ID NO: 66297 - RNA, 19 nt, Artificial Sequence
  Description of Artificial Sequence: Synthetic oligonucleotide
  Antisense strand to SEQ ID NO: 66216
ucuguaaugagcaguuugc

SEQ ID NO: 66298 - RNA, 19 nt, Artificial Sequence
  Description of Artificial Sequence: Synthetic oligonucleotide
  Sense strand starting at position 2329 of SEQ ID NO: 819
aggcaaacugcucauuaca

SEQ ID NO: 66299 - RNA, 19 nt, Artificial Sequence
  Description of Artificial Sequence: Synthetic oligonucleotide
  Antisense strand to SEQ ID NO: 66218
uguaaugagcaguuugccu

SEQ ID NO: 66300 - RNA, 19 nt, Artificial Sequence
  Description of Artificial Sequence: Synthetic oligonucleotide
  Sense strand starting at position 2234 of SEQ ID NO: 819
cuccgaagugagcauaaua

SEQ ID NO: 66301 - RNA, 19 nt, Artificial Sequence
  Description of Artificial Sequence: Synthetic oligonucleotide
  Antisense strand to SEQ ID NO: 66220
uauuaugcucacuucggag

SEQ ID NO: 66302 - RNA, 19 nt, Artificial Sequence
  Description of Artificial Sequence: Synthetic oligonucleotide
  Sense strand starting at position 2195 of SEQ ID NO: 819
aguauugcaagacgaaaca

SEQ ID NO: 66303 - RNA, 19 nt, Artificial Sequence
  Description of Artificial Sequence: Synthetic oligonucleotide
  Antisense strand to SEQ ID NO: 66222
uguuucgucuugcaauacu

SEQ ID NO: 66304 - RNA, 19 nt, Artificial Sequence
  Description of Artificial Sequence: Synthetic oligonucleotide
  Sense strand starting at position 2193 of SEQ ID NO: 819
cuaguauugcaagacgaaa

SEQ ID NO: 66305 - RNA, 19 nt, Artificial Sequence
  Description of Artificial Sequence: Synthetic oligonucleotide
  Antisense strand to SEQ ID NO: 66224
uuucgucuugcaauacuag

SEQ ID NO: 66306 - RNA, 19 nt, Artificial Sequence
  Description of Artificial Sequence: Synthetic oligonucleotide
  Sense strand starting at position 1813 of SEQ ID NO: 819
agucaagacucaccugagu

SEQ ID NO: 66307 - RNA, 19 nt, Artificial Sequence
  Description of Artificial Sequence: Synthetic oligonucleotide
  Antisense strand to SEQ ID NO: 66226
acucaggugagucuugacu

SEQ ID NO: 66308 - RNA, 19 nt, Artificial Sequence
  Description of Artificial Sequence: Synthetic oligonucleotide
  Sense strand starting at position 1637 of SEQ ID NO: 819
aucauuguuccagaguaag

SEQ ID NO: 66309 - RNA, 19 nt, Artificial Sequence
  Description of Artificial Sequence: Synthetic oligonucleotide
  Antisense strand to SEQ ID NO: 66228
cuuacucuggaacaaugau

SEQ ID NO: 66310 - RNA, 19 nt, Artificial Sequence
  Description of Artificial Sequence: Synthetic oligonucleotide
  Sense strand starting at position 1589 of SEQ ID NO: 819
gaaugugacuuagcaucca

SEQ ID NO: 66311 - RNA, 19 nt, Artificial Sequence
  Description of Artificial Sequence: Synthetic oligonucleotide
  Antisense strand to SEQ ID NO: 66230
uggaugcuaagucacauuc

SEQ ID NO: 66312 - RNA, 19 nt, Artificial Sequence
  Description of Artificial Sequence: Synthetic oligonucleotide
  Sense strand starting at position 1423 of SEQ ID NO: 819
gugacaauuguguaggguu

SEQ ID NO: 66313 - RNA, 19 nt, Artificial Sequence
  Description of Artificial Sequence: Synthetic oligonucleotide
  Antisense strand to SEQ ID NO: 66232
aacccuacacaauugucac

SEQ ID NO: 66314 - RNA, 19 nt, Artificial Sequence
  Description of Artificial Sequence: Synthetic oligonucleotide
  Sense strand starting at position 1201 of SEQ ID NO: 819
cuguuaucuguacacauuc

SEQ ID NO: 66315 - RNA, 19 nt, Artificial Sequence
  Description of Artificial Sequence: Synthetic oligonucleotide
  Antisense strand to SEQ ID NO: 66234
gaauguguacagauaacag

SEQ ID NO: 66316 - RNA, 19 nt, Artificial Sequence
  Description of Artificial Sequence: Synthetic oligonucleotide
  Sense strand starting at position 1101 of SEQ ID NO: 819
augcaagauugucuggaag

SEQ ID NO: 66317 - RNA, 19 nt, Artificial Sequence
  Description of Artificial Sequence: Synthetic oligonucleotide
  Antisense strand to SEQ ID NO: 66236
cuuccagacaaucuugcau

SEQ ID NO: 66318 - RNA, 19 nt, Artificial Sequence
  Description of Artificial Sequence: Synthetic oligonucleotide
  Sense strand starting at position 1100 of SEQ ID NO: 819
uaugcaagauugucuggaa

SEQ ID NO: 66319 - RNA, 19 nt, Artificial Sequence
  Description of Artificial Sequence: Synthetic oligonucleotide
  Antisense strand to SEQ ID NO: 66238
uuccagacaaucuugcaua

SEQ ID NO: 66320 - RNA, 19 nt, Artificial Sequence
  Description of Artificial Sequence: Synthetic oligonucleotide
  Sense strand starting at position 1069 of SEQ ID NO: 819
uugccuugggucuaucaau

SEQ ID NO: 66321 - RNA, 19 nt, Artificial Sequence
  Description of Artificial Sequence: Synthetic oligonucleotide
  Antisense strand to SEQ ID NO: 66240
auugauagacccaaggcaa

SEQ ID NO: 66322 - RNA, 19 nt, Artificial Sequence
  Description of Artificial Sequence: Synthetic oligonucleotide
  Sense strand starting at position 1050 of SEQ ID NO: 819
gagcgauaugaugagaguu

SEQ ID NO: 66323 - RNA, 19 nt, Artificial Sequence
  Description of Artificial Sequence: Synthetic oligonucleotide
  Antisense strand to SEQ ID NO: 66242
aacucucaucauaucgcuc

SEQ ID NO: 66324 - RNA, 19 nt, Artificial Sequence
  Description of Artificial Sequence: Synthetic oligonucleotide
  Sense strand starting at position 981 of SEQ ID NO: 819
cgucuauuagcguuagguc

SEQ ID NO: 66325 - RNA, 19 nt, Artificial Sequence
  Description of Artificial Sequence: Synthetic oligonucleotide
  Antisense strand to SEQ ID NO: 66244
gaccuaacgcuaauagacg

SEQ ID NO: 66326 - RNA, 19 nt, Artificial Sequence
  Description of Artificial Sequence: Synthetic oligonucleotide
  Sense strand starting at position 980 of SEQ ID NO: 819
ccgucuauuagcguuaggu

SEQ ID NO: 66327 - RNA, 19 nt, Artificial Sequence
  Description of Artificial Sequence: Synthetic oligonucleotide
  Antisense strand to SEQ ID NO: 66246
accuaacgcuaauagacgg

SEQ ID NO: 66328 - RNA, 19 nt, Artificial Sequence
  Description of Artificial Sequence: Synthetic oligonucleotide
  Sense strand starting at position 953 of SEQ ID NO: 819
gaacaagacuugcugggau

SEQ ID NO: 66329 - RNA, 19 nt, Artificial Sequence
  Description of Artificial Sequence: Synthetic oligonucleotide
  Antisense strand to SEQ ID NO: 66248
aucccagcaagucuuguuc

SEQ ID NO: 66330 - RNA, 19 nt, Artificial Sequence
  Description of Artificial Sequence: Synthetic oligonucleotide
  Sense strand starting at position 711 of SEQ ID NO: 819
auagcaauuuacugaaaga

SEQ ID NO: 66331 - RNA, 19 nt, Artificial Sequence
  Description of Artificial Sequence: Synthetic oligonucleotide
  Antisense strand to SEQ ID NO: 66250
ucuuucaguaaauugcuau

SEQ ID NO: 66332 - RNA, 19 nt, Artificial Sequence
  Description of Artificial Sequence: Synthetic oligonucleotide
  Sense strand starting at position 302 of SEQ ID NO: 819
ugucauuuguccuccaucu

SEQ ID NO: 66333 - RNA, 19 nt, Artificial Sequence
  Description of Artificial Sequence: Synthetic oligonucleotide
  Antisense strand to SEQ ID NO: 66252
agauggaggacaaaugaca

SEQ ID NO: 66334 - RNA, 19 nt, Artificial Sequence
  Description of Artificial Sequence: Synthetic oligonucleotide
  Sense strand starting at position 300 of SEQ ID NO: 819
ugugucauuuguccuccau

SEQ ID NO: 66335 - RNA, 19 nt, Artificial Sequence
  Description of Artificial Sequence: Synthetic oligonucleotide
  Antisense strand to SEQ ID NO: 66254
auggaggacaaaugacaca

SEQ ID NO: 66336 - RNA, 19 nt, Artificial Sequence
  Description of Artificial Sequence: Synthetic oligonucleotide
  Sense strand starting at position 96 of SEQ ID NO: 819
cagagugauuaaguacgau

SEQ ID NO: 66337 - RNA, 19 nt, Artificial Sequence
  Description of Artificial Sequence: Synthetic oligonucleotide
  Antisense strand to SEQ ID NO: 66256
aucguacuuaaucacucug

SEQ ID NO: 66338 - RNA, 19 nt, Artificial Sequence
  Description of Artificial Sequence: Synthetic oligonucleotide
  Sense strand starting at position 92 of SEQ ID NO: 819
gagucagagugauuaagua

SEQ ID NO: 66339 - RNA, 19 nt, Artificial Sequence
  Description of Artificial Sequence: Synthetic oligonucleotide
  Antisense strand to SEQ ID NO: 66258
uacuuaaucacucugacuc

SEQ ID NO: 66340 - RNA, 19 nt, Artificial Sequence
  Description of Artificial Sequence: Synthetic oligonucleotide
  Sense strand starting at position 41 of SEQ ID NO: 821
guagucaaauaugucaaca

SEQ ID NO: 66341 - RNA, 19 nt, Artificial Sequence
  Description of Artificial Sequence: Synthetic oligonucleotide
  Antisense strand to SEQ ID NO: 66260
uguugacauauuugacuac

SEQ ID NO: 66342 - RNA, 19 nt, Artificial Sequence
  Description of Artificial Sequence: Synthetic oligonucleotide
  Sense strand starting at position 253 of SEQ ID NO: 821
agaguuacauccuugaaac

SEQ ID NO: 66343 - RNA, 19 nt, Artificial Sequence
  Description of Artificial Sequence: Synthetic oligonucleotide
  Antisense strand to SEQ ID NO: 66262
guuucaaggauguaacucu

SEQ ID NO: 66344 - RNA, 19 nt, Artificial Sequence
  Description of Artificial Sequence: Synthetic oligonucleotide
  Sense strand starting at position 759 of SEQ ID NO: 821
gcaccugucagggauauua

SEQ ID NO: 66345 - RNA, 19 nt, Artificial Sequence
  Description of Artificial Sequence: Synthetic oligonucleotide
  Antisense strand to SEQ ID NO: 66264
uaauaucccugacaggugc

SEQ ID NO: 66346 - RNA, 19 nt, Artificial Sequence
  Description of Artificial Sequence: Synthetic oligonucleotide
  Sense strand starting at position 829 of SEQ ID NO: 821
auaguuuguggccacaauu

SEQ ID NO: 66347 - RNA, 19 nt, Artificial Sequence
  Description of Artificial Sequence: Synthetic oligonucleotide
  Antisense strand to SEQ ID NO: 66266
aauuguggccacaaacuau

SEQ ID NO: 66348 - RNA, 19 nt, Artificial Sequence
  Description of Artificial Sequence: Synthetic oligonucleotide
  Sense strand starting at position 979 of SEQ ID NO: 821
augcauuaagcucaggaaa

SEQ ID NO: 66349 - RNA, 19 nt, Artificial Sequence
  Description of Artificial Sequence: Synthetic oligonucleotide
  Antisense strand to SEQ ID NO: 66268
uuuccugagcuuaaugcau

SEQ ID NO: 66350 - RNA, 19 nt, Artificial Sequence
  Description of Artificial Sequence: Synthetic oligonucleotide
  Sense strand starting at position 1112 of SEQ ID NO: 821
uuugcacagcucuagacau

SEQ ID NO: 66351 - RNA, 19 nt, Artificial Sequence
  Description of Artificial Sequence: Synthetic oligonucleotide
  Antisense strand to SEQ ID NO: 66270
augucuagagcugugcaaa

SEQ ID NO: 66352 - RNA, 19 nt, Artificial Sequence
  Description of Artificial Sequence: Synthetic oligonucleotide
  Sense strand starting at position 1151 of SEQ ID NO: 821
uucuaugcagcucaagaau

SEQ ID NO: 66353 - RNA, 19 nt, Artificial Sequence
  Description of Artificial Sequence: Synthetic oligonucleotide
  Antisense strand to SEQ ID NO: 66272
auucuugagcugcauagaa

SEQ ID NO: 66354 - RNA, 19 nt, Artificial Sequence
  Description of Artificial Sequence: Synthetic oligonucleotide
  Sense strand starting at position 1227 of SEQ ID NO: 821
aagucucagugagcaaaca

SEQ ID NO: 66355 - RNA, 19 nt, Artificial Sequence
  Description of Artificial Sequence: Synthetic oligonucleotide
  Antisense strand to SEQ ID NO: 66274
uguuugcucacugagacuu

SEQ ID NO: 66356 - RNA, 19 nt, Artificial Sequence
  Description of Artificial Sequence: Synthetic oligonucleotide
  Sense strand starting at position 1228 of SEQ ID NO: 821
agucucagugagcaaacaa

SEQ ID NO: 66357 - RNA, 19 nt, Artificial Sequence
  Description of Artificial Sequence: Synthetic oligonucleotide
  Antisense strand to SEQ ID NO: 66276
uuguuugcucacugagacu

SEQ ID NO: 66358 - RNA, 19 nt, Artificial Sequence
  Description of Artificial Sequence: Synthetic oligonucleotide
  Sense strand starting at position 1321 of SEQ ID NO: 821
cagggauugcgggaaccua

SEQ ID NO: 66359 - RNA, 19 nt, Artificial Sequence
  Description of Artificial Sequence: Synthetic oligonucleotide
  Antisense strand to SEQ ID NO: 66278
uagguucccgcaaucccug

SEQ ID NO: 66360 - RNA, 19 nt, Artificial Sequence
  Description of Artificial Sequence: Synthetic oligonucleotide
  Sense strand starting at position 1631 of SEQ ID NO: 821
aggcucguucuucaagaga

SEQ ID NO: 66361 - RNA, 19 nt, Artificial Sequence
  Description of Artificial Sequence: Synthetic oligonucleotide
  Antisense strand to SEQ ID NO: 66280
ucucuugaagaacgagccu

SEQ ID NO: 66362 - RNA, 19 nt, Artificial Sequence
  Description of Artificial Sequence: Synthetic oligonucleotide
  Sense strand starting at position 1868 of SEQ ID NO: 821
ccgaguacggcgagucaaa

SEQ ID NO: 66363 - RNA, 19 nt, Artificial Sequence
  Description of Artificial Sequence: Synthetic oligonucleotide
  Antisense strand to SEQ ID NO: 66282
uuugacucgccguacucgg

SEQ ID NO: 66364 - RNA, 19 nt, Artificial Sequence
  Description of Artificial Sequence: Synthetic oligonucleotide
  Sense strand starting at position 1881 of SEQ ID NO: 821
gucaaagucccaggagacu

SEQ ID NO: 66365 - RNA, 19 nt, Artificial Sequence
  Description of Artificial Sequence: Synthetic oligonucleotide
  Antisense strand to SEQ ID NO: 66284
agucuccugggacuuugac

SEQ ID NO: 66366 - RNA, 19 nt, Artificial Sequence
  Description of Artificial Sequence: Synthetic oligonucleotide
  Sense strand starting at position 1984 of SEQ ID NO: 821
uccgucauuuccuccuaga

SEQ ID NO: 66367 - RNA, 19 nt, Artificial Sequence
  Description of Artificial Sequence: Synthetic oligonucleotide
  Antisense strand to SEQ ID NO: 66286
ucuaggaggaaaugacgga

SEQ ID NO: 66368 - RNA, 19 nt, Artificial Sequence
  Description of Artificial Sequence: Synthetic oligonucleotide
  Sense strand starting at position 2137 of SEQ ID NO: 821
gcauuaucugcggcuccga

SEQ ID NO: 66369 - RNA, 19 nt, Artificial Sequence
  Description of Artificial Sequence: Synthetic oligonucleotide
  Antisense strand to SEQ ID NO: 66288
ucggagccgcagauaaugc

SEQ ID NO: 66370 - RNA, 19 nt, Artificial Sequence
  Description of Artificial Sequence: Synthetic oligonucleotide
  Sense strand starting at position 2168 of SEQ ID NO: 821
uggcugaggcguucgugau

SEQ ID NO: 66371 - RNA, 19 nt, Artificial Sequence
  Description of Artificial Sequence: Synthetic oligonucleotide
  Antisense strand to SEQ ID NO: 66290
aucacgaacgccucagcca

SEQ ID NO: 66372 - RNA, 19 nt, Artificial Sequence
  Description of Artificial Sequence: Synthetic oligonucleotide
  Sense strand starting at position 2407 of SEQ ID NO: 821
accgaagacucguuuagga

SEQ ID NO: 66373 - RNA, 19 nt, Artificial Sequence
  Description of Artificial Sequence: Synthetic oligonucleotide
  Antisense strand to SEQ ID NO: 66292
uccuaaacgagucuucggu

SEQ ID NO: 66374 - RNA, 19 nt, Artificial Sequence
  Description of Artificial Sequence: Synthetic oligonucleotide
  Sense strand starting at position 2409 of SEQ ID NO: 821
cgaagacucguuuaggaau

SEQ ID NO: 66375 - RNA, 19 nt, Artificial Sequence
  Description of Artificial Sequence: Synthetic oligonucleotide
  Antisense strand to SEQ ID NO: 66294
auuccuaaacgagucuucg

SEQ ID NO: 66376 - RNA, 19 nt, Artificial Sequence
  Description of Artificial Sequence: Synthetic oligonucleotide
  Sense strand starting at position 2598 of SEQ ID NO: 821
uuguaugggagguaguuua

SEQ ID NO: 66377 - RNA, 19 nt, Artificial Sequence
  Description of Artificial Sequence: Synthetic oligonucleotide
  Antisense strand to SEQ ID NO: 66296
uaaacuaccucccauacaa

SEQ ID NO: 66378 - RNA, 19 nt, Artificial Sequence
  Description of Artificial Sequence: Synthetic oligonucleotide
  Sense strand starting at position 2611 of SEQ ID NO: 821
aguuuaaauaucgaggcga

SEQ ID NO: 66379 - RNA, 19 nt, Artificial Sequence
  Description of Artificial Sequence: Synthetic oligonucleotide
  Antisense strand to SEQ ID NO: 66298
ucgccucgauauuuaaacu

SEQ ID NO: 66380 - RNA, 19 nt, Artificial Sequence
  Description of Artificial Sequence: Synthetic oligonucleotide
  Sense strand starting at position 2615 of SEQ ID NO: 821
uaaauaucgaggcgaugaa

SEQ ID NO: 66381 - RNA, 19 nt, Artificial Sequence
  Description of Artificial Sequence: Synthetic oligonucleotide
  Antisense strand to SEQ ID NO: 66300
uucaucgccucgauauuua

SEQ ID NO: 66382 - RNA, 19 nt, Artificial Sequence
  Description of Artificial Sequence: Synthetic oligonucleotide
  Sense strand starting at position 2644 of SEQ ID NO: 821
uagaauugggcuuacucga

SEQ ID NO: 66383 - RNA, 19 nt, Artificial Sequence
  Description of Artificial Sequence: Synthetic oligonucleotide
  Antisense strand to SEQ ID NO: 66302
ucgaguaagcccaauucua

SEQ ID NO: 66384 - RNA, 19 nt, Artificial Sequence
  Description of Artificial Sequence: Synthetic oligonucleotide
  Sense strand starting at position 2649 of SEQ ID NO: 821
uugggcuuacucgaaagga

SEQ ID NO: 66385 - RNA, 19 nt, Artificial Sequence
  Description of Artificial Sequence: Synthetic oligonucleotide
  Antisense strand to SEQ ID NO: 66304
uccuuucgaguaagcccaa

SEQ ID NO: 66386 - RNA, 19 nt, Artificial Sequence
  Description of Artificial Sequence: Synthetic oligonucleotide
  Sense strand starting at position 2713 of SEQ ID NO: 821
cauggauguuauucuaagu

SEQ ID NO: 66387 - RNA, 19 nt, Artificial Sequence
  Description of Artificial Sequence: Synthetic oligonucleotide
  Antisense strand to SEQ ID NO: 66306
acuuagaauaacauccaug

SEQ ID NO: 66388 - RNA, 19 nt, Artificial Sequence
  Description of Artificial Sequence: Synthetic oligonucleotide
  Sense strand starting at position 2786 of SEQ ID NO: 821
gccugacaggaagguuuau

SEQ ID NO: 66389 - RNA, 19 nt, Artificial Sequence
  Description of Artificial Sequence: Synthetic oligonucleotide
  Antisense strand to SEQ ID NO: 66308
auaaaccuuccugucaggc

SEQ ID NO: 66390 - RNA, 19 nt, Artificial Sequence
  Description of Artificial Sequence: Synthetic oligonucleotide
  Sense strand starting at position 2792 of SEQ ID NO: 821
caggaagguuuauucgaga

SEQ ID NO: 66391 - RNA, 19 nt, Artificial Sequence
  Description of Artificial Sequence: Synthetic oligonucleotide
  Antisense strand to SEQ ID NO: 66310
ucucgaauaaaccuuccug

SEQ ID NO: 66392 - RNA, 19 nt, Artificial Sequence
  Description of Artificial Sequence: Synthetic oligonucleotide
  Sense strand starting at position 2899 of SEQ ID NO: 821
aagauuagucgguaguauu

SEQ ID NO: 66393 - RNA, 19 nt, Artificial Sequence
  Description of Artificial Sequence: Synthetic oligonucleotide
  Antisense strand to SEQ ID NO: 66312
aauacuaccgacuaaucuu

SEQ ID NO: 66394 - RNA, 19 nt, Artificial Sequence
  Description of Artificial Sequence: Synthetic oligonucleotide
  Sense strand starting at position 2979 of SEQ ID NO: 821
gcaguaauccagugauaaa

SEQ ID NO: 66395 - RNA, 19 nt, Artificial Sequence
  Description of Artificial Sequence: Synthetic oligonucleotide
  Antisense strand to SEQ ID NO: 66314
uuuaucacuggauuacugc

SEQ ID NO: 66396 - RNA, 19 nt, Artificial Sequence
  Description of Artificial Sequence: Synthetic oligonucleotide
  Sense strand starting at position 2990 of SEQ ID NO: 821
gugauaaagagcuggaacu

SEQ ID NO: 66397 - RNA, 19 nt, Artificial Sequence
  Description of Artificial Sequence: Synthetic oligonucleotide
  Antisense strand to SEQ ID NO: 66316
aguuccagcucuuuaucac

SEQ ID NO: 66398 - RNA, 19 nt, Artificial Sequence
  Description of Artificial Sequence: Synthetic oligonucleotide
  Sense strand starting at position 3006 of SEQ ID NO: 821
acugaaagugcuggagaga

SEQ ID NO: 66399 - RNA, 19 nt, Artificial Sequence
  Description of Artificial Sequence: Synthetic oligonucleotide
  Antisense strand to SEQ ID NO: 66318
ucucuccagcacuuucagu

SEQ ID NO: 66400 - RNA, 19 nt, Artificial Sequence
  Description of Artificial Sequence: Synthetic oligonucleotide
  Sense strand starting at position 3043 of SEQ ID NO: 821
guaacagucagguggaauu

SEQ ID NO: 66401 - RNA, 19 nt, Artificial Sequence
  Description of Artificial Sequence: Synthetic oligonucleotide
  Antisense strand to SEQ ID NO: 66320
aauuccaccugacuguuac

SEQ ID NO: 66402 - RNA, 19 nt, Artificial Sequence
  Description of Artificial Sequence: Synthetic oligonucleotide
  Sense strand starting at position 3082 of SEQ ID NO: 821
agagaagcaguuuagcaua

SEQ ID NO: 66403 - RNA, 19 nt, Artificial Sequence
  Description of Artificial Sequence: Synthetic oligonucleotide
  Antisense strand to SEQ ID NO: 66322
uaugcuaaacugcuucucu

SEQ ID NO: 66404 - RNA, 19 nt, Artificial Sequence
  Description of Artificial Sequence: Synthetic oligonucleotide
  Sense strand starting at position 3123 of SEQ ID NO: 821
gaguuagacuggcuggauu

SEQ ID NO: 66405 - RNA, 19 nt, Artificial Sequence
  Description of Artificial Sequence: Synthetic oligonucleotide
  Antisense strand to SEQ ID NO: 66324
aauccagccagucuaacuc

SEQ ID NO: 66406 - RNA, 19 nt, Artificial Sequence
  Description of Artificial Sequence: Synthetic oligonucleotide
  Sense strand starting at position 3166 of SEQ ID NO: 821
gcuaaaugacuuugaguua

SEQ ID NO: 66407 - RNA, 19 nt, Artificial Sequence
  Description of Artificial Sequence: Synthetic oligonucleotide
  Antisense strand to SEQ ID NO: 66326
uaacucaaagucauuuagc

SEQ ID NO: 66408 - RNA, 19 nt, Artificial Sequence
  Description of Artificial Sequence: Synthetic oligonucleotide
  Sense strand starting at position 3254 of SEQ ID NO: 821
gguguuauuguggagaauu

SEQ ID NO: 66409 - RNA, 19 nt, Artificial Sequence
  Description of Artificial Sequence: Synthetic oligonucleotide
  Antisense strand to SEQ ID NO: 66328
aauucuccacaauaacacc

SEQ ID NO: 66410 - RNA, 19 nt, Artificial Sequence
  Description of Artificial Sequence: Synthetic oligonucleotide
  Sense strand starting at position 3607 of SEQ ID NO: 821
gcauauguuagcucgguuu

SEQ ID NO: 66411 - RNA, 19 nt, Artificial Sequence
  Description of Artificial Sequence: Synthetic oligonucleotide
  Antisense strand to SEQ ID NO: 66330
aaaccgagcuaacauaugc

SEQ ID NO: 66412 - RNA, 19 nt, Artificial Sequence
  Description of Artificial Sequence: Synthetic oligonucleotide
  Sense strand starting at position 3867 of SEQ ID NO: 821
aguggagauguucaguaaa

SEQ ID NO: 66413 - RNA, 19 nt, Artificial Sequence
  Description of Artificial Sequence: Synthetic oligonucleotide
  Antisense strand to SEQ ID NO: 66332
uuuacugaacaucuccacu

SEQ ID NO: 66414 - RNA, 19 nt, Artificial Sequence
  Description of Artificial Sequence: Synthetic oligonucleotide
  Sense strand starting at position 3905 of SEQ ID NO: 821
aguauucauguagguggaa

SEQ ID NO: 66415 - RNA, 19 nt, Artificial Sequence
  Description of Artificial Sequence: Synthetic oligonucleotide
  Antisense strand to SEQ ID NO: 66334
uuccaccuacaugaauacu

SEQ ID NO: 66416 - RNA, 19 nt, Artificial Sequence
  Description of Artificial Sequence: Synthetic oligonucleotide
  Sense strand starting at position 3906 of SEQ ID NO: 821
guauucauguagguggaaa

SEQ ID NO: 66417 - RNA, 19 nt, Artificial Sequence
  Description of Artificial Sequence: Synthetic oligonucleotide
  Antisense strand to SEQ ID NO: 66336
uuuccaccuacaugaauac

SEQ ID NO: 66418 - RNA, 19 nt, Artificial Sequence
  Description of Artificial Sequence: Synthetic oligonucleotide
  Sense strand starting at position 3958 of SEQ ID NO: 821
cuaggcaugcuauaugaau

SEQ ID NO: 66419 - RNA, 19 nt, Artificial Sequence
  Description of Artificial Sequence: Synthetic oligonucleotide
  Antisense strand to SEQ ID NO: 66338
auucauauagcaugccuag

SEQ ID NO: 66420 - RNA, 19 nt, Artificial Sequence
  Description of Artificial Sequence: Synthetic oligonucleotide
  Sense strand starting at position 36 of SEQ ID NO: 824
aggagacagcucugaauuc

SEQ ID NO: 66421 - RNA, 19 nt, Artificial Sequence
  Description of Artificial Sequence: Synthetic oligonucleotide
  Antisense strand to SEQ ID NO: 66340
gaauucagagcugucuccu

SEQ ID NO: 66422 - RNA, 19 nt, Artificial Sequence
  Description of Artificial Sequence: Synthetic oligonucleotide
  Sense strand starting at position 37 of SEQ ID NO: 824
ggagacagcucugaauucu

SEQ ID NO: 66423 - RNA, 19 nt, Artificial Sequence
  Description of Artificial Sequence: Synthetic oligonucleotide
  Antisense strand to SEQ ID NO: 66342
agaauucagagcugucucc

SEQ ID NO: 66424 - RNA, 19 nt, Artificial Sequence
  Description of Artificial Sequence: Synthetic oligonucleotide
  Sense strand starting at position 125 of SEQ ID NO: 824
ggcauuuacaaaugugugu

SEQ ID NO: 66425 - RNA, 19 nt, Artificial Sequence
  Description of Artificial Sequence: Synthetic oligonucleotide
  Antisense strand to SEQ ID NO: 66344
acacacauuuguaaaugcc

SEQ ID NO: 66426 - RNA, 19 nt, Artificial Sequence
  Description of Artificial Sequence: Synthetic oligonucleotide
  Sense strand starting at position 374 of SEQ ID NO: 824
gcaaacauauucuggauau

SEQ ID NO: 66427 - RNA, 19 nt, Artificial Sequence
  Description of Artificial Sequence: Synthetic oligonucleotide
  Antisense strand to SEQ ID NO: 66346
auauccagaauauguuugc

SEQ ID NO: 66428 - RNA, 19 nt, Artificial Sequence
  Description of Artificial Sequence: Synthetic oligonucleotide
  Sense strand starting at position 462 of SEQ ID NO: 824
cccaacguguggucacuua

SEQ ID NO: 66429 - RNA, 19 nt, Artificial Sequence
  Description of Artificial Sequence: Synthetic oligonucleotide
  Antisense strand to SEQ ID NO: 66348
uaagugaccacacguuggg

SEQ ID NO: 66430 - RNA, 19 nt, Artificial Sequence
  Description of Artificial Sequence: Synthetic oligonucleotide
  Sense strand starting at position 473 of SEQ ID NO: 824
gucacuuaguuugccugaa

SEQ ID NO: 66431 - RNA, 19 nt, Artificial Sequence
  Description of Artificial Sequence: Synthetic oligonucleotide
  Antisense strand to SEQ ID NO: 66350
uucaggcaaacuaagugac

SEQ ID NO: 66432 - RNA, 19 nt, Artificial Sequence
  Description of Artificial Sequence: Synthetic oligonucleotide
  Sense strand starting at position 493 of SEQ ID NO: 824
cuggauugcucgcuggaaa

SEQ ID NO: 66433 - RNA, 19 nt, Artificial Sequence
  Description of Artificial Sequence: Synthetic oligonucleotide
  Antisense strand to SEQ ID NO: 66352
uuuccagcgagcaauccag

SEQ ID NO: 66434 - RNA, 19 nt, Artificial Sequence
  Description of Artificial Sequence: Synthetic oligonucleotide
  Sense strand starting at position 494 of SEQ ID NO: 824
uggauugcucgcuggaaau

SEQ ID NO: 66435 - RNA, 19 nt, Artificial Sequence
  Description of Artificial Sequence: Synthetic oligonucleotide
  Antisense strand to SEQ ID NO: 66354
auuuccagcgagcaaucca

SEQ ID NO: 66436 - RNA, 19 nt, Artificial Sequence
  Description of Artificial Sequence: Synthetic oligonucleotide
  Sense strand starting at position 496 of SEQ ID NO: 824
gauugcucgcuggaaauga

SEQ ID NO: 66437 - RNA, 19 nt, Artificial Sequence
  Description of Artificial Sequence: Synthetic oligonucleotide
  Antisense strand to SEQ ID NO: 66356
ucauuuccagcgagcaauc

SEQ ID NO: 66438 - RNA, 19 nt, Artificial Sequence
  Description of Artificial Sequence: Synthetic oligonucleotide
  Sense strand starting at position 676 of SEQ ID NO: 824
cuguucucuguuugagguu

SEQ ID NO: 66439 - RNA, 19 nt, Artificial Sequence
  Description of Artificial Sequence: Synthetic oligonucleotide
  Antisense strand to SEQ ID NO: 66358
aaccucaaacagagaacag

SEQ ID NO: 66440 - RNA, 19 nt, Artificial Sequence
  Description of Artificial Sequence: Synthetic oligonucleotide
  Sense strand starting at position 701 of SEQ ID NO: 824
ucuagauugcaggauccua

SEQ ID NO: 66441 - RNA, 19 nt, Artificial Sequence
  Description of Artificial Sequence: Synthetic oligonucleotide
  Antisense strand to SEQ ID NO: 66360
uaggauccugcaaucuaga

SEQ ID NO: 66442 - RNA, 19 nt, Artificial Sequence
  Description of Artificial Sequence: Synthetic oligonucleotide
  Sense strand starting at position 709 of SEQ ID NO: 824
gcaggauccuagcacuuua

SEQ ID NO: 66443 - RNA, 19 nt, Artificial Sequence
  Description of Artificial Sequence: Synthetic oligonucleotide
  Antisense strand to SEQ ID NO: 66362
uaaagugcuaggauccugc

SEQ ID NO: 66444 - RNA, 19 nt, Artificial Sequence
  Description of Artificial Sequence: Synthetic oligonucleotide
  Sense strand starting at position 778 of SEQ ID NO: 824
cgaaacgacugguuuguuu

SEQ ID NO: 66445 - RNA, 19 nt, Artificial Sequence
  Description of Artificial Sequence: Synthetic oligonucleotide
  Antisense strand to SEQ ID NO: 66364
aaacaaaccagucguuucg

SEQ ID NO: 66446 - RNA, 19 nt, Artificial Sequence
  Description of Artificial Sequence: Synthetic oligonucleotide
  Sense strand starting at position 820 of SEQ ID NO: 824
aaacgaaucuaagcgacaa

SEQ ID NO: 66447 - RNA, 19 nt, Artificial Sequence
  Description of Artificial Sequence: Synthetic oligonucleotide
  Antisense strand to SEQ ID NO: 66366
uugucgcuuagauucguuu

SEQ ID NO: 66448 - RNA, 19 nt, Artificial Sequence
  Description of Artificial Sequence: Synthetic oligonucleotide
  Sense strand starting at position 938 of SEQ ID NO: 824
cucccuucucccggaaaga

SEQ ID NO: 66449 - RNA, 19 nt, Artificial Sequence
  Description of Artificial Sequence: Synthetic oligonucleotide
  Antisense strand to SEQ ID NO: 66368
ucuuuccgggagaagggag

SEQ ID NO: 66450 - RNA, 19 nt, Artificial Sequence
  Description of Artificial Sequence: Synthetic oligonucleotide
  Sense strand starting at position 972 of SEQ ID NO: 824
uuagcauuucuacgcccaa

SEQ ID NO: 66451 - RNA, 19 nt, Artificial Sequence
  Description of Artificial Sequence: Synthetic oligonucleotide
  Antisense strand to SEQ ID NO: 66370
uugggcguagaaaugcuaa

SEQ ID NO: 66452 - RNA, 19 nt, Artificial Sequence
  Description of Artificial Sequence: Synthetic oligonucleotide
  Sense strand starting at position 1053 of SEQ ID NO: 824
guggguuccuaccuggaga

SEQ ID NO: 66453 - RNA, 19 nt, Artificial Sequence
  Description of Artificial Sequence: Synthetic oligonucleotide
  Antisense strand to SEQ ID NO: 66372
ucuccagguaggaacccac

SEQ ID NO: 66454 - RNA, 19 nt, Artificial Sequence
  Description of Artificial Sequence: Synthetic oligonucleotide
  Sense strand starting at position 1237 of SEQ ID NO: 824
ugaagugcugucugcaaag

SEQ ID NO: 66455 - RNA, 19 nt, Artificial Sequence
  Description of Artificial Sequence: Synthetic oligonucleotide
  Antisense strand to SEQ ID NO: 66374
cuuugcagacagcacuuca

SEQ ID NO: 66456 - RNA, 19 nt, Artificial Sequence
  Description of Artificial Sequence: Synthetic oligonucleotide
  Sense strand starting at position 1491 of SEQ ID NO: 824
cucccagcuccggacuaau

SEQ ID NO: 66457 - RNA, 19 nt, Artificial Sequence
  Description of Artificial Sequence: Synthetic oligonucleotide
  Antisense strand to SEQ ID NO: 66376
auuaguccggagcugggag

SEQ ID NO: 66458 - RNA, 19 nt, Artificial Sequence
  Description of Artificial Sequence: Synthetic oligonucleotide
  Sense strand starting at position 1588 of SEQ ID NO: 824
gccgguacauucucuaaac

SEQ ID NO: 66459 - RNA, 19 nt, Artificial Sequence
  Description of Artificial Sequence: Synthetic oligonucleotide
  Antisense strand to SEQ ID NO: 66378
guuuagagaauguaccggc

SEQ ID NO: 66460 - RNA, 19 nt, Artificial Sequence
  Description of Artificial Sequence: Synthetic oligonucleotide
  Sense strand starting at position 1608 of SEQ ID NO: 824
gagggaauagucugguccu

SEQ ID NO: 66461 - RNA, 19 nt, Artificial Sequence
  Description of Artificial Sequence: Synthetic oligonucleotide
  Antisense strand to SEQ ID NO: 66380
aggaccagacuauucccuc

SEQ ID NO: 66462 - RNA, 19 nt, Artificial Sequence
  Description of Artificial Sequence: Synthetic oligonucleotide
  Sense strand starting at position 1991 of SEQ ID NO: 824
gacacagcucagcgguaaa

SEQ ID NO: 66463 - RNA, 19 nt, Artificial Sequence
  Description of Artificial Sequence: Synthetic oligonucleotide
  Antisense strand to SEQ ID NO: 66382
uuuaccgcugagcuguguc

SEQ ID NO: 66464 - RNA, 19 nt, Artificial Sequence
  Description of Artificial Sequence: Synthetic oligonucleotide
  Sense strand starting at position 2518 of SEQ ID NO: 824
gagaaacuuugcccuugga

SEQ ID NO: 66465 - RNA, 19 nt, Artificial Sequence
  Description of Artificial Sequence: Synthetic oligonucleotide
  Antisense strand to SEQ ID NO: 66384
uccaagggcaaaguuucuc

SEQ ID NO: 66466 - RNA, 19 nt, Artificial Sequence
  Description of Artificial Sequence: Synthetic oligonucleotide
  Sense strand starting at position 2591 of SEQ ID NO: 824
gagaccuaaccucgggaau

SEQ ID NO: 66467 - RNA, 19 nt, Artificial Sequence
  Description of Artificial Sequence: Synthetic oligonucleotide
  Antisense strand to SEQ ID NO: 66386
auucccgagguuaggucuc

SEQ ID NO: 66468 - RNA, 19 nt, Artificial Sequence
  Description of Artificial Sequence: Synthetic oligonucleotide
  Sense strand starting at position 2593 of SEQ ID NO: 824
gaccuaaccucgggaauca

SEQ ID NO: 66469 - RNA, 19 nt, Artificial Sequence
  Description of Artificial Sequence: Synthetic oligonucleotide
  Antisense strand to SEQ ID NO: 66388
ugauucccgagguuagguc

SEQ ID NO: 66470 - RNA, 19 nt, Artificial Sequence
  Description of Artificial Sequence: Synthetic oligonucleotide
  Sense strand starting at position 2605 of SEQ ID NO: 824
ggaaucaggucccgggaaa

SEQ ID NO: 66471 - RNA, 19 nt, Artificial Sequence
  Description of Artificial Sequence: Synthetic oligonucleotide
  Antisense strand to SEQ ID NO: 66390
uuucccgggaccugauucc

SEQ ID NO: 66472 - RNA, 19 nt, Artificial Sequence
  Description of Artificial Sequence: Synthetic oligonucleotide
  Sense strand starting at position 2632 of SEQ ID NO: 824
uuccguucugcucaccaaa

SEQ ID NO: 66473 - RNA, 19 nt, Artificial Sequence
  Description of Artificial Sequence: Synthetic oligonucleotide
  Antisense strand to SEQ ID NO: 66392
uuuggugagcagaacggaa

SEQ ID NO: 66474 - RNA, 19 nt, Artificial Sequence
  Description of Artificial Sequence: Synthetic oligonucleotide
  Sense strand starting at position 2683 of SEQ ID NO: 824
acgaacguugacugggaaa

SEQ ID NO: 66475 - RNA, 19 nt, Artificial Sequence
  Description of Artificial Sequence: Synthetic oligonucleotide
  Antisense strand to SEQ ID NO: 66394
uuucccagucaacguucgu

SEQ ID NO: 66476 - RNA, 19 nt, Artificial Sequence
  Description of Artificial Sequence: Synthetic oligonucleotide
  Sense strand starting at position 2685 of SEQ ID NO: 824
gaacguugacugggaaaug

SEQ ID NO: 66477 - RNA, 19 nt, Artificial Sequence
  Description of Artificial Sequence: Synthetic oligonucleotide
  Antisense strand to SEQ ID NO: 66396
cauuucccagucaacguuc

SEQ ID NO: 66478 - RNA, 19 nt, Artificial Sequence
  Description of Artificial Sequence: Synthetic oligonucleotide
  Sense strand starting at position 2718 of SEQ ID NO: 824
ucgguagugcaccgacaau

SEQ ID NO: 66479 - RNA, 19 nt, Artificial Sequence
  Description of Artificial Sequence: Synthetic oligonucleotide
  Antisense strand to SEQ ID NO: 66398
auugucggugcacuaccga

SEQ ID NO: 66480 - RNA, 19 nt, Artificial Sequence
  Description of Artificial Sequence: Synthetic oligonucleotide
  Sense strand starting at position 2729 of SEQ ID NO: 824
ccgacaauuuagcagacaa

SEQ ID NO: 66481 - RNA, 19 nt, Artificial Sequence
  Description of Artificial Sequence: Synthetic oligonucleotide
  Antisense strand to SEQ ID NO: 66400
uugucugcuaaauugucgg

SEQ ID NO: 66482 - RNA, 19 nt, Artificial Sequence
  Description of Artificial Sequence: Synthetic oligonucleotide
  Sense strand starting at position 2862 of SEQ ID NO: 824
caccuaauaccaggucgaa

SEQ ID NO: 66483 - RNA, 19 nt, Artificial Sequence
  Description of Artificial Sequence: Synthetic oligonucleotide
  Antisense strand to SEQ ID NO: 66402
uucgaccugguauuaggug

SEQ ID NO: 66484 - RNA, 19 nt, Artificial Sequence
  Description of Artificial Sequence: Synthetic oligonucleotide
  Sense strand starting at position 2954 of SEQ ID NO: 824
gucgagguggucuggagua

SEQ ID NO: 66485 - RNA, 19 nt, Artificial Sequence
  Description of Artificial Sequence: Synthetic oligonucleotide
  Antisense strand to SEQ ID NO: 66404
uacuccagaccaccucgac

SEQ ID NO: 66486 - RNA, 19 nt, Artificial Sequence
  Description of Artificial Sequence: Synthetic oligonucleotide
  Sense strand starting at position 2956 of SEQ ID NO: 824
cgagguggucuggaguaaa

SEQ ID NO: 66487 - RNA, 19 nt, Artificial Sequence
  Description of Artificial Sequence: Synthetic oligonucleotide
  Antisense strand to SEQ ID NO: 66406
uuuacuccagaccaccucg

SEQ ID NO: 66488 - RNA, 19 nt, Artificial Sequence
  Description of Artificial Sequence: Synthetic oligonucleotide
  Sense strand starting at position 2959 of SEQ ID NO: 824
gguggucuggaguaaacga

SEQ ID NO: 66489 - RNA, 19 nt, Artificial Sequence
  Description of Artificial Sequence: Synthetic oligonucleotide
  Antisense strand to SEQ ID NO: 66408
ucguuuacuccagaccacc

SEQ ID NO: 66490 - RNA, 19 nt, Artificial Sequence
  Description of Artificial Sequence: Synthetic oligonucleotide
  Sense strand starting at position 3356 of SEQ ID NO: 824
gaaguuucccgcuacccaa

SEQ ID NO: 66491 - RNA, 19 nt, Artificial Sequence
  Description of Artificial Sequence: Synthetic oligonucleotide
  Antisense strand to SEQ ID NO: 66410
uuggguagcgggaaacuuc

SEQ ID NO: 66492 - RNA, 19 nt, Artificial Sequence
  Description of Artificial Sequence: Synthetic oligonucleotide
  Sense strand starting at position 3456 of SEQ ID NO: 824
gcacuucucguccguacaa

SEQ ID NO: 66493 - RNA, 19 nt, Artificial Sequence
  Description of Artificial Sequence: Synthetic oligonucleotide
  Antisense strand to SEQ ID NO: 66412
uuguacggacgagaagugc

SEQ ID NO: 66494 - RNA, 19 nt, Artificial Sequence
  Description of Artificial Sequence: Synthetic oligonucleotide
  Sense strand starting at position 3457 of SEQ ID NO: 824
cacuucucguccguacaau

SEQ ID NO: 66495 - RNA, 19 nt, Artificial Sequence
  Description of Artificial Sequence: Synthetic oligonucleotide
  Antisense strand to SEQ ID NO: 66414
auuguacggacgagaagug

SEQ ID NO: 66496 - RNA, 19 nt, Artificial Sequence
  Description of Artificial Sequence: Synthetic oligonucleotide
  Sense strand starting at position 3458 of SEQ ID NO: 824
acuucucguccguacaauu

SEQ ID NO: 66497 - RNA, 19 nt, Artificial Sequence
  Description of Artificial Sequence: Synthetic oligonucleotide
  Antisense strand to SEQ ID NO: 66416
aauuguacggacgagaagu

SEQ ID NO: 66498 - RNA, 19 nt, Artificial Sequence
  Description of Artificial Sequence: Synthetic oligonucleotide
  Sense strand starting at position 3513 of SEQ ID NO: 824
ccacgaaacucggaagaaa

SEQ ID NO: 66499 - RNA, 19 nt, Artificial Sequence
  Description of Artificial Sequence: Synthetic oligonucleotide
  Antisense strand to SEQ ID NO: 66418
uuucuuccgaguuucgugg

SEQ ID NO: 66500 - RNA, 19 nt, Artificial Sequence
  Description of Artificial Sequence: Synthetic oligonucleotide
  Sense strand starting at position 246 of SEQ ID NO: 822
gagaaacuuugcccuugga

SEQ ID NO: 66501 - RNA, 19 nt, Artificial Sequence
  Description of Artificial Sequence: Synthetic oligonucleotide
  Antisense strand to SEQ ID NO: 66420
uccaagggcaaaguuucuc

SEQ ID NO: 66502 - RNA, 19 nt, Artificial Sequence
  Description of Artificial Sequence: Synthetic oligonucleotide
  Sense strand starting at position 319 of SEQ ID NO: 822
gagaccuaaccucgggaau

SEQ ID NO: 66503 - RNA, 19 nt, Artificial Sequence
  Description of Artificial Sequence: Synthetic oligonucleotide
  Antisense strand to SEQ ID NO: 66422
auucccgagguuaggucuc

SEQ ID NO: 66504 - RNA, 19 nt, Artificial Sequence
  Description of Artificial Sequence: Synthetic oligonucleotide
  Sense strand starting at position 360 of SEQ ID NO: 822
uuccguucugcucaccaaa

SEQ ID NO: 66505 - RNA, 19 nt, Artificial Sequence
  Description of Artificial Sequence: Synthetic oligonucleotide
  Antisense strand to SEQ ID NO: 66424
uuuggugagcagaacggaa

SEQ ID NO: 66506 - RNA, 19 nt, Artificial Sequence
  Description of Artificial Sequence: Synthetic oligonucleotide
  Sense strand starting at position 411 of SEQ ID NO: 822
acgaacguugacugggaaa

SEQ ID NO: 66507 - RNA, 19 nt, Artificial Sequence
  Description of Artificial Sequence: Synthetic oligonucleotide
  Antisense strand to SEQ ID NO: 66426
uuucccagucaacguucgu

SEQ ID NO: 66508 - RNA, 19 nt, Artificial Sequence
  Description of Artificial Sequence: Synthetic oligonucleotide
  Sense strand starting at position 413 of SEQ ID NO: 822
gaacguugacugggaaaug

SEQ ID NO: 66509 - RNA, 19 nt, Artificial Sequence
  Description of Artificial Sequence: Synthetic oligonucleotide
  Antisense strand to SEQ ID NO: 66428
cauuucccagucaacguuc

SEQ ID NO: 66510 - RNA, 19 nt, Artificial Sequence
  Description of Artificial Sequence: Synthetic oligonucleotide
  Sense strand starting at position 457 of SEQ ID NO: 822
ccgacaauuuagcagacaa

SEQ ID NO: 66511 - RNA, 19 nt, Artificial Sequence
  Description of Artificial Sequence: Synthetic oligonucleotide
  Antisense strand to SEQ ID NO: 66430
uugucugcuaaauugucgg

SEQ ID NO: 66512 - RNA, 19 nt, Artificial Sequence
  Description of Artificial Sequence: Synthetic oligonucleotide
  Sense strand starting at position 590 of SEQ ID NO: 822
caccuaauaccaggucgaa

SEQ ID NO: 66513 - RNA, 19 nt, Artificial Sequence
  Description of Artificial Sequence: Synthetic oligonucleotide
  Antisense strand to SEQ ID NO: 66432
uucgaccugguauuaggug

SEQ ID NO: 66514 - RNA, 19 nt, Artificial Sequence
  Description of Artificial Sequence: Synthetic oligonucleotide
  Sense strand starting at position 682 of SEQ ID NO: 822
gucgagguggucuggagua

SEQ ID NO: 66515 - RNA, 19 nt, Artificial Sequence
  Description of Artificial Sequence: Synthetic oligonucleotide
  Antisense strand to SEQ ID NO: 66434
uacuccagaccaccucgac

SEQ ID NO: 66516 - RNA, 19 nt, Artificial Sequence
  Description of Artificial Sequence: Synthetic oligonucleotide
  Sense strand starting at position 684 of SEQ ID NO: 822
cgagguggucuggaguaaa

SEQ ID NO: 66517 - RNA, 19 nt, Artificial Sequence
  Description of Artificial Sequence: Synthetic oligonucleotide
  Antisense strand to SEQ ID NO: 66436
uuuacuccagaccaccucg

SEQ ID NO: 66518 - RNA, 19 nt, Artificial Sequence
  Description of Artificial Sequence: Synthetic oligonucleotide
  Sense strand starting at position 687 of SEQ ID NO: 822
gguggucuggaguaaacga

SEQ ID NO: 66519 - RNA, 19 nt, Artificial Sequence
  Description of Artificial Sequence: Synthetic oligonucleotide
  Antisense strand to SEQ ID NO: 66438
ucguuuacuccagaccacc

SEQ ID NO: 66520 - RNA, 19 nt, Artificial Sequence
  Description of Artificial Sequence: Synthetic oligonucleotide
  Sense strand starting at position 1084 of SEQ ID NO: 822
gaaguuucccgcuacccaa

SEQ ID NO: 66521 - RNA, 19 nt, Artificial Sequence
  Description of Artificial Sequence: Synthetic oligonucleotide
  Antisense strand to SEQ ID NO: 66440
uuggguagcgggaaacuuc

SEQ ID NO: 66522 - RNA, 19 nt, Artificial Sequence
  Description of Artificial Sequence: Synthetic oligonucleotide
  Sense strand starting at position 1186 of SEQ ID NO: 822
acuucucguccguacaauu

SEQ ID NO: 66523 - RNA, 19 nt, Artificial Sequence
  Description of Artificial Sequence: Synthetic oligonucleotide
  Antisense strand to SEQ ID NO: 66442
aauuguacggacgagaagu

SEQ ID NO: 66524 - RNA, 19 nt, Artificial Sequence
  Description of Artificial Sequence: Synthetic oligonucleotide
  Sense strand starting at position 1241 of SEQ ID NO: 822
ccacgaaacucggaagaaa

SEQ ID NO: 66525 - RNA, 19 nt, Artificial Sequence
  Description of Artificial Sequence: Synthetic oligonucleotide
  Antisense strand to SEQ ID NO: 66444
uuucuuccgaguuucgugg

SEQ ID NO: 66526 - RNA, 19 nt, Artificial Sequence
  Description of Artificial Sequence: Synthetic oligonucleotide
  Sense strand starting at position 2004 of SEQ ID NO: 822
gagagaccgcucuaucucu

SEQ ID NO: 66527 - RNA, 19 nt, Artificial Sequence
  Description of Artificial Sequence: Synthetic oligonucleotide
  Antisense strand to SEQ ID NO: 66446
agagauagagcggucucuc

SEQ ID NO: 66528 - RNA, 19 nt, Artificial Sequence
  Description of Artificial Sequence: Synthetic oligonucleotide
  Sense strand starting at position 2011 of SEQ ID NO: 822
cgcucuaucucucugacuu

SEQ ID NO: 66529 - RNA, 19 nt, Artificial Sequence
  Description of Artificial Sequence: Synthetic oligonucleotide
  Antisense strand to SEQ ID NO: 66448
aagucagagagauagagcg

SEQ ID NO: 66530 - RNA, 19 nt, Artificial Sequence
  Description of Artificial Sequence: Synthetic oligonucleotide
  Sense strand starting at position 2339 of SEQ ID NO: 822
agacuuccgcagcgagaga

SEQ ID NO: 66531 - RNA, 19 nt, Artificial Sequence
  Description of Artificial Sequence: Synthetic oligonucleotide
  Antisense strand to SEQ ID NO: 66450
ucucucgcugcggaagucu

SEQ ID NO: 66532 - RNA, 19 nt, Artificial Sequence
  Description of Artificial Sequence: Synthetic oligonucleotide
  Sense strand starting at position 2374 of SEQ ID NO: 822
cacagauugacuggcgaga

SEQ ID NO: 66533 - RNA, 19 nt, Artificial Sequence
  Description of Artificial Sequence: Synthetic oligonucleotide
  Antisense strand to SEQ ID NO: 66452
ucucgccagucaaucugug

SEQ ID NO: 66534 - RNA, 19 nt, Artificial Sequence
  Description of Artificial Sequence: Synthetic oligonucleotide
  Sense strand starting at position 2596 of SEQ ID NO: 822
cgaaauagcuuguugugga

SEQ ID NO: 66535 - RNA, 19 nt, Artificial Sequence
  Description of Artificial Sequence: Synthetic oligonucleotide
  Antisense strand to SEQ ID NO: 66454
uccacaacaagcuauuucg

SEQ ID NO: 66536 - RNA, 19 nt, Artificial Sequence
  Description of Artificial Sequence: Synthetic oligonucleotide
  Sense strand starting at position 2660 of SEQ ID NO: 822
cacccaauccgagagguuu

SEQ ID NO: 66537 - RNA, 19 nt, Artificial Sequence
  Description of Artificial Sequence: Synthetic oligonucleotide
  Antisense strand to SEQ ID NO: 66456
aaaccucucggauugggug

SEQ ID NO: 66538 - RNA, 19 nt, Artificial Sequence
  Description of Artificial Sequence: Synthetic oligonucleotide
  Sense strand starting at position 2666 of SEQ ID NO: 822
auccgagagguuugcucau

SEQ ID NO: 66539 - RNA, 19 nt, Artificial Sequence
  Description of Artificial Sequence: Synthetic oligonucleotide
  Antisense strand to SEQ ID NO: 66458
augagcaaaccucucggau

SEQ ID NO: 66540 - RNA, 19 nt, Artificial Sequence
  Description of Artificial Sequence: Synthetic oligonucleotide
  Sense strand starting at position 2668 of SEQ ID NO: 822
ccgagagguuugcucauuu

SEQ ID NO: 66541 - RNA, 19 nt, Artificial Sequence
  Description of Artificial Sequence: Synthetic oligonucleotide
  Antisense strand to SEQ ID NO: 66460
aaaugagcaaaccucucgg

SEQ ID NO: 66542 - RNA, 19 nt, Artificial Sequence
  Description of Artificial Sequence: Synthetic oligonucleotide
  Sense strand starting at position 2672 of SEQ ID NO: 822
gagguuugcucauuucccu

SEQ ID NO: 66543 - RNA, 19 nt, Artificial Sequence
  Description of Artificial Sequence: Synthetic oligonucleotide
  Antisense strand to SEQ ID NO: 66462
agggaaaugagcaaaccuc

SEQ ID NO: 66544 - RNA, 19 nt, Artificial Sequence
  Description of Artificial Sequence: Synthetic oligonucleotide
  Sense strand starting at position 2681 of SEQ ID NO: 822
ucauuucccuucggauuua

SEQ ID NO: 66545 - RNA, 19 nt, Artificial Sequence
  Description of Artificial Sequence: Synthetic oligonucleotide
  Antisense strand to SEQ ID NO: 66464
uaaauccgaagggaaauga

SEQ ID NO: 66546 - RNA, 19 nt, Artificial Sequence
  Description of Artificial Sequence: Synthetic oligonucleotide
  Sense strand starting at position 2693 of SEQ ID NO: 822
ggauuuagguaaugguuaa

SEQ ID NO: 66547 - RNA, 19 nt, Artificial Sequence
  Description of Artificial Sequence: Synthetic oligonucleotide
  Antisense strand to SEQ ID NO: 66466
uuaaccauuaccuaaaucc

SEQ ID NO: 66548 - RNA, 19 nt, Artificial Sequence
  Description of Artificial Sequence: Synthetic oligonucleotide
  Sense strand starting at position 3005 of SEQ ID NO: 822
gguguuggcgggagcagua

SEQ ID NO: 66549 - RNA, 19 nt, Artificial Sequence
  Description of Artificial Sequence: Synthetic oligonucleotide
  Antisense strand to SEQ ID NO: 66468
uacugcucccgccaacacc

SEQ ID NO: 66550 - RNA, 19 nt, Artificial Sequence
  Description of Artificial Sequence: Synthetic oligonucleotide
  Sense strand starting at position 3037 of SEQ ID NO: 822
gcaccacuuggaugacuau

SEQ ID NO: 66551 - RNA, 19 nt, Artificial Sequence
  Description of Artificial Sequence: Synthetic oligonucleotide
  Antisense strand to SEQ ID NO: 66470
auagucauccaaguggugc

SEQ ID NO: 66552 - RNA, 19 nt, Artificial Sequence
  Description of Artificial Sequence: Synthetic oligonucleotide
  Sense strand starting at position 3065 of SEQ ID NO: 822
agccuucuucgcucggauu

SEQ ID NO: 66553 - RNA, 19 nt, Artificial Sequence
  Description of Artificial Sequence: Synthetic oligonucleotide
  Antisense strand to SEQ ID NO: 66472
aauccgagcgaagaaggcu

SEQ ID NO: 66554 - RNA, 19 nt, Artificial Sequence
  Description of Artificial Sequence: Synthetic oligonucleotide
  Sense strand starting at position 3146 of SEQ ID NO: 822
aaggcuguggacugaguaa

SEQ ID NO: 66555 - RNA, 19 nt, Artificial Sequence
  Description of Artificial Sequence: Synthetic oligonucleotide
  Antisense strand to SEQ ID NO: 66474
uuacucaguccacagccuu

SEQ ID NO: 66556 - RNA, 19 nt, Artificial Sequence
  Description of Artificial Sequence: Synthetic oligonucleotide
  Sense strand starting at position 3274 of SEQ ID NO: 822
gacuguaugccaugaccca

SEQ ID NO: 66557 - RNA, 19 nt, Artificial Sequence
  Description of Artificial Sequence: Synthetic oligonucleotide
  Antisense strand to SEQ ID NO: 66476
ugggucauggcauacaguc

SEQ ID NO: 66558 - RNA, 19 nt, Artificial Sequence
  Description of Artificial Sequence: Synthetic oligonucleotide
  Sense strand starting at position 3302 of SEQ ID NO: 822
gccugcuguguauacucaa

SEQ ID NO: 66559 - RNA, 19 nt, Artificial Sequence
  Description of Artificial Sequence: Synthetic oligonucleotide
  Antisense strand to SEQ ID NO: 66478
uugaguauacacagcaggc

SEQ ID NO: 66560 - RNA, 19 nt, Artificial Sequence
  Description of Artificial Sequence: Synthetic oligonucleotide
  Sense strand starting at position 3328 of SEQ ID NO: 822
acccuuugcucauuggagu

SEQ ID NO: 66561 - RNA, 19 nt, Artificial Sequence
  Description of Artificial Sequence: Synthetic oligonucleotide
  Antisense strand to SEQ ID NO: 66480
acuccaaugagcaaagggu

SEQ ID NO: 66562 - RNA, 19 nt, Artificial Sequence
  Description of Artificial Sequence: Synthetic oligonucleotide
  Sense strand starting at position 3351 of SEQ ID NO: 822
ggauguuguagucauguua

SEQ ID NO: 66563 - RNA, 19 nt, Artificial Sequence
  Description of Artificial Sequence: Synthetic oligonucleotide
  Antisense strand to SEQ ID NO: 66482
uaacaugacuacaacaucc

SEQ ID NO: 66564 - RNA, 19 nt, Artificial Sequence
  Description of Artificial Sequence: Synthetic oligonucleotide
  Sense strand starting at position 3490 of SEQ ID NO: 822
guucuagguuaaucuuaaa

SEQ ID NO: 66565 - RNA, 19 nt, Artificial Sequence
  Description of Artificial Sequence: Synthetic oligonucleotide
  Antisense strand to SEQ ID NO: 66484
uuuaagauuaaccuagaac

SEQ ID NO: 66566 - RNA, 19 nt, Artificial Sequence
  Description of Artificial Sequence: Synthetic oligonucleotide
  Sense strand starting at position 3597 of SEQ ID NO: 822
cagggaauauuugguuagu

SEQ ID NO: 66567 - RNA, 19 nt, Artificial Sequence
  Description of Artificial Sequence: Synthetic oligonucleotide
  Antisense strand to SEQ ID NO: 66486
acuaaccaaauauucccug

SEQ ID NO: 66568 - RNA, 19 nt, Artificial Sequence
  Description of Artificial Sequence: Synthetic oligonucleotide
  Sense strand starting at position 3603 of SEQ ID NO: 822
auauuugguuaguauagca

SEQ ID NO: 66569 - RNA, 19 nt, Artificial Sequence
  Description of Artificial Sequence: Synthetic oligonucleotide
  Antisense strand to SEQ ID NO: 66488
ugcuauacuaaccaaauau

SEQ ID NO: 66570 - RNA, 19 nt, Artificial Sequence
  Description of Artificial Sequence: Synthetic oligonucleotide
  Sense strand starting at position 3620 of SEQ ID NO: 822
cagugcuucgagcauguau

SEQ ID NO: 66571 - RNA, 19 nt, Artificial Sequence
  Description of Artificial Sequence: Synthetic oligonucleotide
  Antisense strand to SEQ ID NO: 66490
auacaugcucgaagcacug

SEQ ID NO: 66572 - RNA, 19 nt, Artificial Sequence
  Description of Artificial Sequence: Synthetic oligonucleotide
  Sense strand starting at position 3697 of SEQ ID NO: 822
gggcaaaucuugucugccu

SEQ ID NO: 66573 - RNA, 19 nt, Artificial Sequence
  Description of Artificial Sequence: Synthetic oligonucleotide
  Antisense strand to SEQ ID NO: 66492
aggcagacaagauuugccc

SEQ ID NO: 66574 - RNA, 19 nt, Artificial Sequence
  Description of Artificial Sequence: Synthetic oligonucleotide
  Sense strand starting at position 3698 of SEQ ID NO: 822
ggcaaaucuugucugccua

SEQ ID NO: 66575 - RNA, 19 nt, Artificial Sequence
  Description of Artificial Sequence: Synthetic oligonucleotide
  Antisense strand to SEQ ID NO: 66494
uaggcagacaagauuugcc

SEQ ID NO: 66576 - RNA, 19 nt, Artificial Sequence
  Description of Artificial Sequence: Synthetic oligonucleotide
  Sense strand starting at position 3901 of SEQ ID NO: 822
ucuccuacucgauagcaga

SEQ ID NO: 66577 - RNA, 19 nt, Artificial Sequence
  Description of Artificial Sequence: Synthetic oligonucleotide
  Antisense strand to SEQ ID NO: 66496
ucugcuaucgaguaggaga

SEQ ID NO: 66578 - RNA, 19 nt, Artificial Sequence
  Description of Artificial Sequence: Synthetic oligonucleotide
  Sense strand starting at position 3973 of SEQ ID NO: 822
ucaaccaaguucuagagaa

SEQ ID NO: 66579 - RNA, 19 nt, Artificial Sequence
  Description of Artificial Sequence: Synthetic oligonucleotide
  Antisense strand to SEQ ID NO: 66498
uucucuagaacuugguuga

SEQ ID NO: 66580 - RNA, 19 nt, Artificial Sequence
  Description of Artificial Sequence: Synthetic oligonucleotide
  Sense strand starting at position 279 of SEQ ID NO: 823
gaaguuucccgcuacccaa

SEQ ID NO: 66581 - RNA, 19 nt, Artificial Sequence
  Description of Artificial Sequence: Synthetic oligonucleotide
  Antisense strand to SEQ ID NO: 66500
uuggguagcgggaaacuuc

SEQ ID NO: 66582 - RNA, 19 nt, Artificial Sequence
  Description of Artificial Sequence: Synthetic oligonucleotide
  Sense strand starting at position 381 of SEQ ID NO: 823
acuucucguccguacaauu

SEQ ID NO: 66583 - RNA, 19 nt, Artificial Sequence
  Description of Artificial Sequence: Synthetic oligonucleotide
  Antisense strand to SEQ ID NO: 66502
aauuguacggacgagaagu

SEQ ID NO: 66584 - RNA, 19 nt, Artificial Sequence
  Description of Artificial Sequence: Synthetic oligonucleotide
  Sense strand starting at position 436 of SEQ ID NO: 823
ccacgaaacucggaagaaa

SEQ ID NO: 66585 - RNA, 19 nt, Artificial Sequence
  Description of Artificial Sequence: Synthetic oligonucleotide
  Antisense strand to SEQ ID NO: 66504
uuucuuccgaguuucgugg

SEQ ID NO: 66586 - RNA, 19 nt, Artificial Sequence
  Description of Artificial Sequence: Synthetic oligonucleotide
  Sense strand starting at position 1199 of SEQ ID NO: 823
gagagaccgcucuaucucu

SEQ ID NO: 66587 - RNA, 19 nt, Artificial Sequence
  Description of Artificial Sequence: Synthetic oligonucleotide
  Antisense strand to SEQ ID NO: 66506
agagauagagcggucucuc

SEQ ID NO: 66588 - RNA, 19 nt, Artificial Sequence
  Description of Artificial Sequence: Synthetic oligonucleotide
  Sense strand starting at position 1206 of SEQ ID NO: 823
cgcucuaucucucugacuu

SEQ ID NO: 66589 - RNA, 19 nt, Artificial Sequence
  Description of Artificial Sequence: Synthetic oligonucleotide
  Antisense strand to SEQ ID NO: 66508
aagucagagagauagagcg

SEQ ID NO: 66590 - RNA, 19 nt, Artificial Sequence
  Description of Artificial Sequence: Synthetic oligonucleotide
  Sense strand starting at position 1534 of SEQ ID NO: 823
agacuuccgcagcgagaga

SEQ ID NO: 66591 - RNA, 19 nt, Artificial Sequence
  Description of Artificial Sequence: Synthetic oligonucleotide
  Antisense strand to SEQ ID NO: 66510
ucucucgcugcggaagucu

SEQ ID NO: 66592 - RNA, 19 nt, Artificial Sequence
  Description of Artificial Sequence: Synthetic oligonucleotide
  Sense strand starting at position 1569 of SEQ ID NO: 823
cacagauugacuggcgaga

SEQ ID NO: 66593 - RNA, 19 nt, Artificial Sequence
  Description of Artificial Sequence: Synthetic oligonucleotide
  Antisense strand to SEQ ID NO: 66512
ucucgccagucaaucugug

SEQ ID NO: 66594 - RNA, 19 nt, Artificial Sequence
  Description of Artificial Sequence: Synthetic oligonucleotide
  Sense strand starting at position 1791 of SEQ ID NO: 823
cgaaauagcuuguugugga

SEQ ID NO: 66595 - RNA, 19 nt, Artificial Sequence
  Description of Artificial Sequence: Synthetic oligonucleotide
  Antisense strand to SEQ ID NO: 66514
uccacaacaagcuauuucg

SEQ ID NO: 66596 - RNA, 19 nt, Artificial Sequence
  Description of Artificial Sequence: Synthetic oligonucleotide
  Sense strand starting at position 1855 of SEQ ID NO: 823
cacccaauccgagagguuu

SEQ ID NO: 66597 - RNA, 19 nt, Artificial Sequence
  Description of Artificial Sequence: Synthetic oligonucleotide
  Antisense strand to SEQ ID NO: 66516
aaaccucucggauugggug

SEQ ID NO: 66598 - RNA, 19 nt, Artificial Sequence
  Description of Artificial Sequence: Synthetic oligonucleotide
  Sense strand starting at position 1861 of SEQ ID NO: 823
auccgagagguuugcucau

SEQ ID NO: 66599 - RNA, 19 nt, Artificial Sequence
  Description of Artificial Sequence: Synthetic oligonucleotide
  Antisense strand to SEQ ID NO: 66518
augagcaaaccucucggau

SEQ ID NO: 66600 - RNA, 19 nt, Artificial Sequence
  Description of Artificial Sequence: Synthetic oligonucleotide
  Sense strand starting at position 1863 of SEQ ID NO: 823
ccgagagguuugcucauuu

SEQ ID NO: 66601 - RNA, 19 nt, Artificial Sequence
  Description of Artificial Sequence: Synthetic oligonucleotide
  Antisense strand to SEQ ID NO: 66520
aaaugagcaaaccucucgg

SEQ ID NO: 66602 - RNA, 19 nt, Artificial Sequence
  Description of Artificial Sequence: Synthetic oligonucleotide
  Sense strand starting at position 1867 of SEQ ID NO: 823
gagguuugcucauuucccu

SEQ ID NO: 66603 - RNA, 19 nt, Artificial Sequence
  Description of Artificial Sequence: Synthetic oligonucleotide
  Antisense strand to SEQ ID NO: 66522
agggaaaugagcaaaccuc

SEQ ID NO: 66604 - RNA, 19 nt, Artificial Sequence
  Description of Artificial Sequence: Synthetic oligonucleotide
  Sense strand starting at position 1876 of SEQ ID NO: 823
ucauuucccuucggauuua

SEQ ID NO: 66605 - RNA, 19 nt, Artificial Sequence
  Description of Artificial Sequence: Synthetic oligonucleotide
  Antisense strand to SEQ ID NO: 66524
uaaauccgaagggaaauga

SEQ ID NO: 66606 - RNA, 19 nt, Artificial Sequence
  Description of Artificial Sequence: Synthetic oligonucleotide
  Sense strand starting at position 1888 of SEQ ID NO: 823
ggauuuagguaaugguuaa

SEQ ID NO: 66607 - RNA, 19 nt, Artificial Sequence
  Description of Artificial Sequence: Synthetic oligonucleotide
  Antisense strand to SEQ ID NO: 66526
uuaaccauuaccuaaaucc

SEQ ID NO: 66608 - RNA, 19 nt, Artificial Sequence
  Description of Artificial Sequence: Synthetic oligonucleotide
  Sense strand starting at position 2200 of SEQ ID NO: 823
gguguuggcgggagcagua

SEQ ID NO: 66609 - RNA, 19 nt, Artificial Sequence
  Description of Artificial Sequence: Synthetic oligonucleotide
  Antisense strand to SEQ ID NO: 66528
uacugcucccgccaacacc

SEQ ID NO: 66610 - RNA, 19 nt, Artificial Sequence
  Description of Artificial Sequence: Synthetic oligonucleotide
  Sense strand starting at position 2232 of SEQ ID NO: 823
gcaccacuuggaugacuau

SEQ ID NO: 66611 - RNA, 19 nt, Artificial Sequence
  Description of Artificial Sequence: Synthetic oligonucleotide
  Antisense strand to SEQ ID NO: 66530
auagucauccaaguggugc

SEQ ID NO: 66612 - RNA, 19 nt, Artificial Sequence
  Description of Artificial Sequence: Synthetic oligonucleotide
  Sense strand starting at position 2260 of SEQ ID NO: 823
agccuucuucgcucggauu

SEQ ID NO: 66613 - RNA, 19 nt, Artificial Sequence
  Description of Artificial Sequence: Synthetic oligonucleotide
  Antisense strand to SEQ ID NO: 66532
aauccgagcgaagaaggcu

SEQ ID NO: 66614 - RNA, 19 nt, Artificial Sequence
  Description of Artificial Sequence: Synthetic oligonucleotide
  Sense strand starting at position 2341 of SEQ ID NO: 823
aaggcuguggacugaguaa

SEQ ID NO: 66615 - RNA, 19 nt, Artificial Sequence
  Description of Artificial Sequence: Synthetic oligonucleotide
  Antisense strand to SEQ ID NO: 66534
uuacucaguccacagccuu

SEQ ID NO: 66616 - RNA, 19 nt, Artificial Sequence
  Description of Artificial Sequence: Synthetic oligonucleotide
  Sense strand starting at position 2469 of SEQ ID NO: 823
gacuguaugccaugaccca

SEQ ID NO: 66617 - RNA, 19 nt, Artificial Sequence
  Description of Artificial Sequence: Synthetic oligonucleotide
  Antisense strand to SEQ ID NO: 66536
ugggucauggcauacaguc

SEQ ID NO: 66618 - RNA, 19 nt, Artificial Sequence
  Description of Artificial Sequence: Synthetic oligonucleotide
  Sense strand starting at position 2497 of SEQ ID NO: 823
gccugcuguguauacucaa

SEQ ID NO: 66619 - RNA, 19 nt, Artificial Sequence
  Description of Artificial Sequence: Synthetic oligonucleotide
  Antisense strand to SEQ ID NO: 66538
uugaguauacacagcaggc

SEQ ID NO: 66620 - RNA, 19 nt, Artificial Sequence
  Description of Artificial Sequence: Synthetic oligonucleotide
  Sense strand starting at position 2523 of SEQ ID NO: 823
acccuuugcucauuggagu

SEQ ID NO: 66621 - RNA, 19 nt, Artificial Sequence
  Description of Artificial Sequence: Synthetic oligonucleotide
  Antisense strand to SEQ ID NO: 66540
acuccaaugagcaaagggu

SEQ ID NO: 66622 - RNA, 19 nt, Artificial Sequence
  Description of Artificial Sequence: Synthetic oligonucleotide
  Sense strand starting at position 2546 of SEQ ID NO: 823
ggauguuguagucauguua

SEQ ID NO: 66623 - RNA, 19 nt, Artificial Sequence
  Description of Artificial Sequence: Synthetic oligonucleotide
  Antisense strand to SEQ ID NO: 66542
uaacaugacuacaacaucc

SEQ ID NO: 66624 - RNA, 19 nt, Artificial Sequence
  Description of Artificial Sequence: Synthetic oligonucleotide
  Sense strand starting at position 2685 of SEQ ID NO: 823
guucuagguuaaucuuaaa

SEQ ID NO: 66625 - RNA, 19 nt, Artificial Sequence
  Description of Artificial Sequence: Synthetic oligonucleotide
  Antisense strand to SEQ ID NO: 66544
uuuaagauuaaccuagaac

SEQ ID NO: 66626 - RNA, 19 nt, Artificial Sequence
  Description of Artificial Sequence: Synthetic oligonucleotide
  Sense strand starting at position 2792 of SEQ ID NO: 823
cagggaauauuugguuagu

SEQ ID NO: 66627 - RNA, 19 nt, Artificial Sequence
  Description of Artificial Sequence: Synthetic oligonucleotide
  Antisense strand to SEQ ID NO: 66546
acuaaccaaauauucccug

SEQ ID NO: 66628 - RNA, 19 nt, Artificial Sequence
  Description of Artificial Sequence: Synthetic oligonucleotide
  Sense strand starting at position 2798 of SEQ ID NO: 823
auauuugguuaguauagca

SEQ ID NO: 66629 - RNA, 19 nt, Artificial Sequence
  Description of Artificial Sequence: Synthetic oligonucleotide
  Antisense strand to SEQ ID NO: 66548
ugcuauacuaaccaaauau

SEQ ID NO: 66630 - RNA, 19 nt, Artificial Sequence
  Description of Artificial Sequence: Synthetic oligonucleotide
  Sense strand starting at position 2815 of SEQ ID NO: 823
cagugcuucgagcauguau

SEQ ID NO: 66631 - RNA, 19 nt, Artificial Sequence
  Description of Artificial Sequence: Synthetic oligonucleotide
  Antisense strand to SEQ ID NO: 66550
auacaugcucgaagcacug

SEQ ID NO: 66632 - RNA, 19 nt, Artificial Sequence
  Description of Artificial Sequence: Synthetic oligonucleotide
  Sense strand starting at position 2892 of SEQ ID NO: 823
gggcaaaucuugucugccu

SEQ ID NO: 66633 - RNA, 19 nt, Artificial Sequence
  Description of Artificial Sequence: Synthetic oligonucleotide
  Antisense strand to SEQ ID NO: 66552
aggcagacaagauuugccc

SEQ ID NO: 66634 - RNA, 19 nt, Artificial Sequence
  Description of Artificial Sequence: Synthetic oligonucleotide
  Sense strand starting at position 2893 of SEQ ID NO: 823
ggcaaaucuugucugccua

SEQ ID NO: 66635 - RNA, 19 nt, Artificial Sequence
  Description of Artificial Sequence: Synthetic oligonucleotide
  Antisense strand to SEQ ID NO: 66554
uaggcagacaagauuugcc

SEQ ID NO: 66636 - RNA, 19 nt, Artificial Sequence
  Description of Artificial Sequence: Synthetic oligonucleotide
  Sense strand starting at position 3096 of SEQ ID NO: 823
ucuccuacucgauagcaga

SEQ ID NO: 66637 - RNA, 19 nt, Artificial Sequence
  Description of Artificial Sequence: Synthetic oligonucleotide
  Antisense strand to SEQ ID NO: 66556
ucugcuaucgaguaggaga

SEQ ID NO: 66638 - RNA, 19 nt, Artificial Sequence
  Description of Artificial Sequence: Synthetic oligonucleotide
  Sense strand starting at position 3168 of SEQ ID NO: 823
ucaaccaaguucuagagaa

SEQ ID NO: 66639 - RNA, 19 nt, Artificial Sequence
  Description of Artificial Sequence: Synthetic oligonucleotide
  Antisense strand to SEQ ID NO: 66558
uucucuagaacuugguuga

SEQ ID NO: 66640 - RNA, 19 nt, Artificial Sequence
  Description of Artificial Sequence: Synthetic oligonucleotide
  Sense strand starting at position 3182 of SEQ ID NO: 823
gagaaaugguuggacuauu

SEQ ID NO: 66641 - RNA, 19 nt, Artificial Sequence
  Description of Artificial Sequence: Synthetic oligonucleotide
  Antisense strand to SEQ ID NO: 66560
aauaguccaaccauuucuc

SEQ ID NO: 66642 - RNA, 19 nt, Artificial Sequence
  Description of Artificial Sequence: Synthetic oligonucleotide
  Sense strand starting at position 3343 of SEQ ID NO: 823
ugagcaguaucaccuuaga

SEQ ID NO: 66643 - RNA, 19 nt, Artificial Sequence
  Description of Artificial Sequence: Synthetic oligonucleotide
  Antisense strand to SEQ ID NO: 66562
ucuaaggugauacugcuca

SEQ ID NO: 66644 - RNA, 19 nt, Artificial Sequence
  Description of Artificial Sequence: Synthetic oligonucleotide
  Sense strand starting at position 3346 of SEQ ID NO: 823
gcaguaucaccuuagaaua

SEQ ID NO: 66645 - RNA, 19 nt, Artificial Sequence
  Description of Artificial Sequence: Synthetic oligonucleotide
  Antisense strand to SEQ ID NO: 66564
uauucuaaggugauacugc

SEQ ID NO: 66646 - RNA, 19 nt, Artificial Sequence
  Description of Artificial Sequence: Synthetic oligonucleotide
  Sense strand starting at position 3530 of SEQ ID NO: 823
cauguugaaccauguguau

SEQ ID NO: 66647 - RNA, 19 nt, Artificial Sequence
  Description of Artificial Sequence: Synthetic oligonucleotide
  Antisense strand to SEQ ID NO: 66566
auacacaugguucaacaug

SEQ ID NO: 66648 - RNA, 19 nt, Artificial Sequence
  Description of Artificial Sequence: Synthetic oligonucleotide
  Sense strand starting at position 3532 of SEQ ID NO: 823
uguugaaccauguguaugu

SEQ ID NO: 66649 - RNA, 19 nt, Artificial Sequence
  Description of Artificial Sequence: Synthetic oligonucleotide
  Antisense strand to SEQ ID NO: 66568
acauacacaugguucaaca

SEQ ID NO: 66650 - RNA, 19 nt, Artificial Sequence
  Description of Artificial Sequence: Synthetic oligonucleotide
  Sense strand starting at position 3533 of SEQ ID NO: 823
guugaaccauguguaugua

SEQ ID NO: 66651 - RNA, 19 nt, Artificial Sequence
  Description of Artificial Sequence: Synthetic oligonucleotide
  Antisense strand to SEQ ID NO: 66570
uacauacacaugguucaac

SEQ ID NO: 66652 - RNA, 19 nt, Artificial Sequence
  Description of Artificial Sequence: Synthetic oligonucleotide
  Sense strand starting at position 3536 of SEQ ID NO: 823
gaaccauguguauguagua

SEQ ID NO: 66653 - RNA, 19 nt, Artificial Sequence
  Description of Artificial Sequence: Synthetic oligonucleotide
  Antisense strand to SEQ ID NO: 66572
uacuacauacacaugguuc

SEQ ID NO: 66654 - RNA, 19 nt, Artificial Sequence
  Description of Artificial Sequence: Synthetic oligonucleotide
  Sense strand starting at position 3643 of SEQ ID NO: 823
acaacacucccggguguau

SEQ ID NO: 66655 - RNA, 19 nt, Artificial Sequence
  Description of Artificial Sequence: Synthetic oligonucleotide
  Antisense strand to SEQ ID NO: 66574
auacacccgggaguguugu

SEQ ID NO: 66656 - RNA, 19 nt, Artificial Sequence
  Description of Artificial Sequence: Synthetic oligonucleotide
  Sense strand starting at position 3656 of SEQ ID NO: 823
guguauaguguugaagugu

SEQ ID NO: 66657 - RNA, 19 nt, Artificial Sequence
  Description of Artificial Sequence: Synthetic oligonucleotide
  Antisense strand to SEQ ID NO: 66576
acacuucaacacuauacac

SEQ ID NO: 66658 - RNA, 19 nt, Artificial Sequence
  Description of Artificial Sequence: Synthetic oligonucleotide
  Sense strand starting at position 3730 of SEQ ID NO: 823
gguuaagaaccuugccaag

SEQ ID NO: 66659 - RNA, 19 nt, Artificial Sequence
  Description of Artificial Sequence: Synthetic oligonucleotide
  Antisense strand to SEQ ID NO: 66578
cuuggcaagguucuuaacc

SEQ ID NO: 66660 - RNA, 19 nt, Artificial Sequence
  Description of Artificial Sequence: Synthetic oligonucleotide
  Sense strand starting at position 3937 of SEQ ID NO: 825
cucuuugacucgucacaaa

SEQ ID NO: 66661 - RNA, 19 nt, Artificial Sequence
  Description of Artificial Sequence: Synthetic oligonucleotide
  Antisense strand to SEQ ID NO: 66580
uuugugacgagucaaagag

SEQ ID NO: 66662 - RNA, 19 nt, Artificial Sequence
  Description of Artificial Sequence: Synthetic oligonucleotide
  Sense strand starting at position 3902 of SEQ ID NO: 825
uugugugaacaguacugua

SEQ ID NO: 66663 - RNA, 19 nt, Artificial Sequence
  Description of Artificial Sequence: Synthetic oligonucleotide
  Antisense strand to SEQ ID NO: 66582
uacaguacuguucacacaa

SEQ ID NO: 66664 - RNA, 19 nt, Artificial Sequence
  Description of Artificial Sequence: Synthetic oligonucleotide
  Sense strand starting at position 3853 of SEQ ID NO: 825
acuguauugugguucuauc

SEQ ID NO: 66665 - RNA, 19 nt, Artificial Sequence
  Description of Artificial Sequence: Synthetic oligonucleotide
  Antisense strand to SEQ ID NO: 66584
gauagaaccacaauacagu

SEQ ID NO: 66666 - RNA, 19 nt, Artificial Sequence
  Description of Artificial Sequence: Synthetic oligonucleotide
  Sense strand starting at position 3828 of SEQ ID NO: 825
cagguaaucugacccuaga

SEQ ID NO: 66667 - RNA, 19 nt, Artificial Sequence
  Description of Artificial Sequence: Synthetic oligonucleotide
  Antisense strand to SEQ ID NO: 66586
ucuagggucagauuaccug

SEQ ID NO: 66668 - RNA, 19 nt, Artificial Sequence
  Description of Artificial Sequence: Synthetic oligonucleotide
  Sense strand starting at position 3777 of SEQ ID NO: 825
ggaauaacggcaugaauua

SEQ ID NO: 66669 - RNA, 19 nt, Artificial Sequence
  Description of Artificial Sequence: Synthetic oligonucleotide
  Antisense strand to SEQ ID NO: 66588
uaauucaugccguuauucc

SEQ ID NO: 66670 - RNA, 19 nt, Artificial Sequence
  Description of Artificial Sequence: Synthetic oligonucleotide
  Sense strand starting at position 3717 of SEQ ID NO: 825
ggaugucucaacugaagau

SEQ ID NO: 66671 - RNA, 19 nt, Artificial Sequence
  Description of Artificial Sequence: Synthetic oligonucleotide
  Antisense strand to SEQ ID NO: 66590
aucuucaguugagacaucc

SEQ ID NO: 66672 - RNA, 19 nt, Artificial Sequence
  Description of Artificial Sequence: Synthetic oligonucleotide
  Sense strand starting at position 3711 of SEQ ID NO: 825
guuauaggaugucucaacu

SEQ ID NO: 66673 - RNA, 19 nt, Artificial Sequence
  Description of Artificial Sequence: Synthetic oligonucleotide
  Antisense strand to SEQ ID NO: 66592
aguugagacauccuauaac

SEQ ID NO: 66674 - RNA, 19 nt, Artificial Sequence
  Description of Artificial Sequence: Synthetic oligonucleotide
  Sense strand starting at position 3708 of SEQ ID NO: 825
gcaguuauaggaugucuca

SEQ ID NO: 66675 - RNA, 19 nt, Artificial Sequence
  Description of Artificial Sequence: Synthetic oligonucleotide
  Antisense strand to SEQ ID NO: 66594
ugagacauccuauaacugc

SEQ ID NO: 66676 - RNA, 19 nt, Artificial Sequence
  Description of Artificial Sequence: Synthetic oligonucleotide
  Sense strand starting at position 3701 of SEQ ID NO: 825
guuggaggcaguuauagga

SEQ ID NO: 66677 - RNA, 19 nt, Artificial Sequence
  Description of Artificial Sequence: Synthetic oligonucleotide
  Antisense strand to SEQ ID NO: 66596
uccuauaacugccuccaac

SEQ ID NO: 66678 - RNA, 19 nt, Artificial Sequence
  Description of Artificial Sequence: Synthetic oligonucleotide
  Sense strand starting at position 3697 of SEQ ID NO: 825
uggaguuggaggcaguuau

SEQ ID NO: 66679 - RNA, 19 nt, Artificial Sequence
  Description of Artificial Sequence: Synthetic oligonucleotide
  Antisense strand to SEQ ID NO: 66598
auaacugccuccaacucca

SEQ ID NO: 66680 - RNA, 19 nt, Artificial Sequence
  Description of Artificial Sequence: Synthetic oligonucleotide
  Sense strand starting at position 3513 of SEQ ID NO: 825
agucaucaugaagguaaga

SEQ ID NO: 66681 - RNA, 19 nt, Artificial Sequence
  Description of Artificial Sequence: Synthetic oligonucleotide
  Antisense strand to SEQ ID NO: 66600
ucuuaccuucaugaugacu

SEQ ID NO: 66682 - RNA, 19 nt, Artificial Sequence
  Description of Artificial Sequence: Synthetic oligonucleotide
  Sense strand starting at position 3506 of SEQ ID NO: 825
gucccagagucaucaugaa

SEQ ID NO: 66683 - RNA, 19 nt, Artificial Sequence
  Description of Artificial Sequence: Synthetic oligonucleotide
  Antisense strand to SEQ ID NO: 66602
uucaugaugacucugggac

SEQ ID NO: 66684 - RNA, 19 nt, Artificial Sequence
  Description of Artificial Sequence: Synthetic oligonucleotide
  Sense strand starting at position 3217 of SEQ ID NO: 825
cauugucguagacgggaaa

SEQ ID NO: 66685 - RNA, 19 nt, Artificial Sequence
  Description of Artificial Sequence: Synthetic oligonucleotide
  Antisense strand to SEQ ID NO: 66604
uuucccgucuacgacaaug

SEQ ID NO: 66686 - RNA, 19 nt, Artificial Sequence
  Description of Artificial Sequence: Synthetic oligonucleotide
  Sense strand starting at position 3205 of SEQ ID NO: 825
cagaaauggcgucauuguc

SEQ ID NO: 66687 - RNA, 19 nt, Artificial Sequence
  Description of Artificial Sequence: Synthetic oligonucleotide
  Antisense strand to SEQ ID NO: 66606
gacaaugacgccauuucug

SEQ ID NO: 66688 - RNA, 19 nt, Artificial Sequence
  Description of Artificial Sequence: Synthetic oligonucleotide
  Sense strand starting at position 3190 of SEQ ID NO: 825
gaguuucuucucugacaga

SEQ ID NO: 66689 - RNA, 19 nt, Artificial Sequence
  Description of Artificial Sequence: Synthetic oligonucleotide
  Antisense strand to SEQ ID NO: 66608
ucugucagagaagaaacuc

SEQ ID NO: 66690 - RNA, 19 nt, Artificial Sequence
  Description of Artificial Sequence: Synthetic oligonucleotide
  Sense strand starting at position 3189 of SEQ ID NO: 825
ugaguuucuucucugacag

SEQ ID NO: 66691 - RNA, 19 nt, Artificial Sequence
  Description of Artificial Sequence: Synthetic oligonucleotide
  Antisense strand to SEQ ID NO: 66610
cugucagagaagaaacuca

SEQ ID NO: 66692 - RNA, 19 nt, Artificial Sequence
  Description of Artificial Sequence: Synthetic oligonucleotide
  Sense strand starting at position 3188 of SEQ ID NO: 825
gugaguuucuucucugaca

SEQ ID NO: 66693 - RNA, 19 nt, Artificial Sequence
  Description of Artificial Sequence: Synthetic oligonucleotide
  Antisense strand to SEQ ID NO: 66612
ugucagagaagaaacucac

SEQ ID NO: 66694 - RNA, 19 nt, Artificial Sequence
  Description of Artificial Sequence: Synthetic oligonucleotide
  Sense strand starting at position 3186 of SEQ ID NO: 825
uugugaguuucuucucuga

SEQ ID NO: 66695 - RNA, 19 nt, Artificial Sequence
  Description of Artificial Sequence: Synthetic oligonucleotide
  Antisense strand to SEQ ID NO: 66614
ucagagaagaaacucacaa

SEQ ID NO: 66696 - RNA, 19 nt, Artificial Sequence
  Description of Artificial Sequence: Synthetic oligonucleotide
  Sense strand starting at position 2651 of SEQ ID NO: 825
agaucucgccuccgaggaa

SEQ ID NO: 66697 - RNA, 19 nt, Artificial Sequence
  Description of Artificial Sequence: Synthetic oligonucleotide
  Antisense strand to SEQ ID NO: 66616
uuccucggaggcgagaucu

SEQ ID NO: 66698 - RNA, 19 nt, Artificial Sequence
  Description of Artificial Sequence: Synthetic oligonucleotide
  Sense strand starting at position 2355 of SEQ ID NO: 825
ggaccuuugcccggaggga

SEQ ID NO: 66699 - RNA, 19 nt, Artificial Sequence
  Description of Artificial Sequence: Synthetic oligonucleotide
  Antisense strand to SEQ ID NO: 66618
ucccuccgggcaaaggucc

SEQ ID NO: 66700 - RNA, 19 nt, Artificial Sequence
  Description of Artificial Sequence: Synthetic oligonucleotide
  Sense strand starting at position 2256 of SEQ ID NO: 825
cgauguuugcccgucaguc

SEQ ID NO: 66701 - RNA, 19 nt, Artificial Sequence
  Description of Artificial Sequence: Synthetic oligonucleotide
  Antisense strand to SEQ ID NO: 66620
gacugacgggcaaacaucg

SEQ ID NO: 66702 - RNA, 19 nt, Artificial Sequence
  Description of Artificial Sequence: Synthetic oligonucleotide
  Sense strand starting at position 2148 of SEQ ID NO: 825
aauccaaggucgucuaaga

SEQ ID NO: 66703 - RNA, 19 nt, Artificial Sequence
  Description of Artificial Sequence: Synthetic oligonucleotide
  Antisense strand to SEQ ID NO: 66622
ucuuagacgaccuuggauu

SEQ ID NO: 66704 - RNA, 19 nt, Artificial Sequence
  Description of Artificial Sequence: Synthetic oligonucleotide
  Sense strand starting at position 2125 of SEQ ID NO: 825
gcggguucuaaagaacuuu

SEQ ID NO: 66705 - RNA, 19 nt, Artificial Sequence
  Description of Artificial Sequence: Synthetic oligonucleotide
  Antisense strand to SEQ ID NO: 66624
aaaguucuuuagaacccgc

SEQ ID NO: 66706 - RNA, 19 nt, Artificial Sequence
  Description of Artificial Sequence: Synthetic oligonucleotide
  Sense strand starting at position 2090 of SEQ ID NO: 825
guuuguauccagggaccaa

SEQ ID NO: 66707 - RNA, 19 nt, Artificial Sequence
  Description of Artificial Sequence: Synthetic oligonucleotide
  Antisense strand to SEQ ID NO: 66626
uuggucccuggauacaaac

SEQ ID NO: 66708 - RNA, 19 nt, Artificial Sequence
  Description of Artificial Sequence: Synthetic oligonucleotide
  Sense strand starting at position 2046 of SEQ ID NO: 825
guaacuuucuguuuccaua

SEQ ID NO: 66709 - RNA, 19 nt, Artificial Sequence
  Description of Artificial Sequence: Synthetic oligonucleotide
  Antisense strand to SEQ ID NO: 66628
uauggaaacagaaaguuac

SEQ ID NO: 66710 - RNA, 19 nt, Artificial Sequence
  Description of Artificial Sequence: Synthetic oligonucleotide
  Sense strand starting at position 2035 of SEQ ID NO: 825
agccuugaggcguaacuuu

SEQ ID NO: 66711 - RNA, 19 nt, Artificial Sequence
  Description of Artificial Sequence: Synthetic oligonucleotide
  Antisense strand to SEQ ID NO: 66630
aaaguuacgccucaaggcu

SEQ ID NO: 66712 - RNA, 19 nt, Artificial Sequence
  Description of Artificial Sequence: Synthetic oligonucleotide
  Sense strand starting at position 1316 of SEQ ID NO: 825
aaagaagccgccugauaua

SEQ ID NO: 66713 - RNA, 19 nt, Artificial Sequence
  Description of Artificial Sequence: Synthetic oligonucleotide
  Antisense strand to SEQ ID NO: 66632
uauaucaggcggcuucuuu

SEQ ID NO: 66714 - RNA, 19 nt, Artificial Sequence
  Description of Artificial Sequence: Synthetic oligonucleotide
  Sense strand starting at position 1303 of SEQ ID NO: 825
gacgauggaucugaaagaa

SEQ ID NO: 66715 - RNA, 19 nt, Artificial Sequence
  Description of Artificial Sequence: Synthetic oligonucleotide
  Antisense strand to SEQ ID NO: 66634
uucuuucagauccaucguc

SEQ ID NO: 66716 - RNA, 19 nt, Artificial Sequence
  Description of Artificial Sequence: Synthetic oligonucleotide
  Sense strand starting at position 1258 of SEQ ID NO: 825
augugaagcgcauacugaa

SEQ ID NO: 66717 - RNA, 19 nt, Artificial Sequence
  Description of Artificial Sequence: Synthetic oligonucleotide
  Antisense strand to SEQ ID NO: 66636
uucaguaugcgcuucacau

SEQ ID NO: 66718 - RNA, 19 nt, Artificial Sequence
  Description of Artificial Sequence: Synthetic oligonucleotide
  Sense strand starting at position 1223 of SEQ ID NO: 825
aagggccugguuugagaau

SEQ ID NO: 66719 - RNA, 19 nt, Artificial Sequence
  Description of Artificial Sequence: Synthetic oligonucleotide
  Antisense strand to SEQ ID NO: 66638
auucucaaaccaggcccuu

SEQ ID NO: 66720 - RNA, 19 nt, Artificial Sequence
  Description of Artificial Sequence: Synthetic oligonucleotide
  Sense strand starting at position 1179 of SEQ ID NO: 825
gcgucuaagaagugaacau

SEQ ID NO: 66721 - RNA, 19 nt, Artificial Sequence
  Description of Artificial Sequence: Synthetic oligonucleotide
  Antisense strand to SEQ ID NO: 66640
auguucacuucuuagacgc

SEQ ID NO: 66722 - RNA, 19 nt, Artificial Sequence
  Description of Artificial Sequence: Synthetic oligonucleotide
  Sense strand starting at position 1172 of SEQ ID NO: 825
caaccuugcgucuaagaag

SEQ ID NO: 66723 - RNA, 19 nt, Artificial Sequence
  Description of Artificial Sequence: Synthetic oligonucleotide
  Antisense strand to SEQ ID NO: 66642
cuucuuagacgcaagguug

SEQ ID NO: 66724 - RNA, 19 nt, Artificial Sequence
  Description of Artificial Sequence: Synthetic oligonucleotide
  Sense strand starting at position 1109 of SEQ ID NO: 825
gcucaacacccaugaagaa

SEQ ID NO: 66725 - RNA, 19 nt, Artificial Sequence
  Description of Artificial Sequence: Synthetic oligonucleotide
  Antisense strand to SEQ ID NO: 66644
uucuucauggguguugagc

SEQ ID NO: 66726 - RNA, 19 nt, Artificial Sequence
  Description of Artificial Sequence: Synthetic oligonucleotide
  Sense strand starting at position 983 of SEQ ID NO: 825
cuccuaucaccguggaacu

SEQ ID NO: 66727 - RNA, 19 nt, Artificial Sequence
  Description of Artificial Sequence: Synthetic oligonucleotide
  Antisense strand to SEQ ID NO: 66646
aguuccacggugauaggag

SEQ ID NO: 66728 - RNA, 19 nt, Artificial Sequence
  Description of Artificial Sequence: Synthetic oligonucleotide
  Sense strand starting at position 562 of SEQ ID NO: 825
ugugaacuacuacggcaau

SEQ ID NO: 66729 - RNA, 19 nt, Artificial Sequence
  Description of Artificial Sequence: Synthetic oligonucleotide
  Antisense strand to SEQ ID NO: 66648
auugccguaguaguucaca

SEQ ID NO: 66730 - RNA, 19 nt, Artificial Sequence
  Description of Artificial Sequence: Synthetic oligonucleotide
  Sense strand starting at position 447 of SEQ ID NO: 825
agaauaccucagugagagu

SEQ ID NO: 66731 - RNA, 19 nt, Artificial Sequence
  Description of Artificial Sequence: Synthetic oligonucleotide
  Antisense strand to SEQ ID NO: 66650
acucucacugagguauucu

SEQ ID NO: 66732 - RNA, 19 nt, Artificial Sequence
  Description of Artificial Sequence: Synthetic oligonucleotide
  Sense strand starting at position 376 of SEQ ID NO: 825
guuaaauguaaagaggcau

SEQ ID NO: 66733 - RNA, 19 nt, Artificial Sequence
  Description of Artificial Sequence: Synthetic oligonucleotide
  Antisense strand to SEQ ID NO: 66652
augccucuuuacauuuaac

SEQ ID NO: 66734 - RNA, 19 nt, Artificial Sequence
  Description of Artificial Sequence: Synthetic oligonucleotide
  Sense strand starting at position 338 of SEQ ID NO: 825
uuuaucacagcuggaaauu

SEQ ID NO: 66735 - RNA, 19 nt, Artificial Sequence
  Description of Artificial Sequence: Synthetic oligonucleotide
  Antisense strand to SEQ ID NO: 66654
aauuuccagcugugauaaa

SEQ ID NO: 66736 - RNA, 19 nt, Artificial Sequence
  Description of Artificial Sequence: Synthetic oligonucleotide
  Sense strand starting at position 238 of SEQ ID NO: 825
ccuugugucuucuuaagag

SEQ ID NO: 66737 - RNA, 19 nt, Artificial Sequence
  Description of Artificial Sequence: Synthetic oligonucleotide
  Antisense strand to SEQ ID NO: 66656
cucuuaagaagacacaagg

SEQ ID NO: 66738 - RNA, 19 nt, Artificial Sequence
  Description of Artificial Sequence: Synthetic oligonucleotide
  Sense strand starting at position 235 of SEQ ID NO: 825
ccgccuugugucuucuuaa

SEQ ID NO: 66739 - RNA, 19 nt, Artificial Sequence
  Description of Artificial Sequence: Synthetic oligonucleotide
  Antisense strand to SEQ ID NO: 66658
uuaagaagacacaaggcgg

SEQ ID NO: 66740 - RNA, 19 nt, Artificial Sequence
  Description of Artificial Sequence: Synthetic oligonucleotide
  Sense strand starting at position 3966 of SEQ ID NO: 826
gagguuccaucccugaaga

SEQ ID NO: 66741 - RNA, 19 nt, Artificial Sequence
  Description of Artificial Sequence: Synthetic oligonucleotide
  Antisense strand to SEQ ID NO: 66660
ucuucagggauggaaccuc

SEQ ID NO: 66742 - RNA, 19 nt, Artificial Sequence
  Description of Artificial Sequence: Synthetic oligonucleotide
  Sense strand starting at position 3850 of SEQ ID NO: 826
guuggaaugcuuuaauucu

SEQ ID NO: 66743 - RNA, 19 nt, Artificial Sequence
  Description of Artificial Sequence: Synthetic oligonucleotide
  Antisense strand to SEQ ID NO: 66662
agaauuaaagcauuccaac

SEQ ID NO: 66744 - RNA, 19 nt, Artificial Sequence
  Description of Artificial Sequence: Synthetic oligonucleotide
  Sense strand starting at position 3839 of SEQ ID NO: 826
augguuucuuuguuggaau

SEQ ID NO: 66745 - RNA, 19 nt, Artificial Sequence
  Description of Artificial Sequence: Synthetic oligonucleotide
  Antisense strand to SEQ ID NO: 66664
auuccaacaaagaaaccau

SEQ ID NO: 66746 - RNA, 19 nt, Artificial Sequence
  Description of Artificial Sequence: Synthetic oligonucleotide
  Sense strand starting at position 3838 of SEQ ID NO: 826
aaugguuucuuuguuggaa

SEQ ID NO: 66747 - RNA, 19 nt, Artificial Sequence
  Description of Artificial Sequence: Synthetic oligonucleotide
  Antisense strand to SEQ ID NO: 66666
uuccaacaaagaaaccauu

SEQ ID NO: 66748 - RNA, 19 nt, Artificial Sequence
  Description of Artificial Sequence: Synthetic oligonucleotide
  Sense strand starting at position 3650 of SEQ ID NO: 826
auguuucugugacuuagaa

SEQ ID NO: 66749 - RNA, 19 nt, Artificial Sequence
  Description of Artificial Sequence: Synthetic oligonucleotide
  Antisense strand to SEQ ID NO: 66668
uucuaagucacagaaacau

SEQ ID NO: 66750 - RNA, 19 nt, Artificial Sequence
  Description of Artificial Sequence: Synthetic oligonucleotide
  Sense strand starting at position 3276 of SEQ ID NO: 826
ucaacuuaagguuagcaga

SEQ ID NO: 66751 - RNA, 19 nt, Artificial Sequence
  Description of Artificial Sequence: Synthetic oligonucleotide
  Antisense strand to SEQ ID NO: 66670
ucugcuaaccuuaaguuga

SEQ ID NO: 66752 - RNA, 19 nt, Artificial Sequence
  Description of Artificial Sequence: Synthetic oligonucleotide
  Sense strand starting at position 3201 of SEQ ID NO: 826
uguggagucgucguaucag

SEQ ID NO: 66753 - RNA, 19 nt, Artificial Sequence
  Description of Artificial Sequence: Synthetic oligonucleotide
  Antisense strand to SEQ ID NO: 66672
cugauacgacgacuccaca

SEQ ID NO: 66754 - RNA, 19 nt, Artificial Sequence
  Description of Artificial Sequence: Synthetic oligonucleotide
  Sense strand starting at position 3019 of SEQ ID NO: 826
gacguuguugucuaccaaa

SEQ ID NO: 66755 - RNA, 19 nt, Artificial Sequence
  Description of Artificial Sequence: Synthetic oligonucleotide
  Antisense strand to SEQ ID NO: 66674
uuugguagacaacaacguc

SEQ ID NO: 66756 - RNA, 19 nt, Artificial Sequence
  Description of Artificial Sequence: Synthetic oligonucleotide
  Sense strand starting at position 2685 of SEQ ID NO: 826
aagcacugugaucagacuu

SEQ ID NO: 66757 - RNA, 19 nt, Artificial Sequence
  Description of Artificial Sequence: Synthetic oligonucleotide
  Antisense strand to SEQ ID NO: 66676
aagucugaucacagugcuu

SEQ ID NO: 66758 - RNA, 19 nt, Artificial Sequence
  Description of Artificial Sequence: Synthetic oligonucleotide
  Sense strand starting at position 2684 of SEQ ID NO: 826
gaagcacugugaucagacu

SEQ ID NO: 66759 - RNA, 19 nt, Artificial Sequence
  Description of Artificial Sequence: Synthetic oligonucleotide
  Antisense strand to SEQ ID NO: 66678
agucugaucacagugcuuc

SEQ ID NO: 66760 - RNA, 19 nt, Artificial Sequence
  Description of Artificial Sequence: Synthetic oligonucleotide
  Sense strand starting at position 2642 of SEQ ID NO: 826
uugaauuauuagcuacgaa

SEQ ID NO: 66761 - RNA, 19 nt, Artificial Sequence
  Description of Artificial Sequence: Synthetic oligonucleotide
  Antisense strand to SEQ ID NO: 66680
uucguagcuaauaauucaa

SEQ ID NO: 66762 - RNA, 19 nt, Artificial Sequence
  Description of Artificial Sequence: Synthetic oligonucleotide
  Sense strand starting at position 2638 of SEQ ID NO: 826
agucuugaauuauuagcua

SEQ ID NO: 66763 - RNA, 19 nt, Artificial Sequence
  Description of Artificial Sequence: Synthetic oligonucleotide
  Antisense strand to SEQ ID NO: 66682
uagcuaauaauucaagacu

SEQ ID NO: 66764 - RNA, 19 nt, Artificial Sequence
  Description of Artificial Sequence: Synthetic oligonucleotide
  Sense strand starting at position 2564 of SEQ ID NO: 826
ucccuaccucgcguuuauu

SEQ ID NO: 66765 - RNA, 19 nt, Artificial Sequence
  Description of Artificial Sequence: Synthetic oligonucleotide
  Antisense strand to SEQ ID NO: 66684
aauaaacgcgagguaggga

SEQ ID NO: 66766 - RNA, 19 nt, Artificial Sequence
  Description of Artificial Sequence: Synthetic oligonucleotide
  Sense strand starting at position 2545 of SEQ ID NO: 826
aagugugaguucccucaau

SEQ ID NO: 66767 - RNA, 19 nt, Artificial Sequence
  Description of Artificial Sequence: Synthetic oligonucleotide
  Antisense strand to SEQ ID NO: 66686
auugagggaacucacacuu

SEQ ID NO: 66768 - RNA, 19 nt, Artificial Sequence
  Description of Artificial Sequence: Synthetic oligonucleotide
  Sense strand starting at position 2495 of SEQ ID NO: 826
agaggaccuugccucauau

SEQ ID NO: 66769 - RNA, 19 nt, Artificial Sequence
  Description of Artificial Sequence: Synthetic oligonucleotide
  Antisense strand to SEQ ID NO: 66688
auaugaggcaagguccucu

SEQ ID NO: 66770 - RNA, 19 nt, Artificial Sequence
  Description of Artificial Sequence: Synthetic oligonucleotide
  Sense strand starting at position 2479 of SEQ ID NO: 826
ccuucuuagucucuacaga

SEQ ID NO: 66771 - RNA, 19 nt, Artificial Sequence
  Description of Artificial Sequence: Synthetic oligonucleotide
  Antisense strand to SEQ ID NO: 66690
ucuguagagacuaagaagg

SEQ ID NO: 66772 - RNA, 19 nt, Artificial Sequence
  Description of Artificial Sequence: Synthetic oligonucleotide
  Sense strand starting at position 2328 of SEQ ID NO: 826
gucacauaaccuugagcuu

SEQ ID NO: 66773 - RNA, 19 nt, Artificial Sequence
  Description of Artificial Sequence: Synthetic oligonucleotide
  Antisense strand to SEQ ID NO: 66692
aagcucaagguuaugugac

SEQ ID NO: 66774 - RNA, 19 nt, Artificial Sequence
  Description of Artificial Sequence: Synthetic oligonucleotide
  Sense strand starting at position 2091 of SEQ ID NO: 826
gcucuauuuacgugaacgc

SEQ ID NO: 66775 - RNA, 19 nt, Artificial Sequence
  Description of Artificial Sequence: Synthetic oligonucleotide
  Antisense strand to SEQ ID NO: 66694
gcguucacguaaauagagc

SEQ ID NO: 66776 - RNA, 19 nt, Artificial Sequence
  Description of Artificial Sequence: Synthetic oligonucleotide
  Sense strand starting at position 2051 of SEQ ID NO: 826
auccuaucaccagguuuau

SEQ ID NO: 66777 - RNA, 19 nt, Artificial Sequence
  Description of Artificial Sequence: Synthetic oligonucleotide
  Antisense strand to SEQ ID NO: 66696
auaaaccuggugauaggau

SEQ ID NO: 66778 - RNA, 19 nt, Artificial Sequence
  Description of Artificial Sequence: Synthetic oligonucleotide
  Sense strand starting at position 1462 of SEQ ID NO: 826
gauuucgcgcuccgggaaa

SEQ ID NO: 66779 - RNA, 19 nt, Artificial Sequence
  Description of Artificial Sequence: Synthetic oligonucleotide
  Antisense strand to SEQ ID NO: 66698
uuucccggagcgcgaaauc

SEQ ID NO: 66780 - RNA, 19 nt, Artificial Sequence
  Description of Artificial Sequence: Synthetic oligonucleotide
  Sense strand starting at position 1338 of SEQ ID NO: 826
aggccagaucucggagcaa

SEQ ID NO: 66781 - RNA, 19 nt, Artificial Sequence
  Description of Artificial Sequence: Synthetic oligonucleotide
  Antisense strand to SEQ ID NO: 66700
uugcuccgagaucuggccu

SEQ ID NO: 66782 - RNA, 19 nt, Artificial Sequence
  Description of Artificial Sequence: Synthetic oligonucleotide
  Sense strand starting at position 1263 of SEQ ID NO: 826
ggcggaauccgggacaucu

SEQ ID NO: 66783 - RNA, 19 nt, Artificial Sequence
  Description of Artificial Sequence: Synthetic oligonucleotide
  Antisense strand to SEQ ID NO: 66702
agaugucccggauuccgcc

SEQ ID NO: 66784 - RNA, 19 nt, Artificial Sequence
  Description of Artificial Sequence: Synthetic oligonucleotide
  Sense strand starting at position 1192 of SEQ ID NO: 826
gaugaaguggaggguauua

SEQ ID NO: 66785 - RNA, 19 nt, Artificial Sequence
  Description of Artificial Sequence: Synthetic oligonucleotide
  Antisense strand to SEQ ID NO: 66704
uaauacccuccacuucauc

SEQ ID NO: 66786 - RNA, 19 nt, Artificial Sequence
  Description of Artificial Sequence: Synthetic oligonucleotide
  Sense strand starting at position 1137 of SEQ ID NO: 826
ggagaugaccugcgugacu

SEQ ID NO: 66787 - RNA, 19 nt, Artificial Sequence
  Description of Artificial Sequence: Synthetic oligonucleotide
  Antisense strand to SEQ ID NO: 66706
agucacgcaggucaucucc

SEQ ID NO: 66788 - RNA, 19 nt, Artificial Sequence
  Description of Artificial Sequence: Synthetic oligonucleotide
  Sense strand starting at position 1124 of SEQ ID NO: 826
cccguuaaucuagggagau

SEQ ID NO: 66789 - RNA, 19 nt, Artificial Sequence
  Description of Artificial Sequence: Synthetic oligonucleotide
  Antisense strand to SEQ ID NO: 66708
aucucccuagauuaacggg

SEQ ID NO: 66790 - RNA, 19 nt, Artificial Sequence
  Description of Artificial Sequence: Synthetic oligonucleotide
  Sense strand starting at position 1076 of SEQ ID NO: 826
ccacuuaaucuggguauca

SEQ ID NO: 66791 - RNA, 19 nt, Artificial Sequence
  Description of Artificial Sequence: Synthetic oligonucleotide
  Antisense strand to SEQ ID NO: 66710
ugauacccagauuaagugg

SEQ ID NO: 66792 - RNA, 19 nt, Artificial Sequence
  Description of Artificial Sequence: Synthetic oligonucleotide
  Sense strand starting at position 1040 of SEQ ID NO: 826
ugguauuaccuggaaggcu

SEQ ID NO: 66793 - RNA, 19 nt, Artificial Sequence
  Description of Artificial Sequence: Synthetic oligonucleotide
  Antisense strand to SEQ ID NO: 66712
agccuuccagguaauacca

SEQ ID NO: 66794 - RNA, 19 nt, Artificial Sequence
  Description of Artificial Sequence: Synthetic oligonucleotide
  Sense strand starting at position 911 of SEQ ID NO: 826
aaguaugaaucucuagguu

SEQ ID NO: 66795 - RNA, 19 nt, Artificial Sequence
  Description of Artificial Sequence: Synthetic oligonucleotide
  Antisense strand to SEQ ID NO: 66714
aaccuagagauucauacuu

SEQ ID NO: 66796 - RNA, 19 nt, Artificial Sequence
  Description of Artificial Sequence: Synthetic oligonucleotide
  Sense strand starting at position 904 of SEQ ID NO: 826
cgugauuaaguaugaaucu

SEQ ID NO: 66797 - RNA, 19 nt, Artificial Sequence
  Description of Artificial Sequence: Synthetic oligonucleotide
  Antisense strand to SEQ ID NO: 66716
agauucauacuuaaucacg

SEQ ID NO: 66798 - RNA, 19 nt, Artificial Sequence
  Description of Artificial Sequence: Synthetic oligonucleotide
  Sense strand starting at position 901 of SEQ ID NO: 826
ccacgugauuaaguaugaa

SEQ ID NO: 66799 - RNA, 19 nt, Artificial Sequence
  Description of Artificial Sequence: Synthetic oligonucleotide
  Antisense strand to SEQ ID NO: 66718
uucauacuuaaucacgugg

SEQ ID NO: 66800 - RNA, 19 nt, Artificial Sequence
  Description of Artificial Sequence: Synthetic oligonucleotide
  Sense strand starting at position 898 of SEQ ID NO: 826
gucccacgugauuaaguau

SEQ ID NO: 66801 - RNA, 19 nt, Artificial Sequence
  Description of Artificial Sequence: Synthetic oligonucleotide
  Antisense strand to SEQ ID NO: 66720
auacuuaaucacgugggac

SEQ ID NO: 66802 - RNA, 19 nt, Artificial Sequence
  Description of Artificial Sequence: Synthetic oligonucleotide
  Sense strand starting at position 866 of SEQ ID NO: 826
gcugaucuuccucaugaaa

SEQ ID NO: 66803 - RNA, 19 nt, Artificial Sequence
  Description of Artificial Sequence: Synthetic oligonucleotide
  Antisense strand to SEQ ID NO: 66722
uuucaugaggaagaucagc

SEQ ID NO: 66804 - RNA, 19 nt, Artificial Sequence
  Description of Artificial Sequence: Synthetic oligonucleotide
  Sense strand starting at position 865 of SEQ ID NO: 826
agcugaucuuccucaugaa

SEQ ID NO: 66805 - RNA, 19 nt, Artificial Sequence
  Description of Artificial Sequence: Synthetic oligonucleotide
  Antisense strand to SEQ ID NO: 66724
uucaugaggaagaucagcu

SEQ ID NO: 66806 - RNA, 19 nt, Artificial Sequence
  Description of Artificial Sequence: Synthetic oligonucleotide
  Sense strand starting at position 762 of SEQ ID NO: 826
aaacuagugcuuuagguca

SEQ ID NO: 66807 - RNA, 19 nt, Artificial Sequence
  Description of Artificial Sequence: Synthetic oligonucleotide
  Antisense strand to SEQ ID NO: 66726
ugaccuaaagcacuaguuu

SEQ ID NO: 66808 - RNA, 19 nt, Artificial Sequence
  Description of Artificial Sequence: Synthetic oligonucleotide
  Sense strand starting at position 510 of SEQ ID NO: 826
ucgucuccucuuggaauuu

SEQ ID NO: 66809 - RNA, 19 nt, Artificial Sequence
  Description of Artificial Sequence: Synthetic oligonucleotide
  Antisense strand to SEQ ID NO: 66728
aaauuccaagaggagacga

SEQ ID NO: 66810 - RNA, 19 nt, Artificial Sequence
  Description of Artificial Sequence: Synthetic oligonucleotide
  Sense strand starting at position 344 of SEQ ID NO: 826
gaaaguguccugugaaagu

SEQ ID NO: 66811 - RNA, 19 nt, Artificial Sequence
  Description of Artificial Sequence: Synthetic oligonucleotide
  Antisense strand to SEQ ID NO: 66730
acuuucacaggacacuuuc

SEQ ID NO: 66812 - RNA, 19 nt, Artificial Sequence
  Description of Artificial Sequence: Synthetic oligonucleotide
  Sense strand starting at position 340 of SEQ ID NO: 826
aaaggaaaguguccuguga

SEQ ID NO: 66813 - RNA, 19 nt, Artificial Sequence
  Description of Artificial Sequence: Synthetic oligonucleotide
  Antisense strand to SEQ ID NO: 66732
ucacaggacacuuuccuuu

SEQ ID NO: 66814 - RNA, 19 nt, Artificial Sequence
  Description of Artificial Sequence: Synthetic oligonucleotide
  Sense strand starting at position 290 of SEQ ID NO: 826
ccauguccaaguuaucgua

SEQ ID NO: 66815 - RNA, 19 nt, Artificial Sequence
  Description of Artificial Sequence: Synthetic oligonucleotide
  Antisense strand to SEQ ID NO: 66734
uacgauaacuuggacaugg

SEQ ID NO: 66816 - RNA, 19 nt, Artificial Sequence
  Description of Artificial Sequence: Synthetic oligonucleotide
  Sense strand starting at position 148 of SEQ ID NO: 826
aucugauacguuuacauac

SEQ ID NO: 66817 - RNA, 19 nt, Artificial Sequence
  Description of Artificial Sequence: Synthetic oligonucleotide
  Antisense strand to SEQ ID NO: 66736
guauguaaacguaucagau

SEQ ID NO: 66818 - RNA, 19 nt, Artificial Sequence
  Description of Artificial Sequence: Synthetic oligonucleotide
  Sense strand starting at position 104 of SEQ ID NO: 826
ucauauuaguuaccaugua

SEQ ID NO: 66819 - RNA, 19 nt, Artificial Sequence
  Description of Artificial Sequence: Synthetic oligonucleotide
  Antisense strand to SEQ ID NO: 66738
uacaugguaacuaauauga

SEQ ID NO: 66820 - RNA, 19 nt, Artificial Sequence
  Description of Artificial Sequence: Synthetic oligonucleotide
  Sense strand starting at position 3843 of SEQ ID NO: 827
ucaguauacugggaaagag

SEQ ID NO: 66821 - RNA, 19 nt, Artificial Sequence
  Description of Artificial Sequence: Synthetic oligonucleotide
  Antisense strand to SEQ ID NO: 66740
cucuuucccaguauacuga

SEQ ID NO: 66822 - RNA, 19 nt, Artificial Sequence
  Description of Artificial Sequence: Synthetic oligonucleotide
  Sense strand starting at position 3666 of SEQ ID NO: 827
aacugagucuccuggauuu

SEQ ID NO: 66823 - RNA, 19 nt, Artificial Sequence
  Description of Artificial Sequence: Synthetic oligonucleotide
  Antisense strand to SEQ ID NO: 66742
aaauccaggagacucaguu

SEQ ID NO: 66824 - RNA, 19 nt, Artificial Sequence
  Description of Artificial Sequence: Synthetic oligonucleotide
  Sense strand starting at position 3664 of SEQ ID NO: 827
ugaacugagucuccuggau

SEQ ID NO: 66825 - RNA, 19 nt, Artificial Sequence
  Description of Artificial Sequence: Synthetic oligonucleotide
  Antisense strand to SEQ ID NO: 66744
auccaggagacucaguuca

SEQ ID NO: 66826 - RNA, 19 nt, Artificial Sequence
  Description of Artificial Sequence: Synthetic oligonucleotide
  Sense strand starting at position 3476 of SEQ ID NO: 827
guuccuccacagcaagauu

SEQ ID NO: 66827 - RNA, 19 nt, Artificial Sequence
  Description of Artificial Sequence: Synthetic oligonucleotide
  Antisense strand to SEQ ID NO: 66746
aaucuugcuguggaggaac

SEQ ID NO: 66828 - RNA, 19 nt, Artificial Sequence
  Description of Artificial Sequence: Synthetic oligonucleotide
  Sense strand starting at position 3382 of SEQ ID NO: 827
uuguucuuagaggguggua

SEQ ID NO: 66829 - RNA, 19 nt, Artificial Sequence
  Description of Artificial Sequence: Synthetic oligonucleotide
  Antisense strand to SEQ ID NO: 66748
uaccacccucuaagaacaa

SEQ ID NO: 66830 - RNA, 19 nt, Artificial Sequence
  Description of Artificial Sequence: Synthetic oligonucleotide
  Sense strand starting at position 3275 of SEQ ID NO: 827
uggcauacagugugaucaa

SEQ ID NO: 66831 - RNA, 19 nt, Artificial Sequence
  Description of Artificial Sequence: Synthetic oligonucleotide
  Antisense strand to SEQ ID NO: 66750
uugaucacacuguaugcca

SEQ ID NO: 66832 - RNA, 19 nt, Artificial Sequence
  Description of Artificial Sequence: Synthetic oligonucleotide
  Sense strand starting at position 3231 of SEQ ID NO: 827
ucuacagaaugagaauagu

SEQ ID NO: 66833 - RNA, 19 nt, Artificial Sequence
  Description of Artificial Sequence: Synthetic oligonucleotide
  Antisense strand to SEQ ID NO: 66752
acuauucucauucuguaga

SEQ ID NO: 66834 - RNA, 19 nt, Artificial Sequence
  Description of Artificial Sequence: Synthetic oligonucleotide
  Sense strand starting at position 3191 of SEQ ID NO: 827
uuaggcaaguuacucaaau

SEQ ID NO: 66835 - RNA, 19 nt, Artificial Sequence
  Description of Artificial Sequence: Synthetic oligonucleotide
  Antisense strand to SEQ ID NO: 66754
auuugaguaacuugccuaa

SEQ ID NO: 66836 - RNA, 19 nt, Artificial Sequence
  Description of Artificial Sequence: Synthetic oligonucleotide
  Sense strand starting at position 3122 of SEQ ID NO: 827
cucggagugcugagacguu

SEQ ID NO: 66837 - RNA, 19 nt, Artificial Sequence
  Description of Artificial Sequence: Synthetic oligonucleotide
  Antisense strand to SEQ ID NO: 66756
aacgucucagcacuccgag

SEQ ID NO: 66838 - RNA, 19 nt, Artificial Sequence
  Description of Artificial Sequence: Synthetic oligonucleotide
  Sense strand starting at position 2982 of SEQ ID NO: 827
aggaacauuuccuggagga

SEQ ID NO: 66839 - RNA, 19 nt, Artificial Sequence
  Description of Artificial Sequence: Synthetic oligonucleotide
  Antisense strand to SEQ ID NO: 66758
uccuccaggaaauguuccu

SEQ ID NO: 66840 - RNA, 19 nt, Artificial Sequence
  Description of Artificial Sequence: Synthetic oligonucleotide
  Sense strand starting at position 2972 of SEQ ID NO: 827
ggacuugguuaggaacauu

SEQ ID NO: 66841 - RNA, 19 nt, Artificial Sequence
  Description of Artificial Sequence: Synthetic oligonucleotide
  Antisense strand to SEQ ID NO: 66760
aauguuccuaaccaagucc

SEQ ID NO: 66842 - RNA, 19 nt, Artificial Sequence
  Description of Artificial Sequence: Synthetic oligonucleotide
  Sense strand starting at position 2946 of SEQ ID NO: 827
cugagagguacugggugau

SEQ ID NO: 66843 - RNA, 19 nt, Artificial Sequence
  Description of Artificial Sequence: Synthetic oligonucleotide
  Antisense strand to SEQ ID NO: 66762
aucacccaguaccucucag

SEQ ID NO: 66844 - RNA, 19 nt, Artificial Sequence
  Description of Artificial Sequence: Synthetic oligonucleotide
  Sense strand starting at position 2936 of SEQ ID NO: 827
gaaaguucuccugagaggu

SEQ ID NO: 66845 - RNA, 19 nt, Artificial Sequence
  Description of Artificial Sequence: Synthetic oligonucleotide
  Antisense strand to SEQ ID NO: 66764
accucucaggagaacuuuc

SEQ ID NO: 66846 - RNA, 19 nt, Artificial Sequence
  Description of Artificial Sequence: Synthetic oligonucleotide
  Sense strand starting at position 2933 of SEQ ID NO: 827
guggaaaguucuccugaga

SEQ ID NO: 66847 - RNA, 19 nt, Artificial Sequence
  Description of Artificial Sequence: Synthetic oligonucleotide
  Antisense strand to SEQ ID NO: 66766
ucucaggagaacuuuccac

SEQ ID NO: 66848 - RNA, 19 nt, Artificial Sequence
  Description of Artificial Sequence: Synthetic oligonucleotide
  Sense strand starting at position 2911 of SEQ ID NO: 827
ggauaacgguaagauaaua

SEQ ID NO: 66849 - RNA, 19 nt, Artificial Sequence
  Description of Artificial Sequence: Synthetic oligonucleotide
  Antisense strand to SEQ ID NO: 66768
uauuaucuuaccguuaucc

SEQ ID NO: 66850 - RNA, 19 nt, Artificial Sequence
  Description of Artificial Sequence: Synthetic oligonucleotide
  Sense strand starting at position 2713 of SEQ ID NO: 827
ggacauccauaggaaugaa

SEQ ID NO: 66851 - RNA, 19 nt, Artificial Sequence
  Description of Artificial Sequence: Synthetic oligonucleotide
  Antisense strand to SEQ ID NO: 66770
uucauuccuauggaugucc

SEQ ID NO: 66852 - RNA, 19 nt, Artificial Sequence
  Description of Artificial Sequence: Synthetic oligonucleotide
  Sense strand starting at position 2674 of SEQ ID NO: 827
ccguucuuaugccucuaaa

SEQ ID NO: 66853 - RNA, 19 nt, Artificial Sequence
  Description of Artificial Sequence: Synthetic oligonucleotide
  Antisense strand to SEQ ID NO: 66772
uuuagaggcauaagaacgg

SEQ ID NO: 66854 - RNA, 19 nt, Artificial Sequence
  Description of Artificial Sequence: Synthetic oligonucleotide
  Sense strand starting at position 2251 of SEQ ID NO: 827
cguuucuuuggccagggaa

SEQ ID NO: 66855 - RNA, 19 nt, Artificial Sequence
  Description of Artificial Sequence: Synthetic oligonucleotide
  Antisense strand to SEQ ID NO: 66774
uucccuggccaaagaaacg

SEQ ID NO: 66856 - RNA, 19 nt, Artificial Sequence
  Description of Artificial Sequence: Synthetic oligonucleotide
  Sense strand starting at position 2250 of SEQ ID NO: 827
ucguuucuuuggccaggga

SEQ ID NO: 66857 - RNA, 19 nt, Artificial Sequence
  Description of Artificial Sequence: Synthetic oligonucleotide
  Antisense strand to SEQ ID NO: 66776
ucccuggccaaagaaacga

SEQ ID NO: 66858 - RNA, 19 nt, Artificial Sequence
  Description of Artificial Sequence: Synthetic oligonucleotide
  Sense strand starting at position 2221 of SEQ ID NO: 827
ccagguauuccagacagua

SEQ ID NO: 66859 - RNA, 19 nt, Artificial Sequence
  Description of Artificial Sequence: Synthetic oligonucleotide
  Antisense strand to SEQ ID NO: 66778
uacugucuggaauaccugg

SEQ ID NO: 66860 - RNA, 19 nt, Artificial Sequence
  Description of Artificial Sequence: Synthetic oligonucleotide
  Sense strand starting at position 1754 of SEQ ID NO: 827
uuacaaggauuccauggaa

SEQ ID NO: 66861 - RNA, 19 nt, Artificial Sequence
  Description of Artificial Sequence: Synthetic oligonucleotide
  Antisense strand to SEQ ID NO: 66780
uuccauggaauccuuguaa

SEQ ID NO: 66862 - RNA, 19 nt, Artificial Sequence
  Description of Artificial Sequence: Synthetic oligonucleotide
  Sense strand starting at position 1749 of SEQ ID NO: 827
gguuguuacaaggauucca

SEQ ID NO: 66863 - RNA, 19 nt, Artificial Sequence
  Description of Artificial Sequence: Synthetic oligonucleotide
  Antisense strand to SEQ ID NO: 66782
uggaauccuuguaacaacc

SEQ ID NO: 66864 - RNA, 19 nt, Artificial Sequence
  Description of Artificial Sequence: Synthetic oligonucleotide
  Sense strand starting at position 1710 of SEQ ID NO: 827
ccacgauagaguggaaaca

SEQ ID NO: 66865 - RNA, 19 nt, Artificial Sequence
  Description of Artificial Sequence: Synthetic oligonucleotide
  Antisense strand to SEQ ID NO: 66784
uguuuccacucuaucgugg

SEQ ID NO: 66866 - RNA, 19 nt, Artificial Sequence
  Description of Artificial Sequence: Synthetic oligonucleotide
  Sense strand starting at position 1701 of SEQ ID NO: 827
cagucuccuccacgauaga

SEQ ID NO: 66867 - RNA, 19 nt, Artificial Sequence
  Description of Artificial Sequence: Synthetic oligonucleotide
  Antisense strand to SEQ ID NO: 66786
ucuaucguggaggagacug

SEQ ID NO: 66868 - RNA, 19 nt, Artificial Sequence
  Description of Artificial Sequence: Synthetic oligonucleotide
  Sense strand starting at position 1699 of SEQ ID NO: 827
cucagucuccuccacgaua

SEQ ID NO: 66869 - RNA, 19 nt, Artificial Sequence
  Description of Artificial Sequence: Synthetic oligonucleotide
  Antisense strand to SEQ ID NO: 66788
uaucguggaggagacugag

SEQ ID NO: 66870 - RNA, 19 nt, Artificial Sequence
  Description of Artificial Sequence: Synthetic oligonucleotide
  Sense strand starting at position 1511 of SEQ ID NO: 827
uggcaaauucuagacucuu

SEQ ID NO: 66871 - RNA, 19 nt, Artificial Sequence
  Description of Artificial Sequence: Synthetic oligonucleotide
  Antisense strand to SEQ ID NO: 66790
aagagucuagaauuugcca

SEQ ID NO: 66872 - RNA, 19 nt, Artificial Sequence
  Description of Artificial Sequence: Synthetic oligonucleotide
  Sense strand starting at position 1500 of SEQ ID NO: 827
aaagcugaugcuggcaaau

SEQ ID NO: 66873 - RNA, 19 nt, Artificial Sequence
  Description of Artificial Sequence: Synthetic oligonucleotide
  Antisense strand to SEQ ID NO: 66792
auuugccagcaucagcuuu

SEQ ID NO: 66874 - RNA, 19 nt, Artificial Sequence
  Description of Artificial Sequence: Synthetic oligonucleotide
  Sense strand starting at position 1387 of SEQ ID NO: 827
gcagcaucauccuuuagcu

SEQ ID NO: 66875 - RNA, 19 nt, Artificial Sequence
  Description of Artificial Sequence: Synthetic oligonucleotide
  Antisense strand to SEQ ID NO: 66794
agcuaaaggaugaugcugc

SEQ ID NO: 66876 - RNA, 19 nt, Artificial Sequence
  Description of Artificial Sequence: Synthetic oligonucleotide
  Sense strand starting at position 1240 of SEQ ID NO: 827
gaugaugguagagguguua

SEQ ID NO: 66877 - RNA, 19 nt, Artificial Sequence
  Description of Artificial Sequence: Synthetic oligonucleotide
  Antisense strand to SEQ ID NO: 66796
uaacaccucuaccaucauc

SEQ ID NO: 66878 - RNA, 19 nt, Artificial Sequence
  Description of Artificial Sequence: Synthetic oligonucleotide
  Sense strand starting at position 1239 of SEQ ID NO: 827
ugaugaugguagagguguu

SEQ ID NO: 66879 - RNA, 19 nt, Artificial Sequence
  Description of Artificial Sequence: Synthetic oligonucleotide
  Antisense strand to SEQ ID NO: 66798
aacaccucuaccaucauca

SEQ ID NO: 66880 - RNA, 19 nt, Artificial Sequence
  Description of Artificial Sequence: Synthetic oligonucleotide
  Sense strand starting at position 1231 of SEQ ID NO: 827
ggagcuagugaugauggua

SEQ ID NO: 66881 - RNA, 19 nt, Artificial Sequence
  Description of Artificial Sequence: Synthetic oligonucleotide
  Antisense strand to SEQ ID NO: 66800
uaccaucaucacuagcucc

SEQ ID NO: 66882 - RNA, 19 nt, Artificial Sequence
  Description of Artificial Sequence: Synthetic oligonucleotide
  Sense strand starting at position 1152 of SEQ ID NO: 827
ugaggaacuuauccaaagu

SEQ ID NO: 66883 - RNA, 19 nt, Artificial Sequence
  Description of Artificial Sequence: Synthetic oligonucleotide
  Antisense strand to SEQ ID NO: 66802
acuuuggauaaguuccuca

SEQ ID NO: 66884 - RNA, 19 nt, Artificial Sequence
  Description of Artificial Sequence: Synthetic oligonucleotide
  Sense strand starting at position 1125 of SEQ ID NO: 827
ggcuccuuugccuauggga

SEQ ID NO: 66885 - RNA, 19 nt, Artificial Sequence
  Description of Artificial Sequence: Synthetic oligonucleotide
  Antisense strand to SEQ ID NO: 66804
ucccauaggcaaaggagcc

SEQ ID NO: 66886 - RNA, 19 nt, Artificial Sequence
  Description of Artificial Sequence: Synthetic oligonucleotide
  Sense strand starting at position 1104 of SEQ ID NO: 827
aggaaaucuggguggaguu

SEQ ID NO: 66887 - RNA, 19 nt, Artificial Sequence
  Description of Artificial Sequence: Synthetic oligonucleotide
  Antisense strand to SEQ ID NO: 66806
aacuccacccagauuuccu

SEQ ID NO: 66888 - RNA, 19 nt, Artificial Sequence
  Description of Artificial Sequence: Synthetic oligonucleotide
  Sense strand starting at position 1103 of SEQ ID NO: 827
aaggaaaucuggguggagu

SEQ ID NO: 66889 - RNA, 19 nt, Artificial Sequence
  Description of Artificial Sequence: Synthetic oligonucleotide
  Antisense strand to SEQ ID NO: 66808
acuccacccagauuuccuu

SEQ ID NO: 66890 - RNA, 19 nt, Artificial Sequence
  Description of Artificial Sequence: Synthetic oligonucleotide
  Sense strand starting at position 1035 of SEQ ID NO: 827
gucccugccuaaucagaca

SEQ ID NO: 66891 - RNA, 19 nt, Artificial Sequence
  Description of Artificial Sequence: Synthetic oligonucleotide
  Antisense strand to SEQ ID NO: 66810
ugucugauuaggcagggac

SEQ ID NO: 66892 - RNA, 19 nt, Artificial Sequence
  Description of Artificial Sequence: Synthetic oligonucleotide
  Sense strand starting at position 1028 of SEQ ID NO: 827
ggcuaaggucccugccuaa

SEQ ID NO: 66893 - RNA, 19 nt, Artificial Sequence
  Description of Artificial Sequence: Synthetic oligonucleotide
  Antisense strand to SEQ ID NO: 66812
uuaggcagggaccuuagcc

SEQ ID NO: 66894 - RNA, 19 nt, Artificial Sequence
  Description of Artificial Sequence: Synthetic oligonucleotide
  Sense strand starting at position 1015 of SEQ ID NO: 827
cucauucugcuuuggcuaa

SEQ ID NO: 66895 - RNA, 19 nt, Artificial Sequence
  Description of Artificial Sequence: Synthetic oligonucleotide
  Antisense strand to SEQ ID NO: 66814
uuagccaaagcagaaugag

SEQ ID NO: 66896 - RNA, 19 nt, Artificial Sequence
  Description of Artificial Sequence: Synthetic oligonucleotide
  Sense strand starting at position 1002 of SEQ ID NO: 827
cucuuuguauggucucauu

SEQ ID NO: 66897 - RNA, 19 nt, Artificial Sequence
  Description of Artificial Sequence: Synthetic oligonucleotide
  Antisense strand to SEQ ID NO: 66816
aaugagaccauacaaagag

SEQ ID NO: 66898 - RNA, 19 nt, Artificial Sequence
  Description of Artificial Sequence: Synthetic oligonucleotide
  Sense strand starting at position 889 of SEQ ID NO: 827
ccguucuaccuacaaagaa

SEQ ID NO: 66899 - RNA, 19 nt, Artificial Sequence
  Description of Artificial Sequence: Synthetic oligonucleotide
  Antisense strand to SEQ ID NO: 66818
uucuuuguagguagaacgg

SEQ ID NO: 66900 - RNA, 19 nt, Artificial Sequence
  Description of Artificial Sequence: Synthetic oligonucleotide
  Sense strand starting at position 149 of SEQ ID NO: 829
guucuaauguucucagacc

SEQ ID NO: 66901 - RNA, 19 nt, Artificial Sequence
  Description of Artificial Sequence: Synthetic oligonucleotide
  Antisense strand to SEQ ID NO: 66820
ggucugagaacauuagaac

SEQ ID NO: 66902 - RNA, 19 nt, Artificial Sequence
  Description of Artificial Sequence: Synthetic oligonucleotide
  Sense strand starting at position 194 of SEQ ID NO: 829
gagugaggcaguuaagaug

SEQ ID NO: 66903 - RNA, 19 nt, Artificial Sequence
  Description of Artificial Sequence: Synthetic oligonucleotide
  Antisense strand to SEQ ID NO: 66822
caucuuaacugccucacuc

SEQ ID NO: 66904 - RNA, 19 nt, Artificial Sequence
  Description of Artificial Sequence: Synthetic oligonucleotide
  Sense strand starting at position 201 of SEQ ID NO: 829
gcaguuaagauguaagaac

SEQ ID NO: 66905 - RNA, 19 nt, Artificial Sequence
  Description of Artificial Sequence: Synthetic oligonucleotide
  Antisense strand to SEQ ID NO: 66824
guucuuacaucuuaacugc

SEQ ID NO: 66906 - RNA, 19 nt, Artificial Sequence
  Description of Artificial Sequence: Synthetic oligonucleotide
  Sense strand starting at position 322 of SEQ ID NO: 829
acaugugugggugaaggau

SEQ ID NO: 66907 - RNA, 19 nt, Artificial Sequence
  Description of Artificial Sequence: Synthetic oligonucleotide
  Antisense strand to SEQ ID NO: 66826
auccuucacccacacaugu

SEQ ID NO: 66908 - RNA, 19 nt, Artificial Sequence
  Description of Artificial Sequence: Synthetic oligonucleotide
  Sense strand starting at position 331 of SEQ ID NO: 829
ggugaaggaugcucagaga

SEQ ID NO: 66909 - RNA, 19 nt, Artificial Sequence
  Description of Artificial Sequence: Synthetic oligonucleotide
  Antisense strand to SEQ ID NO: 66828
ucucugagcauccuucacc

SEQ ID NO: 66910 - RNA, 19 nt, Artificial Sequence
  Description of Artificial Sequence: Synthetic oligonucleotide
  Sense strand starting at position 345 of SEQ ID NO: 829
agagaguguuggguuggaa

SEQ ID NO: 66911 - RNA, 19 nt, Artificial Sequence
  Description of Artificial Sequence: Synthetic oligonucleotide
  Antisense strand to SEQ ID NO: 66830
uuccaacccaacacucucu

SEQ ID NO: 66912 - RNA, 19 nt, Artificial Sequence
  Description of Artificial Sequence: Synthetic oligonucleotide
  Sense strand starting at position 400 of SEQ ID NO: 829
gacuguggucauugggacu

SEQ ID NO: 66913 - RNA, 19 nt, Artificial Sequence
  Description of Artificial Sequence: Synthetic oligonucleotide
  Antisense strand to SEQ ID NO: 66832
agucccaaugaccacaguc

SEQ ID NO: 66914 - RNA, 19 nt, Artificial Sequence
  Description of Artificial Sequence: Synthetic oligonucleotide
  Sense strand starting at position 534 of SEQ ID NO: 829
ccuagagagcagugaauca

SEQ ID NO: 66915 - RNA, 19 nt, Artificial Sequence
  Description of Artificial Sequence: Synthetic oligonucleotide
  Antisense strand to SEQ ID NO: 66834
ugauucacugcucucuagg

SEQ ID NO: 66916 - RNA, 19 nt, Artificial Sequence
  Description of Artificial Sequence: Synthetic oligonucleotide
  Sense strand starting at position 909 of SEQ ID NO: 829
ggaauacugcgagggagaa

SEQ ID NO: 66917 - RNA, 19 nt, Artificial Sequence
  Description of Artificial Sequence: Synthetic oligonucleotide
  Antisense strand to SEQ ID NO: 66836
uucucccucgcaguauucc

SEQ ID NO: 66918 - RNA, 19 nt, Artificial Sequence
  Description of Artificial Sequence: Synthetic oligonucleotide
  Sense strand starting at position 910 of SEQ ID NO: 829
gaauacugcgagggagaau

SEQ ID NO: 66919 - RNA, 19 nt, Artificial Sequence
  Description of Artificial Sequence: Synthetic oligonucleotide
  Antisense strand to SEQ ID NO: 66838
auucucccucgcaguauuc

SEQ ID NO: 66920 - RNA, 19 nt, Artificial Sequence
  Description of Artificial Sequence: Synthetic oligonucleotide
  Sense strand starting at position 1002 of SEQ ID NO: 829
ugccuuugagccuauggaa

SEQ ID NO: 66921 - RNA, 19 nt, Artificial Sequence
  Description of Artificial Sequence: Synthetic oligonucleotide
  Antisense strand to SEQ ID NO: 66840
uuccauaggcucaaaggca

SEQ ID NO: 66922 - RNA, 19 nt, Artificial Sequence
  Description of Artificial Sequence: Synthetic oligonucleotide
  Sense strand starting at position 1364 of SEQ ID NO: 829
acaugauacucugcaggaa

SEQ ID NO: 66923 - RNA, 19 nt, Artificial Sequence
  Description of Artificial Sequence: Synthetic oligonucleotide
  Antisense strand to SEQ ID NO: 66842
uuccugcagaguaucaugu

SEQ ID NO: 66924 - RNA, 19 nt, Artificial Sequence
  Description of Artificial Sequence: Synthetic oligonucleotide
  Sense strand starting at position 1367 of SEQ ID NO: 829
ugauacucugcaggaaacu

SEQ ID NO: 66925 - RNA, 19 nt, Artificial Sequence
  Description of Artificial Sequence: Synthetic oligonucleotide
  Antisense strand to SEQ ID NO: 66844
aguuuccugcagaguauca

SEQ ID NO: 66926 - RNA, 19 nt, Artificial Sequence
  Description of Artificial Sequence: Synthetic oligonucleotide
  Sense strand starting at position 1975 of SEQ ID NO: 829
gcucuugagccugucaguu

SEQ ID NO: 66927 - RNA, 19 nt, Artificial Sequence
  Description of Artificial Sequence: Synthetic oligonucleotide
  Antisense strand to SEQ ID NO: 66846
aacugacaggcucaagagc

SEQ ID NO: 66928 - RNA, 19 nt, Artificial Sequence
  Description of Artificial Sequence: Synthetic oligonucleotide
  Sense strand starting at position 2864 of SEQ ID NO: 829
uuguaaaguaagugguaga

SEQ ID NO: 66929 - RNA, 19 nt, Artificial Sequence
  Description of Artificial Sequence: Synthetic oligonucleotide
  Antisense strand to SEQ ID NO: 66848
ucuaccacuuacuuuacaa

SEQ ID NO: 66930 - RNA, 19 nt, Artificial Sequence
  Description of Artificial Sequence: Synthetic oligonucleotide
  Sense strand starting at position 2865 of SEQ ID NO: 829
uguaaaguaagugguagaa

SEQ ID NO: 66931 - RNA, 19 nt, Artificial Sequence
  Description of Artificial Sequence: Synthetic oligonucleotide
  Antisense strand to SEQ ID NO: 66850
uucuaccacuuacuuuaca

SEQ ID NO: 66932 - RNA, 19 nt, Artificial Sequence
  Description of Artificial Sequence: Synthetic oligonucleotide
  Sense strand starting at position 2974 of SEQ ID NO: 829
gaaaguaagguuggcucuu

SEQ ID NO: 66933 - RNA, 19 nt, Artificial Sequence
  Description of Artificial Sequence: Synthetic oligonucleotide
  Antisense strand to SEQ ID NO: 66852
aagagccaaccuuacuuuc

SEQ ID NO: 66934 - RNA, 19 nt, Artificial Sequence
  Description of Artificial Sequence: Synthetic oligonucleotide
  Sense strand starting at position 3035 of SEQ ID NO: 829
ggguaucucuucccucaaa

SEQ ID NO: 66935 - RNA, 19 nt, Artificial Sequence
  Description of Artificial Sequence: Synthetic oligonucleotide
  Antisense strand to SEQ ID NO: 66854
uuugagggaagagauaccc

SEQ ID NO: 66936 - RNA, 19 nt, Artificial Sequence
  Description of Artificial Sequence: Synthetic oligonucleotide
  Sense strand starting at position 3115 of SEQ ID NO: 829
guuggaaugagguaagugu

SEQ ID NO: 66937 - RNA, 19 nt, Artificial Sequence
  Description of Artificial Sequence: Synthetic oligonucleotide
  Antisense strand to SEQ ID NO: 66856
acacuuaccucauuccaac

SEQ ID NO: 66938 - RNA, 19 nt, Artificial Sequence
  Description of Artificial Sequence: Synthetic oligonucleotide
  Sense strand starting at position 3119 of SEQ ID NO: 829
gaaugagguaagugucaac

SEQ ID NO: 66939 - RNA, 19 nt, Artificial Sequence
  Description of Artificial Sequence: Synthetic oligonucleotide
  Antisense strand to SEQ ID NO: 66858
guugacacuuaccucauuc

SEQ ID NO: 66940 - RNA, 19 nt, Artificial Sequence
  Description of Artificial Sequence: Synthetic oligonucleotide
  Sense strand starting at position 3130 of SEQ ID NO: 829
gugucaacaacagagguua

SEQ ID NO: 66941 - RNA, 19 nt, Artificial Sequence
  Description of Artificial Sequence: Synthetic oligonucleotide
  Antisense strand to SEQ ID NO: 66860
uaaccucuguuguugacac

SEQ ID NO: 66942 - RNA, 19 nt, Artificial Sequence
  Description of Artificial Sequence: Synthetic oligonucleotide
  Sense strand starting at position 3145 of SEQ ID NO: 829
guuacuaugaguggacuga

SEQ ID NO: 66943 - RNA, 19 nt, Artificial Sequence
  Description of Artificial Sequence: Synthetic oligonucleotide
  Antisense strand to SEQ ID NO: 66862
ucaguccacucauaguaac

SEQ ID NO: 66944 - RNA, 19 nt, Artificial Sequence
  Description of Artificial Sequence: Synthetic oligonucleotide
  Sense strand starting at position 3149 of SEQ ID NO: 829
cuaugaguggacugaaauc

SEQ ID NO: 66945 - RNA, 19 nt, Artificial Sequence
  Description of Artificial Sequence: Synthetic oligonucleotide
  Antisense strand to SEQ ID NO: 66864
gauuucaguccacucauag

SEQ ID NO: 66946 - RNA, 19 nt, Artificial Sequence
  Description of Artificial Sequence: Synthetic oligonucleotide
  Sense strand starting at position 3277 of SEQ ID NO: 829
ugucauauacaguaguaug

SEQ ID NO: 66947 - RNA, 19 nt, Artificial Sequence
  Description of Artificial Sequence: Synthetic oligonucleotide
  Antisense strand to SEQ ID NO: 66866
cauacuacuguauaugaca

SEQ ID NO: 66948 - RNA, 19 nt, Artificial Sequence
  Description of Artificial Sequence: Synthetic oligonucleotide
  Sense strand starting at position 3288 of SEQ ID NO: 829
guaguauguggcagaggca

SEQ ID NO: 66949 - RNA, 19 nt, Artificial Sequence
  Description of Artificial Sequence: Synthetic oligonucleotide
  Antisense strand to SEQ ID NO: 66868
ugccucugccacauacuac

SEQ ID NO: 66950 - RNA, 19 nt, Artificial Sequence
  Description of Artificial Sequence: Synthetic oligonucleotide
  Sense strand starting at position 3387 of SEQ ID NO: 829
uuccaagauucugcaaaga

SEQ ID NO: 66951 - RNA, 19 nt, Artificial Sequence
  Description of Artificial Sequence: Synthetic oligonucleotide
  Antisense strand to SEQ ID NO: 66870
ucuuugcagaaucuuggaa

SEQ ID NO: 66952 - RNA, 19 nt, Artificial Sequence
  Description of Artificial Sequence: Synthetic oligonucleotide
  Sense strand starting at position 3397 of SEQ ID NO: 829
cugcaaagauguuuccuua

SEQ ID NO: 66953 - RNA, 19 nt, Artificial Sequence
  Description of Artificial Sequence: Synthetic oligonucleotide
  Antisense strand to SEQ ID NO: 66872
uaaggaaacaucuuugcag

SEQ ID NO: 66954 - RNA, 19 nt, Artificial Sequence
  Description of Artificial Sequence: Synthetic oligonucleotide
  Sense strand starting at position 3401 of SEQ ID NO: 829
aaagauguuuccuuaaugg

SEQ ID NO: 66955 - RNA, 19 nt, Artificial Sequence
  Description of Artificial Sequence: Synthetic oligonucleotide
  Antisense strand to SEQ ID NO: 66874
ccauuaaggaaacaucuuu

SEQ ID NO: 66956 - RNA, 19 nt, Artificial Sequence
  Description of Artificial Sequence: Synthetic oligonucleotide
  Sense strand starting at position 3435 of SEQ ID NO: 829
ggugaaugagcuuaggauc

SEQ ID NO: 66957 - RNA, 19 nt, Artificial Sequence
  Description of Artificial Sequence: Synthetic oligonucleotide
  Antisense strand to SEQ ID NO: 66876
gauccuaagcucauucacc

SEQ ID NO: 66958 - RNA, 19 nt, Artificial Sequence
  Description of Artificial Sequence: Synthetic oligonucleotide
  Sense strand starting at position 3500 of SEQ ID NO: 829
ggcaacagcccuggugaaa

SEQ ID NO: 66959 - RNA, 19 nt, Artificial Sequence
  Description of Artificial Sequence: Synthetic oligonucleotide
  Antisense strand to SEQ ID NO: 66878
uuucaccagggcuguugcc

SEQ ID NO: 66960 - RNA, 19 nt, Artificial Sequence
  Description of Artificial Sequence: Synthetic oligonucleotide
  Sense strand starting at position 3532 of SEQ ID NO: 829
ucuugauuccuuggccaga

SEQ ID NO: 66961 - RNA, 19 nt, Artificial Sequence
  Description of Artificial Sequence: Synthetic oligonucleotide
  Antisense strand to SEQ ID NO: 66880
ucuggccaaggaaucaaga

SEQ ID NO: 66962 - RNA, 19 nt, Artificial Sequence
  Description of Artificial Sequence: Synthetic oligonucleotide
  Sense strand starting at position 3535 of SEQ ID NO: 829
ugauuccuuggccagaguu

SEQ ID NO: 66963 - RNA, 19 nt, Artificial Sequence
  Description of Artificial Sequence: Synthetic oligonucleotide
  Antisense strand to SEQ ID NO: 66882
aacucuggccaaggaauca

SEQ ID NO: 66964 - RNA, 19 nt, Artificial Sequence
  Description of Artificial Sequence: Synthetic oligonucleotide
  Sense strand starting at position 3537 of SEQ ID NO: 829
auuccuuggccagaguuua

SEQ ID NO: 66965 - RNA, 19 nt, Artificial Sequence
  Description of Artificial Sequence: Synthetic oligonucleotide
  Antisense strand to SEQ ID NO: 66884
uaaacucuggccaaggaau

SEQ ID NO: 66966 - RNA, 19 nt, Artificial Sequence
  Description of Artificial Sequence: Synthetic oligonucleotide
  Sense strand starting at position 3689 of SEQ ID NO: 829
uugggaauauuaucuacuu

SEQ ID NO: 66967 - RNA, 19 nt, Artificial Sequence
  Description of Artificial Sequence: Synthetic oligonucleotide
  Antisense strand to SEQ ID NO: 66886
aaguagauaauauucccaa

SEQ ID NO: 66968 - RNA, 19 nt, Artificial Sequence
  Description of Artificial Sequence: Synthetic oligonucleotide
  Sense strand starting at position 3690 of SEQ ID NO: 829
ugggaauauuaucuacuuc

SEQ ID NO: 66969 - RNA, 19 nt, Artificial Sequence
  Description of Artificial Sequence: Synthetic oligonucleotide
  Antisense strand to SEQ ID NO: 66888
gaaguagauaauauuccca

SEQ ID NO: 66970 - RNA, 19 nt, Artificial Sequence
  Description of Artificial Sequence: Synthetic oligonucleotide
  Sense strand starting at position 3723 of SEQ ID NO: 829
aggacuaacgaguauguga

SEQ ID NO: 66971 - RNA, 19 nt, Artificial Sequence
  Description of Artificial Sequence: Synthetic oligonucleotide
  Antisense strand to SEQ ID NO: 66890
ucacauacucguuaguccu

SEQ ID NO: 66972 - RNA, 19 nt, Artificial Sequence
  Description of Artificial Sequence: Synthetic oligonucleotide
  Sense strand starting at position 3725 of SEQ ID NO: 829
gacuaacgaguaugugaaa

SEQ ID NO: 66973 - RNA, 19 nt, Artificial Sequence
  Description of Artificial Sequence: Synthetic oligonucleotide
  Antisense strand to SEQ ID NO: 66892
uuucacauacucguuaguc

SEQ ID NO: 66974 - RNA, 19 nt, Artificial Sequence
  Description of Artificial Sequence: Synthetic oligonucleotide
  Sense strand starting at position 3943 of SEQ ID NO: 829
uugccauggcuguaccaaa

SEQ ID NO: 66975 - RNA, 19 nt, Artificial Sequence
  Description of Artificial Sequence: Synthetic oligonucleotide
  Antisense strand to SEQ ID NO: 66894
uuugguacagccauggcaa

SEQ ID NO: 66976 - RNA, 19 nt, Artificial Sequence
  Description of Artificial Sequence: Synthetic oligonucleotide
  Sense strand starting at position 3956 of SEQ ID NO: 829
accaaaguccugugaugga

SEQ ID NO: 66977 - RNA, 19 nt, Artificial Sequence
  Description of Artificial Sequence: Synthetic oligonucleotide
  Antisense strand to SEQ ID NO: 66896
uccaucacaggacuuuggu

SEQ ID NO: 66978 - RNA, 19 nt, Artificial Sequence
  Description of Artificial Sequence: Synthetic oligonucleotide
  Sense strand starting at position 3969 of SEQ ID NO: 829
gauggaauuuagcauguga

SEQ ID NO: 66979 - RNA, 19 nt, Artificial Sequence
  Description of Artificial Sequence: Synthetic oligonucleotide
  Antisense strand to SEQ ID NO: 66898
ucacaugcuaaauuccauc

SEQ ID NO: 66980 - RNA, 19 nt, Artificial Sequence
  Description of Artificial Sequence: Synthetic oligonucleotide
  Sense strand starting at position 11 of SEQ ID NO: 828
ugaagacauucuucucugu

SEQ ID NO: 66981 - RNA, 19 nt, Artificial Sequence
  Description of Artificial Sequence: Synthetic oligonucleotide
  Antisense strand to SEQ ID NO: 66900
acagagaagaaugucuuca

SEQ ID NO: 66982 - RNA, 19 nt, Artificial Sequence
  Description of Artificial Sequence: Synthetic oligonucleotide
  Sense strand starting at position 96 of SEQ ID NO: 828
caggaagauuccguagaug

SEQ ID NO: 66983 - RNA, 19 nt, Artificial Sequence
  Description of Artificial Sequence: Synthetic oligonucleotide
  Antisense strand to SEQ ID NO: 66902
caucuacggaaucuuccug

SEQ ID NO: 66984 - RNA, 19 nt, Artificial Sequence
  Description of Artificial Sequence: Synthetic oligonucleotide
  Sense strand starting at position 101 of SEQ ID NO: 828
agauuccguagaugaagua

SEQ ID NO: 66985 - RNA, 19 nt, Artificial Sequence
  Description of Artificial Sequence: Synthetic oligonucleotide
  Antisense strand to SEQ ID NO: 66904
uacuucaucuacggaaucu

SEQ ID NO: 66986 - RNA, 19 nt, Artificial Sequence
  Description of Artificial Sequence: Synthetic oligonucleotide
  Sense strand starting at position 116 of SEQ ID NO: 828
aguacuggcccacaaugaa

SEQ ID NO: 66987 - RNA, 19 nt, Artificial Sequence
  Description of Artificial Sequence: Synthetic oligonucleotide
  Antisense strand to SEQ ID NO: 66906
uucauugugggccaguacu

SEQ ID NO: 66988 - RNA, 19 nt, Artificial Sequence
  Description of Artificial Sequence: Synthetic oligonucleotide
  Sense strand starting at position 465 of SEQ ID NO: 828
cguaucacaccggaaauca

SEQ ID NO: 66989 - RNA, 19 nt, Artificial Sequence
  Description of Artificial Sequence: Synthetic oligonucleotide
  Antisense strand to SEQ ID NO: 66908
ugauuuccggugugauacg

SEQ ID NO: 66990 - RNA, 19 nt, Artificial Sequence
  Description of Artificial Sequence: Synthetic oligonucleotide
  Sense strand starting at position 576 of SEQ ID NO: 828
ggucgagugcuuguguacu

SEQ ID NO: 66991 - RNA, 19 nt, Artificial Sequence
  Description of Artificial Sequence: Synthetic oligonucleotide
  Antisense strand to SEQ ID NO: 66910
aguacacaagcacucgacc

SEQ ID NO: 66992 - RNA, 19 nt, Artificial Sequence
  Description of Artificial Sequence: Synthetic oligonucleotide
  Sense strand starting at position 588 of SEQ ID NO: 828
guguacuuccuccaggaaa

SEQ ID NO: 66993 - RNA, 19 nt, Artificial Sequence
  Description of Artificial Sequence: Synthetic oligonucleotide
  Antisense strand to SEQ ID NO: 66912
uuuccuggaggaaguacac

SEQ ID NO: 66994 - RNA, 19 nt, Artificial Sequence
  Description of Artificial Sequence: Synthetic oligonucleotide
  Sense strand starting at position 590 of SEQ ID NO: 828
guacuuccuccaggaaauu

SEQ ID NO: 66995 - RNA, 19 nt, Artificial Sequence
  Description of Artificial Sequence: Synthetic oligonucleotide
  Antisense strand to SEQ ID NO: 66914
aauuuccuggaggaaguac

SEQ ID NO: 66996 - RNA, 19 nt, Artificial Sequence
  Description of Artificial Sequence: Synthetic oligonucleotide
  Sense strand starting at position 697 of SEQ ID NO: 828
gaagaaggauguucuguga

SEQ ID NO: 66997 - RNA, 19 nt, Artificial Sequence
  Description of Artificial Sequence: Synthetic oligonucleotide
  Antisense strand to SEQ ID NO: 66916
ucacagaacauccuucuuc

SEQ ID NO: 66998 - RNA, 19 nt, Artificial Sequence
  Description of Artificial Sequence: Synthetic oligonucleotide
  Sense strand starting at position 701 of SEQ ID NO: 828
aaggauguucugugaaggu

SEQ ID NO: 66999 - RNA, 19 nt, Artificial Sequence
  Description of Artificial Sequence: Synthetic oligonucleotide
  Antisense strand to SEQ ID NO: 66918
accuucacagaacauccuu

SEQ ID NO: 67000 - RNA, 19 nt, Artificial Sequence
  Description of Artificial Sequence: Synthetic oligonucleotide
  Sense strand starting at position 714 of SEQ ID NO: 828
gaaggucuggaaugucuau

SEQ ID NO: 67001 - RNA, 19 nt, Artificial Sequence
  Description of Artificial Sequence: Synthetic oligonucleotide
  Antisense strand to SEQ ID NO: 66920
auagacauuccagaccuuc

SEQ ID NO: 67002 - RNA, 19 nt, Artificial Sequence
  Description of Artificial Sequence: Synthetic oligonucleotide
  Sense strand starting at position 739 of SEQ ID NO: 828
cugggauuccacugaucca

SEQ ID NO: 67003 - RNA, 19 nt, Artificial Sequence
  Description of Artificial Sequence: Synthetic oligonucleotide
  Antisense strand to SEQ ID NO: 66922
uggaucaguggaaucccag

SEQ ID NO: 67004 - RNA, 19 nt, Artificial Sequence
  Description of Artificial Sequence: Synthetic oligonucleotide
  Sense strand starting at position 762 of SEQ ID NO: 828
uccaauggguucuuuaaga

SEQ ID NO: 67005 - RNA, 19 nt, Artificial Sequence
  Description of Artificial Sequence: Synthetic oligonucleotide
  Antisense strand to SEQ ID NO: 66924
ucuuaaagaacccauugga

SEQ ID NO: 67006 - RNA, 19 nt, Artificial Sequence
  Description of Artificial Sequence: Synthetic oligonucleotide
  Sense strand starting at position 1114 of SEQ ID NO: 828
gcauuuaccucacugaguc

SEQ ID NO: 67007 - RNA, 19 nt, Artificial Sequence
  Description of Artificial Sequence: Synthetic oligonucleotide
  Antisense strand to SEQ ID NO: 66926
gacucagugagguaaaugc

SEQ ID NO: 67008 - RNA, 19 nt, Artificial Sequence
  Description of Artificial Sequence: Synthetic oligonucleotide
  Sense strand starting at position 1192 of SEQ ID NO: 828
aaugauaugagguguguga

SEQ ID NO: 67009 - RNA, 19 nt, Artificial Sequence
  Description of Artificial Sequence: Synthetic oligonucleotide
  Antisense strand to SEQ ID NO: 66928
ucacacaccucauaucauu

SEQ ID NO: 67010 - RNA, 19 nt, Artificial Sequence
  Description of Artificial Sequence: Synthetic oligonucleotide
  Sense strand starting at position 1605 of SEQ ID NO: 828
uuauguccagaauaaaugu

SEQ ID NO: 67011 - RNA, 19 nt, Artificial Sequence
  Description of Artificial Sequence: Synthetic oligonucleotide
  Antisense strand to SEQ ID NO: 66930
acauuuauucuggacauaa

SEQ ID NO: 67012 - RNA, 19 nt, Artificial Sequence
  Description of Artificial Sequence: Synthetic oligonucleotide
  Sense strand starting at position 1908 of SEQ ID NO: 828
ugcugccuuguguuguaau

SEQ ID NO: 67013 - RNA, 19 nt, Artificial Sequence
  Description of Artificial Sequence: Synthetic oligonucleotide
  Antisense strand to SEQ ID NO: 66932
auuacaacacaaggcagca

SEQ ID NO: 67014 - RNA, 19 nt, Artificial Sequence
  Description of Artificial Sequence: Synthetic oligonucleotide
  Sense strand starting at position 2009 of SEQ ID NO: 828
agaguagguguuuaauaua

SEQ ID NO: 67015 - RNA, 19 nt, Artificial Sequence
  Description of Artificial Sequence: Synthetic oligonucleotide
  Antisense strand to SEQ ID NO: 66934
uauauuaaacaccuacucu

SEQ ID NO: 67016 - RNA, 19 nt, Artificial Sequence
  Description of Artificial Sequence: Synthetic oligonucleotide
  Sense strand starting at position 2022 of SEQ ID NO: 828
aauauaucuuaguugagug

SEQ ID NO: 67017 - RNA, 19 nt, Artificial Sequence
  Description of Artificial Sequence: Synthetic oligonucleotide
  Antisense strand to SEQ ID NO: 66936
cacucaacuaagauauauu

SEQ ID NO: 67018 - RNA, 19 nt, Artificial Sequence
  Description of Artificial Sequence: Synthetic oligonucleotide
  Sense strand starting at position 2024 of SEQ ID NO: 828
uauaucuuaguugagugaa

SEQ ID NO: 67019 - RNA, 19 nt, Artificial Sequence
  Description of Artificial Sequence: Synthetic oligonucleotide
  Antisense strand to SEQ ID NO: 66938
uucacucaacuaagauaua

SEQ ID NO: 67020 - RNA, 19 nt, Artificial Sequence
  Description of Artificial Sequence: Synthetic oligonucleotide
  Sense strand starting at position 2026 of SEQ ID NO: 828
uaucuuaguugagugaaug

SEQ ID NO: 67021 - RNA, 19 nt, Artificial Sequence
  Description of Artificial Sequence: Synthetic oligonucleotide
  Antisense strand to SEQ ID NO: 66940
cauucacucaacuaagaua

SEQ ID NO: 67022 - RNA, 19 nt, Artificial Sequence
  Description of Artificial Sequence: Synthetic oligonucleotide
  Sense strand starting at position 2027 of SEQ ID NO: 828
aucuuaguugagugaauga

SEQ ID NO: 67023 - RNA, 19 nt, Artificial Sequence
  Description of Artificial Sequence: Synthetic oligonucleotide
  Antisense strand to SEQ ID NO: 66942
ucauucacucaacuaagau

SEQ ID NO: 67024 - RNA, 19 nt, Artificial Sequence
  Description of Artificial Sequence: Synthetic oligonucleotide
  Sense strand starting at position 2113 of SEQ ID NO: 828
ucccauuggcagggugaaa

SEQ ID NO: 67025 - RNA, 19 nt, Artificial Sequence
  Description of Artificial Sequence: Synthetic oligonucleotide
  Antisense strand to SEQ ID NO: 66944
uuucacccugccaauggga

SEQ ID NO: 67026 - RNA, 19 nt, Artificial Sequence
  Description of Artificial Sequence: Synthetic oligonucleotide
  Sense strand starting at position 2411 of SEQ ID NO: 828
gacagaguuguaugaacca

SEQ ID NO: 67027 - RNA, 19 nt, Artificial Sequence
  Description of Artificial Sequence: Synthetic oligonucleotide
  Antisense strand to SEQ ID NO: 66946
ugguucauacaacucuguc

SEQ ID NO: 67028 - RNA, 19 nt, Artificial Sequence
  Description of Artificial Sequence: Synthetic oligonucleotide
  Sense strand starting at position 2435 of SEQ ID NO: 828
ucuaaagcuguccagagaa

SEQ ID NO: 67029 - RNA, 19 nt, Artificial Sequence
  Description of Artificial Sequence: Synthetic oligonucleotide
  Antisense strand to SEQ ID NO: 66948
uucucuggacagcuuuaga

SEQ ID NO: 67030 - RNA, 19 nt, Artificial Sequence
  Description of Artificial Sequence: Synthetic oligonucleotide
  Sense strand starting at position 2514 of SEQ ID NO: 828
ccagaauucuuacuuagug

SEQ ID NO: 67031 - RNA, 19 nt, Artificial Sequence
  Description of Artificial Sequence: Synthetic oligonucleotide
  Antisense strand to SEQ ID NO: 66950
cacuaaguaagaauucugg

SEQ ID NO: 67032 - RNA, 19 nt, Artificial Sequence
  Description of Artificial Sequence: Synthetic oligonucleotide
  Sense strand starting at position 2659 of SEQ ID NO: 828
cuuagagguuugucaaauu

SEQ ID NO: 67033 - RNA, 19 nt, Artificial Sequence
  Description of Artificial Sequence: Synthetic oligonucleotide
  Antisense strand to SEQ ID NO: 66952
aauuugacaaaccucuaag

SEQ ID NO: 67034 - RNA, 19 nt, Artificial Sequence
  Description of Artificial Sequence: Synthetic oligonucleotide
  Sense strand starting at position 2880 of SEQ ID NO: 828
uauacagugucccugggaa

SEQ ID NO: 67035 - RNA, 19 nt, Artificial Sequence
  Description of Artificial Sequence: Synthetic oligonucleotide
  Antisense strand to SEQ ID NO: 66954
uucccagggacacuguaua

SEQ ID NO: 67036 - RNA, 19 nt, Artificial Sequence
  Description of Artificial Sequence: Synthetic oligonucleotide
  Sense strand starting at position 2882 of SEQ ID NO: 828
uacagugucccugggaaug

SEQ ID NO: 67037 - RNA, 19 nt, Artificial Sequence
  Description of Artificial Sequence: Synthetic oligonucleotide
  Antisense strand to SEQ ID NO: 66956
cauucccagggacacugua

SEQ ID NO: 67038 - RNA, 19 nt, Artificial Sequence
  Description of Artificial Sequence: Synthetic oligonucleotide
  Sense strand starting at position 2976 of SEQ ID NO: 828
ccuuuccugucauuuguga

SEQ ID NO: 67039 - RNA, 19 nt, Artificial Sequence
  Description of Artificial Sequence: Synthetic oligonucleotide
  Antisense strand to SEQ ID NO: 66958
ucacaaaugacaggaaagg

SEQ ID NO: 67040 - RNA, 19 nt, Artificial Sequence
  Description of Artificial Sequence: Synthetic oligonucleotide
  Sense strand starting at position 3179 of SEQ ID NO: 828
gugacugaacuaugguaaa

SEQ ID NO: 67041 - RNA, 19 nt, Artificial Sequence
  Description of Artificial Sequence: Synthetic oligonucleotide
  Antisense strand to SEQ ID NO: 66960
uuuaccauaguucagucac

SEQ ID NO: 67042 - RNA, 19 nt, Artificial Sequence
  Description of Artificial Sequence: Synthetic oligonucleotide
  Sense strand starting at position 3189 of SEQ ID NO: 828
uaugguaaaugucugagaa

SEQ ID NO: 67043 - RNA, 19 nt, Artificial Sequence
  Description of Artificial Sequence: Synthetic oligonucleotide
  Antisense strand to SEQ ID NO: 66962
uucucagacauuuaccaua

SEQ ID NO: 67044 - RNA, 19 nt, Artificial Sequence
  Description of Artificial Sequence: Synthetic oligonucleotide
  Sense strand starting at position 3190 of SEQ ID NO: 828
augguaaaugucugagaaa

SEQ ID NO: 67045 - RNA, 19 nt, Artificial Sequence
  Description of Artificial Sequence: Synthetic oligonucleotide
  Antisense strand to SEQ ID NO: 66964
uuucucagacauuuaccau

SEQ ID NO: 67046 - RNA, 19 nt, Artificial Sequence
  Description of Artificial Sequence: Synthetic oligonucleotide
  Sense strand starting at position 3313 of SEQ ID NO: 828
agaugcaggaguuagcuua

SEQ ID NO: 67047 - RNA, 19 nt, Artificial Sequence
  Description of Artificial Sequence: Synthetic oligonucleotide
  Antisense strand to SEQ ID NO: 66966
uaagcuaacuccugcaucu

SEQ ID NO: 67048 - RNA, 19 nt, Artificial Sequence
  Description of Artificial Sequence: Synthetic oligonucleotide
  Sense strand starting at position 3328 of SEQ ID NO: 828
cuuacugagguuugacaaa

SEQ ID NO: 67049 - RNA, 19 nt, Artificial Sequence
  Description of Artificial Sequence: Synthetic oligonucleotide
  Antisense strand to SEQ ID NO: 66968
uuugucaaaccucaguaag

SEQ ID NO: 67050 - RNA, 19 nt, Artificial Sequence
  Description of Artificial Sequence: Synthetic oligonucleotide
  Sense strand starting at position 3358 of SEQ ID NO: 828
aucugcugggcuuagauaa

SEQ ID NO: 67051 - RNA, 19 nt, Artificial Sequence
  Description of Artificial Sequence: Synthetic oligonucleotide
  Antisense strand to SEQ ID NO: 66970
uuaucuaagcccagcagau

SEQ ID NO: 67052 - RNA, 19 nt, Artificial Sequence
  Description of Artificial Sequence: Synthetic oligonucleotide
  Sense strand starting at position 3432 of SEQ ID NO: 828
cauagagugcuaugagaug

SEQ ID NO: 67053 - RNA, 19 nt, Artificial Sequence
  Description of Artificial Sequence: Synthetic oligonucleotide
  Antisense strand to SEQ ID NO: 66972
caucucauagcacucuaug

SEQ ID NO: 67054 - RNA, 19 nt, Artificial Sequence
  Description of Artificial Sequence: Synthetic oligonucleotide
  Sense strand starting at position 3576 of SEQ ID NO: 828
aguagagaaaggugcauua

SEQ ID NO: 67055 - RNA, 19 nt, Artificial Sequence
  Description of Artificial Sequence: Synthetic oligonucleotide
  Antisense strand to SEQ ID NO: 66974
uaaugcaccuuucucuacu

SEQ ID NO: 67056 - RNA, 19 nt, Artificial Sequence
  Description of Artificial Sequence: Synthetic oligonucleotide
  Sense strand starting at position 3587 of SEQ ID NO: 828
gugcauuacaaaggagaaa

SEQ ID NO: 67057 - RNA, 19 nt, Artificial Sequence
  Description of Artificial Sequence: Synthetic oligonucleotide
  Antisense strand to SEQ ID NO: 66976
uuucuccuuuguaaugcac

SEQ ID NO: 67058 - RNA, 19 nt, Artificial Sequence
  Description of Artificial Sequence: Synthetic oligonucleotide
  Sense strand starting at position 3674 of SEQ ID NO: 828
augucauauucuuccagga

SEQ ID NO: 67059 - RNA, 19 nt, Artificial Sequence
  Description of Artificial Sequence: Synthetic oligonucleotide
  Antisense strand to SEQ ID NO: 66978
uccuggaagaauaugacau

SEQ ID NO: 67060 - RNA, 19 nt, Artificial Sequence
  Description of Artificial Sequence: Synthetic oligonucleotide
  Sense strand starting at position 3940 of SEQ ID NO: 830
ccuuguuuacuuuagaugu

SEQ ID NO: 67061 - RNA, 19 nt, Artificial Sequence
  Description of Artificial Sequence: Synthetic oligonucleotide
  Antisense strand to SEQ ID NO: 66980
acaucuaaaguaaacaagg

SEQ ID NO: 67062 - RNA, 19 nt, Artificial Sequence
  Description of Artificial Sequence: Synthetic oligonucleotide
  Sense strand starting at position 3833 of SEQ ID NO: 830
gugucauggacauauugca

SEQ ID NO: 67063 - RNA, 19 nt, Artificial Sequence
  Description of Artificial Sequence: Synthetic oligonucleotide
  Antisense strand to SEQ ID NO: 66982
ugcaauauguccaugacac

SEQ ID NO: 67064 - RNA, 19 nt, Artificial Sequence
  Description of Artificial Sequence: Synthetic oligonucleotide
  Sense strand starting at position 3729 of SEQ ID NO: 830
ugcaauguaugauuacuaa

SEQ ID NO: 67065 - RNA, 19 nt, Artificial Sequence
  Description of Artificial Sequence: Synthetic oligonucleotide
  Antisense strand to SEQ ID NO: 66984
uuaguaaucauacauugca

SEQ ID NO: 67066 - RNA, 19 nt, Artificial Sequence
  Description of Artificial Sequence: Synthetic oligonucleotide
  Sense strand starting at position 3722 of SEQ ID NO: 830
ugaaaucugcaauguauga

SEQ ID NO: 67067 - RNA, 19 nt, Artificial Sequence
  Description of Artificial Sequence: Synthetic oligonucleotide
  Antisense strand to SEQ ID NO: 66986
ucauacauugcagauuuca

SEQ ID NO: 67068 - RNA, 19 nt, Artificial Sequence
  Description of Artificial Sequence: Synthetic oligonucleotide
  Sense strand starting at position 3719 of SEQ ID NO: 830
uuaugaaaucugcaaugua

SEQ ID NO: 67069 - RNA, 19 nt, Artificial Sequence
  Description of Artificial Sequence: Synthetic oligonucleotide
  Antisense strand to SEQ ID NO: 66988
uacauugcagauuucauaa

SEQ ID NO: 67070 - RNA, 19 nt, Artificial Sequence
  Description of Artificial Sequence: Synthetic oligonucleotide
  Sense strand starting at position 3664 of SEQ ID NO: 830
cuacaaguuuauucgugaa

SEQ ID NO: 67071 - RNA, 19 nt, Artificial Sequence
  Description of Artificial Sequence: Synthetic oligonucleotide
  Antisense strand to SEQ ID NO: 66990
uucacgaauaaacuuguag

SEQ ID NO: 67072 - RNA, 19 nt, Artificial Sequence
  Description of Artificial Sequence: Synthetic oligonucleotide
  Sense strand starting at position 3592 of SEQ ID NO: 830
gacugacuauugguaguau

SEQ ID NO: 67073 - RNA, 19 nt, Artificial Sequence
  Description of Artificial Sequence: Synthetic oligonucleotide
  Antisense strand to SEQ ID NO: 66992
auacuaccaauagucaguc

SEQ ID NO: 67074 - RNA, 19 nt, Artificial Sequence
  Description of Artificial Sequence: Synthetic oligonucleotide
  Sense strand starting at position 3548 of SEQ ID NO: 830
auggacauaugcucucuga

SEQ ID NO: 67075 - RNA, 19 nt, Artificial Sequence
  Description of Artificial Sequence: Synthetic oligonucleotide
  Antisense strand to SEQ ID NO: 66994
ucagagagcauauguccau

SEQ ID NO: 67076 - RNA, 19 nt, Artificial Sequence
  Description of Artificial Sequence: Synthetic oligonucleotide
  Sense strand starting at position 3509 of SEQ ID NO: 830
auucuaauguggcuuaaug

SEQ ID NO: 67077 - RNA, 19 nt, Artificial Sequence
  Description of Artificial Sequence: Synthetic oligonucleotide
  Antisense strand to SEQ ID NO: 66996
cauuaagccacauuagaau

SEQ ID NO: 67078 - RNA, 19 nt, Artificial Sequence
  Description of Artificial Sequence: Synthetic oligonucleotide
  Sense strand starting at position 3338 of SEQ ID NO: 830
uggugccauuugucaaagu

SEQ ID NO: 67079 - RNA, 19 nt, Artificial Sequence
  Description of Artificial Sequence: Synthetic oligonucleotide
  Antisense strand to SEQ ID NO: 66998
acuuugacaaauggcacca

SEQ ID NO: 67080 - RNA, 19 nt, Artificial Sequence
  Description of Artificial Sequence: Synthetic oligonucleotide
  Sense strand starting at position 3115 of SEQ ID NO: 830
ugagaugcugaauaugcua

SEQ ID NO: 67081 - RNA, 19 nt, Artificial Sequence
  Description of Artificial Sequence: Synthetic oligonucleotide
  Antisense strand to SEQ ID NO: 67000
uagcauauucagcaucuca

SEQ ID NO: 67082 - RNA, 19 nt, Artificial Sequence
  Description of Artificial Sequence: Synthetic oligonucleotide
  Sense strand starting at position 3112 of SEQ ID NO: 830
guuugagaugcugaauaug

SEQ ID NO: 67083 - RNA, 19 nt, Artificial Sequence
  Description of Artificial Sequence: Synthetic oligonucleotide
  Antisense strand to SEQ ID NO: 67002
cauauucagcaucucaaac

SEQ ID NO: 67084 - RNA, 19 nt, Artificial Sequence
  Description of Artificial Sequence: Synthetic oligonucleotide
  Sense strand starting at position 2684 of SEQ ID NO: 830
gggugaauaugguuaacau

SEQ ID NO: 67085 - RNA, 19 nt, Artificial Sequence
  Description of Artificial Sequence: Synthetic oligonucleotide
  Antisense strand to SEQ ID NO: 67004
auguuaaccauauucaccc

SEQ ID NO: 67086 - RNA, 19 nt, Artificial Sequence
  Description of Artificial Sequence: Synthetic oligonucleotide
  Sense strand starting at position 2402 of SEQ ID NO: 830
uaucaucagcugggagaau

SEQ ID NO: 67087 - RNA, 19 nt, Artificial Sequence
  Description of Artificial Sequence: Synthetic oligonucleotide
  Antisense strand to SEQ ID NO: 67006
auucucccagcugaugaua

SEQ ID NO: 67088 - RNA, 19 nt, Artificial Sequence
  Description of Artificial Sequence: Synthetic oligonucleotide
  Sense strand starting at position 2401 of SEQ ID NO: 830
uuaucaucagcugggagaa

SEQ ID NO: 67089 - RNA, 19 nt, Artificial Sequence
  Description of Artificial Sequence: Synthetic oligonucleotide
  Antisense strand to SEQ ID NO: 67008
uucucccagcugaugauaa

SEQ ID NO: 67090 - RNA, 19 nt, Artificial Sequence
  Description of Artificial Sequence: Synthetic oligonucleotide
  Sense strand starting at position 2400 of SEQ ID NO: 830
cuuaucaucagcugggaga

SEQ ID NO: 67091 - RNA, 19 nt, Artificial Sequence
  Description of Artificial Sequence: Synthetic oligonucleotide
  Antisense strand to SEQ ID NO: 67010
ucucccagcugaugauaag

SEQ ID NO: 67092 - RNA, 19 nt, Artificial Sequence
  Description of Artificial Sequence: Synthetic oligonucleotide
  Sense strand starting at position 2334 of SEQ ID NO: 830
ccuguacaucaguaaaccu

SEQ ID NO: 67093 - RNA, 19 nt, Artificial Sequence
  Description of Artificial Sequence: Synthetic oligonucleotide
  Antisense strand to SEQ ID NO: 67012
agguuuacugauguacagg

SEQ ID NO: 67094 - RNA, 19 nt, Artificial Sequence
  Description of Artificial Sequence: Synthetic oligonucleotide
  Sense strand starting at position 2331 of SEQ ID NO: 830
gggccuguacaucaguaaa

SEQ ID NO: 67095 - RNA, 19 nt, Artificial Sequence
  Description of Artificial Sequence: Synthetic oligonucleotide
  Antisense strand to SEQ ID NO: 67014
uuuacugauguacaggccc

SEQ ID NO: 67096 - RNA, 19 nt, Artificial Sequence
  Description of Artificial Sequence: Synthetic oligonucleotide
  Sense strand starting at position 2105 of SEQ ID NO: 830
agcagauaugacuggauug

SEQ ID NO: 67097 - RNA, 19 nt, Artificial Sequence
  Description of Artificial Sequence: Synthetic oligonucleotide
  Antisense strand to SEQ ID NO: 67016
caauccagucauaucugcu

SEQ ID NO: 67098 - RNA, 19 nt, Artificial Sequence
  Description of Artificial Sequence: Synthetic oligonucleotide
  Sense strand starting at position 1891 of SEQ ID NO: 830
cuuagauuaggcugagaaa

SEQ ID NO: 67099 - RNA, 19 nt, Artificial Sequence
  Description of Artificial Sequence: Synthetic oligonucleotide
  Antisense strand to SEQ ID NO: 67018
uuucucagccuaaucuaag

SEQ ID NO: 67100 - RNA, 19 nt, Artificial Sequence
  Description of Artificial Sequence: Synthetic oligonucleotide
  Sense strand starting at position 1889 of SEQ ID NO: 830
cccuuagauuaggcugaga

SEQ ID NO: 67101 - RNA, 19 nt, Artificial Sequence
  Description of Artificial Sequence: Synthetic oligonucleotide
  Antisense strand to SEQ ID NO: 67020
ucucagccuaaucuaaggg

SEQ ID NO: 67102 - RNA, 19 nt, Artificial Sequence
  Description of Artificial Sequence: Synthetic oligonucleotide
  Sense strand starting at position 1881 of SEQ ID NO: 830
auauauggcccuuagauua

SEQ ID NO: 67103 - RNA, 19 nt, Artificial Sequence
  Description of Artificial Sequence: Synthetic oligonucleotide
  Antisense strand to SEQ ID NO: 67022
uaaucuaagggccauauau

SEQ ID NO: 67104 - RNA, 19 nt, Artificial Sequence
  Description of Artificial Sequence: Synthetic oligonucleotide
  Sense strand starting at position 1694 of SEQ ID NO: 830
auuguaguuugaguuugga

SEQ ID NO: 67105 - RNA, 19 nt, Artificial Sequence
  Description of Artificial Sequence: Synthetic oligonucleotide
  Antisense strand to SEQ ID NO: 67024
uccaaacucaaacuacaau

SEQ ID NO: 67106 - RNA, 19 nt, Artificial Sequence
  Description of Artificial Sequence: Synthetic oligonucleotide
  Sense strand starting at position 1654 of SEQ ID NO: 830
uguggauuccuguagacau

SEQ ID NO: 67107 - RNA, 19 nt, Artificial Sequence
  Description of Artificial Sequence: Synthetic oligonucleotide
  Antisense strand to SEQ ID NO: 67026
augucuacaggaauccaca

SEQ ID NO: 67108 - RNA, 19 nt, Artificial Sequence
  Description of Artificial Sequence: Synthetic oligonucleotide
  Sense strand starting at position 1651 of SEQ ID NO: 830
cccuguggauuccuguaga

SEQ ID NO: 67109 - RNA, 19 nt, Artificial Sequence
  Description of Artificial Sequence: Synthetic oligonucleotide
  Antisense strand to SEQ ID NO: 67028
ucuacaggaauccacaggg

SEQ ID NO: 67110 - RNA, 19 nt, Artificial Sequence
  Description of Artificial Sequence: Synthetic oligonucleotide
  Sense strand starting at position 1587 of SEQ ID NO: 830
auuguagaauuugagugaa

SEQ ID NO: 67111 - RNA, 19 nt, Artificial Sequence
  Description of Artificial Sequence: Synthetic oligonucleotide
  Antisense strand to SEQ ID NO: 67030
uucacucaaauucuacaau

SEQ ID NO: 67112 - RNA, 19 nt, Artificial Sequence
  Description of Artificial Sequence: Synthetic oligonucleotide
  Sense strand starting at position 1359 of SEQ ID NO: 830
uuaccacucugguugguaa

SEQ ID NO: 67113 - RNA, 19 nt, Artificial Sequence
  Description of Artificial Sequence: Synthetic oligonucleotide
  Antisense strand to SEQ ID NO: 67032
uuaccaaccagagugguaa

SEQ ID NO: 67114 - RNA, 19 nt, Artificial Sequence
  Description of Artificial Sequence: Synthetic oligonucleotide
  Sense strand starting at position 1248 of SEQ ID NO: 830
ccuggucuucuagaucuaa

SEQ ID NO: 67115 - RNA, 19 nt, Artificial Sequence
  Description of Artificial Sequence: Synthetic oligonucleotide
  Antisense strand to SEQ ID NO: 67034
uuagaucuagaagaccagg

SEQ ID NO: 67116 - RNA, 19 nt, Artificial Sequence
  Description of Artificial Sequence: Synthetic oligonucleotide
  Sense strand starting at position 1191 of SEQ ID NO: 830
ugaaaugagucuccaagau

SEQ ID NO: 67117 - RNA, 19 nt, Artificial Sequence
  Description of Artificial Sequence: Synthetic oligonucleotide
  Antisense strand to SEQ ID NO: 67036
aucuuggagacucauuuca

SEQ ID NO: 67118 - RNA, 19 nt, Artificial Sequence
  Description of Artificial Sequence: Synthetic oligonucleotide
  Sense strand starting at position 1139 of SEQ ID NO: 830
ugaacuuggcauuaucaau

SEQ ID NO: 67119 - RNA, 19 nt, Artificial Sequence
  Description of Artificial Sequence: Synthetic oligonucleotide
  Antisense strand to SEQ ID NO: 67038
auugauaaugccaaguuca

SEQ ID NO: 67120 - RNA, 19 nt, Artificial Sequence
  Description of Artificial Sequence: Synthetic oligonucleotide
  Sense strand starting at position 1134 of SEQ ID NO: 830
accagugaacuuggcauua

SEQ ID NO: 67121 - RNA, 19 nt, Artificial Sequence
  Description of Artificial Sequence: Synthetic oligonucleotide
  Antisense strand to SEQ ID NO: 67040
uaaugccaaguucacuggu

SEQ ID NO: 67122 - RNA, 19 nt, Artificial Sequence
  Description of Artificial Sequence: Synthetic oligonucleotide
  Sense strand starting at position 1012 of SEQ ID NO: 830
acacuuaacuuggugaaac

SEQ ID NO: 67123 - RNA, 19 nt, Artificial Sequence
  Description of Artificial Sequence: Synthetic oligonucleotide
  Antisense strand to SEQ ID NO: 67042
guuucaccaaguuaagugu

SEQ ID NO: 67124 - RNA, 19 nt, Artificial Sequence
  Description of Artificial Sequence: Synthetic oligonucleotide
  Sense strand starting at position 409 of SEQ ID NO: 830
ugaucuaagugauacauuu

SEQ ID NO: 67125 - RNA, 19 nt, Artificial Sequence
  Description of Artificial Sequence: Synthetic oligonucleotide
  Antisense strand to SEQ ID NO: 67044
aaauguaucacuuagauca

SEQ ID NO: 67126 - RNA, 19 nt, Artificial Sequence
  Description of Artificial Sequence: Synthetic oligonucleotide
  Sense strand starting at position 400 of SEQ ID NO: 830
ggguauccuugaucuaagu

SEQ ID NO: 67127 - RNA, 19 nt, Artificial Sequence
  Description of Artificial Sequence: Synthetic oligonucleotide
  Antisense strand to SEQ ID NO: 67046
acuuagaucaaggauaccc

SEQ ID NO: 67128 - RNA, 19 nt, Artificial Sequence
  Description of Artificial Sequence: Synthetic oligonucleotide
  Sense strand starting at position 398 of SEQ ID NO: 830
uuggguauccuugaucuaa

SEQ ID NO: 67129 - RNA, 19 nt, Artificial Sequence
  Description of Artificial Sequence: Synthetic oligonucleotide
  Antisense strand to SEQ ID NO: 67048
uuagaucaaggauacccaa

SEQ ID NO: 67130 - RNA, 19 nt, Artificial Sequence
  Description of Artificial Sequence: Synthetic oligonucleotide
  Sense strand starting at position 394 of SEQ ID NO: 830
auguuuggguauccuugau

SEQ ID NO: 67131 - RNA, 19 nt, Artificial Sequence
  Description of Artificial Sequence: Synthetic oligonucleotide
  Antisense strand to SEQ ID NO: 67050
aucaaggauacccaaacau

SEQ ID NO: 67132 - RNA, 19 nt, Artificial Sequence
  Description of Artificial Sequence: Synthetic oligonucleotide
  Sense strand starting at position 387 of SEQ ID NO: 830
acaccuuauguuuggguau

SEQ ID NO: 67133 - RNA, 19 nt, Artificial Sequence
  Description of Artificial Sequence: Synthetic oligonucleotide
  Antisense strand to SEQ ID NO: 67052
auacccaaacauaaggugu

SEQ ID NO: 67134 - RNA, 19 nt, Artificial Sequence
  Description of Artificial Sequence: Synthetic oligonucleotide
  Sense strand starting at position 326 of SEQ ID NO: 830
guccauauauggccaggaa

SEQ ID NO: 67135 - RNA, 19 nt, Artificial Sequence
  Description of Artificial Sequence: Synthetic oligonucleotide
  Antisense strand to SEQ ID NO: 67054
uuccuggccauauauggac

SEQ ID NO: 67136 - RNA, 19 nt, Artificial Sequence
  Description of Artificial Sequence: Synthetic oligonucleotide
  Sense strand starting at position 98 of SEQ ID NO: 830
ggaaauguauugguuuccu

SEQ ID NO: 67137 - RNA, 19 nt, Artificial Sequence
  Description of Artificial Sequence: Synthetic oligonucleotide
  Antisense strand to SEQ ID NO: 67056
aggaaaccaauacauuucc

SEQ ID NO: 67138 - RNA, 19 nt, Artificial Sequence
  Description of Artificial Sequence: Synthetic oligonucleotide
  Sense strand starting at position 9 of SEQ ID NO: 830
acuguaauuuaggacacaa

SEQ ID NO: 67139 - RNA, 19 nt, Artificial Sequence
  Description of Artificial Sequence: Synthetic oligonucleotide
  Antisense strand to SEQ ID NO: 67058
uuguguccuaaauuacagu

SEQ ID NO: 67140 - RNA, 19 nt, Artificial Sequence
  Description of Artificial Sequence: Synthetic oligonucleotide
  Sense strand starting at position 430 of SEQ ID NO: 831
auaguuguauuccugaaau

SEQ ID NO: 67141 - RNA, 19 nt, Artificial Sequence
  Description of Artificial Sequence: Synthetic oligonucleotide
  Antisense strand to SEQ ID NO: 67060
auuucaggaauacaacuau

SEQ ID NO: 67142 - RNA, 19 nt, Artificial Sequence
  Description of Artificial Sequence: Synthetic oligonucleotide
  Sense strand starting at position 432 of SEQ ID NO: 831
aguuguauuccugaaauag

SEQ ID NO: 67143 - RNA, 19 nt, Artificial Sequence
  Description of Artificial Sequence: Synthetic oligonucleotide
  Antisense strand to SEQ ID NO: 67062
cuauuucaggaauacaacu

SEQ ID NO: 67144 - RNA, 19 nt, Artificial Sequence
  Description of Artificial Sequence: Synthetic oligonucleotide
  Sense strand starting at position 1289 of SEQ ID NO: 831
cugguuaaauaaucgacua

SEQ ID NO: 67145 - RNA, 19 nt, Artificial Sequence
  Description of Artificial Sequence: Synthetic oligonucleotide
  Antisense strand to SEQ ID NO: 67064
uagucgauuauuuaaccag

SEQ ID NO: 67146 - RNA, 19 nt, Artificial Sequence
  Description of Artificial Sequence: Synthetic oligonucleotide
  Sense strand starting at position 1324 of SEQ ID NO: 831
cuaugcaaccaguagaaau

SEQ ID NO: 67147 - RNA, 19 nt, Artificial Sequence
  Description of Artificial Sequence: Synthetic oligonucleotide
  Antisense strand to SEQ ID NO: 67066
auuucuacugguugcauag

SEQ ID NO: 67148 - RNA, 19 nt, Artificial Sequence
  Description of Artificial Sequence: Synthetic oligonucleotide
  Sense strand starting at position 1481 of SEQ ID NO: 831
aaauauuaacggugauuag

SEQ ID NO: 67149 - RNA, 19 nt, Artificial Sequence
  Description of Artificial Sequence: Synthetic oligonucleotide
  Antisense strand to SEQ ID NO: 67068
cuaaucaccguuaauauuu

SEQ ID NO: 67150 - RNA, 19 nt, Artificial Sequence
  Description of Artificial Sequence: Synthetic oligonucleotide
  Sense strand starting at position 1805 of SEQ ID NO: 831
ccuuucuuaguuuagguaa

SEQ ID NO: 67151 - RNA, 19 nt, Artificial Sequence
  Description of Artificial Sequence: Synthetic oligonucleotide
  Antisense strand to SEQ ID NO: 67070
uuaccuaaacuaagaaagg

SEQ ID NO: 67152 - RNA, 19 nt, Artificial Sequence
  Description of Artificial Sequence: Synthetic oligonucleotide
  Sense strand starting at position 1808 of SEQ ID NO: 831
uucuuaguuuagguaaauc

SEQ ID NO: 67153 - RNA, 19 nt, Artificial Sequence
  Description of Artificial Sequence: Synthetic oligonucleotide
  Antisense strand to SEQ ID NO: 67072
gauuuaccuaaacuaagaa

SEQ ID NO: 67154 - RNA, 19 nt, Artificial Sequence
  Description of Artificial Sequence: Synthetic oligonucleotide
  Sense strand starting at position 1833 of SEQ ID NO: 831
gcaaaccauguuuagaagu

SEQ ID NO: 67155 - RNA, 19 nt, Artificial Sequence
  Description of Artificial Sequence: Synthetic oligonucleotide
  Antisense strand to SEQ ID NO: 67074
acuucuaaacaugguuugc

SEQ ID NO: 67156 - RNA, 19 nt, Artificial Sequence
  Description of Artificial Sequence: Synthetic oligonucleotide
  Sense strand starting at position 1880 of SEQ ID NO: 831
cugaauuugucccuuugcu

SEQ ID NO: 67157 - RNA, 19 nt, Artificial Sequence
  Description of Artificial Sequence: Synthetic oligonucleotide
  Antisense strand to SEQ ID NO: 67076
agcaaagggacaaauucag

SEQ ID NO: 67158 - RNA, 19 nt, Artificial Sequence
  Description of Artificial Sequence: Synthetic oligonucleotide
  Sense strand starting at position 1924 of SEQ ID NO: 831
gaauguagugagugaguca

SEQ ID NO: 67159 - RNA, 19 nt, Artificial Sequence
  Description of Artificial Sequence: Synthetic oligonucleotide
  Antisense strand to SEQ ID NO: 67078
ugacucacucacuacauuc

SEQ ID NO: 67160 - RNA, 19 nt, Artificial Sequence
  Description of Artificial Sequence: Synthetic oligonucleotide
  Sense strand starting at position 1925 of SEQ ID NO: 831
aauguagugagugagucau

SEQ ID NO: 67161 - RNA, 19 nt, Artificial Sequence
  Description of Artificial Sequence: Synthetic oligonucleotide
  Antisense strand to SEQ ID NO: 67080
augacucacucacuacauu

SEQ ID NO: 67162 - RNA, 19 nt, Artificial Sequence
  Description of Artificial Sequence: Synthetic oligonucleotide
  Sense strand starting at position 1931 of SEQ ID NO: 831
gugagugagucauccauca

SEQ ID NO: 67163 - RNA, 19 nt, Artificial Sequence
  Description of Artificial Sequence: Synthetic oligonucleotide
  Antisense strand to SEQ ID NO: 67082
ugauggaugacucacucac

SEQ ID NO: 67164 - RNA, 19 nt, Artificial Sequence
  Description of Artificial Sequence: Synthetic oligonucleotide
  Sense strand starting at position 2260 of SEQ ID NO: 831
aaauuaagcugagugaaug

SEQ ID NO: 67165 - RNA, 19 nt, Artificial Sequence
  Description of Artificial Sequence: Synthetic oligonucleotide
  Antisense strand to SEQ ID NO: 67084
cauucacucagcuuaauuu

SEQ ID NO: 67166 - RNA, 19 nt, Artificial Sequence
  Description of Artificial Sequence: Synthetic oligonucleotide
  Sense strand starting at position 2261 of SEQ ID NO: 831
aauuaagcugagugaauga

SEQ ID NO: 67167 - RNA, 19 nt, Artificial Sequence
  Description of Artificial Sequence: Synthetic oligonucleotide
  Antisense strand to SEQ ID NO: 67086
ucauucacucagcuuaauu

SEQ ID NO: 67168 - RNA, 19 nt, Artificial Sequence
  Description of Artificial Sequence: Synthetic oligonucleotide
  Sense strand starting at position 2271 of SEQ ID NO: 831
agugaaugauuccuccaua

SEQ ID NO: 67169 - RNA, 19 nt, Artificial Sequence
  Description of Artificial Sequence: Synthetic oligonucleotide
  Antisense strand to SEQ ID NO: 67088
uauggaggaaucauucacu

SEQ ID NO: 67170 - RNA, 19 nt, Artificial Sequence
  Description of Artificial Sequence: Synthetic oligonucleotide
  Sense strand starting at position 2272 of SEQ ID NO: 831
gugaaugauuccuccauaa

SEQ ID NO: 67171 - RNA, 19 nt, Artificial Sequence
  Description of Artificial Sequence: Synthetic oligonucleotide
  Antisense strand to SEQ ID NO: 67090
uuauggaggaaucauucac

SEQ ID NO: 67172 - RNA, 19 nt, Artificial Sequence
  Description of Artificial Sequence: Synthetic oligonucleotide
  Sense strand starting at position 2318 of SEQ ID NO: 831
ggagguauuugugugcugu

SEQ ID NO: 67173 - RNA, 19 nt, Artificial Sequence
  Description of Artificial Sequence: Synthetic oligonucleotide
  Antisense strand to SEQ ID NO: 67092
acagcacacaaauaccucc

SEQ ID NO: 67174 - RNA, 19 nt, Artificial Sequence
  Description of Artificial Sequence: Synthetic oligonucleotide
  Sense strand starting at position 2448 of SEQ ID NO: 831
ggucaucugccuuaauaaa

SEQ ID NO: 67175 - RNA, 19 nt, Artificial Sequence
  Description of Artificial Sequence: Synthetic oligonucleotide
  Antisense strand to SEQ ID NO: 67094
uuuauuaaggcagaugacc

SEQ ID NO: 67176 - RNA, 19 nt, Artificial Sequence
  Description of Artificial Sequence: Synthetic oligonucleotide
  Sense strand starting at position 2488 of SEQ ID NO: 831
gauagauccugauucuguc

SEQ ID NO: 67177 - RNA, 19 nt, Artificial Sequence
  Description of Artificial Sequence: Synthetic oligonucleotide
  Antisense strand to SEQ ID NO: 67096
gacagaaucaggaucuauc

SEQ ID NO: 67178 - RNA, 19 nt, Artificial Sequence
  Description of Artificial Sequence: Synthetic oligonucleotide
  Sense strand starting at position 2578 of SEQ ID NO: 831
gcagguugagcauaacaga

SEQ ID NO: 67179 - RNA, 19 nt, Artificial Sequence
  Description of Artificial Sequence: Synthetic oligonucleotide
  Antisense strand to SEQ ID NO: 67098
ucuguuaugcucaaccugc

SEQ ID NO: 67180 - RNA, 19 nt, Artificial Sequence
  Description of Artificial Sequence: Synthetic oligonucleotide
  Sense strand starting at position 2830 of SEQ ID NO: 831
auuacauauguguaacuca

SEQ ID NO: 67181 - RNA, 19 nt, Artificial Sequence
  Description of Artificial Sequence: Synthetic oligonucleotide
  Antisense strand to SEQ ID NO: 67100
ugaguuacacauauguaau

SEQ ID NO: 67182 - RNA, 19 nt, Artificial Sequence
  Description of Artificial Sequence: Synthetic oligonucleotide
  Sense strand starting at position 2833 of SEQ ID NO: 831
acauauguguaacucauaa

SEQ ID NO: 67183 - RNA, 19 nt, Artificial Sequence
  Description of Artificial Sequence: Synthetic oligonucleotide
  Antisense strand to SEQ ID NO: 67102
uuaugaguuacacauaugu

SEQ ID NO: 67184 - RNA, 19 nt, Artificial Sequence
  Description of Artificial Sequence: Synthetic oligonucleotide
  Sense strand starting at position 2882 of SEQ ID NO: 831
ucgguagucagagaauaca

SEQ ID NO: 67185 - RNA, 19 nt, Artificial Sequence
  Description of Artificial Sequence: Synthetic oligonucleotide
  Antisense strand to SEQ ID NO: 67104
uguauucucugacuaccga

SEQ ID NO: 67186 - RNA, 19 nt, Artificial Sequence
  Description of Artificial Sequence: Synthetic oligonucleotide
  Sense strand starting at position 2982 of SEQ ID NO: 831
agacacuguuacucucaua

SEQ ID NO: 67187 - RNA, 19 nt, Artificial Sequence
  Description of Artificial Sequence: Synthetic oligonucleotide
  Antisense strand to SEQ ID NO: 67106
uaugagaguaacagugucu

SEQ ID NO: 67188 - RNA, 19 nt, Artificial Sequence
  Description of Artificial Sequence: Synthetic oligonucleotide
  Sense strand starting at position 2994 of SEQ ID NO: 831
ucucauauccuguagguaa

SEQ ID NO: 67189 - RNA, 19 nt, Artificial Sequence
  Description of Artificial Sequence: Synthetic oligonucleotide
  Antisense strand to SEQ ID NO: 67108
uuaccuacaggauaugaga

SEQ ID NO: 67190 - RNA, 19 nt, Artificial Sequence
  Description of Artificial Sequence: Synthetic oligonucleotide
  Sense strand starting at position 2996 of SEQ ID NO: 831
ucauauccuguagguaaga

SEQ ID NO: 67191 - RNA, 19 nt, Artificial Sequence
  Description of Artificial Sequence: Synthetic oligonucleotide
  Antisense strand to SEQ ID NO: 67110
ucuuaccuacaggauauga

SEQ ID NO: 67192 - RNA, 19 nt, Artificial Sequence
  Description of Artificial Sequence: Synthetic oligonucleotide
  Sense strand starting at position 2997 of SEQ ID NO: 831
cauauccuguagguaagaa

SEQ ID NO: 67193 - RNA, 19 nt, Artificial Sequence
  Description of Artificial Sequence: Synthetic oligonucleotide
  Antisense strand to SEQ ID NO: 67112
uucuuaccuacaggauaug

SEQ ID NO: 67194 - RNA, 19 nt, Artificial Sequence
  Description of Artificial Sequence: Synthetic oligonucleotide
  Sense strand starting at position 3184 of SEQ ID NO: 831
auuuaaaugucugacagag

SEQ ID NO: 67195 - RNA, 19 nt, Artificial Sequence
  Description of Artificial Sequence: Synthetic oligonucleotide
  Antisense strand to SEQ ID NO: 67114
cucugucagacauuuaaau

SEQ ID NO: 67196 - RNA, 19 nt, Artificial Sequence
  Description of Artificial Sequence: Synthetic oligonucleotide
  Sense strand starting at position 3201 of SEQ ID NO: 831
aggaaugguuaucuauggu

SEQ ID NO: 67197 - RNA, 19 nt, Artificial Sequence
  Description of Artificial Sequence: Synthetic oligonucleotide
  Antisense strand to SEQ ID NO: 67116
accauagauaaccauuccu

SEQ ID NO: 67198 - RNA, 19 nt, Artificial Sequence
  Description of Artificial Sequence: Synthetic oligonucleotide
  Sense strand starting at position 3204 of SEQ ID NO: 831
aaugguuaucuaugguaca

SEQ ID NO: 67199 - RNA, 19 nt, Artificial Sequence
  Description of Artificial Sequence: Synthetic oligonucleotide
  Antisense strand to SEQ ID NO: 67118
uguaccauagauaaccauu

SEQ ID NO: 67200 - RNA, 19 nt, Artificial Sequence
  Description of Artificial Sequence: Synthetic oligonucleotide
  Sense strand starting at position 3209 of SEQ ID NO: 831
uuaucuaugguacaucuau

SEQ ID NO: 67201 - RNA, 19 nt, Artificial Sequence
  Description of Artificial Sequence: Synthetic oligonucleotide
  Antisense strand to SEQ ID NO: 67120
auagauguaccauagauaa

SEQ ID NO: 67202 - RNA, 19 nt, Artificial Sequence
  Description of Artificial Sequence: Synthetic oligonucleotide
  Sense strand starting at position 3375 of SEQ ID NO: 831
ugggcucaugucuauaauc

SEQ ID NO: 67203 - RNA, 19 nt, Artificial Sequence
  Description of Artificial Sequence: Synthetic oligonucleotide
  Antisense strand to SEQ ID NO: 67122
gauuauagacaugagccca

SEQ ID NO: 67204 - RNA, 19 nt, Artificial Sequence
  Description of Artificial Sequence: Synthetic oligonucleotide
  Sense strand starting at position 3780 of SEQ ID NO: 831
ugaugcuuaggaggaguua

SEQ ID NO: 67205 - RNA, 19 nt, Artificial Sequence
  Description of Artificial Sequence: Synthetic oligonucleotide
  Antisense strand to SEQ ID NO: 67124
uaacuccuccuaagcauca

SEQ ID NO: 67206 - RNA, 19 nt, Artificial Sequence
  Description of Artificial Sequence: Synthetic oligonucleotide
  Sense strand starting at position 3781 of SEQ ID NO: 831
gaugcuuaggaggaguuau

SEQ ID NO: 67207 - RNA, 19 nt, Artificial Sequence
  Description of Artificial Sequence: Synthetic oligonucleotide
  Antisense strand to SEQ ID NO: 67126
auaacuccuccuaagcauc

SEQ ID NO: 67208 - RNA, 19 nt, Artificial Sequence
  Description of Artificial Sequence: Synthetic oligonucleotide
  Sense strand starting at position 3792 of SEQ ID NO: 831
ggaguuauaccauggacac

SEQ ID NO: 67209 - RNA, 19 nt, Artificial Sequence
  Description of Artificial Sequence: Synthetic oligonucleotide
  Antisense strand to SEQ ID NO: 67128
guguccaugguauaacucc

SEQ ID NO: 67210 - RNA, 19 nt, Artificial Sequence
  Description of Artificial Sequence: Synthetic oligonucleotide
  Sense strand starting at position 3849 of SEQ ID NO: 831
agagcagauucagugaagu

SEQ ID NO: 67211 - RNA, 19 nt, Artificial Sequence
  Description of Artificial Sequence: Synthetic oligonucleotide
  Antisense strand to SEQ ID NO: 67130
acuucacugaaucugcucu

SEQ ID NO: 67212 - RNA, 19 nt, Artificial Sequence
  Description of Artificial Sequence: Synthetic oligonucleotide
  Sense strand starting at position 3884 of SEQ ID NO: 831
guuggacauuaacuuaaau

SEQ ID NO: 67213 - RNA, 19 nt, Artificial Sequence
  Description of Artificial Sequence: Synthetic oligonucleotide
  Antisense strand to SEQ ID NO: 67132
auuuaaguuaauguccaac

SEQ ID NO: 67214 - RNA, 19 nt, Artificial Sequence
  Description of Artificial Sequence: Synthetic oligonucleotide
  Sense strand starting at position 3934 of SEQ ID NO: 831
aaaugucugcaaggauaca

SEQ ID NO: 67215 - RNA, 19 nt, Artificial Sequence
  Description of Artificial Sequence: Synthetic oligonucleotide
  Antisense strand to SEQ ID NO: 67134
uguauccuugcagacauuu

SEQ ID NO: 67216 - RNA, 19 nt, Artificial Sequence
  Description of Artificial Sequence: Synthetic oligonucleotide
  Sense strand starting at position 3958 of SEQ ID NO: 831
uacuguugugaccacugau

SEQ ID NO: 67217 - RNA, 19 nt, Artificial Sequence
  Description of Artificial Sequence: Synthetic oligonucleotide
  Antisense strand to SEQ ID NO: 67136
aucaguggucacaacagua

SEQ ID NO: 67218 - RNA, 19 nt, Artificial Sequence
  Description of Artificial Sequence: Synthetic oligonucleotide
  Sense strand starting at position 3961 of SEQ ID NO: 831
uguugugaccacugaugau

SEQ ID NO: 67219 - RNA, 19 nt, Artificial Sequence
  Description of Artificial Sequence: Synthetic oligonucleotide
  Antisense strand to SEQ ID NO: 67138
aucaucaguggucacaaca

SEQ ID NO: 67220 - RNA, 19 nt, Artificial Sequence
  Description of Artificial Sequence: Synthetic oligonucleotide
  Sense strand starting at position 3947 of SEQ ID NO: 832
gcagcauccagaugaggaa

SEQ ID NO: 67221 - RNA, 19 nt, Artificial Sequence
  Description of Artificial Sequence: Synthetic oligonucleotide
  Antisense strand to SEQ ID NO: 67140
uuccucaucuggaugcugc

SEQ ID NO: 67222 - RNA, 19 nt, Artificial Sequence
  Description of Artificial Sequence: Synthetic oligonucleotide
  Sense strand starting at position 3741 of SEQ ID NO: 832
guguuugcccaggacugua

SEQ ID NO: 67223 - RNA, 19 nt, Artificial Sequence
  Description of Artificial Sequence: Synthetic oligonucleotide
  Antisense strand to SEQ ID NO: 67142
uacaguccugggcaaacac

SEQ ID NO: 67224 - RNA, 19 nt, Artificial Sequence
  Description of Artificial Sequence: Synthetic oligonucleotide
  Sense strand starting at position 3707 of SEQ ID NO: 832
gaugauauugcuggcacua

SEQ ID NO: 67225 - RNA, 19 nt, Artificial Sequence
  Description of Artificial Sequence: Synthetic oligonucleotide
  Antisense strand to SEQ ID NO: 67144
uagugccagcaauaucauc

SEQ ID NO: 67226 - RNA, 19 nt, Artificial Sequence
  Description of Artificial Sequence: Synthetic oligonucleotide
  Sense strand starting at position 3688 of SEQ ID NO: 832
cgaguccugucuccacaga

SEQ ID NO: 67227 - RNA, 19 nt, Artificial Sequence
  Description of Artificial Sequence: Synthetic oligonucleotide
  Antisense strand to SEQ ID NO: 67146
ucuguggagacaggacucg

SEQ ID NO: 67228 - RNA, 19 nt, Artificial Sequence
  Description of Artificial Sequence: Synthetic oligonucleotide
  Sense strand starting at position 3658 of SEQ ID NO: 832
uugggagucccuggaucuu

SEQ ID NO: 67229 - RNA, 19 nt, Artificial Sequence
  Description of Artificial Sequence: Synthetic oligonucleotide
  Antisense strand to SEQ ID NO: 67148
aagauccagggacucccaa

SEQ ID NO: 67230 - RNA, 19 nt, Artificial Sequence
  Description of Artificial Sequence: Synthetic oligonucleotide
  Sense strand starting at position 3574 of SEQ ID NO: 832
uuacuaguguguccugacu

SEQ ID NO: 67231 - RNA, 19 nt, Artificial Sequence
  Description of Artificial Sequence: Synthetic oligonucleotide
  Antisense strand to SEQ ID NO: 67150
agucaggacacacuaguaa

SEQ ID NO: 67232 - RNA, 19 nt, Artificial Sequence
  Description of Artificial Sequence: Synthetic oligonucleotide
  Sense strand starting at position 3490 of SEQ ID NO: 832
guaaauagccucugccaaa

SEQ ID NO: 67233 - RNA, 19 nt, Artificial Sequence
  Description of Artificial Sequence: Synthetic oligonucleotide
  Antisense strand to SEQ ID NO: 67152
uuuggcagaggcuauuuac

SEQ ID NO: 67234 - RNA, 19 nt, Artificial Sequence
  Description of Artificial Sequence: Synthetic oligonucleotide
  Sense strand starting at position 3479 of SEQ ID NO: 832
auaccauugcaguaaauag

SEQ ID NO: 67235 - RNA, 19 nt, Artificial Sequence
  Description of Artificial Sequence: Synthetic oligonucleotide
  Antisense strand to SEQ ID NO: 67154
cuauuuacugcaaugguau

SEQ ID NO: 67236 - RNA, 19 nt, Artificial Sequence
  Description of Artificial Sequence: Synthetic oligonucleotide
  Sense strand starting at position 3438 of SEQ ID NO: 832
aauuaaggcuguuucuagu

SEQ ID NO: 67237 - RNA, 19 nt, Artificial Sequence
  Description of Artificial Sequence: Synthetic oligonucleotide
  Antisense strand to SEQ ID NO: 67156
acuagaaacagccuuaauu

SEQ ID NO: 67238 - RNA, 19 nt, Artificial Sequence
  Description of Artificial Sequence: Synthetic oligonucleotide
  Sense strand starting at position 3280 of SEQ ID NO: 832
guaugcuaucuacacucuu

SEQ ID NO: 67239 - RNA, 19 nt, Artificial Sequence
  Description of Artificial Sequence: Synthetic oligonucleotide
  Antisense strand to SEQ ID NO: 67158
aagaguguagauagcauac

SEQ ID NO: 67240 - RNA, 19 nt, Artificial Sequence
  Description of Artificial Sequence: Synthetic oligonucleotide
  Sense strand starting at position 3265 of SEQ ID NO: 832
ucuuaaccuguggaaguau

SEQ ID NO: 67241 - RNA, 19 nt, Artificial Sequence
  Description of Artificial Sequence: Synthetic oligonucleotide
  Antisense strand to SEQ ID NO: 67160
auacuuccacagguuaaga

SEQ ID NO: 67242 - RNA, 19 nt, Artificial Sequence
  Description of Artificial Sequence: Synthetic oligonucleotide
  Sense strand starting at position 3263 of SEQ ID NO: 832
agucuuaaccuguggaagu

SEQ ID NO: 67243 - RNA, 19 nt, Artificial Sequence
  Description of Artificial Sequence: Synthetic oligonucleotide
  Antisense strand to SEQ ID NO: 67162
acuuccacagguuaagacu

SEQ ID NO: 67244 - RNA, 19 nt, Artificial Sequence
  Description of Artificial Sequence: Synthetic oligonucleotide
  Sense strand starting at position 2364 of SEQ ID NO: 832
gagggaggauugagaggua

SEQ ID NO: 67245 - RNA, 19 nt, Artificial Sequence
  Description of Artificial Sequence: Synthetic oligonucleotide
  Antisense strand to SEQ ID NO: 67164
uaccucucaauccucccuc

SEQ ID NO: 67246 - RNA, 19 nt, Artificial Sequence
  Description of Artificial Sequence: Synthetic oligonucleotide
  Sense strand starting at position 2347 of SEQ ID NO: 832
ccagaauugagaggcgaga

SEQ ID NO: 67247 - RNA, 19 nt, Artificial Sequence
  Description of Artificial Sequence: Synthetic oligonucleotide
  Antisense strand to SEQ ID NO: 67166
ucucgccucucaauucugg

SEQ ID NO: 67248 - RNA, 19 nt, Artificial Sequence
  Description of Artificial Sequence: Synthetic oligonucleotide
  Sense strand starting at position 2336 of SEQ ID NO: 832
cccuaaugggcccagaauu

SEQ ID NO: 67249 - RNA, 19 nt, Artificial Sequence
  Description of Artificial Sequence: Synthetic oligonucleotide
  Antisense strand to SEQ ID NO: 67168
aauucugggcccauuaggg

SEQ ID NO: 67250 - RNA, 19 nt, Artificial Sequence
  Description of Artificial Sequence: Synthetic oligonucleotide
  Sense strand starting at position 2234 of SEQ ID NO: 832
ggauaaagcucccuuuccu

SEQ ID NO: 67251 - RNA, 19 nt, Artificial Sequence
  Description of Artificial Sequence: Synthetic oligonucleotide
  Antisense strand to SEQ ID NO: 67170
aggaaagggagcuuuaucc

SEQ ID NO: 67252 - RNA, 19 nt, Artificial Sequence
  Description of Artificial Sequence: Synthetic oligonucleotide
  Sense strand starting at position 2218 of SEQ ID NO: 832
ccacaaugucccugaagga

SEQ ID NO: 67253 - RNA, 19 nt, Artificial Sequence
  Description of Artificial Sequence: Synthetic oligonucleotide
  Antisense strand to SEQ ID NO: 67172
uccuucagggacauugugg

SEQ ID NO: 67254 - RNA, 19 nt, Artificial Sequence
  Description of Artificial Sequence: Synthetic oligonucleotide
  Sense strand starting at position 1707 of SEQ ID NO: 832
cggaguuccaccuggauuc

SEQ ID NO: 67255 - RNA, 19 nt, Artificial Sequence
  Description of Artificial Sequence: Synthetic oligonucleotide
  Antisense strand to SEQ ID NO: 67174
gaauccagguggaacuccg

SEQ ID NO: 67256 - RNA, 19 nt, Artificial Sequence
  Description of Artificial Sequence: Synthetic oligonucleotide
  Sense strand starting at position 1569 of SEQ ID NO: 832
gcguuuccucugggaauca

SEQ ID NO: 67257 - RNA, 19 nt, Artificial Sequence
  Description of Artificial Sequence: Synthetic oligonucleotide
  Antisense strand to SEQ ID NO: 67176
ugauucccagaggaaacgc

SEQ ID NO: 67258 - RNA, 19 nt, Artificial Sequence
  Description of Artificial Sequence: Synthetic oligonucleotide
  Sense strand starting at position 1242 of SEQ ID NO: 832
gcacuuagucacuaucuga

SEQ ID NO: 67259 - RNA, 19 nt, Artificial Sequence
  Description of Artificial Sequence: Synthetic oligonucleotide
  Antisense strand to SEQ ID NO: 67178
ucagauagugacuaagugc

SEQ ID NO: 67260 - RNA, 19 nt, Artificial Sequence
  Description of Artificial Sequence: Synthetic oligonucleotide
  Sense strand starting at position 997 of SEQ ID NO: 832
uuacccugggucugaaaga

SEQ ID NO: 67261 - RNA, 19 nt, Artificial Sequence
  Description of Artificial Sequence: Synthetic oligonucleotide
  Antisense strand to SEQ ID NO: 67180
ucuuucagacccaggguaa

SEQ ID NO: 67262 - RNA, 19 nt, Artificial Sequence
  Description of Artificial Sequence: Synthetic oligonucleotide
  Sense strand starting at position 994 of SEQ ID NO: 832
agauuacccugggucugaa

SEQ ID NO: 67263 - RNA, 19 nt, Artificial Sequence
  Description of Artificial Sequence: Synthetic oligonucleotide
  Antisense strand to SEQ ID NO: 67182
uucagacccaggguaaucu

SEQ ID NO: 67264 - RNA, 19 nt, Artificial Sequence
  Description of Artificial Sequence: Synthetic oligonucleotide
  Sense strand starting at position 937 of SEQ ID NO: 832
ggauccuucucaucacaga

SEQ ID NO: 67265 - RNA, 19 nt, Artificial Sequence
  Description of Artificial Sequence: Synthetic oligonucleotide
  Antisense strand to SEQ ID NO: 67184
ucugugaugagaaggaucc

SEQ ID NO: 67266 - RNA, 19 nt, Artificial Sequence
  Description of Artificial Sequence: Synthetic oligonucleotide
  Sense strand starting at position 934 of SEQ ID NO: 832
gguggauccuucucaucac

SEQ ID NO: 67267 - RNA, 19 nt, Artificial Sequence
  Description of Artificial Sequence: Synthetic oligonucleotide
  Antisense strand to SEQ ID NO: 67186
gugaugagaaggauccacc

SEQ ID NO: 67268 - RNA, 19 nt, Artificial Sequence
  Description of Artificial Sequence: Synthetic oligonucleotide
  Sense strand starting at position 931 of SEQ ID NO: 832
auggguggauccuucucau

SEQ ID NO: 67269 - RNA, 19 nt, Artificial Sequence
  Description of Artificial Sequence: Synthetic oligonucleotide
  Antisense strand to SEQ ID NO: 67188
augagaaggauccacccau

SEQ ID NO: 67270 - RNA, 19 nt, Artificial Sequence
  Description of Artificial Sequence: Synthetic oligonucleotide
  Sense strand starting at position 811 of SEQ ID NO: 832
ucucgcuaggcuuagcaaa

SEQ ID NO: 67271 - RNA, 19 nt, Artificial Sequence
  Description of Artificial Sequence: Synthetic oligonucleotide
  Antisense strand to SEQ ID NO: 67190
uuugcuaagccuagcgaga

SEQ ID NO: 67272 - RNA, 19 nt, Artificial Sequence
  Description of Artificial Sequence: Synthetic oligonucleotide
  Sense strand starting at position 781 of SEQ ID NO: 832
gccacucccuuguuuaaga

SEQ ID NO: 67273 - RNA, 19 nt, Artificial Sequence
  Description of Artificial Sequence: Synthetic oligonucleotide
  Antisense strand to SEQ ID NO: 67192
ucuuaaacaagggaguggc

SEQ ID NO: 67274 - RNA, 19 nt, Artificial Sequence
  Description of Artificial Sequence: Synthetic oligonucleotide
  Sense strand starting at position 710 of SEQ ID NO: 832
ccuguauuauggccucuuu

SEQ ID NO: 67275 - RNA, 19 nt, Artificial Sequence
  Description of Artificial Sequence: Synthetic oligonucleotide
  Antisense strand to SEQ ID NO: 67194
aaagaggccauaauacagg

SEQ ID NO: 67276 - RNA, 19 nt, Artificial Sequence
  Description of Artificial Sequence: Synthetic oligonucleotide
  Sense strand starting at position 700 of SEQ ID NO: 832
auuauucuggccuguauua

SEQ ID NO: 67277 - RNA, 19 nt, Artificial Sequence
  Description of Artificial Sequence: Synthetic oligonucleotide
  Antisense strand to SEQ ID NO: 67196
uaauacaggccagaauaau

SEQ ID NO: 67278 - RNA, 19 nt, Artificial Sequence
  Description of Artificial Sequence: Synthetic oligonucleotide
  Sense strand starting at position 698 of SEQ ID NO: 832
cuauuauucuggccuguau

SEQ ID NO: 67279 - RNA, 19 nt, Artificial Sequence
  Description of Artificial Sequence: Synthetic oligonucleotide
  Antisense strand to SEQ ID NO: 67198
auacaggccagaauaauag

SEQ ID NO: 67280 - RNA, 19 nt, Artificial Sequence
  Description of Artificial Sequence: Synthetic oligonucleotide
  Sense strand starting at position 451 of SEQ ID NO: 832
guggaaagaugugcuuugu

SEQ ID NO: 67281 - RNA, 19 nt, Artificial Sequence
  Description of Artificial Sequence: Synthetic oligonucleotide
  Antisense strand to SEQ ID NO: 67200
acaaagcacaucuuuccac

SEQ ID NO: 67282 - RNA, 19 nt, Artificial Sequence
  Description of Artificial Sequence: Synthetic oligonucleotide
  Sense strand starting at position 442 of SEQ ID NO: 832
ggccuugugguggaaagau

SEQ ID NO: 67283 - RNA, 19 nt, Artificial Sequence
  Description of Artificial Sequence: Synthetic oligonucleotide
  Antisense strand to SEQ ID NO: 67202
aucuuuccaccacaaggcc

SEQ ID NO: 67284 - RNA, 19 nt, Artificial Sequence
  Description of Artificial Sequence: Synthetic oligonucleotide
  Sense strand starting at position 441 of SEQ ID NO: 832
gggccuugugguggaaaga

SEQ ID NO: 67285 - RNA, 19 nt, Artificial Sequence
  Description of Artificial Sequence: Synthetic oligonucleotide
  Antisense strand to SEQ ID NO: 67204
ucuuuccaccacaaggccc

SEQ ID NO: 67286 - RNA, 19 nt, Artificial Sequence
  Description of Artificial Sequence: Synthetic oligonucleotide
  Sense strand starting at position 322 of SEQ ID NO: 832
ggagccuuaugaucugacu

SEQ ID NO: 67287 - RNA, 19 nt, Artificial Sequence
  Description of Artificial Sequence: Synthetic oligonucleotide
  Antisense strand to SEQ ID NO: 67206
agucagaucauaaggcucc

SEQ ID NO: 67288 - RNA, 19 nt, Artificial Sequence
  Description of Artificial Sequence: Synthetic oligonucleotide
  Sense strand starting at position 194 of SEQ ID NO: 832
ugaaguugcaguuaugagu

SEQ ID NO: 67289 - RNA, 19 nt, Artificial Sequence
  Description of Artificial Sequence: Synthetic oligonucleotide
  Antisense strand to SEQ ID NO: 67208
acucauaacugcaacuuca

SEQ ID NO: 67290 - RNA, 19 nt, Artificial Sequence
  Description of Artificial Sequence: Synthetic oligonucleotide
  Sense strand starting at position 182 of SEQ ID NO: 832
acuacuauacugugaaguu

SEQ ID NO: 67291 - RNA, 19 nt, Artificial Sequence
  Description of Artificial Sequence: Synthetic oligonucleotide
  Antisense strand to SEQ ID NO: 67210
aacuucacaguauaguagu

SEQ ID NO: 67292 - RNA, 19 nt, Artificial Sequence
  Description of Artificial Sequence: Synthetic oligonucleotide
  Sense strand starting at position 171 of SEQ ID NO: 832
guggaugccucacuacuau

SEQ ID NO: 67293 - RNA, 19 nt, Artificial Sequence
  Description of Artificial Sequence: Synthetic oligonucleotide
  Antisense strand to SEQ ID NO: 67212
auaguagugaggcauccac

SEQ ID NO: 67294 - RNA, 19 nt, Artificial Sequence
  Description of Artificial Sequence: Synthetic oligonucleotide
  Sense strand starting at position 158 of SEQ ID NO: 832
aaacguuuacuuuguggau

SEQ ID NO: 67295 - RNA, 19 nt, Artificial Sequence
  Description of Artificial Sequence: Synthetic oligonucleotide
  Antisense strand to SEQ ID NO: 67214
auccacaaaguaaacguuu

SEQ ID NO: 67296 - RNA, 19 nt, Artificial Sequence
  Description of Artificial Sequence: Synthetic oligonucleotide
  Sense strand starting at position 18 of SEQ ID NO: 832
cugugaaauuuagagaggu

SEQ ID NO: 67297 - RNA, 19 nt, Artificial Sequence
  Description of Artificial Sequence: Synthetic oligonucleotide
  Antisense strand to SEQ ID NO: 67216
accucucuaaauuucacag

SEQ ID NO: 67298 - RNA, 19 nt, Artificial Sequence
  Description of Artificial Sequence: Synthetic oligonucleotide
  Sense strand starting at position 6 of SEQ ID NO: 832
ggcuacucauuacugugaa

SEQ ID NO: 67299 - RNA, 19 nt, Artificial Sequence
  Description of Artificial Sequence: Synthetic oligonucleotide
  Antisense strand to SEQ ID NO: 67218
uucacaguaaugaguagcc

SEQ ID NO: 67300 - RNA, 19 nt, Artificial Sequence
  Description of Artificial Sequence: Synthetic oligonucleotide
  Sense strand starting at position 3943 of SEQ ID NO: 833
ugaaauguuugcuuuaaag

SEQ ID NO: 67301 - RNA, 19 nt, Artificial Sequence
  Description of Artificial Sequence: Synthetic oligonucleotide
  Antisense strand to SEQ ID NO: 67220
cuuuaaagcaaacauuuca

SEQ ID NO: 67302 - RNA, 19 nt, Artificial Sequence
  Description of Artificial Sequence: Synthetic oligonucleotide
  Sense strand starting at position 3940 of SEQ ID NO: 833
augugaaauguuugcuuua

SEQ ID NO: 67303 - RNA, 19 nt, Artificial Sequence
  Description of Artificial Sequence: Synthetic oligonucleotide
  Antisense strand to SEQ ID NO: 67222
uaaagcaaacauuucacau

SEQ ID NO: 67304 - RNA, 19 nt, Artificial Sequence
  Description of Artificial Sequence: Synthetic oligonucleotide
  Sense strand starting at position 3915 of SEQ ID NO: 833
uugugucuacaggacauau

SEQ ID NO: 67305 - RNA, 19 nt, Artificial Sequence
  Description of Artificial Sequence: Synthetic oligonucleotide
  Antisense strand to SEQ ID NO: 67224
auauguccuguagacacaa

SEQ ID NO: 67306 - RNA, 19 nt, Artificial Sequence
  Description of Artificial Sequence: Synthetic oligonucleotide
  Sense strand starting at position 3875 of SEQ ID NO: 833
ugacuauccuuggauaauc

SEQ ID NO: 67307 - RNA, 19 nt, Artificial Sequence
  Description of Artificial Sequence: Synthetic oligonucleotide
  Antisense strand to SEQ ID NO: 67226
gauuauccaaggauaguca

SEQ ID NO: 67308 - RNA, 19 nt, Artificial Sequence
  Description of Artificial Sequence: Synthetic oligonucleotide
  Sense strand starting at position 3874 of SEQ ID NO: 833
gugacuauccuuggauaau

SEQ ID NO: 67309 - RNA, 19 nt, Artificial Sequence
  Description of Artificial Sequence: Synthetic oligonucleotide
  Antisense strand to SEQ ID NO: 67228
auuauccaaggauagucac

SEQ ID NO: 67310 - RNA, 19 nt, Artificial Sequence
  Description of Artificial Sequence: Synthetic oligonucleotide
  Sense strand starting at position 3873 of SEQ ID NO: 833
cgugacuauccuuggauaa

SEQ ID NO: 67311 - RNA, 19 nt, Artificial Sequence
  Description of Artificial Sequence: Synthetic oligonucleotide
  Antisense strand to SEQ ID NO: 67230
uuauccaaggauagucacg

SEQ ID NO: 67312 - RNA, 19 nt, Artificial Sequence
  Description of Artificial Sequence: Synthetic oligonucleotide
  Sense strand starting at position 3872 of SEQ ID NO: 833
gcgugacuauccuuggaua

SEQ ID NO: 67313 - RNA, 19 nt, Artificial Sequence
  Description of Artificial Sequence: Synthetic oligonucleotide
  Antisense strand to SEQ ID NO: 67232
uauccaaggauagucacgc

SEQ ID NO: 67314 - RNA, 19 nt, Artificial Sequence
  Description of Artificial Sequence: Synthetic oligonucleotide
  Sense strand starting at position 3864 of SEQ ID NO: 833
auaccauugcgugacuauc

SEQ ID NO: 67315 - RNA, 19 nt, Artificial Sequence
  Description of Artificial Sequence: Synthetic oligonucleotide
  Antisense strand to SEQ ID NO: 67234
gauagucacgcaaugguau

SEQ ID NO: 67316 - RNA, 19 nt, Artificial Sequence
  Description of Artificial Sequence: Synthetic oligonucleotide
  Sense strand starting at position 3863 of SEQ ID NO: 833
aauaccauugcgugacuau

SEQ ID NO: 67317 - RNA, 19 nt, Artificial Sequence
  Description of Artificial Sequence: Synthetic oligonucleotide
  Antisense strand to SEQ ID NO: 67236
auagucacgcaaugguauu

SEQ ID NO: 67318 - RNA, 19 nt, Artificial Sequence
  Description of Artificial Sequence: Synthetic oligonucleotide
  Sense strand starting at position 3859 of SEQ ID NO: 833
uacaaauaccauugcguga

SEQ ID NO: 67319 - RNA, 19 nt, Artificial Sequence
  Description of Artificial Sequence: Synthetic oligonucleotide
  Antisense strand to SEQ ID NO: 67238
ucacgcaaugguauuugua

SEQ ID NO: 67320 - RNA, 19 nt, Artificial Sequence
  Description of Artificial Sequence: Synthetic oligonucleotide
  Sense strand starting at position 3664 of SEQ ID NO: 833
ggaagugugcuaugcuauc

SEQ ID NO: 67321 - RNA, 19 nt, Artificial Sequence
  Description of Artificial Sequence: Synthetic oligonucleotide
  Antisense strand to SEQ ID NO: 67240
gauagcauagcacacuucc

SEQ ID NO: 67322 - RNA, 19 nt, Artificial Sequence
  Description of Artificial Sequence: Synthetic oligonucleotide
  Sense strand starting at position 3534 of SEQ ID NO: 833
gugacuucucccugaacac

SEQ ID NO: 67323 - RNA, 19 nt, Artificial Sequence
  Description of Artificial Sequence: Synthetic oligonucleotide
  Antisense strand to SEQ ID NO: 67242
guguucagggagaagucac

SEQ ID NO: 67324 - RNA, 19 nt, Artificial Sequence
  Description of Artificial Sequence: Synthetic oligonucleotide
  Sense strand starting at position 3533 of SEQ ID NO: 833
cgugacuucucccugaaca

SEQ ID NO: 67325 - RNA, 19 nt, Artificial Sequence
  Description of Artificial Sequence: Synthetic oligonucleotide
  Antisense strand to SEQ ID NO: 67244
uguucagggagaagucacg

SEQ ID NO: 67326 - RNA, 19 nt, Artificial Sequence
  Description of Artificial Sequence: Synthetic oligonucleotide
  Sense strand starting at position 3530 of SEQ ID NO: 833
ggacgugacuucucccuga

SEQ ID NO: 67327 - RNA, 19 nt, Artificial Sequence
  Description of Artificial Sequence: Synthetic oligonucleotide
  Antisense strand to SEQ ID NO: 67246
ucagggagaagucacgucc

SEQ ID NO: 67328 - RNA, 19 nt, Artificial Sequence
  Description of Artificial Sequence: Synthetic oligonucleotide
  Sense strand starting at position 3349 of SEQ ID NO: 833
ggcacuccuuccuucuaga

SEQ ID NO: 67329 - RNA, 19 nt, Artificial Sequence
  Description of Artificial Sequence: Synthetic oligonucleotide
  Antisense strand to SEQ ID NO: 67248
ucuagaaggaaggagugcc

SEQ ID NO: 67330 - RNA, 19 nt, Artificial Sequence
  Description of Artificial Sequence: Synthetic oligonucleotide
  Sense strand starting at position 3267 of SEQ ID NO: 833
cguggaucuccauaaugcu

SEQ ID NO: 67331 - RNA, 19 nt, Artificial Sequence
  Description of Artificial Sequence: Synthetic oligonucleotide
  Antisense strand to SEQ ID NO: 67250
agcauuauggagauccacg

SEQ ID NO: 67332 - RNA, 19 nt, Artificial Sequence
  Description of Artificial Sequence: Synthetic oligonucleotide
  Sense strand starting at position 3264 of SEQ ID NO: 833
cuccguggaucuccauaau

SEQ ID NO: 67333 - RNA, 19 nt, Artificial Sequence
  Description of Artificial Sequence: Synthetic oligonucleotide
  Antisense strand to SEQ ID NO: 67252
auuauggagauccacggag

SEQ ID NO: 67334 - RNA, 19 nt, Artificial Sequence
  Description of Artificial Sequence: Synthetic oligonucleotide
  Sense strand starting at position 2826 of SEQ ID NO: 833
gcagcauccagaugaggaa

SEQ ID NO: 67335 - RNA, 19 nt, Artificial Sequence
  Description of Artificial Sequence: Synthetic oligonucleotide
  Antisense strand to SEQ ID NO: 67254
uuccucaucuggaugcugc

SEQ ID NO: 67336 - RNA, 19 nt, Artificial Sequence
  Description of Artificial Sequence: Synthetic oligonucleotide
  Sense strand starting at position 2620 of SEQ ID NO: 833
guguuugcccaggacugua

SEQ ID NO: 67337 - RNA, 19 nt, Artificial Sequence
  Description of Artificial Sequence: Synthetic oligonucleotide
  Antisense strand to SEQ ID NO: 67256
uacaguccugggcaaacac

SEQ ID NO: 67338 - RNA, 19 nt, Artificial Sequence
  Description of Artificial Sequence: Synthetic oligonucleotide
  Sense strand starting at position 2586 of SEQ ID NO: 833
gaugauauugcuggcacua

SEQ ID NO: 67339 - RNA, 19 nt, Artificial Sequence
  Description of Artificial Sequence: Synthetic oligonucleotide
  Antisense strand to SEQ ID NO: 67258
uagugccagcaauaucauc

SEQ ID NO: 67340 - RNA, 19 nt, Artificial Sequence
  Description of Artificial Sequence: Synthetic oligonucleotide
  Sense strand starting at position 2567 of SEQ ID NO: 833
cgaguccugucuccacaga

SEQ ID NO: 67341 - RNA, 19 nt, Artificial Sequence
  Description of Artificial Sequence: Synthetic oligonucleotide
  Antisense strand to SEQ ID NO: 67260
ucuguggagacaggacucg

SEQ ID NO: 67342 - RNA, 19 nt, Artificial Sequence
  Description of Artificial Sequence: Synthetic oligonucleotide
  Sense strand starting at position 2537 of SEQ ID NO: 833
uugggagucccuggaucuu

SEQ ID NO: 67343 - RNA, 19 nt, Artificial Sequence
  Description of Artificial Sequence: Synthetic oligonucleotide
  Antisense strand to SEQ ID NO: 67262
aagauccagggacucccaa

SEQ ID NO: 67344 - RNA, 19 nt, Artificial Sequence
  Description of Artificial Sequence: Synthetic oligonucleotide
  Sense strand starting at position 2453 of SEQ ID NO: 833
uuacuaguguguccugacu

SEQ ID NO: 67345 - RNA, 19 nt, Artificial Sequence
  Description of Artificial Sequence: Synthetic oligonucleotide
  Antisense strand to SEQ ID NO: 67264
agucaggacacacuaguaa

SEQ ID NO: 67346 - RNA, 19 nt, Artificial Sequence
  Description of Artificial Sequence: Synthetic oligonucleotide
  Sense strand starting at position 2369 of SEQ ID NO: 833
guaaauagccucugccaaa

SEQ ID NO: 67347 - RNA, 19 nt, Artificial Sequence
  Description of Artificial Sequence: Synthetic oligonucleotide
  Antisense strand to SEQ ID NO: 67266
uuuggcagaggcuauuuac

SEQ ID NO: 67348 - RNA, 19 nt, Artificial Sequence
  Description of Artificial Sequence: Synthetic oligonucleotide
  Sense strand starting at position 2358 of SEQ ID NO: 833
auaccauugcaguaaauag

SEQ ID NO: 67349 - RNA, 19 nt, Artificial Sequence
  Description of Artificial Sequence: Synthetic oligonucleotide
  Antisense strand to SEQ ID NO: 67268
cuauuuacugcaaugguau

SEQ ID NO: 67350 - RNA, 19 nt, Artificial Sequence
  Description of Artificial Sequence: Synthetic oligonucleotide
  Sense strand starting at position 2317 of SEQ ID NO: 833
aauuaaggcuguuucuagu

SEQ ID NO: 67351 - RNA, 19 nt, Artificial Sequence
  Description of Artificial Sequence: Synthetic oligonucleotide
  Antisense strand to SEQ ID NO: 67270
acuagaaacagccuuaauu

SEQ ID NO: 67352 - RNA, 19 nt, Artificial Sequence
  Description of Artificial Sequence: Synthetic oligonucleotide
  Sense strand starting at position 2238 of SEQ ID NO: 833
gcugccuugcucucucauu

SEQ ID NO: 67353 - RNA, 19 nt, Artificial Sequence
  Description of Artificial Sequence: Synthetic oligonucleotide
  Antisense strand to SEQ ID NO: 67272
aaugagagagcaaggcagc

SEQ ID NO: 67354 - RNA, 19 nt, Artificial Sequence
  Description of Artificial Sequence: Synthetic oligonucleotide
  Sense strand starting at position 2210 of SEQ ID NO: 833
cgacauuucucccaucagu

SEQ ID NO: 67355 - RNA, 19 nt, Artificial Sequence
  Description of Artificial Sequence: Synthetic oligonucleotide
  Antisense strand to SEQ ID NO: 67274
acugaugggagaaaugucg

SEQ ID NO: 67356 - RNA, 19 nt, Artificial Sequence
  Description of Artificial Sequence: Synthetic oligonucleotide
  Sense strand starting at position 2159 of SEQ ID NO: 833
guaugcuaucuacacucuu

SEQ ID NO: 67357 - RNA, 19 nt, Artificial Sequence
  Description of Artificial Sequence: Synthetic oligonucleotide
  Antisense strand to SEQ ID NO: 67276
aagaguguagauagcauac

SEQ ID NO: 67358 - RNA, 19 nt, Artificial Sequence
  Description of Artificial Sequence: Synthetic oligonucleotide
  Sense strand starting at position 2144 of SEQ ID NO: 833
ucuuaaccuguggaaguau

SEQ ID NO: 67359 - RNA, 19 nt, Artificial Sequence
  Description of Artificial Sequence: Synthetic oligonucleotide
  Antisense strand to SEQ ID NO: 67278
auacuuccacagguuaaga

SEQ ID NO: 67360 - RNA, 19 nt, Artificial Sequence
  Description of Artificial Sequence: Synthetic oligonucleotide
  Sense strand starting at position 2142 of SEQ ID NO: 833
agucuuaaccuguggaagu

SEQ ID NO: 67361 - RNA, 19 nt, Artificial Sequence
  Description of Artificial Sequence: Synthetic oligonucleotide
  Antisense strand to SEQ ID NO: 67280
acuuccacagguuaagacu

SEQ ID NO: 67362 - RNA, 19 nt, Artificial Sequence
  Description of Artificial Sequence: Synthetic oligonucleotide
  Sense strand starting at position 1243 of SEQ ID NO: 833
gagggaggauugagaggua

SEQ ID NO: 67363 - RNA, 19 nt, Artificial Sequence
  Description of Artificial Sequence: Synthetic oligonucleotide
  Antisense strand to SEQ ID NO: 67282
uaccucucaauccucccuc

SEQ ID NO: 67364 - RNA, 19 nt, Artificial Sequence
  Description of Artificial Sequence: Synthetic oligonucleotide
  Sense strand starting at position 1226 of SEQ ID NO: 833
ccagaauugagaggcgaga

SEQ ID NO: 67365 - RNA, 19 nt, Artificial Sequence
  Description of Artificial Sequence: Synthetic oligonucleotide
  Antisense strand to SEQ ID NO: 67284
ucucgccucucaauucugg

SEQ ID NO: 67366 - RNA, 19 nt, Artificial Sequence
  Description of Artificial Sequence: Synthetic oligonucleotide
  Sense strand starting at position 1215 of SEQ ID NO: 833
cccuaaugggcccagaauu

SEQ ID NO: 67367 - RNA, 19 nt, Artificial Sequence
  Description of Artificial Sequence: Synthetic oligonucleotide
  Antisense strand to SEQ ID NO: 67286
aauucugggcccauuaggg

SEQ ID NO: 67368 - RNA, 19 nt, Artificial Sequence
  Description of Artificial Sequence: Synthetic oligonucleotide
  Sense strand starting at position 1113 of SEQ ID NO: 833
ggauaaagcucccuuuccu

SEQ ID NO: 67369 - RNA, 19 nt, Artificial Sequence
  Description of Artificial Sequence: Synthetic oligonucleotide
  Antisense strand to SEQ ID NO: 67288
aggaaagggagcuuuaucc

SEQ ID NO: 67370 - RNA, 19 nt, Artificial Sequence
  Description of Artificial Sequence: Synthetic oligonucleotide
  Sense strand starting at position 1097 of SEQ ID NO: 833
ccacaaugucccugaagga

SEQ ID NO: 67371 - RNA, 19 nt, Artificial Sequence
  Description of Artificial Sequence: Synthetic oligonucleotide
  Antisense strand to SEQ ID NO: 67290
uccuucagggacauugugg

SEQ ID NO: 67372 - RNA, 19 nt, Artificial Sequence
  Description of Artificial Sequence: Synthetic oligonucleotide
  Sense strand starting at position 586 of SEQ ID NO: 833
cggaguuccaccuggauuc

SEQ ID NO: 67373 - RNA, 19 nt, Artificial Sequence
  Description of Artificial Sequence: Synthetic oligonucleotide
  Antisense strand to SEQ ID NO: 67292
gaauccagguggaacuccg

SEQ ID NO: 67374 - RNA, 19 nt, Artificial Sequence
  Description of Artificial Sequence: Synthetic oligonucleotide
  Sense strand starting at position 448 of SEQ ID NO: 833
gcguuuccucugggaauca

SEQ ID NO: 67375 - RNA, 19 nt, Artificial Sequence
  Description of Artificial Sequence: Synthetic oligonucleotide
  Antisense strand to SEQ ID NO: 67294
ugauucccagaggaaacgc

SEQ ID NO: 67376 - RNA, 19 nt, Artificial Sequence
  Description of Artificial Sequence: Synthetic oligonucleotide
  Sense strand starting at position 446 of SEQ ID NO: 833
cugcguuuccucugggaau

SEQ ID NO: 67377 - RNA, 19 nt, Artificial Sequence
  Description of Artificial Sequence: Synthetic oligonucleotide
  Antisense strand to SEQ ID NO: 67296
auucccagaggaaacgcag

SEQ ID NO: 67378 - RNA, 19 nt, Artificial Sequence
  Description of Artificial Sequence: Synthetic oligonucleotide
  Sense strand starting at position 121 of SEQ ID NO: 833
gcacuuagucacuaucuga

SEQ ID NO: 67379 - RNA, 19 nt, Artificial Sequence
  Description of Artificial Sequence: Synthetic oligonucleotide
  Antisense strand to SEQ ID NO: 67298
ucagauagugacuaagugc

SEQ ID NO: 67380 - RNA, 19 nt, Artificial Sequence
  Description of Artificial Sequence: Synthetic oligonucleotide
  Sense strand starting at position 3001 of SEQ ID NO: 834
gcuccauucucucugcaga

SEQ ID NO: 67381 - RNA, 19 nt, Artificial Sequence
  Description of Artificial Sequence: Synthetic oligonucleotide
  Antisense strand to SEQ ID NO: 67300
ucugcagagagaauggagc

SEQ ID NO: 67382 - RNA, 19 nt, Artificial Sequence
  Description of Artificial Sequence: Synthetic oligonucleotide
  Sense strand starting at position 2940 of SEQ ID NO: 834
ggaacuuggauucgacaca

SEQ ID NO: 67383 - RNA, 19 nt, Artificial Sequence
  Description of Artificial Sequence: Synthetic oligonucleotide
  Antisense strand to SEQ ID NO: 67302
ugugucgaauccaaguucc

SEQ ID NO: 67384 - RNA, 19 nt, Artificial Sequence
  Description of Artificial Sequence: Synthetic oligonucleotide
  Sense strand starting at position 2906 of SEQ ID NO: 834
agagaagcuuaaguuacuu

SEQ ID NO: 67385 - RNA, 19 nt, Artificial Sequence
  Description of Artificial Sequence: Synthetic oligonucleotide
  Antisense strand to SEQ ID NO: 67304
aaguaacuuaagcuucucu

SEQ ID NO: 67386 - RNA, 19 nt, Artificial Sequence
  Description of Artificial Sequence: Synthetic oligonucleotide
  Sense strand starting at position 2843 of SEQ ID NO: 834
cagccaugagcucaucagu

SEQ ID NO: 67387 - RNA, 19 nt, Artificial Sequence
  Description of Artificial Sequence: Synthetic oligonucleotide
  Antisense strand to SEQ ID NO: 67306
acugaugagcucauggcug

SEQ ID NO: 67388 - RNA, 19 nt, Artificial Sequence
  Description of Artificial Sequence: Synthetic oligonucleotide
  Sense strand starting at position 2756 of SEQ ID NO: 834
ccucguuucucacaggcau

SEQ ID NO: 67389 - RNA, 19 nt, Artificial Sequence
  Description of Artificial Sequence: Synthetic oligonucleotide
  Antisense strand to SEQ ID NO: 67308
augccugugagaaacgagg

SEQ ID NO: 67390 - RNA, 19 nt, Artificial Sequence
  Description of Artificial Sequence: Synthetic oligonucleotide
  Sense strand starting at position 2722 of SEQ ID NO: 834
gaagguuaaugugcagcua

SEQ ID NO: 67391 - RNA, 19 nt, Artificial Sequence
  Description of Artificial Sequence: Synthetic oligonucleotide
  Antisense strand to SEQ ID NO: 67310
uagcugcacauuaaccuuc

SEQ ID NO: 67392 - RNA, 19 nt, Artificial Sequence
  Description of Artificial Sequence: Synthetic oligonucleotide
  Sense strand starting at position 2703 of SEQ ID NO: 834
guguucuggcugggaugau

SEQ ID NO: 67393 - RNA, 19 nt, Artificial Sequence
  Description of Artificial Sequence: Synthetic oligonucleotide
  Antisense strand to SEQ ID NO: 67312
aucaucccagccagaacac

SEQ ID NO: 67394 - RNA, 19 nt, Artificial Sequence
  Description of Artificial Sequence: Synthetic oligonucleotide
  Sense strand starting at position 2702 of SEQ ID NO: 834
uguguucuggcugggauga

SEQ ID NO: 67395 - RNA, 19 nt, Artificial Sequence
  Description of Artificial Sequence: Synthetic oligonucleotide
  Antisense strand to SEQ ID NO: 67314
ucaucccagccagaacaca

SEQ ID NO: 67396 - RNA, 19 nt, Artificial Sequence
  Description of Artificial Sequence: Synthetic oligonucleotide
  Sense strand starting at position 2701 of SEQ ID NO: 834
cuguguucuggcugggaug

SEQ ID NO: 67397 - RNA, 19 nt, Artificial Sequence
  Description of Artificial Sequence: Synthetic oligonucleotide
  Antisense strand to SEQ ID NO: 67316
caucccagccagaacacag

SEQ ID NO: 67398 - RNA, 19 nt, Artificial Sequence
  Description of Artificial Sequence: Synthetic oligonucleotide
  Sense strand starting at position 2565 of SEQ ID NO: 834
gcaggucagcagcaugaaa

SEQ ID NO: 67399 - RNA, 19 nt, Artificial Sequence
  Description of Artificial Sequence: Synthetic oligonucleotide
  Antisense strand to SEQ ID NO: 67318
uuucaugcugcugaccugc

SEQ ID NO: 67400 - RNA, 19 nt, Artificial Sequence
  Description of Artificial Sequence: Synthetic oligonucleotide
  Sense strand starting at position 2484 of SEQ ID NO: 834
uuggauuguguaggaaaug

SEQ ID NO: 67401 - RNA, 19 nt, Artificial Sequence
  Description of Artificial Sequence: Synthetic oligonucleotide
  Antisense strand to SEQ ID NO: 67320
cauuuccuacacaauccaa

SEQ ID NO: 67402 - RNA, 19 nt, Artificial Sequence
  Description of Artificial Sequence: Synthetic oligonucleotide
  Sense strand starting at position 2473 of SEQ ID NO: 834
ucuggaagcucuuggauug

SEQ ID NO: 67403 - RNA, 19 nt, Artificial Sequence
  Description of Artificial Sequence: Synthetic oligonucleotide
  Antisense strand to SEQ ID NO: 67322
caauccaagagcuuccaga

SEQ ID NO: 67404 - RNA, 19 nt, Artificial Sequence
  Description of Artificial Sequence: Synthetic oligonucleotide
  Sense strand starting at position 2451 of SEQ ID NO: 834
ugggauauuucugggacug

SEQ ID NO: 67405 - RNA, 19 nt, Artificial Sequence
  Description of Artificial Sequence: Synthetic oligonucleotide
  Antisense strand to SEQ ID NO: 67324
cagucccagaaauauccca

SEQ ID NO: 67406 - RNA, 19 nt, Artificial Sequence
  Description of Artificial Sequence: Synthetic oligonucleotide
  Sense strand starting at position 2450 of SEQ ID NO: 834
gugggauauuucugggacu

SEQ ID NO: 67407 - RNA, 19 nt, Artificial Sequence
  Description of Artificial Sequence: Synthetic oligonucleotide
  Antisense strand to SEQ ID NO: 67326
agucccagaaauaucccac

SEQ ID NO: 67408 - RNA, 19 nt, Artificial Sequence
  Description of Artificial Sequence: Synthetic oligonucleotide
  Sense strand starting at position 2439 of SEQ ID NO: 834
ccauucugguggugggaua

SEQ ID NO: 67409 - RNA, 19 nt, Artificial Sequence
  Description of Artificial Sequence: Synthetic oligonucleotide
  Antisense strand to SEQ ID NO: 67328
uaucccaccaccagaaugg

SEQ ID NO: 67410 - RNA, 19 nt, Artificial Sequence
  Description of Artificial Sequence: Synthetic oligonucleotide
  Sense strand starting at position 2387 of SEQ ID NO: 834
gcagcugacaucuacggaa

SEQ ID NO: 67411 - RNA, 19 nt, Artificial Sequence
  Description of Artificial Sequence: Synthetic oligonucleotide
  Antisense strand to SEQ ID NO: 67330
uuccguagaugucagcugc

SEQ ID NO: 67412 - RNA, 19 nt, Artificial Sequence
  Description of Artificial Sequence: Synthetic oligonucleotide
  Sense strand starting at position 2368 of SEQ ID NO: 834
gccugauacugaggucuca

SEQ ID NO: 67413 - RNA, 19 nt, Artificial Sequence
  Description of Artificial Sequence: Synthetic oligonucleotide
  Antisense strand to SEQ ID NO: 67332
ugagaccucaguaucaggc

SEQ ID NO: 67414 - RNA, 19 nt, Artificial Sequence
  Description of Artificial Sequence: Synthetic oligonucleotide
  Sense strand starting at position 2254 of SEQ ID NO: 834
gccugauaucauuaugccu

SEQ ID NO: 67415 - RNA, 19 nt, Artificial Sequence
  Description of Artificial Sequence: Synthetic oligonucleotide
  Antisense strand to SEQ ID NO: 67334
aggcauaaugauaucaggc

SEQ ID NO: 67416 - RNA, 19 nt, Artificial Sequence
  Description of Artificial Sequence: Synthetic oligonucleotide
  Sense strand starting at position 2248 of SEQ ID NO: 834
ucaggagccugauaucauu

SEQ ID NO: 67417 - RNA, 19 nt, Artificial Sequence
  Description of Artificial Sequence: Synthetic oligonucleotide
  Antisense strand to SEQ ID NO: 67336
aaugauaucaggcuccuga

SEQ ID NO: 67418 - RNA, 19 nt, Artificial Sequence
  Description of Artificial Sequence: Synthetic oligonucleotide
  Sense strand starting at position 2245 of SEQ ID NO: 834
gguucaggagccugauauc

SEQ ID NO: 67419 - RNA, 19 nt, Artificial Sequence
  Description of Artificial Sequence: Synthetic oligonucleotide
  Antisense strand to SEQ ID NO: 67338
gauaucaggcuccugaacc

SEQ ID NO: 67420 - RNA, 19 nt, Artificial Sequence
  Description of Artificial Sequence: Synthetic oligonucleotide
  Sense strand starting at position 2217 of SEQ ID NO: 834
cagguaugugggugagacu

SEQ ID NO: 67421 - RNA, 19 nt, Artificial Sequence
  Description of Artificial Sequence: Synthetic oligonucleotide
  Antisense strand to SEQ ID NO: 67340
agucucacccacauaccug

SEQ ID NO: 67422 - RNA, 19 nt, Artificial Sequence
  Description of Artificial Sequence: Synthetic oligonucleotide
  Sense strand starting at position 2215 of SEQ ID NO: 834
ggcagguaugugggugaga

SEQ ID NO: 67423 - RNA, 19 nt, Artificial Sequence
  Description of Artificial Sequence: Synthetic oligonucleotide
  Antisense strand to SEQ ID NO: 67342
ucucacccacauaccugcc

SEQ ID NO: 67424 - RNA, 19 nt, Artificial Sequence
  Description of Artificial Sequence: Synthetic oligonucleotide
  Sense strand starting at position 2120 of SEQ ID NO: 834
ggcacauacucagagcaaa

SEQ ID NO: 67425 - RNA, 19 nt, Artificial Sequence
  Description of Artificial Sequence: Synthetic oligonucleotide
  Antisense strand to SEQ ID NO: 67344
uuugcucugaguaugugcc

SEQ ID NO: 67426 - RNA, 19 nt, Artificial Sequence
  Description of Artificial Sequence: Synthetic oligonucleotide
  Sense strand starting at position 1887 of SEQ ID NO: 834
cuuggauauccucagcuca

SEQ ID NO: 67427 - RNA, 19 nt, Artificial Sequence
  Description of Artificial Sequence: Synthetic oligonucleotide
  Antisense strand to SEQ ID NO: 67346
ugagcugaggauauccaag

SEQ ID NO: 67428 - RNA, 19 nt, Artificial Sequence
  Description of Artificial Sequence: Synthetic oligonucleotide
  Sense strand starting at position 1778 of SEQ ID NO: 834
uuaggucagccaggacauu

SEQ ID NO: 67429 - RNA, 19 nt, Artificial Sequence
  Description of Artificial Sequence: Synthetic oligonucleotide
  Antisense strand to SEQ ID NO: 67348
aauguccuggcugaccuaa

SEQ ID NO: 67430 - RNA, 19 nt, Artificial Sequence
  Description of Artificial Sequence: Synthetic oligonucleotide
  Sense strand starting at position 1705 of SEQ ID NO: 834
auagauguuuguuaaacug

SEQ ID NO: 67431 - RNA, 19 nt, Artificial Sequence
  Description of Artificial Sequence: Synthetic oligonucleotide
  Antisense strand to SEQ ID NO: 67350
caguuuaacaaacaucuau

SEQ ID NO: 67432 - RNA, 19 nt, Artificial Sequence
  Description of Artificial Sequence: Synthetic oligonucleotide
  Sense strand starting at position 1299 of SEQ ID NO: 834
gauggauucuggcaugguc

SEQ ID NO: 67433 - RNA, 19 nt, Artificial Sequence
  Description of Artificial Sequence: Synthetic oligonucleotide
  Antisense strand to SEQ ID NO: 67352
gaccaugccagaauccauc

SEQ ID NO: 67434 - RNA, 19 nt, Artificial Sequence
  Description of Artificial Sequence: Synthetic oligonucleotide
  Sense strand starting at position 1126 of SEQ ID NO: 834
gguucucagcccuggcauu

SEQ ID NO: 67435 - RNA, 19 nt, Artificial Sequence
  Description of Artificial Sequence: Synthetic oligonucleotide
  Antisense strand to SEQ ID NO: 67354
aaugccagggcugagaacc

SEQ ID NO: 67436 - RNA, 19 nt, Artificial Sequence
  Description of Artificial Sequence: Synthetic oligonucleotide
  Sense strand starting at position 1071 of SEQ ID NO: 834
cuugguaaaucccagaaca

SEQ ID NO: 67437 - RNA, 19 nt, Artificial Sequence
  Description of Artificial Sequence: Synthetic oligonucleotide
  Antisense strand to SEQ ID NO: 67356
uguucugggauuuaccaag

SEQ ID NO: 67438 - RNA, 19 nt, Artificial Sequence
  Description of Artificial Sequence: Synthetic oligonucleotide
  Sense strand starting at position 988 of SEQ ID NO: 834
ccuuaucaguugucagauc

SEQ ID NO: 67439 - RNA, 19 nt, Artificial Sequence
  Description of Artificial Sequence: Synthetic oligonucleotide
  Antisense strand to SEQ ID NO: 67358
gaucugacaacugauaagg

SEQ ID NO: 67440 - RNA, 19 nt, Artificial Sequence
  Description of Artificial Sequence: Synthetic oligonucleotide
  Sense strand starting at position 984 of SEQ ID NO: 834
guauccuuaucaguuguca

SEQ ID NO: 67441 - RNA, 19 nt, Artificial Sequence
  Description of Artificial Sequence: Synthetic oligonucleotide
  Antisense strand to SEQ ID NO: 67360
ugacaacugauaaggauac

SEQ ID NO: 67442 - RNA, 19 nt, Artificial Sequence
  Description of Artificial Sequence: Synthetic oligonucleotide
  Sense strand starting at position 981 of SEQ ID NO: 834
aacguauccuuaucaguug

SEQ ID NO: 67443 - RNA, 19 nt, Artificial Sequence
  Description of Artificial Sequence: Synthetic oligonucleotide
  Antisense strand to SEQ ID NO: 67362
caacugauaaggauacguu

SEQ ID NO: 67444 - RNA, 19 nt, Artificial Sequence
  Description of Artificial Sequence: Synthetic oligonucleotide
  Sense strand starting at position 976 of SEQ ID NO: 834
gugggaacguauccuuauc

SEQ ID NO: 67445 - RNA, 19 nt, Artificial Sequence
  Description of Artificial Sequence: Synthetic oligonucleotide
  Antisense strand to SEQ ID NO: 67364
gauaaggauacguucccac

SEQ ID NO: 67446 - RNA, 19 nt, Artificial Sequence
  Description of Artificial Sequence: Synthetic oligonucleotide
  Sense strand starting at position 887 of SEQ ID NO: 834
gcccaugucuucuaaagag

SEQ ID NO: 67447 - RNA, 19 nt, Artificial Sequence
  Description of Artificial Sequence: Synthetic oligonucleotide
  Antisense strand to SEQ ID NO: 67366
cucuuuagaagacaugggc

SEQ ID NO: 67448 - RNA, 19 nt, Artificial Sequence
  Description of Artificial Sequence: Synthetic oligonucleotide
  Sense strand starting at position 836 of SEQ ID NO: 834
acaaucauccugcauggau

SEQ ID NO: 67449 - RNA, 19 nt, Artificial Sequence
  Description of Artificial Sequence: Synthetic oligonucleotide
  Antisense strand to SEQ ID NO: 67368
auccaugcaggaugauugu

SEQ ID NO: 67450 - RNA, 19 nt, Artificial Sequence
  Description of Artificial Sequence: Synthetic oligonucleotide
  Sense strand starting at position 820 of SEQ ID NO: 834
auagauacaugugaagaca

SEQ ID NO: 67451 - RNA, 19 nt, Artificial Sequence
  Description of Artificial Sequence: Synthetic oligonucleotide
  Antisense strand to SEQ ID NO: 67370
ugucuucacauguaucuau

SEQ ID NO: 67452 - RNA, 19 nt, Artificial Sequence
  Description of Artificial Sequence: Synthetic oligonucleotide
  Sense strand starting at position 817 of SEQ ID NO: 834
guaauagauacaugugaag

SEQ ID NO: 67453 - RNA, 19 nt, Artificial Sequence
  Description of Artificial Sequence: Synthetic oligonucleotide
  Antisense strand to SEQ ID NO: 67372
cuucacauguaucuauuac

SEQ ID NO: 67454 - RNA, 19 nt, Artificial Sequence
  Description of Artificial Sequence: Synthetic oligonucleotide
  Sense strand starting at position 796 of SEQ ID NO: 834
gggucuaccuuauucuaca

SEQ ID NO: 67455 - RNA, 19 nt, Artificial Sequence
  Description of Artificial Sequence: Synthetic oligonucleotide
  Antisense strand to SEQ ID NO: 67374
uguagaauaagguagaccc

SEQ ID NO: 67456 - RNA, 19 nt, Artificial Sequence
  Description of Artificial Sequence: Synthetic oligonucleotide
  Sense strand starting at position 3924 of SEQ ID NO: 835
uguuuauagcauuagagcu

SEQ ID NO: 67457 - RNA, 19 nt, Artificial Sequence
  Description of Artificial Sequence: Synthetic oligonucleotide
  Antisense strand to SEQ ID NO: 67376
agcucuaaugcuauaaaca

SEQ ID NO: 67458 - RNA, 19 nt, Artificial Sequence
  Description of Artificial Sequence: Synthetic oligonucleotide
  Sense strand starting at position 3795 of SEQ ID NO: 835
agccuucgugugcuuagaa

SEQ ID NO: 67459 - RNA, 19 nt, Artificial Sequence
  Description of Artificial Sequence: Synthetic oligonucleotide
  Antisense strand to SEQ ID NO: 67378
uucuaagcacacgaaggcu

SEQ ID NO: 67460 - RNA, 19 nt, Artificial Sequence
  Description of Artificial Sequence: Synthetic oligonucleotide
  Sense strand starting at position 3777 of SEQ ID NO: 835
uuccauaaggcucaucgua

SEQ ID NO: 67461 - RNA, 19 nt, Artificial Sequence
  Description of Artificial Sequence: Synthetic oligonucleotide
  Antisense strand to SEQ ID NO: 67380
uacgaugagccuuauggaa

SEQ ID NO: 67462 - RNA, 19 nt, Artificial Sequence
  Description of Artificial Sequence: Synthetic oligonucleotide
  Sense strand starting at position 3618 of SEQ ID NO: 835
uuacaaugugguuaucaac

SEQ ID NO: 67463 - RNA, 19 nt, Artificial Sequence
  Description of Artificial Sequence: Synthetic oligonucleotide
  Antisense strand to SEQ ID NO: 67382
guugauaaccacauuguaa

SEQ ID NO: 67464 - RNA, 19 nt, Artificial Sequence
  Description of Artificial Sequence: Synthetic oligonucleotide
  Sense strand starting at position 3617 of SEQ ID NO: 835
uuuacaaugugguuaucaa

SEQ ID NO: 67465 - RNA, 19 nt, Artificial Sequence
  Description of Artificial Sequence: Synthetic oligonucleotide
  Antisense strand to SEQ ID NO: 67384
uugauaaccacauuguaaa

SEQ ID NO: 67466 - RNA, 19 nt, Artificial Sequence
  Description of Artificial Sequence: Synthetic oligonucleotide
  Sense strand starting at position 3570 of SEQ ID NO: 835
gcauucuuccuagaggaca

SEQ ID NO: 67467 - RNA, 19 nt, Artificial Sequence
  Description of Artificial Sequence: Synthetic oligonucleotide
  Antisense strand to SEQ ID NO: 67386
uguccucuaggaagaaugc

SEQ ID NO: 67468 - RNA, 19 nt, Artificial Sequence
  Description of Artificial Sequence: Synthetic oligonucleotide
  Sense strand starting at position 3567 of SEQ ID NO: 835
gaagcauucuuccuagagg

SEQ ID NO: 67469 - RNA, 19 nt, Artificial Sequence
  Description of Artificial Sequence: Synthetic oligonucleotide
  Antisense strand to SEQ ID NO: 67388
ccucuaggaagaaugcuuc

SEQ ID NO: 67470 - RNA, 19 nt, Artificial Sequence
  Description of Artificial Sequence: Synthetic oligonucleotide
  Sense strand starting at position 3522 of SEQ ID NO: 835
aguuauagucuaugaguca

SEQ ID NO: 67471 - RNA, 19 nt, Artificial Sequence
  Description of Artificial Sequence: Synthetic oligonucleotide
  Antisense strand to SEQ ID NO: 67390
ugacucauagacuauaacu

SEQ ID NO: 67472 - RNA, 19 nt, Artificial Sequence
  Description of Artificial Sequence: Synthetic oligonucleotide
  Sense strand starting at position 3520 of SEQ ID NO: 835
guaguuauagucuaugagu

SEQ ID NO: 67473 - RNA, 19 nt, Artificial Sequence
  Description of Artificial Sequence: Synthetic oligonucleotide
  Antisense strand to SEQ ID NO: 67392
acucauagacuauaacuac

SEQ ID NO: 67474 - RNA, 19 nt, Artificial Sequence
  Description of Artificial Sequence: Synthetic oligonucleotide
  Sense strand starting at position 3483 of SEQ ID NO: 835
auggucagauugguacauu

SEQ ID NO: 67475 - RNA, 19 nt, Artificial Sequence
  Description of Artificial Sequence: Synthetic oligonucleotide
  Antisense strand to SEQ ID NO: 67394
aauguaccaaucugaccau

SEQ ID NO: 67476 - RNA, 19 nt, Artificial Sequence
  Description of Artificial Sequence: Synthetic oligonucleotide
  Sense strand starting at position 3068 of SEQ ID NO: 835
caguuacaacauugugaga

SEQ ID NO: 67477 - RNA, 19 nt, Artificial Sequence
  Description of Artificial Sequence: Synthetic oligonucleotide
  Antisense strand to SEQ ID NO: 67396
ucucacaauguuguaacug

SEQ ID NO: 67478 - RNA, 19 nt, Artificial Sequence
  Description of Artificial Sequence: Synthetic oligonucleotide
  Sense strand starting at position 2955 of SEQ ID NO: 835
augaaugaugugugaaaug

SEQ ID NO: 67479 - RNA, 19 nt, Artificial Sequence
  Description of Artificial Sequence: Synthetic oligonucleotide
  Antisense strand to SEQ ID NO: 67398
cauuucacacaucauucau

SEQ ID NO: 67480 - RNA, 19 nt, Artificial Sequence
  Description of Artificial Sequence: Synthetic oligonucleotide
  Sense strand starting at position 2828 of SEQ ID NO: 835
ccacaauuaugggcacagu

SEQ ID NO: 67481 - RNA, 19 nt, Artificial Sequence
  Description of Artificial Sequence: Synthetic oligonucleotide
  Antisense strand to SEQ ID NO: 67400
acugugcccauaauugugg

SEQ ID NO: 67482 - RNA, 19 nt, Artificial Sequence
  Description of Artificial Sequence: Synthetic oligonucleotide
  Sense strand starting at position 2683 of SEQ ID NO: 835
uggccuaauugacuuccaa

SEQ ID NO: 67483 - RNA, 19 nt, Artificial Sequence
  Description of Artificial Sequence: Synthetic oligonucleotide
  Antisense strand to SEQ ID NO: 67402
uuggaagucaauuaggcca

SEQ ID NO: 67484 - RNA, 19 nt, Artificial Sequence
  Description of Artificial Sequence: Synthetic oligonucleotide
  Sense strand starting at position 2530 of SEQ ID NO: 835
agacguaugcacuagagaa

SEQ ID NO: 67485 - RNA, 19 nt, Artificial Sequence
  Description of Artificial Sequence: Synthetic oligonucleotide
  Antisense strand to SEQ ID NO: 67404
uucucuagugcauacgucu

SEQ ID NO: 67486 - RNA, 19 nt, Artificial Sequence
  Description of Artificial Sequence: Synthetic oligonucleotide
  Sense strand starting at position 2527 of SEQ ID NO: 835
gagagacguaugcacuaga

SEQ ID NO: 67487 - RNA, 19 nt, Artificial Sequence
  Description of Artificial Sequence: Synthetic oligonucleotide
  Antisense strand to SEQ ID NO: 67406
ucuagugcauacgucucuc

SEQ ID NO: 67488 - RNA, 19 nt, Artificial Sequence
  Description of Artificial Sequence: Synthetic oligonucleotide
  Sense strand starting at position 2368 of SEQ ID NO: 835
ggaagcccugucuacaauu

SEQ ID NO: 67489 - RNA, 19 nt, Artificial Sequence
  Description of Artificial Sequence: Synthetic oligonucleotide
  Antisense strand to SEQ ID NO: 67408
aauuguagacagggcuucc

SEQ ID NO: 67490 - RNA, 19 nt, Artificial Sequence
  Description of Artificial Sequence: Synthetic oligonucleotide
  Sense strand starting at position 2335 of SEQ ID NO: 835
gggugaagugcuuagaaca

SEQ ID NO: 67491 - RNA, 19 nt, Artificial Sequence
  Description of Artificial Sequence: Synthetic oligonucleotide
  Antisense strand to SEQ ID NO: 67410
uguucuaagcacuucaccc

SEQ ID NO: 67492 - RNA, 19 nt, Artificial Sequence
  Description of Artificial Sequence: Synthetic oligonucleotide
  Sense strand starting at position 2306 of SEQ ID NO: 835
gguggauacguggauuaac

SEQ ID NO: 67493 - RNA, 19 nt, Artificial Sequence
  Description of Artificial Sequence: Synthetic oligonucleotide
  Antisense strand to SEQ ID NO: 67412
guuaauccacguauccacc

SEQ ID NO: 67494 - RNA, 19 nt, Artificial Sequence
  Description of Artificial Sequence: Synthetic oligonucleotide
  Sense strand starting at position 2305 of SEQ ID NO: 835
ggguggauacguggauuaa

SEQ ID NO: 67495 - RNA, 19 nt, Artificial Sequence
  Description of Artificial Sequence: Synthetic oligonucleotide
  Antisense strand to SEQ ID NO: 67414
uuaauccacguauccaccc

SEQ ID NO: 67496 - RNA, 19 nt, Artificial Sequence
  Description of Artificial Sequence: Synthetic oligonucleotide
  Sense strand starting at position 2252 of SEQ ID NO: 835
gugauuucuugccuucucu

SEQ ID NO: 67497 - RNA, 19 nt, Artificial Sequence
  Description of Artificial Sequence: Synthetic oligonucleotide
  Antisense strand to SEQ ID NO: 67416
agagaaggcaagaaaucac

SEQ ID NO: 67498 - RNA, 19 nt, Artificial Sequence
  Description of Artificial Sequence: Synthetic oligonucleotide
  Sense strand starting at position 2251 of SEQ ID NO: 835
ugugauuucuugccuucuc

SEQ ID NO: 67499 - RNA, 19 nt, Artificial Sequence
  Description of Artificial Sequence: Synthetic oligonucleotide
  Antisense strand to SEQ ID NO: 67418
gagaaggcaagaaaucaca

SEQ ID NO: 67500 - RNA, 19 nt, Artificial Sequence
  Description of Artificial Sequence: Synthetic oligonucleotide
  Sense strand starting at position 2248 of SEQ ID NO: 835
cugugugauuucuugccuu

SEQ ID NO: 67501 - RNA, 19 nt, Artificial Sequence
  Description of Artificial Sequence: Synthetic oligonucleotide
  Antisense strand to SEQ ID NO: 67420
aaggcaagaaaucacacag

SEQ ID NO: 67502 - RNA, 19 nt, Artificial Sequence
  Description of Artificial Sequence: Synthetic oligonucleotide
  Sense strand starting at position 2240 of SEQ ID NO: 835
cuuucucacugugugauuu

SEQ ID NO: 67503 - RNA, 19 nt, Artificial Sequence
  Description of Artificial Sequence: Synthetic oligonucleotide
  Antisense strand to SEQ ID NO: 67422
aaaucacacagugagaaag

SEQ ID NO: 67504 - RNA, 19 nt, Artificial Sequence
  Description of Artificial Sequence: Synthetic oligonucleotide
  Sense strand starting at position 1502 of SEQ ID NO: 835
cucaguccugucuaaggua

SEQ ID NO: 67505 - RNA, 19 nt, Artificial Sequence
  Description of Artificial Sequence: Synthetic oligonucleotide
  Antisense strand to SEQ ID NO: 67424
uaccuuagacaggacugag

SEQ ID NO: 67506 - RNA, 19 nt, Artificial Sequence
  Description of Artificial Sequence: Synthetic oligonucleotide
  Sense strand starting at position 1081 of SEQ ID NO: 835
uuguaugaaucaguacauu

SEQ ID NO: 67507 - RNA, 19 nt, Artificial Sequence
  Description of Artificial Sequence: Synthetic oligonucleotide
  Antisense strand to SEQ ID NO: 67426
aauguacugauucauacaa

SEQ ID NO: 67508 - RNA, 19 nt, Artificial Sequence
  Description of Artificial Sequence: Synthetic oligonucleotide
  Sense strand starting at position 1031 of SEQ ID NO: 835
gccaauauccaugaagcau

SEQ ID NO: 67509 - RNA, 19 nt, Artificial Sequence
  Description of Artificial Sequence: Synthetic oligonucleotide
  Antisense strand to SEQ ID NO: 67428
augcuucauggauauuggc

SEQ ID NO: 67510 - RNA, 19 nt, Artificial Sequence
  Description of Artificial Sequence: Synthetic oligonucleotide
  Sense strand starting at position 1030 of SEQ ID NO: 835
agccaauauccaugaagca

SEQ ID NO: 67511 - RNA, 19 nt, Artificial Sequence
  Description of Artificial Sequence: Synthetic oligonucleotide
  Antisense strand to SEQ ID NO: 67430
ugcuucauggauauuggcu

SEQ ID NO: 67512 - RNA, 19 nt, Artificial Sequence
  Description of Artificial Sequence: Synthetic oligonucleotide
  Sense strand starting at position 847 of SEQ ID NO: 835
ggguguguccauuaagacc

SEQ ID NO: 67513 - RNA, 19 nt, Artificial Sequence
  Description of Artificial Sequence: Synthetic oligonucleotide
  Antisense strand to SEQ ID NO: 67432
ggucuuaauggacacaccc

SEQ ID NO: 67514 - RNA, 19 nt, Artificial Sequence
  Description of Artificial Sequence: Synthetic oligonucleotide
  Sense strand starting at position 828 of SEQ ID NO: 835
gccugauuccuggagaugg

SEQ ID NO: 67515 - RNA, 19 nt, Artificial Sequence
  Description of Artificial Sequence: Synthetic oligonucleotide
  Antisense strand to SEQ ID NO: 67434
ccaucuccaggaaucaggc

SEQ ID NO: 67516 - RNA, 19 nt, Artificial Sequence
  Description of Artificial Sequence: Synthetic oligonucleotide
  Sense strand starting at position 817 of SEQ ID NO: 835
gcgaguccucugccugauu

SEQ ID NO: 67517 - RNA, 19 nt, Artificial Sequence
  Description of Artificial Sequence: Synthetic oligonucleotide
  Antisense strand to SEQ ID NO: 67436
aaucaggcagaggacucgc

SEQ ID NO: 67518 - RNA, 19 nt, Artificial Sequence
  Description of Artificial Sequence: Synthetic oligonucleotide
  Sense strand starting at position 776 of SEQ ID NO: 835
gugacugcuaggcagagua

SEQ ID NO: 67519 - RNA, 19 nt, Artificial Sequence
  Description of Artificial Sequence: Synthetic oligonucleotide
  Antisense strand to SEQ ID NO: 67438
uacucugccuagcagucac

SEQ ID NO: 67520 - RNA, 19 nt, Artificial Sequence
  Description of Artificial Sequence: Synthetic oligonucleotide
  Sense strand starting at position 668 of SEQ ID NO: 835
ggaacagccuugucaagac

SEQ ID NO: 67521 - RNA, 19 nt, Artificial Sequence
  Description of Artificial Sequence: Synthetic oligonucleotide
  Antisense strand to SEQ ID NO: 67440
gucuugacaaggcuguucc

SEQ ID NO: 67522 - RNA, 19 nt, Artificial Sequence
  Description of Artificial Sequence: Synthetic oligonucleotide
  Sense strand starting at position 480 of SEQ ID NO: 835
agaggauucugugucaaga

SEQ ID NO: 67523 - RNA, 19 nt, Artificial Sequence
  Description of Artificial Sequence: Synthetic oligonucleotide
  Antisense strand to SEQ ID NO: 67442
ucuugacacagaauccucu

SEQ ID NO: 67524 - RNA, 19 nt, Artificial Sequence
  Description of Artificial Sequence: Synthetic oligonucleotide
  Sense strand starting at position 386 of SEQ ID NO: 835
guagguuuccuagaguaac

SEQ ID NO: 67525 - RNA, 19 nt, Artificial Sequence
  Description of Artificial Sequence: Synthetic oligonucleotide
  Antisense strand to SEQ ID NO: 67444
guuacucuaggaaaccuac

SEQ ID NO: 67526 - RNA, 19 nt, Artificial Sequence
  Description of Artificial Sequence: Synthetic oligonucleotide
  Sense strand starting at position 285 of SEQ ID NO: 835
gucuaacacucuguaauua

SEQ ID NO: 67527 - RNA, 19 nt, Artificial Sequence
  Description of Artificial Sequence: Synthetic oligonucleotide
  Antisense strand to SEQ ID NO: 67446
uaauuacagaguguuagac

SEQ ID NO: 67528 - RNA, 19 nt, Artificial Sequence
  Description of Artificial Sequence: Synthetic oligonucleotide
  Sense strand starting at position 284 of SEQ ID NO: 835
ggucuaacacucuguaauu

SEQ ID NO: 67529 - RNA, 19 nt, Artificial Sequence
  Description of Artificial Sequence: Synthetic oligonucleotide
  Antisense strand to SEQ ID NO: 67448
aauuacagaguguuagacc

SEQ ID NO: 67530 - RNA, 19 nt, Artificial Sequence
  Description of Artificial Sequence: Synthetic oligonucleotide
  Sense strand starting at position 144 of SEQ ID NO: 835
ugagaugguucucuccuuu

SEQ ID NO: 67531 - RNA, 19 nt, Artificial Sequence
  Description of Artificial Sequence: Synthetic oligonucleotide
  Antisense strand to SEQ ID NO: 67450
aaaggagagaaccaucuca

SEQ ID NO: 67532 - RNA, 19 nt, Artificial Sequence
  Description of Artificial Sequence: Synthetic oligonucleotide
  Sense strand starting at position 143 of SEQ ID NO: 835
uugagaugguucucuccuu

SEQ ID NO: 67533 - RNA, 19 nt, Artificial Sequence
  Description of Artificial Sequence: Synthetic oligonucleotide
  Antisense strand to SEQ ID NO: 67452
aaggagagaaccaucucaa

SEQ ID NO: 67534 - RNA, 19 nt, Artificial Sequence
  Description of Artificial Sequence: Synthetic oligonucleotide
  Sense strand starting at position 50 of SEQ ID NO: 835
ugagguucugcagagugaa

SEQ ID NO: 67535 - RNA, 19 nt, Artificial Sequence
  Description of Artificial Sequence: Synthetic oligonucleotide
  Antisense strand to SEQ ID NO: 67454
uucacucugcagaaccuca

SEQ ID NO: 67536 - RNA, 19 nt, Artificial Sequence
  Description of Artificial Sequence: Synthetic oligonucleotide
  Sense strand starting at position 3982 of SEQ ID NO: 836
cuggcauucccuggugauc

SEQ ID NO: 67537 - RNA, 19 nt, Artificial Sequence
  Description of Artificial Sequence: Synthetic oligonucleotide
  Antisense strand to SEQ ID NO: 67456
gaucaccagggaaugccag

SEQ ID NO: 67538 - RNA, 19 nt, Artificial Sequence
  Description of Artificial Sequence: Synthetic oligonucleotide
  Sense strand starting at position 3981 of SEQ ID NO: 836
ccuggcauucccuggugau

SEQ ID NO: 67539 - RNA, 19 nt, Artificial Sequence
  Description of Artificial Sequence: Synthetic oligonucleotide
  Antisense strand to SEQ ID NO: 67458
aucaccagggaaugccagg

SEQ ID NO: 67540 - RNA, 19 nt, Artificial Sequence
  Description of Artificial Sequence: Synthetic oligonucleotide
  Sense strand starting at position 3874 of SEQ ID NO: 836
ggagguaguugagaggucu

SEQ ID NO: 67541 - RNA, 19 nt, Artificial Sequence
  Description of Artificial Sequence: Synthetic oligonucleotide
  Antisense strand to SEQ ID NO: 67460
agaccucucaacuaccucc

SEQ ID NO: 67542 - RNA, 19 nt, Artificial Sequence
  Description of Artificial Sequence: Synthetic oligonucleotide
  Sense strand starting at position 3156 of SEQ ID NO: 836
guaggacugucccaucuaa

SEQ ID NO: 67543 - RNA, 19 nt, Artificial Sequence
  Description of Artificial Sequence: Synthetic oligonucleotide
  Antisense strand to SEQ ID NO: 67462
uuagaugggacaguccuac

SEQ ID NO: 67544 - RNA, 19 nt, Artificial Sequence
  Description of Artificial Sequence: Synthetic oligonucleotide
  Sense strand starting at position 2753 of SEQ ID NO: 836
ccacucauuuauggaguuu

SEQ ID NO: 67545 - RNA, 19 nt, Artificial Sequence
  Description of Artificial Sequence: Synthetic oligonucleotide
  Antisense strand to SEQ ID NO: 67464
aaacuccauaaaugagugg

SEQ ID NO: 67546 - RNA, 19 nt, Artificial Sequence
  Description of Artificial Sequence: Synthetic oligonucleotide
  Sense strand starting at position 2752 of SEQ ID NO: 836
uccacucauuuauggaguu

SEQ ID NO: 67547 - RNA, 19 nt, Artificial Sequence
  Description of Artificial Sequence: Synthetic oligonucleotide
  Antisense strand to SEQ ID NO: 67466
aacuccauaaaugagugga

SEQ ID NO: 67548 - RNA, 19 nt, Artificial Sequence
  Description of Artificial Sequence: Synthetic oligonucleotide
  Sense strand starting at position 2370 of SEQ ID NO: 836
cccuuagaccucgagaucu

SEQ ID NO: 67549 - RNA, 19 nt, Artificial Sequence
  Description of Artificial Sequence: Synthetic oligonucleotide
  Antisense strand to SEQ ID NO: 67468
agaucucgaggucuaaggg

SEQ ID NO: 67550 - RNA, 19 nt, Artificial Sequence
  Description of Artificial Sequence: Synthetic oligonucleotide
  Sense strand starting at position 2350 of SEQ ID NO: 836
gggcaucucccucagggaa

SEQ ID NO: 67551 - RNA, 19 nt, Artificial Sequence
  Description of Artificial Sequence: Synthetic oligonucleotide
  Antisense strand to SEQ ID NO: 67470
uucccugagggagaugccc

SEQ ID NO: 67552 - RNA, 19 nt, Artificial Sequence
  Description of Artificial Sequence: Synthetic oligonucleotide
  Sense strand starting at position 2057 of SEQ ID NO: 836
gccuguauccuccggcagu

SEQ ID NO: 67553 - RNA, 19 nt, Artificial Sequence
  Description of Artificial Sequence: Synthetic oligonucleotide
  Antisense strand to SEQ ID NO: 67472
acugccggaggauacaggc

SEQ ID NO: 67554 - RNA, 19 nt, Artificial Sequence
  Description of Artificial Sequence: Synthetic oligonucleotide
  Sense strand starting at position 1423 of SEQ ID NO: 836
ccagcugucccagagcaga

SEQ ID NO: 67555 - RNA, 19 nt, Artificial Sequence
  Description of Artificial Sequence: Synthetic oligonucleotide
  Antisense strand to SEQ ID NO: 67474
ucugcucugggacagcugg

SEQ ID NO: 67556 - RNA, 19 nt, Artificial Sequence
  Description of Artificial Sequence: Synthetic oligonucleotide
  Sense strand starting at position 928 of SEQ ID NO: 836
caggaauccugggcucacu

SEQ ID NO: 67557 - RNA, 19 nt, Artificial Sequence
  Description of Artificial Sequence: Synthetic oligonucleotide
  Antisense strand to SEQ ID NO: 67476
agugagcccaggauuccug

SEQ ID NO: 67558 - RNA, 19 nt, Artificial Sequence
  Description of Artificial Sequence: Synthetic oligonucleotide
  Sense strand starting at position 815 of SEQ ID NO: 836
guauccauacugggaguga

SEQ ID NO: 67559 - RNA, 19 nt, Artificial Sequence
  Description of Artificial Sequence: Synthetic oligonucleotide
  Antisense strand to SEQ ID NO: 67478
ucacucccaguauggauac

SEQ ID NO: 67560 - RNA, 19 nt, Artificial Sequence
  Description of Artificial Sequence: Synthetic oligonucleotide
  Sense strand starting at position 813 of SEQ ID NO: 836
ggguauccauacugggagu

SEQ ID NO: 67561 - RNA, 19 nt, Artificial Sequence
  Description of Artificial Sequence: Synthetic oligonucleotide
  Antisense strand to SEQ ID NO: 67480
acucccaguauggauaccc

SEQ ID NO: 67562 - RNA, 19 nt, Artificial Sequence
  Description of Artificial Sequence: Synthetic oligonucleotide
  Sense strand starting at position 709 of SEQ ID NO: 836
gggagugugucaucgcuga

SEQ ID NO: 67563 - RNA, 19 nt, Artificial Sequence
  Description of Artificial Sequence: Synthetic oligonucleotide
  Antisense strand to SEQ ID NO: 67482
ucagcgaugacacacuccc

SEQ ID NO: 67564 - RNA, 19 nt, Artificial Sequence
  Description of Artificial Sequence: Synthetic oligonucleotide
  Sense strand starting at position 686 of SEQ ID NO: 836
gcgaguuaggccuggguca

SEQ ID NO: 67565 - RNA, 19 nt, Artificial Sequence
  Description of Artificial Sequence: Synthetic oligonucleotide
  Antisense strand to SEQ ID NO: 67484
ugacccaggccuaacucgc

SEQ ID NO: 67566 - RNA, 19 nt, Artificial Sequence
  Description of Artificial Sequence: Synthetic oligonucleotide
  Sense strand starting at position 550 of SEQ ID NO: 836
gguuguuggcgcugugaau

SEQ ID NO: 67567 - RNA, 19 nt, Artificial Sequence
  Description of Artificial Sequence: Synthetic oligonucleotide
  Antisense strand to SEQ ID NO: 67486
auucacagcgccaacaacc

SEQ ID NO: 67568 - RNA, 19 nt, Artificial Sequence
  Description of Artificial Sequence: Synthetic oligonucleotide
  Sense strand starting at position 549 of SEQ ID NO: 836
ggguuguuggcgcugugaa

SEQ ID NO: 67569 - RNA, 19 nt, Artificial Sequence
  Description of Artificial Sequence: Synthetic oligonucleotide
  Antisense strand to SEQ ID NO: 67488
uucacagcgccaacaaccc

SEQ ID NO: 67570 - RNA, 19 nt, Artificial Sequence
  Description of Artificial Sequence: Synthetic oligonucleotide
  Sense strand starting at position 439 of SEQ ID NO: 836
agguaugagucugugggau

SEQ ID NO: 67571 - RNA, 19 nt, Artificial Sequence
  Description of Artificial Sequence: Synthetic oligonucleotide
  Antisense strand to SEQ ID NO: 67490
aucccacagacucauaccu

SEQ ID NO: 67572 - RNA, 19 nt, Artificial Sequence
  Description of Artificial Sequence: Synthetic oligonucleotide
  Sense strand starting at position 438 of SEQ ID NO: 836
gagguaugagucuguggga

SEQ ID NO: 67573 - RNA, 19 nt, Artificial Sequence
  Description of Artificial Sequence: Synthetic oligonucleotide
  Antisense strand to SEQ ID NO: 67492
ucccacagacucauaccuc

SEQ ID NO: 67574 - RNA, 19 nt, Artificial Sequence
  Description of Artificial Sequence: Synthetic oligonucleotide
  Sense strand starting at position 428 of SEQ ID NO: 836
gcgugguguggagguauga

SEQ ID NO: 67575 - RNA, 19 nt, Artificial Sequence
  Description of Artificial Sequence: Synthetic oligonucleotide
  Antisense strand to SEQ ID NO: 67494
ucauaccuccacaccacgc

SEQ ID NO: 67576 - RNA, 19 nt, Artificial Sequence
  Description of Artificial Sequence: Synthetic oligonucleotide
  Sense strand starting at position 382 of SEQ ID NO: 836
ggguguggcgcucaggaau

SEQ ID NO: 67577 - RNA, 19 nt, Artificial Sequence
  Description of Artificial Sequence: Synthetic oligonucleotide
  Antisense strand to SEQ ID NO: 67496
auuccugagcgccacaccc

SEQ ID NO: 67578 - RNA, 19 nt, Artificial Sequence
  Description of Artificial Sequence: Synthetic oligonucleotide
  Sense strand starting at position 72 of SEQ ID NO: 837
cucugagaccacuggguua

SEQ ID NO: 67579 - RNA, 19 nt, Artificial Sequence
  Description of Artificial Sequence: Synthetic oligonucleotide
  Antisense strand to SEQ ID NO: 67498
uaacccaguggucucagag

SEQ ID NO: 67580 - RNA, 19 nt, Artificial Sequence
  Description of Artificial Sequence: Synthetic oligonucleotide
  Sense strand starting at position 149 of SEQ ID NO: 837
uaaauauggcuuugggaga

SEQ ID NO: 67581 - RNA, 19 nt, Artificial Sequence
  Description of Artificial Sequence: Synthetic oligonucleotide
  Antisense strand to SEQ ID NO: 67500
ucucccaaagccauauuua

SEQ ID NO: 67582 - RNA, 19 nt, Artificial Sequence
  Description of Artificial Sequence: Synthetic oligonucleotide
  Sense strand starting at position 341 of SEQ ID NO: 837
cuagaaucauuagcacagu

SEQ ID NO: 67583 - RNA, 19 nt, Artificial Sequence
  Description of Artificial Sequence: Synthetic oligonucleotide
  Antisense strand to SEQ ID NO: 67502
acugugcuaaugauucuag

SEQ ID NO: 67584 - RNA, 19 nt, Artificial Sequence
  Description of Artificial Sequence: Synthetic oligonucleotide
  Sense strand starting at position 490 of SEQ ID NO: 837
ccuugaacugaaugucuuu

SEQ ID NO: 67585 - RNA, 19 nt, Artificial Sequence
  Description of Artificial Sequence: Synthetic oligonucleotide
  Antisense strand to SEQ ID NO: 67504
aaagacauucaguucaagg

SEQ ID NO: 67586 - RNA, 19 nt, Artificial Sequence
  Description of Artificial Sequence: Synthetic oligonucleotide
  Sense strand starting at position 637 of SEQ ID NO: 837
cuuugaauauaaccguaua

SEQ ID NO: 67587 - RNA, 19 nt, Artificial Sequence
  Description of Artificial Sequence: Synthetic oligonucleotide
  Antisense strand to SEQ ID NO: 67506
uauacgguuauauucaaag

SEQ ID NO: 67588 - RNA, 19 nt, Artificial Sequence
  Description of Artificial Sequence: Synthetic oligonucleotide
  Sense strand starting at position 640 of SEQ ID NO: 837
ugaauauaaccguauaugu

SEQ ID NO: 67589 - RNA, 19 nt, Artificial Sequence
  Description of Artificial Sequence: Synthetic oligonucleotide
  Antisense strand to SEQ ID NO: 67508
acauauacgguuauauuca

SEQ ID NO: 67590 - RNA, 19 nt, Artificial Sequence
  Description of Artificial Sequence: Synthetic oligonucleotide
  Sense strand starting at position 733 of SEQ ID NO: 837
gggaaauuauccucagcga

SEQ ID NO: 67591 - RNA, 19 nt, Artificial Sequence
  Description of Artificial Sequence: Synthetic oligonucleotide
  Antisense strand to SEQ ID NO: 67510
ucgcugaggauaauuuccc

SEQ ID NO: 67592 - RNA, 19 nt, Artificial Sequence
  Description of Artificial Sequence: Synthetic oligonucleotide
  Sense strand starting at position 734 of SEQ ID NO: 837
ggaaauuauccucagcgau

SEQ ID NO: 67593 - RNA, 19 nt, Artificial Sequence
  Description of Artificial Sequence: Synthetic oligonucleotide
  Antisense strand to SEQ ID NO: 67512
aucgcugaggauaauuucc

SEQ ID NO: 67594 - RNA, 19 nt, Artificial Sequence
  Description of Artificial Sequence: Synthetic oligonucleotide
  Sense strand starting at position 762 of SEQ ID NO: 837
ucgacuucccaauaaaguu

SEQ ID NO: 67595 - RNA, 19 nt, Artificial Sequence
  Description of Artificial Sequence: Synthetic oligonucleotide
  Antisense strand to SEQ ID NO: 67514
aacuuuauugggaagucga

SEQ ID NO: 67596 - RNA, 19 nt, Artificial Sequence
  Description of Artificial Sequence: Synthetic oligonucleotide
  Sense strand starting at position 861 of SEQ ID NO: 837
ccaggauacuggccaaacu

SEQ ID NO: 67597 - RNA, 19 nt, Artificial Sequence
  Description of Artificial Sequence: Synthetic oligonucleotide
  Antisense strand to SEQ ID NO: 67516
aguuuggccaguauccugg

SEQ ID NO: 67598 - RNA, 19 nt, Artificial Sequence
  Description of Artificial Sequence: Synthetic oligonucleotide
  Sense strand starting at position 871 of SEQ ID NO: 837
ggccaaacuccacaaagua

SEQ ID NO: 67599 - RNA, 19 nt, Artificial Sequence
  Description of Artificial Sequence: Synthetic oligonucleotide
  Antisense strand to SEQ ID NO: 67518
uacuuuguggaguuuggcc

SEQ ID NO: 67600 - RNA, 19 nt, Artificial Sequence
  Description of Artificial Sequence: Synthetic oligonucleotide
  Sense strand starting at position 1061 of SEQ ID NO: 837
guaacucugagaugagguu

SEQ ID NO: 67601 - RNA, 19 nt, Artificial Sequence
  Description of Artificial Sequence: Synthetic oligonucleotide
  Antisense strand to SEQ ID NO: 67520
aaccucaucucagaguuac

SEQ ID NO: 67602 - RNA, 19 nt, Artificial Sequence
  Description of Artificial Sequence: Synthetic oligonucleotide
  Sense strand starting at position 1178 of SEQ ID NO: 837
auagacuaucgaugugauu

SEQ ID NO: 67603 - RNA, 19 nt, Artificial Sequence
  Description of Artificial Sequence: Synthetic oligonucleotide
  Antisense strand to SEQ ID NO: 67522
aaucacaucgauagucuau

SEQ ID NO: 67604 - RNA, 19 nt, Artificial Sequence
  Description of Artificial Sequence: Synthetic oligonucleotide
  Sense strand starting at position 1405 of SEQ ID NO: 837
uuauauuuccgcuacaugu

SEQ ID NO: 67605 - RNA, 19 nt, Artificial Sequence
  Description of Artificial Sequence: Synthetic oligonucleotide
  Antisense strand to SEQ ID NO: 67524
acauguagcggaaauauaa

SEQ ID NO: 67606 - RNA, 19 nt, Artificial Sequence
  Description of Artificial Sequence: Synthetic oligonucleotide
  Sense strand starting at position 1429 of SEQ ID NO: 837
aaagauuugucggauacau

SEQ ID NO: 67607 - RNA, 19 nt, Artificial Sequence
  Description of Artificial Sequence: Synthetic oligonucleotide
  Antisense strand to SEQ ID NO: 67526
auguauccgacaaaucuuu

SEQ ID NO: 67608 - RNA, 19 nt, Artificial Sequence
  Description of Artificial Sequence: Synthetic oligonucleotide
  Sense strand starting at position 1695 of SEQ ID NO: 837
cauaccuuucuaugaggga

SEQ ID NO: 67609 - RNA, 19 nt, Artificial Sequence
  Description of Artificial Sequence: Synthetic oligonucleotide
  Antisense strand to SEQ ID NO: 67528
ucccucauagaaagguaug

SEQ ID NO: 67610 - RNA, 19 nt, Artificial Sequence
  Description of Artificial Sequence: Synthetic oligonucleotide
  Sense strand starting at position 1935 of SEQ ID NO: 837
gguucacauuugucgugau

SEQ ID NO: 67611 - RNA, 19 nt, Artificial Sequence
  Description of Artificial Sequence: Synthetic oligonucleotide
  Antisense strand to SEQ ID NO: 67530
aucacgacaaaugugaacc

SEQ ID NO: 67612 - RNA, 19 nt, Artificial Sequence
  Description of Artificial Sequence: Synthetic oligonucleotide
  Sense strand starting at position 2088 of SEQ ID NO: 837
ugugguaaacuauaaaguu

SEQ ID NO: 67613 - RNA, 19 nt, Artificial Sequence
  Description of Artificial Sequence: Synthetic oligonucleotide
  Antisense strand to SEQ ID NO: 67532
aacuuuauaguuuaccaca

SEQ ID NO: 67614 - RNA, 19 nt, Artificial Sequence
  Description of Artificial Sequence: Synthetic oligonucleotide
  Sense strand starting at position 2185 of SEQ ID NO: 837
uuaaauucucugggaacgu

SEQ ID NO: 67615 - RNA, 19 nt, Artificial Sequence
  Description of Artificial Sequence: Synthetic oligonucleotide
  Antisense strand to SEQ ID NO: 67534
acguucccagagaauuuaa

SEQ ID NO: 67616 - RNA, 19 nt, Artificial Sequence
  Description of Artificial Sequence: Synthetic oligonucleotide
  Sense strand starting at position 2256 of SEQ ID NO: 837
gaagguacaaguuguggaa

SEQ ID NO: 67617 - RNA, 19 nt, Artificial Sequence
  Description of Artificial Sequence: Synthetic oligonucleotide
  Antisense strand to SEQ ID NO: 67536
uuccacaacuuguaccuuc

SEQ ID NO: 67618 - RNA, 19 nt, Artificial Sequence
  Description of Artificial Sequence: Synthetic oligonucleotide
  Sense strand starting at position 2333 of SEQ ID NO: 837
ugagcaaaucccugaaccu

SEQ ID NO: 67619 - RNA, 19 nt, Artificial Sequence
  Description of Artificial Sequence: Synthetic oligonucleotide
  Antisense strand to SEQ ID NO: 67538
agguucagggauuugcuca

SEQ ID NO: 67620 - RNA, 19 nt, Artificial Sequence
  Description of Artificial Sequence: Synthetic oligonucleotide
  Sense strand starting at position 2563 of SEQ ID NO: 837
aaagcuguccgccugcaua

SEQ ID NO: 67621 - RNA, 19 nt, Artificial Sequence
  Description of Artificial Sequence: Synthetic oligonucleotide
  Antisense strand to SEQ ID NO: 67540
uaugcaggcggacagcuuu

SEQ ID NO: 67622 - RNA, 19 nt, Artificial Sequence
  Description of Artificial Sequence: Synthetic oligonucleotide
  Sense strand starting at position 2565 of SEQ ID NO: 837
agcuguccgccugcauaaa

SEQ ID NO: 67623 - RNA, 19 nt, Artificial Sequence
  Description of Artificial Sequence: Synthetic oligonucleotide
  Antisense strand to SEQ ID NO: 67542
uuuaugcaggcggacagcu

SEQ ID NO: 67624 - RNA, 19 nt, Artificial Sequence
  Description of Artificial Sequence: Synthetic oligonucleotide
  Sense strand starting at position 2577 of SEQ ID NO: 837
gcauaaagcccagauguuu

SEQ ID NO: 67625 - RNA, 19 nt, Artificial Sequence
  Description of Artificial Sequence: Synthetic oligonucleotide
  Antisense strand to SEQ ID NO: 67544
aaacaucugggcuuuaugc

SEQ ID NO: 67626 - RNA, 19 nt, Artificial Sequence
  Description of Artificial Sequence: Synthetic oligonucleotide
  Sense strand starting at position 2602 of SEQ ID NO: 837
uuuccuugucaggacuuau

SEQ ID NO: 67627 - RNA, 19 nt, Artificial Sequence
  Description of Artificial Sequence: Synthetic oligonucleotide
  Antisense strand to SEQ ID NO: 67546
auaaguccugacaaggaaa

SEQ ID NO: 67628 - RNA, 19 nt, Artificial Sequence
  Description of Artificial Sequence: Synthetic oligonucleotide
  Sense strand starting at position 2625 of SEQ ID NO: 837
gcagagugucggguguuua

SEQ ID NO: 67629 - RNA, 19 nt, Artificial Sequence
  Description of Artificial Sequence: Synthetic oligonucleotide
  Antisense strand to SEQ ID NO: 67548
uaaacacccgacacucugc

SEQ ID NO: 67630 - RNA, 19 nt, Artificial Sequence
  Description of Artificial Sequence: Synthetic oligonucleotide
  Sense strand starting at position 2690 of SEQ ID NO: 837
cuguuuggaaucuggauaa

SEQ ID NO: 67631 - RNA, 19 nt, Artificial Sequence
  Description of Artificial Sequence: Synthetic oligonucleotide
  Antisense strand to SEQ ID NO: 67550
uuauccagauuccaaacag

SEQ ID NO: 67632 - RNA, 19 nt, Artificial Sequence
  Description of Artificial Sequence: Synthetic oligonucleotide
  Sense strand starting at position 2728 of SEQ ID NO: 837
agaucaugauucuuauugu

SEQ ID NO: 67633 - RNA, 19 nt, Artificial Sequence
  Description of Artificial Sequence: Synthetic oligonucleotide
  Antisense strand to SEQ ID NO: 67552
acaauaagaaucaugaucu

SEQ ID NO: 67634 - RNA, 19 nt, Artificial Sequence
  Description of Artificial Sequence: Synthetic oligonucleotide
  Sense strand starting at position 2747 of SEQ ID NO: 837
aaaugaugacaauguuagu

SEQ ID NO: 67635 - RNA, 19 nt, Artificial Sequence
  Description of Artificial Sequence: Synthetic oligonucleotide
  Antisense strand to SEQ ID NO: 67554
acuaacauugucaucauuu

SEQ ID NO: 67636 - RNA, 19 nt, Artificial Sequence
  Description of Artificial Sequence: Synthetic oligonucleotide
  Sense strand starting at position 2753 of SEQ ID NO: 837
ugacaauguuaguccauga

SEQ ID NO: 67637 - RNA, 19 nt, Artificial Sequence
  Description of Artificial Sequence: Synthetic oligonucleotide
  Antisense strand to SEQ ID NO: 67556
ucauggacuaacauuguca

SEQ ID NO: 67638 - RNA, 19 nt, Artificial Sequence
  Description of Artificial Sequence: Synthetic oligonucleotide
  Sense strand starting at position 2819 of SEQ ID NO: 837
cccagacauuuauggauaa

SEQ ID NO: 67639 - RNA, 19 nt, Artificial Sequence
  Description of Artificial Sequence: Synthetic oligonucleotide
  Antisense strand to SEQ ID NO: 67558
uuauccauaaaugucuggg

SEQ ID NO: 67640 - RNA, 19 nt, Artificial Sequence
  Description of Artificial Sequence: Synthetic oligonucleotide
  Sense strand starting at position 2820 of SEQ ID NO: 837
ccagacauuuauggauaaa

SEQ ID NO: 67641 - RNA, 19 nt, Artificial Sequence
  Description of Artificial Sequence: Synthetic oligonucleotide
  Antisense strand to SEQ ID NO: 67560
uuuauccauaaaugucugg

SEQ ID NO: 67642 - RNA, 19 nt, Artificial Sequence
  Description of Artificial Sequence: Synthetic oligonucleotide
  Sense strand starting at position 3353 of SEQ ID NO: 837
aggguaaauuuacaaacga

SEQ ID NO: 67643 - RNA, 19 nt, Artificial Sequence
  Description of Artificial Sequence: Synthetic oligonucleotide
  Antisense strand to SEQ ID NO: 67562
ucguuuguaaauuuacccu

SEQ ID NO: 67644 - RNA, 19 nt, Artificial Sequence
  Description of Artificial Sequence: Synthetic oligonucleotide
  Sense strand starting at position 3474 of SEQ ID NO: 837
auugguauuucugucuguu

SEQ ID NO: 67645 - RNA, 19 nt, Artificial Sequence
  Description of Artificial Sequence: Synthetic oligonucleotide
  Antisense strand to SEQ ID NO: 67564
aacagacagaaauaccaau

SEQ ID NO: 67646 - RNA, 19 nt, Artificial Sequence
  Description of Artificial Sequence: Synthetic oligonucleotide
  Sense strand starting at position 3478 of SEQ ID NO: 837
guauuucugucuguuucca

SEQ ID NO: 67647 - RNA, 19 nt, Artificial Sequence
  Description of Artificial Sequence: Synthetic oligonucleotide
  Antisense strand to SEQ ID NO: 67566
uggaaacagacagaaauac

SEQ ID NO: 67648 - RNA, 19 nt, Artificial Sequence
  Description of Artificial Sequence: Synthetic oligonucleotide
  Sense strand starting at position 3480 of SEQ ID NO: 837
auuucugucuguuuccaau

SEQ ID NO: 67649 - RNA, 19 nt, Artificial Sequence
  Description of Artificial Sequence: Synthetic oligonucleotide
  Antisense strand to SEQ ID NO: 67568
auuggaaacagacagaaau

SEQ ID NO: 67650 - RNA, 19 nt, Artificial Sequence
  Description of Artificial Sequence: Synthetic oligonucleotide
  Sense strand starting at position 3492 of SEQ ID NO: 837
uuccaauaagccugagaac

SEQ ID NO: 67651 - RNA, 19 nt, Artificial Sequence
  Description of Artificial Sequence: Synthetic oligonucleotide
  Antisense strand to SEQ ID NO: 67570
guucucaggcuuauuggaa

SEQ ID NO: 67652 - RNA, 19 nt, Artificial Sequence
  Description of Artificial Sequence: Synthetic oligonucleotide
  Sense strand starting at position 3501 of SEQ ID NO: 837
gccugagaacuuggagcua

SEQ ID NO: 67653 - RNA, 19 nt, Artificial Sequence
  Description of Artificial Sequence: Synthetic oligonucleotide
  Antisense strand to SEQ ID NO: 67572
uagcuccaaguucucaggc

SEQ ID NO: 67654 - RNA, 19 nt, Artificial Sequence
  Description of Artificial Sequence: Synthetic oligonucleotide
  Sense strand starting at position 3538 of SEQ ID NO: 837
gguuacauggucugggacu

SEQ ID NO: 67655 - RNA, 19 nt, Artificial Sequence
  Description of Artificial Sequence: Synthetic oligonucleotide
  Antisense strand to SEQ ID NO: 67574
agucccagaccauguaacc

SEQ ID NO: 67656 - RNA, 19 nt, Artificial Sequence
  Description of Artificial Sequence: Synthetic oligonucleotide
  Sense strand starting at position 3540 of SEQ ID NO: 837
uuacauggucugggacuau

SEQ ID NO: 67657 - RNA, 19 nt, Artificial Sequence
  Description of Artificial Sequence: Synthetic oligonucleotide
  Antisense strand to SEQ ID NO: 67576
auagucccagaccauguaa

SEQ ID NO: 67658 - RNA, 19 nt, Artificial Sequence
  Description of Artificial Sequence: Synthetic oligonucleotide
  Sense strand starting at position 54 of SEQ ID NO: 838
guuuauguuugaccagaug

SEQ ID NO: 67659 - RNA, 19 nt, Artificial Sequence
  Description of Artificial Sequence: Synthetic oligonucleotide
  Antisense strand to SEQ ID NO: 67578
caucuggucaaacauaaac

SEQ ID NO: 67660 - RNA, 19 nt, Artificial Sequence
  Description of Artificial Sequence: Synthetic oligonucleotide
  Sense strand starting at position 57 of SEQ ID NO: 838
uauguuugaccagauggua

SEQ ID NO: 67661 - RNA, 19 nt, Artificial Sequence
  Description of Artificial Sequence: Synthetic oligonucleotide
  Antisense strand to SEQ ID NO: 67580
uaccaucuggucaaacaua

SEQ ID NO: 67662 - RNA, 19 nt, Artificial Sequence
  Description of Artificial Sequence: Synthetic oligonucleotide
  Sense strand starting at position 336 of SEQ ID NO: 838
agcaucaugugauuauucu

SEQ ID NO: 67663 - RNA, 19 nt, Artificial Sequence
  Description of Artificial Sequence: Synthetic oligonucleotide
  Antisense strand to SEQ ID NO: 67582
agaauaaucacaugaugcu

SEQ ID NO: 67664 - RNA, 19 nt, Artificial Sequence
  Description of Artificial Sequence: Synthetic oligonucleotide
  Sense strand starting at position 337 of SEQ ID NO: 838
gcaucaugugauuauucuc

SEQ ID NO: 67665 - RNA, 19 nt, Artificial Sequence
  Description of Artificial Sequence: Synthetic oligonucleotide
  Antisense strand to SEQ ID NO: 67584
gagaauaaucacaugaugc

SEQ ID NO: 67666 - RNA, 19 nt, Artificial Sequence
  Description of Artificial Sequence: Synthetic oligonucleotide
  Sense strand starting at position 343 of SEQ ID NO: 838
ugugauuauucucuuccca

SEQ ID NO: 67667 - RNA, 19 nt, Artificial Sequence
  Description of Artificial Sequence: Synthetic oligonucleotide
  Antisense strand to SEQ ID NO: 67586
ugggaagagaauaaucaca

SEQ ID NO: 67668 - RNA, 19 nt, Artificial Sequence
  Description of Artificial Sequence: Synthetic oligonucleotide
  Sense strand starting at position 692 of SEQ ID NO: 838
uuuaauaagugaccuugaa

SEQ ID NO: 67669 - RNA, 19 nt, Artificial Sequence
  Description of Artificial Sequence: Synthetic oligonucleotide
  Antisense strand to SEQ ID NO: 67588
uucaaggucacuuauuaaa

SEQ ID NO: 67670 - RNA, 19 nt, Artificial Sequence
  Description of Artificial Sequence: Synthetic oligonucleotide
  Sense strand starting at position 707 of SEQ ID NO: 838
ugaaaucuacuguaccagu

SEQ ID NO: 67671 - RNA, 19 nt, Artificial Sequence
  Description of Artificial Sequence: Synthetic oligonucleotide
  Antisense strand to SEQ ID NO: 67590
acugguacaguagauuuca

SEQ ID NO: 67672 - RNA, 19 nt, Artificial Sequence
  Description of Artificial Sequence: Synthetic oligonucleotide
  Sense strand starting at position 968 of SEQ ID NO: 838
gacugaaguuccucuacag

SEQ ID NO: 67673 - RNA, 19 nt, Artificial Sequence
  Description of Artificial Sequence: Synthetic oligonucleotide
  Antisense strand to SEQ ID NO: 67592
cuguagaggaacuucaguc

SEQ ID NO: 67674 - RNA, 19 nt, Artificial Sequence
  Description of Artificial Sequence: Synthetic oligonucleotide
  Sense strand starting at position 1042 of SEQ ID NO: 838
uuaacuauccgugauauua

SEQ ID NO: 67675 - RNA, 19 nt, Artificial Sequence
  Description of Artificial Sequence: Synthetic oligonucleotide
  Antisense strand to SEQ ID NO: 67594
uaauaucacggauaguuaa

SEQ ID NO: 67676 - RNA, 19 nt, Artificial Sequence
  Description of Artificial Sequence: Synthetic oligonucleotide
  Sense strand starting at position 1156 of SEQ ID NO: 838
aauagcaugcuaggagaaa

SEQ ID NO: 67677 - RNA, 19 nt, Artificial Sequence
  Description of Artificial Sequence: Synthetic oligonucleotide
  Antisense strand to SEQ ID NO: 67596
uuucuccuagcaugcuauu

SEQ ID NO: 67678 - RNA, 19 nt, Artificial Sequence
  Description of Artificial Sequence: Synthetic oligonucleotide
  Sense strand starting at position 1190 of SEQ ID NO: 838
guugaaauguuauuacuga

SEQ ID NO: 67679 - RNA, 19 nt, Artificial Sequence
  Description of Artificial Sequence: Synthetic oligonucleotide
  Antisense strand to SEQ ID NO: 67598
ucaguaauaacauuucaac

SEQ ID NO: 67680 - RNA, 19 nt, Artificial Sequence
  Description of Artificial Sequence: Synthetic oligonucleotide
  Sense strand starting at position 1245 of SEQ ID NO: 838
uuuagaagcccuuauugca

SEQ ID NO: 67681 - RNA, 19 nt, Artificial Sequence
  Description of Artificial Sequence: Synthetic oligonucleotide
  Antisense strand to SEQ ID NO: 67600
ugcaauaagggcuucuaaa

SEQ ID NO: 67682 - RNA, 19 nt, Artificial Sequence
  Description of Artificial Sequence: Synthetic oligonucleotide
  Sense strand starting at position 1290 of SEQ ID NO: 838
uuugaaagcuacuuugaag

SEQ ID NO: 67683 - RNA, 19 nt, Artificial Sequence
  Description of Artificial Sequence: Synthetic oligonucleotide
  Antisense strand to SEQ ID NO: 67602
cuucaaaguagcuuucaaa

SEQ ID NO: 67684 - RNA, 19 nt, Artificial Sequence
  Description of Artificial Sequence: Synthetic oligonucleotide
  Sense strand starting at position 1589 of SEQ ID NO: 838
gugaaaucacuguaucaca

SEQ ID NO: 67685 - RNA, 19 nt, Artificial Sequence
  Description of Artificial Sequence: Synthetic oligonucleotide
  Antisense strand to SEQ ID NO: 67604
ugugauacagugauuucac

SEQ ID NO: 67686 - RNA, 19 nt, Artificial Sequence
  Description of Artificial Sequence: Synthetic oligonucleotide
  Sense strand starting at position 1597 of SEQ ID NO: 838
acuguaucacacggagaca

SEQ ID NO: 67687 - RNA, 19 nt, Artificial Sequence
  Description of Artificial Sequence: Synthetic oligonucleotide
  Antisense strand to SEQ ID NO: 67606
ugucuccgugugauacagu

SEQ ID NO: 67688 - RNA, 19 nt, Artificial Sequence
  Description of Artificial Sequence: Synthetic oligonucleotide
  Sense strand starting at position 2185 of SEQ ID NO: 838
ccgaucucgaguuauagac

SEQ ID NO: 67689 - RNA, 19 nt, Artificial Sequence
  Description of Artificial Sequence: Synthetic oligonucleotide
  Antisense strand to SEQ ID NO: 67608
gucuauaacucgagaucgg

SEQ ID NO: 67690 - RNA, 19 nt, Artificial Sequence
  Description of Artificial Sequence: Synthetic oligonucleotide
  Sense strand starting at position 2245 of SEQ ID NO: 838
gguucucccagguagagua

SEQ ID NO: 67691 - RNA, 19 nt, Artificial Sequence
  Description of Artificial Sequence: Synthetic oligonucleotide
  Antisense strand to SEQ ID NO: 67610
uacucuaccugggagaacc

SEQ ID NO: 67692 - RNA, 19 nt, Artificial Sequence
  Description of Artificial Sequence: Synthetic oligonucleotide
  Sense strand starting at position 2588 of SEQ ID NO: 838
guacccagaucucagauuu

SEQ ID NO: 67693 - RNA, 19 nt, Artificial Sequence
  Description of Artificial Sequence: Synthetic oligonucleotide
  Antisense strand to SEQ ID NO: 67612
aaaucugagaucuggguac

SEQ ID NO: 67694 - RNA, 19 nt, Artificial Sequence
  Description of Artificial Sequence: Synthetic oligonucleotide
  Sense strand starting at position 2609 of SEQ ID NO: 838
aggagugguuaauuaagca

SEQ ID NO: 67695 - RNA, 19 nt, Artificial Sequence
  Description of Artificial Sequence: Synthetic oligonucleotide
  Antisense strand to SEQ ID NO: 67614
ugcuuaauuaaccacuccu

SEQ ID NO: 67696 - RNA, 19 nt, Artificial Sequence
  Description of Artificial Sequence: Synthetic oligonucleotide
  Sense strand starting at position 2613 of SEQ ID NO: 838
gugguuaauuaagcaacua

SEQ ID NO: 67697 - RNA, 19 nt, Artificial Sequence
  Description of Artificial Sequence: Synthetic oligonucleotide
  Antisense strand to SEQ ID NO: 67616
uaguugcuuaauuaaccac

SEQ ID NO: 67698 - RNA, 19 nt, Artificial Sequence
  Description of Artificial Sequence: Synthetic oligonucleotide
  Sense strand starting at position 2785 of SEQ ID NO: 838
ggucuacaguuuguuauuu

SEQ ID NO: 67699 - RNA, 19 nt, Artificial Sequence
  Description of Artificial Sequence: Synthetic oligonucleotide
  Antisense strand to SEQ ID NO: 67618
aaauaacaaacuguagacc

SEQ ID NO: 67700 - RNA, 19 nt, Artificial Sequence
  Description of Artificial Sequence: Synthetic oligonucleotide
  Sense strand starting at position 2790 of SEQ ID NO: 838
acaguuuguuauuugugua

SEQ ID NO: 67701 - RNA, 19 nt, Artificial Sequence
  Description of Artificial Sequence: Synthetic oligonucleotide
  Antisense strand to SEQ ID NO: 67620
uacacaaauaacaaacugu

SEQ ID NO: 67702 - RNA, 19 nt, Artificial Sequence
  Description of Artificial Sequence: Synthetic oligonucleotide
  Sense strand starting at position 2797 of SEQ ID NO: 838
guuauuuguguaggaaucu

SEQ ID NO: 67703 - RNA, 19 nt, Artificial Sequence
  Description of Artificial Sequence: Synthetic oligonucleotide
  Antisense strand to SEQ ID NO: 67622
agauuccuacacaaauaac

SEQ ID NO: 67704 - RNA, 19 nt, Artificial Sequence
  Description of Artificial Sequence: Synthetic oligonucleotide
  Sense strand starting at position 2806 of SEQ ID NO: 838
guaggaaucuaucuuguac

SEQ ID NO: 67705 - RNA, 19 nt, Artificial Sequence
  Description of Artificial Sequence: Synthetic oligonucleotide
  Antisense strand to SEQ ID NO: 67624
guacaagauagauuccuac

SEQ ID NO: 67706 - RNA, 19 nt, Artificial Sequence
  Description of Artificial Sequence: Synthetic oligonucleotide
  Sense strand starting at position 2889 of SEQ ID NO: 838
ugagaaauaaguuguuagu

SEQ ID NO: 67707 - RNA, 19 nt, Artificial Sequence
  Description of Artificial Sequence: Synthetic oligonucleotide
  Antisense strand to SEQ ID NO: 67626
acuaacaacuuauuucuca

SEQ ID NO: 67708 - RNA, 19 nt, Artificial Sequence
  Description of Artificial Sequence: Synthetic oligonucleotide
  Sense strand starting at position 2895 of SEQ ID NO: 838
auaaguuguuagucgauuu

SEQ ID NO: 67709 - RNA, 19 nt, Artificial Sequence
  Description of Artificial Sequence: Synthetic oligonucleotide
  Antisense strand to SEQ ID NO: 67628
aaaucgacuaacaacuuau

SEQ ID NO: 67710 - RNA, 19 nt, Artificial Sequence
  Description of Artificial Sequence: Synthetic oligonucleotide
  Sense strand starting at position 3123 of SEQ ID NO: 838
guaugcuguccgucguuua

SEQ ID NO: 67711 - RNA, 19 nt, Artificial Sequence
  Description of Artificial Sequence: Synthetic oligonucleotide
  Antisense strand to SEQ ID NO: 67630
uaaacgacggacagcauac

SEQ ID NO: 67712 - RNA, 19 nt, Artificial Sequence
  Description of Artificial Sequence: Synthetic oligonucleotide
  Sense strand starting at position 3133 of SEQ ID NO: 838
cgucguuuacggaaauguc

SEQ ID NO: 67713 - RNA, 19 nt, Artificial Sequence
  Description of Artificial Sequence: Synthetic oligonucleotide
  Antisense strand to SEQ ID NO: 67632
gacauuuccguaaacgacg

SEQ ID NO: 67714 - RNA, 19 nt, Artificial Sequence
  Description of Artificial Sequence: Synthetic oligonucleotide
  Sense strand starting at position 3141 of SEQ ID NO: 838
acggaaaugucauuaugua

SEQ ID NO: 67715 - RNA, 19 nt, Artificial Sequence
  Description of Artificial Sequence: Synthetic oligonucleotide
  Antisense strand to SEQ ID NO: 67634
uacauaaugacauuuccgu

SEQ ID NO: 67716 - RNA, 19 nt, Artificial Sequence
  Description of Artificial Sequence: Synthetic oligonucleotide
  Sense strand starting at position 3142 of SEQ ID NO: 838
cggaaaugucauuauguag

SEQ ID NO: 67717 - RNA, 19 nt, Artificial Sequence
  Description of Artificial Sequence: Synthetic oligonucleotide
  Antisense strand to SEQ ID NO: 67636
cuacauaaugacauuuccg

SEQ ID NO: 67718 - RNA, 19 nt, Artificial Sequence
  Description of Artificial Sequence: Synthetic oligonucleotide
  Sense strand starting at position 3246 of SEQ ID NO: 838
ggacaacuacauuggcaua

SEQ ID NO: 67719 - RNA, 19 nt, Artificial Sequence
  Description of Artificial Sequence: Synthetic oligonucleotide
  Antisense strand to SEQ ID NO: 67638
uaugccaauguaguugucc

SEQ ID NO: 67720 - RNA, 19 nt, Artificial Sequence
  Description of Artificial Sequence: Synthetic oligonucleotide
  Sense strand starting at position 3331 of SEQ ID NO: 838
aaauuaucaugagagggaa

SEQ ID NO: 67721 - RNA, 19 nt, Artificial Sequence
  Description of Artificial Sequence: Synthetic oligonucleotide
  Antisense strand to SEQ ID NO: 67640
uucccucucaugauaauuu

SEQ ID NO: 67722 - RNA, 19 nt, Artificial Sequence
  Description of Artificial Sequence: Synthetic oligonucleotide
  Sense strand starting at position 3377 of SEQ ID NO: 838
ucucacauagacuguuaca

SEQ ID NO: 67723 - RNA, 19 nt, Artificial Sequence
  Description of Artificial Sequence: Synthetic oligonucleotide
  Antisense strand to SEQ ID NO: 67642
uguaacagucuaugugaga

SEQ ID NO: 67724 - RNA, 19 nt, Artificial Sequence
  Description of Artificial Sequence: Synthetic oligonucleotide
  Sense strand starting at position 3450 of SEQ ID NO: 838
aggaaugagugucuguaga

SEQ ID NO: 67725 - RNA, 19 nt, Artificial Sequence
  Description of Artificial Sequence: Synthetic oligonucleotide
  Antisense strand to SEQ ID NO: 67644
ucuacagacacucauuccu

SEQ ID NO: 67726 - RNA, 19 nt, Artificial Sequence
  Description of Artificial Sequence: Synthetic oligonucleotide
  Sense strand starting at position 3452 of SEQ ID NO: 838
gaaugagugucuguagaag

SEQ ID NO: 67727 - RNA, 19 nt, Artificial Sequence
  Description of Artificial Sequence: Synthetic oligonucleotide
  Antisense strand to SEQ ID NO: 67646
cuucuacagacacucauuc

SEQ ID NO: 67728 - RNA, 19 nt, Artificial Sequence
  Description of Artificial Sequence: Synthetic oligonucleotide
  Sense strand starting at position 3513 of SEQ ID NO: 838
cuuuauaugccagagacuc

SEQ ID NO: 67729 - RNA, 19 nt, Artificial Sequence
  Description of Artificial Sequence: Synthetic oligonucleotide
  Antisense strand to SEQ ID NO: 67648
gagucucuggcauauaaag

SEQ ID NO: 67730 - RNA, 19 nt, Artificial Sequence
  Description of Artificial Sequence: Synthetic oligonucleotide
  Sense strand starting at position 3702 of SEQ ID NO: 838
aagcauauguagcuaugau

SEQ ID NO: 67731 - RNA, 19 nt, Artificial Sequence
  Description of Artificial Sequence: Synthetic oligonucleotide
  Antisense strand to SEQ ID NO: 67650
aucauagcuacauaugcuu

SEQ ID NO: 67732 - RNA, 19 nt, Artificial Sequence
  Description of Artificial Sequence: Synthetic oligonucleotide
  Sense strand starting at position 3729 of SEQ ID NO: 838
ugugaagacucacuaaucu

SEQ ID NO: 67733 - RNA, 19 nt, Artificial Sequence
  Description of Artificial Sequence: Synthetic oligonucleotide
  Antisense strand to SEQ ID NO: 67652
agauuagugagucuucaca

SEQ ID NO: 67734 - RNA, 19 nt, Artificial Sequence
  Description of Artificial Sequence: Synthetic oligonucleotide
  Sense strand starting at position 3797 of SEQ ID NO: 838
gaguauaagauaugucgga

SEQ ID NO: 67735 - RNA, 19 nt, Artificial Sequence
  Description of Artificial Sequence: Synthetic oligonucleotide
  Antisense strand to SEQ ID NO: 67654
uccgacauaucuuauacuc

SEQ ID NO: 67736 - RNA, 19 nt, Artificial Sequence
  Description of Artificial Sequence: Synthetic oligonucleotide
  Sense strand starting at position 3855 of SEQ ID NO: 838
acaguucuugccuagugga

SEQ ID NO: 67737 - RNA, 19 nt, Artificial Sequence
  Description of Artificial Sequence: Synthetic oligonucleotide
  Antisense strand to SEQ ID NO: 67656
uccacuaggcaagaacugu

SEQ ID NO: 67738 - RNA, 19 nt, Artificial Sequence
  Description of Artificial Sequence: Synthetic oligonucleotide
  Sense strand starting at position 163 of SEQ ID NO: 839
ucuaguugaccuugguaaa

SEQ ID NO: 67739 - RNA, 19 nt, Artificial Sequence
  Description of Artificial Sequence: Synthetic oligonucleotide
  Antisense strand to SEQ ID NO: 67658
uuuaccaaggucaacuaga

SEQ ID NO: 67740 - RNA, 19 nt, Artificial Sequence
  Description of Artificial Sequence: Synthetic oligonucleotide
  Sense strand starting at position 183 of SEQ ID NO: 839
acugucgcgaacuaugaau

SEQ ID NO: 67741 - RNA, 19 nt, Artificial Sequence
  Description of Artificial Sequence: Synthetic oligonucleotide
  Antisense strand to SEQ ID NO: 67660
auucauaguucgcgacagu

SEQ ID NO: 67742 - RNA, 19 nt, Artificial Sequence
  Description of Artificial Sequence: Synthetic oligonucleotide
  Sense strand starting at position 288 of SEQ ID NO: 839
gccuacugugugcuaagua

SEQ ID NO: 67743 - RNA, 19 nt, Artificial Sequence
  Description of Artificial Sequence: Synthetic oligonucleotide
  Antisense strand to SEQ ID NO: 67662
uacuuagcacacaguaggc

SEQ ID NO: 67744 - RNA, 19 nt, Artificial Sequence
  Description of Artificial Sequence: Synthetic oligonucleotide
  Sense strand starting at position 307 of SEQ ID NO: 839
ggcaaagugcuauauugac

SEQ ID NO: 67745 - RNA, 19 nt, Artificial Sequence
  Description of Artificial Sequence: Synthetic oligonucleotide
  Antisense strand to SEQ ID NO: 67664
gucaauauagcacuuugcc

SEQ ID NO: 67746 - RNA, 19 nt, Artificial Sequence
  Description of Artificial Sequence: Synthetic oligonucleotide
  Sense strand starting at position 415 of SEQ ID NO: 839
uagcuuggucuggaaaguu

SEQ ID NO: 67747 - RNA, 19 nt, Artificial Sequence
  Description of Artificial Sequence: Synthetic oligonucleotide
  Antisense strand to SEQ ID NO: 67666
aacuuuccagaccaagcua

SEQ ID NO: 67748 - RNA, 19 nt, Artificial Sequence
  Description of Artificial Sequence: Synthetic oligonucleotide
  Sense strand starting at position 690 of SEQ ID NO: 839
ucagucagccucuauccua

SEQ ID NO: 67749 - RNA, 19 nt, Artificial Sequence
  Description of Artificial Sequence: Synthetic oligonucleotide
  Antisense strand to SEQ ID NO: 67668
uaggauagaggcugacuga

SEQ ID NO: 67750 - RNA, 19 nt, Artificial Sequence
  Description of Artificial Sequence: Synthetic oligonucleotide
  Sense strand starting at position 758 of SEQ ID NO: 839
gguggcuaaguuuagcaaa

SEQ ID NO: 67751 - RNA, 19 nt, Artificial Sequence
  Description of Artificial Sequence: Synthetic oligonucleotide
  Antisense strand to SEQ ID NO: 67670
uuugcuaaacuuagccacc

SEQ ID NO: 67752 - RNA, 19 nt, Artificial Sequence
  Description of Artificial Sequence: Synthetic oligonucleotide
  Sense strand starting at position 911 of SEQ ID NO: 839
uugauugcggcgucuugua

SEQ ID NO: 67753 - RNA, 19 nt, Artificial Sequence
  Description of Artificial Sequence: Synthetic oligonucleotide
  Antisense strand to SEQ ID NO: 67672
uacaagacgccgcaaucaa

SEQ ID NO: 67754 - RNA, 19 nt, Artificial Sequence
  Description of Artificial Sequence: Synthetic oligonucleotide
  Sense strand starting at position 956 of SEQ ID NO: 839
ggccuaagugaacaugagu

SEQ ID NO: 67755 - RNA, 19 nt, Artificial Sequence
  Description of Artificial Sequence: Synthetic oligonucleotide
  Antisense strand to SEQ ID NO: 67674
acucauguucacuuaggcc

SEQ ID NO: 67756 - RNA, 19 nt, Artificial Sequence
  Description of Artificial Sequence: Synthetic oligonucleotide
  Sense strand starting at position 961 of SEQ ID NO: 839
aagugaacaugagugaagu

SEQ ID NO: 67757 - RNA, 19 nt, Artificial Sequence
  Description of Artificial Sequence: Synthetic oligonucleotide
  Antisense strand to SEQ ID NO: 67676
acuucacucauguucacuu

SEQ ID NO: 67758 - RNA, 19 nt, Artificial Sequence
  Description of Artificial Sequence: Synthetic oligonucleotide
  Sense strand starting at position 962 of SEQ ID NO: 839
agugaacaugagugaagua

SEQ ID NO: 67759 - RNA, 19 nt, Artificial Sequence
  Description of Artificial Sequence: Synthetic oligonucleotide
  Antisense strand to SEQ ID NO: 67678
uacuucacucauguucacu

SEQ ID NO: 67760 - RNA, 19 nt, Artificial Sequence
  Description of Artificial Sequence: Synthetic oligonucleotide
  Sense strand starting at position 963 of SEQ ID NO: 839
gugaacaugagugaaguau

SEQ ID NO: 67761 - RNA, 19 nt, Artificial Sequence
  Description of Artificial Sequence: Synthetic oligonucleotide
  Antisense strand to SEQ ID NO: 67680
auacuucacucauguucac

SEQ ID NO: 67762 - RNA, 19 nt, Artificial Sequence
  Description of Artificial Sequence: Synthetic oligonucleotide
  Sense strand starting at position 1526 of SEQ ID NO: 839
guguaaacauccuuuagag

SEQ ID NO: 67763 - RNA, 19 nt, Artificial Sequence
  Description of Artificial Sequence: Synthetic oligonucleotide
  Antisense strand to SEQ ID NO: 67682
cucuaaaggauguuuacac

SEQ ID NO: 67764 - RNA, 19 nt, Artificial Sequence
  Description of Artificial Sequence: Synthetic oligonucleotide
  Sense strand starting at position 1809 of SEQ ID NO: 839
gcaauuggucgagacccaa

SEQ ID NO: 67765 - RNA, 19 nt, Artificial Sequence
  Description of Artificial Sequence: Synthetic oligonucleotide
  Antisense strand to SEQ ID NO: 67684
uugggucucgaccaauugc

SEQ ID NO: 67766 - RNA, 19 nt, Artificial Sequence
  Description of Artificial Sequence: Synthetic oligonucleotide
  Sense strand starting at position 1883 of SEQ ID NO: 839
guugaagguuuacuccaaa

SEQ ID NO: 67767 - RNA, 19 nt, Artificial Sequence
  Description of Artificial Sequence: Synthetic oligonucleotide
  Antisense strand to SEQ ID NO: 67686
uuuggaguaaaccuucaac

SEQ ID NO: 67768 - RNA, 19 nt, Artificial Sequence
  Description of Artificial Sequence: Synthetic oligonucleotide
  Sense strand starting at position 1982 of SEQ ID NO: 839
ucaccauggcuuuggaaau

SEQ ID NO: 67769 - RNA, 19 nt, Artificial Sequence
  Description of Artificial Sequence: Synthetic oligonucleotide
  Antisense strand to SEQ ID NO: 67688
auuuccaaagccaugguga

SEQ ID NO: 67770 - RNA, 19 nt, Artificial Sequence
  Description of Artificial Sequence: Synthetic oligonucleotide
  Sense strand starting at position 2008 of SEQ ID NO: 839
ugcuguugacaggauuauu

SEQ ID NO: 67771 - RNA, 19 nt, Artificial Sequence
  Description of Artificial Sequence: Synthetic oligonucleotide
  Antisense strand to SEQ ID NO: 67690
aauaauccugucaacagca

SEQ ID NO: 67772 - RNA, 19 nt, Artificial Sequence
  Description of Artificial Sequence: Synthetic oligonucleotide
  Sense strand starting at position 2052 of SEQ ID NO: 839
agccuuugugcgucacuau

SEQ ID NO: 67773 - RNA, 19 nt, Artificial Sequence
  Description of Artificial Sequence: Synthetic oligonucleotide
  Antisense strand to SEQ ID NO: 67692
auagugacgcacaaaggcu

SEQ ID NO: 67774 - RNA, 19 nt, Artificial Sequence
  Description of Artificial Sequence: Synthetic oligonucleotide
  Sense strand starting at position 2055 of SEQ ID NO: 839
cuuugugcgucacuauuua

SEQ ID NO: 67775 - RNA, 19 nt, Artificial Sequence
  Description of Artificial Sequence: Synthetic oligonucleotide
  Antisense strand to SEQ ID NO: 67694
uaaauagugacgcacaaag

SEQ ID NO: 67776 - RNA, 19 nt, Artificial Sequence
  Description of Artificial Sequence: Synthetic oligonucleotide
  Sense strand starting at position 2059 of SEQ ID NO: 839
gugcgucacuauuuaaggu

SEQ ID NO: 67777 - RNA, 19 nt, Artificial Sequence
  Description of Artificial Sequence: Synthetic oligonucleotide
  Antisense strand to SEQ ID NO: 67696
accuuaaauagugacgcac

SEQ ID NO: 67778 - RNA, 19 nt, Artificial Sequence
  Description of Artificial Sequence: Synthetic oligonucleotide
  Sense strand starting at position 2273 of SEQ ID NO: 839
ucaaaugggcuauguuuga

SEQ ID NO: 67779 - RNA, 19 nt, Artificial Sequence
  Description of Artificial Sequence: Synthetic oligonucleotide
  Antisense strand to SEQ ID NO: 67698
ucaaacauagcccauuuga

SEQ ID NO: 67780 - RNA, 19 nt, Artificial Sequence
  Description of Artificial Sequence: Synthetic oligonucleotide
  Sense strand starting at position 2306 of SEQ ID NO: 839
gauggaaguuaguugcaaa

SEQ ID NO: 67781 - RNA, 19 nt, Artificial Sequence
  Description of Artificial Sequence: Synthetic oligonucleotide
  Antisense strand to SEQ ID NO: 67700
uuugcaacuaacuuccauc

SEQ ID NO: 67782 - RNA, 19 nt, Artificial Sequence
  Description of Artificial Sequence: Synthetic oligonucleotide
  Sense strand starting at position 2417 of SEQ ID NO: 839
cuguaauguggccauuaca

SEQ ID NO: 67783 - RNA, 19 nt, Artificial Sequence
  Description of Artificial Sequence: Synthetic oligonucleotide
  Antisense strand to SEQ ID NO: 67702
uguaauggccacauuacag

SEQ ID NO: 67784 - RNA, 19 nt, Artificial Sequence
  Description of Artificial Sequence: Synthetic oligonucleotide
  Sense strand starting at position 2566 of SEQ ID NO: 839
ccuccaauauuggugaaac

SEQ ID NO: 67785 - RNA, 19 nt, Artificial Sequence
  Description of Artificial Sequence: Synthetic oligonucleotide
  Antisense strand to SEQ ID NO: 67704
guuucaccaauauuggagg

SEQ ID NO: 67786 - RNA, 19 nt, Artificial Sequence
  Description of Artificial Sequence: Synthetic oligonucleotide
  Sense strand starting at position 2801 of SEQ ID NO: 839
guuaucuaucuauaguguu

SEQ ID NO: 67787 - RNA, 19 nt, Artificial Sequence
  Description of Artificial Sequence: Synthetic oligonucleotide
  Antisense strand to SEQ ID NO: 67706
aacacuauagauagauaac

SEQ ID NO: 67788 - RNA, 19 nt, Artificial Sequence
  Description of Artificial Sequence: Synthetic oligonucleotide
  Sense strand starting at position 2933 of SEQ ID NO: 839
aggugaaccgaucauguua

SEQ ID NO: 67789 - RNA, 19 nt, Artificial Sequence
  Description of Artificial Sequence: Synthetic oligonucleotide
  Antisense strand to SEQ ID NO: 67708
uaacaugaucgguucaccu

SEQ ID NO: 67790 - RNA, 19 nt, Artificial Sequence
  Description of Artificial Sequence: Synthetic oligonucleotide
  Sense strand starting at position 3159 of SEQ ID NO: 839
aguugugaugacugcaaua

SEQ ID NO: 67791 - RNA, 19 nt, Artificial Sequence
  Description of Artificial Sequence: Synthetic oligonucleotide
  Antisense strand to SEQ ID NO: 67710
uauugcagucaucacaacu

SEQ ID NO: 67792 - RNA, 19 nt, Artificial Sequence
  Description of Artificial Sequence: Synthetic oligonucleotide
  Sense strand starting at position 3186 of SEQ ID NO: 839
agaaauaugucagcagaca

SEQ ID NO: 67793 - RNA, 19 nt, Artificial Sequence
  Description of Artificial Sequence: Synthetic oligonucleotide
  Antisense strand to SEQ ID NO: 67712
ugucugcugacauauuucu

SEQ ID NO: 67794 - RNA, 19 nt, Artificial Sequence
  Description of Artificial Sequence: Synthetic oligonucleotide
  Sense strand starting at position 3275 of SEQ ID NO: 839
ucaauuaugcgagauaggu

SEQ ID NO: 67795 - RNA, 19 nt, Artificial Sequence
  Description of Artificial Sequence: Synthetic oligonucleotide
  Antisense strand to SEQ ID NO: 67714
accuaucucgcauaauuga

SEQ ID NO: 67796 - RNA, 19 nt, Artificial Sequence
  Description of Artificial Sequence: Synthetic oligonucleotide
  Sense strand starting at position 3290 of SEQ ID NO: 839
agguaaguucuagagagcu

SEQ ID NO: 67797 - RNA, 19 nt, Artificial Sequence
  Description of Artificial Sequence: Synthetic oligonucleotide
  Antisense strand to SEQ ID NO: 67716
agcucucuagaacuuaccu

SEQ ID NO: 67798 - RNA, 19 nt, Artificial Sequence
  Description of Artificial Sequence: Synthetic oligonucleotide
  Sense strand starting at position 3296 of SEQ ID NO: 839
guucuagagagcuaaagua

SEQ ID NO: 67799 - RNA, 19 nt, Artificial Sequence
  Description of Artificial Sequence: Synthetic oligonucleotide
  Antisense strand to SEQ ID NO: 67718
uacuuuagcucucuagaac

SEQ ID NO: 67800 - RNA, 19 nt, Artificial Sequence
  Description of Artificial Sequence: Synthetic oligonucleotide
  Sense strand starting at position 3320 of SEQ ID NO: 839
augugacuauaguuaggaa

SEQ ID NO: 67801 - RNA, 19 nt, Artificial Sequence
  Description of Artificial Sequence: Synthetic oligonucleotide
  Antisense strand to SEQ ID NO: 67720
uuccuaacuauagucacau

SEQ ID NO: 67802 - RNA, 19 nt, Artificial Sequence
  Description of Artificial Sequence: Synthetic oligonucleotide
  Sense strand starting at position 3761 of SEQ ID NO: 839
aaaggugguggcuauguua

SEQ ID NO: 67803 - RNA, 19 nt, Artificial Sequence
  Description of Artificial Sequence: Synthetic oligonucleotide
  Antisense strand to SEQ ID NO: 67722
uaacauagccaccaccuuu

SEQ ID NO: 67804 - RNA, 19 nt, Artificial Sequence
  Description of Artificial Sequence: Synthetic oligonucleotide
  Sense strand starting at position 3815 of SEQ ID NO: 839
caggcuuuggaaugaaugu

SEQ ID NO: 67805 - RNA, 19 nt, Artificial Sequence
  Description of Artificial Sequence: Synthetic oligonucleotide
  Antisense strand to SEQ ID NO: 67724
acauucauuccaaagccug

SEQ ID NO: 67806 - RNA, 19 nt, Artificial Sequence
  Description of Artificial Sequence: Synthetic oligonucleotide
  Sense strand starting at position 3816 of SEQ ID NO: 839
aggcuuuggaaugaauguu

SEQ ID NO: 67807 - RNA, 19 nt, Artificial Sequence
  Description of Artificial Sequence: Synthetic oligonucleotide
  Antisense strand to SEQ ID NO: 67726
aacauucauuccaaagccu

SEQ ID NO: 67808 - RNA, 19 nt, Artificial Sequence
  Description of Artificial Sequence: Synthetic oligonucleotide
  Sense strand starting at position 3842 of SEQ ID NO: 839
ucugacacuuauguugaaa

SEQ ID NO: 67809 - RNA, 19 nt, Artificial Sequence
  Description of Artificial Sequence: Synthetic oligonucleotide
  Antisense strand to SEQ ID NO: 67728
uuucaacauaagugucaga

SEQ ID NO: 67810 - RNA, 19 nt, Artificial Sequence
  Description of Artificial Sequence: Synthetic oligonucleotide
  Sense strand starting at position 3895 of SEQ ID NO: 839
uugagagaugauugggcau

SEQ ID NO: 67811 - RNA, 19 nt, Artificial Sequence
  Description of Artificial Sequence: Synthetic oligonucleotide
  Antisense strand to SEQ ID NO: 67730
augcccaaucaucucucaa

SEQ ID NO: 67812 - RNA, 19 nt, Artificial Sequence
  Description of Artificial Sequence: Synthetic oligonucleotide
  Sense strand starting at position 3908 of SEQ ID NO: 839
gggcaugagagcuggaaca

SEQ ID NO: 67813 - RNA, 19 nt, Artificial Sequence
  Description of Artificial Sequence: Synthetic oligonucleotide
  Antisense strand to SEQ ID NO: 67732
uguuccagcucucaugccc

SEQ ID NO: 67814 - RNA, 19 nt, Artificial Sequence
  Description of Artificial Sequence: Synthetic oligonucleotide
  Sense strand starting at position 3910 of SEQ ID NO: 839
gcaugagagcuggaacaug

SEQ ID NO: 67815 - RNA, 19 nt, Artificial Sequence
  Description of Artificial Sequence: Synthetic oligonucleotide
  Antisense strand to SEQ ID NO: 67734
cauguuccagcucucaugc

SEQ ID NO: 67816 - RNA, 19 nt, Artificial Sequence
  Description of Artificial Sequence: Synthetic oligonucleotide
  Sense strand starting at position 3942 of SEQ ID NO: 839
augggugaucaugggagua

SEQ ID NO: 67817 - RNA, 19 nt, Artificial Sequence
  Description of Artificial Sequence: Synthetic oligonucleotide
  Antisense strand to SEQ ID NO: 67736
uacucccaugaucacccau

SEQ ID NO: 67818 - RNA, 19 nt, Artificial Sequence
  Description of Artificial Sequence: Synthetic oligonucleotide
  Sense strand starting at position 106 of SEQ ID NO: 840
ucuaguugaccuugguaaa

SEQ ID NO: 67819 - RNA, 19 nt, Artificial Sequence
  Description of Artificial Sequence: Synthetic oligonucleotide
  Antisense strand to SEQ ID NO: 67738
uuuaccaaggucaacuaga

SEQ ID NO: 67820 - RNA, 19 nt, Artificial Sequence
  Description of Artificial Sequence: Synthetic oligonucleotide
  Sense strand starting at position 126 of SEQ ID NO: 840
acugucgcgaacuaugaau

SEQ ID NO: 67821 - RNA, 19 nt, Artificial Sequence
  Description of Artificial Sequence: Synthetic oligonucleotide
  Antisense strand to SEQ ID NO: 67740
auucauaguucgcgacagu

SEQ ID NO: 67822 - RNA, 19 nt, Artificial Sequence
  Description of Artificial Sequence: Synthetic oligonucleotide
  Sense strand starting at position 231 of SEQ ID NO: 840
gccuacugugugcuaagua

SEQ ID NO: 67823 - RNA, 19 nt, Artificial Sequence
  Description of Artificial Sequence: Synthetic oligonucleotide
  Antisense strand to SEQ ID NO: 67742
uacuuagcacacaguaggc

SEQ ID NO: 67824 - RNA, 19 nt, Artificial Sequence
  Description of Artificial Sequence: Synthetic oligonucleotide
  Sense strand starting at position 250 of SEQ ID NO: 840
ggcaaagugcuauauugac

SEQ ID NO: 67825 - RNA, 19 nt, Artificial Sequence
  Description of Artificial Sequence: Synthetic oligonucleotide
  Antisense strand to SEQ ID NO: 67744
gucaauauagcacuuugcc

SEQ ID NO: 67826 - RNA, 19 nt, Artificial Sequence
  Description of Artificial Sequence: Synthetic oligonucleotide
  Sense strand starting at position 358 of SEQ ID NO: 840
uagcuuggucuggaaaguu

SEQ ID NO: 67827 - RNA, 19 nt, Artificial Sequence
  Description of Artificial Sequence: Synthetic oligonucleotide
  Antisense strand to SEQ ID NO: 67746
aacuuuccagaccaagcua

SEQ ID NO: 67828 - RNA, 19 nt, Artificial Sequence
  Description of Artificial Sequence: Synthetic oligonucleotide
  Sense strand starting at position 633 of SEQ ID NO: 840
ucagucagccucuauccua

SEQ ID NO: 67829 - RNA, 19 nt, Artificial Sequence
  Description of Artificial Sequence: Synthetic oligonucleotide
  Antisense strand to SEQ ID NO: 67748
uaggauagaggcugacuga

SEQ ID NO: 67830 - RNA, 19 nt, Artificial Sequence
  Description of Artificial Sequence: Synthetic oligonucleotide
  Sense strand starting at position 701 of SEQ ID NO: 840
gguggcuaaguuuagcaaa

SEQ ID NO: 67831 - RNA, 19 nt, Artificial Sequence
  Description of Artificial Sequence: Synthetic oligonucleotide
  Antisense strand to SEQ ID NO: 67750
uuugcuaaacuuagccacc

SEQ ID NO: 67832 - RNA, 19 nt, Artificial Sequence
  Description of Artificial Sequence: Synthetic oligonucleotide
  Sense strand starting at position 854 of SEQ ID NO: 840
uugauugcggcgucuugua

SEQ ID NO: 67833 - RNA, 19 nt, Artificial Sequence
  Description of Artificial Sequence: Synthetic oligonucleotide
  Antisense strand to SEQ ID NO: 67752
uacaagacgccgcaaucaa

SEQ ID NO: 67834 - RNA, 19 nt, Artificial Sequence
  Description of Artificial Sequence: Synthetic oligonucleotide
  Sense strand starting at position 899 of SEQ ID NO: 840
ggccuaagugaacaugagu

SEQ ID NO: 67835 - RNA, 19 nt, Artificial Sequence
  Description of Artificial Sequence: Synthetic oligonucleotide
  Antisense strand to SEQ ID NO: 67754
acucauguucacuuaggcc

SEQ ID NO: 67836 - RNA, 19 nt, Artificial Sequence
  Description of Artificial Sequence: Synthetic oligonucleotide
  Sense strand starting at position 904 of SEQ ID NO: 840
aagugaacaugagugaagu

SEQ ID NO: 67837 - RNA, 19 nt, Artificial Sequence
  Description of Artificial Sequence: Synthetic oligonucleotide
  Antisense strand to SEQ ID NO: 67756
acuucacucauguucacuu

SEQ ID NO: 67838 - RNA, 19 nt, Artificial Sequence
  Description of Artificial Sequence: Synthetic oligonucleotide
  Sense strand starting at position 905 of SEQ ID NO: 840
agugaacaugagugaagua

SEQ ID NO: 67839 - RNA, 19 nt, Artificial Sequence
  Description of Artificial Sequence: Synthetic oligonucleotide
  Antisense strand to SEQ ID NO: 67758
uacuucacucauguucacu

SEQ ID NO: 67840 - RNA, 19 nt, Artificial Sequence
  Description of Artificial Sequence: Synthetic oligonucleotide
  Sense strand starting at position 906 of SEQ ID NO: 840
gugaacaugagugaaguau

SEQ ID NO: 67841 - RNA, 19 nt, Artificial Sequence
  Description of Artificial Sequence: Synthetic oligonucleotide
  Antisense strand to SEQ ID NO: 67760
auacuucacucauguucac

SEQ ID NO: 67842 - RNA, 19 nt, Artificial Sequence
  Description of Artificial Sequence: Synthetic oligonucleotide
  Sense strand starting at position 1469 of SEQ ID NO: 840
guguaaacauccuuuagag

SEQ ID NO: 67843 - RNA, 19 nt, Artificial Sequence
  Description of Artificial Sequence: Synthetic oligonucleotide
  Antisense strand to SEQ ID NO: 67762
cucuaaaggauguuuacac

SEQ ID NO: 67844 - RNA, 19 nt, Artificial Sequence
  Description of Artificial Sequence: Synthetic oligonucleotide
  Sense strand starting at position 1752 of SEQ ID NO: 840
gcaauuggucgagacccaa

SEQ ID NO: 67845 - RNA, 19 nt, Artificial Sequence
  Description of Artificial Sequence: Synthetic oligonucleotide
  Antisense strand to SEQ ID NO: 67764
uugggucucgaccaauugc

SEQ ID NO: 67846 - RNA, 19 nt, Artificial Sequence
  Description of Artificial Sequence: Synthetic oligonucleotide
  Sense strand starting at position 1826 of SEQ ID NO: 840
guugaagguuuacuccaaa

SEQ ID NO: 67847 - RNA, 19 nt, Artificial Sequence
  Description of Artificial Sequence: Synthetic oligonucleotide
  Antisense strand to SEQ ID NO: 67766
uuuggaguaaaccuucaac

SEQ ID NO: 67848 - RNA, 19 nt, Artificial Sequence
  Description of Artificial Sequence: Synthetic oligonucleotide
  Sense strand starting at position 1925 of SEQ ID NO: 840
ucaccauggcuuuggaaau

SEQ ID NO: 67849 - RNA, 19 nt, Artificial Sequence
  Description of Artificial Sequence: Synthetic oligonucleotide
  Antisense strand to SEQ ID NO: 67768
auuuccaaagccaugguga

SEQ ID NO: 67850 - RNA, 19 nt, Artificial Sequence
  Description of Artificial Sequence: Synthetic oligonucleotide
  Sense strand starting at position 1951 of SEQ ID NO: 840
ugcuguugacaggauuauu

SEQ ID NO: 67851 - RNA, 19 nt, Artificial Sequence
  Description of Artificial Sequence: Synthetic oligonucleotide
  Antisense strand to SEQ ID NO: 67770
aauaauccugucaacagca

SEQ ID NO: 67852 - RNA, 19 nt, Artificial Sequence
  Description of Artificial Sequence: Synthetic oligonucleotide
  Sense strand starting at position 1995 of SEQ ID NO: 840
agccuuugugcgucacuau

SEQ ID NO: 67853 - RNA, 19 nt, Artificial Sequence
  Description of Artificial Sequence: Synthetic oligonucleotide
  Antisense strand to SEQ ID NO: 67772
auagugacgcacaaaggcu

SEQ ID NO: 67854 - RNA, 19 nt, Artificial Sequence
  Description of Artificial Sequence: Synthetic oligonucleotide
  Sense strand starting at position 1998 of SEQ ID NO: 840
cuuugugcgucacuauuua

SEQ ID NO: 67855 - RNA, 19 nt, Artificial Sequence
  Description of Artificial Sequence: Synthetic oligonucleotide
  Antisense strand to SEQ ID NO: 67774
uaaauagugacgcacaaag

SEQ ID NO: 67856 - RNA, 19 nt, Artificial Sequence
  Description of Artificial Sequence: Synthetic oligonucleotide
  Sense strand starting at position 2002 of SEQ ID NO: 840
gugcgucacuauuuaaggu

SEQ ID NO: 67857 - RNA, 19 nt, Artificial Sequence
  Description of Artificial Sequence: Synthetic oligonucleotide
  Antisense strand to SEQ ID NO: 67776
accuuaaauagugacgcac

SEQ ID NO: 67858 - RNA, 19 nt, Artificial Sequence
  Description of Artificial Sequence: Synthetic oligonucleotide
  Sense strand starting at position 2216 of SEQ ID NO: 840
ucaaaugggcuauguuuga

SEQ ID NO: 67859 - RNA, 19 nt, Artificial Sequence
  Description of Artificial Sequence: Synthetic oligonucleotide
  Antisense strand to SEQ ID NO: 67778
ucaaacauagcccauuuga

SEQ ID NO: 67860 - RNA, 19 nt, Artificial Sequence
  Description of Artificial Sequence: Synthetic oligonucleotide
  Sense strand starting at position 2249 of SEQ ID NO: 840
gauggaaguuaguugcaaa

SEQ ID NO: 67861 - RNA, 19 nt, Artificial Sequence
  Description of Artificial Sequence: Synthetic oligonucleotide
  Antisense strand to SEQ ID NO: 67780
uuugcaacuaacuuccauc

SEQ ID NO: 67862 - RNA, 19 nt, Artificial Sequence
  Description of Artificial Sequence: Synthetic oligonucleotide
  Sense strand starting at position 2360 of SEQ ID NO: 840
cuguaauguggccauuaca

SEQ ID NO: 67863 - RNA, 19 nt, Artificial Sequence
  Description of Artificial Sequence: Synthetic oligonucleotide
  Antisense strand to SEQ ID NO: 67782
uguaauggccacauuacag

SEQ ID NO: 67864 - RNA, 19 nt, Artificial Sequence
  Description of Artificial Sequence: Synthetic oligonucleotide
  Sense strand starting at position 2509 of SEQ ID NO: 840
ccuccaauauuggugaaac

SEQ ID NO: 67865 - RNA, 19 nt, Artificial Sequence
  Description of Artificial Sequence: Synthetic oligonucleotide
  Antisense strand to SEQ ID NO: 67784
guuucaccaauauuggagg

SEQ ID NO: 67866 - RNA, 19 nt, Artificial Sequence
  Description of Artificial Sequence: Synthetic oligonucleotide
  Sense strand starting at position 2744 of SEQ ID NO: 840
guuaucuaucuauaguguu

SEQ ID NO: 67867 - RNA, 19 nt, Artificial Sequence
  Description of Artificial Sequence: Synthetic oligonucleotide
  Antisense strand to SEQ ID NO: 67786
aacacuauagauagauaac

SEQ ID NO: 67868 - RNA, 19 nt, Artificial Sequence
  Description of Artificial Sequence: Synthetic oligonucleotide
  Sense strand starting at position 2876 of SEQ ID NO: 840
aggugaaccgaucauguua

SEQ ID NO: 67869 - RNA, 19 nt, Artificial Sequence
  Description of Artificial Sequence: Synthetic oligonucleotide
  Antisense strand to SEQ ID NO: 67788
uaacaugaucgguucaccu

SEQ ID NO: 67870 - RNA, 19 nt, Artificial Sequence
  Description of Artificial Sequence: Synthetic oligonucleotide
  Sense strand starting at position 3102 of SEQ ID NO: 840
aguugugaugacugcaaua

SEQ ID NO: 67871 - RNA, 19 nt, Artificial Sequence
  Description of Artificial Sequence: Synthetic oligonucleotide
  Antisense strand to SEQ ID NO: 67790
uauugcagucaucacaacu

SEQ ID NO: 67872 - RNA, 19 nt, Artificial Sequence
  Description of Artificial Sequence: Synthetic oligonucleotide
  Sense strand starting at position 3129 of SEQ ID NO: 840
agaaauaugucagcagaca

SEQ ID NO: 67873 - RNA, 19 nt, Artificial Sequence
  Description of Artificial Sequence: Synthetic oligonucleotide
  Antisense strand to SEQ ID NO: 67792
ugucugcugacauauuucu

SEQ ID NO: 67874 - RNA, 19 nt, Artificial Sequence
  Description of Artificial Sequence: Synthetic oligonucleotide
  Sense strand starting at position 3218 of SEQ ID NO: 840
ucaauuaugcgagauaggu

SEQ ID NO: 67875 - RNA, 19 nt, Artificial Sequence
  Description of Artificial Sequence: Synthetic oligonucleotide
  Antisense strand to SEQ ID NO: 67794
accuaucucgcauaauuga

SEQ ID NO: 67876 - RNA, 19 nt, Artificial Sequence
  Description of Artificial Sequence: Synthetic oligonucleotide
  Sense strand starting at position 3233 of SEQ ID NO: 840
agguaaguucuagagagcu

SEQ ID NO: 67877 - RNA, 19 nt, Artificial Sequence
  Description of Artificial Sequence: Synthetic oligonucleotide
  Antisense strand to SEQ ID NO: 67796
agcucucuagaacuuaccu

SEQ ID NO: 67878 - RNA, 19 nt, Artificial Sequence
  Description of Artificial Sequence: Synthetic oligonucleotide
  Sense strand starting at position 3239 of SEQ ID NO: 840
guucuagagagcuaaagua

SEQ ID NO: 67879 - RNA, 19 nt, Artificial Sequence
  Description of Artificial Sequence: Synthetic oligonucleotide
  Antisense strand to SEQ ID NO: 67798
uacuuuagcucucuagaac

SEQ ID NO: 67880 - RNA, 19 nt, Artificial Sequence
  Description of Artificial Sequence: Synthetic oligonucleotide
  Sense strand starting at position 3263 of SEQ ID NO: 840
augugacuauaguuaggaa

SEQ ID NO: 67881 - RNA, 19 nt, Artificial Sequence
  Description of Artificial Sequence: Synthetic oligonucleotide
  Antisense strand to SEQ ID NO: 67800
uuccuaacuauagucacau

SEQ ID NO: 67882 - RNA, 19 nt, Artificial Sequence
  Description of Artificial Sequence: Synthetic oligonucleotide
  Sense strand starting at position 3704 of SEQ ID NO: 840
aaaggugguggcuauguua

SEQ ID NO: 67883 - RNA, 19 nt, Artificial Sequence
  Description of Artificial Sequence: Synthetic oligonucleotide
  Antisense strand to SEQ ID NO: 67802
uaacauagccaccaccuuu

SEQ ID NO: 67884 - RNA, 19 nt, Artificial Sequence
  Description of Artificial Sequence: Synthetic oligonucleotide
  Sense strand starting at position 3758 of SEQ ID NO: 840
caggcuuuggaaugaaugu

SEQ ID NO: 67885 - RNA, 19 nt, Artificial Sequence
  Description of Artificial Sequence: Synthetic oligonucleotide
  Antisense strand to SEQ ID NO: 67804
acauucauuccaaagccug

SEQ ID NO: 67886 - RNA, 19 nt, Artificial Sequence
  Description of Artificial Sequence: Synthetic oligonucleotide
  Sense strand starting at position 3759 of SEQ ID NO: 840
aggcuuuggaaugaauguu

SEQ ID NO: 67887 - RNA, 19 nt, Artificial Sequence
  Description of Artificial Sequence: Synthetic oligonucleotide
  Antisense strand to SEQ ID NO: 67806
aacauucauuccaaagccu

SEQ ID NO: 67888 - RNA, 19 nt, Artificial Sequence
  Description of Artificial Sequence: Synthetic oligonucleotide
  Sense strand starting at position 3785 of SEQ ID NO: 840
ucugacacuuauguugaaa

SEQ ID NO: 67889 - RNA, 19 nt, Artificial Sequence
  Description of Artificial Sequence: Synthetic oligonucleotide
  Antisense strand to SEQ ID NO: 67808
uuucaacauaagugucaga

SEQ ID NO: 67890 - RNA, 19 nt, Artificial Sequence
  Description of Artificial Sequence: Synthetic oligonucleotide
  Sense strand starting at position 3838 of SEQ ID NO: 840
uugagagaugauugggcau

SEQ ID NO: 67891 - RNA, 19 nt, Artificial Sequence
  Description of Artificial Sequence: Synthetic oligonucleotide
  Antisense strand to SEQ ID NO: 67810
augcccaaucaucucucaa

SEQ ID NO: 67892 - RNA, 19 nt, Artificial Sequence
  Description of Artificial Sequence: Synthetic oligonucleotide
  Sense strand starting at position 3851 of SEQ ID NO: 840
gggcaugagagcuggaaca

SEQ ID NO: 67893 - RNA, 19 nt, Artificial Sequence
  Description of Artificial Sequence: Synthetic oligonucleotide
  Antisense strand to SEQ ID NO: 67812
uguuccagcucucaugccc

SEQ ID NO: 67894 - RNA, 19 nt, Artificial Sequence
  Description of Artificial Sequence: Synthetic oligonucleotide
  Sense strand starting at position 3853 of SEQ ID NO: 840
gcaugagagcuggaacaug

SEQ ID NO: 67895 - RNA, 19 nt, Artificial Sequence
  Description of Artificial Sequence: Synthetic oligonucleotide
  Antisense strand to SEQ ID NO: 67814
cauguuccagcucucaugc

SEQ ID NO: 67896 - RNA, 19 nt, Artificial Sequence
  Description of Artificial Sequence: Synthetic oligonucleotide
  Sense strand starting at position 3885 of SEQ ID NO: 840
augggugaucaugggagua

SEQ ID NO: 67897 - RNA, 19 nt, Artificial Sequence
  Description of Artificial Sequence: Synthetic oligonucleotide
  Antisense strand to SEQ ID NO: 67816
uacucccaugaucacccau

SEQ ID NO: 67898 - RNA, 19 nt, Artificial Sequence
  Description of Artificial Sequence: Synthetic oligonucleotide
  Sense strand starting at position 45 of SEQ ID NO: 841
acuuuaucauaggcaagua

SEQ ID NO: 67899 - RNA, 19 nt, Artificial Sequence
  Description of Artificial Sequence: Synthetic oligonucleotide
  Antisense strand to SEQ ID NO: 67818
uacuugccuaugauaaagu

SEQ ID NO: 67900 - RNA, 19 nt, Artificial Sequence
  Description of Artificial Sequence: Synthetic oligonucleotide
  Sense strand starting at position 305 of SEQ ID NO: 841
cuaauaguauuagcaagga

SEQ ID NO: 67901 - RNA, 19 nt, Artificial Sequence
  Description of Artificial Sequence: Synthetic oligonucleotide
  Antisense strand to SEQ ID NO: 67820
uccuugcuaauacuauuag

SEQ ID NO: 67902 - RNA, 19 nt, Artificial Sequence
  Description of Artificial Sequence: Synthetic oligonucleotide
  Sense strand starting at position 440 of SEQ ID NO: 841
aguugaguuccugaagccu

SEQ ID NO: 67903 - RNA, 19 nt, Artificial Sequence
  Description of Artificial Sequence: Synthetic oligonucleotide
  Antisense strand to SEQ ID NO: 67822
aggcuucaggaacucaacu

SEQ ID NO: 67904 - RNA, 19 nt, Artificial Sequence
  Description of Artificial Sequence: Synthetic oligonucleotide
  Sense strand starting at position 497 of SEQ ID NO: 841
ggaagagcauugguggaau

SEQ ID NO: 67905 - RNA, 19 nt, Artificial Sequence
  Description of Artificial Sequence: Synthetic oligonucleotide
  Antisense strand to SEQ ID NO: 67824
auuccaccaaugcucuucc

SEQ ID NO: 67906 - RNA, 19 nt, Artificial Sequence
  Description of Artificial Sequence: Synthetic oligonucleotide
  Sense strand starting at position 499 of SEQ ID NO: 841
aagagcauugguggaauaa

SEQ ID NO: 67907 - RNA, 19 nt, Artificial Sequence
  Description of Artificial Sequence: Synthetic oligonucleotide
  Antisense strand to SEQ ID NO: 67826
uuauuccaccaaugcucuu

SEQ ID NO: 67908 - RNA, 19 nt, Artificial Sequence
  Description of Artificial Sequence: Synthetic oligonucleotide
  Sense strand starting at position 522 of SEQ ID NO: 841
gcaagcuguauuugguuua

SEQ ID NO: 67909 - RNA, 19 nt, Artificial Sequence
  Description of Artificial Sequence: Synthetic oligonucleotide
  Antisense strand to SEQ ID NO: 67828
uaaaccaaauacagcuugc

SEQ ID NO: 67910 - RNA, 19 nt, Artificial Sequence
  Description of Artificial Sequence: Synthetic oligonucleotide
  Sense strand starting at position 525 of SEQ ID NO: 841
agcuguauuugguuuauca

SEQ ID NO: 67911 - RNA, 19 nt, Artificial Sequence
  Description of Artificial Sequence: Synthetic oligonucleotide
  Antisense strand to SEQ ID NO: 67830
ugauaaaccaaauacagcu

SEQ ID NO: 67912 - RNA, 19 nt, Artificial Sequence
  Description of Artificial Sequence: Synthetic oligonucleotide
  Sense strand starting at position 742 of SEQ ID NO: 841
ucuaguugaccuugguaaa

SEQ ID NO: 67913 - RNA, 19 nt, Artificial Sequence
  Description of Artificial Sequence: Synthetic oligonucleotide
  Antisense strand to SEQ ID NO: 67832
uuuaccaaggucaacuaga

SEQ ID NO: 67914 - RNA, 19 nt, Artificial Sequence
  Description of Artificial Sequence: Synthetic oligonucleotide
  Sense strand starting at position 762 of SEQ ID NO: 841
acugucgcgaacuaugaau

SEQ ID NO: 67915 - RNA, 19 nt, Artificial Sequence
  Description of Artificial Sequence: Synthetic oligonucleotide
  Antisense strand to SEQ ID NO: 67834
auucauaguucgcgacagu

SEQ ID NO: 67916 - RNA, 19 nt, Artificial Sequence
  Description of Artificial Sequence: Synthetic oligonucleotide
  Sense strand starting at position 867 of SEQ ID NO: 841
gccuacugugugcuaagua

SEQ ID NO: 67917 - RNA, 19 nt, Artificial Sequence
  Description of Artificial Sequence: Synthetic oligonucleotide
  Antisense strand to SEQ ID NO: 67836
uacuuagcacacaguaggc

SEQ ID NO: 67918 - RNA, 19 nt, Artificial Sequence
  Description of Artificial Sequence: Synthetic oligonucleotide
  Sense strand starting at position 886 of SEQ ID NO: 841
ggcaaagugcuauauugac

SEQ ID NO: 67919 - RNA, 19 nt, Artificial Sequence
  Description of Artificial Sequence: Synthetic oligonucleotide
  Antisense strand to SEQ ID NO: 67838
gucaauauagcacuuugcc

SEQ ID NO: 67920 - RNA, 19 nt, Artificial Sequence
  Description of Artificial Sequence: Synthetic oligonucleotide
  Sense strand starting at position 994 of SEQ ID NO: 841
uagcuuggucuggaaaguu

SEQ ID NO: 67921 - RNA, 19 nt, Artificial Sequence
  Description of Artificial Sequence: Synthetic oligonucleotide
  Antisense strand to SEQ ID NO: 67840
aacuuuccagaccaagcua

SEQ ID NO: 67922 - RNA, 19 nt, Artificial Sequence
  Description of Artificial Sequence: Synthetic oligonucleotide
  Sense strand starting at position 1269 of SEQ ID NO: 841
ucagucagccucuauccua

SEQ ID NO: 67923 - RNA, 19 nt, Artificial Sequence
  Description of Artificial Sequence: Synthetic oligonucleotide
  Antisense strand to SEQ ID NO: 67842
uaggauagaggcugacuga

SEQ ID NO: 67924 - RNA, 19 nt, Artificial Sequence
  Description of Artificial Sequence: Synthetic oligonucleotide
  Sense strand starting at position 1337 of SEQ ID NO: 841
gguggcuaaguuuagcaaa

SEQ ID NO: 67925 - RNA, 19 nt, Artificial Sequence
  Description of Artificial Sequence: Synthetic oligonucleotide
  Antisense strand to SEQ ID NO: 67844
uuugcuaaacuuagccacc

SEQ ID NO: 67926 - RNA, 19 nt, Artificial Sequence
  Description of Artificial Sequence: Synthetic oligonucleotide
  Sense strand starting at position 1490 of SEQ ID NO: 841
uugauugcggcgucuugua

SEQ ID NO: 67927 - RNA, 19 nt, Artificial Sequence
  Description of Artificial Sequence: Synthetic oligonucleotide
  Antisense strand to SEQ ID NO: 67846
uacaagacgccgcaaucaa

SEQ ID NO: 67928 - RNA, 19 nt, Artificial Sequence
  Description of Artificial Sequence: Synthetic oligonucleotide
  Sense strand starting at position 1535 of SEQ ID NO: 841
ggccuaagugaacaugagu

SEQ ID NO: 67929 - RNA, 19 nt, Artificial Sequence
  Description of Artificial Sequence: Synthetic oligonucleotide
  Antisense strand to SEQ ID NO: 67848
acucauguucacuuaggcc

SEQ ID NO: 67930 - RNA, 19 nt, Artificial Sequence
  Description of Artificial Sequence: Synthetic oligonucleotide
  Sense strand starting at position 1540 of SEQ ID NO: 841
aagugaacaugagugaagu

SEQ ID NO: 67931 - RNA, 19 nt, Artificial Sequence
  Description of Artificial Sequence: Synthetic oligonucleotide
  Antisense strand to SEQ ID NO: 67850
acuucacucauguucacuu

SEQ ID NO: 67932 - RNA, 19 nt, Artificial Sequence
  Description of Artificial Sequence: Synthetic oligonucleotide
  Sense strand starting at position 1541 of SEQ ID NO: 841
agugaacaugagugaagua

SEQ ID NO: 67933 - RNA, 19 nt, Artificial Sequence
  Description of Artificial Sequence: Synthetic oligonucleotide
  Antisense strand to SEQ ID NO: 67852
uacuucacucauguucacu

SEQ ID NO: 67934 - RNA, 19 nt, Artificial Sequence
  Description of Artificial Sequence: Synthetic oligonucleotide
  Sense strand starting at position 1542 of SEQ ID NO: 841
gugaacaugagugaaguau

SEQ ID NO: 67935 - RNA, 19 nt, Artificial Sequence
  Description of Artificial Sequence: Synthetic oligonucleotide
  Antisense strand to SEQ ID NO: 67854
auacuucacucauguucac

SEQ ID NO: 67936 - RNA, 19 nt, Artificial Sequence
  Description of Artificial Sequence: Synthetic oligonucleotide
  Sense strand starting at position 2105 of SEQ ID NO: 841
guguaaacauccuuuagag

SEQ ID NO: 67937 - RNA, 19 nt, Artificial Sequence
  Description of Artificial Sequence: Synthetic oligonucleotide
  Antisense strand to SEQ ID NO: 67856
cucuaaaggauguuuacac

SEQ ID NO: 67938 - RNA, 19 nt, Artificial Sequence
  Description of Artificial Sequence: Synthetic oligonucleotide
  Sense strand starting at position 2388 of SEQ ID NO: 841
gcaauuggucgagacccaa

SEQ ID NO: 67939 - RNA, 19 nt, Artificial Sequence
  Description of Artificial Sequence: Synthetic oligonucleotide
  Antisense strand to SEQ ID NO: 67858
uugggucucgaccaauugc

SEQ ID NO: 67940 - RNA, 19 nt, Artificial Sequence
  Description of Artificial Sequence: Synthetic oligonucleotide
  Sense strand starting at position 2462 of SEQ ID NO: 841
guugaagguuuacuccaaa

SEQ ID NO: 67941 - RNA, 19 nt, Artificial Sequence
  Description of Artificial Sequence: Synthetic oligonucleotide
  Antisense strand to SEQ ID NO: 67860
uuuggaguaaaccuucaac

SEQ ID NO: 67942 - RNA, 19 nt, Artificial Sequence
  Description of Artificial Sequence: Synthetic oligonucleotide
  Sense strand starting at position 2561 of SEQ ID NO: 841
ucaccauggcuuuggaaau

SEQ ID NO: 67943 - RNA, 19 nt, Artificial Sequence
  Description of Artificial Sequence: Synthetic oligonucleotide
  Antisense strand to SEQ ID NO: 67862
auuuccaaagccaugguga

SEQ ID NO: 67944 - RNA, 19 nt, Artificial Sequence
  Description of Artificial Sequence: Synthetic oligonucleotide
  Sense strand starting at position 2587 of SEQ ID NO: 841
ugcuguugacaggauuauu

SEQ ID NO: 67945 - RNA, 19 nt, Artificial Sequence
  Description of Artificial Sequence: Synthetic oligonucleotide
  Antisense strand to SEQ ID NO: 67864
aauaauccugucaacagca

SEQ ID NO: 67946 - RNA, 19 nt, Artificial Sequence
  Description of Artificial Sequence: Synthetic oligonucleotide
  Sense strand starting at position 2610 of SEQ ID NO: 841
ccacucaguggugguaaua

SEQ ID NO: 67947 - RNA, 19 nt, Artificial Sequence
  Description of Artificial Sequence: Synthetic oligonucleotide
  Antisense strand to SEQ ID NO: 67866
uauuaccaccacugagugg

SEQ ID NO: 67948 - RNA, 19 nt, Artificial Sequence
  Description of Artificial Sequence: Synthetic oligonucleotide
  Sense strand starting at position 2631 of SEQ ID NO: 841
agccuuugugcgucacuau

SEQ ID NO: 67949 - RNA, 19 nt, Artificial Sequence
  Description of Artificial Sequence: Synthetic oligonucleotide
  Antisense strand to SEQ ID NO: 67868
auagugacgcacaaaggcu

SEQ ID NO: 67950 - RNA, 19 nt, Artificial Sequence
  Description of Artificial Sequence: Synthetic oligonucleotide
  Sense strand starting at position 2634 of SEQ ID NO: 841
cuuugugcgucacuauuua

SEQ ID NO: 67951 - RNA, 19 nt, Artificial Sequence
  Description of Artificial Sequence: Synthetic oligonucleotide
  Antisense strand to SEQ ID NO: 67870
uaaauagugacgcacaaag

SEQ ID NO: 67952 - RNA, 19 nt, Artificial Sequence
  Description of Artificial Sequence: Synthetic oligonucleotide
  Sense strand starting at position 2638 of SEQ ID NO: 841
gugcgucacuauuuaaggu

SEQ ID NO: 67953 - RNA, 19 nt, Artificial Sequence
  Description of Artificial Sequence: Synthetic oligonucleotide
  Antisense strand to SEQ ID NO: 67872
accuuaaauagugacgcac

SEQ ID NO: 67954 - RNA, 19 nt, Artificial Sequence
  Description of Artificial Sequence: Synthetic oligonucleotide
  Sense strand starting at position 2852 of SEQ ID NO: 841
ucaaaugggcuauguuuga

SEQ ID NO: 67955 - RNA, 19 nt, Artificial Sequence
  Description of Artificial Sequence: Synthetic oligonucleotide
  Antisense strand to SEQ ID NO: 67874
ucaaacauagcccauuuga

SEQ ID NO: 67956 - RNA, 19 nt, Artificial Sequence
  Description of Artificial Sequence: Synthetic oligonucleotide
  Sense strand starting at position 2885 of SEQ ID NO: 841
gauggaaguuaguugcaaa

SEQ ID NO: 67957 - RNA, 19 nt, Artificial Sequence
  Description of Artificial Sequence: Synthetic oligonucleotide
  Antisense strand to SEQ ID NO: 67876
uuugcaacuaacuuccauc

SEQ ID NO: 67958 - RNA, 19 nt, Artificial Sequence
  Description of Artificial Sequence: Synthetic oligonucleotide
  Sense strand starting at position 2996 of SEQ ID NO: 841
cuguaauguggccauuaca

SEQ ID NO: 67959 - RNA, 19 nt, Artificial Sequence
  Description of Artificial Sequence: Synthetic oligonucleotide
  Antisense strand to SEQ ID NO: 67878
uguaauggccacauuacag

SEQ ID NO: 67960 - RNA, 19 nt, Artificial Sequence
  Description of Artificial Sequence: Synthetic oligonucleotide
  Sense strand starting at position 3145 of SEQ ID NO: 841
ccuccaauauuggugaaac

SEQ ID NO: 67961 - RNA, 19 nt, Artificial Sequence
  Description of Artificial Sequence: Synthetic oligonucleotide
  Antisense strand to SEQ ID NO: 67880
guuucaccaauauuggagg

SEQ ID NO: 67962 - RNA, 19 nt, Artificial Sequence
  Description of Artificial Sequence: Synthetic oligonucleotide
  Sense strand starting at position 3380 of SEQ ID NO: 841
guuaucuaucuauaguguu

SEQ ID NO: 67963 - RNA, 19 nt, Artificial Sequence
  Description of Artificial Sequence: Synthetic oligonucleotide
  Antisense strand to SEQ ID NO: 67882
aacacuauagauagauaac

SEQ ID NO: 67964 - RNA, 19 nt, Artificial Sequence
  Description of Artificial Sequence: Synthetic oligonucleotide
  Sense strand starting at position 3512 of SEQ ID NO: 841
aggugaaccgaucauguua

SEQ ID NO: 67965 - RNA, 19 nt, Artificial Sequence
  Description of Artificial Sequence: Synthetic oligonucleotide
  Antisense strand to SEQ ID NO: 67884
uaacaugaucgguucaccu

SEQ ID NO: 67966 - RNA, 19 nt, Artificial Sequence
  Description of Artificial Sequence: Synthetic oligonucleotide
  Sense strand starting at position 3738 of SEQ ID NO: 841
aguugugaugacugcaaua

SEQ ID NO: 67967 - RNA, 19 nt, Artificial Sequence
  Description of Artificial Sequence: Synthetic oligonucleotide
  Antisense strand to SEQ ID NO: 67886
uauugcagucaucacaacu

SEQ ID NO: 67968 - RNA, 19 nt, Artificial Sequence
  Description of Artificial Sequence: Synthetic oligonucleotide
  Sense strand starting at position 3765 of SEQ ID NO: 841
agaaauaugucagcagaca

SEQ ID NO: 67969 - RNA, 19 nt, Artificial Sequence
  Description of Artificial Sequence: Synthetic oligonucleotide
  Antisense strand to SEQ ID NO: 67888
ugucugcugacauauuucu

SEQ ID NO: 67970 - RNA, 19 nt, Artificial Sequence
  Description of Artificial Sequence: Synthetic oligonucleotide
  Sense strand starting at position 3854 of SEQ ID NO: 841
ucaauuaugcgagauaggu

SEQ ID NO: 67971 - RNA, 19 nt, Artificial Sequence
  Description of Artificial Sequence: Synthetic oligonucleotide
  Antisense strand to SEQ ID NO: 67890
accuaucucgcauaauuga

SEQ ID NO: 67972 - RNA, 19 nt, Artificial Sequence
  Description of Artificial Sequence: Synthetic oligonucleotide
  Sense strand starting at position 3869 of SEQ ID NO: 841
agguaaguucuagagagcu

SEQ ID NO: 67973 - RNA, 19 nt, Artificial Sequence
  Description of Artificial Sequence: Synthetic oligonucleotide
  Antisense strand to SEQ ID NO: 67892
agcucucuagaacuuaccu

SEQ ID NO: 67974 - RNA, 19 nt, Artificial Sequence
  Description of Artificial Sequence: Synthetic oligonucleotide
  Sense strand starting at position 3875 of SEQ ID NO: 841
guucuagagagcuaaagua

SEQ ID NO: 67975 - RNA, 19 nt, Artificial Sequence
  Description of Artificial Sequence: Synthetic oligonucleotide
  Antisense strand to SEQ ID NO: 67894
uacuuuagcucucuagaac

SEQ ID NO: 67976 - RNA, 19 nt, Artificial Sequence
  Description of Artificial Sequence: Synthetic oligonucleotide
  Sense strand starting at position 3899 of SEQ ID NO: 841
augugacuauaguuaggaa

SEQ ID NO: 67977 - RNA, 19 nt, Artificial Sequence
  Description of Artificial Sequence: Synthetic oligonucleotide
  Antisense strand to SEQ ID NO: 67896
uuccuaacuauagucacau

SEQ ID NO: 67978 - RNA, 19 nt, Artificial Sequence
  Description of Artificial Sequence: Synthetic oligonucleotide
  Sense strand starting at position 2 of SEQ ID NO: 842
gauagagacucugucggaa

SEQ ID NO: 67979 - RNA, 19 nt, Artificial Sequence
  Description of Artificial Sequence: Synthetic oligonucleotide
  Antisense strand to SEQ ID NO: 67898
uuccgacagagucucuauc

SEQ ID NO: 67980 - RNA, 19 nt, Artificial Sequence
  Description of Artificial Sequence: Synthetic oligonucleotide
  Sense strand starting at position 57 of SEQ ID NO: 842
uguccucuccaacauguua

SEQ ID NO: 67981 - RNA, 19 nt, Artificial Sequence
  Description of Artificial Sequence: Synthetic oligonucleotide
  Antisense strand to SEQ ID NO: 67900
uaacauguuggagaggaca

SEQ ID NO: 67982 - RNA, 19 nt, Artificial Sequence
  Description of Artificial Sequence: Synthetic oligonucleotide
  Sense strand starting at position 488 of SEQ ID NO: 842
ggucuuaaucuugacucga

SEQ ID NO: 67983 - RNA, 19 nt, Artificial Sequence
  Description of Artificial Sequence: Synthetic oligonucleotide
  Antisense strand to SEQ ID NO: 67902
ucgagucaagauuaagacc

SEQ ID NO: 67984 - RNA, 19 nt, Artificial Sequence
  Description of Artificial Sequence: Synthetic oligonucleotide
  Sense strand starting at position 490 of SEQ ID NO: 842
ucuuaaucuugacucgaga

SEQ ID NO: 67985 - RNA, 19 nt, Artificial Sequence
  Description of Artificial Sequence: Synthetic oligonucleotide
  Antisense strand to SEQ ID NO: 67904
ucucgagucaagauuaaga

SEQ ID NO: 67986 - RNA, 19 nt, Artificial Sequence
  Description of Artificial Sequence: Synthetic oligonucleotide
  Sense strand starting at position 572 of SEQ ID NO: 842
gucugacuucucguugucu

SEQ ID NO: 67987 - RNA, 19 nt, Artificial Sequence
  Description of Artificial Sequence: Synthetic oligonucleotide
  Antisense strand to SEQ ID NO: 67906
agacaacgagaagucagac

SEQ ID NO: 67988 - RNA, 19 nt, Artificial Sequence
  Description of Artificial Sequence: Synthetic oligonucleotide
  Sense strand starting at position 700 of SEQ ID NO: 842
acugaaaugucccuaaagu

SEQ ID NO: 67989 - RNA, 19 nt, Artificial Sequence
  Description of Artificial Sequence: Synthetic oligonucleotide
  Antisense strand to SEQ ID NO: 67908
acuuuagggacauuucagu

SEQ ID NO: 67990 - RNA, 19 nt, Artificial Sequence
  Description of Artificial Sequence: Synthetic oligonucleotide
  Sense strand starting at position 701 of SEQ ID NO: 842
cugaaaugucccuaaagug

SEQ ID NO: 67991 - RNA, 19 nt, Artificial Sequence
  Description of Artificial Sequence: Synthetic oligonucleotide
  Antisense strand to SEQ ID NO: 67910
cacuuuagggacauuucag

SEQ ID NO: 67992 - RNA, 19 nt, Artificial Sequence
  Description of Artificial Sequence: Synthetic oligonucleotide
  Sense strand starting at position 2279 of SEQ ID NO: 842
cgugcuguuucucuaauuu

SEQ ID NO: 67993 - RNA, 19 nt, Artificial Sequence
  Description of Artificial Sequence: Synthetic oligonucleotide
  Antisense strand to SEQ ID NO: 67912
aaauuagagaaacagcacg

SEQ ID NO: 67994 - RNA, 19 nt, Artificial Sequence
  Description of Artificial Sequence: Synthetic oligonucleotide
  Sense strand starting at position 2449 of SEQ ID NO: 842
auuugaaauucugugugca

SEQ ID NO: 67995 - RNA, 19 nt, Artificial Sequence
  Description of Artificial Sequence: Synthetic oligonucleotide
  Antisense strand to SEQ ID NO: 67914
ugcacacagaauuucaaau

SEQ ID NO: 67996 - RNA, 19 nt, Artificial Sequence
  Description of Artificial Sequence: Synthetic oligonucleotide
  Sense strand starting at position 2451 of SEQ ID NO: 842
uugaaauucugugugcaaa

SEQ ID NO: 67997 - RNA, 19 nt, Artificial Sequence
  Description of Artificial Sequence: Synthetic oligonucleotide
  Antisense strand to SEQ ID NO: 67916
uuugcacacagaauuucaa

SEQ ID NO: 67998 - RNA, 19 nt, Artificial Sequence
  Description of Artificial Sequence: Synthetic oligonucleotide
  Sense strand starting at position 2453 of SEQ ID NO: 842
gaaauucugugugcaaacu

SEQ ID NO: 67999 - RNA, 19 nt, Artificial Sequence
  Description of Artificial Sequence: Synthetic oligonucleotide
  Antisense strand to SEQ ID NO: 67918
aguuugcacacagaauuuc

SEQ ID NO: 68000 - RNA, 19 nt, Artificial Sequence
  Description of Artificial Sequence: Synthetic oligonucleotide
  Sense strand starting at position 2488 of SEQ ID NO: 842
aaaggaaaucgagguguuc

SEQ ID NO: 68001 - RNA, 19 nt, Artificial Sequence
  Description of Artificial Sequence: Synthetic oligonucleotide
  Antisense strand to SEQ ID NO: 67920
gaacaccucgauuuccuuu

SEQ ID NO: 68002 - RNA, 19 nt, Artificial Sequence
  Description of Artificial Sequence: Synthetic oligonucleotide
  Sense strand starting at position 2516 of SEQ ID NO: 842
cuuugaaguccagggauug

SEQ ID NO: 68003 - RNA, 19 nt, Artificial Sequence
  Description of Artificial Sequence: Synthetic oligonucleotide
  Antisense strand to SEQ ID NO: 67922
caaucccuggacuucaaag

SEQ ID NO: 68004 - RNA, 19 nt, Artificial Sequence
  Description of Artificial Sequence: Synthetic oligonucleotide
  Sense strand starting at position 2517 of SEQ ID NO: 842
uuugaaguccagggauugu

SEQ ID NO: 68005 - RNA, 19 nt, Artificial Sequence
  Description of Artificial Sequence: Synthetic oligonucleotide
  Antisense strand to SEQ ID NO: 67924
acaaucccuggacuucaaa

SEQ ID NO: 68006 - RNA, 19 nt, Artificial Sequence
  Description of Artificial Sequence: Synthetic oligonucleotide
  Sense strand starting at position 2535 of SEQ ID NO: 842
ucaagaaauuccuuuaacg

SEQ ID NO: 68007 - RNA, 19 nt, Artificial Sequence
  Description of Artificial Sequence: Synthetic oligonucleotide
  Antisense strand to SEQ ID NO: 67926
cguuaaaggaauuucuuga

SEQ ID NO: 68008 - RNA, 19 nt, Artificial Sequence
  Description of Artificial Sequence: Synthetic oligonucleotide
  Sense strand starting at position 2585 of SEQ ID NO: 842
gcuucuuguuaaucuggaa

SEQ ID NO: 68009 - RNA, 19 nt, Artificial Sequence
  Description of Artificial Sequence: Synthetic oligonucleotide
  Antisense strand to SEQ ID NO: 67928
uuccagauuaacaagaagc

SEQ ID NO: 68010 - RNA, 19 nt, Artificial Sequence
  Description of Artificial Sequence: Synthetic oligonucleotide
  Sense strand starting at position 2653 of SEQ ID NO: 842
uguguaugugaacacaaua

SEQ ID NO: 68011 - RNA, 19 nt, Artificial Sequence
  Description of Artificial Sequence: Synthetic oligonucleotide
  Antisense strand to SEQ ID NO: 67930
uauuguguucacauacaca

SEQ ID NO: 68012 - RNA, 19 nt, Artificial Sequence
  Description of Artificial Sequence: Synthetic oligonucleotide
  Sense strand starting at position 2736 of SEQ ID NO: 842
guacuauuacucgaucauu

SEQ ID NO: 68013 - RNA, 19 nt, Artificial Sequence
  Description of Artificial Sequence: Synthetic oligonucleotide
  Antisense strand to SEQ ID NO: 67932
aaugaucgaguaauaguac

SEQ ID NO: 68014 - RNA, 19 nt, Artificial Sequence
  Description of Artificial Sequence: Synthetic oligonucleotide
  Sense strand starting at position 2777 of SEQ ID NO: 842
accugaugguguccagauu

SEQ ID NO: 68015 - RNA, 19 nt, Artificial Sequence
  Description of Artificial Sequence: Synthetic oligonucleotide
  Antisense strand to SEQ ID NO: 67934
aaucuggacaccaucaggu

SEQ ID NO: 68016 - RNA, 19 nt, Artificial Sequence
  Description of Artificial Sequence: Synthetic oligonucleotide
  Sense strand starting at position 2858 of SEQ ID NO: 842
ggaagaaguuuguucuggu

SEQ ID NO: 68017 - RNA, 19 nt, Artificial Sequence
  Description of Artificial Sequence: Synthetic oligonucleotide
  Antisense strand to SEQ ID NO: 67936
accagaacaaacuucuucc

SEQ ID NO: 68018 - RNA, 19 nt, Artificial Sequence
  Description of Artificial Sequence: Synthetic oligonucleotide
  Sense strand starting at position 2859 of SEQ ID NO: 842
gaagaaguuuguucugguu

SEQ ID NO: 68019 - RNA, 19 nt, Artificial Sequence
  Description of Artificial Sequence: Synthetic oligonucleotide
  Antisense strand to SEQ ID NO: 67938
aaccagaacaaacuucuuc

SEQ ID NO: 68020 - RNA, 19 nt, Artificial Sequence
  Description of Artificial Sequence: Synthetic oligonucleotide
  Sense strand starting at position 2959 of SEQ ID NO: 842
uuccuuuaagaguguauaa

SEQ ID NO: 68021 - RNA, 19 nt, Artificial Sequence
  Description of Artificial Sequence: Synthetic oligonucleotide
  Antisense strand to SEQ ID NO: 67940
uuauacacucuuaaaggaa

SEQ ID NO: 68022 - RNA, 19 nt, Artificial Sequence
  Description of Artificial Sequence: Synthetic oligonucleotide
  Sense strand starting at position 2961 of SEQ ID NO: 842
ccuuuaagaguguauaaca

SEQ ID NO: 68023 - RNA, 19 nt, Artificial Sequence
  Description of Artificial Sequence: Synthetic oligonucleotide
  Antisense strand to SEQ ID NO: 67942
uguuauacacucuuaaagg

SEQ ID NO: 68024 - RNA, 19 nt, Artificial Sequence
  Description of Artificial Sequence: Synthetic oligonucleotide
  Sense strand starting at position 3194 of SEQ ID NO: 842
cuuuguguuggccaaauca

SEQ ID NO: 68025 - RNA, 19 nt, Artificial Sequence
  Description of Artificial Sequence: Synthetic oligonucleotide
  Antisense strand to SEQ ID NO: 67944
ugauuuggccaacacaaag

SEQ ID NO: 68026 - RNA, 19 nt, Artificial Sequence
  Description of Artificial Sequence: Synthetic oligonucleotide
  Sense strand starting at position 3288 of SEQ ID NO: 842
ugugauagcacaugcagaa

SEQ ID NO: 68027 - RNA, 19 nt, Artificial Sequence
  Description of Artificial Sequence: Synthetic oligonucleotide
  Antisense strand to SEQ ID NO: 67946
uucugcaugugcuaucaca

SEQ ID NO: 68028 - RNA, 19 nt, Artificial Sequence
  Description of Artificial Sequence: Synthetic oligonucleotide
  Sense strand starting at position 3301 of SEQ ID NO: 842
gcagaagagauugaguagu

SEQ ID NO: 68029 - RNA, 19 nt, Artificial Sequence
  Description of Artificial Sequence: Synthetic oligonucleotide
  Antisense strand to SEQ ID NO: 67948
acuacucaaucucuucugc

SEQ ID NO: 68030 - RNA, 19 nt, Artificial Sequence
  Description of Artificial Sequence: Synthetic oligonucleotide
  Sense strand starting at position 3328 of SEQ ID NO: 842
caucguaaauguuuagaaa

SEQ ID NO: 68031 - RNA, 19 nt, Artificial Sequence
  Description of Artificial Sequence: Synthetic oligonucleotide
  Antisense strand to SEQ ID NO: 67950
uuucuaaacauuuacgaug

SEQ ID NO: 68032 - RNA, 19 nt, Artificial Sequence
  Description of Artificial Sequence: Synthetic oligonucleotide
  Sense strand starting at position 3368 of SEQ ID NO: 842
ggccaaguucuauaaucug

SEQ ID NO: 68033 - RNA, 19 nt, Artificial Sequence
  Description of Artificial Sequence: Synthetic oligonucleotide
  Antisense strand to SEQ ID NO: 67952
cagauuauagaacuuggcc

SEQ ID NO: 68034 - RNA, 19 nt, Artificial Sequence
  Description of Artificial Sequence: Synthetic oligonucleotide
  Sense strand starting at position 3389 of SEQ ID NO: 842
gugauuggauucuuucuuu

SEQ ID NO: 68035 - RNA, 19 nt, Artificial Sequence
  Description of Artificial Sequence: Synthetic oligonucleotide
  Antisense strand to SEQ ID NO: 67954
aaagaaagaauccaaucac

SEQ ID NO: 68036 - RNA, 19 nt, Artificial Sequence
  Description of Artificial Sequence: Synthetic oligonucleotide
  Sense strand starting at position 3444 of SEQ ID NO: 842
aguguaaugcuuuaccauu

SEQ ID NO: 68037 - RNA, 19 nt, Artificial Sequence
  Description of Artificial Sequence: Synthetic oligonucleotide
  Antisense strand to SEQ ID NO: 67956
aaugguaaagcauuacacu

SEQ ID NO: 68038 - RNA, 19 nt, Artificial Sequence
  Description of Artificial Sequence: Synthetic oligonucleotide
  Sense strand starting at position 3476 of SEQ ID NO: 842
uggacuuaaccuugguaac

SEQ ID NO: 68039 - RNA, 19 nt, Artificial Sequence
  Description of Artificial Sequence: Synthetic oligonucleotide
  Antisense strand to SEQ ID NO: 67958
guuaccaagguuaagucca

SEQ ID NO: 68040 - RNA, 19 nt, Artificial Sequence
  Description of Artificial Sequence: Synthetic oligonucleotide
  Sense strand starting at position 3477 of SEQ ID NO: 842
ggacuuaaccuugguaaca

SEQ ID NO: 68041 - RNA, 19 nt, Artificial Sequence
  Description of Artificial Sequence: Synthetic oligonucleotide
  Antisense strand to SEQ ID NO: 67960
uguuaccaagguuaagucc

SEQ ID NO: 68042 - RNA, 19 nt, Artificial Sequence
  Description of Artificial Sequence: Synthetic oligonucleotide
  Sense strand starting at position 3531 of SEQ ID NO: 842
gaguuuaaauggucgagga

SEQ ID NO: 68043 - RNA, 19 nt, Artificial Sequence
  Description of Artificial Sequence: Synthetic oligonucleotide
  Antisense strand to SEQ ID NO: 67962
uccucgaccauuuaaacuc

SEQ ID NO: 68044 - RNA, 19 nt, Artificial Sequence
  Description of Artificial Sequence: Synthetic oligonucleotide
  Sense strand starting at position 3532 of SEQ ID NO: 842
aguuuaaauggucgaggaa

SEQ ID NO: 68045 - RNA, 19 nt, Artificial Sequence
  Description of Artificial Sequence: Synthetic oligonucleotide
  Antisense strand to SEQ ID NO: 67964
uuccucgaccauuuaaacu

SEQ ID NO: 68046 - RNA, 19 nt, Artificial Sequence
  Description of Artificial Sequence: Synthetic oligonucleotide
  Sense strand starting at position 3533 of SEQ ID NO: 842
guuuaaauggucgaggaag

SEQ ID NO: 68047 - RNA, 19 nt, Artificial Sequence
  Description of Artificial Sequence: Synthetic oligonucleotide
  Antisense strand to SEQ ID NO: 67966
cuuccucgaccauuuaaac

SEQ ID NO: 68048 - RNA, 19 nt, Artificial Sequence
  Description of Artificial Sequence: Synthetic oligonucleotide
  Sense strand starting at position 3735 of SEQ ID NO: 842
ugguauuucugccauuuga

SEQ ID NO: 68049 - RNA, 19 nt, Artificial Sequence
  Description of Artificial Sequence: Synthetic oligonucleotide
  Antisense strand to SEQ ID NO: 67968
ucaaauggcagaaauacca

SEQ ID NO: 68050 - RNA, 19 nt, Artificial Sequence
  Description of Artificial Sequence: Synthetic oligonucleotide
  Sense strand starting at position 3769 of SEQ ID NO: 842
ccuagaugucuugaccuca

SEQ ID NO: 68051 - RNA, 19 nt, Artificial Sequence
  Description of Artificial Sequence: Synthetic oligonucleotide
  Antisense strand to SEQ ID NO: 67970
ugaggucaagacaucuagg

SEQ ID NO: 68052 - RNA, 19 nt, Artificial Sequence
  Description of Artificial Sequence: Synthetic oligonucleotide
  Sense strand starting at position 3781 of SEQ ID NO: 842
gaccucauugagcaguuua

SEQ ID NO: 68053 - RNA, 19 nt, Artificial Sequence
  Description of Artificial Sequence: Synthetic oligonucleotide
  Antisense strand to SEQ ID NO: 67972
uaaacugcucaaugagguc

SEQ ID NO: 68054 - RNA, 19 nt, Artificial Sequence
  Description of Artificial Sequence: Synthetic oligonucleotide
  Sense strand starting at position 3816 of SEQ ID NO: 842
ccaguaguguccacgguga

SEQ ID NO: 68055 - RNA, 19 nt, Artificial Sequence
  Description of Artificial Sequence: Synthetic oligonucleotide
  Antisense strand to SEQ ID NO: 67974
ucaccguggacacuacugg

SEQ ID NO: 68056 - RNA, 19 nt, Artificial Sequence
  Description of Artificial Sequence: Synthetic oligonucleotide
  Sense strand starting at position 3887 of SEQ ID NO: 842
aagagaacaugugcuuuga

SEQ ID NO: 68057 - RNA, 19 nt, Artificial Sequence
  Description of Artificial Sequence: Synthetic oligonucleotide
  Antisense strand to SEQ ID NO: 67976
ucaaagcacauguucucuu

SEQ ID NO: 68058 - RNA, 19 nt, Artificial Sequence
  Description of Artificial Sequence: Synthetic oligonucleotide
  Sense strand starting at position 14 of SEQ ID NO: 843
gcuagcaguuuccuacaca

SEQ ID NO: 68059 - RNA, 19 nt, Artificial Sequence
  Description of Artificial Sequence: Synthetic oligonucleotide
  Antisense strand to SEQ ID NO: 67978
uguguaggaaacugcuagc

SEQ ID NO: 68060 - RNA, 19 nt, Artificial Sequence
  Description of Artificial Sequence: Synthetic oligonucleotide
  Sense strand starting at position 67 of SEQ ID NO: 843
ugccauaauuuccauaggu

SEQ ID NO: 68061 - RNA, 19 nt, Artificial Sequence
  Description of Artificial Sequence: Synthetic oligonucleotide
  Antisense strand to SEQ ID NO: 67980
accuauggaaauuauggca

SEQ ID NO: 68062 - RNA, 19 nt, Artificial Sequence
  Description of Artificial Sequence: Synthetic oligonucleotide
  Sense strand starting at position 90 of SEQ ID NO: 843
ugcaaagucucacuuaaga

SEQ ID NO: 68063 - RNA, 19 nt, Artificial Sequence
  Description of Artificial Sequence: Synthetic oligonucleotide
  Antisense strand to SEQ ID NO: 67982
ucuuaagugagacuuugca

SEQ ID NO: 68064 - RNA, 19 nt, Artificial Sequence
  Description of Artificial Sequence: Synthetic oligonucleotide
  Sense strand starting at position 103 of SEQ ID NO: 843
uuaagauagugggcaagaa

SEQ ID NO: 68065 - RNA, 19 nt, Artificial Sequence
  Description of Artificial Sequence: Synthetic oligonucleotide
  Antisense strand to SEQ ID NO: 67984
uucuugcccacuaucuuaa

SEQ ID NO: 68066 - RNA, 19 nt, Artificial Sequence
  Description of Artificial Sequence: Synthetic oligonucleotide
  Sense strand starting at position 140 of SEQ ID NO: 843
cuacaagacuugucaagua

SEQ ID NO: 68067 - RNA, 19 nt, Artificial Sequence
  Description of Artificial Sequence: Synthetic oligonucleotide
  Antisense strand to SEQ ID NO: 67986
uacuugacaagucuuguag

SEQ ID NO: 68068 - RNA, 19 nt, Artificial Sequence
  Description of Artificial Sequence: Synthetic oligonucleotide
  Sense strand starting at position 148 of SEQ ID NO: 843
cuugucaaguaauuaggaa

SEQ ID NO: 68069 - RNA, 19 nt, Artificial Sequence
  Description of Artificial Sequence: Synthetic oligonucleotide
  Antisense strand to SEQ ID NO: 67988
uuccuaauuacuugacaag

SEQ ID NO: 68070 - RNA, 19 nt, Artificial Sequence
  Description of Artificial Sequence: Synthetic oligonucleotide
  Sense strand starting at position 205 of SEQ ID NO: 843
agccaugaggcauacuaau

SEQ ID NO: 68071 - RNA, 19 nt, Artificial Sequence
  Description of Artificial Sequence: Synthetic oligonucleotide
  Antisense strand to SEQ ID NO: 67990
auuaguaugccucauggcu

SEQ ID NO: 68072 - RNA, 19 nt, Artificial Sequence
  Description of Artificial Sequence: Synthetic oligonucleotide
  Sense strand starting at position 804 of SEQ ID NO: 843
gauagagacucugucggaa

SEQ ID NO: 68073 - RNA, 19 nt, Artificial Sequence
  Description of Artificial Sequence: Synthetic oligonucleotide
  Antisense strand to SEQ ID NO: 67992
uuccgacagagucucuauc

SEQ ID NO: 68074 - RNA, 19 nt, Artificial Sequence
  Description of Artificial Sequence: Synthetic oligonucleotide
  Sense strand starting at position 859 of SEQ ID NO: 843
uguccucuccaacauguua

SEQ ID NO: 68075 - RNA, 19 nt, Artificial Sequence
  Description of Artificial Sequence: Synthetic oligonucleotide
  Antisense strand to SEQ ID NO: 67994
uaacauguuggagaggaca

SEQ ID NO: 68076 - RNA, 19 nt, Artificial Sequence
  Description of Artificial Sequence: Synthetic oligonucleotide
  Sense strand starting at position 1103 of SEQ ID NO: 843
gaaagucaagcguaucguu

SEQ ID NO: 68077 - RNA, 19 nt, Artificial Sequence
  Description of Artificial Sequence: Synthetic oligonucleotide
  Antisense strand to SEQ ID NO: 67996
aacgauacgcuugacuuuc

SEQ ID NO: 68078 - RNA, 19 nt, Artificial Sequence
  Description of Artificial Sequence: Synthetic oligonucleotide
  Sense strand starting at position 1290 of SEQ ID NO: 843
ggucuuaaucuugacucga

SEQ ID NO: 68079 - RNA, 19 nt, Artificial Sequence
  Description of Artificial Sequence: Synthetic oligonucleotide
  Antisense strand to SEQ ID NO: 67998
ucgagucaagauuaagacc

SEQ ID NO: 68080 - RNA, 19 nt, Artificial Sequence
  Description of Artificial Sequence: Synthetic oligonucleotide
  Sense strand starting at position 1292 of SEQ ID NO: 843
ucuuaaucuugacucgaga

SEQ ID NO: 68081 - RNA, 19 nt, Artificial Sequence
  Description of Artificial Sequence: Synthetic oligonucleotide
  Antisense strand to SEQ ID NO: 68000
ucucgagucaagauuaaga

SEQ ID NO: 68082 - RNA, 19 nt, Artificial Sequence
  Description of Artificial Sequence: Synthetic oligonucleotide
  Sense strand starting at position 1374 of SEQ ID NO: 843
gucugacuucucguugucu

SEQ ID NO: 68083 - RNA, 19 nt, Artificial Sequence
  Description of Artificial Sequence: Synthetic oligonucleotide
  Antisense strand to SEQ ID NO: 68002
agacaacgagaagucagac

SEQ ID NO: 68084 - RNA, 19 nt, Artificial Sequence
  Description of Artificial Sequence: Synthetic oligonucleotide
  Sense strand starting at position 1502 of SEQ ID NO: 843
acugaaaugucccuaaagu

SEQ ID NO: 68085 - RNA, 19 nt, Artificial Sequence
  Description of Artificial Sequence: Synthetic oligonucleotide
  Antisense strand to SEQ ID NO: 68004
acuuuagggacauuucagu

SEQ ID NO: 68086 - RNA, 19 nt, Artificial Sequence
  Description of Artificial Sequence: Synthetic oligonucleotide
  Sense strand starting at position 1503 of SEQ ID NO: 843
cugaaaugucccuaaagug

SEQ ID NO: 68087 - RNA, 19 nt, Artificial Sequence
  Description of Artificial Sequence: Synthetic oligonucleotide
  Antisense strand to SEQ ID NO: 68006
cacuuuagggacauuucag

SEQ ID NO: 68088 - RNA, 19 nt, Artificial Sequence
  Description of Artificial Sequence: Synthetic oligonucleotide
  Sense strand starting at position 1699 of SEQ ID NO: 843
cuccauuguucggucacau

SEQ ID NO: 68089 - RNA, 19 nt, Artificial Sequence
  Description of Artificial Sequence: Synthetic oligonucleotide
  Antisense strand to SEQ ID NO: 68008
augugaccgaacaauggag

SEQ ID NO: 68090 - RNA, 19 nt, Artificial Sequence
  Description of Artificial Sequence: Synthetic oligonucleotide
  Sense strand starting at position 2116 of SEQ ID NO: 843
gcacucaugccggaucuca

SEQ ID NO: 68091 - RNA, 19 nt, Artificial Sequence
  Description of Artificial Sequence: Synthetic oligonucleotide
  Antisense strand to SEQ ID NO: 68010
ugagauccggcaugagugc

SEQ ID NO: 68092 - RNA, 19 nt, Artificial Sequence
  Description of Artificial Sequence: Synthetic oligonucleotide
  Sense strand starting at position 3081 of SEQ ID NO: 843
cgugcuguuucucuaauuu

SEQ ID NO: 68093 - RNA, 19 nt, Artificial Sequence
  Description of Artificial Sequence: Synthetic oligonucleotide
  Antisense strand to SEQ ID NO: 68012
aaauuagagaaacagcacg

SEQ ID NO: 68094 - RNA, 19 nt, Artificial Sequence
  Description of Artificial Sequence: Synthetic oligonucleotide
  Sense strand starting at position 3251 of SEQ ID NO: 843
auuugaaauucugugugca

SEQ ID NO: 68095 - RNA, 19 nt, Artificial Sequence
  Description of Artificial Sequence: Synthetic oligonucleotide
  Antisense strand to SEQ ID NO: 68014
ugcacacagaauuucaaau

SEQ ID NO: 68096 - RNA, 19 nt, Artificial Sequence
  Description of Artificial Sequence: Synthetic oligonucleotide
  Sense strand starting at position 3253 of SEQ ID NO: 843
uugaaauucugugugcaaa

SEQ ID NO: 68097 - RNA, 19 nt, Artificial Sequence
  Description of Artificial Sequence: Synthetic oligonucleotide
  Antisense strand to SEQ ID NO: 68016
uuugcacacagaauuucaa

SEQ ID NO: 68098 - RNA, 19 nt, Artificial Sequence
  Description of Artificial Sequence: Synthetic oligonucleotide
  Sense strand starting at position 3254 of SEQ ID NO: 843
ugaaauucugugugcaaac

SEQ ID NO: 68099 - RNA, 19 nt, Artificial Sequence
  Description of Artificial Sequence: Synthetic oligonucleotide
  Antisense strand to SEQ ID NO: 68018
guuugcacacagaauuuca

SEQ ID NO: 68100 - RNA, 19 nt, Artificial Sequence
  Description of Artificial Sequence: Synthetic oligonucleotide
  Sense strand starting at position 3255 of SEQ ID NO: 843
gaaauucugugugcaaacu

SEQ ID NO: 68101 - RNA, 19 nt, Artificial Sequence
  Description of Artificial Sequence: Synthetic oligonucleotide
  Antisense strand to SEQ ID NO: 68020
aguuugcacacagaauuuc

SEQ ID NO: 68102 - RNA, 19 nt, Artificial Sequence
  Description of Artificial Sequence: Synthetic oligonucleotide
  Sense strand starting at position 3290 of SEQ ID NO: 843
aaaggaaaucgagguguuc

SEQ ID NO: 68103 - RNA, 19 nt, Artificial Sequence
  Description of Artificial Sequence: Synthetic oligonucleotide
  Antisense strand to SEQ ID NO: 68022
gaacaccucgauuuccuuu

SEQ ID NO: 68104 - RNA, 19 nt, Artificial Sequence
  Description of Artificial Sequence: Synthetic oligonucleotide
  Sense strand starting at position 3318 of SEQ ID NO: 843
cuuugaaguccagggauug

SEQ ID NO: 68105 - RNA, 19 nt, Artificial Sequence
  Description of Artificial Sequence: Synthetic oligonucleotide
  Antisense strand to SEQ ID NO: 68024
caaucccuggacuucaaag

SEQ ID NO: 68106 - RNA, 19 nt, Artificial Sequence
  Description of Artificial Sequence: Synthetic oligonucleotide
  Sense strand starting at position 3319 of SEQ ID NO: 843
uuugaaguccagggauugu

SEQ ID NO: 68107 - RNA, 19 nt, Artificial Sequence
  Description of Artificial Sequence: Synthetic oligonucleotide
  Antisense strand to SEQ ID NO: 68026
acaaucccuggacuucaaa

SEQ ID NO: 68108 - RNA, 19 nt, Artificial Sequence
  Description of Artificial Sequence: Synthetic oligonucleotide
  Sense strand starting at position 3337 of SEQ ID NO: 843
ucaagaaauuccuuuaacg

SEQ ID NO: 68109 - RNA, 19 nt, Artificial Sequence
  Description of Artificial Sequence: Synthetic oligonucleotide
  Antisense strand to SEQ ID NO: 68028
cguuaaaggaauuucuuga

SEQ ID NO: 68110 - RNA, 19 nt, Artificial Sequence
  Description of Artificial Sequence: Synthetic oligonucleotide
  Sense strand starting at position 3387 of SEQ ID NO: 843
gcuucuuguuaaucuggaa

SEQ ID NO: 68111 - RNA, 19 nt, Artificial Sequence
  Description of Artificial Sequence: Synthetic oligonucleotide
  Antisense strand to SEQ ID NO: 68030
uuccagauuaacaagaagc

SEQ ID NO: 68112 - RNA, 19 nt, Artificial Sequence
  Description of Artificial Sequence: Synthetic oligonucleotide
  Sense strand starting at position 3435 of SEQ ID NO: 843
ugccgugaugguugggaaa

SEQ ID NO: 68113 - RNA, 19 nt, Artificial Sequence
  Description of Artificial Sequence: Synthetic oligonucleotide
  Antisense strand to SEQ ID NO: 68032
uuucccaaccaucacggca

SEQ ID NO: 68114 - RNA, 19 nt, Artificial Sequence
  Description of Artificial Sequence: Synthetic oligonucleotide
  Sense strand starting at position 3455 of SEQ ID NO: 843
uguguaugugaacacaaua

SEQ ID NO: 68115 - RNA, 19 nt, Artificial Sequence
  Description of Artificial Sequence: Synthetic oligonucleotide
  Antisense strand to SEQ ID NO: 68034
uauuguguucacauacaca

SEQ ID NO: 68116 - RNA, 19 nt, Artificial Sequence
  Description of Artificial Sequence: Synthetic oligonucleotide
  Sense strand starting at position 3536 of SEQ ID NO: 843
ccguacuauuacucgauca

SEQ ID NO: 68117 - RNA, 19 nt, Artificial Sequence
  Description of Artificial Sequence: Synthetic oligonucleotide
  Antisense strand to SEQ ID NO: 68036
ugaucgaguaauaguacgg

SEQ ID NO: 68118 - RNA, 19 nt, Artificial Sequence
  Description of Artificial Sequence: Synthetic oligonucleotide
  Sense strand starting at position 3538 of SEQ ID NO: 843
guacuauuacucgaucauu

SEQ ID NO: 68119 - RNA, 19 nt, Artificial Sequence
  Description of Artificial Sequence: Synthetic oligonucleotide
  Antisense strand to SEQ ID NO: 68038
aaugaucgaguaauaguac

SEQ ID NO: 68120 - RNA, 19 nt, Artificial Sequence
  Description of Artificial Sequence: Synthetic oligonucleotide
  Sense strand starting at position 3579 of SEQ ID NO: 843
accugaugguguccagauu

SEQ ID NO: 68121 - RNA, 19 nt, Artificial Sequence
  Description of Artificial Sequence: Synthetic oligonucleotide
  Antisense strand to SEQ ID NO: 68040
aaucuggacaccaucaggu

SEQ ID NO: 68122 - RNA, 19 nt, Artificial Sequence
  Description of Artificial Sequence: Synthetic oligonucleotide
  Sense strand starting at position 3660 of SEQ ID NO: 843
ggaagaaguuuguucuggu

SEQ ID NO: 68123 - RNA, 19 nt, Artificial Sequence
  Description of Artificial Sequence: Synthetic oligonucleotide
  Antisense strand to SEQ ID NO: 68042
accagaacaaacuucuucc

SEQ ID NO: 68124 - RNA, 19 nt, Artificial Sequence
  Description of Artificial Sequence: Synthetic oligonucleotide
  Sense strand starting at position 3661 of SEQ ID NO: 843
gaagaaguuuguucugguu

SEQ ID NO: 68125 - RNA, 19 nt, Artificial Sequence
  Description of Artificial Sequence: Synthetic oligonucleotide
  Antisense strand to SEQ ID NO: 68044
aaccagaacaaacuucuuc

SEQ ID NO: 68126 - RNA, 19 nt, Artificial Sequence
  Description of Artificial Sequence: Synthetic oligonucleotide
  Sense strand starting at position 3667 of SEQ ID NO: 843
guuuguucugguuauguuu

SEQ ID NO: 68127 - RNA, 19 nt, Artificial Sequence
  Description of Artificial Sequence: Synthetic oligonucleotide
  Antisense strand to SEQ ID NO: 68046
aaacauaaccagaacaaac

SEQ ID NO: 68128 - RNA, 19 nt, Artificial Sequence
  Description of Artificial Sequence: Synthetic oligonucleotide
  Sense strand starting at position 3737 of SEQ ID NO: 843
uuggcuucuuuggucaaca

SEQ ID NO: 68129 - RNA, 19 nt, Artificial Sequence
  Description of Artificial Sequence: Synthetic oligonucleotide
  Antisense strand to SEQ ID NO: 68048
uguugaccaaagaagccaa

SEQ ID NO: 68130 - RNA, 19 nt, Artificial Sequence
  Description of Artificial Sequence: Synthetic oligonucleotide
  Sense strand starting at position 3738 of SEQ ID NO: 843
uggcuucuuuggucaacau

SEQ ID NO: 68131 - RNA, 19 nt, Artificial Sequence
  Description of Artificial Sequence: Synthetic oligonucleotide
  Antisense strand to SEQ ID NO: 68050
auguugaccaaagaagcca

SEQ ID NO: 68132 - RNA, 19 nt, Artificial Sequence
  Description of Artificial Sequence: Synthetic oligonucleotide
  Sense strand starting at position 3761 of SEQ ID NO: 843
uuccuuuaagaguguauaa

SEQ ID NO: 68133 - RNA, 19 nt, Artificial Sequence
  Description of Artificial Sequence: Synthetic oligonucleotide
  Antisense strand to SEQ ID NO: 68052
uuauacacucuuaaaggaa

SEQ ID NO: 68134 - RNA, 19 nt, Artificial Sequence
  Description of Artificial Sequence: Synthetic oligonucleotide
  Sense strand starting at position 3763 of SEQ ID NO: 843
ccuuuaagaguguauaaca

SEQ ID NO: 68135 - RNA, 19 nt, Artificial Sequence
  Description of Artificial Sequence: Synthetic oligonucleotide
  Antisense strand to SEQ ID NO: 68054
uguuauacacucuuaaagg

SEQ ID NO: 68136 - RNA, 19 nt, Artificial Sequence
  Description of Artificial Sequence: Synthetic oligonucleotide
  Sense strand starting at position 3919 of SEQ ID NO: 843
uuacauugugguggcuaaa

SEQ ID NO: 68137 - RNA, 19 nt, Artificial Sequence
  Description of Artificial Sequence: Synthetic oligonucleotide
  Antisense strand to SEQ ID NO: 68056
uuuagccaccacaauguaa

SEQ ID NO: 68138 - RNA, 19 nt, Artificial Sequence
  Description of Artificial Sequence: Synthetic oligonucleotide
  Sense strand starting at position 3878 of SEQ ID NO: 844
ugcccacucuggucucuaa

SEQ ID NO: 68139 - RNA, 19 nt, Artificial Sequence
  Description of Artificial Sequence: Synthetic oligonucleotide
  Antisense strand to SEQ ID NO: 68058
uuagagaccagagugggca

SEQ ID NO: 68140 - RNA, 19 nt, Artificial Sequence
  Description of Artificial Sequence: Synthetic oligonucleotide
  Sense strand starting at position 3303 of SEQ ID NO: 844
agaugcuucugucuuguau

SEQ ID NO: 68141 - RNA, 19 nt, Artificial Sequence
  Description of Artificial Sequence: Synthetic oligonucleotide
  Antisense strand to SEQ ID NO: 68060
auacaagacagaagcaucu

SEQ ID NO: 68142 - RNA, 19 nt, Artificial Sequence
  Description of Artificial Sequence: Synthetic oligonucleotide
  Sense strand starting at position 3287 of SEQ ID NO: 844
gccuauggcuuggugaaga

SEQ ID NO: 68143 - RNA, 19 nt, Artificial Sequence
  Description of Artificial Sequence: Synthetic oligonucleotide
  Antisense strand to SEQ ID NO: 68062
ucuucaccaagccauaggc

SEQ ID NO: 68144 - RNA, 19 nt, Artificial Sequence
  Description of Artificial Sequence: Synthetic oligonucleotide
  Sense strand starting at position 3286 of SEQ ID NO: 844
ggccuauggcuuggugaag

SEQ ID NO: 68145 - RNA, 19 nt, Artificial Sequence
  Description of Artificial Sequence: Synthetic oligonucleotide
  Antisense strand to SEQ ID NO: 68064
cuucaccaagccauaggcc

SEQ ID NO: 68146 - RNA, 19 nt, Artificial Sequence
  Description of Artificial Sequence: Synthetic oligonucleotide
  Sense strand starting at position 3285 of SEQ ID NO: 844
uggccuauggcuuggugaa

SEQ ID NO: 68147 - RNA, 19 nt, Artificial Sequence
  Description of Artificial Sequence: Synthetic oligonucleotide
  Antisense strand to SEQ ID NO: 68066
uucaccaagccauaggcca

SEQ ID NO: 68148 - RNA, 19 nt, Artificial Sequence
  Description of Artificial Sequence: Synthetic oligonucleotide
  Sense strand starting at position 2557 of SEQ ID NO: 844
agugcuaaagaaggugaua

SEQ ID NO: 68149 - RNA, 19 nt, Artificial Sequence
  Description of Artificial Sequence: Synthetic oligonucleotide
  Antisense strand to SEQ ID NO: 68068
uaucaccuucuuuagcacu

SEQ ID NO: 68150 - RNA, 19 nt, Artificial Sequence
  Description of Artificial Sequence: Synthetic oligonucleotide
  Sense strand starting at position 2547 of SEQ ID NO: 844
acauaaugugagugcuaaa

SEQ ID NO: 68151 - RNA, 19 nt, Artificial Sequence
  Description of Artificial Sequence: Synthetic oligonucleotide
  Antisense strand to SEQ ID NO: 68070
uuuagcacucacauuaugu

SEQ ID NO: 68152 - RNA, 19 nt, Artificial Sequence
  Description of Artificial Sequence: Synthetic oligonucleotide
  Sense strand starting at position 2546 of SEQ ID NO: 844
gacauaaugugagugcuaa

SEQ ID NO: 68153 - RNA, 19 nt, Artificial Sequence
  Description of Artificial Sequence: Synthetic oligonucleotide
  Antisense strand to SEQ ID NO: 68072
uuagcacucacauuauguc

SEQ ID NO: 68154 - RNA, 19 nt, Artificial Sequence
  Description of Artificial Sequence: Synthetic oligonucleotide
  Sense strand starting at position 2531 of SEQ ID NO: 844
accuguuuccgauaagaca

SEQ ID NO: 68155 - RNA, 19 nt, Artificial Sequence
  Description of Artificial Sequence: Synthetic oligonucleotide
  Antisense strand to SEQ ID NO: 68074
ugucuuaucggaaacaggu

SEQ ID NO: 68156 - RNA, 19 nt, Artificial Sequence
  Description of Artificial Sequence: Synthetic oligonucleotide
  Sense strand starting at position 2527 of SEQ ID NO: 844
cuaaaccuguuuccgauaa

SEQ ID NO: 68157 - RNA, 19 nt, Artificial Sequence
  Description of Artificial Sequence: Synthetic oligonucleotide
  Antisense strand to SEQ ID NO: 68076
uuaucggaaacagguuuag

SEQ ID NO: 68158 - RNA, 19 nt, Artificial Sequence
  Description of Artificial Sequence: Synthetic oligonucleotide
  Sense strand starting at position 2525 of SEQ ID NO: 844
cucuaaaccuguuuccgau

SEQ ID NO: 68159 - RNA, 19 nt, Artificial Sequence
  Description of Artificial Sequence: Synthetic oligonucleotide
  Antisense strand to SEQ ID NO: 68078
aucggaaacagguuuagag

SEQ ID NO: 68160 - RNA, 19 nt, Artificial Sequence
  Description of Artificial Sequence: Synthetic oligonucleotide
  Sense strand starting at position 2510 of SEQ ID NO: 844
ggaauuucuugacagcucu

SEQ ID NO: 68161 - RNA, 19 nt, Artificial Sequence
  Description of Artificial Sequence: Synthetic oligonucleotide
  Antisense strand to SEQ ID NO: 68080
agagcugucaagaaauucc

SEQ ID NO: 68162 - RNA, 19 nt, Artificial Sequence
  Description of Artificial Sequence: Synthetic oligonucleotide
  Sense strand starting at position 2507 of SEQ ID NO: 844
ggaggaauuucuugacagc

SEQ ID NO: 68163 - RNA, 19 nt, Artificial Sequence
  Description of Artificial Sequence: Synthetic oligonucleotide
  Antisense strand to SEQ ID NO: 68082
gcugucaagaaauuccucc

SEQ ID NO: 68164 - RNA, 19 nt, Artificial Sequence
  Description of Artificial Sequence: Synthetic oligonucleotide
  Sense strand starting at position 2456 of SEQ ID NO: 844
gaguuucuggguugaaguc

SEQ ID NO: 68165 - RNA, 19 nt, Artificial Sequence
  Description of Artificial Sequence: Synthetic oligonucleotide
  Antisense strand to SEQ ID NO: 68084
gacuucaacccagaaacuc

SEQ ID NO: 68166 - RNA, 19 nt, Artificial Sequence
  Description of Artificial Sequence: Synthetic oligonucleotide
  Sense strand starting at position 2454 of SEQ ID NO: 844
gugaguuucuggguugaag

SEQ ID NO: 68167 - RNA, 19 nt, Artificial Sequence
  Description of Artificial Sequence: Synthetic oligonucleotide
  Antisense strand to SEQ ID NO: 68086
cuucaacccagaaacucac

SEQ ID NO: 68168 - RNA, 19 nt, Artificial Sequence
  Description of Artificial Sequence: Synthetic oligonucleotide
  Sense strand starting at position 2450 of SEQ ID NO: 844
gcuugugaguuucuggguu

SEQ ID NO: 68169 - RNA, 19 nt, Artificial Sequence
  Description of Artificial Sequence: Synthetic oligonucleotide
  Antisense strand to SEQ ID NO: 68088
aacccagaaacucacaagc

SEQ ID NO: 68170 - RNA, 19 nt, Artificial Sequence
  Description of Artificial Sequence: Synthetic oligonucleotide
  Sense strand starting at position 2404 of SEQ ID NO: 844
agcccuaagcauugucuga

SEQ ID NO: 68171 - RNA, 19 nt, Artificial Sequence
  Description of Artificial Sequence: Synthetic oligonucleotide
  Antisense strand to SEQ ID NO: 68090
ucagacaaugcuuagggcu

SEQ ID NO: 68172 - RNA, 19 nt, Artificial Sequence
  Description of Artificial Sequence: Synthetic oligonucleotide
  Sense strand starting at position 2387 of SEQ ID NO: 844
ucacgaguccuugagcaag

SEQ ID NO: 68173 - RNA, 19 nt, Artificial Sequence
  Description of Artificial Sequence: Synthetic oligonucleotide
  Antisense strand to SEQ ID NO: 68092
cuugcucaaggacucguga

SEQ ID NO: 68174 - RNA, 19 nt, Artificial Sequence
  Description of Artificial Sequence: Synthetic oligonucleotide
  Sense strand starting at position 2385 of SEQ ID NO: 844
ggucacgaguccuugagca

SEQ ID NO: 68175 - RNA, 19 nt, Artificial Sequence
  Description of Artificial Sequence: Synthetic oligonucleotide
  Antisense strand to SEQ ID NO: 68094
ugcucaaggacucgugacc

SEQ ID NO: 68176 - RNA, 19 nt, Artificial Sequence
  Description of Artificial Sequence: Synthetic oligonucleotide
  Sense strand starting at position 2376 of SEQ ID NO: 844
ucaguaacuggucacgagu

SEQ ID NO: 68177 - RNA, 19 nt, Artificial Sequence
  Description of Artificial Sequence: Synthetic oligonucleotide
  Antisense strand to SEQ ID NO: 68096
acucgugaccaguuacuga

SEQ ID NO: 68178 - RNA, 19 nt, Artificial Sequence
  Description of Artificial Sequence: Synthetic oligonucleotide
  Sense strand starting at position 2342 of SEQ ID NO: 844
agcuaucaguuugcaauca

SEQ ID NO: 68179 - RNA, 19 nt, Artificial Sequence
  Description of Artificial Sequence: Synthetic oligonucleotide
  Antisense strand to SEQ ID NO: 68098
ugauugcaaacugauagcu

SEQ ID NO: 68180 - RNA, 19 nt, Artificial Sequence
  Description of Artificial Sequence: Synthetic oligonucleotide
  Sense strand starting at position 2176 of SEQ ID NO: 844
cgcacucauagaugaggaa

SEQ ID NO: 68181 - RNA, 19 nt, Artificial Sequence
  Description of Artificial Sequence: Synthetic oligonucleotide
  Antisense strand to SEQ ID NO: 68100
uuccucaucuaugagugcg

SEQ ID NO: 68182 - RNA, 19 nt, Artificial Sequence
  Description of Artificial Sequence: Synthetic oligonucleotide
  Sense strand starting at position 2139 of SEQ ID NO: 844
uggaaaggucgcuagagac

SEQ ID NO: 68183 - RNA, 19 nt, Artificial Sequence
  Description of Artificial Sequence: Synthetic oligonucleotide
  Antisense strand to SEQ ID NO: 68102
gucucuagcgaccuuucca

SEQ ID NO: 68184 - RNA, 19 nt, Artificial Sequence
  Description of Artificial Sequence: Synthetic oligonucleotide
  Sense strand starting at position 2138 of SEQ ID NO: 844
uuggaaaggucgcuagaga

SEQ ID NO: 68185 - RNA, 19 nt, Artificial Sequence
  Description of Artificial Sequence: Synthetic oligonucleotide
  Antisense strand to SEQ ID NO: 68104
ucucuagcgaccuuuccaa

SEQ ID NO: 68186 - RNA, 19 nt, Artificial Sequence
  Description of Artificial Sequence: Synthetic oligonucleotide
  Sense strand starting at position 2110 of SEQ ID NO: 844
agaauucuuucgcccuuga

SEQ ID NO: 68187 - RNA, 19 nt, Artificial Sequence
  Description of Artificial Sequence: Synthetic oligonucleotide
  Antisense strand to SEQ ID NO: 68106
ucaagggcgaaagaauucu

SEQ ID NO: 68188 - RNA, 19 nt, Artificial Sequence
  Description of Artificial Sequence: Synthetic oligonucleotide
  Sense strand starting at position 2096 of SEQ ID NO: 844
ggccuuaccuaagcagaau

SEQ ID NO: 68189 - RNA, 19 nt, Artificial Sequence
  Description of Artificial Sequence: Synthetic oligonucleotide
  Antisense strand to SEQ ID NO: 68108
auucugcuuagguaaggcc

SEQ ID NO: 68190 - RNA, 19 nt, Artificial Sequence
  Description of Artificial Sequence: Synthetic oligonucleotide
  Sense strand starting at position 1248 of SEQ ID NO: 844
ggacucugcucuccucaga

SEQ ID NO: 68191 - RNA, 19 nt, Artificial Sequence
  Description of Artificial Sequence: Synthetic oligonucleotide
  Antisense strand to SEQ ID NO: 68110
ucugaggagagcagagucc

SEQ ID NO: 68192 - RNA, 19 nt, Artificial Sequence
  Description of Artificial Sequence: Synthetic oligonucleotide
  Sense strand starting at position 932 of SEQ ID NO: 844
agcaucuuuccucaacgau

SEQ ID NO: 68193 - RNA, 19 nt, Artificial Sequence
  Description of Artificial Sequence: Synthetic oligonucleotide
  Antisense strand to SEQ ID NO: 68112
aucguugaggaaagaugcu

SEQ ID NO: 68194 - RNA, 19 nt, Artificial Sequence
  Description of Artificial Sequence: Synthetic oligonucleotide
  Sense strand starting at position 918 of SEQ ID NO: 844
gcgggaacaccuuaagcau

SEQ ID NO: 68195 - RNA, 19 nt, Artificial Sequence
  Description of Artificial Sequence: Synthetic oligonucleotide
  Antisense strand to SEQ ID NO: 68114
augcuuaagguguucccgc

SEQ ID NO: 68196 - RNA, 19 nt, Artificial Sequence
  Description of Artificial Sequence: Synthetic oligonucleotide
  Sense strand starting at position 836 of SEQ ID NO: 844
agacccucggguugagauu

SEQ ID NO: 68197 - RNA, 19 nt, Artificial Sequence
  Description of Artificial Sequence: Synthetic oligonucleotide
  Antisense strand to SEQ ID NO: 68116
aaucucaacccgagggucu

SEQ ID NO: 68198 - RNA, 19 nt, Artificial Sequence
  Description of Artificial Sequence: Synthetic oligonucleotide
  Sense strand starting at position 819 of SEQ ID NO: 844
uguggaucauccuccaaag

SEQ ID NO: 68199 - RNA, 19 nt, Artificial Sequence
  Description of Artificial Sequence: Synthetic oligonucleotide
  Antisense strand to SEQ ID NO: 68118
cuuuggaggaugauccaca

SEQ ID NO: 68200 - RNA, 19 nt, Artificial Sequence
  Description of Artificial Sequence: Synthetic oligonucleotide
  Sense strand starting at position 784 of SEQ ID NO: 844
ucugcugucuaggucaaga

SEQ ID NO: 68201 - RNA, 19 nt, Artificial Sequence
  Description of Artificial Sequence: Synthetic oligonucleotide
  Antisense strand to SEQ ID NO: 68120
ucuugaccuagacagcaga

SEQ ID NO: 68202 - RNA, 19 nt, Artificial Sequence
  Description of Artificial Sequence: Synthetic oligonucleotide
  Sense strand starting at position 750 of SEQ ID NO: 844
cucucaucuugagagaauc

SEQ ID NO: 68203 - RNA, 19 nt, Artificial Sequence
  Description of Artificial Sequence: Synthetic oligonucleotide
  Antisense strand to SEQ ID NO: 68122
gauucucucaagaugagag

SEQ ID NO: 68204 - RNA, 19 nt, Artificial Sequence
  Description of Artificial Sequence: Synthetic oligonucleotide
  Sense strand starting at position 742 of SEQ ID NO: 844
ugagauuucucucaucuug

SEQ ID NO: 68205 - RNA, 19 nt, Artificial Sequence
  Description of Artificial Sequence: Synthetic oligonucleotide
  Antisense strand to SEQ ID NO: 68124
caagaugagagaaaucuca

SEQ ID NO: 68206 - RNA, 19 nt, Artificial Sequence
  Description of Artificial Sequence: Synthetic oligonucleotide
  Sense strand starting at position 681 of SEQ ID NO: 844
ucuugauuggccuaaacag

SEQ ID NO: 68207 - RNA, 19 nt, Artificial Sequence
  Description of Artificial Sequence: Synthetic oligonucleotide
  Antisense strand to SEQ ID NO: 68126
cuguuuaggccaaucaaga

SEQ ID NO: 68208 - RNA, 19 nt, Artificial Sequence
  Description of Artificial Sequence: Synthetic oligonucleotide
  Sense strand starting at position 679 of SEQ ID NO: 844
cgucuugauuggccuaaac

SEQ ID NO: 68209 - RNA, 19 nt, Artificial Sequence
  Description of Artificial Sequence: Synthetic oligonucleotide
  Antisense strand to SEQ ID NO: 68128
guuuaggccaaucaagacg

SEQ ID NO: 68210 - RNA, 19 nt, Artificial Sequence
  Description of Artificial Sequence: Synthetic oligonucleotide
  Sense strand starting at position 678 of SEQ ID NO: 844
ccgucuugauuggccuaaa

SEQ ID NO: 68211 - RNA, 19 nt, Artificial Sequence
  Description of Artificial Sequence: Synthetic oligonucleotide
  Antisense strand to SEQ ID NO: 68130
uuuaggccaaucaagacgg

SEQ ID NO: 68212 - RNA, 19 nt, Artificial Sequence
  Description of Artificial Sequence: Synthetic oligonucleotide
  Sense strand starting at position 644 of SEQ ID NO: 844
uagaauuaugucugacagu

SEQ ID NO: 68213 - RNA, 19 nt, Artificial Sequence
  Description of Artificial Sequence: Synthetic oligonucleotide
  Antisense strand to SEQ ID NO: 68132
acugucagacauaauucua

SEQ ID NO: 68214 - RNA, 19 nt, Artificial Sequence
  Description of Artificial Sequence: Synthetic oligonucleotide
  Sense strand starting at position 643 of SEQ ID NO: 844
cuagaauuaugucugacag

SEQ ID NO: 68215 - RNA, 19 nt, Artificial Sequence
  Description of Artificial Sequence: Synthetic oligonucleotide
  Antisense strand to SEQ ID NO: 68134
cugucagacauaauucuag

SEQ ID NO: 68216 - RNA, 19 nt, Artificial Sequence
  Description of Artificial Sequence: Synthetic oligonucleotide
  Sense strand starting at position 594 of SEQ ID NO: 844
uuugguaacuauuagaaga

SEQ ID NO: 68217 - RNA, 19 nt, Artificial Sequence
  Description of Artificial Sequence: Synthetic oligonucleotide
  Antisense strand to SEQ ID NO: 68136
ucuucuaauaguuaccaaa

SEQ ID NO: 68218 - RNA, 19 nt, Artificial Sequence
  Description of Artificial Sequence: Synthetic oligonucleotide
  Sense strand starting at position 3963 of SEQ ID NO: 845
cuuugauguaugugaagga

SEQ ID NO: 68219 - RNA, 19 nt, Artificial Sequence
  Description of Artificial Sequence: Synthetic oligonucleotide
  Antisense strand to SEQ ID NO: 68138
uccuucacauacaucaaag

SEQ ID NO: 68220 - RNA, 19 nt, Artificial Sequence
  Description of Artificial Sequence: Synthetic oligonucleotide
  Sense strand starting at position 3961 of SEQ ID NO: 845
uucuuugauguaugugaag

SEQ ID NO: 68221 - RNA, 19 nt, Artificial Sequence
  Description of Artificial Sequence: Synthetic oligonucleotide
  Antisense strand to SEQ ID NO: 68140
cuucacauacaucaaagaa

SEQ ID NO: 68222 - RNA, 19 nt, Artificial Sequence
  Description of Artificial Sequence: Synthetic oligonucleotide
  Sense strand starting at position 3862 of SEQ ID NO: 845
ugaacccauguaugucaaa

SEQ ID NO: 68223 - RNA, 19 nt, Artificial Sequence
  Description of Artificial Sequence: Synthetic oligonucleotide
  Antisense strand to SEQ ID NO: 68142
uuugacauacauggguuca

SEQ ID NO: 68224 - RNA, 19 nt, Artificial Sequence
  Description of Artificial Sequence: Synthetic oligonucleotide
  Sense strand starting at position 3781 of SEQ ID NO: 845
uugggaaaguucucagcau

SEQ ID NO: 68225 - RNA, 19 nt, Artificial Sequence
  Description of Artificial Sequence: Synthetic oligonucleotide
  Antisense strand to SEQ ID NO: 68144
augcugagaacuuucccaa

SEQ ID NO: 68226 - RNA, 19 nt, Artificial Sequence
  Description of Artificial Sequence: Synthetic oligonucleotide
  Sense strand starting at position 3732 of SEQ ID NO: 845
ggcaucuggugacuagaaa

SEQ ID NO: 68227 - RNA, 19 nt, Artificial Sequence
  Description of Artificial Sequence: Synthetic oligonucleotide
  Antisense strand to SEQ ID NO: 68146
uuucuagucaccagaugcc

SEQ ID NO: 68228 - RNA, 19 nt, Artificial Sequence
  Description of Artificial Sequence: Synthetic oligonucleotide
  Sense strand starting at position 3703 of SEQ ID NO: 845
gccaaagauuacguauuga

SEQ ID NO: 68229 - RNA, 19 nt, Artificial Sequence
  Description of Artificial Sequence: Synthetic oligonucleotide
  Antisense strand to SEQ ID NO: 68148
ucaauacguaaucuuuggc

SEQ ID NO: 68230 - RNA, 19 nt, Artificial Sequence
  Description of Artificial Sequence: Synthetic oligonucleotide
  Sense strand starting at position 3100 of SEQ ID NO: 845
gguuuauauagugaugauu

SEQ ID NO: 68231 - RNA, 19 nt, Artificial Sequence
  Description of Artificial Sequence: Synthetic oligonucleotide
  Antisense strand to SEQ ID NO: 68150
aaucaucacuauauaaacc

SEQ ID NO: 68232 - RNA, 19 nt, Artificial Sequence
  Description of Artificial Sequence: Synthetic oligonucleotide
  Sense strand starting at position 3030 of SEQ ID NO: 845
cuuucccugugauuguaaa

SEQ ID NO: 68233 - RNA, 19 nt, Artificial Sequence
  Description of Artificial Sequence: Synthetic oligonucleotide
  Antisense strand to SEQ ID NO: 68152
uuuacaaucacagggaaag

SEQ ID NO: 68234 - RNA, 19 nt, Artificial Sequence
  Description of Artificial Sequence: Synthetic oligonucleotide
  Sense strand starting at position 2995 of SEQ ID NO: 845
auacguucuagcgaaggga

SEQ ID NO: 68235 - RNA, 19 nt, Artificial Sequence
  Description of Artificial Sequence: Synthetic oligonucleotide
  Antisense strand to SEQ ID NO: 68154
ucccuucgcuagaacguau

SEQ ID NO: 68236 - RNA, 19 nt, Artificial Sequence
  Description of Artificial Sequence: Synthetic oligonucleotide
  Sense strand starting at position 2973 of SEQ ID NO: 845
ggcaaauaagcccacaauu

SEQ ID NO: 68237 - RNA, 19 nt, Artificial Sequence
  Description of Artificial Sequence: Synthetic oligonucleotide
  Antisense strand to SEQ ID NO: 68156
aauugugggcuuauuugcc

SEQ ID NO: 68238 - RNA, 19 nt, Artificial Sequence
  Description of Artificial Sequence: Synthetic oligonucleotide
  Sense strand starting at position 2935 of SEQ ID NO: 845
uggauacugcgugaaggua

SEQ ID NO: 68239 - RNA, 19 nt, Artificial Sequence
  Description of Artificial Sequence: Synthetic oligonucleotide
  Antisense strand to SEQ ID NO: 68158
uaccuucacgcaguaucca

SEQ ID NO: 68240 - RNA, 19 nt, Artificial Sequence
  Description of Artificial Sequence: Synthetic oligonucleotide
  Sense strand starting at position 2895 of SEQ ID NO: 845
gugaaagucccaggcagau

SEQ ID NO: 68241 - RNA, 19 nt, Artificial Sequence
  Description of Artificial Sequence: Synthetic oligonucleotide
  Antisense strand to SEQ ID NO: 68160
aucugccugggacuuucac

SEQ ID NO: 68242 - RNA, 19 nt, Artificial Sequence
  Description of Artificial Sequence: Synthetic oligonucleotide
  Sense strand starting at position 2884 of SEQ ID NO: 845
uuaaguccacugugaaagu

SEQ ID NO: 68243 - RNA, 19 nt, Artificial Sequence
  Description of Artificial Sequence: Synthetic oligonucleotide
  Antisense strand to SEQ ID NO: 68162
acuuucacaguggacuuaa

SEQ ID NO: 68244 - RNA, 19 nt, Artificial Sequence
  Description of Artificial Sequence: Synthetic oligonucleotide
  Sense strand starting at position 2882 of SEQ ID NO: 845
acuuaaguccacugugaaa

SEQ ID NO: 68245 - RNA, 19 nt, Artificial Sequence
  Description of Artificial Sequence: Synthetic oligonucleotide
  Antisense strand to SEQ ID NO: 68164
uuucacaguggacuuaagu

SEQ ID NO: 68246 - RNA, 19 nt, Artificial Sequence
  Description of Artificial Sequence: Synthetic oligonucleotide
  Sense strand starting at position 2864 of SEQ ID NO: 845
gcccuaguaucaccugaaa

SEQ ID NO: 68247 - RNA, 19 nt, Artificial Sequence
  Description of Artificial Sequence: Synthetic oligonucleotide
  Antisense strand to SEQ ID NO: 68166
uuucaggugauacuagggc

SEQ ID NO: 68248 - RNA, 19 nt, Artificial Sequence
  Description of Artificial Sequence: Synthetic oligonucleotide
  Sense strand starting at position 2685 of SEQ ID NO: 845
ugcccuucucuccaguaua

SEQ ID NO: 68249 - RNA, 19 nt, Artificial Sequence
  Description of Artificial Sequence: Synthetic oligonucleotide
  Antisense strand to SEQ ID NO: 68168
uauacuggagagaagggca

SEQ ID NO: 68250 - RNA, 19 nt, Artificial Sequence
  Description of Artificial Sequence: Synthetic oligonucleotide
  Sense strand starting at position 2624 of SEQ ID NO: 845
gcuagcagauacucgauaa

SEQ ID NO: 68251 - RNA, 19 nt, Artificial Sequence
  Description of Artificial Sequence: Synthetic oligonucleotide
  Antisense strand to SEQ ID NO: 68170
uuaucgaguaucugcuagc

SEQ ID NO: 68252 - RNA, 19 nt, Artificial Sequence
  Description of Artificial Sequence: Synthetic oligonucleotide
  Sense strand starting at position 2614 of SEQ ID NO: 845
acuugaaaucgcuagcaga

SEQ ID NO: 68253 - RNA, 19 nt, Artificial Sequence
  Description of Artificial Sequence: Synthetic oligonucleotide
  Antisense strand to SEQ ID NO: 68172
ucugcuagcgauuucaagu

SEQ ID NO: 68254 - RNA, 19 nt, Artificial Sequence
  Description of Artificial Sequence: Synthetic oligonucleotide
  Sense strand starting at position 2576 of SEQ ID NO: 845
gcuugagauuugcuuaacu

SEQ ID NO: 68255 - RNA, 19 nt, Artificial Sequence
  Description of Artificial Sequence: Synthetic oligonucleotide
  Antisense strand to SEQ ID NO: 68174
aguuaagcaaaucucaagc

SEQ ID NO: 68256 - RNA, 19 nt, Artificial Sequence
  Description of Artificial Sequence: Synthetic oligonucleotide
  Sense strand starting at position 2563 of SEQ ID NO: 845
cguauuucugugggcuuga

SEQ ID NO: 68257 - RNA, 19 nt, Artificial Sequence
  Description of Artificial Sequence: Synthetic oligonucleotide
  Antisense strand to SEQ ID NO: 68176
ucaagcccacagaaauacg

SEQ ID NO: 68258 - RNA, 19 nt, Artificial Sequence
  Description of Artificial Sequence: Synthetic oligonucleotide
  Sense strand starting at position 2561 of SEQ ID NO: 845
cacguauuucugugggcuu

SEQ ID NO: 68259 - RNA, 19 nt, Artificial Sequence
  Description of Artificial Sequence: Synthetic oligonucleotide
  Antisense strand to SEQ ID NO: 68178
aagcccacagaaauacgug

SEQ ID NO: 68260 - RNA, 19 nt, Artificial Sequence
  Description of Artificial Sequence: Synthetic oligonucleotide
  Sense strand starting at position 2486 of SEQ ID NO: 845
ggaccucagcaauaacuuu

SEQ ID NO: 68261 - RNA, 19 nt, Artificial Sequence
  Description of Artificial Sequence: Synthetic oligonucleotide
  Antisense strand to SEQ ID NO: 68180
aaaguuauugcugaggucc

SEQ ID NO: 68262 - RNA, 19 nt, Artificial Sequence
  Description of Artificial Sequence: Synthetic oligonucleotide
  Sense strand starting at position 2480 of SEQ ID NO: 845
ugcuuaggaccucagcaau

SEQ ID NO: 68263 - RNA, 19 nt, Artificial Sequence
  Description of Artificial Sequence: Synthetic oligonucleotide
  Antisense strand to SEQ ID NO: 68182
auugcugagguccuaagca

SEQ ID NO: 68264 - RNA, 19 nt, Artificial Sequence
  Description of Artificial Sequence: Synthetic oligonucleotide
  Sense strand starting at position 2454 of SEQ ID NO: 845
cacaucugagaucguaaca

SEQ ID NO: 68265 - RNA, 19 nt, Artificial Sequence
  Description of Artificial Sequence: Synthetic oligonucleotide
  Antisense strand to SEQ ID NO: 68184
uguuacgaucucagaugug

SEQ ID NO: 68266 - RNA, 19 nt, Artificial Sequence
  Description of Artificial Sequence: Synthetic oligonucleotide
  Sense strand starting at position 2305 of SEQ ID NO: 845
gguaauuucucgccugcca

SEQ ID NO: 68267 - RNA, 19 nt, Artificial Sequence
  Description of Artificial Sequence: Synthetic oligonucleotide
  Antisense strand to SEQ ID NO: 68186
uggcaggcgagaaauuacc

SEQ ID NO: 68268 - RNA, 19 nt, Artificial Sequence
  Description of Artificial Sequence: Synthetic oligonucleotide
  Sense strand starting at position 2293 of SEQ ID NO: 845
ggaauaucugcugguaauu

SEQ ID NO: 68269 - RNA, 19 nt, Artificial Sequence
  Description of Artificial Sequence: Synthetic oligonucleotide
  Antisense strand to SEQ ID NO: 68188
aauuaccagcagauauucc

SEQ ID NO: 68270 - RNA, 19 nt, Artificial Sequence
  Description of Artificial Sequence: Synthetic oligonucleotide
  Sense strand starting at position 2256 of SEQ ID NO: 845
ggcggagauuucuaaauua

SEQ ID NO: 68271 - RNA, 19 nt, Artificial Sequence
  Description of Artificial Sequence: Synthetic oligonucleotide
  Antisense strand to SEQ ID NO: 68190
uaauuuagaaaucuccgcc

SEQ ID NO: 68272 - RNA, 19 nt, Artificial Sequence
  Description of Artificial Sequence: Synthetic oligonucleotide
  Sense strand starting at position 1174 of SEQ ID NO: 845
uggauaauccaggguucuu

SEQ ID NO: 68273 - RNA, 19 nt, Artificial Sequence
  Description of Artificial Sequence: Synthetic oligonucleotide
  Antisense strand to SEQ ID NO: 68192
aagaacccuggauuaucca

SEQ ID NO: 68274 - RNA, 19 nt, Artificial Sequence
  Description of Artificial Sequence: Synthetic oligonucleotide
  Sense strand starting at position 1173 of SEQ ID NO: 845
cuggauaauccaggguucu

SEQ ID NO: 68275 - RNA, 19 nt, Artificial Sequence
  Description of Artificial Sequence: Synthetic oligonucleotide
  Antisense strand to SEQ ID NO: 68194
agaacccuggauuauccag

SEQ ID NO: 68276 - RNA, 19 nt, Artificial Sequence
  Description of Artificial Sequence: Synthetic oligonucleotide
  Sense strand starting at position 860 of SEQ ID NO: 845
uguccaacucuguaacuua

SEQ ID NO: 68277 - RNA, 19 nt, Artificial Sequence
  Description of Artificial Sequence: Synthetic oligonucleotide
  Antisense strand to SEQ ID NO: 68196
uaaguuacagaguuggaca

SEQ ID NO: 68278 - RNA, 19 nt, Artificial Sequence
  Description of Artificial Sequence: Synthetic oligonucleotide
  Sense strand starting at position 852 of SEQ ID NO: 845
agugaauauguccaacucu

SEQ ID NO: 68279 - RNA, 19 nt, Artificial Sequence
  Description of Artificial Sequence: Synthetic oligonucleotide
  Antisense strand to SEQ ID NO: 68198
agaguuggacauauucacu

SEQ ID NO: 68280 - RNA, 19 nt, Artificial Sequence
  Description of Artificial Sequence: Synthetic oligonucleotide
  Sense strand starting at position 836 of SEQ ID NO: 845
cuaccauagucuuuacagu

SEQ ID NO: 68281 - RNA, 19 nt, Artificial Sequence
  Description of Artificial Sequence: Synthetic oligonucleotide
  Antisense strand to SEQ ID NO: 68200
acuguaaagacuaugguag

SEQ ID NO: 68282 - RNA, 19 nt, Artificial Sequence
  Description of Artificial Sequence: Synthetic oligonucleotide
  Sense strand starting at position 830 of SEQ ID NO: 845
agaagucuaccauagucuu

SEQ ID NO: 68283 - RNA, 19 nt, Artificial Sequence
  Description of Artificial Sequence: Synthetic oligonucleotide
  Antisense strand to SEQ ID NO: 68202
aagacuaugguagacuucu

SEQ ID NO: 68284 - RNA, 19 nt, Artificial Sequence
  Description of Artificial Sequence: Synthetic oligonucleotide
  Sense strand starting at position 768 of SEQ ID NO: 845
acaguaauuccugaaguca

SEQ ID NO: 68285 - RNA, 19 nt, Artificial Sequence
  Description of Artificial Sequence: Synthetic oligonucleotide
  Antisense strand to SEQ ID NO: 68204
ugacuucaggaauuacugu

SEQ ID NO: 68286 - RNA, 19 nt, Artificial Sequence
  Description of Artificial Sequence: Synthetic oligonucleotide
  Sense strand starting at position 715 of SEQ ID NO: 845
acauccgacuguguuuaaa

SEQ ID NO: 68287 - RNA, 19 nt, Artificial Sequence
  Description of Artificial Sequence: Synthetic oligonucleotide
  Antisense strand to SEQ ID NO: 68206
uuuaaacacagucggaugu

SEQ ID NO: 68288 - RNA, 19 nt, Artificial Sequence
  Description of Artificial Sequence: Synthetic oligonucleotide
  Sense strand starting at position 652 of SEQ ID NO: 845
ccaguauucuuuguaugau

SEQ ID NO: 68289 - RNA, 19 nt, Artificial Sequence
  Description of Artificial Sequence: Synthetic oligonucleotide
  Antisense strand to SEQ ID NO: 68208
aucauacaaagaauacugg

SEQ ID NO: 68290 - RNA, 19 nt, Artificial Sequence
  Description of Artificial Sequence: Synthetic oligonucleotide
  Sense strand starting at position 617 of SEQ ID NO: 845
gaagaaauguggcuugauu

SEQ ID NO: 68291 - RNA, 19 nt, Artificial Sequence
  Description of Artificial Sequence: Synthetic oligonucleotide
  Antisense strand to SEQ ID NO: 68210
aaucaagccacauuucuuc

SEQ ID NO: 68292 - RNA, 19 nt, Artificial Sequence
  Description of Artificial Sequence: Synthetic oligonucleotide
  Sense strand starting at position 500 of SEQ ID NO: 845
uuguaaggguuucuguaga

SEQ ID NO: 68293 - RNA, 19 nt, Artificial Sequence
  Description of Artificial Sequence: Synthetic oligonucleotide
  Antisense strand to SEQ ID NO: 68212
ucuacagaaacccuuacaa

SEQ ID NO: 68294 - RNA, 19 nt, Artificial Sequence
  Description of Artificial Sequence: Synthetic oligonucleotide
  Sense strand starting at position 355 of SEQ ID NO: 845
gggcacuuagaauguacaa

SEQ ID NO: 68295 - RNA, 19 nt, Artificial Sequence
  Description of Artificial Sequence: Synthetic oligonucleotide
  Antisense strand to SEQ ID NO: 68214
uuguacauucuaagugccc

SEQ ID NO: 68296 - RNA, 19 nt, Artificial Sequence
  Description of Artificial Sequence: Synthetic oligonucleotide
  Sense strand starting at position 107 of SEQ ID NO: 845
gcugguuaacaguaaauau

SEQ ID NO: 68297 - RNA, 19 nt, Artificial Sequence
  Description of Artificial Sequence: Synthetic oligonucleotide
  Antisense strand to SEQ ID NO: 68216
auauuuacuguuaaccagc

SEQ ID NO: 68298 - RNA, 19 nt, Artificial Sequence
  Description of Artificial Sequence: Synthetic oligonucleotide
  Sense strand starting at position 628 of SEQ ID NO: 846
guagaagaaaucugcuuag

SEQ ID NO: 68299 - RNA, 19 nt, Artificial Sequence
  Description of Artificial Sequence: Synthetic oligonucleotide
  Antisense strand to SEQ ID NO: 68218
cuaagcagauuucuucuac

SEQ ID NO: 68300 - RNA, 19 nt, Artificial Sequence
  Description of Artificial Sequence: Synthetic oligonucleotide
  Sense strand starting at position 631 of SEQ ID NO: 846
gaagaaaucugcuuaggcu

SEQ ID NO: 68301 - RNA, 19 nt, Artificial Sequence
  Description of Artificial Sequence: Synthetic oligonucleotide
  Antisense strand to SEQ ID NO: 68220
agccuaagcagauuucuuc

SEQ ID NO: 68302 - RNA, 19 nt, Artificial Sequence
  Description of Artificial Sequence: Synthetic oligonucleotide
  Sense strand starting at position 758 of SEQ ID NO: 846
acgacugugccacagauca

SEQ ID NO: 68303 - RNA, 19 nt, Artificial Sequence
  Description of Artificial Sequence: Synthetic oligonucleotide
  Antisense strand to SEQ ID NO: 68222
ugaucuguggcacagucgu

SEQ ID NO: 68304 - RNA, 19 nt, Artificial Sequence
  Description of Artificial Sequence: Synthetic oligonucleotide
  Sense strand starting at position 1217 of SEQ ID NO: 846
ugggacuaucucugguacu

SEQ ID NO: 68305 - RNA, 19 nt, Artificial Sequence
  Description of Artificial Sequence: Synthetic oligonucleotide
  Antisense strand to SEQ ID NO: 68224
aguaccagagauaguccca

SEQ ID NO: 68306 - RNA, 19 nt, Artificial Sequence
  Description of Artificial Sequence: Synthetic oligonucleotide
  Sense strand starting at position 1312 of SEQ ID NO: 846
uagaguucucugcagauug

SEQ ID NO: 68307 - RNA, 19 nt, Artificial Sequence
  Description of Artificial Sequence: Synthetic oligonucleotide
  Antisense strand to SEQ ID NO: 68226
caaucugcagagaacucua

SEQ ID NO: 68308 - RNA, 19 nt, Artificial Sequence
  Description of Artificial Sequence: Synthetic oligonucleotide
  Sense strand starting at position 1392 of SEQ ID NO: 846
uggaaauggguggguucau

SEQ ID NO: 68309 - RNA, 19 nt, Artificial Sequence
  Description of Artificial Sequence: Synthetic oligonucleotide
  Antisense strand to SEQ ID NO: 68228
augaacccacccauuucca

SEQ ID NO: 68310 - RNA, 19 nt, Artificial Sequence
  Description of Artificial Sequence: Synthetic oligonucleotide
  Sense strand starting at position 1832 of SEQ ID NO: 846
uaagguuuccuguauguga

SEQ ID NO: 68311 - RNA, 19 nt, Artificial Sequence
  Description of Artificial Sequence: Synthetic oligonucleotide
  Antisense strand to SEQ ID NO: 68230
ucacauacaggaaaccuua

SEQ ID NO: 68312 - RNA, 19 nt, Artificial Sequence
  Description of Artificial Sequence: Synthetic oligonucleotide
  Sense strand starting at position 1841 of SEQ ID NO: 846
cuguaugugagauggaaga

SEQ ID NO: 68313 - RNA, 19 nt, Artificial Sequence
  Description of Artificial Sequence: Synthetic oligonucleotide
  Antisense strand to SEQ ID NO: 68232
ucuuccaucucacauacag

SEQ ID NO: 68314 - RNA, 19 nt, Artificial Sequence
  Description of Artificial Sequence: Synthetic oligonucleotide
  Sense strand starting at position 1874 of SEQ ID NO: 846
gggauugaguaucccaacu

SEQ ID NO: 68315 - RNA, 19 nt, Artificial Sequence
  Description of Artificial Sequence: Synthetic oligonucleotide
  Antisense strand to SEQ ID NO: 68234
aguugggauacucaauccc

SEQ ID NO: 68316 - RNA, 19 nt, Artificial Sequence
  Description of Artificial Sequence: Synthetic oligonucleotide
  Sense strand starting at position 1959 of SEQ ID NO: 846
gccuacauugacugagacu

SEQ ID NO: 68317 - RNA, 19 nt, Artificial Sequence
  Description of Artificial Sequence: Synthetic oligonucleotide
  Antisense strand to SEQ ID NO: 68236
agucucagucaauguaggc

SEQ ID NO: 68318 - RNA, 19 nt, Artificial Sequence
  Description of Artificial Sequence: Synthetic oligonucleotide
  Sense strand starting at position 1998 of SEQ ID NO: 846
uacuucuuagucuagggau

SEQ ID NO: 68319 - RNA, 19 nt, Artificial Sequence
  Description of Artificial Sequence: Synthetic oligonucleotide
  Antisense strand to SEQ ID NO: 68238
aucccuagacuaagaagua

SEQ ID NO: 68320 - RNA, 19 nt, Artificial Sequence
  Description of Artificial Sequence: Synthetic oligonucleotide
  Sense strand starting at position 2000 of SEQ ID NO: 846
cuucuuagucuagggauug

SEQ ID NO: 68321 - RNA, 19 nt, Artificial Sequence
  Description of Artificial Sequence: Synthetic oligonucleotide
  Antisense strand to SEQ ID NO: 68240
caaucccuagacuaagaag

SEQ ID NO: 68322 - RNA, 19 nt, Artificial Sequence
  Description of Artificial Sequence: Synthetic oligonucleotide
  Sense strand starting at position 2033 of SEQ ID NO: 846
agcaaugugauaggucaag

SEQ ID NO: 68323 - RNA, 19 nt, Artificial Sequence
  Description of Artificial Sequence: Synthetic oligonucleotide
  Antisense strand to SEQ ID NO: 68242
cuugaccuaucacauugcu

SEQ ID NO: 68324 - RNA, 19 nt, Artificial Sequence
  Description of Artificial Sequence: Synthetic oligonucleotide
  Sense strand starting at position 2110 of SEQ ID NO: 846
gggaaaugaucugcugggu

SEQ ID NO: 68325 - RNA, 19 nt, Artificial Sequence
  Description of Artificial Sequence: Synthetic oligonucleotide
  Antisense strand to SEQ ID NO: 68244
acccagcagaucauuuccc

SEQ ID NO: 68326 - RNA, 19 nt, Artificial Sequence
  Description of Artificial Sequence: Synthetic oligonucleotide
  Sense strand starting at position 2123 of SEQ ID NO: 846
cuggguucugacggaagga

SEQ ID NO: 68327 - RNA, 19 nt, Artificial Sequence
  Description of Artificial Sequence: Synthetic oligonucleotide
  Antisense strand to SEQ ID NO: 68246
uccuuccgucagaacccag

SEQ ID NO: 68328 - RNA, 19 nt, Artificial Sequence
  Description of Artificial Sequence: Synthetic oligonucleotide
  Sense strand starting at position 2214 of SEQ ID NO: 846
gcaucauagagcuagagau

SEQ ID NO: 68329 - RNA, 19 nt, Artificial Sequence
  Description of Artificial Sequence: Synthetic oligonucleotide
  Antisense strand to SEQ ID NO: 68248
aucucuagcucuaugaugc

SEQ ID NO: 68330 - RNA, 19 nt, Artificial Sequence
  Description of Artificial Sequence: Synthetic oligonucleotide
  Sense strand starting at position 2229 of SEQ ID NO: 846
agauuacuggcacauaugu

SEQ ID NO: 68331 - RNA, 19 nt, Artificial Sequence
  Description of Artificial Sequence: Synthetic oligonucleotide
  Antisense strand to SEQ ID NO: 68250
acauaugugccaguaaucu

SEQ ID NO: 68332 - RNA, 19 nt, Artificial Sequence
  Description of Artificial Sequence: Synthetic oligonucleotide
  Sense strand starting at position 2237 of SEQ ID NO: 846
ggcacauauguagaaagca

SEQ ID NO: 68333 - RNA, 19 nt, Artificial Sequence
  Description of Artificial Sequence: Synthetic oligonucleotide
  Antisense strand to SEQ ID NO: 68252
ugcuuucuacauaugugcc

SEQ ID NO: 68334 - RNA, 19 nt, Artificial Sequence
  Description of Artificial Sequence: Synthetic oligonucleotide
  Sense strand starting at position 2249 of SEQ ID NO: 846
gaaagcauuccuuauguug

SEQ ID NO: 68335 - RNA, 19 nt, Artificial Sequence
  Description of Artificial Sequence: Synthetic oligonucleotide
  Antisense strand to SEQ ID NO: 68254
caacauaaggaaugcuuuc

SEQ ID NO: 68336 - RNA, 19 nt, Artificial Sequence
  Description of Artificial Sequence: Synthetic oligonucleotide
  Sense strand starting at position 2278 of SEQ ID NO: 846
uuauaaggucuugaucuca

SEQ ID NO: 68337 - RNA, 19 nt, Artificial Sequence
  Description of Artificial Sequence: Synthetic oligonucleotide
  Antisense strand to SEQ ID NO: 68256
ugagaucaagaccuuauaa

SEQ ID NO: 68338 - RNA, 19 nt, Artificial Sequence
  Description of Artificial Sequence: Synthetic oligonucleotide
  Sense strand starting at position 2614 of SEQ ID NO: 846
agguuuggugaaugaauaa

SEQ ID NO: 68339 - RNA, 19 nt, Artificial Sequence
  Description of Artificial Sequence: Synthetic oligonucleotide
  Antisense strand to SEQ ID NO: 68258
uuauucauucaccaaaccu

SEQ ID NO: 68340 - RNA, 19 nt, Artificial Sequence
  Description of Artificial Sequence: Synthetic oligonucleotide
  Sense strand starting at position 2718 of SEQ ID NO: 846
aaaugaacuuugcugguau

SEQ ID NO: 68341 - RNA, 19 nt, Artificial Sequence
  Description of Artificial Sequence: Synthetic oligonucleotide
  Antisense strand to SEQ ID NO: 68260
auaccagcaaaguucauuu

SEQ ID NO: 68342 - RNA, 19 nt, Artificial Sequence
  Description of Artificial Sequence: Synthetic oligonucleotide
  Sense strand starting at position 2747 of SEQ ID NO: 846
guuugugcugccucacaca

SEQ ID NO: 68343 - RNA, 19 nt, Artificial Sequence
  Description of Artificial Sequence: Synthetic oligonucleotide
  Antisense strand to SEQ ID NO: 68262
ugugugaggcagcacaaac

SEQ ID NO: 68344 - RNA, 19 nt, Artificial Sequence
  Description of Artificial Sequence: Synthetic oligonucleotide
  Sense strand starting at position 3053 of SEQ ID NO: 846
cccggaagcucauuagaca

SEQ ID NO: 68345 - RNA, 19 nt, Artificial Sequence
  Description of Artificial Sequence: Synthetic oligonucleotide
  Antisense strand to SEQ ID NO: 68264
ugucuaaugagcuuccggg

SEQ ID NO: 68346 - RNA, 19 nt, Artificial Sequence
  Description of Artificial Sequence: Synthetic oligonucleotide
  Sense strand starting at position 3054 of SEQ ID NO: 846
ccggaagcucauuagacau

SEQ ID NO: 68347 - RNA, 19 nt, Artificial Sequence
  Description of Artificial Sequence: Synthetic oligonucleotide
  Antisense strand to SEQ ID NO: 68266
augucuaaugagcuuccgg

SEQ ID NO: 68348 - RNA, 19 nt, Artificial Sequence
  Description of Artificial Sequence: Synthetic oligonucleotide
  Sense strand starting at position 3084 of SEQ ID NO: 846
ggcuuuaauccagaacuuc

SEQ ID NO: 68349 - RNA, 19 nt, Artificial Sequence
  Description of Artificial Sequence: Synthetic oligonucleotide
  Antisense strand to SEQ ID NO: 68268
gaaguucuggauuaaagcc

SEQ ID NO: 68350 - RNA, 19 nt, Artificial Sequence
  Description of Artificial Sequence: Synthetic oligonucleotide
  Sense strand starting at position 3116 of SEQ ID NO: 846
gcaguuuaacaagaucuca

SEQ ID NO: 68351 - RNA, 19 nt, Artificial Sequence
  Description of Artificial Sequence: Synthetic oligonucleotide
  Antisense strand to SEQ ID NO: 68270
ugagaucuuguuaaacugc

SEQ ID NO: 68352 - RNA, 19 nt, Artificial Sequence
  Description of Artificial Sequence: Synthetic oligonucleotide
  Sense strand starting at position 3128 of SEQ ID NO: 846
gaucucaggugacucuaaa

SEQ ID NO: 68353 - RNA, 19 nt, Artificial Sequence
  Description of Artificial Sequence: Synthetic oligonucleotide
  Antisense strand to SEQ ID NO: 68272
uuuagagucaccugagauc

SEQ ID NO: 68354 - RNA, 19 nt, Artificial Sequence
  Description of Artificial Sequence: Synthetic oligonucleotide
  Sense strand starting at position 3207 of SEQ ID NO: 846
cuaagaaucaccuggguug

SEQ ID NO: 68355 - RNA, 19 nt, Artificial Sequence
  Description of Artificial Sequence: Synthetic oligonucleotide
  Antisense strand to SEQ ID NO: 68274
caacccaggugauucuuag

SEQ ID NO: 68356 - RNA, 19 nt, Artificial Sequence
  Description of Artificial Sequence: Synthetic oligonucleotide
  Sense strand starting at position 3266 of SEQ ID NO: 846
agaagauuacccugcuuuc

SEQ ID NO: 68357 - RNA, 19 nt, Artificial Sequence
  Description of Artificial Sequence: Synthetic oligonucleotide
  Antisense strand to SEQ ID NO: 68276
gaaagcaggguaaucuucu

SEQ ID NO: 68358 - RNA, 19 nt, Artificial Sequence
  Description of Artificial Sequence: Synthetic oligonucleotide
  Sense strand starting at position 3317 of SEQ ID NO: 846
guauguuagcaucaaacuc

SEQ ID NO: 68359 - RNA, 19 nt, Artificial Sequence
  Description of Artificial Sequence: Synthetic oligonucleotide
  Antisense strand to SEQ ID NO: 68278
gaguuugaugcuaacauac

SEQ ID NO: 68360 - RNA, 19 nt, Artificial Sequence
  Description of Artificial Sequence: Synthetic oligonucleotide
  Sense strand starting at position 3473 of SEQ ID NO: 846
uuaauuggucuggagugca

SEQ ID NO: 68361 - RNA, 19 nt, Artificial Sequence
  Description of Artificial Sequence: Synthetic oligonucleotide
  Antisense strand to SEQ ID NO: 68280
ugcacuccagaccaauuaa

SEQ ID NO: 68362 - RNA, 19 nt, Artificial Sequence
  Description of Artificial Sequence: Synthetic oligonucleotide
  Sense strand starting at position 3559 of SEQ ID NO: 846
gaggucgaaggauguaauu

SEQ ID NO: 68363 - RNA, 19 nt, Artificial Sequence
  Description of Artificial Sequence: Synthetic oligonucleotide
  Antisense strand to SEQ ID NO: 68282
aauuacauccuucgaccuc

SEQ ID NO: 68364 - RNA, 19 nt, Artificial Sequence
  Description of Artificial Sequence: Synthetic oligonucleotide
  Sense strand starting at position 3792 of SEQ ID NO: 846
uuggcaaguccuuauugac

SEQ ID NO: 68365 - RNA, 19 nt, Artificial Sequence
  Description of Artificial Sequence: Synthetic oligonucleotide
  Antisense strand to SEQ ID NO: 68284
gucaauaaggacuugccaa

SEQ ID NO: 68366 - RNA, 19 nt, Artificial Sequence
  Description of Artificial Sequence: Synthetic oligonucleotide
  Sense strand starting at position 3821 of SEQ ID NO: 846
acaggagagucucuuugaa

SEQ ID NO: 68367 - RNA, 19 nt, Artificial Sequence
  Description of Artificial Sequence: Synthetic oligonucleotide
  Antisense strand to SEQ ID NO: 68286
uucaaagagacucuccugu

SEQ ID NO: 68368 - RNA, 19 nt, Artificial Sequence
  Description of Artificial Sequence: Synthetic oligonucleotide
  Sense strand starting at position 3823 of SEQ ID NO: 846
aggagagucucuuugaaau

SEQ ID NO: 68369 - RNA, 19 nt, Artificial Sequence
  Description of Artificial Sequence: Synthetic oligonucleotide
  Antisense strand to SEQ ID NO: 68288
auuucaaagagacucuccu

SEQ ID NO: 68370 - RNA, 19 nt, Artificial Sequence
  Description of Artificial Sequence: Synthetic oligonucleotide
  Sense strand starting at position 3839 of SEQ ID NO: 846
aauugugacuaucuuggaa

SEQ ID NO: 68371 - RNA, 19 nt, Artificial Sequence
  Description of Artificial Sequence: Synthetic oligonucleotide
  Antisense strand to SEQ ID NO: 68290
uuccaagauagucacaauu

SEQ ID NO: 68372 - RNA, 19 nt, Artificial Sequence
  Description of Artificial Sequence: Synthetic oligonucleotide
  Sense strand starting at position 3842 of SEQ ID NO: 846
ugugacuaucuuggaaucu

SEQ ID NO: 68373 - RNA, 19 nt, Artificial Sequence
  Description of Artificial Sequence: Synthetic oligonucleotide
  Antisense strand to SEQ ID NO: 68292
agauuccaagauagucaca

SEQ ID NO: 68374 - RNA, 19 nt, Artificial Sequence
  Description of Artificial Sequence: Synthetic oligonucleotide
  Sense strand starting at position 3851 of SEQ ID NO: 846
cuuggaaucuugguuauaa

SEQ ID NO: 68375 - RNA, 19 nt, Artificial Sequence
  Description of Artificial Sequence: Synthetic oligonucleotide
  Antisense strand to SEQ ID NO: 68294
uuauaaccaagauuccaag

SEQ ID NO: 68376 - RNA, 19 nt, Artificial Sequence
  Description of Artificial Sequence: Synthetic oligonucleotide
  Sense strand starting at position 3852 of SEQ ID NO: 846
uuggaaucuugguuauaag

SEQ ID NO: 68377 - RNA, 19 nt, Artificial Sequence
  Description of Artificial Sequence: Synthetic oligonucleotide
  Antisense strand to SEQ ID NO: 68296
cuuauaaccaagauuccaa

SEQ ID NO: 68378 - RNA, 19 nt, Artificial Sequence
  Description of Artificial Sequence: Synthetic oligonucleotide
  Sense strand starting at position 99 of SEQ ID NO: 847
acguccauuugcuaaucau

SEQ ID NO: 68379 - RNA, 19 nt, Artificial Sequence
  Description of Artificial Sequence: Synthetic oligonucleotide
  Antisense strand to SEQ ID NO: 68298
augauuagcaaauggacgu

SEQ ID NO: 68380 - RNA, 19 nt, Artificial Sequence
  Description of Artificial Sequence: Synthetic oligonucleotide
  Sense strand starting at position 183 of SEQ ID NO: 847
auuugagacuaauguuauc

SEQ ID NO: 68381 - RNA, 19 nt, Artificial Sequence
  Description of Artificial Sequence: Synthetic oligonucleotide
  Antisense strand to SEQ ID NO: 68300
gauaacauuagucucaaau

SEQ ID NO: 68382 - RNA, 19 nt, Artificial Sequence
  Description of Artificial Sequence: Synthetic oligonucleotide
  Sense strand starting at position 186 of SEQ ID NO: 847
ugagacuaauguuaucaga

SEQ ID NO: 68383 - RNA, 19 nt, Artificial Sequence
  Description of Artificial Sequence: Synthetic oligonucleotide
  Antisense strand to SEQ ID NO: 68302
ucugauaacauuagucuca

SEQ ID NO: 68384 - RNA, 19 nt, Artificial Sequence
  Description of Artificial Sequence: Synthetic oligonucleotide
  Sense strand starting at position 189 of SEQ ID NO: 847
gacuaauguuaucagauag

SEQ ID NO: 68385 - RNA, 19 nt, Artificial Sequence
  Description of Artificial Sequence: Synthetic oligonucleotide
  Antisense strand to SEQ ID NO: 68304
cuaucugauaacauuaguc

SEQ ID NO: 68386 - RNA, 19 nt, Artificial Sequence
  Description of Artificial Sequence: Synthetic oligonucleotide
  Sense strand starting at position 258 of SEQ ID NO: 847
gguuaccauuucuacacua

SEQ ID NO: 68387 - RNA, 19 nt, Artificial Sequence
  Description of Artificial Sequence: Synthetic oligonucleotide
  Antisense strand to SEQ ID NO: 68306
uaguguagaaaugguaacc

SEQ ID NO: 68388 - RNA, 19 nt, Artificial Sequence
  Description of Artificial Sequence: Synthetic oligonucleotide
  Sense strand starting at position 282 of SEQ ID NO: 847
ccauaaguccaguacugua

SEQ ID NO: 68389 - RNA, 19 nt, Artificial Sequence
  Description of Artificial Sequence: Synthetic oligonucleotide
  Antisense strand to SEQ ID NO: 68308
uacaguacuggacuuaugg

SEQ ID NO: 68390 - RNA, 19 nt, Artificial Sequence
  Description of Artificial Sequence: Synthetic oligonucleotide
  Sense strand starting at position 608 of SEQ ID NO: 847
gcaugcuaaccauguaauu

SEQ ID NO: 68391 - RNA, 19 nt, Artificial Sequence
  Description of Artificial Sequence: Synthetic oligonucleotide
  Antisense strand to SEQ ID NO: 68310
aauuacaugguuagcaugc

SEQ ID NO: 68392 - RNA, 19 nt, Artificial Sequence
  Description of Artificial Sequence: Synthetic oligonucleotide
  Sense strand starting at position 719 of SEQ ID NO: 847
ccgacagcccuguggaauu

SEQ ID NO: 68393 - RNA, 19 nt, Artificial Sequence
  Description of Artificial Sequence: Synthetic oligonucleotide
  Antisense strand to SEQ ID NO: 68312
aauuccacagggcugucgg

SEQ ID NO: 68394 - RNA, 19 nt, Artificial Sequence
  Description of Artificial Sequence: Synthetic oligonucleotide
  Sense strand starting at position 1133 of SEQ ID NO: 847
cccggcuuccgcuuuaaau

SEQ ID NO: 68395 - RNA, 19 nt, Artificial Sequence
  Description of Artificial Sequence: Synthetic oligonucleotide
  Antisense strand to SEQ ID NO: 68314
auuuaaagcggaagccggg

SEQ ID NO: 68396 - RNA, 19 nt, Artificial Sequence
  Description of Artificial Sequence: Synthetic oligonucleotide
  Sense strand starting at position 1134 of SEQ ID NO: 847
ccggcuuccgcuuuaaauc

SEQ ID NO: 68397 - RNA, 19 nt, Artificial Sequence
  Description of Artificial Sequence: Synthetic oligonucleotide
  Antisense strand to SEQ ID NO: 68316
gauuuaaagcggaagccgg

SEQ ID NO: 68398 - RNA, 19 nt, Artificial Sequence
  Description of Artificial Sequence: Synthetic oligonucleotide
  Sense strand starting at position 2415 of SEQ ID NO: 847
gcgagaucgcuuccugcag

SEQ ID NO: 68399 - RNA, 19 nt, Artificial Sequence
  Description of Artificial Sequence: Synthetic oligonucleotide
  Antisense strand to SEQ ID NO: 68318
cugcaggaagcgaucucgc

SEQ ID NO: 68400 - RNA, 19 nt, Artificial Sequence
  Description of Artificial Sequence: Synthetic oligonucleotide
  Sense strand starting at position 2416 of SEQ ID NO: 847
cgagaucgcuuccugcaga

SEQ ID NO: 68401 - RNA, 19 nt, Artificial Sequence
  Description of Artificial Sequence: Synthetic oligonucleotide
  Antisense strand to SEQ ID NO: 68320
ucugcaggaagcgaucucg

SEQ ID NO: 68402 - RNA, 19 nt, Artificial Sequence
  Description of Artificial Sequence: Synthetic oligonucleotide
  Sense strand starting at position 2419 of SEQ ID NO: 847
gaucgcuuccugcagagga

SEQ ID NO: 68403 - RNA, 19 nt, Artificial Sequence
  Description of Artificial Sequence: Synthetic oligonucleotide
  Antisense strand to SEQ ID NO: 68322
uccucugcaggaagcgauc

SEQ ID NO: 68404 - RNA, 19 nt, Artificial Sequence
  Description of Artificial Sequence: Synthetic oligonucleotide
  Sense strand starting at position 2553 of SEQ ID NO: 847
ggcucagugcgugugaagu

SEQ ID NO: 68405 - RNA, 19 nt, Artificial Sequence
  Description of Artificial Sequence: Synthetic oligonucleotide
  Antisense strand to SEQ ID NO: 68324
acuucacacgcacugagcc

SEQ ID NO: 68406 - RNA, 19 nt, Artificial Sequence
  Description of Artificial Sequence: Synthetic oligonucleotide
  Sense strand starting at position 2780 of SEQ ID NO: 847
caggcuugguguccucaga

SEQ ID NO: 68407 - RNA, 19 nt, Artificial Sequence
  Description of Artificial Sequence: Synthetic oligonucleotide
  Antisense strand to SEQ ID NO: 68326
ucugaggacaccaagccug

SEQ ID NO: 68408 - RNA, 19 nt, Artificial Sequence
  Description of Artificial Sequence: Synthetic oligonucleotide
  Sense strand starting at position 2846 of SEQ ID NO: 847
gcugucuuuccagcugagu

SEQ ID NO: 68409 - RNA, 19 nt, Artificial Sequence
  Description of Artificial Sequence: Synthetic oligonucleotide
  Antisense strand to SEQ ID NO: 68328
acucagcuggaaagacagc

SEQ ID NO: 68410 - RNA, 19 nt, Artificial Sequence
  Description of Artificial Sequence: Synthetic oligonucleotide
  Sense strand starting at position 3198 of SEQ ID NO: 847
gugcauggugcuuguguga

SEQ ID NO: 68411 - RNA, 19 nt, Artificial Sequence
  Description of Artificial Sequence: Synthetic oligonucleotide
  Antisense strand to SEQ ID NO: 68330
ucacacaagcaccaugcac

SEQ ID NO: 68412 - RNA, 19 nt, Artificial Sequence
  Description of Artificial Sequence: Synthetic oligonucleotide
  Sense strand starting at position 3201 of SEQ ID NO: 847
cauggugcuugugugagaa

SEQ ID NO: 68413 - RNA, 19 nt, Artificial Sequence
  Description of Artificial Sequence: Synthetic oligonucleotide
  Antisense strand to SEQ ID NO: 68332
uucucacacaagcaccaug

SEQ ID NO: 68414 - RNA, 19 nt, Artificial Sequence
  Description of Artificial Sequence: Synthetic oligonucleotide
  Sense strand starting at position 3204 of SEQ ID NO: 847
ggugcuugugugagaaagu

SEQ ID NO: 68415 - RNA, 19 nt, Artificial Sequence
  Description of Artificial Sequence: Synthetic oligonucleotide
  Antisense strand to SEQ ID NO: 68334
acuuucucacacaagcacc

SEQ ID NO: 68416 - RNA, 19 nt, Artificial Sequence
  Description of Artificial Sequence: Synthetic oligonucleotide
  Sense strand starting at position 3205 of SEQ ID NO: 847
gugcuugugugagaaagug

SEQ ID NO: 68417 - RNA, 19 nt, Artificial Sequence
  Description of Artificial Sequence: Synthetic oligonucleotide
  Antisense strand to SEQ ID NO: 68336
cacuuucucacacaagcac

SEQ ID NO: 68418 - RNA, 19 nt, Artificial Sequence
  Description of Artificial Sequence: Synthetic oligonucleotide
  Sense strand starting at position 3381 of SEQ ID NO: 847
cuuucuuucuggcacgaga

SEQ ID NO: 68419 - RNA, 19 nt, Artificial Sequence
  Description of Artificial Sequence: Synthetic oligonucleotide
  Antisense strand to SEQ ID NO: 68338
ucucgugccagaaagaaag

SEQ ID NO: 68420 - RNA, 19 nt, Artificial Sequence
  Description of Artificial Sequence: Synthetic oligonucleotide
  Sense strand starting at position 3461 of SEQ ID NO: 847
ccugguucauugugggaga

SEQ ID NO: 68421 - RNA, 19 nt, Artificial Sequence
  Description of Artificial Sequence: Synthetic oligonucleotide
  Antisense strand to SEQ ID NO: 68340
ucucccacaaugaaccagg

SEQ ID NO: 68422 - RNA, 19 nt, Artificial Sequence
  Description of Artificial Sequence: Synthetic oligonucleotide
  Sense strand starting at position 3462 of SEQ ID NO: 847
cugguucauugugggagaa

SEQ ID NO: 68423 - RNA, 19 nt, Artificial Sequence
  Description of Artificial Sequence: Synthetic oligonucleotide
  Antisense strand to SEQ ID NO: 68342
uucucccacaaugaaccag

SEQ ID NO: 68424 - RNA, 19 nt, Artificial Sequence
  Description of Artificial Sequence: Synthetic oligonucleotide
  Sense strand starting at position 3463 of SEQ ID NO: 847
ugguucauugugggagaau

SEQ ID NO: 68425 - RNA, 19 nt, Artificial Sequence
  Description of Artificial Sequence: Synthetic oligonucleotide
  Antisense strand to SEQ ID NO: 68344
auucucccacaaugaacca

SEQ ID NO: 68426 - RNA, 19 nt, Artificial Sequence
  Description of Artificial Sequence: Synthetic oligonucleotide
  Sense strand starting at position 3464 of SEQ ID NO: 847
gguucauugugggagaaug

SEQ ID NO: 68427 - RNA, 19 nt, Artificial Sequence
  Description of Artificial Sequence: Synthetic oligonucleotide
  Antisense strand to SEQ ID NO: 68346
cauucucccacaaugaacc

SEQ ID NO: 68428 - RNA, 19 nt, Artificial Sequence
  Description of Artificial Sequence: Synthetic oligonucleotide
  Sense strand starting at position 3474 of SEQ ID NO: 847
gggagaaugucaugcagag

SEQ ID NO: 68429 - RNA, 19 nt, Artificial Sequence
  Description of Artificial Sequence: Synthetic oligonucleotide
  Antisense strand to SEQ ID NO: 68348
cucugcaugacauucuccc

SEQ ID NO: 68430 - RNA, 19 nt, Artificial Sequence
  Description of Artificial Sequence: Synthetic oligonucleotide
  Sense strand starting at position 3556 of SEQ ID NO: 847
ggaacacaucuauguacau

SEQ ID NO: 68431 - RNA, 19 nt, Artificial Sequence
  Description of Artificial Sequence: Synthetic oligonucleotide
  Antisense strand to SEQ ID NO: 68350
auguacauagauguguucc

SEQ ID NO: 68432 - RNA, 19 nt, Artificial Sequence
  Description of Artificial Sequence: Synthetic oligonucleotide
  Sense strand starting at position 3600 of SEQ ID NO: 847
guuucaugggcguguuugu

SEQ ID NO: 68433 - RNA, 19 nt, Artificial Sequence
  Description of Artificial Sequence: Synthetic oligonucleotide
  Antisense strand to SEQ ID NO: 68352
acaaacacgcccaugaaac

SEQ ID NO: 68434 - RNA, 19 nt, Artificial Sequence
  Description of Artificial Sequence: Synthetic oligonucleotide
  Sense strand starting at position 3635 of SEQ ID NO: 847
ccacguguuuacucugaug

SEQ ID NO: 68435 - RNA, 19 nt, Artificial Sequence
  Description of Artificial Sequence: Synthetic oligonucleotide
  Antisense strand to SEQ ID NO: 68354
caucagaguaaacacgugg

SEQ ID NO: 68436 - RNA, 19 nt, Artificial Sequence
  Description of Artificial Sequence: Synthetic oligonucleotide
  Sense strand starting at position 3638 of SEQ ID NO: 847
cguguuuacucugaugcca

SEQ ID NO: 68437 - RNA, 19 nt, Artificial Sequence
  Description of Artificial Sequence: Synthetic oligonucleotide
  Antisense strand to SEQ ID NO: 68356
uggcaucagaguaaacacg

SEQ ID NO: 68438 - RNA, 19 nt, Artificial Sequence
  Description of Artificial Sequence: Synthetic oligonucleotide
  Sense strand starting at position 3671 of SEQ ID NO: 847
ggcucaaccuguucggaau

SEQ ID NO: 68439 - RNA, 19 nt, Artificial Sequence
  Description of Artificial Sequence: Synthetic oligonucleotide
  Antisense strand to SEQ ID NO: 68358
auuccgaacagguugagcc

SEQ ID NO: 68440 - RNA, 19 nt, Artificial Sequence
  Description of Artificial Sequence: Synthetic oligonucleotide
  Sense strand starting at position 3712 of SEQ ID NO: 847
ugaggaaccuggcucugau

SEQ ID NO: 68441 - RNA, 19 nt, Artificial Sequence
  Description of Artificial Sequence: Synthetic oligonucleotide
  Antisense strand to SEQ ID NO: 68360
aucagagccagguuccuca

SEQ ID NO: 68442 - RNA, 19 nt, Artificial Sequence
  Description of Artificial Sequence: Synthetic oligonucleotide
  Sense strand starting at position 3715 of SEQ ID NO: 847
ggaaccuggcucugauuau

SEQ ID NO: 68443 - RNA, 19 nt, Artificial Sequence
  Description of Artificial Sequence: Synthetic oligonucleotide
  Antisense strand to SEQ ID NO: 68362
auaaucagagccagguucc

SEQ ID NO: 68444 - RNA, 19 nt, Artificial Sequence
  Description of Artificial Sequence: Synthetic oligonucleotide
  Sense strand starting at position 3724 of SEQ ID NO: 847
cucugauuaucuccugugu

SEQ ID NO: 68445 - RNA, 19 nt, Artificial Sequence
  Description of Artificial Sequence: Synthetic oligonucleotide
  Antisense strand to SEQ ID NO: 68364
acacaggagauaaucagag

SEQ ID NO: 68446 - RNA, 19 nt, Artificial Sequence
  Description of Artificial Sequence: Synthetic oligonucleotide
  Sense strand starting at position 3726 of SEQ ID NO: 847
cugauuaucuccuguguaa

SEQ ID NO: 68447 - RNA, 19 nt, Artificial Sequence
  Description of Artificial Sequence: Synthetic oligonucleotide
  Antisense strand to SEQ ID NO: 68366
uuacacaggagauaaucag

SEQ ID NO: 68448 - RNA, 19 nt, Artificial Sequence
  Description of Artificial Sequence: Synthetic oligonucleotide
  Sense strand starting at position 3875 of SEQ ID NO: 847
aggagugaauucccaguga

SEQ ID NO: 68449 - RNA, 19 nt, Artificial Sequence
  Description of Artificial Sequence: Synthetic oligonucleotide
  Antisense strand to SEQ ID NO: 68368
ucacugggaauucacuccu

SEQ ID NO: 68450 - RNA, 19 nt, Artificial Sequence
  Description of Artificial Sequence: Synthetic oligonucleotide
  Sense strand starting at position 3879 of SEQ ID NO: 847
gugaauucccagugaaauu

SEQ ID NO: 68451 - RNA, 19 nt, Artificial Sequence
  Description of Artificial Sequence: Synthetic oligonucleotide
  Antisense strand to SEQ ID NO: 68370
aauuucacugggaauucac

SEQ ID NO: 68452 - RNA, 19 nt, Artificial Sequence
  Description of Artificial Sequence: Synthetic oligonucleotide
  Sense strand starting at position 31 of SEQ ID NO: 848
ggguucgauaucuaguaaa

SEQ ID NO: 68453 - RNA, 19 nt, Artificial Sequence
  Description of Artificial Sequence: Synthetic oligonucleotide
  Antisense strand to SEQ ID NO: 68372
uuuacuagauaucgaaccc

SEQ ID NO: 68454 - RNA, 19 nt, Artificial Sequence
  Description of Artificial Sequence: Synthetic oligonucleotide
  Sense strand starting at position 130 of SEQ ID NO: 848
ggacuuaaaccagggcuuu

SEQ ID NO: 68455 - RNA, 19 nt, Artificial Sequence
  Description of Artificial Sequence: Synthetic oligonucleotide
  Antisense strand to SEQ ID NO: 68374
aaagcccugguuuaagucc

SEQ ID NO: 68456 - RNA, 19 nt, Artificial Sequence
  Description of Artificial Sequence: Synthetic oligonucleotide
  Sense strand starting at position 258 of SEQ ID NO: 848
ugugaauaacguuaguuua

SEQ ID NO: 68457 - RNA, 19 nt, Artificial Sequence
  Description of Artificial Sequence: Synthetic oligonucleotide
  Antisense strand to SEQ ID NO: 68376
uaaacuaacguuauucaca

SEQ ID NO: 68458 - RNA, 19 nt, Artificial Sequence
  Description of Artificial Sequence: Synthetic oligonucleotide
  Sense strand starting at position 260 of SEQ ID NO: 848
ugaauaacguuaguuuacu

SEQ ID NO: 68459 - RNA, 19 nt, Artificial Sequence
  Description of Artificial Sequence: Synthetic oligonucleotide
  Antisense strand to SEQ ID NO: 68378
aguaaacuaacguuauuca

SEQ ID NO: 68460 - RNA, 19 nt, Artificial Sequence
  Description of Artificial Sequence: Synthetic oligonucleotide
  Sense strand starting at position 261 of SEQ ID NO: 848
gaauaacguuaguuuacua

SEQ ID NO: 68461 - RNA, 19 nt, Artificial Sequence
  Description of Artificial Sequence: Synthetic oligonucleotide
  Antisense strand to SEQ ID NO: 68380
uaguaaacuaacguuauuc

SEQ ID NO: 68462 - RNA, 19 nt, Artificial Sequence
  Description of Artificial Sequence: Synthetic oligonucleotide
  Sense strand starting at position 265 of SEQ ID NO: 848
aacguuaguuuacuagaaa

SEQ ID NO: 68463 - RNA, 19 nt, Artificial Sequence
  Description of Artificial Sequence: Synthetic oligonucleotide
  Antisense strand to SEQ ID NO: 68382
uuucuaguaaacuaacguu

SEQ ID NO: 68464 - RNA, 19 nt, Artificial Sequence
  Description of Artificial Sequence: Synthetic oligonucleotide
  Sense strand starting at position 340 of SEQ ID NO: 848
uccuuacuugaaugugauu

SEQ ID NO: 68465 - RNA, 19 nt, Artificial Sequence
  Description of Artificial Sequence: Synthetic oligonucleotide
  Antisense strand to SEQ ID NO: 68384
aaucacauucaaguaagga

SEQ ID NO: 68466 - RNA, 19 nt, Artificial Sequence
  Description of Artificial Sequence: Synthetic oligonucleotide
  Sense strand starting at position 630 of SEQ ID NO: 848
uaaacugugucggcaaaga

SEQ ID NO: 68467 - RNA, 19 nt, Artificial Sequence
  Description of Artificial Sequence: Synthetic oligonucleotide
  Antisense strand to SEQ ID NO: 68386
ucuuugccgacacaguuua

SEQ ID NO: 68468 - RNA, 19 nt, Artificial Sequence
  Description of Artificial Sequence: Synthetic oligonucleotide
  Sense strand starting at position 690 of SEQ ID NO: 848
ucaugugaaguuuguccaa

SEQ ID NO: 68469 - RNA, 19 nt, Artificial Sequence
  Description of Artificial Sequence: Synthetic oligonucleotide
  Antisense strand to SEQ ID NO: 68388
uuggacaaacuucacauga

SEQ ID NO: 68470 - RNA, 19 nt, Artificial Sequence
  Description of Artificial Sequence: Synthetic oligonucleotide
  Sense strand starting at position 692 of SEQ ID NO: 848
augugaaguuuguccaacu

SEQ ID NO: 68471 - RNA, 19 nt, Artificial Sequence
  Description of Artificial Sequence: Synthetic oligonucleotide
  Antisense strand to SEQ ID NO: 68390
aguuggacaaacuucacau

SEQ ID NO: 68472 - RNA, 19 nt, Artificial Sequence
  Description of Artificial Sequence: Synthetic oligonucleotide
  Sense strand starting at position 693 of SEQ ID NO: 848
ugugaaguuuguccaacuc

SEQ ID NO: 68473 - RNA, 19 nt, Artificial Sequence
  Description of Artificial Sequence: Synthetic oligonucleotide
  Antisense strand to SEQ ID NO: 68392
gaguuggacaaacuucaca

SEQ ID NO: 68474 - RNA, 19 nt, Artificial Sequence
  Description of Artificial Sequence: Synthetic oligonucleotide
  Sense strand starting at position 709 of SEQ ID NO: 848
cuccacacggucuaauaaa

SEQ ID NO: 68475 - RNA, 19 nt, Artificial Sequence
  Description of Artificial Sequence: Synthetic oligonucleotide
  Antisense strand to SEQ ID NO: 68394
uuuauuagaccguguggag

SEQ ID NO: 68476 - RNA, 19 nt, Artificial Sequence
  Description of Artificial Sequence: Synthetic oligonucleotide
  Sense strand starting at position 955 of SEQ ID NO: 848
cuuccuuaucgugaguuau

SEQ ID NO: 68477 - RNA, 19 nt, Artificial Sequence
  Description of Artificial Sequence: Synthetic oligonucleotide
  Antisense strand to SEQ ID NO: 68396
auaacucacgauaaggaag

SEQ ID NO: 68478 - RNA, 19 nt, Artificial Sequence
  Description of Artificial Sequence: Synthetic oligonucleotide
  Sense strand starting at position 959 of SEQ ID NO: 848
cuuaucgugaguuaugaau

SEQ ID NO: 68479 - RNA, 19 nt, Artificial Sequence
  Description of Artificial Sequence: Synthetic oligonucleotide
  Antisense strand to SEQ ID NO: 68398
auucauaacucacgauaag

SEQ ID NO: 68480 - RNA, 19 nt, Artificial Sequence
  Description of Artificial Sequence: Synthetic oligonucleotide
  Sense strand starting at position 1276 of SEQ ID NO: 848
ccgcuauuucccugcuaga

SEQ ID NO: 68481 - RNA, 19 nt, Artificial Sequence
  Description of Artificial Sequence: Synthetic oligonucleotide
  Antisense strand to SEQ ID NO: 68400
ucuagcagggaaauagcgg

SEQ ID NO: 68482 - RNA, 19 nt, Artificial Sequence
  Description of Artificial Sequence: Synthetic oligonucleotide
  Sense strand starting at position 2365 of SEQ ID NO: 848
gguucuguuccagaaacua

SEQ ID NO: 68483 - RNA, 19 nt, Artificial Sequence
  Description of Artificial Sequence: Synthetic oligonucleotide
  Antisense strand to SEQ ID NO: 68402
uaguuucuggaacagaacc

SEQ ID NO: 68484 - RNA, 19 nt, Artificial Sequence
  Description of Artificial Sequence: Synthetic oligonucleotide
  Sense strand starting at position 2452 of SEQ ID NO: 848
gagguauaacugcggauua

SEQ ID NO: 68485 - RNA, 19 nt, Artificial Sequence
  Description of Artificial Sequence: Synthetic oligonucleotide
  Antisense strand to SEQ ID NO: 68404
uaauccgcaguuauaccuc

SEQ ID NO: 68486 - RNA, 19 nt, Artificial Sequence
  Description of Artificial Sequence: Synthetic oligonucleotide
  Sense strand starting at position 2454 of SEQ ID NO: 848
gguauaacugcggauuaua

SEQ ID NO: 68487 - RNA, 19 nt, Artificial Sequence
  Description of Artificial Sequence: Synthetic oligonucleotide
  Antisense strand to SEQ ID NO: 68406
uauaauccgcaguuauacc

SEQ ID NO: 68488 - RNA, 19 nt, Artificial Sequence
  Description of Artificial Sequence: Synthetic oligonucleotide
  Sense strand starting at position 2559 of SEQ ID NO: 848
cagaguucugccuaaugaa

SEQ ID NO: 68489 - RNA, 19 nt, Artificial Sequence
  Description of Artificial Sequence: Synthetic oligonucleotide
  Antisense strand to SEQ ID NO: 68408
uucauuaggcagaacucug

SEQ ID NO: 68490 - RNA, 19 nt, Artificial Sequence
  Description of Artificial Sequence: Synthetic oligonucleotide
  Sense strand starting at position 2608 of SEQ ID NO: 848
ggguucaaggucggguaaa

SEQ ID NO: 68491 - RNA, 19 nt, Artificial Sequence
  Description of Artificial Sequence: Synthetic oligonucleotide
  Antisense strand to SEQ ID NO: 68410
uuuacccgaccuugaaccc

SEQ ID NO: 68492 - RNA, 19 nt, Artificial Sequence
  Description of Artificial Sequence: Synthetic oligonucleotide
  Sense strand starting at position 2669 of SEQ ID NO: 848
uuggccauucgacagacau

SEQ ID NO: 68493 - RNA, 19 nt, Artificial Sequence
  Description of Artificial Sequence: Synthetic oligonucleotide
  Antisense strand to SEQ ID NO: 68412
augucugucgaauggccaa

SEQ ID NO: 68494 - RNA, 19 nt, Artificial Sequence
  Description of Artificial Sequence: Synthetic oligonucleotide
  Sense strand starting at position 2671 of SEQ ID NO: 848
ggccauucgacagacauua

SEQ ID NO: 68495 - RNA, 19 nt, Artificial Sequence
  Description of Artificial Sequence: Synthetic oligonucleotide
  Antisense strand to SEQ ID NO: 68414
uaaugucugucgaauggcc

SEQ ID NO: 68496 - RNA, 19 nt, Artificial Sequence
  Description of Artificial Sequence: Synthetic oligonucleotide
  Sense strand starting at position 2819 of SEQ ID NO: 848
agcggacuucuagaguauu

SEQ ID NO: 68497 - RNA, 19 nt, Artificial Sequence
  Description of Artificial Sequence: Synthetic oligonucleotide
  Antisense strand to SEQ ID NO: 68416
aauacucuagaaguccgcu

SEQ ID NO: 68498 - RNA, 19 nt, Artificial Sequence
  Description of Artificial Sequence: Synthetic oligonucleotide
  Sense strand starting at position 2822 of SEQ ID NO: 848
ggacuucuagaguauuccu

SEQ ID NO: 68499 - RNA, 19 nt, Artificial Sequence
  Description of Artificial Sequence: Synthetic oligonucleotide
  Antisense strand to SEQ ID NO: 68418
aggaauacucuagaagucc

SEQ ID NO: 68500 - RNA, 19 nt, Artificial Sequence
  Description of Artificial Sequence: Synthetic oligonucleotide
  Sense strand starting at position 2827 of SEQ ID NO: 848
ucuagaguauuccuaggua

SEQ ID NO: 68501 - RNA, 19 nt, Artificial Sequence
  Description of Artificial Sequence: Synthetic oligonucleotide
  Antisense strand to SEQ ID NO: 68420
uaccuaggaauacucuaga

SEQ ID NO: 68502 - RNA, 19 nt, Artificial Sequence
  Description of Artificial Sequence: Synthetic oligonucleotide
  Sense strand starting at position 2889 of SEQ ID NO: 848
caaaguaggucacuuagaa

SEQ ID NO: 68503 - RNA, 19 nt, Artificial Sequence
  Description of Artificial Sequence: Synthetic oligonucleotide
  Antisense strand to SEQ ID NO: 68422
uucuaagugaccuacuuug

SEQ ID NO: 68504 - RNA, 19 nt, Artificial Sequence
  Description of Artificial Sequence: Synthetic oligonucleotide
  Sense strand starting at position 2940 of SEQ ID NO: 848
gucugaaagcauuggugag

SEQ ID NO: 68505 - RNA, 19 nt, Artificial Sequence
  Description of Artificial Sequence: Synthetic oligonucleotide
  Antisense strand to SEQ ID NO: 68424
cucaccaaugcuuucagac

SEQ ID NO: 68506 - RNA, 19 nt, Artificial Sequence
  Description of Artificial Sequence: Synthetic oligonucleotide
  Sense strand starting at position 2953 of SEQ ID NO: 848
ggugagggaugucugugua

SEQ ID NO: 68507 - RNA, 19 nt, Artificial Sequence
  Description of Artificial Sequence: Synthetic oligonucleotide
  Antisense strand to SEQ ID NO: 68426
uacacagacaucccucacc

SEQ ID NO: 68508 - RNA, 19 nt, Artificial Sequence
  Description of Artificial Sequence: Synthetic oligonucleotide
  Sense strand starting at position 2956 of SEQ ID NO: 848
gagggaugucuguguauug

SEQ ID NO: 68509 - RNA, 19 nt, Artificial Sequence
  Description of Artificial Sequence: Synthetic oligonucleotide
  Antisense strand to SEQ ID NO: 68428
caauacacagacaucccuc

SEQ ID NO: 68510 - RNA, 19 nt, Artificial Sequence
  Description of Artificial Sequence: Synthetic oligonucleotide
  Sense strand starting at position 3113 of SEQ ID NO: 848
agaggugucacagguagag

SEQ ID NO: 68511 - RNA, 19 nt, Artificial Sequence
  Description of Artificial Sequence: Synthetic oligonucleotide
  Antisense strand to SEQ ID NO: 68430
cucuaccugugacaccucu

SEQ ID NO: 68512 - RNA, 19 nt, Artificial Sequence
  Description of Artificial Sequence: Synthetic oligonucleotide
  Sense strand starting at position 3115 of SEQ ID NO: 848
aggugucacagguagagua

SEQ ID NO: 68513 - RNA, 19 nt, Artificial Sequence
  Description of Artificial Sequence: Synthetic oligonucleotide
  Antisense strand to SEQ ID NO: 68432
uacucuaccugugacaccu

SEQ ID NO: 68514 - RNA, 19 nt, Artificial Sequence
  Description of Artificial Sequence: Synthetic oligonucleotide
  Sense strand starting at position 3250 of SEQ ID NO: 848
agcauuaggaaaugcuuga

SEQ ID NO: 68515 - RNA, 19 nt, Artificial Sequence
  Description of Artificial Sequence: Synthetic oligonucleotide
  Antisense strand to SEQ ID NO: 68434
ucaagcauuuccuaaugcu

SEQ ID NO: 68516 - RNA, 19 nt, Artificial Sequence
  Description of Artificial Sequence: Synthetic oligonucleotide
  Sense strand starting at position 3254 of SEQ ID NO: 848
uuaggaaaugcuugacuga

SEQ ID NO: 68517 - RNA, 19 nt, Artificial Sequence
  Description of Artificial Sequence: Synthetic oligonucleotide
  Antisense strand to SEQ ID NO: 68436
ucagucaagcauuuccuaa

SEQ ID NO: 68518 - RNA, 19 nt, Artificial Sequence
  Description of Artificial Sequence: Synthetic oligonucleotide
  Sense strand starting at position 3257 of SEQ ID NO: 848
ggaaaugcuugacugauuc

SEQ ID NO: 68519 - RNA, 19 nt, Artificial Sequence
  Description of Artificial Sequence: Synthetic oligonucleotide
  Antisense strand to SEQ ID NO: 68438
gaaucagucaagcauuucc

SEQ ID NO: 68520 - RNA, 19 nt, Artificial Sequence
  Description of Artificial Sequence: Synthetic oligonucleotide
  Sense strand starting at position 3381 of SEQ ID NO: 848
agaauagacuccucuaagc

SEQ ID NO: 68521 - RNA, 19 nt, Artificial Sequence
  Description of Artificial Sequence: Synthetic oligonucleotide
  Antisense strand to SEQ ID NO: 68440
gcuuagaggagucuauucu

SEQ ID NO: 68522 - RNA, 19 nt, Artificial Sequence
  Description of Artificial Sequence: Synthetic oligonucleotide
  Sense strand starting at position 3643 of SEQ ID NO: 848
ugaagaugagcauguagaa

SEQ ID NO: 68523 - RNA, 19 nt, Artificial Sequence
  Description of Artificial Sequence: Synthetic oligonucleotide
  Antisense strand to SEQ ID NO: 68442
uucuacaugcucaucuuca

SEQ ID NO: 68524 - RNA, 19 nt, Artificial Sequence
  Description of Artificial Sequence: Synthetic oligonucleotide
  Sense strand starting at position 3806 of SEQ ID NO: 848
agaagcacugaucgagaua

SEQ ID NO: 68525 - RNA, 19 nt, Artificial Sequence
  Description of Artificial Sequence: Synthetic oligonucleotide
  Antisense strand to SEQ ID NO: 68444
uaucucgaucagugcuucu

SEQ ID NO: 68526 - RNA, 19 nt, Artificial Sequence
  Description of Artificial Sequence: Synthetic oligonucleotide
  Sense strand starting at position 3809 of SEQ ID NO: 848
agcacugaucgagauagua

SEQ ID NO: 68527 - RNA, 19 nt, Artificial Sequence
  Description of Artificial Sequence: Synthetic oligonucleotide
  Antisense strand to SEQ ID NO: 68446
uacuaucucgaucagugcu

SEQ ID NO: 68528 - RNA, 19 nt, Artificial Sequence
  Description of Artificial Sequence: Synthetic oligonucleotide
  Sense strand starting at position 3822 of SEQ ID NO: 848
auaguauuagguuaguaca

SEQ ID NO: 68529 - RNA, 19 nt, Artificial Sequence
  Description of Artificial Sequence: Synthetic oligonucleotide
  Antisense strand to SEQ ID NO: 68448
uguacuaaccuaauacuau

SEQ ID NO: 68530 - RNA, 19 nt, Artificial Sequence
  Description of Artificial Sequence: Synthetic oligonucleotide
  Sense strand starting at position 3824 of SEQ ID NO: 848
aguauuagguuaguacaga

SEQ ID NO: 68531 - RNA, 19 nt, Artificial Sequence
  Description of Artificial Sequence: Synthetic oligonucleotide
  Antisense strand to SEQ ID NO: 68450
ucuguacuaaccuaauacu

SEQ ID NO: 68532 - RNA, 19 nt, Artificial Sequence
  Description of Artificial Sequence: Synthetic oligonucleotide
  Sense strand starting at position 216 of SEQ ID NO: 849
cgccguuucgcguuauuuc

SEQ ID NO: 68533 - RNA, 19 nt, Artificial Sequence
  Description of Artificial Sequence: Synthetic oligonucleotide
  Antisense strand to SEQ ID NO: 68452
gaaauaacgcgaaacggcg

SEQ ID NO: 68534 - RNA, 19 nt, Artificial Sequence
  Description of Artificial Sequence: Synthetic oligonucleotide
  Sense strand starting at position 219 of SEQ ID NO: 849
cguuucgcguuauuuccaa

SEQ ID NO: 68535 - RNA, 19 nt, Artificial Sequence
  Description of Artificial Sequence: Synthetic oligonucleotide
  Antisense strand to SEQ ID NO: 68454
uuggaaauaacgcgaaacg

SEQ ID NO: 68536 - RNA, 19 nt, Artificial Sequence
  Description of Artificial Sequence: Synthetic oligonucleotide
  Sense strand starting at position 226 of SEQ ID NO: 849
cguuauuuccaaggcaauu

SEQ ID NO: 68537 - RNA, 19 nt, Artificial Sequence
  Description of Artificial Sequence: Synthetic oligonucleotide
  Antisense strand to SEQ ID NO: 68456
aauugccuuggaaauaacg

SEQ ID NO: 68538 - RNA, 19 nt, Artificial Sequence
  Description of Artificial Sequence: Synthetic oligonucleotide
  Sense strand starting at position 447 of SEQ ID NO: 849
aggcacucgccagaaacau

SEQ ID NO: 68539 - RNA, 19 nt, Artificial Sequence
  Description of Artificial Sequence: Synthetic oligonucleotide
  Antisense strand to SEQ ID NO: 68458
auguuucuggcgagugccu

SEQ ID NO: 68540 - RNA, 19 nt, Artificial Sequence
  Description of Artificial Sequence: Synthetic oligonucleotide
  Sense strand starting at position 551 of SEQ ID NO: 849
gcaaacgcucugugaccua

SEQ ID NO: 68541 - RNA, 19 nt, Artificial Sequence
  Description of Artificial Sequence: Synthetic oligonucleotide
  Antisense strand to SEQ ID NO: 68460
uaggucacagagcguuugc

SEQ ID NO: 68542 - RNA, 19 nt, Artificial Sequence
  Description of Artificial Sequence: Synthetic oligonucleotide
  Sense strand starting at position 1785 of SEQ ID NO: 849
cgcggaauaccugugcgaa

SEQ ID NO: 68543 - RNA, 19 nt, Artificial Sequence
  Description of Artificial Sequence: Synthetic oligonucleotide
  Antisense strand to SEQ ID NO: 68462
uucgcacagguauuccgcg

SEQ ID NO: 68544 - RNA, 19 nt, Artificial Sequence
  Description of Artificial Sequence: Synthetic oligonucleotide
  Sense strand starting at position 1786 of SEQ ID NO: 849
gcggaauaccugugcgaau

SEQ ID NO: 68545 - RNA, 19 nt, Artificial Sequence
  Description of Artificial Sequence: Synthetic oligonucleotide
  Antisense strand to SEQ ID NO: 68464
auucgcacagguauuccgc

SEQ ID NO: 68546 - RNA, 19 nt, Artificial Sequence
  Description of Artificial Sequence: Synthetic oligonucleotide
  Sense strand starting at position 1787 of SEQ ID NO: 849
cggaauaccugugcgaauu

SEQ ID NO: 68547 - RNA, 19 nt, Artificial Sequence
  Description of Artificial Sequence: Synthetic oligonucleotide
  Antisense strand to SEQ ID NO: 68466
aauucgcacagguauuccg

SEQ ID NO: 68548 - RNA, 19 nt, Artificial Sequence
  Description of Artificial Sequence: Synthetic oligonucleotide
  Sense strand starting at position 1788 of SEQ ID NO: 849
ggaauaccugugcgaauuc

SEQ ID NO: 68549 - RNA, 19 nt, Artificial Sequence
  Description of Artificial Sequence: Synthetic oligonucleotide
  Antisense strand to SEQ ID NO: 68468
gaauucgcacagguauucc

SEQ ID NO: 68550 - RNA, 19 nt, Artificial Sequence
  Description of Artificial Sequence: Synthetic oligonucleotide
  Sense strand starting at position 2108 of SEQ ID NO: 849
acgaaaccuugggaauaga

SEQ ID NO: 68551 - RNA, 19 nt, Artificial Sequence
  Description of Artificial Sequence: Synthetic oligonucleotide
  Antisense strand to SEQ ID NO: 68470
ucuauucccaagguuucgu

SEQ ID NO: 68552 - RNA, 19 nt, Artificial Sequence
  Description of Artificial Sequence: Synthetic oligonucleotide
  Sense strand starting at position 2145 of SEQ ID NO: 849
cacgcaguguuggcaagau

SEQ ID NO: 68553 - RNA, 19 nt, Artificial Sequence
  Description of Artificial Sequence: Synthetic oligonucleotide
  Antisense strand to SEQ ID NO: 68472
aucuugccaacacugcgug

SEQ ID NO: 68554 - RNA, 19 nt, Artificial Sequence
  Description of Artificial Sequence: Synthetic oligonucleotide
  Sense strand starting at position 2221 of SEQ ID NO: 849
gaugaacgauuaggaaaua

SEQ ID NO: 68555 - RNA, 19 nt, Artificial Sequence
  Description of Artificial Sequence: Synthetic oligonucleotide
  Antisense strand to SEQ ID NO: 68474
uauuuccuaaucguucauc

SEQ ID NO: 68556 - RNA, 19 nt, Artificial Sequence
  Description of Artificial Sequence: Synthetic oligonucleotide
  Sense strand starting at position 2222 of SEQ ID NO: 849
augaacgauuaggaaauau

SEQ ID NO: 68557 - RNA, 19 nt, Artificial Sequence
  Description of Artificial Sequence: Synthetic oligonucleotide
  Antisense strand to SEQ ID NO: 68476
auauuuccuaaucguucau

SEQ ID NO: 68558 - RNA, 19 nt, Artificial Sequence
  Description of Artificial Sequence: Synthetic oligonucleotide
  Sense strand starting at position 2231 of SEQ ID NO: 849
uaggaaauauuucgggaag

SEQ ID NO: 68559 - RNA, 19 nt, Artificial Sequence
  Description of Artificial Sequence: Synthetic oligonucleotide
  Antisense strand to SEQ ID NO: 68478
cuucccgaaauauuuccua

SEQ ID NO: 68560 - RNA, 19 nt, Artificial Sequence
  Description of Artificial Sequence: Synthetic oligonucleotide
  Sense strand starting at position 2232 of SEQ ID NO: 849
aggaaauauuucgggaaga

SEQ ID NO: 68561 - RNA, 19 nt, Artificial Sequence
  Description of Artificial Sequence: Synthetic oligonucleotide
  Antisense strand to SEQ ID NO: 68480
ucuucccgaaauauuuccu

SEQ ID NO: 68562 - RNA, 19 nt, Artificial Sequence
  Description of Artificial Sequence: Synthetic oligonucleotide
  Sense strand starting at position 2233 of SEQ ID NO: 849
ggaaauauuucgggaagau

SEQ ID NO: 68563 - RNA, 19 nt, Artificial Sequence
  Description of Artificial Sequence: Synthetic oligonucleotide
  Antisense strand to SEQ ID NO: 68482
aucuucccgaaauauuucc

SEQ ID NO: 68564 - RNA, 19 nt, Artificial Sequence
  Description of Artificial Sequence: Synthetic oligonucleotide
  Sense strand starting at position 2560 of SEQ ID NO: 849
auaugaguacugcauugaa

SEQ ID NO: 68565 - RNA, 19 nt, Artificial Sequence
  Description of Artificial Sequence: Synthetic oligonucleotide
  Antisense strand to SEQ ID NO: 68484
uucaaugcaguacucauau

SEQ ID NO: 68566 - RNA, 19 nt, Artificial Sequence
  Description of Artificial Sequence: Synthetic oligonucleotide
  Sense strand starting at position 2678 of SEQ ID NO: 849
gcagaauccuagguuuccu

SEQ ID NO: 68567 - RNA, 19 nt, Artificial Sequence
  Description of Artificial Sequence: Synthetic oligonucleotide
  Antisense strand to SEQ ID NO: 68486
aggaaaccuaggauucugc

SEQ ID NO: 68568 - RNA, 19 nt, Artificial Sequence
  Description of Artificial Sequence: Synthetic oligonucleotide
  Sense strand starting at position 2732 of SEQ ID NO: 849
aagggaaaucagugucuac

SEQ ID NO: 68569 - RNA, 19 nt, Artificial Sequence
  Description of Artificial Sequence: Synthetic oligonucleotide
  Antisense strand to SEQ ID NO: 68488
guagacacugauuucccuu

SEQ ID NO: 68570 - RNA, 19 nt, Artificial Sequence
  Description of Artificial Sequence: Synthetic oligonucleotide
  Sense strand starting at position 2735 of SEQ ID NO: 849
ggaaaucagugucuacacu

SEQ ID NO: 68571 - RNA, 19 nt, Artificial Sequence
  Description of Artificial Sequence: Synthetic oligonucleotide
  Antisense strand to SEQ ID NO: 68490
aguguagacacugauuucc

SEQ ID NO: 68572 - RNA, 19 nt, Artificial Sequence
  Description of Artificial Sequence: Synthetic oligonucleotide
  Sense strand starting at position 2758 of SEQ ID NO: 849
agcgcaucauuuccuuauu

SEQ ID NO: 68573 - RNA, 19 nt, Artificial Sequence
  Description of Artificial Sequence: Synthetic oligonucleotide
  Antisense strand to SEQ ID NO: 68492
aauaaggaaaugaugcgcu

SEQ ID NO: 68574 - RNA, 19 nt, Artificial Sequence
  Description of Artificial Sequence: Synthetic oligonucleotide
  Sense strand starting at position 2806 of SEQ ID NO: 849
aagauaggaucaugucagu

SEQ ID NO: 68575 - RNA, 19 nt, Artificial Sequence
  Description of Artificial Sequence: Synthetic oligonucleotide
  Antisense strand to SEQ ID NO: 68494
acugacaugauccuaucuu

SEQ ID NO: 68576 - RNA, 19 nt, Artificial Sequence
  Description of Artificial Sequence: Synthetic oligonucleotide
  Sense strand starting at position 2889 of SEQ ID NO: 849
cagcgugucaccugggaau

SEQ ID NO: 68577 - RNA, 19 nt, Artificial Sequence
  Description of Artificial Sequence: Synthetic oligonucleotide
  Antisense strand to SEQ ID NO: 68496
auucccaggugacacgcug

SEQ ID NO: 68578 - RNA, 19 nt, Artificial Sequence
  Description of Artificial Sequence: Synthetic oligonucleotide
  Sense strand starting at position 2891 of SEQ ID NO: 849
gcgugucaccugggaaucu

SEQ ID NO: 68579 - RNA, 19 nt, Artificial Sequence
  Description of Artificial Sequence: Synthetic oligonucleotide
  Antisense strand to SEQ ID NO: 68498
agauucccaggugacacgc

SEQ ID NO: 68580 - RNA, 19 nt, Artificial Sequence
  Description of Artificial Sequence: Synthetic oligonucleotide
  Sense strand starting at position 3003 of SEQ ID NO: 849
agguaauucugauuccguu

SEQ ID NO: 68581 - RNA, 19 nt, Artificial Sequence
  Description of Artificial Sequence: Synthetic oligonucleotide
  Antisense strand to SEQ ID NO: 68500
aacggaaucagaauuaccu

SEQ ID NO: 68582 - RNA, 19 nt, Artificial Sequence
  Description of Artificial Sequence: Synthetic oligonucleotide
  Sense strand starting at position 3038 of SEQ ID NO: 849
ccaggauagcugcaguagu

SEQ ID NO: 68583 - RNA, 19 nt, Artificial Sequence
  Description of Artificial Sequence: Synthetic oligonucleotide
  Antisense strand to SEQ ID NO: 68502
acuacugcagcuauccugg

SEQ ID NO: 68584 - RNA, 19 nt, Artificial Sequence
  Description of Artificial Sequence: Synthetic oligonucleotide
  Sense strand starting at position 3390 of SEQ ID NO: 849
gucauauccuuuguucuga

SEQ ID NO: 68585 - RNA, 19 nt, Artificial Sequence
  Description of Artificial Sequence: Synthetic oligonucleotide
  Antisense strand to SEQ ID NO: 68504
ucagaacaaaggauaugac

SEQ ID NO: 68586 - RNA, 19 nt, Artificial Sequence
  Description of Artificial Sequence: Synthetic oligonucleotide
  Sense strand starting at position 3404 of SEQ ID NO: 849
ucugaagucuucuuuguuu

SEQ ID NO: 68587 - RNA, 19 nt, Artificial Sequence
  Description of Artificial Sequence: Synthetic oligonucleotide
  Antisense strand to SEQ ID NO: 68506
aaacaaagaagacuucaga

SEQ ID NO: 68588 - RNA, 19 nt, Artificial Sequence
  Description of Artificial Sequence: Synthetic oligonucleotide
  Sense strand starting at position 3406 of SEQ ID NO: 849
ugaagucuucuuuguuuau

SEQ ID NO: 68589 - RNA, 19 nt, Artificial Sequence
  Description of Artificial Sequence: Synthetic oligonucleotide
  Antisense strand to SEQ ID NO: 68508
auaaacaaagaagacuuca

SEQ ID NO: 68590 - RNA, 19 nt, Artificial Sequence
  Description of Artificial Sequence: Synthetic oligonucleotide
  Sense strand starting at position 3450 of SEQ ID NO: 849
uacuauuaguguuugcaug

SEQ ID NO: 68591 - RNA, 19 nt, Artificial Sequence
  Description of Artificial Sequence: Synthetic oligonucleotide
  Antisense strand to SEQ ID NO: 68510
caugcaaacacuaauagua

SEQ ID NO: 68592 - RNA, 19 nt, Artificial Sequence
  Description of Artificial Sequence: Synthetic oligonucleotide
  Sense strand starting at position 3451 of SEQ ID NO: 849
acuauuaguguuugcauga

SEQ ID NO: 68593 - RNA, 19 nt, Artificial Sequence
  Description of Artificial Sequence: Synthetic oligonucleotide
  Antisense strand to SEQ ID NO: 68512
ucaugcaaacacuaauagu

SEQ ID NO: 68594 - RNA, 19 nt, Artificial Sequence
  Description of Artificial Sequence: Synthetic oligonucleotide
  Sense strand starting at position 3452 of SEQ ID NO: 849
cuauuaguguuugcaugau

SEQ ID NO: 68595 - RNA, 19 nt, Artificial Sequence
  Description of Artificial Sequence: Synthetic oligonucleotide
  Antisense strand to SEQ ID NO: 68514
aucaugcaaacacuaauag

SEQ ID NO: 68596 - RNA, 19 nt, Artificial Sequence
  Description of Artificial Sequence: Synthetic oligonucleotide
  Sense strand starting at position 3460 of SEQ ID NO: 849
guuugcaugauauguguuu

SEQ ID NO: 68597 - RNA, 19 nt, Artificial Sequence
  Description of Artificial Sequence: Synthetic oligonucleotide
  Antisense strand to SEQ ID NO: 68516
aaacacauaucaugcaaac

SEQ ID NO: 68598 - RNA, 19 nt, Artificial Sequence
  Description of Artificial Sequence: Synthetic oligonucleotide
  Sense strand starting at position 3461 of SEQ ID NO: 849
uuugcaugauauguguuua

SEQ ID NO: 68599 - RNA, 19 nt, Artificial Sequence
  Description of Artificial Sequence: Synthetic oligonucleotide
  Antisense strand to SEQ ID NO: 68518
uaaacacauaucaugcaaa

SEQ ID NO: 68600 - RNA, 19 nt, Artificial Sequence
  Description of Artificial Sequence: Synthetic oligonucleotide
  Sense strand starting at position 3783 of SEQ ID NO: 849
ugcgauuacagucgugagu

SEQ ID NO: 68601 - RNA, 19 nt, Artificial Sequence
  Description of Artificial Sequence: Synthetic oligonucleotide
  Antisense strand to SEQ ID NO: 68520
acucacgacuguaaucgca

SEQ ID NO: 68602 - RNA, 19 nt, Artificial Sequence
  Description of Artificial Sequence: Synthetic oligonucleotide
  Sense strand starting at position 3813 of SEQ ID NO: 849
gccuguaucuuuguucuua

SEQ ID NO: 68603 - RNA, 19 nt, Artificial Sequence
  Description of Artificial Sequence: Synthetic oligonucleotide
  Antisense strand to SEQ ID NO: 68522
uaagaacaaagauacaggc

SEQ ID NO: 68604 - RNA, 19 nt, Artificial Sequence
  Description of Artificial Sequence: Synthetic oligonucleotide
  Sense strand starting at position 3814 of SEQ ID NO: 849
ccuguaucuuuguucuuaa

SEQ ID NO: 68605 - RNA, 19 nt, Artificial Sequence
  Description of Artificial Sequence: Synthetic oligonucleotide
  Antisense strand to SEQ ID NO: 68524
uuaagaacaaagauacagg

SEQ ID NO: 68606 - RNA, 19 nt, Artificial Sequence
  Description of Artificial Sequence: Synthetic oligonucleotide
  Sense strand starting at position 3898 of SEQ ID NO: 849
aucugucagcuugacaacu

SEQ ID NO: 68607 - RNA, 19 nt, Artificial Sequence
  Description of Artificial Sequence: Synthetic oligonucleotide
  Antisense strand to SEQ ID NO: 68526
aguugucaagcugacagau

SEQ ID NO: 68608 - RNA, 19 nt, Artificial Sequence
  Description of Artificial Sequence: Synthetic oligonucleotide
  Sense strand starting at position 3900 of SEQ ID NO: 849
cugucagcuugacaacuaa

SEQ ID NO: 68609 - RNA, 19 nt, Artificial Sequence
  Description of Artificial Sequence: Synthetic oligonucleotide
  Antisense strand to SEQ ID NO: 68528
uuaguugucaagcugacag

SEQ ID NO: 68610 - RNA, 19 nt, Artificial Sequence
  Description of Artificial Sequence: Synthetic oligonucleotide
  Sense strand starting at position 3975 of SEQ ID NO: 849
gaauaugacuagggauaaa

SEQ ID NO: 68611 - RNA, 19 nt, Artificial Sequence
  Description of Artificial Sequence: Synthetic oligonucleotide
  Antisense strand to SEQ ID NO: 68530
uuuaucccuagucauauuc

SEQ ID NO: 68612 - RNA, 19 nt, Artificial Sequence
  Description of Artificial Sequence: Synthetic oligonucleotide
  Sense strand starting at position 43 of SEQ ID NO: 850
ugguuucuccaccaucagu

SEQ ID NO: 68613 - RNA, 19 nt, Artificial Sequence
  Description of Artificial Sequence: Synthetic oligonucleotide
  Antisense strand to SEQ ID NO: 68532
acugaugguggagaaacca

SEQ ID NO: 68614 - RNA, 19 nt, Artificial Sequence
  Description of Artificial Sequence: Synthetic oligonucleotide
  Sense strand starting at position 53 of SEQ ID NO: 850
accaucaguuugcaugaga

SEQ ID NO: 68615 - RNA, 19 nt, Artificial Sequence
  Description of Artificial Sequence: Synthetic oligonucleotide
  Antisense strand to SEQ ID NO: 68534
ucucaugcaaacugauggu

SEQ ID NO: 68616 - RNA, 19 nt, Artificial Sequence
  Description of Artificial Sequence: Synthetic oligonucleotide
  Sense strand starting at position 56 of SEQ ID NO: 850
aucaguuugcaugagaaac

SEQ ID NO: 68617 - RNA, 19 nt, Artificial Sequence
  Description of Artificial Sequence: Synthetic oligonucleotide
  Antisense strand to SEQ ID NO: 68536
guuucucaugcaaacugau

SEQ ID NO: 68618 - RNA, 19 nt, Artificial Sequence
  Description of Artificial Sequence: Synthetic oligonucleotide
  Sense strand starting at position 144 of SEQ ID NO: 850
uggcuuccuugggcgaauu

SEQ ID NO: 68619 - RNA, 19 nt, Artificial Sequence
  Description of Artificial Sequence: Synthetic oligonucleotide
  Antisense strand to SEQ ID NO: 68538
aauucgcccaaggaagcca

SEQ ID NO: 68620 - RNA, 19 nt, Artificial Sequence
  Description of Artificial Sequence: Synthetic oligonucleotide
  Sense strand starting at position 145 of SEQ ID NO: 850
ggcuuccuugggcgaauuu

SEQ ID NO: 68621 - RNA, 19 nt, Artificial Sequence
  Description of Artificial Sequence: Synthetic oligonucleotide
  Antisense strand to SEQ ID NO: 68540
aaauucgcccaaggaagcc

SEQ ID NO: 68622 - RNA, 19 nt, Artificial Sequence
  Description of Artificial Sequence: Synthetic oligonucleotide
  Sense strand starting at position 168 of SEQ ID NO: 850
gccuaugagcacuggaguu

SEQ ID NO: 68623 - RNA, 19 nt, Artificial Sequence
  Description of Artificial Sequence: Synthetic oligonucleotide
  Antisense strand to SEQ ID NO: 68542
aacuccagugcucauaggc

SEQ ID NO: 68624 - RNA, 19 nt, Artificial Sequence
  Description of Artificial Sequence: Synthetic oligonucleotide
  Sense strand starting at position 180 of SEQ ID NO: 850
uggaguugugcauggaggu

SEQ ID NO: 68625 - RNA, 19 nt, Artificial Sequence
  Description of Artificial Sequence: Synthetic oligonucleotide
  Antisense strand to SEQ ID NO: 68544
accuccaugcacaacucca

SEQ ID NO: 68626 - RNA, 19 nt, Artificial Sequence
  Description of Artificial Sequence: Synthetic oligonucleotide
  Sense strand starting at position 208 of SEQ ID NO: 850
caggaaguccauuguccua

SEQ ID NO: 68627 - RNA, 19 nt, Artificial Sequence
  Description of Artificial Sequence: Synthetic oligonucleotide
  Antisense strand to SEQ ID NO: 68546
uaggacaauggacuuccug

SEQ ID NO: 68628 - RNA, 19 nt, Artificial Sequence
  Description of Artificial Sequence: Synthetic oligonucleotide
  Sense strand starting at position 210 of SEQ ID NO: 850
ggaaguccauuguccuaaa

SEQ ID NO: 68629 - RNA, 19 nt, Artificial Sequence
  Description of Artificial Sequence: Synthetic oligonucleotide
  Antisense strand to SEQ ID NO: 68548
uuuaggacaauggacuucc

SEQ ID NO: 68630 - RNA, 19 nt, Artificial Sequence
  Description of Artificial Sequence: Synthetic oligonucleotide
  Sense strand starting at position 213 of SEQ ID NO: 850
aguccauuguccuaaauag

SEQ ID NO: 68631 - RNA, 19 nt, Artificial Sequence
  Description of Artificial Sequence: Synthetic oligonucleotide
  Antisense strand to SEQ ID NO: 68550
cuauuuaggacaauggacu

SEQ ID NO: 68632 - RNA, 19 nt, Artificial Sequence
  Description of Artificial Sequence: Synthetic oligonucleotide
  Sense strand starting at position 255 of SEQ ID NO: 850
uggugaggcugcucauuaa

SEQ ID NO: 68633 - RNA, 19 nt, Artificial Sequence
  Description of Artificial Sequence: Synthetic oligonucleotide
  Antisense strand to SEQ ID NO: 68552
uuaaugagcagccucacca

SEQ ID NO: 68634 - RNA, 19 nt, Artificial Sequence
  Description of Artificial Sequence: Synthetic oligonucleotide
  Sense strand starting at position 393 of SEQ ID NO: 850
guuuauagguccucugucu

SEQ ID NO: 68635 - RNA, 19 nt, Artificial Sequence
  Description of Artificial Sequence: Synthetic oligonucleotide
  Antisense strand to SEQ ID NO: 68554
agacagaggaccuauaaac

SEQ ID NO: 68636 - RNA, 19 nt, Artificial Sequence
  Description of Artificial Sequence: Synthetic oligonucleotide
  Sense strand starting at position 601 of SEQ ID NO: 850
gaggcauucgccgcugcaa

SEQ ID NO: 68637 - RNA, 19 nt, Artificial Sequence
  Description of Artificial Sequence: Synthetic oligonucleotide
  Antisense strand to SEQ ID NO: 68556
uugcagcggcgaaugccuc

SEQ ID NO: 68638 - RNA, 19 nt, Artificial Sequence
  Description of Artificial Sequence: Synthetic oligonucleotide
  Sense strand starting at position 602 of SEQ ID NO: 850
aggcauucgccgcugcaaa

SEQ ID NO: 68639 - RNA, 19 nt, Artificial Sequence
  Description of Artificial Sequence: Synthetic oligonucleotide
  Antisense strand to SEQ ID NO: 68558
uuugcagcggcgaaugccu

SEQ ID NO: 68640 - RNA, 19 nt, Artificial Sequence
  Description of Artificial Sequence: Synthetic oligonucleotide
  Sense strand starting at position 604 of SEQ ID NO: 850
gcauucgccgcugcaaauu

SEQ ID NO: 68641 - RNA, 19 nt, Artificial Sequence
  Description of Artificial Sequence: Synthetic oligonucleotide
  Antisense strand to SEQ ID NO: 68560
aauuugcagcggcgaaugc

SEQ ID NO: 68642 - RNA, 19 nt, Artificial Sequence
  Description of Artificial Sequence: Synthetic oligonucleotide
  Sense strand starting at position 977 of SEQ ID NO: 850
cgccguuucgcguuauuuc

SEQ ID NO: 68643 - RNA, 19 nt, Artificial Sequence
  Description of Artificial Sequence: Synthetic oligonucleotide
  Antisense strand to SEQ ID NO: 68562
gaaauaacgcgaaacggcg

SEQ ID NO: 68644 - RNA, 19 nt, Artificial Sequence
  Description of Artificial Sequence: Synthetic oligonucleotide
  Sense strand starting at position 980 of SEQ ID NO: 850
cguuucgcguuauuuccaa

SEQ ID NO: 68645 - RNA, 19 nt, Artificial Sequence
  Description of Artificial Sequence: Synthetic oligonucleotide
  Antisense strand to SEQ ID NO: 68564
uuggaaauaacgcgaaacg

SEQ ID NO: 68646 - RNA, 19 nt, Artificial Sequence
  Description of Artificial Sequence: Synthetic oligonucleotide
  Sense strand starting at position 987 of SEQ ID NO: 850
cguuauuuccaaggcaauu

SEQ ID NO: 68647 - RNA, 19 nt, Artificial Sequence
  Description of Artificial Sequence: Synthetic oligonucleotide
  Antisense strand to SEQ ID NO: 68566
aauugccuuggaaauaacg

SEQ ID NO: 68648 - RNA, 19 nt, Artificial Sequence
  Description of Artificial Sequence: Synthetic oligonucleotide
  Sense strand starting at position 1208 of SEQ ID NO: 850
aggcacucgccagaaacau

SEQ ID NO: 68649 - RNA, 19 nt, Artificial Sequence
  Description of Artificial Sequence: Synthetic oligonucleotide
  Antisense strand to SEQ ID NO: 68568
auguuucuggcgagugccu

SEQ ID NO: 68650 - RNA, 19 nt, Artificial Sequence
  Description of Artificial Sequence: Synthetic oligonucleotide
  Sense strand starting at position 1312 of SEQ ID NO: 850
gcaaacgcucugugaccua

SEQ ID NO: 68651 - RNA, 19 nt, Artificial Sequence
  Description of Artificial Sequence: Synthetic oligonucleotide
  Antisense strand to SEQ ID NO: 68570
uaggucacagagcguuugc

SEQ ID NO: 68652 - RNA, 19 nt, Artificial Sequence
  Description of Artificial Sequence: Synthetic oligonucleotide
  Sense strand starting at position 2546 of SEQ ID NO: 850
cgcggaauaccugugcgaa

SEQ ID NO: 68653 - RNA, 19 nt, Artificial Sequence
  Description of Artificial Sequence: Synthetic oligonucleotide
  Antisense strand to SEQ ID NO: 68572
uucgcacagguauuccgcg

SEQ ID NO: 68654 - RNA, 19 nt, Artificial Sequence
  Description of Artificial Sequence: Synthetic oligonucleotide
  Sense strand starting at position 2547 of SEQ ID NO: 850
gcggaauaccugugcgaau

SEQ ID NO: 68655 - RNA, 19 nt, Artificial Sequence
  Description of Artificial Sequence: Synthetic oligonucleotide
  Antisense strand to SEQ ID NO: 68574
auucgcacagguauuccgc

SEQ ID NO: 68656 - RNA, 19 nt, Artificial Sequence
  Description of Artificial Sequence: Synthetic oligonucleotide
  Sense strand starting at position 2548 of SEQ ID NO: 850
cggaauaccugugcgaauu

SEQ ID NO: 68657 - RNA, 19 nt, Artificial Sequence
  Description of Artificial Sequence: Synthetic oligonucleotide
  Antisense strand to SEQ ID NO: 68576
aauucgcacagguauuccg

SEQ ID NO: 68658 - RNA, 19 nt, Artificial Sequence
  Description of Artificial Sequence: Synthetic oligonucleotide
  Sense strand starting at position 2549 of SEQ ID NO: 850
ggaauaccugugcgaauuc

SEQ ID NO: 68659 - RNA, 19 nt, Artificial Sequence
  Description of Artificial Sequence: Synthetic oligonucleotide
  Antisense strand to SEQ ID NO: 68578
gaauucgcacagguauucc

SEQ ID NO: 68660 - RNA, 19 nt, Artificial Sequence
  Description of Artificial Sequence: Synthetic oligonucleotide
  Sense strand starting at position 2869 of SEQ ID NO: 850
acgaaaccuugggaauaga

SEQ ID NO: 68661 - RNA, 19 nt, Artificial Sequence
  Description of Artificial Sequence: Synthetic oligonucleotide
  Antisense strand to SEQ ID NO: 68580
ucuauucccaagguuucgu

SEQ ID NO: 68662 - RNA, 19 nt, Artificial Sequence
  Description of Artificial Sequence: Synthetic oligonucleotide
  Sense strand starting at position 2906 of SEQ ID NO: 850
cacgcaguguuggcaagau

SEQ ID NO: 68663 - RNA, 19 nt, Artificial Sequence
  Description of Artificial Sequence: Synthetic oligonucleotide
  Antisense strand to SEQ ID NO: 68582
aucuugccaacacugcgug

SEQ ID NO: 68664 - RNA, 19 nt, Artificial Sequence
  Description of Artificial Sequence: Synthetic oligonucleotide
  Sense strand starting at position 2982 of SEQ ID NO: 850
gaugaacgauuaggaaaua

SEQ ID NO: 68665 - RNA, 19 nt, Artificial Sequence
  Description of Artificial Sequence: Synthetic oligonucleotide
  Antisense strand to SEQ ID NO: 68584
uauuuccuaaucguucauc

SEQ ID NO: 68666 - RNA, 19 nt, Artificial Sequence
  Description of Artificial Sequence: Synthetic oligonucleotide
  Sense strand starting at position 2983 of SEQ ID NO: 850
augaacgauuaggaaauau

SEQ ID NO: 68667 - RNA, 19 nt, Artificial Sequence
  Description of Artificial Sequence: Synthetic oligonucleotide
  Antisense strand to SEQ ID NO: 68586
auauuuccuaaucguucau

SEQ ID NO: 68668 - RNA, 19 nt, Artificial Sequence
  Description of Artificial Sequence: Synthetic oligonucleotide
  Sense strand starting at position 2992 of SEQ ID NO: 850
uaggaaauauuucgggaag

SEQ ID NO: 68669 - RNA, 19 nt, Artificial Sequence
  Description of Artificial Sequence: Synthetic oligonucleotide
  Antisense strand to SEQ ID NO: 68588
cuucccgaaauauuuccua

SEQ ID NO: 68670 - RNA, 19 nt, Artificial Sequence
  Description of Artificial Sequence: Synthetic oligonucleotide
  Sense strand starting at position 2993 of SEQ ID NO: 850
aggaaauauuucgggaaga

SEQ ID NO: 68671 - RNA, 19 nt, Artificial Sequence
  Description of Artificial Sequence: Synthetic oligonucleotide
  Antisense strand to SEQ ID NO: 68590
ucuucccgaaauauuuccu

SEQ ID NO: 68672 - RNA, 19 nt, Artificial Sequence
  Description of Artificial Sequence: Synthetic oligonucleotide
  Sense strand starting at position 2994 of SEQ ID NO: 850
ggaaauauuucgggaagau

SEQ ID NO: 68673 - RNA, 19 nt, Artificial Sequence
  Description of Artificial Sequence: Synthetic oligonucleotide
  Antisense strand to SEQ ID NO: 68592
aucuucccgaaauauuucc

SEQ ID NO: 68674 - RNA, 19 nt, Artificial Sequence
  Description of Artificial Sequence: Synthetic oligonucleotide
  Sense strand starting at position 3321 of SEQ ID NO: 850
auaugaguacugcauugaa

SEQ ID NO: 68675 - RNA, 19 nt, Artificial Sequence
  Description of Artificial Sequence: Synthetic oligonucleotide
  Antisense strand to SEQ ID NO: 68594
uucaaugcaguacucauau

SEQ ID NO: 68676 - RNA, 19 nt, Artificial Sequence
  Description of Artificial Sequence: Synthetic oligonucleotide
  Sense strand starting at position 3439 of SEQ ID NO: 850
gcagaauccuagguuuccu

SEQ ID NO: 68677 - RNA, 19 nt, Artificial Sequence
  Description of Artificial Sequence: Synthetic oligonucleotide
  Antisense strand to SEQ ID NO: 68596
aggaaaccuaggauucugc

SEQ ID NO: 68678 - RNA, 19 nt, Artificial Sequence
  Description of Artificial Sequence: Synthetic oligonucleotide
  Sense strand starting at position 3493 of SEQ ID NO: 850
aagggaaaucagugucuac

SEQ ID NO: 68679 - RNA, 19 nt, Artificial Sequence
  Description of Artificial Sequence: Synthetic oligonucleotide
  Antisense strand to SEQ ID NO: 68598
guagacacugauuucccuu

SEQ ID NO: 68680 - RNA, 19 nt, Artificial Sequence
  Description of Artificial Sequence: Synthetic oligonucleotide
  Sense strand starting at position 3496 of SEQ ID NO: 850
ggaaaucagugucuacacu

SEQ ID NO: 68681 - RNA, 19 nt, Artificial Sequence
  Description of Artificial Sequence: Synthetic oligonucleotide
  Antisense strand to SEQ ID NO: 68600
aguguagacacugauuucc

SEQ ID NO: 68682 - RNA, 19 nt, Artificial Sequence
  Description of Artificial Sequence: Synthetic oligonucleotide
  Sense strand starting at position 3519 of SEQ ID NO: 850
agcgcaucauuuccuuauu

SEQ ID NO: 68683 - RNA, 19 nt, Artificial Sequence
  Description of Artificial Sequence: Synthetic oligonucleotide
  Antisense strand to SEQ ID NO: 68602
aauaaggaaaugaugcgcu

SEQ ID NO: 68684 - RNA, 19 nt, Artificial Sequence
  Description of Artificial Sequence: Synthetic oligonucleotide
  Sense strand starting at position 3650 of SEQ ID NO: 850
cagcgugucaccugggaau

SEQ ID NO: 68685 - RNA, 19 nt, Artificial Sequence
  Description of Artificial Sequence: Synthetic oligonucleotide
  Antisense strand to SEQ ID NO: 68604
auucccaggugacacgcug

SEQ ID NO: 68686 - RNA, 19 nt, Artificial Sequence
  Description of Artificial Sequence: Synthetic oligonucleotide
  Sense strand starting at position 3652 of SEQ ID NO: 850
gcgugucaccugggaaucu

SEQ ID NO: 68687 - RNA, 19 nt, Artificial Sequence
  Description of Artificial Sequence: Synthetic oligonucleotide
  Antisense strand to SEQ ID NO: 68606
agauucccaggugacacgc

SEQ ID NO: 68688 - RNA, 19 nt, Artificial Sequence
  Description of Artificial Sequence: Synthetic oligonucleotide
  Sense strand starting at position 3764 of SEQ ID NO: 850
agguaauucugauuccguu

SEQ ID NO: 68689 - RNA, 19 nt, Artificial Sequence
  Description of Artificial Sequence: Synthetic oligonucleotide
  Antisense strand to SEQ ID NO: 68608
aacggaaucagaauuaccu

SEQ ID NO: 68690 - RNA, 19 nt, Artificial Sequence
  Description of Artificial Sequence: Synthetic oligonucleotide
  Sense strand starting at position 3799 of SEQ ID NO: 850
ccaggauagcugcaguagu

SEQ ID NO: 68691 - RNA, 19 nt, Artificial Sequence
  Description of Artificial Sequence: Synthetic oligonucleotide
  Antisense strand to SEQ ID NO: 68610
acuacugcagcuauccugg

SEQ ID NO: 68692 - RNA, 19 nt, Artificial Sequence
  Description of Artificial Sequence: Synthetic oligonucleotide
  Sense strand starting at position 5 of SEQ ID NO: 851
ggcacaccugaaugacauu

SEQ ID NO: 68693 - RNA, 19 nt, Artificial Sequence
  Description of Artificial Sequence: Synthetic oligonucleotide
  Antisense strand to SEQ ID NO: 68612
aaugucauucaggugugcc

SEQ ID NO: 68694 - RNA, 19 nt, Artificial Sequence
  Description of Artificial Sequence: Synthetic oligonucleotide
  Sense strand starting at position 79 of SEQ ID NO: 851
acuagaaaccacugugaug

SEQ ID NO: 68695 - RNA, 19 nt, Artificial Sequence
  Description of Artificial Sequence: Synthetic oligonucleotide
  Antisense strand to SEQ ID NO: 68614
caucacagugguuucuagu

SEQ ID NO: 68696 - RNA, 19 nt, Artificial Sequence
  Description of Artificial Sequence: Synthetic oligonucleotide
  Sense strand starting at position 138 of SEQ ID NO: 851
cagugaggucuacagcauu

SEQ ID NO: 68697 - RNA, 19 nt, Artificial Sequence
  Description of Artificial Sequence: Synthetic oligonucleotide
  Antisense strand to SEQ ID NO: 68616
aaugcuguagaccucacug

SEQ ID NO: 68698 - RNA, 19 nt, Artificial Sequence
  Description of Artificial Sequence: Synthetic oligonucleotide
  Sense strand starting at position 213 of SEQ ID NO: 851
uucugaguugaccacaacu

SEQ ID NO: 68699 - RNA, 19 nt, Artificial Sequence
  Description of Artificial Sequence: Synthetic oligonucleotide
  Antisense strand to SEQ ID NO: 68618
aguuguggucaacucagaa

SEQ ID NO: 68700 - RNA, 19 nt, Artificial Sequence
  Description of Artificial Sequence: Synthetic oligonucleotide
  Sense strand starting at position 235 of SEQ ID NO: 851
uaagcuaggucccugacau

SEQ ID NO: 68701 - RNA, 19 nt, Artificial Sequence
  Description of Artificial Sequence: Synthetic oligonucleotide
  Antisense strand to SEQ ID NO: 68620
augucagggaccuagcuua

SEQ ID NO: 68702 - RNA, 19 nt, Artificial Sequence
  Description of Artificial Sequence: Synthetic oligonucleotide
  Sense strand starting at position 236 of SEQ ID NO: 851
aagcuaggucccugacauu

SEQ ID NO: 68703 - RNA, 19 nt, Artificial Sequence
  Description of Artificial Sequence: Synthetic oligonucleotide
  Antisense strand to SEQ ID NO: 68622
aaugucagggaccuagcuu

SEQ ID NO: 68704 - RNA, 19 nt, Artificial Sequence
  Description of Artificial Sequence: Synthetic oligonucleotide
  Sense strand starting at position 354 of SEQ ID NO: 851
aagcuaggucucugacacu

SEQ ID NO: 68705 - RNA, 19 nt, Artificial Sequence
  Description of Artificial Sequence: Synthetic oligonucleotide
  Antisense strand to SEQ ID NO: 68624
agugucagagaccuagcuu

SEQ ID NO: 68706 - RNA, 19 nt, Artificial Sequence
  Description of Artificial Sequence: Synthetic oligonucleotide
  Sense strand starting at position 366 of SEQ ID NO: 851
ugacacuucuaguuaagaa

SEQ ID NO: 68707 - RNA, 19 nt, Artificial Sequence
  Description of Artificial Sequence: Synthetic oligonucleotide
  Antisense strand to SEQ ID NO: 68626
uucuuaacuagaaguguca

SEQ ID NO: 68708 - RNA, 19 nt, Artificial Sequence
  Description of Artificial Sequence: Synthetic oligonucleotide
  Sense strand starting at position 434 of SEQ ID NO: 851
cuagccugaugaguauaaa

SEQ ID NO: 68709 - RNA, 19 nt, Artificial Sequence
  Description of Artificial Sequence: Synthetic oligonucleotide
  Antisense strand to SEQ ID NO: 68628
uuuauacucaucaggcuag

SEQ ID NO: 68710 - RNA, 19 nt, Artificial Sequence
  Description of Artificial Sequence: Synthetic oligonucleotide
  Sense strand starting at position 621 of SEQ ID NO: 851
augucaaguuauucuauca

SEQ ID NO: 68711 - RNA, 19 nt, Artificial Sequence
  Description of Artificial Sequence: Synthetic oligonucleotide
  Antisense strand to SEQ ID NO: 68630
ugauagaauaacuugacau

SEQ ID NO: 68712 - RNA, 19 nt, Artificial Sequence
  Description of Artificial Sequence: Synthetic oligonucleotide
  Sense strand starting at position 783 of SEQ ID NO: 851
caaacugugccauagguau

SEQ ID NO: 68713 - RNA, 19 nt, Artificial Sequence
  Description of Artificial Sequence: Synthetic oligonucleotide
  Antisense strand to SEQ ID NO: 68632
auaccuauggcacaguuug

SEQ ID NO: 68714 - RNA, 19 nt, Artificial Sequence
  Description of Artificial Sequence: Synthetic oligonucleotide
  Sense strand starting at position 787 of SEQ ID NO: 851
cugugccauagguaugaaa

SEQ ID NO: 68715 - RNA, 19 nt, Artificial Sequence
  Description of Artificial Sequence: Synthetic oligonucleotide
  Antisense strand to SEQ ID NO: 68634
uuucauaccuauggcacag

SEQ ID NO: 68716 - RNA, 19 nt, Artificial Sequence
  Description of Artificial Sequence: Synthetic oligonucleotide
  Sense strand starting at position 789 of SEQ ID NO: 851
gugccauagguaugaaaug

SEQ ID NO: 68717 - RNA, 19 nt, Artificial Sequence
  Description of Artificial Sequence: Synthetic oligonucleotide
  Antisense strand to SEQ ID NO: 68636
cauuucauaccuauggcac

SEQ ID NO: 68718 - RNA, 19 nt, Artificial Sequence
  Description of Artificial Sequence: Synthetic oligonucleotide
  Sense strand starting at position 943 of SEQ ID NO: 851
aguugaagguaagaauuua

SEQ ID NO: 68719 - RNA, 19 nt, Artificial Sequence
  Description of Artificial Sequence: Synthetic oligonucleotide
  Antisense strand to SEQ ID NO: 68638
uaaauucuuaccuucaacu

SEQ ID NO: 68720 - RNA, 19 nt, Artificial Sequence
  Description of Artificial Sequence: Synthetic oligonucleotide
  Sense strand starting at position 1032 of SEQ ID NO: 851
uacccuguccgaugagaaa

SEQ ID NO: 68721 - RNA, 19 nt, Artificial Sequence
  Description of Artificial Sequence: Synthetic oligonucleotide
  Antisense strand to SEQ ID NO: 68640
uuucucaucggacagggua

SEQ ID NO: 68722 - RNA, 19 nt, Artificial Sequence
  Description of Artificial Sequence: Synthetic oligonucleotide
  Sense strand starting at position 1825 of SEQ ID NO: 851
gccgauuagggagagguaa

SEQ ID NO: 68723 - RNA, 19 nt, Artificial Sequence
  Description of Artificial Sequence: Synthetic oligonucleotide
  Antisense strand to SEQ ID NO: 68642
uuaccucucccuaaucggc

SEQ ID NO: 68724 - RNA, 19 nt, Artificial Sequence
  Description of Artificial Sequence: Synthetic oligonucleotide
  Sense strand starting at position 1856 of SEQ ID NO: 851
ccguuagccgcgaagaacu

SEQ ID NO: 68725 - RNA, 19 nt, Artificial Sequence
  Description of Artificial Sequence: Synthetic oligonucleotide
  Antisense strand to SEQ ID NO: 68644
aguucuucgcggcuaacgg

SEQ ID NO: 68726 - RNA, 19 nt, Artificial Sequence
  Description of Artificial Sequence: Synthetic oligonucleotide
  Sense strand starting at position 2237 of SEQ ID NO: 851
agggaucuucucgagguuu

SEQ ID NO: 68727 - RNA, 19 nt, Artificial Sequence
  Description of Artificial Sequence: Synthetic oligonucleotide
  Antisense strand to SEQ ID NO: 68646
aaaccucgagaagaucccu

SEQ ID NO: 68728 - RNA, 19 nt, Artificial Sequence
  Description of Artificial Sequence: Synthetic oligonucleotide
  Sense strand starting at position 2239 of SEQ ID NO: 851
ggaucuucucgagguuuga

SEQ ID NO: 68729 - RNA, 19 nt, Artificial Sequence
  Description of Artificial Sequence: Synthetic oligonucleotide
  Antisense strand to SEQ ID NO: 68648
ucaaaccucgagaagaucc

SEQ ID NO: 68730 - RNA, 19 nt, Artificial Sequence
  Description of Artificial Sequence: Synthetic oligonucleotide
  Sense strand starting at position 2366 of SEQ ID NO: 851
gagaauuaaugcuuauugu

SEQ ID NO: 68731 - RNA, 19 nt, Artificial Sequence
  Description of Artificial Sequence: Synthetic oligonucleotide
  Antisense strand to SEQ ID NO: 68650
acaauaagcauuaauucuc

SEQ ID NO: 68732 - RNA, 19 nt, Artificial Sequence
  Description of Artificial Sequence: Synthetic oligonucleotide
  Sense strand starting at position 2431 of SEQ ID NO: 851
uuuaguauuuccguuguaa

SEQ ID NO: 68733 - RNA, 19 nt, Artificial Sequence
  Description of Artificial Sequence: Synthetic oligonucleotide
  Antisense strand to SEQ ID NO: 68652
uuacaacggaaauacuaaa

SEQ ID NO: 68734 - RNA, 19 nt, Artificial Sequence
  Description of Artificial Sequence: Synthetic oligonucleotide
  Sense strand starting at position 2433 of SEQ ID NO: 851
uaguauuuccguuguaauu

SEQ ID NO: 68735 - RNA, 19 nt, Artificial Sequence
  Description of Artificial Sequence: Synthetic oligonucleotide
  Antisense strand to SEQ ID NO: 68654
aauuacaacggaaauacua

SEQ ID NO: 68736 - RNA, 19 nt, Artificial Sequence
  Description of Artificial Sequence: Synthetic oligonucleotide
  Sense strand starting at position 2463 of SEQ ID NO: 851
gcuugaaauugaguaccaa

SEQ ID NO: 68737 - RNA, 19 nt, Artificial Sequence
  Description of Artificial Sequence: Synthetic oligonucleotide
  Antisense strand to SEQ ID NO: 68656
uugguacucaauuucaagc

SEQ ID NO: 68738 - RNA, 19 nt, Artificial Sequence
  Description of Artificial Sequence: Synthetic oligonucleotide
  Sense strand starting at position 2471 of SEQ ID NO: 851
uugaguaccaaaggaguuu

SEQ ID NO: 68739 - RNA, 19 nt, Artificial Sequence
  Description of Artificial Sequence: Synthetic oligonucleotide
  Antisense strand to SEQ ID NO: 68658
aaacuccuuugguacucaa

SEQ ID NO: 68740 - RNA, 19 nt, Artificial Sequence
  Description of Artificial Sequence: Synthetic oligonucleotide
  Sense strand starting at position 2579 of SEQ ID NO: 851
gcacuaagggcagauguuu

SEQ ID NO: 68741 - RNA, 19 nt, Artificial Sequence
  Description of Artificial Sequence: Synthetic oligonucleotide
  Antisense strand to SEQ ID NO: 68660
aaacaucugcccuuagugc

SEQ ID NO: 68742 - RNA, 19 nt, Artificial Sequence
  Description of Artificial Sequence: Synthetic oligonucleotide
  Sense strand starting at position 2587 of SEQ ID NO: 851
ggcagauguuuccuauuuc

SEQ ID NO: 68743 - RNA, 19 nt, Artificial Sequence
  Description of Artificial Sequence: Synthetic oligonucleotide
  Antisense strand to SEQ ID NO: 68662
gaaauaggaaacaucugcc

SEQ ID NO: 68744 - RNA, 19 nt, Artificial Sequence
  Description of Artificial Sequence: Synthetic oligonucleotide
  Sense strand starting at position 2612 of SEQ ID NO: 851
gguagucaaucuccgaaug

SEQ ID NO: 68745 - RNA, 19 nt, Artificial Sequence
  Description of Artificial Sequence: Synthetic oligonucleotide
  Antisense strand to SEQ ID NO: 68664
cauucggagauugacuacc

SEQ ID NO: 68746 - RNA, 19 nt, Artificial Sequence
  Description of Artificial Sequence: Synthetic oligonucleotide
  Sense strand starting at position 2857 of SEQ ID NO: 851
gguauucuugggcaagcca

SEQ ID NO: 68747 - RNA, 19 nt, Artificial Sequence
  Description of Artificial Sequence: Synthetic oligonucleotide
  Antisense strand to SEQ ID NO: 68666
uggcuugcccaagaauacc

SEQ ID NO: 68748 - RNA, 19 nt, Artificial Sequence
  Description of Artificial Sequence: Synthetic oligonucleotide
  Sense strand starting at position 2973 of SEQ ID NO: 851
ugugaaagcuaucucaaua

SEQ ID NO: 68749 - RNA, 19 nt, Artificial Sequence
  Description of Artificial Sequence: Synthetic oligonucleotide
  Antisense strand to SEQ ID NO: 68668
uauugagauagcuuucaca

SEQ ID NO: 68750 - RNA, 19 nt, Artificial Sequence
  Description of Artificial Sequence: Synthetic oligonucleotide
  Sense strand starting at position 3172 of SEQ ID NO: 851
uauguuaaugcuggaagag

SEQ ID NO: 68751 - RNA, 19 nt, Artificial Sequence
  Description of Artificial Sequence: Synthetic oligonucleotide
  Antisense strand to SEQ ID NO: 68670
cucuuccagcauuaacaua

SEQ ID NO: 68752 - RNA, 19 nt, Artificial Sequence
  Description of Artificial Sequence: Synthetic oligonucleotide
  Sense strand starting at position 3214 of SEQ ID NO: 851
uaauuacuucugugaggga

SEQ ID NO: 68753 - RNA, 19 nt, Artificial Sequence
  Description of Artificial Sequence: Synthetic oligonucleotide
  Antisense strand to SEQ ID NO: 68672
ucccucacagaaguaauua

SEQ ID NO: 68754 - RNA, 19 nt, Artificial Sequence
  Description of Artificial Sequence: Synthetic oligonucleotide
  Sense strand starting at position 3229 of SEQ ID NO: 851
gggagacuguugaggaaua

SEQ ID NO: 68755 - RNA, 19 nt, Artificial Sequence
  Description of Artificial Sequence: Synthetic oligonucleotide
  Antisense strand to SEQ ID NO: 68674
uauuccucaacagucuccc

SEQ ID NO: 68756 - RNA, 19 nt, Artificial Sequence
  Description of Artificial Sequence: Synthetic oligonucleotide
  Sense strand starting at position 3341 of SEQ ID NO: 851
ucucaaacaccagguguua

SEQ ID NO: 68757 - RNA, 19 nt, Artificial Sequence
  Description of Artificial Sequence: Synthetic oligonucleotide
  Antisense strand to SEQ ID NO: 68676
uaacaccugguguuugaga

SEQ ID NO: 68758 - RNA, 19 nt, Artificial Sequence
  Description of Artificial Sequence: Synthetic oligonucleotide
  Sense strand starting at position 3382 of SEQ ID NO: 851
agauucuauuuaggauaca

SEQ ID NO: 68759 - RNA, 19 nt, Artificial Sequence
  Description of Artificial Sequence: Synthetic oligonucleotide
  Antisense strand to SEQ ID NO: 68678
uguauccuaaauagaaucu

SEQ ID NO: 68760 - RNA, 19 nt, Artificial Sequence
  Description of Artificial Sequence: Synthetic oligonucleotide
  Sense strand starting at position 3600 of SEQ ID NO: 851
aggcuugaugcaggagauu

SEQ ID NO: 68761 - RNA, 19 nt, Artificial Sequence
  Description of Artificial Sequence: Synthetic oligonucleotide
  Antisense strand to SEQ ID NO: 68680
aaucuccugcaucaagccu

SEQ ID NO: 68762 - RNA, 19 nt, Artificial Sequence
  Description of Artificial Sequence: Synthetic oligonucleotide
  Sense strand starting at position 3750 of SEQ ID NO: 851
aucugaagugauuaccagu

SEQ ID NO: 68763 - RNA, 19 nt, Artificial Sequence
  Description of Artificial Sequence: Synthetic oligonucleotide
  Antisense strand to SEQ ID NO: 68682
acugguaaucacuucagau

SEQ ID NO: 68764 - RNA, 19 nt, Artificial Sequence
  Description of Artificial Sequence: Synthetic oligonucleotide
  Sense strand starting at position 3809 of SEQ ID NO: 851
uuuagauguucuuugaccu

SEQ ID NO: 68765 - RNA, 19 nt, Artificial Sequence
  Description of Artificial Sequence: Synthetic oligonucleotide
  Antisense strand to SEQ ID NO: 68684
aggucaaagaacaucuaaa

SEQ ID NO: 68766 - RNA, 19 nt, Artificial Sequence
  Description of Artificial Sequence: Synthetic oligonucleotide
  Sense strand starting at position 3810 of SEQ ID NO: 851
uuagauguucuuugaccuu

SEQ ID NO: 68767 - RNA, 19 nt, Artificial Sequence
  Description of Artificial Sequence: Synthetic oligonucleotide
  Antisense strand to SEQ ID NO: 68686
aaggucaaagaacaucuaa

SEQ ID NO: 68768 - RNA, 19 nt, Artificial Sequence
  Description of Artificial Sequence: Synthetic oligonucleotide
  Sense strand starting at position 3872 of SEQ ID NO: 851
gacauagaugcucacuguu

SEQ ID NO: 68769 - RNA, 19 nt, Artificial Sequence
  Description of Artificial Sequence: Synthetic oligonucleotide
  Antisense strand to SEQ ID NO: 68688
aacagugagcaucuauguc

SEQ ID NO: 68770 - RNA, 19 nt, Artificial Sequence
  Description of Artificial Sequence: Synthetic oligonucleotide
  Sense strand starting at position 3963 of SEQ ID NO: 851
aguaaucugucacuuuaug

SEQ ID NO: 68771 - RNA, 19 nt, Artificial Sequence
  Description of Artificial Sequence: Synthetic oligonucleotide
  Antisense strand to SEQ ID NO: 68690
cauaaagugacagauuacu

SEQ ID NO: 68772 - RNA, 19 nt, Artificial Sequence
  Description of Artificial Sequence: Synthetic oligonucleotide
  Sense strand starting at position 26 of SEQ ID NO: 852
agcuacaugguaugacaaa

SEQ ID NO: 68773 - RNA, 19 nt, Artificial Sequence
  Description of Artificial Sequence: Synthetic oligonucleotide
  Antisense strand to SEQ ID NO: 68692
uuugucauaccauguagcu

SEQ ID NO: 68774 - RNA, 19 nt, Artificial Sequence
  Description of Artificial Sequence: Synthetic oligonucleotide
  Sense strand starting at position 50 of SEQ ID NO: 852
cccaaucuuugaucuucga

SEQ ID NO: 68775 - RNA, 19 nt, Artificial Sequence
  Description of Artificial Sequence: Synthetic oligonucleotide
  Antisense strand to SEQ ID NO: 68694
ucgaagaucaaagauuggg

SEQ ID NO: 68776 - RNA, 19 nt, Artificial Sequence
  Description of Artificial Sequence: Synthetic oligonucleotide
  Sense strand starting at position 57 of SEQ ID NO: 852
uuugaucuucgauaggauu

SEQ ID NO: 68777 - RNA, 19 nt, Artificial Sequence
  Description of Artificial Sequence: Synthetic oligonucleotide
  Antisense strand to SEQ ID NO: 68696
aauccuaucgaagaucaaa

SEQ ID NO: 68778 - RNA, 19 nt, Artificial Sequence
  Description of Artificial Sequence: Synthetic oligonucleotide
  Sense strand starting at position 59 of SEQ ID NO: 852
ugaucuucgauaggauugu

SEQ ID NO: 68779 - RNA, 19 nt, Artificial Sequence
  Description of Artificial Sequence: Synthetic oligonucleotide
  Antisense strand to SEQ ID NO: 68698
acaauccuaucgaagauca

SEQ ID NO: 68780 - RNA, 19 nt, Artificial Sequence
  Description of Artificial Sequence: Synthetic oligonucleotide
  Sense strand starting at position 65 of SEQ ID NO: 852
ucgauaggauuguauuuga

SEQ ID NO: 68781 - RNA, 19 nt, Artificial Sequence
  Description of Artificial Sequence: Synthetic oligonucleotide
  Antisense strand to SEQ ID NO: 68700
ucaaauacaauccuaucga

SEQ ID NO: 68782 - RNA, 19 nt, Artificial Sequence
  Description of Artificial Sequence: Synthetic oligonucleotide
  Sense strand starting at position 70 of SEQ ID NO: 852
aggauuguauuugagaaga

SEQ ID NO: 68783 - RNA, 19 nt, Artificial Sequence
  Description of Artificial Sequence: Synthetic oligonucleotide
  Antisense strand to SEQ ID NO: 68702
ucuucucaaauacaauccu

SEQ ID NO: 68784 - RNA, 19 nt, Artificial Sequence
  Description of Artificial Sequence: Synthetic oligonucleotide
  Sense strand starting at position 72 of SEQ ID NO: 852
gauuguauuugagaagaau

SEQ ID NO: 68785 - RNA, 19 nt, Artificial Sequence
  Description of Artificial Sequence: Synthetic oligonucleotide
  Antisense strand to SEQ ID NO: 68704
auucuucucaaauacaauc

SEQ ID NO: 68786 - RNA, 19 nt, Artificial Sequence
  Description of Artificial Sequence: Synthetic oligonucleotide
  Sense strand starting at position 238 of SEQ ID NO: 852
aggucaaaccguuacuaaa

SEQ ID NO: 68787 - RNA, 19 nt, Artificial Sequence
  Description of Artificial Sequence: Synthetic oligonucleotide
  Antisense strand to SEQ ID NO: 68706
uuuaguaacgguuugaccu

SEQ ID NO: 68788 - RNA, 19 nt, Artificial Sequence
  Description of Artificial Sequence: Synthetic oligonucleotide
  Sense strand starting at position 300 of SEQ ID NO: 852
uggucuuaaccacgaagau

SEQ ID NO: 68789 - RNA, 19 nt, Artificial Sequence
  Description of Artificial Sequence: Synthetic oligonucleotide
  Antisense strand to SEQ ID NO: 68708
aucuucgugguuaagacca

SEQ ID NO: 68790 - RNA, 19 nt, Artificial Sequence
  Description of Artificial Sequence: Synthetic oligonucleotide
  Sense strand starting at position 328 of SEQ ID NO: 852
ugugucucaguuuaacaaa

SEQ ID NO: 68791 - RNA, 19 nt, Artificial Sequence
  Description of Artificial Sequence: Synthetic oligonucleotide
  Antisense strand to SEQ ID NO: 68710
uuuguuaaacugagacaca

SEQ ID NO: 68792 - RNA, 19 nt, Artificial Sequence
  Description of Artificial Sequence: Synthetic oligonucleotide
  Sense strand starting at position 392 of SEQ ID NO: 852
ugauauauguguucuuacu

SEQ ID NO: 68793 - RNA, 19 nt, Artificial Sequence
  Description of Artificial Sequence: Synthetic oligonucleotide
  Antisense strand to SEQ ID NO: 68712
aguaagaacacauauauca

SEQ ID NO: 68794 - RNA, 19 nt, Artificial Sequence
  Description of Artificial Sequence: Synthetic oligonucleotide
  Sense strand starting at position 874 of SEQ ID NO: 852
cugucugguccugaaguga

SEQ ID NO: 68795 - RNA, 19 nt, Artificial Sequence
  Description of Artificial Sequence: Synthetic oligonucleotide
  Antisense strand to SEQ ID NO: 68714
ucacuucaggaccagacag

SEQ ID NO: 68796 - RNA, 19 nt, Artificial Sequence
  Description of Artificial Sequence: Synthetic oligonucleotide
  Sense strand starting at position 878 of SEQ ID NO: 852
cugguccugaagugauaca

SEQ ID NO: 68797 - RNA, 19 nt, Artificial Sequence
  Description of Artificial Sequence: Synthetic oligonucleotide
  Antisense strand to SEQ ID NO: 68716
uguaucacuucaggaccag

SEQ ID NO: 68798 - RNA, 19 nt, Artificial Sequence
  Description of Artificial Sequence: Synthetic oligonucleotide
  Sense strand starting at position 1080 of SEQ ID NO: 852
agauuccaguuugugcaaa

SEQ ID NO: 68799 - RNA, 19 nt, Artificial Sequence
  Description of Artificial Sequence: Synthetic oligonucleotide
  Antisense strand to SEQ ID NO: 68718
uuugcacaaacuggaaucu

SEQ ID NO: 68800 - RNA, 19 nt, Artificial Sequence
  Description of Artificial Sequence: Synthetic oligonucleotide
  Sense strand starting at position 1216 of SEQ ID NO: 852
cccauaggaugucuuguua

SEQ ID NO: 68801 - RNA, 19 nt, Artificial Sequence
  Description of Artificial Sequence: Synthetic oligonucleotide
  Antisense strand to SEQ ID NO: 68720
uaacaagacauccuauggg

SEQ ID NO: 68802 - RNA, 19 nt, Artificial Sequence
  Description of Artificial Sequence: Synthetic oligonucleotide
  Sense strand starting at position 1231 of SEQ ID NO: 852
guuaaucguacagguggaa

SEQ ID NO: 68803 - RNA, 19 nt, Artificial Sequence
  Description of Artificial Sequence: Synthetic oligonucleotide
  Antisense strand to SEQ ID NO: 68722
uuccaccuguacgauuaac

SEQ ID NO: 68804 - RNA, 19 nt, Artificial Sequence
  Description of Artificial Sequence: Synthetic oligonucleotide
  Sense strand starting at position 1279 of SEQ ID NO: 852
acagccuuacugcaaugau

SEQ ID NO: 68805 - RNA, 19 nt, Artificial Sequence
  Description of Artificial Sequence: Synthetic oligonucleotide
  Antisense strand to SEQ ID NO: 68724
aucauugcaguaaggcugu

SEQ ID NO: 68806 - RNA, 19 nt, Artificial Sequence
  Description of Artificial Sequence: Synthetic oligonucleotide
  Sense strand starting at position 1716 of SEQ ID NO: 852
ggagcccuucccuauacuu

SEQ ID NO: 68807 - RNA, 19 nt, Artificial Sequence
  Description of Artificial Sequence: Synthetic oligonucleotide
  Antisense strand to SEQ ID NO: 68726
aaguauagggaagggcucc

SEQ ID NO: 68808 - RNA, 19 nt, Artificial Sequence
  Description of Artificial Sequence: Synthetic oligonucleotide
  Sense strand starting at position 1873 of SEQ ID NO: 852
ggcuuacguggugaaacaa

SEQ ID NO: 68809 - RNA, 19 nt, Artificial Sequence
  Description of Artificial Sequence: Synthetic oligonucleotide
  Antisense strand to SEQ ID NO: 68728
uuguuucaccacguaagcc

SEQ ID NO: 68810 - RNA, 19 nt, Artificial Sequence
  Description of Artificial Sequence: Synthetic oligonucleotide
  Sense strand starting at position 2124 of SEQ ID NO: 852
auagcaaccgccuaguuaa

SEQ ID NO: 68811 - RNA, 19 nt, Artificial Sequence
  Description of Artificial Sequence: Synthetic oligonucleotide
  Antisense strand to SEQ ID NO: 68730
uuaacuaggcgguugcuau

SEQ ID NO: 68812 - RNA, 19 nt, Artificial Sequence
  Description of Artificial Sequence: Synthetic oligonucleotide
  Sense strand starting at position 2220 of SEQ ID NO: 852
uuaaguuugucuucugaau

SEQ ID NO: 68813 - RNA, 19 nt, Artificial Sequence
  Description of Artificial Sequence: Synthetic oligonucleotide
  Antisense strand to SEQ ID NO: 68732
auucagaagacaaacuuaa

SEQ ID NO: 68814 - RNA, 19 nt, Artificial Sequence
  Description of Artificial Sequence: Synthetic oligonucleotide
  Sense strand starting at position 2279 of SEQ ID NO: 852
agccaaauauccguuagga

SEQ ID NO: 68815 - RNA, 19 nt, Artificial Sequence
  Description of Artificial Sequence: Synthetic oligonucleotide
  Antisense strand to SEQ ID NO: 68734
uccuaacggauauuuggcu

SEQ ID NO: 68816 - RNA, 19 nt, Artificial Sequence
  Description of Artificial Sequence: Synthetic oligonucleotide
  Sense strand starting at position 2327 of SEQ ID NO: 852
ggcuuaucaucacucuuag

SEQ ID NO: 68817 - RNA, 19 nt, Artificial Sequence
  Description of Artificial Sequence: Synthetic oligonucleotide
  Antisense strand to SEQ ID NO: 68736
cuaagagugaugauaagcc

SEQ ID NO: 68818 - RNA, 19 nt, Artificial Sequence
  Description of Artificial Sequence: Synthetic oligonucleotide
  Sense strand starting at position 2408 of SEQ ID NO: 852
uugccaucccuacaggauu

SEQ ID NO: 68819 - RNA, 19 nt, Artificial Sequence
  Description of Artificial Sequence: Synthetic oligonucleotide
  Antisense strand to SEQ ID NO: 68738
aauccuguagggauggcaa

SEQ ID NO: 68820 - RNA, 19 nt, Artificial Sequence
  Description of Artificial Sequence: Synthetic oligonucleotide
  Sense strand starting at position 2479 of SEQ ID NO: 852
cccucugguuauucugaca

SEQ ID NO: 68821 - RNA, 19 nt, Artificial Sequence
  Description of Artificial Sequence: Synthetic oligonucleotide
  Antisense strand to SEQ ID NO: 68740
ugucagaauaaccagaggg

SEQ ID NO: 68822 - RNA, 19 nt, Artificial Sequence
  Description of Artificial Sequence: Synthetic oligonucleotide
  Sense strand starting at position 2506 of SEQ ID NO: 852
ggauauucucucugccuga

SEQ ID NO: 68823 - RNA, 19 nt, Artificial Sequence
  Description of Artificial Sequence: Synthetic oligonucleotide
  Antisense strand to SEQ ID NO: 68742
ucaggcagagagaauaucc

SEQ ID NO: 68824 - RNA, 19 nt, Artificial Sequence
  Description of Artificial Sequence: Synthetic oligonucleotide
  Sense strand starting at position 2586 of SEQ ID NO: 852
uugguaggccugcaagaau

SEQ ID NO: 68825 - RNA, 19 nt, Artificial Sequence
  Description of Artificial Sequence: Synthetic oligonucleotide
  Antisense strand to SEQ ID NO: 68744
auucuugcaggccuaccaa

SEQ ID NO: 68826 - RNA, 19 nt, Artificial Sequence
  Description of Artificial Sequence: Synthetic oligonucleotide
  Sense strand starting at position 2595 of SEQ ID NO: 852
cugcaagaauuagcaaaua

SEQ ID NO: 68827 - RNA, 19 nt, Artificial Sequence
  Description of Artificial Sequence: Synthetic oligonucleotide
  Antisense strand to SEQ ID NO: 68746
uauuugcuaauucuugcag

SEQ ID NO: 68828 - RNA, 19 nt, Artificial Sequence
  Description of Artificial Sequence: Synthetic oligonucleotide
  Sense strand starting at position 3091 of SEQ ID NO: 852
ggcauuaagacccagugau

SEQ ID NO: 68829 - RNA, 19 nt, Artificial Sequence
  Description of Artificial Sequence: Synthetic oligonucleotide
  Antisense strand to SEQ ID NO: 68748
aucacugggucuuaaugcc

SEQ ID NO: 68830 - RNA, 19 nt, Artificial Sequence
  Description of Artificial Sequence: Synthetic oligonucleotide
  Sense strand starting at position 3104 of SEQ ID NO: 852
agugauuucuguuucuacu

SEQ ID NO: 68831 - RNA, 19 nt, Artificial Sequence
  Description of Artificial Sequence: Synthetic oligonucleotide
  Antisense strand to SEQ ID NO: 68750
aguagaaacagaaaucacu

SEQ ID NO: 68832 - RNA, 19 nt, Artificial Sequence
  Description of Artificial Sequence: Synthetic oligonucleotide
  Sense strand starting at position 3113 of SEQ ID NO: 852
uguuucuacuagccagaau

SEQ ID NO: 68833 - RNA, 19 nt, Artificial Sequence
  Description of Artificial Sequence: Synthetic oligonucleotide
  Antisense strand to SEQ ID NO: 68752
auucuggcuaguagaaaca

SEQ ID NO: 68834 - RNA, 19 nt, Artificial Sequence
  Description of Artificial Sequence: Synthetic oligonucleotide
  Sense strand starting at position 3124 of SEQ ID NO: 852
gccagaauaaagugucuag

SEQ ID NO: 68835 - RNA, 19 nt, Artificial Sequence
  Description of Artificial Sequence: Synthetic oligonucleotide
  Antisense strand to SEQ ID NO: 68754
cuagacacuuuauucuggc

SEQ ID NO: 68836 - RNA, 19 nt, Artificial Sequence
  Description of Artificial Sequence: Synthetic oligonucleotide
  Sense strand starting at position 3127 of SEQ ID NO: 852
agaauaaagugucuagaug

SEQ ID NO: 68837 - RNA, 19 nt, Artificial Sequence
  Description of Artificial Sequence: Synthetic oligonucleotide
  Antisense strand to SEQ ID NO: 68756
caucuagacacuuuauucu

SEQ ID NO: 68838 - RNA, 19 nt, Artificial Sequence
  Description of Artificial Sequence: Synthetic oligonucleotide
  Sense strand starting at position 3639 of SEQ ID NO: 852
uuuguuauaaagugaggua

SEQ ID NO: 68839 - RNA, 19 nt, Artificial Sequence
  Description of Artificial Sequence: Synthetic oligonucleotide
  Antisense strand to SEQ ID NO: 68758
uaccucacuuuauaacaaa

SEQ ID NO: 68840 - RNA, 19 nt, Artificial Sequence
  Description of Artificial Sequence: Synthetic oligonucleotide
  Sense strand starting at position 3640 of SEQ ID NO: 852
uuguuauaaagugagguau

SEQ ID NO: 68841 - RNA, 19 nt, Artificial Sequence
  Description of Artificial Sequence: Synthetic oligonucleotide
  Antisense strand to SEQ ID NO: 68760
auaccucacuuuauaacaa

SEQ ID NO: 68842 - RNA, 19 nt, Artificial Sequence
  Description of Artificial Sequence: Synthetic oligonucleotide
  Sense strand starting at position 3652 of SEQ ID NO: 852
gagguauucuaauugagca

SEQ ID NO: 68843 - RNA, 19 nt, Artificial Sequence
  Description of Artificial Sequence: Synthetic oligonucleotide
  Antisense strand to SEQ ID NO: 68762
ugcucaauuagaauaccuc

SEQ ID NO: 68844 - RNA, 19 nt, Artificial Sequence
  Description of Artificial Sequence: Synthetic oligonucleotide
  Sense strand starting at position 3682 of SEQ ID NO: 852
agucuuuauuucucugagu

SEQ ID NO: 68845 - RNA, 19 nt, Artificial Sequence
  Description of Artificial Sequence: Synthetic oligonucleotide
  Antisense strand to SEQ ID NO: 68764
acucagagaaauaaagacu

SEQ ID NO: 68846 - RNA, 19 nt, Artificial Sequence
  Description of Artificial Sequence: Synthetic oligonucleotide
  Sense strand starting at position 3683 of SEQ ID NO: 852
gucuuuauuucucugaguu

SEQ ID NO: 68847 - RNA, 19 nt, Artificial Sequence
  Description of Artificial Sequence: Synthetic oligonucleotide
  Antisense strand to SEQ ID NO: 68766
aacucagagaaauaaagac

SEQ ID NO: 68848 - RNA, 19 nt, Artificial Sequence
  Description of Artificial Sequence: Synthetic oligonucleotide
  Sense strand starting at position 3750 of SEQ ID NO: 852
auaggcuagagcuggaaau

SEQ ID NO: 68849 - RNA, 19 nt, Artificial Sequence
  Description of Artificial Sequence: Synthetic oligonucleotide
  Antisense strand to SEQ ID NO: 68768
auuuccagcucuagccuau

SEQ ID NO: 68850 - RNA, 19 nt, Artificial Sequence
  Description of Artificial Sequence: Synthetic oligonucleotide
  Sense strand starting at position 3751 of SEQ ID NO: 852
uaggcuagagcuggaaaua

SEQ ID NO: 68851 - RNA, 19 nt, Artificial Sequence
  Description of Artificial Sequence: Synthetic oligonucleotide
  Antisense strand to SEQ ID NO: 68770
uauuuccagcucuagccua

SEQ ID NO: 68852 - RNA, 19 nt, Artificial Sequence
  Description of Artificial Sequence: Synthetic oligonucleotide
  Sense strand starting at position 3919 of SEQ ID NO: 853
aggauuugauacugaugau

SEQ ID NO: 68853 - RNA, 19 nt, Artificial Sequence
  Description of Artificial Sequence: Synthetic oligonucleotide
  Antisense strand to SEQ ID NO: 68772
aucaucaguaucaaauccu

SEQ ID NO: 68854 - RNA, 19 nt, Artificial Sequence
  Description of Artificial Sequence: Synthetic oligonucleotide
  Sense strand starting at position 3905 of SEQ ID NO: 853
acaaauacauucguaggau

SEQ ID NO: 68855 - RNA, 19 nt, Artificial Sequence
  Description of Artificial Sequence: Synthetic oligonucleotide
  Antisense strand to SEQ ID NO: 68774
auccuacgaauguauuugu

SEQ ID NO: 68856 - RNA, 19 nt, Artificial Sequence
  Description of Artificial Sequence: Synthetic oligonucleotide
  Sense strand starting at position 3883 of SEQ ID NO: 853
ugcauauagcccuggaaua

SEQ ID NO: 68857 - RNA, 19 nt, Artificial Sequence
  Description of Artificial Sequence: Synthetic oligonucleotide
  Antisense strand to SEQ ID NO: 68776
uauuccagggcuauaugca

SEQ ID NO: 68858 - RNA, 19 nt, Artificial Sequence
  Description of Artificial Sequence: Synthetic oligonucleotide
  Sense strand starting at position 3756 of SEQ ID NO: 853
ugugcuaauaagggucaaa

SEQ ID NO: 68859 - RNA, 19 nt, Artificial Sequence
  Description of Artificial Sequence: Synthetic oligonucleotide
  Antisense strand to SEQ ID NO: 68778
uuugacccuuauuagcaca

SEQ ID NO: 68860 - RNA, 19 nt, Artificial Sequence
  Description of Artificial Sequence: Synthetic oligonucleotide
  Sense strand starting at position 3747 of SEQ ID NO: 853
uaaagugauugugcuaaua

SEQ ID NO: 68861 - RNA, 19 nt, Artificial Sequence
  Description of Artificial Sequence: Synthetic oligonucleotide
  Antisense strand to SEQ ID NO: 68780
uauuagcacaaucacuuua

SEQ ID NO: 68862 - RNA, 19 nt, Artificial Sequence
  Description of Artificial Sequence: Synthetic oligonucleotide
  Sense strand starting at position 3701 of SEQ ID NO: 853
ggacuauugcugugaugac

SEQ ID NO: 68863 - RNA, 19 nt, Artificial Sequence
  Description of Artificial Sequence: Synthetic oligonucleotide
  Antisense strand to SEQ ID NO: 68782
gucaucacagcaauagucc

SEQ ID NO: 68864 - RNA, 19 nt, Artificial Sequence
  Description of Artificial Sequence: Synthetic oligonucleotide
  Sense strand starting at position 3648 of SEQ ID NO: 853
gcugcagugccugauauuu

SEQ ID NO: 68865 - RNA, 19 nt, Artificial Sequence
  Description of Artificial Sequence: Synthetic oligonucleotide
  Antisense strand to SEQ ID NO: 68784
aaauaucaggcacugcagc

SEQ ID NO: 68866 - RNA, 19 nt, Artificial Sequence
  Description of Artificial Sequence: Synthetic oligonucleotide
  Sense strand starting at position 3594 of SEQ ID NO: 853
uaggaagacuauuccaugu

SEQ ID NO: 68867 - RNA, 19 nt, Artificial Sequence
  Description of Artificial Sequence: Synthetic oligonucleotide
  Antisense strand to SEQ ID NO: 68786
acauggaauagucuuccua

SEQ ID NO: 68868 - RNA, 19 nt, Artificial Sequence
  Description of Artificial Sequence: Synthetic oligonucleotide
  Sense strand starting at position 3452 of SEQ ID NO: 853
cuaggauucugguuagaac

SEQ ID NO: 68869 - RNA, 19 nt, Artificial Sequence
  Description of Artificial Sequence: Synthetic oligonucleotide
  Antisense strand to SEQ ID NO: 68788
guucuaaccagaauccuag

SEQ ID NO: 68870 - RNA, 19 nt, Artificial Sequence
  Description of Artificial Sequence: Synthetic oligonucleotide
  Sense strand starting at position 3443 of SEQ ID NO: 853
uaaggaugccuaggauucu

SEQ ID NO: 68871 - RNA, 19 nt, Artificial Sequence
  Description of Artificial Sequence: Synthetic oligonucleotide
  Antisense strand to SEQ ID NO: 68790
agaauccuaggcauccuua

SEQ ID NO: 68872 - RNA, 19 nt, Artificial Sequence
  Description of Artificial Sequence: Synthetic oligonucleotide
  Sense strand starting at position 3440 of SEQ ID NO: 853
gaguaaggaugccuaggau

SEQ ID NO: 68873 - RNA, 19 nt, Artificial Sequence
  Description of Artificial Sequence: Synthetic oligonucleotide
  Antisense strand to SEQ ID NO: 68792
auccuaggcauccuuacuc

SEQ ID NO: 68874 - RNA, 19 nt, Artificial Sequence
  Description of Artificial Sequence: Synthetic oligonucleotide
  Sense strand starting at position 3282 of SEQ ID NO: 853
cucugaaggcauugaaugu

SEQ ID NO: 68875 - RNA, 19 nt, Artificial Sequence
  Description of Artificial Sequence: Synthetic oligonucleotide
  Antisense strand to SEQ ID NO: 68794
acauucaaugccuucagag

SEQ ID NO: 68876 - RNA, 19 nt, Artificial Sequence
  Description of Artificial Sequence: Synthetic oligonucleotide
  Sense strand starting at position 3262 of SEQ ID NO: 853
gcuggaaaucaugguagga

SEQ ID NO: 68877 - RNA, 19 nt, Artificial Sequence
  Description of Artificial Sequence: Synthetic oligonucleotide
  Antisense strand to SEQ ID NO: 68796
uccuaccaugauuuccagc

SEQ ID NO: 68878 - RNA, 19 nt, Artificial Sequence
  Description of Artificial Sequence: Synthetic oligonucleotide
  Sense strand starting at position 3187 of SEQ ID NO: 853
gucucugaccuugagaagu

SEQ ID NO: 68879 - RNA, 19 nt, Artificial Sequence
  Description of Artificial Sequence: Synthetic oligonucleotide
  Antisense strand to SEQ ID NO: 68798
acuucucaaggucagagac

SEQ ID NO: 68880 - RNA, 19 nt, Artificial Sequence
  Description of Artificial Sequence: Synthetic oligonucleotide
  Sense strand starting at position 3186 of SEQ ID NO: 853
agucucugaccuugagaag

SEQ ID NO: 68881 - RNA, 19 nt, Artificial Sequence
  Description of Artificial Sequence: Synthetic oligonucleotide
  Antisense strand to SEQ ID NO: 68800
cuucucaaggucagagacu

SEQ ID NO: 68882 - RNA, 19 nt, Artificial Sequence
  Description of Artificial Sequence: Synthetic oligonucleotide
  Sense strand starting at position 3180 of SEQ ID NO: 853
agacuuagucucugaccuu

SEQ ID NO: 68883 - RNA, 19 nt, Artificial Sequence
  Description of Artificial Sequence: Synthetic oligonucleotide
  Antisense strand to SEQ ID NO: 68802
aaggucagagacuaagucu

SEQ ID NO: 68884 - RNA, 19 nt, Artificial Sequence
  Description of Artificial Sequence: Synthetic oligonucleotide
  Sense strand starting at position 3012 of SEQ ID NO: 853
auaaauccaugauugcaga

SEQ ID NO: 68885 - RNA, 19 nt, Artificial Sequence
  Description of Artificial Sequence: Synthetic oligonucleotide
  Antisense strand to SEQ ID NO: 68804
ucugcaaucauggauuuau

SEQ ID NO: 68886 - RNA, 19 nt, Artificial Sequence
  Description of Artificial Sequence: Synthetic oligonucleotide
  Sense strand starting at position 3009 of SEQ ID NO: 853
gucauaaauccaugauugc

SEQ ID NO: 68887 - RNA, 19 nt, Artificial Sequence
  Description of Artificial Sequence: Synthetic oligonucleotide
  Antisense strand to SEQ ID NO: 68806
gcaaucauggauuuaugac

SEQ ID NO: 68888 - RNA, 19 nt, Artificial Sequence
  Description of Artificial Sequence: Synthetic oligonucleotide
  Sense strand starting at position 2757 of SEQ ID NO: 853
agagcuuucccgggagaag

SEQ ID NO: 68889 - RNA, 19 nt, Artificial Sequence
  Description of Artificial Sequence: Synthetic oligonucleotide
  Antisense strand to SEQ ID NO: 68808
cuucucccgggaaagcucu

SEQ ID NO: 68890 - RNA, 19 nt, Artificial Sequence
  Description of Artificial Sequence: Synthetic oligonucleotide
  Sense strand starting at position 2756 of SEQ ID NO: 853
aagagcuuucccgggagaa

SEQ ID NO: 68891 - RNA, 19 nt, Artificial Sequence
  Description of Artificial Sequence: Synthetic oligonucleotide
  Antisense strand to SEQ ID NO: 68810
uucucccgggaaagcucuu

SEQ ID NO: 68892 - RNA, 19 nt, Artificial Sequence
  Description of Artificial Sequence: Synthetic oligonucleotide
  Sense strand starting at position 2718 of SEQ ID NO: 853
cauggcaugucaguaggaa

SEQ ID NO: 68893 - RNA, 19 nt, Artificial Sequence
  Description of Artificial Sequence: Synthetic oligonucleotide
  Antisense strand to SEQ ID NO: 68812
uuccuacugacaugccaug

SEQ ID NO: 68894 - RNA, 19 nt, Artificial Sequence
  Description of Artificial Sequence: Synthetic oligonucleotide
  Sense strand starting at position 2576 of SEQ ID NO: 853
ugucccucuccagagacau

SEQ ID NO: 68895 - RNA, 19 nt, Artificial Sequence
  Description of Artificial Sequence: Synthetic oligonucleotide
  Antisense strand to SEQ ID NO: 68814
augucucuggagagggaca

SEQ ID NO: 68896 - RNA, 19 nt, Artificial Sequence
  Description of Artificial Sequence: Synthetic oligonucleotide
  Sense strand starting at position 2540 of SEQ ID NO: 853
gggccuguuggauaauaca

SEQ ID NO: 68897 - RNA, 19 nt, Artificial Sequence
  Description of Artificial Sequence: Synthetic oligonucleotide
  Antisense strand to SEQ ID NO: 68816
uguauuauccaacaggccc

SEQ ID NO: 68898 - RNA, 19 nt, Artificial Sequence
  Description of Artificial Sequence: Synthetic oligonucleotide
  Sense strand starting at position 2449 of SEQ ID NO: 853
uuucuugagcccugggaag

SEQ ID NO: 68899 - RNA, 19 nt, Artificial Sequence
  Description of Artificial Sequence: Synthetic oligonucleotide
  Antisense strand to SEQ ID NO: 68818
cuucccagggcucaagaaa

SEQ ID NO: 68900 - RNA, 19 nt, Artificial Sequence
  Description of Artificial Sequence: Synthetic oligonucleotide
  Sense strand starting at position 1558 of SEQ ID NO: 853
acuguuguccuggaaacca

SEQ ID NO: 68901 - RNA, 19 nt, Artificial Sequence
  Description of Artificial Sequence: Synthetic oligonucleotide
  Antisense strand to SEQ ID NO: 68820
ugguuuccaggacaacagu

SEQ ID NO: 68902 - RNA, 19 nt, Artificial Sequence
  Description of Artificial Sequence: Synthetic oligonucleotide
  Sense strand starting at position 1505 of SEQ ID NO: 853
ccauaauccguagaaacuu

SEQ ID NO: 68903 - RNA, 19 nt, Artificial Sequence
  Description of Artificial Sequence: Synthetic oligonucleotide
  Antisense strand to SEQ ID NO: 68822
aaguuucuacggauuaugg

SEQ ID NO: 68904 - RNA, 19 nt, Artificial Sequence
  Description of Artificial Sequence: Synthetic oligonucleotide
  Sense strand starting at position 1501 of SEQ ID NO: 853
ggaaccauaauccguagaa

SEQ ID NO: 68905 - RNA, 19 nt, Artificial Sequence
  Description of Artificial Sequence: Synthetic oligonucleotide
  Antisense strand to SEQ ID NO: 68824
uucuacggauuaugguucc

SEQ ID NO: 68906 - RNA, 19 nt, Artificial Sequence
  Description of Artificial Sequence: Synthetic oligonucleotide
  Sense strand starting at position 1268 of SEQ ID NO: 853
gcucuacucccaggaauau

SEQ ID NO: 68907 - RNA, 19 nt, Artificial Sequence
  Description of Artificial Sequence: Synthetic oligonucleotide
  Antisense strand to SEQ ID NO: 68826
auauuccugggaguagagc

SEQ ID NO: 68908 - RNA, 19 nt, Artificial Sequence
  Description of Artificial Sequence: Synthetic oligonucleotide
  Sense strand starting at position 849 of SEQ ID NO: 853
caguaaucaccaggauaug

SEQ ID NO: 68909 - RNA, 19 nt, Artificial Sequence
  Description of Artificial Sequence: Synthetic oligonucleotide
  Antisense strand to SEQ ID NO: 68828
cauauccuggugauuacug

SEQ ID NO: 68910 - RNA, 19 nt, Artificial Sequence
  Description of Artificial Sequence: Synthetic oligonucleotide
  Sense strand starting at position 785 of SEQ ID NO: 853
ugcuguguuaucccuguuu

SEQ ID NO: 68911 - RNA, 19 nt, Artificial Sequence
  Description of Artificial Sequence: Synthetic oligonucleotide
  Antisense strand to SEQ ID NO: 68830
aaacagggauaacacagca

SEQ ID NO: 68912 - RNA, 19 nt, Artificial Sequence
  Description of Artificial Sequence: Synthetic oligonucleotide
  Sense strand starting at position 777 of SEQ ID NO: 853
ucuugcucugcuguguuau

SEQ ID NO: 68913 - RNA, 19 nt, Artificial Sequence
  Description of Artificial Sequence: Synthetic oligonucleotide
  Antisense strand to SEQ ID NO: 68832
auaacacagcagagcaaga

SEQ ID NO: 68914 - RNA, 19 nt, Artificial Sequence
  Description of Artificial Sequence: Synthetic oligonucleotide
  Sense strand starting at position 725 of SEQ ID NO: 853
gugucucaauuugaaggaa

SEQ ID NO: 68915 - RNA, 19 nt, Artificial Sequence
  Description of Artificial Sequence: Synthetic oligonucleotide
  Antisense strand to SEQ ID NO: 68834
uuccuucaaauugagacac

SEQ ID NO: 68916 - RNA, 19 nt, Artificial Sequence
  Description of Artificial Sequence: Synthetic oligonucleotide
  Sense strand starting at position 717 of SEQ ID NO: 853
gaauauuggugucucaauu

SEQ ID NO: 68917 - RNA, 19 nt, Artificial Sequence
  Description of Artificial Sequence: Synthetic oligonucleotide
  Antisense strand to SEQ ID NO: 68836
aauugagacaccaauauuc

SEQ ID NO: 68918 - RNA, 19 nt, Artificial Sequence
  Description of Artificial Sequence: Synthetic oligonucleotide
  Sense strand starting at position 693 of SEQ ID NO: 853
acagaaguuucuccauguu

SEQ ID NO: 68919 - RNA, 19 nt, Artificial Sequence
  Description of Artificial Sequence: Synthetic oligonucleotide
  Antisense strand to SEQ ID NO: 68838
aacauggagaaacuucugu

SEQ ID NO: 68920 - RNA, 19 nt, Artificial Sequence
  Description of Artificial Sequence: Synthetic oligonucleotide
  Sense strand starting at position 674 of SEQ ID NO: 853
aggucuugauagagaggga

SEQ ID NO: 68921 - RNA, 19 nt, Artificial Sequence
  Description of Artificial Sequence: Synthetic oligonucleotide
  Antisense strand to SEQ ID NO: 68840
ucccucucuaucaagaccu

SEQ ID NO: 68922 - RNA, 19 nt, Artificial Sequence
  Description of Artificial Sequence: Synthetic oligonucleotide
  Sense strand starting at position 378 of SEQ ID NO: 853
uaaagaaccguugguaaag

SEQ ID NO: 68923 - RNA, 19 nt, Artificial Sequence
  Description of Artificial Sequence: Synthetic oligonucleotide
  Antisense strand to SEQ ID NO: 68842
cuuuaccaacgguucuuua

SEQ ID NO: 68924 - RNA, 19 nt, Artificial Sequence
  Description of Artificial Sequence: Synthetic oligonucleotide
  Sense strand starting at position 314 of SEQ ID NO: 853
acuacagaaugcucagaua

SEQ ID NO: 68925 - RNA, 19 nt, Artificial Sequence
  Description of Artificial Sequence: Synthetic oligonucleotide
  Antisense strand to SEQ ID NO: 68844
uaucugagcauucuguagu

SEQ ID NO: 68926 - RNA, 19 nt, Artificial Sequence
  Description of Artificial Sequence: Synthetic oligonucleotide
  Sense strand starting at position 267 of SEQ ID NO: 853
aguagugagaacuaccagu

SEQ ID NO: 68927 - RNA, 19 nt, Artificial Sequence
  Description of Artificial Sequence: Synthetic oligonucleotide
  Antisense strand to SEQ ID NO: 68846
acugguaguucucacuacu

SEQ ID NO: 68928 - RNA, 19 nt, Artificial Sequence
  Description of Artificial Sequence: Synthetic oligonucleotide
  Sense strand starting at position 242 of SEQ ID NO: 853
aguaaagguuauccaguca

SEQ ID NO: 68929 - RNA, 19 nt, Artificial Sequence
  Description of Artificial Sequence: Synthetic oligonucleotide
  Antisense strand to SEQ ID NO: 68848
ugacuggauaaccuuuacu

SEQ ID NO: 68930 - RNA, 19 nt, Artificial Sequence
  Description of Artificial Sequence: Synthetic oligonucleotide
  Sense strand starting at position 228 of SEQ ID NO: 853
aagguuaccguggaaguaa

SEQ ID NO: 68931 - RNA, 19 nt, Artificial Sequence
  Description of Artificial Sequence: Synthetic oligonucleotide
  Antisense strand to SEQ ID NO: 68850
uuacuuccacgguaaccuu

SEQ ID NO: 68932 - RNA, 19 nt, Artificial Sequence
  Description of Artificial Sequence: Synthetic oligonucleotide
  Sense strand starting at position 280 of SEQ ID NO: 854
gugaauauccaccauuguc

SEQ ID NO: 68933 - RNA, 19 nt, Artificial Sequence
  Description of Artificial Sequence: Synthetic oligonucleotide
  Antisense strand to SEQ ID NO: 68852
gacaaugguggauauucac

SEQ ID NO: 68934 - RNA, 19 nt, Artificial Sequence
  Description of Artificial Sequence: Synthetic oligonucleotide
  Sense strand starting at position 319 of SEQ ID NO: 854
aucccaaguuaaguaagau

SEQ ID NO: 68935 - RNA, 19 nt, Artificial Sequence
  Description of Artificial Sequence: Synthetic oligonucleotide
  Antisense strand to SEQ ID NO: 68854
aucuuacuuaacuugggau

SEQ ID NO: 68936 - RNA, 19 nt, Artificial Sequence
  Description of Artificial Sequence: Synthetic oligonucleotide
  Sense strand starting at position 524 of SEQ ID NO: 854
auguacucacuuuggagau

SEQ ID NO: 68937 - RNA, 19 nt, Artificial Sequence
  Description of Artificial Sequence: Synthetic oligonucleotide
  Antisense strand to SEQ ID NO: 68856
aucuccaaagugaguacau

SEQ ID NO: 68938 - RNA, 19 nt, Artificial Sequence
  Description of Artificial Sequence: Synthetic oligonucleotide
  Sense strand starting at position 578 of SEQ ID NO: 854
guaguaauuccacagucag

SEQ ID NO: 68939 - RNA, 19 nt, Artificial Sequence
  Description of Artificial Sequence: Synthetic oligonucleotide
  Antisense strand to SEQ ID NO: 68858
cugacuguggaauuacuac

SEQ ID NO: 68940 - RNA, 19 nt, Artificial Sequence
  Description of Artificial Sequence: Synthetic oligonucleotide
  Sense strand starting at position 585 of SEQ ID NO: 854
uuccacagucaguaaacuu

SEQ ID NO: 68941 - RNA, 19 nt, Artificial Sequence
  Description of Artificial Sequence: Synthetic oligonucleotide
  Antisense strand to SEQ ID NO: 68860
aaguuuacugacuguggaa

SEQ ID NO: 68942 - RNA, 19 nt, Artificial Sequence
  Description of Artificial Sequence: Synthetic oligonucleotide
  Sense strand starting at position 666 of SEQ ID NO: 854
cuggcaagagaguguugaa

SEQ ID NO: 68943 - RNA, 19 nt, Artificial Sequence
  Description of Artificial Sequence: Synthetic oligonucleotide
  Antisense strand to SEQ ID NO: 68862
uucaacacucucuugccag

SEQ ID NO: 68944 - RNA, 19 nt, Artificial Sequence
  Description of Artificial Sequence: Synthetic oligonucleotide
  Sense strand starting at position 1090 of SEQ ID NO: 854
cuuuaaaggccuugugaag

SEQ ID NO: 68945 - RNA, 19 nt, Artificial Sequence
  Description of Artificial Sequence: Synthetic oligonucleotide
  Antisense strand to SEQ ID NO: 68864
cuucacaaggccuuuaaag

SEQ ID NO: 68946 - RNA, 19 nt, Artificial Sequence
  Description of Artificial Sequence: Synthetic oligonucleotide
  Sense strand starting at position 1102 of SEQ ID NO: 854
ugugaaggccuuuaaguga

SEQ ID NO: 68947 - RNA, 19 nt, Artificial Sequence
  Description of Artificial Sequence: Synthetic oligonucleotide
  Antisense strand to SEQ ID NO: 68866
ucacuuaaaggccuucaca

SEQ ID NO: 68948 - RNA, 19 nt, Artificial Sequence
  Description of Artificial Sequence: Synthetic oligonucleotide
  Sense strand starting at position 1237 of SEQ ID NO: 854
gucucucaacuguaaacuu

SEQ ID NO: 68949 - RNA, 19 nt, Artificial Sequence
  Description of Artificial Sequence: Synthetic oligonucleotide
  Antisense strand to SEQ ID NO: 68868
aaguuuacaguugagagac

SEQ ID NO: 68950 - RNA, 19 nt, Artificial Sequence
  Description of Artificial Sequence: Synthetic oligonucleotide
  Sense strand starting at position 1264 of SEQ ID NO: 854
cagggauauugucuucuug

SEQ ID NO: 68951 - RNA, 19 nt, Artificial Sequence
  Description of Artificial Sequence: Synthetic oligonucleotide
  Antisense strand to SEQ ID NO: 68870
caagaagacaauaucccug

SEQ ID NO: 68952 - RNA, 19 nt, Artificial Sequence
  Description of Artificial Sequence: Synthetic oligonucleotide
  Sense strand starting at position 1275 of SEQ ID NO: 854
ucuucuuggguuuauauau

SEQ ID NO: 68953 - RNA, 19 nt, Artificial Sequence
  Description of Artificial Sequence: Synthetic oligonucleotide
  Antisense strand to SEQ ID NO: 68872
auauauaaacccaagaaga

SEQ ID NO: 68954 - RNA, 19 nt, Artificial Sequence
  Description of Artificial Sequence: Synthetic oligonucleotide
  Sense strand starting at position 1284 of SEQ ID NO: 854
guuuauauauucuccauag

SEQ ID NO: 68955 - RNA, 19 nt, Artificial Sequence
  Description of Artificial Sequence: Synthetic oligonucleotide
  Antisense strand to SEQ ID NO: 68874
cuauggagaauauauaaac

SEQ ID NO: 68956 - RNA, 19 nt, Artificial Sequence
  Description of Artificial Sequence: Synthetic oligonucleotide
  Sense strand starting at position 1324 of SEQ ID NO: 854
uuguuauugcucgauaaau

SEQ ID NO: 68957 - RNA, 19 nt, Artificial Sequence
  Description of Artificial Sequence: Synthetic oligonucleotide
  Antisense strand to SEQ ID NO: 68876
auuuaucgagcaauaacaa

SEQ ID NO: 68958 - RNA, 19 nt, Artificial Sequence
  Description of Artificial Sequence: Synthetic oligonucleotide
  Sense strand starting at position 1364 of SEQ ID NO: 854
cucagaagugcaugugaac

SEQ ID NO: 68959 - RNA, 19 nt, Artificial Sequence
  Description of Artificial Sequence: Synthetic oligonucleotide
  Antisense strand to SEQ ID NO: 68878
guucacaugcacuucugag

SEQ ID NO: 68960 - RNA, 19 nt, Artificial Sequence
  Description of Artificial Sequence: Synthetic oligonucleotide
  Sense strand starting at position 1544 of SEQ ID NO: 854
gggacuauuuccuaaacca

SEQ ID NO: 68961 - RNA, 19 nt, Artificial Sequence
  Description of Artificial Sequence: Synthetic oligonucleotide
  Antisense strand to SEQ ID NO: 68880
ugguuuaggaaauaguccc

SEQ ID NO: 68962 - RNA, 19 nt, Artificial Sequence
  Description of Artificial Sequence: Synthetic oligonucleotide
  Sense strand starting at position 1957 of SEQ ID NO: 854
acaucagcuuccucaggau

SEQ ID NO: 68963 - RNA, 19 nt, Artificial Sequence
  Description of Artificial Sequence: Synthetic oligonucleotide
  Antisense strand to SEQ ID NO: 68882
auccugaggaagcugaugu

SEQ ID NO: 68964 - RNA, 19 nt, Artificial Sequence
  Description of Artificial Sequence: Synthetic oligonucleotide
  Sense strand starting at position 2072 of SEQ ID NO: 854
ccagcuauucuguugcgau

SEQ ID NO: 68965 - RNA, 19 nt, Artificial Sequence
  Description of Artificial Sequence: Synthetic oligonucleotide
  Antisense strand to SEQ ID NO: 68884
aucgcaacagaauagcugg

SEQ ID NO: 68966 - RNA, 19 nt, Artificial Sequence
  Description of Artificial Sequence: Synthetic oligonucleotide
  Sense strand starting at position 2080 of SEQ ID NO: 854
ucuguugcgauccagacaa

SEQ ID NO: 68967 - RNA, 19 nt, Artificial Sequence
  Description of Artificial Sequence: Synthetic oligonucleotide
  Antisense strand to SEQ ID NO: 68886
uugucuggaucgcaacaga

SEQ ID NO: 68968 - RNA, 19 nt, Artificial Sequence
  Description of Artificial Sequence: Synthetic oligonucleotide
  Sense strand starting at position 2115 of SEQ ID NO: 854
gcagguuugcguucaaccu

SEQ ID NO: 68969 - RNA, 19 nt, Artificial Sequence
  Description of Artificial Sequence: Synthetic oligonucleotide
  Antisense strand to SEQ ID NO: 68888
agguugaacgcaaaccugc

SEQ ID NO: 68970 - RNA, 19 nt, Artificial Sequence
  Description of Artificial Sequence: Synthetic oligonucleotide
  Sense strand starting at position 2268 of SEQ ID NO: 854
gguuaauuucagcguagca

SEQ ID NO: 68971 - RNA, 19 nt, Artificial Sequence
  Description of Artificial Sequence: Synthetic oligonucleotide
  Antisense strand to SEQ ID NO: 68890
ugcuacgcugaaauuaacc

SEQ ID NO: 68972 - RNA, 19 nt, Artificial Sequence
  Description of Artificial Sequence: Synthetic oligonucleotide
  Sense strand starting at position 2318 of SEQ ID NO: 854
aauuaagugagauguguug

SEQ ID NO: 68973 - RNA, 19 nt, Artificial Sequence
  Description of Artificial Sequence: Synthetic oligonucleotide
  Antisense strand to SEQ ID NO: 68892
caacacaucucacuuaauu

SEQ ID NO: 68974 - RNA, 19 nt, Artificial Sequence
  Description of Artificial Sequence: Synthetic oligonucleotide
  Sense strand starting at position 2330 of SEQ ID NO: 854
uguguugggauccaagcaa

SEQ ID NO: 68975 - RNA, 19 nt, Artificial Sequence
  Description of Artificial Sequence: Synthetic oligonucleotide
  Antisense strand to SEQ ID NO: 68894
uugcuuggaucccaacaca

SEQ ID NO: 68976 - RNA, 19 nt, Artificial Sequence
  Description of Artificial Sequence: Synthetic oligonucleotide
  Sense strand starting at position 2385 of SEQ ID NO: 854
guuucugacagucaguuua

SEQ ID NO: 68977 - RNA, 19 nt, Artificial Sequence
  Description of Artificial Sequence: Synthetic oligonucleotide
  Antisense strand to SEQ ID NO: 68896
uaaacugacugucagaaac

SEQ ID NO: 68978 - RNA, 19 nt, Artificial Sequence
  Description of Artificial Sequence: Synthetic oligonucleotide
  Sense strand starting at position 2396 of SEQ ID NO: 854
ucaguuuauccuugacuug

SEQ ID NO: 68979 - RNA, 19 nt, Artificial Sequence
  Description of Artificial Sequence: Synthetic oligonucleotide
  Antisense strand to SEQ ID NO: 68898
caagucaaggauaaacuga

SEQ ID NO: 68980 - RNA, 19 nt, Artificial Sequence
  Description of Artificial Sequence: Synthetic oligonucleotide
  Sense strand starting at position 2399 of SEQ ID NO: 854
guuuauccuugacuugacu

SEQ ID NO: 68981 - RNA, 19 nt, Artificial Sequence
  Description of Artificial Sequence: Synthetic oligonucleotide
  Antisense strand to SEQ ID NO: 68900
agucaagucaaggauaaac

SEQ ID NO: 68982 - RNA, 19 nt, Artificial Sequence
  Description of Artificial Sequence: Synthetic oligonucleotide
  Sense strand starting at position 2408 of SEQ ID NO: 854
ugacuugacuguuccagaa

SEQ ID NO: 68983 - RNA, 19 nt, Artificial Sequence
  Description of Artificial Sequence: Synthetic oligonucleotide
  Antisense strand to SEQ ID NO: 68902
uucuggaacagucaaguca

SEQ ID NO: 68984 - RNA, 19 nt, Artificial Sequence
  Description of Artificial Sequence: Synthetic oligonucleotide
  Sense strand starting at position 2427 of SEQ ID NO: 854
aaacaugaucugggucagu

SEQ ID NO: 68985 - RNA, 19 nt, Artificial Sequence
  Description of Artificial Sequence: Synthetic oligonucleotide
  Antisense strand to SEQ ID NO: 68904
acugacccagaucauguuu

SEQ ID NO: 68986 - RNA, 19 nt, Artificial Sequence
  Description of Artificial Sequence: Synthetic oligonucleotide
  Sense strand starting at position 2560 of SEQ ID NO: 854
uuggaauauggcugcugaa

SEQ ID NO: 68987 - RNA, 19 nt, Artificial Sequence
  Description of Artificial Sequence: Synthetic oligonucleotide
  Antisense strand to SEQ ID NO: 68906
uucagcagccauauuccaa

SEQ ID NO: 68988 - RNA, 19 nt, Artificial Sequence
  Description of Artificial Sequence: Synthetic oligonucleotide
  Sense strand starting at position 2860 of SEQ ID NO: 854
ggccuacguacugaacaau

SEQ ID NO: 68989 - RNA, 19 nt, Artificial Sequence
  Description of Artificial Sequence: Synthetic oligonucleotide
  Antisense strand to SEQ ID NO: 68908
auuguucaguacguaggcc

SEQ ID NO: 68990 - RNA, 19 nt, Artificial Sequence
  Description of Artificial Sequence: Synthetic oligonucleotide
  Sense strand starting at position 2863 of SEQ ID NO: 854
cuacguacugaacaauauu

SEQ ID NO: 68991 - RNA, 19 nt, Artificial Sequence
  Description of Artificial Sequence: Synthetic oligonucleotide
  Antisense strand to SEQ ID NO: 68910
aauauuguucaguacguag

SEQ ID NO: 68992 - RNA, 19 nt, Artificial Sequence
  Description of Artificial Sequence: Synthetic oligonucleotide
  Sense strand starting at position 3149 of SEQ ID NO: 854
auuagagggccuuaacagu

SEQ ID NO: 68993 - RNA, 19 nt, Artificial Sequence
  Description of Artificial Sequence: Synthetic oligonucleotide
  Antisense strand to SEQ ID NO: 68912
acuguuaaggcccucuaau

SEQ ID NO: 68994 - RNA, 19 nt, Artificial Sequence
  Description of Artificial Sequence: Synthetic oligonucleotide
  Sense strand starting at position 3158 of SEQ ID NO: 854
ccuuaacaguuaguauaua

SEQ ID NO: 68995 - RNA, 19 nt, Artificial Sequence
  Description of Artificial Sequence: Synthetic oligonucleotide
  Antisense strand to SEQ ID NO: 68914
uauauacuaacuguuaagg

SEQ ID NO: 68996 - RNA, 19 nt, Artificial Sequence
  Description of Artificial Sequence: Synthetic oligonucleotide
  Sense strand starting at position 3236 of SEQ ID NO: 854
cgaaucaauuaugacauuu

SEQ ID NO: 68997 - RNA, 19 nt, Artificial Sequence
  Description of Artificial Sequence: Synthetic oligonucleotide
  Antisense strand to SEQ ID NO: 68916
aaaugucauaauugauucg

SEQ ID NO: 68998 - RNA, 19 nt, Artificial Sequence
  Description of Artificial Sequence: Synthetic oligonucleotide
  Sense strand starting at position 3283 of SEQ ID NO: 854
uuggauuuaucucaagauu

SEQ ID NO: 68999 - RNA, 19 nt, Artificial Sequence
  Description of Artificial Sequence: Synthetic oligonucleotide
  Antisense strand to SEQ ID NO: 68918
aaucuugagauaaauccaa

SEQ ID NO: 69000 - RNA, 19 nt, Artificial Sequence
  Description of Artificial Sequence: Synthetic oligonucleotide
  Sense strand starting at position 3421 of SEQ ID NO: 854
agaagaacucugcaagccu

SEQ ID NO: 69001 - RNA, 19 nt, Artificial Sequence
  Description of Artificial Sequence: Synthetic oligonucleotide
  Antisense strand to SEQ ID NO: 68920
aggcuugcagaguucuucu

SEQ ID NO: 69002 - RNA, 19 nt, Artificial Sequence
  Description of Artificial Sequence: Synthetic oligonucleotide
  Sense strand starting at position 3565 of SEQ ID NO: 854
auagauacuuuccuguuua

SEQ ID NO: 69003 - RNA, 19 nt, Artificial Sequence
  Description of Artificial Sequence: Synthetic oligonucleotide
  Antisense strand to SEQ ID NO: 68922
uaaacaggaaaguaucuau

SEQ ID NO: 69004 - RNA, 19 nt, Artificial Sequence
  Description of Artificial Sequence: Synthetic oligonucleotide
  Sense strand starting at position 3728 of SEQ ID NO: 854
gaaaguauguacuugcaaa

SEQ ID NO: 69005 - RNA, 19 nt, Artificial Sequence
  Description of Artificial Sequence: Synthetic oligonucleotide
  Antisense strand to SEQ ID NO: 68924
uuugcaaguacauacuuuc

SEQ ID NO: 69006 - RNA, 19 nt, Artificial Sequence
  Description of Artificial Sequence: Synthetic oligonucleotide
  Sense strand starting at position 3763 of SEQ ID NO: 854
agggcugcucuagaaguga

SEQ ID NO: 69007 - RNA, 19 nt, Artificial Sequence
  Description of Artificial Sequence: Synthetic oligonucleotide
  Antisense strand to SEQ ID NO: 68926
ucacuucuagagcagcccu

SEQ ID NO: 69008 - RNA, 19 nt, Artificial Sequence
  Description of Artificial Sequence: Synthetic oligonucleotide
  Sense strand starting at position 3885 of SEQ ID NO: 854
cuuggaaucauguacgauu

SEQ ID NO: 69009 - RNA, 19 nt, Artificial Sequence
  Description of Artificial Sequence: Synthetic oligonucleotide
  Antisense strand to SEQ ID NO: 68928
aaucguacaugauuccaag

SEQ ID NO: 69010 - RNA, 19 nt, Artificial Sequence
  Description of Artificial Sequence: Synthetic oligonucleotide
  Sense strand starting at position 3888 of SEQ ID NO: 854
ggaaucauguacgauuuaa

SEQ ID NO: 69011 - RNA, 19 nt, Artificial Sequence
  Description of Artificial Sequence: Synthetic oligonucleotide
  Antisense strand to SEQ ID NO: 68930
uuaaaucguacaugauucc

SEQ ID NO: 69012 - RNA, 19 nt, Artificial Sequence
  Description of Artificial Sequence: Synthetic oligonucleotide
  Sense strand starting at position 139 of SEQ ID NO: 855
uguccaaaccgucagcaaa

SEQ ID NO: 69013 - RNA, 19 nt, Artificial Sequence
  Description of Artificial Sequence: Synthetic oligonucleotide
  Antisense strand to SEQ ID NO: 68932
uuugcugacgguuuggaca

SEQ ID NO: 69014 - RNA, 19 nt, Artificial Sequence
  Description of Artificial Sequence: Synthetic oligonucleotide
  Sense strand starting at position 351 of SEQ ID NO: 855
ccugguaaacguggagaaa

SEQ ID NO: 69015 - RNA, 19 nt, Artificial Sequence
  Description of Artificial Sequence: Synthetic oligonucleotide
  Antisense strand to SEQ ID NO: 68934
uuucuccacguuuaccagg

SEQ ID NO: 69016 - RNA, 19 nt, Artificial Sequence
  Description of Artificial Sequence: Synthetic oligonucleotide
  Sense strand starting at position 679 of SEQ ID NO: 855
aggucauuaccauggucua

SEQ ID NO: 69017 - RNA, 19 nt, Artificial Sequence
  Description of Artificial Sequence: Synthetic oligonucleotide
  Antisense strand to SEQ ID NO: 68936
uagaccaugguaaugaccu

SEQ ID NO: 69018 - RNA, 19 nt, Artificial Sequence
  Description of Artificial Sequence: Synthetic oligonucleotide
  Sense strand starting at position 680 of SEQ ID NO: 855
ggucauuaccauggucuau

SEQ ID NO: 69019 - RNA, 19 nt, Artificial Sequence
  Description of Artificial Sequence: Synthetic oligonucleotide
  Antisense strand to SEQ ID NO: 68938
auagaccaugguaaugacc

SEQ ID NO: 69020 - RNA, 19 nt, Artificial Sequence
  Description of Artificial Sequence: Synthetic oligonucleotide
  Sense strand starting at position 684 of SEQ ID NO: 855
auuaccauggucuauaagu

SEQ ID NO: 69021 - RNA, 19 nt, Artificial Sequence
  Description of Artificial Sequence: Synthetic oligonucleotide
  Antisense strand to SEQ ID NO: 68940
acuuauagaccaugguaau

SEQ ID NO: 69022 - RNA, 19 nt, Artificial Sequence
  Description of Artificial Sequence: Synthetic oligonucleotide
  Sense strand starting at position 764 of SEQ ID NO: 855
cucacuuugcuccagguau

SEQ ID NO: 69023 - RNA, 19 nt, Artificial Sequence
  Description of Artificial Sequence: Synthetic oligonucleotide
  Antisense strand to SEQ ID NO: 68942
auaccuggagcaaagugag

SEQ ID NO: 69024 - RNA, 19 nt, Artificial Sequence
  Description of Artificial Sequence: Synthetic oligonucleotide
  Sense strand starting at position 1174 of SEQ ID NO: 855
agagacaaaucuguugagu

SEQ ID NO: 69025 - RNA, 19 nt, Artificial Sequence
  Description of Artificial Sequence: Synthetic oligonucleotide
  Antisense strand to SEQ ID NO: 68944
acucaacagauuugucucu

SEQ ID NO: 69026 - RNA, 19 nt, Artificial Sequence
  Description of Artificial Sequence: Synthetic oligonucleotide
  Sense strand starting at position 1179 of SEQ ID NO: 855
caaaucuguugagugaaca

SEQ ID NO: 69027 - RNA, 19 nt, Artificial Sequence
  Description of Artificial Sequence: Synthetic oligonucleotide
  Antisense strand to SEQ ID NO: 68946
uguucacucaacagauuug

SEQ ID NO: 69028 - RNA, 19 nt, Artificial Sequence
  Description of Artificial Sequence: Synthetic oligonucleotide
  Sense strand starting at position 1180 of SEQ ID NO: 855
aaaucuguugagugaacaa

SEQ ID NO: 69029 - RNA, 19 nt, Artificial Sequence
  Description of Artificial Sequence: Synthetic oligonucleotide
  Antisense strand to SEQ ID NO: 68948
uuguucacucaacagauuu

SEQ ID NO: 69030 - RNA, 19 nt, Artificial Sequence
  Description of Artificial Sequence: Synthetic oligonucleotide
  Sense strand starting at position 1352 of SEQ ID NO: 855
gauguuuaggagugagggu

SEQ ID NO: 69031 - RNA, 19 nt, Artificial Sequence
  Description of Artificial Sequence: Synthetic oligonucleotide
  Antisense strand to SEQ ID NO: 68950
acccucacuccuaaacauc

SEQ ID NO: 69032 - RNA, 19 nt, Artificial Sequence
  Description of Artificial Sequence: Synthetic oligonucleotide
  Sense strand starting at position 1353 of SEQ ID NO: 855
auguuuaggagugagggua

SEQ ID NO: 69033 - RNA, 19 nt, Artificial Sequence
  Description of Artificial Sequence: Synthetic oligonucleotide
  Antisense strand to SEQ ID NO: 68952
uacccucacuccuaaacau

SEQ ID NO: 69034 - RNA, 19 nt, Artificial Sequence
  Description of Artificial Sequence: Synthetic oligonucleotide
  Sense strand starting at position 1934 of SEQ ID NO: 855
guggcaaaucauuaacucu

SEQ ID NO: 69035 - RNA, 19 nt, Artificial Sequence
  Description of Artificial Sequence: Synthetic oligonucleotide
  Antisense strand to SEQ ID NO: 68954
agaguuaaugauuugccac

SEQ ID NO: 69036 - RNA, 19 nt, Artificial Sequence
  Description of Artificial Sequence: Synthetic oligonucleotide
  Sense strand starting at position 2135 of SEQ ID NO: 855
cgaaacuuagauuguaugu

SEQ ID NO: 69037 - RNA, 19 nt, Artificial Sequence
  Description of Artificial Sequence: Synthetic oligonucleotide
  Antisense strand to SEQ ID NO: 68956
acauacaaucuaaguuucg

SEQ ID NO: 69038 - RNA, 19 nt, Artificial Sequence
  Description of Artificial Sequence: Synthetic oligonucleotide
  Sense strand starting at position 2140 of SEQ ID NO: 855
cuuagauuguauguggaag

SEQ ID NO: 69039 - RNA, 19 nt, Artificial Sequence
  Description of Artificial Sequence: Synthetic oligonucleotide
  Antisense strand to SEQ ID NO: 68958
cuuccacauacaaucuaag

SEQ ID NO: 69040 - RNA, 19 nt, Artificial Sequence
  Description of Artificial Sequence: Synthetic oligonucleotide
  Sense strand starting at position 2151 of SEQ ID NO: 855
uguggaagcauuggaaucu

SEQ ID NO: 69041 - RNA, 19 nt, Artificial Sequence
  Description of Artificial Sequence: Synthetic oligonucleotide
  Antisense strand to SEQ ID NO: 68960
agauuccaaugcuuccaca

SEQ ID NO: 69042 - RNA, 19 nt, Artificial Sequence
  Description of Artificial Sequence: Synthetic oligonucleotide
  Sense strand starting at position 2194 of SEQ ID NO: 855
gguuugauagugugggaag

SEQ ID NO: 69043 - RNA, 19 nt, Artificial Sequence
  Description of Artificial Sequence: Synthetic oligonucleotide
  Antisense strand to SEQ ID NO: 68962
cuucccacacuaucaaacc

SEQ ID NO: 69044 - RNA, 19 nt, Artificial Sequence
  Description of Artificial Sequence: Synthetic oligonucleotide
  Sense strand starting at position 2229 of SEQ ID NO: 855
ucccuuugggaauguacua

SEQ ID NO: 69045 - RNA, 19 nt, Artificial Sequence
  Description of Artificial Sequence: Synthetic oligonucleotide
  Antisense strand to SEQ ID NO: 68964
uaguacauucccaaaggga

SEQ ID NO: 69046 - RNA, 19 nt, Artificial Sequence
  Description of Artificial Sequence: Synthetic oligonucleotide
  Sense strand starting at position 2354 of SEQ ID NO: 855
gccagaucggguuaaauca

SEQ ID NO: 69047 - RNA, 19 nt, Artificial Sequence
  Description of Artificial Sequence: Synthetic oligonucleotide
  Antisense strand to SEQ ID NO: 68966
ugauuuaacccgaucuggc

SEQ ID NO: 69048 - RNA, 19 nt, Artificial Sequence
  Description of Artificial Sequence: Synthetic oligonucleotide
  Sense strand starting at position 2362 of SEQ ID NO: 855
ggguuaaaucaauggcaaa

SEQ ID NO: 69049 - RNA, 19 nt, Artificial Sequence
  Description of Artificial Sequence: Synthetic oligonucleotide
  Antisense strand to SEQ ID NO: 68968
uuugccauugauuuaaccc

SEQ ID NO: 69050 - RNA, 19 nt, Artificial Sequence
  Description of Artificial Sequence: Synthetic oligonucleotide
  Sense strand starting at position 2392 of SEQ ID NO: 855
ggaaguuagacgugaaggu

SEQ ID NO: 69051 - RNA, 19 nt, Artificial Sequence
  Description of Artificial Sequence: Synthetic oligonucleotide
  Antisense strand to SEQ ID NO: 68970
accuucacgucuaacuucc

SEQ ID NO: 69052 - RNA, 19 nt, Artificial Sequence
  Description of Artificial Sequence: Synthetic oligonucleotide
  Sense strand starting at position 2452 of SEQ ID NO: 855
gacugugauguugagcuau

SEQ ID NO: 69053 - RNA, 19 nt, Artificial Sequence
  Description of Artificial Sequence: Synthetic oligonucleotide
  Antisense strand to SEQ ID NO: 68972
auagcucaacaucacaguc

SEQ ID NO: 69054 - RNA, 19 nt, Artificial Sequence
  Description of Artificial Sequence: Synthetic oligonucleotide
  Sense strand starting at position 2458 of SEQ ID NO: 855
gauguugagcuauggaaga

SEQ ID NO: 69055 - RNA, 19 nt, Artificial Sequence
  Description of Artificial Sequence: Synthetic oligonucleotide
  Antisense strand to SEQ ID NO: 68974
ucuuccauagcucaacauc

SEQ ID NO: 69056 - RNA, 19 nt, Artificial Sequence
  Description of Artificial Sequence: Synthetic oligonucleotide
  Sense strand starting at position 2540 of SEQ ID NO: 855
ccaccagcuguguagacau

SEQ ID NO: 69057 - RNA, 19 nt, Artificial Sequence
  Description of Artificial Sequence: Synthetic oligonucleotide
  Antisense strand to SEQ ID NO: 68976
augucuacacagcuggugg

SEQ ID NO: 69058 - RNA, 19 nt, Artificial Sequence
  Description of Artificial Sequence: Synthetic oligonucleotide
  Sense strand starting at position 2586 of SEQ ID NO: 855
agaggcaguuaguuccuaa

SEQ ID NO: 69059 - RNA, 19 nt, Artificial Sequence
  Description of Artificial Sequence: Synthetic oligonucleotide
  Antisense strand to SEQ ID NO: 68978
uuaggaacuaacugccucu

SEQ ID NO: 69060 - RNA, 19 nt, Artificial Sequence
  Description of Artificial Sequence: Synthetic oligonucleotide
  Sense strand starting at position 2589 of SEQ ID NO: 855
ggcaguuaguuccuaacau

SEQ ID NO: 69061 - RNA, 19 nt, Artificial Sequence
  Description of Artificial Sequence: Synthetic oligonucleotide
  Antisense strand to SEQ ID NO: 68980
auguuaggaacuaacugcc

SEQ ID NO: 69062 - RNA, 19 nt, Artificial Sequence
  Description of Artificial Sequence: Synthetic oligonucleotide
  Sense strand starting at position 2678 of SEQ ID NO: 855
aaugucuucuguguccaga

SEQ ID NO: 69063 - RNA, 19 nt, Artificial Sequence
  Description of Artificial Sequence: Synthetic oligonucleotide
  Antisense strand to SEQ ID NO: 68982
ucuggacacagaagacauu

SEQ ID NO: 69064 - RNA, 19 nt, Artificial Sequence
  Description of Artificial Sequence: Synthetic oligonucleotide
  Sense strand starting at position 2680 of SEQ ID NO: 855
ugucuucuguguccagaaa

SEQ ID NO: 69065 - RNA, 19 nt, Artificial Sequence
  Description of Artificial Sequence: Synthetic oligonucleotide
  Antisense strand to SEQ ID NO: 68984
uuucuggacacagaagaca

SEQ ID NO: 69066 - RNA, 19 nt, Artificial Sequence
  Description of Artificial Sequence: Synthetic oligonucleotide
  Sense strand starting at position 2681 of SEQ ID NO: 855
gucuucuguguccagaaau

SEQ ID NO: 69067 - RNA, 19 nt, Artificial Sequence
  Description of Artificial Sequence: Synthetic oligonucleotide
  Antisense strand to SEQ ID NO: 68986
auuucuggacacagaagac

SEQ ID NO: 69068 - RNA, 19 nt, Artificial Sequence
  Description of Artificial Sequence: Synthetic oligonucleotide
  Sense strand starting at position 2744 of SEQ ID NO: 855
ugcaaauaggccuggcaua

SEQ ID NO: 69069 - RNA, 19 nt, Artificial Sequence
  Description of Artificial Sequence: Synthetic oligonucleotide
  Antisense strand to SEQ ID NO: 68988
uaugccaggccuauuugca

SEQ ID NO: 69070 - RNA, 19 nt, Artificial Sequence
  Description of Artificial Sequence: Synthetic oligonucleotide
  Sense strand starting at position 2769 of SEQ ID NO: 855
gcauuaugucuguaauccc

SEQ ID NO: 69071 - RNA, 19 nt, Artificial Sequence
  Description of Artificial Sequence: Synthetic oligonucleotide
  Antisense strand to SEQ ID NO: 68990
gggauuacagacauaaugc

SEQ ID NO: 69072 - RNA, 19 nt, Artificial Sequence
  Description of Artificial Sequence: Synthetic oligonucleotide
  Sense strand starting at position 3352 of SEQ ID NO: 855
gacguacuugcauaugaug

SEQ ID NO: 69073 - RNA, 19 nt, Artificial Sequence
  Description of Artificial Sequence: Synthetic oligonucleotide
  Antisense strand to SEQ ID NO: 68992
caucauaugcaaguacguc

SEQ ID NO: 69074 - RNA, 19 nt, Artificial Sequence
  Description of Artificial Sequence: Synthetic oligonucleotide
  Sense strand starting at position 3447 of SEQ ID NO: 855
aaguaugaugugcaugcaa

SEQ ID NO: 69075 - RNA, 19 nt, Artificial Sequence
  Description of Artificial Sequence: Synthetic oligonucleotide
  Antisense strand to SEQ ID NO: 68994
uugcaugcacaucauacuu

SEQ ID NO: 69076 - RNA, 19 nt, Artificial Sequence
  Description of Artificial Sequence: Synthetic oligonucleotide
  Sense strand starting at position 3558 of SEQ ID NO: 855
ugaaacauaucagcguuga

SEQ ID NO: 69077 - RNA, 19 nt, Artificial Sequence
  Description of Artificial Sequence: Synthetic oligonucleotide
  Antisense strand to SEQ ID NO: 68996
ucaacgcugauauguuuca

SEQ ID NO: 69078 - RNA, 19 nt, Artificial Sequence
  Description of Artificial Sequence: Synthetic oligonucleotide
  Sense strand starting at position 3559 of SEQ ID NO: 855
gaaacauaucagcguugag

SEQ ID NO: 69079 - RNA, 19 nt, Artificial Sequence
  Description of Artificial Sequence: Synthetic oligonucleotide
  Antisense strand to SEQ ID NO: 68998
cucaacgcugauauguuuc

SEQ ID NO: 69080 - RNA, 19 nt, Artificial Sequence
  Description of Artificial Sequence: Synthetic oligonucleotide
  Sense strand starting at position 3562 of SEQ ID NO: 855
acauaucagcguugaggua

SEQ ID NO: 69081 - RNA, 19 nt, Artificial Sequence
  Description of Artificial Sequence: Synthetic oligonucleotide
  Antisense strand to SEQ ID NO: 69000
uaccucaacgcugauaugu

SEQ ID NO: 69082 - RNA, 19 nt, Artificial Sequence
  Description of Artificial Sequence: Synthetic oligonucleotide
  Sense strand starting at position 3563 of SEQ ID NO: 855
cauaucagcguugagguaa

SEQ ID NO: 69083 - RNA, 19 nt, Artificial Sequence
  Description of Artificial Sequence: Synthetic oligonucleotide
  Antisense strand to SEQ ID NO: 69002
uuaccucaacgcugauaug

SEQ ID NO: 69084 - RNA, 19 nt, Artificial Sequence
  Description of Artificial Sequence: Synthetic oligonucleotide
  Sense strand starting at position 3714 of SEQ ID NO: 855
caguguuguaaagacagga

SEQ ID NO: 69085 - RNA, 19 nt, Artificial Sequence
  Description of Artificial Sequence: Synthetic oligonucleotide
  Antisense strand to SEQ ID NO: 69004
uccugucuuuacaacacug

SEQ ID NO: 69086 - RNA, 19 nt, Artificial Sequence
  Description of Artificial Sequence: Synthetic oligonucleotide
  Sense strand starting at position 3852 of SEQ ID NO: 855
gugagaucuucugcaucuc

SEQ ID NO: 69087 - RNA, 19 nt, Artificial Sequence
  Description of Artificial Sequence: Synthetic oligonucleotide
  Antisense strand to SEQ ID NO: 69006
gagaugcagaagaucucac

SEQ ID NO: 69088 - RNA, 19 nt, Artificial Sequence
  Description of Artificial Sequence: Synthetic oligonucleotide
  Sense strand starting at position 3853 of SEQ ID NO: 855
ugagaucuucugcaucuca

SEQ ID NO: 69089 - RNA, 19 nt, Artificial Sequence
  Description of Artificial Sequence: Synthetic oligonucleotide
  Antisense strand to SEQ ID NO: 69008
ugagaugcagaagaucuca

SEQ ID NO: 69090 - RNA, 19 nt, Artificial Sequence
  Description of Artificial Sequence: Synthetic oligonucleotide
  Sense strand starting at position 3927 of SEQ ID NO: 855
gucaauuucuucguuuauu

SEQ ID NO: 69091 - RNA, 19 nt, Artificial Sequence
  Description of Artificial Sequence: Synthetic oligonucleotide
  Antisense strand to SEQ ID NO: 69010
aauaaacgaagaaauugac

SEQ ID NO: 69092 - RNA, 19 nt, Artificial Sequence
  Description of Artificial Sequence: Synthetic oligonucleotide
  Sense strand starting at position 9 of SEQ ID NO: 857
gguuaagauucagugguuu

SEQ ID NO: 69093 - RNA, 19 nt, Artificial Sequence
  Description of Artificial Sequence: Synthetic oligonucleotide
  Antisense strand to SEQ ID NO: 69012
aaaccacugaaucuuaacc

SEQ ID NO: 69094 - RNA, 19 nt, Artificial Sequence
  Description of Artificial Sequence: Synthetic oligonucleotide
  Sense strand starting at position 362 of SEQ ID NO: 857
cuacgagucaccuggaaca

SEQ ID NO: 69095 - RNA, 19 nt, Artificial Sequence
  Description of Artificial Sequence: Synthetic oligonucleotide
  Antisense strand to SEQ ID NO: 69014
uguuccaggugacucguag

SEQ ID NO: 69096 - RNA, 19 nt, Artificial Sequence
  Description of Artificial Sequence: Synthetic oligonucleotide
  Sense strand starting at position 474 of SEQ ID NO: 857
uuggacucaggcuauagua

SEQ ID NO: 69097 - RNA, 19 nt, Artificial Sequence
  Description of Artificial Sequence: Synthetic oligonucleotide
  Antisense strand to SEQ ID NO: 69016
uacuauagccugaguccaa

SEQ ID NO: 69098 - RNA, 19 nt, Artificial Sequence
  Description of Artificial Sequence: Synthetic oligonucleotide
  Sense strand starting at position 476 of SEQ ID NO: 857
ggacucaggcuauaguaau

SEQ ID NO: 69099 - RNA, 19 nt, Artificial Sequence
  Description of Artificial Sequence: Synthetic oligonucleotide
  Antisense strand to SEQ ID NO: 69018
auuacuauagccugagucc

SEQ ID NO: 69100 - RNA, 19 nt, Artificial Sequence
  Description of Artificial Sequence: Synthetic oligonucleotide
  Sense strand starting at position 550 of SEQ ID NO: 857
gugacuuggucuccacaau

SEQ ID NO: 69101 - RNA, 19 nt, Artificial Sequence
  Description of Artificial Sequence: Synthetic oligonucleotide
  Antisense strand to SEQ ID NO: 69020
auuguggagaccaagucac

SEQ ID NO: 69102 - RNA, 19 nt, Artificial Sequence
  Description of Artificial Sequence: Synthetic oligonucleotide
  Sense strand starting at position 551 of SEQ ID NO: 857
ugacuuggucuccacaaua

SEQ ID NO: 69103 - RNA, 19 nt, Artificial Sequence
  Description of Artificial Sequence: Synthetic oligonucleotide
  Antisense strand to SEQ ID NO: 69022
uauuguggagaccaaguca

SEQ ID NO: 69104 - RNA, 19 nt, Artificial Sequence
  Description of Artificial Sequence: Synthetic oligonucleotide
  Sense strand starting at position 611 of SEQ ID NO: 857
aaaguucuggcucaucuga

SEQ ID NO: 69105 - RNA, 19 nt, Artificial Sequence
  Description of Artificial Sequence: Synthetic oligonucleotide
  Antisense strand to SEQ ID NO: 69024
ucagaugagccagaacuuu

SEQ ID NO: 69106 - RNA, 19 nt, Artificial Sequence
  Description of Artificial Sequence: Synthetic oligonucleotide
  Sense strand starting at position 619 of SEQ ID NO: 857
ggcucaucugaguagguga

SEQ ID NO: 69107 - RNA, 19 nt, Artificial Sequence
  Description of Artificial Sequence: Synthetic oligonucleotide
  Antisense strand to SEQ ID NO: 69026
ucaccuacucagaugagcc

SEQ ID NO: 69108 - RNA, 19 nt, Artificial Sequence
  Description of Artificial Sequence: Synthetic oligonucleotide
  Sense strand starting at position 621 of SEQ ID NO: 857
cucaucugaguaggugauu

SEQ ID NO: 69109 - RNA, 19 nt, Artificial Sequence
  Description of Artificial Sequence: Synthetic oligonucleotide
  Antisense strand to SEQ ID NO: 69028
aaucaccuacucagaugag

SEQ ID NO: 69110 - RNA, 19 nt, Artificial Sequence
  Description of Artificial Sequence: Synthetic oligonucleotide
  Sense strand starting at position 676 of SEQ ID NO: 857
gguauuaagucuccuaacu

SEQ ID NO: 69111 - RNA, 19 nt, Artificial Sequence
  Description of Artificial Sequence: Synthetic oligonucleotide
  Antisense strand to SEQ ID NO: 69030
aguuaggagacuuaauacc

SEQ ID NO: 69112 - RNA, 19 nt, Artificial Sequence
  Description of Artificial Sequence: Synthetic oligonucleotide
  Sense strand starting at position 1012 of SEQ ID NO: 857
gguugaaauuuaugcaaac

SEQ ID NO: 69113 - RNA, 19 nt, Artificial Sequence
  Description of Artificial Sequence: Synthetic oligonucleotide
  Antisense strand to SEQ ID NO: 69032
guuugcauaaauuucaacc

SEQ ID NO: 69114 - RNA, 19 nt, Artificial Sequence
  Description of Artificial Sequence: Synthetic oligonucleotide
  Sense strand starting at position 1031 of SEQ ID NO: 857
auggcaguagucugacuaa

SEQ ID NO: 69115 - RNA, 19 nt, Artificial Sequence
  Description of Artificial Sequence: Synthetic oligonucleotide
  Antisense strand to SEQ ID NO: 69034
uuagucagacuacugccau

SEQ ID NO: 69116 - RNA, 19 nt, Artificial Sequence
  Description of Artificial Sequence: Synthetic oligonucleotide
  Sense strand starting at position 1034 of SEQ ID NO: 857
gcaguagucugacuaaccu

SEQ ID NO: 69117 - RNA, 19 nt, Artificial Sequence
  Description of Artificial Sequence: Synthetic oligonucleotide
  Antisense strand to SEQ ID NO: 69036
agguuagucagacuacugc

SEQ ID NO: 69118 - RNA, 19 nt, Artificial Sequence
  Description of Artificial Sequence: Synthetic oligonucleotide
  Sense strand starting at position 1102 of SEQ ID NO: 857
guuucauguguguuguucu

SEQ ID NO: 69119 - RNA, 19 nt, Artificial Sequence
  Description of Artificial Sequence: Synthetic oligonucleotide
  Antisense strand to SEQ ID NO: 69038
agaacaacacacaugaaac

SEQ ID NO: 69120 - RNA, 19 nt, Artificial Sequence
  Description of Artificial Sequence: Synthetic oligonucleotide
  Sense strand starting at position 1206 of SEQ ID NO: 857
acugauuaacuuuggcacu

SEQ ID NO: 69121 - RNA, 19 nt, Artificial Sequence
  Description of Artificial Sequence: Synthetic oligonucleotide
  Antisense strand to SEQ ID NO: 69040
agugccaaaguuaaucagu

SEQ ID NO: 69122 - RNA, 19 nt, Artificial Sequence
  Description of Artificial Sequence: Synthetic oligonucleotide
  Sense strand starting at position 1208 of SEQ ID NO: 857
ugauuaacuuuggcacuuu

SEQ ID NO: 69123 - RNA, 19 nt, Artificial Sequence
  Description of Artificial Sequence: Synthetic oligonucleotide
  Antisense strand to SEQ ID NO: 69042
aaagugccaaaguuaauca

SEQ ID NO: 69124 - RNA, 19 nt, Artificial Sequence
  Description of Artificial Sequence: Synthetic oligonucleotide
  Sense strand starting at position 1660 of SEQ ID NO: 857
guuucugagguuuaagaca

SEQ ID NO: 69125 - RNA, 19 nt, Artificial Sequence
  Description of Artificial Sequence: Synthetic oligonucleotide
  Antisense strand to SEQ ID NO: 69044
ugucuuaaaccucagaaac

SEQ ID NO: 69126 - RNA, 19 nt, Artificial Sequence
  Description of Artificial Sequence: Synthetic oligonucleotide
  Sense strand starting at position 1679 of SEQ ID NO: 857
guuuccauccacugugaaa

SEQ ID NO: 69127 - RNA, 19 nt, Artificial Sequence
  Description of Artificial Sequence: Synthetic oligonucleotide
  Antisense strand to SEQ ID NO: 69046
uuucacaguggauggaaac

SEQ ID NO: 69128 - RNA, 19 nt, Artificial Sequence
  Description of Artificial Sequence: Synthetic oligonucleotide
  Sense strand starting at position 1735 of SEQ ID NO: 857
cggucucagaaaugcauaa

SEQ ID NO: 69129 - RNA, 19 nt, Artificial Sequence
  Description of Artificial Sequence: Synthetic oligonucleotide
  Antisense strand to SEQ ID NO: 69048
uuaugcauuucugagaccg

SEQ ID NO: 69130 - RNA, 19 nt, Artificial Sequence
  Description of Artificial Sequence: Synthetic oligonucleotide
  Sense strand starting at position 1755 of SEQ ID NO: 857
gauggcagucgauacugaa

SEQ ID NO: 69131 - RNA, 19 nt, Artificial Sequence
  Description of Artificial Sequence: Synthetic oligonucleotide
  Antisense strand to SEQ ID NO: 69050
uucaguaucgacugccauc

SEQ ID NO: 69132 - RNA, 19 nt, Artificial Sequence
  Description of Artificial Sequence: Synthetic oligonucleotide
  Sense strand starting at position 1767 of SEQ ID NO: 857
uacugaaauccaggcagua

SEQ ID NO: 69133 - RNA, 19 nt, Artificial Sequence
  Description of Artificial Sequence: Synthetic oligonucleotide
  Antisense strand to SEQ ID NO: 69052
uacugccuggauuucagua

SEQ ID NO: 69134 - RNA, 19 nt, Artificial Sequence
  Description of Artificial Sequence: Synthetic oligonucleotide
  Sense strand starting at position 2019 of SEQ ID NO: 857
ggcugacuuccguaaucuu

SEQ ID NO: 69135 - RNA, 19 nt, Artificial Sequence
  Description of Artificial Sequence: Synthetic oligonucleotide
  Antisense strand to SEQ ID NO: 69054
aagauuacggaagucagcc

SEQ ID NO: 69136 - RNA, 19 nt, Artificial Sequence
  Description of Artificial Sequence: Synthetic oligonucleotide
  Sense strand starting at position 2384 of SEQ ID NO: 857
gaccuagcuuugguaagua

SEQ ID NO: 69137 - RNA, 19 nt, Artificial Sequence
  Description of Artificial Sequence: Synthetic oligonucleotide
  Antisense strand to SEQ ID NO: 69056
uacuuaccaaagcuagguc

SEQ ID NO: 69138 - RNA, 19 nt, Artificial Sequence
  Description of Artificial Sequence: Synthetic oligonucleotide
  Sense strand starting at position 2416 of SEQ ID NO: 857
uaagcuugagguggucaga

SEQ ID NO: 69139 - RNA, 19 nt, Artificial Sequence
  Description of Artificial Sequence: Synthetic oligonucleotide
  Antisense strand to SEQ ID NO: 69058
ucugaccaccucaagcuua

SEQ ID NO: 69140 - RNA, 19 nt, Artificial Sequence
  Description of Artificial Sequence: Synthetic oligonucleotide
  Sense strand starting at position 2419 of SEQ ID NO: 857
gcuugagguggucagaaug

SEQ ID NO: 69141 - RNA, 19 nt, Artificial Sequence
  Description of Artificial Sequence: Synthetic oligonucleotide
  Antisense strand to SEQ ID NO: 69060
cauucugaccaccucaagc

SEQ ID NO: 69142 - RNA, 19 nt, Artificial Sequence
  Description of Artificial Sequence: Synthetic oligonucleotide
  Sense strand starting at position 2560 of SEQ ID NO: 857
agugcaugaacuugagcua

SEQ ID NO: 69143 - RNA, 19 nt, Artificial Sequence
  Description of Artificial Sequence: Synthetic oligonucleotide
  Antisense strand to SEQ ID NO: 69062
uagcucaaguucaugcacu

SEQ ID NO: 69144 - RNA, 19 nt, Artificial Sequence
  Description of Artificial Sequence: Synthetic oligonucleotide
  Sense strand starting at position 2561 of SEQ ID NO: 857
gugcaugaacuugagcuau

SEQ ID NO: 69145 - RNA, 19 nt, Artificial Sequence
  Description of Artificial Sequence: Synthetic oligonucleotide
  Antisense strand to SEQ ID NO: 69064
auagcucaaguucaugcac

SEQ ID NO: 69146 - RNA, 19 nt, Artificial Sequence
  Description of Artificial Sequence: Synthetic oligonucleotide
  Sense strand starting at position 2622 of SEQ ID NO: 857
ggaaguccaggaugcuaaa

SEQ ID NO: 69147 - RNA, 19 nt, Artificial Sequence
  Description of Artificial Sequence: Synthetic oligonucleotide
  Antisense strand to SEQ ID NO: 69066
uuuagcauccuggacuucc

SEQ ID NO: 69148 - RNA, 19 nt, Artificial Sequence
  Description of Artificial Sequence: Synthetic oligonucleotide
  Sense strand starting at position 2663 of SEQ ID NO: 857
cacugcuggaggugagaaa

SEQ ID NO: 69149 - RNA, 19 nt, Artificial Sequence
  Description of Artificial Sequence: Synthetic oligonucleotide
  Antisense strand to SEQ ID NO: 69068
uuucucaccuccagcagug

SEQ ID NO: 69150 - RNA, 19 nt, Artificial Sequence
  Description of Artificial Sequence: Synthetic oligonucleotide
  Sense strand starting at position 3165 of SEQ ID NO: 857
gggacugaccagcguugau

SEQ ID NO: 69151 - RNA, 19 nt, Artificial Sequence
  Description of Artificial Sequence: Synthetic oligonucleotide
  Antisense strand to SEQ ID NO: 69070
aucaacgcuggucaguccc

SEQ ID NO: 69152 - RNA, 19 nt, Artificial Sequence
  Description of Artificial Sequence: Synthetic oligonucleotide
  Sense strand starting at position 3249 of SEQ ID NO: 857
cuuuguguaccgcagaaag

SEQ ID NO: 69153 - RNA, 19 nt, Artificial Sequence
  Description of Artificial Sequence: Synthetic oligonucleotide
  Antisense strand to SEQ ID NO: 69072
cuuucugcgguacacaaag

SEQ ID NO: 69154 - RNA, 19 nt, Artificial Sequence
  Description of Artificial Sequence: Synthetic oligonucleotide
  Sense strand starting at position 3259 of SEQ ID NO: 857
cgcagaaagcauuacguca

SEQ ID NO: 69155 - RNA, 19 nt, Artificial Sequence
  Description of Artificial Sequence: Synthetic oligonucleotide
  Antisense strand to SEQ ID NO: 69074
ugacguaaugcuuucugcg

SEQ ID NO: 69156 - RNA, 19 nt, Artificial Sequence
  Description of Artificial Sequence: Synthetic oligonucleotide
  Sense strand starting at position 3305 of SEQ ID NO: 857
cccugugggcuccaagauu

SEQ ID NO: 69157 - RNA, 19 nt, Artificial Sequence
  Description of Artificial Sequence: Synthetic oligonucleotide
  Antisense strand to SEQ ID NO: 69076
aaucuuggagcccacaggg

SEQ ID NO: 69158 - RNA, 19 nt, Artificial Sequence
  Description of Artificial Sequence: Synthetic oligonucleotide
  Sense strand starting at position 3438 of SEQ ID NO: 857
ggagcaaacuuccuguguu

SEQ ID NO: 69159 - RNA, 19 nt, Artificial Sequence
  Description of Artificial Sequence: Synthetic oligonucleotide
  Antisense strand to SEQ ID NO: 69078
aacacaggaaguuugcucc

SEQ ID NO: 69160 - RNA, 19 nt, Artificial Sequence
  Description of Artificial Sequence: Synthetic oligonucleotide
  Sense strand starting at position 3441 of SEQ ID NO: 857
gcaaacuuccuguguuaug

SEQ ID NO: 69161 - RNA, 19 nt, Artificial Sequence
  Description of Artificial Sequence: Synthetic oligonucleotide
  Antisense strand to SEQ ID NO: 69080
cauaacacaggaaguuugc

SEQ ID NO: 69162 - RNA, 19 nt, Artificial Sequence
  Description of Artificial Sequence: Synthetic oligonucleotide
  Sense strand starting at position 3567 of SEQ ID NO: 857
gggauucuaucccucagac

SEQ ID NO: 69163 - RNA, 19 nt, Artificial Sequence
  Description of Artificial Sequence: Synthetic oligonucleotide
  Antisense strand to SEQ ID NO: 69082
gucugagggauagaauccc

SEQ ID NO: 69164 - RNA, 19 nt, Artificial Sequence
  Description of Artificial Sequence: Synthetic oligonucleotide
  Sense strand starting at position 3581 of SEQ ID NO: 857
cagacaauccaguagguuu

SEQ ID NO: 69165 - RNA, 19 nt, Artificial Sequence
  Description of Artificial Sequence: Synthetic oligonucleotide
  Antisense strand to SEQ ID NO: 69084
aaaccuacuggauugucug

SEQ ID NO: 69166 - RNA, 19 nt, Artificial Sequence
  Description of Artificial Sequence: Synthetic oligonucleotide
  Sense strand starting at position 3802 of SEQ ID NO: 857
aggcuaaaucuugauggua

SEQ ID NO: 69167 - RNA, 19 nt, Artificial Sequence
  Description of Artificial Sequence: Synthetic oligonucleotide
  Antisense strand to SEQ ID NO: 69086
uaccaucaagauuuagccu

SEQ ID NO: 69168 - RNA, 19 nt, Artificial Sequence
  Description of Artificial Sequence: Synthetic oligonucleotide
  Sense strand starting at position 3844 of SEQ ID NO: 857
gcaucuuuauucuuugagu

SEQ ID NO: 69169 - RNA, 19 nt, Artificial Sequence
  Description of Artificial Sequence: Synthetic oligonucleotide
  Antisense strand to SEQ ID NO: 69088
acucaaagaauaaagaugc

SEQ ID NO: 69170 - RNA, 19 nt, Artificial Sequence
  Description of Artificial Sequence: Synthetic oligonucleotide
  Sense strand starting at position 3846 of SEQ ID NO: 857
aucuuuauucuuugaguuc

SEQ ID NO: 69171 - RNA, 19 nt, Artificial Sequence
  Description of Artificial Sequence: Synthetic oligonucleotide
  Antisense strand to SEQ ID NO: 69090
gaacucaaagaauaaagau

SEQ ID NO: 69172 - RNA, 19 nt, Artificial Sequence
  Description of Artificial Sequence: Synthetic oligonucleotide
  Sense strand starting at position 14 of SEQ ID NO: 856
uuucgagaaaugggauuau

SEQ ID NO: 69173 - RNA, 19 nt, Artificial Sequence
  Description of Artificial Sequence: Synthetic oligonucleotide
  Antisense strand to SEQ ID NO: 69092
auaaucccauuucucgaaa

SEQ ID NO: 69174 - RNA, 19 nt, Artificial Sequence
  Description of Artificial Sequence: Synthetic oligonucleotide
  Sense strand starting at position 245 of SEQ ID NO: 856
guagauacucaauguauca

SEQ ID NO: 69175 - RNA, 19 nt, Artificial Sequence
  Description of Artificial Sequence: Synthetic oligonucleotide
  Antisense strand to SEQ ID NO: 69094
ugauacauugaguaucuac

SEQ ID NO: 69176 - RNA, 19 nt, Artificial Sequence
  Description of Artificial Sequence: Synthetic oligonucleotide
  Sense strand starting at position 252 of SEQ ID NO: 856
cucaauguaucacugagua

SEQ ID NO: 69177 - RNA, 19 nt, Artificial Sequence
  Description of Artificial Sequence: Synthetic oligonucleotide
  Antisense strand to SEQ ID NO: 69096
uacucagugauacauugag

SEQ ID NO: 69178 - RNA, 19 nt, Artificial Sequence
  Description of Artificial Sequence: Synthetic oligonucleotide
  Sense strand starting at position 256 of SEQ ID NO: 856
auguaucacugaguauuga

SEQ ID NO: 69179 - RNA, 19 nt, Artificial Sequence
  Description of Artificial Sequence: Synthetic oligonucleotide
  Antisense strand to SEQ ID NO: 69098
ucaauacucagugauacau

SEQ ID NO: 69180 - RNA, 19 nt, Artificial Sequence
  Description of Artificial Sequence: Synthetic oligonucleotide
  Sense strand starting at position 257 of SEQ ID NO: 856
uguaucacugaguauugau

SEQ ID NO: 69181 - RNA, 19 nt, Artificial Sequence
  Description of Artificial Sequence: Synthetic oligonucleotide
  Antisense strand to SEQ ID NO: 69100
aucaauacucagugauaca

SEQ ID NO: 69182 - RNA, 19 nt, Artificial Sequence
  Description of Artificial Sequence: Synthetic oligonucleotide
  Sense strand starting at position 266 of SEQ ID NO: 856
gaguauugauacucaaugu

SEQ ID NO: 69183 - RNA, 19 nt, Artificial Sequence
  Description of Artificial Sequence: Synthetic oligonucleotide
  Antisense strand to SEQ ID NO: 69102
acauugaguaucaauacuc

SEQ ID NO: 69184 - RNA, 19 nt, Artificial Sequence
  Description of Artificial Sequence: Synthetic oligonucleotide
  Sense strand starting at position 270 of SEQ ID NO: 856
auugauacucaauguguca

SEQ ID NO: 69185 - RNA, 19 nt, Artificial Sequence
  Description of Artificial Sequence: Synthetic oligonucleotide
  Antisense strand to SEQ ID NO: 69104
ugacacauugaguaucaau

SEQ ID NO: 69186 - RNA, 19 nt, Artificial Sequence
  Description of Artificial Sequence: Synthetic oligonucleotide
  Sense strand starting at position 277 of SEQ ID NO: 856
cucaaugugucacugaaua

SEQ ID NO: 69187 - RNA, 19 nt, Artificial Sequence
  Description of Artificial Sequence: Synthetic oligonucleotide
  Antisense strand to SEQ ID NO: 69106
uauucagugacacauugag

SEQ ID NO: 69188 - RNA, 19 nt, Artificial Sequence
  Description of Artificial Sequence: Synthetic oligonucleotide
  Sense strand starting at position 282 of SEQ ID NO: 856
ugugucacugaauauugua

SEQ ID NO: 69189 - RNA, 19 nt, Artificial Sequence
  Description of Artificial Sequence: Synthetic oligonucleotide
  Antisense strand to SEQ ID NO: 69108
uacaauauucagugacaca

SEQ ID NO: 69190 - RNA, 19 nt, Artificial Sequence
  Description of Artificial Sequence: Synthetic oligonucleotide
  Sense strand starting at position 309 of SEQ ID NO: 856
augaaugcucccugaauaa

SEQ ID NO: 69191 - RNA, 19 nt, Artificial Sequence
  Description of Artificial Sequence: Synthetic oligonucleotide
  Antisense strand to SEQ ID NO: 69110
uuauucagggagcauucau

SEQ ID NO: 69192 - RNA, 19 nt, Artificial Sequence
  Description of Artificial Sequence: Synthetic oligonucleotide
  Sense strand starting at position 372 of SEQ ID NO: 856
gccaaauguuaagcauuau

SEQ ID NO: 69193 - RNA, 19 nt, Artificial Sequence
  Description of Artificial Sequence: Synthetic oligonucleotide
  Antisense strand to SEQ ID NO: 69112
auaaugcuuaacauuuggc

SEQ ID NO: 69194 - RNA, 19 nt, Artificial Sequence
  Description of Artificial Sequence: Synthetic oligonucleotide
  Sense strand starting at position 714 of SEQ ID NO: 856
gcaucuuauuacccaggaa

SEQ ID NO: 69195 - RNA, 19 nt, Artificial Sequence
  Description of Artificial Sequence: Synthetic oligonucleotide
  Antisense strand to SEQ ID NO: 69114
uuccuggguaauaagaugc

SEQ ID NO: 69196 - RNA, 19 nt, Artificial Sequence
  Description of Artificial Sequence: Synthetic oligonucleotide
  Sense strand starting at position 764 of SEQ ID NO: 856
gaauaagccgccuuguguu

SEQ ID NO: 69197 - RNA, 19 nt, Artificial Sequence
  Description of Artificial Sequence: Synthetic oligonucleotide
  Antisense strand to SEQ ID NO: 69116
aacacaaggcggcuuauuc

SEQ ID NO: 69198 - RNA, 19 nt, Artificial Sequence
  Description of Artificial Sequence: Synthetic oligonucleotide
  Sense strand starting at position 777 of SEQ ID NO: 856
uguguuagaucacuggcaa

SEQ ID NO: 69199 - RNA, 19 nt, Artificial Sequence
  Description of Artificial Sequence: Synthetic oligonucleotide
  Antisense strand to SEQ ID NO: 69118
uugccagugaucuaacaca

SEQ ID NO: 69200 - RNA, 19 nt, Artificial Sequence
  Description of Artificial Sequence: Synthetic oligonucleotide
  Sense strand starting at position 778 of SEQ ID NO: 856
guguuagaucacuggcaau

SEQ ID NO: 69201 - RNA, 19 nt, Artificial Sequence
  Description of Artificial Sequence: Synthetic oligonucleotide
  Antisense strand to SEQ ID NO: 69120
auugccagugaucuaacac

SEQ ID NO: 69202 - RNA, 19 nt, Artificial Sequence
  Description of Artificial Sequence: Synthetic oligonucleotide
  Sense strand starting at position 881 of SEQ ID NO: 856
acucuaagcgucuaagguu

SEQ ID NO: 69203 - RNA, 19 nt, Artificial Sequence
  Description of Artificial Sequence: Synthetic oligonucleotide
  Antisense strand to SEQ ID NO: 69122
aaccuuagacgcuuagagu

SEQ ID NO: 69204 - RNA, 19 nt, Artificial Sequence
  Description of Artificial Sequence: Synthetic oligonucleotide
  Sense strand starting at position 1132 of SEQ ID NO: 856
ggucucgauuuguuaccca

SEQ ID NO: 69205 - RNA, 19 nt, Artificial Sequence
  Description of Artificial Sequence: Synthetic oligonucleotide
  Antisense strand to SEQ ID NO: 69124
uggguaacaaaucgagacc

SEQ ID NO: 69206 - RNA, 19 nt, Artificial Sequence
  Description of Artificial Sequence: Synthetic oligonucleotide
  Sense strand starting at position 1361 of SEQ ID NO: 856
cguugauuccugugagaga

SEQ ID NO: 69207 - RNA, 19 nt, Artificial Sequence
  Description of Artificial Sequence: Synthetic oligonucleotide
  Antisense strand to SEQ ID NO: 69126
ucucucacaggaaucaacg

SEQ ID NO: 69208 - RNA, 19 nt, Artificial Sequence
  Description of Artificial Sequence: Synthetic oligonucleotide
  Sense strand starting at position 1539 of SEQ ID NO: 856
gcaguagcucgacagaauc

SEQ ID NO: 69209 - RNA, 19 nt, Artificial Sequence
  Description of Artificial Sequence: Synthetic oligonucleotide
  Antisense strand to SEQ ID NO: 69128
gauucugucgagcuacugc

SEQ ID NO: 69210 - RNA, 19 nt, Artificial Sequence
  Description of Artificial Sequence: Synthetic oligonucleotide
  Sense strand starting at position 1870 of SEQ ID NO: 856
gccugauuccacggaaacg

SEQ ID NO: 69211 - RNA, 19 nt, Artificial Sequence
  Description of Artificial Sequence: Synthetic oligonucleotide
  Antisense strand to SEQ ID NO: 69130
cguuuccguggaaucaggc

SEQ ID NO: 69212 - RNA, 19 nt, Artificial Sequence
  Description of Artificial Sequence: Synthetic oligonucleotide
  Sense strand starting at position 2028 of SEQ ID NO: 856
aacguuagugcgucaguua

SEQ ID NO: 69213 - RNA, 19 nt, Artificial Sequence
  Description of Artificial Sequence: Synthetic oligonucleotide
  Antisense strand to SEQ ID NO: 69132
uaacugacgcacuaacguu

SEQ ID NO: 69214 - RNA, 19 nt, Artificial Sequence
  Description of Artificial Sequence: Synthetic oligonucleotide
  Sense strand starting at position 2114 of SEQ ID NO: 856
gguuaagauucagugguuu

SEQ ID NO: 69215 - RNA, 19 nt, Artificial Sequence
  Description of Artificial Sequence: Synthetic oligonucleotide
  Antisense strand to SEQ ID NO: 69134
aaaccacugaaucuuaacc

SEQ ID NO: 69216 - RNA, 19 nt, Artificial Sequence
  Description of Artificial Sequence: Synthetic oligonucleotide
  Sense strand starting at position 2467 of SEQ ID NO: 856
cuacgagucaccuggaaca

SEQ ID NO: 69217 - RNA, 19 nt, Artificial Sequence
  Description of Artificial Sequence: Synthetic oligonucleotide
  Antisense strand to SEQ ID NO: 69136
uguuccaggugacucguag

SEQ ID NO: 69218 - RNA, 19 nt, Artificial Sequence
  Description of Artificial Sequence: Synthetic oligonucleotide
  Sense strand starting at position 2579 of SEQ ID NO: 856
uuggacucaggcuauagua

SEQ ID NO: 69219 - RNA, 19 nt, Artificial Sequence
  Description of Artificial Sequence: Synthetic oligonucleotide
  Antisense strand to SEQ ID NO: 69138
uacuauagccugaguccaa

SEQ ID NO: 69220 - RNA, 19 nt, Artificial Sequence
  Description of Artificial Sequence: Synthetic oligonucleotide
  Sense strand starting at position 2581 of SEQ ID NO: 856
ggacucaggcuauaguaau

SEQ ID NO: 69221 - RNA, 19 nt, Artificial Sequence
  Description of Artificial Sequence: Synthetic oligonucleotide
  Antisense strand to SEQ ID NO: 69140
auuacuauagccugagucc

SEQ ID NO: 69222 - RNA, 19 nt, Artificial Sequence
  Description of Artificial Sequence: Synthetic oligonucleotide
  Sense strand starting at position 2655 of SEQ ID NO: 856
gugacuuggucuccacaau

SEQ ID NO: 69223 - RNA, 19 nt, Artificial Sequence
  Description of Artificial Sequence: Synthetic oligonucleotide
  Antisense strand to SEQ ID NO: 69142
auuguggagaccaagucac

SEQ ID NO: 69224 - RNA, 19 nt, Artificial Sequence
  Description of Artificial Sequence: Synthetic oligonucleotide
  Sense strand starting at position 2656 of SEQ ID NO: 856
ugacuuggucuccacaaua

SEQ ID NO: 69225 - RNA, 19 nt, Artificial Sequence
  Description of Artificial Sequence: Synthetic oligonucleotide
  Antisense strand to SEQ ID NO: 69144
uauuguggagaccaaguca

SEQ ID NO: 69226 - RNA, 19 nt, Artificial Sequence
  Description of Artificial Sequence: Synthetic oligonucleotide
  Sense strand starting at position 2716 of SEQ ID NO: 856
aaaguucuggcucaucuga

SEQ ID NO: 69227 - RNA, 19 nt, Artificial Sequence
  Description of Artificial Sequence: Synthetic oligonucleotide
  Antisense strand to SEQ ID NO: 69146
ucagaugagccagaacuuu

SEQ ID NO: 69228 - RNA, 19 nt, Artificial Sequence
  Description of Artificial Sequence: Synthetic oligonucleotide
  Sense strand starting at position 2724 of SEQ ID NO: 856
ggcucaucugaguagguga

SEQ ID NO: 69229 - RNA, 19 nt, Artificial Sequence
  Description of Artificial Sequence: Synthetic oligonucleotide
  Antisense strand to SEQ ID NO: 69148
ucaccuacucagaugagcc

SEQ ID NO: 69230 - RNA, 19 nt, Artificial Sequence
  Description of Artificial Sequence: Synthetic oligonucleotide
  Sense strand starting at position 2726 of SEQ ID NO: 856
cucaucugaguaggugauu

SEQ ID NO: 69231 - RNA, 19 nt, Artificial Sequence
  Description of Artificial Sequence: Synthetic oligonucleotide
  Antisense strand to SEQ ID NO: 69150
aaucaccuacucagaugag

SEQ ID NO: 69232 - RNA, 19 nt, Artificial Sequence
  Description of Artificial Sequence: Synthetic oligonucleotide
  Sense strand starting at position 2781 of SEQ ID NO: 856
gguauuaagucuccuaacu

SEQ ID NO: 69233 - RNA, 19 nt, Artificial Sequence
  Description of Artificial Sequence: Synthetic oligonucleotide
  Antisense strand to SEQ ID NO: 69152
aguuaggagacuuaauacc

SEQ ID NO: 69234 - RNA, 19 nt, Artificial Sequence
  Description of Artificial Sequence: Synthetic oligonucleotide
  Sense strand starting at position 3136 of SEQ ID NO: 856
auggcaguagucugacuaa

SEQ ID NO: 69235 - RNA, 19 nt, Artificial Sequence
  Description of Artificial Sequence: Synthetic oligonucleotide
  Antisense strand to SEQ ID NO: 69154
uuagucagacuacugccau

SEQ ID NO: 69236 - RNA, 19 nt, Artificial Sequence
  Description of Artificial Sequence: Synthetic oligonucleotide
  Sense strand starting at position 3207 of SEQ ID NO: 856
guuucauguguguuguucu

SEQ ID NO: 69237 - RNA, 19 nt, Artificial Sequence
  Description of Artificial Sequence: Synthetic oligonucleotide
  Antisense strand to SEQ ID NO: 69156
agaacaacacacaugaaac

SEQ ID NO: 69238 - RNA, 19 nt, Artificial Sequence
  Description of Artificial Sequence: Synthetic oligonucleotide
  Sense strand starting at position 3311 of SEQ ID NO: 856
acugauuaacuuuggcacu

SEQ ID NO: 69239 - RNA, 19 nt, Artificial Sequence
  Description of Artificial Sequence: Synthetic oligonucleotide
  Antisense strand to SEQ ID NO: 69158
agugccaaaguuaaucagu

SEQ ID NO: 69240 - RNA, 19 nt, Artificial Sequence
  Description of Artificial Sequence: Synthetic oligonucleotide
  Sense strand starting at position 3313 of SEQ ID NO: 856
ugauuaacuuuggcacuuu

SEQ ID NO: 69241 - RNA, 19 nt, Artificial Sequence
  Description of Artificial Sequence: Synthetic oligonucleotide
  Antisense strand to SEQ ID NO: 69160
aaagugccaaaguuaauca

SEQ ID NO: 69242 - RNA, 19 nt, Artificial Sequence
  Description of Artificial Sequence: Synthetic oligonucleotide
  Sense strand starting at position 3765 of SEQ ID NO: 856
guuucugagguuuaagaca

SEQ ID NO: 69243 - RNA, 19 nt, Artificial Sequence
  Description of Artificial Sequence: Synthetic oligonucleotide
  Antisense strand to SEQ ID NO: 69162
ugucuuaaaccucagaaac

SEQ ID NO: 69244 - RNA, 19 nt, Artificial Sequence
  Description of Artificial Sequence: Synthetic oligonucleotide
  Sense strand starting at position 3784 of SEQ ID NO: 856
guuuccauccacugugaaa

SEQ ID NO: 69245 - RNA, 19 nt, Artificial Sequence
  Description of Artificial Sequence: Synthetic oligonucleotide
  Antisense strand to SEQ ID NO: 69164
uuucacaguggauggaaac

SEQ ID NO: 69246 - RNA, 19 nt, Artificial Sequence
  Description of Artificial Sequence: Synthetic oligonucleotide
  Sense strand starting at position 3840 of SEQ ID NO: 856
cggucucagaaaugcauaa

SEQ ID NO: 69247 - RNA, 19 nt, Artificial Sequence
  Description of Artificial Sequence: Synthetic oligonucleotide
  Antisense strand to SEQ ID NO: 69166
uuaugcauuucugagaccg

SEQ ID NO: 69248 - RNA, 19 nt, Artificial Sequence
  Description of Artificial Sequence: Synthetic oligonucleotide
  Sense strand starting at position 3860 of SEQ ID NO: 856
gauggcagucgauacugaa

SEQ ID NO: 69249 - RNA, 19 nt, Artificial Sequence
  Description of Artificial Sequence: Synthetic oligonucleotide
  Antisense strand to SEQ ID NO: 69168
uucaguaucgacugccauc

SEQ ID NO: 69250 - RNA, 19 nt, Artificial Sequence
  Description of Artificial Sequence: Synthetic oligonucleotide
  Sense strand starting at position 3872 of SEQ ID NO: 856
uacugaaauccaggcagua

SEQ ID NO: 69251 - RNA, 19 nt, Artificial Sequence
  Description of Artificial Sequence: Synthetic oligonucleotide
  Antisense strand to SEQ ID NO: 69170
uacugccuggauuucagua

SEQ ID NO: 69252 - RNA, 19 nt, Artificial Sequence
  Description of Artificial Sequence: Synthetic oligonucleotide
  Sense strand starting at position 3814 of SEQ ID NO: 858
gaaagugacacgugguaaa

SEQ ID NO: 69253 - RNA, 19 nt, Artificial Sequence
  Description of Artificial Sequence: Synthetic oligonucleotide
  Antisense strand to SEQ ID NO: 69172
uuuaccacgugucacuuuc

SEQ ID NO: 69254 - RNA, 19 nt, Artificial Sequence
  Description of Artificial Sequence: Synthetic oligonucleotide
  Sense strand starting at position 3553 of SEQ ID NO: 858
aguuauagauuaucuagcu

SEQ ID NO: 69255 - RNA, 19 nt, Artificial Sequence
  Description of Artificial Sequence: Synthetic oligonucleotide
  Antisense strand to SEQ ID NO: 69174
agcuagauaaucuauaacu

SEQ ID NO: 69256 - RNA, 19 nt, Artificial Sequence
  Description of Artificial Sequence: Synthetic oligonucleotide
  Sense strand starting at position 3531 of SEQ ID NO: 858
gaauauagacuacguauau

SEQ ID NO: 69257 - RNA, 19 nt, Artificial Sequence
  Description of Artificial Sequence: Synthetic oligonucleotide
  Antisense strand to SEQ ID NO: 69176
auauacguagucuauauuc

SEQ ID NO: 69258 - RNA, 19 nt, Artificial Sequence
  Description of Artificial Sequence: Synthetic oligonucleotide
  Sense strand starting at position 3529 of SEQ ID NO: 858
cugaauauagacuacguau

SEQ ID NO: 69259 - RNA, 19 nt, Artificial Sequence
  Description of Artificial Sequence: Synthetic oligonucleotide
  Antisense strand to SEQ ID NO: 69178
auacguagucuauauucag

SEQ ID NO: 69260 - RNA, 19 nt, Artificial Sequence
  Description of Artificial Sequence: Synthetic oligonucleotide
  Sense strand starting at position 3401 of SEQ ID NO: 858
aacuuaaagugguuucuga

SEQ ID NO: 69261 - RNA, 19 nt, Artificial Sequence
  Description of Artificial Sequence: Synthetic oligonucleotide
  Antisense strand to SEQ ID NO: 69180
ucagaaaccacuuuaaguu

SEQ ID NO: 69262 - RNA, 19 nt, Artificial Sequence
  Description of Artificial Sequence: Synthetic oligonucleotide
  Sense strand starting at position 3360 of SEQ ID NO: 858
gaaggauguuuggaauuuc

SEQ ID NO: 69263 - RNA, 19 nt, Artificial Sequence
  Description of Artificial Sequence: Synthetic oligonucleotide
  Antisense strand to SEQ ID NO: 69182
gaaauuccaaacauccuuc

SEQ ID NO: 69264 - RNA, 19 nt, Artificial Sequence
  Description of Artificial Sequence: Synthetic oligonucleotide
  Sense strand starting at position 3357 of SEQ ID NO: 858
agugaaggauguuuggaau

SEQ ID NO: 69265 - RNA, 19 nt, Artificial Sequence
  Description of Artificial Sequence: Synthetic oligonucleotide
  Antisense strand to SEQ ID NO: 69184
auuccaaacauccuucacu

SEQ ID NO: 69266 - RNA, 19 nt, Artificial Sequence
  Description of Artificial Sequence: Synthetic oligonucleotide
  Sense strand starting at position 3079 of SEQ ID NO: 858
uugaaauaugguugcaaag

SEQ ID NO: 69267 - RNA, 19 nt, Artificial Sequence
  Description of Artificial Sequence: Synthetic oligonucleotide
  Antisense strand to SEQ ID NO: 69186
cuuugcaaccauauuucaa

SEQ ID NO: 69268 - RNA, 19 nt, Artificial Sequence
  Description of Artificial Sequence: Synthetic oligonucleotide
  Sense strand starting at position 3037 of SEQ ID NO: 858
ggguucugccuugaacacu

SEQ ID NO: 69269 - RNA, 19 nt, Artificial Sequence
  Description of Artificial Sequence: Synthetic oligonucleotide
  Antisense strand to SEQ ID NO: 69188
aguguucaaggcagaaccc

SEQ ID NO: 69270 - RNA, 19 nt, Artificial Sequence
  Description of Artificial Sequence: Synthetic oligonucleotide
  Sense strand starting at position 3002 of SEQ ID NO: 858
uuaggauccugccuggaau

SEQ ID NO: 69271 - RNA, 19 nt, Artificial Sequence
  Description of Artificial Sequence: Synthetic oligonucleotide
  Antisense strand to SEQ ID NO: 69190
auuccaggcaggauccuaa

SEQ ID NO: 69272 - RNA, 19 nt, Artificial Sequence
  Description of Artificial Sequence: Synthetic oligonucleotide
  Sense strand starting at position 2276 of SEQ ID NO: 858
gggagaucuaagugccuuu

SEQ ID NO: 69273 - RNA, 19 nt, Artificial Sequence
  Description of Artificial Sequence: Synthetic oligonucleotide
  Antisense strand to SEQ ID NO: 69192
aaaggcacuuagaucuccc

SEQ ID NO: 69274 - RNA, 19 nt, Artificial Sequence
  Description of Artificial Sequence: Synthetic oligonucleotide
  Sense strand starting at position 2268 of SEQ ID NO: 858
gcggaaacgggagaucuaa

SEQ ID NO: 69275 - RNA, 19 nt, Artificial Sequence
  Description of Artificial Sequence: Synthetic oligonucleotide
  Antisense strand to SEQ ID NO: 69194
uuagaucucccguuuccgc

SEQ ID NO: 69276 - RNA, 19 nt, Artificial Sequence
  Description of Artificial Sequence: Synthetic oligonucleotide
  Sense strand starting at position 1603 of SEQ ID NO: 858
aguggauuccuggaccguu

SEQ ID NO: 69277 - RNA, 19 nt, Artificial Sequence
  Description of Artificial Sequence: Synthetic oligonucleotide
  Antisense strand to SEQ ID NO: 69196
aacgguccaggaauccacu

SEQ ID NO: 69278 - RNA, 19 nt, Artificial Sequence
  Description of Artificial Sequence: Synthetic oligonucleotide
  Sense strand starting at position 1588 of SEQ ID NO: 858
gagucaaaucccuacagug

SEQ ID NO: 69279 - RNA, 19 nt, Artificial Sequence
  Description of Artificial Sequence: Synthetic oligonucleotide
  Antisense strand to SEQ ID NO: 69198
cacuguagggauuugacuc

SEQ ID NO: 69280 - RNA, 19 nt, Artificial Sequence
  Description of Artificial Sequence: Synthetic oligonucleotide
  Sense strand starting at position 1587 of SEQ ID NO: 858
agagucaaaucccuacagu

SEQ ID NO: 69281 - RNA, 19 nt, Artificial Sequence
  Description of Artificial Sequence: Synthetic oligonucleotide
  Antisense strand to SEQ ID NO: 69200
acuguagggauuugacucu

SEQ ID NO: 69282 - RNA, 19 nt, Artificial Sequence
  Description of Artificial Sequence: Synthetic oligonucleotide
  Sense strand starting at position 1334 of SEQ ID NO: 858
accagaagugaaugcaaca

SEQ ID NO: 69283 - RNA, 19 nt, Artificial Sequence
  Description of Artificial Sequence: Synthetic oligonucleotide
  Antisense strand to SEQ ID NO: 69202
uguugcauucacuucuggu

SEQ ID NO: 69284 - RNA, 19 nt, Artificial Sequence
  Description of Artificial Sequence: Synthetic oligonucleotide
  Sense strand starting at position 1224 of SEQ ID NO: 858
guaagacuguauguauaua

SEQ ID NO: 69285 - RNA, 19 nt, Artificial Sequence
  Description of Artificial Sequence: Synthetic oligonucleotide
  Antisense strand to SEQ ID NO: 69204
uauauacauacagucuuac

SEQ ID NO: 69286 - RNA, 19 nt, Artificial Sequence
  Description of Artificial Sequence: Synthetic oligonucleotide
  Sense strand starting at position 1221 of SEQ ID NO: 858
ucaguaagacuguauguau

SEQ ID NO: 69287 - RNA, 19 nt, Artificial Sequence
  Description of Artificial Sequence: Synthetic oligonucleotide
  Antisense strand to SEQ ID NO: 69206
auacauacagucuuacuga

SEQ ID NO: 69288 - RNA, 19 nt, Artificial Sequence
  Description of Artificial Sequence: Synthetic oligonucleotide
  Sense strand starting at position 1213 of SEQ ID NO: 858
cuccaaagucaguaagacu

SEQ ID NO: 69289 - RNA, 19 nt, Artificial Sequence
  Description of Artificial Sequence: Synthetic oligonucleotide
  Antisense strand to SEQ ID NO: 69208
agucuuacugacuuuggag

SEQ ID NO: 69290 - RNA, 19 nt, Artificial Sequence
  Description of Artificial Sequence: Synthetic oligonucleotide
  Sense strand starting at position 1202 of SEQ ID NO: 858
agguuagcuuacuccaaag

SEQ ID NO: 69291 - RNA, 19 nt, Artificial Sequence
  Description of Artificial Sequence: Synthetic oligonucleotide
  Antisense strand to SEQ ID NO: 69210
cuuuggaguaagcuaaccu

SEQ ID NO: 69292 - RNA, 19 nt, Artificial Sequence
  Description of Artificial Sequence: Synthetic oligonucleotide
  Sense strand starting at position 1029 of SEQ ID NO: 858
guacuaccacgauaaccau

SEQ ID NO: 69293 - RNA, 19 nt, Artificial Sequence
  Description of Artificial Sequence: Synthetic oligonucleotide
  Antisense strand to SEQ ID NO: 69212
augguuaucgugguaguac

SEQ ID NO: 69294 - RNA, 19 nt, Artificial Sequence
  Description of Artificial Sequence: Synthetic oligonucleotide
  Sense strand starting at position 1017 of SEQ ID NO: 858
cagaaauuguguguacuac

SEQ ID NO: 69295 - RNA, 19 nt, Artificial Sequence
  Description of Artificial Sequence: Synthetic oligonucleotide
  Antisense strand to SEQ ID NO: 69214
guaguacacacaauuucug

SEQ ID NO: 69296 - RNA, 19 nt, Artificial Sequence
  Description of Artificial Sequence: Synthetic oligonucleotide
  Sense strand starting at position 1016 of SEQ ID NO: 858
acagaaauuguguguacua

SEQ ID NO: 69297 - RNA, 19 nt, Artificial Sequence
  Description of Artificial Sequence: Synthetic oligonucleotide
  Antisense strand to SEQ ID NO: 69216
uaguacacacaauuucugu

SEQ ID NO: 69298 - RNA, 19 nt, Artificial Sequence
  Description of Artificial Sequence: Synthetic oligonucleotide
  Sense strand starting at position 1015 of SEQ ID NO: 858
uacagaaauuguguguacu

SEQ ID NO: 69299 - RNA, 19 nt, Artificial Sequence
  Description of Artificial Sequence: Synthetic oligonucleotide
  Antisense strand to SEQ ID NO: 69218
aguacacacaauuucugua

SEQ ID NO: 69300 - RNA, 19 nt, Artificial Sequence
  Description of Artificial Sequence: Synthetic oligonucleotide
  Sense strand starting at position 989 of SEQ ID NO: 858
agguaccaagagugaugua

SEQ ID NO: 69301 - RNA, 19 nt, Artificial Sequence
  Description of Artificial Sequence: Synthetic oligonucleotide
  Antisense strand to SEQ ID NO: 69220
uacaucacucuugguaccu

SEQ ID NO: 69302 - RNA, 19 nt, Artificial Sequence
  Description of Artificial Sequence: Synthetic oligonucleotide
  Sense strand starting at position 861 of SEQ ID NO: 858
uugucugcccuagauuauu

SEQ ID NO: 69303 - RNA, 19 nt, Artificial Sequence
  Description of Artificial Sequence: Synthetic oligonucleotide
  Antisense strand to SEQ ID NO: 69222
aauaaucuagggcagacaa

SEQ ID NO: 69304 - RNA, 19 nt, Artificial Sequence
  Description of Artificial Sequence: Synthetic oligonucleotide
  Sense strand starting at position 859 of SEQ ID NO: 858
acuugucugcccuagauua

SEQ ID NO: 69305 - RNA, 19 nt, Artificial Sequence
  Description of Artificial Sequence: Synthetic oligonucleotide
  Antisense strand to SEQ ID NO: 69224
uaaucuagggcagacaagu

SEQ ID NO: 69306 - RNA, 19 nt, Artificial Sequence
  Description of Artificial Sequence: Synthetic oligonucleotide
  Sense strand starting at position 730 of SEQ ID NO: 858
agagucaguuaacuacaua

SEQ ID NO: 69307 - RNA, 19 nt, Artificial Sequence
  Description of Artificial Sequence: Synthetic oligonucleotide
  Antisense strand to SEQ ID NO: 69226
uauguaguuaacugacucu

SEQ ID NO: 69308 - RNA, 19 nt, Artificial Sequence
  Description of Artificial Sequence: Synthetic oligonucleotide
  Sense strand starting at position 708 of SEQ ID NO: 858
auuugaguauaucaagcaa

SEQ ID NO: 69309 - RNA, 19 nt, Artificial Sequence
  Description of Artificial Sequence: Synthetic oligonucleotide
  Antisense strand to SEQ ID NO: 69228
uugcuugauauacucaaau

SEQ ID NO: 69310 - RNA, 19 nt, Artificial Sequence
  Description of Artificial Sequence: Synthetic oligonucleotide
  Sense strand starting at position 670 of SEQ ID NO: 858
aaguaugugaauggauguu

SEQ ID NO: 69311 - RNA, 19 nt, Artificial Sequence
  Description of Artificial Sequence: Synthetic oligonucleotide
  Antisense strand to SEQ ID NO: 69230
aacauccauucacauacuu

SEQ ID NO: 69312 - RNA, 19 nt, Artificial Sequence
  Description of Artificial Sequence: Synthetic oligonucleotide
  Sense strand starting at position 669 of SEQ ID NO: 858
aaaguaugugaauggaugu

SEQ ID NO: 69313 - RNA, 19 nt, Artificial Sequence
  Description of Artificial Sequence: Synthetic oligonucleotide
  Antisense strand to SEQ ID NO: 69232
acauccauucacauacuuu

SEQ ID NO: 69314 - RNA, 19 nt, Artificial Sequence
  Description of Artificial Sequence: Synthetic oligonucleotide
  Sense strand starting at position 653 of SEQ ID NO: 858
uuguacccuguauaucaaa

SEQ ID NO: 69315 - RNA, 19 nt, Artificial Sequence
  Description of Artificial Sequence: Synthetic oligonucleotide
  Antisense strand to SEQ ID NO: 69234
uuugauauacaggguacaa

SEQ ID NO: 69316 - RNA, 19 nt, Artificial Sequence
  Description of Artificial Sequence: Synthetic oligonucleotide
  Sense strand starting at position 651 of SEQ ID NO: 858
acuuguacccuguauauca

SEQ ID NO: 69317 - RNA, 19 nt, Artificial Sequence
  Description of Artificial Sequence: Synthetic oligonucleotide
  Antisense strand to SEQ ID NO: 69236
ugauauacaggguacaagu

SEQ ID NO: 69318 - RNA, 19 nt, Artificial Sequence
  Description of Artificial Sequence: Synthetic oligonucleotide
  Sense strand starting at position 607 of SEQ ID NO: 858
uugucuccucaugagucua

SEQ ID NO: 69319 - RNA, 19 nt, Artificial Sequence
  Description of Artificial Sequence: Synthetic oligonucleotide
  Antisense strand to SEQ ID NO: 69238
uagacucaugaggagacaa

SEQ ID NO: 69320 - RNA, 19 nt, Artificial Sequence
  Description of Artificial Sequence: Synthetic oligonucleotide
  Sense strand starting at position 460 of SEQ ID NO: 858
agucaucuuuacccuggaa

SEQ ID NO: 69321 - RNA, 19 nt, Artificial Sequence
  Description of Artificial Sequence: Synthetic oligonucleotide
  Antisense strand to SEQ ID NO: 69240
uuccaggguaaagaugacu

SEQ ID NO: 69322 - RNA, 19 nt, Artificial Sequence
  Description of Artificial Sequence: Synthetic oligonucleotide
  Sense strand starting at position 325 of SEQ ID NO: 858
gcgauuugguuuccacacu

SEQ ID NO: 69323 - RNA, 19 nt, Artificial Sequence
  Description of Artificial Sequence: Synthetic oligonucleotide
  Antisense strand to SEQ ID NO: 69242
aguguggaaaccaaaucgc

SEQ ID NO: 69324 - RNA, 19 nt, Artificial Sequence
  Description of Artificial Sequence: Synthetic oligonucleotide
  Sense strand starting at position 280 of SEQ ID NO: 858
caaggagguuaagauauuu

SEQ ID NO: 69325 - RNA, 19 nt, Artificial Sequence
  Description of Artificial Sequence: Synthetic oligonucleotide
  Antisense strand to SEQ ID NO: 69244
aaauaucuuaaccuccuug

SEQ ID NO: 69326 - RNA, 19 nt, Artificial Sequence
  Description of Artificial Sequence: Synthetic oligonucleotide
  Sense strand starting at position 272 of SEQ ID NO: 858
cggguauacaaggagguua

SEQ ID NO: 69327 - RNA, 19 nt, Artificial Sequence
  Description of Artificial Sequence: Synthetic oligonucleotide
  Antisense strand to SEQ ID NO: 69246
uaaccuccuuguauacccg

SEQ ID NO: 69328 - RNA, 19 nt, Artificial Sequence
  Description of Artificial Sequence: Synthetic oligonucleotide
  Sense strand starting at position 236 of SEQ ID NO: 858
cuggaaguucuauaugcca

SEQ ID NO: 69329 - RNA, 19 nt, Artificial Sequence
  Description of Artificial Sequence: Synthetic oligonucleotide
  Antisense strand to SEQ ID NO: 69248
uggcauauagaacuuccag

SEQ ID NO: 69330 - RNA, 19 nt, Artificial Sequence
  Description of Artificial Sequence: Synthetic oligonucleotide
  Sense strand starting at position 175 of SEQ ID NO: 858
agggccaaauccucuaauu

SEQ ID NO: 69331 - RNA, 19 nt, Artificial Sequence
  Description of Artificial Sequence: Synthetic oligonucleotide
  Antisense strand to SEQ ID NO: 69250
aauuagaggauuuggcccu

SEQ ID NO: 69332 - RNA, 19 nt, Artificial Sequence
  Description of Artificial Sequence: Synthetic oligonucleotide
  Sense strand starting at position 287 of SEQ ID NO: 859
ugaaucugauggcugagau

SEQ ID NO: 69333 - RNA, 19 nt, Artificial Sequence
  Description of Artificial Sequence: Synthetic oligonucleotide
  Antisense strand to SEQ ID NO: 69252
aucucagccaucagauuca

SEQ ID NO: 69334 - RNA, 19 nt, Artificial Sequence
  Description of Artificial Sequence: Synthetic oligonucleotide
  Sense strand starting at position 288 of SEQ ID NO: 859
gaaucugauggcugagaua

SEQ ID NO: 69335 - RNA, 19 nt, Artificial Sequence
  Description of Artificial Sequence: Synthetic oligonucleotide
  Antisense strand to SEQ ID NO: 69254
uaucucagccaucagauuc

SEQ ID NO: 69336 - RNA, 19 nt, Artificial Sequence
  Description of Artificial Sequence: Synthetic oligonucleotide
  Sense strand starting at position 299 of SEQ ID NO: 859
cugagauaggcccacuuau

SEQ ID NO: 69337 - RNA, 19 nt, Artificial Sequence
  Description of Artificial Sequence: Synthetic oligonucleotide
  Antisense strand to SEQ ID NO: 69256
auaagugggccuaucucag

SEQ ID NO: 69338 - RNA, 19 nt, Artificial Sequence
  Description of Artificial Sequence: Synthetic oligonucleotide
  Sense strand starting at position 372 of SEQ ID NO: 859
aguaaagaguuguuuggau

SEQ ID NO: 69339 - RNA, 19 nt, Artificial Sequence
  Description of Artificial Sequence: Synthetic oligonucleotide
  Antisense strand to SEQ ID NO: 69258
auccaaacaacucuuuacu

SEQ ID NO: 69340 - RNA, 19 nt, Artificial Sequence
  Description of Artificial Sequence: Synthetic oligonucleotide
  Sense strand starting at position 374 of SEQ ID NO: 859
uaaagaguuguuuggauaa

SEQ ID NO: 69341 - RNA, 19 nt, Artificial Sequence
  Description of Artificial Sequence: Synthetic oligonucleotide
  Antisense strand to SEQ ID NO: 69260
uuauccaaacaacucuuua

SEQ ID NO: 69342 - RNA, 19 nt, Artificial Sequence
  Description of Artificial Sequence: Synthetic oligonucleotide
  Sense strand starting at position 447 of SEQ ID NO: 859
gucagaugaacuugagcca

SEQ ID NO: 69343 - RNA, 19 nt, Artificial Sequence
  Description of Artificial Sequence: Synthetic oligonucleotide
  Antisense strand to SEQ ID NO: 69262
uggcucaaguucaucugac

SEQ ID NO: 69344 - RNA, 19 nt, Artificial Sequence
  Description of Artificial Sequence: Synthetic oligonucleotide
  Sense strand starting at position 768 of SEQ ID NO: 859
ucugaauugcaaggugaug

SEQ ID NO: 69345 - RNA, 19 nt, Artificial Sequence
  Description of Artificial Sequence: Synthetic oligonucleotide
  Antisense strand to SEQ ID NO: 69264
caucaccuugcaauucaga

SEQ ID NO: 69346 - RNA, 19 nt, Artificial Sequence
  Description of Artificial Sequence: Synthetic oligonucleotide
  Sense strand starting at position 945 of SEQ ID NO: 859
acagaacacugugcuauua

SEQ ID NO: 69347 - RNA, 19 nt, Artificial Sequence
  Description of Artificial Sequence: Synthetic oligonucleotide
  Antisense strand to SEQ ID NO: 69266
uaauagcacaguguucugu

SEQ ID NO: 69348 - RNA, 19 nt, Artificial Sequence
  Description of Artificial Sequence: Synthetic oligonucleotide
  Sense strand starting at position 1158 of SEQ ID NO: 859
cugugaaugauacgggaua

SEQ ID NO: 69349 - RNA, 19 nt, Artificial Sequence
  Description of Artificial Sequence: Synthetic oligonucleotide
  Antisense strand to SEQ ID NO: 69268
uaucccguaucauucacag

SEQ ID NO: 69350 - RNA, 19 nt, Artificial Sequence
  Description of Artificial Sequence: Synthetic oligonucleotide
  Sense strand starting at position 1160 of SEQ ID NO: 859
gugaaugauacgggauaag

SEQ ID NO: 69351 - RNA, 19 nt, Artificial Sequence
  Description of Artificial Sequence: Synthetic oligonucleotide
  Antisense strand to SEQ ID NO: 69270
cuuaucccguaucauucac

SEQ ID NO: 69352 - RNA, 19 nt, Artificial Sequence
  Description of Artificial Sequence: Synthetic oligonucleotide
  Sense strand starting at position 1186 of SEQ ID NO: 859
gucucuucugccucaguuu

SEQ ID NO: 69353 - RNA, 19 nt, Artificial Sequence
  Description of Artificial Sequence: Synthetic oligonucleotide
  Antisense strand to SEQ ID NO: 69272
aaacugaggcagaagagac

SEQ ID NO: 69354 - RNA, 19 nt, Artificial Sequence
  Description of Artificial Sequence: Synthetic oligonucleotide
  Sense strand starting at position 1373 of SEQ ID NO: 859
ucuugagaguacuuugaau

SEQ ID NO: 69355 - RNA, 19 nt, Artificial Sequence
  Description of Artificial Sequence: Synthetic oligonucleotide
  Antisense strand to SEQ ID NO: 69274
auucaaaguacucucaaga

SEQ ID NO: 69356 - RNA, 19 nt, Artificial Sequence
  Description of Artificial Sequence: Synthetic oligonucleotide
  Sense strand starting at position 1375 of SEQ ID NO: 859
uugagaguacuuugaauuc

SEQ ID NO: 69357 - RNA, 19 nt, Artificial Sequence
  Description of Artificial Sequence: Synthetic oligonucleotide
  Antisense strand to SEQ ID NO: 69276
gaauucaaaguacucucaa

SEQ ID NO: 69358 - RNA, 19 nt, Artificial Sequence
  Description of Artificial Sequence: Synthetic oligonucleotide
  Sense strand starting at position 1523 of SEQ ID NO: 859
cugggaaggcucugacaga

SEQ ID NO: 69359 - RNA, 19 nt, Artificial Sequence
  Description of Artificial Sequence: Synthetic oligonucleotide
  Antisense strand to SEQ ID NO: 69278
ucugucagagccuucccag

SEQ ID NO: 69360 - RNA, 19 nt, Artificial Sequence
  Description of Artificial Sequence: Synthetic oligonucleotide
  Sense strand starting at position 1893 of SEQ ID NO: 859
agaggagucuucccuacuu

SEQ ID NO: 69361 - RNA, 19 nt, Artificial Sequence
  Description of Artificial Sequence: Synthetic oligonucleotide
  Antisense strand to SEQ ID NO: 69280
aaguagggaagacuccucu

SEQ ID NO: 69362 - RNA, 19 nt, Artificial Sequence
  Description of Artificial Sequence: Synthetic oligonucleotide
  Sense strand starting at position 2057 of SEQ ID NO: 859
aggguuccaagcuaguaaa

SEQ ID NO: 69363 - RNA, 19 nt, Artificial Sequence
  Description of Artificial Sequence: Synthetic oligonucleotide
  Antisense strand to SEQ ID NO: 69282
uuuacuagcuuggaacccu

SEQ ID NO: 69364 - RNA, 19 nt, Artificial Sequence
  Description of Artificial Sequence: Synthetic oligonucleotide
  Sense strand starting at position 2112 of SEQ ID NO: 859
gacacaaugugaucuguuu

SEQ ID NO: 69365 - RNA, 19 nt, Artificial Sequence
  Description of Artificial Sequence: Synthetic oligonucleotide
  Antisense strand to SEQ ID NO: 69284
aaacagaucacauuguguc

SEQ ID NO: 69366 - RNA, 19 nt, Artificial Sequence
  Description of Artificial Sequence: Synthetic oligonucleotide
  Sense strand starting at position 2164 of SEQ ID NO: 859
cacagugcgcaagagauau

SEQ ID NO: 69367 - RNA, 19 nt, Artificial Sequence
  Description of Artificial Sequence: Synthetic oligonucleotide
  Antisense strand to SEQ ID NO: 69286
auaucucuugcgcacugug

SEQ ID NO: 69368 - RNA, 19 nt, Artificial Sequence
  Description of Artificial Sequence: Synthetic oligonucleotide
  Sense strand starting at position 2170 of SEQ ID NO: 859
gcgcaagagauauagucau

SEQ ID NO: 69369 - RNA, 19 nt, Artificial Sequence
  Description of Artificial Sequence: Synthetic oligonucleotide
  Antisense strand to SEQ ID NO: 69288
augacuauaucucuugcgc

SEQ ID NO: 69370 - RNA, 19 nt, Artificial Sequence
  Description of Artificial Sequence: Synthetic oligonucleotide
  Sense strand starting at position 2219 of SEQ ID NO: 859
uuuauauucugacugggaa

SEQ ID NO: 69371 - RNA, 19 nt, Artificial Sequence
  Description of Artificial Sequence: Synthetic oligonucleotide
  Antisense strand to SEQ ID NO: 69290
uucccagucagaauauaaa

SEQ ID NO: 69372 - RNA, 19 nt, Artificial Sequence
  Description of Artificial Sequence: Synthetic oligonucleotide
  Sense strand starting at position 2222 of SEQ ID NO: 859
auauucugacugggaaagu

SEQ ID NO: 69373 - RNA, 19 nt, Artificial Sequence
  Description of Artificial Sequence: Synthetic oligonucleotide
  Antisense strand to SEQ ID NO: 69292
acuuucccagucagaauau

SEQ ID NO: 69374 - RNA, 19 nt, Artificial Sequence
  Description of Artificial Sequence: Synthetic oligonucleotide
  Sense strand starting at position 2359 of SEQ ID NO: 859
ggaugauggucacccuacu

SEQ ID NO: 69375 - RNA, 19 nt, Artificial Sequence
  Description of Artificial Sequence: Synthetic oligonucleotide
  Antisense strand to SEQ ID NO: 69294
aguagggugaccaucaucc

SEQ ID NO: 69376 - RNA, 19 nt, Artificial Sequence
  Description of Artificial Sequence: Synthetic oligonucleotide
  Sense strand starting at position 2379 of SEQ ID NO: 859
aaagaaugaucaguggugu

SEQ ID NO: 69377 - RNA, 19 nt, Artificial Sequence
  Description of Artificial Sequence: Synthetic oligonucleotide
  Antisense strand to SEQ ID NO: 69296
acaccacugaucauucuuu

SEQ ID NO: 69378 - RNA, 19 nt, Artificial Sequence
  Description of Artificial Sequence: Synthetic oligonucleotide
  Sense strand starting at position 2404 of SEQ ID NO: 859
auaauucuccaggagcagu

SEQ ID NO: 69379 - RNA, 19 nt, Artificial Sequence
  Description of Artificial Sequence: Synthetic oligonucleotide
  Antisense strand to SEQ ID NO: 69298
acugcuccuggagaauuau

SEQ ID NO: 69380 - RNA, 19 nt, Artificial Sequence
  Description of Artificial Sequence: Synthetic oligonucleotide
  Sense strand starting at position 2432 of SEQ ID NO: 859
ugguuucuuccauagauau

SEQ ID NO: 69381 - RNA, 19 nt, Artificial Sequence
  Description of Artificial Sequence: Synthetic oligonucleotide
  Antisense strand to SEQ ID NO: 69300
auaucuauggaagaaacca

SEQ ID NO: 69382 - RNA, 19 nt, Artificial Sequence
  Description of Artificial Sequence: Synthetic oligonucleotide
  Sense strand starting at position 2462 of SEQ ID NO: 859
auacacuguucugcaauga

SEQ ID NO: 69383 - RNA, 19 nt, Artificial Sequence
  Description of Artificial Sequence: Synthetic oligonucleotide
  Antisense strand to SEQ ID NO: 69302
ucauugcagaacaguguau

SEQ ID NO: 69384 - RNA, 19 nt, Artificial Sequence
  Description of Artificial Sequence: Synthetic oligonucleotide
  Sense strand starting at position 2580 of SEQ ID NO: 859
acuguauaugagugacaug

SEQ ID NO: 69385 - RNA, 19 nt, Artificial Sequence
  Description of Artificial Sequence: Synthetic oligonucleotide
  Antisense strand to SEQ ID NO: 69304
caugucacucauauacagu

SEQ ID NO: 69386 - RNA, 19 nt, Artificial Sequence
  Description of Artificial Sequence: Synthetic oligonucleotide
  Sense strand starting at position 2671 of SEQ ID NO: 859
aucuauuauguguacgaua

SEQ ID NO: 69387 - RNA, 19 nt, Artificial Sequence
  Description of Artificial Sequence: Synthetic oligonucleotide
  Antisense strand to SEQ ID NO: 69306
uaucguacacauaauagau

SEQ ID NO: 69388 - RNA, 19 nt, Artificial Sequence
  Description of Artificial Sequence: Synthetic oligonucleotide
  Sense strand starting at position 2750 of SEQ ID NO: 859
acugaaaguuaugcauauu

SEQ ID NO: 69389 - RNA, 19 nt, Artificial Sequence
  Description of Artificial Sequence: Synthetic oligonucleotide
  Antisense strand to SEQ ID NO: 69308
aauaugcauaacuuucagu

SEQ ID NO: 69390 - RNA, 19 nt, Artificial Sequence
  Description of Artificial Sequence: Synthetic oligonucleotide
  Sense strand starting at position 2878 of SEQ ID NO: 859
uuaccaaguguuuaugaca

SEQ ID NO: 69391 - RNA, 19 nt, Artificial Sequence
  Description of Artificial Sequence: Synthetic oligonucleotide
  Antisense strand to SEQ ID NO: 69310
ugucauaaacacuugguaa

SEQ ID NO: 69392 - RNA, 19 nt, Artificial Sequence
  Description of Artificial Sequence: Synthetic oligonucleotide
  Sense strand starting at position 2885 of SEQ ID NO: 859
guguuuaugacacaguuau

SEQ ID NO: 69393 - RNA, 19 nt, Artificial Sequence
  Description of Artificial Sequence: Synthetic oligonucleotide
  Antisense strand to SEQ ID NO: 69312
auaacugugucauaaacac

SEQ ID NO: 69394 - RNA, 19 nt, Artificial Sequence
  Description of Artificial Sequence: Synthetic oligonucleotide
  Sense strand starting at position 3306 of SEQ ID NO: 859
auaguugcacaucauauau

SEQ ID NO: 69395 - RNA, 19 nt, Artificial Sequence
  Description of Artificial Sequence: Synthetic oligonucleotide
  Antisense strand to SEQ ID NO: 69314
auauaugaugugcaacuau

SEQ ID NO: 69396 - RNA, 19 nt, Artificial Sequence
  Description of Artificial Sequence: Synthetic oligonucleotide
  Sense strand starting at position 3548 of SEQ ID NO: 859
ugacuucuagcagaucuuu

SEQ ID NO: 69397 - RNA, 19 nt, Artificial Sequence
  Description of Artificial Sequence: Synthetic oligonucleotide
  Antisense strand to SEQ ID NO: 69316
aaagaucugcuagaaguca

SEQ ID NO: 69398 - RNA, 19 nt, Artificial Sequence
  Description of Artificial Sequence: Synthetic oligonucleotide
  Sense strand starting at position 3590 of SEQ ID NO: 859
ggaugugauaagcauugca

SEQ ID NO: 69399 - RNA, 19 nt, Artificial Sequence
  Description of Artificial Sequence: Synthetic oligonucleotide
  Antisense strand to SEQ ID NO: 69318
ugcaaugcuuaucacaucc

SEQ ID NO: 69400 - RNA, 19 nt, Artificial Sequence
  Description of Artificial Sequence: Synthetic oligonucleotide
  Sense strand starting at position 3618 of SEQ ID NO: 859
ccuagcauuucuuuguguu

SEQ ID NO: 69401 - RNA, 19 nt, Artificial Sequence
  Description of Artificial Sequence: Synthetic oligonucleotide
  Antisense strand to SEQ ID NO: 69320
aacacaaagaaaugcuagg

SEQ ID NO: 69402 - RNA, 19 nt, Artificial Sequence
  Description of Artificial Sequence: Synthetic oligonucleotide
  Sense strand starting at position 3622 of SEQ ID NO: 859
gcauuucuuuguguuauga

SEQ ID NO: 69403 - RNA, 19 nt, Artificial Sequence
  Description of Artificial Sequence: Synthetic oligonucleotide
  Antisense strand to SEQ ID NO: 69322
ucauaacacaaagaaaugc

SEQ ID NO: 69404 - RNA, 19 nt, Artificial Sequence
  Description of Artificial Sequence: Synthetic oligonucleotide
  Sense strand starting at position 3653 of SEQ ID NO: 859
cuacaugacuuauuguuau

SEQ ID NO: 69405 - RNA, 19 nt, Artificial Sequence
  Description of Artificial Sequence: Synthetic oligonucleotide
  Antisense strand to SEQ ID NO: 69324
auaacaauaagucauguag

SEQ ID NO: 69406 - RNA, 19 nt, Artificial Sequence
  Description of Artificial Sequence: Synthetic oligonucleotide
  Sense strand starting at position 3687 of SEQ ID NO: 859
cuagguuugguugacauac

SEQ ID NO: 69407 - RNA, 19 nt, Artificial Sequence
  Description of Artificial Sequence: Synthetic oligonucleotide
  Antisense strand to SEQ ID NO: 69326
guaugucaaccaaaccuag

SEQ ID NO: 69408 - RNA, 19 nt, Artificial Sequence
  Description of Artificial Sequence: Synthetic oligonucleotide
  Sense strand starting at position 3928 of SEQ ID NO: 859
uacguaauuuaugcucuga

SEQ ID NO: 69409 - RNA, 19 nt, Artificial Sequence
  Description of Artificial Sequence: Synthetic oligonucleotide
  Antisense strand to SEQ ID NO: 69328
ucagagcauaaauuacgua

SEQ ID NO: 69410 - RNA, 19 nt, Artificial Sequence
  Description of Artificial Sequence: Synthetic oligonucleotide
  Sense strand starting at position 3936 of SEQ ID NO: 859
uuaugcucugaccaaguua

SEQ ID NO: 69411 - RNA, 19 nt, Artificial Sequence
  Description of Artificial Sequence: Synthetic oligonucleotide
  Antisense strand to SEQ ID NO: 69330
uaacuuggucagagcauaa

SEQ ID NO: 69412 - RNA, 19 nt, Artificial Sequence
  Description of Artificial Sequence: Synthetic oligonucleotide
  Sense strand starting at position 2 of SEQ ID NO: 860
caguauucccagugggacu

SEQ ID NO: 69413 - RNA, 19 nt, Artificial Sequence
  Description of Artificial Sequence: Synthetic oligonucleotide
  Antisense strand to SEQ ID NO: 69332
agucccacugggaauacug

SEQ ID NO: 69414 - RNA, 19 nt, Artificial Sequence
  Description of Artificial Sequence: Synthetic oligonucleotide
  Sense strand starting at position 21 of SEQ ID NO: 860
ggaauuuauuacugggauc

SEQ ID NO: 69415 - RNA, 19 nt, Artificial Sequence
  Description of Artificial Sequence: Synthetic oligonucleotide
  Antisense strand to SEQ ID NO: 69334
gaucccaguaauaaauucc

SEQ ID NO: 69416 - RNA, 19 nt, Artificial Sequence
  Description of Artificial Sequence: Synthetic oligonucleotide
  Sense strand starting at position 24 of SEQ ID NO: 860
auuuauuacugggaucaaa

SEQ ID NO: 69417 - RNA, 19 nt, Artificial Sequence
  Description of Artificial Sequence: Synthetic oligonucleotide
  Antisense strand to SEQ ID NO: 69336
uuugaucccaguaauaaau

SEQ ID NO: 69418 - RNA, 19 nt, Artificial Sequence
  Description of Artificial Sequence: Synthetic oligonucleotide
  Sense strand starting at position 125 of SEQ ID NO: 860
ucauacagauagucauaca

SEQ ID NO: 69419 - RNA, 19 nt, Artificial Sequence
  Description of Artificial Sequence: Synthetic oligonucleotide
  Antisense strand to SEQ ID NO: 69338
uguaugacuaucuguauga

SEQ ID NO: 69420 - RNA, 19 nt, Artificial Sequence
  Description of Artificial Sequence: Synthetic oligonucleotide
  Sense strand starting at position 260 of SEQ ID NO: 860
gccauaagaaauggugagu

SEQ ID NO: 69421 - RNA, 19 nt, Artificial Sequence
  Description of Artificial Sequence: Synthetic oligonucleotide
  Antisense strand to SEQ ID NO: 69340
acucaccauuucuuauggc

SEQ ID NO: 69422 - RNA, 19 nt, Artificial Sequence
  Description of Artificial Sequence: Synthetic oligonucleotide
  Sense strand starting at position 263 of SEQ ID NO: 860
auaagaaauggugaguugu

SEQ ID NO: 69423 - RNA, 19 nt, Artificial Sequence
  Description of Artificial Sequence: Synthetic oligonucleotide
  Antisense strand to SEQ ID NO: 69342
acaacucaccauuucuuau

SEQ ID NO: 69424 - RNA, 19 nt, Artificial Sequence
  Description of Artificial Sequence: Synthetic oligonucleotide
  Sense strand starting at position 265 of SEQ ID NO: 860
aagaaauggugaguuguau

SEQ ID NO: 69425 - RNA, 19 nt, Artificial Sequence
  Description of Artificial Sequence: Synthetic oligonucleotide
  Antisense strand to SEQ ID NO: 69344
auacaacucaccauuucuu

SEQ ID NO: 69426 - RNA, 19 nt, Artificial Sequence
  Description of Artificial Sequence: Synthetic oligonucleotide
  Sense strand starting at position 271 of SEQ ID NO: 860
uggugaguuguaugacaag

SEQ ID NO: 69427 - RNA, 19 nt, Artificial Sequence
  Description of Artificial Sequence: Synthetic oligonucleotide
  Antisense strand to SEQ ID NO: 69346
cuugucauacaacucacca

SEQ ID NO: 69428 - RNA, 19 nt, Artificial Sequence
  Description of Artificial Sequence: Synthetic oligonucleotide
  Sense strand starting at position 309 of SEQ ID NO: 860
gaaggagguuucucucagu

SEQ ID NO: 69429 - RNA, 19 nt, Artificial Sequence
  Description of Artificial Sequence: Synthetic oligonucleotide
  Antisense strand to SEQ ID NO: 69348
acugagagaaaccuccuuc

SEQ ID NO: 69430 - RNA, 19 nt, Artificial Sequence
  Description of Artificial Sequence: Synthetic oligonucleotide
  Sense strand starting at position 314 of SEQ ID NO: 860
agguuucucucaguaccua

SEQ ID NO: 69431 - RNA, 19 nt, Artificial Sequence
  Description of Artificial Sequence: Synthetic oligonucleotide
  Antisense strand to SEQ ID NO: 69350
uagguacugagagaaaccu

SEQ ID NO: 69432 - RNA, 19 nt, Artificial Sequence
  Description of Artificial Sequence: Synthetic oligonucleotide
  Sense strand starting at position 315 of SEQ ID NO: 860
gguuucucucaguaccuaa

SEQ ID NO: 69433 - RNA, 19 nt, Artificial Sequence
  Description of Artificial Sequence: Synthetic oligonucleotide
  Antisense strand to SEQ ID NO: 69352
uuagguacugagagaaacc

SEQ ID NO: 69434 - RNA, 19 nt, Artificial Sequence
  Description of Artificial Sequence: Synthetic oligonucleotide
  Sense strand starting at position 496 of SEQ ID NO: 860
guauccuugagagggaacu

SEQ ID NO: 69435 - RNA, 19 nt, Artificial Sequence
  Description of Artificial Sequence: Synthetic oligonucleotide
  Antisense strand to SEQ ID NO: 69354
aguucccucucaaggauac

SEQ ID NO: 69436 - RNA, 19 nt, Artificial Sequence
  Description of Artificial Sequence: Synthetic oligonucleotide
  Sense strand starting at position 546 of SEQ ID NO: 860
uugugugguguuuacauaa

SEQ ID NO: 69437 - RNA, 19 nt, Artificial Sequence
  Description of Artificial Sequence: Synthetic oligonucleotide
  Antisense strand to SEQ ID NO: 69356
uuauguaaacaccacacaa

SEQ ID NO: 69438 - RNA, 19 nt, Artificial Sequence
  Description of Artificial Sequence: Synthetic oligonucleotide
  Sense strand starting at position 553 of SEQ ID NO: 860
guguuuacauaaguauaug

SEQ ID NO: 69439 - RNA, 19 nt, Artificial Sequence
  Description of Artificial Sequence: Synthetic oligonucleotide
  Antisense strand to SEQ ID NO: 69358
cauauacuuauguaaacac

SEQ ID NO: 69440 - RNA, 19 nt, Artificial Sequence
  Description of Artificial Sequence: Synthetic oligonucleotide
  Sense strand starting at position 911 of SEQ ID NO: 860
ucaccuguuggucagaacu

SEQ ID NO: 69441 - RNA, 19 nt, Artificial Sequence
  Description of Artificial Sequence: Synthetic oligonucleotide
  Antisense strand to SEQ ID NO: 69360
aguucugaccaacagguga

SEQ ID NO: 69442 - RNA, 19 nt, Artificial Sequence
  Description of Artificial Sequence: Synthetic oligonucleotide
  Sense strand starting at position 919 of SEQ ID NO: 860
uggucagaacuuuauguuu

SEQ ID NO: 69443 - RNA, 19 nt, Artificial Sequence
  Description of Artificial Sequence: Synthetic oligonucleotide
  Antisense strand to SEQ ID NO: 69362
aaacauaaaguucugacca

SEQ ID NO: 69444 - RNA, 19 nt, Artificial Sequence
  Description of Artificial Sequence: Synthetic oligonucleotide
  Sense strand starting at position 924 of SEQ ID NO: 860
agaacuuuauguuugagga

SEQ ID NO: 69445 - RNA, 19 nt, Artificial Sequence
  Description of Artificial Sequence: Synthetic oligonucleotide
  Antisense strand to SEQ ID NO: 69364
uccucaaacauaaaguucu

SEQ ID NO: 69446 - RNA, 19 nt, Artificial Sequence
  Description of Artificial Sequence: Synthetic oligonucleotide
  Sense strand starting at position 925 of SEQ ID NO: 860
gaacuuuauguuugaggau

SEQ ID NO: 69447 - RNA, 19 nt, Artificial Sequence
  Description of Artificial Sequence: Synthetic oligonucleotide
  Antisense strand to SEQ ID NO: 69366
auccucaaacauaaaguuc

SEQ ID NO: 69448 - RNA, 19 nt, Artificial Sequence
  Description of Artificial Sequence: Synthetic oligonucleotide
  Sense strand starting at position 1064 of SEQ ID NO: 860
ggauucuagcucuaggauu

SEQ ID NO: 69449 - RNA, 19 nt, Artificial Sequence
  Description of Artificial Sequence: Synthetic oligonucleotide
  Antisense strand to SEQ ID NO: 69368
aauccuagagcuagaaucc

SEQ ID NO: 69450 - RNA, 19 nt, Artificial Sequence
  Description of Artificial Sequence: Synthetic oligonucleotide
  Sense strand starting at position 1066 of SEQ ID NO: 860
auucuagcucuaggauuaa

SEQ ID NO: 69451 - RNA, 19 nt, Artificial Sequence
  Description of Artificial Sequence: Synthetic oligonucleotide
  Antisense strand to SEQ ID NO: 69370
uuaauccuagagcuagaau

SEQ ID NO: 69452 - RNA, 19 nt, Artificial Sequence
  Description of Artificial Sequence: Synthetic oligonucleotide
  Sense strand starting at position 1129 of SEQ ID NO: 860
uugugauauucugcuauca

SEQ ID NO: 69453 - RNA, 19 nt, Artificial Sequence
  Description of Artificial Sequence: Synthetic oligonucleotide
  Antisense strand to SEQ ID NO: 69372
ugauagcagaauaucacaa

SEQ ID NO: 69454 - RNA, 19 nt, Artificial Sequence
  Description of Artificial Sequence: Synthetic oligonucleotide
  Sense strand starting at position 1142 of SEQ ID NO: 860
cuaucacaaggcugucaua

SEQ ID NO: 69455 - RNA, 19 nt, Artificial Sequence
  Description of Artificial Sequence: Synthetic oligonucleotide
  Antisense strand to SEQ ID NO: 69374
uaugacagccuugugauag

SEQ ID NO: 69456 - RNA, 19 nt, Artificial Sequence
  Description of Artificial Sequence: Synthetic oligonucleotide
  Sense strand starting at position 1264 of SEQ ID NO: 860
aguuauagguucuuggaaa

SEQ ID NO: 69457 - RNA, 19 nt, Artificial Sequence
  Description of Artificial Sequence: Synthetic oligonucleotide
  Antisense strand to SEQ ID NO: 69376
uuuccaagaaccuauaacu

SEQ ID NO: 69458 - RNA, 19 nt, Artificial Sequence
  Description of Artificial Sequence: Synthetic oligonucleotide
  Sense strand starting at position 1408 of SEQ ID NO: 860
acucuagauuucuggaauu

SEQ ID NO: 69459 - RNA, 19 nt, Artificial Sequence
  Description of Artificial Sequence: Synthetic oligonucleotide
  Antisense strand to SEQ ID NO: 69378
aauuccagaaaucuagagu

SEQ ID NO: 69460 - RNA, 19 nt, Artificial Sequence
  Description of Artificial Sequence: Synthetic oligonucleotide
  Sense strand starting at position 1476 of SEQ ID NO: 860
gggaauaaggcccggauua

SEQ ID NO: 69461 - RNA, 19 nt, Artificial Sequence
  Description of Artificial Sequence: Synthetic oligonucleotide
  Antisense strand to SEQ ID NO: 69380
uaauccgggccuuauuccc

SEQ ID NO: 69462 - RNA, 19 nt, Artificial Sequence
  Description of Artificial Sequence: Synthetic oligonucleotide
  Sense strand starting at position 1477 of SEQ ID NO: 860
ggaauaaggcccggauuaa

SEQ ID NO: 69463 - RNA, 19 nt, Artificial Sequence
  Description of Artificial Sequence: Synthetic oligonucleotide
  Antisense strand to SEQ ID NO: 69382
uuaauccgggccuuauucc

SEQ ID NO: 69464 - RNA, 19 nt, Artificial Sequence
  Description of Artificial Sequence: Synthetic oligonucleotide
  Sense strand starting at position 1542 of SEQ ID NO: 860
ugaauugcuccuggaguac

SEQ ID NO: 69465 - RNA, 19 nt, Artificial Sequence
  Description of Artificial Sequence: Synthetic oligonucleotide
  Antisense strand to SEQ ID NO: 69384
guacuccaggagcaauuca

SEQ ID NO: 69466 - RNA, 19 nt, Artificial Sequence
  Description of Artificial Sequence: Synthetic oligonucleotide
  Sense strand starting at position 1937 of SEQ ID NO: 860
gcgacuuccaaagagcagu

SEQ ID NO: 69467 - RNA, 19 nt, Artificial Sequence
  Description of Artificial Sequence: Synthetic oligonucleotide
  Antisense strand to SEQ ID NO: 69386
acugcucuuuggaagucgc

SEQ ID NO: 69468 - RNA, 19 nt, Artificial Sequence
  Description of Artificial Sequence: Synthetic oligonucleotide
  Sense strand starting at position 2021 of SEQ ID NO: 860
uuaguucuccgcguuuacu

SEQ ID NO: 69469 - RNA, 19 nt, Artificial Sequence
  Description of Artificial Sequence: Synthetic oligonucleotide
  Antisense strand to SEQ ID NO: 69388
aguaaacgcggagaacuaa

SEQ ID NO: 69470 - RNA, 19 nt, Artificial Sequence
  Description of Artificial Sequence: Synthetic oligonucleotide
  Sense strand starting at position 2198 of SEQ ID NO: 860
ccgggagugagcuaugguu

SEQ ID NO: 69471 - RNA, 19 nt, Artificial Sequence
  Description of Artificial Sequence: Synthetic oligonucleotide
  Antisense strand to SEQ ID NO: 69390
aaccauagcucacucccgg

SEQ ID NO: 69472 - RNA, 19 nt, Artificial Sequence
  Description of Artificial Sequence: Synthetic oligonucleotide
  Sense strand starting at position 2200 of SEQ ID NO: 860
gggagugagcuaugguuua

SEQ ID NO: 69473 - RNA, 19 nt, Artificial Sequence
  Description of Artificial Sequence: Synthetic oligonucleotide
  Antisense strand to SEQ ID NO: 69392
uaaaccauagcucacuccc

SEQ ID NO: 69474 - RNA, 19 nt, Artificial Sequence
  Description of Artificial Sequence: Synthetic oligonucleotide
  Sense strand starting at position 2492 of SEQ ID NO: 860
uugggaguuucuguuacca

SEQ ID NO: 69475 - RNA, 19 nt, Artificial Sequence
  Description of Artificial Sequence: Synthetic oligonucleotide
  Antisense strand to SEQ ID NO: 69394
ugguaacagaaacucccaa

SEQ ID NO: 69476 - RNA, 19 nt, Artificial Sequence
  Description of Artificial Sequence: Synthetic oligonucleotide
  Sense strand starting at position 2504 of SEQ ID NO: 860
guuaccauacaacgaaauu

SEQ ID NO: 69477 - RNA, 19 nt, Artificial Sequence
  Description of Artificial Sequence: Synthetic oligonucleotide
  Antisense strand to SEQ ID NO: 69396
aauuucguuguaugguaac

SEQ ID NO: 69478 - RNA, 19 nt, Artificial Sequence
  Description of Artificial Sequence: Synthetic oligonucleotide
  Sense strand starting at position 2540 of SEQ ID NO: 860
guagauauucagugugaga

SEQ ID NO: 69479 - RNA, 19 nt, Artificial Sequence
  Description of Artificial Sequence: Synthetic oligonucleotide
  Antisense strand to SEQ ID NO: 69398
ucucacacugaauaucuac

SEQ ID NO: 69480 - RNA, 19 nt, Artificial Sequence
  Description of Artificial Sequence: Synthetic oligonucleotide
  Sense strand starting at position 2542 of SEQ ID NO: 860
agauauucagugugagaug

SEQ ID NO: 69481 - RNA, 19 nt, Artificial Sequence
  Description of Artificial Sequence: Synthetic oligonucleotide
  Antisense strand to SEQ ID NO: 69400
caucucacacugaauaucu

SEQ ID NO: 69482 - RNA, 19 nt, Artificial Sequence
  Description of Artificial Sequence: Synthetic oligonucleotide
  Sense strand starting at position 3227 of SEQ ID NO: 860
cuucuugcccaggaagagu

SEQ ID NO: 69483 - RNA, 19 nt, Artificial Sequence
  Description of Artificial Sequence: Synthetic oligonucleotide
  Antisense strand to SEQ ID NO: 69402
acucuuccugggcaagaag

SEQ ID NO: 69484 - RNA, 19 nt, Artificial Sequence
  Description of Artificial Sequence: Synthetic oligonucleotide
  Sense strand starting at position 3396 of SEQ ID NO: 860
acguuuaucucaccuacua

SEQ ID NO: 69485 - RNA, 19 nt, Artificial Sequence
  Description of Artificial Sequence: Synthetic oligonucleotide
  Antisense strand to SEQ ID NO: 69404
uaguaggugagauaaacgu

SEQ ID NO: 69486 - RNA, 19 nt, Artificial Sequence
  Description of Artificial Sequence: Synthetic oligonucleotide
  Sense strand starting at position 3514 of SEQ ID NO: 860
cagagacagugucucuuau

SEQ ID NO: 69487 - RNA, 19 nt, Artificial Sequence
  Description of Artificial Sequence: Synthetic oligonucleotide
  Antisense strand to SEQ ID NO: 69406
auaagagacacugucucug

SEQ ID NO: 69488 - RNA, 19 nt, Artificial Sequence
  Description of Artificial Sequence: Synthetic oligonucleotide
  Sense strand starting at position 3552 of SEQ ID NO: 860
gucuccaacgucuaugaua

SEQ ID NO: 69489 - RNA, 19 nt, Artificial Sequence
  Description of Artificial Sequence: Synthetic oligonucleotide
  Antisense strand to SEQ ID NO: 69408
uaucauagacguuggagac

SEQ ID NO: 69490 - RNA, 19 nt, Artificial Sequence
  Description of Artificial Sequence: Synthetic oligonucleotide
  Sense strand starting at position 3639 of SEQ ID NO: 860
guagcccugguuuaaguaa

SEQ ID NO: 69491 - RNA, 19 nt, Artificial Sequence
  Description of Artificial Sequence: Synthetic oligonucleotide
  Antisense strand to SEQ ID NO: 69410
uuacuuaaaccagggcuac

SEQ ID NO: 69492 - RNA, 19 nt, Artificial Sequence
  Description of Artificial Sequence: Synthetic oligonucleotide
  Sense strand starting at position 508 of SEQ ID NO: 861
uuaacaugcccugaaaguu

SEQ ID NO: 69493 - RNA, 19 nt, Artificial Sequence
  Description of Artificial Sequence: Synthetic oligonucleotide
  Antisense strand to SEQ ID NO: 69412
aacuuucagggcauguuaa

SEQ ID NO: 69494 - RNA, 19 nt, Artificial Sequence
  Description of Artificial Sequence: Synthetic oligonucleotide
  Sense strand starting at position 646 of SEQ ID NO: 861
augauccaucuaggaaguu

SEQ ID NO: 69495 - RNA, 19 nt, Artificial Sequence
  Description of Artificial Sequence: Synthetic oligonucleotide
  Antisense strand to SEQ ID NO: 69414
aacuuccuagauggaucau

SEQ ID NO: 69496 - RNA, 19 nt, Artificial Sequence
  Description of Artificial Sequence: Synthetic oligonucleotide
  Sense strand starting at position 707 of SEQ ID NO: 861
caguauaggcucuggaaca

SEQ ID NO: 69497 - RNA, 19 nt, Artificial Sequence
  Description of Artificial Sequence: Synthetic oligonucleotide
  Antisense strand to SEQ ID NO: 69416
uguuccagagccuauacug

SEQ ID NO: 69498 - RNA, 19 nt, Artificial Sequence
  Description of Artificial Sequence: Synthetic oligonucleotide
  Sense strand starting at position 720 of SEQ ID NO: 861
ggaacagaugccuagguuu

SEQ ID NO: 69499 - RNA, 19 nt, Artificial Sequence
  Description of Artificial Sequence: Synthetic oligonucleotide
  Antisense strand to SEQ ID NO: 69418
aaaccuaggcaucuguucc

SEQ ID NO: 69500 - RNA, 19 nt, Artificial Sequence
  Description of Artificial Sequence: Synthetic oligonucleotide
  Sense strand starting at position 900 of SEQ ID NO: 861
aauacagagugcucaguga

SEQ ID NO: 69501 - RNA, 19 nt, Artificial Sequence
  Description of Artificial Sequence: Synthetic oligonucleotide
  Antisense strand to SEQ ID NO: 69420
ucacugagcacucuguauu

SEQ ID NO: 69502 - RNA, 19 nt, Artificial Sequence
  Description of Artificial Sequence: Synthetic oligonucleotide
  Sense strand starting at position 933 of SEQ ID NO: 861
aaugacaucucuguggcaa

SEQ ID NO: 69503 - RNA, 19 nt, Artificial Sequence
  Description of Artificial Sequence: Synthetic oligonucleotide
  Antisense strand to SEQ ID NO: 69422
uugccacagagaugucauu

SEQ ID NO: 69504 - RNA, 19 nt, Artificial Sequence
  Description of Artificial Sequence: Synthetic oligonucleotide
  Sense strand starting at position 977 of SEQ ID NO: 861
uguggauucugagcacaca

SEQ ID NO: 69505 - RNA, 19 nt, Artificial Sequence
  Description of Artificial Sequence: Synthetic oligonucleotide
  Antisense strand to SEQ ID NO: 69424
ugugugcucagaauccaca

SEQ ID NO: 69506 - RNA, 19 nt, Artificial Sequence
  Description of Artificial Sequence: Synthetic oligonucleotide
  Sense strand starting at position 1029 of SEQ ID NO: 861
ucacacuaggucuagcaau

SEQ ID NO: 69507 - RNA, 19 nt, Artificial Sequence
  Description of Artificial Sequence: Synthetic oligonucleotide
  Antisense strand to SEQ ID NO: 69426
auugcuagaccuaguguga

SEQ ID NO: 69508 - RNA, 19 nt, Artificial Sequence
  Description of Artificial Sequence: Synthetic oligonucleotide
  Sense strand starting at position 1052 of SEQ ID NO: 861
gcauuuguugaauguguga

SEQ ID NO: 69509 - RNA, 19 nt, Artificial Sequence
  Description of Artificial Sequence: Synthetic oligonucleotide
  Antisense strand to SEQ ID NO: 69428
ucacacauucaacaaaugc

SEQ ID NO: 69510 - RNA, 19 nt, Artificial Sequence
  Description of Artificial Sequence: Synthetic oligonucleotide
  Sense strand starting at position 1124 of SEQ ID NO: 861
gugggagcuguccagagaa

SEQ ID NO: 69511 - RNA, 19 nt, Artificial Sequence
  Description of Artificial Sequence: Synthetic oligonucleotide
  Antisense strand to SEQ ID NO: 69430
uucucuggacagcucccac

SEQ ID NO: 69512 - RNA, 19 nt, Artificial Sequence
  Description of Artificial Sequence: Synthetic oligonucleotide
  Sense strand starting at position 1312 of SEQ ID NO: 861
aaugaaggcucuuccgaau

SEQ ID NO: 69513 - RNA, 19 nt, Artificial Sequence
  Description of Artificial Sequence: Synthetic oligonucleotide
  Antisense strand to SEQ ID NO: 69432
auucggaagagccuucauu

SEQ ID NO: 69514 - RNA, 19 nt, Artificial Sequence
  Description of Artificial Sequence: Synthetic oligonucleotide
  Sense strand starting at position 1388 of SEQ ID NO: 861
ugaagcucugucuagaaua

SEQ ID NO: 69515 - RNA, 19 nt, Artificial Sequence
  Description of Artificial Sequence: Synthetic oligonucleotide
  Antisense strand to SEQ ID NO: 69434
uauucuagacagagcuuca

SEQ ID NO: 69516 - RNA, 19 nt, Artificial Sequence
  Description of Artificial Sequence: Synthetic oligonucleotide
  Sense strand starting at position 1390 of SEQ ID NO: 861
aagcucugucuagaauaug

SEQ ID NO: 69517 - RNA, 19 nt, Artificial Sequence
  Description of Artificial Sequence: Synthetic oligonucleotide
  Antisense strand to SEQ ID NO: 69436
cauauucuagacagagcuu

SEQ ID NO: 69518 - RNA, 19 nt, Artificial Sequence
  Description of Artificial Sequence: Synthetic oligonucleotide
  Sense strand starting at position 1542 of SEQ ID NO: 861
gaagucugcggaugagaca

SEQ ID NO: 69519 - RNA, 19 nt, Artificial Sequence
  Description of Artificial Sequence: Synthetic oligonucleotide
  Antisense strand to SEQ ID NO: 69438
ugucucauccgcagacuuc

SEQ ID NO: 69520 - RNA, 19 nt, Artificial Sequence
  Description of Artificial Sequence: Synthetic oligonucleotide
  Sense strand starting at position 1974 of SEQ ID NO: 861
uggauugucacaugaucag

SEQ ID NO: 69521 - RNA, 19 nt, Artificial Sequence
  Description of Artificial Sequence: Synthetic oligonucleotide
  Antisense strand to SEQ ID NO: 69440
cugaucaugugacaaucca

SEQ ID NO: 69522 - RNA, 19 nt, Artificial Sequence
  Description of Artificial Sequence: Synthetic oligonucleotide
  Sense strand starting at position 1980 of SEQ ID NO: 861
gucacaugaucagcuagaa

SEQ ID NO: 69523 - RNA, 19 nt, Artificial Sequence
  Description of Artificial Sequence: Synthetic oligonucleotide
  Antisense strand to SEQ ID NO: 69442
uucuagcugaucaugugac

SEQ ID NO: 69524 - RNA, 19 nt, Artificial Sequence
  Description of Artificial Sequence: Synthetic oligonucleotide
  Sense strand starting at position 2039 of SEQ ID NO: 861
ugcguugcgagauugugaa

SEQ ID NO: 69525 - RNA, 19 nt, Artificial Sequence
  Description of Artificial Sequence: Synthetic oligonucleotide
  Antisense strand to SEQ ID NO: 69444
uucacaaucucgcaacgca

SEQ ID NO: 69526 - RNA, 19 nt, Artificial Sequence
  Description of Artificial Sequence: Synthetic oligonucleotide
  Sense strand starting at position 2061 of SEQ ID NO: 861
ucuaacuaguccuuuggga

SEQ ID NO: 69527 - RNA, 19 nt, Artificial Sequence
  Description of Artificial Sequence: Synthetic oligonucleotide
  Antisense strand to SEQ ID NO: 69446
ucccaaaggacuaguuaga

SEQ ID NO: 69528 - RNA, 19 nt, Artificial Sequence
  Description of Artificial Sequence: Synthetic oligonucleotide
  Sense strand starting at position 2063 of SEQ ID NO: 861
uaacuaguccuuugggauu

SEQ ID NO: 69529 - RNA, 19 nt, Artificial Sequence
  Description of Artificial Sequence: Synthetic oligonucleotide
  Antisense strand to SEQ ID NO: 69448
aaucccaaaggacuaguua

SEQ ID NO: 69530 - RNA, 19 nt, Artificial Sequence
  Description of Artificial Sequence: Synthetic oligonucleotide
  Sense strand starting at position 2261 of SEQ ID NO: 861
guggauauugcacaccuaa

SEQ ID NO: 69531 - RNA, 19 nt, Artificial Sequence
  Description of Artificial Sequence: Synthetic oligonucleotide
  Antisense strand to SEQ ID NO: 69450
uuaggugugcaauauccac

SEQ ID NO: 69532 - RNA, 19 nt, Artificial Sequence
  Description of Artificial Sequence: Synthetic oligonucleotide
  Sense strand starting at position 2305 of SEQ ID NO: 861
uuuagucguucuuccauuu

SEQ ID NO: 69533 - RNA, 19 nt, Artificial Sequence
  Description of Artificial Sequence: Synthetic oligonucleotide
  Antisense strand to SEQ ID NO: 69452
aaauggaagaacgacuaaa

SEQ ID NO: 69534 - RNA, 19 nt, Artificial Sequence
  Description of Artificial Sequence: Synthetic oligonucleotide
  Sense strand starting at position 2349 of SEQ ID NO: 861
ucccacaaaucgguaagaa

SEQ ID NO: 69535 - RNA, 19 nt, Artificial Sequence
  Description of Artificial Sequence: Synthetic oligonucleotide
  Antisense strand to SEQ ID NO: 69454
uucuuaccgauuuguggga

SEQ ID NO: 69536 - RNA, 19 nt, Artificial Sequence
  Description of Artificial Sequence: Synthetic oligonucleotide
  Sense strand starting at position 2438 of SEQ ID NO: 861
augaaagugcuaugaguua

SEQ ID NO: 69537 - RNA, 19 nt, Artificial Sequence
  Description of Artificial Sequence: Synthetic oligonucleotide
  Antisense strand to SEQ ID NO: 69456
uaacucauagcacuuucau

SEQ ID NO: 69538 - RNA, 19 nt, Artificial Sequence
  Description of Artificial Sequence: Synthetic oligonucleotide
  Sense strand starting at position 2454 of SEQ ID NO: 861
uuacuagaggcuuacguua

SEQ ID NO: 69539 - RNA, 19 nt, Artificial Sequence
  Description of Artificial Sequence: Synthetic oligonucleotide
  Antisense strand to SEQ ID NO: 69458
uaacguaagccucuaguaa

SEQ ID NO: 69540 - RNA, 19 nt, Artificial Sequence
  Description of Artificial Sequence: Synthetic oligonucleotide
  Sense strand starting at position 2459 of SEQ ID NO: 861
agaggcuuacguuaaagaa

SEQ ID NO: 69541 - RNA, 19 nt, Artificial Sequence
  Description of Artificial Sequence: Synthetic oligonucleotide
  Antisense strand to SEQ ID NO: 69460
uucuuuaacguaagccucu

SEQ ID NO: 69542 - RNA, 19 nt, Artificial Sequence
  Description of Artificial Sequence: Synthetic oligonucleotide
  Sense strand starting at position 2602 of SEQ ID NO: 861
guggaaauguaaguugaua

SEQ ID NO: 69543 - RNA, 19 nt, Artificial Sequence
  Description of Artificial Sequence: Synthetic oligonucleotide
  Antisense strand to SEQ ID NO: 69462
uaucaacuuacauuuccac

SEQ ID NO: 69544 - RNA, 19 nt, Artificial Sequence
  Description of Artificial Sequence: Synthetic oligonucleotide
  Sense strand starting at position 2604 of SEQ ID NO: 861
ggaaauguaaguugauaca

SEQ ID NO: 69545 - RNA, 19 nt, Artificial Sequence
  Description of Artificial Sequence: Synthetic oligonucleotide
  Antisense strand to SEQ ID NO: 69464
uguaucaacuuacauuucc

SEQ ID NO: 69546 - RNA, 19 nt, Artificial Sequence
  Description of Artificial Sequence: Synthetic oligonucleotide
  Sense strand starting at position 2635 of SEQ ID NO: 861
aacaauuggcguuaucuag

SEQ ID NO: 69547 - RNA, 19 nt, Artificial Sequence
  Description of Artificial Sequence: Synthetic oligonucleotide
  Antisense strand to SEQ ID NO: 69466
cuagauaacgccaauuguu

SEQ ID NO: 69548 - RNA, 19 nt, Artificial Sequence
  Description of Artificial Sequence: Synthetic oligonucleotide
  Sense strand starting at position 3306 of SEQ ID NO: 861
cacauuauacugggugaua

SEQ ID NO: 69549 - RNA, 19 nt, Artificial Sequence
  Description of Artificial Sequence: Synthetic oligonucleotide
  Antisense strand to SEQ ID NO: 69468
uaucacccaguauaaugug

SEQ ID NO: 69550 - RNA, 19 nt, Artificial Sequence
  Description of Artificial Sequence: Synthetic oligonucleotide
  Sense strand starting at position 3307 of SEQ ID NO: 861
acauuauacugggugauag

SEQ ID NO: 69551 - RNA, 19 nt, Artificial Sequence
  Description of Artificial Sequence: Synthetic oligonucleotide
  Antisense strand to SEQ ID NO: 69470
cuaucacccaguauaaugu

SEQ ID NO: 69552 - RNA, 19 nt, Artificial Sequence
  Description of Artificial Sequence: Synthetic oligonucleotide
  Sense strand starting at position 3506 of SEQ ID NO: 861
acugcacauguuuaucaga

SEQ ID NO: 69553 - RNA, 19 nt, Artificial Sequence
  Description of Artificial Sequence: Synthetic oligonucleotide
  Antisense strand to SEQ ID NO: 69472
ucugauaaacaugugcagu

SEQ ID NO: 69554 - RNA, 19 nt, Artificial Sequence
  Description of Artificial Sequence: Synthetic oligonucleotide
  Sense strand starting at position 3508 of SEQ ID NO: 861
ugcacauguuuaucagaag

SEQ ID NO: 69555 - RNA, 19 nt, Artificial Sequence
  Description of Artificial Sequence: Synthetic oligonucleotide
  Antisense strand to SEQ ID NO: 69474
cuucugauaaacaugugca

SEQ ID NO: 69556 - RNA, 19 nt, Artificial Sequence
  Description of Artificial Sequence: Synthetic oligonucleotide
  Sense strand starting at position 3649 of SEQ ID NO: 861
aagugaguuagguaagacu

SEQ ID NO: 69557 - RNA, 19 nt, Artificial Sequence
  Description of Artificial Sequence: Synthetic oligonucleotide
  Antisense strand to SEQ ID NO: 69476
agucuuaccuaacucacuu

SEQ ID NO: 69558 - RNA, 19 nt, Artificial Sequence
  Description of Artificial Sequence: Synthetic oligonucleotide
  Sense strand starting at position 3731 of SEQ ID NO: 861
ucaugaaagcuuugaggaa

SEQ ID NO: 69559 - RNA, 19 nt, Artificial Sequence
  Description of Artificial Sequence: Synthetic oligonucleotide
  Antisense strand to SEQ ID NO: 69478
uuccucaaagcuuucauga

SEQ ID NO: 69560 - RNA, 19 nt, Artificial Sequence
  Description of Artificial Sequence: Synthetic oligonucleotide
  Sense strand starting at position 3761 of SEQ ID NO: 861
cacugaucaguuggaacaa

SEQ ID NO: 69561 - RNA, 19 nt, Artificial Sequence
  Description of Artificial Sequence: Synthetic oligonucleotide
  Antisense strand to SEQ ID NO: 69480
uuguuccaacugaucagug

SEQ ID NO: 69562 - RNA, 19 nt, Artificial Sequence
  Description of Artificial Sequence: Synthetic oligonucleotide
  Sense strand starting at position 3772 of SEQ ID NO: 861
uggaacaaacuuugguuaa

SEQ ID NO: 69563 - RNA, 19 nt, Artificial Sequence
  Description of Artificial Sequence: Synthetic oligonucleotide
  Antisense strand to SEQ ID NO: 69482
uuaaccaaaguuuguucca

SEQ ID NO: 69564 - RNA, 19 nt, Artificial Sequence
  Description of Artificial Sequence: Synthetic oligonucleotide
  Sense strand starting at position 3864 of SEQ ID NO: 861
acagccucuccugagaaua

SEQ ID NO: 69565 - RNA, 19 nt, Artificial Sequence
  Description of Artificial Sequence: Synthetic oligonucleotide
  Antisense strand to SEQ ID NO: 69484
uauucucaggagaggcugu

SEQ ID NO: 69566 - RNA, 19 nt, Artificial Sequence
  Description of Artificial Sequence: Synthetic oligonucleotide
  Sense strand starting at position 3900 of SEQ ID NO: 861
agcauuaucugaucuacug

SEQ ID NO: 69567 - RNA, 19 nt, Artificial Sequence
  Description of Artificial Sequence: Synthetic oligonucleotide
  Antisense strand to SEQ ID NO: 69486
caguagaucagauaaugcu

SEQ ID NO: 69568 - RNA, 19 nt, Artificial Sequence
  Description of Artificial Sequence: Synthetic oligonucleotide
  Sense strand starting at position 3972 of SEQ ID NO: 861
uuuacuccucuguaugaga

SEQ ID NO: 69569 - RNA, 19 nt, Artificial Sequence
  Description of Artificial Sequence: Synthetic oligonucleotide
  Antisense strand to SEQ ID NO: 69488
ucucauacagaggaguaaa

SEQ ID NO: 69570 - RNA, 19 nt, Artificial Sequence
  Description of Artificial Sequence: Synthetic oligonucleotide
  Sense strand starting at position 3974 of SEQ ID NO: 861
uacuccucuguaugagaga

SEQ ID NO: 69571 - RNA, 19 nt, Artificial Sequence
  Description of Artificial Sequence: Synthetic oligonucleotide
  Antisense strand to SEQ ID NO: 69490
ucucucauacagaggagua

SEQ ID NO: 69572 - RNA, 19 nt, Artificial Sequence
  Description of Artificial Sequence: Synthetic oligonucleotide
  Sense strand starting at position 14 of SEQ ID NO: 862
ucccuaucuggcuacagaa

SEQ ID NO: 69573 - RNA, 19 nt, Artificial Sequence
  Description of Artificial Sequence: Synthetic oligonucleotide
  Antisense strand to SEQ ID NO: 69492
uucuguagccagauaggga

SEQ ID NO: 69574 - RNA, 19 nt, Artificial Sequence
  Description of Artificial Sequence: Synthetic oligonucleotide
  Sense strand starting at position 112 of SEQ ID NO: 862
gugcuaagacuuuacaaag

SEQ ID NO: 69575 - RNA, 19 nt, Artificial Sequence
  Description of Artificial Sequence: Synthetic oligonucleotide
  Antisense strand to SEQ ID NO: 69494
cuuuguaaagucuuagcac

SEQ ID NO: 69576 - RNA, 19 nt, Artificial Sequence
  Description of Artificial Sequence: Synthetic oligonucleotide
  Sense strand starting at position 161 of SEQ ID NO: 862
agggaaauauuagccuauu

SEQ ID NO: 69577 - RNA, 19 nt, Artificial Sequence
  Description of Artificial Sequence: Synthetic oligonucleotide
  Antisense strand to SEQ ID NO: 69496
aauaggcuaauauuucccu

SEQ ID NO: 69578 - RNA, 19 nt, Artificial Sequence
  Description of Artificial Sequence: Synthetic oligonucleotide
  Sense strand starting at position 334 of SEQ ID NO: 862
uaaugaggugcuuauuaac

SEQ ID NO: 69579 - RNA, 19 nt, Artificial Sequence
  Description of Artificial Sequence: Synthetic oligonucleotide
  Antisense strand to SEQ ID NO: 69498
guuaauaagcaccucauua

SEQ ID NO: 69580 - RNA, 19 nt, Artificial Sequence
  Description of Artificial Sequence: Synthetic oligonucleotide
  Sense strand starting at position 343 of SEQ ID NO: 862
gcuuauuaaccugagucau

SEQ ID NO: 69581 - RNA, 19 nt, Artificial Sequence
  Description of Artificial Sequence: Synthetic oligonucleotide
  Antisense strand to SEQ ID NO: 69500
augacucagguuaauaagc

SEQ ID NO: 69582 - RNA, 19 nt, Artificial Sequence
  Description of Artificial Sequence: Synthetic oligonucleotide
  Sense strand starting at position 364 of SEQ ID NO: 862
gauaaugguacucgguaga

SEQ ID NO: 69583 - RNA, 19 nt, Artificial Sequence
  Description of Artificial Sequence: Synthetic oligonucleotide
  Antisense strand to SEQ ID NO: 69502
ucuaccgaguaccauuauc

SEQ ID NO: 69584 - RNA, 19 nt, Artificial Sequence
  Description of Artificial Sequence: Synthetic oligonucleotide
  Sense strand starting at position 367 of SEQ ID NO: 862
aaugguacucgguagagac

SEQ ID NO: 69585 - RNA, 19 nt, Artificial Sequence
  Description of Artificial Sequence: Synthetic oligonucleotide
  Antisense strand to SEQ ID NO: 69504
gucucuaccgaguaccauu

SEQ ID NO: 69586 - RNA, 19 nt, Artificial Sequence
  Description of Artificial Sequence: Synthetic oligonucleotide
  Sense strand starting at position 490 of SEQ ID NO: 862
uuugaaaguguccaacuua

SEQ ID NO: 69587 - RNA, 19 nt, Artificial Sequence
  Description of Artificial Sequence: Synthetic oligonucleotide
  Antisense strand to SEQ ID NO: 69506
uaaguuggacacuuucaaa

SEQ ID NO: 69588 - RNA, 19 nt, Artificial Sequence
  Description of Artificial Sequence: Synthetic oligonucleotide
  Sense strand starting at position 535 of SEQ ID NO: 862
augcauaacagguggauua

SEQ ID NO: 69589 - RNA, 19 nt, Artificial Sequence
  Description of Artificial Sequence: Synthetic oligonucleotide
  Antisense strand to SEQ ID NO: 69508
uaauccaccuguuaugcau

SEQ ID NO: 69590 - RNA, 19 nt, Artificial Sequence
  Description of Artificial Sequence: Synthetic oligonucleotide
  Sense strand starting at position 918 of SEQ ID NO: 862
uugauaguccugugagaua

SEQ ID NO: 69591 - RNA, 19 nt, Artificial Sequence
  Description of Artificial Sequence: Synthetic oligonucleotide
  Antisense strand to SEQ ID NO: 69510
uaucucacaggacuaucaa

SEQ ID NO: 69592 - RNA, 19 nt, Artificial Sequence
  Description of Artificial Sequence: Synthetic oligonucleotide
  Sense strand starting at position 1016 of SEQ ID NO: 862
gcuggaauuacaugaugga

SEQ ID NO: 69593 - RNA, 19 nt, Artificial Sequence
  Description of Artificial Sequence: Synthetic oligonucleotide
  Antisense strand to SEQ ID NO: 69512
uccaucauguaauuccagc

SEQ ID NO: 69594 - RNA, 19 nt, Artificial Sequence
  Description of Artificial Sequence: Synthetic oligonucleotide
  Sense strand starting at position 1490 of SEQ ID NO: 862
cuacaugcccuggaaguua

SEQ ID NO: 69595 - RNA, 19 nt, Artificial Sequence
  Description of Artificial Sequence: Synthetic oligonucleotide
  Antisense strand to SEQ ID NO: 69514
uaacuuccagggcauguag

SEQ ID NO: 69596 - RNA, 19 nt, Artificial Sequence
  Description of Artificial Sequence: Synthetic oligonucleotide
  Sense strand starting at position 1549 of SEQ ID NO: 862
ggcgccagaacucaagaau

SEQ ID NO: 69597 - RNA, 19 nt, Artificial Sequence
  Description of Artificial Sequence: Synthetic oligonucleotide
  Antisense strand to SEQ ID NO: 69516
auucuugaguucuggcgcc

SEQ ID NO: 69598 - RNA, 19 nt, Artificial Sequence
  Description of Artificial Sequence: Synthetic oligonucleotide
  Sense strand starting at position 1572 of SEQ ID NO: 862
ucagucguuauuuguugaa

SEQ ID NO: 69599 - RNA, 19 nt, Artificial Sequence
  Description of Artificial Sequence: Synthetic oligonucleotide
  Antisense strand to SEQ ID NO: 69518
uucaacaaauaacgacuga

SEQ ID NO: 69600 - RNA, 19 nt, Artificial Sequence
  Description of Artificial Sequence: Synthetic oligonucleotide
  Sense strand starting at position 1574 of SEQ ID NO: 862
agucguuauuuguugaacu

SEQ ID NO: 69601 - RNA, 19 nt, Artificial Sequence
  Description of Artificial Sequence: Synthetic oligonucleotide
  Antisense strand to SEQ ID NO: 69520
aguucaacaaauaacgacu

SEQ ID NO: 69602 - RNA, 19 nt, Artificial Sequence
  Description of Artificial Sequence: Synthetic oligonucleotide
  Sense strand starting at position 1584 of SEQ ID NO: 862
uguugaacugaauggcaua

SEQ ID NO: 69603 - RNA, 19 nt, Artificial Sequence
  Description of Artificial Sequence: Synthetic oligonucleotide
  Antisense strand to SEQ ID NO: 69522
uaugccauucaguucaaca

SEQ ID NO: 69604 - RNA, 19 nt, Artificial Sequence
  Description of Artificial Sequence: Synthetic oligonucleotide
  Sense strand starting at position 1600 of SEQ ID NO: 862
auaguuaggaauggcuuua

SEQ ID NO: 69605 - RNA, 19 nt, Artificial Sequence
  Description of Artificial Sequence: Synthetic oligonucleotide
  Antisense strand to SEQ ID NO: 69524
uaaagccauuccuaacuau

SEQ ID NO: 69606 - RNA, 19 nt, Artificial Sequence
  Description of Artificial Sequence: Synthetic oligonucleotide
  Sense strand starting at position 1629 of SEQ ID NO: 862
aguggauaacuggguagaa

SEQ ID NO: 69607 - RNA, 19 nt, Artificial Sequence
  Description of Artificial Sequence: Synthetic oligonucleotide
  Antisense strand to SEQ ID NO: 69526
uucuacccaguuauccacu

SEQ ID NO: 69608 - RNA, 19 nt, Artificial Sequence
  Description of Artificial Sequence: Synthetic oligonucleotide
  Sense strand starting at position 1665 of SEQ ID NO: 862
uucugaaaccugugaucac

SEQ ID NO: 69609 - RNA, 19 nt, Artificial Sequence
  Description of Artificial Sequence: Synthetic oligonucleotide
  Antisense strand to SEQ ID NO: 69528
gugaucacagguuucagaa

SEQ ID NO: 69610 - RNA, 19 nt, Artificial Sequence
  Description of Artificial Sequence: Synthetic oligonucleotide
  Sense strand starting at position 1795 of SEQ ID NO: 862
gcucuugagggcuaaauuc

SEQ ID NO: 69611 - RNA, 19 nt, Artificial Sequence
  Description of Artificial Sequence: Synthetic oligonucleotide
  Antisense strand to SEQ ID NO: 69530
gaauuuagcccucaagagc

SEQ ID NO: 69612 - RNA, 19 nt, Artificial Sequence
  Description of Artificial Sequence: Synthetic oligonucleotide
  Sense strand starting at position 2082 of SEQ ID NO: 862
ccaauuugccgguaugguu

SEQ ID NO: 69613 - RNA, 19 nt, Artificial Sequence
  Description of Artificial Sequence: Synthetic oligonucleotide
  Antisense strand to SEQ ID NO: 69532
aaccauaccggcaaauugg

SEQ ID NO: 69614 - RNA, 19 nt, Artificial Sequence
  Description of Artificial Sequence: Synthetic oligonucleotide
  Sense strand starting at position 2310 of SEQ ID NO: 862
ugagaaauucguggaggca

SEQ ID NO: 69615 - RNA, 19 nt, Artificial Sequence
  Description of Artificial Sequence: Synthetic oligonucleotide
  Antisense strand to SEQ ID NO: 69534
ugccuccacgaauuucuca

SEQ ID NO: 69616 - RNA, 19 nt, Artificial Sequence
  Description of Artificial Sequence: Synthetic oligonucleotide
  Sense strand starting at position 2311 of SEQ ID NO: 862
gagaaauucguggaggcag

SEQ ID NO: 69617 - RNA, 19 nt, Artificial Sequence
  Description of Artificial Sequence: Synthetic oligonucleotide
  Antisense strand to SEQ ID NO: 69536
cugccuccacgaauuucuc

SEQ ID NO: 69618 - RNA, 19 nt, Artificial Sequence
  Description of Artificial Sequence: Synthetic oligonucleotide
  Sense strand starting at position 2506 of SEQ ID NO: 862
gcgcgauaucgacucacuc

SEQ ID NO: 69619 - RNA, 19 nt, Artificial Sequence
  Description of Artificial Sequence: Synthetic oligonucleotide
  Antisense strand to SEQ ID NO: 69538
gagugagucgauaucgcgc

SEQ ID NO: 69620 - RNA, 19 nt, Artificial Sequence
  Description of Artificial Sequence: Synthetic oligonucleotide
  Sense strand starting at position 2776 of SEQ ID NO: 862
cauugugugccagaacuug

SEQ ID NO: 69621 - RNA, 19 nt, Artificial Sequence
  Description of Artificial Sequence: Synthetic oligonucleotide
  Antisense strand to SEQ ID NO: 69540
caaguucuggcacacaaug

SEQ ID NO: 69622 - RNA, 19 nt, Artificial Sequence
  Description of Artificial Sequence: Synthetic oligonucleotide
  Sense strand starting at position 2855 of SEQ ID NO: 862
cccagucuagccugggaaa

SEQ ID NO: 69623 - RNA, 19 nt, Artificial Sequence
  Description of Artificial Sequence: Synthetic oligonucleotide
  Antisense strand to SEQ ID NO: 69542
uuucccaggcuagacuggg

SEQ ID NO: 69624 - RNA, 19 nt, Artificial Sequence
  Description of Artificial Sequence: Synthetic oligonucleotide
  Sense strand starting at position 2857 of SEQ ID NO: 862
cagucuagccugggaaacu

SEQ ID NO: 69625 - RNA, 19 nt, Artificial Sequence
  Description of Artificial Sequence: Synthetic oligonucleotide
  Antisense strand to SEQ ID NO: 69544
aguuucccaggcuagacug

SEQ ID NO: 69626 - RNA, 19 nt, Artificial Sequence
  Description of Artificial Sequence: Synthetic oligonucleotide
  Sense strand starting at position 2877 of SEQ ID NO: 862
gggaccuugagugggauua

SEQ ID NO: 69627 - RNA, 19 nt, Artificial Sequence
  Description of Artificial Sequence: Synthetic oligonucleotide
  Antisense strand to SEQ ID NO: 69546
uaaucccacucaagguccc

SEQ ID NO: 69628 - RNA, 19 nt, Artificial Sequence
  Description of Artificial Sequence: Synthetic oligonucleotide
  Sense strand starting at position 2908 of SEQ ID NO: 862
gccagugggacuuggagaa

SEQ ID NO: 69629 - RNA, 19 nt, Artificial Sequence
  Description of Artificial Sequence: Synthetic oligonucleotide
  Antisense strand to SEQ ID NO: 69548
uucuccaagucccacuggc

SEQ ID NO: 69630 - RNA, 19 nt, Artificial Sequence
  Description of Artificial Sequence: Synthetic oligonucleotide
  Sense strand starting at position 3038 of SEQ ID NO: 862
uggcgagacaccgacuaaa

SEQ ID NO: 69631 - RNA, 19 nt, Artificial Sequence
  Description of Artificial Sequence: Synthetic oligonucleotide
  Antisense strand to SEQ ID NO: 69550
uuuagucggugucucgcca

SEQ ID NO: 69632 - RNA, 19 nt, Artificial Sequence
  Description of Artificial Sequence: Synthetic oligonucleotide
  Sense strand starting at position 3400 of SEQ ID NO: 862
aucgguauuuccguugacu

SEQ ID NO: 69633 - RNA, 19 nt, Artificial Sequence
  Description of Artificial Sequence: Synthetic oligonucleotide
  Antisense strand to SEQ ID NO: 69552
agucaacggaaauaccgau

SEQ ID NO: 69634 - RNA, 19 nt, Artificial Sequence
  Description of Artificial Sequence: Synthetic oligonucleotide
  Sense strand starting at position 3402 of SEQ ID NO: 862
cgguauuuccguugacuua

SEQ ID NO: 69635 - RNA, 19 nt, Artificial Sequence
  Description of Artificial Sequence: Synthetic oligonucleotide
  Antisense strand to SEQ ID NO: 69554
uaagucaacggaaauaccg

SEQ ID NO: 69636 - RNA, 19 nt, Artificial Sequence
  Description of Artificial Sequence: Synthetic oligonucleotide
  Sense strand starting at position 3461 of SEQ ID NO: 862
acaggagagccuugucaua

SEQ ID NO: 69637 - RNA, 19 nt, Artificial Sequence
  Description of Artificial Sequence: Synthetic oligonucleotide
  Antisense strand to SEQ ID NO: 69556
uaugacaaggcucuccugu

SEQ ID NO: 69638 - RNA, 19 nt, Artificial Sequence
  Description of Artificial Sequence: Synthetic oligonucleotide
  Sense strand starting at position 3463 of SEQ ID NO: 862
aggagagccuugucauaau

SEQ ID NO: 69639 - RNA, 19 nt, Artificial Sequence
  Description of Artificial Sequence: Synthetic oligonucleotide
  Antisense strand to SEQ ID NO: 69558
auuaugacaaggcucuccu

SEQ ID NO: 69640 - RNA, 19 nt, Artificial Sequence
  Description of Artificial Sequence: Synthetic oligonucleotide
  Sense strand starting at position 3566 of SEQ ID NO: 862
acuuuaaacgaucgaucuu

SEQ ID NO: 69641 - RNA, 19 nt, Artificial Sequence
  Description of Artificial Sequence: Synthetic oligonucleotide
  Antisense strand to SEQ ID NO: 69560
aagaucgaucguuuaaagu

SEQ ID NO: 69642 - RNA, 19 nt, Artificial Sequence
  Description of Artificial Sequence: Synthetic oligonucleotide
  Sense strand starting at position 3578 of SEQ ID NO: 862
cgaucuuaauuacuggaau

SEQ ID NO: 69643 - RNA, 19 nt, Artificial Sequence
  Description of Artificial Sequence: Synthetic oligonucleotide
  Antisense strand to SEQ ID NO: 69562
auuccaguaauuaagaucg

SEQ ID NO: 69644 - RNA, 19 nt, Artificial Sequence
  Description of Artificial Sequence: Synthetic oligonucleotide
  Sense strand starting at position 3676 of SEQ ID NO: 862
agagacaucugacuccuuu

SEQ ID NO: 69645 - RNA, 19 nt, Artificial Sequence
  Description of Artificial Sequence: Synthetic oligonucleotide
  Antisense strand to SEQ ID NO: 69564
aaaggagucagaugucucu

SEQ ID NO: 69646 - RNA, 19 nt, Artificial Sequence
  Description of Artificial Sequence: Synthetic oligonucleotide
  Sense strand starting at position 3712 of SEQ ID NO: 862
uugugugaccuugaacaau

SEQ ID NO: 69647 - RNA, 19 nt, Artificial Sequence
  Description of Artificial Sequence: Synthetic oligonucleotide
  Antisense strand to SEQ ID NO: 69566
auuguucaaggucacacaa

SEQ ID NO: 69648 - RNA, 19 nt, Artificial Sequence
  Description of Artificial Sequence: Synthetic oligonucleotide
  Sense strand starting at position 3864 of SEQ ID NO: 862
uugaguuucgcugcagugu

SEQ ID NO: 69649 - RNA, 19 nt, Artificial Sequence
  Description of Artificial Sequence: Synthetic oligonucleotide
  Antisense strand to SEQ ID NO: 69568
acacugcagcgaaacucaa

SEQ ID NO: 69650 - RNA, 19 nt, Artificial Sequence
  Description of Artificial Sequence: Synthetic oligonucleotide
  Sense strand starting at position 3882 of SEQ ID NO: 862
uccugcagccacugagaaa

SEQ ID NO: 69651 - RNA, 19 nt, Artificial Sequence
  Description of Artificial Sequence: Synthetic oligonucleotide
  Antisense strand to SEQ ID NO: 69570
uuucucaguggcugcagga

SEQ ID NO: 69652 - RNA, 19 nt, Artificial Sequence
  Description of Artificial Sequence: Synthetic oligonucleotide
  Sense strand starting at position 74 of SEQ ID NO: 863
ccaguuuaguaguuaacag

SEQ ID NO: 69653 - RNA, 19 nt, Artificial Sequence
  Description of Artificial Sequence: Synthetic oligonucleotide
  Antisense strand to SEQ ID NO: 69572
cuguuaacuacuaaacugg

SEQ ID NO: 69654 - RNA, 19 nt, Artificial Sequence
  Description of Artificial Sequence: Synthetic oligonucleotide
  Sense strand starting at position 81 of SEQ ID NO: 863
aguaguuaacagugacaaa

SEQ ID NO: 69655 - RNA, 19 nt, Artificial Sequence
  Description of Artificial Sequence: Synthetic oligonucleotide
  Antisense strand to SEQ ID NO: 69574
uuugucacuguuaacuacu

SEQ ID NO: 69656 - RNA, 19 nt, Artificial Sequence
  Description of Artificial Sequence: Synthetic oligonucleotide
  Sense strand starting at position 107 of SEQ ID NO: 863
gcaacuagcuuguaauuuc

SEQ ID NO: 69657 - RNA, 19 nt, Artificial Sequence
  Description of Artificial Sequence: Synthetic oligonucleotide
  Antisense strand to SEQ ID NO: 69576
gaaauuacaagcuaguugc

SEQ ID NO: 69658 - RNA, 19 nt, Artificial Sequence
  Description of Artificial Sequence: Synthetic oligonucleotide
  Sense strand starting at position 255 of SEQ ID NO: 863
cugacucccuaggaaagau

SEQ ID NO: 69659 - RNA, 19 nt, Artificial Sequence
  Description of Artificial Sequence: Synthetic oligonucleotide
  Antisense strand to SEQ ID NO: 69578
aucuuuccuagggagucag

SEQ ID NO: 69660 - RNA, 19 nt, Artificial Sequence
  Description of Artificial Sequence: Synthetic oligonucleotide
  Sense strand starting at position 412 of SEQ ID NO: 863
guuuaaacuucuggaucua

SEQ ID NO: 69661 - RNA, 19 nt, Artificial Sequence
  Description of Artificial Sequence: Synthetic oligonucleotide
  Antisense strand to SEQ ID NO: 69580
uagauccagaaguuuaaac

SEQ ID NO: 69662 - RNA, 19 nt, Artificial Sequence
  Description of Artificial Sequence: Synthetic oligonucleotide
  Sense strand starting at position 530 of SEQ ID NO: 863
gucuuacacuauucuagua

SEQ ID NO: 69663 - RNA, 19 nt, Artificial Sequence
  Description of Artificial Sequence: Synthetic oligonucleotide
  Antisense strand to SEQ ID NO: 69582
uacuagaauaguguaagac

SEQ ID NO: 69664 - RNA, 19 nt, Artificial Sequence
  Description of Artificial Sequence: Synthetic oligonucleotide
  Sense strand starting at position 613 of SEQ ID NO: 863
agaucagcagucuacuaaa

SEQ ID NO: 69665 - RNA, 19 nt, Artificial Sequence
  Description of Artificial Sequence: Synthetic oligonucleotide
  Antisense strand to SEQ ID NO: 69584
uuuaguagacugcugaucu

SEQ ID NO: 69666 - RNA, 19 nt, Artificial Sequence
  Description of Artificial Sequence: Synthetic oligonucleotide
  Sense strand starting at position 638 of SEQ ID NO: 863
auauaagucuaaugaggag

SEQ ID NO: 69667 - RNA, 19 nt, Artificial Sequence
  Description of Artificial Sequence: Synthetic oligonucleotide
  Antisense strand to SEQ ID NO: 69586
cuccucauuagacuuauau

SEQ ID NO: 69668 - RNA, 19 nt, Artificial Sequence
  Description of Artificial Sequence: Synthetic oligonucleotide
  Sense strand starting at position 751 of SEQ ID NO: 863
ucugguaagcaauaaaugu

SEQ ID NO: 69669 - RNA, 19 nt, Artificial Sequence
  Description of Artificial Sequence: Synthetic oligonucleotide
  Antisense strand to SEQ ID NO: 69588
acauuuauugcuuaccaga

SEQ ID NO: 69670 - RNA, 19 nt, Artificial Sequence
  Description of Artificial Sequence: Synthetic oligonucleotide
  Sense strand starting at position 758 of SEQ ID NO: 863
agcaauaaaugucaauguu

SEQ ID NO: 69671 - RNA, 19 nt, Artificial Sequence
  Description of Artificial Sequence: Synthetic oligonucleotide
  Antisense strand to SEQ ID NO: 69590
aacauugacauuuauugcu

SEQ ID NO: 69672 - RNA, 19 nt, Artificial Sequence
  Description of Artificial Sequence: Synthetic oligonucleotide
  Sense strand starting at position 1122 of SEQ ID NO: 863
cagacugucuuucgaauuu

SEQ ID NO: 69673 - RNA, 19 nt, Artificial Sequence
  Description of Artificial Sequence: Synthetic oligonucleotide
  Antisense strand to SEQ ID NO: 69592
aaauucgaaagacagucug

SEQ ID NO: 69674 - RNA, 19 nt, Artificial Sequence
  Description of Artificial Sequence: Synthetic oligonucleotide
  Sense strand starting at position 1233 of SEQ ID NO: 863
aaaggagguugguagauau

SEQ ID NO: 69675 - RNA, 19 nt, Artificial Sequence
  Description of Artificial Sequence: Synthetic oligonucleotide
  Antisense strand to SEQ ID NO: 69594
auaucuaccaaccuccuuu

SEQ ID NO: 69676 - RNA, 19 nt, Artificial Sequence
  Description of Artificial Sequence: Synthetic oligonucleotide
  Sense strand starting at position 1237 of SEQ ID NO: 863
gagguugguagauaucgga

SEQ ID NO: 69677 - RNA, 19 nt, Artificial Sequence
  Description of Artificial Sequence: Synthetic oligonucleotide
  Antisense strand to SEQ ID NO: 69596
uccgauaucuaccaaccuc

SEQ ID NO: 69678 - RNA, 19 nt, Artificial Sequence
  Description of Artificial Sequence: Synthetic oligonucleotide
  Sense strand starting at position 1241 of SEQ ID NO: 863
uugguagauaucggauaga

SEQ ID NO: 69679 - RNA, 19 nt, Artificial Sequence
  Description of Artificial Sequence: Synthetic oligonucleotide
  Antisense strand to SEQ ID NO: 69598
ucuauccgauaucuaccaa

SEQ ID NO: 69680 - RNA, 19 nt, Artificial Sequence
  Description of Artificial Sequence: Synthetic oligonucleotide
  Sense strand starting at position 1794 of SEQ ID NO: 863
gagcuauggccagggacua

SEQ ID NO: 69681 - RNA, 19 nt, Artificial Sequence
  Description of Artificial Sequence: Synthetic oligonucleotide
  Antisense strand to SEQ ID NO: 69600
uagucccuggccauagcuc

SEQ ID NO: 69682 - RNA, 19 nt, Artificial Sequence
  Description of Artificial Sequence: Synthetic oligonucleotide
  Sense strand starting at position 2206 of SEQ ID NO: 863
cacggacaagccuaguuua

SEQ ID NO: 69683 - RNA, 19 nt, Artificial Sequence
  Description of Artificial Sequence: Synthetic oligonucleotide
  Antisense strand to SEQ ID NO: 69602
uaaacuaggcuuguccgug

SEQ ID NO: 69684 - RNA, 19 nt, Artificial Sequence
  Description of Artificial Sequence: Synthetic oligonucleotide
  Sense strand starting at position 2209 of SEQ ID NO: 863
ggacaagccuaguuuagua

SEQ ID NO: 69685 - RNA, 19 nt, Artificial Sequence
  Description of Artificial Sequence: Synthetic oligonucleotide
  Antisense strand to SEQ ID NO: 69604
uacuaaacuaggcuugucc

SEQ ID NO: 69686 - RNA, 19 nt, Artificial Sequence
  Description of Artificial Sequence: Synthetic oligonucleotide
  Sense strand starting at position 2259 of SEQ ID NO: 863
ggccugggcgcguaugaau

SEQ ID NO: 69687 - RNA, 19 nt, Artificial Sequence
  Description of Artificial Sequence: Synthetic oligonucleotide
  Antisense strand to SEQ ID NO: 69606
auucauacgcgcccaggcc

SEQ ID NO: 69688 - RNA, 19 nt, Artificial Sequence
  Description of Artificial Sequence: Synthetic oligonucleotide
  Sense strand starting at position 2387 of SEQ ID NO: 863
uucggaggaacguguguuu

SEQ ID NO: 69689 - RNA, 19 nt, Artificial Sequence
  Description of Artificial Sequence: Synthetic oligonucleotide
  Antisense strand to SEQ ID NO: 69608
aaacacacguuccuccgaa

SEQ ID NO: 69690 - RNA, 19 nt, Artificial Sequence
  Description of Artificial Sequence: Synthetic oligonucleotide
  Sense strand starting at position 2630 of SEQ ID NO: 863
ccugaagucucauugggua

SEQ ID NO: 69691 - RNA, 19 nt, Artificial Sequence
  Description of Artificial Sequence: Synthetic oligonucleotide
  Antisense strand to SEQ ID NO: 69610
uacccaaugagacuucagg

SEQ ID NO: 69692 - RNA, 19 nt, Artificial Sequence
  Description of Artificial Sequence: Synthetic oligonucleotide
  Sense strand starting at position 2701 of SEQ ID NO: 863
aaggccuagcucgacuaaa

SEQ ID NO: 69693 - RNA, 19 nt, Artificial Sequence
  Description of Artificial Sequence: Synthetic oligonucleotide
  Antisense strand to SEQ ID NO: 69612
uuuagucgagcuaggccuu

SEQ ID NO: 69694 - RNA, 19 nt, Artificial Sequence
  Description of Artificial Sequence: Synthetic oligonucleotide
  Sense strand starting at position 2735 of SEQ ID NO: 863
ggaagacuucgcuguggcu

SEQ ID NO: 69695 - RNA, 19 nt, Artificial Sequence
  Description of Artificial Sequence: Synthetic oligonucleotide
  Antisense strand to SEQ ID NO: 69614
agccacagcgaagucuucc

SEQ ID NO: 69696 - RNA, 19 nt, Artificial Sequence
  Description of Artificial Sequence: Synthetic oligonucleotide
  Sense strand starting at position 2767 of SEQ ID NO: 863
aaagcuaaaccguguaaug

SEQ ID NO: 69697 - RNA, 19 nt, Artificial Sequence
  Description of Artificial Sequence: Synthetic oligonucleotide
  Antisense strand to SEQ ID NO: 69616
cauuacacgguuuagcuuu

SEQ ID NO: 69698 - RNA, 19 nt, Artificial Sequence
  Description of Artificial Sequence: Synthetic oligonucleotide
  Sense strand starting at position 2808 of SEQ ID NO: 863
uaccuagaauccggaggau

SEQ ID NO: 69699 - RNA, 19 nt, Artificial Sequence
  Description of Artificial Sequence: Synthetic oligonucleotide
  Antisense strand to SEQ ID NO: 69618
auccuccggauucuaggua

SEQ ID NO: 69700 - RNA, 19 nt, Artificial Sequence
  Description of Artificial Sequence: Synthetic oligonucleotide
  Sense strand starting at position 2916 of SEQ ID NO: 863
ggugccauuuccugugaaa

SEQ ID NO: 69701 - RNA, 19 nt, Artificial Sequence
  Description of Artificial Sequence: Synthetic oligonucleotide
  Antisense strand to SEQ ID NO: 69620
uuucacaggaaauggcacc

SEQ ID NO: 69702 - RNA, 19 nt, Artificial Sequence
  Description of Artificial Sequence: Synthetic oligonucleotide
  Sense strand starting at position 2919 of SEQ ID NO: 863
gccauuuccugugaaacaa

SEQ ID NO: 69703 - RNA, 19 nt, Artificial Sequence
  Description of Artificial Sequence: Synthetic oligonucleotide
  Antisense strand to SEQ ID NO: 69622
uuguuucacaggaaauggc

SEQ ID NO: 69704 - RNA, 19 nt, Artificial Sequence
  Description of Artificial Sequence: Synthetic oligonucleotide
  Sense strand starting at position 2965 of SEQ ID NO: 863
aggucacauagccgagaaa

SEQ ID NO: 69705 - RNA, 19 nt, Artificial Sequence
  Description of Artificial Sequence: Synthetic oligonucleotide
  Antisense strand to SEQ ID NO: 69624
uuucucggcuaugugaccu

SEQ ID NO: 69706 - RNA, 19 nt, Artificial Sequence
  Description of Artificial Sequence: Synthetic oligonucleotide
  Sense strand starting at position 2966 of SEQ ID NO: 863
ggucacauagccgagaaau

SEQ ID NO: 69707 - RNA, 19 nt, Artificial Sequence
  Description of Artificial Sequence: Synthetic oligonucleotide
  Antisense strand to SEQ ID NO: 69626
auuucucggcuaugugacc

SEQ ID NO: 69708 - RNA, 19 nt, Artificial Sequence
  Description of Artificial Sequence: Synthetic oligonucleotide
  Sense strand starting at position 3078 of SEQ ID NO: 863
cugcucuugugcucuuuaa

SEQ ID NO: 69709 - RNA, 19 nt, Artificial Sequence
  Description of Artificial Sequence: Synthetic oligonucleotide
  Antisense strand to SEQ ID NO: 69628
uuaaagagcacaagagcag

SEQ ID NO: 69710 - RNA, 19 nt, Artificial Sequence
  Description of Artificial Sequence: Synthetic oligonucleotide
  Sense strand starting at position 3133 of SEQ ID NO: 863
ggauguaagaacugggcuu

SEQ ID NO: 69711 - RNA, 19 nt, Artificial Sequence
  Description of Artificial Sequence: Synthetic oligonucleotide
  Antisense strand to SEQ ID NO: 69630
aagcccaguucuuacaucc

SEQ ID NO: 69712 - RNA, 19 nt, Artificial Sequence
  Description of Artificial Sequence: Synthetic oligonucleotide
  Sense strand starting at position 3179 of SEQ ID NO: 863
gcccuaaugcagugagaug

SEQ ID NO: 69713 - RNA, 19 nt, Artificial Sequence
  Description of Artificial Sequence: Synthetic oligonucleotide
  Antisense strand to SEQ ID NO: 69632
caucucacugcauuagggc

SEQ ID NO: 69714 - RNA, 19 nt, Artificial Sequence
  Description of Artificial Sequence: Synthetic oligonucleotide
  Sense strand starting at position 3180 of SEQ ID NO: 863
cccuaaugcagugagaugu

SEQ ID NO: 69715 - RNA, 19 nt, Artificial Sequence
  Description of Artificial Sequence: Synthetic oligonucleotide
  Antisense strand to SEQ ID NO: 69634
acaucucacugcauuaggg

SEQ ID NO: 69716 - RNA, 19 nt, Artificial Sequence
  Description of Artificial Sequence: Synthetic oligonucleotide
  Sense strand starting at position 3312 of SEQ ID NO: 863
ccaucauucugagauuguu

SEQ ID NO: 69717 - RNA, 19 nt, Artificial Sequence
  Description of Artificial Sequence: Synthetic oligonucleotide
  Antisense strand to SEQ ID NO: 69636
aacaaucucagaaugaugg

SEQ ID NO: 69718 - RNA, 19 nt, Artificial Sequence
  Description of Artificial Sequence: Synthetic oligonucleotide
  Sense strand starting at position 3354 of SEQ ID NO: 863
cgaacucugugggcagauu

SEQ ID NO: 69719 - RNA, 19 nt, Artificial Sequence
  Description of Artificial Sequence: Synthetic oligonucleotide
  Antisense strand to SEQ ID NO: 69638
aaucugcccacagaguucg

SEQ ID NO: 69720 - RNA, 19 nt, Artificial Sequence
  Description of Artificial Sequence: Synthetic oligonucleotide
  Sense strand starting at position 3670 of SEQ ID NO: 863
aaggguugguaguaaauuu

SEQ ID NO: 69721 - RNA, 19 nt, Artificial Sequence
  Description of Artificial Sequence: Synthetic oligonucleotide
  Antisense strand to SEQ ID NO: 69640
aaauuuacuaccaacccuu

SEQ ID NO: 69722 - RNA, 19 nt, Artificial Sequence
  Description of Artificial Sequence: Synthetic oligonucleotide
  Sense strand starting at position 3864 of SEQ ID NO: 863
ucauuuauauuaggaggau

SEQ ID NO: 69723 - RNA, 19 nt, Artificial Sequence
  Description of Artificial Sequence: Synthetic oligonucleotide
  Antisense strand to SEQ ID NO: 69642
auccuccuaauauaaauga

SEQ ID NO: 69724 - RNA, 19 nt, Artificial Sequence
  Description of Artificial Sequence: Synthetic oligonucleotide
  Sense strand starting at position 3865 of SEQ ID NO: 863
cauuuauauuaggaggauu

SEQ ID NO: 69725 - RNA, 19 nt, Artificial Sequence
  Description of Artificial Sequence: Synthetic oligonucleotide
  Antisense strand to SEQ ID NO: 69644
aauccuccuaauauaaaug

SEQ ID NO: 69726 - RNA, 19 nt, Artificial Sequence
  Description of Artificial Sequence: Synthetic oligonucleotide
  Sense strand starting at position 3878 of SEQ ID NO: 863
aggauuaagcuuugagucu

SEQ ID NO: 69727 - RNA, 19 nt, Artificial Sequence
  Description of Artificial Sequence: Synthetic oligonucleotide
  Antisense strand to SEQ ID NO: 69646
agacucaaagcuuaauccu

SEQ ID NO: 69728 - RNA, 19 nt, Artificial Sequence
  Description of Artificial Sequence: Synthetic oligonucleotide
  Sense strand starting at position 3879 of SEQ ID NO: 863
ggauuaagcuuugagucuc

SEQ ID NO: 69729 - RNA, 19 nt, Artificial Sequence
  Description of Artificial Sequence: Synthetic oligonucleotide
  Antisense strand to SEQ ID NO: 69648
gagacucaaagcuuaaucc

SEQ ID NO: 69730 - RNA, 19 nt, Artificial Sequence
  Description of Artificial Sequence: Synthetic oligonucleotide
  Sense strand starting at position 3887 of SEQ ID NO: 863
cuuugagucucaguccuua

SEQ ID NO: 69731 - RNA, 19 nt, Artificial Sequence
  Description of Artificial Sequence: Synthetic oligonucleotide
  Antisense strand to SEQ ID NO: 69650
uaaggacugagacucaaag

SEQ ID NO: 69732 - RNA, 19 nt, Artificial Sequence
  Description of Artificial Sequence: Synthetic oligonucleotide
  Sense strand starting at position 61 of SEQ ID NO: 864
ggcuaagccaucuggucua

SEQ ID NO: 69733 - RNA, 19 nt, Artificial Sequence
  Description of Artificial Sequence: Synthetic oligonucleotide
  Antisense strand to SEQ ID NO: 69652
uagaccagauggcuuagcc

SEQ ID NO: 69734 - RNA, 19 nt, Artificial Sequence
  Description of Artificial Sequence: Synthetic oligonucleotide
  Sense strand starting at position 132 of SEQ ID NO: 864
acuagugccucugcauaga

SEQ ID NO: 69735 - RNA, 19 nt, Artificial Sequence
  Description of Artificial Sequence: Synthetic oligonucleotide
  Antisense strand to SEQ ID NO: 69654
ucuaugcagaggcacuagu

SEQ ID NO: 69736 - RNA, 19 nt, Artificial Sequence
  Description of Artificial Sequence: Synthetic oligonucleotide
  Sense strand starting at position 349 of SEQ ID NO: 864
acugucguaucacuuuaau

SEQ ID NO: 69737 - RNA, 19 nt, Artificial Sequence
  Description of Artificial Sequence: Synthetic oligonucleotide
  Antisense strand to SEQ ID NO: 69656
auuaaagugauacgacagu

SEQ ID NO: 69738 - RNA, 19 nt, Artificial Sequence
  Description of Artificial Sequence: Synthetic oligonucleotide
  Sense strand starting at position 393 of SEQ ID NO: 864
guagcucucuugucuccaa

SEQ ID NO: 69739 - RNA, 19 nt, Artificial Sequence
  Description of Artificial Sequence: Synthetic oligonucleotide
  Antisense strand to SEQ ID NO: 69658
uuggagacaagagagcuac

SEQ ID NO: 69740 - RNA, 19 nt, Artificial Sequence
  Description of Artificial Sequence: Synthetic oligonucleotide
  Sense strand starting at position 446 of SEQ ID NO: 864
aauaaaugggcaggaguua

SEQ ID NO: 69741 - RNA, 19 nt, Artificial Sequence
  Description of Artificial Sequence: Synthetic oligonucleotide
  Antisense strand to SEQ ID NO: 69660
uaacuccugcccauuuauu

SEQ ID NO: 69742 - RNA, 19 nt, Artificial Sequence
  Description of Artificial Sequence: Synthetic oligonucleotide
  Sense strand starting at position 563 of SEQ ID NO: 864
gcucuucgccuggaacaga

SEQ ID NO: 69743 - RNA, 19 nt, Artificial Sequence
  Description of Artificial Sequence: Synthetic oligonucleotide
  Antisense strand to SEQ ID NO: 69662
ucuguuccaggcgaagagc

SEQ ID NO: 69744 - RNA, 19 nt, Artificial Sequence
  Description of Artificial Sequence: Synthetic oligonucleotide
  Sense strand starting at position 612 of SEQ ID NO: 864
ugagguccaucuuggaaag

SEQ ID NO: 69745 - RNA, 19 nt, Artificial Sequence
  Description of Artificial Sequence: Synthetic oligonucleotide
  Antisense strand to SEQ ID NO: 69664
cuuuccaagauggaccuca

SEQ ID NO: 69746 - RNA, 19 nt, Artificial Sequence
  Description of Artificial Sequence: Synthetic oligonucleotide
  Sense strand starting at position 614 of SEQ ID NO: 864
agguccaucuuggaaagga

SEQ ID NO: 69747 - RNA, 19 nt, Artificial Sequence
  Description of Artificial Sequence: Synthetic oligonucleotide
  Antisense strand to SEQ ID NO: 69666
uccuuuccaagauggaccu

SEQ ID NO: 69748 - RNA, 19 nt, Artificial Sequence
  Description of Artificial Sequence: Synthetic oligonucleotide
  Sense strand starting at position 767 of SEQ ID NO: 864
gugagaguggccuggagaa

SEQ ID NO: 69749 - RNA, 19 nt, Artificial Sequence
  Description of Artificial Sequence: Synthetic oligonucleotide
  Antisense strand to SEQ ID NO: 69668
uucuccaggccacucucac

SEQ ID NO: 69750 - RNA, 19 nt, Artificial Sequence
  Description of Artificial Sequence: Synthetic oligonucleotide
  Sense strand starting at position 793 of SEQ ID NO: 864
ucagcauucccucaugaga

SEQ ID NO: 69751 - RNA, 19 nt, Artificial Sequence
  Description of Artificial Sequence: Synthetic oligonucleotide
  Antisense strand to SEQ ID NO: 69670
ucucaugagggaaugcuga

SEQ ID NO: 69752 - RNA, 19 nt, Artificial Sequence
  Description of Artificial Sequence: Synthetic oligonucleotide
  Sense strand starting at position 796 of SEQ ID NO: 864
gcauucccucaugagaaug

SEQ ID NO: 69753 - RNA, 19 nt, Artificial Sequence
  Description of Artificial Sequence: Synthetic oligonucleotide
  Antisense strand to SEQ ID NO: 69672
cauucucaugagggaaugc

SEQ ID NO: 69754 - RNA, 19 nt, Artificial Sequence
  Description of Artificial Sequence: Synthetic oligonucleotide
  Sense strand starting at position 886 of SEQ ID NO: 864
guuuccuucucccaggaaa

SEQ ID NO: 69755 - RNA, 19 nt, Artificial Sequence
  Description of Artificial Sequence: Synthetic oligonucleotide
  Antisense strand to SEQ ID NO: 69674
uuuccugggagaaggaaac

SEQ ID NO: 69756 - RNA, 19 nt, Artificial Sequence
  Description of Artificial Sequence: Synthetic oligonucleotide
  Sense strand starting at position 965 of SEQ ID NO: 864
guuuaaaucccauggcauc

SEQ ID NO: 69757 - RNA, 19 nt, Artificial Sequence
  Description of Artificial Sequence: Synthetic oligonucleotide
  Antisense strand to SEQ ID NO: 69676
gaugccaugggauuuaaac

SEQ ID NO: 69758 - RNA, 19 nt, Artificial Sequence
  Description of Artificial Sequence: Synthetic oligonucleotide
  Sense strand starting at position 1113 of SEQ ID NO: 864
ugagguucagagugaugaa

SEQ ID NO: 69759 - RNA, 19 nt, Artificial Sequence
  Description of Artificial Sequence: Synthetic oligonucleotide
  Antisense strand to SEQ ID NO: 69678
uucaucacucugaaccuca

SEQ ID NO: 69760 - RNA, 19 nt, Artificial Sequence
  Description of Artificial Sequence: Synthetic oligonucleotide
  Sense strand starting at position 1454 of SEQ ID NO: 864
ccagguacuccaugcagua

SEQ ID NO: 69761 - RNA, 19 nt, Artificial Sequence
  Description of Artificial Sequence: Synthetic oligonucleotide
  Antisense strand to SEQ ID NO: 69680
uacugcauggaguaccugg

SEQ ID NO: 69762 - RNA, 19 nt, Artificial Sequence
  Description of Artificial Sequence: Synthetic oligonucleotide
  Sense strand starting at position 1887 of SEQ ID NO: 864
ggccgauacuaacuagacu

SEQ ID NO: 69763 - RNA, 19 nt, Artificial Sequence
  Description of Artificial Sequence: Synthetic oligonucleotide
  Antisense strand to SEQ ID NO: 69682
agucuaguuaguaucggcc

SEQ ID NO: 69764 - RNA, 19 nt, Artificial Sequence
  Description of Artificial Sequence: Synthetic oligonucleotide
  Sense strand starting at position 2116 of SEQ ID NO: 864
aguaaacgucuuuauucuu

SEQ ID NO: 69765 - RNA, 19 nt, Artificial Sequence
  Description of Artificial Sequence: Synthetic oligonucleotide
  Antisense strand to SEQ ID NO: 69684
aagaauaaagacguuuacu

SEQ ID NO: 69766 - RNA, 19 nt, Artificial Sequence
  Description of Artificial Sequence: Synthetic oligonucleotide
  Sense strand starting at position 2122 of SEQ ID NO: 864
cgucuuuauucuuccguga

SEQ ID NO: 69767 - RNA, 19 nt, Artificial Sequence
  Description of Artificial Sequence: Synthetic oligonucleotide
  Antisense strand to SEQ ID NO: 69686
ucacggaagaauaaagacg

SEQ ID NO: 69768 - RNA, 19 nt, Artificial Sequence
  Description of Artificial Sequence: Synthetic oligonucleotide
  Sense strand starting at position 2125 of SEQ ID NO: 864
cuuuauucuuccgugacgu

SEQ ID NO: 69769 - RNA, 19 nt, Artificial Sequence
  Description of Artificial Sequence: Synthetic oligonucleotide
  Antisense strand to SEQ ID NO: 69688
acgucacggaagaauaaag

SEQ ID NO: 69770 - RNA, 19 nt, Artificial Sequence
  Description of Artificial Sequence: Synthetic oligonucleotide
  Sense strand starting at position 2126 of SEQ ID NO: 864
uuuauucuuccgugacguc

SEQ ID NO: 69771 - RNA, 19 nt, Artificial Sequence
  Description of Artificial Sequence: Synthetic oligonucleotide
  Antisense strand to SEQ ID NO: 69690
gacgucacggaagaauaaa

SEQ ID NO: 69772 - RNA, 19 nt, Artificial Sequence
  Description of Artificial Sequence: Synthetic oligonucleotide
  Sense strand starting at position 2313 of SEQ ID NO: 864
caaggaaggcugugcugau

SEQ ID NO: 69773 - RNA, 19 nt, Artificial Sequence
  Description of Artificial Sequence: Synthetic oligonucleotide
  Antisense strand to SEQ ID NO: 69692
aucagcacagccuuccuug

SEQ ID NO: 69774 - RNA, 19 nt, Artificial Sequence
  Description of Artificial Sequence: Synthetic oligonucleotide
  Sense strand starting at position 2314 of SEQ ID NO: 864
aaggaaggcugugcugaua

SEQ ID NO: 69775 - RNA, 19 nt, Artificial Sequence
  Description of Artificial Sequence: Synthetic oligonucleotide
  Antisense strand to SEQ ID NO: 69694
uaucagcacagccuuccuu

SEQ ID NO: 69776 - RNA, 19 nt, Artificial Sequence
  Description of Artificial Sequence: Synthetic oligonucleotide
  Sense strand starting at position 2325 of SEQ ID NO: 864
ugcugauagccucacucaa

SEQ ID NO: 69777 - RNA, 19 nt, Artificial Sequence
  Description of Artificial Sequence: Synthetic oligonucleotide
  Antisense strand to SEQ ID NO: 69696
uugagugaggcuaucagca

SEQ ID NO: 69778 - RNA, 19 nt, Artificial Sequence
  Description of Artificial Sequence: Synthetic oligonucleotide
  Sense strand starting at position 2354 of SEQ ID NO: 864
caaaguucugcaggaggca

SEQ ID NO: 69779 - RNA, 19 nt, Artificial Sequence
  Description of Artificial Sequence: Synthetic oligonucleotide
  Antisense strand to SEQ ID NO: 69698
ugccuccugcagaacuuug

SEQ ID NO: 69780 - RNA, 19 nt, Artificial Sequence
  Description of Artificial Sequence: Synthetic oligonucleotide
  Sense strand starting at position 2382 of SEQ ID NO: 864
cccagagauuaggguuaga

SEQ ID NO: 69781 - RNA, 19 nt, Artificial Sequence
  Description of Artificial Sequence: Synthetic oligonucleotide
  Antisense strand to SEQ ID NO: 69700
ucuaacccuaaucucuggg

SEQ ID NO: 69782 - RNA, 19 nt, Artificial Sequence
  Description of Artificial Sequence: Synthetic oligonucleotide
  Sense strand starting at position 2599 of SEQ ID NO: 864
ucauguagcuaugaaagga

SEQ ID NO: 69783 - RNA, 19 nt, Artificial Sequence
  Description of Artificial Sequence: Synthetic oligonucleotide
  Antisense strand to SEQ ID NO: 69702
uccuuucauagcuacauga

SEQ ID NO: 69784 - RNA, 19 nt, Artificial Sequence
  Description of Artificial Sequence: Synthetic oligonucleotide
  Sense strand starting at position 2683 of SEQ ID NO: 864
ggccaugucuguccgaaac

SEQ ID NO: 69785 - RNA, 19 nt, Artificial Sequence
  Description of Artificial Sequence: Synthetic oligonucleotide
  Antisense strand to SEQ ID NO: 69704
guuucggacagacauggcc

SEQ ID NO: 69786 - RNA, 19 nt, Artificial Sequence
  Description of Artificial Sequence: Synthetic oligonucleotide
  Sense strand starting at position 2753 of SEQ ID NO: 864
gguagaggcucaucauaga

SEQ ID NO: 69787 - RNA, 19 nt, Artificial Sequence
  Description of Artificial Sequence: Synthetic oligonucleotide
  Antisense strand to SEQ ID NO: 69706
ucuaugaugagccucuacc

SEQ ID NO: 69788 - RNA, 19 nt, Artificial Sequence
  Description of Artificial Sequence: Synthetic oligonucleotide
  Sense strand starting at position 2763 of SEQ ID NO: 864
caucauagaugguggagau

SEQ ID NO: 69789 - RNA, 19 nt, Artificial Sequence
  Description of Artificial Sequence: Synthetic oligonucleotide
  Antisense strand to SEQ ID NO: 69708
aucuccaccaucuaugaug

SEQ ID NO: 69790 - RNA, 19 nt, Artificial Sequence
  Description of Artificial Sequence: Synthetic oligonucleotide
  Sense strand starting at position 2829 of SEQ ID NO: 864
guagcuucucuccauggua

SEQ ID NO: 69791 - RNA, 19 nt, Artificial Sequence
  Description of Artificial Sequence: Synthetic oligonucleotide
  Antisense strand to SEQ ID NO: 69710
uaccauggagagaagcuac

SEQ ID NO: 69792 - RNA, 19 nt, Artificial Sequence
  Description of Artificial Sequence: Synthetic oligonucleotide
  Sense strand starting at position 2871 of SEQ ID NO: 864
ugagaaggcugcucucaaa

SEQ ID NO: 69793 - RNA, 19 nt, Artificial Sequence
  Description of Artificial Sequence: Synthetic oligonucleotide
  Antisense strand to SEQ ID NO: 69712
uuugagagcagccuucuca

SEQ ID NO: 69794 - RNA, 19 nt, Artificial Sequence
  Description of Artificial Sequence: Synthetic oligonucleotide
  Sense strand starting at position 2919 of SEQ ID NO: 864
ggaaguaguuacuacauau

SEQ ID NO: 69795 - RNA, 19 nt, Artificial Sequence
  Description of Artificial Sequence: Synthetic oligonucleotide
  Antisense strand to SEQ ID NO: 69714
auauguaguaacuacuucc

SEQ ID NO: 69796 - RNA, 19 nt, Artificial Sequence
  Description of Artificial Sequence: Synthetic oligonucleotide
  Sense strand starting at position 2932 of SEQ ID NO: 864
acauaucugguuuguccaa

SEQ ID NO: 69797 - RNA, 19 nt, Artificial Sequence
  Description of Artificial Sequence: Synthetic oligonucleotide
  Antisense strand to SEQ ID NO: 69716
uuggacaaaccagauaugu

SEQ ID NO: 69798 - RNA, 19 nt, Artificial Sequence
  Description of Artificial Sequence: Synthetic oligonucleotide
  Sense strand starting at position 2959 of SEQ ID NO: 864
gcuuuaaaucugggucuuu

SEQ ID NO: 69799 - RNA, 19 nt, Artificial Sequence
  Description of Artificial Sequence: Synthetic oligonucleotide
  Antisense strand to SEQ ID NO: 69718
aaagacccagauuuaaagc

SEQ ID NO: 69800 - RNA, 19 nt, Artificial Sequence
  Description of Artificial Sequence: Synthetic oligonucleotide
  Sense strand starting at position 2992 of SEQ ID NO: 864
uuaucuauccauugacagu

SEQ ID NO: 69801 - RNA, 19 nt, Artificial Sequence
  Description of Artificial Sequence: Synthetic oligonucleotide
  Antisense strand to SEQ ID NO: 69720
acugucaauggauagauaa

SEQ ID NO: 69802 - RNA, 19 nt, Artificial Sequence
  Description of Artificial Sequence: Synthetic oligonucleotide
  Sense strand starting at position 3100 of SEQ ID NO: 864
ggguaugaaugaucuuguu

SEQ ID NO: 69803 - RNA, 19 nt, Artificial Sequence
  Description of Artificial Sequence: Synthetic oligonucleotide
  Antisense strand to SEQ ID NO: 69722
aacaagaucauucauaccc

SEQ ID NO: 69804 - RNA, 19 nt, Artificial Sequence
  Description of Artificial Sequence: Synthetic oligonucleotide
  Sense strand starting at position 3103 of SEQ ID NO: 864
uaugaaugaucuuguuaag

SEQ ID NO: 69805 - RNA, 19 nt, Artificial Sequence
  Description of Artificial Sequence: Synthetic oligonucleotide
  Antisense strand to SEQ ID NO: 69724
cuuaacaagaucauucaua

SEQ ID NO: 69806 - RNA, 19 nt, Artificial Sequence
  Description of Artificial Sequence: Synthetic oligonucleotide
  Sense strand starting at position 3219 of SEQ ID NO: 864
auuguaauggcgugaucuc

SEQ ID NO: 69807 - RNA, 19 nt, Artificial Sequence
  Description of Artificial Sequence: Synthetic oligonucleotide
  Antisense strand to SEQ ID NO: 69726
gagaucacgccauuacaau

SEQ ID NO: 69808 - RNA, 19 nt, Artificial Sequence
  Description of Artificial Sequence: Synthetic oligonucleotide
  Sense strand starting at position 3780 of SEQ ID NO: 864
cagagacagucucauaugu

SEQ ID NO: 69809 - RNA, 19 nt, Artificial Sequence
  Description of Artificial Sequence: Synthetic oligonucleotide
  Antisense strand to SEQ ID NO: 69728
acauaugagacugucucug

SEQ ID NO: 69810 - RNA, 19 nt, Artificial Sequence
  Description of Artificial Sequence: Synthetic oligonucleotide
  Sense strand starting at position 3782 of SEQ ID NO: 864
gagacagucucauauguug

SEQ ID NO: 69811 - RNA, 19 nt, Artificial Sequence
  Description of Artificial Sequence: Synthetic oligonucleotide
  Antisense strand to SEQ ID NO: 69730
caacauaugagacugucuc

SEQ ID NO: 69812 - RNA, 19 nt, Artificial Sequence
  Description of Artificial Sequence: Synthetic oligonucleotide
  Sense strand starting at position 3974 of SEQ ID NO: 865
gguccagacucugauauuu

SEQ ID NO: 69813 - RNA, 19 nt, Artificial Sequence
  Description of Artificial Sequence: Synthetic oligonucleotide
  Antisense strand to SEQ ID NO: 69732
aaauaucagagucuggacc

SEQ ID NO: 69814 - RNA, 19 nt, Artificial Sequence
  Description of Artificial Sequence: Synthetic oligonucleotide
  Sense strand starting at position 3973 of SEQ ID NO: 865
agguccagacucugauauu

SEQ ID NO: 69815 - RNA, 19 nt, Artificial Sequence
  Description of Artificial Sequence: Synthetic oligonucleotide
  Antisense strand to SEQ ID NO: 69734
aauaucagagucuggaccu

SEQ ID NO: 69816 - RNA, 19 nt, Artificial Sequence
  Description of Artificial Sequence: Synthetic oligonucleotide
  Sense strand starting at position 3958 of SEQ ID NO: 865
auuguuugucaacagaggu

SEQ ID NO: 69817 - RNA, 19 nt, Artificial Sequence
  Description of Artificial Sequence: Synthetic oligonucleotide
  Antisense strand to SEQ ID NO: 69736
accucuguugacaaacaau

SEQ ID NO: 69818 - RNA, 19 nt, Artificial Sequence
  Description of Artificial Sequence: Synthetic oligonucleotide
  Sense strand starting at position 3954 of SEQ ID NO: 865
gaauauuguuugucaacag

SEQ ID NO: 69819 - RNA, 19 nt, Artificial Sequence
  Description of Artificial Sequence: Synthetic oligonucleotide
  Antisense strand to SEQ ID NO: 69738
cuguugacaaacaauauuc

SEQ ID NO: 69820 - RNA, 19 nt, Artificial Sequence
  Description of Artificial Sequence: Synthetic oligonucleotide
  Sense strand starting at position 3953 of SEQ ID NO: 865
ggaauauuguuugucaaca

SEQ ID NO: 69821 - RNA, 19 nt, Artificial Sequence
  Description of Artificial Sequence: Synthetic oligonucleotide
  Antisense strand to SEQ ID NO: 69740
uguugacaaacaauauucc

SEQ ID NO: 69822 - RNA, 19 nt, Artificial Sequence
  Description of Artificial Sequence: Synthetic oligonucleotide
  Sense strand starting at position 3952 of SEQ ID NO: 865
aggaauauuguuugucaac

SEQ ID NO: 69823 - RNA, 19 nt, Artificial Sequence
  Description of Artificial Sequence: Synthetic oligonucleotide
  Antisense strand to SEQ ID NO: 69742
guugacaaacaauauuccu

SEQ ID NO: 69824 - RNA, 19 nt, Artificial Sequence
  Description of Artificial Sequence: Synthetic oligonucleotide
  Sense strand starting at position 3951 of SEQ ID NO: 865
aaggaauauuguuugucaa

SEQ ID NO: 69825 - RNA, 19 nt, Artificial Sequence
  Description of Artificial Sequence: Synthetic oligonucleotide
  Antisense strand to SEQ ID NO: 69744
uugacaaacaauauuccuu

SEQ ID NO: 69826 - RNA, 19 nt, Artificial Sequence
  Description of Artificial Sequence: Synthetic oligonucleotide
  Sense strand starting at position 3950 of SEQ ID NO: 865
gaaggaauauuguuuguca

SEQ ID NO: 69827 - RNA, 19 nt, Artificial Sequence
  Description of Artificial Sequence: Synthetic oligonucleotide
  Antisense strand to SEQ ID NO: 69746
ugacaaacaauauuccuuc

SEQ ID NO: 69828 - RNA, 19 nt, Artificial Sequence
  Description of Artificial Sequence: Synthetic oligonucleotide
  Sense strand starting at position 3876 of SEQ ID NO: 865
gauagaaacuaggcuuguu

SEQ ID NO: 69829 - RNA, 19 nt, Artificial Sequence
  Description of Artificial Sequence: Synthetic oligonucleotide
  Antisense strand to SEQ ID NO: 69748
aacaagccuaguuucuauc

SEQ ID NO: 69830 - RNA, 19 nt, Artificial Sequence
  Description of Artificial Sequence: Synthetic oligonucleotide
  Sense strand starting at position 3858 of SEQ ID NO: 865
uuauuuauguguccuuaug

SEQ ID NO: 69831 - RNA, 19 nt, Artificial Sequence
  Description of Artificial Sequence: Synthetic oligonucleotide
  Antisense strand to SEQ ID NO: 69750
cauaaggacacauaaauaa

SEQ ID NO: 69832 - RNA, 19 nt, Artificial Sequence
  Description of Artificial Sequence: Synthetic oligonucleotide
  Sense strand starting at position 3820 of SEQ ID NO: 865
auauccuugccugauuguu

SEQ ID NO: 69833 - RNA, 19 nt, Artificial Sequence
  Description of Artificial Sequence: Synthetic oligonucleotide
  Antisense strand to SEQ ID NO: 69752
aacaaucaggcaaggauau

SEQ ID NO: 69834 - RNA, 19 nt, Artificial Sequence
  Description of Artificial Sequence: Synthetic oligonucleotide
  Sense strand starting at position 3805 of SEQ ID NO: 865
cugugugcuucccuaauau

SEQ ID NO: 69835 - RNA, 19 nt, Artificial Sequence
  Description of Artificial Sequence: Synthetic oligonucleotide
  Antisense strand to SEQ ID NO: 69754
auauuagggaagcacacag

SEQ ID NO: 69836 - RNA, 19 nt, Artificial Sequence
  Description of Artificial Sequence: Synthetic oligonucleotide
  Sense strand starting at position 3783 of SEQ ID NO: 865
aggauuaggcuagguguuu

SEQ ID NO: 69837 - RNA, 19 nt, Artificial Sequence
  Description of Artificial Sequence: Synthetic oligonucleotide
  Antisense strand to SEQ ID NO: 69756
aaacaccuagccuaauccu

SEQ ID NO: 69838 - RNA, 19 nt, Artificial Sequence
  Description of Artificial Sequence: Synthetic oligonucleotide
  Sense strand starting at position 3729 of SEQ ID NO: 865
ggguguaacuuccugcaga

SEQ ID NO: 69839 - RNA, 19 nt, Artificial Sequence
  Description of Artificial Sequence: Synthetic oligonucleotide
  Antisense strand to SEQ ID NO: 69758
ucugcaggaaguuacaccc

SEQ ID NO: 69840 - RNA, 19 nt, Artificial Sequence
  Description of Artificial Sequence: Synthetic oligonucleotide
  Sense strand starting at position 3720 of SEQ ID NO: 865
uauccaugaggguguaacu

SEQ ID NO: 69841 - RNA, 19 nt, Artificial Sequence
  Description of Artificial Sequence: Synthetic oligonucleotide
  Antisense strand to SEQ ID NO: 69760
aguuacacccucauggaua

SEQ ID NO: 69842 - RNA, 19 nt, Artificial Sequence
  Description of Artificial Sequence: Synthetic oligonucleotide
  Sense strand starting at position 3714 of SEQ ID NO: 865
ccuagcuauccaugagggu

SEQ ID NO: 69843 - RNA, 19 nt, Artificial Sequence
  Description of Artificial Sequence: Synthetic oligonucleotide
  Antisense strand to SEQ ID NO: 69762
acccucauggauagcuagg

SEQ ID NO: 69844 - RNA, 19 nt, Artificial Sequence
  Description of Artificial Sequence: Synthetic oligonucleotide
  Sense strand starting at position 3707 of SEQ ID NO: 865
gguccuuccuagcuaucca

SEQ ID NO: 69845 - RNA, 19 nt, Artificial Sequence
  Description of Artificial Sequence: Synthetic oligonucleotide
  Antisense strand to SEQ ID NO: 69764
uggauagcuaggaaggacc

SEQ ID NO: 69846 - RNA, 19 nt, Artificial Sequence
  Description of Artificial Sequence: Synthetic oligonucleotide
  Sense strand starting at position 3561 of SEQ ID NO: 865
ucccuugcuccucauaguu

SEQ ID NO: 69847 - RNA, 19 nt, Artificial Sequence
  Description of Artificial Sequence: Synthetic oligonucleotide
  Antisense strand to SEQ ID NO: 69766
aacuaugaggagcaaggga

SEQ ID NO: 69848 - RNA, 19 nt, Artificial Sequence
  Description of Artificial Sequence: Synthetic oligonucleotide
  Sense strand starting at position 3535 of SEQ ID NO: 865
acuuuacucccgugcuuaa

SEQ ID NO: 69849 - RNA, 19 nt, Artificial Sequence
  Description of Artificial Sequence: Synthetic oligonucleotide
  Antisense strand to SEQ ID NO: 69768
uuaagcacgggaguaaagu

SEQ ID NO: 69850 - RNA, 19 nt, Artificial Sequence
  Description of Artificial Sequence: Synthetic oligonucleotide
  Sense strand starting at position 3504 of SEQ ID NO: 865
auggaaugaucgcucuaaa

SEQ ID NO: 69851 - RNA, 19 nt, Artificial Sequence
  Description of Artificial Sequence: Synthetic oligonucleotide
  Antisense strand to SEQ ID NO: 69770
uuuagagcgaucauuccau

SEQ ID NO: 69852 - RNA, 19 nt, Artificial Sequence
  Description of Artificial Sequence: Synthetic oligonucleotide
  Sense strand starting at position 3298 of SEQ ID NO: 865
cagaauuacuuagugguua

SEQ ID NO: 69853 - RNA, 19 nt, Artificial Sequence
  Description of Artificial Sequence: Synthetic oligonucleotide
  Antisense strand to SEQ ID NO: 69772
uaaccacuaaguaauucug

SEQ ID NO: 69854 - RNA, 19 nt, Artificial Sequence
  Description of Artificial Sequence: Synthetic oligonucleotide
  Sense strand starting at position 3265 of SEQ ID NO: 865
cuggcauauccagaaucca

SEQ ID NO: 69855 - RNA, 19 nt, Artificial Sequence
  Description of Artificial Sequence: Synthetic oligonucleotide
  Antisense strand to SEQ ID NO: 69774
uggauucuggauaugccag

SEQ ID NO: 69856 - RNA, 19 nt, Artificial Sequence
  Description of Artificial Sequence: Synthetic oligonucleotide
  Sense strand starting at position 3223 of SEQ ID NO: 865
ccacuucgugccuaauugu

SEQ ID NO: 69857 - RNA, 19 nt, Artificial Sequence
  Description of Artificial Sequence: Synthetic oligonucleotide
  Antisense strand to SEQ ID NO: 69776
acaauuaggcacgaagugg

SEQ ID NO: 69858 - RNA, 19 nt, Artificial Sequence
  Description of Artificial Sequence: Synthetic oligonucleotide
  Sense strand starting at position 3195 of SEQ ID NO: 865
uccaguaauugugauuucu

SEQ ID NO: 69859 - RNA, 19 nt, Artificial Sequence
  Description of Artificial Sequence: Synthetic oligonucleotide
  Antisense strand to SEQ ID NO: 69778
agaaaucacaauuacugga

SEQ ID NO: 69860 - RNA, 19 nt, Artificial Sequence
  Description of Artificial Sequence: Synthetic oligonucleotide
  Sense strand starting at position 3192 of SEQ ID NO: 865
ggcuccaguaauugugauu

SEQ ID NO: 69861 - RNA, 19 nt, Artificial Sequence
  Description of Artificial Sequence: Synthetic oligonucleotide
  Antisense strand to SEQ ID NO: 69780
aaucacaauuacuggagcc

SEQ ID NO: 69862 - RNA, 19 nt, Artificial Sequence
  Description of Artificial Sequence: Synthetic oligonucleotide
  Sense strand starting at position 2732 of SEQ ID NO: 865
uuguauacugagugaggaa

SEQ ID NO: 69863 - RNA, 19 nt, Artificial Sequence
  Description of Artificial Sequence: Synthetic oligonucleotide
  Antisense strand to SEQ ID NO: 69782
uuccucacucaguauacaa

SEQ ID NO: 69864 - RNA, 19 nt, Artificial Sequence
  Description of Artificial Sequence: Synthetic oligonucleotide
  Sense strand starting at position 2731 of SEQ ID NO: 865
uuuguauacugagugagga

SEQ ID NO: 69865 - RNA, 19 nt, Artificial Sequence
  Description of Artificial Sequence: Synthetic oligonucleotide
  Antisense strand to SEQ ID NO: 69784
uccucacucaguauacaaa

SEQ ID NO: 69866 - RNA, 19 nt, Artificial Sequence
  Description of Artificial Sequence: Synthetic oligonucleotide
  Sense strand starting at position 2728 of SEQ ID NO: 865
aaauuuguauacugaguga

SEQ ID NO: 69867 - RNA, 19 nt, Artificial Sequence
  Description of Artificial Sequence: Synthetic oligonucleotide
  Antisense strand to SEQ ID NO: 69786
ucacucaguauacaaauuu

SEQ ID NO: 69868 - RNA, 19 nt, Artificial Sequence
  Description of Artificial Sequence: Synthetic oligonucleotide
  Sense strand starting at position 2636 of SEQ ID NO: 865
acgacucuguggcuaugaa

SEQ ID NO: 69869 - RNA, 19 nt, Artificial Sequence
  Description of Artificial Sequence: Synthetic oligonucleotide
  Antisense strand to SEQ ID NO: 69788
uucauagccacagagucgu

SEQ ID NO: 69870 - RNA, 19 nt, Artificial Sequence
  Description of Artificial Sequence: Synthetic oligonucleotide
  Sense strand starting at position 2548 of SEQ ID NO: 865
ugcagaaguuaauuccuuu

SEQ ID NO: 69871 - RNA, 19 nt, Artificial Sequence
  Description of Artificial Sequence: Synthetic oligonucleotide
  Antisense strand to SEQ ID NO: 69790
aaaggaauuaacuucugca

SEQ ID NO: 69872 - RNA, 19 nt, Artificial Sequence
  Description of Artificial Sequence: Synthetic oligonucleotide
  Sense strand starting at position 2521 of SEQ ID NO: 865
gcgcauucugcugcugauu

SEQ ID NO: 69873 - RNA, 19 nt, Artificial Sequence
  Description of Artificial Sequence: Synthetic oligonucleotide
  Antisense strand to SEQ ID NO: 69792
aaucagcagcagaaugcgc

SEQ ID NO: 69874 - RNA, 19 nt, Artificial Sequence
  Description of Artificial Sequence: Synthetic oligonucleotide
  Sense strand starting at position 923 of SEQ ID NO: 865
uagcaauccgguggaauga

SEQ ID NO: 69875 - RNA, 19 nt, Artificial Sequence
  Description of Artificial Sequence: Synthetic oligonucleotide
  Antisense strand to SEQ ID NO: 69794
ucauuccaccggauugcua

SEQ ID NO: 69876 - RNA, 19 nt, Artificial Sequence
  Description of Artificial Sequence: Synthetic oligonucleotide
  Sense strand starting at position 922 of SEQ ID NO: 865
uuagcaauccgguggaaug

SEQ ID NO: 69877 - RNA, 19 nt, Artificial Sequence
  Description of Artificial Sequence: Synthetic oligonucleotide
  Antisense strand to SEQ ID NO: 69796
cauuccaccggauugcuaa

SEQ ID NO: 69878 - RNA, 19 nt, Artificial Sequence
  Description of Artificial Sequence: Synthetic oligonucleotide
  Sense strand starting at position 911 of SEQ ID NO: 865
cagccugcuguuuagcaau

SEQ ID NO: 69879 - RNA, 19 nt, Artificial Sequence
  Description of Artificial Sequence: Synthetic oligonucleotide
  Antisense strand to SEQ ID NO: 69798
auugcuaaacagcaggcug

SEQ ID NO: 69880 - RNA, 19 nt, Artificial Sequence
  Description of Artificial Sequence: Synthetic oligonucleotide
  Sense strand starting at position 673 of SEQ ID NO: 865
uugcaaagugcucaacaau

SEQ ID NO: 69881 - RNA, 19 nt, Artificial Sequence
  Description of Artificial Sequence: Synthetic oligonucleotide
  Antisense strand to SEQ ID NO: 69800
auuguugagcacuuugcaa

SEQ ID NO: 69882 - RNA, 19 nt, Artificial Sequence
  Description of Artificial Sequence: Synthetic oligonucleotide
  Sense strand starting at position 627 of SEQ ID NO: 865
ggcggcaccgcguuauuaa

SEQ ID NO: 69883 - RNA, 19 nt, Artificial Sequence
  Description of Artificial Sequence: Synthetic oligonucleotide
  Antisense strand to SEQ ID NO: 69802
uuaauaacgcggugccgcc

SEQ ID NO: 69884 - RNA, 19 nt, Artificial Sequence
  Description of Artificial Sequence: Synthetic oligonucleotide
  Sense strand starting at position 572 of SEQ ID NO: 865
caucuuagugcuuggaaag

SEQ ID NO: 69885 - RNA, 19 nt, Artificial Sequence
  Description of Artificial Sequence: Synthetic oligonucleotide
  Antisense strand to SEQ ID NO: 69804
cuuuccaagcacuaagaug

SEQ ID NO: 69886 - RNA, 19 nt, Artificial Sequence
  Description of Artificial Sequence: Synthetic oligonucleotide
  Sense strand starting at position 571 of SEQ ID NO: 865
acaucuuagugcuuggaaa

SEQ ID NO: 69887 - RNA, 19 nt, Artificial Sequence
  Description of Artificial Sequence: Synthetic oligonucleotide
  Antisense strand to SEQ ID NO: 69806
uuuccaagcacuaagaugu

SEQ ID NO: 69888 - RNA, 19 nt, Artificial Sequence
  Description of Artificial Sequence: Synthetic oligonucleotide
  Sense strand starting at position 462 of SEQ ID NO: 865
ugagaugccugcuugcaca

SEQ ID NO: 69889 - RNA, 19 nt, Artificial Sequence
  Description of Artificial Sequence: Synthetic oligonucleotide
  Antisense strand to SEQ ID NO: 69808
ugugcaagcaggcaucuca

SEQ ID NO: 69890 - RNA, 19 nt, Artificial Sequence
  Description of Artificial Sequence: Synthetic oligonucleotide
  Sense strand starting at position 58 of SEQ ID NO: 865
uccacuguaccagagcaau

SEQ ID NO: 69891 - RNA, 19 nt, Artificial Sequence
  Description of Artificial Sequence: Synthetic oligonucleotide
  Antisense strand to SEQ ID NO: 69810
auugcucugguacagugga

SEQ ID NO: 69892 - RNA, 19 nt, Artificial Sequence
  Description of Artificial Sequence: Synthetic oligonucleotide
  Sense strand starting at position 383 of SEQ ID NO: 866
uuguaaaguuuguccagca

SEQ ID NO: 69893 - RNA, 19 nt, Artificial Sequence
  Description of Artificial Sequence: Synthetic oligonucleotide
  Antisense strand to SEQ ID NO: 69812
ugcuggacaaacuuuacaa

SEQ ID NO: 69894 - RNA, 19 nt, Artificial Sequence
  Description of Artificial Sequence: Synthetic oligonucleotide
  Sense strand starting at position 690 of SEQ ID NO: 866
guagucuuggcaugggaga

SEQ ID NO: 69895 - RNA, 19 nt, Artificial Sequence
  Description of Artificial Sequence: Synthetic oligonucleotide
  Antisense strand to SEQ ID NO: 69814
ucucccaugccaagacuac

SEQ ID NO: 69896 - RNA, 19 nt, Artificial Sequence
  Description of Artificial Sequence: Synthetic oligonucleotide
  Sense strand starting at position 766 of SEQ ID NO: 866
acugguugugugggaacaa

SEQ ID NO: 69897 - RNA, 19 nt, Artificial Sequence
  Description of Artificial Sequence: Synthetic oligonucleotide
  Antisense strand to SEQ ID NO: 69816
uuguucccacacaaccagu

SEQ ID NO: 69898 - RNA, 19 nt, Artificial Sequence
  Description of Artificial Sequence: Synthetic oligonucleotide
  Sense strand starting at position 767 of SEQ ID NO: 866
cugguugugugggaacaaa

SEQ ID NO: 69899 - RNA, 19 nt, Artificial Sequence
  Description of Artificial Sequence: Synthetic oligonucleotide
  Antisense strand to SEQ ID NO: 69818
uuuguucccacacaaccag

SEQ ID NO: 69900 - RNA, 19 nt, Artificial Sequence
  Description of Artificial Sequence: Synthetic oligonucleotide
  Sense strand starting at position 957 of SEQ ID NO: 866
cugucuucugcugggaagu

SEQ ID NO: 69901 - RNA, 19 nt, Artificial Sequence
  Description of Artificial Sequence: Synthetic oligonucleotide
  Antisense strand to SEQ ID NO: 69820
acuucccagcagaagacag

SEQ ID NO: 69902 - RNA, 19 nt, Artificial Sequence
  Description of Artificial Sequence: Synthetic oligonucleotide
  Sense strand starting at position 958 of SEQ ID NO: 866
ugucuucugcugggaaguu

SEQ ID NO: 69903 - RNA, 19 nt, Artificial Sequence
  Description of Artificial Sequence: Synthetic oligonucleotide
  Antisense strand to SEQ ID NO: 69822
aacuucccagcagaagaca

SEQ ID NO: 69904 - RNA, 19 nt, Artificial Sequence
  Description of Artificial Sequence: Synthetic oligonucleotide
  Sense strand starting at position 959 of SEQ ID NO: 866
gucuucugcugggaaguuu

SEQ ID NO: 69905 - RNA, 19 nt, Artificial Sequence
  Description of Artificial Sequence: Synthetic oligonucleotide
  Antisense strand to SEQ ID NO: 69824
aaacuucccagcagaagac

SEQ ID NO: 69906 - RNA, 19 nt, Artificial Sequence
  Description of Artificial Sequence: Synthetic oligonucleotide
  Sense strand starting at position 2518 of SEQ ID NO: 866
cgcaucuaagaugaacaau

SEQ ID NO: 69907 - RNA, 19 nt, Artificial Sequence
  Description of Artificial Sequence: Synthetic oligonucleotide
  Antisense strand to SEQ ID NO: 69826
auuguucaucuuagaugcg

SEQ ID NO: 69908 - RNA, 19 nt, Artificial Sequence
  Description of Artificial Sequence: Synthetic oligonucleotide
  Sense strand starting at position 2591 of SEQ ID NO: 866
gggaauccagucugaagca

SEQ ID NO: 69909 - RNA, 19 nt, Artificial Sequence
  Description of Artificial Sequence: Synthetic oligonucleotide
  Antisense strand to SEQ ID NO: 69828
ugcuucagacuggauuccc

SEQ ID NO: 69910 - RNA, 19 nt, Artificial Sequence
  Description of Artificial Sequence: Synthetic oligonucleotide
  Sense strand starting at position 2739 of SEQ ID NO: 866
agaaauuguucucucugaa

SEQ ID NO: 69911 - RNA, 19 nt, Artificial Sequence
  Description of Artificial Sequence: Synthetic oligonucleotide
  Antisense strand to SEQ ID NO: 69830
uucagagagaacaauuucu

SEQ ID NO: 69912 - RNA, 19 nt, Artificial Sequence
  Description of Artificial Sequence: Synthetic oligonucleotide
  Sense strand starting at position 3005 of SEQ ID NO: 866
gaggaucgugccugucuuu

SEQ ID NO: 69913 - RNA, 19 nt, Artificial Sequence
  Description of Artificial Sequence: Synthetic oligonucleotide
  Antisense strand to SEQ ID NO: 69832
aaagacaggcacgauccuc

SEQ ID NO: 69914 - RNA, 19 nt, Artificial Sequence
  Description of Artificial Sequence: Synthetic oligonucleotide
  Sense strand starting at position 3127 of SEQ ID NO: 866
cugugucuggaggaaacua

SEQ ID NO: 69915 - RNA, 19 nt, Artificial Sequence
  Description of Artificial Sequence: Synthetic oligonucleotide
  Antisense strand to SEQ ID NO: 69834
uaguuuccuccagacacag

SEQ ID NO: 69916 - RNA, 19 nt, Artificial Sequence
  Description of Artificial Sequence: Synthetic oligonucleotide
  Sense strand starting at position 3302 of SEQ ID NO: 866
uaggguccgucccaugaga

SEQ ID NO: 69917 - RNA, 19 nt, Artificial Sequence
  Description of Artificial Sequence: Synthetic oligonucleotide
  Antisense strand to SEQ ID NO: 69836
ucucaugggacggacccua

SEQ ID NO: 69918 - RNA, 19 nt, Artificial Sequence
  Description of Artificial Sequence: Synthetic oligonucleotide
  Sense strand starting at position 3304 of SEQ ID NO: 866
ggguccgucccaugagaca

SEQ ID NO: 69919 - RNA, 19 nt, Artificial Sequence
  Description of Artificial Sequence: Synthetic oligonucleotide
  Antisense strand to SEQ ID NO: 69838
ugucucaugggacggaccc

SEQ ID NO: 69920 - RNA, 19 nt, Artificial Sequence
  Description of Artificial Sequence: Synthetic oligonucleotide
  Sense strand starting at position 3326 of SEQ ID NO: 866
agaggagugucuguagaga

SEQ ID NO: 69921 - RNA, 19 nt, Artificial Sequence
  Description of Artificial Sequence: Synthetic oligonucleotide
  Antisense strand to SEQ ID NO: 69840
ucucuacagacacuccucu

SEQ ID NO: 69922 - RNA, 19 nt, Artificial Sequence
  Description of Artificial Sequence: Synthetic oligonucleotide
  Sense strand starting at position 3484 of SEQ ID NO: 866
ggugguccugguuauaaau

SEQ ID NO: 69923 - RNA, 19 nt, Artificial Sequence
  Description of Artificial Sequence: Synthetic oligonucleotide
  Antisense strand to SEQ ID NO: 69842
auuuauaaccaggaccacc

SEQ ID NO: 69924 - RNA, 19 nt, Artificial Sequence
  Description of Artificial Sequence: Synthetic oligonucleotide
  Sense strand starting at position 3539 of SEQ ID NO: 866
guaaucaagggugguguuu

SEQ ID NO: 69925 - RNA, 19 nt, Artificial Sequence
  Description of Artificial Sequence: Synthetic oligonucleotide
  Antisense strand to SEQ ID NO: 69844
aaacaccacccuugauuac

SEQ ID NO: 69926 - RNA, 19 nt, Artificial Sequence
  Description of Artificial Sequence: Synthetic oligonucleotide
  Sense strand starting at position 3547 of SEQ ID NO: 866
gggugguguuucuaagugu

SEQ ID NO: 69927 - RNA, 19 nt, Artificial Sequence
  Description of Artificial Sequence: Synthetic oligonucleotide
  Antisense strand to SEQ ID NO: 69846
acacuuagaaacaccaccc

SEQ ID NO: 69928 - RNA, 19 nt, Artificial Sequence
  Description of Artificial Sequence: Synthetic oligonucleotide
  Sense strand starting at position 3548 of SEQ ID NO: 866
ggugguguuucuaaguguc

SEQ ID NO: 69929 - RNA, 19 nt, Artificial Sequence
  Description of Artificial Sequence: Synthetic oligonucleotide
  Antisense strand to SEQ ID NO: 69848
gacacuuagaaacaccacc

SEQ ID NO: 69930 - RNA, 19 nt, Artificial Sequence
  Description of Artificial Sequence: Synthetic oligonucleotide
  Sense strand starting at position 3558 of SEQ ID NO: 866
cuaagugucucgccuguga

SEQ ID NO: 69931 - RNA, 19 nt, Artificial Sequence
  Description of Artificial Sequence: Synthetic oligonucleotide
  Antisense strand to SEQ ID NO: 69850
ucacaggcgagacacuuag

SEQ ID NO: 69932 - RNA, 19 nt, Artificial Sequence
  Description of Artificial Sequence: Synthetic oligonucleotide
  Sense strand starting at position 3560 of SEQ ID NO: 866
aagugucucgccugugacu

SEQ ID NO: 69933 - RNA, 19 nt, Artificial Sequence
  Description of Artificial Sequence: Synthetic oligonucleotide
  Antisense strand to SEQ ID NO: 69852
agucacaggcgagacacuu

SEQ ID NO: 69934 - RNA, 19 nt, Artificial Sequence
  Description of Artificial Sequence: Synthetic oligonucleotide
  Sense strand starting at position 3591 of SEQ ID NO: 866
guagaaacgccacacuuaa

SEQ ID NO: 69935 - RNA, 19 nt, Artificial Sequence
  Description of Artificial Sequence: Synthetic oligonucleotide
  Antisense strand to SEQ ID NO: 69854
uuaaguguggcguuucuac

SEQ ID NO: 69936 - RNA, 19 nt, Artificial Sequence
  Description of Artificial Sequence: Synthetic oligonucleotide
  Sense strand starting at position 3 of SEQ ID NO: 867
ugggccuacuucuuuauca

SEQ ID NO: 69937 - RNA, 19 nt, Artificial Sequence
  Description of Artificial Sequence: Synthetic oligonucleotide
  Antisense strand to SEQ ID NO: 69856
ugauaaagaaguaggccca

SEQ ID NO: 69938 - RNA, 19 nt, Artificial Sequence
  Description of Artificial Sequence: Synthetic oligonucleotide
  Sense strand starting at position 4 of SEQ ID NO: 867
gggccuacuucuuuaucaa

SEQ ID NO: 69939 - RNA, 19 nt, Artificial Sequence
  Description of Artificial Sequence: Synthetic oligonucleotide
  Antisense strand to SEQ ID NO: 69858
uugauaaagaaguaggccc

SEQ ID NO: 69940 - RNA, 19 nt, Artificial Sequence
  Description of Artificial Sequence: Synthetic oligonucleotide
  Sense strand starting at position 54 of SEQ ID NO: 867
ccuagaggguccguaauga

SEQ ID NO: 69941 - RNA, 19 nt, Artificial Sequence
  Description of Artificial Sequence: Synthetic oligonucleotide
  Antisense strand to SEQ ID NO: 69860
ucauuacggacccucuagg

SEQ ID NO: 69942 - RNA, 19 nt, Artificial Sequence
  Description of Artificial Sequence: Synthetic oligonucleotide
  Sense strand starting at position 140 of SEQ ID NO: 867
agguucuguuaccauuaaa

SEQ ID NO: 69943 - RNA, 19 nt, Artificial Sequence
  Description of Artificial Sequence: Synthetic oligonucleotide
  Antisense strand to SEQ ID NO: 69862
uuuaaugguaacagaaccu

SEQ ID NO: 69944 - RNA, 19 nt, Artificial Sequence
  Description of Artificial Sequence: Synthetic oligonucleotide
  Sense strand starting at position 199 of SEQ ID NO: 867
gagaacagguucuugcaaa

SEQ ID NO: 69945 - RNA, 19 nt, Artificial Sequence
  Description of Artificial Sequence: Synthetic oligonucleotide
  Antisense strand to SEQ ID NO: 69864
uuugcaagaaccuguucuc

SEQ ID NO: 69946 - RNA, 19 nt, Artificial Sequence
  Description of Artificial Sequence: Synthetic oligonucleotide
  Sense strand starting at position 200 of SEQ ID NO: 867
agaacagguucuugcaaag

SEQ ID NO: 69947 - RNA, 19 nt, Artificial Sequence
  Description of Artificial Sequence: Synthetic oligonucleotide
  Antisense strand to SEQ ID NO: 69866
cuuugcaagaaccuguucu

SEQ ID NO: 69948 - RNA, 19 nt, Artificial Sequence
  Description of Artificial Sequence: Synthetic oligonucleotide
  Sense strand starting at position 206 of SEQ ID NO: 867
gguucuugcaaagagaggu

SEQ ID NO: 69949 - RNA, 19 nt, Artificial Sequence
  Description of Artificial Sequence: Synthetic oligonucleotide
  Antisense strand to SEQ ID NO: 69868
accucucuuugcaagaacc

SEQ ID NO: 69950 - RNA, 19 nt, Artificial Sequence
  Description of Artificial Sequence: Synthetic oligonucleotide
  Sense strand starting at position 380 of SEQ ID NO: 867
uuuggaugauguguugcaa

SEQ ID NO: 69951 - RNA, 19 nt, Artificial Sequence
  Description of Artificial Sequence: Synthetic oligonucleotide
  Antisense strand to SEQ ID NO: 69870
uugcaacacaucauccaaa

SEQ ID NO: 69952 - RNA, 19 nt, Artificial Sequence
  Description of Artificial Sequence: Synthetic oligonucleotide
  Sense strand starting at position 384 of SEQ ID NO: 867
gaugauguguugcaaagau

SEQ ID NO: 69953 - RNA, 19 nt, Artificial Sequence
  Description of Artificial Sequence: Synthetic oligonucleotide
  Antisense strand to SEQ ID NO: 69872
aucuuugcaacacaucauc

SEQ ID NO: 69954 - RNA, 19 nt, Artificial Sequence
  Description of Artificial Sequence: Synthetic oligonucleotide
  Sense strand starting at position 430 of SEQ ID NO: 867
ucacuuaguuucucaagga

SEQ ID NO: 69955 - RNA, 19 nt, Artificial Sequence
  Description of Artificial Sequence: Synthetic oligonucleotide
  Antisense strand to SEQ ID NO: 69874
uccuugagaaacuaaguga

SEQ ID NO: 69956 - RNA, 19 nt, Artificial Sequence
  Description of Artificial Sequence: Synthetic oligonucleotide
  Sense strand starting at position 498 of SEQ ID NO: 867
guagccuugccgugugaca

SEQ ID NO: 69957 - RNA, 19 nt, Artificial Sequence
  Description of Artificial Sequence: Synthetic oligonucleotide
  Antisense strand to SEQ ID NO: 69876
ugucacacggcaaggcuac

SEQ ID NO: 69958 - RNA, 19 nt, Artificial Sequence
  Description of Artificial Sequence: Synthetic oligonucleotide
  Sense strand starting at position 522 of SEQ ID NO: 867
gugaccugucucugccaaa

SEQ ID NO: 69959 - RNA, 19 nt, Artificial Sequence
  Description of Artificial Sequence: Synthetic oligonucleotide
  Antisense strand to SEQ ID NO: 69878
uuuggcagagacaggucac

SEQ ID NO: 69960 - RNA, 19 nt, Artificial Sequence
  Description of Artificial Sequence: Synthetic oligonucleotide
  Sense strand starting at position 594 of SEQ ID NO: 867
accuauaauuagggcagua

SEQ ID NO: 69961 - RNA, 19 nt, Artificial Sequence
  Description of Artificial Sequence: Synthetic oligonucleotide
  Antisense strand to SEQ ID NO: 69880
uacugcccuaauuauaggu

SEQ ID NO: 69962 - RNA, 19 nt, Artificial Sequence
  Description of Artificial Sequence: Synthetic oligonucleotide
  Sense strand starting at position 618 of SEQ ID NO: 867
ugcucugaucugggagaag

SEQ ID NO: 69963 - RNA, 19 nt, Artificial Sequence
  Description of Artificial Sequence: Synthetic oligonucleotide
  Antisense strand to SEQ ID NO: 69882
cuucucccagaucagagca

SEQ ID NO: 69964 - RNA, 19 nt, Artificial Sequence
  Description of Artificial Sequence: Synthetic oligonucleotide
  Sense strand starting at position 657 of SEQ ID NO: 867
uaggauuccugcccucagu

SEQ ID NO: 69965 - RNA, 19 nt, Artificial Sequence
  Description of Artificial Sequence: Synthetic oligonucleotide
  Antisense strand to SEQ ID NO: 69884
acugagggcaggaauccua

SEQ ID NO: 69966 - RNA, 19 nt, Artificial Sequence
  Description of Artificial Sequence: Synthetic oligonucleotide
  Sense strand starting at position 744 of SEQ ID NO: 867
cagcgaggcuuacuugaaa

SEQ ID NO: 69967 - RNA, 19 nt, Artificial Sequence
  Description of Artificial Sequence: Synthetic oligonucleotide
  Antisense strand to SEQ ID NO: 69886
uuucaaguaagccucgcug

SEQ ID NO: 69968 - RNA, 19 nt, Artificial Sequence
  Description of Artificial Sequence: Synthetic oligonucleotide
  Sense strand starting at position 866 of SEQ ID NO: 867
cucagaauugcugaacucu

SEQ ID NO: 69969 - RNA, 19 nt, Artificial Sequence
  Description of Artificial Sequence: Synthetic oligonucleotide
  Antisense strand to SEQ ID NO: 69888
agaguucagcaauucugag

SEQ ID NO: 69970 - RNA, 19 nt, Artificial Sequence
  Description of Artificial Sequence: Synthetic oligonucleotide
  Sense strand starting at position 874 of SEQ ID NO: 867
ugcugaacucuggaaaguc

SEQ ID NO: 69971 - RNA, 19 nt, Artificial Sequence
  Description of Artificial Sequence: Synthetic oligonucleotide
  Antisense strand to SEQ ID NO: 69890
gacuuuccagaguucagca

SEQ ID NO: 69972 - RNA, 19 nt, Artificial Sequence
  Description of Artificial Sequence: Synthetic oligonucleotide
  Sense strand starting at position 962 of SEQ ID NO: 867
agcacaguccuuuguaaac

SEQ ID NO: 69973 - RNA, 19 nt, Artificial Sequence
  Description of Artificial Sequence: Synthetic oligonucleotide
  Antisense strand to SEQ ID NO: 69892
guuuacaaaggacugugcu

SEQ ID NO: 69974 - RNA, 19 nt, Artificial Sequence
  Description of Artificial Sequence: Synthetic oligonucleotide
  Sense strand starting at position 1530 of SEQ ID NO: 867
ggacgaugcugagguacaa

SEQ ID NO: 69975 - RNA, 19 nt, Artificial Sequence
  Description of Artificial Sequence: Synthetic oligonucleotide
  Antisense strand to SEQ ID NO: 69894
uuguaccucagcaucgucc

SEQ ID NO: 69976 - RNA, 19 nt, Artificial Sequence
  Description of Artificial Sequence: Synthetic oligonucleotide
  Sense strand starting at position 1639 of SEQ ID NO: 867
cgcgaaguucugcagcacu

SEQ ID NO: 69977 - RNA, 19 nt, Artificial Sequence
  Description of Artificial Sequence: Synthetic oligonucleotide
  Antisense strand to SEQ ID NO: 69896
agugcugcagaacuucgcg

SEQ ID NO: 69978 - RNA, 19 nt, Artificial Sequence
  Description of Artificial Sequence: Synthetic oligonucleotide
  Sense strand starting at position 1649 of SEQ ID NO: 867
ugcagcacuccguagaagu

SEQ ID NO: 69979 - RNA, 19 nt, Artificial Sequence
  Description of Artificial Sequence: Synthetic oligonucleotide
  Antisense strand to SEQ ID NO: 69898
acuucuacggagugcugca

SEQ ID NO: 69980 - RNA, 19 nt, Artificial Sequence
  Description of Artificial Sequence: Synthetic oligonucleotide
  Sense strand starting at position 2622 of SEQ ID NO: 867
gacauccaguccugugaga

SEQ ID NO: 69981 - RNA, 19 nt, Artificial Sequence
  Description of Artificial Sequence: Synthetic oligonucleotide
  Antisense strand to SEQ ID NO: 69900
ucucacaggacuggauguc

SEQ ID NO: 69982 - RNA, 19 nt, Artificial Sequence
  Description of Artificial Sequence: Synthetic oligonucleotide
  Sense strand starting at position 2718 of SEQ ID NO: 867
gcgugaggaucagaggcau

SEQ ID NO: 69983 - RNA, 19 nt, Artificial Sequence
  Description of Artificial Sequence: Synthetic oligonucleotide
  Antisense strand to SEQ ID NO: 69902
augccucugauccucacgc

SEQ ID NO: 69984 - RNA, 19 nt, Artificial Sequence
  Description of Artificial Sequence: Synthetic oligonucleotide
  Sense strand starting at position 2730 of SEQ ID NO: 867
gaggcauucuuuccacuag

SEQ ID NO: 69985 - RNA, 19 nt, Artificial Sequence
  Description of Artificial Sequence: Synthetic oligonucleotide
  Antisense strand to SEQ ID NO: 69904
cuaguggaaagaaugccuc

SEQ ID NO: 69986 - RNA, 19 nt, Artificial Sequence
  Description of Artificial Sequence: Synthetic oligonucleotide
  Sense strand starting at position 2753 of SEQ ID NO: 867
agaaacagcucucggguau

SEQ ID NO: 69987 - RNA, 19 nt, Artificial Sequence
  Description of Artificial Sequence: Synthetic oligonucleotide
  Antisense strand to SEQ ID NO: 69906
auacccgagagcuguuucu

SEQ ID NO: 69988 - RNA, 19 nt, Artificial Sequence
  Description of Artificial Sequence: Synthetic oligonucleotide
  Sense strand starting at position 2757 of SEQ ID NO: 867
acagcucucggguaugauc

SEQ ID NO: 69989 - RNA, 19 nt, Artificial Sequence
  Description of Artificial Sequence: Synthetic oligonucleotide
  Antisense strand to SEQ ID NO: 69908
gaucauacccgagagcugu

SEQ ID NO: 69990 - RNA, 19 nt, Artificial Sequence
  Description of Artificial Sequence: Synthetic oligonucleotide
  Sense strand starting at position 2766 of SEQ ID NO: 867
ggguaugauccucauuccu

SEQ ID NO: 69991 - RNA, 19 nt, Artificial Sequence
  Description of Artificial Sequence: Synthetic oligonucleotide
  Antisense strand to SEQ ID NO: 69910
aggaaugaggaucauaccc

SEQ ID NO: 69992 - RNA, 19 nt, Artificial Sequence
  Description of Artificial Sequence: Synthetic oligonucleotide
  Sense strand starting at position 2768 of SEQ ID NO: 867
guaugauccucauuccuuc

SEQ ID NO: 69993 - RNA, 19 nt, Artificial Sequence
  Description of Artificial Sequence: Synthetic oligonucleotide
  Antisense strand to SEQ ID NO: 69912
gaaggaaugaggaucauac

SEQ ID NO: 69994 - RNA, 19 nt, Artificial Sequence
  Description of Artificial Sequence: Synthetic oligonucleotide
  Sense strand starting at position 2789 of SEQ ID NO: 867
ccgugaucccgacguguuc

SEQ ID NO: 69995 - RNA, 19 nt, Artificial Sequence
  Description of Artificial Sequence: Synthetic oligonucleotide
  Antisense strand to SEQ ID NO: 69914
gaacacgucgggaucacgg

SEQ ID NO: 69996 - RNA, 19 nt, Artificial Sequence
  Description of Artificial Sequence: Synthetic oligonucleotide
  Sense strand starting at position 2882 of SEQ ID NO: 867
auagcuaacuaggugugau

SEQ ID NO: 69997 - RNA, 19 nt, Artificial Sequence
  Description of Artificial Sequence: Synthetic oligonucleotide
  Antisense strand to SEQ ID NO: 69916
aucacaccuaguuagcuau

SEQ ID NO: 69998 - RNA, 19 nt, Artificial Sequence
  Description of Artificial Sequence: Synthetic oligonucleotide
  Sense strand starting at position 3091 of SEQ ID NO: 867
ccuuaucccucagcuguua

SEQ ID NO: 69999 - RNA, 19 nt, Artificial Sequence
  Description of Artificial Sequence: Synthetic oligonucleotide
  Antisense strand to SEQ ID NO: 69918
uaacagcugagggauaagg

SEQ ID NO: 70000 - RNA, 19 nt, Artificial Sequence
  Description of Artificial Sequence: Synthetic oligonucleotide
  Sense strand starting at position 3103 of SEQ ID NO: 867
gcuguuagcccucaguucu

SEQ ID NO: 70001 - RNA, 19 nt, Artificial Sequence
  Description of Artificial Sequence: Synthetic oligonucleotide
  Antisense strand to SEQ ID NO: 69920
agaacugagggcuaacagc

SEQ ID NO: 70002 - RNA, 19 nt, Artificial Sequence
  Description of Artificial Sequence: Synthetic oligonucleotide
  Sense strand starting at position 3142 of SEQ ID NO: 867
acucuucuaccguggauuu

SEQ ID NO: 70003 - RNA, 19 nt, Artificial Sequence
  Description of Artificial Sequence: Synthetic oligonucleotide
  Antisense strand to SEQ ID NO: 69922
aaauccacgguagaagagu

SEQ ID NO: 70004 - RNA, 19 nt, Artificial Sequence
  Description of Artificial Sequence: Synthetic oligonucleotide
  Sense strand starting at position 3204 of SEQ ID NO: 867
ggccuuuaugucugacuuu

SEQ ID NO: 70005 - RNA, 19 nt, Artificial Sequence
  Description of Artificial Sequence: Synthetic oligonucleotide
  Antisense strand to SEQ ID NO: 69924
aaagucagacauaaaggcc

SEQ ID NO: 70006 - RNA, 19 nt, Artificial Sequence
  Description of Artificial Sequence: Synthetic oligonucleotide
  Sense strand starting at position 3747 of SEQ ID NO: 867
ucaauucuccuauguguau

SEQ ID NO: 70007 - RNA, 19 nt, Artificial Sequence
  Description of Artificial Sequence: Synthetic oligonucleotide
  Antisense strand to SEQ ID NO: 69926
auacacauaggagaauuga

SEQ ID NO: 70008 - RNA, 19 nt, Artificial Sequence
  Description of Artificial Sequence: Synthetic oligonucleotide
  Sense strand starting at position 3756 of SEQ ID NO: 867
cuauguguauaccuaggaa

SEQ ID NO: 70009 - RNA, 19 nt, Artificial Sequence
  Description of Artificial Sequence: Synthetic oligonucleotide
  Antisense strand to SEQ ID NO: 69928
uuccuagguauacacauag

SEQ ID NO: 70010 - RNA, 19 nt, Artificial Sequence
  Description of Artificial Sequence: Synthetic oligonucleotide
  Sense strand starting at position 3873 of SEQ ID NO: 867
agcaaugaaggucgcaauu

SEQ ID NO: 70011 - RNA, 19 nt, Artificial Sequence
  Description of Artificial Sequence: Synthetic oligonucleotide
  Antisense strand to SEQ ID NO: 69930
aauugcgaccuucauugcu

SEQ ID NO: 70012 - RNA, 19 nt, Artificial Sequence
  Description of Artificial Sequence: Synthetic oligonucleotide
  Sense strand starting at position 3882 of SEQ ID NO: 867
ggucgcaauuucucuacau

SEQ ID NO: 70013 - RNA, 19 nt, Artificial Sequence
  Description of Artificial Sequence: Synthetic oligonucleotide
  Antisense strand to SEQ ID NO: 69932
auguagagaaauugcgacc

SEQ ID NO: 70014 - RNA, 19 nt, Artificial Sequence
  Description of Artificial Sequence: Synthetic oligonucleotide
  Sense strand starting at position 3883 of SEQ ID NO: 867
gucgcaauuucucuacauu

SEQ ID NO: 70015 - RNA, 19 nt, Artificial Sequence
  Description of Artificial Sequence: Synthetic oligonucleotide
  Antisense strand to SEQ ID NO: 69934
aauguagagaaauugcgac

SEQ ID NO: 70016 - RNA, 19 nt, Artificial Sequence
  Description of Artificial Sequence: Synthetic oligonucleotide
  Sense strand starting at position 102 of SEQ ID NO: 869
ggugucuccauuggacaau

SEQ ID NO: 70017 - RNA, 19 nt, Artificial Sequence
  Description of Artificial Sequence: Synthetic oligonucleotide
  Antisense strand to SEQ ID NO: 69936
auuguccaauggagacacc

SEQ ID NO: 70018 - RNA, 19 nt, Artificial Sequence
  Description of Artificial Sequence: Synthetic oligonucleotide
  Sense strand starting at position 129 of SEQ ID NO: 869
ugagguucuuucccuccaa

SEQ ID NO: 70019 - RNA, 19 nt, Artificial Sequence
  Description of Artificial Sequence: Synthetic oligonucleotide
  Antisense strand to SEQ ID NO: 69938
uuggagggaaagaaccuca

SEQ ID NO: 70020 - RNA, 19 nt, Artificial Sequence
  Description of Artificial Sequence: Synthetic oligonucleotide
  Sense strand starting at position 261 of SEQ ID NO: 869
gugauauaaagcgaugcca

SEQ ID NO: 70021 - RNA, 19 nt, Artificial Sequence
  Description of Artificial Sequence: Synthetic oligonucleotide
  Antisense strand to SEQ ID NO: 69940
uggcaucgcuuuauaucac

SEQ ID NO: 70022 - RNA, 19 nt, Artificial Sequence
  Description of Artificial Sequence: Synthetic oligonucleotide
  Sense strand starting at position 292 of SEQ ID NO: 869
gugguuacuggugagcaga

SEQ ID NO: 70023 - RNA, 19 nt, Artificial Sequence
  Description of Artificial Sequence: Synthetic oligonucleotide
  Antisense strand to SEQ ID NO: 69942
ucugcucaccaguaaccac

SEQ ID NO: 70024 - RNA, 19 nt, Artificial Sequence
  Description of Artificial Sequence: Synthetic oligonucleotide
  Sense strand starting at position 1788 of SEQ ID NO: 869
cuguuaauaccacagugaa

SEQ ID NO: 70025 - RNA, 19 nt, Artificial Sequence
  Description of Artificial Sequence: Synthetic oligonucleotide
  Antisense strand to SEQ ID NO: 69944
uucacugugguauuaacag

SEQ ID NO: 70026 - RNA, 19 nt, Artificial Sequence
  Description of Artificial Sequence: Synthetic oligonucleotide
  Sense strand starting at position 2214 of SEQ ID NO: 869
ugaaauccaucugcuuuga

SEQ ID NO: 70027 - RNA, 19 nt, Artificial Sequence
  Description of Artificial Sequence: Synthetic oligonucleotide
  Antisense strand to SEQ ID NO: 69946
ucaaagcagauggauuuca

SEQ ID NO: 70028 - RNA, 19 nt, Artificial Sequence
  Description of Artificial Sequence: Synthetic oligonucleotide
  Sense strand starting at position 2274 of SEQ ID NO: 869
gggagaugcuuccuuaaua

SEQ ID NO: 70029 - RNA, 19 nt, Artificial Sequence
  Description of Artificial Sequence: Synthetic oligonucleotide
  Antisense strand to SEQ ID NO: 69948
uauuaaggaagcaucuccc

SEQ ID NO: 70030 - RNA, 19 nt, Artificial Sequence
  Description of Artificial Sequence: Synthetic oligonucleotide
  Sense strand starting at position 2275 of SEQ ID NO: 869
ggagaugcuuccuuaauau

SEQ ID NO: 70031 - RNA, 19 nt, Artificial Sequence
  Description of Artificial Sequence: Synthetic oligonucleotide
  Antisense strand to SEQ ID NO: 69950
auauuaaggaagcaucucc

SEQ ID NO: 70032 - RNA, 19 nt, Artificial Sequence
  Description of Artificial Sequence: Synthetic oligonucleotide
  Sense strand starting at position 2393 of SEQ ID NO: 869
aaaguaaaugggugccuua

SEQ ID NO: 70033 - RNA, 19 nt, Artificial Sequence
  Description of Artificial Sequence: Synthetic oligonucleotide
  Antisense strand to SEQ ID NO: 69952
uaaggcacccauuuacuuu

SEQ ID NO: 70034 - RNA, 19 nt, Artificial Sequence
  Description of Artificial Sequence: Synthetic oligonucleotide
  Sense strand starting at position 2396 of SEQ ID NO: 869
guaaaugggugccuuaaua

SEQ ID NO: 70035 - RNA, 19 nt, Artificial Sequence
  Description of Artificial Sequence: Synthetic oligonucleotide
  Antisense strand to SEQ ID NO: 69954
uauuaaggcacccauuuac

SEQ ID NO: 70036 - RNA, 19 nt, Artificial Sequence
  Description of Artificial Sequence: Synthetic oligonucleotide
  Sense strand starting at position 2409 of SEQ ID NO: 869
uuaauauuccuaugggaua

SEQ ID NO: 70037 - RNA, 19 nt, Artificial Sequence
  Description of Artificial Sequence: Synthetic oligonucleotide
  Antisense strand to SEQ ID NO: 69956
uaucccauaggaauauuaa

SEQ ID NO: 70038 - RNA, 19 nt, Artificial Sequence
  Description of Artificial Sequence: Synthetic oligonucleotide
  Sense strand starting at position 2457 of SEQ ID NO: 869
ugacgcuccacuuaagagu

SEQ ID NO: 70039 - RNA, 19 nt, Artificial Sequence
  Description of Artificial Sequence: Synthetic oligonucleotide
  Antisense strand to SEQ ID NO: 69958
acucuuaaguggagcguca

SEQ ID NO: 70040 - RNA, 19 nt, Artificial Sequence
  Description of Artificial Sequence: Synthetic oligonucleotide
  Sense strand starting at position 2465 of SEQ ID NO: 869
cacuuaagagucuagguca

SEQ ID NO: 70041 - RNA, 19 nt, Artificial Sequence
  Description of Artificial Sequence: Synthetic oligonucleotide
  Antisense strand to SEQ ID NO: 69960
ugaccuagacucuuaagug

SEQ ID NO: 70042 - RNA, 19 nt, Artificial Sequence
  Description of Artificial Sequence: Synthetic oligonucleotide
  Sense strand starting at position 2601 of SEQ ID NO: 869
gcucuaugagccugaggga

SEQ ID NO: 70043 - RNA, 19 nt, Artificial Sequence
  Description of Artificial Sequence: Synthetic oligonucleotide
  Antisense strand to SEQ ID NO: 69962
ucccucaggcucauagagc

SEQ ID NO: 70044 - RNA, 19 nt, Artificial Sequence
  Description of Artificial Sequence: Synthetic oligonucleotide
  Sense strand starting at position 2610 of SEQ ID NO: 869
gccugagggagugaguuaa

SEQ ID NO: 70045 - RNA, 19 nt, Artificial Sequence
  Description of Artificial Sequence: Synthetic oligonucleotide
  Antisense strand to SEQ ID NO: 69964
uuaacucacucccucaggc

SEQ ID NO: 70046 - RNA, 19 nt, Artificial Sequence
  Description of Artificial Sequence: Synthetic oligonucleotide
  Sense strand starting at position 2669 of SEQ ID NO: 869
auacuuuccuaucuguaga

SEQ ID NO: 70047 - RNA, 19 nt, Artificial Sequence
  Description of Artificial Sequence: Synthetic oligonucleotide
  Antisense strand to SEQ ID NO: 69966
ucuacagauaggaaaguau

SEQ ID NO: 70048 - RNA, 19 nt, Artificial Sequence
  Description of Artificial Sequence: Synthetic oligonucleotide
  Sense strand starting at position 2672 of SEQ ID NO: 869
cuuuccuaucuguagaguu

SEQ ID NO: 70049 - RNA, 19 nt, Artificial Sequence
  Description of Artificial Sequence: Synthetic oligonucleotide
  Antisense strand to SEQ ID NO: 69968
aacucuacagauaggaaag

SEQ ID NO: 70050 - RNA, 19 nt, Artificial Sequence
  Description of Artificial Sequence: Synthetic oligonucleotide
  Sense strand starting at position 2697 of SEQ ID NO: 869
guuaaaugaggucauguaa

SEQ ID NO: 70051 - RNA, 19 nt, Artificial Sequence
  Description of Artificial Sequence: Synthetic oligonucleotide
  Antisense strand to SEQ ID NO: 69970
uuacaugaccucauuuaac

SEQ ID NO: 70052 - RNA, 19 nt, Artificial Sequence
  Description of Artificial Sequence: Synthetic oligonucleotide
  Sense strand starting at position 2704 of SEQ ID NO: 869
gaggucauguaaguaaauc

SEQ ID NO: 70053 - RNA, 19 nt, Artificial Sequence
  Description of Artificial Sequence: Synthetic oligonucleotide
  Antisense strand to SEQ ID NO: 69972
gauuuacuuacaugaccuc

SEQ ID NO: 70054 - RNA, 19 nt, Artificial Sequence
  Description of Artificial Sequence: Synthetic oligonucleotide
  Sense strand starting at position 2712 of SEQ ID NO: 869
guaaguaaaucauccagug

SEQ ID NO: 70055 - RNA, 19 nt, Artificial Sequence
  Description of Artificial Sequence: Synthetic oligonucleotide
  Antisense strand to SEQ ID NO: 69974
cacuggaugauuuacuuac

SEQ ID NO: 70056 - RNA, 19 nt, Artificial Sequence
  Description of Artificial Sequence: Synthetic oligonucleotide
  Sense strand starting at position 2763 of SEQ ID NO: 869
auugguauucacgaaaggu

SEQ ID NO: 70057 - RNA, 19 nt, Artificial Sequence
  Description of Artificial Sequence: Synthetic oligonucleotide
  Antisense strand to SEQ ID NO: 69976
accuuucgugaauaccaau

SEQ ID NO: 70058 - RNA, 19 nt, Artificial Sequence
  Description of Artificial Sequence: Synthetic oligonucleotide
  Sense strand starting at position 2860 of SEQ ID NO: 869
ccauccaugaugcgaaaga

SEQ ID NO: 70059 - RNA, 19 nt, Artificial Sequence
  Description of Artificial Sequence: Synthetic oligonucleotide
  Antisense strand to SEQ ID NO: 69978
ucuuucgcaucauggaugg

SEQ ID NO: 70060 - RNA, 19 nt, Artificial Sequence
  Description of Artificial Sequence: Synthetic oligonucleotide
  Sense strand starting at position 3012 of SEQ ID NO: 869
agcucauaagcucagaacu

SEQ ID NO: 70061 - RNA, 19 nt, Artificial Sequence
  Description of Artificial Sequence: Synthetic oligonucleotide
  Antisense strand to SEQ ID NO: 69980
aguucugagcuuaugagcu

SEQ ID NO: 70062 - RNA, 19 nt, Artificial Sequence
  Description of Artificial Sequence: Synthetic oligonucleotide
  Sense strand starting at position 3033 of SEQ ID NO: 869
cugugcauucagggaugga

SEQ ID NO: 70063 - RNA, 19 nt, Artificial Sequence
  Description of Artificial Sequence: Synthetic oligonucleotide
  Antisense strand to SEQ ID NO: 69982
uccaucccugaaugcacag

SEQ ID NO: 70064 - RNA, 19 nt, Artificial Sequence
  Description of Artificial Sequence: Synthetic oligonucleotide
  Sense strand starting at position 3107 of SEQ ID NO: 869
ggagcuaauauugagcuau

SEQ ID NO: 70065 - RNA, 19 nt, Artificial Sequence
  Description of Artificial Sequence: Synthetic oligonucleotide
  Antisense strand to SEQ ID NO: 69984
auagcucaauauuagcucc

SEQ ID NO: 70066 - RNA, 19 nt, Artificial Sequence
  Description of Artificial Sequence: Synthetic oligonucleotide
  Sense strand starting at position 3109 of SEQ ID NO: 869
agcuaauauugagcuauga

SEQ ID NO: 70067 - RNA, 19 nt, Artificial Sequence
  Description of Artificial Sequence: Synthetic oligonucleotide
  Antisense strand to SEQ ID NO: 69986
ucauagcucaauauuagcu

SEQ ID NO: 70068 - RNA, 19 nt, Artificial Sequence
  Description of Artificial Sequence: Synthetic oligonucleotide
  Sense strand starting at position 3117 of SEQ ID NO: 869
uugagcuaugagcagaauu

SEQ ID NO: 70069 - RNA, 19 nt, Artificial Sequence
  Description of Artificial Sequence: Synthetic oligonucleotide
  Antisense strand to SEQ ID NO: 69988
aauucugcucauagcucaa

SEQ ID NO: 70070 - RNA, 19 nt, Artificial Sequence
  Description of Artificial Sequence: Synthetic oligonucleotide
  Sense strand starting at position 3192 of SEQ ID NO: 869
aucauuguauaggugacaa

SEQ ID NO: 70071 - RNA, 19 nt, Artificial Sequence
  Description of Artificial Sequence: Synthetic oligonucleotide
  Antisense strand to SEQ ID NO: 69990
uugucaccuauacaaugau

SEQ ID NO: 70072 - RNA, 19 nt, Artificial Sequence
  Description of Artificial Sequence: Synthetic oligonucleotide
  Sense strand starting at position 3200 of SEQ ID NO: 869
auaggugacaauugugaaa

SEQ ID NO: 70073 - RNA, 19 nt, Artificial Sequence
  Description of Artificial Sequence: Synthetic oligonucleotide
  Antisense strand to SEQ ID NO: 69992
uuucacaauugucaccuau

SEQ ID NO: 70074 - RNA, 19 nt, Artificial Sequence
  Description of Artificial Sequence: Synthetic oligonucleotide
  Sense strand starting at position 3440 of SEQ ID NO: 869
agucuagcaguccacauaa

SEQ ID NO: 70075 - RNA, 19 nt, Artificial Sequence
  Description of Artificial Sequence: Synthetic oligonucleotide
  Antisense strand to SEQ ID NO: 69994
uuauguggacugcuagacu

SEQ ID NO: 70076 - RNA, 19 nt, Artificial Sequence
  Description of Artificial Sequence: Synthetic oligonucleotide
  Sense strand starting at position 3495 of SEQ ID NO: 869
uuccacauggaauguuauu

SEQ ID NO: 70077 - RNA, 19 nt, Artificial Sequence
  Description of Artificial Sequence: Synthetic oligonucleotide
  Antisense strand to SEQ ID NO: 69996
aauaacauuccauguggaa

SEQ ID NO: 70078 - RNA, 19 nt, Artificial Sequence
  Description of Artificial Sequence: Synthetic oligonucleotide
  Sense strand starting at position 3579 of SEQ ID NO: 869
agagaagucuucccugaug

SEQ ID NO: 70079 - RNA, 19 nt, Artificial Sequence
  Description of Artificial Sequence: Synthetic oligonucleotide
  Antisense strand to SEQ ID NO: 69998
caucagggaagacuucucu

SEQ ID NO: 70080 - RNA, 19 nt, Artificial Sequence
  Description of Artificial Sequence: Synthetic oligonucleotide
  Sense strand starting at position 3826 of SEQ ID NO: 869
acaguaugccuccacugau

SEQ ID NO: 70081 - RNA, 19 nt, Artificial Sequence
  Description of Artificial Sequence: Synthetic oligonucleotide
  Antisense strand to SEQ ID NO: 70000
aucaguggaggcauacugu

SEQ ID NO: 70082 - RNA, 19 nt, Artificial Sequence
  Description of Artificial Sequence: Synthetic oligonucleotide
  Sense strand starting at position 3829 of SEQ ID NO: 869
guaugccuccacugauaga

SEQ ID NO: 70083 - RNA, 19 nt, Artificial Sequence
  Description of Artificial Sequence: Synthetic oligonucleotide
  Antisense strand to SEQ ID NO: 70002
ucuaucaguggaggcauac

SEQ ID NO: 70084 - RNA, 19 nt, Artificial Sequence
  Description of Artificial Sequence: Synthetic oligonucleotide
  Sense strand starting at position 3872 of SEQ ID NO: 869
uggaaacuucccugaaacu

SEQ ID NO: 70085 - RNA, 19 nt, Artificial Sequence
  Description of Artificial Sequence: Synthetic oligonucleotide
  Antisense strand to SEQ ID NO: 70004
aguuucagggaaguuucca

SEQ ID NO: 70086 - RNA, 19 nt, Artificial Sequence
  Description of Artificial Sequence: Synthetic oligonucleotide
  Sense strand starting at position 3895 of SEQ ID NO: 869
ugccucuggacugaucaga

SEQ ID NO: 70087 - RNA, 19 nt, Artificial Sequence
  Description of Artificial Sequence: Synthetic oligonucleotide
  Antisense strand to SEQ ID NO: 70006
ucugaucaguccagaggca

SEQ ID NO: 70088 - RNA, 19 nt, Artificial Sequence
  Description of Artificial Sequence: Synthetic oligonucleotide
  Sense strand starting at position 3945 of SEQ ID NO: 869
auugaaucaguauggguuu

SEQ ID NO: 70089 - RNA, 19 nt, Artificial Sequence
  Description of Artificial Sequence: Synthetic oligonucleotide
  Antisense strand to SEQ ID NO: 70008
aaacccauacugauucaau

SEQ ID NO: 70090 - RNA, 19 nt, Artificial Sequence
  Description of Artificial Sequence: Synthetic oligonucleotide
  Sense strand starting at position 3947 of SEQ ID NO: 869
ugaaucaguauggguuuau

SEQ ID NO: 70091 - RNA, 19 nt, Artificial Sequence
  Description of Artificial Sequence: Synthetic oligonucleotide
  Antisense strand to SEQ ID NO: 70010
auaaacccauacugauuca

SEQ ID NO: 70092 - RNA, 19 nt, Artificial Sequence
  Description of Artificial Sequence: Synthetic oligonucleotide
  Sense strand starting at position 3948 of SEQ ID NO: 869
gaaucaguauggguuuauu

SEQ ID NO: 70093 - RNA, 19 nt, Artificial Sequence
  Description of Artificial Sequence: Synthetic oligonucleotide
  Antisense strand to SEQ ID NO: 70012
aauaaacccauacugauuc

SEQ ID NO: 70094 - RNA, 19 nt, Artificial Sequence
  Description of Artificial Sequence: Synthetic oligonucleotide
  Sense strand starting at position 3958 of SEQ ID NO: 869
ggguuuauuucuguuacuu

SEQ ID NO: 70095 - RNA, 19 nt, Artificial Sequence
  Description of Artificial Sequence: Synthetic oligonucleotide
  Antisense strand to SEQ ID NO: 70014
aaguaacagaaauaaaccc

SEQ ID NO: 70096 - RNA, 19 nt, Artificial Sequence
  Description of Artificial Sequence: Synthetic oligonucleotide
  Sense strand starting at position 46 of SEQ ID NO: 870
gcaguagcucuccagaacu

SEQ ID NO: 70097 - RNA, 19 nt, Artificial Sequence
  Description of Artificial Sequence: Synthetic oligonucleotide
  Antisense strand to SEQ ID NO: 70016
aguucuggagagcuacugc

SEQ ID NO: 70098 - RNA, 19 nt, Artificial Sequence
  Description of Artificial Sequence: Synthetic oligonucleotide
  Sense strand starting at position 48 of SEQ ID NO: 870
aguagcucuccagaacuca

SEQ ID NO: 70099 - RNA, 19 nt, Artificial Sequence
  Description of Artificial Sequence: Synthetic oligonucleotide
  Antisense strand to SEQ ID NO: 70018
ugaguucuggagagcuacu

SEQ ID NO: 70100 - RNA, 19 nt, Artificial Sequence
  Description of Artificial Sequence: Synthetic oligonucleotide
  Sense strand starting at position 57 of SEQ ID NO: 870
ccagaacucaucuggaggu

SEQ ID NO: 70101 - RNA, 19 nt, Artificial Sequence
  Description of Artificial Sequence: Synthetic oligonucleotide
  Antisense strand to SEQ ID NO: 70020
accuccagaugaguucugg

SEQ ID NO: 70102 - RNA, 19 nt, Artificial Sequence
  Description of Artificial Sequence: Synthetic oligonucleotide
  Sense strand starting at position 196 of SEQ ID NO: 870
ggugucuccauuggacaau

SEQ ID NO: 70103 - RNA, 19 nt, Artificial Sequence
  Description of Artificial Sequence: Synthetic oligonucleotide
  Antisense strand to SEQ ID NO: 70022
auuguccaauggagacacc

SEQ ID NO: 70104 - RNA, 19 nt, Artificial Sequence
  Description of Artificial Sequence: Synthetic oligonucleotide
  Sense strand starting at position 223 of SEQ ID NO: 870
ugagguucuuucccuccaa

SEQ ID NO: 70105 - RNA, 19 nt, Artificial Sequence
  Description of Artificial Sequence: Synthetic oligonucleotide
  Antisense strand to SEQ ID NO: 70024
uuggagggaaagaaccuca

SEQ ID NO: 70106 - RNA, 19 nt, Artificial Sequence
  Description of Artificial Sequence: Synthetic oligonucleotide
  Sense strand starting at position 355 of SEQ ID NO: 870
gugauauaaagcgaugcca

SEQ ID NO: 70107 - RNA, 19 nt, Artificial Sequence
  Description of Artificial Sequence: Synthetic oligonucleotide
  Antisense strand to SEQ ID NO: 70026
uggcaucgcuuuauaucac

SEQ ID NO: 70108 - RNA, 19 nt, Artificial Sequence
  Description of Artificial Sequence: Synthetic oligonucleotide
  Sense strand starting at position 386 of SEQ ID NO: 870
gugguuacuggugagcaga

SEQ ID NO: 70109 - RNA, 19 nt, Artificial Sequence
  Description of Artificial Sequence: Synthetic oligonucleotide
  Antisense strand to SEQ ID NO: 70028
ucugcucaccaguaaccac

SEQ ID NO: 70110 - RNA, 19 nt, Artificial Sequence
  Description of Artificial Sequence: Synthetic oligonucleotide
  Sense strand starting at position 1882 of SEQ ID NO: 870
cuguuaauaccacagugaa

SEQ ID NO: 70111 - RNA, 19 nt, Artificial Sequence
  Description of Artificial Sequence: Synthetic oligonucleotide
  Antisense strand to SEQ ID NO: 70030
uucacugugguauuaacag

SEQ ID NO: 70112 - RNA, 19 nt, Artificial Sequence
  Description of Artificial Sequence: Synthetic oligonucleotide
  Sense strand starting at position 2308 of SEQ ID NO: 870
ugaaauccaucugcuuuga

SEQ ID NO: 70113 - RNA, 19 nt, Artificial Sequence
  Description of Artificial Sequence: Synthetic oligonucleotide
  Antisense strand to SEQ ID NO: 70032
ucaaagcagauggauuuca

SEQ ID NO: 70114 - RNA, 19 nt, Artificial Sequence
  Description of Artificial Sequence: Synthetic oligonucleotide
  Sense strand starting at position 2368 of SEQ ID NO: 870
gggagaugcuuccuuaaua

SEQ ID NO: 70115 - RNA, 19 nt, Artificial Sequence
  Description of Artificial Sequence: Synthetic oligonucleotide
  Antisense strand to SEQ ID NO: 70034
uauuaaggaagcaucuccc

SEQ ID NO: 70116 - RNA, 19 nt, Artificial Sequence
  Description of Artificial Sequence: Synthetic oligonucleotide
  Sense strand starting at position 2369 of SEQ ID NO: 870
ggagaugcuuccuuaauau

SEQ ID NO: 70117 - RNA, 19 nt, Artificial Sequence
  Description of Artificial Sequence: Synthetic oligonucleotide
  Antisense strand to SEQ ID NO: 70036
auauuaaggaagcaucucc

SEQ ID NO: 70118 - RNA, 19 nt, Artificial Sequence
  Description of Artificial Sequence: Synthetic oligonucleotide
  Sense strand starting at position 2487 of SEQ ID NO: 870
aaaguaaaugggugccuua

SEQ ID NO: 70119 - RNA, 19 nt, Artificial Sequence
  Description of Artificial Sequence: Synthetic oligonucleotide
  Antisense strand to SEQ ID NO: 70038
uaaggcacccauuuacuuu

SEQ ID NO: 70120 - RNA, 19 nt, Artificial Sequence
  Description of Artificial Sequence: Synthetic oligonucleotide
  Sense strand starting at position 2490 of SEQ ID NO: 870
guaaaugggugccuuaaua

SEQ ID NO: 70121 - RNA, 19 nt, Artificial Sequence
  Description of Artificial Sequence: Synthetic oligonucleotide
  Antisense strand to SEQ ID NO: 70040
uauuaaggcacccauuuac

SEQ ID NO: 70122 - RNA, 19 nt, Artificial Sequence
  Description of Artificial Sequence: Synthetic oligonucleotide
  Sense strand starting at position 2503 of SEQ ID NO: 870
uuaauauuccuaugggaua

SEQ ID NO: 70123 - RNA, 19 nt, Artificial Sequence
  Description of Artificial Sequence: Synthetic oligonucleotide
  Antisense strand to SEQ ID NO: 70042
uaucccauaggaauauuaa

SEQ ID NO: 70124 - RNA, 19 nt, Artificial Sequence
  Description of Artificial Sequence: Synthetic oligonucleotide
  Sense strand starting at position 2551 of SEQ ID NO: 870
ugacgcuccacuuaagagu

SEQ ID NO: 70125 - RNA, 19 nt, Artificial Sequence
  Description of Artificial Sequence: Synthetic oligonucleotide
  Antisense strand to SEQ ID NO: 70044
acucuuaaguggagcguca

SEQ ID NO: 70126 - RNA, 19 nt, Artificial Sequence
  Description of Artificial Sequence: Synthetic oligonucleotide
  Sense strand starting at position 2559 of SEQ ID NO: 870
cacuuaagagucuagguca

SEQ ID NO: 70127 - RNA, 19 nt, Artificial Sequence
  Description of Artificial Sequence: Synthetic oligonucleotide
  Antisense strand to SEQ ID NO: 70046
ugaccuagacucuuaagug

SEQ ID NO: 70128 - RNA, 19 nt, Artificial Sequence
  Description of Artificial Sequence: Synthetic oligonucleotide
  Sense strand starting at position 2695 of SEQ ID NO: 870
gcucuaugagccugaggga

SEQ ID NO: 70129 - RNA, 19 nt, Artificial Sequence
  Description of Artificial Sequence: Synthetic oligonucleotide
  Antisense strand to SEQ ID NO: 70048
ucccucaggcucauagagc

SEQ ID NO: 70130 - RNA, 19 nt, Artificial Sequence
  Description of Artificial Sequence: Synthetic oligonucleotide
  Sense strand starting at position 2704 of SEQ ID NO: 870
gccugagggagugaguuaa

SEQ ID NO: 70131 - RNA, 19 nt, Artificial Sequence
  Description of Artificial Sequence: Synthetic oligonucleotide
  Antisense strand to SEQ ID NO: 70050
uuaacucacucccucaggc

SEQ ID NO: 70132 - RNA, 19 nt, Artificial Sequence
  Description of Artificial Sequence: Synthetic oligonucleotide
  Sense strand starting at position 2763 of SEQ ID NO: 870
auacuuuccuaucuguaga

SEQ ID NO: 70133 - RNA, 19 nt, Artificial Sequence
  Description of Artificial Sequence: Synthetic oligonucleotide
  Antisense strand to SEQ ID NO: 70052
ucuacagauaggaaaguau

SEQ ID NO: 70134 - RNA, 19 nt, Artificial Sequence
  Description of Artificial Sequence: Synthetic oligonucleotide
  Sense strand starting at position 2766 of SEQ ID NO: 870
cuuuccuaucuguagaguu

SEQ ID NO: 70135 - RNA, 19 nt, Artificial Sequence
  Description of Artificial Sequence: Synthetic oligonucleotide
  Antisense strand to SEQ ID NO: 70054
aacucuacagauaggaaag

SEQ ID NO: 70136 - RNA, 19 nt, Artificial Sequence
  Description of Artificial Sequence: Synthetic oligonucleotide
  Sense strand starting at position 2791 of SEQ ID NO: 870
guuaaaugaggucauguaa

SEQ ID NO: 70137 - RNA, 19 nt, Artificial Sequence
  Description of Artificial Sequence: Synthetic oligonucleotide
  Antisense strand to SEQ ID NO: 70056
uuacaugaccucauuuaac

SEQ ID NO: 70138 - RNA, 19 nt, Artificial Sequence
  Description of Artificial Sequence: Synthetic oligonucleotide
  Sense strand starting at position 2798 of SEQ ID NO: 870
gaggucauguaaguaaauc

SEQ ID NO: 70139 - RNA, 19 nt, Artificial Sequence
  Description of Artificial Sequence: Synthetic oligonucleotide
  Antisense strand to SEQ ID NO: 70058
gauuuacuuacaugaccuc

SEQ ID NO: 70140 - RNA, 19 nt, Artificial Sequence
  Description of Artificial Sequence: Synthetic oligonucleotide
  Sense strand starting at position 2806 of SEQ ID NO: 870
guaaguaaaucauccagug

SEQ ID NO: 70141 - RNA, 19 nt, Artificial Sequence
  Description of Artificial Sequence: Synthetic oligonucleotide
  Antisense strand to SEQ ID NO: 70060
cacuggaugauuuacuuac

SEQ ID NO: 70142 - RNA, 19 nt, Artificial Sequence
  Description of Artificial Sequence: Synthetic oligonucleotide
  Sense strand starting at position 2857 of SEQ ID NO: 870
auugguauucacgaaaggu

SEQ ID NO: 70143 - RNA, 19 nt, Artificial Sequence
  Description of Artificial Sequence: Synthetic oligonucleotide
  Antisense strand to SEQ ID NO: 70062
accuuucgugaauaccaau

SEQ ID NO: 70144 - RNA, 19 nt, Artificial Sequence
  Description of Artificial Sequence: Synthetic oligonucleotide
  Sense strand starting at position 2902 of SEQ ID NO: 870
uggugagaaugagaauaaa

SEQ ID NO: 70145 - RNA, 19 nt, Artificial Sequence
  Description of Artificial Sequence: Synthetic oligonucleotide
  Antisense strand to SEQ ID NO: 70064
uuuauucucauucucacca

SEQ ID NO: 70146 - RNA, 19 nt, Artificial Sequence
  Description of Artificial Sequence: Synthetic oligonucleotide
  Sense strand starting at position 2954 of SEQ ID NO: 870
ccauccaugaugcgaaaga

SEQ ID NO: 70147 - RNA, 19 nt, Artificial Sequence
  Description of Artificial Sequence: Synthetic oligonucleotide
  Antisense strand to SEQ ID NO: 70066
ucuuucgcaucauggaugg

SEQ ID NO: 70148 - RNA, 19 nt, Artificial Sequence
  Description of Artificial Sequence: Synthetic oligonucleotide
  Sense strand starting at position 3106 of SEQ ID NO: 870
agcucauaagcucagaacu

SEQ ID NO: 70149 - RNA, 19 nt, Artificial Sequence
  Description of Artificial Sequence: Synthetic oligonucleotide
  Antisense strand to SEQ ID NO: 70068
aguucugagcuuaugagcu

SEQ ID NO: 70150 - RNA, 19 nt, Artificial Sequence
  Description of Artificial Sequence: Synthetic oligonucleotide
  Sense strand starting at position 3127 of SEQ ID NO: 870
cugugcauucagggaugga

SEQ ID NO: 70151 - RNA, 19 nt, Artificial Sequence
  Description of Artificial Sequence: Synthetic oligonucleotide
  Antisense strand to SEQ ID NO: 70070
uccaucccugaaugcacag

SEQ ID NO: 70152 - RNA, 19 nt, Artificial Sequence
  Description of Artificial Sequence: Synthetic oligonucleotide
  Sense strand starting at position 3201 of SEQ ID NO: 870
ggagcuaauauugagcuau

SEQ ID NO: 70153 - RNA, 19 nt, Artificial Sequence
  Description of Artificial Sequence: Synthetic oligonucleotide
  Antisense strand to SEQ ID NO: 70072
auagcucaauauuagcucc

SEQ ID NO: 70154 - RNA, 19 nt, Artificial Sequence
  Description of Artificial Sequence: Synthetic oligonucleotide
  Sense strand starting at position 3203 of SEQ ID NO: 870
agcuaauauugagcuauga

SEQ ID NO: 70155 - RNA, 19 nt, Artificial Sequence
  Description of Artificial Sequence: Synthetic oligonucleotide
  Antisense strand to SEQ ID NO: 70074
ucauagcucaauauuagcu

SEQ ID NO: 70156 - RNA, 19 nt, Artificial Sequence
  Description of Artificial Sequence: Synthetic oligonucleotide
  Sense strand starting at position 3211 of SEQ ID NO: 870
uugagcuaugagcagaauu

SEQ ID NO: 70157 - RNA, 19 nt, Artificial Sequence
  Description of Artificial Sequence: Synthetic oligonucleotide
  Antisense strand to SEQ ID NO: 70076
aauucugcucauagcucaa

SEQ ID NO: 70158 - RNA, 19 nt, Artificial Sequence
  Description of Artificial Sequence: Synthetic oligonucleotide
  Sense strand starting at position 3279 of SEQ ID NO: 870
accguauaucauuguauag

SEQ ID NO: 70159 - RNA, 19 nt, Artificial Sequence
  Description of Artificial Sequence: Synthetic oligonucleotide
  Antisense strand to SEQ ID NO: 70078
cuauacaaugauauacggu

SEQ ID NO: 70160 - RNA, 19 nt, Artificial Sequence
  Description of Artificial Sequence: Synthetic oligonucleotide
  Sense strand starting at position 3286 of SEQ ID NO: 870
aucauuguauaggugacaa

SEQ ID NO: 70161 - RNA, 19 nt, Artificial Sequence
  Description of Artificial Sequence: Synthetic oligonucleotide
  Antisense strand to SEQ ID NO: 70080
uugucaccuauacaaugau

SEQ ID NO: 70162 - RNA, 19 nt, Artificial Sequence
  Description of Artificial Sequence: Synthetic oligonucleotide
  Sense strand starting at position 3294 of SEQ ID NO: 870
auaggugacaauugugaaa

SEQ ID NO: 70163 - RNA, 19 nt, Artificial Sequence
  Description of Artificial Sequence: Synthetic oligonucleotide
  Antisense strand to SEQ ID NO: 70082
uuucacaauugucaccuau

SEQ ID NO: 70164 - RNA, 19 nt, Artificial Sequence
  Description of Artificial Sequence: Synthetic oligonucleotide
  Sense strand starting at position 3534 of SEQ ID NO: 870
agucuagcaguccacauaa

SEQ ID NO: 70165 - RNA, 19 nt, Artificial Sequence
  Description of Artificial Sequence: Synthetic oligonucleotide
  Antisense strand to SEQ ID NO: 70084
uuauguggacugcuagacu

SEQ ID NO: 70166 - RNA, 19 nt, Artificial Sequence
  Description of Artificial Sequence: Synthetic oligonucleotide
  Sense strand starting at position 3589 of SEQ ID NO: 870
uuccacauggaauguuauu

SEQ ID NO: 70167 - RNA, 19 nt, Artificial Sequence
  Description of Artificial Sequence: Synthetic oligonucleotide
  Antisense strand to SEQ ID NO: 70086
aauaacauuccauguggaa

SEQ ID NO: 70168 - RNA, 19 nt, Artificial Sequence
  Description of Artificial Sequence: Synthetic oligonucleotide
  Sense strand starting at position 3673 of SEQ ID NO: 870
agagaagucuucccugaug

SEQ ID NO: 70169 - RNA, 19 nt, Artificial Sequence
  Description of Artificial Sequence: Synthetic oligonucleotide
  Antisense strand to SEQ ID NO: 70088
caucagggaagacuucucu

SEQ ID NO: 70170 - RNA, 19 nt, Artificial Sequence
  Description of Artificial Sequence: Synthetic oligonucleotide
  Sense strand starting at position 3920 of SEQ ID NO: 870
acaguaugccuccacugau

SEQ ID NO: 70171 - RNA, 19 nt, Artificial Sequence
  Description of Artificial Sequence: Synthetic oligonucleotide
  Antisense strand to SEQ ID NO: 70090
aucaguggaggcauacugu

SEQ ID NO: 70172 - RNA, 19 nt, Artificial Sequence
  Description of Artificial Sequence: Synthetic oligonucleotide
  Sense strand starting at position 3923 of SEQ ID NO: 870
guaugccuccacugauaga

SEQ ID NO: 70173 - RNA, 19 nt, Artificial Sequence
  Description of Artificial Sequence: Synthetic oligonucleotide
  Antisense strand to SEQ ID NO: 70092
ucuaucaguggaggcauac

SEQ ID NO: 70174 - RNA, 19 nt, Artificial Sequence
  Description of Artificial Sequence: Synthetic oligonucleotide
  Sense strand starting at position 3966 of SEQ ID NO: 870
uggaaacuucccugaaacu

SEQ ID NO: 70175 - RNA, 19 nt, Artificial Sequence
  Description of Artificial Sequence: Synthetic oligonucleotide
  Antisense strand to SEQ ID NO: 70094
aguuucagggaaguuucca

SEQ ID NO: 70176 - RNA, 19 nt, Artificial Sequence
  Description of Artificial Sequence: Synthetic oligonucleotide
  Sense strand starting at position 31 of SEQ ID NO: 868
acugauagcuaucucuagu

SEQ ID NO: 70177 - RNA, 19 nt, Artificial Sequence
  Description of Artificial Sequence: Synthetic oligonucleotide
  Antisense strand to SEQ ID NO: 70096
acuagagauagcuaucagu

SEQ ID NO: 70178 - RNA, 19 nt, Artificial Sequence
  Description of Artificial Sequence: Synthetic oligonucleotide
  Sense strand starting at position 44 of SEQ ID NO: 868
ucuaguucuguugauguuu

SEQ ID NO: 70179 - RNA, 19 nt, Artificial Sequence
  Description of Artificial Sequence: Synthetic oligonucleotide
  Antisense strand to SEQ ID NO: 70098
aaacaucaacagaacuaga

SEQ ID NO: 70180 - RNA, 19 nt, Artificial Sequence
  Description of Artificial Sequence: Synthetic oligonucleotide
  Sense strand starting at position 478 of SEQ ID NO: 868
gcugacauuuaggucaguu

SEQ ID NO: 70181 - RNA, 19 nt, Artificial Sequence
  Description of Artificial Sequence: Synthetic oligonucleotide
  Antisense strand to SEQ ID NO: 70100
aacugaccuaaaugucagc

SEQ ID NO: 70182 - RNA, 19 nt, Artificial Sequence
  Description of Artificial Sequence: Synthetic oligonucleotide
  Sense strand starting at position 611 of SEQ ID NO: 868
aagagaacgguucggauau

SEQ ID NO: 70183 - RNA, 19 nt, Artificial Sequence
  Description of Artificial Sequence: Synthetic oligonucleotide
  Antisense strand to SEQ ID NO: 70102
auauccgaaccguucucuu

SEQ ID NO: 70184 - RNA, 19 nt, Artificial Sequence
  Description of Artificial Sequence: Synthetic oligonucleotide
  Sense strand starting at position 680 of SEQ ID NO: 868
gggucucuauucuugaugu

SEQ ID NO: 70185 - RNA, 19 nt, Artificial Sequence
  Description of Artificial Sequence: Synthetic oligonucleotide
  Antisense strand to SEQ ID NO: 70104
acaucaagaauagagaccc

SEQ ID NO: 70186 - RNA, 19 nt, Artificial Sequence
  Description of Artificial Sequence: Synthetic oligonucleotide
  Sense strand starting at position 682 of SEQ ID NO: 868
gucucuauucuugauguua

SEQ ID NO: 70187 - RNA, 19 nt, Artificial Sequence
  Description of Artificial Sequence: Synthetic oligonucleotide
  Antisense strand to SEQ ID NO: 70106
uaacaucaagaauagagac

SEQ ID NO: 70188 - RNA, 19 nt, Artificial Sequence
  Description of Artificial Sequence: Synthetic oligonucleotide
  Sense strand starting at position 820 of SEQ ID NO: 868
uaccuagcugggcaagaau

SEQ ID NO: 70189 - RNA, 19 nt, Artificial Sequence
  Description of Artificial Sequence: Synthetic oligonucleotide
  Antisense strand to SEQ ID NO: 70108
auucuugcccagcuaggua

SEQ ID NO: 70190 - RNA, 19 nt, Artificial Sequence
  Description of Artificial Sequence: Synthetic oligonucleotide
  Sense strand starting at position 898 of SEQ ID NO: 868
aagguuguugugugaauga

SEQ ID NO: 70191 - RNA, 19 nt, Artificial Sequence
  Description of Artificial Sequence: Synthetic oligonucleotide
  Antisense strand to SEQ ID NO: 70110
ucauucacacaacaaccuu

SEQ ID NO: 70192 - RNA, 19 nt, Artificial Sequence
  Description of Artificial Sequence: Synthetic oligonucleotide
  Sense strand starting at position 925 of SEQ ID NO: 868
acaugaaagugcuuguaag

SEQ ID NO: 70193 - RNA, 19 nt, Artificial Sequence
  Description of Artificial Sequence: Synthetic oligonucleotide
  Antisense strand to SEQ ID NO: 70112
cuuacaagcacuuucaugu

SEQ ID NO: 70194 - RNA, 19 nt, Artificial Sequence
  Description of Artificial Sequence: Synthetic oligonucleotide
  Sense strand starting at position 993 of SEQ ID NO: 868
ggugcucugaaagaaguaa

SEQ ID NO: 70195 - RNA, 19 nt, Artificial Sequence
  Description of Artificial Sequence: Synthetic oligonucleotide
  Antisense strand to SEQ ID NO: 70114
uuacuucuuucagagcacc

SEQ ID NO: 70196 - RNA, 19 nt, Artificial Sequence
  Description of Artificial Sequence: Synthetic oligonucleotide
  Sense strand starting at position 1044 of SEQ ID NO: 868
ugaagagccucugucucua

SEQ ID NO: 70197 - RNA, 19 nt, Artificial Sequence
  Description of Artificial Sequence: Synthetic oligonucleotide
  Antisense strand to SEQ ID NO: 70116
uagagacagaggcucuuca

SEQ ID NO: 70198 - RNA, 19 nt, Artificial Sequence
  Description of Artificial Sequence: Synthetic oligonucleotide
  Sense strand starting at position 1183 of SEQ ID NO: 868
gcaguagcucuccagaacu

SEQ ID NO: 70199 - RNA, 19 nt, Artificial Sequence
  Description of Artificial Sequence: Synthetic oligonucleotide
  Antisense strand to SEQ ID NO: 70118
aguucuggagagcuacugc

SEQ ID NO: 70200 - RNA, 19 nt, Artificial Sequence
  Description of Artificial Sequence: Synthetic oligonucleotide
  Sense strand starting at position 1185 of SEQ ID NO: 868
aguagcucuccagaacuca

SEQ ID NO: 70201 - RNA, 19 nt, Artificial Sequence
  Description of Artificial Sequence: Synthetic oligonucleotide
  Antisense strand to SEQ ID NO: 70120
ugaguucuggagagcuacu

SEQ ID NO: 70202 - RNA, 19 nt, Artificial Sequence
  Description of Artificial Sequence: Synthetic oligonucleotide
  Sense strand starting at position 1194 of SEQ ID NO: 868
ccagaacucaucuggaggu

SEQ ID NO: 70203 - RNA, 19 nt, Artificial Sequence
  Description of Artificial Sequence: Synthetic oligonucleotide
  Antisense strand to SEQ ID NO: 70122
accuccagaugaguucugg

SEQ ID NO: 70204 - RNA, 19 nt, Artificial Sequence
  Description of Artificial Sequence: Synthetic oligonucleotide
  Sense strand starting at position 1333 of SEQ ID NO: 868
ggugucuccauuggacaau

SEQ ID NO: 70205 - RNA, 19 nt, Artificial Sequence
  Description of Artificial Sequence: Synthetic oligonucleotide
  Antisense strand to SEQ ID NO: 70124
auuguccaauggagacacc

SEQ ID NO: 70206 - RNA, 19 nt, Artificial Sequence
  Description of Artificial Sequence: Synthetic oligonucleotide
  Sense strand starting at position 1360 of SEQ ID NO: 868
ugagguucuuucccuccaa

SEQ ID NO: 70207 - RNA, 19 nt, Artificial Sequence
  Description of Artificial Sequence: Synthetic oligonucleotide
  Antisense strand to SEQ ID NO: 70126
uuggagggaaagaaccuca

SEQ ID NO: 70208 - RNA, 19 nt, Artificial Sequence
  Description of Artificial Sequence: Synthetic oligonucleotide
  Sense strand starting at position 1492 of SEQ ID NO: 868
gugauauaaagcgaugcca

SEQ ID NO: 70209 - RNA, 19 nt, Artificial Sequence
  Description of Artificial Sequence: Synthetic oligonucleotide
  Antisense strand to SEQ ID NO: 70128
uggcaucgcuuuauaucac

SEQ ID NO: 70210 - RNA, 19 nt, Artificial Sequence
  Description of Artificial Sequence: Synthetic oligonucleotide
  Sense strand starting at position 1523 of SEQ ID NO: 868
gugguuacuggugagcaga

SEQ ID NO: 70211 - RNA, 19 nt, Artificial Sequence
  Description of Artificial Sequence: Synthetic oligonucleotide
  Antisense strand to SEQ ID NO: 70130
ucugcucaccaguaaccac

SEQ ID NO: 70212 - RNA, 19 nt, Artificial Sequence
  Description of Artificial Sequence: Synthetic oligonucleotide
  Sense strand starting at position 1621 of SEQ ID NO: 868
ggguuaagcuuggcccaga

SEQ ID NO: 70213 - RNA, 19 nt, Artificial Sequence
  Description of Artificial Sequence: Synthetic oligonucleotide
  Antisense strand to SEQ ID NO: 70132
ucugggccaagcuuaaccc

SEQ ID NO: 70214 - RNA, 19 nt, Artificial Sequence
  Description of Artificial Sequence: Synthetic oligonucleotide
  Sense strand starting at position 1622 of SEQ ID NO: 868
gguuaagcuuggcccagaa

SEQ ID NO: 70215 - RNA, 19 nt, Artificial Sequence
  Description of Artificial Sequence: Synthetic oligonucleotide
  Antisense strand to SEQ ID NO: 70134
uucugggccaagcuuaacc

SEQ ID NO: 70216 - RNA, 19 nt, Artificial Sequence
  Description of Artificial Sequence: Synthetic oligonucleotide
  Sense strand starting at position 2762 of SEQ ID NO: 868
cuuuguggugccuaacuca

SEQ ID NO: 70217 - RNA, 19 nt, Artificial Sequence
  Description of Artificial Sequence: Synthetic oligonucleotide
  Antisense strand to SEQ ID NO: 70136
ugaguuaggcaccacaaag

SEQ ID NO: 70218 - RNA, 19 nt, Artificial Sequence
  Description of Artificial Sequence: Synthetic oligonucleotide
  Sense strand starting at position 3019 of SEQ ID NO: 868
cuguuaauaccacagugaa

SEQ ID NO: 70219 - RNA, 19 nt, Artificial Sequence
  Description of Artificial Sequence: Synthetic oligonucleotide
  Antisense strand to SEQ ID NO: 70138
uucacugugguauuaacag

SEQ ID NO: 70220 - RNA, 19 nt, Artificial Sequence
  Description of Artificial Sequence: Synthetic oligonucleotide
  Sense strand starting at position 3034 of SEQ ID NO: 868
ugaauucgucccgaagcca

SEQ ID NO: 70221 - RNA, 19 nt, Artificial Sequence
  Description of Artificial Sequence: Synthetic oligonucleotide
  Antisense strand to SEQ ID NO: 70140
uggcuucgggacgaauuca

SEQ ID NO: 70222 - RNA, 19 nt, Artificial Sequence
  Description of Artificial Sequence: Synthetic oligonucleotide
  Sense strand starting at position 3418 of SEQ ID NO: 868
gugcuuagagcaggauuca

SEQ ID NO: 70223 - RNA, 19 nt, Artificial Sequence
  Description of Artificial Sequence: Synthetic oligonucleotide
  Antisense strand to SEQ ID NO: 70142
ugaauccugcucuaagcac

SEQ ID NO: 70224 - RNA, 19 nt, Artificial Sequence
  Description of Artificial Sequence: Synthetic oligonucleotide
  Sense strand starting at position 3445 of SEQ ID NO: 868
ugaaauccaucugcuuuga

SEQ ID NO: 70225 - RNA, 19 nt, Artificial Sequence
  Description of Artificial Sequence: Synthetic oligonucleotide
  Antisense strand to SEQ ID NO: 70144
ucaaagcagauggauuuca

SEQ ID NO: 70226 - RNA, 19 nt, Artificial Sequence
  Description of Artificial Sequence: Synthetic oligonucleotide
  Sense strand starting at position 3505 of SEQ ID NO: 868
gggagaugcuuccuuaaua

SEQ ID NO: 70227 - RNA, 19 nt, Artificial Sequence
  Description of Artificial Sequence: Synthetic oligonucleotide
  Antisense strand to SEQ ID NO: 70146
uauuaaggaagcaucuccc

SEQ ID NO: 70228 - RNA, 19 nt, Artificial Sequence
  Description of Artificial Sequence: Synthetic oligonucleotide
  Sense strand starting at position 3506 of SEQ ID NO: 868
ggagaugcuuccuuaauau

SEQ ID NO: 70229 - RNA, 19 nt, Artificial Sequence
  Description of Artificial Sequence: Synthetic oligonucleotide
  Antisense strand to SEQ ID NO: 70148
auauuaaggaagcaucucc

SEQ ID NO: 70230 - RNA, 19 nt, Artificial Sequence
  Description of Artificial Sequence: Synthetic oligonucleotide
  Sense strand starting at position 3624 of SEQ ID NO: 868
aaaguaaaugggugccuua

SEQ ID NO: 70231 - RNA, 19 nt, Artificial Sequence
  Description of Artificial Sequence: Synthetic oligonucleotide
  Antisense strand to SEQ ID NO: 70150
uaaggcacccauuuacuuu

SEQ ID NO: 70232 - RNA, 19 nt, Artificial Sequence
  Description of Artificial Sequence: Synthetic oligonucleotide
  Sense strand starting at position 3627 of SEQ ID NO: 868
guaaaugggugccuuaaua

SEQ ID NO: 70233 - RNA, 19 nt, Artificial Sequence
  Description of Artificial Sequence: Synthetic oligonucleotide
  Antisense strand to SEQ ID NO: 70152
uauuaaggcacccauuuac

SEQ ID NO: 70234 - RNA, 19 nt, Artificial Sequence
  Description of Artificial Sequence: Synthetic oligonucleotide
  Sense strand starting at position 3640 of SEQ ID NO: 868
uuaauauuccuaugggaua

SEQ ID NO: 70235 - RNA, 19 nt, Artificial Sequence
  Description of Artificial Sequence: Synthetic oligonucleotide
  Antisense strand to SEQ ID NO: 70154
uaucccauaggaauauuaa

SEQ ID NO: 70236 - RNA, 19 nt, Artificial Sequence
  Description of Artificial Sequence: Synthetic oligonucleotide
  Sense strand starting at position 3688 of SEQ ID NO: 868
ugacgcuccacuuaagagu

SEQ ID NO: 70237 - RNA, 19 nt, Artificial Sequence
  Description of Artificial Sequence: Synthetic oligonucleotide
  Antisense strand to SEQ ID NO: 70156
acucuuaaguggagcguca

SEQ ID NO: 70238 - RNA, 19 nt, Artificial Sequence
  Description of Artificial Sequence: Synthetic oligonucleotide
  Sense strand starting at position 3696 of SEQ ID NO: 868
cacuuaagagucuagguca

SEQ ID NO: 70239 - RNA, 19 nt, Artificial Sequence
  Description of Artificial Sequence: Synthetic oligonucleotide
  Antisense strand to SEQ ID NO: 70158
ugaccuagacucuuaagug

SEQ ID NO: 70240 - RNA, 19 nt, Artificial Sequence
  Description of Artificial Sequence: Synthetic oligonucleotide
  Sense strand starting at position 3746 of SEQ ID NO: 868
agcuuucuguucuuaauag

SEQ ID NO: 70241 - RNA, 19 nt, Artificial Sequence
  Description of Artificial Sequence: Synthetic oligonucleotide
  Antisense strand to SEQ ID NO: 70160
cuauuaagaacagaaagcu

SEQ ID NO: 70242 - RNA, 19 nt, Artificial Sequence
  Description of Artificial Sequence: Synthetic oligonucleotide
  Sense strand starting at position 3832 of SEQ ID NO: 868
gcucuaugagccugaggga

SEQ ID NO: 70243 - RNA, 19 nt, Artificial Sequence
  Description of Artificial Sequence: Synthetic oligonucleotide
  Antisense strand to SEQ ID NO: 70162
ucccucaggcucauagagc

SEQ ID NO: 70244 - RNA, 19 nt, Artificial Sequence
  Description of Artificial Sequence: Synthetic oligonucleotide
  Sense strand starting at position 3841 of SEQ ID NO: 868
gccugagggagugaguuaa

SEQ ID NO: 70245 - RNA, 19 nt, Artificial Sequence
  Description of Artificial Sequence: Synthetic oligonucleotide
  Antisense strand to SEQ ID NO: 70164
uuaacucacucccucaggc

SEQ ID NO: 70246 - RNA, 19 nt, Artificial Sequence
  Description of Artificial Sequence: Synthetic oligonucleotide
  Sense strand starting at position 3900 of SEQ ID NO: 868
auacuuuccuaucuguaga

SEQ ID NO: 70247 - RNA, 19 nt, Artificial Sequence
  Description of Artificial Sequence: Synthetic oligonucleotide
  Antisense strand to SEQ ID NO: 70166
ucuacagauaggaaaguau

SEQ ID NO: 70248 - RNA, 19 nt, Artificial Sequence
  Description of Artificial Sequence: Synthetic oligonucleotide
  Sense strand starting at position 3903 of SEQ ID NO: 868
cuuuccuaucuguagaguu

SEQ ID NO: 70249 - RNA, 19 nt, Artificial Sequence
  Description of Artificial Sequence: Synthetic oligonucleotide
  Antisense strand to SEQ ID NO: 70168
aacucuacagauaggaaag

SEQ ID NO: 70250 - RNA, 19 nt, Artificial Sequence
  Description of Artificial Sequence: Synthetic oligonucleotide
  Sense strand starting at position 3928 of SEQ ID NO: 868
guuaaaugaggucauguaa

SEQ ID NO: 70251 - RNA, 19 nt, Artificial Sequence
  Description of Artificial Sequence: Synthetic oligonucleotide
  Antisense strand to SEQ ID NO: 70170
uuacaugaccucauuuaac

SEQ ID NO: 70252 - RNA, 19 nt, Artificial Sequence
  Description of Artificial Sequence: Synthetic oligonucleotide
  Sense strand starting at position 3935 of SEQ ID NO: 868
gaggucauguaaguaaauc

SEQ ID NO: 70253 - RNA, 19 nt, Artificial Sequence
  Description of Artificial Sequence: Synthetic oligonucleotide
  Antisense strand to SEQ ID NO: 70172
gauuuacuuacaugaccuc

SEQ ID NO: 70254 - RNA, 19 nt, Artificial Sequence
  Description of Artificial Sequence: Synthetic oligonucleotide
  Sense strand starting at position 3943 of SEQ ID NO: 868
guaaguaaaucauccagug

SEQ ID NO: 70255 - RNA, 19 nt, Artificial Sequence
  Description of Artificial Sequence: Synthetic oligonucleotide
  Antisense strand to SEQ ID NO: 70174
cacuggaugauuuacuuac

SEQ ID NO: 70256 - RNA, 19 nt, Artificial Sequence
  Description of Artificial Sequence: Synthetic oligonucleotide
  Sense strand starting at position 207 of SEQ ID NO: 871
gcugacauuuaggucaguu

SEQ ID NO: 70257 - RNA, 19 nt, Artificial Sequence
  Description of Artificial Sequence: Synthetic oligonucleotide
  Antisense strand to SEQ ID NO: 70176
aacugaccuaaaugucagc

SEQ ID NO: 70258 - RNA, 19 nt, Artificial Sequence
  Description of Artificial Sequence: Synthetic oligonucleotide
  Sense strand starting at position 340 of SEQ ID NO: 871
aagagaacgguucggauau

SEQ ID NO: 70259 - RNA, 19 nt, Artificial Sequence
  Description of Artificial Sequence: Synthetic oligonucleotide
  Antisense strand to SEQ ID NO: 70178
auauccgaaccguucucuu

SEQ ID NO: 70260 - RNA, 19 nt, Artificial Sequence
  Description of Artificial Sequence: Synthetic oligonucleotide
  Sense strand starting at position 409 of SEQ ID NO: 871
gggucucuauucuugaugu

SEQ ID NO: 70261 - RNA, 19 nt, Artificial Sequence
  Description of Artificial Sequence: Synthetic oligonucleotide
  Antisense strand to SEQ ID NO: 70180
acaucaagaauagagaccc

SEQ ID NO: 70262 - RNA, 19 nt, Artificial Sequence
  Description of Artificial Sequence: Synthetic oligonucleotide
  Sense strand starting at position 411 of SEQ ID NO: 871
gucucuauucuugauguua

SEQ ID NO: 70263 - RNA, 19 nt, Artificial Sequence
  Description of Artificial Sequence: Synthetic oligonucleotide
  Antisense strand to SEQ ID NO: 70182
uaacaucaagaauagagac

SEQ ID NO: 70264 - RNA, 19 nt, Artificial Sequence
  Description of Artificial Sequence: Synthetic oligonucleotide
  Sense strand starting at position 549 of SEQ ID NO: 871
uaccuagcugggcaagaau

SEQ ID NO: 70265 - RNA, 19 nt, Artificial Sequence
  Description of Artificial Sequence: Synthetic oligonucleotide
  Antisense strand to SEQ ID NO: 70184
auucuugcccagcuaggua

SEQ ID NO: 70266 - RNA, 19 nt, Artificial Sequence
  Description of Artificial Sequence: Synthetic oligonucleotide
  Sense strand starting at position 627 of SEQ ID NO: 871
aagguuguugugugaauga

SEQ ID NO: 70267 - RNA, 19 nt, Artificial Sequence
  Description of Artificial Sequence: Synthetic oligonucleotide
  Antisense strand to SEQ ID NO: 70186
ucauucacacaacaaccuu

SEQ ID NO: 70268 - RNA, 19 nt, Artificial Sequence
  Description of Artificial Sequence: Synthetic oligonucleotide
  Sense strand starting at position 654 of SEQ ID NO: 871
acaugaaagugcuuguaag

SEQ ID NO: 70269 - RNA, 19 nt, Artificial Sequence
  Description of Artificial Sequence: Synthetic oligonucleotide
  Antisense strand to SEQ ID NO: 70188
cuuacaagcacuuucaugu

SEQ ID NO: 70270 - RNA, 19 nt, Artificial Sequence
  Description of Artificial Sequence: Synthetic oligonucleotide
  Sense strand starting at position 722 of SEQ ID NO: 871
ggugcucugaaagaaguaa

SEQ ID NO: 70271 - RNA, 19 nt, Artificial Sequence
  Description of Artificial Sequence: Synthetic oligonucleotide
  Antisense strand to SEQ ID NO: 70190
uuacuucuuucagagcacc

SEQ ID NO: 70272 - RNA, 19 nt, Artificial Sequence
  Description of Artificial Sequence: Synthetic oligonucleotide
  Sense strand starting at position 773 of SEQ ID NO: 871
ugaagagccucugucucua

SEQ ID NO: 70273 - RNA, 19 nt, Artificial Sequence
  Description of Artificial Sequence: Synthetic oligonucleotide
  Antisense strand to SEQ ID NO: 70192
uagagacagaggcucuuca

SEQ ID NO: 70274 - RNA, 19 nt, Artificial Sequence
  Description of Artificial Sequence: Synthetic oligonucleotide
  Sense strand starting at position 912 of SEQ ID NO: 871
gcaguagcucuccagaacu

SEQ ID NO: 70275 - RNA, 19 nt, Artificial Sequence
  Description of Artificial Sequence: Synthetic oligonucleotide
  Antisense strand to SEQ ID NO: 70194
aguucuggagagcuacugc

SEQ ID NO: 70276 - RNA, 19 nt, Artificial Sequence
  Description of Artificial Sequence: Synthetic oligonucleotide
  Sense strand starting at position 914 of SEQ ID NO: 871
aguagcucuccagaacuca

SEQ ID NO: 70277 - RNA, 19 nt, Artificial Sequence
  Description of Artificial Sequence: Synthetic oligonucleotide
  Antisense strand to SEQ ID NO: 70196
ugaguucuggagagcuacu

SEQ ID NO: 70278 - RNA, 19 nt, Artificial Sequence
  Description of Artificial Sequence: Synthetic oligonucleotide
  Sense strand starting at position 923 of SEQ ID NO: 871
ccagaacucaucuggaggu

SEQ ID NO: 70279 - RNA, 19 nt, Artificial Sequence
  Description of Artificial Sequence: Synthetic oligonucleotide
  Antisense strand to SEQ ID NO: 70198
accuccagaugaguucugg

SEQ ID NO: 70280 - RNA, 19 nt, Artificial Sequence
  Description of Artificial Sequence: Synthetic oligonucleotide
  Sense strand starting at position 1062 of SEQ ID NO: 871
ggugucuccauuggacaau

SEQ ID NO: 70281 - RNA, 19 nt, Artificial Sequence
  Description of Artificial Sequence: Synthetic oligonucleotide
  Antisense strand to SEQ ID NO: 70200
auuguccaauggagacacc

SEQ ID NO: 70282 - RNA, 19 nt, Artificial Sequence
  Description of Artificial Sequence: Synthetic oligonucleotide
  Sense strand starting at position 1089 of SEQ ID NO: 871
ugagguucuuucccuccaa

SEQ ID NO: 70283 - RNA, 19 nt, Artificial Sequence
  Description of Artificial Sequence: Synthetic oligonucleotide
  Antisense strand to SEQ ID NO: 70202
uuggagggaaagaaccuca

SEQ ID NO: 70284 - RNA, 19 nt, Artificial Sequence
  Description of Artificial Sequence: Synthetic oligonucleotide
  Sense strand starting at position 1221 of SEQ ID NO: 871
gugauauaaagcgaugcca

SEQ ID NO: 70285 - RNA, 19 nt, Artificial Sequence
  Description of Artificial Sequence: Synthetic oligonucleotide
  Antisense strand to SEQ ID NO: 70204
uggcaucgcuuuauaucac

SEQ ID NO: 70286 - RNA, 19 nt, Artificial Sequence
  Description of Artificial Sequence: Synthetic oligonucleotide
  Sense strand starting at position 1252 of SEQ ID NO: 871
gugguuacuggugagcaga

SEQ ID NO: 70287 - RNA, 19 nt, Artificial Sequence
  Description of Artificial Sequence: Synthetic oligonucleotide
  Antisense strand to SEQ ID NO: 70206
ucugcucaccaguaaccac

SEQ ID NO: 70288 - RNA, 19 nt, Artificial Sequence
  Description of Artificial Sequence: Synthetic oligonucleotide
  Sense strand starting at position 1351 of SEQ ID NO: 871
gguuaagcuuggcccagaa

SEQ ID NO: 70289 - RNA, 19 nt, Artificial Sequence
  Description of Artificial Sequence: Synthetic oligonucleotide
  Antisense strand to SEQ ID NO: 70208
uucugggccaagcuuaacc

SEQ ID NO: 70290 - RNA, 19 nt, Artificial Sequence
  Description of Artificial Sequence: Synthetic oligonucleotide
  Sense strand starting at position 2491 of SEQ ID NO: 871
cuuuguggugccuaacuca

SEQ ID NO: 70291 - RNA, 19 nt, Artificial Sequence
  Description of Artificial Sequence: Synthetic oligonucleotide
  Antisense strand to SEQ ID NO: 70210
ugaguuaggcaccacaaag

SEQ ID NO: 70292 - RNA, 19 nt, Artificial Sequence
  Description of Artificial Sequence: Synthetic oligonucleotide
  Sense strand starting at position 2748 of SEQ ID NO: 871
cuguuaauaccacagugaa

SEQ ID NO: 70293 - RNA, 19 nt, Artificial Sequence
  Description of Artificial Sequence: Synthetic oligonucleotide
  Antisense strand to SEQ ID NO: 70212
uucacugugguauuaacag

SEQ ID NO: 70294 - RNA, 19 nt, Artificial Sequence
  Description of Artificial Sequence: Synthetic oligonucleotide
  Sense strand starting at position 2763 of SEQ ID NO: 871
ugaauucgucccgaagcca

SEQ ID NO: 70295 - RNA, 19 nt, Artificial Sequence
  Description of Artificial Sequence: Synthetic oligonucleotide
  Antisense strand to SEQ ID NO: 70214
uggcuucgggacgaauuca

SEQ ID NO: 70296 - RNA, 19 nt, Artificial Sequence
  Description of Artificial Sequence: Synthetic oligonucleotide
  Sense strand starting at position 3147 of SEQ ID NO: 871
gugcuuagagcaggauuca

SEQ ID NO: 70297 - RNA, 19 nt, Artificial Sequence
  Description of Artificial Sequence: Synthetic oligonucleotide
  Antisense strand to SEQ ID NO: 70216
ugaauccugcucuaagcac

SEQ ID NO: 70298 - RNA, 19 nt, Artificial Sequence
  Description of Artificial Sequence: Synthetic oligonucleotide
  Sense strand starting at position 3174 of SEQ ID NO: 871
ugaaauccaucugcuuuga

SEQ ID NO: 70299 - RNA, 19 nt, Artificial Sequence
  Description of Artificial Sequence: Synthetic oligonucleotide
  Antisense strand to SEQ ID NO: 70218
ucaaagcagauggauuuca

SEQ ID NO: 70300 - RNA, 19 nt, Artificial Sequence
  Description of Artificial Sequence: Synthetic oligonucleotide
  Sense strand starting at position 3234 of SEQ ID NO: 871
gggagaugcuuccuuaaua

SEQ ID NO: 70301 - RNA, 19 nt, Artificial Sequence
  Description of Artificial Sequence: Synthetic oligonucleotide
  Antisense strand to SEQ ID NO: 70220
uauuaaggaagcaucuccc

SEQ ID NO: 70302 - RNA, 19 nt, Artificial Sequence
  Description of Artificial Sequence: Synthetic oligonucleotide
  Sense strand starting at position 3235 of SEQ ID NO: 871
ggagaugcuuccuuaauau

SEQ ID NO: 70303 - RNA, 19 nt, Artificial Sequence
  Description of Artificial Sequence: Synthetic oligonucleotide
  Antisense strand to SEQ ID NO: 70222
auauuaaggaagcaucucc

SEQ ID NO: 70304 - RNA, 19 nt, Artificial Sequence
  Description of Artificial Sequence: Synthetic oligonucleotide
  Sense strand starting at position 3353 of SEQ ID NO: 871
aaaguaaaugggugccuua

SEQ ID NO: 70305 - RNA, 19 nt, Artificial Sequence
  Description of Artificial Sequence: Synthetic oligonucleotide
  Antisense strand to SEQ ID NO: 70224
uaaggcacccauuuacuuu

SEQ ID NO: 70306 - RNA, 19 nt, Artificial Sequence
  Description of Artificial Sequence: Synthetic oligonucleotide
  Sense strand starting at position 3356 of SEQ ID NO: 871
guaaaugggugccuuaaua

SEQ ID NO: 70307 - RNA, 19 nt, Artificial Sequence
  Description of Artificial Sequence: Synthetic oligonucleotide
  Antisense strand to SEQ ID NO: 70226
uauuaaggcacccauuuac

SEQ ID NO: 70308 - RNA, 19 nt, Artificial Sequence
  Description of Artificial Sequence: Synthetic oligonucleotide
  Sense strand starting at position 3369 of SEQ ID NO: 871
uuaauauuccuaugggaua

SEQ ID NO: 70309 - RNA, 19 nt, Artificial Sequence
  Description of Artificial Sequence: Synthetic oligonucleotide
  Antisense strand to SEQ ID NO: 70228
uaucccauaggaauauuaa

SEQ ID NO: 70310 - RNA, 19 nt, Artificial Sequence
  Description of Artificial Sequence: Synthetic oligonucleotide
  Sense strand starting at position 3417 of SEQ ID NO: 871
ugacgcuccacuuaagagu

SEQ ID NO: 70311 - RNA, 19 nt, Artificial Sequence
  Description of Artificial Sequence: Synthetic oligonucleotide
  Antisense strand to SEQ ID NO: 70230
acucuuaaguggagcguca

SEQ ID NO: 70312 - RNA, 19 nt, Artificial Sequence
  Description of Artificial Sequence: Synthetic oligonucleotide
  Sense strand starting at position 3425 of SEQ ID NO: 871
cacuuaagagucuagguca

SEQ ID NO: 70313 - RNA, 19 nt, Artificial Sequence
  Description of Artificial Sequence: Synthetic oligonucleotide
  Antisense strand to SEQ ID NO: 70232
ugaccuagacucuuaagug

SEQ ID NO: 70314 - RNA, 19 nt, Artificial Sequence
  Description of Artificial Sequence: Synthetic oligonucleotide
  Sense strand starting at position 3561 of SEQ ID NO: 871
gcucuaugagccugaggga

SEQ ID NO: 70315 - RNA, 19 nt, Artificial Sequence
  Description of Artificial Sequence: Synthetic oligonucleotide
  Antisense strand to SEQ ID NO: 70234
ucccucaggcucauagagc

SEQ ID NO: 70316 - RNA, 19 nt, Artificial Sequence
  Description of Artificial Sequence: Synthetic oligonucleotide
  Sense strand starting at position 3570 of SEQ ID NO: 871
gccugagggagugaguuaa

SEQ ID NO: 70317 - RNA, 19 nt, Artificial Sequence
  Description of Artificial Sequence: Synthetic oligonucleotide
  Antisense strand to SEQ ID NO: 70236
uuaacucacucccucaggc

SEQ ID NO: 70318 - RNA, 19 nt, Artificial Sequence
  Description of Artificial Sequence: Synthetic oligonucleotide
  Sense strand starting at position 3629 of SEQ ID NO: 871
auacuuuccuaucuguaga

SEQ ID NO: 70319 - RNA, 19 nt, Artificial Sequence
  Description of Artificial Sequence: Synthetic oligonucleotide
  Antisense strand to SEQ ID NO: 70238
ucuacagauaggaaaguau

SEQ ID NO: 70320 - RNA, 19 nt, Artificial Sequence
  Description of Artificial Sequence: Synthetic oligonucleotide
  Sense strand starting at position 3632 of SEQ ID NO: 871
cuuuccuaucuguagaguu

SEQ ID NO: 70321 - RNA, 19 nt, Artificial Sequence
  Description of Artificial Sequence: Synthetic oligonucleotide
  Antisense strand to SEQ ID NO: 70240
aacucuacagauaggaaag

SEQ ID NO: 70322 - RNA, 19 nt, Artificial Sequence
  Description of Artificial Sequence: Synthetic oligonucleotide
  Sense strand starting at position 3657 of SEQ ID NO: 871
guuaaaugaggucauguaa

SEQ ID NO: 70323 - RNA, 19 nt, Artificial Sequence
  Description of Artificial Sequence: Synthetic oligonucleotide
  Antisense strand to SEQ ID NO: 70242
uuacaugaccucauuuaac

SEQ ID NO: 70324 - RNA, 19 nt, Artificial Sequence
  Description of Artificial Sequence: Synthetic oligonucleotide
  Sense strand starting at position 3664 of SEQ ID NO: 871
gaggucauguaaguaaauc

SEQ ID NO: 70325 - RNA, 19 nt, Artificial Sequence
  Description of Artificial Sequence: Synthetic oligonucleotide
  Antisense strand to SEQ ID NO: 70244
gauuuacuuacaugaccuc

SEQ ID NO: 70326 - RNA, 19 nt, Artificial Sequence
  Description of Artificial Sequence: Synthetic oligonucleotide
  Sense strand starting at position 3672 of SEQ ID NO: 871
guaaguaaaucauccagug

SEQ ID NO: 70327 - RNA, 19 nt, Artificial Sequence
  Description of Artificial Sequence: Synthetic oligonucleotide
  Antisense strand to SEQ ID NO: 70246
cacuggaugauuuacuuac

SEQ ID NO: 70328 - RNA, 19 nt, Artificial Sequence
  Description of Artificial Sequence: Synthetic oligonucleotide
  Sense strand starting at position 3723 of SEQ ID NO: 871
auugguauucacgaaaggu

SEQ ID NO: 70329 - RNA, 19 nt, Artificial Sequence
  Description of Artificial Sequence: Synthetic oligonucleotide
  Antisense strand to SEQ ID NO: 70248
accuuucgugaauaccaau

SEQ ID NO: 70330 - RNA, 19 nt, Artificial Sequence
  Description of Artificial Sequence: Synthetic oligonucleotide
  Sense strand starting at position 3768 of SEQ ID NO: 871
uggugagaaugagaauaaa

SEQ ID NO: 70331 - RNA, 19 nt, Artificial Sequence
  Description of Artificial Sequence: Synthetic oligonucleotide
  Antisense strand to SEQ ID NO: 70250
uuuauucucauucucacca

SEQ ID NO: 70332 - RNA, 19 nt, Artificial Sequence
  Description of Artificial Sequence: Synthetic oligonucleotide
  Sense strand starting at position 3820 of SEQ ID NO: 871
ccauccaugaugcgaaaga

SEQ ID NO: 70333 - RNA, 19 nt, Artificial Sequence
  Description of Artificial Sequence: Synthetic oligonucleotide
  Antisense strand to SEQ ID NO: 70252
ucuuucgcaucauggaugg

SEQ ID NO: 70334 - RNA, 19 nt, Artificial Sequence
  Description of Artificial Sequence: Synthetic oligonucleotide
  Sense strand starting at position 3972 of SEQ ID NO: 871
agcucauaagcucagaacu

SEQ ID NO: 70335 - RNA, 19 nt, Artificial Sequence
  Description of Artificial Sequence: Synthetic oligonucleotide
  Antisense strand to SEQ ID NO: 70254
aguucugagcuuaugagcu

SEQ ID NO: 70336 - RNA, 19 nt, Artificial Sequence
  Description of Artificial Sequence: Synthetic oligonucleotide
  Sense strand starting at position 3876 of SEQ ID NO: 872
ggguuucucugcuuaggga

SEQ ID NO: 70337 - RNA, 19 nt, Artificial Sequence
  Description of Artificial Sequence: Synthetic oligonucleotide
  Antisense strand to SEQ ID NO: 70256
ucccuaagcagagaaaccc

SEQ ID NO: 70338 - RNA, 19 nt, Artificial Sequence
  Description of Artificial Sequence: Synthetic oligonucleotide
  Sense strand starting at position 3765 of SEQ ID NO: 872
uuauuugugucugaaauag

SEQ ID NO: 70339 - RNA, 19 nt, Artificial Sequence
  Description of Artificial Sequence: Synthetic oligonucleotide
  Antisense strand to SEQ ID NO: 70258
cuauuucagacacaaauaa

SEQ ID NO: 70340 - RNA, 19 nt, Artificial Sequence
  Description of Artificial Sequence: Synthetic oligonucleotide
  Sense strand starting at position 3758 of SEQ ID NO: 872
guuguaauuauuugugucu

SEQ ID NO: 70341 - RNA, 19 nt, Artificial Sequence
  Description of Artificial Sequence: Synthetic oligonucleotide
  Antisense strand to SEQ ID NO: 70260
agacacaaauaauuacaac

SEQ ID NO: 70342 - RNA, 19 nt, Artificial Sequence
  Description of Artificial Sequence: Synthetic oligonucleotide
  Sense strand starting at position 3748 of SEQ ID NO: 872
cccauaguagguuguaauu

SEQ ID NO: 70343 - RNA, 19 nt, Artificial Sequence
  Description of Artificial Sequence: Synthetic oligonucleotide
  Antisense strand to SEQ ID NO: 70262
aauuacaaccuacuauggg

SEQ ID NO: 70344 - RNA, 19 nt, Artificial Sequence
  Description of Artificial Sequence: Synthetic oligonucleotide
  Sense strand starting at position 3429 of SEQ ID NO: 872
gaugacacuugagaucagu

SEQ ID NO: 70345 - RNA, 19 nt, Artificial Sequence
  Description of Artificial Sequence: Synthetic oligonucleotide
  Antisense strand to SEQ ID NO: 70264
acugaucucaagugucauc

SEQ ID NO: 70346 - RNA, 19 nt, Artificial Sequence
  Description of Artificial Sequence: Synthetic oligonucleotide
  Sense strand starting at position 3298 of SEQ ID NO: 872
gcagaaucuuauguaaucu

SEQ ID NO: 70347 - RNA, 19 nt, Artificial Sequence
  Description of Artificial Sequence: Synthetic oligonucleotide
  Antisense strand to SEQ ID NO: 70266
agauuacauaagauucugc

SEQ ID NO: 70348 - RNA, 19 nt, Artificial Sequence
  Description of Artificial Sequence: Synthetic oligonucleotide
  Sense strand starting at position 3289 of SEQ ID NO: 872
guuacauaagcagaaucuu

SEQ ID NO: 70349 - RNA, 19 nt, Artificial Sequence
  Description of Artificial Sequence: Synthetic oligonucleotide
  Antisense strand to SEQ ID NO: 70268
aagauucugcuuauguaac

SEQ ID NO: 70350 - RNA, 19 nt, Artificial Sequence
  Description of Artificial Sequence: Synthetic oligonucleotide
  Sense strand starting at position 3286 of SEQ ID NO: 872
augguuacauaagcagaau

SEQ ID NO: 70351 - RNA, 19 nt, Artificial Sequence
  Description of Artificial Sequence: Synthetic oligonucleotide
  Antisense strand to SEQ ID NO: 70270
auucugcuuauguaaccau

SEQ ID NO: 70352 - RNA, 19 nt, Artificial Sequence
  Description of Artificial Sequence: Synthetic oligonucleotide
  Sense strand starting at position 3199 of SEQ ID NO: 872
ugaacuccuccaugaagca

SEQ ID NO: 70353 - RNA, 19 nt, Artificial Sequence
  Description of Artificial Sequence: Synthetic oligonucleotide
  Antisense strand to SEQ ID NO: 70272
ugcuucauggaggaguuca

SEQ ID NO: 70354 - RNA, 19 nt, Artificial Sequence
  Description of Artificial Sequence: Synthetic oligonucleotide
  Sense strand starting at position 3110 of SEQ ID NO: 872
ccagguaugaguggcugau

SEQ ID NO: 70355 - RNA, 19 nt, Artificial Sequence
  Description of Artificial Sequence: Synthetic oligonucleotide
  Antisense strand to SEQ ID NO: 70274
aucagccacucauaccugg

SEQ ID NO: 70356 - RNA, 19 nt, Artificial Sequence
  Description of Artificial Sequence: Synthetic oligonucleotide
  Sense strand starting at position 3103 of SEQ ID NO: 872
aguguucccagguaugagu

SEQ ID NO: 70357 - RNA, 19 nt, Artificial Sequence
  Description of Artificial Sequence: Synthetic oligonucleotide
  Antisense strand to SEQ ID NO: 70276
acucauaccugggaacacu

SEQ ID NO: 70358 - RNA, 19 nt, Artificial Sequence
  Description of Artificial Sequence: Synthetic oligonucleotide
  Sense strand starting at position 3061 of SEQ ID NO: 872
ugugguagaacugauguca

SEQ ID NO: 70359 - RNA, 19 nt, Artificial Sequence
  Description of Artificial Sequence: Synthetic oligonucleotide
  Antisense strand to SEQ ID NO: 70278
ugacaucaguucuaccaca

SEQ ID NO: 70360 - RNA, 19 nt, Artificial Sequence
  Description of Artificial Sequence: Synthetic oligonucleotide
  Sense strand starting at position 3022 of SEQ ID NO: 872
ucugaauucuucuuagcag

SEQ ID NO: 70361 - RNA, 19 nt, Artificial Sequence
  Description of Artificial Sequence: Synthetic oligonucleotide
  Antisense strand to SEQ ID NO: 70280
cugcuaagaagaauucaga

SEQ ID NO: 70362 - RNA, 19 nt, Artificial Sequence
  Description of Artificial Sequence: Synthetic oligonucleotide
  Sense strand starting at position 2986 of SEQ ID NO: 872
gcucuuucuccugaaggag

SEQ ID NO: 70363 - RNA, 19 nt, Artificial Sequence
  Description of Artificial Sequence: Synthetic oligonucleotide
  Antisense strand to SEQ ID NO: 70282
cuccuucaggagaaagagc

SEQ ID NO: 70364 - RNA, 19 nt, Artificial Sequence
  Description of Artificial Sequence: Synthetic oligonucleotide
  Sense strand starting at position 2982 of SEQ ID NO: 872
gcuugcucuuucuccugaa

SEQ ID NO: 70365 - RNA, 19 nt, Artificial Sequence
  Description of Artificial Sequence: Synthetic oligonucleotide
  Antisense strand to SEQ ID NO: 70284
uucaggagaaagagcaagc

SEQ ID NO: 70366 - RNA, 19 nt, Artificial Sequence
  Description of Artificial Sequence: Synthetic oligonucleotide
  Sense strand starting at position 2976 of SEQ ID NO: 872
gggaaagcuugcucuuucu

SEQ ID NO: 70367 - RNA, 19 nt, Artificial Sequence
  Description of Artificial Sequence: Synthetic oligonucleotide
  Antisense strand to SEQ ID NO: 70286
agaaagagcaagcuuuccc

SEQ ID NO: 70368 - RNA, 19 nt, Artificial Sequence
  Description of Artificial Sequence: Synthetic oligonucleotide
  Sense strand starting at position 2858 of SEQ ID NO: 872
gcagcaagaucccuucuga

SEQ ID NO: 70369 - RNA, 19 nt, Artificial Sequence
  Description of Artificial Sequence: Synthetic oligonucleotide
  Antisense strand to SEQ ID NO: 70288
ucagaagggaucuugcugc

SEQ ID NO: 70370 - RNA, 19 nt, Artificial Sequence
  Description of Artificial Sequence: Synthetic oligonucleotide
  Sense strand starting at position 2831 of SEQ ID NO: 872
ccuaaauuaugagucagga

SEQ ID NO: 70371 - RNA, 19 nt, Artificial Sequence
  Description of Artificial Sequence: Synthetic oligonucleotide
  Antisense strand to SEQ ID NO: 70290
uccugacucauaauuuagg

SEQ ID NO: 70372 - RNA, 19 nt, Artificial Sequence
  Description of Artificial Sequence: Synthetic oligonucleotide
  Sense strand starting at position 2826 of SEQ ID NO: 872
guuguccuaaauuaugagu

SEQ ID NO: 70373 - RNA, 19 nt, Artificial Sequence
  Description of Artificial Sequence: Synthetic oligonucleotide
  Antisense strand to SEQ ID NO: 70292
acucauaauuuaggacaac

SEQ ID NO: 70374 - RNA, 19 nt, Artificial Sequence
  Description of Artificial Sequence: Synthetic oligonucleotide
  Sense strand starting at position 2818 of SEQ ID NO: 872
ccagauuaguuguccuaaa

SEQ ID NO: 70375 - RNA, 19 nt, Artificial Sequence
  Description of Artificial Sequence: Synthetic oligonucleotide
  Antisense strand to SEQ ID NO: 70294
uuuaggacaacuaaucugg

SEQ ID NO: 70376 - RNA, 19 nt, Artificial Sequence
  Description of Artificial Sequence: Synthetic oligonucleotide
  Sense strand starting at position 2625 of SEQ ID NO: 872
cagucagguccucaugaag

SEQ ID NO: 70377 - RNA, 19 nt, Artificial Sequence
  Description of Artificial Sequence: Synthetic oligonucleotide
  Antisense strand to SEQ ID NO: 70296
cuucaugaggaccugacug

SEQ ID NO: 70378 - RNA, 19 nt, Artificial Sequence
  Description of Artificial Sequence: Synthetic oligonucleotide
  Sense strand starting at position 2624 of SEQ ID NO: 872
ccagucagguccucaugaa

SEQ ID NO: 70379 - RNA, 19 nt, Artificial Sequence
  Description of Artificial Sequence: Synthetic oligonucleotide
  Antisense strand to SEQ ID NO: 70298
uucaugaggaccugacugg

SEQ ID NO: 70380 - RNA, 19 nt, Artificial Sequence
  Description of Artificial Sequence: Synthetic oligonucleotide
  Sense strand starting at position 2568 of SEQ ID NO: 872
guuagcguccugagaugug

SEQ ID NO: 70381 - RNA, 19 nt, Artificial Sequence
  Description of Artificial Sequence: Synthetic oligonucleotide
  Antisense strand to SEQ ID NO: 70300
cacaucucaggacgcuaac

SEQ ID NO: 70382 - RNA, 19 nt, Artificial Sequence
  Description of Artificial Sequence: Synthetic oligonucleotide
  Sense strand starting at position 2562 of SEQ ID NO: 872
gcaguuguuagcguccuga

SEQ ID NO: 70383 - RNA, 19 nt, Artificial Sequence
  Description of Artificial Sequence: Synthetic oligonucleotide
  Antisense strand to SEQ ID NO: 70302
ucaggacgcuaacaacugc

SEQ ID NO: 70384 - RNA, 19 nt, Artificial Sequence
  Description of Artificial Sequence: Synthetic oligonucleotide
  Sense strand starting at position 2484 of SEQ ID NO: 872
accuguucccuaggaaaga

SEQ ID NO: 70385 - RNA, 19 nt, Artificial Sequence
  Description of Artificial Sequence: Synthetic oligonucleotide
  Antisense strand to SEQ ID NO: 70304
ucuuuccuagggaacaggu

SEQ ID NO: 70386 - RNA, 19 nt, Artificial Sequence
  Description of Artificial Sequence: Synthetic oligonucleotide
  Sense strand starting at position 2482 of SEQ ID NO: 872
ccaccuguucccuaggaaa

SEQ ID NO: 70387 - RNA, 19 nt, Artificial Sequence
  Description of Artificial Sequence: Synthetic oligonucleotide
  Antisense strand to SEQ ID NO: 70306
uuuccuagggaacaggugg

SEQ ID NO: 70388 - RNA, 19 nt, Artificial Sequence
  Description of Artificial Sequence: Synthetic oligonucleotide
  Sense strand starting at position 2277 of SEQ ID NO: 872
ucgugaaaucgggauacuu

SEQ ID NO: 70389 - RNA, 19 nt, Artificial Sequence
  Description of Artificial Sequence: Synthetic oligonucleotide
  Antisense strand to SEQ ID NO: 70308
aaguaucccgauuucacga

SEQ ID NO: 70390 - RNA, 19 nt, Artificial Sequence
  Description of Artificial Sequence: Synthetic oligonucleotide
  Sense strand starting at position 2266 of SEQ ID NO: 872
aguuucuuuguucgugaaa

SEQ ID NO: 70391 - RNA, 19 nt, Artificial Sequence
  Description of Artificial Sequence: Synthetic oligonucleotide
  Antisense strand to SEQ ID NO: 70310
uuucacgaacaaagaaacu

SEQ ID NO: 70392 - RNA, 19 nt, Artificial Sequence
  Description of Artificial Sequence: Synthetic oligonucleotide
  Sense strand starting at position 2242 of SEQ ID NO: 872
ggcccauuccucuauuagu

SEQ ID NO: 70393 - RNA, 19 nt, Artificial Sequence
  Description of Artificial Sequence: Synthetic oligonucleotide
  Antisense strand to SEQ ID NO: 70312
acuaauagaggaaugggcc

SEQ ID NO: 70394 - RNA, 19 nt, Artificial Sequence
  Description of Artificial Sequence: Synthetic oligonucleotide
  Sense strand starting at position 2240 of SEQ ID NO: 872
guggcccauuccucuauua

SEQ ID NO: 70395 - RNA, 19 nt, Artificial Sequence
  Description of Artificial Sequence: Synthetic oligonucleotide
  Antisense strand to SEQ ID NO: 70314
uaauagaggaaugggccac

SEQ ID NO: 70396 - RNA, 19 nt, Artificial Sequence
  Description of Artificial Sequence: Synthetic oligonucleotide
  Sense strand starting at position 2178 of SEQ ID NO: 872
ucuaaaucuugggaggaaa

SEQ ID NO: 70397 - RNA, 19 nt, Artificial Sequence
  Description of Artificial Sequence: Synthetic oligonucleotide
  Antisense strand to SEQ ID NO: 70316
uuuccucccaagauuuaga

SEQ ID NO: 70398 - RNA, 19 nt, Artificial Sequence
  Description of Artificial Sequence: Synthetic oligonucleotide
  Sense strand starting at position 2177 of SEQ ID NO: 872
aucuaaaucuugggaggaa

SEQ ID NO: 70399 - RNA, 19 nt, Artificial Sequence
  Description of Artificial Sequence: Synthetic oligonucleotide
  Antisense strand to SEQ ID NO: 70318
uuccucccaagauuuagau

SEQ ID NO: 70400 - RNA, 19 nt, Artificial Sequence
  Description of Artificial Sequence: Synthetic oligonucleotide
  Sense strand starting at position 634 of SEQ ID NO: 872
ggaguucaauuguucugag

SEQ ID NO: 70401 - RNA, 19 nt, Artificial Sequence
  Description of Artificial Sequence: Synthetic oligonucleotide
  Antisense strand to SEQ ID NO: 70320
cucagaacaauugaacucc

SEQ ID NO: 70402 - RNA, 19 nt, Artificial Sequence
  Description of Artificial Sequence: Synthetic oligonucleotide
  Sense strand starting at position 554 of SEQ ID NO: 872
ccuaucuuggacuggacaa

SEQ ID NO: 70403 - RNA, 19 nt, Artificial Sequence
  Description of Artificial Sequence: Synthetic oligonucleotide
  Antisense strand to SEQ ID NO: 70322
uuguccaguccaagauagg

SEQ ID NO: 70404 - RNA, 19 nt, Artificial Sequence
  Description of Artificial Sequence: Synthetic oligonucleotide
  Sense strand starting at position 495 of SEQ ID NO: 872
uucugucuacuuggugaau

SEQ ID NO: 70405 - RNA, 19 nt, Artificial Sequence
  Description of Artificial Sequence: Synthetic oligonucleotide
  Antisense strand to SEQ ID NO: 70324
auucaccaaguagacagaa

SEQ ID NO: 70406 - RNA, 19 nt, Artificial Sequence
  Description of Artificial Sequence: Synthetic oligonucleotide
  Sense strand starting at position 456 of SEQ ID NO: 872
uucucuucccgaugggaca

SEQ ID NO: 70407 - RNA, 19 nt, Artificial Sequence
  Description of Artificial Sequence: Synthetic oligonucleotide
  Antisense strand to SEQ ID NO: 70326
ugucccaucgggaagagaa

SEQ ID NO: 70408 - RNA, 19 nt, Artificial Sequence
  Description of Artificial Sequence: Synthetic oligonucleotide
  Sense strand starting at position 454 of SEQ ID NO: 872
gguucucuucccgauggga

SEQ ID NO: 70409 - RNA, 19 nt, Artificial Sequence
  Description of Artificial Sequence: Synthetic oligonucleotide
  Antisense strand to SEQ ID NO: 70328
ucccaucgggaagagaacc

SEQ ID NO: 70410 - RNA, 19 nt, Artificial Sequence
  Description of Artificial Sequence: Synthetic oligonucleotide
  Sense strand starting at position 252 of SEQ ID NO: 872
gaacaacuuccaggugagu

SEQ ID NO: 70411 - RNA, 19 nt, Artificial Sequence
  Description of Artificial Sequence: Synthetic oligonucleotide
  Antisense strand to SEQ ID NO: 70330
acucaccuggaaguuguuc

SEQ ID NO: 70412 - RNA, 19 nt, Artificial Sequence
  Description of Artificial Sequence: Synthetic oligonucleotide
  Sense strand starting at position 171 of SEQ ID NO: 872
gagguuccuggcugaguga

SEQ ID NO: 70413 - RNA, 19 nt, Artificial Sequence
  Description of Artificial Sequence: Synthetic oligonucleotide
  Antisense strand to SEQ ID NO: 70332
ucacucagccaggaaccuc

SEQ ID NO: 70414 - RNA, 19 nt, Artificial Sequence
  Description of Artificial Sequence: Synthetic oligonucleotide
  Sense strand starting at position 128 of SEQ ID NO: 872
uagcaagaguguuuauuga

SEQ ID NO: 70415 - RNA, 19 nt, Artificial Sequence
  Description of Artificial Sequence: Synthetic oligonucleotide
  Antisense strand to SEQ ID NO: 70334
ucaauaaacacucuugcua

SEQ ID NO: 70416 - RNA, 19 nt, Artificial Sequence
  Description of Artificial Sequence: Synthetic oligonucleotide
  Sense strand starting at position 3900 of SEQ ID NO: 873
cgaauuacuucugaaacag

SEQ ID NO: 70417 - RNA, 19 nt, Artificial Sequence
  Description of Artificial Sequence: Synthetic oligonucleotide
  Antisense strand to SEQ ID NO: 70336
cuguuucagaaguaauucg

SEQ ID NO: 70418 - RNA, 19 nt, Artificial Sequence
  Description of Artificial Sequence: Synthetic oligonucleotide
  Sense strand starting at position 3888 of SEQ ID NO: 873
ggucucugcucccgaauua

SEQ ID NO: 70419 - RNA, 19 nt, Artificial Sequence
  Description of Artificial Sequence: Synthetic oligonucleotide
  Antisense strand to SEQ ID NO: 70338
uaauucgggagcagagacc

SEQ ID NO: 70420 - RNA, 19 nt, Artificial Sequence
  Description of Artificial Sequence: Synthetic oligonucleotide
  Sense strand starting at position 3885 of SEQ ID NO: 873
ccaggucucugcucccgaa

SEQ ID NO: 70421 - RNA, 19 nt, Artificial Sequence
  Description of Artificial Sequence: Synthetic oligonucleotide
  Antisense strand to SEQ ID NO: 70340
uucgggagcagagaccugg

SEQ ID NO: 70422 - RNA, 19 nt, Artificial Sequence
  Description of Artificial Sequence: Synthetic oligonucleotide
  Sense strand starting at position 3707 of SEQ ID NO: 873
aauguuacagcuggauaau

SEQ ID NO: 70423 - RNA, 19 nt, Artificial Sequence
  Description of Artificial Sequence: Synthetic oligonucleotide
  Antisense strand to SEQ ID NO: 70342
auuauccagcuguaacauu

SEQ ID NO: 70424 - RNA, 19 nt, Artificial Sequence
  Description of Artificial Sequence: Synthetic oligonucleotide
  Sense strand starting at position 3697 of SEQ ID NO: 873
auuggccaucaauguuaca

SEQ ID NO: 70425 - RNA, 19 nt, Artificial Sequence
  Description of Artificial Sequence: Synthetic oligonucleotide
  Antisense strand to SEQ ID NO: 70344
uguaacauugauggccaau

SEQ ID NO: 70426 - RNA, 19 nt, Artificial Sequence
  Description of Artificial Sequence: Synthetic oligonucleotide
  Sense strand starting at position 3694 of SEQ ID NO: 873
gccauuggccaucaauguu

SEQ ID NO: 70427 - RNA, 19 nt, Artificial Sequence
  Description of Artificial Sequence: Synthetic oligonucleotide
  Antisense strand to SEQ ID NO: 70346
aacauugauggccaauggc

SEQ ID NO: 70428 - RNA, 19 nt, Artificial Sequence
  Description of Artificial Sequence: Synthetic oligonucleotide
  Sense strand starting at position 3681 of SEQ ID NO: 873
guggguucuacuugccauu

SEQ ID NO: 70429 - RNA, 19 nt, Artificial Sequence
  Description of Artificial Sequence: Synthetic oligonucleotide
  Antisense strand to SEQ ID NO: 70348
aauggcaaguagaacccac

SEQ ID NO: 70430 - RNA, 19 nt, Artificial Sequence
  Description of Artificial Sequence: Synthetic oligonucleotide
  Sense strand starting at position 3672 of SEQ ID NO: 873
gguuguugaguggguucua

SEQ ID NO: 70431 - RNA, 19 nt, Artificial Sequence
  Description of Artificial Sequence: Synthetic oligonucleotide
  Antisense strand to SEQ ID NO: 70350
uagaacccacucaacaacc

SEQ ID NO: 70432 - RNA, 19 nt, Artificial Sequence
  Description of Artificial Sequence: Synthetic oligonucleotide
  Sense strand starting at position 3588 of SEQ ID NO: 873
gggugacuuuggagaguuu

SEQ ID NO: 70433 - RNA, 19 nt, Artificial Sequence
  Description of Artificial Sequence: Synthetic oligonucleotide
  Antisense strand to SEQ ID NO: 70352
aaacucuccaaagucaccc

SEQ ID NO: 70434 - RNA, 19 nt, Artificial Sequence
  Description of Artificial Sequence: Synthetic oligonucleotide
  Sense strand starting at position 3518 of SEQ ID NO: 873
guuggauguggugaguuua

SEQ ID NO: 70435 - RNA, 19 nt, Artificial Sequence
  Description of Artificial Sequence: Synthetic oligonucleotide
  Antisense strand to SEQ ID NO: 70354
uaaacucaccacauccaac

SEQ ID NO: 70436 - RNA, 19 nt, Artificial Sequence
  Description of Artificial Sequence: Synthetic oligonucleotide
  Sense strand starting at position 3335 of SEQ ID NO: 873
gguuaagaggccugaggau

SEQ ID NO: 70437 - RNA, 19 nt, Artificial Sequence
  Description of Artificial Sequence: Synthetic oligonucleotide
  Antisense strand to SEQ ID NO: 70356
auccucaggccucuuaacc

SEQ ID NO: 70438 - RNA, 19 nt, Artificial Sequence
  Description of Artificial Sequence: Synthetic oligonucleotide
  Sense strand starting at position 3291 of SEQ ID NO: 873
ugaugcucccuggaaucau

SEQ ID NO: 70439 - RNA, 19 nt, Artificial Sequence
  Description of Artificial Sequence: Synthetic oligonucleotide
  Antisense strand to SEQ ID NO: 70358
augauuccagggagcauca

SEQ ID NO: 70440 - RNA, 19 nt, Artificial Sequence
  Description of Artificial Sequence: Synthetic oligonucleotide
  Sense strand starting at position 3289 of SEQ ID NO: 873
cuugaugcucccuggaauc

SEQ ID NO: 70441 - RNA, 19 nt, Artificial Sequence
  Description of Artificial Sequence: Synthetic oligonucleotide
  Antisense strand to SEQ ID NO: 70360
gauuccagggagcaucaag

SEQ ID NO: 70442 - RNA, 19 nt, Artificial Sequence
  Description of Artificial Sequence: Synthetic oligonucleotide
  Sense strand starting at position 3288 of SEQ ID NO: 873
ccuugaugcucccuggaau

SEQ ID NO: 70443 - RNA, 19 nt, Artificial Sequence
  Description of Artificial Sequence: Synthetic oligonucleotide
  Antisense strand to SEQ ID NO: 70362
auuccagggagcaucaagg

SEQ ID NO: 70444 - RNA, 19 nt, Artificial Sequence
  Description of Artificial Sequence: Synthetic oligonucleotide
  Sense strand starting at position 3209 of SEQ ID NO: 873
ggcagacuucuccagaugu

SEQ ID NO: 70445 - RNA, 19 nt, Artificial Sequence
  Description of Artificial Sequence: Synthetic oligonucleotide
  Antisense strand to SEQ ID NO: 70364
acaucuggagaagucugcc

SEQ ID NO: 70446 - RNA, 19 nt, Artificial Sequence
  Description of Artificial Sequence: Synthetic oligonucleotide
  Sense strand starting at position 3207 of SEQ ID NO: 873
ugggcagacuucuccagau

SEQ ID NO: 70447 - RNA, 19 nt, Artificial Sequence
  Description of Artificial Sequence: Synthetic oligonucleotide
  Antisense strand to SEQ ID NO: 70366
aucuggagaagucugccca

SEQ ID NO: 70448 - RNA, 19 nt, Artificial Sequence
  Description of Artificial Sequence: Synthetic oligonucleotide
  Sense strand starting at position 3021 of SEQ ID NO: 873
ggugcacuucccugaagca

SEQ ID NO: 70449 - RNA, 19 nt, Artificial Sequence
  Description of Artificial Sequence: Synthetic oligonucleotide
  Antisense strand to SEQ ID NO: 70368
ugcuucagggaagugcacc

SEQ ID NO: 70450 - RNA, 19 nt, Artificial Sequence
  Description of Artificial Sequence: Synthetic oligonucleotide
  Sense strand starting at position 2692 of SEQ ID NO: 873
ccauuacccugucagaaug

SEQ ID NO: 70451 - RNA, 19 nt, Artificial Sequence
  Description of Artificial Sequence: Synthetic oligonucleotide
  Antisense strand to SEQ ID NO: 70370
cauucugacaggguaaugg

SEQ ID NO: 70452 - RNA, 19 nt, Artificial Sequence
  Description of Artificial Sequence: Synthetic oligonucleotide
  Sense strand starting at position 2689 of SEQ ID NO: 873
ucaccauuacccugucaga

SEQ ID NO: 70453 - RNA, 19 nt, Artificial Sequence
  Description of Artificial Sequence: Synthetic oligonucleotide
  Antisense strand to SEQ ID NO: 70372
ucugacaggguaaugguga

SEQ ID NO: 70454 - RNA, 19 nt, Artificial Sequence
  Description of Artificial Sequence: Synthetic oligonucleotide
  Sense strand starting at position 2506 of SEQ ID NO: 873
acauuagcauggugacaga

SEQ ID NO: 70455 - RNA, 19 nt, Artificial Sequence
  Description of Artificial Sequence: Synthetic oligonucleotide
  Antisense strand to SEQ ID NO: 70374
ucugucaccaugcuaaugu

SEQ ID NO: 70456 - RNA, 19 nt, Artificial Sequence
  Description of Artificial Sequence: Synthetic oligonucleotide
  Sense strand starting at position 2504 of SEQ ID NO: 873
cgacauuagcauggugaca

SEQ ID NO: 70457 - RNA, 19 nt, Artificial Sequence
  Description of Artificial Sequence: Synthetic oligonucleotide
  Antisense strand to SEQ ID NO: 70376
ugucaccaugcuaaugucg

SEQ ID NO: 70458 - RNA, 19 nt, Artificial Sequence
  Description of Artificial Sequence: Synthetic oligonucleotide
  Sense strand starting at position 2423 of SEQ ID NO: 873
augacaggguuuccaagau

SEQ ID NO: 70459 - RNA, 19 nt, Artificial Sequence
  Description of Artificial Sequence: Synthetic oligonucleotide
  Antisense strand to SEQ ID NO: 70378
aucuuggaaacccugucau

SEQ ID NO: 70460 - RNA, 19 nt, Artificial Sequence
  Description of Artificial Sequence: Synthetic oligonucleotide
  Sense strand starting at position 2406 of SEQ ID NO: 873
gggcuucccuggugagaau

SEQ ID NO: 70461 - RNA, 19 nt, Artificial Sequence
  Description of Artificial Sequence: Synthetic oligonucleotide
  Antisense strand to SEQ ID NO: 70380
auucucaccagggaagccc

SEQ ID NO: 70462 - RNA, 19 nt, Artificial Sequence
  Description of Artificial Sequence: Synthetic oligonucleotide
  Sense strand starting at position 2404 of SEQ ID NO: 873
uugggcuucccuggugaga

SEQ ID NO: 70463 - RNA, 19 nt, Artificial Sequence
  Description of Artificial Sequence: Synthetic oligonucleotide
  Antisense strand to SEQ ID NO: 70382
ucucaccagggaagcccaa

SEQ ID NO: 70464 - RNA, 19 nt, Artificial Sequence
  Description of Artificial Sequence: Synthetic oligonucleotide
  Sense strand starting at position 2378 of SEQ ID NO: 873
gaaggaagagcuugugaug

SEQ ID NO: 70465 - RNA, 19 nt, Artificial Sequence
  Description of Artificial Sequence: Synthetic oligonucleotide
  Antisense strand to SEQ ID NO: 70384
caucacaagcucuuccuuc

SEQ ID NO: 70466 - RNA, 19 nt, Artificial Sequence
  Description of Artificial Sequence: Synthetic oligonucleotide
  Sense strand starting at position 2362 of SEQ ID NO: 873
acgagauccaggugacgaa

SEQ ID NO: 70467 - RNA, 19 nt, Artificial Sequence
  Description of Artificial Sequence: Synthetic oligonucleotide
  Antisense strand to SEQ ID NO: 70386
uucgucaccuggaucucgu

SEQ ID NO: 70468 - RNA, 19 nt, Artificial Sequence
  Description of Artificial Sequence: Synthetic oligonucleotide
  Sense strand starting at position 2252 of SEQ ID NO: 873
gugcgagagccuugaaguc

SEQ ID NO: 70469 - RNA, 19 nt, Artificial Sequence
  Description of Artificial Sequence: Synthetic oligonucleotide
  Antisense strand to SEQ ID NO: 70388
gacuucaaggcucucgcac

SEQ ID NO: 70470 - RNA, 19 nt, Artificial Sequence
  Description of Artificial Sequence: Synthetic oligonucleotide
  Sense strand starting at position 2105 of SEQ ID NO: 873
cguugcgcggcauaguaau

SEQ ID NO: 70471 - RNA, 19 nt, Artificial Sequence
  Description of Artificial Sequence: Synthetic oligonucleotide
  Antisense strand to SEQ ID NO: 70390
auuacuaugccgcgcaacg

SEQ ID NO: 70472 - RNA, 19 nt, Artificial Sequence
  Description of Artificial Sequence: Synthetic oligonucleotide
  Sense strand starting at position 1645 of SEQ ID NO: 873
ccggcuuaaccucagauga

SEQ ID NO: 70473 - RNA, 19 nt, Artificial Sequence
  Description of Artificial Sequence: Synthetic oligonucleotide
  Antisense strand to SEQ ID NO: 70392
ucaucugagguuaagccgg

SEQ ID NO: 70474 - RNA, 19 nt, Artificial Sequence
  Description of Artificial Sequence: Synthetic oligonucleotide
  Sense strand starting at position 1502 of SEQ ID NO: 873
cuggaucccugagucagau

SEQ ID NO: 70475 - RNA, 19 nt, Artificial Sequence
  Description of Artificial Sequence: Synthetic oligonucleotide
  Antisense strand to SEQ ID NO: 70394
aucugacucagggauccag

SEQ ID NO: 70476 - RNA, 19 nt, Artificial Sequence
  Description of Artificial Sequence: Synthetic oligonucleotide
  Sense strand starting at position 1450 of SEQ ID NO: 873
cuucuuuccgccugaaucu

SEQ ID NO: 70477 - RNA, 19 nt, Artificial Sequence
  Description of Artificial Sequence: Synthetic oligonucleotide
  Antisense strand to SEQ ID NO: 70396
agauucaggcggaaagaag

SEQ ID NO: 70478 - RNA, 19 nt, Artificial Sequence
  Description of Artificial Sequence: Synthetic oligonucleotide
  Sense strand starting at position 1245 of SEQ ID NO: 873
gcucccucccaucagagau

SEQ ID NO: 70479 - RNA, 19 nt, Artificial Sequence
  Description of Artificial Sequence: Synthetic oligonucleotide
  Antisense strand to SEQ ID NO: 70398
aucucugaugggagggagc

SEQ ID NO: 70480 - RNA, 19 nt, Artificial Sequence
  Description of Artificial Sequence: Synthetic oligonucleotide
  Sense strand starting at position 1141 of SEQ ID NO: 873
ggguacuauaaguggaaga

SEQ ID NO: 70481 - RNA, 19 nt, Artificial Sequence
  Description of Artificial Sequence: Synthetic oligonucleotide
  Antisense strand to SEQ ID NO: 70400
ucuuccacuuauaguaccc

SEQ ID NO: 70482 - RNA, 19 nt, Artificial Sequence
  Description of Artificial Sequence: Synthetic oligonucleotide
  Sense strand starting at position 943 of SEQ ID NO: 873
gggagucucuccucaggau

SEQ ID NO: 70483 - RNA, 19 nt, Artificial Sequence
  Description of Artificial Sequence: Synthetic oligonucleotide
  Antisense strand to SEQ ID NO: 70402
auccugaggagagacuccc

SEQ ID NO: 70484 - RNA, 19 nt, Artificial Sequence
  Description of Artificial Sequence: Synthetic oligonucleotide
  Sense strand starting at position 921 of SEQ ID NO: 873
ggugcuucucaggauacgu

SEQ ID NO: 70485 - RNA, 19 nt, Artificial Sequence
  Description of Artificial Sequence: Synthetic oligonucleotide
  Antisense strand to SEQ ID NO: 70404
acguauccugagaagcacc

SEQ ID NO: 70486 - RNA, 19 nt, Artificial Sequence
  Description of Artificial Sequence: Synthetic oligonucleotide
  Sense strand starting at position 918 of SEQ ID NO: 873
ugaggugcuucucaggaua

SEQ ID NO: 70487 - RNA, 19 nt, Artificial Sequence
  Description of Artificial Sequence: Synthetic oligonucleotide
  Antisense strand to SEQ ID NO: 70406
uauccugagaagcaccuca

SEQ ID NO: 70488 - RNA, 19 nt, Artificial Sequence
  Description of Artificial Sequence: Synthetic oligonucleotide
  Sense strand starting at position 857 of SEQ ID NO: 873
ggagaaaggccuugugaga

SEQ ID NO: 70489 - RNA, 19 nt, Artificial Sequence
  Description of Artificial Sequence: Synthetic oligonucleotide
  Antisense strand to SEQ ID NO: 70408
ucucacaaggccuuucucc

SEQ ID NO: 70490 - RNA, 19 nt, Artificial Sequence
  Description of Artificial Sequence: Synthetic oligonucleotide
  Sense strand starting at position 3721 of SEQ ID NO: 874
ggcauuaugcugcugucau

SEQ ID NO: 70491 - RNA, 19 nt, Artificial Sequence
  Description of Artificial Sequence: Synthetic oligonucleotide
  Antisense strand to SEQ ID NO: 70410
augacagcagcauaaugcc

SEQ ID NO: 70492 - RNA, 19 nt, Artificial Sequence
  Description of Artificial Sequence: Synthetic oligonucleotide
  Sense strand starting at position 3720 of SEQ ID NO: 874
cggcauuaugcugcuguca

SEQ ID NO: 70493 - RNA, 19 nt, Artificial Sequence
  Description of Artificial Sequence: Synthetic oligonucleotide
  Antisense strand to SEQ ID NO: 70412
ugacagcagcauaaugccg

SEQ ID NO: 70494 - RNA, 19 nt, Artificial Sequence
  Description of Artificial Sequence: Synthetic oligonucleotide
  Sense strand starting at position 3634 of SEQ ID NO: 874
acacgaugccuaggagaau

SEQ ID NO: 70495 - RNA, 19 nt, Artificial Sequence
  Description of Artificial Sequence: Synthetic oligonucleotide
  Antisense strand to SEQ ID NO: 70414
auucuccuaggcaucgugu

SEQ ID NO: 70496 - RNA, 19 nt, Artificial Sequence
  Description of Artificial Sequence: Synthetic oligonucleotide
  Sense strand starting at position 3357 of SEQ ID NO: 874
guuguuaaguaggcaaaca

SEQ ID NO: 70497 - RNA, 19 nt, Artificial Sequence
  Description of Artificial Sequence: Synthetic oligonucleotide
  Antisense strand to SEQ ID NO: 70416
uguuugccuacuuaacaac

SEQ ID NO: 70498 - RNA, 19 nt, Artificial Sequence
  Description of Artificial Sequence: Synthetic oligonucleotide
  Sense strand starting at position 3349 of SEQ ID NO: 874
uaucacagguuguuaagua

SEQ ID NO: 70499 - RNA, 19 nt, Artificial Sequence
  Description of Artificial Sequence: Synthetic oligonucleotide
  Antisense strand to SEQ ID NO: 70418
uacuuaacaaccugugaua

SEQ ID NO: 70500 - RNA, 19 nt, Artificial Sequence
  Description of Artificial Sequence: Synthetic oligonucleotide
  Sense strand starting at position 3330 of SEQ ID NO: 874
ucccauaagcaauggagaa

SEQ ID NO: 70501 - RNA, 19 nt, Artificial Sequence
  Description of Artificial Sequence: Synthetic oligonucleotide
  Antisense strand to SEQ ID NO: 70420
uucuccauugcuuauggga

SEQ ID NO: 70502 - RNA, 19 nt, Artificial Sequence
  Description of Artificial Sequence: Synthetic oligonucleotide
  Sense strand starting at position 3159 of SEQ ID NO: 874
uguggaagugggugauguu

SEQ ID NO: 70503 - RNA, 19 nt, Artificial Sequence
  Description of Artificial Sequence: Synthetic oligonucleotide
  Antisense strand to SEQ ID NO: 70422
aacaucacccacuuccaca

SEQ ID NO: 70504 - RNA, 19 nt, Artificial Sequence
  Description of Artificial Sequence: Synthetic oligonucleotide
  Sense strand starting at position 3117 of SEQ ID NO: 874
gugcucuaggcagaagaca

SEQ ID NO: 70505 - RNA, 19 nt, Artificial Sequence
  Description of Artificial Sequence: Synthetic oligonucleotide
  Antisense strand to SEQ ID NO: 70424
ugucuucugccuagagcac

SEQ ID NO: 70506 - RNA, 19 nt, Artificial Sequence
  Description of Artificial Sequence: Synthetic oligonucleotide
  Sense strand starting at position 3115 of SEQ ID NO: 874
gggugcucuaggcagaaga

SEQ ID NO: 70507 - RNA, 19 nt, Artificial Sequence
  Description of Artificial Sequence: Synthetic oligonucleotide
  Antisense strand to SEQ ID NO: 70426
ucuucugccuagagcaccc

SEQ ID NO: 70508 - RNA, 19 nt, Artificial Sequence
  Description of Artificial Sequence: Synthetic oligonucleotide
  Sense strand starting at position 3113 of SEQ ID NO: 874
gagggugcucuaggcagaa

SEQ ID NO: 70509 - RNA, 19 nt, Artificial Sequence
  Description of Artificial Sequence: Synthetic oligonucleotide
  Antisense strand to SEQ ID NO: 70428
uucugccuagagcacccuc

SEQ ID NO: 70510 - RNA, 19 nt, Artificial Sequence
  Description of Artificial Sequence: Synthetic oligonucleotide
  Sense strand starting at position 3073 of SEQ ID NO: 874
gagaaauggcugugagcuu

SEQ ID NO: 70511 - RNA, 19 nt, Artificial Sequence
  Description of Artificial Sequence: Synthetic oligonucleotide
  Antisense strand to SEQ ID NO: 70430
aagcucacagccauuucuc

SEQ ID NO: 70512 - RNA, 19 nt, Artificial Sequence
  Description of Artificial Sequence: Synthetic oligonucleotide
  Sense strand starting at position 2945 of SEQ ID NO: 874
gaaguaaauguguaaguuc

SEQ ID NO: 70513 - RNA, 19 nt, Artificial Sequence
  Description of Artificial Sequence: Synthetic oligonucleotide
  Antisense strand to SEQ ID NO: 70432
gaacuuacacauuuacuuc

SEQ ID NO: 70514 - RNA, 19 nt, Artificial Sequence
  Description of Artificial Sequence: Synthetic oligonucleotide
  Sense strand starting at position 2944 of SEQ ID NO: 874
ggaaguaaauguguaaguu

SEQ ID NO: 70515 - RNA, 19 nt, Artificial Sequence
  Description of Artificial Sequence: Synthetic oligonucleotide
  Antisense strand to SEQ ID NO: 70434
aacuuacacauuuacuucc

SEQ ID NO: 70516 - RNA, 19 nt, Artificial Sequence
  Description of Artificial Sequence: Synthetic oligonucleotide
  Sense strand starting at position 2871 of SEQ ID NO: 874
uguuguguuccagacacuc

SEQ ID NO: 70517 - RNA, 19 nt, Artificial Sequence
  Description of Artificial Sequence: Synthetic oligonucleotide
  Antisense strand to SEQ ID NO: 70436
gagugucuggaacacaaca

SEQ ID NO: 70518 - RNA, 19 nt, Artificial Sequence
  Description of Artificial Sequence: Synthetic oligonucleotide
  Sense strand starting at position 2824 of SEQ ID NO: 874
acacaagauguguggacau

SEQ ID NO: 70519 - RNA, 19 nt, Artificial Sequence
  Description of Artificial Sequence: Synthetic oligonucleotide
  Antisense strand to SEQ ID NO: 70438
auguccacacaucuugugu

SEQ ID NO: 70520 - RNA, 19 nt, Artificial Sequence
  Description of Artificial Sequence: Synthetic oligonucleotide
  Sense strand starting at position 2639 of SEQ ID NO: 874
ggauuacaguuacuguagu

SEQ ID NO: 70521 - RNA, 19 nt, Artificial Sequence
  Description of Artificial Sequence: Synthetic oligonucleotide
  Antisense strand to SEQ ID NO: 70440
acuacaguaacuguaaucc

SEQ ID NO: 70522 - RNA, 19 nt, Artificial Sequence
  Description of Artificial Sequence: Synthetic oligonucleotide
  Sense strand starting at position 2637 of SEQ ID NO: 874
ugggauuacaguuacugua

SEQ ID NO: 70523 - RNA, 19 nt, Artificial Sequence
  Description of Artificial Sequence: Synthetic oligonucleotide
  Antisense strand to SEQ ID NO: 70442
uacaguaacuguaauccca

SEQ ID NO: 70524 - RNA, 19 nt, Artificial Sequence
  Description of Artificial Sequence: Synthetic oligonucleotide
  Sense strand starting at position 2452 of SEQ ID NO: 874
agucacuugccacauaguu

SEQ ID NO: 70525 - RNA, 19 nt, Artificial Sequence
  Description of Artificial Sequence: Synthetic oligonucleotide
  Antisense strand to SEQ ID NO: 70444
aacuauguggcaagugacu

SEQ ID NO: 70526 - RNA, 19 nt, Artificial Sequence
  Description of Artificial Sequence: Synthetic oligonucleotide
  Sense strand starting at position 2436 of SEQ ID NO: 874
gagguuuguagaggucagu

SEQ ID NO: 70527 - RNA, 19 nt, Artificial Sequence
  Description of Artificial Sequence: Synthetic oligonucleotide
  Antisense strand to SEQ ID NO: 70446
acugaccucuacaaaccuc

SEQ ID NO: 70528 - RNA, 19 nt, Artificial Sequence
  Description of Artificial Sequence: Synthetic oligonucleotide
  Sense strand starting at position 2388 of SEQ ID NO: 874
ucagcugguuucucaauua

SEQ ID NO: 70529 - RNA, 19 nt, Artificial Sequence
  Description of Artificial Sequence: Synthetic oligonucleotide
  Antisense strand to SEQ ID NO: 70448
uaauugagaaaccagcuga

SEQ ID NO: 70530 - RNA, 19 nt, Artificial Sequence
  Description of Artificial Sequence: Synthetic oligonucleotide
  Sense strand starting at position 1182 of SEQ ID NO: 874
aagucagagcuccaagacu

SEQ ID NO: 70531 - RNA, 19 nt, Artificial Sequence
  Description of Artificial Sequence: Synthetic oligonucleotide
  Antisense strand to SEQ ID NO: 70450
agucuuggagcucugacuu

SEQ ID NO: 70532 - RNA, 19 nt, Artificial Sequence
  Description of Artificial Sequence: Synthetic oligonucleotide
  Sense strand starting at position 1148 of SEQ ID NO: 874
guauuugucuccuucucca

SEQ ID NO: 70533 - RNA, 19 nt, Artificial Sequence
  Description of Artificial Sequence: Synthetic oligonucleotide
  Antisense strand to SEQ ID NO: 70452
uggagaaggagacaaauac

SEQ ID NO: 70534 - RNA, 19 nt, Artificial Sequence
  Description of Artificial Sequence: Synthetic oligonucleotide
  Sense strand starting at position 1113 of SEQ ID NO: 874
ccuacuucucuugagagca

SEQ ID NO: 70535 - RNA, 19 nt, Artificial Sequence
  Description of Artificial Sequence: Synthetic oligonucleotide
  Antisense strand to SEQ ID NO: 70454
ugcucucaagagaaguagg

SEQ ID NO: 70536 - RNA, 19 nt, Artificial Sequence
  Description of Artificial Sequence: Synthetic oligonucleotide
  Sense strand starting at position 1110 of SEQ ID NO: 874
cugccuacuucucuugaga

SEQ ID NO: 70537 - RNA, 19 nt, Artificial Sequence
  Description of Artificial Sequence: Synthetic oligonucleotide
  Antisense strand to SEQ ID NO: 70456
ucucaagagaaguaggcag

SEQ ID NO: 70538 - RNA, 19 nt, Artificial Sequence
  Description of Artificial Sequence: Synthetic oligonucleotide
  Sense strand starting at position 997 of SEQ ID NO: 874
cagcuuagggucuggagaa

SEQ ID NO: 70539 - RNA, 19 nt, Artificial Sequence
  Description of Artificial Sequence: Synthetic oligonucleotide
  Antisense strand to SEQ ID NO: 70458
uucuccagacccuaagcug

SEQ ID NO: 70540 - RNA, 19 nt, Artificial Sequence
  Description of Artificial Sequence: Synthetic oligonucleotide
  Sense strand starting at position 950 of SEQ ID NO: 874
agguaucuugggugggaca

SEQ ID NO: 70541 - RNA, 19 nt, Artificial Sequence
  Description of Artificial Sequence: Synthetic oligonucleotide
  Antisense strand to SEQ ID NO: 70460
ugucccacccaagauaccu

SEQ ID NO: 70542 - RNA, 19 nt, Artificial Sequence
  Description of Artificial Sequence: Synthetic oligonucleotide
  Sense strand starting at position 776 of SEQ ID NO: 874
uguauucucauggagugga

SEQ ID NO: 70543 - RNA, 19 nt, Artificial Sequence
  Description of Artificial Sequence: Synthetic oligonucleotide
  Antisense strand to SEQ ID NO: 70462
uccacuccaugagaauaca

SEQ ID NO: 70544 - RNA, 19 nt, Artificial Sequence
  Description of Artificial Sequence: Synthetic oligonucleotide
  Sense strand starting at position 494 of SEQ ID NO: 874
agugguauacuuuagaacu

SEQ ID NO: 70545 - RNA, 19 nt, Artificial Sequence
  Description of Artificial Sequence: Synthetic oligonucleotide
  Antisense strand to SEQ ID NO: 70464
aguucuaaaguauaccacu

SEQ ID NO: 70546 - RNA, 19 nt, Artificial Sequence
  Description of Artificial Sequence: Synthetic oligonucleotide
  Sense strand starting at position 489 of SEQ ID NO: 874
ggcauagugguauacuuua

SEQ ID NO: 70547 - RNA, 19 nt, Artificial Sequence
  Description of Artificial Sequence: Synthetic oligonucleotide
  Antisense strand to SEQ ID NO: 70466
uaaaguauaccacuaugcc

SEQ ID NO: 70548 - RNA, 19 nt, Artificial Sequence
  Description of Artificial Sequence: Synthetic oligonucleotide
  Sense strand starting at position 459 of SEQ ID NO: 874
ggacuuaucguagacgcua

SEQ ID NO: 70549 - RNA, 19 nt, Artificial Sequence
  Description of Artificial Sequence: Synthetic oligonucleotide
  Antisense strand to SEQ ID NO: 70468
uagcgucuacgauaagucc

SEQ ID NO: 70550 - RNA, 19 nt, Artificial Sequence
  Description of Artificial Sequence: Synthetic oligonucleotide
  Sense strand starting at position 367 of SEQ ID NO: 874
ccuugcugugucuugcaua

SEQ ID NO: 70551 - RNA, 19 nt, Artificial Sequence
  Description of Artificial Sequence: Synthetic oligonucleotide
  Antisense strand to SEQ ID NO: 70470
uaugcaagacacagcaagg

SEQ ID NO: 70552 - RNA, 19 nt, Artificial Sequence
  Description of Artificial Sequence: Synthetic oligonucleotide
  Sense strand starting at position 322 of SEQ ID NO: 874
gaaagacuguuugcuuauu

SEQ ID NO: 70553 - RNA, 19 nt, Artificial Sequence
  Description of Artificial Sequence: Synthetic oligonucleotide
  Antisense strand to SEQ ID NO: 70472
aauaagcaaacagucuuuc

SEQ ID NO: 70554 - RNA, 19 nt, Artificial Sequence
  Description of Artificial Sequence: Synthetic oligonucleotide
  Sense strand starting at position 320 of SEQ ID NO: 874
uugaaagacuguuugcuua

SEQ ID NO: 70555 - RNA, 19 nt, Artificial Sequence
  Description of Artificial Sequence: Synthetic oligonucleotide
  Antisense strand to SEQ ID NO: 70474
uaagcaaacagucuuucaa

SEQ ID NO: 70556 - RNA, 19 nt, Artificial Sequence
  Description of Artificial Sequence: Synthetic oligonucleotide
  Sense strand starting at position 236 of SEQ ID NO: 874
cuugucaugcagcaucauu

SEQ ID NO: 70557 - RNA, 19 nt, Artificial Sequence
  Description of Artificial Sequence: Synthetic oligonucleotide
  Antisense strand to SEQ ID NO: 70476
aaugaugcugcaugacaag

SEQ ID NO: 70558 - RNA, 19 nt, Artificial Sequence
  Description of Artificial Sequence: Synthetic oligonucleotide
  Sense strand starting at position 137 of SEQ ID NO: 874
acaucaucauuguuacaug

SEQ ID NO: 70559 - RNA, 19 nt, Artificial Sequence
  Description of Artificial Sequence: Synthetic oligonucleotide
  Antisense strand to SEQ ID NO: 70478
cauguaacaaugaugaugu

SEQ ID NO: 70560 - RNA, 19 nt, Artificial Sequence
  Description of Artificial Sequence: Synthetic oligonucleotide
  Sense strand starting at position 135 of SEQ ID NO: 874
ugacaucaucauuguuaca

SEQ ID NO: 70561 - RNA, 19 nt, Artificial Sequence
  Description of Artificial Sequence: Synthetic oligonucleotide
  Antisense strand to SEQ ID NO: 70480
uguaacaaugaugauguca

SEQ ID NO: 70562 - RNA, 19 nt, Artificial Sequence
  Description of Artificial Sequence: Synthetic oligonucleotide
  Sense strand starting at position 132 of SEQ ID NO: 874
cuaugacaucaucauuguu

SEQ ID NO: 70563 - RNA, 19 nt, Artificial Sequence
  Description of Artificial Sequence: Synthetic oligonucleotide
  Antisense strand to SEQ ID NO: 70482
aacaaugaugaugucauag

SEQ ID NO: 70564 - RNA, 19 nt, Artificial Sequence
  Description of Artificial Sequence: Synthetic oligonucleotide
  Sense strand starting at position 116 of SEQ ID NO: 874
cagggagucuguccaacua

SEQ ID NO: 70565 - RNA, 19 nt, Artificial Sequence
  Description of Artificial Sequence: Synthetic oligonucleotide
  Antisense strand to SEQ ID NO: 70484
uaguuggacagacucccug

SEQ ID NO: 70566 - RNA, 19 nt, Artificial Sequence
  Description of Artificial Sequence: Synthetic oligonucleotide
  Sense strand starting at position 26 of SEQ ID NO: 874
uucuuucaggguggaguaa

SEQ ID NO: 70567 - RNA, 19 nt, Artificial Sequence
  Description of Artificial Sequence: Synthetic oligonucleotide
  Antisense strand to SEQ ID NO: 70486
uuacuccacccugaaagaa

SEQ ID NO: 70568 - RNA, 19 nt, Artificial Sequence
  Description of Artificial Sequence: Synthetic oligonucleotide
  Sense strand starting at position 25 of SEQ ID NO: 874
cuucuuucaggguggagua

SEQ ID NO: 70569 - RNA, 19 nt, Artificial Sequence
  Description of Artificial Sequence: Synthetic oligonucleotide
  Antisense strand to SEQ ID NO: 70488
uacuccacccugaaagaag

SEQ ID NO: 70570 - RNA, 19 nt, Artificial Sequence
  Description of Artificial Sequence: Synthetic oligonucleotide
  Sense strand starting at position 3909 of SEQ ID NO: 875
ggaugcugucaguauauuc

SEQ ID NO: 70571 - RNA, 19 nt, Artificial Sequence
  Description of Artificial Sequence: Synthetic oligonucleotide
  Antisense strand to SEQ ID NO: 70490
gaauauacugacagcaucc

SEQ ID NO: 70572 - RNA, 19 nt, Artificial Sequence
  Description of Artificial Sequence: Synthetic oligonucleotide
  Sense strand starting at position 3884 of SEQ ID NO: 875
ccgauuuacugugaugcag

SEQ ID NO: 70573 - RNA, 19 nt, Artificial Sequence
  Description of Artificial Sequence: Synthetic oligonucleotide
  Antisense strand to SEQ ID NO: 70492
cugcaucacaguaaaucgg

SEQ ID NO: 70574 - RNA, 19 nt, Artificial Sequence
  Description of Artificial Sequence: Synthetic oligonucleotide
  Sense strand starting at position 3883 of SEQ ID NO: 875
uccgauuuacugugaugca

SEQ ID NO: 70575 - RNA, 19 nt, Artificial Sequence
  Description of Artificial Sequence: Synthetic oligonucleotide
  Antisense strand to SEQ ID NO: 70494
ugcaucacaguaaaucgga

SEQ ID NO: 70576 - RNA, 19 nt, Artificial Sequence
  Description of Artificial Sequence: Synthetic oligonucleotide
  Sense strand starting at position 3819 of SEQ ID NO: 875
agguaaugcuucucaccua

SEQ ID NO: 70577 - RNA, 19 nt, Artificial Sequence
  Description of Artificial Sequence: Synthetic oligonucleotide
  Antisense strand to SEQ ID NO: 70496
uaggugagaagcauuaccu

SEQ ID NO: 70578 - RNA, 19 nt, Artificial Sequence
  Description of Artificial Sequence: Synthetic oligonucleotide
  Sense strand starting at position 3587 of SEQ ID NO: 875
ccugucauucuuuguuauc

SEQ ID NO: 70579 - RNA, 19 nt, Artificial Sequence
  Description of Artificial Sequence: Synthetic oligonucleotide
  Antisense strand to SEQ ID NO: 70498
gauaacaaagaaugacagg

SEQ ID NO: 70580 - RNA, 19 nt, Artificial Sequence
  Description of Artificial Sequence: Synthetic oligonucleotide
  Sense strand starting at position 3586 of SEQ ID NO: 875
uccugucauucuuuguuau

SEQ ID NO: 70581 - RNA, 19 nt, Artificial Sequence
  Description of Artificial Sequence: Synthetic oligonucleotide
  Antisense strand to SEQ ID NO: 70500
auaacaaagaaugacagga

SEQ ID NO: 70582 - RNA, 19 nt, Artificial Sequence
  Description of Artificial Sequence: Synthetic oligonucleotide
  Sense strand starting at position 3536 of SEQ ID NO: 875
guuaacauuugccaaagua

SEQ ID NO: 70583 - RNA, 19 nt, Artificial Sequence
  Description of Artificial Sequence: Synthetic oligonucleotide
  Antisense strand to SEQ ID NO: 70502
uacuuuggcaaauguuaac

SEQ ID NO: 70584 - RNA, 19 nt, Artificial Sequence
  Description of Artificial Sequence: Synthetic oligonucleotide
  Sense strand starting at position 3459 of SEQ ID NO: 875
auccuagaguuugaaacau

SEQ ID NO: 70585 - RNA, 19 nt, Artificial Sequence
  Description of Artificial Sequence: Synthetic oligonucleotide
  Antisense strand to SEQ ID NO: 70504
auguuucaaacucuaggau

SEQ ID NO: 70586 - RNA, 19 nt, Artificial Sequence
  Description of Artificial Sequence: Synthetic oligonucleotide
  Sense strand starting at position 3453 of SEQ ID NO: 875
cuuuaaauccuagaguuug

SEQ ID NO: 70587 - RNA, 19 nt, Artificial Sequence
  Description of Artificial Sequence: Synthetic oligonucleotide
  Antisense strand to SEQ ID NO: 70506
caaacucuaggauuuaaag

SEQ ID NO: 70588 - RNA, 19 nt, Artificial Sequence
  Description of Artificial Sequence: Synthetic oligonucleotide
  Sense strand starting at position 3405 of SEQ ID NO: 875
guugcaagauagucuuauu

SEQ ID NO: 70589 - RNA, 19 nt, Artificial Sequence
  Description of Artificial Sequence: Synthetic oligonucleotide
  Antisense strand to SEQ ID NO: 70508
aauaagacuaucuugcaac

SEQ ID NO: 70590 - RNA, 19 nt, Artificial Sequence
  Description of Artificial Sequence: Synthetic oligonucleotide
  Sense strand starting at position 3367 of SEQ ID NO: 875
ugagcaagugcucaauuaa

SEQ ID NO: 70591 - RNA, 19 nt, Artificial Sequence
  Description of Artificial Sequence: Synthetic oligonucleotide
  Antisense strand to SEQ ID NO: 70510
uuaauugagcacuugcuca

SEQ ID NO: 70592 - RNA, 19 nt, Artificial Sequence
  Description of Artificial Sequence: Synthetic oligonucleotide
  Sense strand starting at position 3366 of SEQ ID NO: 875
uugagcaagugcucaauua

SEQ ID NO: 70593 - RNA, 19 nt, Artificial Sequence
  Description of Artificial Sequence: Synthetic oligonucleotide
  Antisense strand to SEQ ID NO: 70512
uaauugagcacuugcucaa

SEQ ID NO: 70594 - RNA, 19 nt, Artificial Sequence
  Description of Artificial Sequence: Synthetic oligonucleotide
  Sense strand starting at position 3136 of SEQ ID NO: 875
ccgagcuuauuugaccaga

SEQ ID NO: 70595 - RNA, 19 nt, Artificial Sequence
  Description of Artificial Sequence: Synthetic oligonucleotide
  Antisense strand to SEQ ID NO: 70514
ucuggucaaauaagcucgg

SEQ ID NO: 70596 - RNA, 19 nt, Artificial Sequence
  Description of Artificial Sequence: Synthetic oligonucleotide
  Sense strand starting at position 3125 of SEQ ID NO: 875
uccaauauacuccgagcuu

SEQ ID NO: 70597 - RNA, 19 nt, Artificial Sequence
  Description of Artificial Sequence: Synthetic oligonucleotide
  Antisense strand to SEQ ID NO: 70516
aagcucggaguauauugga

SEQ ID NO: 70598 - RNA, 19 nt, Artificial Sequence
  Description of Artificial Sequence: Synthetic oligonucleotide
  Sense strand starting at position 2888 of SEQ ID NO: 875
acaguuacuggugguacua

SEQ ID NO: 70599 - RNA, 19 nt, Artificial Sequence
  Description of Artificial Sequence: Synthetic oligonucleotide
  Antisense strand to SEQ ID NO: 70518
uaguaccaccaguaacugu

SEQ ID NO: 70600 - RNA, 19 nt, Artificial Sequence
  Description of Artificial Sequence: Synthetic oligonucleotide
  Sense strand starting at position 2885 of SEQ ID NO: 875
auuacaguuacugguggua

SEQ ID NO: 70601 - RNA, 19 nt, Artificial Sequence
  Description of Artificial Sequence: Synthetic oligonucleotide
  Antisense strand to SEQ ID NO: 70520
uaccaccaguaacuguaau

SEQ ID NO: 70602 - RNA, 19 nt, Artificial Sequence
  Description of Artificial Sequence: Synthetic oligonucleotide
  Sense strand starting at position 2609 of SEQ ID NO: 875
gggucaaauuuauaaccua

SEQ ID NO: 70603 - RNA, 19 nt, Artificial Sequence
  Description of Artificial Sequence: Synthetic oligonucleotide
  Antisense strand to SEQ ID NO: 70522
uagguuauaaauuugaccc

SEQ ID NO: 70604 - RNA, 19 nt, Artificial Sequence
  Description of Artificial Sequence: Synthetic oligonucleotide
  Sense strand starting at position 2583 of SEQ ID NO: 875
ggcuuaguucagggauuga

SEQ ID NO: 70605 - RNA, 19 nt, Artificial Sequence
  Description of Artificial Sequence: Synthetic oligonucleotide
  Antisense strand to SEQ ID NO: 70524
ucaaucccugaacuaagcc

SEQ ID NO: 70606 - RNA, 19 nt, Artificial Sequence
  Description of Artificial Sequence: Synthetic oligonucleotide
  Sense strand starting at position 2572 of SEQ ID NO: 875
gagugucuuugggcuuagu

SEQ ID NO: 70607 - RNA, 19 nt, Artificial Sequence
  Description of Artificial Sequence: Synthetic oligonucleotide
  Antisense strand to SEQ ID NO: 70526
acuaagcccaaagacacuc

SEQ ID NO: 70608 - RNA, 19 nt, Artificial Sequence
  Description of Artificial Sequence: Synthetic oligonucleotide
  Sense strand starting at position 2568 of SEQ ID NO: 875
caaagagugucuuugggcu

SEQ ID NO: 70609 - RNA, 19 nt, Artificial Sequence
  Description of Artificial Sequence: Synthetic oligonucleotide
  Antisense strand to SEQ ID NO: 70528
agcccaaagacacucuuug

SEQ ID NO: 70610 - RNA, 19 nt, Artificial Sequence
  Description of Artificial Sequence: Synthetic oligonucleotide
  Sense strand starting at position 2525 of SEQ ID NO: 875
gaucucaaauuugguugaa

SEQ ID NO: 70611 - RNA, 19 nt, Artificial Sequence
  Description of Artificial Sequence: Synthetic oligonucleotide
  Antisense strand to SEQ ID NO: 70530
uucaaccaaauuugagauc

SEQ ID NO: 70612 - RNA, 19 nt, Artificial Sequence
  Description of Artificial Sequence: Synthetic oligonucleotide
  Sense strand starting at position 2471 of SEQ ID NO: 875
cugcuuuaucuaugaugaa

SEQ ID NO: 70613 - RNA, 19 nt, Artificial Sequence
  Description of Artificial Sequence: Synthetic oligonucleotide
  Antisense strand to SEQ ID NO: 70532
uucaucauagauaaagcag

SEQ ID NO: 70614 - RNA, 19 nt, Artificial Sequence
  Description of Artificial Sequence: Synthetic oligonucleotide
  Sense strand starting at position 2465 of SEQ ID NO: 875
ggcuuccugcuuuaucuau

SEQ ID NO: 70615 - RNA, 19 nt, Artificial Sequence
  Description of Artificial Sequence: Synthetic oligonucleotide
  Antisense strand to SEQ ID NO: 70534
auagauaaagcaggaagcc

SEQ ID NO: 70616 - RNA, 19 nt, Artificial Sequence
  Description of Artificial Sequence: Synthetic oligonucleotide
  Sense strand starting at position 2384 of SEQ ID NO: 875
gugggcuguucuccuaaga

SEQ ID NO: 70617 - RNA, 19 nt, Artificial Sequence
  Description of Artificial Sequence: Synthetic oligonucleotide
  Antisense strand to SEQ ID NO: 70536
ucuuaggagaacagcccac

SEQ ID NO: 70618 - RNA, 19 nt, Artificial Sequence
  Description of Artificial Sequence: Synthetic oligonucleotide
  Sense strand starting at position 2230 of SEQ ID NO: 875
agaggucacuaauuaguuu

SEQ ID NO: 70619 - RNA, 19 nt, Artificial Sequence
  Description of Artificial Sequence: Synthetic oligonucleotide
  Antisense strand to SEQ ID NO: 70538
aaacuaauuagugaccucu

SEQ ID NO: 70620 - RNA, 19 nt, Artificial Sequence
  Description of Artificial Sequence: Synthetic oligonucleotide
  Sense strand starting at position 2083 of SEQ ID NO: 875
uucugucacagcugagagu

SEQ ID NO: 70621 - RNA, 19 nt, Artificial Sequence
  Description of Artificial Sequence: Synthetic oligonucleotide
  Antisense strand to SEQ ID NO: 70540
acucucagcugugacagaa

SEQ ID NO: 70622 - RNA, 19 nt, Artificial Sequence
  Description of Artificial Sequence: Synthetic oligonucleotide
  Sense strand starting at position 2072 of SEQ ID NO: 875
agugucagugcuucuguca

SEQ ID NO: 70623 - RNA, 19 nt, Artificial Sequence
  Description of Artificial Sequence: Synthetic oligonucleotide
  Antisense strand to SEQ ID NO: 70542
ugacagaagcacugacacu

SEQ ID NO: 70624 - RNA, 19 nt, Artificial Sequence
  Description of Artificial Sequence: Synthetic oligonucleotide
  Sense strand starting at position 464 of SEQ ID NO: 875
agggcaguuuauguaagua

SEQ ID NO: 70625 - RNA, 19 nt, Artificial Sequence
  Description of Artificial Sequence: Synthetic oligonucleotide
  Antisense strand to SEQ ID NO: 70544
uacuuacauaaacugcccu

SEQ ID NO: 70626 - RNA, 19 nt, Artificial Sequence
  Description of Artificial Sequence: Synthetic oligonucleotide
  Sense strand starting at position 384 of SEQ ID NO: 875
agauuagugugauuaaagg

SEQ ID NO: 70627 - RNA, 19 nt, Artificial Sequence
  Description of Artificial Sequence: Synthetic oligonucleotide
  Antisense strand to SEQ ID NO: 70546
ccuuuaaucacacuaaucu

SEQ ID NO: 70628 - RNA, 19 nt, Artificial Sequence
  Description of Artificial Sequence: Synthetic oligonucleotide
  Sense strand starting at position 378 of SEQ ID NO: 875
gauuauagauuagugugau

SEQ ID NO: 70629 - RNA, 19 nt, Artificial Sequence
  Description of Artificial Sequence: Synthetic oligonucleotide
  Antisense strand to SEQ ID NO: 70548
aucacacuaaucuauaauc

SEQ ID NO: 70630 - RNA, 19 nt, Artificial Sequence
  Description of Artificial Sequence: Synthetic oligonucleotide
  Sense strand starting at position 349 of SEQ ID NO: 875
gugcauccuccaugaagag

SEQ ID NO: 70631 - RNA, 19 nt, Artificial Sequence
  Description of Artificial Sequence: Synthetic oligonucleotide
  Antisense strand to SEQ ID NO: 70550
cucuucauggaggaugcac

SEQ ID NO: 70632 - RNA, 19 nt, Artificial Sequence
  Description of Artificial Sequence: Synthetic oligonucleotide
  Sense strand starting at position 276 of SEQ ID NO: 875
cugugcugcagagaacauu

SEQ ID NO: 70633 - RNA, 19 nt, Artificial Sequence
  Description of Artificial Sequence: Synthetic oligonucleotide
  Antisense strand to SEQ ID NO: 70552
aauguucucugcagcacag

SEQ ID NO: 70634 - RNA, 19 nt, Artificial Sequence
  Description of Artificial Sequence: Synthetic oligonucleotide
  Sense strand starting at position 274 of SEQ ID NO: 875
aacugugcugcagagaaca

SEQ ID NO: 70635 - RNA, 19 nt, Artificial Sequence
  Description of Artificial Sequence: Synthetic oligonucleotide
  Antisense strand to SEQ ID NO: 70554
uguucucugcagcacaguu

SEQ ID NO: 70636 - RNA, 19 nt, Artificial Sequence
  Description of Artificial Sequence: Synthetic oligonucleotide
  Sense strand starting at position 253 of SEQ ID NO: 875
ucuauuuguuuauagcaga

SEQ ID NO: 70637 - RNA, 19 nt, Artificial Sequence
  Description of Artificial Sequence: Synthetic oligonucleotide
  Antisense strand to SEQ ID NO: 70556
ucugcuauaaacaaauaga

SEQ ID NO: 70638 - RNA, 19 nt, Artificial Sequence
  Description of Artificial Sequence: Synthetic oligonucleotide
  Sense strand starting at position 185 of SEQ ID NO: 875
acaggagacuguuaggaaa

SEQ ID NO: 70639 - RNA, 19 nt, Artificial Sequence
  Description of Artificial Sequence: Synthetic oligonucleotide
  Antisense strand to SEQ ID NO: 70558
uuuccuaacagucuccugu

SEQ ID NO: 70640 - RNA, 19 nt, Artificial Sequence
  Description of Artificial Sequence: Synthetic oligonucleotide
  Sense strand starting at position 94 of SEQ ID NO: 875
ggaugcucuauacaguaga

SEQ ID NO: 70641 - RNA, 19 nt, Artificial Sequence
  Description of Artificial Sequence: Synthetic oligonucleotide
  Antisense strand to SEQ ID NO: 70560
ucuacuguauagagcaucc

SEQ ID NO: 70642 - RNA, 19 nt, Artificial Sequence
  Description of Artificial Sequence: Synthetic oligonucleotide
  Sense strand starting at position 92 of SEQ ID NO: 875
auggaugcucuauacagua

SEQ ID NO: 70643 - RNA, 19 nt, Artificial Sequence
  Description of Artificial Sequence: Synthetic oligonucleotide
  Antisense strand to SEQ ID NO: 70562
uacuguauagagcauccau

SEQ ID NO: 70644 - RNA, 19 nt, Artificial Sequence
  Description of Artificial Sequence: Synthetic oligonucleotide
  Sense strand starting at position 56 of SEQ ID NO: 875
gauugcuuugcuggaagaa

SEQ ID NO: 70645 - RNA, 19 nt, Artificial Sequence
  Description of Artificial Sequence: Synthetic oligonucleotide
  Antisense strand to SEQ ID NO: 70564
uucuuccagcaaagcaauc

SEQ ID NO: 70646 - RNA, 19 nt, Artificial Sequence
  Description of Artificial Sequence: Synthetic oligonucleotide
  Sense strand starting at position 53 of SEQ ID NO: 875
ccagauugcuuugcuggaa

SEQ ID NO: 70647 - RNA, 19 nt, Artificial Sequence
  Description of Artificial Sequence: Synthetic oligonucleotide
  Antisense strand to SEQ ID NO: 70566
uuccagcaaagcaaucugg

SEQ ID NO: 70648 - RNA, 19 nt, Artificial Sequence
  Description of Artificial Sequence: Synthetic oligonucleotide
  Sense strand starting at position 52 of SEQ ID NO: 875
accagauugcuuugcugga

SEQ ID NO: 70649 - RNA, 19 nt, Artificial Sequence
  Description of Artificial Sequence: Synthetic oligonucleotide
  Antisense strand to SEQ ID NO: 70568
uccagcaaagcaaucuggu

SEQ ID NO: 70650 - RNA, 19 nt, Artificial Sequence
  Description of Artificial Sequence: Synthetic oligonucleotide
  Sense strand starting at position 3796 of SEQ ID NO: 876
auugucugggauuagguaa

SEQ ID NO: 70651 - RNA, 19 nt, Artificial Sequence
  Description of Artificial Sequence: Synthetic oligonucleotide
  Antisense strand to SEQ ID NO: 70570
uuaccuaaucccagacaau

SEQ ID NO: 70652 - RNA, 19 nt, Artificial Sequence
  Description of Artificial Sequence: Synthetic oligonucleotide
  Sense strand starting at position 3792 of SEQ ID NO: 876
gcagauugucugggauuag

SEQ ID NO: 70653 - RNA, 19 nt, Artificial Sequence
  Description of Artificial Sequence: Synthetic oligonucleotide
  Antisense strand to SEQ ID NO: 70572
cuaaucccagacaaucugc

SEQ ID NO: 70654 - RNA, 19 nt, Artificial Sequence
  Description of Artificial Sequence: Synthetic oligonucleotide
  Sense strand starting at position 3789 of SEQ ID NO: 876
caagcagauugucugggau

SEQ ID NO: 70655 - RNA, 19 nt, Artificial Sequence
  Description of Artificial Sequence: Synthetic oligonucleotide
  Antisense strand to SEQ ID NO: 70574
aucccagacaaucugcuug

SEQ ID NO: 70656 - RNA, 19 nt, Artificial Sequence
  Description of Artificial Sequence: Synthetic oligonucleotide
  Sense strand starting at position 3774 of SEQ ID NO: 876
agauuaauuuggcaucaag

SEQ ID NO: 70657 - RNA, 19 nt, Artificial Sequence
  Description of Artificial Sequence: Synthetic oligonucleotide
  Antisense strand to SEQ ID NO: 70576
cuugaugccaaauuaaucu

SEQ ID NO: 70658 - RNA, 19 nt, Artificial Sequence
  Description of Artificial Sequence: Synthetic oligonucleotide
  Sense strand starting at position 3763 of SEQ ID NO: 876
uuguguuggcaagauuaau

SEQ ID NO: 70659 - RNA, 19 nt, Artificial Sequence
  Description of Artificial Sequence: Synthetic oligonucleotide
  Antisense strand to SEQ ID NO: 70578
auuaaucuugccaacacaa

SEQ ID NO: 70660 - RNA, 19 nt, Artificial Sequence
  Description of Artificial Sequence: Synthetic oligonucleotide
  Sense strand starting at position 3756 of SEQ ID NO: 876
ugugcuguuguguuggcaa

SEQ ID NO: 70661 - RNA, 19 nt, Artificial Sequence
  Description of Artificial Sequence: Synthetic oligonucleotide
  Antisense strand to SEQ ID NO: 70580
uugccaacacaacagcaca

SEQ ID NO: 70662 - RNA, 19 nt, Artificial Sequence
  Description of Artificial Sequence: Synthetic oligonucleotide
  Sense strand starting at position 3678 of SEQ ID NO: 876
cauaccugcguacaagaaa

SEQ ID NO: 70663 - RNA, 19 nt, Artificial Sequence
  Description of Artificial Sequence: Synthetic oligonucleotide
  Antisense strand to SEQ ID NO: 70582
uuucuuguacgcagguaug

SEQ ID NO: 70664 - RNA, 19 nt, Artificial Sequence
  Description of Artificial Sequence: Synthetic oligonucleotide
  Sense strand starting at position 3676 of SEQ ID NO: 876
ggcauaccugcguacaaga

SEQ ID NO: 70665 - RNA, 19 nt, Artificial Sequence
  Description of Artificial Sequence: Synthetic oligonucleotide
  Antisense strand to SEQ ID NO: 70584
ucuuguacgcagguaugcc

SEQ ID NO: 70666 - RNA, 19 nt, Artificial Sequence
  Description of Artificial Sequence: Synthetic oligonucleotide
  Sense strand starting at position 3524 of SEQ ID NO: 876
cuguuugaaguccaaguau

SEQ ID NO: 70667 - RNA, 19 nt, Artificial Sequence
  Description of Artificial Sequence: Synthetic oligonucleotide
  Antisense strand to SEQ ID NO: 70586
auacuuggacuucaaacag

SEQ ID NO: 70668 - RNA, 19 nt, Artificial Sequence
  Description of Artificial Sequence: Synthetic oligonucleotide
  Sense strand starting at position 3517 of SEQ ID NO: 876
cccagaucuguuugaaguc

SEQ ID NO: 70669 - RNA, 19 nt, Artificial Sequence
  Description of Artificial Sequence: Synthetic oligonucleotide
  Antisense strand to SEQ ID NO: 70588
gacuucaaacagaucuggg

SEQ ID NO: 70670 - RNA, 19 nt, Artificial Sequence
  Description of Artificial Sequence: Synthetic oligonucleotide
  Sense strand starting at position 3514 of SEQ ID NO: 876
gaacccagaucuguuugaa

SEQ ID NO: 70671 - RNA, 19 nt, Artificial Sequence
  Description of Artificial Sequence: Synthetic oligonucleotide
  Antisense strand to SEQ ID NO: 70590
uucaaacagaucuggguuc

SEQ ID NO: 70672 - RNA, 19 nt, Artificial Sequence
  Description of Artificial Sequence: Synthetic oligonucleotide
  Sense strand starting at position 3127 of SEQ ID NO: 876
cugagacuugccuaucuag

SEQ ID NO: 70673 - RNA, 19 nt, Artificial Sequence
  Description of Artificial Sequence: Synthetic oligonucleotide
  Antisense strand to SEQ ID NO: 70592
cuagauaggcaagucucag

SEQ ID NO: 70674 - RNA, 19 nt, Artificial Sequence
  Description of Artificial Sequence: Synthetic oligonucleotide
  Sense strand starting at position 2996 of SEQ ID NO: 876
ggccaagguauccauguuu

SEQ ID NO: 70675 - RNA, 19 nt, Artificial Sequence
  Description of Artificial Sequence: Synthetic oligonucleotide
  Antisense strand to SEQ ID NO: 70594
aaacauggauaccuuggcc

SEQ ID NO: 70676 - RNA, 19 nt, Artificial Sequence
  Description of Artificial Sequence: Synthetic oligonucleotide
  Sense strand starting at position 2900 of SEQ ID NO: 876
ucccucuagcuaugaagaa

SEQ ID NO: 70677 - RNA, 19 nt, Artificial Sequence
  Description of Artificial Sequence: Synthetic oligonucleotide
  Antisense strand to SEQ ID NO: 70596
uucuucauagcuagaggga

SEQ ID NO: 70678 - RNA, 19 nt, Artificial Sequence
  Description of Artificial Sequence: Synthetic oligonucleotide
  Sense strand starting at position 2799 of SEQ ID NO: 876
cuggauuugugggacugga

SEQ ID NO: 70679 - RNA, 19 nt, Artificial Sequence
  Description of Artificial Sequence: Synthetic oligonucleotide
  Antisense strand to SEQ ID NO: 70598
uccagucccacaaauccag

SEQ ID NO: 70680 - RNA, 19 nt, Artificial Sequence
  Description of Artificial Sequence: Synthetic oligonucleotide
  Sense strand starting at position 2786 of SEQ ID NO: 876
ugcucacacugaucuggau

SEQ ID NO: 70681 - RNA, 19 nt, Artificial Sequence
  Description of Artificial Sequence: Synthetic oligonucleotide
  Antisense strand to SEQ ID NO: 70600
auccagaucagugugagca

SEQ ID NO: 70682 - RNA, 19 nt, Artificial Sequence
  Description of Artificial Sequence: Synthetic oligonucleotide
  Sense strand starting at position 2637 of SEQ ID NO: 876
auuguauguuuauuggaac

SEQ ID NO: 70683 - RNA, 19 nt, Artificial Sequence
  Description of Artificial Sequence: Synthetic oligonucleotide
  Antisense strand to SEQ ID NO: 70602
guuccaauaaacauacaau

SEQ ID NO: 70684 - RNA, 19 nt, Artificial Sequence
  Description of Artificial Sequence: Synthetic oligonucleotide
  Sense strand starting at position 2344 of SEQ ID NO: 876
uggccuugauuucuuagca

SEQ ID NO: 70685 - RNA, 19 nt, Artificial Sequence
  Description of Artificial Sequence: Synthetic oligonucleotide
  Antisense strand to SEQ ID NO: 70604
ugcuaagaaaucaaggcca

SEQ ID NO: 70686 - RNA, 19 nt, Artificial Sequence
  Description of Artificial Sequence: Synthetic oligonucleotide
  Sense strand starting at position 2089 of SEQ ID NO: 876
gagucacuucuggagcaaa

SEQ ID NO: 70687 - RNA, 19 nt, Artificial Sequence
  Description of Artificial Sequence: Synthetic oligonucleotide
  Antisense strand to SEQ ID NO: 70606
uuugcuccagaagugacuc

SEQ ID NO: 70688 - RNA, 19 nt, Artificial Sequence
  Description of Artificial Sequence: Synthetic oligonucleotide
  Sense strand starting at position 1796 of SEQ ID NO: 876
aacugcucaccggaaugua

SEQ ID NO: 70689 - RNA, 19 nt, Artificial Sequence
  Description of Artificial Sequence: Synthetic oligonucleotide
  Antisense strand to SEQ ID NO: 70608
uacauuccggugagcaguu

SEQ ID NO: 70690 - RNA, 19 nt, Artificial Sequence
  Description of Artificial Sequence: Synthetic oligonucleotide
  Sense strand starting at position 1793 of SEQ ID NO: 876
ucaaacugcucaccggaau

SEQ ID NO: 70691 - RNA, 19 nt, Artificial Sequence
  Description of Artificial Sequence: Synthetic oligonucleotide
  Antisense strand to SEQ ID NO: 70610
auuccggugagcaguuuga

SEQ ID NO: 70692 - RNA, 19 nt, Artificial Sequence
  Description of Artificial Sequence: Synthetic oligonucleotide
  Sense strand starting at position 1754 of SEQ ID NO: 876
caauaccgccuuugggaua

SEQ ID NO: 70693 - RNA, 19 nt, Artificial Sequence
  Description of Artificial Sequence: Synthetic oligonucleotide
  Antisense strand to SEQ ID NO: 70612
uaucccaaaggcgguauug

SEQ ID NO: 70694 - RNA, 19 nt, Artificial Sequence
  Description of Artificial Sequence: Synthetic oligonucleotide
  Sense strand starting at position 1631 of SEQ ID NO: 876
gacccauguccaugacaug

SEQ ID NO: 70695 - RNA, 19 nt, Artificial Sequence
  Description of Artificial Sequence: Synthetic oligonucleotide
  Antisense strand to SEQ ID NO: 70614
caugucauggacauggguc

SEQ ID NO: 70696 - RNA, 19 nt, Artificial Sequence
  Description of Artificial Sequence: Synthetic oligonucleotide
  Sense strand starting at position 1625 of SEQ ID NO: 876
gugggagacccauguccau

SEQ ID NO: 70697 - RNA, 19 nt, Artificial Sequence
  Description of Artificial Sequence: Synthetic oligonucleotide
  Antisense strand to SEQ ID NO: 70616
auggacaugggucucccac

SEQ ID NO: 70698 - RNA, 19 nt, Artificial Sequence
  Description of Artificial Sequence: Synthetic oligonucleotide
  Sense strand starting at position 1609 of SEQ ID NO: 876
ggcccauuccuagaaugug

SEQ ID NO: 70699 - RNA, 19 nt, Artificial Sequence
  Description of Artificial Sequence: Synthetic oligonucleotide
  Antisense strand to SEQ ID NO: 70618
cacauucuaggaaugggcc

SEQ ID NO: 70700 - RNA, 19 nt, Artificial Sequence
  Description of Artificial Sequence: Synthetic oligonucleotide
  Sense strand starting at position 1380 of SEQ ID NO: 876
augcaagaugugcauaagu

SEQ ID NO: 70701 - RNA, 19 nt, Artificial Sequence
  Description of Artificial Sequence: Synthetic oligonucleotide
  Antisense strand to SEQ ID NO: 70620
acuuaugcacaucuugcau

SEQ ID NO: 70702 - RNA, 19 nt, Artificial Sequence
  Description of Artificial Sequence: Synthetic oligonucleotide
  Sense strand starting at position 1378 of SEQ ID NO: 876
ggaugcaagaugugcauaa

SEQ ID NO: 70703 - RNA, 19 nt, Artificial Sequence
  Description of Artificial Sequence: Synthetic oligonucleotide
  Antisense strand to SEQ ID NO: 70622
uuaugcacaucuugcaucc

SEQ ID NO: 70704 - RNA, 19 nt, Artificial Sequence
  Description of Artificial Sequence: Synthetic oligonucleotide
  Sense strand starting at position 1219 of SEQ ID NO: 876
aggucauaucauuaugccu

SEQ ID NO: 70705 - RNA, 19 nt, Artificial Sequence
  Description of Artificial Sequence: Synthetic oligonucleotide
  Antisense strand to SEQ ID NO: 70624
aggcauaaugauaugaccu

SEQ ID NO: 70706 - RNA, 19 nt, Artificial Sequence
  Description of Artificial Sequence: Synthetic oligonucleotide
  Sense strand starting at position 1208 of SEQ ID NO: 876
acuccucucccaggucaua

SEQ ID NO: 70707 - RNA, 19 nt, Artificial Sequence
  Description of Artificial Sequence: Synthetic oligonucleotide
  Antisense strand to SEQ ID NO: 70626
uaugaccugggagaggagu

SEQ ID NO: 70708 - RNA, 19 nt, Artificial Sequence
  Description of Artificial Sequence: Synthetic oligonucleotide
  Sense strand starting at position 1124 of SEQ ID NO: 876
ugggcacucccucacuaau

SEQ ID NO: 70709 - RNA, 19 nt, Artificial Sequence
  Description of Artificial Sequence: Synthetic oligonucleotide
  Antisense strand to SEQ ID NO: 70628
auuagugagggagugccca

SEQ ID NO: 70710 - RNA, 19 nt, Artificial Sequence
  Description of Artificial Sequence: Synthetic oligonucleotide
  Sense strand starting at position 1099 of SEQ ID NO: 876
cagacagaucaguguaucu

SEQ ID NO: 70711 - RNA, 19 nt, Artificial Sequence
  Description of Artificial Sequence: Synthetic oligonucleotide
  Antisense strand to SEQ ID NO: 70630
agauacacugaucugucug

SEQ ID NO: 70712 - RNA, 19 nt, Artificial Sequence
  Description of Artificial Sequence: Synthetic oligonucleotide
  Sense strand starting at position 1072 of SEQ ID NO: 876
augccaggauuccaauuua

SEQ ID NO: 70713 - RNA, 19 nt, Artificial Sequence
  Description of Artificial Sequence: Synthetic oligonucleotide
  Antisense strand to SEQ ID NO: 70632
uaaauuggaauccuggcau

SEQ ID NO: 70714 - RNA, 19 nt, Artificial Sequence
  Description of Artificial Sequence: Synthetic oligonucleotide
  Sense strand starting at position 999 of SEQ ID NO: 876
gcaagaaggcauuggacau

SEQ ID NO: 70715 - RNA, 19 nt, Artificial Sequence
  Description of Artificial Sequence: Synthetic oligonucleotide
  Antisense strand to SEQ ID NO: 70634
auguccaaugccuucuugc

SEQ ID NO: 70716 - RNA, 19 nt, Artificial Sequence
  Description of Artificial Sequence: Synthetic oligonucleotide
  Sense strand starting at position 729 of SEQ ID NO: 876
aucagcuucucauuagagu

SEQ ID NO: 70717 - RNA, 19 nt, Artificial Sequence
  Description of Artificial Sequence: Synthetic oligonucleotide
  Antisense strand to SEQ ID NO: 70636
acucuaaugagaagcugau

SEQ ID NO: 70718 - RNA, 19 nt, Artificial Sequence
  Description of Artificial Sequence: Synthetic oligonucleotide
  Sense strand starting at position 682 of SEQ ID NO: 876
gacuuagagucugcagaga

SEQ ID NO: 70719 - RNA, 19 nt, Artificial Sequence
  Description of Artificial Sequence: Synthetic oligonucleotide
  Antisense strand to SEQ ID NO: 70638
ucucugcagacucuaaguc

SEQ ID NO: 70720 - RNA, 19 nt, Artificial Sequence
  Description of Artificial Sequence: Synthetic oligonucleotide
  Sense strand starting at position 439 of SEQ ID NO: 876
auaggugcugaauacaauu

SEQ ID NO: 70721 - RNA, 19 nt, Artificial Sequence
  Description of Artificial Sequence: Synthetic oligonucleotide
  Antisense strand to SEQ ID NO: 70640
aauuguauucagcaccuau

SEQ ID NO: 70722 - RNA, 19 nt, Artificial Sequence
  Description of Artificial Sequence: Synthetic oligonucleotide
  Sense strand starting at position 299 of SEQ ID NO: 876
uuucuauggcugcaauaaa

SEQ ID NO: 70723 - RNA, 19 nt, Artificial Sequence
  Description of Artificial Sequence: Synthetic oligonucleotide
  Antisense strand to SEQ ID NO: 70642
uuuauugcagccauagaaa

SEQ ID NO: 70724 - RNA, 19 nt, Artificial Sequence
  Description of Artificial Sequence: Synthetic oligonucleotide
  Sense strand starting at position 296 of SEQ ID NO: 876
ucauuucuauggcugcaau

SEQ ID NO: 70725 - RNA, 19 nt, Artificial Sequence
  Description of Artificial Sequence: Synthetic oligonucleotide
  Antisense strand to SEQ ID NO: 70644
auugcagccauagaaauga

SEQ ID NO: 70726 - RNA, 19 nt, Artificial Sequence
  Description of Artificial Sequence: Synthetic oligonucleotide
  Sense strand starting at position 224 of SEQ ID NO: 876
guucuagacuuacuacagu

SEQ ID NO: 70727 - RNA, 19 nt, Artificial Sequence
  Description of Artificial Sequence: Synthetic oligonucleotide
  Antisense strand to SEQ ID NO: 70646
acuguaguaagucuagaac

SEQ ID NO: 70728 - RNA, 19 nt, Artificial Sequence
  Description of Artificial Sequence: Synthetic oligonucleotide
  Sense strand starting at position 172 of SEQ ID NO: 876
cucugaucucuggagcuga

SEQ ID NO: 70729 - RNA, 19 nt, Artificial Sequence
  Description of Artificial Sequence: Synthetic oligonucleotide
  Antisense strand to SEQ ID NO: 70648
ucagcuccagagaucagag

SEQ ID NO: 70730 - RNA, 19 nt, Artificial Sequence
  Description of Artificial Sequence: Synthetic oligonucleotide
  Sense strand starting at position 3947 of SEQ ID NO: 877
ugccauuuguccuuauuga

SEQ ID NO: 70731 - RNA, 19 nt, Artificial Sequence
  Description of Artificial Sequence: Synthetic oligonucleotide
  Antisense strand to SEQ ID NO: 70650
ucaauaaggacaaauggca

SEQ ID NO: 70732 - RNA, 19 nt, Artificial Sequence
  Description of Artificial Sequence: Synthetic oligonucleotide
  Sense strand starting at position 3917 of SEQ ID NO: 877
augaguauuugucaucauc

SEQ ID NO: 70733 - RNA, 19 nt, Artificial Sequence
  Description of Artificial Sequence: Synthetic oligonucleotide
  Antisense strand to SEQ ID NO: 70652
gaugaugacaaauacucau

SEQ ID NO: 70734 - RNA, 19 nt, Artificial Sequence
  Description of Artificial Sequence: Synthetic oligonucleotide
  Sense strand starting at position 3906 of SEQ ID NO: 877
auguaaaugagaugaguau

SEQ ID NO: 70735 - RNA, 19 nt, Artificial Sequence
  Description of Artificial Sequence: Synthetic oligonucleotide
  Antisense strand to SEQ ID NO: 70654
auacucaucucauuuacau

SEQ ID NO: 70736 - RNA, 19 nt, Artificial Sequence
  Description of Artificial Sequence: Synthetic oligonucleotide
  Sense strand starting at position 3889 of SEQ ID NO: 877
cgauaucaaguuuacugau

SEQ ID NO: 70737 - RNA, 19 nt, Artificial Sequence
  Description of Artificial Sequence: Synthetic oligonucleotide
  Antisense strand to SEQ ID NO: 70656
aucaguaaacuugauaucg

SEQ ID NO: 70738 - RNA, 19 nt, Artificial Sequence
  Description of Artificial Sequence: Synthetic oligonucleotide
  Sense strand starting at position 3865 of SEQ ID NO: 877
ugcuauucagaggguugaa

SEQ ID NO: 70739 - RNA, 19 nt, Artificial Sequence
  Description of Artificial Sequence: Synthetic oligonucleotide
  Antisense strand to SEQ ID NO: 70658
uucaacccucugaauagca

SEQ ID NO: 70740 - RNA, 19 nt, Artificial Sequence
  Description of Artificial Sequence: Synthetic oligonucleotide
  Sense strand starting at position 3791 of SEQ ID NO: 877
gcuauaucugaaugaaauu

SEQ ID NO: 70741 - RNA, 19 nt, Artificial Sequence
  Description of Artificial Sequence: Synthetic oligonucleotide
  Antisense strand to SEQ ID NO: 70660
aauuucauucagauauagc

SEQ ID NO: 70742 - RNA, 19 nt, Artificial Sequence
  Description of Artificial Sequence: Synthetic oligonucleotide
  Sense strand starting at position 3712 of SEQ ID NO: 877
caauaugguuaguugauga

SEQ ID NO: 70743 - RNA, 19 nt, Artificial Sequence
  Description of Artificial Sequence: Synthetic oligonucleotide
  Antisense strand to SEQ ID NO: 70662
ucaucaacuaaccauauug

SEQ ID NO: 70744 - RNA, 19 nt, Artificial Sequence
  Description of Artificial Sequence: Synthetic oligonucleotide
  Sense strand starting at position 3633 of SEQ ID NO: 877
gucauaugucccuaagagc

SEQ ID NO: 70745 - RNA, 19 nt, Artificial Sequence
  Description of Artificial Sequence: Synthetic oligonucleotide
  Antisense strand to SEQ ID NO: 70664
gcucuuagggacauaugac

SEQ ID NO: 70746 - RNA, 19 nt, Artificial Sequence
  Description of Artificial Sequence: Synthetic oligonucleotide
  Sense strand starting at position 3632 of SEQ ID NO: 877
ggucauaugucccuaagag

SEQ ID NO: 70747 - RNA, 19 nt, Artificial Sequence
  Description of Artificial Sequence: Synthetic oligonucleotide
  Antisense strand to SEQ ID NO: 70666
cucuuagggacauaugacc

SEQ ID NO: 70748 - RNA, 19 nt, Artificial Sequence
  Description of Artificial Sequence: Synthetic oligonucleotide
  Sense strand starting at position 3623 of SEQ ID NO: 877
guaguucugggucauaugu

SEQ ID NO: 70749 - RNA, 19 nt, Artificial Sequence
  Description of Artificial Sequence: Synthetic oligonucleotide
  Antisense strand to SEQ ID NO: 70668
acauaugacccagaacuac

SEQ ID NO: 70750 - RNA, 19 nt, Artificial Sequence
  Description of Artificial Sequence: Synthetic oligonucleotide
  Sense strand starting at position 3620 of SEQ ID NO: 877
guuguaguucugggucaua

SEQ ID NO: 70751 - RNA, 19 nt, Artificial Sequence
  Description of Artificial Sequence: Synthetic oligonucleotide
  Antisense strand to SEQ ID NO: 70670
uaugacccagaacuacaac

SEQ ID NO: 70752 - RNA, 19 nt, Artificial Sequence
  Description of Artificial Sequence: Synthetic oligonucleotide
  Sense strand starting at position 3609 of SEQ ID NO: 877
caugcauugcaguuguagu

SEQ ID NO: 70753 - RNA, 19 nt, Artificial Sequence
  Description of Artificial Sequence: Synthetic oligonucleotide
  Antisense strand to SEQ ID NO: 70672
acuacaacugcaaugcaug

SEQ ID NO: 70754 - RNA, 19 nt, Artificial Sequence
  Description of Artificial Sequence: Synthetic oligonucleotide
  Sense strand starting at position 3455 of SEQ ID NO: 877
agccuugcgauggauuauu

SEQ ID NO: 70755 - RNA, 19 nt, Artificial Sequence
  Description of Artificial Sequence: Synthetic oligonucleotide
  Antisense strand to SEQ ID NO: 70674
aauaauccaucgcaaggcu

SEQ ID NO: 70756 - RNA, 19 nt, Artificial Sequence
  Description of Artificial Sequence: Synthetic oligonucleotide
  Sense strand starting at position 3454 of SEQ ID NO: 877
uagccuugcgauggauuau

SEQ ID NO: 70757 - RNA, 19 nt, Artificial Sequence
  Description of Artificial Sequence: Synthetic oligonucleotide
  Antisense strand to SEQ ID NO: 70676
auaauccaucgcaaggcua

SEQ ID NO: 70758 - RNA, 19 nt, Artificial Sequence
  Description of Artificial Sequence: Synthetic oligonucleotide
  Sense strand starting at position 3368 of SEQ ID NO: 877
augggaauaugguaacaug

SEQ ID NO: 70759 - RNA, 19 nt, Artificial Sequence
  Description of Artificial Sequence: Synthetic oligonucleotide
  Antisense strand to SEQ ID NO: 70678
cauguuaccauauucccau

SEQ ID NO: 70760 - RNA, 19 nt, Artificial Sequence
  Description of Artificial Sequence: Synthetic oligonucleotide
  Sense strand starting at position 3280 of SEQ ID NO: 877
uuauccauuccauguggga

SEQ ID NO: 70761 - RNA, 19 nt, Artificial Sequence
  Description of Artificial Sequence: Synthetic oligonucleotide
  Antisense strand to SEQ ID NO: 70680
ucccacauggaauggauaa

SEQ ID NO: 70762 - RNA, 19 nt, Artificial Sequence
  Description of Artificial Sequence: Synthetic oligonucleotide
  Sense strand starting at position 3234 of SEQ ID NO: 877
agauuugcagucugauguu

SEQ ID NO: 70763 - RNA, 19 nt, Artificial Sequence
  Description of Artificial Sequence: Synthetic oligonucleotide
  Antisense strand to SEQ ID NO: 70682
aacaucagacugcaaaucu

SEQ ID NO: 70764 - RNA, 19 nt, Artificial Sequence
  Description of Artificial Sequence: Synthetic oligonucleotide
  Sense strand starting at position 3221 of SEQ ID NO: 877
uugucugucuuggagauuu

SEQ ID NO: 70765 - RNA, 19 nt, Artificial Sequence
  Description of Artificial Sequence: Synthetic oligonucleotide
  Antisense strand to SEQ ID NO: 70684
aaaucuccaagacagacaa

SEQ ID NO: 70766 - RNA, 19 nt, Artificial Sequence
  Description of Artificial Sequence: Synthetic oligonucleotide
  Sense strand starting at position 3220 of SEQ ID NO: 877
cuugucugucuuggagauu

SEQ ID NO: 70767 - RNA, 19 nt, Artificial Sequence
  Description of Artificial Sequence: Synthetic oligonucleotide
  Antisense strand to SEQ ID NO: 70686
aaucuccaagacagacaag

SEQ ID NO: 70768 - RNA, 19 nt, Artificial Sequence
  Description of Artificial Sequence: Synthetic oligonucleotide
  Sense strand starting at position 2931 of SEQ ID NO: 877
gaaacaucaguguaagcca

SEQ ID NO: 70769 - RNA, 19 nt, Artificial Sequence
  Description of Artificial Sequence: Synthetic oligonucleotide
  Antisense strand to SEQ ID NO: 70688
uggcuuacacugauguuuc

SEQ ID NO: 70770 - RNA, 19 nt, Artificial Sequence
  Description of Artificial Sequence: Synthetic oligonucleotide
  Sense strand starting at position 2929 of SEQ ID NO: 877
gugaaacaucaguguaagc

SEQ ID NO: 70771 - RNA, 19 nt, Artificial Sequence
  Description of Artificial Sequence: Synthetic oligonucleotide
  Antisense strand to SEQ ID NO: 70690
gcuuacacugauguuucac

SEQ ID NO: 70772 - RNA, 19 nt, Artificial Sequence
  Description of Artificial Sequence: Synthetic oligonucleotide
  Sense strand starting at position 2928 of SEQ ID NO: 877
ugugaaacaucaguguaag

SEQ ID NO: 70773 - RNA, 19 nt, Artificial Sequence
  Description of Artificial Sequence: Synthetic oligonucleotide
  Antisense strand to SEQ ID NO: 70692
cuuacacugauguuucaca

SEQ ID NO: 70774 - RNA, 19 nt, Artificial Sequence
  Description of Artificial Sequence: Synthetic oligonucleotide
  Sense strand starting at position 2890 of SEQ ID NO: 877
ggaucuguguacuuauaaa

SEQ ID NO: 70775 - RNA, 19 nt, Artificial Sequence
  Description of Artificial Sequence: Synthetic oligonucleotide
  Antisense strand to SEQ ID NO: 70694
uuuauaaguacacagaucc

SEQ ID NO: 70776 - RNA, 19 nt, Artificial Sequence
  Description of Artificial Sequence: Synthetic oligonucleotide
  Sense strand starting at position 2887 of SEQ ID NO: 877
aguggaucuguguacuuau

SEQ ID NO: 70777 - RNA, 19 nt, Artificial Sequence
  Description of Artificial Sequence: Synthetic oligonucleotide
  Antisense strand to SEQ ID NO: 70696
auaaguacacagauccacu

SEQ ID NO: 70778 - RNA, 19 nt, Artificial Sequence
  Description of Artificial Sequence: Synthetic oligonucleotide
  Sense strand starting at position 2860 of SEQ ID NO: 877
uggaacuacucuguaugau

SEQ ID NO: 70779 - RNA, 19 nt, Artificial Sequence
  Description of Artificial Sequence: Synthetic oligonucleotide
  Antisense strand to SEQ ID NO: 70698
aucauacagaguaguucca

SEQ ID NO: 70780 - RNA, 19 nt, Artificial Sequence
  Description of Artificial Sequence: Synthetic oligonucleotide
  Sense strand starting at position 2859 of SEQ ID NO: 877
guggaacuacucuguauga

SEQ ID NO: 70781 - RNA, 19 nt, Artificial Sequence
  Description of Artificial Sequence: Synthetic oligonucleotide
  Antisense strand to SEQ ID NO: 70700
ucauacagaguaguuccac

SEQ ID NO: 70782 - RNA, 19 nt, Artificial Sequence
  Description of Artificial Sequence: Synthetic oligonucleotide
  Sense strand starting at position 2843 of SEQ ID NO: 877
gaagauucuuaggacagug

SEQ ID NO: 70783 - RNA, 19 nt, Artificial Sequence
  Description of Artificial Sequence: Synthetic oligonucleotide
  Antisense strand to SEQ ID NO: 70702
cacuguccuaagaaucuuc

SEQ ID NO: 70784 - RNA, 19 nt, Artificial Sequence
  Description of Artificial Sequence: Synthetic oligonucleotide
  Sense strand starting at position 2840 of SEQ ID NO: 877
acggaagauucuuaggaca

SEQ ID NO: 70785 - RNA, 19 nt, Artificial Sequence
  Description of Artificial Sequence: Synthetic oligonucleotide
  Antisense strand to SEQ ID NO: 70704
uguccuaagaaucuuccgu

SEQ ID NO: 70786 - RNA, 19 nt, Artificial Sequence
  Description of Artificial Sequence: Synthetic oligonucleotide
  Sense strand starting at position 2681 of SEQ ID NO: 877
accuuaaguguguaucacu

SEQ ID NO: 70787 - RNA, 19 nt, Artificial Sequence
  Description of Artificial Sequence: Synthetic oligonucleotide
  Antisense strand to SEQ ID NO: 70706
agugauacacacuuaaggu

SEQ ID NO: 70788 - RNA, 19 nt, Artificial Sequence
  Description of Artificial Sequence: Synthetic oligonucleotide
  Sense strand starting at position 2679 of SEQ ID NO: 877
gaaccuuaaguguguauca

SEQ ID NO: 70789 - RNA, 19 nt, Artificial Sequence
  Description of Artificial Sequence: Synthetic oligonucleotide
  Antisense strand to SEQ ID NO: 70708
ugauacacacuuaagguuc

SEQ ID NO: 70790 - RNA, 19 nt, Artificial Sequence
  Description of Artificial Sequence: Synthetic oligonucleotide
  Sense strand starting at position 2594 of SEQ ID NO: 877
gcagaugucagugguacau

SEQ ID NO: 70791 - RNA, 19 nt, Artificial Sequence
  Description of Artificial Sequence: Synthetic oligonucleotide
  Antisense strand to SEQ ID NO: 70710
auguaccacugacaucugc

SEQ ID NO: 70792 - RNA, 19 nt, Artificial Sequence
  Description of Artificial Sequence: Synthetic oligonucleotide
  Sense strand starting at position 2593 of SEQ ID NO: 877
agcagaugucagugguaca

SEQ ID NO: 70793 - RNA, 19 nt, Artificial Sequence
  Description of Artificial Sequence: Synthetic oligonucleotide
  Antisense strand to SEQ ID NO: 70712
uguaccacugacaucugcu

SEQ ID NO: 70794 - RNA, 19 nt, Artificial Sequence
  Description of Artificial Sequence: Synthetic oligonucleotide
  Sense strand starting at position 2543 of SEQ ID NO: 877
uuaguaaugaaaugguuag

SEQ ID NO: 70795 - RNA, 19 nt, Artificial Sequence
  Description of Artificial Sequence: Synthetic oligonucleotide
  Antisense strand to SEQ ID NO: 70714
cuaaccauuucauuacuaa

SEQ ID NO: 70796 - RNA, 19 nt, Artificial Sequence
  Description of Artificial Sequence: Synthetic oligonucleotide
  Sense strand starting at position 2391 of SEQ ID NO: 877
cgagaauuacuuuaugcac

SEQ ID NO: 70797 - RNA, 19 nt, Artificial Sequence
  Description of Artificial Sequence: Synthetic oligonucleotide
  Antisense strand to SEQ ID NO: 70716
gugcauaaaguaauucucg

SEQ ID NO: 70798 - RNA, 19 nt, Artificial Sequence
  Description of Artificial Sequence: Synthetic oligonucleotide
  Sense strand starting at position 2157 of SEQ ID NO: 877
aaguccugucguuaacaag

SEQ ID NO: 70799 - RNA, 19 nt, Artificial Sequence
  Description of Artificial Sequence: Synthetic oligonucleotide
  Antisense strand to SEQ ID NO: 70718
cuuguuaacgacaggacuu

SEQ ID NO: 70800 - RNA, 19 nt, Artificial Sequence
  Description of Artificial Sequence: Synthetic oligonucleotide
  Sense strand starting at position 2156 of SEQ ID NO: 877
aaaguccugucguuaacaa

SEQ ID NO: 70801 - RNA, 19 nt, Artificial Sequence
  Description of Artificial Sequence: Synthetic oligonucleotide
  Antisense strand to SEQ ID NO: 70720
uuguuaacgacaggacuuu

SEQ ID NO: 70802 - RNA, 19 nt, Artificial Sequence
  Description of Artificial Sequence: Synthetic oligonucleotide
  Sense strand starting at position 2092 of SEQ ID NO: 877
cacgcuuggcaugaauuau

SEQ ID NO: 70803 - RNA, 19 nt, Artificial Sequence
  Description of Artificial Sequence: Synthetic oligonucleotide
  Antisense strand to SEQ ID NO: 70722
auaauucaugccaagcgug

SEQ ID NO: 70804 - RNA, 19 nt, Artificial Sequence
  Description of Artificial Sequence: Synthetic oligonucleotide
  Sense strand starting at position 2091 of SEQ ID NO: 877
ccacgcuuggcaugaauua

SEQ ID NO: 70805 - RNA, 19 nt, Artificial Sequence
  Description of Artificial Sequence: Synthetic oligonucleotide
  Antisense strand to SEQ ID NO: 70724
uaauucaugccaagcgugg

SEQ ID NO: 70806 - RNA, 19 nt, Artificial Sequence
  Description of Artificial Sequence: Synthetic oligonucleotide
  Sense strand starting at position 2048 of SEQ ID NO: 877
ucuccugcuuaguuauaca

SEQ ID NO: 70807 - RNA, 19 nt, Artificial Sequence
  Description of Artificial Sequence: Synthetic oligonucleotide
  Antisense strand to SEQ ID NO: 70726
uguauaacuaagcaggaga

SEQ ID NO: 70808 - RNA, 19 nt, Artificial Sequence
  Description of Artificial Sequence: Synthetic oligonucleotide
  Sense strand starting at position 2045 of SEQ ID NO: 877
cucucuccugcuuaguuau

SEQ ID NO: 70809 - RNA, 19 nt, Artificial Sequence
  Description of Artificial Sequence: Synthetic oligonucleotide
  Antisense strand to SEQ ID NO: 70728
auaacuaagcaggagagag

SEQ ID NO: 70810 - RNA, 19 nt, Artificial Sequence
  Description of Artificial Sequence: Synthetic oligonucleotide
  Sense strand starting at position 3912 of SEQ ID NO: 878
cucuacugcugguaauauu

SEQ ID NO: 70811 - RNA, 19 nt, Artificial Sequence
  Description of Artificial Sequence: Synthetic oligonucleotide
  Antisense strand to SEQ ID NO: 70730
aauauuaccagcaguagag

SEQ ID NO: 70812 - RNA, 19 nt, Artificial Sequence
  Description of Artificial Sequence: Synthetic oligonucleotide
  Sense strand starting at position 3910 of SEQ ID NO: 878
aucucuacugcugguaaua

SEQ ID NO: 70813 - RNA, 19 nt, Artificial Sequence
  Description of Artificial Sequence: Synthetic oligonucleotide
  Antisense strand to SEQ ID NO: 70732
uauuaccagcaguagagau

SEQ ID NO: 70814 - RNA, 19 nt, Artificial Sequence
  Description of Artificial Sequence: Synthetic oligonucleotide
  Sense strand starting at position 3709 of SEQ ID NO: 878
ucagaaugcucccuacugu

SEQ ID NO: 70815 - RNA, 19 nt, Artificial Sequence
  Description of Artificial Sequence: Synthetic oligonucleotide
  Antisense strand to SEQ ID NO: 70734
acaguagggagcauucuga

SEQ ID NO: 70816 - RNA, 19 nt, Artificial Sequence
  Description of Artificial Sequence: Synthetic oligonucleotide
  Sense strand starting at position 3480 of SEQ ID NO: 878
ggcuauaucuauuagguaa

SEQ ID NO: 70817 - RNA, 19 nt, Artificial Sequence
  Description of Artificial Sequence: Synthetic oligonucleotide
  Antisense strand to SEQ ID NO: 70736
uuaccuaauagauauagcc

SEQ ID NO: 70818 - RNA, 19 nt, Artificial Sequence
  Description of Artificial Sequence: Synthetic oligonucleotide
  Sense strand starting at position 3473 of SEQ ID NO: 878
guguccaggcuauaucuau

SEQ ID NO: 70819 - RNA, 19 nt, Artificial Sequence
  Description of Artificial Sequence: Synthetic oligonucleotide
  Antisense strand to SEQ ID NO: 70738
auagauauagccuggacac

SEQ ID NO: 70820 - RNA, 19 nt, Artificial Sequence
  Description of Artificial Sequence: Synthetic oligonucleotide
  Sense strand starting at position 3299 of SEQ ID NO: 878
auaagugaucugcagauuc

SEQ ID NO: 70821 - RNA, 19 nt, Artificial Sequence
  Description of Artificial Sequence: Synthetic oligonucleotide
  Antisense strand to SEQ ID NO: 70740
gaaucugcagaucacuuau

SEQ ID NO: 70822 - RNA, 19 nt, Artificial Sequence
  Description of Artificial Sequence: Synthetic oligonucleotide
  Sense strand starting at position 3034 of SEQ ID NO: 878
auugcaguggaucaaauau

SEQ ID NO: 70823 - RNA, 19 nt, Artificial Sequence
  Description of Artificial Sequence: Synthetic oligonucleotide
  Antisense strand to SEQ ID NO: 70742
auauuugauccacugcaau

SEQ ID NO: 70824 - RNA, 19 nt, Artificial Sequence
  Description of Artificial Sequence: Synthetic oligonucleotide
  Sense strand starting at position 3031 of SEQ ID NO: 878
ccuauugcaguggaucaaa

SEQ ID NO: 70825 - RNA, 19 nt, Artificial Sequence
  Description of Artificial Sequence: Synthetic oligonucleotide
  Antisense strand to SEQ ID NO: 70744
uuugauccacugcaauagg

SEQ ID NO: 70826 - RNA, 19 nt, Artificial Sequence
  Description of Artificial Sequence: Synthetic oligonucleotide
  Sense strand starting at position 3029 of SEQ ID NO: 878
caccuauugcaguggauca

SEQ ID NO: 70827 - RNA, 19 nt, Artificial Sequence
  Description of Artificial Sequence: Synthetic oligonucleotide
  Antisense strand to SEQ ID NO: 70746
ugauccacugcaauaggug

SEQ ID NO: 70828 - RNA, 19 nt, Artificial Sequence
  Description of Artificial Sequence: Synthetic oligonucleotide
  Sense strand starting at position 757 of SEQ ID NO: 878
guaacugcuucuguuauuu

SEQ ID NO: 70829 - RNA, 19 nt, Artificial Sequence
  Description of Artificial Sequence: Synthetic oligonucleotide
  Antisense strand to SEQ ID NO: 70748
aaauaacagaagcaguuac

SEQ ID NO: 70830 - RNA, 19 nt, Artificial Sequence
  Description of Artificial Sequence: Synthetic oligonucleotide
  Sense strand starting at position 756 of SEQ ID NO: 878
gguaacugcuucuguuauu

SEQ ID NO: 70831 - RNA, 19 nt, Artificial Sequence
  Description of Artificial Sequence: Synthetic oligonucleotide
  Antisense strand to SEQ ID NO: 70750
aauaacagaagcaguuacc

SEQ ID NO: 70832 - RNA, 19 nt, Artificial Sequence
  Description of Artificial Sequence: Synthetic oligonucleotide
  Sense strand starting at position 579 of SEQ ID NO: 878
gcauuagagugguaggauu

SEQ ID NO: 70833 - RNA, 19 nt, Artificial Sequence
  Description of Artificial Sequence: Synthetic oligonucleotide
  Antisense strand to SEQ ID NO: 70752
aauccuaccacucuaaugc

SEQ ID NO: 70834 - RNA, 19 nt, Artificial Sequence
  Description of Artificial Sequence: Synthetic oligonucleotide
  Sense strand starting at position 577 of SEQ ID NO: 878
uugcauuagagugguagga

SEQ ID NO: 70835 - RNA, 19 nt, Artificial Sequence
  Description of Artificial Sequence: Synthetic oligonucleotide
  Antisense strand to SEQ ID NO: 70754
uccuaccacucuaaugcaa

SEQ ID NO: 70836 - RNA, 19 nt, Artificial Sequence
  Description of Artificial Sequence: Synthetic oligonucleotide
  Sense strand starting at position 571 of SEQ ID NO: 878
aaacuauugcauuagagug

SEQ ID NO: 70837 - RNA, 19 nt, Artificial Sequence
  Description of Artificial Sequence: Synthetic oligonucleotide
  Antisense strand to SEQ ID NO: 70756
cacucuaaugcaauaguuu

SEQ ID NO: 70838 - RNA, 19 nt, Artificial Sequence
  Description of Artificial Sequence: Synthetic oligonucleotide
  Sense strand starting at position 197 of SEQ ID NO: 878
gcaugugugaagugaaagu

SEQ ID NO: 70839 - RNA, 19 nt, Artificial Sequence
  Description of Artificial Sequence: Synthetic oligonucleotide
  Antisense strand to SEQ ID NO: 70758
acuuucacuucacacaugc

SEQ ID NO: 70840 - RNA, 19 nt, Artificial Sequence
  Description of Artificial Sequence: Synthetic oligonucleotide
  Sense strand starting at position 193 of SEQ ID NO: 878
ggaugcaugugugaaguga

SEQ ID NO: 70841 - RNA, 19 nt, Artificial Sequence
  Description of Artificial Sequence: Synthetic oligonucleotide
  Antisense strand to SEQ ID NO: 70760
ucacuucacacaugcaucc

SEQ ID NO: 70842 - RNA, 19 nt, Artificial Sequence
  Description of Artificial Sequence: Synthetic oligonucleotide
  Sense strand starting at position 190 of SEQ ID NO: 878
uguggaugcaugugugaag

SEQ ID NO: 70843 - RNA, 19 nt, Artificial Sequence
  Description of Artificial Sequence: Synthetic oligonucleotide
  Antisense strand to SEQ ID NO: 70762
cuucacacaugcauccaca

SEQ ID NO: 70844 - RNA, 19 nt, Artificial Sequence
  Description of Artificial Sequence: Synthetic oligonucleotide
  Sense strand starting at position 178 of SEQ ID NO: 878
uuaauuacugcauguggau

SEQ ID NO: 70845 - RNA, 19 nt, Artificial Sequence
  Description of Artificial Sequence: Synthetic oligonucleotide
  Antisense strand to SEQ ID NO: 70764
auccacaugcaguaauuaa

SEQ ID NO: 70846 - RNA, 19 nt, Artificial Sequence
  Description of Artificial Sequence: Synthetic oligonucleotide
  Sense strand starting at position 3940 of SEQ ID NO: 879
cucuaccgcugguaauauu

SEQ ID NO: 70847 - RNA, 19 nt, Artificial Sequence
  Description of Artificial Sequence: Synthetic oligonucleotide
  Antisense strand to SEQ ID NO: 70766
aauauuaccagcgguagag

SEQ ID NO: 70848 - RNA, 19 nt, Artificial Sequence
  Description of Artificial Sequence: Synthetic oligonucleotide
  Sense strand starting at position 3938 of SEQ ID NO: 879
aucucuaccgcugguaaua

SEQ ID NO: 70849 - RNA, 19 nt, Artificial Sequence
  Description of Artificial Sequence: Synthetic oligonucleotide
  Antisense strand to SEQ ID NO: 70768
uauuaccagcgguagagau

SEQ ID NO: 70850 - RNA, 19 nt, Artificial Sequence
  Description of Artificial Sequence: Synthetic oligonucleotide
  Sense strand starting at position 3937 of SEQ ID NO: 879
caucucuaccgcugguaau

SEQ ID NO: 70851 - RNA, 19 nt, Artificial Sequence
  Description of Artificial Sequence: Synthetic oligonucleotide
  Antisense strand to SEQ ID NO: 70770
auuaccagcgguagagaug

SEQ ID NO: 70852 - RNA, 19 nt, Artificial Sequence
  Description of Artificial Sequence: Synthetic oligonucleotide
  Sense strand starting at position 3508 of SEQ ID NO: 879
ggcuaugucuauuagguaa

SEQ ID NO: 70853 - RNA, 19 nt, Artificial Sequence
  Description of Artificial Sequence: Synthetic oligonucleotide
  Antisense strand to SEQ ID NO: 70772
uuaccuaauagacauagcc

SEQ ID NO: 70854 - RNA, 19 nt, Artificial Sequence
  Description of Artificial Sequence: Synthetic oligonucleotide
  Sense strand starting at position 3062 of SEQ ID NO: 879
guugcaguggaucaaauau

SEQ ID NO: 70855 - RNA, 19 nt, Artificial Sequence
  Description of Artificial Sequence: Synthetic oligonucleotide
  Antisense strand to SEQ ID NO: 70774
auauuugauccacugcaac

SEQ ID NO: 70856 - RNA, 19 nt, Artificial Sequence
  Description of Artificial Sequence: Synthetic oligonucleotide
  Sense strand starting at position 3058 of SEQ ID NO: 879
accuguugcaguggaucaa

SEQ ID NO: 70857 - RNA, 19 nt, Artificial Sequence
  Description of Artificial Sequence: Synthetic oligonucleotide
  Antisense strand to SEQ ID NO: 70776
uugauccacugcaacaggu

SEQ ID NO: 70858 - RNA, 19 nt, Artificial Sequence
  Description of Artificial Sequence: Synthetic oligonucleotide
  Sense strand starting at position 1761 of SEQ ID NO: 879
gggcgauucggugaaggga

SEQ ID NO: 70859 - RNA, 19 nt, Artificial Sequence
  Description of Artificial Sequence: Synthetic oligonucleotide
  Antisense strand to SEQ ID NO: 70778
ucccuucaccgaaucgccc

SEQ ID NO: 70860 - RNA, 19 nt, Artificial Sequence
  Description of Artificial Sequence: Synthetic oligonucleotide
  Sense strand starting at position 786 of SEQ ID NO: 879
gguaacuguuucuguuauu

SEQ ID NO: 70861 - RNA, 19 nt, Artificial Sequence
  Description of Artificial Sequence: Synthetic oligonucleotide
  Antisense strand to SEQ ID NO: 70780
aauaacagaaacaguuacc

SEQ ID NO: 70862 - RNA, 19 nt, Artificial Sequence
  Description of Artificial Sequence: Synthetic oligonucleotide
  Sense strand starting at position 785 of SEQ ID NO: 879
agguaacuguuucuguuau

SEQ ID NO: 70863 - RNA, 19 nt, Artificial Sequence
  Description of Artificial Sequence: Synthetic oligonucleotide
  Antisense strand to SEQ ID NO: 70782
auaacagaaacaguuaccu

SEQ ID NO: 70864 - RNA, 19 nt, Artificial Sequence
  Description of Artificial Sequence: Synthetic oligonucleotide
  Sense strand starting at position 611 of SEQ ID NO: 879
auuagagcgguaggauuau

SEQ ID NO: 70865 - RNA, 19 nt, Artificial Sequence
  Description of Artificial Sequence: Synthetic oligonucleotide
  Antisense strand to SEQ ID NO: 70784
auaauccuaccgcucuaau

SEQ ID NO: 70866 - RNA, 19 nt, Artificial Sequence
  Description of Artificial Sequence: Synthetic oligonucleotide
  Sense strand starting at position 609 of SEQ ID NO: 879
gcauuagagcgguaggauu

SEQ ID NO: 70867 - RNA, 19 nt, Artificial Sequence
  Description of Artificial Sequence: Synthetic oligonucleotide
  Antisense strand to SEQ ID NO: 70786
aauccuaccgcucuaaugc

SEQ ID NO: 70868 - RNA, 19 nt, Artificial Sequence
  Description of Artificial Sequence: Synthetic oligonucleotide
  Sense strand starting at position 607 of SEQ ID NO: 879
uugcauuagagcgguagga

SEQ ID NO: 70869 - RNA, 19 nt, Artificial Sequence
  Description of Artificial Sequence: Synthetic oligonucleotide
  Antisense strand to SEQ ID NO: 70788
uccuaccgcucuaaugcaa

SEQ ID NO: 70870 - RNA, 19 nt, Artificial Sequence
  Description of Artificial Sequence: Synthetic oligonucleotide
  Sense strand starting at position 228 of SEQ ID NO: 879
acaugugugaagugaaagu

SEQ ID NO: 70871 - RNA, 19 nt, Artificial Sequence
  Description of Artificial Sequence: Synthetic oligonucleotide
  Antisense strand to SEQ ID NO: 70790
acuuucacuucacacaugu

SEQ ID NO: 70872 - RNA, 19 nt, Artificial Sequence
  Description of Artificial Sequence: Synthetic oligonucleotide
  Sense strand starting at position 224 of SEQ ID NO: 879
ggauacaugugugaaguga

SEQ ID NO: 70873 - RNA, 19 nt, Artificial Sequence
  Description of Artificial Sequence: Synthetic oligonucleotide
  Antisense strand to SEQ ID NO: 70792
ucacuucacacauguaucc

SEQ ID NO: 70874 - RNA, 19 nt, Artificial Sequence
  Description of Artificial Sequence: Synthetic oligonucleotide
  Sense strand starting at position 223 of SEQ ID NO: 879
uggauacaugugugaagug

SEQ ID NO: 70875 - RNA, 19 nt, Artificial Sequence
  Description of Artificial Sequence: Synthetic oligonucleotide
  Antisense strand to SEQ ID NO: 70794
cacuucacacauguaucca

SEQ ID NO: 70876 - RNA, 19 nt, Artificial Sequence
  Description of Artificial Sequence: Synthetic oligonucleotide
  Sense strand starting at position 222 of SEQ ID NO: 879
auggauacaugugugaagu

SEQ ID NO: 70877 - RNA, 19 nt, Artificial Sequence
  Description of Artificial Sequence: Synthetic oligonucleotide
  Antisense strand to SEQ ID NO: 70796
acuucacacauguauccau

SEQ ID NO: 70878 - RNA, 19 nt, Artificial Sequence
  Description of Artificial Sequence: Synthetic oligonucleotide
  Sense strand starting at position 221 of SEQ ID NO: 879
uauggauacaugugugaag

SEQ ID NO: 70879 - RNA, 19 nt, Artificial Sequence
  Description of Artificial Sequence: Synthetic oligonucleotide
  Antisense strand to SEQ ID NO: 70798
cuucacacauguauccaua

SEQ ID NO: 70880 - RNA, 19 nt, Artificial Sequence
  Description of Artificial Sequence: Synthetic oligonucleotide
  Sense strand starting at position 209 of SEQ ID NO: 879
uuaauuacugcauauggau

SEQ ID NO: 70881 - RNA, 19 nt, Artificial Sequence
  Description of Artificial Sequence: Synthetic oligonucleotide
  Antisense strand to SEQ ID NO: 70800
auccauaugcaguaauuaa

SEQ ID NO: 70882 - RNA, 19 nt, Artificial Sequence
  Description of Artificial Sequence: Synthetic oligonucleotide
  Sense strand starting at position 3712 of SEQ ID NO: 880
uguuaagugguugacauag

SEQ ID NO: 70883 - RNA, 19 nt, Artificial Sequence
  Description of Artificial Sequence: Synthetic oligonucleotide
  Antisense strand to SEQ ID NO: 70802
cuaugucaaccacuuaaca

SEQ ID NO: 70884 - RNA, 19 nt, Artificial Sequence
  Description of Artificial Sequence: Synthetic oligonucleotide
  Sense strand starting at position 3675 of SEQ ID NO: 880
uaauaaggguugcuaugau

SEQ ID NO: 70885 - RNA, 19 nt, Artificial Sequence
  Description of Artificial Sequence: Synthetic oligonucleotide
  Antisense strand to SEQ ID NO: 70804
aucauagcaacccuuauua

SEQ ID NO: 70886 - RNA, 19 nt, Artificial Sequence
  Description of Artificial Sequence: Synthetic oligonucleotide
  Sense strand starting at position 3613 of SEQ ID NO: 880
uugaaugaguuaucuucuu

SEQ ID NO: 70887 - RNA, 19 nt, Artificial Sequence
  Description of Artificial Sequence: Synthetic oligonucleotide
  Antisense strand to SEQ ID NO: 70806
aagaagauaacucauucaa

SEQ ID NO: 70888 - RNA, 19 nt, Artificial Sequence
  Description of Artificial Sequence: Synthetic oligonucleotide
  Sense strand starting at position 3609 of SEQ ID NO: 880
gaccuugaaugaguuaucu

SEQ ID NO: 70889 - RNA, 19 nt, Artificial Sequence
  Description of Artificial Sequence: Synthetic oligonucleotide
  Antisense strand to SEQ ID NO: 70808
agauaacucauucaagguc

SEQ ID NO: 70890 - RNA, 19 nt, Artificial Sequence
  Description of Artificial Sequence: Synthetic oligonucleotide
  Sense strand starting at position 3606 of SEQ ID NO: 880
auugaccuugaaugaguua

SEQ ID NO: 70891 - RNA, 19 nt, Artificial Sequence
  Description of Artificial Sequence: Synthetic oligonucleotide
  Antisense strand to SEQ ID NO: 70810
uaacucauucaaggucaau

SEQ ID NO: 70892 - RNA, 19 nt, Artificial Sequence
  Description of Artificial Sequence: Synthetic oligonucleotide
  Sense strand starting at position 3602 of SEQ ID NO: 880
gcugauugaccuugaauga

SEQ ID NO: 70893 - RNA, 19 nt, Artificial Sequence
  Description of Artificial Sequence: Synthetic oligonucleotide
  Antisense strand to SEQ ID NO: 70812
ucauucaaggucaaucagc

SEQ ID NO: 70894 - RNA, 19 nt, Artificial Sequence
  Description of Artificial Sequence: Synthetic oligonucleotide
  Sense strand starting at position 3599 of SEQ ID NO: 880
cuugcugauugaccuugaa

SEQ ID NO: 70895 - RNA, 19 nt, Artificial Sequence
  Description of Artificial Sequence: Synthetic oligonucleotide
  Antisense strand to SEQ ID NO: 70814
uucaaggucaaucagcaag

SEQ ID NO: 70896 - RNA, 19 nt, Artificial Sequence
  Description of Artificial Sequence: Synthetic oligonucleotide
  Sense strand starting at position 3561 of SEQ ID NO: 880
aaacuagaccuggguuuga

SEQ ID NO: 70897 - RNA, 19 nt, Artificial Sequence
  Description of Artificial Sequence: Synthetic oligonucleotide
  Antisense strand to SEQ ID NO: 70816
ucaaacccaggucuaguuu

SEQ ID NO: 70898 - RNA, 19 nt, Artificial Sequence
  Description of Artificial Sequence: Synthetic oligonucleotide
  Sense strand starting at position 3544 of SEQ ID NO: 880
ggaacagcuuuaucaucaa

SEQ ID NO: 70899 - RNA, 19 nt, Artificial Sequence
  Description of Artificial Sequence: Synthetic oligonucleotide
  Antisense strand to SEQ ID NO: 70818
uugaugauaaagcuguucc

SEQ ID NO: 70900 - RNA, 19 nt, Artificial Sequence
  Description of Artificial Sequence: Synthetic oligonucleotide
  Sense strand starting at position 3528 of SEQ ID NO: 880
uggcaaauugcuuaaagga

SEQ ID NO: 70901 - RNA, 19 nt, Artificial Sequence
  Description of Artificial Sequence: Synthetic oligonucleotide
  Antisense strand to SEQ ID NO: 70820
uccuuuaagcaauuugcca

SEQ ID NO: 70902 - RNA, 19 nt, Artificial Sequence
  Description of Artificial Sequence: Synthetic oligonucleotide
  Sense strand starting at position 3481 of SEQ ID NO: 880
ggccauaaccagugaucca

SEQ ID NO: 70903 - RNA, 19 nt, Artificial Sequence
  Description of Artificial Sequence: Synthetic oligonucleotide
  Antisense strand to SEQ ID NO: 70822
uggaucacugguuauggcc

SEQ ID NO: 70904 - RNA, 19 nt, Artificial Sequence
  Description of Artificial Sequence: Synthetic oligonucleotide
  Sense strand starting at position 3462 of SEQ ID NO: 880
caguaucuccgugaaugau

SEQ ID NO: 70905 - RNA, 19 nt, Artificial Sequence
  Description of Artificial Sequence: Synthetic oligonucleotide
  Antisense strand to SEQ ID NO: 70824
aucauucacggagauacug

SEQ ID NO: 70906 - RNA, 19 nt, Artificial Sequence
  Description of Artificial Sequence: Synthetic oligonucleotide
  Sense strand starting at position 3430 of SEQ ID NO: 880
gguaaaggcuauguuaaag

SEQ ID NO: 70907 - RNA, 19 nt, Artificial Sequence
  Description of Artificial Sequence: Synthetic oligonucleotide
  Antisense strand to SEQ ID NO: 70826
cuuuaacauagccuuuacc

SEQ ID NO: 70908 - RNA, 19 nt, Artificial Sequence
  Description of Artificial Sequence: Synthetic oligonucleotide
  Sense strand starting at position 3429 of SEQ ID NO: 880
ggguaaaggcuauguuaaa

SEQ ID NO: 70909 - RNA, 19 nt, Artificial Sequence
  Description of Artificial Sequence: Synthetic oligonucleotide
  Antisense strand to SEQ ID NO: 70828
uuuaacauagccuuuaccc

SEQ ID NO: 70910 - RNA, 19 nt, Artificial Sequence
  Description of Artificial Sequence: Synthetic oligonucleotide
  Sense strand starting at position 3427 of SEQ ID NO: 880
caggguaaaggcuauguua

SEQ ID NO: 70911 - RNA, 19 nt, Artificial Sequence
  Description of Artificial Sequence: Synthetic oligonucleotide
  Antisense strand to SEQ ID NO: 70830
uaacauagccuuuacccug

SEQ ID NO: 70912 - RNA, 19 nt, Artificial Sequence
  Description of Artificial Sequence: Synthetic oligonucleotide
  Sense strand starting at position 3418 of SEQ ID NO: 880
auguuucuacaggguaaag

SEQ ID NO: 70913 - RNA, 19 nt, Artificial Sequence
  Description of Artificial Sequence: Synthetic oligonucleotide
  Antisense strand to SEQ ID NO: 70832
cuuuacccuguagaaacau

SEQ ID NO: 70914 - RNA, 19 nt, Artificial Sequence
  Description of Artificial Sequence: Synthetic oligonucleotide
  Sense strand starting at position 3347 of SEQ ID NO: 880
ggguaaagcaucugaugaa

SEQ ID NO: 70915 - RNA, 19 nt, Artificial Sequence
  Description of Artificial Sequence: Synthetic oligonucleotide
  Antisense strand to SEQ ID NO: 70834
uucaucagaugcuuuaccc

SEQ ID NO: 70916 - RNA, 19 nt, Artificial Sequence
  Description of Artificial Sequence: Synthetic oligonucleotide
  Sense strand starting at position 2925 of SEQ ID NO: 880
uaaagacacugggaagaau

SEQ ID NO: 70917 - RNA, 19 nt, Artificial Sequence
  Description of Artificial Sequence: Synthetic oligonucleotide
  Antisense strand to SEQ ID NO: 70836
auucuucccagugucuuua

SEQ ID NO: 70918 - RNA, 19 nt, Artificial Sequence
  Description of Artificial Sequence: Synthetic oligonucleotide
  Sense strand starting at position 2814 of SEQ ID NO: 880
gcguuuccagcuguuggaa

SEQ ID NO: 70919 - RNA, 19 nt, Artificial Sequence
  Description of Artificial Sequence: Synthetic oligonucleotide
  Antisense strand to SEQ ID NO: 70838
uuccaacagcuggaaacgc

SEQ ID NO: 70920 - RNA, 19 nt, Artificial Sequence
  Description of Artificial Sequence: Synthetic oligonucleotide
  Sense strand starting at position 2752 of SEQ ID NO: 880
agagggaccgugugaaagu

SEQ ID NO: 70921 - RNA, 19 nt, Artificial Sequence
  Description of Artificial Sequence: Synthetic oligonucleotide
  Antisense strand to SEQ ID NO: 70840
acuuucacacggucccucu

SEQ ID NO: 70922 - RNA, 19 nt, Artificial Sequence
  Description of Artificial Sequence: Synthetic oligonucleotide
  Sense strand starting at position 2707 of SEQ ID NO: 880
gcagaugcgggauauagaa

SEQ ID NO: 70923 - RNA, 19 nt, Artificial Sequence
  Description of Artificial Sequence: Synthetic oligonucleotide
  Antisense strand to SEQ ID NO: 70842
uucuauaucccgcaucugc

SEQ ID NO: 70924 - RNA, 19 nt, Artificial Sequence
  Description of Artificial Sequence: Synthetic oligonucleotide
  Sense strand starting at position 2617 of SEQ ID NO: 880
uggccuagaucccuuuaaa

SEQ ID NO: 70925 - RNA, 19 nt, Artificial Sequence
  Description of Artificial Sequence: Synthetic oligonucleotide
  Antisense strand to SEQ ID NO: 70844
uuuaaagggaucuaggcca

SEQ ID NO: 70926 - RNA, 19 nt, Artificial Sequence
  Description of Artificial Sequence: Synthetic oligonucleotide
  Sense strand starting at position 1332 of SEQ ID NO: 880
gacuccaagugauugcaau

SEQ ID NO: 70927 - RNA, 19 nt, Artificial Sequence
  Description of Artificial Sequence: Synthetic oligonucleotide
  Antisense strand to SEQ ID NO: 70846
auugcaaucacuuggaguc

SEQ ID NO: 70928 - RNA, 19 nt, Artificial Sequence
  Description of Artificial Sequence: Synthetic oligonucleotide
  Sense strand starting at position 1148 of SEQ ID NO: 880
auucgaagguauucuauag

SEQ ID NO: 70929 - RNA, 19 nt, Artificial Sequence
  Description of Artificial Sequence: Synthetic oligonucleotide
  Antisense strand to SEQ ID NO: 70848
cuauagaauaccuucgaau

SEQ ID NO: 70930 - RNA, 19 nt, Artificial Sequence
  Description of Artificial Sequence: Synthetic oligonucleotide
  Sense strand starting at position 1101 of SEQ ID NO: 880
gcucuaacugguuacuauu

SEQ ID NO: 70931 - RNA, 19 nt, Artificial Sequence
  Description of Artificial Sequence: Synthetic oligonucleotide
  Antisense strand to SEQ ID NO: 70850
aauaguaaccaguuagagc

SEQ ID NO: 70932 - RNA, 19 nt, Artificial Sequence
  Description of Artificial Sequence: Synthetic oligonucleotide
  Sense strand starting at position 990 of SEQ ID NO: 880
agaaccuacuucguuuaau

SEQ ID NO: 70933 - RNA, 19 nt, Artificial Sequence
  Description of Artificial Sequence: Synthetic oligonucleotide
  Antisense strand to SEQ ID NO: 70852
auuaaacgaaguagguucu

SEQ ID NO: 70934 - RNA, 19 nt, Artificial Sequence
  Description of Artificial Sequence: Synthetic oligonucleotide
  Sense strand starting at position 795 of SEQ ID NO: 880
aaagcugcuccugaauagu

SEQ ID NO: 70935 - RNA, 19 nt, Artificial Sequence
  Description of Artificial Sequence: Synthetic oligonucleotide
  Antisense strand to SEQ ID NO: 70854
acuauucaggagcagcuuu

SEQ ID NO: 70936 - RNA, 19 nt, Artificial Sequence
  Description of Artificial Sequence: Synthetic oligonucleotide
  Sense strand starting at position 674 of SEQ ID NO: 880
aagagaaguaggugugaga

SEQ ID NO: 70937 - RNA, 19 nt, Artificial Sequence
  Description of Artificial Sequence: Synthetic oligonucleotide
  Antisense strand to SEQ ID NO: 70856
ucucacaccuacuucucuu

SEQ ID NO: 70938 - RNA, 19 nt, Artificial Sequence
  Description of Artificial Sequence: Synthetic oligonucleotide
  Sense strand starting at position 664 of SEQ ID NO: 880
gguaguuguaaagagaagu

SEQ ID NO: 70939 - RNA, 19 nt, Artificial Sequence
  Description of Artificial Sequence: Synthetic oligonucleotide
  Antisense strand to SEQ ID NO: 70858
acuucucuuuacaacuacc

SEQ ID NO: 70940 - RNA, 19 nt, Artificial Sequence
  Description of Artificial Sequence: Synthetic oligonucleotide
  Sense strand starting at position 635 of SEQ ID NO: 880
ugggaaauagcuugcgaaa

SEQ ID NO: 70941 - RNA, 19 nt, Artificial Sequence
  Description of Artificial Sequence: Synthetic oligonucleotide
  Antisense strand to SEQ ID NO: 70860
uuucgcaagcuauuuccca

SEQ ID NO: 70942 - RNA, 19 nt, Artificial Sequence
  Description of Artificial Sequence: Synthetic oligonucleotide
  Sense strand starting at position 625 of SEQ ID NO: 880
aguaauagccugggaaaua

SEQ ID NO: 70943 - RNA, 19 nt, Artificial Sequence
  Description of Artificial Sequence: Synthetic oligonucleotide
  Antisense strand to SEQ ID NO: 70862
uauuucccaggcuauuacu

SEQ ID NO: 70944 - RNA, 19 nt, Artificial Sequence
  Description of Artificial Sequence: Synthetic oligonucleotide
  Sense strand starting at position 624 of SEQ ID NO: 880
aaguaauagccugggaaau

SEQ ID NO: 70945 - RNA, 19 nt, Artificial Sequence
  Description of Artificial Sequence: Synthetic oligonucleotide
  Antisense strand to SEQ ID NO: 70864
auuucccaggcuauuacuu

SEQ ID NO: 70946 - RNA, 19 nt, Artificial Sequence
  Description of Artificial Sequence: Synthetic oligonucleotide
  Sense strand starting at position 623 of SEQ ID NO: 880
uaaguaauagccugggaaa

SEQ ID NO: 70947 - RNA, 19 nt, Artificial Sequence
  Description of Artificial Sequence: Synthetic oligonucleotide
  Antisense strand to SEQ ID NO: 70866
uuucccaggcuauuacuua

SEQ ID NO: 70948 - RNA, 19 nt, Artificial Sequence
  Description of Artificial Sequence: Synthetic oligonucleotide
  Sense strand starting at position 228 of SEQ ID NO: 880
aacauagugcuguaguaau

SEQ ID NO: 70949 - RNA, 19 nt, Artificial Sequence
  Description of Artificial Sequence: Synthetic oligonucleotide
  Antisense strand to SEQ ID NO: 70868
auuacuacagcacuauguu

SEQ ID NO: 70950 - RNA, 19 nt, Artificial Sequence
  Description of Artificial Sequence: Synthetic oligonucleotide
  Sense strand starting at position 168 of SEQ ID NO: 880
agacaugauuuauaaagca

SEQ ID NO: 70951 - RNA, 19 nt, Artificial Sequence
  Description of Artificial Sequence: Synthetic oligonucleotide
  Antisense strand to SEQ ID NO: 70870
ugcuuuauaaaucaugucu

SEQ ID NO: 70952 - RNA, 19 nt, Artificial Sequence
  Description of Artificial Sequence: Synthetic oligonucleotide
  Sense strand starting at position 95 of SEQ ID NO: 880
auaugaucuuacgcuaaac

SEQ ID NO: 70953 - RNA, 19 nt, Artificial Sequence
  Description of Artificial Sequence: Synthetic oligonucleotide
  Antisense strand to SEQ ID NO: 70872
guuuagcguaagaucauau

SEQ ID NO: 70954 - RNA, 19 nt, Artificial Sequence
  Description of Artificial Sequence: Synthetic oligonucleotide
  Sense strand starting at position 81 of SEQ ID NO: 880
gugacuuauuaguuauaug

SEQ ID NO: 70955 - RNA, 19 nt, Artificial Sequence
  Description of Artificial Sequence: Synthetic oligonucleotide
  Antisense strand to SEQ ID NO: 70874
cauauaacuaauaagucac

SEQ ID NO: 70956 - RNA, 19 nt, Artificial Sequence
  Description of Artificial Sequence: Synthetic oligonucleotide
  Sense strand starting at position 75 of SEQ ID NO: 880
ggcacagugacuuauuagu

SEQ ID NO: 70957 - RNA, 19 nt, Artificial Sequence
  Description of Artificial Sequence: Synthetic oligonucleotide
  Antisense strand to SEQ ID NO: 70876
acuaauaagucacugugcc

SEQ ID NO: 70958 - RNA, 19 nt, Artificial Sequence
  Description of Artificial Sequence: Synthetic oligonucleotide
  Sense strand starting at position 64 of SEQ ID NO: 880
auuugaaucucggcacagu

SEQ ID NO: 70959 - RNA, 19 nt, Artificial Sequence
  Description of Artificial Sequence: Synthetic oligonucleotide
  Antisense strand to SEQ ID NO: 70878
acugugccgagauucaaau

SEQ ID NO: 70960 - RNA, 19 nt, Artificial Sequence
  Description of Artificial Sequence: Synthetic oligonucleotide
  Sense strand starting at position 48 of SEQ ID NO: 880
uugggaucaggccaugauu

SEQ ID NO: 70961 - RNA, 19 nt, Artificial Sequence
  Description of Artificial Sequence: Synthetic oligonucleotide
  Antisense strand to SEQ ID NO: 70880
aaucauggccugaucccaa

SEQ ID NO: 70962 - RNA, 19 nt, Artificial Sequence
  Description of Artificial Sequence: Synthetic oligonucleotide
  Sense strand starting at position 3558 of SEQ ID NO: 881
guagaaagaucucuuucga

SEQ ID NO: 70963 - RNA, 19 nt, Artificial Sequence
  Description of Artificial Sequence: Synthetic oligonucleotide
  Antisense strand to SEQ ID NO: 70882
ucgaaagagaucuuucuac

SEQ ID NO: 70964 - RNA, 19 nt, Artificial Sequence
  Description of Artificial Sequence: Synthetic oligonucleotide
  Sense strand starting at position 3533 of SEQ ID NO: 881
gagguaucacaaugagucu

SEQ ID NO: 70965 - RNA, 19 nt, Artificial Sequence
  Description of Artificial Sequence: Synthetic oligonucleotide
  Antisense strand to SEQ ID NO: 70884
agacucauugugauaccuc

SEQ ID NO: 70966 - RNA, 19 nt, Artificial Sequence
  Description of Artificial Sequence: Synthetic oligonucleotide
  Sense strand starting at position 3505 of SEQ ID NO: 881
ccaagaaaugaagguucuu

SEQ ID NO: 70967 - RNA, 19 nt, Artificial Sequence
  Description of Artificial Sequence: Synthetic oligonucleotide
  Antisense strand to SEQ ID NO: 70886
aagaaccuucauuucuugg

SEQ ID NO: 70968 - RNA, 19 nt, Artificial Sequence
  Description of Artificial Sequence: Synthetic oligonucleotide
  Sense strand starting at position 3489 of SEQ ID NO: 881
gacuguggucuuuaaacca

SEQ ID NO: 70969 - RNA, 19 nt, Artificial Sequence
  Description of Artificial Sequence: Synthetic oligonucleotide
  Antisense strand to SEQ ID NO: 70888
ugguuuaaagaccacaguc

SEQ ID NO: 70970 - RNA, 19 nt, Artificial Sequence
  Description of Artificial Sequence: Synthetic oligonucleotide
  Sense strand starting at position 3485 of SEQ ID NO: 881
uagggacuguggucuuuaa

SEQ ID NO: 70971 - RNA, 19 nt, Artificial Sequence
  Description of Artificial Sequence: Synthetic oligonucleotide
  Antisense strand to SEQ ID NO: 70890
uuaaagaccacagucccua

SEQ ID NO: 70972 - RNA, 19 nt, Artificial Sequence
  Description of Artificial Sequence: Synthetic oligonucleotide
  Sense strand starting at position 3393 of SEQ ID NO: 881
cucauuugguuggaacaga

SEQ ID NO: 70973 - RNA, 19 nt, Artificial Sequence
  Description of Artificial Sequence: Synthetic oligonucleotide
  Antisense strand to SEQ ID NO: 70892
ucuguuccaaccaaaugag

SEQ ID NO: 70974 - RNA, 19 nt, Artificial Sequence
  Description of Artificial Sequence: Synthetic oligonucleotide
  Sense strand starting at position 3369 of SEQ ID NO: 881
uggugcauugaguaacaaa

SEQ ID NO: 70975 - RNA, 19 nt, Artificial Sequence
  Description of Artificial Sequence: Synthetic oligonucleotide
  Antisense strand to SEQ ID NO: 70894
uuuguuacucaaugcacca

SEQ ID NO: 70976 - RNA, 19 nt, Artificial Sequence
  Description of Artificial Sequence: Synthetic oligonucleotide
  Sense strand starting at position 3287 of SEQ ID NO: 881
ugagcugagcucugaagaa

SEQ ID NO: 70977 - RNA, 19 nt, Artificial Sequence
  Description of Artificial Sequence: Synthetic oligonucleotide
  Antisense strand to SEQ ID NO: 70896
uucuucagagcucagcuca

SEQ ID NO: 70978 - RNA, 19 nt, Artificial Sequence
  Description of Artificial Sequence: Synthetic oligonucleotide
  Sense strand starting at position 3157 of SEQ ID NO: 881
gggcauuaucucuauccag

SEQ ID NO: 70979 - RNA, 19 nt, Artificial Sequence
  Description of Artificial Sequence: Synthetic oligonucleotide
  Antisense strand to SEQ ID NO: 70898
cuggauagagauaaugccc

SEQ ID NO: 70980 - RNA, 19 nt, Artificial Sequence
  Description of Artificial Sequence: Synthetic oligonucleotide
  Sense strand starting at position 3156 of SEQ ID NO: 881
agggcauuaucucuaucca

SEQ ID NO: 70981 - RNA, 19 nt, Artificial Sequence
  Description of Artificial Sequence: Synthetic oligonucleotide
  Antisense strand to SEQ ID NO: 70900
uggauagagauaaugcccu

SEQ ID NO: 70982 - RNA, 19 nt, Artificial Sequence
  Description of Artificial Sequence: Synthetic oligonucleotide
  Sense strand starting at position 3133 of SEQ ID NO: 881
auucuuaggcagggaugaa

SEQ ID NO: 70983 - RNA, 19 nt, Artificial Sequence
  Description of Artificial Sequence: Synthetic oligonucleotide
  Antisense strand to SEQ ID NO: 70902
uucaucccugccuaagaau

SEQ ID NO: 70984 - RNA, 19 nt, Artificial Sequence
  Description of Artificial Sequence: Synthetic oligonucleotide
  Sense strand starting at position 3132 of SEQ ID NO: 881
gauucuuaggcagggauga

SEQ ID NO: 70985 - RNA, 19 nt, Artificial Sequence
  Description of Artificial Sequence: Synthetic oligonucleotide
  Antisense strand to SEQ ID NO: 70904
ucaucccugccuaagaauc

SEQ ID NO: 70986 - RNA, 19 nt, Artificial Sequence
  Description of Artificial Sequence: Synthetic oligonucleotide
  Sense strand starting at position 3129 of SEQ ID NO: 881
ggugauucuuaggcaggga

SEQ ID NO: 70987 - RNA, 19 nt, Artificial Sequence
  Description of Artificial Sequence: Synthetic oligonucleotide
  Antisense strand to SEQ ID NO: 70906
ucccugccuaagaaucacc

SEQ ID NO: 70988 - RNA, 19 nt, Artificial Sequence
  Description of Artificial Sequence: Synthetic oligonucleotide
  Sense strand starting at position 3005 of SEQ ID NO: 881
cacagacuggugugagaga

SEQ ID NO: 70989 - RNA, 19 nt, Artificial Sequence
  Description of Artificial Sequence: Synthetic oligonucleotide
  Antisense strand to SEQ ID NO: 70908
ucucucacaccagucugug

SEQ ID NO: 70990 - RNA, 19 nt, Artificial Sequence
  Description of Artificial Sequence: Synthetic oligonucleotide
  Sense strand starting at position 2933 of SEQ ID NO: 881
uguugagcccaugaaaugu

SEQ ID NO: 70991 - RNA, 19 nt, Artificial Sequence
  Description of Artificial Sequence: Synthetic oligonucleotide
  Antisense strand to SEQ ID NO: 70910
acauuucaugggcucaaca

SEQ ID NO: 70992 - RNA, 19 nt, Artificial Sequence
  Description of Artificial Sequence: Synthetic oligonucleotide
  Sense strand starting at position 2930 of SEQ ID NO: 881
cccuguugagcccaugaaa

SEQ ID NO: 70993 - RNA, 19 nt, Artificial Sequence
  Description of Artificial Sequence: Synthetic oligonucleotide
  Antisense strand to SEQ ID NO: 70912
uuucaugggcucaacaggg

SEQ ID NO: 70994 - RNA, 19 nt, Artificial Sequence
  Description of Artificial Sequence: Synthetic oligonucleotide
  Sense strand starting at position 2864 of SEQ ID NO: 881
guccuaaguccucagugau

SEQ ID NO: 70995 - RNA, 19 nt, Artificial Sequence
  Description of Artificial Sequence: Synthetic oligonucleotide
  Antisense strand to SEQ ID NO: 70914
aucacugaggacuuaggac

SEQ ID NO: 70996 - RNA, 19 nt, Artificial Sequence
  Description of Artificial Sequence: Synthetic oligonucleotide
  Sense strand starting at position 2740 of SEQ ID NO: 881
cuuuaucaguccuuggaug

SEQ ID NO: 70997 - RNA, 19 nt, Artificial Sequence
  Description of Artificial Sequence: Synthetic oligonucleotide
  Antisense strand to SEQ ID NO: 70916
cauccaaggacugauaaag

SEQ ID NO: 70998 - RNA, 19 nt, Artificial Sequence
  Description of Artificial Sequence: Synthetic oligonucleotide
  Sense strand starting at position 2694 of SEQ ID NO: 881
gcuagaguagcccaucaga

SEQ ID NO: 70999 - RNA, 19 nt, Artificial Sequence
  Description of Artificial Sequence: Synthetic oligonucleotide
  Antisense strand to SEQ ID NO: 70918
ucugaugggcuacucuagc

SEQ ID NO: 71000 - RNA, 19 nt, Artificial Sequence
  Description of Artificial Sequence: Synthetic oligonucleotide
  Sense strand starting at position 2469 of SEQ ID NO: 881
aagugauggcugggagaag

SEQ ID NO: 71001 - RNA, 19 nt, Artificial Sequence
  Description of Artificial Sequence: Synthetic oligonucleotide
  Antisense strand to SEQ ID NO: 70920
cuucucccagccaucacuu

SEQ ID NO: 71002 - RNA, 19 nt, Artificial Sequence
  Description of Artificial Sequence: Synthetic oligonucleotide
  Sense strand starting at position 2467 of SEQ ID NO: 881
gaaagugauggcugggaga

SEQ ID NO: 71003 - RNA, 19 nt, Artificial Sequence
  Description of Artificial Sequence: Synthetic oligonucleotide
  Antisense strand to SEQ ID NO: 70922
ucucccagccaucacuuuc

SEQ ID NO: 71004 - RNA, 19 nt, Artificial Sequence
  Description of Artificial Sequence: Synthetic oligonucleotide
  Sense strand starting at position 2453 of SEQ ID NO: 881
aaugcauguucccugaaag

SEQ ID NO: 71005 - RNA, 19 nt, Artificial Sequence
  Description of Artificial Sequence: Synthetic oligonucleotide
  Antisense strand to SEQ ID NO: 70924
cuuucagggaacaugcauu

SEQ ID NO: 71006 - RNA, 19 nt, Artificial Sequence
  Description of Artificial Sequence: Synthetic oligonucleotide
  Sense strand starting at position 2452 of SEQ ID NO: 881
gaaugcauguucccugaaa

SEQ ID NO: 71007 - RNA, 19 nt, Artificial Sequence
  Description of Artificial Sequence: Synthetic oligonucleotide
  Antisense strand to SEQ ID NO: 70926
uuucagggaacaugcauuc

SEQ ID NO: 71008 - RNA, 19 nt, Artificial Sequence
  Description of Artificial Sequence: Synthetic oligonucleotide
  Sense strand starting at position 2404 of SEQ ID NO: 881
ugcgaaacacuuuaacagu

SEQ ID NO: 71009 - RNA, 19 nt, Artificial Sequence
  Description of Artificial Sequence: Synthetic oligonucleotide
  Antisense strand to SEQ ID NO: 70928
acuguuaaaguguuucgca

SEQ ID NO: 71010 - RNA, 19 nt, Artificial Sequence
  Description of Artificial Sequence: Synthetic oligonucleotide
  Sense strand starting at position 2372 of SEQ ID NO: 881
ucgguauaggauggaagua

SEQ ID NO: 71011 - RNA, 19 nt, Artificial Sequence
  Description of Artificial Sequence: Synthetic oligonucleotide
  Antisense strand to SEQ ID NO: 70930
uacuuccauccuauaccga

SEQ ID NO: 71012 - RNA, 19 nt, Artificial Sequence
  Description of Artificial Sequence: Synthetic oligonucleotide
  Sense strand starting at position 2364 of SEQ ID NO: 881
ggagcuagucgguauagga

SEQ ID NO: 71013 - RNA, 19 nt, Artificial Sequence
  Description of Artificial Sequence: Synthetic oligonucleotide
  Antisense strand to SEQ ID NO: 70932
uccuauaccgacuagcucc

SEQ ID NO: 71014 - RNA, 19 nt, Artificial Sequence
  Description of Artificial Sequence: Synthetic oligonucleotide
  Sense strand starting at position 2342 of SEQ ID NO: 881
ucaguuucuccacauguua

SEQ ID NO: 71015 - RNA, 19 nt, Artificial Sequence
  Description of Artificial Sequence: Synthetic oligonucleotide
  Antisense strand to SEQ ID NO: 70934
uaacauguggagaaacuga

SEQ ID NO: 71016 - RNA, 19 nt, Artificial Sequence
  Description of Artificial Sequence: Synthetic oligonucleotide
  Sense strand starting at position 1307 of SEQ ID NO: 881
agggaugauccgugugagg

SEQ ID NO: 71017 - RNA, 19 nt, Artificial Sequence
  Description of Artificial Sequence: Synthetic oligonucleotide
  Antisense strand to SEQ ID NO: 70936
ccucacacggaucaucccu

SEQ ID NO: 71018 - RNA, 19 nt, Artificial Sequence
  Description of Artificial Sequence: Synthetic oligonucleotide
  Sense strand starting at position 1297 of SEQ ID NO: 881
gcccucucccagggaugau

SEQ ID NO: 71019 - RNA, 19 nt, Artificial Sequence
  Description of Artificial Sequence: Synthetic oligonucleotide
  Antisense strand to SEQ ID NO: 70938
aucaucccugggagagggc

SEQ ID NO: 71020 - RNA, 19 nt, Artificial Sequence
  Description of Artificial Sequence: Synthetic oligonucleotide
  Sense strand starting at position 1139 of SEQ ID NO: 881
gcaauuagccuggaugacu

SEQ ID NO: 71021 - RNA, 19 nt, Artificial Sequence
  Description of Artificial Sequence: Synthetic oligonucleotide
  Antisense strand to SEQ ID NO: 70940
agucauccaggcuaauugc

SEQ ID NO: 71022 - RNA, 19 nt, Artificial Sequence
  Description of Artificial Sequence: Synthetic oligonucleotide
  Sense strand starting at position 1137 of SEQ ID NO: 881
gggcaauuagccuggauga

SEQ ID NO: 71023 - RNA, 19 nt, Artificial Sequence
  Description of Artificial Sequence: Synthetic oligonucleotide
  Antisense strand to SEQ ID NO: 70942
ucauccaggcuaauugccc

SEQ ID NO: 71024 - RNA, 19 nt, Artificial Sequence
  Description of Artificial Sequence: Synthetic oligonucleotide
  Sense strand starting at position 1116 of SEQ ID NO: 881
gauucccucuugguaauga

SEQ ID NO: 71025 - RNA, 19 nt, Artificial Sequence
  Description of Artificial Sequence: Synthetic oligonucleotide
  Antisense strand to SEQ ID NO: 70944
ucauuaccaagagggaauc

SEQ ID NO: 71026 - RNA, 19 nt, Artificial Sequence
  Description of Artificial Sequence: Synthetic oligonucleotide
  Sense strand starting at position 440 of SEQ ID NO: 881
ugagcugcccuagagagaa

SEQ ID NO: 71027 - RNA, 19 nt, Artificial Sequence
  Description of Artificial Sequence: Synthetic oligonucleotide
  Antisense strand to SEQ ID NO: 70946
uucucucuagggcagcuca

SEQ ID NO: 71028 - RNA, 19 nt, Artificial Sequence
  Description of Artificial Sequence: Synthetic oligonucleotide
  Sense strand starting at position 389 of SEQ ID NO: 881
cgaauuaauaaguagcaga

SEQ ID NO: 71029 - RNA, 19 nt, Artificial Sequence
  Description of Artificial Sequence: Synthetic oligonucleotide
  Antisense strand to SEQ ID NO: 70948
ucugcuacuuauuaauucg

SEQ ID NO: 71030 - RNA, 19 nt, Artificial Sequence
  Description of Artificial Sequence: Synthetic oligonucleotide
  Sense strand starting at position 348 of SEQ ID NO: 881
aguaucuaguuaguauaca

SEQ ID NO: 71031 - RNA, 19 nt, Artificial Sequence
  Description of Artificial Sequence: Synthetic oligonucleotide
  Antisense strand to SEQ ID NO: 70950
uguauacuaacuagauacu

SEQ ID NO: 71032 - RNA, 19 nt, Artificial Sequence
  Description of Artificial Sequence: Synthetic oligonucleotide
  Sense strand starting at position 237 of SEQ ID NO: 881
gugcauuucucaguuccuu

SEQ ID NO: 71033 - RNA, 19 nt, Artificial Sequence
  Description of Artificial Sequence: Synthetic oligonucleotide
  Antisense strand to SEQ ID NO: 70952
aaggaacugagaaaugcac

SEQ ID NO: 71034 - RNA, 19 nt, Artificial Sequence
  Description of Artificial Sequence: Synthetic oligonucleotide
  Sense strand starting at position 183 of SEQ ID NO: 881
gugugaccuuguucuauuu

SEQ ID NO: 71035 - RNA, 19 nt, Artificial Sequence
  Description of Artificial Sequence: Synthetic oligonucleotide
  Antisense strand to SEQ ID NO: 70954
aaauagaacaaggucacac

SEQ ID NO: 71036 - RNA, 19 nt, Artificial Sequence
  Description of Artificial Sequence: Synthetic oligonucleotide
  Sense strand starting at position 53 of SEQ ID NO: 881
ggguuaacucagcaccaau

SEQ ID NO: 71037 - RNA, 19 nt, Artificial Sequence
  Description of Artificial Sequence: Synthetic oligonucleotide
  Antisense strand to SEQ ID NO: 70956
auuggugcugaguuaaccc

SEQ ID NO: 71038 - RNA, 19 nt, Artificial Sequence
  Description of Artificial Sequence: Synthetic oligonucleotide
  Sense strand starting at position 52 of SEQ ID NO: 881
uggguuaacucagcaccaa

SEQ ID NO: 71039 - RNA, 19 nt, Artificial Sequence
  Description of Artificial Sequence: Synthetic oligonucleotide
  Antisense strand to SEQ ID NO: 70958
uuggugcugaguuaaccca

SEQ ID NO: 71040 - RNA, 19 nt, Artificial Sequence
  Description of Artificial Sequence: Synthetic oligonucleotide
  Sense strand starting at position 1 of SEQ ID NO: 881
aauguuugcaggugaagga

SEQ ID NO: 71041 - RNA, 19 nt, Artificial Sequence
  Description of Artificial Sequence: Synthetic oligonucleotide
  Antisense strand to SEQ ID NO: 70960
uccuucaccugcaaacauu

SEQ ID NO: 71042 - RNA, 19 nt, Artificial Sequence
  Description of Artificial Sequence: Synthetic oligonucleotide
  Sense strand starting at position 97 of SEQ ID NO: 882
agaucaguucuuuacaguu

SEQ ID NO: 71043 - RNA, 19 nt, Artificial Sequence
  Description of Artificial Sequence: Synthetic oligonucleotide
  Antisense strand to SEQ ID NO: 70962
aacuguaaagaacugaucu

SEQ ID NO: 71044 - RNA, 19 nt, Artificial Sequence
  Description of Artificial Sequence: Synthetic oligonucleotide
  Sense strand starting at position 190 of SEQ ID NO: 882
ccaugucuauacuuugaca

SEQ ID NO: 71045 - RNA, 19 nt, Artificial Sequence
  Description of Artificial Sequence: Synthetic oligonucleotide
  Antisense strand to SEQ ID NO: 70964
ugucaaaguauagacaugg

SEQ ID NO: 71046 - RNA, 19 nt, Artificial Sequence
  Description of Artificial Sequence: Synthetic oligonucleotide
  Sense strand starting at position 240 of SEQ ID NO: 882
agaucagucgaugggcaaa

SEQ ID NO: 71047 - RNA, 19 nt, Artificial Sequence
  Description of Artificial Sequence: Synthetic oligonucleotide
  Antisense strand to SEQ ID NO: 70966
uuugcccaucgacugaucu

SEQ ID NO: 71048 - RNA, 19 nt, Artificial Sequence
  Description of Artificial Sequence: Synthetic oligonucleotide
  Sense strand starting at position 276 of SEQ ID NO: 882
gacucuaugguagagcuaa

SEQ ID NO: 71049 - RNA, 19 nt, Artificial Sequence
  Description of Artificial Sequence: Synthetic oligonucleotide
  Antisense strand to SEQ ID NO: 70968
uuagcucuaccauagaguc

SEQ ID NO: 71050 - RNA, 19 nt, Artificial Sequence
  Description of Artificial Sequence: Synthetic oligonucleotide
  Sense strand starting at position 295 of SEQ ID NO: 882
gcaugcauuuccuuuaaug

SEQ ID NO: 71051 - RNA, 19 nt, Artificial Sequence
  Description of Artificial Sequence: Synthetic oligonucleotide
  Antisense strand to SEQ ID NO: 70970
cauuaaaggaaaugcaugc

SEQ ID NO: 71052 - RNA, 19 nt, Artificial Sequence
  Description of Artificial Sequence: Synthetic oligonucleotide
  Sense strand starting at position 503 of SEQ ID NO: 882
cgaauuaucagugaauggu

SEQ ID NO: 71053 - RNA, 19 nt, Artificial Sequence
  Description of Artificial Sequence: Synthetic oligonucleotide
  Antisense strand to SEQ ID NO: 70972
accauucacugauaauucg

SEQ ID NO: 71054 - RNA, 19 nt, Artificial Sequence
  Description of Artificial Sequence: Synthetic oligonucleotide
  Sense strand starting at position 509 of SEQ ID NO: 882
aucagugaaugguuuggau

SEQ ID NO: 71055 - RNA, 19 nt, Artificial Sequence
  Description of Artificial Sequence: Synthetic oligonucleotide
  Antisense strand to SEQ ID NO: 70974
auccaaaccauucacugau

SEQ ID NO: 71056 - RNA, 19 nt, Artificial Sequence
  Description of Artificial Sequence: Synthetic oligonucleotide
  Sense strand starting at position 511 of SEQ ID NO: 882
cagugaaugguuuggauau

SEQ ID NO: 71057 - RNA, 19 nt, Artificial Sequence
  Description of Artificial Sequence: Synthetic oligonucleotide
  Antisense strand to SEQ ID NO: 70976
auauccaaaccauucacug

SEQ ID NO: 71058 - RNA, 19 nt, Artificial Sequence
  Description of Artificial Sequence: Synthetic oligonucleotide
  Sense strand starting at position 517 of SEQ ID NO: 882
augguuuggauaugaucga

SEQ ID NO: 71059 - RNA, 19 nt, Artificial Sequence
  Description of Artificial Sequence: Synthetic oligonucleotide
  Antisense strand to SEQ ID NO: 70978
ucgaucauauccaaaccau

SEQ ID NO: 71060 - RNA, 19 nt, Artificial Sequence
  Description of Artificial Sequence: Synthetic oligonucleotide
  Sense strand starting at position 521 of SEQ ID NO: 882
uuuggauaugaucgacuaa

SEQ ID NO: 71061 - RNA, 19 nt, Artificial Sequence
  Description of Artificial Sequence: Synthetic oligonucleotide
  Antisense strand to SEQ ID NO: 70980
uuagucgaucauauccaaa

SEQ ID NO: 71062 - RNA, 19 nt, Artificial Sequence
  Description of Artificial Sequence: Synthetic oligonucleotide
  Sense strand starting at position 824 of SEQ ID NO: 882
ggaguuauauaacuaucuu

SEQ ID NO: 71063 - RNA, 19 nt, Artificial Sequence
  Description of Artificial Sequence: Synthetic oligonucleotide
  Antisense strand to SEQ ID NO: 70982
aagauaguuauauaacucc

SEQ ID NO: 71064 - RNA, 19 nt, Artificial Sequence
  Description of Artificial Sequence: Synthetic oligonucleotide
  Sense strand starting at position 1040 of SEQ ID NO: 882
augugagauccuggaacug

SEQ ID NO: 71065 - RNA, 19 nt, Artificial Sequence
  Description of Artificial Sequence: Synthetic oligonucleotide
  Antisense strand to SEQ ID NO: 70984
caguuccaggaucucacau

SEQ ID NO: 71066 - RNA, 19 nt, Artificial Sequence
  Description of Artificial Sequence: Synthetic oligonucleotide
  Sense strand starting at position 1097 of SEQ ID NO: 882
cucguaagacaauguagaa

SEQ ID NO: 71067 - RNA, 19 nt, Artificial Sequence
  Description of Artificial Sequence: Synthetic oligonucleotide
  Antisense strand to SEQ ID NO: 70986
uucuacauugucuuacgag

SEQ ID NO: 71068 - RNA, 19 nt, Artificial Sequence
  Description of Artificial Sequence: Synthetic oligonucleotide
  Sense strand starting at position 1289 of SEQ ID NO: 882
uuccuauuccuguagggag

SEQ ID NO: 71069 - RNA, 19 nt, Artificial Sequence
  Description of Artificial Sequence: Synthetic oligonucleotide
  Antisense strand to SEQ ID NO: 70988
cucccuacaggaauaggaa

SEQ ID NO: 71070 - RNA, 19 nt, Artificial Sequence
  Description of Artificial Sequence: Synthetic oligonucleotide
  Sense strand starting at position 1307 of SEQ ID NO: 882
ggauauuaaccugguaggu

SEQ ID NO: 71071 - RNA, 19 nt, Artificial Sequence
  Description of Artificial Sequence: Synthetic oligonucleotide
  Antisense strand to SEQ ID NO: 70990
accuaccagguuaauaucc

SEQ ID NO: 71072 - RNA, 19 nt, Artificial Sequence
  Description of Artificial Sequence: Synthetic oligonucleotide
  Sense strand starting at position 1338 of SEQ ID NO: 882
uucguagcccgcuuucuaa

SEQ ID NO: 71073 - RNA, 19 nt, Artificial Sequence
  Description of Artificial Sequence: Synthetic oligonucleotide
  Antisense strand to SEQ ID NO: 70992
uuagaaagcgggcuacgaa

SEQ ID NO: 71074 - RNA, 19 nt, Artificial Sequence
  Description of Artificial Sequence: Synthetic oligonucleotide
  Sense strand starting at position 1353 of SEQ ID NO: 882
cuaacaauuggaugguguu

SEQ ID NO: 71075 - RNA, 19 nt, Artificial Sequence
  Description of Artificial Sequence: Synthetic oligonucleotide
  Antisense strand to SEQ ID NO: 70994
aacaccauccaauuguuag

SEQ ID NO: 71076 - RNA, 19 nt, Artificial Sequence
  Description of Artificial Sequence: Synthetic oligonucleotide
  Sense strand starting at position 1354 of SEQ ID NO: 882
uaacaauuggaugguguuu

SEQ ID NO: 71077 - RNA, 19 nt, Artificial Sequence
  Description of Artificial Sequence: Synthetic oligonucleotide
  Antisense strand to SEQ ID NO: 70996
aaacaccauccaauuguua

SEQ ID NO: 71078 - RNA, 19 nt, Artificial Sequence
  Description of Artificial Sequence: Synthetic oligonucleotide
  Sense strand starting at position 1366 of SEQ ID NO: 882
gguguuugccucgcuauag

SEQ ID NO: 71079 - RNA, 19 nt, Artificial Sequence
  Description of Artificial Sequence: Synthetic oligonucleotide
  Antisense strand to SEQ ID NO: 70998
cuauagcgaggcaaacacc

SEQ ID NO: 71080 - RNA, 19 nt, Artificial Sequence
  Description of Artificial Sequence: Synthetic oligonucleotide
  Sense strand starting at position 1377 of SEQ ID NO: 882
cgcuauagucaugauuaga

SEQ ID NO: 71081 - RNA, 19 nt, Artificial Sequence
  Description of Artificial Sequence: Synthetic oligonucleotide
  Antisense strand to SEQ ID NO: 71000
ucuaaucaugacuauagcg

SEQ ID NO: 71082 - RNA, 19 nt, Artificial Sequence
  Description of Artificial Sequence: Synthetic oligonucleotide
  Sense strand starting at position 1415 of SEQ ID NO: 882
auuuauuggugggaugaca

SEQ ID NO: 71083 - RNA, 19 nt, Artificial Sequence
  Description of Artificial Sequence: Synthetic oligonucleotide
  Antisense strand to SEQ ID NO: 71002
ugucaucccaccaauaaau

SEQ ID NO: 71084 - RNA, 19 nt, Artificial Sequence
  Description of Artificial Sequence: Synthetic oligonucleotide
  Sense strand starting at position 1430 of SEQ ID NO: 882
gacaacauauugguauuga

SEQ ID NO: 71085 - RNA, 19 nt, Artificial Sequence
  Description of Artificial Sequence: Synthetic oligonucleotide
  Antisense strand to SEQ ID NO: 71004
ucaauaccaauauguuguc

SEQ ID NO: 71086 - RNA, 19 nt, Artificial Sequence
  Description of Artificial Sequence: Synthetic oligonucleotide
  Sense strand starting at position 1488 of SEQ ID NO: 882
uuugaagguccuuauguua

SEQ ID NO: 71087 - RNA, 19 nt, Artificial Sequence
  Description of Artificial Sequence: Synthetic oligonucleotide
  Antisense strand to SEQ ID NO: 71006
uaacauaaggaccuucaaa

SEQ ID NO: 71088 - RNA, 19 nt, Artificial Sequence
  Description of Artificial Sequence: Synthetic oligonucleotide
  Sense strand starting at position 1722 of SEQ ID NO: 882
cugcaaugacgugauggaa

SEQ ID NO: 71089 - RNA, 19 nt, Artificial Sequence
  Description of Artificial Sequence: Synthetic oligonucleotide
  Antisense strand to SEQ ID NO: 71008
uuccaucacgucauugcag

SEQ ID NO: 71090 - RNA, 19 nt, Artificial Sequence
  Description of Artificial Sequence: Synthetic oligonucleotide
  Sense strand starting at position 2251 of SEQ ID NO: 882
cuuguuuauguagagaaau

SEQ ID NO: 71091 - RNA, 19 nt, Artificial Sequence
  Description of Artificial Sequence: Synthetic oligonucleotide
  Antisense strand to SEQ ID NO: 71010
auuucucuacauaaacaag

SEQ ID NO: 71092 - RNA, 19 nt, Artificial Sequence
  Description of Artificial Sequence: Synthetic oligonucleotide
  Sense strand starting at position 2352 of SEQ ID NO: 882
auggguuuccaaugugaag

SEQ ID NO: 71093 - RNA, 19 nt, Artificial Sequence
  Description of Artificial Sequence: Synthetic oligonucleotide
  Antisense strand to SEQ ID NO: 71012
cuucacauuggaaacccau

SEQ ID NO: 71094 - RNA, 19 nt, Artificial Sequence
  Description of Artificial Sequence: Synthetic oligonucleotide
  Sense strand starting at position 2354 of SEQ ID NO: 882
ggguuuccaaugugaagaa

SEQ ID NO: 71095 - RNA, 19 nt, Artificial Sequence
  Description of Artificial Sequence: Synthetic oligonucleotide
  Antisense strand to SEQ ID NO: 71014
uucuucacauuggaaaccc

SEQ ID NO: 71096 - RNA, 19 nt, Artificial Sequence
  Description of Artificial Sequence: Synthetic oligonucleotide
  Sense strand starting at position 2478 of SEQ ID NO: 882
aacugaggccagugaaaua

SEQ ID NO: 71097 - RNA, 19 nt, Artificial Sequence
  Description of Artificial Sequence: Synthetic oligonucleotide
  Antisense strand to SEQ ID NO: 71016
uauuucacuggccucaguu

SEQ ID NO: 71098 - RNA, 19 nt, Artificial Sequence
  Description of Artificial Sequence: Synthetic oligonucleotide
  Sense strand starting at position 2524 of SEQ ID NO: 882
gugagagcuuaacuaauaa

SEQ ID NO: 71099 - RNA, 19 nt, Artificial Sequence
  Description of Artificial Sequence: Synthetic oligonucleotide
  Antisense strand to SEQ ID NO: 71018
uuauuaguuaagcucucac

SEQ ID NO: 71100 - RNA, 19 nt, Artificial Sequence
  Description of Artificial Sequence: Synthetic oligonucleotide
  Sense strand starting at position 2749 of SEQ ID NO: 882
cguauugugacgccuaagu

SEQ ID NO: 71101 - RNA, 19 nt, Artificial Sequence
  Description of Artificial Sequence: Synthetic oligonucleotide
  Antisense strand to SEQ ID NO: 71020
acuuaggcgucacaauacg

SEQ ID NO: 71102 - RNA, 19 nt, Artificial Sequence
  Description of Artificial Sequence: Synthetic oligonucleotide
  Sense strand starting at position 2760 of SEQ ID NO: 882
gccuaagugcuugcucuuu

SEQ ID NO: 71103 - RNA, 19 nt, Artificial Sequence
  Description of Artificial Sequence: Synthetic oligonucleotide
  Antisense strand to SEQ ID NO: 71022
aaagagcaagcacuuaggc

SEQ ID NO: 71104 - RNA, 19 nt, Artificial Sequence
  Description of Artificial Sequence: Synthetic oligonucleotide
  Sense strand starting at position 3184 of SEQ ID NO: 882
uuuguaugcuauuugguau

SEQ ID NO: 71105 - RNA, 19 nt, Artificial Sequence
  Description of Artificial Sequence: Synthetic oligonucleotide
  Antisense strand to SEQ ID NO: 71024
auaccaaauagcauacaaa

SEQ ID NO: 71106 - RNA, 19 nt, Artificial Sequence
  Description of Artificial Sequence: Synthetic oligonucleotide
  Sense strand starting at position 3188 of SEQ ID NO: 882
uaugcuauuugguauuuga

SEQ ID NO: 71107 - RNA, 19 nt, Artificial Sequence
  Description of Artificial Sequence: Synthetic oligonucleotide
  Antisense strand to SEQ ID NO: 71026
ucaaauaccaaauagcaua

SEQ ID NO: 71108 - RNA, 19 nt, Artificial Sequence
  Description of Artificial Sequence: Synthetic oligonucleotide
  Sense strand starting at position 3321 of SEQ ID NO: 882
ggcacauuacaggaauugu

SEQ ID NO: 71109 - RNA, 19 nt, Artificial Sequence
  Description of Artificial Sequence: Synthetic oligonucleotide
  Antisense strand to SEQ ID NO: 71028
acaauuccuguaaugugcc

SEQ ID NO: 71110 - RNA, 19 nt, Artificial Sequence
  Description of Artificial Sequence: Synthetic oligonucleotide
  Sense strand starting at position 3531 of SEQ ID NO: 882
gucauaaaucuuugaaagu

SEQ ID NO: 71111 - RNA, 19 nt, Artificial Sequence
  Description of Artificial Sequence: Synthetic oligonucleotide
  Antisense strand to SEQ ID NO: 71030
acuuucaaagauuuaugac

SEQ ID NO: 71112 - RNA, 19 nt, Artificial Sequence
  Description of Artificial Sequence: Synthetic oligonucleotide
  Sense strand starting at position 3541 of SEQ ID NO: 882
uuugaaaguguagaaugua

SEQ ID NO: 71113 - RNA, 19 nt, Artificial Sequence
  Description of Artificial Sequence: Synthetic oligonucleotide
  Antisense strand to SEQ ID NO: 71032
uacauucuacacuuucaaa

SEQ ID NO: 71114 - RNA, 19 nt, Artificial Sequence
  Description of Artificial Sequence: Synthetic oligonucleotide
  Sense strand starting at position 3598 of SEQ ID NO: 882
gaguuauagguaugauauu

SEQ ID NO: 71115 - RNA, 19 nt, Artificial Sequence
  Description of Artificial Sequence: Synthetic oligonucleotide
  Antisense strand to SEQ ID NO: 71034
aauaucauaccuauaacuc

SEQ ID NO: 71116 - RNA, 19 nt, Artificial Sequence
  Description of Artificial Sequence: Synthetic oligonucleotide
  Sense strand starting at position 3604 of SEQ ID NO: 882
uagguaugauauuccagau

SEQ ID NO: 71117 - RNA, 19 nt, Artificial Sequence
  Description of Artificial Sequence: Synthetic oligonucleotide
  Antisense strand to SEQ ID NO: 71036
aucuggaauaucauaccua

SEQ ID NO: 71118 - RNA, 19 nt, Artificial Sequence
  Description of Artificial Sequence: Synthetic oligonucleotide
  Sense strand starting at position 3853 of SEQ ID NO: 882
uucagaacgggucauguua

SEQ ID NO: 71119 - RNA, 19 nt, Artificial Sequence
  Description of Artificial Sequence: Synthetic oligonucleotide
  Antisense strand to SEQ ID NO: 71038
uaacaugacccguucugaa

SEQ ID NO: 71120 - RNA, 19 nt, Artificial Sequence
  Description of Artificial Sequence: Synthetic oligonucleotide
  Sense strand starting at position 3945 of SEQ ID NO: 882
ccaaguagaucauuguauu

SEQ ID NO: 71121 - RNA, 19 nt, Artificial Sequence
  Description of Artificial Sequence: Synthetic oligonucleotide
  Antisense strand to SEQ ID NO: 71040
aauacaaugaucuacuugg

SEQ ID NO: 71122 - RNA, 19 nt, Artificial Sequence
  Description of Artificial Sequence: Synthetic oligonucleotide
  Sense strand starting at position 3953 of SEQ ID NO: 883
gcauacauugugucgccua

SEQ ID NO: 71123 - RNA, 19 nt, Artificial Sequence
  Description of Artificial Sequence: Synthetic oligonucleotide
  Antisense strand to SEQ ID NO: 71042
uaggcgacacaauguaugc

SEQ ID NO: 71124 - RNA, 19 nt, Artificial Sequence
  Description of Artificial Sequence: Synthetic oligonucleotide
  Sense strand starting at position 3939 of SEQ ID NO: 883
cauugugcgccuuugcaua

SEQ ID NO: 71125 - RNA, 19 nt, Artificial Sequence
  Description of Artificial Sequence: Synthetic oligonucleotide
  Antisense strand to SEQ ID NO: 71044
uaugcaaaggcgcacaaug

SEQ ID NO: 71126 - RNA, 19 nt, Artificial Sequence
  Description of Artificial Sequence: Synthetic oligonucleotide
  Sense strand starting at position 3832 of SEQ ID NO: 883
cuuccucuggaauguaaau

SEQ ID NO: 71127 - RNA, 19 nt, Artificial Sequence
  Description of Artificial Sequence: Synthetic oligonucleotide
  Antisense strand to SEQ ID NO: 71046
auuuacauuccagaggaag

SEQ ID NO: 71128 - RNA, 19 nt, Artificial Sequence
  Description of Artificial Sequence: Synthetic oligonucleotide
  Sense strand starting at position 3760 of SEQ ID NO: 883
gagcccuuaugacuuauga

SEQ ID NO: 71129 - RNA, 19 nt, Artificial Sequence
  Description of Artificial Sequence: Synthetic oligonucleotide
  Antisense strand to SEQ ID NO: 71048
ucauaagucauaagggcuc

SEQ ID NO: 71130 - RNA, 19 nt, Artificial Sequence
  Description of Artificial Sequence: Synthetic oligonucleotide
  Sense strand starting at position 3406 of SEQ ID NO: 883
ugugucuuccuggaaaccu

SEQ ID NO: 71131 - RNA, 19 nt, Artificial Sequence
  Description of Artificial Sequence: Synthetic oligonucleotide
  Antisense strand to SEQ ID NO: 71050
agguuuccaggaagacaca

SEQ ID NO: 71132 - RNA, 19 nt, Artificial Sequence
  Description of Artificial Sequence: Synthetic oligonucleotide
  Sense strand starting at position 3291 of SEQ ID NO: 883
ccaggauuaguuugaaauu

SEQ ID NO: 71133 - RNA, 19 nt, Artificial Sequence
  Description of Artificial Sequence: Synthetic oligonucleotide
  Antisense strand to SEQ ID NO: 71052
aauuucaaacuaauccugg

SEQ ID NO: 71134 - RNA, 19 nt, Artificial Sequence
  Description of Artificial Sequence: Synthetic oligonucleotide
  Sense strand starting at position 3288 of SEQ ID NO: 883
cuuccaggauuaguuugaa

SEQ ID NO: 71135 - RNA, 19 nt, Artificial Sequence
  Description of Artificial Sequence: Synthetic oligonucleotide
  Antisense strand to SEQ ID NO: 71054
uucaaacuaauccuggaag

SEQ ID NO: 71136 - RNA, 19 nt, Artificial Sequence
  Description of Artificial Sequence: Synthetic oligonucleotide
  Sense strand starting at position 3283 of SEQ ID NO: 883
agcuucuuccaggauuagu

SEQ ID NO: 71137 - RNA, 19 nt, Artificial Sequence
  Description of Artificial Sequence: Synthetic oligonucleotide
  Antisense strand to SEQ ID NO: 71056
acuaauccuggaagaagcu

SEQ ID NO: 71138 - RNA, 19 nt, Artificial Sequence
  Description of Artificial Sequence: Synthetic oligonucleotide
  Sense strand starting at position 3282 of SEQ ID NO: 883
gagcuucuuccaggauuag

SEQ ID NO: 71139 - RNA, 19 nt, Artificial Sequence
  Description of Artificial Sequence: Synthetic oligonucleotide
  Antisense strand to SEQ ID NO: 71058
cuaauccuggaagaagcuc

SEQ ID NO: 71140 - RNA, 19 nt, Artificial Sequence
  Description of Artificial Sequence: Synthetic oligonucleotide
  Sense strand starting at position 3201 of SEQ ID NO: 883
agcugucuacuauaaagaa

SEQ ID NO: 71141 - RNA, 19 nt, Artificial Sequence
  Description of Artificial Sequence: Synthetic oligonucleotide
  Antisense strand to SEQ ID NO: 71060
uucuuuauaguagacagcu

SEQ ID NO: 71142 - RNA, 19 nt, Artificial Sequence
  Description of Artificial Sequence: Synthetic oligonucleotide
  Sense strand starting at position 3175 of SEQ ID NO: 883
gaaguaauuguggaguaau

SEQ ID NO: 71143 - RNA, 19 nt, Artificial Sequence
  Description of Artificial Sequence: Synthetic oligonucleotide
  Antisense strand to SEQ ID NO: 71062
auuacuccacaauuacuuc

SEQ ID NO: 71144 - RNA, 19 nt, Artificial Sequence
  Description of Artificial Sequence: Synthetic oligonucleotide
  Sense strand starting at position 3123 of SEQ ID NO: 883
aagugcuucguucuguauu

SEQ ID NO: 71145 - RNA, 19 nt, Artificial Sequence
  Description of Artificial Sequence: Synthetic oligonucleotide
  Antisense strand to SEQ ID NO: 71064
aauacagaacgaagcacuu

SEQ ID NO: 71146 - RNA, 19 nt, Artificial Sequence
  Description of Artificial Sequence: Synthetic oligonucleotide
  Sense strand starting at position 3074 of SEQ ID NO: 883
guugaaggcuccucugaag

SEQ ID NO: 71147 - RNA, 19 nt, Artificial Sequence
  Description of Artificial Sequence: Synthetic oligonucleotide
  Antisense strand to SEQ ID NO: 71066
cuucagaggagccuucaac

SEQ ID NO: 71148 - RNA, 19 nt, Artificial Sequence
  Description of Artificial Sequence: Synthetic oligonucleotide
  Sense strand starting at position 2663 of SEQ ID NO: 883
guagauuuauuaucgcuuc

SEQ ID NO: 71149 - RNA, 19 nt, Artificial Sequence
  Description of Artificial Sequence: Synthetic oligonucleotide
  Antisense strand to SEQ ID NO: 71068
gaagcgauaauaaaucuac

SEQ ID NO: 71150 - RNA, 19 nt, Artificial Sequence
  Description of Artificial Sequence: Synthetic oligonucleotide
  Sense strand starting at position 2545 of SEQ ID NO: 883
cagguagaucuuuguauaa

SEQ ID NO: 71151 - RNA, 19 nt, Artificial Sequence
  Description of Artificial Sequence: Synthetic oligonucleotide
  Antisense strand to SEQ ID NO: 71070
uuauacaaagaucuaccug

SEQ ID NO: 71152 - RNA, 19 nt, Artificial Sequence
  Description of Artificial Sequence: Synthetic oligonucleotide
  Sense strand starting at position 2544 of SEQ ID NO: 883
ccagguagaucuuuguaua

SEQ ID NO: 71153 - RNA, 19 nt, Artificial Sequence
  Description of Artificial Sequence: Synthetic oligonucleotide
  Antisense strand to SEQ ID NO: 71072
uauacaaagaucuaccugg

SEQ ID NO: 71154 - RNA, 19 nt, Artificial Sequence
  Description of Artificial Sequence: Synthetic oligonucleotide
  Sense strand starting at position 2403 of SEQ ID NO: 883
acagauaacuuggcuuaaa

SEQ ID NO: 71155 - RNA, 19 nt, Artificial Sequence
  Description of Artificial Sequence: Synthetic oligonucleotide
  Antisense strand to SEQ ID NO: 71074
uuuaagccaaguuaucugu

SEQ ID NO: 71156 - RNA, 19 nt, Artificial Sequence
  Description of Artificial Sequence: Synthetic oligonucleotide
  Sense strand starting at position 1765 of SEQ ID NO: 883
cgaaacugcucagcaaaga

SEQ ID NO: 71157 - RNA, 19 nt, Artificial Sequence
  Description of Artificial Sequence: Synthetic oligonucleotide
  Antisense strand to SEQ ID NO: 71076
ucuuugcugagcaguuucg

SEQ ID NO: 71158 - RNA, 19 nt, Artificial Sequence
  Description of Artificial Sequence: Synthetic oligonucleotide
  Sense strand starting at position 1763 of SEQ ID NO: 883
cucgaaacugcucagcaaa

SEQ ID NO: 71159 - RNA, 19 nt, Artificial Sequence
  Description of Artificial Sequence: Synthetic oligonucleotide
  Antisense strand to SEQ ID NO: 71078
uuugcugagcaguuucgag

SEQ ID NO: 71160 - RNA, 19 nt, Artificial Sequence
  Description of Artificial Sequence: Synthetic oligonucleotide
  Sense strand starting at position 1568 of SEQ ID NO: 883
gcaaacaagucccuuuaga

SEQ ID NO: 71161 - RNA, 19 nt, Artificial Sequence
  Description of Artificial Sequence: Synthetic oligonucleotide
  Antisense strand to SEQ ID NO: 71080
ucuaaagggacuuguuugc

SEQ ID NO: 71162 - RNA, 19 nt, Artificial Sequence
  Description of Artificial Sequence: Synthetic oligonucleotide
  Sense strand starting at position 1441 of SEQ ID NO: 883
uugaaugucuugucugaga

SEQ ID NO: 71163 - RNA, 19 nt, Artificial Sequence
  Description of Artificial Sequence: Synthetic oligonucleotide
  Antisense strand to SEQ ID NO: 71082
ucucagacaagacauucaa

SEQ ID NO: 71164 - RNA, 19 nt, Artificial Sequence
  Description of Artificial Sequence: Synthetic oligonucleotide
  Sense strand starting at position 1325 of SEQ ID NO: 883
agaccauagcuuuaugcua

SEQ ID NO: 71165 - RNA, 19 nt, Artificial Sequence
  Description of Artificial Sequence: Synthetic oligonucleotide
  Antisense strand to SEQ ID NO: 71084
uagcauaaagcuauggucu

SEQ ID NO: 71166 - RNA, 19 nt, Artificial Sequence
  Description of Artificial Sequence: Synthetic oligonucleotide
  Sense strand starting at position 1170 of SEQ ID NO: 883
ucagucagucaggaucuua

SEQ ID NO: 71167 - RNA, 19 nt, Artificial Sequence
  Description of Artificial Sequence: Synthetic oligonucleotide
  Antisense strand to SEQ ID NO: 71086
uaagauccugacugacuga

SEQ ID NO: 71168 - RNA, 19 nt, Artificial Sequence
  Description of Artificial Sequence: Synthetic oligonucleotide
  Sense strand starting at position 1167 of SEQ ID NO: 883
gcaucagucagucaggauc

SEQ ID NO: 71169 - RNA, 19 nt, Artificial Sequence
  Description of Artificial Sequence: Synthetic oligonucleotide
  Antisense strand to SEQ ID NO: 71088
gauccugacugacugaugc

SEQ ID NO: 71170 - RNA, 19 nt, Artificial Sequence
  Description of Artificial Sequence: Synthetic oligonucleotide
  Sense strand starting at position 1156 of SEQ ID NO: 883
ggugaagaucagcaucagu

SEQ ID NO: 71171 - RNA, 19 nt, Artificial Sequence
  Description of Artificial Sequence: Synthetic oligonucleotide
  Antisense strand to SEQ ID NO: 71090
acugaugcugaucuucacc

SEQ ID NO: 71172 - RNA, 19 nt, Artificial Sequence
  Description of Artificial Sequence: Synthetic oligonucleotide
  Sense strand starting at position 1036 of SEQ ID NO: 883
agagccuguguuuaaagga

SEQ ID NO: 71173 - RNA, 19 nt, Artificial Sequence
  Description of Artificial Sequence: Synthetic oligonucleotide
  Antisense strand to SEQ ID NO: 71092
uccuuuaaacacaggcucu

SEQ ID NO: 71174 - RNA, 19 nt, Artificial Sequence
  Description of Artificial Sequence: Synthetic oligonucleotide
  Sense strand starting at position 1033 of SEQ ID NO: 883
aggagagccuguguuuaaa

SEQ ID NO: 71175 - RNA, 19 nt, Artificial Sequence
  Description of Artificial Sequence: Synthetic oligonucleotide
  Antisense strand to SEQ ID NO: 71094
uuuaaacacaggcucuccu

SEQ ID NO: 71176 - RNA, 19 nt, Artificial Sequence
  Description of Artificial Sequence: Synthetic oligonucleotide
  Sense strand starting at position 823 of SEQ ID NO: 883
aaagaaaugugccuguuaa

SEQ ID NO: 71177 - RNA, 19 nt, Artificial Sequence
  Description of Artificial Sequence: Synthetic oligonucleotide
  Antisense strand to SEQ ID NO: 71096
uuaacaggcacauuucuuu

SEQ ID NO: 71178 - RNA, 19 nt, Artificial Sequence
  Description of Artificial Sequence: Synthetic oligonucleotide
  Sense strand starting at position 669 of SEQ ID NO: 883
auuuacagaugaggauuaa

SEQ ID NO: 71179 - RNA, 19 nt, Artificial Sequence
  Description of Artificial Sequence: Synthetic oligonucleotide
  Antisense strand to SEQ ID NO: 71098
uuaauccucaucuguaaau

SEQ ID NO: 71180 - RNA, 19 nt, Artificial Sequence
  Description of Artificial Sequence: Synthetic oligonucleotide
  Sense strand starting at position 662 of SEQ ID NO: 883
ggccacuauuuacagauga

SEQ ID NO: 71181 - RNA, 19 nt, Artificial Sequence
  Description of Artificial Sequence: Synthetic oligonucleotide
  Antisense strand to SEQ ID NO: 71100
ucaucuguaaauaguggcc

SEQ ID NO: 71182 - RNA, 19 nt, Artificial Sequence
  Description of Artificial Sequence: Synthetic oligonucleotide
  Sense strand starting at position 577 of SEQ ID NO: 883
guguguucuccaccagccu

SEQ ID NO: 71183 - RNA, 19 nt, Artificial Sequence
  Description of Artificial Sequence: Synthetic oligonucleotide
  Antisense strand to SEQ ID NO: 71102
aggcugguggagaacacac

SEQ ID NO: 71184 - RNA, 19 nt, Artificial Sequence
  Description of Artificial Sequence: Synthetic oligonucleotide
  Sense strand starting at position 555 of SEQ ID NO: 883
ugaaaugacaaugguguua

SEQ ID NO: 71185 - RNA, 19 nt, Artificial Sequence
  Description of Artificial Sequence: Synthetic oligonucleotide
  Antisense strand to SEQ ID NO: 71104
uaacaccauugucauuuca

SEQ ID NO: 71186 - RNA, 19 nt, Artificial Sequence
  Description of Artificial Sequence: Synthetic oligonucleotide
  Sense strand starting at position 541 of SEQ ID NO: 883
ugguuaguucuacaugaaa

SEQ ID NO: 71187 - RNA, 19 nt, Artificial Sequence
  Description of Artificial Sequence: Synthetic oligonucleotide
  Antisense strand to SEQ ID NO: 71106
uuucauguagaacuaacca

SEQ ID NO: 71188 - RNA, 19 nt, Artificial Sequence
  Description of Artificial Sequence: Synthetic oligonucleotide
  Sense strand starting at position 524 of SEQ ID NO: 883
ugggaaugcucauugauug

SEQ ID NO: 71189 - RNA, 19 nt, Artificial Sequence
  Description of Artificial Sequence: Synthetic oligonucleotide
  Antisense strand to SEQ ID NO: 71108
caaucaaugagcauuccca

SEQ ID NO: 71190 - RNA, 19 nt, Artificial Sequence
  Description of Artificial Sequence: Synthetic oligonucleotide
  Sense strand starting at position 518 of SEQ ID NO: 883
gagguuugggaaugcucau

SEQ ID NO: 71191 - RNA, 19 nt, Artificial Sequence
  Description of Artificial Sequence: Synthetic oligonucleotide
  Antisense strand to SEQ ID NO: 71110
augagcauucccaaaccuc

SEQ ID NO: 71192 - RNA, 19 nt, Artificial Sequence
  Description of Artificial Sequence: Synthetic oligonucleotide
  Sense strand starting at position 512 of SEQ ID NO: 883
uagcaagagguuugggaau

SEQ ID NO: 71193 - RNA, 19 nt, Artificial Sequence
  Description of Artificial Sequence: Synthetic oligonucleotide
  Antisense strand to SEQ ID NO: 71112
auucccaaaccucuugcua

SEQ ID NO: 71194 - RNA, 19 nt, Artificial Sequence
  Description of Artificial Sequence: Synthetic oligonucleotide
  Sense strand starting at position 411 of SEQ ID NO: 883
ugaauagauucugucugua

SEQ ID NO: 71195 - RNA, 19 nt, Artificial Sequence
  Description of Artificial Sequence: Synthetic oligonucleotide
  Antisense strand to SEQ ID NO: 71114
uacagacagaaucuauuca

SEQ ID NO: 71196 - RNA, 19 nt, Artificial Sequence
  Description of Artificial Sequence: Synthetic oligonucleotide
  Sense strand starting at position 400 of SEQ ID NO: 883
acgugcaguaaugaauaga

SEQ ID NO: 71197 - RNA, 19 nt, Artificial Sequence
  Description of Artificial Sequence: Synthetic oligonucleotide
  Antisense strand to SEQ ID NO: 71116
ucuauucauuacugcacgu

SEQ ID NO: 71198 - RNA, 19 nt, Artificial Sequence
  Description of Artificial Sequence: Synthetic oligonucleotide
  Sense strand starting at position 396 of SEQ ID NO: 883
ccuaacgugcaguaaugaa

SEQ ID NO: 71199 - RNA, 19 nt, Artificial Sequence
  Description of Artificial Sequence: Synthetic oligonucleotide
  Antisense strand to SEQ ID NO: 71118
uucauuacugcacguuagg

SEQ ID NO: 71200 - RNA, 19 nt, Artificial Sequence
  Description of Artificial Sequence: Synthetic oligonucleotide
  Sense strand starting at position 244 of SEQ ID NO: 883
gcaauuacucagcaggcaa

SEQ ID NO: 71201 - RNA, 19 nt, Artificial Sequence
  Description of Artificial Sequence: Synthetic oligonucleotide
  Antisense strand to SEQ ID NO: 71120
uugccugcugaguaauugc

SEQ ID NO: 71202 - RNA, 19 nt, Artificial Sequence
  Description of Artificial Sequence: Synthetic oligonucleotide
  Sense strand starting at position 3885 of SEQ ID NO: 885
ugaauagauucugucugua

SEQ ID NO: 71203 - RNA, 19 nt, Artificial Sequence
  Description of Artificial Sequence: Synthetic oligonucleotide
  Antisense strand to SEQ ID NO: 71122
uacagacagaaucuauuca

SEQ ID NO: 71204 - RNA, 19 nt, Artificial Sequence
  Description of Artificial Sequence: Synthetic oligonucleotide
  Sense strand starting at position 3874 of SEQ ID NO: 885
acgugcaguaaugaauaga

SEQ ID NO: 71205 - RNA, 19 nt, Artificial Sequence
  Description of Artificial Sequence: Synthetic oligonucleotide
  Antisense strand to SEQ ID NO: 71124
ucuauucauuacugcacgu

SEQ ID NO: 71206 - RNA, 19 nt, Artificial Sequence
  Description of Artificial Sequence: Synthetic oligonucleotide
  Sense strand starting at position 3870 of SEQ ID NO: 885
ccuaacgugcaguaaugaa

SEQ ID NO: 71207 - RNA, 19 nt, Artificial Sequence
  Description of Artificial Sequence: Synthetic oligonucleotide
  Antisense strand to SEQ ID NO: 71126
uucauuacugcacguuagg

SEQ ID NO: 71208 - RNA, 19 nt, Artificial Sequence
  Description of Artificial Sequence: Synthetic oligonucleotide
  Sense strand starting at position 3718 of SEQ ID NO: 885
gcaauuacucagcaggcaa

SEQ ID NO: 71209 - RNA, 19 nt, Artificial Sequence
  Description of Artificial Sequence: Synthetic oligonucleotide
  Antisense strand to SEQ ID NO: 71128
uugccugcugaguaauugc

SEQ ID NO: 71210 - RNA, 19 nt, Artificial Sequence
  Description of Artificial Sequence: Synthetic oligonucleotide
  Sense strand starting at position 3376 of SEQ ID NO: 885
guagguguuacagacagau

SEQ ID NO: 71211 - RNA, 19 nt, Artificial Sequence
  Description of Artificial Sequence: Synthetic oligonucleotide
  Antisense strand to SEQ ID NO: 71130
aucugucuguaacaccuac

SEQ ID NO: 71212 - RNA, 19 nt, Artificial Sequence
  Description of Artificial Sequence: Synthetic oligonucleotide
  Sense strand starting at position 2632 of SEQ ID NO: 885
ggaggcguuccugauuaac

SEQ ID NO: 71213 - RNA, 19 nt, Artificial Sequence
  Description of Artificial Sequence: Synthetic oligonucleotide
  Antisense strand to SEQ ID NO: 71132
guuaaucaggaacgccucc

SEQ ID NO: 71214 - RNA, 19 nt, Artificial Sequence
  Description of Artificial Sequence: Synthetic oligonucleotide
  Sense strand starting at position 2263 of SEQ ID NO: 885
uuuguucuaacguaagaga

SEQ ID NO: 71215 - RNA, 19 nt, Artificial Sequence
  Description of Artificial Sequence: Synthetic oligonucleotide
  Antisense strand to SEQ ID NO: 71134
ucucuuacguuagaacaaa

SEQ ID NO: 71216 - RNA, 19 nt, Artificial Sequence
  Description of Artificial Sequence: Synthetic oligonucleotide
  Sense strand starting at position 2188 of SEQ ID NO: 885
aagagcguguauuuaucaa

SEQ ID NO: 71217 - RNA, 19 nt, Artificial Sequence
  Description of Artificial Sequence: Synthetic oligonucleotide
  Antisense strand to SEQ ID NO: 71136
uugauaaauacacgcucuu

SEQ ID NO: 71218 - RNA, 19 nt, Artificial Sequence
  Description of Artificial Sequence: Synthetic oligonucleotide
  Sense strand starting at position 2059 of SEQ ID NO: 885
cuaagacccgguuaagauc

SEQ ID NO: 71219 - RNA, 19 nt, Artificial Sequence
  Description of Artificial Sequence: Synthetic oligonucleotide
  Antisense strand to SEQ ID NO: 71138
gaucuuaaccgggucuuag

SEQ ID NO: 71220 - RNA, 19 nt, Artificial Sequence
  Description of Artificial Sequence: Synthetic oligonucleotide
  Sense strand starting at position 1872 of SEQ ID NO: 885
aagguaacauagguuugua

SEQ ID NO: 71221 - RNA, 19 nt, Artificial Sequence
  Description of Artificial Sequence: Synthetic oligonucleotide
  Antisense strand to SEQ ID NO: 71140
uacaaaccuauguuaccuu

SEQ ID NO: 71222 - RNA, 19 nt, Artificial Sequence
  Description of Artificial Sequence: Synthetic oligonucleotide
  Sense strand starting at position 1806 of SEQ ID NO: 885
ugagaacacuguucuaggu

SEQ ID NO: 71223 - RNA, 19 nt, Artificial Sequence
  Description of Artificial Sequence: Synthetic oligonucleotide
  Antisense strand to SEQ ID NO: 71142
accuagaacaguguucuca

SEQ ID NO: 71224 - RNA, 19 nt, Artificial Sequence
  Description of Artificial Sequence: Synthetic oligonucleotide
  Sense strand starting at position 1803 of SEQ ID NO: 885
guuugagaacacuguucua

SEQ ID NO: 71225 - RNA, 19 nt, Artificial Sequence
  Description of Artificial Sequence: Synthetic oligonucleotide
  Antisense strand to SEQ ID NO: 71144
uagaacaguguucucaaac

SEQ ID NO: 71226 - RNA, 19 nt, Artificial Sequence
  Description of Artificial Sequence: Synthetic oligonucleotide
  Sense strand starting at position 1757 of SEQ ID NO: 885
cuaguucccaggugaugau

SEQ ID NO: 71227 - RNA, 19 nt, Artificial Sequence
  Description of Artificial Sequence: Synthetic oligonucleotide
  Antisense strand to SEQ ID NO: 71146
aucaucaccugggaacuag

SEQ ID NO: 71228 - RNA, 19 nt, Artificial Sequence
  Description of Artificial Sequence: Synthetic oligonucleotide
  Sense strand starting at position 1617 of SEQ ID NO: 885
ggucuucuaggccaacagu

SEQ ID NO: 71229 - RNA, 19 nt, Artificial Sequence
  Description of Artificial Sequence: Synthetic oligonucleotide
  Antisense strand to SEQ ID NO: 71148
acuguuggccuagaagacc

SEQ ID NO: 71230 - RNA, 19 nt, Artificial Sequence
  Description of Artificial Sequence: Synthetic oligonucleotide
  Sense strand starting at position 1517 of SEQ ID NO: 885
aggugugaucuuggaacua

SEQ ID NO: 71231 - RNA, 19 nt, Artificial Sequence
  Description of Artificial Sequence: Synthetic oligonucleotide
  Antisense strand to SEQ ID NO: 71150
uaguuccaagaucacaccu

SEQ ID NO: 71232 - RNA, 19 nt, Artificial Sequence
  Description of Artificial Sequence: Synthetic oligonucleotide
  Sense strand starting at position 1482 of SEQ ID NO: 885
ccaaucuauagguggcaga

SEQ ID NO: 71233 - RNA, 19 nt, Artificial Sequence
  Description of Artificial Sequence: Synthetic oligonucleotide
  Antisense strand to SEQ ID NO: 71152
ucugccaccuauagauugg

SEQ ID NO: 71234 - RNA, 19 nt, Artificial Sequence
  Description of Artificial Sequence: Synthetic oligonucleotide
  Sense strand starting at position 1458 of SEQ ID NO: 885
gguuaaggagcucauccaa

SEQ ID NO: 71235 - RNA, 19 nt, Artificial Sequence
  Description of Artificial Sequence: Synthetic oligonucleotide
  Antisense strand to SEQ ID NO: 71154
uuggaugagcuccuuaacc

SEQ ID NO: 71236 - RNA, 19 nt, Artificial Sequence
  Description of Artificial Sequence: Synthetic oligonucleotide
  Sense strand starting at position 1277 of SEQ ID NO: 885
ccaggauuauuugcggcau

SEQ ID NO: 71237 - RNA, 19 nt, Artificial Sequence
  Description of Artificial Sequence: Synthetic oligonucleotide
  Antisense strand to SEQ ID NO: 71156
augccgcaaauaauccugg

SEQ ID NO: 71238 - RNA, 19 nt, Artificial Sequence
  Description of Artificial Sequence: Synthetic oligonucleotide
  Sense strand starting at position 1019 of SEQ ID NO: 885
gaggauuacucuguaaaug

SEQ ID NO: 71239 - RNA, 19 nt, Artificial Sequence
  Description of Artificial Sequence: Synthetic oligonucleotide
  Antisense strand to SEQ ID NO: 71158
cauuuacagaguaauccuc

SEQ ID NO: 71240 - RNA, 19 nt, Artificial Sequence
  Description of Artificial Sequence: Synthetic oligonucleotide
  Sense strand starting at position 1018 of SEQ ID NO: 885
ugaggauuacucuguaaau

SEQ ID NO: 71241 - RNA, 19 nt, Artificial Sequence
  Description of Artificial Sequence: Synthetic oligonucleotide
  Antisense strand to SEQ ID NO: 71160
auuuacagaguaauccuca

SEQ ID NO: 71242 - RNA, 19 nt, Artificial Sequence
  Description of Artificial Sequence: Synthetic oligonucleotide
  Sense strand starting at position 1015 of SEQ ID NO: 885
cacugaggauuacucugua

SEQ ID NO: 71243 - RNA, 19 nt, Artificial Sequence
  Description of Artificial Sequence: Synthetic oligonucleotide
  Antisense strand to SEQ ID NO: 71162
uacagaguaauccucagug

SEQ ID NO: 71244 - RNA, 19 nt, Artificial Sequence
  Description of Artificial Sequence: Synthetic oligonucleotide
  Sense strand starting at position 930 of SEQ ID NO: 885
ugugaaagaaguugaaauc

SEQ ID NO: 71245 - RNA, 19 nt, Artificial Sequence
  Description of Artificial Sequence: Synthetic oligonucleotide
  Antisense strand to SEQ ID NO: 71164
gauuucaacuucuuucaca

SEQ ID NO: 71246 - RNA, 19 nt, Artificial Sequence
  Description of Artificial Sequence: Synthetic oligonucleotide
  Sense strand starting at position 920 of SEQ ID NO: 885
ucaacugaggugugaaaga

SEQ ID NO: 71247 - RNA, 19 nt, Artificial Sequence
  Description of Artificial Sequence: Synthetic oligonucleotide
  Antisense strand to SEQ ID NO: 71166
ucuuucacaccucaguuga

SEQ ID NO: 71248 - RNA, 19 nt, Artificial Sequence
  Description of Artificial Sequence: Synthetic oligonucleotide
  Sense strand starting at position 831 of SEQ ID NO: 885
aauucuucccuguauggga

SEQ ID NO: 71249 - RNA, 19 nt, Artificial Sequence
  Description of Artificial Sequence: Synthetic oligonucleotide
  Antisense strand to SEQ ID NO: 71168
ucccauacagggaagaauu

SEQ ID NO: 71250 - RNA, 19 nt, Artificial Sequence
  Description of Artificial Sequence: Synthetic oligonucleotide
  Sense strand starting at position 808 of SEQ ID NO: 885
aagugaguuucugcuauuu

SEQ ID NO: 71251 - RNA, 19 nt, Artificial Sequence
  Description of Artificial Sequence: Synthetic oligonucleotide
  Antisense strand to SEQ ID NO: 71170
aaauagcagaaacucacuu

SEQ ID NO: 71252 - RNA, 19 nt, Artificial Sequence
  Description of Artificial Sequence: Synthetic oligonucleotide
  Sense strand starting at position 786 of SEQ ID NO: 885
gcccuuuccuaauuagaga

SEQ ID NO: 71253 - RNA, 19 nt, Artificial Sequence
  Description of Artificial Sequence: Synthetic oligonucleotide
  Antisense strand to SEQ ID NO: 71172
ucucuaauuaggaaagggc

SEQ ID NO: 71254 - RNA, 19 nt, Artificial Sequence
  Description of Artificial Sequence: Synthetic oligonucleotide
  Sense strand starting at position 665 of SEQ ID NO: 885
cuuggagauuuccacuuaa

SEQ ID NO: 71255 - RNA, 19 nt, Artificial Sequence
  Description of Artificial Sequence: Synthetic oligonucleotide
  Antisense strand to SEQ ID NO: 71174
uuaaguggaaaucuccaag

SEQ ID NO: 71256 - RNA, 19 nt, Artificial Sequence
  Description of Artificial Sequence: Synthetic oligonucleotide
  Sense strand starting at position 655 of SEQ ID NO: 885
cauccugaugcuuggagau

SEQ ID NO: 71257 - RNA, 19 nt, Artificial Sequence
  Description of Artificial Sequence: Synthetic oligonucleotide
  Antisense strand to SEQ ID NO: 71176
aucuccaagcaucaggaug

SEQ ID NO: 71258 - RNA, 19 nt, Artificial Sequence
  Description of Artificial Sequence: Synthetic oligonucleotide
  Sense strand starting at position 654 of SEQ ID NO: 885
ucauccugaugcuuggaga

SEQ ID NO: 71259 - RNA, 19 nt, Artificial Sequence
  Description of Artificial Sequence: Synthetic oligonucleotide
  Antisense strand to SEQ ID NO: 71178
ucuccaagcaucaggauga

SEQ ID NO: 71260 - RNA, 19 nt, Artificial Sequence
  Description of Artificial Sequence: Synthetic oligonucleotide
  Sense strand starting at position 645 of SEQ ID NO: 885
cuggcagaaucauccugau

SEQ ID NO: 71261 - RNA, 19 nt, Artificial Sequence
  Description of Artificial Sequence: Synthetic oligonucleotide
  Antisense strand to SEQ ID NO: 71180
aucaggaugauucugccag

SEQ ID NO: 71262 - RNA, 19 nt, Artificial Sequence
  Description of Artificial Sequence: Synthetic oligonucleotide
  Sense strand starting at position 616 of SEQ ID NO: 885
agccuaugaaucgggauau

SEQ ID NO: 71263 - RNA, 19 nt, Artificial Sequence
  Description of Artificial Sequence: Synthetic oligonucleotide
  Antisense strand to SEQ ID NO: 71182
auaucccgauucauaggcu

SEQ ID NO: 71264 - RNA, 19 nt, Artificial Sequence
  Description of Artificial Sequence: Synthetic oligonucleotide
  Sense strand starting at position 503 of SEQ ID NO: 885
agguaaagcgaucagcaua

SEQ ID NO: 71265 - RNA, 19 nt, Artificial Sequence
  Description of Artificial Sequence: Synthetic oligonucleotide
  Antisense strand to SEQ ID NO: 71184
uaugcugaucgcuuuaccu

SEQ ID NO: 71266 - RNA, 19 nt, Artificial Sequence
  Description of Artificial Sequence: Synthetic oligonucleotide
  Sense strand starting at position 469 of SEQ ID NO: 885
aguauuacuguuggaagau

SEQ ID NO: 71267 - RNA, 19 nt, Artificial Sequence
  Description of Artificial Sequence: Synthetic oligonucleotide
  Antisense strand to SEQ ID NO: 71186
aucuuccaacaguaauacu

SEQ ID NO: 71268 - RNA, 19 nt, Artificial Sequence
  Description of Artificial Sequence: Synthetic oligonucleotide
  Sense strand starting at position 368 of SEQ ID NO: 885
acagaauugcuaugagagc

SEQ ID NO: 71269 - RNA, 19 nt, Artificial Sequence
  Description of Artificial Sequence: Synthetic oligonucleotide
  Antisense strand to SEQ ID NO: 71188
gcucucauagcaauucugu

SEQ ID NO: 71270 - RNA, 19 nt, Artificial Sequence
  Description of Artificial Sequence: Synthetic oligonucleotide
  Sense strand starting at position 352 of SEQ ID NO: 885
ugagaaugcuaaccucaca

SEQ ID NO: 71271 - RNA, 19 nt, Artificial Sequence
  Description of Artificial Sequence: Synthetic oligonucleotide
  Antisense strand to SEQ ID NO: 71190
ugugagguuagcauucuca

SEQ ID NO: 71272 - RNA, 19 nt, Artificial Sequence
  Description of Artificial Sequence: Synthetic oligonucleotide
  Sense strand starting at position 287 of SEQ ID NO: 885
ggugacuuuaagcaagcaa

SEQ ID NO: 71273 - RNA, 19 nt, Artificial Sequence
  Description of Artificial Sequence: Synthetic oligonucleotide
  Antisense strand to SEQ ID NO: 71192
uugcuugcuuaaagucacc

SEQ ID NO: 71274 - RNA, 19 nt, Artificial Sequence
  Description of Artificial Sequence: Synthetic oligonucleotide
  Sense strand starting at position 278 of SEQ ID NO: 885
uacuuacugggugacuuua

SEQ ID NO: 71275 - RNA, 19 nt, Artificial Sequence
  Description of Artificial Sequence: Synthetic oligonucleotide
  Antisense strand to SEQ ID NO: 71194
uaaagucacccaguaagua

SEQ ID NO: 71276 - RNA, 19 nt, Artificial Sequence
  Description of Artificial Sequence: Synthetic oligonucleotide
  Sense strand starting at position 277 of SEQ ID NO: 885
cuacuuacugggugacuuu

SEQ ID NO: 71277 - RNA, 19 nt, Artificial Sequence
  Description of Artificial Sequence: Synthetic oligonucleotide
  Antisense strand to SEQ ID NO: 71196
aaagucacccaguaaguag

SEQ ID NO: 71278 - RNA, 19 nt, Artificial Sequence
  Description of Artificial Sequence: Synthetic oligonucleotide
  Sense strand starting at position 214 of SEQ ID NO: 885
ugaacucaucguuauggga

SEQ ID NO: 71279 - RNA, 19 nt, Artificial Sequence
  Description of Artificial Sequence: Synthetic oligonucleotide
  Antisense strand to SEQ ID NO: 71198
ucccauaacgaugaguuca

SEQ ID NO: 71280 - RNA, 19 nt, Artificial Sequence
  Description of Artificial Sequence: Synthetic oligonucleotide
  Sense strand starting at position 91 of SEQ ID NO: 885
ggguguacagauugugaaa

SEQ ID NO: 71281 - RNA, 19 nt, Artificial Sequence
  Description of Artificial Sequence: Synthetic oligonucleotide
  Antisense strand to SEQ ID NO: 71200
uuucacaaucuguacaccc

SEQ ID NO: 71282 - RNA, 19 nt, Artificial Sequence
  Description of Artificial Sequence: Synthetic oligonucleotide
  Sense strand starting at position 3709 of SEQ ID NO: 884
gcauacauugugucgccua

SEQ ID NO: 71283 - RNA, 19 nt, Artificial Sequence
  Description of Artificial Sequence: Synthetic oligonucleotide
  Antisense strand to SEQ ID NO: 71202
uaggcgacacaauguaugc

SEQ ID NO: 71284 - RNA, 19 nt, Artificial Sequence
  Description of Artificial Sequence: Synthetic oligonucleotide
  Sense strand starting at position 3695 of SEQ ID NO: 884
cauugugcgccuuugcaua

SEQ ID NO: 71285 - RNA, 19 nt, Artificial Sequence
  Description of Artificial Sequence: Synthetic oligonucleotide
  Antisense strand to SEQ ID NO: 71204
uaugcaaaggcgcacaaug

SEQ ID NO: 71286 - RNA, 19 nt, Artificial Sequence
  Description of Artificial Sequence: Synthetic oligonucleotide
  Sense strand starting at position 3588 of SEQ ID NO: 884
cuuccucuggaauguaaau

SEQ ID NO: 71287 - RNA, 19 nt, Artificial Sequence
  Description of Artificial Sequence: Synthetic oligonucleotide
  Antisense strand to SEQ ID NO: 71206
auuuacauuccagaggaag

SEQ ID NO: 71288 - RNA, 19 nt, Artificial Sequence
  Description of Artificial Sequence: Synthetic oligonucleotide
  Sense strand starting at position 3516 of SEQ ID NO: 884
gagcccuuaugacuuauga

SEQ ID NO: 71289 - RNA, 19 nt, Artificial Sequence
  Description of Artificial Sequence: Synthetic oligonucleotide
  Antisense strand to SEQ ID NO: 71208
ucauaagucauaagggcuc

SEQ ID NO: 71290 - RNA, 19 nt, Artificial Sequence
  Description of Artificial Sequence: Synthetic oligonucleotide
  Sense strand starting at position 3162 of SEQ ID NO: 884
ugugucuuccuggaaaccu

SEQ ID NO: 71291 - RNA, 19 nt, Artificial Sequence
  Description of Artificial Sequence: Synthetic oligonucleotide
  Antisense strand to SEQ ID NO: 71210
agguuuccaggaagacaca

SEQ ID NO: 71292 - RNA, 19 nt, Artificial Sequence
  Description of Artificial Sequence: Synthetic oligonucleotide
  Sense strand starting at position 3047 of SEQ ID NO: 884
ccaggauuaguuugaaauu

SEQ ID NO: 71293 - RNA, 19 nt, Artificial Sequence
  Description of Artificial Sequence: Synthetic oligonucleotide
  Antisense strand to SEQ ID NO: 71212
aauuucaaacuaauccugg

SEQ ID NO: 71294 - RNA, 19 nt, Artificial Sequence
  Description of Artificial Sequence: Synthetic oligonucleotide
  Sense strand starting at position 3044 of SEQ ID NO: 884
cuuccaggauuaguuugaa

SEQ ID NO: 71295 - RNA, 19 nt, Artificial Sequence
  Description of Artificial Sequence: Synthetic oligonucleotide
  Antisense strand to SEQ ID NO: 71214
uucaaacuaauccuggaag

SEQ ID NO: 71296 - RNA, 19 nt, Artificial Sequence
  Description of Artificial Sequence: Synthetic oligonucleotide
  Sense strand starting at position 3039 of SEQ ID NO: 884
agcuucuuccaggauuagu

SEQ ID NO: 71297 - RNA, 19 nt, Artificial Sequence
  Description of Artificial Sequence: Synthetic oligonucleotide
  Antisense strand to SEQ ID NO: 71216
acuaauccuggaagaagcu

SEQ ID NO: 71298 - RNA, 19 nt, Artificial Sequence
  Description of Artificial Sequence: Synthetic oligonucleotide
  Sense strand starting at position 3038 of SEQ ID NO: 884
gagcuucuuccaggauuag

SEQ ID NO: 71299 - RNA, 19 nt, Artificial Sequence
  Description of Artificial Sequence: Synthetic oligonucleotide
  Antisense strand to SEQ ID NO: 71218
cuaauccuggaagaagcuc

SEQ ID NO: 71300 - RNA, 19 nt, Artificial Sequence
  Description of Artificial Sequence: Synthetic oligonucleotide
  Sense strand starting at position 2957 of SEQ ID NO: 884
agcugucuacuauaaagaa

SEQ ID NO: 71301 - RNA, 19 nt, Artificial Sequence
  Description of Artificial Sequence: Synthetic oligonucleotide
  Antisense strand to SEQ ID NO: 71220
uucuuuauaguagacagcu

SEQ ID NO: 71302 - RNA, 19 nt, Artificial Sequence
  Description of Artificial Sequence: Synthetic oligonucleotide
  Sense strand starting at position 2931 of SEQ ID NO: 884
gaaguaauuguggaguaau

SEQ ID NO: 71303 - RNA, 19 nt, Artificial Sequence
  Description of Artificial Sequence: Synthetic oligonucleotide
  Antisense strand to SEQ ID NO: 71222
auuacuccacaauuacuuc

SEQ ID NO: 71304 - RNA, 19 nt, Artificial Sequence
  Description of Artificial Sequence: Synthetic oligonucleotide
  Sense strand starting at position 2879 of SEQ ID NO: 884
aagugcuucguucuguauu

SEQ ID NO: 71305 - RNA, 19 nt, Artificial Sequence
  Description of Artificial Sequence: Synthetic oligonucleotide
  Antisense strand to SEQ ID NO: 71224
aauacagaacgaagcacuu

SEQ ID NO: 71306 - RNA, 19 nt, Artificial Sequence
  Description of Artificial Sequence: Synthetic oligonucleotide
  Sense strand starting at position 2830 of SEQ ID NO: 884
guugaaggcuccucugaag

SEQ ID NO: 71307 - RNA, 19 nt, Artificial Sequence
  Description of Artificial Sequence: Synthetic oligonucleotide
  Antisense strand to SEQ ID NO: 71226
cuucagaggagccuucaac

SEQ ID NO: 71308 - RNA, 19 nt, Artificial Sequence
  Description of Artificial Sequence: Synthetic oligonucleotide
  Sense strand starting at position 2419 of SEQ ID NO: 884
guagauuuauuaucgcuuc

SEQ ID NO: 71309 - RNA, 19 nt, Artificial Sequence
  Description of Artificial Sequence: Synthetic oligonucleotide
  Antisense strand to SEQ ID NO: 71228
gaagcgauaauaaaucuac

SEQ ID NO: 71310 - RNA, 19 nt, Artificial Sequence
  Description of Artificial Sequence: Synthetic oligonucleotide
  Sense strand starting at position 2301 of SEQ ID NO: 884
cagguagaucuuuguauaa

SEQ ID NO: 71311 - RNA, 19 nt, Artificial Sequence
  Description of Artificial Sequence: Synthetic oligonucleotide
  Antisense strand to SEQ ID NO: 71230
uuauacaaagaucuaccug

SEQ ID NO: 71312 - RNA, 19 nt, Artificial Sequence
  Description of Artificial Sequence: Synthetic oligonucleotide
  Sense strand starting at position 2300 of SEQ ID NO: 884
ccagguagaucuuuguaua

SEQ ID NO: 71313 - RNA, 19 nt, Artificial Sequence
  Description of Artificial Sequence: Synthetic oligonucleotide
  Antisense strand to SEQ ID NO: 71232
uauacaaagaucuaccugg

SEQ ID NO: 71314 - RNA, 19 nt, Artificial Sequence
  Description of Artificial Sequence: Synthetic oligonucleotide
  Sense strand starting at position 2159 of SEQ ID NO: 884
acagauaacuuggcuuaaa

SEQ ID NO: 71315 - RNA, 19 nt, Artificial Sequence
  Description of Artificial Sequence: Synthetic oligonucleotide
  Antisense strand to SEQ ID NO: 71234
uuuaagccaaguuaucugu

SEQ ID NO: 71316 - RNA, 19 nt, Artificial Sequence
  Description of Artificial Sequence: Synthetic oligonucleotide
  Sense strand starting at position 1521 of SEQ ID NO: 884
cgaaacugcucagcaaaga

SEQ ID NO: 71317 - RNA, 19 nt, Artificial Sequence
  Description of Artificial Sequence: Synthetic oligonucleotide
  Antisense strand to SEQ ID NO: 71236
ucuuugcugagcaguuucg

SEQ ID NO: 71318 - RNA, 19 nt, Artificial Sequence
  Description of Artificial Sequence: Synthetic oligonucleotide
  Sense strand starting at position 1519 of SEQ ID NO: 884
cucgaaacugcucagcaaa

SEQ ID NO: 71319 - RNA, 19 nt, Artificial Sequence
  Description of Artificial Sequence: Synthetic oligonucleotide
  Antisense strand to SEQ ID NO: 71238
uuugcugagcaguuucgag

SEQ ID NO: 71320 - RNA, 19 nt, Artificial Sequence
  Description of Artificial Sequence: Synthetic oligonucleotide
  Sense strand starting at position 1324 of SEQ ID NO: 884
gcaaacaagucccuuuaga

SEQ ID NO: 71321 - RNA, 19 nt, Artificial Sequence
  Description of Artificial Sequence: Synthetic oligonucleotide
  Antisense strand to SEQ ID NO: 71240
ucuaaagggacuuguuugc

SEQ ID NO: 71322 - RNA, 19 nt, Artificial Sequence
  Description of Artificial Sequence: Synthetic oligonucleotide
  Sense strand starting at position 1199 of SEQ ID NO: 884
gaaugucuugucugagauc

SEQ ID NO: 71323 - RNA, 19 nt, Artificial Sequence
  Description of Artificial Sequence: Synthetic oligonucleotide
  Antisense strand to SEQ ID NO: 71242
gaucucagacaagacauuc

SEQ ID NO: 71324 - RNA, 19 nt, Artificial Sequence
  Description of Artificial Sequence: Synthetic oligonucleotide
  Sense strand starting at position 1197 of SEQ ID NO: 884
uugaaugucuugucugaga

SEQ ID NO: 71325 - RNA, 19 nt, Artificial Sequence
  Description of Artificial Sequence: Synthetic oligonucleotide
  Antisense strand to SEQ ID NO: 71244
ucucagacaagacauucaa

SEQ ID NO: 71326 - RNA, 19 nt, Artificial Sequence
  Description of Artificial Sequence: Synthetic oligonucleotide
  Sense strand starting at position 1081 of SEQ ID NO: 884
agaccauagcuuuaugcua

SEQ ID NO: 71327 - RNA, 19 nt, Artificial Sequence
  Description of Artificial Sequence: Synthetic oligonucleotide
  Antisense strand to SEQ ID NO: 71246
uagcauaaagcuauggucu

SEQ ID NO: 71328 - RNA, 19 nt, Artificial Sequence
  Description of Artificial Sequence: Synthetic oligonucleotide
  Sense strand starting at position 926 of SEQ ID NO: 884
ucagucagucaggaucuua

SEQ ID NO: 71329 - RNA, 19 nt, Artificial Sequence
  Description of Artificial Sequence: Synthetic oligonucleotide
  Antisense strand to SEQ ID NO: 71248
uaagauccugacugacuga

SEQ ID NO: 71330 - RNA, 19 nt, Artificial Sequence
  Description of Artificial Sequence: Synthetic oligonucleotide
  Sense strand starting at position 923 of SEQ ID NO: 884
gcaucagucagucaggauc

SEQ ID NO: 71331 - RNA, 19 nt, Artificial Sequence
  Description of Artificial Sequence: Synthetic oligonucleotide
  Antisense strand to SEQ ID NO: 71250
gauccugacugacugaugc

SEQ ID NO: 71332 - RNA, 19 nt, Artificial Sequence
  Description of Artificial Sequence: Synthetic oligonucleotide
  Sense strand starting at position 912 of SEQ ID NO: 884
ggugaagaucagcaucagu

SEQ ID NO: 71333 - RNA, 19 nt, Artificial Sequence
  Description of Artificial Sequence: Synthetic oligonucleotide
  Antisense strand to SEQ ID NO: 71252
acugaugcugaucuucacc

SEQ ID NO: 71334 - RNA, 19 nt, Artificial Sequence
  Description of Artificial Sequence: Synthetic oligonucleotide
  Sense strand starting at position 792 of SEQ ID NO: 884
agagccuguguuuaaagga

SEQ ID NO: 71335 - RNA, 19 nt, Artificial Sequence
  Description of Artificial Sequence: Synthetic oligonucleotide
  Antisense strand to SEQ ID NO: 71254
uccuuuaaacacaggcucu

SEQ ID NO: 71336 - RNA, 19 nt, Artificial Sequence
  Description of Artificial Sequence: Synthetic oligonucleotide
  Sense strand starting at position 789 of SEQ ID NO: 884
aggagagccuguguuuaaa

SEQ ID NO: 71337 - RNA, 19 nt, Artificial Sequence
  Description of Artificial Sequence: Synthetic oligonucleotide
  Antisense strand to SEQ ID NO: 71256
uuuaaacacaggcucuccu

SEQ ID NO: 71338 - RNA, 19 nt, Artificial Sequence
  Description of Artificial Sequence: Synthetic oligonucleotide
  Sense strand starting at position 579 of SEQ ID NO: 884
aaagaaaugugccuguuaa

SEQ ID NO: 71339 - RNA, 19 nt, Artificial Sequence
  Description of Artificial Sequence: Synthetic oligonucleotide
  Antisense strand to SEQ ID NO: 71258
uuaacaggcacauuucuuu

SEQ ID NO: 71340 - RNA, 19 nt, Artificial Sequence
  Description of Artificial Sequence: Synthetic oligonucleotide
  Sense strand starting at position 425 of SEQ ID NO: 884
auuuacagaugaggauuaa

SEQ ID NO: 71341 - RNA, 19 nt, Artificial Sequence
  Description of Artificial Sequence: Synthetic oligonucleotide
  Antisense strand to SEQ ID NO: 71260
uuaauccucaucuguaaau

SEQ ID NO: 71342 - RNA, 19 nt, Artificial Sequence
  Description of Artificial Sequence: Synthetic oligonucleotide
  Sense strand starting at position 418 of SEQ ID NO: 884
ggccacuauuuacagauga

SEQ ID NO: 71343 - RNA, 19 nt, Artificial Sequence
  Description of Artificial Sequence: Synthetic oligonucleotide
  Antisense strand to SEQ ID NO: 71262
ucaucuguaaauaguggcc

SEQ ID NO: 71344 - RNA, 19 nt, Artificial Sequence
  Description of Artificial Sequence: Synthetic oligonucleotide
  Sense strand starting at position 333 of SEQ ID NO: 884
guguguucuccaccagccu

SEQ ID NO: 71345 - RNA, 19 nt, Artificial Sequence
  Description of Artificial Sequence: Synthetic oligonucleotide
  Antisense strand to SEQ ID NO: 71264
aggcugguggagaacacac

SEQ ID NO: 71346 - RNA, 19 nt, Artificial Sequence
  Description of Artificial Sequence: Synthetic oligonucleotide
  Sense strand starting at position 311 of SEQ ID NO: 884
ugaaaugacaaugguguua

SEQ ID NO: 71347 - RNA, 19 nt, Artificial Sequence
  Description of Artificial Sequence: Synthetic oligonucleotide
  Antisense strand to SEQ ID NO: 71266
uaacaccauugucauuuca

SEQ ID NO: 71348 - RNA, 19 nt, Artificial Sequence
  Description of Artificial Sequence: Synthetic oligonucleotide
  Sense strand starting at position 297 of SEQ ID NO: 884
ugguuaguucuacaugaaa

SEQ ID NO: 71349 - RNA, 19 nt, Artificial Sequence
  Description of Artificial Sequence: Synthetic oligonucleotide
  Antisense strand to SEQ ID NO: 71268
uuucauguagaacuaacca

SEQ ID NO: 71350 - RNA, 19 nt, Artificial Sequence
  Description of Artificial Sequence: Synthetic oligonucleotide
  Sense strand starting at position 280 of SEQ ID NO: 884
ugggaaugcucauugauug

SEQ ID NO: 71351 - RNA, 19 nt, Artificial Sequence
  Description of Artificial Sequence: Synthetic oligonucleotide
  Antisense strand to SEQ ID NO: 71270
caaucaaugagcauuccca

SEQ ID NO: 71352 - RNA, 19 nt, Artificial Sequence
  Description of Artificial Sequence: Synthetic oligonucleotide
  Sense strand starting at position 274 of SEQ ID NO: 884
gagguuugggaaugcucau

SEQ ID NO: 71353 - RNA, 19 nt, Artificial Sequence
  Description of Artificial Sequence: Synthetic oligonucleotide
  Antisense strand to SEQ ID NO: 71272
augagcauucccaaaccuc

SEQ ID NO: 71354 - RNA, 19 nt, Artificial Sequence
  Description of Artificial Sequence: Synthetic oligonucleotide
  Sense strand starting at position 268 of SEQ ID NO: 884
uagcaagagguuugggaau

SEQ ID NO: 71355 - RNA, 19 nt, Artificial Sequence
  Description of Artificial Sequence: Synthetic oligonucleotide
  Antisense strand to SEQ ID NO: 71274
auucccaaaccucuugcua

SEQ ID NO: 71356 - RNA, 19 nt, Artificial Sequence
  Description of Artificial Sequence: Synthetic oligonucleotide
  Sense strand starting at position 167 of SEQ ID NO: 884
ugaauagauucugucugua

SEQ ID NO: 71357 - RNA, 19 nt, Artificial Sequence
  Description of Artificial Sequence: Synthetic oligonucleotide
  Antisense strand to SEQ ID NO: 71276
uacagacagaaucuauuca

SEQ ID NO: 71358 - RNA, 19 nt, Artificial Sequence
  Description of Artificial Sequence: Synthetic oligonucleotide
  Sense strand starting at position 156 of SEQ ID NO: 884
acgugcaguaaugaauaga

SEQ ID NO: 71359 - RNA, 19 nt, Artificial Sequence
  Description of Artificial Sequence: Synthetic oligonucleotide
  Antisense strand to SEQ ID NO: 71278
ucuauucauuacugcacgu

SEQ ID NO: 71360 - RNA, 19 nt, Artificial Sequence
  Description of Artificial Sequence: Synthetic oligonucleotide
  Sense strand starting at position 152 of SEQ ID NO: 884
ccuaacgugcaguaaugaa

SEQ ID NO: 71361 - RNA, 19 nt, Artificial Sequence
  Description of Artificial Sequence: Synthetic oligonucleotide
  Antisense strand to SEQ ID NO: 71280
uucauuacugcacguuagg

SEQ ID NO: 71362 - RNA, 19 nt, Artificial Sequence
  Description of Artificial Sequence: Synthetic oligonucleotide
  Sense strand starting at position 360 of SEQ ID NO: 886
aaggguuaagccugaccau

SEQ ID NO: 71363 - RNA, 19 nt, Artificial Sequence
  Description of Artificial Sequence: Synthetic oligonucleotide
  Antisense strand to SEQ ID NO: 71282
auggucaggcuuaacccuu

SEQ ID NO: 71364 - RNA, 19 nt, Artificial Sequence
  Description of Artificial Sequence: Synthetic oligonucleotide
  Sense strand starting at position 361 of SEQ ID NO: 886
aggguuaagccugaccaua

SEQ ID NO: 71365 - RNA, 19 nt, Artificial Sequence
  Description of Artificial Sequence: Synthetic oligonucleotide
  Antisense strand to SEQ ID NO: 71284
uauggucaggcuuaacccu

SEQ ID NO: 71366 - RNA, 19 nt, Artificial Sequence
  Description of Artificial Sequence: Synthetic oligonucleotide
  Sense strand starting at position 363 of SEQ ID NO: 886
gguuaagccugaccauaag

SEQ ID NO: 71367 - RNA, 19 nt, Artificial Sequence
  Description of Artificial Sequence: Synthetic oligonucleotide
  Antisense strand to SEQ ID NO: 71286
cuuauggucaggcuuaacc

SEQ ID NO: 71368 - RNA, 19 nt, Artificial Sequence
  Description of Artificial Sequence: Synthetic oligonucleotide
  Sense strand starting at position 661 of SEQ ID NO: 886
caagguccgcccugaagaa

SEQ ID NO: 71369 - RNA, 19 nt, Artificial Sequence
  Description of Artificial Sequence: Synthetic oligonucleotide
  Antisense strand to SEQ ID NO: 71288
uucuucagggcggaccuug

SEQ ID NO: 71370 - RNA, 19 nt, Artificial Sequence
  Description of Artificial Sequence: Synthetic oligonucleotide
  Sense strand starting at position 929 of SEQ ID NO: 886
guaagagucuccggcgaga

SEQ ID NO: 71371 - RNA, 19 nt, Artificial Sequence
  Description of Artificial Sequence: Synthetic oligonucleotide
  Antisense strand to SEQ ID NO: 71290
ucucgccggagacucuuac

SEQ ID NO: 71372 - RNA, 19 nt, Artificial Sequence
  Description of Artificial Sequence: Synthetic oligonucleotide
  Sense strand starting at position 931 of SEQ ID NO: 886
aagagucuccggcgagaag

SEQ ID NO: 71373 - RNA, 19 nt, Artificial Sequence
  Description of Artificial Sequence: Synthetic oligonucleotide
  Antisense strand to SEQ ID NO: 71292
cuucucgccggagacucuu

SEQ ID NO: 71374 - RNA, 19 nt, Artificial Sequence
  Description of Artificial Sequence: Synthetic oligonucleotide
  Sense strand starting at position 932 of SEQ ID NO: 886
agagucuccggcgagaaga

SEQ ID NO: 71375 - RNA, 19 nt, Artificial Sequence
  Description of Artificial Sequence: Synthetic oligonucleotide
  Antisense strand to SEQ ID NO: 71294
ucuucucgccggagacucu

SEQ ID NO: 71376 - RNA, 19 nt, Artificial Sequence
  Description of Artificial Sequence: Synthetic oligonucleotide
  Sense strand starting at position 1014 of SEQ ID NO: 886
aggaauucgggcuaacuuu

SEQ ID NO: 71377 - RNA, 19 nt, Artificial Sequence
  Description of Artificial Sequence: Synthetic oligonucleotide
  Antisense strand to SEQ ID NO: 71296
aaaguuagcccgaauuccu

SEQ ID NO: 71378 - RNA, 19 nt, Artificial Sequence
  Description of Artificial Sequence: Synthetic oligonucleotide
  Sense strand starting at position 1253 of SEQ ID NO: 886
cugcccucgucaugcgaau

SEQ ID NO: 71379 - RNA, 19 nt, Artificial Sequence
  Description of Artificial Sequence: Synthetic oligonucleotide
  Antisense strand to SEQ ID NO: 71298
auucgcaugacgagggcag

SEQ ID NO: 71380 - RNA, 19 nt, Artificial Sequence
  Description of Artificial Sequence: Synthetic oligonucleotide
  Sense strand starting at position 1446 of SEQ ID NO: 886
gcgaaaugcgcccucgacu

SEQ ID NO: 71381 - RNA, 19 nt, Artificial Sequence
  Description of Artificial Sequence: Synthetic oligonucleotide
  Antisense strand to SEQ ID NO: 71300
agucgagggcgcauuucgc

SEQ ID NO: 71382 - RNA, 19 nt, Artificial Sequence
  Description of Artificial Sequence: Synthetic oligonucleotide
  Sense strand starting at position 3104 of SEQ ID NO: 886
acuguaauuugucguggga

SEQ ID NO: 71383 - RNA, 19 nt, Artificial Sequence
  Description of Artificial Sequence: Synthetic oligonucleotide
  Antisense strand to SEQ ID NO: 71302
ucccacgacaaauuacagu

SEQ ID NO: 71384 - RNA, 19 nt, Artificial Sequence
  Description of Artificial Sequence: Synthetic oligonucleotide
  Sense strand starting at position 3106 of SEQ ID NO: 886
uguaauuugucgugggaug

SEQ ID NO: 71385 - RNA, 19 nt, Artificial Sequence
  Description of Artificial Sequence: Synthetic oligonucleotide
  Antisense strand to SEQ ID NO: 71304
caucccacgacaaauuaca

SEQ ID NO: 71386 - RNA, 19 nt, Artificial Sequence
  Description of Artificial Sequence: Synthetic oligonucleotide
  Sense strand starting at position 3171 of SEQ ID NO: 886
caacguuguuuauuagcaa

SEQ ID NO: 71387 - RNA, 19 nt, Artificial Sequence
  Description of Artificial Sequence: Synthetic oligonucleotide
  Antisense strand to SEQ ID NO: 71306
uugcuaauaaacaacguug

SEQ ID NO: 71388 - RNA, 19 nt, Artificial Sequence
  Description of Artificial Sequence: Synthetic oligonucleotide
  Sense strand starting at position 3172 of SEQ ID NO: 886
aacguuguuuauuagcaau

SEQ ID NO: 71389 - RNA, 19 nt, Artificial Sequence
  Description of Artificial Sequence: Synthetic oligonucleotide
  Antisense strand to SEQ ID NO: 71308
auugcuaauaaacaacguu

SEQ ID NO: 71390 - RNA, 19 nt, Artificial Sequence
  Description of Artificial Sequence: Synthetic oligonucleotide
  Sense strand starting at position 3174 of SEQ ID NO: 886
cguuguuuauuagcaauaa

SEQ ID NO: 71391 - RNA, 19 nt, Artificial Sequence
  Description of Artificial Sequence: Synthetic oligonucleotide
  Antisense strand to SEQ ID NO: 71310
uuauugcuaauaaacaacg

SEQ ID NO: 71392 - RNA, 19 nt, Artificial Sequence
  Description of Artificial Sequence: Synthetic oligonucleotide
  Sense strand starting at position 3262 of SEQ ID NO: 886
cugcgaauuacucaguuag

SEQ ID NO: 71393 - RNA, 19 nt, Artificial Sequence
  Description of Artificial Sequence: Synthetic oligonucleotide
  Antisense strand to SEQ ID NO: 71312
cuaacugaguaauucgcag

SEQ ID NO: 71394 - RNA, 19 nt, Artificial Sequence
  Description of Artificial Sequence: Synthetic oligonucleotide
  Sense strand starting at position 3270 of SEQ ID NO: 886
uacucaguuaggcgaguuu

SEQ ID NO: 71395 - RNA, 19 nt, Artificial Sequence
  Description of Artificial Sequence: Synthetic oligonucleotide
  Antisense strand to SEQ ID NO: 71314
aaacucgccuaacugagua

SEQ ID NO: 71396 - RNA, 19 nt, Artificial Sequence
  Description of Artificial Sequence: Synthetic oligonucleotide
  Sense strand starting at position 3279 of SEQ ID NO: 886
aggcgaguuuaaugaccuu

SEQ ID NO: 71397 - RNA, 19 nt, Artificial Sequence
  Description of Artificial Sequence: Synthetic oligonucleotide
  Antisense strand to SEQ ID NO: 71316
aaggucauuaaacucgccu

SEQ ID NO: 71398 - RNA, 19 nt, Artificial Sequence
  Description of Artificial Sequence: Synthetic oligonucleotide
  Sense strand starting at position 3318 of SEQ ID NO: 886
gccgauacaguagauaaau

SEQ ID NO: 71399 - RNA, 19 nt, Artificial Sequence
  Description of Artificial Sequence: Synthetic oligonucleotide
  Antisense strand to SEQ ID NO: 71318
auuuaucuacuguaucggc

SEQ ID NO: 71400 - RNA, 19 nt, Artificial Sequence
  Description of Artificial Sequence: Synthetic oligonucleotide
  Sense strand starting at position 3517 of SEQ ID NO: 886
cucucacccgccuguuaau

SEQ ID NO: 71401 - RNA, 19 nt, Artificial Sequence
  Description of Artificial Sequence: Synthetic oligonucleotide
  Antisense strand to SEQ ID NO: 71320
auuaacaggcgggugagag

SEQ ID NO: 71402 - RNA, 19 nt, Artificial Sequence
  Description of Artificial Sequence: Synthetic oligonucleotide
  Sense strand starting at position 3764 of SEQ ID NO: 886
gagguuauugagugucugu

SEQ ID NO: 71403 - RNA, 19 nt, Artificial Sequence
  Description of Artificial Sequence: Synthetic oligonucleotide
  Antisense strand to SEQ ID NO: 71322
acagacacucaauaaccuc

SEQ ID NO: 71404 - RNA, 19 nt, Artificial Sequence
  Description of Artificial Sequence: Synthetic oligonucleotide
  Sense strand starting at position 3774 of SEQ ID NO: 886
agugucugucucugccaaa

SEQ ID NO: 71405 - RNA, 19 nt, Artificial Sequence
  Description of Artificial Sequence: Synthetic oligonucleotide
  Antisense strand to SEQ ID NO: 71324
uuuggcagagacagacacu

SEQ ID NO: 71406 - RNA, 19 nt, Artificial Sequence
  Description of Artificial Sequence: Synthetic oligonucleotide
  Sense strand starting at position 3777 of SEQ ID NO: 886
gucugucucugccaaaguu

SEQ ID NO: 71407 - RNA, 19 nt, Artificial Sequence
  Description of Artificial Sequence: Synthetic oligonucleotide
  Antisense strand to SEQ ID NO: 71326
aacuuuggcagagacagac

SEQ ID NO: 71408 - RNA, 19 nt, Artificial Sequence
  Description of Artificial Sequence: Synthetic oligonucleotide
  Sense strand starting at position 3907 of SEQ ID NO: 886
gcugccaccucuugauaaa

SEQ ID NO: 71409 - RNA, 19 nt, Artificial Sequence
  Description of Artificial Sequence: Synthetic oligonucleotide
  Antisense strand to SEQ ID NO: 71328
uuuaucaagagguggcagc

SEQ ID NO: 71410 - RNA, 19 nt, Artificial Sequence
  Description of Artificial Sequence: Synthetic oligonucleotide
  Sense strand starting at position 3821 of SEQ ID NO: 887
ugcuuuaaaggauauugca

SEQ ID NO: 71411 - RNA, 19 nt, Artificial Sequence
  Description of Artificial Sequence: Synthetic oligonucleotide
  Antisense strand to SEQ ID NO: 71330
ugcaauauccuuuaaagca

SEQ ID NO: 71412 - RNA, 19 nt, Artificial Sequence
  Description of Artificial Sequence: Synthetic oligonucleotide
  Sense strand starting at position 3814 of SEQ ID NO: 887
gguugacugcuuuaaagga

SEQ ID NO: 71413 - RNA, 19 nt, Artificial Sequence
  Description of Artificial Sequence: Synthetic oligonucleotide
  Antisense strand to SEQ ID NO: 71332
uccuuuaaagcagucaacc

SEQ ID NO: 71414 - RNA, 19 nt, Artificial Sequence
  Description of Artificial Sequence: Synthetic oligonucleotide
  Sense strand starting at position 3727 of SEQ ID NO: 887
ccacgagaacaauguccaa

SEQ ID NO: 71415 - RNA, 19 nt, Artificial Sequence
  Description of Artificial Sequence: Synthetic oligonucleotide
  Antisense strand to SEQ ID NO: 71334
uuggacauuguucucgugg

SEQ ID NO: 71416 - RNA, 19 nt, Artificial Sequence
  Description of Artificial Sequence: Synthetic oligonucleotide
  Sense strand starting at position 2623 of SEQ ID NO: 887
cuaaguacuguguaaauua

SEQ ID NO: 71417 - RNA, 19 nt, Artificial Sequence
  Description of Artificial Sequence: Synthetic oligonucleotide
  Antisense strand to SEQ ID NO: 71336
uaauuuacacaguacuuag

SEQ ID NO: 71418 - RNA, 19 nt, Artificial Sequence
  Description of Artificial Sequence: Synthetic oligonucleotide
  Sense strand starting at position 2621 of SEQ ID NO: 887
ggcuaaguacuguguaaau

SEQ ID NO: 71419 - RNA, 19 nt, Artificial Sequence
  Description of Artificial Sequence: Synthetic oligonucleotide
  Antisense strand to SEQ ID NO: 71338
auuuacacaguacuuagcc

SEQ ID NO: 71420 - RNA, 19 nt, Artificial Sequence
  Description of Artificial Sequence: Synthetic oligonucleotide
  Sense strand starting at position 2619 of SEQ ID NO: 887
cuggcuaaguacuguguaa

SEQ ID NO: 71421 - RNA, 19 nt, Artificial Sequence
  Description of Artificial Sequence: Synthetic oligonucleotide
  Antisense strand to SEQ ID NO: 71340
uuacacaguacuuagccag

SEQ ID NO: 71422 - RNA, 19 nt, Artificial Sequence
  Description of Artificial Sequence: Synthetic oligonucleotide
  Sense strand starting at position 2123 of SEQ ID NO: 887
cgaggguuccgggagcgaa

SEQ ID NO: 71423 - RNA, 19 nt, Artificial Sequence
  Description of Artificial Sequence: Synthetic oligonucleotide
  Antisense strand to SEQ ID NO: 71342
uucgcucccggaacccucg

SEQ ID NO: 71424 - RNA, 19 nt, Artificial Sequence
  Description of Artificial Sequence: Synthetic oligonucleotide
  Sense strand starting at position 2085 of SEQ ID NO: 887
ggcugcacucaguaagacu

SEQ ID NO: 71425 - RNA, 19 nt, Artificial Sequence
  Description of Artificial Sequence: Synthetic oligonucleotide
  Antisense strand to SEQ ID NO: 71344
agucuuacugagugcagcc

SEQ ID NO: 71426 - RNA, 19 nt, Artificial Sequence
  Description of Artificial Sequence: Synthetic oligonucleotide
  Sense strand starting at position 1799 of SEQ ID NO: 887
gaggaacggucccuagagu

SEQ ID NO: 71427 - RNA, 19 nt, Artificial Sequence
  Description of Artificial Sequence: Synthetic oligonucleotide
  Antisense strand to SEQ ID NO: 71346
acucuagggaccguuccuc

SEQ ID NO: 71428 - RNA, 19 nt, Artificial Sequence
  Description of Artificial Sequence: Synthetic oligonucleotide
  Sense strand starting at position 1675 of SEQ ID NO: 887
cuuugucugcaccagggaa

SEQ ID NO: 71429 - RNA, 19 nt, Artificial Sequence
  Description of Artificial Sequence: Synthetic oligonucleotide
  Antisense strand to SEQ ID NO: 71348
uucccuggugcagacaaag

SEQ ID NO: 71430 - RNA, 19 nt, Artificial Sequence
  Description of Artificial Sequence: Synthetic oligonucleotide
  Sense strand starting at position 1644 of SEQ ID NO: 887
gcaggucgcgucagagaug

SEQ ID NO: 71431 - RNA, 19 nt, Artificial Sequence
  Description of Artificial Sequence: Synthetic oligonucleotide
  Antisense strand to SEQ ID NO: 71350
caucucugacgcgaccugc

SEQ ID NO: 71432 - RNA, 19 nt, Artificial Sequence
  Description of Artificial Sequence: Synthetic oligonucleotide
  Sense strand starting at position 1643 of SEQ ID NO: 887
cgcaggucgcgucagagau

SEQ ID NO: 71433 - RNA, 19 nt, Artificial Sequence
  Description of Artificial Sequence: Synthetic oligonucleotide
  Antisense strand to SEQ ID NO: 71352
aucucugacgcgaccugcg

SEQ ID NO: 71434 - RNA, 19 nt, Artificial Sequence
  Description of Artificial Sequence: Synthetic oligonucleotide
  Sense strand starting at position 1502 of SEQ ID NO: 887
gugccaacuuagcgugagu

SEQ ID NO: 71435 - RNA, 19 nt, Artificial Sequence
  Description of Artificial Sequence: Synthetic oligonucleotide
  Antisense strand to SEQ ID NO: 71354
acucacgcuaaguuggcac

SEQ ID NO: 71436 - RNA, 19 nt, Artificial Sequence
  Description of Artificial Sequence: Synthetic oligonucleotide
  Sense strand starting at position 875 of SEQ ID NO: 887
agaauacugucacaugaac

SEQ ID NO: 71437 - RNA, 19 nt, Artificial Sequence
  Description of Artificial Sequence: Synthetic oligonucleotide
  Antisense strand to SEQ ID NO: 71356
guucaugugacaguauucu

SEQ ID NO: 71438 - RNA, 19 nt, Artificial Sequence
  Description of Artificial Sequence: Synthetic oligonucleotide
  Sense strand starting at position 467 of SEQ ID NO: 887
cucacaaauucuggauugu

SEQ ID NO: 71439 - RNA, 19 nt, Artificial Sequence
  Description of Artificial Sequence: Synthetic oligonucleotide
  Antisense strand to SEQ ID NO: 71358
acaauccagaauuugugag

SEQ ID NO: 71440 - RNA, 19 nt, Artificial Sequence
  Description of Artificial Sequence: Synthetic oligonucleotide
  Sense strand starting at position 280 of SEQ ID NO: 887
uccuaagguuggugggaau

SEQ ID NO: 71441 - RNA, 19 nt, Artificial Sequence
  Description of Artificial Sequence: Synthetic oligonucleotide
  Antisense strand to SEQ ID NO: 71360
auucccaccaaccuuagga

SEQ ID NO: 71442 - RNA, 19 nt, Artificial Sequence
  Description of Artificial Sequence: Synthetic oligonucleotide
  Sense strand starting at position 271 of SEQ ID NO: 887
uggaucguguccuaagguu

SEQ ID NO: 71443 - RNA, 19 nt, Artificial Sequence
  Description of Artificial Sequence: Synthetic oligonucleotide
  Antisense strand to SEQ ID NO: 71362
aaccuuaggacacgaucca

SEQ ID NO: 71444 - RNA, 19 nt, Artificial Sequence
  Description of Artificial Sequence: Synthetic oligonucleotide
  Sense strand starting at position 159 of SEQ ID NO: 887
ugaacuggcugacagaaau

SEQ ID NO: 71445 - RNA, 19 nt, Artificial Sequence
  Description of Artificial Sequence: Synthetic oligonucleotide
  Antisense strand to SEQ ID NO: 71364
auuucugucagccaguuca

SEQ ID NO: 71446 - RNA, 19 nt, Artificial Sequence
  Description of Artificial Sequence: Synthetic oligonucleotide
  Sense strand starting at position 156 of SEQ ID NO: 887
augugaacuggcugacaga

SEQ ID NO: 71447 - RNA, 19 nt, Artificial Sequence
  Description of Artificial Sequence: Synthetic oligonucleotide
  Antisense strand to SEQ ID NO: 71366
ucugucagccaguucacau

SEQ ID NO: 71448 - RNA, 19 nt, Artificial Sequence
  Description of Artificial Sequence: Synthetic oligonucleotide
  Sense strand starting at position 126 of SEQ ID NO: 887
gagucugcauauucuagga

SEQ ID NO: 71449 - RNA, 19 nt, Artificial Sequence
  Description of Artificial Sequence: Synthetic oligonucleotide
  Antisense strand to SEQ ID NO: 71368
uccuagaauaugcagacuc

SEQ ID NO: 71450 - RNA, 19 nt, Artificial Sequence
  Description of Artificial Sequence: Synthetic oligonucleotide
  Sense strand starting at position 120 of SEQ ID NO: 887
cuacuugagucugcauauu

SEQ ID NO: 71451 - RNA, 19 nt, Artificial Sequence
  Description of Artificial Sequence: Synthetic oligonucleotide
  Antisense strand to SEQ ID NO: 71370
aauaugcagacucaaguag

SEQ ID NO: 71452 - RNA, 19 nt, Artificial Sequence
  Description of Artificial Sequence: Synthetic oligonucleotide
  Sense strand starting at position 119 of SEQ ID NO: 887
ucuacuugagucugcauau

SEQ ID NO: 71453 - RNA, 19 nt, Artificial Sequence
  Description of Artificial Sequence: Synthetic oligonucleotide
  Antisense strand to SEQ ID NO: 71372
auaugcagacucaaguaga

SEQ ID NO: 71454 - RNA, 19 nt, Artificial Sequence
  Description of Artificial Sequence: Synthetic oligonucleotide
  Sense strand starting at position 112 of SEQ ID NO: 887
ugagucuucuacuugaguc

SEQ ID NO: 71455 - RNA, 19 nt, Artificial Sequence
  Description of Artificial Sequence: Synthetic oligonucleotide
  Antisense strand to SEQ ID NO: 71374
gacucaaguagaagacuca

SEQ ID NO: 71456 - RNA, 19 nt, Artificial Sequence
  Description of Artificial Sequence: Synthetic oligonucleotide
  Sense strand starting at position 109 of SEQ ID NO: 887
uccugagucuucuacuuga

SEQ ID NO: 71457 - RNA, 19 nt, Artificial Sequence
  Description of Artificial Sequence: Synthetic oligonucleotide
  Antisense strand to SEQ ID NO: 71376
ucaaguagaagacucagga

SEQ ID NO: 71458 - RNA, 19 nt, Artificial Sequence
  Description of Artificial Sequence: Synthetic oligonucleotide
  Sense strand starting at position 107 of SEQ ID NO: 887
auuccugagucuucuacuu

SEQ ID NO: 71459 - RNA, 19 nt, Artificial Sequence
  Description of Artificial Sequence: Synthetic oligonucleotide
  Antisense strand to SEQ ID NO: 71378
aaguagaagacucaggaau

SEQ ID NO: 71460 - RNA, 19 nt, Artificial Sequence
  Description of Artificial Sequence: Synthetic oligonucleotide
  Sense strand starting at position 100 of SEQ ID NO: 887
ccauuacauuccugagucu

SEQ ID NO: 71461 - RNA, 19 nt, Artificial Sequence
  Description of Artificial Sequence: Synthetic oligonucleotide
  Antisense strand to SEQ ID NO: 71380
agacucaggaauguaaugg

SEQ ID NO: 71462 - RNA, 19 nt, Artificial Sequence
  Description of Artificial Sequence: Synthetic oligonucleotide
  Sense strand starting at position 35 of SEQ ID NO: 887
gaucccugugcaugucaau

SEQ ID NO: 71463 - RNA, 19 nt, Artificial Sequence
  Description of Artificial Sequence: Synthetic oligonucleotide
  Antisense strand to SEQ ID NO: 71382
auugacaugcacagggauc

SEQ ID NO: 71464 - RNA, 19 nt, Artificial Sequence
  Description of Artificial Sequence: Synthetic oligonucleotide
  Sense strand starting at position 31 of SEQ ID NO: 887
cgcagaucccugugcaugu

SEQ ID NO: 71465 - RNA, 19 nt, Artificial Sequence
  Description of Artificial Sequence: Synthetic oligonucleotide
  Antisense strand to SEQ ID NO: 71384
acaugcacagggaucugcg

SEQ ID NO: 71466 - RNA, 19 nt, Artificial Sequence
  Description of Artificial Sequence: Synthetic oligonucleotide
  Sense strand starting at position 29 of SEQ ID NO: 887
ugcgcagaucccugugcau

SEQ ID NO: 71467 - RNA, 19 nt, Artificial Sequence
  Description of Artificial Sequence: Synthetic oligonucleotide
  Antisense strand to SEQ ID NO: 71386
augcacagggaucugcgca

SEQ ID NO: 71468 - RNA, 19 nt, Artificial Sequence
  Description of Artificial Sequence: Synthetic oligonucleotide
  Sense strand starting at position 3961 of SEQ ID NO: 888
gacuaucguguguagaaag

SEQ ID NO: 71469 - RNA, 19 nt, Artificial Sequence
  Description of Artificial Sequence: Synthetic oligonucleotide
  Antisense strand to SEQ ID NO: 71388
cuuucuacacacgauaguc

SEQ ID NO: 71470 - RNA, 19 nt, Artificial Sequence
  Description of Artificial Sequence: Synthetic oligonucleotide
  Sense strand starting at position 3960 of SEQ ID NO: 888
ugacuaucguguguagaaa

SEQ ID NO: 71471 - RNA, 19 nt, Artificial Sequence
  Description of Artificial Sequence: Synthetic oligonucleotide
  Antisense strand to SEQ ID NO: 71390
uuucuacacacgauaguca

SEQ ID NO: 71472 - RNA, 19 nt, Artificial Sequence
  Description of Artificial Sequence: Synthetic oligonucleotide
  Sense strand starting at position 3959 of SEQ ID NO: 888
cugacuaucguguguagaa

SEQ ID NO: 71473 - RNA, 19 nt, Artificial Sequence
  Description of Artificial Sequence: Synthetic oligonucleotide
  Antisense strand to SEQ ID NO: 71392
uucuacacacgauagucag

SEQ ID NO: 71474 - RNA, 19 nt, Artificial Sequence
  Description of Artificial Sequence: Synthetic oligonucleotide
  Sense strand starting at position 3957 of SEQ ID NO: 888
accugacuaucguguguag

SEQ ID NO: 71475 - RNA, 19 nt, Artificial Sequence
  Description of Artificial Sequence: Synthetic oligonucleotide
  Antisense strand to SEQ ID NO: 71394
cuacacacgauagucaggu

SEQ ID NO: 71476 - RNA, 19 nt, Artificial Sequence
  Description of Artificial Sequence: Synthetic oligonucleotide
  Sense strand starting at position 3949 of SEQ ID NO: 888
agguaucuaccugacuauc

SEQ ID NO: 71477 - RNA, 19 nt, Artificial Sequence
  Description of Artificial Sequence: Synthetic oligonucleotide
  Antisense strand to SEQ ID NO: 71396
gauagucagguagauaccu

SEQ ID NO: 71478 - RNA, 19 nt, Artificial Sequence
  Description of Artificial Sequence: Synthetic oligonucleotide
  Sense strand starting at position 3947 of SEQ ID NO: 888
gaagguaucuaccugacua

SEQ ID NO: 71479 - RNA, 19 nt, Artificial Sequence
  Description of Artificial Sequence: Synthetic oligonucleotide
  Antisense strand to SEQ ID NO: 71398
uagucagguagauaccuuc

SEQ ID NO: 71480 - RNA, 19 nt, Artificial Sequence
  Description of Artificial Sequence: Synthetic oligonucleotide
  Sense strand starting at position 3646 of SEQ ID NO: 888
ggguaauuccucuagagcu

SEQ ID NO: 71481 - RNA, 19 nt, Artificial Sequence
  Description of Artificial Sequence: Synthetic oligonucleotide
  Antisense strand to SEQ ID NO: 71400
agcucuagaggaauuaccc

SEQ ID NO: 71482 - RNA, 19 nt, Artificial Sequence
  Description of Artificial Sequence: Synthetic oligonucleotide
  Sense strand starting at position 3047 of SEQ ID NO: 888
gacaguacugcugagguga

SEQ ID NO: 71483 - RNA, 19 nt, Artificial Sequence
  Description of Artificial Sequence: Synthetic oligonucleotide
  Antisense strand to SEQ ID NO: 71402
ucaccucagcaguacuguc

SEQ ID NO: 71484 - RNA, 19 nt, Artificial Sequence
  Description of Artificial Sequence: Synthetic oligonucleotide
  Sense strand starting at position 2996 of SEQ ID NO: 888
cugcaaugcucaggacagu

SEQ ID NO: 71485 - RNA, 19 nt, Artificial Sequence
  Description of Artificial Sequence: Synthetic oligonucleotide
  Antisense strand to SEQ ID NO: 71404
acuguccugagcauugcag

SEQ ID NO: 71486 - RNA, 19 nt, Artificial Sequence
  Description of Artificial Sequence: Synthetic oligonucleotide
  Sense strand starting at position 2968 of SEQ ID NO: 888
guagaguuugcguaggaug

SEQ ID NO: 71487 - RNA, 19 nt, Artificial Sequence
  Description of Artificial Sequence: Synthetic oligonucleotide
  Antisense strand to SEQ ID NO: 71406
cauccuacgcaaacucuac

SEQ ID NO: 71488 - RNA, 19 nt, Artificial Sequence
  Description of Artificial Sequence: Synthetic oligonucleotide
  Sense strand starting at position 2967 of SEQ ID NO: 888
gguagaguuugcguaggau

SEQ ID NO: 71489 - RNA, 19 nt, Artificial Sequence
  Description of Artificial Sequence: Synthetic oligonucleotide
  Antisense strand to SEQ ID NO: 71408
auccuacgcaaacucuacc

SEQ ID NO: 71490 - RNA, 19 nt, Artificial Sequence
  Description of Artificial Sequence: Synthetic oligonucleotide
  Sense strand starting at position 2966 of SEQ ID NO: 888
ggguagaguuugcguagga

SEQ ID NO: 71491 - RNA, 19 nt, Artificial Sequence
  Description of Artificial Sequence: Synthetic oligonucleotide
  Antisense strand to SEQ ID NO: 71410
uccuacgcaaacucuaccc

SEQ ID NO: 71492 - RNA, 19 nt, Artificial Sequence
  Description of Artificial Sequence: Synthetic oligonucleotide
  Sense strand starting at position 2867 of SEQ ID NO: 888
ggucuucaaguggagguaa

SEQ ID NO: 71493 - RNA, 19 nt, Artificial Sequence
  Description of Artificial Sequence: Synthetic oligonucleotide
  Antisense strand to SEQ ID NO: 71412
uuaccuccacuugaagacc

SEQ ID NO: 71494 - RNA, 19 nt, Artificial Sequence
  Description of Artificial Sequence: Synthetic oligonucleotide
  Sense strand starting at position 2791 of SEQ ID NO: 888
cuacaugaguuauauuaug

SEQ ID NO: 71495 - RNA, 19 nt, Artificial Sequence
  Description of Artificial Sequence: Synthetic oligonucleotide
  Antisense strand to SEQ ID NO: 71414
cauaauauaacucauguag

SEQ ID NO: 71496 - RNA, 19 nt, Artificial Sequence
  Description of Artificial Sequence: Synthetic oligonucleotide
  Sense strand starting at position 2640 of SEQ ID NO: 888
aucagaggucuuuguauuc

SEQ ID NO: 71497 - RNA, 19 nt, Artificial Sequence
  Description of Artificial Sequence: Synthetic oligonucleotide
  Antisense strand to SEQ ID NO: 71416
gaauacaaagaccucugau

SEQ ID NO: 71498 - RNA, 19 nt, Artificial Sequence
  Description of Artificial Sequence: Synthetic oligonucleotide
  Sense strand starting at position 2603 of SEQ ID NO: 888
ggagaaagcccauguggaa

SEQ ID NO: 71499 - RNA, 19 nt, Artificial Sequence
  Description of Artificial Sequence: Synthetic oligonucleotide
  Antisense strand to SEQ ID NO: 71418
uuccacaugggcuuucucc

SEQ ID NO: 71500 - RNA, 19 nt, Artificial Sequence
  Description of Artificial Sequence: Synthetic oligonucleotide
  Sense strand starting at position 2380 of SEQ ID NO: 888
ggacauacguggcaugaca

SEQ ID NO: 71501 - RNA, 19 nt, Artificial Sequence
  Description of Artificial Sequence: Synthetic oligonucleotide
  Antisense strand to SEQ ID NO: 71420
ugucaugccacguaugucc

SEQ ID NO: 71502 - RNA, 19 nt, Artificial Sequence
  Description of Artificial Sequence: Synthetic oligonucleotide
  Sense strand starting at position 2368 of SEQ ID NO: 888
guuauaaacugcggacaua

SEQ ID NO: 71503 - RNA, 19 nt, Artificial Sequence
  Description of Artificial Sequence: Synthetic oligonucleotide
  Antisense strand to SEQ ID NO: 71422
uauguccgcaguuuauaac

SEQ ID NO: 71504 - RNA, 19 nt, Artificial Sequence
  Description of Artificial Sequence: Synthetic oligonucleotide
  Sense strand starting at position 2367 of SEQ ID NO: 888
uguuauaaacugcggacau

SEQ ID NO: 71505 - RNA, 19 nt, Artificial Sequence
  Description of Artificial Sequence: Synthetic oligonucleotide
  Antisense strand to SEQ ID NO: 71424
auguccgcaguuuauaaca

SEQ ID NO: 71506 - RNA, 19 nt, Artificial Sequence
  Description of Artificial Sequence: Synthetic oligonucleotide
  Sense strand starting at position 2360 of SEQ ID NO: 888
uagagauuguuauaaacug

SEQ ID NO: 71507 - RNA, 19 nt, Artificial Sequence
  Description of Artificial Sequence: Synthetic oligonucleotide
  Antisense strand to SEQ ID NO: 71426
caguuuauaacaaucucua

SEQ ID NO: 71508 - RNA, 19 nt, Artificial Sequence
  Description of Artificial Sequence: Synthetic oligonucleotide
  Sense strand starting at position 2358 of SEQ ID NO: 888
gauagagauuguuauaaac

SEQ ID NO: 71509 - RNA, 19 nt, Artificial Sequence
  Description of Artificial Sequence: Synthetic oligonucleotide
  Antisense strand to SEQ ID NO: 71428
guuuauaacaaucucuauc

SEQ ID NO: 71510 - RNA, 19 nt, Artificial Sequence
  Description of Artificial Sequence: Synthetic oligonucleotide
  Sense strand starting at position 2308 of SEQ ID NO: 888
uuuggugcucagggauuca

SEQ ID NO: 71511 - RNA, 19 nt, Artificial Sequence
  Description of Artificial Sequence: Synthetic oligonucleotide
  Antisense strand to SEQ ID NO: 71430
ugaaucccugagcaccaaa

SEQ ID NO: 71512 - RNA, 19 nt, Artificial Sequence
  Description of Artificial Sequence: Synthetic oligonucleotide
  Sense strand starting at position 1648 of SEQ ID NO: 888
uugugacgacucugcacaa

SEQ ID NO: 71513 - RNA, 19 nt, Artificial Sequence
  Description of Artificial Sequence: Synthetic oligonucleotide
  Antisense strand to SEQ ID NO: 71432
uugugcagagucgucacaa

SEQ ID NO: 71514 - RNA, 19 nt, Artificial Sequence
  Description of Artificial Sequence: Synthetic oligonucleotide
  Sense strand starting at position 321 of SEQ ID NO: 888
gcggcuucauucuuagagu

SEQ ID NO: 71515 - RNA, 19 nt, Artificial Sequence
  Description of Artificial Sequence: Synthetic oligonucleotide
  Antisense strand to SEQ ID NO: 71434
acucuaagaaugaagccgc

SEQ ID NO: 71516 - RNA, 19 nt, Artificial Sequence
  Description of Artificial Sequence: Synthetic oligonucleotide
  Sense strand starting at position 32 of SEQ ID NO: 888
acucuuuggguuugaacua

SEQ ID NO: 71517 - RNA, 19 nt, Artificial Sequence
  Description of Artificial Sequence: Synthetic oligonucleotide
  Antisense strand to SEQ ID NO: 71436
uaguucaaacccaaagagu

SEQ ID NO: 71518 - RNA, 19 nt, Artificial Sequence
  Description of Artificial Sequence: Synthetic oligonucleotide
  Sense strand starting at position 29 of SEQ ID NO: 888
cucacucuuuggguuugaa

SEQ ID NO: 71519 - RNA, 19 nt, Artificial Sequence
  Description of Artificial Sequence: Synthetic oligonucleotide
  Antisense strand to SEQ ID NO: 71438
uucaaacccaaagagugag

SEQ ID NO: 71520 - RNA, 19 nt, Artificial Sequence
  Description of Artificial Sequence: Synthetic oligonucleotide
  Sense strand starting at position 267 of SEQ ID NO: 889
uauuuauucuauccggguu

SEQ ID NO: 71521 - RNA, 19 nt, Artificial Sequence
  Description of Artificial Sequence: Synthetic oligonucleotide
  Antisense strand to SEQ ID NO: 71440
aacccggauagaauaaaua

SEQ ID NO: 71522 - RNA, 19 nt, Artificial Sequence
  Description of Artificial Sequence: Synthetic oligonucleotide
  Sense strand starting at position 273 of SEQ ID NO: 889
uucuauccggguuaagauc

SEQ ID NO: 71523 - RNA, 19 nt, Artificial Sequence
  Description of Artificial Sequence: Synthetic oligonucleotide
  Antisense strand to SEQ ID NO: 71442
gaucuuaacccggauagaa

SEQ ID NO: 71524 - RNA, 19 nt, Artificial Sequence
  Description of Artificial Sequence: Synthetic oligonucleotide
  Sense strand starting at position 445 of SEQ ID NO: 889
auagucaggagcuguaaga

SEQ ID NO: 71525 - RNA, 19 nt, Artificial Sequence
  Description of Artificial Sequence: Synthetic oligonucleotide
  Antisense strand to SEQ ID NO: 71444
ucuuacagcuccugacuau

SEQ ID NO: 71526 - RNA, 19 nt, Artificial Sequence
  Description of Artificial Sequence: Synthetic oligonucleotide
  Sense strand starting at position 454 of SEQ ID NO: 889
agcuguaagagacggaauu

SEQ ID NO: 71527 - RNA, 19 nt, Artificial Sequence
  Description of Artificial Sequence: Synthetic oligonucleotide
  Antisense strand to SEQ ID NO: 71446
aauuccgucucuuacagcu

SEQ ID NO: 71528 - RNA, 19 nt, Artificial Sequence
  Description of Artificial Sequence: Synthetic oligonucleotide
  Sense strand starting at position 455 of SEQ ID NO: 889
gcuguaagagacggaauua

SEQ ID NO: 71529 - RNA, 19 nt, Artificial Sequence
  Description of Artificial Sequence: Synthetic oligonucleotide
  Antisense strand to SEQ ID NO: 71448
uaauuccgucucuuacagc

SEQ ID NO: 71530 - RNA, 19 nt, Artificial Sequence
  Description of Artificial Sequence: Synthetic oligonucleotide
  Sense strand starting at position 524 of SEQ ID NO: 889
aagaaaugacuugguccca

SEQ ID NO: 71531 - RNA, 19 nt, Artificial Sequence
  Description of Artificial Sequence: Synthetic oligonucleotide
  Antisense strand to SEQ ID NO: 71450
ugggaccaagucauuucuu

SEQ ID NO: 71532 - RNA, 19 nt, Artificial Sequence
  Description of Artificial Sequence: Synthetic oligonucleotide
  Sense strand starting at position 525 of SEQ ID NO: 889
agaaaugacuuggucccaa

SEQ ID NO: 71533 - RNA, 19 nt, Artificial Sequence
  Description of Artificial Sequence: Synthetic oligonucleotide
  Antisense strand to SEQ ID NO: 71452
uugggaccaagucauuucu

SEQ ID NO: 71534 - RNA, 19 nt, Artificial Sequence
  Description of Artificial Sequence: Synthetic oligonucleotide
  Sense strand starting at position 589 of SEQ ID NO: 889
agcccuauuugguuaagca

SEQ ID NO: 71535 - RNA, 19 nt, Artificial Sequence
  Description of Artificial Sequence: Synthetic oligonucleotide
  Antisense strand to SEQ ID NO: 71454
ugcuuaaccaaauagggcu

SEQ ID NO: 71536 - RNA, 19 nt, Artificial Sequence
  Description of Artificial Sequence: Synthetic oligonucleotide
  Sense strand starting at position 652 of SEQ ID NO: 889
agauaaaggaugugucucu

SEQ ID NO: 71537 - RNA, 19 nt, Artificial Sequence
  Description of Artificial Sequence: Synthetic oligonucleotide
  Antisense strand to SEQ ID NO: 71456
agagacacauccuuuaucu

SEQ ID NO: 71538 - RNA, 19 nt, Artificial Sequence
  Description of Artificial Sequence: Synthetic oligonucleotide
  Sense strand starting at position 653 of SEQ ID NO: 889
gauaaaggaugugucucua

SEQ ID NO: 71539 - RNA, 19 nt, Artificial Sequence
  Description of Artificial Sequence: Synthetic oligonucleotide
  Antisense strand to SEQ ID NO: 71458
uagagacacauccuuuauc

SEQ ID NO: 71540 - RNA, 19 nt, Artificial Sequence
  Description of Artificial Sequence: Synthetic oligonucleotide
  Sense strand starting at position 810 of SEQ ID NO: 889
accguuucuccucauaaga

SEQ ID NO: 71541 - RNA, 19 nt, Artificial Sequence
  Description of Artificial Sequence: Synthetic oligonucleotide
  Antisense strand to SEQ ID NO: 71460
ucuuaugaggagaaacggu

SEQ ID NO: 71542 - RNA, 19 nt, Artificial Sequence
  Description of Artificial Sequence: Synthetic oligonucleotide
  Sense strand starting at position 823 of SEQ ID NO: 889
auaagagguauccgugaac

SEQ ID NO: 71543 - RNA, 19 nt, Artificial Sequence
  Description of Artificial Sequence: Synthetic oligonucleotide
  Antisense strand to SEQ ID NO: 71462
guucacggauaccucuuau

SEQ ID NO: 71544 - RNA, 19 nt, Artificial Sequence
  Description of Artificial Sequence: Synthetic oligonucleotide
  Sense strand starting at position 1213 of SEQ ID NO: 889
cccaguacccgagaaccau

SEQ ID NO: 71545 - RNA, 19 nt, Artificial Sequence
  Description of Artificial Sequence: Synthetic oligonucleotide
  Antisense strand to SEQ ID NO: 71464
augguucucggguacuggg

SEQ ID NO: 71546 - RNA, 19 nt, Artificial Sequence
  Description of Artificial Sequence: Synthetic oligonucleotide
  Sense strand starting at position 1300 of SEQ ID NO: 889
ggcuuuauacccgacauaa

SEQ ID NO: 71547 - RNA, 19 nt, Artificial Sequence
  Description of Artificial Sequence: Synthetic oligonucleotide
  Antisense strand to SEQ ID NO: 71466
uuaugucggguauaaagcc

SEQ ID NO: 71548 - RNA, 19 nt, Artificial Sequence
  Description of Artificial Sequence: Synthetic oligonucleotide
  Sense strand starting at position 1977 of SEQ ID NO: 889
cuugaagccuucucagaac

SEQ ID NO: 71549 - RNA, 19 nt, Artificial Sequence
  Description of Artificial Sequence: Synthetic oligonucleotide
  Antisense strand to SEQ ID NO: 71468
guucugagaaggcuucaag

SEQ ID NO: 71550 - RNA, 19 nt, Artificial Sequence
  Description of Artificial Sequence: Synthetic oligonucleotide
  Sense strand starting at position 1999 of SEQ ID NO: 889
ccucuauccuggccagaag

SEQ ID NO: 71551 - RNA, 19 nt, Artificial Sequence
  Description of Artificial Sequence: Synthetic oligonucleotide
  Antisense strand to SEQ ID NO: 71470
cuucuggccaggauagagg

SEQ ID NO: 71552 - RNA, 19 nt, Artificial Sequence
  Description of Artificial Sequence: Synthetic oligonucleotide
  Sense strand starting at position 2000 of SEQ ID NO: 889
cucuauccuggccagaaga

SEQ ID NO: 71553 - RNA, 19 nt, Artificial Sequence
  Description of Artificial Sequence: Synthetic oligonucleotide
  Antisense strand to SEQ ID NO: 71472
ucuucuggccaggauagag

SEQ ID NO: 71554 - RNA, 19 nt, Artificial Sequence
  Description of Artificial Sequence: Synthetic oligonucleotide
  Sense strand starting at position 2016 of SEQ ID NO: 889
agaggucucuuaucuugaa

SEQ ID NO: 71555 - RNA, 19 nt, Artificial Sequence
  Description of Artificial Sequence: Synthetic oligonucleotide
  Antisense strand to SEQ ID NO: 71474
uucaagauaagagaccucu

SEQ ID NO: 71556 - RNA, 19 nt, Artificial Sequence
  Description of Artificial Sequence: Synthetic oligonucleotide
  Sense strand starting at position 2017 of SEQ ID NO: 889
gaggucucuuaucuugaau

SEQ ID NO: 71557 - RNA, 19 nt, Artificial Sequence
  Description of Artificial Sequence: Synthetic oligonucleotide
  Antisense strand to SEQ ID NO: 71476
auucaagauaagagaccuc

SEQ ID NO: 71558 - RNA, 19 nt, Artificial Sequence
  Description of Artificial Sequence: Synthetic oligonucleotide
  Sense strand starting at position 2020 of SEQ ID NO: 889
gucucuuaucuugaauguu

SEQ ID NO: 71559 - RNA, 19 nt, Artificial Sequence
  Description of Artificial Sequence: Synthetic oligonucleotide
  Antisense strand to SEQ ID NO: 71478
aacauucaagauaagagac

SEQ ID NO: 71560 - RNA, 19 nt, Artificial Sequence
  Description of Artificial Sequence: Synthetic oligonucleotide
  Sense strand starting at position 2148 of SEQ ID NO: 889
ccucuuuguguaggaugga

SEQ ID NO: 71561 - RNA, 19 nt, Artificial Sequence
  Description of Artificial Sequence: Synthetic oligonucleotide
  Antisense strand to SEQ ID NO: 71480
uccauccuacacaaagagg

SEQ ID NO: 71562 - RNA, 19 nt, Artificial Sequence
  Description of Artificial Sequence: Synthetic oligonucleotide
  Sense strand starting at position 2206 of SEQ ID NO: 889
ucaucuguccaacaauguu

SEQ ID NO: 71563 - RNA, 19 nt, Artificial Sequence
  Description of Artificial Sequence: Synthetic oligonucleotide
  Antisense strand to SEQ ID NO: 71482
aacauuguuggacagauga

SEQ ID NO: 71564 - RNA, 19 nt, Artificial Sequence
  Description of Artificial Sequence: Synthetic oligonucleotide
  Sense strand starting at position 2367 of SEQ ID NO: 889
gguggugauacacauccua

SEQ ID NO: 71565 - RNA, 19 nt, Artificial Sequence
  Description of Artificial Sequence: Synthetic oligonucleotide
  Antisense strand to SEQ ID NO: 71484
uaggauguguaucaccacc

SEQ ID NO: 71566 - RNA, 19 nt, Artificial Sequence
  Description of Artificial Sequence: Synthetic oligonucleotide
  Sense strand starting at position 2498 of SEQ ID NO: 889
uggagaaguuaaucuuuaa

SEQ ID NO: 71567 - RNA, 19 nt, Artificial Sequence
  Description of Artificial Sequence: Synthetic oligonucleotide
  Antisense strand to SEQ ID NO: 71486
uuaaagauuaacuucucca

SEQ ID NO: 71568 - RNA, 19 nt, Artificial Sequence
  Description of Artificial Sequence: Synthetic oligonucleotide
  Sense strand starting at position 2701 of SEQ ID NO: 889
cuugaagccuucucagaau

SEQ ID NO: 71569 - RNA, 19 nt, Artificial Sequence
  Description of Artificial Sequence: Synthetic oligonucleotide
  Antisense strand to SEQ ID NO: 71488
auucugagaaggcuucaag

SEQ ID NO: 71570 - RNA, 19 nt, Artificial Sequence
  Description of Artificial Sequence: Synthetic oligonucleotide
  Sense strand starting at position 2726 of SEQ ID NO: 889
cuauccuggccagaagagu

SEQ ID NO: 71571 - RNA, 19 nt, Artificial Sequence
  Description of Artificial Sequence: Synthetic oligonucleotide
  Antisense strand to SEQ ID NO: 71490
acucuucuggccaggauag

SEQ ID NO: 71572 - RNA, 19 nt, Artificial Sequence
  Description of Artificial Sequence: Synthetic oligonucleotide
  Sense strand starting at position 2831 of SEQ ID NO: 889
aucacucuguguuugaaac

SEQ ID NO: 71573 - RNA, 19 nt, Artificial Sequence
  Description of Artificial Sequence: Synthetic oligonucleotide
  Antisense strand to SEQ ID NO: 71492
guuucaaacacagagugau

SEQ ID NO: 71574 - RNA, 19 nt, Artificial Sequence
  Description of Artificial Sequence: Synthetic oligonucleotide
  Sense strand starting at position 2877 of SEQ ID NO: 889
gcacgaguagcagagauga

SEQ ID NO: 71575 - RNA, 19 nt, Artificial Sequence
  Description of Artificial Sequence: Synthetic oligonucleotide
  Antisense strand to SEQ ID NO: 71494
ucaucucugcuacucgugc

SEQ ID NO: 71576 - RNA, 19 nt, Artificial Sequence
  Description of Artificial Sequence: Synthetic oligonucleotide
  Sense strand starting at position 2917 of SEQ ID NO: 889
cuggcauaucaacauguaa

SEQ ID NO: 71577 - RNA, 19 nt, Artificial Sequence
  Description of Artificial Sequence: Synthetic oligonucleotide
  Antisense strand to SEQ ID NO: 71496
uuacauguugauaugccag

SEQ ID NO: 71578 - RNA, 19 nt, Artificial Sequence
  Description of Artificial Sequence: Synthetic oligonucleotide
  Sense strand starting at position 3016 of SEQ ID NO: 889
ccagaagccaugugaagau

SEQ ID NO: 71579 - RNA, 19 nt, Artificial Sequence
  Description of Artificial Sequence: Synthetic oligonucleotide
  Antisense strand to SEQ ID NO: 71498
aucuucacauggcuucugg

SEQ ID NO: 71580 - RNA, 19 nt, Artificial Sequence
  Description of Artificial Sequence: Synthetic oligonucleotide
  Sense strand starting at position 3020 of SEQ ID NO: 889
aagccaugugaagauguuu

SEQ ID NO: 71581 - RNA, 19 nt, Artificial Sequence
  Description of Artificial Sequence: Synthetic oligonucleotide
  Antisense strand to SEQ ID NO: 71500
aaacaucuucacauggcuu

SEQ ID NO: 71582 - RNA, 19 nt, Artificial Sequence
  Description of Artificial Sequence: Synthetic oligonucleotide
  Sense strand starting at position 3062 of SEQ ID NO: 889
ucaaguguggcugaucaag

SEQ ID NO: 71583 - RNA, 19 nt, Artificial Sequence
  Description of Artificial Sequence: Synthetic oligonucleotide
  Antisense strand to SEQ ID NO: 71502
cuugaucagccacacuuga

SEQ ID NO: 71584 - RNA, 19 nt, Artificial Sequence
  Description of Artificial Sequence: Synthetic oligonucleotide
  Sense strand starting at position 3104 of SEQ ID NO: 889
gguugaauuuaggaaagua

SEQ ID NO: 71585 - RNA, 19 nt, Artificial Sequence
  Description of Artificial Sequence: Synthetic oligonucleotide
  Antisense strand to SEQ ID NO: 71504
uacuuuccuaaauucaacc

SEQ ID NO: 71586 - RNA, 19 nt, Artificial Sequence
  Description of Artificial Sequence: Synthetic oligonucleotide
  Sense strand starting at position 3163 of SEQ ID NO: 889
cccuauagucaugggaaga

SEQ ID NO: 71587 - RNA, 19 nt, Artificial Sequence
  Description of Artificial Sequence: Synthetic oligonucleotide
  Antisense strand to SEQ ID NO: 71506
ucuucccaugacuauaggg

SEQ ID NO: 71588 - RNA, 19 nt, Artificial Sequence
  Description of Artificial Sequence: Synthetic oligonucleotide
  Sense strand starting at position 3259 of SEQ ID NO: 889
auaggauucuaguugaaug

SEQ ID NO: 71589 - RNA, 19 nt, Artificial Sequence
  Description of Artificial Sequence: Synthetic oligonucleotide
  Antisense strand to SEQ ID NO: 71508
cauucaacuagaauccuau

SEQ ID NO: 71590 - RNA, 19 nt, Artificial Sequence
  Description of Artificial Sequence: Synthetic oligonucleotide
  Sense strand starting at position 3270 of SEQ ID NO: 889
guugaauguggaggaguga

SEQ ID NO: 71591 - RNA, 19 nt, Artificial Sequence
  Description of Artificial Sequence: Synthetic oligonucleotide
  Antisense strand to SEQ ID NO: 71510
ucacuccuccacauucaac

SEQ ID NO: 71592 - RNA, 19 nt, Artificial Sequence
  Description of Artificial Sequence: Synthetic oligonucleotide
  Sense strand starting at position 3497 of SEQ ID NO: 889
auuuauaaugccugugucu

SEQ ID NO: 71593 - RNA, 19 nt, Artificial Sequence
  Description of Artificial Sequence: Synthetic oligonucleotide
  Antisense strand to SEQ ID NO: 71512
agacacaggcauuauaaau

SEQ ID NO: 71594 - RNA, 19 nt, Artificial Sequence
  Description of Artificial Sequence: Synthetic oligonucleotide
  Sense strand starting at position 3611 of SEQ ID NO: 889
uguuuacguauguuagcua

SEQ ID NO: 71595 - RNA, 19 nt, Artificial Sequence
  Description of Artificial Sequence: Synthetic oligonucleotide
  Antisense strand to SEQ ID NO: 71514
uagcuaacauacguaaaca

SEQ ID NO: 71596 - RNA, 19 nt, Artificial Sequence
  Description of Artificial Sequence: Synthetic oligonucleotide
  Sense strand starting at position 3615 of SEQ ID NO: 889
uacguauguuagcuaauuu

SEQ ID NO: 71597 - RNA, 19 nt, Artificial Sequence
  Description of Artificial Sequence: Synthetic oligonucleotide
  Antisense strand to SEQ ID NO: 71516
aaauuagcuaacauacgua

SEQ ID NO: 71598 - RNA, 19 nt, Artificial Sequence
  Description of Artificial Sequence: Synthetic oligonucleotide
  Sense strand starting at position 3660 of SEQ ID NO: 889
uuaggaaguagguguuaug

SEQ ID NO: 71599 - RNA, 19 nt, Artificial Sequence
  Description of Artificial Sequence: Synthetic oligonucleotide
  Antisense strand to SEQ ID NO: 71518
cauaacaccuacuuccuaa

SEQ ID NO: 71600 - RNA, 19 nt, Artificial Sequence
  Description of Artificial Sequence: Synthetic oligonucleotide
  Sense strand starting at position 3724 of SEQ ID NO: 890
ccagauuaucugugcuuuc

SEQ ID NO: 71601 - RNA, 19 nt, Artificial Sequence
  Description of Artificial Sequence: Synthetic oligonucleotide
  Antisense strand to SEQ ID NO: 71520
gaaagcacagauaaucugg

SEQ ID NO: 71602 - RNA, 19 nt, Artificial Sequence
  Description of Artificial Sequence: Synthetic oligonucleotide
  Sense strand starting at position 3723 of SEQ ID NO: 890
accagauuaucugugcuuu

SEQ ID NO: 71603 - RNA, 19 nt, Artificial Sequence
  Description of Artificial Sequence: Synthetic oligonucleotide
  Antisense strand to SEQ ID NO: 71522
aaagcacagauaaucuggu

SEQ ID NO: 71604 - RNA, 19 nt, Artificial Sequence
  Description of Artificial Sequence: Synthetic oligonucleotide
  Sense strand starting at position 3681 of SEQ ID NO: 890
caucuuguaugagagaaau

SEQ ID NO: 71605 - RNA, 19 nt, Artificial Sequence
  Description of Artificial Sequence: Synthetic oligonucleotide
  Antisense strand to SEQ ID NO: 71524
auuucucucauacaagaug

SEQ ID NO: 71606 - RNA, 19 nt, Artificial Sequence
  Description of Artificial Sequence: Synthetic oligonucleotide
  Sense strand starting at position 3679 of SEQ ID NO: 890
ugcaucuuguaugagagaa

SEQ ID NO: 71607 - RNA, 19 nt, Artificial Sequence
  Description of Artificial Sequence: Synthetic oligonucleotide
  Antisense strand to SEQ ID NO: 71526
uucucucauacaagaugca

SEQ ID NO: 71608 - RNA, 19 nt, Artificial Sequence
  Description of Artificial Sequence: Synthetic oligonucleotide
  Sense strand starting at position 3678 of SEQ ID NO: 890
uugcaucuuguaugagaga

SEQ ID NO: 71609 - RNA, 19 nt, Artificial Sequence
  Description of Artificial Sequence: Synthetic oligonucleotide
  Antisense strand to SEQ ID NO: 71528
ucucucauacaagaugcaa

SEQ ID NO: 71610 - RNA, 19 nt, Artificial Sequence
  Description of Artificial Sequence: Synthetic oligonucleotide
  Sense strand starting at position 3676 of SEQ ID NO: 890
aauugcaucuuguaugaga

SEQ ID NO: 71611 - RNA, 19 nt, Artificial Sequence
  Description of Artificial Sequence: Synthetic oligonucleotide
  Antisense strand to SEQ ID NO: 71530
ucucauacaagaugcaauu

SEQ ID NO: 71612 - RNA, 19 nt, Artificial Sequence
  Description of Artificial Sequence: Synthetic oligonucleotide
  Sense strand starting at position 3660 of SEQ ID NO: 890
uuauuccuacuaugggaau

SEQ ID NO: 71613 - RNA, 19 nt, Artificial Sequence
  Description of Artificial Sequence: Synthetic oligonucleotide
  Antisense strand to SEQ ID NO: 71532
auucccauaguaggaauaa

SEQ ID NO: 71614 - RNA, 19 nt, Artificial Sequence
  Description of Artificial Sequence: Synthetic oligonucleotide
  Sense strand starting at position 3584 of SEQ ID NO: 890
agagccucccauuguuaau

SEQ ID NO: 71615 - RNA, 19 nt, Artificial Sequence
  Description of Artificial Sequence: Synthetic oligonucleotide
  Antisense strand to SEQ ID NO: 71534
auuaacaaugggaggcucu

SEQ ID NO: 71616 - RNA, 19 nt, Artificial Sequence
  Description of Artificial Sequence: Synthetic oligonucleotide
  Sense strand starting at position 3556 of SEQ ID NO: 890
gccuuuccauaauugaaag

SEQ ID NO: 71617 - RNA, 19 nt, Artificial Sequence
  Description of Artificial Sequence: Synthetic oligonucleotide
  Antisense strand to SEQ ID NO: 71536
cuuucaauuauggaaaggc

SEQ ID NO: 71618 - RNA, 19 nt, Artificial Sequence
  Description of Artificial Sequence: Synthetic oligonucleotide
  Sense strand starting at position 3482 of SEQ ID NO: 890
ucugcaugccugugagauc

SEQ ID NO: 71619 - RNA, 19 nt, Artificial Sequence
  Description of Artificial Sequence: Synthetic oligonucleotide
  Antisense strand to SEQ ID NO: 71538
gaucucacaggcaugcaga

SEQ ID NO: 71620 - RNA, 19 nt, Artificial Sequence
  Description of Artificial Sequence: Synthetic oligonucleotide
  Sense strand starting at position 3451 of SEQ ID NO: 890
gaagaaugugcacgcuguu

SEQ ID NO: 71621 - RNA, 19 nt, Artificial Sequence
  Description of Artificial Sequence: Synthetic oligonucleotide
  Antisense strand to SEQ ID NO: 71540
aacagcgugcacauucuuc

SEQ ID NO: 71622 - RNA, 19 nt, Artificial Sequence
  Description of Artificial Sequence: Synthetic oligonucleotide
  Sense strand starting at position 3105 of SEQ ID NO: 890
agaagucaggugggaacua

SEQ ID NO: 71623 - RNA, 19 nt, Artificial Sequence
  Description of Artificial Sequence: Synthetic oligonucleotide
  Antisense strand to SEQ ID NO: 71542
uaguucccaccugacuucu

SEQ ID NO: 71624 - RNA, 19 nt, Artificial Sequence
  Description of Artificial Sequence: Synthetic oligonucleotide
  Sense strand starting at position 3103 of SEQ ID NO: 890
cuagaagucaggugggaac

SEQ ID NO: 71625 - RNA, 19 nt, Artificial Sequence
  Description of Artificial Sequence: Synthetic oligonucleotide
  Antisense strand to SEQ ID NO: 71544
guucccaccugacuucuag

SEQ ID NO: 71626 - RNA, 19 nt, Artificial Sequence
  Description of Artificial Sequence: Synthetic oligonucleotide
  Sense strand starting at position 3021 of SEQ ID NO: 890
aacaguuguugagauccua

SEQ ID NO: 71627 - RNA, 19 nt, Artificial Sequence
  Description of Artificial Sequence: Synthetic oligonucleotide
  Antisense strand to SEQ ID NO: 71546
uaggaucucaacaacuguu

SEQ ID NO: 71628 - RNA, 19 nt, Artificial Sequence
  Description of Artificial Sequence: Synthetic oligonucleotide
  Sense strand starting at position 3017 of SEQ ID NO: 890
aaacaacaguuguugagau

SEQ ID NO: 71629 - RNA, 19 nt, Artificial Sequence
  Description of Artificial Sequence: Synthetic oligonucleotide
  Antisense strand to SEQ ID NO: 71548
aucucaacaacuguuguuu

SEQ ID NO: 71630 - RNA, 19 nt, Artificial Sequence
  Description of Artificial Sequence: Synthetic oligonucleotide
  Sense strand starting at position 2933 of SEQ ID NO: 890
gcuaacacuuaugagaaua

SEQ ID NO: 71631 - RNA, 19 nt, Artificial Sequence
  Description of Artificial Sequence: Synthetic oligonucleotide
  Antisense strand to SEQ ID NO: 71550
uauucucauaaguguuagc

SEQ ID NO: 71632 - RNA, 19 nt, Artificial Sequence
  Description of Artificial Sequence: Synthetic oligonucleotide
  Sense strand starting at position 2932 of SEQ ID NO: 890
agcuaacacuuaugagaau

SEQ ID NO: 71633 - RNA, 19 nt, Artificial Sequence
  Description of Artificial Sequence: Synthetic oligonucleotide
  Antisense strand to SEQ ID NO: 71552
auucucauaaguguuagcu

SEQ ID NO: 71634 - RNA, 19 nt, Artificial Sequence
  Description of Artificial Sequence: Synthetic oligonucleotide
  Sense strand starting at position 2900 of SEQ ID NO: 890
uagguccaauugugaagau

SEQ ID NO: 71635 - RNA, 19 nt, Artificial Sequence
  Description of Artificial Sequence: Synthetic oligonucleotide
  Antisense strand to SEQ ID NO: 71554
aucuucacaauuggaccua

SEQ ID NO: 71636 - RNA, 19 nt, Artificial Sequence
  Description of Artificial Sequence: Synthetic oligonucleotide
  Sense strand starting at position 2872 of SEQ ID NO: 890
caucuugagcugggaaaga

SEQ ID NO: 71637 - RNA, 19 nt, Artificial Sequence
  Description of Artificial Sequence: Synthetic oligonucleotide
  Antisense strand to SEQ ID NO: 71556
ucuuucccagcucaagaug

SEQ ID NO: 71638 - RNA, 19 nt, Artificial Sequence
  Description of Artificial Sequence: Synthetic oligonucleotide
  Sense strand starting at position 2859 of SEQ ID NO: 890
uucugaguuuauccaucuu

SEQ ID NO: 71639 - RNA, 19 nt, Artificial Sequence
  Description of Artificial Sequence: Synthetic oligonucleotide
  Antisense strand to SEQ ID NO: 71558
aagauggauaaacucagaa

SEQ ID NO: 71640 - RNA, 19 nt, Artificial Sequence
  Description of Artificial Sequence: Synthetic oligonucleotide
  Sense strand starting at position 2856 of SEQ ID NO: 890
ucauucugaguuuauccau

SEQ ID NO: 71641 - RNA, 19 nt, Artificial Sequence
  Description of Artificial Sequence: Synthetic oligonucleotide
  Antisense strand to SEQ ID NO: 71560
auggauaaacucagaauga

SEQ ID NO: 71642 - RNA, 19 nt, Artificial Sequence
  Description of Artificial Sequence: Synthetic oligonucleotide
  Sense strand starting at position 2853 of SEQ ID NO: 890
cugucauucugaguuuauc

SEQ ID NO: 71643 - RNA, 19 nt, Artificial Sequence
  Description of Artificial Sequence: Synthetic oligonucleotide
  Antisense strand to SEQ ID NO: 71562
gauaaacucagaaugacag

SEQ ID NO: 71644 - RNA, 19 nt, Artificial Sequence
  Description of Artificial Sequence: Synthetic oligonucleotide
  Sense strand starting at position 2529 of SEQ ID NO: 890
aagaaugugucauucugag

SEQ ID NO: 71645 - RNA, 19 nt, Artificial Sequence
  Description of Artificial Sequence: Synthetic oligonucleotide
  Antisense strand to SEQ ID NO: 71564
cucagaaugacacauucuu

SEQ ID NO: 71646 - RNA, 19 nt, Artificial Sequence
  Description of Artificial Sequence: Synthetic oligonucleotide
  Sense strand starting at position 2527 of SEQ ID NO: 890
uuaagaaugugucauucug

SEQ ID NO: 71647 - RNA, 19 nt, Artificial Sequence
  Description of Artificial Sequence: Synthetic oligonucleotide
  Antisense strand to SEQ ID NO: 71566
cagaaugacacauucuuaa

SEQ ID NO: 71648 - RNA, 19 nt, Artificial Sequence
  Description of Artificial Sequence: Synthetic oligonucleotide
  Sense strand starting at position 2424 of SEQ ID NO: 890
gguggauucccauguaggu

SEQ ID NO: 71649 - RNA, 19 nt, Artificial Sequence
  Description of Artificial Sequence: Synthetic oligonucleotide
  Antisense strand to SEQ ID NO: 71568
accuacaugggaauccacc

SEQ ID NO: 71650 - RNA, 19 nt, Artificial Sequence
  Description of Artificial Sequence: Synthetic oligonucleotide
  Sense strand starting at position 2421 of SEQ ID NO: 890
caagguggauucccaugua

SEQ ID NO: 71651 - RNA, 19 nt, Artificial Sequence
  Description of Artificial Sequence: Synthetic oligonucleotide
  Antisense strand to SEQ ID NO: 71570
uacaugggaauccaccuug

SEQ ID NO: 71652 - RNA, 19 nt, Artificial Sequence
  Description of Artificial Sequence: Synthetic oligonucleotide
  Sense strand starting at position 2404 of SEQ ID NO: 890
ggaaguggccuauguguca

SEQ ID NO: 71653 - RNA, 19 nt, Artificial Sequence
  Description of Artificial Sequence: Synthetic oligonucleotide
  Antisense strand to SEQ ID NO: 71572
ugacacauaggccacuucc

SEQ ID NO: 71654 - RNA, 19 nt, Artificial Sequence
  Description of Artificial Sequence: Synthetic oligonucleotide
  Sense strand starting at position 2301 of SEQ ID NO: 890
aggcuaugucaccgaagcu

SEQ ID NO: 71655 - RNA, 19 nt, Artificial Sequence
  Description of Artificial Sequence: Synthetic oligonucleotide
  Antisense strand to SEQ ID NO: 71574
agcuucggugacauagccu

SEQ ID NO: 71656 - RNA, 19 nt, Artificial Sequence
  Description of Artificial Sequence: Synthetic oligonucleotide
  Sense strand starting at position 2248 of SEQ ID NO: 890
gucuuagaagucugauggu

SEQ ID NO: 71657 - RNA, 19 nt, Artificial Sequence
  Description of Artificial Sequence: Synthetic oligonucleotide
  Antisense strand to SEQ ID NO: 71576
accaucagacuucuaagac

SEQ ID NO: 71658 - RNA, 19 nt, Artificial Sequence
  Description of Artificial Sequence: Synthetic oligonucleotide
  Sense strand starting at position 2077 of SEQ ID NO: 890
aaagccagaucguaagaga

SEQ ID NO: 71659 - RNA, 19 nt, Artificial Sequence
  Description of Artificial Sequence: Synthetic oligonucleotide
  Antisense strand to SEQ ID NO: 71578
ucucuuacgaucuggcuuu

SEQ ID NO: 71660 - RNA, 19 nt, Artificial Sequence
  Description of Artificial Sequence: Synthetic oligonucleotide
  Sense strand starting at position 2072 of SEQ ID NO: 890
agaguaaagccagaucgua

SEQ ID NO: 71661 - RNA, 19 nt, Artificial Sequence
  Description of Artificial Sequence: Synthetic oligonucleotide
  Antisense strand to SEQ ID NO: 71580
uacgaucuggcuuuacucu

SEQ ID NO: 71662 - RNA, 19 nt, Artificial Sequence
  Description of Artificial Sequence: Synthetic oligonucleotide
  Sense strand starting at position 2059 of SEQ ID NO: 890
ggcugugcgcgugagagua

SEQ ID NO: 71663 - RNA, 19 nt, Artificial Sequence
  Description of Artificial Sequence: Synthetic oligonucleotide
  Antisense strand to SEQ ID NO: 71582
uacucucacgcgcacagcc

SEQ ID NO: 71664 - RNA, 19 nt, Artificial Sequence
  Description of Artificial Sequence: Synthetic oligonucleotide
  Sense strand starting at position 1536 of SEQ ID NO: 890
aggcccuccugugagagau

SEQ ID NO: 71665 - RNA, 19 nt, Artificial Sequence
  Description of Artificial Sequence: Synthetic oligonucleotide
  Antisense strand to SEQ ID NO: 71584
aucucucacaggagggccu

SEQ ID NO: 71666 - RNA, 19 nt, Artificial Sequence
  Description of Artificial Sequence: Synthetic oligonucleotide
  Sense strand starting at position 1385 of SEQ ID NO: 890
ggucgugucagagauggag

SEQ ID NO: 71667 - RNA, 19 nt, Artificial Sequence
  Description of Artificial Sequence: Synthetic oligonucleotide
  Antisense strand to SEQ ID NO: 71586
cuccaucucugacacgacc

SEQ ID NO: 71668 - RNA, 19 nt, Artificial Sequence
  Description of Artificial Sequence: Synthetic oligonucleotide
  Sense strand starting at position 1382 of SEQ ID NO: 890
gcaggucgugucagagaug

SEQ ID NO: 71669 - RNA, 19 nt, Artificial Sequence
  Description of Artificial Sequence: Synthetic oligonucleotide
  Antisense strand to SEQ ID NO: 71588
caucucugacacgaccugc

SEQ ID NO: 71670 - RNA, 19 nt, Artificial Sequence
  Description of Artificial Sequence: Synthetic oligonucleotide
  Sense strand starting at position 1380 of SEQ ID NO: 890
ccgcaggucgugucagaga

SEQ ID NO: 71671 - RNA, 19 nt, Artificial Sequence
  Description of Artificial Sequence: Synthetic oligonucleotide
  Antisense strand to SEQ ID NO: 71590
ucucugacacgaccugcgg

SEQ ID NO: 71672 - RNA, 19 nt, Artificial Sequence
  Description of Artificial Sequence: Synthetic oligonucleotide
  Sense strand starting at position 1269 of SEQ ID NO: 890
cggacacaagggugucauu

SEQ ID NO: 71673 - RNA, 19 nt, Artificial Sequence
  Description of Artificial Sequence: Synthetic oligonucleotide
  Antisense strand to SEQ ID NO: 71592
aaugacacccuuguguccg

SEQ ID NO: 71674 - RNA, 19 nt, Artificial Sequence
  Description of Artificial Sequence: Synthetic oligonucleotide
  Sense strand starting at position 700 of SEQ ID NO: 890
gaagacuccugauccgaac

SEQ ID NO: 71675 - RNA, 19 nt, Artificial Sequence
  Description of Artificial Sequence: Synthetic oligonucleotide
  Antisense strand to SEQ ID NO: 71594
guucggaucaggagucuuc

SEQ ID NO: 71676 - RNA, 19 nt, Artificial Sequence
  Description of Artificial Sequence: Synthetic oligonucleotide
  Sense strand starting at position 599 of SEQ ID NO: 890
gcaggccugacauagaaau

SEQ ID NO: 71677 - RNA, 19 nt, Artificial Sequence
  Description of Artificial Sequence: Synthetic oligonucleotide
  Antisense strand to SEQ ID NO: 71596
auuucuaugucaggccugc

SEQ ID NO: 71678 - RNA, 19 nt, Artificial Sequence
  Description of Artificial Sequence: Synthetic oligonucleotide
  Sense strand starting at position 112 of SEQ ID NO: 890
gaucaauagcagugaggag

SEQ ID NO: 71679 - RNA, 19 nt, Artificial Sequence
  Description of Artificial Sequence: Synthetic oligonucleotide
  Antisense strand to SEQ ID NO: 71598
cuccucacugcuauugauc

SEQ ID NO: 71680 - RNA, 19 nt, Artificial Sequence
  Description of Artificial Sequence: Synthetic oligonucleotide
  Sense strand starting at position 3731 of SEQ ID NO: 891
ccgcaagaacaauguccaa

SEQ ID NO: 71681 - RNA, 19 nt, Artificial Sequence
  Description of Artificial Sequence: Synthetic oligonucleotide
  Antisense strand to SEQ ID NO: 71600
uuggacauuguucuugcgg

SEQ ID NO: 71682 - RNA, 19 nt, Artificial Sequence
  Description of Artificial Sequence: Synthetic oligonucleotide
  Sense strand starting at position 3721 of SEQ ID NO: 891
gguacaaccuccgcaagaa

SEQ ID NO: 71683 - RNA, 19 nt, Artificial Sequence
  Description of Artificial Sequence: Synthetic oligonucleotide
  Antisense strand to SEQ ID NO: 71602
uucuugcggagguuguacc

SEQ ID NO: 71684 - RNA, 19 nt, Artificial Sequence
  Description of Artificial Sequence: Synthetic oligonucleotide
  Sense strand starting at position 3298 of SEQ ID NO: 891
aagaauuccuucguuguuu

SEQ ID NO: 71685 - RNA, 19 nt, Artificial Sequence
  Description of Artificial Sequence: Synthetic oligonucleotide
  Antisense strand to SEQ ID NO: 71604
aaacaacgaaggaauucuu

SEQ ID NO: 71686 - RNA, 19 nt, Artificial Sequence
  Description of Artificial Sequence: Synthetic oligonucleotide
  Sense strand starting at position 3297 of SEQ ID NO: 891
uaagaauuccuucguuguu

SEQ ID NO: 71687 - RNA, 19 nt, Artificial Sequence
  Description of Artificial Sequence: Synthetic oligonucleotide
  Antisense strand to SEQ ID NO: 71606
aacaacgaaggaauucuua

SEQ ID NO: 71688 - RNA, 19 nt, Artificial Sequence
  Description of Artificial Sequence: Synthetic oligonucleotide
  Sense strand starting at position 3156 of SEQ ID NO: 891
gaugauugcccuuaucuug

SEQ ID NO: 71689 - RNA, 19 nt, Artificial Sequence
  Description of Artificial Sequence: Synthetic oligonucleotide
  Antisense strand to SEQ ID NO: 71608
caagauaagggcaaucauc

SEQ ID NO: 71690 - RNA, 19 nt, Artificial Sequence
  Description of Artificial Sequence: Synthetic oligonucleotide
  Sense strand starting at position 3113 of SEQ ID NO: 891
gccucagucuauuuacuua

SEQ ID NO: 71691 - RNA, 19 nt, Artificial Sequence
  Description of Artificial Sequence: Synthetic oligonucleotide
  Antisense strand to SEQ ID NO: 71610
uaaguaaauagacugaggc

SEQ ID NO: 71692 - RNA, 19 nt, Artificial Sequence
  Description of Artificial Sequence: Synthetic oligonucleotide
  Sense strand starting at position 2954 of SEQ ID NO: 891
ggaaauuacuaccagacca

SEQ ID NO: 71693 - RNA, 19 nt, Artificial Sequence
  Description of Artificial Sequence: Synthetic oligonucleotide
  Antisense strand to SEQ ID NO: 71612
uggucugguaguaauuucc

SEQ ID NO: 71694 - RNA, 19 nt, Artificial Sequence
  Description of Artificial Sequence: Synthetic oligonucleotide
  Sense strand starting at position 2951 of SEQ ID NO: 891
ccuggaaauuacuaccaga

SEQ ID NO: 71695 - RNA, 19 nt, Artificial Sequence
  Description of Artificial Sequence: Synthetic oligonucleotide
  Antisense strand to SEQ ID NO: 71614
ucugguaguaauuuccagg

SEQ ID NO: 71696 - RNA, 19 nt, Artificial Sequence
  Description of Artificial Sequence: Synthetic oligonucleotide
  Sense strand starting at position 2627 of SEQ ID NO: 891
ggcuaaguacuauguaaau

SEQ ID NO: 71697 - RNA, 19 nt, Artificial Sequence
  Description of Artificial Sequence: Synthetic oligonucleotide
  Antisense strand to SEQ ID NO: 71616
auuuacauaguacuuagcc

SEQ ID NO: 71698 - RNA, 19 nt, Artificial Sequence
  Description of Artificial Sequence: Synthetic oligonucleotide
  Sense strand starting at position 2625 of SEQ ID NO: 891
cuggcuaaguacuauguaa

SEQ ID NO: 71699 - RNA, 19 nt, Artificial Sequence
  Description of Artificial Sequence: Synthetic oligonucleotide
  Antisense strand to SEQ ID NO: 71618
uuacauaguacuuagccag

SEQ ID NO: 71700 - RNA, 19 nt, Artificial Sequence
  Description of Artificial Sequence: Synthetic oligonucleotide
  Sense strand starting at position 2471 of SEQ ID NO: 891
aagcuacuccgagggcuua

SEQ ID NO: 71701 - RNA, 19 nt, Artificial Sequence
  Description of Artificial Sequence: Synthetic oligonucleotide
  Antisense strand to SEQ ID NO: 71620
uaagcccucggaguagcuu

SEQ ID NO: 71702 - RNA, 19 nt, Artificial Sequence
  Description of Artificial Sequence: Synthetic oligonucleotide
  Sense strand starting at position 2408 of SEQ ID NO: 891
gucccaaccugggaauuua

SEQ ID NO: 71703 - RNA, 19 nt, Artificial Sequence
  Description of Artificial Sequence: Synthetic oligonucleotide
  Antisense strand to SEQ ID NO: 71622
uaaauucccagguugggac

SEQ ID NO: 71704 - RNA, 19 nt, Artificial Sequence
  Description of Artificial Sequence: Synthetic oligonucleotide
  Sense strand starting at position 349 of SEQ ID NO: 891
uuuggagaaccagguuaua

SEQ ID NO: 71705 - RNA, 19 nt, Artificial Sequence
  Description of Artificial Sequence: Synthetic oligonucleotide
  Antisense strand to SEQ ID NO: 71624
uauaaccugguucuccaaa

SEQ ID NO: 71706 - RNA, 19 nt, Artificial Sequence
  Description of Artificial Sequence: Synthetic oligonucleotide
  Sense strand starting at position 236 of SEQ ID NO: 891
ucacaaacucuggguggua

SEQ ID NO: 71707 - RNA, 19 nt, Artificial Sequence
  Description of Artificial Sequence: Synthetic oligonucleotide
  Antisense strand to SEQ ID NO: 71626
uaccacccagaguuuguga

SEQ ID NO: 71708 - RNA, 19 nt, Artificial Sequence
  Description of Artificial Sequence: Synthetic oligonucleotide
  Sense strand starting at position 45 of SEQ ID NO: 891
cuaagauuggugggaauug

SEQ ID NO: 71709 - RNA, 19 nt, Artificial Sequence
  Description of Artificial Sequence: Synthetic oligonucleotide
  Antisense strand to SEQ ID NO: 71628
caauucccaccaaucuuag

SEQ ID NO: 71710 - RNA, 19 nt, Artificial Sequence
  Description of Artificial Sequence: Synthetic oligonucleotide
  Sense strand starting at position 43 of SEQ ID NO: 891
uccuaagauuggugggaau

SEQ ID NO: 71711 - RNA, 19 nt, Artificial Sequence
  Description of Artificial Sequence: Synthetic oligonucleotide
  Antisense strand to SEQ ID NO: 71630
auucccaccaaucuuagga

SEQ ID NO: 71712 - RNA, 19 nt, Artificial Sequence
  Description of Artificial Sequence: Synthetic oligonucleotide
  Sense strand starting at position 42 of SEQ ID NO: 891
guccuaagauuggugggaa

SEQ ID NO: 71713 - RNA, 19 nt, Artificial Sequence
  Description of Artificial Sequence: Synthetic oligonucleotide
  Antisense strand to SEQ ID NO: 71632
uucccaccaaucuuaggac

SEQ ID NO: 71714 - RNA, 19 nt, Artificial Sequence
  Description of Artificial Sequence: Synthetic oligonucleotide
  Sense strand starting at position 34 of SEQ ID NO: 891
uggaucguguccuaagauu

SEQ ID NO: 71715 - RNA, 19 nt, Artificial Sequence
  Description of Artificial Sequence: Synthetic oligonucleotide
  Antisense strand to SEQ ID NO: 71634
aaucuuaggacacgaucca

SEQ ID NO: 71716 - RNA, 19 nt, Artificial Sequence
  Description of Artificial Sequence: Synthetic oligonucleotide
  Sense strand starting at position 32 of SEQ ID NO: 891
ccuggaucguguccuaaga

SEQ ID NO: 71717 - RNA, 19 nt, Artificial Sequence
  Description of Artificial Sequence: Synthetic oligonucleotide
  Antisense strand to SEQ ID NO: 71636
ucuuaggacacgauccagg

SEQ ID NO: 71718 - RNA, 19 nt, Artificial Sequence
  Description of Artificial Sequence: Synthetic oligonucleotide
  Sense strand starting at position 22 of SEQ ID NO: 892
uuguacuccucugugagga

SEQ ID NO: 71719 - RNA, 19 nt, Artificial Sequence
  Description of Artificial Sequence: Synthetic oligonucleotide
  Antisense strand to SEQ ID NO: 71638
uccucacagaggaguacaa

SEQ ID NO: 71720 - RNA, 19 nt, Artificial Sequence
  Description of Artificial Sequence: Synthetic oligonucleotide
  Sense strand starting at position 438 of SEQ ID NO: 892
cuuuguugucacugauaga

SEQ ID NO: 71721 - RNA, 19 nt, Artificial Sequence
  Description of Artificial Sequence: Synthetic oligonucleotide
  Antisense strand to SEQ ID NO: 71640
ucuaucagugacaacaaag

SEQ ID NO: 71722 - RNA, 19 nt, Artificial Sequence
  Description of Artificial Sequence: Synthetic oligonucleotide
  Sense strand starting at position 567 of SEQ ID NO: 892
uuaagucguauuugaguga

SEQ ID NO: 71723 - RNA, 19 nt, Artificial Sequence
  Description of Artificial Sequence: Synthetic oligonucleotide
  Antisense strand to SEQ ID NO: 71642
ucacucaaauacgacuuaa

SEQ ID NO: 71724 - RNA, 19 nt, Artificial Sequence
  Description of Artificial Sequence: Synthetic oligonucleotide
  Sense strand starting at position 570 of SEQ ID NO: 892
agucguauuugagugaucu

SEQ ID NO: 71725 - RNA, 19 nt, Artificial Sequence
  Description of Artificial Sequence: Synthetic oligonucleotide
  Antisense strand to SEQ ID NO: 71644
agaucacucaaauacgacu

SEQ ID NO: 71726 - RNA, 19 nt, Artificial Sequence
  Description of Artificial Sequence: Synthetic oligonucleotide
  Sense strand starting at position 571 of SEQ ID NO: 892
gucguauuugagugaucug

SEQ ID NO: 71727 - RNA, 19 nt, Artificial Sequence
  Description of Artificial Sequence: Synthetic oligonucleotide
  Antisense strand to SEQ ID NO: 71646
cagaucacucaaauacgac

SEQ ID NO: 71728 - RNA, 19 nt, Artificial Sequence
  Description of Artificial Sequence: Synthetic oligonucleotide
  Sense strand starting at position 620 of SEQ ID NO: 892
gaggccuuacccgacagaa

SEQ ID NO: 71729 - RNA, 19 nt, Artificial Sequence
  Description of Artificial Sequence: Synthetic oligonucleotide
  Antisense strand to SEQ ID NO: 71648
uucugucggguaaggccuc

SEQ ID NO: 71730 - RNA, 19 nt, Artificial Sequence
  Description of Artificial Sequence: Synthetic oligonucleotide
  Sense strand starting at position 622 of SEQ ID NO: 892
ggccuuacccgacagaaca

SEQ ID NO: 71731 - RNA, 19 nt, Artificial Sequence
  Description of Artificial Sequence: Synthetic oligonucleotide
  Antisense strand to SEQ ID NO: 71650
uguucugucggguaaggcc

SEQ ID NO: 71732 - RNA, 19 nt, Artificial Sequence
  Description of Artificial Sequence: Synthetic oligonucleotide
  Sense strand starting at position 698 of SEQ ID NO: 892
ugucacuggcuuuaugagu

SEQ ID NO: 71733 - RNA, 19 nt, Artificial Sequence
  Description of Artificial Sequence: Synthetic oligonucleotide
  Antisense strand to SEQ ID NO: 71652
acucauaaagccagugaca

SEQ ID NO: 71734 - RNA, 19 nt, Artificial Sequence
  Description of Artificial Sequence: Synthetic oligonucleotide
  Sense strand starting at position 785 of SEQ ID NO: 892
agucuuggcaguuaccaga

SEQ ID NO: 71735 - RNA, 19 nt, Artificial Sequence
  Description of Artificial Sequence: Synthetic oligonucleotide
  Antisense strand to SEQ ID NO: 71654
ucugguaacugccaagacu

SEQ ID NO: 71736 - RNA, 19 nt, Artificial Sequence
  Description of Artificial Sequence: Synthetic oligonucleotide
  Sense strand starting at position 854 of SEQ ID NO: 892
agaugauagcagggucaga

SEQ ID NO: 71737 - RNA, 19 nt, Artificial Sequence
  Description of Artificial Sequence: Synthetic oligonucleotide
  Antisense strand to SEQ ID NO: 71656
ucugacccugcuaucaucu

SEQ ID NO: 71738 - RNA, 19 nt, Artificial Sequence
  Description of Artificial Sequence: Synthetic oligonucleotide
  Sense strand starting at position 881 of SEQ ID NO: 892
gccagaguuccagaagcug

SEQ ID NO: 71739 - RNA, 19 nt, Artificial Sequence
  Description of Artificial Sequence: Synthetic oligonucleotide
  Antisense strand to SEQ ID NO: 71658
cagcuucuggaacucuggc

SEQ ID NO: 71740 - RNA, 19 nt, Artificial Sequence
  Description of Artificial Sequence: Synthetic oligonucleotide
  Sense strand starting at position 959 of SEQ ID NO: 892
caggaaacagguugucuua

SEQ ID NO: 71741 - RNA, 19 nt, Artificial Sequence
  Description of Artificial Sequence: Synthetic oligonucleotide
  Antisense strand to SEQ ID NO: 71660
uaagacaaccuguuuccug

SEQ ID NO: 71742 - RNA, 19 nt, Artificial Sequence
  Description of Artificial Sequence: Synthetic oligonucleotide
  Sense strand starting at position 961 of SEQ ID NO: 892
ggaaacagguugucuuaga

SEQ ID NO: 71743 - RNA, 19 nt, Artificial Sequence
  Description of Artificial Sequence: Synthetic oligonucleotide
  Antisense strand to SEQ ID NO: 71662
ucuaagacaaccuguuucc

SEQ ID NO: 71744 - RNA, 19 nt, Artificial Sequence
  Description of Artificial Sequence: Synthetic oligonucleotide
  Sense strand starting at position 962 of SEQ ID NO: 892
gaaacagguugucuuagac

SEQ ID NO: 71745 - RNA, 19 nt, Artificial Sequence
  Description of Artificial Sequence: Synthetic oligonucleotide
  Antisense strand to SEQ ID NO: 71664
gucuaagacaaccuguuuc

SEQ ID NO: 71746 - RNA, 19 nt, Artificial Sequence
  Description of Artificial Sequence: Synthetic oligonucleotide
  Sense strand starting at position 1010 of SEQ ID NO: 892
ucaacauuggcaugacuca

SEQ ID NO: 71747 - RNA, 19 nt, Artificial Sequence
  Description of Artificial Sequence: Synthetic oligonucleotide
  Antisense strand to SEQ ID NO: 71666
ugagucaugccaauguuga

SEQ ID NO: 71748 - RNA, 19 nt, Artificial Sequence
  Description of Artificial Sequence: Synthetic oligonucleotide
  Sense strand starting at position 1017 of SEQ ID NO: 892
uggcaugacucaguuuaca

SEQ ID NO: 71749 - RNA, 19 nt, Artificial Sequence
  Description of Artificial Sequence: Synthetic oligonucleotide
  Antisense strand to SEQ ID NO: 71668
uguaaacugagucaugcca

SEQ ID NO: 71750 - RNA, 19 nt, Artificial Sequence
  Description of Artificial Sequence: Synthetic oligonucleotide
  Sense strand starting at position 1134 of SEQ ID NO: 892
gaggguacugcaugcauuu

SEQ ID NO: 71751 - RNA, 19 nt, Artificial Sequence
  Description of Artificial Sequence: Synthetic oligonucleotide
  Antisense strand to SEQ ID NO: 71670
aaaugcaugcaguacccuc

SEQ ID NO: 71752 - RNA, 19 nt, Artificial Sequence
  Description of Artificial Sequence: Synthetic oligonucleotide
  Sense strand starting at position 1277 of SEQ ID NO: 892
auccuuuagcagggaacua

SEQ ID NO: 71753 - RNA, 19 nt, Artificial Sequence
  Description of Artificial Sequence: Synthetic oligonucleotide
  Antisense strand to SEQ ID NO: 71672
uaguucccugcuaaaggau

SEQ ID NO: 71754 - RNA, 19 nt, Artificial Sequence
  Description of Artificial Sequence: Synthetic oligonucleotide
  Sense strand starting at position 1398 of SEQ ID NO: 892
agcugucagaucgauagga

SEQ ID NO: 71755 - RNA, 19 nt, Artificial Sequence
  Description of Artificial Sequence: Synthetic oligonucleotide
  Antisense strand to SEQ ID NO: 71674
uccuaucgaucugacagcu

SEQ ID NO: 71756 - RNA, 19 nt, Artificial Sequence
  Description of Artificial Sequence: Synthetic oligonucleotide
  Sense strand starting at position 1643 of SEQ ID NO: 892
auaagacuccagggcaaua

SEQ ID NO: 71757 - RNA, 19 nt, Artificial Sequence
  Description of Artificial Sequence: Synthetic oligonucleotide
  Antisense strand to SEQ ID NO: 71676
uauugcccuggagucuuau

SEQ ID NO: 71758 - RNA, 19 nt, Artificial Sequence
  Description of Artificial Sequence: Synthetic oligonucleotide
  Sense strand starting at position 2030 of SEQ ID NO: 892
ggccaagaacagugagauc

SEQ ID NO: 71759 - RNA, 19 nt, Artificial Sequence
  Description of Artificial Sequence: Synthetic oligonucleotide
  Antisense strand to SEQ ID NO: 71678
gaucucacuguucuuggcc

SEQ ID NO: 71760 - RNA, 19 nt, Artificial Sequence
  Description of Artificial Sequence: Synthetic oligonucleotide
  Sense strand starting at position 2067 of SEQ ID NO: 892
gcgauuucuuacguucuua

SEQ ID NO: 71761 - RNA, 19 nt, Artificial Sequence
  Description of Artificial Sequence: Synthetic oligonucleotide
  Antisense strand to SEQ ID NO: 71680
uaagaacguaagaaaucgc

SEQ ID NO: 71762 - RNA, 19 nt, Artificial Sequence
  Description of Artificial Sequence: Synthetic oligonucleotide
  Sense strand starting at position 2088 of SEQ ID NO: 892
ccguuucuguaauuugcua

SEQ ID NO: 71763 - RNA, 19 nt, Artificial Sequence
  Description of Artificial Sequence: Synthetic oligonucleotide
  Antisense strand to SEQ ID NO: 71682
uagcaaauuacagaaacgg

SEQ ID NO: 71764 - RNA, 19 nt, Artificial Sequence
  Description of Artificial Sequence: Synthetic oligonucleotide
  Sense strand starting at position 2092 of SEQ ID NO: 892
uucuguaauuugcuauguu

SEQ ID NO: 71765 - RNA, 19 nt, Artificial Sequence
  Description of Artificial Sequence: Synthetic oligonucleotide
  Antisense strand to SEQ ID NO: 71684
aacauagcaaauuacagaa

SEQ ID NO: 71766 - RNA, 19 nt, Artificial Sequence
  Description of Artificial Sequence: Synthetic oligonucleotide
  Sense strand starting at position 2096 of SEQ ID NO: 892
guaauuugcuauguugcua

SEQ ID NO: 71767 - RNA, 19 nt, Artificial Sequence
  Description of Artificial Sequence: Synthetic oligonucleotide
  Antisense strand to SEQ ID NO: 71686
uagcaacauagcaaauuac

SEQ ID NO: 71768 - RNA, 19 nt, Artificial Sequence
  Description of Artificial Sequence: Synthetic oligonucleotide
  Sense strand starting at position 2376 of SEQ ID NO: 892
aagggugauucuuucuaag

SEQ ID NO: 71769 - RNA, 19 nt, Artificial Sequence
  Description of Artificial Sequence: Synthetic oligonucleotide
  Antisense strand to SEQ ID NO: 71688
cuuagaaagaaucacccuu

SEQ ID NO: 71770 - RNA, 19 nt, Artificial Sequence
  Description of Artificial Sequence: Synthetic oligonucleotide
  Sense strand starting at position 2378 of SEQ ID NO: 892
gggugauucuuucuaagaa

SEQ ID NO: 71771 - RNA, 19 nt, Artificial Sequence
  Description of Artificial Sequence: Synthetic oligonucleotide
  Antisense strand to SEQ ID NO: 71690
uucuuagaaagaaucaccc

SEQ ID NO: 71772 - RNA, 19 nt, Artificial Sequence
  Description of Artificial Sequence: Synthetic oligonucleotide
  Sense strand starting at position 2418 of SEQ ID NO: 892
ucacuuaggucauccagaa

SEQ ID NO: 71773 - RNA, 19 nt, Artificial Sequence
  Description of Artificial Sequence: Synthetic oligonucleotide
  Antisense strand to SEQ ID NO: 71692
uucuggaugaccuaaguga

SEQ ID NO: 71774 - RNA, 19 nt, Artificial Sequence
  Description of Artificial Sequence: Synthetic oligonucleotide
  Sense strand starting at position 2436 of SEQ ID NO: 892
acaggugucuguucaggau

SEQ ID NO: 71775 - RNA, 19 nt, Artificial Sequence
  Description of Artificial Sequence: Synthetic oligonucleotide
  Antisense strand to SEQ ID NO: 71694
auccugaacagacaccugu

SEQ ID NO: 71776 - RNA, 19 nt, Artificial Sequence
  Description of Artificial Sequence: Synthetic oligonucleotide
  Sense strand starting at position 2449 of SEQ ID NO: 892
caggaucugucaucagcua

SEQ ID NO: 71777 - RNA, 19 nt, Artificial Sequence
  Description of Artificial Sequence: Synthetic oligonucleotide
  Antisense strand to SEQ ID NO: 71696
uagcugaugacagauccug

SEQ ID NO: 71778 - RNA, 19 nt, Artificial Sequence
  Description of Artificial Sequence: Synthetic oligonucleotide
  Sense strand starting at position 2492 of SEQ ID NO: 892
cuuuauacaggucauguaa

SEQ ID NO: 71779 - RNA, 19 nt, Artificial Sequence
  Description of Artificial Sequence: Synthetic oligonucleotide
  Antisense strand to SEQ ID NO: 71698
uuacaugaccuguauaaag

SEQ ID NO: 71780 - RNA, 19 nt, Artificial Sequence
  Description of Artificial Sequence: Synthetic oligonucleotide
  Sense strand starting at position 2499 of SEQ ID NO: 892
caggucauguaaguuuaua

SEQ ID NO: 71781 - RNA, 19 nt, Artificial Sequence
  Description of Artificial Sequence: Synthetic oligonucleotide
  Antisense strand to SEQ ID NO: 71700
uauaaacuuacaugaccug

SEQ ID NO: 71782 - RNA, 19 nt, Artificial Sequence
  Description of Artificial Sequence: Synthetic oligonucleotide
  Sense strand starting at position 2511 of SEQ ID NO: 892
guuuauauagguuauggua

SEQ ID NO: 71783 - RNA, 19 nt, Artificial Sequence
  Description of Artificial Sequence: Synthetic oligonucleotide
  Antisense strand to SEQ ID NO: 71702
uaccauaaccuauauaaac

SEQ ID NO: 71784 - RNA, 19 nt, Artificial Sequence
  Description of Artificial Sequence: Synthetic oligonucleotide
  Sense strand starting at position 2660 of SEQ ID NO: 892
ggcugauagcuacauauag

SEQ ID NO: 71785 - RNA, 19 nt, Artificial Sequence
  Description of Artificial Sequence: Synthetic oligonucleotide
  Antisense strand to SEQ ID NO: 71704
cuauauguagcuaucagcc

SEQ ID NO: 71786 - RNA, 19 nt, Artificial Sequence
  Description of Artificial Sequence: Synthetic oligonucleotide
  Sense strand starting at position 2896 of SEQ ID NO: 892
guaauaccagcucaagacu

SEQ ID NO: 71787 - RNA, 19 nt, Artificial Sequence
  Description of Artificial Sequence: Synthetic oligonucleotide
  Antisense strand to SEQ ID NO: 71706
agucuugagcugguauuac

SEQ ID NO: 71788 - RNA, 19 nt, Artificial Sequence
  Description of Artificial Sequence: Synthetic oligonucleotide
  Sense strand starting at position 3591 of SEQ ID NO: 892
cuaggaaaucagugugaau

SEQ ID NO: 71789 - RNA, 19 nt, Artificial Sequence
  Description of Artificial Sequence: Synthetic oligonucleotide
  Antisense strand to SEQ ID NO: 71708
auucacacugauuuccuag

SEQ ID NO: 71790 - RNA, 19 nt, Artificial Sequence
  Description of Artificial Sequence: Synthetic oligonucleotide
  Sense strand starting at position 3593 of SEQ ID NO: 892
aggaaaucagugugaaucu

SEQ ID NO: 71791 - RNA, 19 nt, Artificial Sequence
  Description of Artificial Sequence: Synthetic oligonucleotide
  Antisense strand to SEQ ID NO: 71710
agauucacacugauuuccu

SEQ ID NO: 71792 - RNA, 19 nt, Artificial Sequence
  Description of Artificial Sequence: Synthetic oligonucleotide
  Sense strand starting at position 3660 of SEQ ID NO: 892
gcugacaacuauucuugaa

SEQ ID NO: 71793 - RNA, 19 nt, Artificial Sequence
  Description of Artificial Sequence: Synthetic oligonucleotide
  Antisense strand to SEQ ID NO: 71712
uucaagaauaguugucagc

SEQ ID NO: 71794 - RNA, 19 nt, Artificial Sequence
  Description of Artificial Sequence: Synthetic oligonucleotide
  Sense strand starting at position 3805 of SEQ ID NO: 892
gggagauacuagcuuccuu

SEQ ID NO: 71795 - RNA, 19 nt, Artificial Sequence
  Description of Artificial Sequence: Synthetic oligonucleotide
  Antisense strand to SEQ ID NO: 71714
aaggaagcuaguaucuccc

SEQ ID NO: 71796 - RNA, 19 nt, Artificial Sequence
  Description of Artificial Sequence: Synthetic oligonucleotide
  Sense strand starting at position 3862 of SEQ ID NO: 892
cucaaaucuaggugggaac

SEQ ID NO: 71797 - RNA, 19 nt, Artificial Sequence
  Description of Artificial Sequence: Synthetic oligonucleotide
  Antisense strand to SEQ ID NO: 71716
guucccaccuagauuugag

SEQ ID NO: 71798 - RNA, 19 nt, Artificial Sequence
  Description of Artificial Sequence: Synthetic oligonucleotide
  Sense strand starting at position 117 of SEQ ID NO: 893
gcccuuucugcaggagaaa

SEQ ID NO: 71799 - RNA, 19 nt, Artificial Sequence
  Description of Artificial Sequence: Synthetic oligonucleotide
  Antisense strand to SEQ ID NO: 71718
uuucuccugcagaaagggc

SEQ ID NO: 71800 - RNA, 19 nt, Artificial Sequence
  Description of Artificial Sequence: Synthetic oligonucleotide
  Sense strand starting at position 236 of SEQ ID NO: 893
agcgauuuccucugcacaa

SEQ ID NO: 71801 - RNA, 19 nt, Artificial Sequence
  Description of Artificial Sequence: Synthetic oligonucleotide
  Antisense strand to SEQ ID NO: 71720
uugugcagaggaaaucgcu

SEQ ID NO: 71802 - RNA, 19 nt, Artificial Sequence
  Description of Artificial Sequence: Synthetic oligonucleotide
  Sense strand starting at position 237 of SEQ ID NO: 893
gcgauuuccucugcacaac

SEQ ID NO: 71803 - RNA, 19 nt, Artificial Sequence
  Description of Artificial Sequence: Synthetic oligonucleotide
  Antisense strand to SEQ ID NO: 71722
guugugcagaggaaaucgc

SEQ ID NO: 71804 - RNA, 19 nt, Artificial Sequence
  Description of Artificial Sequence: Synthetic oligonucleotide
  Sense strand starting at position 266 of SEQ ID NO: 893
ccucgugagaaccagcauu

SEQ ID NO: 71805 - RNA, 19 nt, Artificial Sequence
  Description of Artificial Sequence: Synthetic oligonucleotide
  Antisense strand to SEQ ID NO: 71724
aaugcugguucucacgagg

SEQ ID NO: 71806 - RNA, 19 nt, Artificial Sequence
  Description of Artificial Sequence: Synthetic oligonucleotide
  Sense strand starting at position 464 of SEQ ID NO: 893
ccagaugaauggucuuagu

SEQ ID NO: 71807 - RNA, 19 nt, Artificial Sequence
  Description of Artificial Sequence: Synthetic oligonucleotide
  Antisense strand to SEQ ID NO: 71726
acuaagaccauucaucugg

SEQ ID NO: 71808 - RNA, 19 nt, Artificial Sequence
  Description of Artificial Sequence: Synthetic oligonucleotide
  Sense strand starting at position 688 of SEQ ID NO: 893
gaaguaucuccugggcauu

SEQ ID NO: 71809 - RNA, 19 nt, Artificial Sequence
  Description of Artificial Sequence: Synthetic oligonucleotide
  Antisense strand to SEQ ID NO: 71728
aaugcccaggagauacuuc

SEQ ID NO: 71810 - RNA, 19 nt, Artificial Sequence
  Description of Artificial Sequence: Synthetic oligonucleotide
  Sense strand starting at position 722 of SEQ ID NO: 893
aggcuugaguucuucugga

SEQ ID NO: 71811 - RNA, 19 nt, Artificial Sequence
  Description of Artificial Sequence: Synthetic oligonucleotide
  Antisense strand to SEQ ID NO: 71730
uccagaagaacucaagccu

SEQ ID NO: 71812 - RNA, 19 nt, Artificial Sequence
  Description of Artificial Sequence: Synthetic oligonucleotide
  Sense strand starting at position 727 of SEQ ID NO: 893
ugaguucuucuggaaaguu

SEQ ID NO: 71813 - RNA, 19 nt, Artificial Sequence
  Description of Artificial Sequence: Synthetic oligonucleotide
  Antisense strand to SEQ ID NO: 71732
aacuuuccagaagaacuca

SEQ ID NO: 71814 - RNA, 19 nt, Artificial Sequence
  Description of Artificial Sequence: Synthetic oligonucleotide
  Sense strand starting at position 781 of SEQ ID NO: 893
cagggaugggugcaaaguu

SEQ ID NO: 71815 - RNA, 19 nt, Artificial Sequence
  Description of Artificial Sequence: Synthetic oligonucleotide
  Antisense strand to SEQ ID NO: 71734
aacuuugcacccaucccug

SEQ ID NO: 71816 - RNA, 19 nt, Artificial Sequence
  Description of Artificial Sequence: Synthetic oligonucleotide
  Sense strand starting at position 791 of SEQ ID NO: 893
ugcaaaguuccugaguuuc

SEQ ID NO: 71817 - RNA, 19 nt, Artificial Sequence
  Description of Artificial Sequence: Synthetic oligonucleotide
  Antisense strand to SEQ ID NO: 71736
gaaacucaggaacuuugca

SEQ ID NO: 71818 - RNA, 19 nt, Artificial Sequence
  Description of Artificial Sequence: Synthetic oligonucleotide
  Sense strand starting at position 1151 of SEQ ID NO: 893
caccauaggugccuaauga

SEQ ID NO: 71819 - RNA, 19 nt, Artificial Sequence
  Description of Artificial Sequence: Synthetic oligonucleotide
  Antisense strand to SEQ ID NO: 71738
ucauuaggcaccuauggug

SEQ ID NO: 71820 - RNA, 19 nt, Artificial Sequence
  Description of Artificial Sequence: Synthetic oligonucleotide
  Sense strand starting at position 1346 of SEQ ID NO: 893
cccggaaucuggcuuugau

SEQ ID NO: 71821 - RNA, 19 nt, Artificial Sequence
  Description of Artificial Sequence: Synthetic oligonucleotide
  Antisense strand to SEQ ID NO: 71740
aucaaagccagauuccggg

SEQ ID NO: 71822 - RNA, 19 nt, Artificial Sequence
  Description of Artificial Sequence: Synthetic oligonucleotide
  Sense strand starting at position 1349 of SEQ ID NO: 893
ggaaucuggcuuugauaga

SEQ ID NO: 71823 - RNA, 19 nt, Artificial Sequence
  Description of Artificial Sequence: Synthetic oligonucleotide
  Antisense strand to SEQ ID NO: 71742
ucuaucaaagccagauucc

SEQ ID NO: 71824 - RNA, 19 nt, Artificial Sequence
  Description of Artificial Sequence: Synthetic oligonucleotide
  Sense strand starting at position 1596 of SEQ ID NO: 893
cccuuucuuccagguugau

SEQ ID NO: 71825 - RNA, 19 nt, Artificial Sequence
  Description of Artificial Sequence: Synthetic oligonucleotide
  Antisense strand to SEQ ID NO: 71744
aucaaccuggaagaaaggg

SEQ ID NO: 71826 - RNA, 19 nt, Artificial Sequence
  Description of Artificial Sequence: Synthetic oligonucleotide
  Sense strand starting at position 1599 of SEQ ID NO: 893
uuucuuccagguugauagu

SEQ ID NO: 71827 - RNA, 19 nt, Artificial Sequence
  Description of Artificial Sequence: Synthetic oligonucleotide
  Antisense strand to SEQ ID NO: 71746
acuaucaaccuggaagaaa

SEQ ID NO: 71828 - RNA, 19 nt, Artificial Sequence
  Description of Artificial Sequence: Synthetic oligonucleotide
  Sense strand starting at position 1720 of SEQ ID NO: 893
ggguuucuuucuccuccaa

SEQ ID NO: 71829 - RNA, 19 nt, Artificial Sequence
  Description of Artificial Sequence: Synthetic oligonucleotide
  Antisense strand to SEQ ID NO: 71748
uuggaggagaaagaaaccc

SEQ ID NO: 71830 - RNA, 19 nt, Artificial Sequence
  Description of Artificial Sequence: Synthetic oligonucleotide
  Sense strand starting at position 1774 of SEQ ID NO: 893
gcaggagcuccucgaagaa

SEQ ID NO: 71831 - RNA, 19 nt, Artificial Sequence
  Description of Artificial Sequence: Synthetic oligonucleotide
  Antisense strand to SEQ ID NO: 71750
uucuucgaggagcuccugc

SEQ ID NO: 71832 - RNA, 19 nt, Artificial Sequence
  Description of Artificial Sequence: Synthetic oligonucleotide
  Sense strand starting at position 2058 of SEQ ID NO: 893
gcagguuacugaguaaccu

SEQ ID NO: 71833 - RNA, 19 nt, Artificial Sequence
  Description of Artificial Sequence: Synthetic oligonucleotide
  Antisense strand to SEQ ID NO: 71752
agguuacucaguaaccugc

SEQ ID NO: 71834 - RNA, 19 nt, Artificial Sequence
  Description of Artificial Sequence: Synthetic oligonucleotide
  Sense strand starting at position 2105 of SEQ ID NO: 893
ccugucaggccuuaucaga

SEQ ID NO: 71835 - RNA, 19 nt, Artificial Sequence
  Description of Artificial Sequence: Synthetic oligonucleotide
  Antisense strand to SEQ ID NO: 71754
ucugauaaggccugacagg

SEQ ID NO: 71836 - RNA, 19 nt, Artificial Sequence
  Description of Artificial Sequence: Synthetic oligonucleotide
  Sense strand starting at position 2112 of SEQ ID NO: 893
ggccuuaucagauaaggcu

SEQ ID NO: 71837 - RNA, 19 nt, Artificial Sequence
  Description of Artificial Sequence: Synthetic oligonucleotide
  Antisense strand to SEQ ID NO: 71756
agccuuaucugauaaggcc

SEQ ID NO: 71838 - RNA, 19 nt, Artificial Sequence
  Description of Artificial Sequence: Synthetic oligonucleotide
  Sense strand starting at position 2119 of SEQ ID NO: 893
ucagauaaggcucgagaca

SEQ ID NO: 71839 - RNA, 19 nt, Artificial Sequence
  Description of Artificial Sequence: Synthetic oligonucleotide
  Antisense strand to SEQ ID NO: 71758
ugucucgagccuuaucuga

SEQ ID NO: 71840 - RNA, 19 nt, Artificial Sequence
  Description of Artificial Sequence: Synthetic oligonucleotide
  Sense strand starting at position 2380 of SEQ ID NO: 893
ggcugagcucuggagaaug

SEQ ID NO: 71841 - RNA, 19 nt, Artificial Sequence
  Description of Artificial Sequence: Synthetic oligonucleotide
  Antisense strand to SEQ ID NO: 71760
cauucuccagagcucagcc

SEQ ID NO: 71842 - RNA, 19 nt, Artificial Sequence
  Description of Artificial Sequence: Synthetic oligonucleotide
  Sense strand starting at position 2467 of SEQ ID NO: 893
gugagacgggccuggaaua

SEQ ID NO: 71843 - RNA, 19 nt, Artificial Sequence
  Description of Artificial Sequence: Synthetic oligonucleotide
  Antisense strand to SEQ ID NO: 71762
uauuccaggcccgucucac

SEQ ID NO: 71844 - RNA, 19 nt, Artificial Sequence
  Description of Artificial Sequence: Synthetic oligonucleotide
  Sense strand starting at position 2720 of SEQ ID NO: 893
aggcauuacuguuuggaga

SEQ ID NO: 71845 - RNA, 19 nt, Artificial Sequence
  Description of Artificial Sequence: Synthetic oligonucleotide
  Antisense strand to SEQ ID NO: 71764
ucuccaaacaguaaugccu

SEQ ID NO: 71846 - RNA, 19 nt, Artificial Sequence
  Description of Artificial Sequence: Synthetic oligonucleotide
  Sense strand starting at position 2721 of SEQ ID NO: 893
ggcauuacuguuuggagaa

SEQ ID NO: 71847 - RNA, 19 nt, Artificial Sequence
  Description of Artificial Sequence: Synthetic oligonucleotide
  Antisense strand to SEQ ID NO: 71766
uucuccaaacaguaaugcc

SEQ ID NO: 71848 - RNA, 19 nt, Artificial Sequence
  Description of Artificial Sequence: Synthetic oligonucleotide
  Sense strand starting at position 2733 of SEQ ID NO: 893
uggagaaucaagugagguu

SEQ ID NO: 71849 - RNA, 19 nt, Artificial Sequence
  Description of Artificial Sequence: Synthetic oligonucleotide
  Antisense strand to SEQ ID NO: 71768
aaccucacuugauucucca

SEQ ID NO: 71850 - RNA, 19 nt, Artificial Sequence
  Description of Artificial Sequence: Synthetic oligonucleotide
  Sense strand starting at position 2797 of SEQ ID NO: 893
agagguccauucccauauu

SEQ ID NO: 71851 - RNA, 19 nt, Artificial Sequence
  Description of Artificial Sequence: Synthetic oligonucleotide
  Antisense strand to SEQ ID NO: 71770
aauaugggaauggaccucu

SEQ ID NO: 71852 - RNA, 19 nt, Artificial Sequence
  Description of Artificial Sequence: Synthetic oligonucleotide
  Sense strand starting at position 2800 of SEQ ID NO: 893
gguccauucccauauuauu

SEQ ID NO: 71853 - RNA, 19 nt, Artificial Sequence
  Description of Artificial Sequence: Synthetic oligonucleotide
  Antisense strand to SEQ ID NO: 71772
aauaauaugggaauggacc

SEQ ID NO: 71854 - RNA, 19 nt, Artificial Sequence
  Description of Artificial Sequence: Synthetic oligonucleotide
  Sense strand starting at position 2937 of SEQ ID NO: 893
caggguguccucgaaugag

SEQ ID NO: 71855 - RNA, 19 nt, Artificial Sequence
  Description of Artificial Sequence: Synthetic oligonucleotide
  Antisense strand to SEQ ID NO: 71774
cucauucgaggacacccug

SEQ ID NO: 71856 - RNA, 19 nt, Artificial Sequence
  Description of Artificial Sequence: Synthetic oligonucleotide
  Sense strand starting at position 3105 of SEQ ID NO: 893
ugcuguugugagcaggaau

SEQ ID NO: 71857 - RNA, 19 nt, Artificial Sequence
  Description of Artificial Sequence: Synthetic oligonucleotide
  Antisense strand to SEQ ID NO: 71776
auuccugcucacaacagca

SEQ ID NO: 71858 - RNA, 19 nt, Artificial Sequence
  Description of Artificial Sequence: Synthetic oligonucleotide
  Sense strand starting at position 3151 of SEQ ID NO: 893
cugggauugucaucuuucu

SEQ ID NO: 71859 - RNA, 19 nt, Artificial Sequence
  Description of Artificial Sequence: Synthetic oligonucleotide
  Antisense strand to SEQ ID NO: 71778
agaaagaugacaaucccag

SEQ ID NO: 71860 - RNA, 19 nt, Artificial Sequence
  Description of Artificial Sequence: Synthetic oligonucleotide
  Sense strand starting at position 3431 of SEQ ID NO: 893
gugugucugcggagaugug

SEQ ID NO: 71861 - RNA, 19 nt, Artificial Sequence
  Description of Artificial Sequence: Synthetic oligonucleotide
  Antisense strand to SEQ ID NO: 71780
cacaucuccgcagacacac

SEQ ID NO: 71862 - RNA, 19 nt, Artificial Sequence
  Description of Artificial Sequence: Synthetic oligonucleotide
  Sense strand starting at position 3474 of SEQ ID NO: 893
uguauauacccugaugggu

SEQ ID NO: 71863 - RNA, 19 nt, Artificial Sequence
  Description of Artificial Sequence: Synthetic oligonucleotide
  Antisense strand to SEQ ID NO: 71782
acccaucaggguauauaca

SEQ ID NO: 71864 - RNA, 19 nt, Artificial Sequence
  Description of Artificial Sequence: Synthetic oligonucleotide
  Sense strand starting at position 3514 of SEQ ID NO: 893
guaugugugcuugugcuga

SEQ ID NO: 71865 - RNA, 19 nt, Artificial Sequence
  Description of Artificial Sequence: Synthetic oligonucleotide
  Antisense strand to SEQ ID NO: 71784
ucagcacaagcacacauac

SEQ ID NO: 71866 - RNA, 19 nt, Artificial Sequence
  Description of Artificial Sequence: Synthetic oligonucleotide
  Sense strand starting at position 3567 of SEQ ID NO: 893
aggaguguauguguauaua

SEQ ID NO: 71867 - RNA, 19 nt, Artificial Sequence
  Description of Artificial Sequence: Synthetic oligonucleotide
  Antisense strand to SEQ ID NO: 71786
uauauacacauacacuccu

SEQ ID NO: 71868 - RNA, 19 nt, Artificial Sequence
  Description of Artificial Sequence: Synthetic oligonucleotide
  Sense strand starting at position 3578 of SEQ ID NO: 893
uguauauaugcugaggugu

SEQ ID NO: 71869 - RNA, 19 nt, Artificial Sequence
  Description of Artificial Sequence: Synthetic oligonucleotide
  Antisense strand to SEQ ID NO: 71788
acaccucagcauauauaca

SEQ ID NO: 71870 - RNA, 19 nt, Artificial Sequence
  Description of Artificial Sequence: Synthetic oligonucleotide
  Sense strand starting at position 3616 of SEQ ID NO: 893
gguauauguguguccgugu

SEQ ID NO: 71871 - RNA, 19 nt, Artificial Sequence
  Description of Artificial Sequence: Synthetic oligonucleotide
  Antisense strand to SEQ ID NO: 71790
acacggacacacauauacc

SEQ ID NO: 71872 - RNA, 19 nt, Artificial Sequence
  Description of Artificial Sequence: Synthetic oligonucleotide
  Sense strand starting at position 3658 of SEQ ID NO: 893
caaggaggugugcauauau

SEQ ID NO: 71873 - RNA, 19 nt, Artificial Sequence
  Description of Artificial Sequence: Synthetic oligonucleotide
  Antisense strand to SEQ ID NO: 71792
auauaugcacaccuccuug

SEQ ID NO: 71874 - RNA, 19 nt, Artificial Sequence
  Description of Artificial Sequence: Synthetic oligonucleotide
  Sense strand starting at position 3811 of SEQ ID NO: 893
guguaugcucaugugugua

SEQ ID NO: 71875 - RNA, 19 nt, Artificial Sequence
  Description of Artificial Sequence: Synthetic oligonucleotide
  Antisense strand to SEQ ID NO: 71794
uacacacaugagcauacac

SEQ ID NO: 71876 - RNA, 19 nt, Artificial Sequence
  Description of Artificial Sequence: Synthetic oligonucleotide
  Sense strand starting at position 3825 of SEQ ID NO: 893
guguauaugcacugagaua

SEQ ID NO: 71877 - RNA, 19 nt, Artificial Sequence
  Description of Artificial Sequence: Synthetic oligonucleotide
  Antisense strand to SEQ ID NO: 71796
uaucucagugcauauacac

SEQ ID NO: 71878 - RNA, 19 nt, Artificial Sequence
  Description of Artificial Sequence: Synthetic oligonucleotide
  Sense strand starting at position 3972 of SEQ ID NO: 894
auguaacucccaugacaag

SEQ ID NO: 71879 - RNA, 19 nt, Artificial Sequence
  Description of Artificial Sequence: Synthetic oligonucleotide
  Antisense strand to SEQ ID NO: 71798
cuugucaugggaguuacau

SEQ ID NO: 71880 - RNA, 19 nt, Artificial Sequence
  Description of Artificial Sequence: Synthetic oligonucleotide
  Sense strand starting at position 3741 of SEQ ID NO: 894
ugaucuuugguacauuacu

SEQ ID NO: 71881 - RNA, 19 nt, Artificial Sequence
  Description of Artificial Sequence: Synthetic oligonucleotide
  Antisense strand to SEQ ID NO: 71800
aguaauguaccaaagauca

SEQ ID NO: 71882 - RNA, 19 nt, Artificial Sequence
  Description of Artificial Sequence: Synthetic oligonucleotide
  Sense strand starting at position 3694 of SEQ ID NO: 894
ugaggagagcuggguucaa

SEQ ID NO: 71883 - RNA, 19 nt, Artificial Sequence
  Description of Artificial Sequence: Synthetic oligonucleotide
  Antisense strand to SEQ ID NO: 71802
uugaacccagcucuccuca

SEQ ID NO: 71884 - RNA, 19 nt, Artificial Sequence
  Description of Artificial Sequence: Synthetic oligonucleotide
  Sense strand starting at position 3530 of SEQ ID NO: 894
gcauaaugguuauucccau

SEQ ID NO: 71885 - RNA, 19 nt, Artificial Sequence
  Description of Artificial Sequence: Synthetic oligonucleotide
  Antisense strand to SEQ ID NO: 71804
augggaauaaccauuaugc

SEQ ID NO: 71886 - RNA, 19 nt, Artificial Sequence
  Description of Artificial Sequence: Synthetic oligonucleotide
  Sense strand starting at position 3482 of SEQ ID NO: 894
gcacaaagcuauguuauag

SEQ ID NO: 71887 - RNA, 19 nt, Artificial Sequence
  Description of Artificial Sequence: Synthetic oligonucleotide
  Antisense strand to SEQ ID NO: 71806
cuauaacauagcuuugugc

SEQ ID NO: 71888 - RNA, 19 nt, Artificial Sequence
  Description of Artificial Sequence: Synthetic oligonucleotide
  Sense strand starting at position 3470 of SEQ ID NO: 894
cuugaauacugugcacaaa

SEQ ID NO: 71889 - RNA, 19 nt, Artificial Sequence
  Description of Artificial Sequence: Synthetic oligonucleotide
  Antisense strand to SEQ ID NO: 71808
uuugugcacaguauucaag

SEQ ID NO: 71890 - RNA, 19 nt, Artificial Sequence
  Description of Artificial Sequence: Synthetic oligonucleotide
  Sense strand starting at position 3469 of SEQ ID NO: 894
ucuugaauacugugcacaa

SEQ ID NO: 71891 - RNA, 19 nt, Artificial Sequence
  Description of Artificial Sequence: Synthetic oligonucleotide
  Antisense strand to SEQ ID NO: 71810
uugugcacaguauucaaga

SEQ ID NO: 71892 - RNA, 19 nt, Artificial Sequence
  Description of Artificial Sequence: Synthetic oligonucleotide
  Sense strand starting at position 3449 of SEQ ID NO: 894
ugggaauaauagcucucau

SEQ ID NO: 71893 - RNA, 19 nt, Artificial Sequence
  Description of Artificial Sequence: Synthetic oligonucleotide
  Antisense strand to SEQ ID NO: 71812
augagagcuauuauuccca

SEQ ID NO: 71894 - RNA, 19 nt, Artificial Sequence
  Description of Artificial Sequence: Synthetic oligonucleotide
  Sense strand starting at position 3324 of SEQ ID NO: 894
ucaagugaacuuuggaauu

SEQ ID NO: 71895 - RNA, 19 nt, Artificial Sequence
  Description of Artificial Sequence: Synthetic oligonucleotide
  Antisense strand to SEQ ID NO: 71814
aauuccaaaguucacuuga

SEQ ID NO: 71896 - RNA, 19 nt, Artificial Sequence
  Description of Artificial Sequence: Synthetic oligonucleotide
  Sense strand starting at position 3295 of SEQ ID NO: 894
cuuaucucagacugaaaug

SEQ ID NO: 71897 - RNA, 19 nt, Artificial Sequence
  Description of Artificial Sequence: Synthetic oligonucleotide
  Antisense strand to SEQ ID NO: 71816
cauuucagucugagauaag

SEQ ID NO: 71898 - RNA, 19 nt, Artificial Sequence
  Description of Artificial Sequence: Synthetic oligonucleotide
  Sense strand starting at position 3128 of SEQ ID NO: 894
gauugaagcccugauagcu

SEQ ID NO: 71899 - RNA, 19 nt, Artificial Sequence
  Description of Artificial Sequence: Synthetic oligonucleotide
  Antisense strand to SEQ ID NO: 71818
agcuaucagggcuucaauc

SEQ ID NO: 71900 - RNA, 19 nt, Artificial Sequence
  Description of Artificial Sequence: Synthetic oligonucleotide
  Sense strand starting at position 3108 of SEQ ID NO: 894
gacauugagccugaacguu

SEQ ID NO: 71901 - RNA, 19 nt, Artificial Sequence
  Description of Artificial Sequence: Synthetic oligonucleotide
  Antisense strand to SEQ ID NO: 71820
aacguucaggcucaauguc

SEQ ID NO: 71902 - RNA, 19 nt, Artificial Sequence
  Description of Artificial Sequence: Synthetic oligonucleotide
  Sense strand starting at position 3001 of SEQ ID NO: 894
gucucuaagggugauauca

SEQ ID NO: 71903 - RNA, 19 nt, Artificial Sequence
  Description of Artificial Sequence: Synthetic oligonucleotide
  Antisense strand to SEQ ID NO: 71822
ugauaucacccuuagagac

SEQ ID NO: 71904 - RNA, 19 nt, Artificial Sequence
  Description of Artificial Sequence: Synthetic oligonucleotide
  Sense strand starting at position 3000 of SEQ ID NO: 894
agucucuaagggugauauc

SEQ ID NO: 71905 - RNA, 19 nt, Artificial Sequence
  Description of Artificial Sequence: Synthetic oligonucleotide
  Antisense strand to SEQ ID NO: 71824
gauaucacccuuagagacu

SEQ ID NO: 71906 - RNA, 19 nt, Artificial Sequence
  Description of Artificial Sequence: Synthetic oligonucleotide
  Sense strand starting at position 2994 of SEQ ID NO: 894
gggcaaagucucuaagggu

SEQ ID NO: 71907 - RNA, 19 nt, Artificial Sequence
  Description of Artificial Sequence: Synthetic oligonucleotide
  Antisense strand to SEQ ID NO: 71826
acccuuagagacuuugccc

SEQ ID NO: 71908 - RNA, 19 nt, Artificial Sequence
  Description of Artificial Sequence: Synthetic oligonucleotide
  Sense strand starting at position 2935 of SEQ ID NO: 894
ccuucuaggcaaugcauaa

SEQ ID NO: 71909 - RNA, 19 nt, Artificial Sequence
  Description of Artificial Sequence: Synthetic oligonucleotide
  Antisense strand to SEQ ID NO: 71828
uuaugcauugccuagaagg

SEQ ID NO: 71910 - RNA, 19 nt, Artificial Sequence
  Description of Artificial Sequence: Synthetic oligonucleotide
  Sense strand starting at position 2896 of SEQ ID NO: 894
ggguaaugcauccauagca

SEQ ID NO: 71911 - RNA, 19 nt, Artificial Sequence
  Description of Artificial Sequence: Synthetic oligonucleotide
  Antisense strand to SEQ ID NO: 71830
ugcuauggaugcauuaccc

SEQ ID NO: 71912 - RNA, 19 nt, Artificial Sequence
  Description of Artificial Sequence: Synthetic oligonucleotide
  Sense strand starting at position 2887 of SEQ ID NO: 894
uuaucuccuggguaaugca

SEQ ID NO: 71913 - RNA, 19 nt, Artificial Sequence
  Description of Artificial Sequence: Synthetic oligonucleotide
  Antisense strand to SEQ ID NO: 71832
ugcauuacccaggagauaa

SEQ ID NO: 71914 - RNA, 19 nt, Artificial Sequence
  Description of Artificial Sequence: Synthetic oligonucleotide
  Sense strand starting at position 2885 of SEQ ID NO: 894
ccuuaucuccuggguaaug

SEQ ID NO: 71915 - RNA, 19 nt, Artificial Sequence
  Description of Artificial Sequence: Synthetic oligonucleotide
  Antisense strand to SEQ ID NO: 71834
cauuacccaggagauaagg

SEQ ID NO: 71916 - RNA, 19 nt, Artificial Sequence
  Description of Artificial Sequence: Synthetic oligonucleotide
  Sense strand starting at position 2884 of SEQ ID NO: 894
cccuuaucuccuggguaau

SEQ ID NO: 71917 - RNA, 19 nt, Artificial Sequence
  Description of Artificial Sequence: Synthetic oligonucleotide
  Antisense strand to SEQ ID NO: 71836
auuacccaggagauaaggg

SEQ ID NO: 71918 - RNA, 19 nt, Artificial Sequence
  Description of Artificial Sequence: Synthetic oligonucleotide
  Sense strand starting at position 2818 of SEQ ID NO: 894
aucaaaugggcaugauaca

SEQ ID NO: 71919 - RNA, 19 nt, Artificial Sequence
  Description of Artificial Sequence: Synthetic oligonucleotide
  Antisense strand to SEQ ID NO: 71838
uguaucaugcccauuugau

SEQ ID NO: 71920 - RNA, 19 nt, Artificial Sequence
  Description of Artificial Sequence: Synthetic oligonucleotide
  Sense strand starting at position 2758 of SEQ ID NO: 894
gcagcugugugauuuagga

SEQ ID NO: 71921 - RNA, 19 nt, Artificial Sequence
  Description of Artificial Sequence: Synthetic oligonucleotide
  Antisense strand to SEQ ID NO: 71840
uccuaaaucacacagcugc

SEQ ID NO: 71922 - RNA, 19 nt, Artificial Sequence
  Description of Artificial Sequence: Synthetic oligonucleotide
  Sense strand starting at position 2711 of SEQ ID NO: 894
aguaguguuggaggcagau

SEQ ID NO: 71923 - RNA, 19 nt, Artificial Sequence
  Description of Artificial Sequence: Synthetic oligonucleotide
  Antisense strand to SEQ ID NO: 71842
aucugccuccaacacuacu

SEQ ID NO: 71924 - RNA, 19 nt, Artificial Sequence
  Description of Artificial Sequence: Synthetic oligonucleotide
  Sense strand starting at position 2181 of SEQ ID NO: 894
ggaacacagugcuugaaca

SEQ ID NO: 71925 - RNA, 19 nt, Artificial Sequence
  Description of Artificial Sequence: Synthetic oligonucleotide
  Antisense strand to SEQ ID NO: 71844
uguucaagcacuguguucc

SEQ ID NO: 71926 - RNA, 19 nt, Artificial Sequence
  Description of Artificial Sequence: Synthetic oligonucleotide
  Sense strand starting at position 2055 of SEQ ID NO: 894
gaguccuggucacucauua

SEQ ID NO: 71927 - RNA, 19 nt, Artificial Sequence
  Description of Artificial Sequence: Synthetic oligonucleotide
  Antisense strand to SEQ ID NO: 71846
uaaugagugaccaggacuc

SEQ ID NO: 71928 - RNA, 19 nt, Artificial Sequence
  Description of Artificial Sequence: Synthetic oligonucleotide
  Sense strand starting at position 2053 of SEQ ID NO: 894
aggaguccuggucacucau

SEQ ID NO: 71929 - RNA, 19 nt, Artificial Sequence
  Description of Artificial Sequence: Synthetic oligonucleotide
  Antisense strand to SEQ ID NO: 71848
augagugaccaggacuccu

SEQ ID NO: 71930 - RNA, 19 nt, Artificial Sequence
  Description of Artificial Sequence: Synthetic oligonucleotide
  Sense strand starting at position 1679 of SEQ ID NO: 894
ugucauugccaucaucacu

SEQ ID NO: 71931 - RNA, 19 nt, Artificial Sequence
  Description of Artificial Sequence: Synthetic oligonucleotide
  Antisense strand to SEQ ID NO: 71850
agugaugauggcaaugaca

SEQ ID NO: 71932 - RNA, 19 nt, Artificial Sequence
  Description of Artificial Sequence: Synthetic oligonucleotide
  Sense strand starting at position 1530 of SEQ ID NO: 894
ggugaauauacggaacugu

SEQ ID NO: 71933 - RNA, 19 nt, Artificial Sequence
  Description of Artificial Sequence: Synthetic oligonucleotide
  Antisense strand to SEQ ID NO: 71852
acaguuccguauauucacc

SEQ ID NO: 71934 - RNA, 19 nt, Artificial Sequence
  Description of Artificial Sequence: Synthetic oligonucleotide
  Sense strand starting at position 1520 of SEQ ID NO: 894
ccuacaugugggugaauau

SEQ ID NO: 71935 - RNA, 19 nt, Artificial Sequence
  Description of Artificial Sequence: Synthetic oligonucleotide
  Antisense strand to SEQ ID NO: 71854
auauucacccacauguagg

SEQ ID NO: 71936 - RNA, 19 nt, Artificial Sequence
  Description of Artificial Sequence: Synthetic oligonucleotide
  Sense strand starting at position 1519 of SEQ ID NO: 894
accuacaugugggugaaua

SEQ ID NO: 71937 - RNA, 19 nt, Artificial Sequence
  Description of Artificial Sequence: Synthetic oligonucleotide
  Antisense strand to SEQ ID NO: 71856
uauucacccacauguaggu

SEQ ID NO: 71938 - RNA, 19 nt, Artificial Sequence
  Description of Artificial Sequence: Synthetic oligonucleotide
  Sense strand starting at position 1518 of SEQ ID NO: 894
caccuacaugugggugaau

SEQ ID NO: 71939 - RNA, 19 nt, Artificial Sequence
  Description of Artificial Sequence: Synthetic oligonucleotide
  Antisense strand to SEQ ID NO: 71858
auucacccacauguaggug

SEQ ID NO: 71940 - RNA, 19 nt, Artificial Sequence
  Description of Artificial Sequence: Synthetic oligonucleotide
  Sense strand starting at position 1474 of SEQ ID NO: 894
aaggguuacuucucaggaa

SEQ ID NO: 71941 - RNA, 19 nt, Artificial Sequence
  Description of Artificial Sequence: Synthetic oligonucleotide
  Antisense strand to SEQ ID NO: 71860
uuccugagaaguaacccuu

SEQ ID NO: 71942 - RNA, 19 nt, Artificial Sequence
  Description of Artificial Sequence: Synthetic oligonucleotide
  Sense strand starting at position 1223 of SEQ ID NO: 894
cagagucagggaugugaca

SEQ ID NO: 71943 - RNA, 19 nt, Artificial Sequence
  Description of Artificial Sequence: Synthetic oligonucleotide
  Antisense strand to SEQ ID NO: 71862
ugucacaucccugacucug

SEQ ID NO: 71944 - RNA, 19 nt, Artificial Sequence
  Description of Artificial Sequence: Synthetic oligonucleotide
  Sense strand starting at position 1100 of SEQ ID NO: 894
gcucacauggcagagugau

SEQ ID NO: 71945 - RNA, 19 nt, Artificial Sequence
  Description of Artificial Sequence: Synthetic oligonucleotide
  Antisense strand to SEQ ID NO: 71864
aucacucugccaugugagc

SEQ ID NO: 71946 - RNA, 19 nt, Artificial Sequence
  Description of Artificial Sequence: Synthetic oligonucleotide
  Sense strand starting at position 1025 of SEQ ID NO: 894
ucaguucccucaucugaca

SEQ ID NO: 71947 - RNA, 19 nt, Artificial Sequence
  Description of Artificial Sequence: Synthetic oligonucleotide
  Antisense strand to SEQ ID NO: 71866
ugucagaugagggaacuga

SEQ ID NO: 71948 - RNA, 19 nt, Artificial Sequence
  Description of Artificial Sequence: Synthetic oligonucleotide
  Sense strand starting at position 895 of SEQ ID NO: 894
cggugagaggugugaggaa

SEQ ID NO: 71949 - RNA, 19 nt, Artificial Sequence
  Description of Artificial Sequence: Synthetic oligonucleotide
  Antisense strand to SEQ ID NO: 71868
uuccucacaccucucaccg

SEQ ID NO: 71950 - RNA, 19 nt, Artificial Sequence
  Description of Artificial Sequence: Synthetic oligonucleotide
  Sense strand starting at position 432 of SEQ ID NO: 894
gggccugaguuacuugaau

SEQ ID NO: 71951 - RNA, 19 nt, Artificial Sequence
  Description of Artificial Sequence: Synthetic oligonucleotide
  Antisense strand to SEQ ID NO: 71870
auucaaguaacucaggccc

SEQ ID NO: 71952 - RNA, 19 nt, Artificial Sequence
  Description of Artificial Sequence: Synthetic oligonucleotide
  Sense strand starting at position 94 of SEQ ID NO: 894
auuucuuguuugcuaaaug

SEQ ID NO: 71953 - RNA, 19 nt, Artificial Sequence
  Description of Artificial Sequence: Synthetic oligonucleotide
  Antisense strand to SEQ ID NO: 71872
cauuuagcaaacaagaaau

SEQ ID NO: 71954 - RNA, 19 nt, Artificial Sequence
  Description of Artificial Sequence: Synthetic oligonucleotide
  Sense strand starting at position 90 of SEQ ID NO: 894
ugagauuucuuguuugcua

SEQ ID NO: 71955 - RNA, 19 nt, Artificial Sequence
  Description of Artificial Sequence: Synthetic oligonucleotide
  Antisense strand to SEQ ID NO: 71874
uagcaaacaagaaaucuca

SEQ ID NO: 71956 - RNA, 19 nt, Artificial Sequence
  Description of Artificial Sequence: Synthetic oligonucleotide
  Sense strand starting at position 87 of SEQ ID NO: 894
gccugagauuucuuguuug

SEQ ID NO: 71957 - RNA, 19 nt, Artificial Sequence
  Description of Artificial Sequence: Synthetic oligonucleotide
  Antisense strand to SEQ ID NO: 71876
caaacaagaaaucucaggc

SEQ ID NO: 71958 - RNA, 19 nt, Artificial Sequence
  Description of Artificial Sequence: Synthetic oligonucleotide
  Sense strand starting at position 3629 of SEQ ID NO: 897
ugugcuaugucauaccaua

SEQ ID NO: 71959 - RNA, 19 nt, Artificial Sequence
  Description of Artificial Sequence: Synthetic oligonucleotide
  Antisense strand to SEQ ID NO: 71878
uaugguaugacauagcaca

SEQ ID NO: 71960 - RNA, 19 nt, Artificial Sequence
  Description of Artificial Sequence: Synthetic oligonucleotide
  Sense strand starting at position 3624 of SEQ ID NO: 897
auacaugugcuaugucaua

SEQ ID NO: 71961 - RNA, 19 nt, Artificial Sequence
  Description of Artificial Sequence: Synthetic oligonucleotide
  Antisense strand to SEQ ID NO: 71880
uaugacauagcacauguau

SEQ ID NO: 71962 - RNA, 19 nt, Artificial Sequence
  Description of Artificial Sequence: Synthetic oligonucleotide
  Sense strand starting at position 3622 of SEQ ID NO: 897
gaauacaugugcuauguca

SEQ ID NO: 71963 - RNA, 19 nt, Artificial Sequence
  Description of Artificial Sequence: Synthetic oligonucleotide
  Antisense strand to SEQ ID NO: 71882
ugacauagcacauguauuc

SEQ ID NO: 71964 - RNA, 19 nt, Artificial Sequence
  Description of Artificial Sequence: Synthetic oligonucleotide
  Sense strand starting at position 3619 of SEQ ID NO: 897
cuggaauacaugugcuaug

SEQ ID NO: 71965 - RNA, 19 nt, Artificial Sequence
  Description of Artificial Sequence: Synthetic oligonucleotide
  Antisense strand to SEQ ID NO: 71884
cauagcacauguauuccag

SEQ ID NO: 71966 - RNA, 19 nt, Artificial Sequence
  Description of Artificial Sequence: Synthetic oligonucleotide
  Sense strand starting at position 3550 of SEQ ID NO: 897
ggcaaagccuugucucuau

SEQ ID NO: 71967 - RNA, 19 nt, Artificial Sequence
  Description of Artificial Sequence: Synthetic oligonucleotide
  Antisense strand to SEQ ID NO: 71886
auagagacaaggcuuugcc

SEQ ID NO: 71968 - RNA, 19 nt, Artificial Sequence
  Description of Artificial Sequence: Synthetic oligonucleotide
  Sense strand starting at position 2261 of SEQ ID NO: 897
agagaaguaccucagugca

SEQ ID NO: 71969 - RNA, 19 nt, Artificial Sequence
  Description of Artificial Sequence: Synthetic oligonucleotide
  Antisense strand to SEQ ID NO: 71888
ugcacugagguacuucucu

SEQ ID NO: 71970 - RNA, 19 nt, Artificial Sequence
  Description of Artificial Sequence: Synthetic oligonucleotide
  Sense strand starting at position 2250 of SEQ ID NO: 897
gcuugucacucagagaagu

SEQ ID NO: 71971 - RNA, 19 nt, Artificial Sequence
  Description of Artificial Sequence: Synthetic oligonucleotide
  Antisense strand to SEQ ID NO: 71890
acuucucugagugacaagc

SEQ ID NO: 71972 - RNA, 19 nt, Artificial Sequence
  Description of Artificial Sequence: Synthetic oligonucleotide
  Sense strand starting at position 2248 of SEQ ID NO: 897
ccgcuugucacucagagaa

SEQ ID NO: 71973 - RNA, 19 nt, Artificial Sequence
  Description of Artificial Sequence: Synthetic oligonucleotide
  Antisense strand to SEQ ID NO: 71892
uucucugagugacaagcgg

SEQ ID NO: 71974 - RNA, 19 nt, Artificial Sequence
  Description of Artificial Sequence: Synthetic oligonucleotide
  Sense strand starting at position 2239 of SEQ ID NO: 897
guacuugucccgcuuguca

SEQ ID NO: 71975 - RNA, 19 nt, Artificial Sequence
  Description of Artificial Sequence: Synthetic oligonucleotide
  Antisense strand to SEQ ID NO: 71894
ugacaagcgggacaaguac

SEQ ID NO: 71976 - RNA, 19 nt, Artificial Sequence
  Description of Artificial Sequence: Synthetic oligonucleotide
  Sense strand starting at position 1611 of SEQ ID NO: 897
gcucgacacugcgauaacu

SEQ ID NO: 71977 - RNA, 19 nt, Artificial Sequence
  Description of Artificial Sequence: Synthetic oligonucleotide
  Antisense strand to SEQ ID NO: 71896
aguuaucgcagugucgagc

SEQ ID NO: 71978 - RNA, 19 nt, Artificial Sequence
  Description of Artificial Sequence: Synthetic oligonucleotide
  Sense strand starting at position 1326 of SEQ ID NO: 897
gacucuggcuuuggagaau

SEQ ID NO: 71979 - RNA, 19 nt, Artificial Sequence
  Description of Artificial Sequence: Synthetic oligonucleotide
  Antisense strand to SEQ ID NO: 71898
auucuccaaagccagaguc

SEQ ID NO: 71980 - RNA, 19 nt, Artificial Sequence
  Description of Artificial Sequence: Synthetic oligonucleotide
  Sense strand starting at position 1325 of SEQ ID NO: 897
ggacucuggcuuuggagaa

SEQ ID NO: 71981 - RNA, 19 nt, Artificial Sequence
  Description of Artificial Sequence: Synthetic oligonucleotide
  Antisense strand to SEQ ID NO: 71900
uucuccaaagccagagucc

SEQ ID NO: 71982 - RNA, 19 nt, Artificial Sequence
  Description of Artificial Sequence: Synthetic oligonucleotide
  Sense strand starting at position 1275 of SEQ ID NO: 897
uaaggcgacgcucaagaau

SEQ ID NO: 71983 - RNA, 19 nt, Artificial Sequence
  Description of Artificial Sequence: Synthetic oligonucleotide
  Antisense strand to SEQ ID NO: 71902
auucuugagcgucgccuua

SEQ ID NO: 71984 - RNA, 19 nt, Artificial Sequence
  Description of Artificial Sequence: Synthetic oligonucleotide
  Sense strand starting at position 933 of SEQ ID NO: 897
uccuuuaccuccugaggaa

SEQ ID NO: 71985 - RNA, 19 nt, Artificial Sequence
  Description of Artificial Sequence: Synthetic oligonucleotide
  Antisense strand to SEQ ID NO: 71904
uuccucaggagguaaagga

SEQ ID NO: 71986 - RNA, 19 nt, Artificial Sequence
  Description of Artificial Sequence: Synthetic oligonucleotide
  Sense strand starting at position 803 of SEQ ID NO: 897
aggguuucugggcacacau

SEQ ID NO: 71987 - RNA, 19 nt, Artificial Sequence
  Description of Artificial Sequence: Synthetic oligonucleotide
  Antisense strand to SEQ ID NO: 71906
augugugcccagaaacccu

SEQ ID NO: 71988 - RNA, 19 nt, Artificial Sequence
  Description of Artificial Sequence: Synthetic oligonucleotide
  Sense strand starting at position 802 of SEQ ID NO: 897
caggguuucugggcacaca

SEQ ID NO: 71989 - RNA, 19 nt, Artificial Sequence
  Description of Artificial Sequence: Synthetic oligonucleotide
  Antisense strand to SEQ ID NO: 71908
ugugugcccagaaacccug

SEQ ID NO: 71990 - RNA, 19 nt, Artificial Sequence
  Description of Artificial Sequence: Synthetic oligonucleotide
  Sense strand starting at position 698 of SEQ ID NO: 897
ccuggccucucguaagaca

SEQ ID NO: 71991 - RNA, 19 nt, Artificial Sequence
  Description of Artificial Sequence: Synthetic oligonucleotide
  Antisense strand to SEQ ID NO: 71910
ugucuuacgagaggccagg

SEQ ID NO: 71992 - RNA, 19 nt, Artificial Sequence
  Description of Artificial Sequence: Synthetic oligonucleotide
  Sense strand starting at position 632 of SEQ ID NO: 897
cccacuguucgaggagaug

SEQ ID NO: 71993 - RNA, 19 nt, Artificial Sequence
  Description of Artificial Sequence: Synthetic oligonucleotide
  Antisense strand to SEQ ID NO: 71912
caucuccucgaacaguggg

SEQ ID NO: 71994 - RNA, 19 nt, Artificial Sequence
  Description of Artificial Sequence: Synthetic oligonucleotide
  Sense strand starting at position 475 of SEQ ID NO: 897
cggaauggucucugccaga

SEQ ID NO: 71995 - RNA, 19 nt, Artificial Sequence
  Description of Artificial Sequence: Synthetic oligonucleotide
  Antisense strand to SEQ ID NO: 71914
ucuggcagagaccauuccg

SEQ ID NO: 71996 - RNA, 19 nt, Artificial Sequence
  Description of Artificial Sequence: Synthetic oligonucleotide
  Sense strand starting at position 465 of SEQ ID NO: 897
auccauguuccggaauggu

SEQ ID NO: 71997 - RNA, 19 nt, Artificial Sequence
  Description of Artificial Sequence: Synthetic oligonucleotide
  Antisense strand to SEQ ID NO: 71916
accauuccggaacauggau

SEQ ID NO: 71998 - RNA, 19 nt, Artificial Sequence
  Description of Artificial Sequence: Synthetic oligonucleotide
  Sense strand starting at position 461 of SEQ ID NO: 897
gcagauccauguuccggaa

SEQ ID NO: 71999 - RNA, 19 nt, Artificial Sequence
  Description of Artificial Sequence: Synthetic oligonucleotide
  Antisense strand to SEQ ID NO: 71918
uuccggaacauggaucugc

SEQ ID NO: 72000 - RNA, 19 nt, Artificial Sequence
  Description of Artificial Sequence: Synthetic oligonucleotide
  Sense strand starting at position 291 of SEQ ID NO: 897
agggaagcauuccagcaaa

SEQ ID NO: 72001 - RNA, 19 nt, Artificial Sequence
  Description of Artificial Sequence: Synthetic oligonucleotide
  Antisense strand to SEQ ID NO: 71920
uuugcuggaaugcuucccu

SEQ ID NO: 72002 - RNA, 19 nt, Artificial Sequence
  Description of Artificial Sequence: Synthetic oligonucleotide
  Sense strand starting at position 273 of SEQ ID NO: 897
gugucuuccugugggcaga

SEQ ID NO: 72003 - RNA, 19 nt, Artificial Sequence
  Description of Artificial Sequence: Synthetic oligonucleotide
  Antisense strand to SEQ ID NO: 71922
ucugcccacaggaagacac

SEQ ID NO: 72004 - RNA, 19 nt, Artificial Sequence
  Description of Artificial Sequence: Synthetic oligonucleotide
  Sense strand starting at position 239 of SEQ ID NO: 897
agccuuugcccugaccaga

SEQ ID NO: 72005 - RNA, 19 nt, Artificial Sequence
  Description of Artificial Sequence: Synthetic oligonucleotide
  Antisense strand to SEQ ID NO: 71924
ucuggucagggcaaaggcu

SEQ ID NO: 72006 - RNA, 19 nt, Artificial Sequence
  Description of Artificial Sequence: Synthetic oligonucleotide
  Sense strand starting at position 215 of SEQ ID NO: 897
gcaaucuugcgguggaaac

SEQ ID NO: 72007 - RNA, 19 nt, Artificial Sequence
  Description of Artificial Sequence: Synthetic oligonucleotide
  Antisense strand to SEQ ID NO: 71926
guuuccaccgcaagauugc

SEQ ID NO: 72008 - RNA, 19 nt, Artificial Sequence
  Description of Artificial Sequence: Synthetic oligonucleotide
  Sense strand starting at position 213 of SEQ ID NO: 897
cugcaaucuugcgguggaa

SEQ ID NO: 72009 - RNA, 19 nt, Artificial Sequence
  Description of Artificial Sequence: Synthetic oligonucleotide
  Antisense strand to SEQ ID NO: 71928
uuccaccgcaagauugcag

SEQ ID NO: 72010 - RNA, 19 nt, Artificial Sequence
  Description of Artificial Sequence: Synthetic oligonucleotide
  Sense strand starting at position 3544 of SEQ ID NO: 895
augcuacgugacuauaaac

SEQ ID NO: 72011 - RNA, 19 nt, Artificial Sequence
  Description of Artificial Sequence: Synthetic oligonucleotide
  Antisense strand to SEQ ID NO: 71930
guuuauagucacguagcau

SEQ ID NO: 72012 - RNA, 19 nt, Artificial Sequence
  Description of Artificial Sequence: Synthetic oligonucleotide
  Sense strand starting at position 3543 of SEQ ID NO: 895
gaugcuacgugacuauaaa

SEQ ID NO: 72013 - RNA, 19 nt, Artificial Sequence
  Description of Artificial Sequence: Synthetic oligonucleotide
  Antisense strand to SEQ ID NO: 71932
uuuauagucacguagcauc

SEQ ID NO: 72014 - RNA, 19 nt, Artificial Sequence
  Description of Artificial Sequence: Synthetic oligonucleotide
  Sense strand starting at position 3540 of SEQ ID NO: 895
cuagaugcuacgugacuau

SEQ ID NO: 72015 - RNA, 19 nt, Artificial Sequence
  Description of Artificial Sequence: Synthetic oligonucleotide
  Antisense strand to SEQ ID NO: 71934
auagucacguagcaucuag

SEQ ID NO: 72016 - RNA, 19 nt, Artificial Sequence
  Description of Artificial Sequence: Synthetic oligonucleotide
  Sense strand starting at position 3539 of SEQ ID NO: 895
ccuagaugcuacgugacua

SEQ ID NO: 72017 - RNA, 19 nt, Artificial Sequence
  Description of Artificial Sequence: Synthetic oligonucleotide
  Antisense strand to SEQ ID NO: 71936
uagucacguagcaucuagg

SEQ ID NO: 72018 - RNA, 19 nt, Artificial Sequence
  Description of Artificial Sequence: Synthetic oligonucleotide
  Sense strand starting at position 3311 of SEQ ID NO: 895
aaucaugugcuucgaagga

SEQ ID NO: 72019 - RNA, 19 nt, Artificial Sequence
  Description of Artificial Sequence: Synthetic oligonucleotide
  Antisense strand to SEQ ID NO: 71938
uccuucgaagcacaugauu

SEQ ID NO: 72020 - RNA, 19 nt, Artificial Sequence
  Description of Artificial Sequence: Synthetic oligonucleotide
  Sense strand starting at position 3307 of SEQ ID NO: 895
gcuaaaucaugugcuucga

SEQ ID NO: 72021 - RNA, 19 nt, Artificial Sequence
  Description of Artificial Sequence: Synthetic oligonucleotide
  Antisense strand to SEQ ID NO: 71940
ucgaagcacaugauuuagc

SEQ ID NO: 72022 - RNA, 19 nt, Artificial Sequence
  Description of Artificial Sequence: Synthetic oligonucleotide
  Sense strand starting at position 3253 of SEQ ID NO: 895
uuaugacuugaugguauua

SEQ ID NO: 72023 - RNA, 19 nt, Artificial Sequence
  Description of Artificial Sequence: Synthetic oligonucleotide
  Antisense strand to SEQ ID NO: 71942
uaauaccaucaagucauaa

SEQ ID NO: 72024 - RNA, 19 nt, Artificial Sequence
  Description of Artificial Sequence: Synthetic oligonucleotide
  Sense strand starting at position 3186 of SEQ ID NO: 895
ggguacaguucucaggaca

SEQ ID NO: 72025 - RNA, 19 nt, Artificial Sequence
  Description of Artificial Sequence: Synthetic oligonucleotide
  Antisense strand to SEQ ID NO: 71944
uguccugagaacuguaccc

SEQ ID NO: 72026 - RNA, 19 nt, Artificial Sequence
  Description of Artificial Sequence: Synthetic oligonucleotide
  Sense strand starting at position 3138 of SEQ ID NO: 895
augccacuugugugaauuu

SEQ ID NO: 72027 - RNA, 19 nt, Artificial Sequence
  Description of Artificial Sequence: Synthetic oligonucleotide
  Antisense strand to SEQ ID NO: 71946
aaauucacacaaguggcau

SEQ ID NO: 72028 - RNA, 19 nt, Artificial Sequence
  Description of Artificial Sequence: Synthetic oligonucleotide
  Sense strand starting at position 3137 of SEQ ID NO: 895
caugccacuugugugaauu

SEQ ID NO: 72029 - RNA, 19 nt, Artificial Sequence
  Description of Artificial Sequence: Synthetic oligonucleotide
  Antisense strand to SEQ ID NO: 71948
aauucacacaaguggcaug

SEQ ID NO: 72030 - RNA, 19 nt, Artificial Sequence
  Description of Artificial Sequence: Synthetic oligonucleotide
  Sense strand starting at position 3075 of SEQ ID NO: 895
acagccugguucccauaau

SEQ ID NO: 72031 - RNA, 19 nt, Artificial Sequence
  Description of Artificial Sequence: Synthetic oligonucleotide
  Antisense strand to SEQ ID NO: 71950
auuaugggaaccaggcugu

SEQ ID NO: 72032 - RNA, 19 nt, Artificial Sequence
  Description of Artificial Sequence: Synthetic oligonucleotide
  Sense strand starting at position 2788 of SEQ ID NO: 895
augugcucuccauaaggga

SEQ ID NO: 72033 - RNA, 19 nt, Artificial Sequence
  Description of Artificial Sequence: Synthetic oligonucleotide
  Antisense strand to SEQ ID NO: 71952
ucccuuauggagagcacau

SEQ ID NO: 72034 - RNA, 19 nt, Artificial Sequence
  Description of Artificial Sequence: Synthetic oligonucleotide
  Sense strand starting at position 2699 of SEQ ID NO: 895
gcauacaugucauugauca

SEQ ID NO: 72035 - RNA, 19 nt, Artificial Sequence
  Description of Artificial Sequence: Synthetic oligonucleotide
  Antisense strand to SEQ ID NO: 71954
ugaucaaugacauguaugc

SEQ ID NO: 72036 - RNA, 19 nt, Artificial Sequence
  Description of Artificial Sequence: Synthetic oligonucleotide
  Sense strand starting at position 2665 of SEQ ID NO: 895
acacauguguaccugcaaa

SEQ ID NO: 72037 - RNA, 19 nt, Artificial Sequence
  Description of Artificial Sequence: Synthetic oligonucleotide
  Antisense strand to SEQ ID NO: 71956
uuugcagguacacaugugu

SEQ ID NO: 72038 - RNA, 19 nt, Artificial Sequence
  Description of Artificial Sequence: Synthetic oligonucleotide
  Sense strand starting at position 2567 of SEQ ID NO: 895
gcaggaugugugcacaaac

SEQ ID NO: 72039 - RNA, 19 nt, Artificial Sequence
  Description of Artificial Sequence: Synthetic oligonucleotide
  Antisense strand to SEQ ID NO: 71958
guuugugcacacauccugc

SEQ ID NO: 72040 - RNA, 19 nt, Artificial Sequence
  Description of Artificial Sequence: Synthetic oligonucleotide
  Sense strand starting at position 2478 of SEQ ID NO: 895
gagguaaucucacaaaugc

SEQ ID NO: 72041 - RNA, 19 nt, Artificial Sequence
  Description of Artificial Sequence: Synthetic oligonucleotide
  Antisense strand to SEQ ID NO: 71960
gcauuugugagauuaccuc

SEQ ID NO: 72042 - RNA, 19 nt, Artificial Sequence
  Description of Artificial Sequence: Synthetic oligonucleotide
  Sense strand starting at position 2242 of SEQ ID NO: 895
gcgucuucgaguugggaug

SEQ ID NO: 72043 - RNA, 19 nt, Artificial Sequence
  Description of Artificial Sequence: Synthetic oligonucleotide
  Antisense strand to SEQ ID NO: 71962
caucccaacucgaagacgc

SEQ ID NO: 72044 - RNA, 19 nt, Artificial Sequence
  Description of Artificial Sequence: Synthetic oligonucleotide
  Sense strand starting at position 2064 of SEQ ID NO: 895
cuucuaagccacgaauaaa

SEQ ID NO: 72045 - RNA, 19 nt, Artificial Sequence
  Description of Artificial Sequence: Synthetic oligonucleotide
  Antisense strand to SEQ ID NO: 71964
uuuauucguggcuuagaag

SEQ ID NO: 72046 - RNA, 19 nt, Artificial Sequence
  Description of Artificial Sequence: Synthetic oligonucleotide
  Sense strand starting at position 2063 of SEQ ID NO: 895
ccuucuaagccacgaauaa

SEQ ID NO: 72047 - RNA, 19 nt, Artificial Sequence
  Description of Artificial Sequence: Synthetic oligonucleotide
  Antisense strand to SEQ ID NO: 71966
uuauucguggcuuagaagg

SEQ ID NO: 72048 - RNA, 19 nt, Artificial Sequence
  Description of Artificial Sequence: Synthetic oligonucleotide
  Sense strand starting at position 1799 of SEQ ID NO: 895
aucugugaugcugguaaug

SEQ ID NO: 72049 - RNA, 19 nt, Artificial Sequence
  Description of Artificial Sequence: Synthetic oligonucleotide
  Antisense strand to SEQ ID NO: 71968
cauuaccagcaucacagau

SEQ ID NO: 72050 - RNA, 19 nt, Artificial Sequence
  Description of Artificial Sequence: Synthetic oligonucleotide
  Sense strand starting at position 1792 of SEQ ID NO: 895
gacuccuaucugugaugcu

SEQ ID NO: 72051 - RNA, 19 nt, Artificial Sequence
  Description of Artificial Sequence: Synthetic oligonucleotide
  Antisense strand to SEQ ID NO: 71970
agcaucacagauaggaguc

SEQ ID NO: 72052 - RNA, 19 nt, Artificial Sequence
  Description of Artificial Sequence: Synthetic oligonucleotide
  Sense strand starting at position 1790 of SEQ ID NO: 895
gggacuccuaucugugaug

SEQ ID NO: 72053 - RNA, 19 nt, Artificial Sequence
  Description of Artificial Sequence: Synthetic oligonucleotide
  Antisense strand to SEQ ID NO: 71972
caucacagauaggaguccc

SEQ ID NO: 72054 - RNA, 19 nt, Artificial Sequence
  Description of Artificial Sequence: Synthetic oligonucleotide
  Sense strand starting at position 1789 of SEQ ID NO: 895
ugggacuccuaucugugau

SEQ ID NO: 72055 - RNA, 19 nt, Artificial Sequence
  Description of Artificial Sequence: Synthetic oligonucleotide
  Antisense strand to SEQ ID NO: 71974
aucacagauaggaguccca

SEQ ID NO: 72056 - RNA, 19 nt, Artificial Sequence
  Description of Artificial Sequence: Synthetic oligonucleotide
  Sense strand starting at position 1770 of SEQ ID NO: 895
aggaacuucucauaggacu

SEQ ID NO: 72057 - RNA, 19 nt, Artificial Sequence
  Description of Artificial Sequence: Synthetic oligonucleotide
  Antisense strand to SEQ ID NO: 71976
aguccuaugagaaguuccu

SEQ ID NO: 72058 - RNA, 19 nt, Artificial Sequence
  Description of Artificial Sequence: Synthetic oligonucleotide
  Sense strand starting at position 1768 of SEQ ID NO: 895
ccaggaacuucucauagga

SEQ ID NO: 72059 - RNA, 19 nt, Artificial Sequence
  Description of Artificial Sequence: Synthetic oligonucleotide
  Antisense strand to SEQ ID NO: 71978
uccuaugagaaguuccugg

SEQ ID NO: 72060 - RNA, 19 nt, Artificial Sequence
  Description of Artificial Sequence: Synthetic oligonucleotide
  Sense strand starting at position 1727 of SEQ ID NO: 895
cagauauggucuuguaaag

SEQ ID NO: 72061 - RNA, 19 nt, Artificial Sequence
  Description of Artificial Sequence: Synthetic oligonucleotide
  Antisense strand to SEQ ID NO: 71980
cuuuacaagaccauaucug

SEQ ID NO: 72062 - RNA, 19 nt, Artificial Sequence
  Description of Artificial Sequence: Synthetic oligonucleotide
  Sense strand starting at position 1631 of SEQ ID NO: 895
gccauuugcucccaugcau

SEQ ID NO: 72063 - RNA, 19 nt, Artificial Sequence
  Description of Artificial Sequence: Synthetic oligonucleotide
  Antisense strand to SEQ ID NO: 71982
augcaugggagcaaauggc

SEQ ID NO: 72064 - RNA, 19 nt, Artificial Sequence
  Description of Artificial Sequence: Synthetic oligonucleotide
  Sense strand starting at position 1589 of SEQ ID NO: 895
cugggagccugcucugaga

SEQ ID NO: 72065 - RNA, 19 nt, Artificial Sequence
  Description of Artificial Sequence: Synthetic oligonucleotide
  Antisense strand to SEQ ID NO: 71984
ucucagagcaggcucccag

SEQ ID NO: 72066 - RNA, 19 nt, Artificial Sequence
  Description of Artificial Sequence: Synthetic oligonucleotide
  Sense strand starting at position 1312 of SEQ ID NO: 895
gccugagagucuccugaga

SEQ ID NO: 72067 - RNA, 19 nt, Artificial Sequence
  Description of Artificial Sequence: Synthetic oligonucleotide
  Antisense strand to SEQ ID NO: 71986
ucucaggagacucucaggc

SEQ ID NO: 72068 - RNA, 19 nt, Artificial Sequence
  Description of Artificial Sequence: Synthetic oligonucleotide
  Sense strand starting at position 1304 of SEQ ID NO: 895
agacauuggccugagaguc

SEQ ID NO: 72069 - RNA, 19 nt, Artificial Sequence
  Description of Artificial Sequence: Synthetic oligonucleotide
  Antisense strand to SEQ ID NO: 71988
gacucucaggccaaugucu

SEQ ID NO: 72070 - RNA, 19 nt, Artificial Sequence
  Description of Artificial Sequence: Synthetic oligonucleotide
  Sense strand starting at position 1303 of SEQ ID NO: 895
gagacauuggccugagagu

SEQ ID NO: 72071 - RNA, 19 nt, Artificial Sequence
  Description of Artificial Sequence: Synthetic oligonucleotide
  Antisense strand to SEQ ID NO: 71990
acucucaggccaaugucuc

SEQ ID NO: 72072 - RNA, 19 nt, Artificial Sequence
  Description of Artificial Sequence: Synthetic oligonucleotide
  Sense strand starting at position 917 of SEQ ID NO: 895
gugugauaaccucagguuc

SEQ ID NO: 72073 - RNA, 19 nt, Artificial Sequence
  Description of Artificial Sequence: Synthetic oligonucleotide
  Antisense strand to SEQ ID NO: 71992
gaaccugagguuaucacac

SEQ ID NO: 72074 - RNA, 19 nt, Artificial Sequence
  Description of Artificial Sequence: Synthetic oligonucleotide
  Sense strand starting at position 911 of SEQ ID NO: 895
gcaggagugugauaaccuc

SEQ ID NO: 72075 - RNA, 19 nt, Artificial Sequence
  Description of Artificial Sequence: Synthetic oligonucleotide
  Antisense strand to SEQ ID NO: 71994
gagguuaucacacuccugc

SEQ ID NO: 72076 - RNA, 19 nt, Artificial Sequence
  Description of Artificial Sequence: Synthetic oligonucleotide
  Sense strand starting at position 856 of SEQ ID NO: 895
cccaguuaucaguacucaa

SEQ ID NO: 72077 - RNA, 19 nt, Artificial Sequence
  Description of Artificial Sequence: Synthetic oligonucleotide
  Antisense strand to SEQ ID NO: 71996
uugaguacugauaacuggg

SEQ ID NO: 72078 - RNA, 19 nt, Artificial Sequence
  Description of Artificial Sequence: Synthetic oligonucleotide
  Sense strand starting at position 668 of SEQ ID NO: 895
ccucgugguaucuagcaga

SEQ ID NO: 72079 - RNA, 19 nt, Artificial Sequence
  Description of Artificial Sequence: Synthetic oligonucleotide
  Antisense strand to SEQ ID NO: 71998
ucugcuagauaccacgagg

SEQ ID NO: 72080 - RNA, 19 nt, Artificial Sequence
  Description of Artificial Sequence: Synthetic oligonucleotide
  Sense strand starting at position 511 of SEQ ID NO: 895
ggacccaucucacagauua

SEQ ID NO: 72081 - RNA, 19 nt, Artificial Sequence
  Description of Artificial Sequence: Synthetic oligonucleotide
  Antisense strand to SEQ ID NO: 72000
uaaucugugagaugggucc

SEQ ID NO: 72082 - RNA, 19 nt, Artificial Sequence
  Description of Artificial Sequence: Synthetic oligonucleotide
  Sense strand starting at position 473 of SEQ ID NO: 895
cugacacccugauugaguu

SEQ ID NO: 72083 - RNA, 19 nt, Artificial Sequence
  Description of Artificial Sequence: Synthetic oligonucleotide
  Antisense strand to SEQ ID NO: 72002
aacucaaucagggugucag

SEQ ID NO: 72084 - RNA, 19 nt, Artificial Sequence
  Description of Artificial Sequence: Synthetic oligonucleotide
  Sense strand starting at position 173 of SEQ ID NO: 895
acuggagaccgucagguua

SEQ ID NO: 72085 - RNA, 19 nt, Artificial Sequence
  Description of Artificial Sequence: Synthetic oligonucleotide
  Antisense strand to SEQ ID NO: 72004
uaaccugacggucuccagu

SEQ ID NO: 72086 - RNA, 19 nt, Artificial Sequence
  Description of Artificial Sequence: Synthetic oligonucleotide
  Sense strand starting at position 62 of SEQ ID NO: 895
guccucacugauggagaua

SEQ ID NO: 72087 - RNA, 19 nt, Artificial Sequence
  Description of Artificial Sequence: Synthetic oligonucleotide
  Antisense strand to SEQ ID NO: 72006
uaucuccaucagugaggac

SEQ ID NO: 72088 - RNA, 19 nt, Artificial Sequence
  Description of Artificial Sequence: Synthetic oligonucleotide
  Sense strand starting at position 61 of SEQ ID NO: 895
uguccucacugauggagau

SEQ ID NO: 72089 - RNA, 19 nt, Artificial Sequence
  Description of Artificial Sequence: Synthetic oligonucleotide
  Antisense strand to SEQ ID NO: 72008
aucuccaucagugaggaca

SEQ ID NO: 72090 - RNA, 19 nt, Artificial Sequence
  Description of Artificial Sequence: Synthetic oligonucleotide
  Sense strand starting at position 3961 of SEQ ID NO: 896
uuguaaggguuagagagaa

SEQ ID NO: 72091 - RNA, 19 nt, Artificial Sequence
  Description of Artificial Sequence: Synthetic oligonucleotide
  Antisense strand to SEQ ID NO: 72010
uucucucuaacccuuacaa

SEQ ID NO: 72092 - RNA, 19 nt, Artificial Sequence
  Description of Artificial Sequence: Synthetic oligonucleotide
  Sense strand starting at position 3866 of SEQ ID NO: 896
auagcagaaccauggguuu

SEQ ID NO: 72093 - RNA, 19 nt, Artificial Sequence
  Description of Artificial Sequence: Synthetic oligonucleotide
  Antisense strand to SEQ ID NO: 72012
aaacccaugguucugcuau

SEQ ID NO: 72094 - RNA, 19 nt, Artificial Sequence
  Description of Artificial Sequence: Synthetic oligonucleotide
  Sense strand starting at position 3485 of SEQ ID NO: 896
ugugcuaugucauaccaua

SEQ ID NO: 72095 - RNA, 19 nt, Artificial Sequence
  Description of Artificial Sequence: Synthetic oligonucleotide
  Antisense strand to SEQ ID NO: 72014
uaugguaugacauagcaca

SEQ ID NO: 72096 - RNA, 19 nt, Artificial Sequence
  Description of Artificial Sequence: Synthetic oligonucleotide
  Sense strand starting at position 3480 of SEQ ID NO: 896
auacaugugcuaugucaua

SEQ ID NO: 72097 - RNA, 19 nt, Artificial Sequence
  Description of Artificial Sequence: Synthetic oligonucleotide
  Antisense strand to SEQ ID NO: 72016
uaugacauagcacauguau

SEQ ID NO: 72098 - RNA, 19 nt, Artificial Sequence
  Description of Artificial Sequence: Synthetic oligonucleotide
  Sense strand starting at position 3478 of SEQ ID NO: 896
gaauacaugugcuauguca

SEQ ID NO: 72099 - RNA, 19 nt, Artificial Sequence
  Description of Artificial Sequence: Synthetic oligonucleotide
  Antisense strand to SEQ ID NO: 72018
ugacauagcacauguauuc

SEQ ID NO: 72100 - RNA, 19 nt, Artificial Sequence
  Description of Artificial Sequence: Synthetic oligonucleotide
  Sense strand starting at position 3475 of SEQ ID NO: 896
cuggaauacaugugcuaug

SEQ ID NO: 72101 - RNA, 19 nt, Artificial Sequence
  Description of Artificial Sequence: Synthetic oligonucleotide
  Antisense strand to SEQ ID NO: 72020
cauagcacauguauuccag

SEQ ID NO: 72102 - RNA, 19 nt, Artificial Sequence
  Description of Artificial Sequence: Synthetic oligonucleotide
  Sense strand starting at position 3406 of SEQ ID NO: 896
ggcaaagccuugucucuau

SEQ ID NO: 72103 - RNA, 19 nt, Artificial Sequence
  Description of Artificial Sequence: Synthetic oligonucleotide
  Antisense strand to SEQ ID NO: 72022
auagagacaaggcuuugcc

SEQ ID NO: 72104 - RNA, 19 nt, Artificial Sequence
  Description of Artificial Sequence: Synthetic oligonucleotide
  Sense strand starting at position 2117 of SEQ ID NO: 896
agagaaguaccucagugca

SEQ ID NO: 72105 - RNA, 19 nt, Artificial Sequence
  Description of Artificial Sequence: Synthetic oligonucleotide
  Antisense strand to SEQ ID NO: 72024
ugcacugagguacuucucu

SEQ ID NO: 72106 - RNA, 19 nt, Artificial Sequence
  Description of Artificial Sequence: Synthetic oligonucleotide
  Sense strand starting at position 2106 of SEQ ID NO: 896
gcuugucacucagagaagu

SEQ ID NO: 72107 - RNA, 19 nt, Artificial Sequence
  Description of Artificial Sequence: Synthetic oligonucleotide
  Antisense strand to SEQ ID NO: 72026
acuucucugagugacaagc

SEQ ID NO: 72108 - RNA, 19 nt, Artificial Sequence
  Description of Artificial Sequence: Synthetic oligonucleotide
  Sense strand starting at position 2104 of SEQ ID NO: 896
ccgcuugucacucagagaa

SEQ ID NO: 72109 - RNA, 19 nt, Artificial Sequence
  Description of Artificial Sequence: Synthetic oligonucleotide
  Antisense strand to SEQ ID NO: 72028
uucucugagugacaagcgg

SEQ ID NO: 72110 - RNA, 19 nt, Artificial Sequence
  Description of Artificial Sequence: Synthetic oligonucleotide
  Sense strand starting at position 2095 of SEQ ID NO: 896
guacuugucccgcuuguca

SEQ ID NO: 72111 - RNA, 19 nt, Artificial Sequence
  Description of Artificial Sequence: Synthetic oligonucleotide
  Antisense strand to SEQ ID NO: 72030
ugacaagcgggacaaguac

SEQ ID NO: 72112 - RNA, 19 nt, Artificial Sequence
  Description of Artificial Sequence: Synthetic oligonucleotide
  Sense strand starting at position 1467 of SEQ ID NO: 896
gcucgacacugcgauaacu

SEQ ID NO: 72113 - RNA, 19 nt, Artificial Sequence
  Description of Artificial Sequence: Synthetic oligonucleotide
  Antisense strand to SEQ ID NO: 72032
aguuaucgcagugucgagc

SEQ ID NO: 72114 - RNA, 19 nt, Artificial Sequence
  Description of Artificial Sequence: Synthetic oligonucleotide
  Sense strand starting at position 1182 of SEQ ID NO: 896
gacucuggcuuuggagaau

SEQ ID NO: 72115 - RNA, 19 nt, Artificial Sequence
  Description of Artificial Sequence: Synthetic oligonucleotide
  Antisense strand to SEQ ID NO: 72034
auucuccaaagccagaguc

SEQ ID NO: 72116 - RNA, 19 nt, Artificial Sequence
  Description of Artificial Sequence: Synthetic oligonucleotide
  Sense strand starting at position 1181 of SEQ ID NO: 896
ggacucuggcuuuggagaa

SEQ ID NO: 72117 - RNA, 19 nt, Artificial Sequence
  Description of Artificial Sequence: Synthetic oligonucleotide
  Antisense strand to SEQ ID NO: 72036
uucuccaaagccagagucc

SEQ ID NO: 72118 - RNA, 19 nt, Artificial Sequence
  Description of Artificial Sequence: Synthetic oligonucleotide
  Sense strand starting at position 1131 of SEQ ID NO: 896
uaaggcgacgcucaagaau

SEQ ID NO: 72119 - RNA, 19 nt, Artificial Sequence
  Description of Artificial Sequence: Synthetic oligonucleotide
  Antisense strand to SEQ ID NO: 72038
auucuugagcgucgccuua

SEQ ID NO: 72120 - RNA, 19 nt, Artificial Sequence
  Description of Artificial Sequence: Synthetic oligonucleotide
  Sense strand starting at position 789 of SEQ ID NO: 896
uccuuuaccuccugaggaa

SEQ ID NO: 72121 - RNA, 19 nt, Artificial Sequence
  Description of Artificial Sequence: Synthetic oligonucleotide
  Antisense strand to SEQ ID NO: 72040
uuccucaggagguaaagga

SEQ ID NO: 72122 - RNA, 19 nt, Artificial Sequence
  Description of Artificial Sequence: Synthetic oligonucleotide
  Sense strand starting at position 659 of SEQ ID NO: 896
aggguuucugggcacacau

SEQ ID NO: 72123 - RNA, 19 nt, Artificial Sequence
  Description of Artificial Sequence: Synthetic oligonucleotide
  Antisense strand to SEQ ID NO: 72042
augugugcccagaaacccu

SEQ ID NO: 72124 - RNA, 19 nt, Artificial Sequence
  Description of Artificial Sequence: Synthetic oligonucleotide
  Sense strand starting at position 658 of SEQ ID NO: 896
caggguuucugggcacaca

SEQ ID NO: 72125 - RNA, 19 nt, Artificial Sequence
  Description of Artificial Sequence: Synthetic oligonucleotide
  Antisense strand to SEQ ID NO: 72044
ugugugcccagaaacccug

SEQ ID NO: 72126 - RNA, 19 nt, Artificial Sequence
  Description of Artificial Sequence: Synthetic oligonucleotide
  Sense strand starting at position 554 of SEQ ID NO: 896
ccuggccucucguaagaca

SEQ ID NO: 72127 - RNA, 19 nt, Artificial Sequence
  Description of Artificial Sequence: Synthetic oligonucleotide
  Antisense strand to SEQ ID NO: 72046
ugucuuacgagaggccagg

SEQ ID NO: 72128 - RNA, 19 nt, Artificial Sequence
  Description of Artificial Sequence: Synthetic oligonucleotide
  Sense strand starting at position 488 of SEQ ID NO: 896
cccacuguucgaggagaug

SEQ ID NO: 72129 - RNA, 19 nt, Artificial Sequence
  Description of Artificial Sequence: Synthetic oligonucleotide
  Antisense strand to SEQ ID NO: 72048
caucuccucgaacaguggg

SEQ ID NO: 72130 - RNA, 19 nt, Artificial Sequence
  Description of Artificial Sequence: Synthetic oligonucleotide
  Sense strand starting at position 331 of SEQ ID NO: 896
cggaauggucucugccaga

SEQ ID NO: 72131 - RNA, 19 nt, Artificial Sequence
  Description of Artificial Sequence: Synthetic oligonucleotide
  Antisense strand to SEQ ID NO: 72050
ucuggcagagaccauuccg

SEQ ID NO: 72132 - RNA, 19 nt, Artificial Sequence
  Description of Artificial Sequence: Synthetic oligonucleotide
  Sense strand starting at position 321 of SEQ ID NO: 896
auccauguuccggaauggu

SEQ ID NO: 72133 - RNA, 19 nt, Artificial Sequence
  Description of Artificial Sequence: Synthetic oligonucleotide
  Antisense strand to SEQ ID NO: 72052
accauuccggaacauggau

SEQ ID NO: 72134 - RNA, 19 nt, Artificial Sequence
  Description of Artificial Sequence: Synthetic oligonucleotide
  Sense strand starting at position 317 of SEQ ID NO: 896
gcagauccauguuccggaa

SEQ ID NO: 72135 - RNA, 19 nt, Artificial Sequence
  Description of Artificial Sequence: Synthetic oligonucleotide
  Antisense strand to SEQ ID NO: 72054
uuccggaacauggaucugc

SEQ ID NO: 72136 - RNA, 19 nt, Artificial Sequence
  Description of Artificial Sequence: Synthetic oligonucleotide
  Sense strand starting at position 147 of SEQ ID NO: 896
agggaagcauuccagcaaa

SEQ ID NO: 72137 - RNA, 19 nt, Artificial Sequence
  Description of Artificial Sequence: Synthetic oligonucleotide
  Antisense strand to SEQ ID NO: 72056
uuugcuggaaugcuucccu

SEQ ID NO: 72138 - RNA, 19 nt, Artificial Sequence
  Description of Artificial Sequence: Synthetic oligonucleotide
  Sense strand starting at position 129 of SEQ ID NO: 896
gugucuuccugugggcaga

SEQ ID NO: 72139 - RNA, 19 nt, Artificial Sequence
  Description of Artificial Sequence: Synthetic oligonucleotide
  Antisense strand to SEQ ID NO: 72058
ucugcccacaggaagacac

SEQ ID NO: 72140 - RNA, 19 nt, Artificial Sequence
  Description of Artificial Sequence: Synthetic oligonucleotide
  Sense strand starting at position 95 of SEQ ID NO: 896
agccuuugcccugaccaga

SEQ ID NO: 72141 - RNA, 19 nt, Artificial Sequence
  Description of Artificial Sequence: Synthetic oligonucleotide
  Antisense strand to SEQ ID NO: 72060
ucuggucagggcaaaggcu

SEQ ID NO: 72142 - RNA, 19 nt, Artificial Sequence
  Description of Artificial Sequence: Synthetic oligonucleotide
  Sense strand starting at position 71 of SEQ ID NO: 896
gcaaucuugcgguggaaac

SEQ ID NO: 72143 - RNA, 19 nt, Artificial Sequence
  Description of Artificial Sequence: Synthetic oligonucleotide
  Antisense strand to SEQ ID NO: 72062
guuuccaccgcaagauugc

SEQ ID NO: 72144 - RNA, 19 nt, Artificial Sequence
  Description of Artificial Sequence: Synthetic oligonucleotide
  Sense strand starting at position 69 of SEQ ID NO: 896
cugcaaucuugcgguggaa

SEQ ID NO: 72145 - RNA, 19 nt, Artificial Sequence
  Description of Artificial Sequence: Synthetic oligonucleotide
  Antisense strand to SEQ ID NO: 72064
uuccaccgcaagauugcag

SEQ ID NO: 72146 - RNA, 19 nt, Artificial Sequence
  Description of Artificial Sequence: Synthetic oligonucleotide
  Sense strand starting at position 3893 of SEQ ID NO: 898
gaaguuaggccacaaauuc

SEQ ID NO: 72147 - RNA, 19 nt, Artificial Sequence
  Description of Artificial Sequence: Synthetic oligonucleotide
  Antisense strand to SEQ ID NO: 72066
gaauuuguggccuaacuuc

SEQ ID NO: 72148 - RNA, 19 nt, Artificial Sequence
  Description of Artificial Sequence: Synthetic oligonucleotide
  Sense strand starting at position 3850 of SEQ ID NO: 898
gucuguccauuugugaaau

SEQ ID NO: 72149 - RNA, 19 nt, Artificial Sequence
  Description of Artificial Sequence: Synthetic oligonucleotide
  Antisense strand to SEQ ID NO: 72068
auuucacaaauggacagac

SEQ ID NO: 72150 - RNA, 19 nt, Artificial Sequence
  Description of Artificial Sequence: Synthetic oligonucleotide
  Sense strand starting at position 3824 of SEQ ID NO: 898
cuuagaugauuugaacuaa

SEQ ID NO: 72151 - RNA, 19 nt, Artificial Sequence
  Description of Artificial Sequence: Synthetic oligonucleotide
  Antisense strand to SEQ ID NO: 72070
uuaguucaaaucaucuaag

SEQ ID NO: 72152 - RNA, 19 nt, Artificial Sequence
  Description of Artificial Sequence: Synthetic oligonucleotide
  Sense strand starting at position 3811 of SEQ ID NO: 898
gaguaauuaugaucuuaga

SEQ ID NO: 72153 - RNA, 19 nt, Artificial Sequence
  Description of Artificial Sequence: Synthetic oligonucleotide
  Antisense strand to SEQ ID NO: 72072
ucuaagaucauaauuacuc

SEQ ID NO: 72154 - RNA, 19 nt, Artificial Sequence
  Description of Artificial Sequence: Synthetic oligonucleotide
  Sense strand starting at position 3805 of SEQ ID NO: 898
uagguagaguaauuaugau

SEQ ID NO: 72155 - RNA, 19 nt, Artificial Sequence
  Description of Artificial Sequence: Synthetic oligonucleotide
  Antisense strand to SEQ ID NO: 72074
aucauaauuacucuaccua

SEQ ID NO: 72156 - RNA, 19 nt, Artificial Sequence
  Description of Artificial Sequence: Synthetic oligonucleotide
  Sense strand starting at position 3705 of SEQ ID NO: 898
guuaaaugacauggguaau

SEQ ID NO: 72157 - RNA, 19 nt, Artificial Sequence
  Description of Artificial Sequence: Synthetic oligonucleotide
  Antisense strand to SEQ ID NO: 72076
auuacccaugucauuuaac

SEQ ID NO: 72158 - RNA, 19 nt, Artificial Sequence
  Description of Artificial Sequence: Synthetic oligonucleotide
  Sense strand starting at position 3704 of SEQ ID NO: 898
uguuaaaugacauggguaa

SEQ ID NO: 72159 - RNA, 19 nt, Artificial Sequence
  Description of Artificial Sequence: Synthetic oligonucleotide
  Antisense strand to SEQ ID NO: 72078
uuacccaugucauuuaaca

SEQ ID NO: 72160 - RNA, 19 nt, Artificial Sequence
  Description of Artificial Sequence: Synthetic oligonucleotide
  Sense strand starting at position 3666 of SEQ ID NO: 898
uguucugcauuaguuaaau

SEQ ID NO: 72161 - RNA, 19 nt, Artificial Sequence
  Description of Artificial Sequence: Synthetic oligonucleotide
  Antisense strand to SEQ ID NO: 72080
auuuaacuaaugcagaaca

SEQ ID NO: 72162 - RNA, 19 nt, Artificial Sequence
  Description of Artificial Sequence: Synthetic oligonucleotide
  Sense strand starting at position 3661 of SEQ ID NO: 898
aaggcuguucugcauuagu

SEQ ID NO: 72163 - RNA, 19 nt, Artificial Sequence
  Description of Artificial Sequence: Synthetic oligonucleotide
  Antisense strand to SEQ ID NO: 72082
acuaaugcagaacagccuu

SEQ ID NO: 72164 - RNA, 19 nt, Artificial Sequence
  Description of Artificial Sequence: Synthetic oligonucleotide
  Sense strand starting at position 3657 of SEQ ID NO: 898
caggaaggcuguucugcau

SEQ ID NO: 72165 - RNA, 19 nt, Artificial Sequence
  Description of Artificial Sequence: Synthetic oligonucleotide
  Antisense strand to SEQ ID NO: 72084
augcagaacagccuuccug

SEQ ID NO: 72166 - RNA, 19 nt, Artificial Sequence
  Description of Artificial Sequence: Synthetic oligonucleotide
  Sense strand starting at position 3470 of SEQ ID NO: 898
auguuaaguguccaugguu

SEQ ID NO: 72167 - RNA, 19 nt, Artificial Sequence
  Description of Artificial Sequence: Synthetic oligonucleotide
  Antisense strand to SEQ ID NO: 72086
aaccauggacacuuaacau

SEQ ID NO: 72168 - RNA, 19 nt, Artificial Sequence
  Description of Artificial Sequence: Synthetic oligonucleotide
  Sense strand starting at position 3390 of SEQ ID NO: 898
aggucacuuaagugaggaa

SEQ ID NO: 72169 - RNA, 19 nt, Artificial Sequence
  Description of Artificial Sequence: Synthetic oligonucleotide
  Antisense strand to SEQ ID NO: 72088
uuccucacuuaagugaccu

SEQ ID NO: 72170 - RNA, 19 nt, Artificial Sequence
  Description of Artificial Sequence: Synthetic oligonucleotide
  Sense strand starting at position 3384 of SEQ ID NO: 898
uguccaaggucacuuaagu

SEQ ID NO: 72171 - RNA, 19 nt, Artificial Sequence
  Description of Artificial Sequence: Synthetic oligonucleotide
  Antisense strand to SEQ ID NO: 72090
acuuaagugaccuuggaca

SEQ ID NO: 72172 - RNA, 19 nt, Artificial Sequence
  Description of Artificial Sequence: Synthetic oligonucleotide
  Sense strand starting at position 3325 of SEQ ID NO: 898
ugauaaacauuaucccgaa

SEQ ID NO: 72173 - RNA, 19 nt, Artificial Sequence
  Description of Artificial Sequence: Synthetic oligonucleotide
  Antisense strand to SEQ ID NO: 72092
uucgggauaauguuuauca

SEQ ID NO: 72174 - RNA, 19 nt, Artificial Sequence
  Description of Artificial Sequence: Synthetic oligonucleotide
  Sense strand starting at position 3312 of SEQ ID NO: 898
caaagcggcuuagugauaa

SEQ ID NO: 72175 - RNA, 19 nt, Artificial Sequence
  Description of Artificial Sequence: Synthetic oligonucleotide
  Antisense strand to SEQ ID NO: 72094
uuaucacuaagccgcuuug

SEQ ID NO: 72176 - RNA, 19 nt, Artificial Sequence
  Description of Artificial Sequence: Synthetic oligonucleotide
  Sense strand starting at position 3310 of SEQ ID NO: 898
cacaaagcggcuuagugau

SEQ ID NO: 72177 - RNA, 19 nt, Artificial Sequence
  Description of Artificial Sequence: Synthetic oligonucleotide
  Antisense strand to SEQ ID NO: 72096
aucacuaagccgcuuugug

SEQ ID NO: 72178 - RNA, 19 nt, Artificial Sequence
  Description of Artificial Sequence: Synthetic oligonucleotide
  Sense strand starting at position 3234 of SEQ ID NO: 898
gcaaauaucccguagggua

SEQ ID NO: 72179 - RNA, 19 nt, Artificial Sequence
  Description of Artificial Sequence: Synthetic oligonucleotide
  Antisense strand to SEQ ID NO: 72098
uacccuacgggauauuugc

SEQ ID NO: 72180 - RNA, 19 nt, Artificial Sequence
  Description of Artificial Sequence: Synthetic oligonucleotide
  Sense strand starting at position 3135 of SEQ ID NO: 898
cacgacuugucaguugauu

SEQ ID NO: 72181 - RNA, 19 nt, Artificial Sequence
  Description of Artificial Sequence: Synthetic oligonucleotide
  Antisense strand to SEQ ID NO: 72100
aaucaacugacaagucgug

SEQ ID NO: 72182 - RNA, 19 nt, Artificial Sequence
  Description of Artificial Sequence: Synthetic oligonucleotide
  Sense strand starting at position 3123 of SEQ ID NO: 898
ccaaguuauccucacgacu

SEQ ID NO: 72183 - RNA, 19 nt, Artificial Sequence
  Description of Artificial Sequence: Synthetic oligonucleotide
  Antisense strand to SEQ ID NO: 72102
agucgugaggauaacuugg

SEQ ID NO: 72184 - RNA, 19 nt, Artificial Sequence
  Description of Artificial Sequence: Synthetic oligonucleotide
  Sense strand starting at position 3089 of SEQ ID NO: 898
uucucaguagcauaggaaa

SEQ ID NO: 72185 - RNA, 19 nt, Artificial Sequence
  Description of Artificial Sequence: Synthetic oligonucleotide
  Antisense strand to SEQ ID NO: 72104
uuuccuaugcuacugagaa

SEQ ID NO: 72186 - RNA, 19 nt, Artificial Sequence
  Description of Artificial Sequence: Synthetic oligonucleotide
  Sense strand starting at position 3054 of SEQ ID NO: 898
ugguuugggaauuaguaca

SEQ ID NO: 72187 - RNA, 19 nt, Artificial Sequence
  Description of Artificial Sequence: Synthetic oligonucleotide
  Antisense strand to SEQ ID NO: 72106
uguacuaauucccaaacca

SEQ ID NO: 72188 - RNA, 19 nt, Artificial Sequence
  Description of Artificial Sequence: Synthetic oligonucleotide
  Sense strand starting at position 3047 of SEQ ID NO: 898
gcaaacgugguuugggaau

SEQ ID NO: 72189 - RNA, 19 nt, Artificial Sequence
  Description of Artificial Sequence: Synthetic oligonucleotide
  Antisense strand to SEQ ID NO: 72108
auucccaaaccacguuugc

SEQ ID NO: 72190 - RNA, 19 nt, Artificial Sequence
  Description of Artificial Sequence: Synthetic oligonucleotide
  Sense strand starting at position 3006 of SEQ ID NO: 898
uucugcauaguuuagaaga

SEQ ID NO: 72191 - RNA, 19 nt, Artificial Sequence
  Description of Artificial Sequence: Synthetic oligonucleotide
  Antisense strand to SEQ ID NO: 72110
ucuucuaaacuaugcagaa

SEQ ID NO: 72192 - RNA, 19 nt, Artificial Sequence
  Description of Artificial Sequence: Synthetic oligonucleotide
  Sense strand starting at position 2976 of SEQ ID NO: 898
gccgaauauagauagucaa

SEQ ID NO: 72193 - RNA, 19 nt, Artificial Sequence
  Description of Artificial Sequence: Synthetic oligonucleotide
  Antisense strand to SEQ ID NO: 72112
uugacuaucuauauucggc

SEQ ID NO: 72194 - RNA, 19 nt, Artificial Sequence
  Description of Artificial Sequence: Synthetic oligonucleotide
  Sense strand starting at position 2952 of SEQ ID NO: 898
guaggauugcuuuggaaag

SEQ ID NO: 72195 - RNA, 19 nt, Artificial Sequence
  Description of Artificial Sequence: Synthetic oligonucleotide
  Antisense strand to SEQ ID NO: 72114
cuuuccaaagcaauccuac

SEQ ID NO: 72196 - RNA, 19 nt, Artificial Sequence
  Description of Artificial Sequence: Synthetic oligonucleotide
  Sense strand starting at position 2719 of SEQ ID NO: 898
acaacuugauccgcuaaga

SEQ ID NO: 72197 - RNA, 19 nt, Artificial Sequence
  Description of Artificial Sequence: Synthetic oligonucleotide
  Antisense strand to SEQ ID NO: 72116
ucuuagcggaucaaguugu

SEQ ID NO: 72198 - RNA, 19 nt, Artificial Sequence
  Description of Artificial Sequence: Synthetic oligonucleotide
  Sense strand starting at position 1430 of SEQ ID NO: 898
uggugaagcuuagcaacaa

SEQ ID NO: 72199 - RNA, 19 nt, Artificial Sequence
  Description of Artificial Sequence: Synthetic oligonucleotide
  Antisense strand to SEQ ID NO: 72118
uuguugcuaagcuucacca

SEQ ID NO: 72200 - RNA, 19 nt, Artificial Sequence
  Description of Artificial Sequence: Synthetic oligonucleotide
  Sense strand starting at position 1014 of SEQ ID NO: 898
uuaauuaacgcacgacauc

SEQ ID NO: 72201 - RNA, 19 nt, Artificial Sequence
  Description of Artificial Sequence: Synthetic oligonucleotide
  Antisense strand to SEQ ID NO: 72120
gaugucgugcguuaauuaa

SEQ ID NO: 72202 - RNA, 19 nt, Artificial Sequence
  Description of Artificial Sequence: Synthetic oligonucleotide
  Sense strand starting at position 1003 of SEQ ID NO: 898
gcacccaggcuuuaauuaa

SEQ ID NO: 72203 - RNA, 19 nt, Artificial Sequence
  Description of Artificial Sequence: Synthetic oligonucleotide
  Antisense strand to SEQ ID NO: 72122
uuaauuaaagccugggugc

SEQ ID NO: 72204 - RNA, 19 nt, Artificial Sequence
  Description of Artificial Sequence: Synthetic oligonucleotide
  Sense strand starting at position 974 of SEQ ID NO: 898
aggcuucgcagugaaauaa

SEQ ID NO: 72205 - RNA, 19 nt, Artificial Sequence
  Description of Artificial Sequence: Synthetic oligonucleotide
  Antisense strand to SEQ ID NO: 72124
uuauuucacugcgaagccu

SEQ ID NO: 72206 - RNA, 19 nt, Artificial Sequence
  Description of Artificial Sequence: Synthetic oligonucleotide
  Sense strand starting at position 825 of SEQ ID NO: 898
gauggauugcuguaaauau

SEQ ID NO: 72207 - RNA, 19 nt, Artificial Sequence
  Description of Artificial Sequence: Synthetic oligonucleotide
  Antisense strand to SEQ ID NO: 72126
auauuuacagcaauccauc

SEQ ID NO: 72208 - RNA, 19 nt, Artificial Sequence
  Description of Artificial Sequence: Synthetic oligonucleotide
  Sense strand starting at position 822 of SEQ ID NO: 898
guugauggauugcuguaaa

SEQ ID NO: 72209 - RNA, 19 nt, Artificial Sequence
  Description of Artificial Sequence: Synthetic oligonucleotide
  Antisense strand to SEQ ID NO: 72128
uuuacagcaauccaucaac

SEQ ID NO: 72210 - RNA, 19 nt, Artificial Sequence
  Description of Artificial Sequence: Synthetic oligonucleotide
  Sense strand starting at position 685 of SEQ ID NO: 898
uuagaaaugucuguaaaca

SEQ ID NO: 72211 - RNA, 19 nt, Artificial Sequence
  Description of Artificial Sequence: Synthetic oligonucleotide
  Antisense strand to SEQ ID NO: 72130
uguuuacagacauuucuaa

SEQ ID NO: 72212 - RNA, 19 nt, Artificial Sequence
  Description of Artificial Sequence: Synthetic oligonucleotide
  Sense strand starting at position 684 of SEQ ID NO: 898
auuagaaaugucuguaaac

SEQ ID NO: 72213 - RNA, 19 nt, Artificial Sequence
  Description of Artificial Sequence: Synthetic oligonucleotide
  Antisense strand to SEQ ID NO: 72132
guuuacagacauuucuaau

SEQ ID NO: 72214 - RNA, 19 nt, Artificial Sequence
  Description of Artificial Sequence: Synthetic oligonucleotide
  Sense strand starting at position 607 of SEQ ID NO: 898
gccaauucugagcgacaaa

SEQ ID NO: 72215 - RNA, 19 nt, Artificial Sequence
  Description of Artificial Sequence: Synthetic oligonucleotide
  Antisense strand to SEQ ID NO: 72134
uuugucgcucagaauuggc

SEQ ID NO: 72216 - RNA, 19 nt, Artificial Sequence
  Description of Artificial Sequence: Synthetic oligonucleotide
  Sense strand starting at position 606 of SEQ ID NO: 898
ugccaauucugagcgacaa

SEQ ID NO: 72217 - RNA, 19 nt, Artificial Sequence
  Description of Artificial Sequence: Synthetic oligonucleotide
  Antisense strand to SEQ ID NO: 72136
uugucgcucagaauuggca

SEQ ID NO: 72218 - RNA, 19 nt, Artificial Sequence
  Description of Artificial Sequence: Synthetic oligonucleotide
  Sense strand starting at position 523 of SEQ ID NO: 898
gaagauuacgucuacccaa

SEQ ID NO: 72219 - RNA, 19 nt, Artificial Sequence
  Description of Artificial Sequence: Synthetic oligonucleotide
  Antisense strand to SEQ ID NO: 72138
uuggguagacguaaucuuc

SEQ ID NO: 72220 - RNA, 19 nt, Artificial Sequence
  Description of Artificial Sequence: Synthetic oligonucleotide
  Sense strand starting at position 465 of SEQ ID NO: 898
uggaaauuaugaucaguau

SEQ ID NO: 72221 - RNA, 19 nt, Artificial Sequence
  Description of Artificial Sequence: Synthetic oligonucleotide
  Antisense strand to SEQ ID NO: 72140
auacugaucauaauuucca

SEQ ID NO: 72222 - RNA, 19 nt, Artificial Sequence
  Description of Artificial Sequence: Synthetic oligonucleotide
  Sense strand starting at position 189 of SEQ ID NO: 898
aagagagacuuugucccau

SEQ ID NO: 72223 - RNA, 19 nt, Artificial Sequence
  Description of Artificial Sequence: Synthetic oligonucleotide
  Antisense strand to SEQ ID NO: 72142
augggacaaagucucucuu

SEQ ID NO: 72224 - RNA, 19 nt, Artificial Sequence
  Description of Artificial Sequence: Synthetic oligonucleotide
  Sense strand starting at position 97 of SEQ ID NO: 898
guaguuaaguguucaaaug

SEQ ID NO: 72225 - RNA, 19 nt, Artificial Sequence
  Description of Artificial Sequence: Synthetic oligonucleotide
  Antisense strand to SEQ ID NO: 72144
cauuugaacacuuaacuac

SEQ ID NO: 72226 - RNA, 19 nt, Artificial Sequence
  Description of Artificial Sequence: Synthetic oligonucleotide
  Sense strand starting at position 3969 of SEQ ID NO: 899
gaaggcgcucuauaaauau

SEQ ID NO: 72227 - RNA, 19 nt, Artificial Sequence
  Description of Artificial Sequence: Synthetic oligonucleotide
  Antisense strand to SEQ ID NO: 72146
auauuuauagagcgccuuc

SEQ ID NO: 72228 - RNA, 19 nt, Artificial Sequence
  Description of Artificial Sequence: Synthetic oligonucleotide
  Sense strand starting at position 3685 of SEQ ID NO: 899
gugguuuacucccucacua

SEQ ID NO: 72229 - RNA, 19 nt, Artificial Sequence
  Description of Artificial Sequence: Synthetic oligonucleotide
  Antisense strand to SEQ ID NO: 72148
uagugagggaguaaaccac

SEQ ID NO: 72230 - RNA, 19 nt, Artificial Sequence
  Description of Artificial Sequence: Synthetic oligonucleotide
  Sense strand starting at position 3144 of SEQ ID NO: 899
ggauguuugccagacuuaa

SEQ ID NO: 72231 - RNA, 19 nt, Artificial Sequence
  Description of Artificial Sequence: Synthetic oligonucleotide
  Antisense strand to SEQ ID NO: 72150
uuaagucuggcaaacaucc

SEQ ID NO: 72232 - RNA, 19 nt, Artificial Sequence
  Description of Artificial Sequence: Synthetic oligonucleotide
  Sense strand starting at position 3141 of SEQ ID NO: 899
gugggauguuugccagacu

SEQ ID NO: 72233 - RNA, 19 nt, Artificial Sequence
  Description of Artificial Sequence: Synthetic oligonucleotide
  Antisense strand to SEQ ID NO: 72152
agucuggcaaacaucccac

SEQ ID NO: 72234 - RNA, 19 nt, Artificial Sequence
  Description of Artificial Sequence: Synthetic oligonucleotide
  Sense strand starting at position 3124 of SEQ ID NO: 899
cuauucugagagcaugagu

SEQ ID NO: 72235 - RNA, 19 nt, Artificial Sequence
  Description of Artificial Sequence: Synthetic oligonucleotide
  Antisense strand to SEQ ID NO: 72154
acucaugcucucagaauag

SEQ ID NO: 72236 - RNA, 19 nt, Artificial Sequence
  Description of Artificial Sequence: Synthetic oligonucleotide
  Sense strand starting at position 3116 of SEQ ID NO: 899
gucaauugcuauucugaga

SEQ ID NO: 72237 - RNA, 19 nt, Artificial Sequence
  Description of Artificial Sequence: Synthetic oligonucleotide
  Antisense strand to SEQ ID NO: 72156
ucucagaauagcaauugac

SEQ ID NO: 72238 - RNA, 19 nt, Artificial Sequence
  Description of Artificial Sequence: Synthetic oligonucleotide
  Sense strand starting at position 3062 of SEQ ID NO: 899
ccguccaagucuuuauuua

SEQ ID NO: 72239 - RNA, 19 nt, Artificial Sequence
  Description of Artificial Sequence: Synthetic oligonucleotide
  Antisense strand to SEQ ID NO: 72158
uaaauaaagacuuggacgg

SEQ ID NO: 72240 - RNA, 19 nt, Artificial Sequence
  Description of Artificial Sequence: Synthetic oligonucleotide
  Sense strand starting at position 3021 of SEQ ID NO: 899
cagagucaguugguaaaca

SEQ ID NO: 72241 - RNA, 19 nt, Artificial Sequence
  Description of Artificial Sequence: Synthetic oligonucleotide
  Antisense strand to SEQ ID NO: 72160
uguuuaccaacugacucug

SEQ ID NO: 72242 - RNA, 19 nt, Artificial Sequence
  Description of Artificial Sequence: Synthetic oligonucleotide
  Sense strand starting at position 2907 of SEQ ID NO: 899
aggugaagauauucuauua

SEQ ID NO: 72243 - RNA, 19 nt, Artificial Sequence
  Description of Artificial Sequence: Synthetic oligonucleotide
  Antisense strand to SEQ ID NO: 72162
uaauagaauaucuucaccu

SEQ ID NO: 72244 - RNA, 19 nt, Artificial Sequence
  Description of Artificial Sequence: Synthetic oligonucleotide
  Sense strand starting at position 2898 of SEQ ID NO: 899
gcaucuaugaggugaagau

SEQ ID NO: 72245 - RNA, 19 nt, Artificial Sequence
  Description of Artificial Sequence: Synthetic oligonucleotide
  Antisense strand to SEQ ID NO: 72164
aucuucaccucauagaugc

SEQ ID NO: 72246 - RNA, 19 nt, Artificial Sequence
  Description of Artificial Sequence: Synthetic oligonucleotide
  Sense strand starting at position 2472 of SEQ ID NO: 899
guuccucucucaucucaga

SEQ ID NO: 72247 - RNA, 19 nt, Artificial Sequence
  Description of Artificial Sequence: Synthetic oligonucleotide
  Antisense strand to SEQ ID NO: 72166
ucugagaugagagaggaac

SEQ ID NO: 72248 - RNA, 19 nt, Artificial Sequence
  Description of Artificial Sequence: Synthetic oligonucleotide
  Sense strand starting at position 2255 of SEQ ID NO: 899
aggugaugugccuagucuu

SEQ ID NO: 72249 - RNA, 19 nt, Artificial Sequence
  Description of Artificial Sequence: Synthetic oligonucleotide
  Antisense strand to SEQ ID NO: 72168
aagacuaggcacaucaccu

SEQ ID NO: 72250 - RNA, 19 nt, Artificial Sequence
  Description of Artificial Sequence: Synthetic oligonucleotide
  Sense strand starting at position 2196 of SEQ ID NO: 899
aagaacaugugggaguaaa

SEQ ID NO: 72251 - RNA, 19 nt, Artificial Sequence
  Description of Artificial Sequence: Synthetic oligonucleotide
  Antisense strand to SEQ ID NO: 72170
uuuacucccacauguucuu

SEQ ID NO: 72252 - RNA, 19 nt, Artificial Sequence
  Description of Artificial Sequence: Synthetic oligonucleotide
  Sense strand starting at position 2171 of SEQ ID NO: 899
acccaugaguuuggaauuu

SEQ ID NO: 72253 - RNA, 19 nt, Artificial Sequence
  Description of Artificial Sequence: Synthetic oligonucleotide
  Antisense strand to SEQ ID NO: 72172
aaauuccaaacucaugggu

SEQ ID NO: 72254 - RNA, 19 nt, Artificial Sequence
  Description of Artificial Sequence: Synthetic oligonucleotide
  Sense strand starting at position 2170 of SEQ ID NO: 899
gacccaugaguuuggaauu

SEQ ID NO: 72255 - RNA, 19 nt, Artificial Sequence
  Description of Artificial Sequence: Synthetic oligonucleotide
  Antisense strand to SEQ ID NO: 72174
aauuccaaacucauggguc

SEQ ID NO: 72256 - RNA, 19 nt, Artificial Sequence
  Description of Artificial Sequence: Synthetic oligonucleotide
  Sense strand starting at position 2064 of SEQ ID NO: 899
gcgggagguaaaggucaau

SEQ ID NO: 72257 - RNA, 19 nt, Artificial Sequence
  Description of Artificial Sequence: Synthetic oligonucleotide
  Antisense strand to SEQ ID NO: 72176
auugaccuuuaccucccgc

SEQ ID NO: 72258 - RNA, 19 nt, Artificial Sequence
  Description of Artificial Sequence: Synthetic oligonucleotide
  Sense strand starting at position 1803 of SEQ ID NO: 899
cgagucauccugggagaga

SEQ ID NO: 72259 - RNA, 19 nt, Artificial Sequence
  Description of Artificial Sequence: Synthetic oligonucleotide
  Antisense strand to SEQ ID NO: 72178
ucucucccaggaugacucg

SEQ ID NO: 72260 - RNA, 19 nt, Artificial Sequence
  Description of Artificial Sequence: Synthetic oligonucleotide
  Sense strand starting at position 1802 of SEQ ID NO: 899
acgagucauccugggagag

SEQ ID NO: 72261 - RNA, 19 nt, Artificial Sequence
  Description of Artificial Sequence: Synthetic oligonucleotide
  Antisense strand to SEQ ID NO: 72180
cucucccaggaugacucgu

SEQ ID NO: 72262 - RNA, 19 nt, Artificial Sequence
  Description of Artificial Sequence: Synthetic oligonucleotide
  Sense strand starting at position 1705 of SEQ ID NO: 899
ucugauggcucaucuuaga

SEQ ID NO: 72263 - RNA, 19 nt, Artificial Sequence
  Description of Artificial Sequence: Synthetic oligonucleotide
  Antisense strand to SEQ ID NO: 72182
ucuaagaugagccaucaga

SEQ ID NO: 72264 - RNA, 19 nt, Artificial Sequence
  Description of Artificial Sequence: Synthetic oligonucleotide
  Sense strand starting at position 1624 of SEQ ID NO: 899
uuaagauacuugccagaaa

SEQ ID NO: 72265 - RNA, 19 nt, Artificial Sequence
  Description of Artificial Sequence: Synthetic oligonucleotide
  Antisense strand to SEQ ID NO: 72184
uuucuggcaaguaucuuaa

SEQ ID NO: 72266 - RNA, 19 nt, Artificial Sequence
  Description of Artificial Sequence: Synthetic oligonucleotide
  Sense strand starting at position 1588 of SEQ ID NO: 899
guguguggaggaugcaauu

SEQ ID NO: 72267 - RNA, 19 nt, Artificial Sequence
  Description of Artificial Sequence: Synthetic oligonucleotide
  Antisense strand to SEQ ID NO: 72186
aauugcauccuccacacac

SEQ ID NO: 72268 - RNA, 19 nt, Artificial Sequence
  Description of Artificial Sequence: Synthetic oligonucleotide
  Sense strand starting at position 1573 of SEQ ID NO: 899
gaagcuaugacuuacgugu

SEQ ID NO: 72269 - RNA, 19 nt, Artificial Sequence
  Description of Artificial Sequence: Synthetic oligonucleotide
  Antisense strand to SEQ ID NO: 72188
acacguaagucauagcuuc

SEQ ID NO: 72270 - RNA, 19 nt, Artificial Sequence
  Description of Artificial Sequence: Synthetic oligonucleotide
  Sense strand starting at position 1420 of SEQ ID NO: 899
cccuauuauccgggaacug

SEQ ID NO: 72271 - RNA, 19 nt, Artificial Sequence
  Description of Artificial Sequence: Synthetic oligonucleotide
  Antisense strand to SEQ ID NO: 72190
caguucccggauaauaggg

SEQ ID NO: 72272 - RNA, 19 nt, Artificial Sequence
  Description of Artificial Sequence: Synthetic oligonucleotide
  Sense strand starting at position 1406 of SEQ ID NO: 899
aaaggugauccgcacccua

SEQ ID NO: 72273 - RNA, 19 nt, Artificial Sequence
  Description of Artificial Sequence: Synthetic oligonucleotide
  Antisense strand to SEQ ID NO: 72192
uagggugcggaucaccuuu

SEQ ID NO: 72274 - RNA, 19 nt, Artificial Sequence
  Description of Artificial Sequence: Synthetic oligonucleotide
  Sense strand starting at position 1358 of SEQ ID NO: 899
aaaggaucugugugaucuu

SEQ ID NO: 72275 - RNA, 19 nt, Artificial Sequence
  Description of Artificial Sequence: Synthetic oligonucleotide
  Antisense strand to SEQ ID NO: 72194
aagaucacacagauccuuu

SEQ ID NO: 72276 - RNA, 19 nt, Artificial Sequence
  Description of Artificial Sequence: Synthetic oligonucleotide
  Sense strand starting at position 1355 of SEQ ID NO: 899
gauaaaggaucugugugau

SEQ ID NO: 72277 - RNA, 19 nt, Artificial Sequence
  Description of Artificial Sequence: Synthetic oligonucleotide
  Antisense strand to SEQ ID NO: 72196
aucacacagauccuuuauc

SEQ ID NO: 72278 - RNA, 19 nt, Artificial Sequence
  Description of Artificial Sequence: Synthetic oligonucleotide
  Sense strand starting at position 1354 of SEQ ID NO: 899
agauaaaggaucuguguga

SEQ ID NO: 72279 - RNA, 19 nt, Artificial Sequence
  Description of Artificial Sequence: Synthetic oligonucleotide
  Antisense strand to SEQ ID NO: 72198
ucacacagauccuuuaucu

SEQ ID NO: 72280 - RNA, 19 nt, Artificial Sequence
  Description of Artificial Sequence: Synthetic oligonucleotide
  Sense strand starting at position 1327 of SEQ ID NO: 899
uuuccucaucgaggaaaug

SEQ ID NO: 72281 - RNA, 19 nt, Artificial Sequence
  Description of Artificial Sequence: Synthetic oligonucleotide
  Antisense strand to SEQ ID NO: 72200
cauuuccucgaugaggaaa

SEQ ID NO: 72282 - RNA, 19 nt, Artificial Sequence
  Description of Artificial Sequence: Synthetic oligonucleotide
  Sense strand starting at position 1325 of SEQ ID NO: 899
aguuuccucaucgaggaaa

SEQ ID NO: 72283 - RNA, 19 nt, Artificial Sequence
  Description of Artificial Sequence: Synthetic oligonucleotide
  Antisense strand to SEQ ID NO: 72202
uuuccucgaugaggaaacu

SEQ ID NO: 72284 - RNA, 19 nt, Artificial Sequence
  Description of Artificial Sequence: Synthetic oligonucleotide
  Sense strand starting at position 1324 of SEQ ID NO: 899
caguuuccucaucgaggaa

SEQ ID NO: 72285 - RNA, 19 nt, Artificial Sequence
  Description of Artificial Sequence: Synthetic oligonucleotide
  Antisense strand to SEQ ID NO: 72204
uuccucgaugaggaaacug

SEQ ID NO: 72286 - RNA, 19 nt, Artificial Sequence
  Description of Artificial Sequence: Synthetic oligonucleotide
  Sense strand starting at position 1323 of SEQ ID NO: 899
ucaguuuccucaucgagga

SEQ ID NO: 72287 - RNA, 19 nt, Artificial Sequence
  Description of Artificial Sequence: Synthetic oligonucleotide
  Antisense strand to SEQ ID NO: 72206
uccucgaugaggaaacuga

SEQ ID NO: 72288 - RNA, 19 nt, Artificial Sequence
  Description of Artificial Sequence: Synthetic oligonucleotide
  Sense strand starting at position 1145 of SEQ ID NO: 899
cgaaucacuucugcucaaa

SEQ ID NO: 72289 - RNA, 19 nt, Artificial Sequence
  Description of Artificial Sequence: Synthetic oligonucleotide
  Antisense strand to SEQ ID NO: 72208
uuugagcagaagugauucg

SEQ ID NO: 72290 - RNA, 19 nt, Artificial Sequence
  Description of Artificial Sequence: Synthetic oligonucleotide
  Sense strand starting at position 1091 of SEQ ID NO: 899
acuugaaguuagccaaaga

SEQ ID NO: 72291 - RNA, 19 nt, Artificial Sequence
  Description of Artificial Sequence: Synthetic oligonucleotide
  Antisense strand to SEQ ID NO: 72210
ucuuuggcuaacuucaagu

SEQ ID NO: 72292 - RNA, 19 nt, Artificial Sequence
  Description of Artificial Sequence: Synthetic oligonucleotide
  Sense strand starting at position 1054 of SEQ ID NO: 899
aggaaugggcugugaaaua

SEQ ID NO: 72293 - RNA, 19 nt, Artificial Sequence
  Description of Artificial Sequence: Synthetic oligonucleotide
  Antisense strand to SEQ ID NO: 72212
uauuucacagcccauuccu

SEQ ID NO: 72294 - RNA, 19 nt, Artificial Sequence
  Description of Artificial Sequence: Synthetic oligonucleotide
  Sense strand starting at position 1052 of SEQ ID NO: 899
agaggaaugggcugugaaa

SEQ ID NO: 72295 - RNA, 19 nt, Artificial Sequence
  Description of Artificial Sequence: Synthetic oligonucleotide
  Antisense strand to SEQ ID NO: 72214
uuucacagcccauuccucu

SEQ ID NO: 72296 - RNA, 19 nt, Artificial Sequence
  Description of Artificial Sequence: Synthetic oligonucleotide
  Sense strand starting at position 874 of SEQ ID NO: 899
cccagagaagcccaguuaa

SEQ ID NO: 72297 - RNA, 19 nt, Artificial Sequence
  Description of Artificial Sequence: Synthetic oligonucleotide
  Antisense strand to SEQ ID NO: 72216
uuaacugggcuucucuggg

SEQ ID NO: 72298 - RNA, 19 nt, Artificial Sequence
  Description of Artificial Sequence: Synthetic oligonucleotide
  Sense strand starting at position 593 of SEQ ID NO: 899
agugaagacugagaugaua

SEQ ID NO: 72299 - RNA, 19 nt, Artificial Sequence
  Description of Artificial Sequence: Synthetic oligonucleotide
  Antisense strand to SEQ ID NO: 72218
uaucaucucagucuucacu

SEQ ID NO: 72300 - RNA, 19 nt, Artificial Sequence
  Description of Artificial Sequence: Synthetic oligonucleotide
  Sense strand starting at position 509 of SEQ ID NO: 899
ugauuagagccuuagcauc

SEQ ID NO: 72301 - RNA, 19 nt, Artificial Sequence
  Description of Artificial Sequence: Synthetic oligonucleotide
  Antisense strand to SEQ ID NO: 72220
gaugcuaaggcucuaauca

SEQ ID NO: 72302 - RNA, 19 nt, Artificial Sequence
  Description of Artificial Sequence: Synthetic oligonucleotide
  Sense strand starting at position 113 of SEQ ID NO: 899
cuaacuucgugaucuaauu

SEQ ID NO: 72303 - RNA, 19 nt, Artificial Sequence
  Description of Artificial Sequence: Synthetic oligonucleotide
  Antisense strand to SEQ ID NO: 72222
aauuagaucacgaaguuag

SEQ ID NO: 72304 - RNA, 19 nt, Artificial Sequence
  Description of Artificial Sequence: Synthetic oligonucleotide
  Sense strand starting at position 111 of SEQ ID NO: 899
gccuaacuucgugaucuaa

SEQ ID NO: 72305 - RNA, 19 nt, Artificial Sequence
  Description of Artificial Sequence: Synthetic oligonucleotide
  Antisense strand to SEQ ID NO: 72224
uuagaucacgaaguuaggc

SEQ ID NO: 72306 - RNA, 19 nt, Artificial Sequence
  Description of Artificial Sequence: Synthetic oligonucleotide
  Sense strand starting at position 3688 of SEQ ID NO: 900
gagggcuucuuauaaauag

SEQ ID NO: 72307 - RNA, 19 nt, Artificial Sequence
  Description of Artificial Sequence: Synthetic oligonucleotide
  Antisense strand to SEQ ID NO: 72226
cuauuuauaagaagcccuc

SEQ ID NO: 72308 - RNA, 19 nt, Artificial Sequence
  Description of Artificial Sequence: Synthetic oligonucleotide
  Sense strand starting at position 3636 of SEQ ID NO: 900
ggguucguuucccagaucu

SEQ ID NO: 72309 - RNA, 19 nt, Artificial Sequence
  Description of Artificial Sequence: Synthetic oligonucleotide
  Antisense strand to SEQ ID NO: 72228
agaucugggaaacgaaccc

SEQ ID NO: 72310 - RNA, 19 nt, Artificial Sequence
  Description of Artificial Sequence: Synthetic oligonucleotide
  Sense strand starting at position 3506 of SEQ ID NO: 900
ccgggacucuuggccuaga

SEQ ID NO: 72311 - RNA, 19 nt, Artificial Sequence
  Description of Artificial Sequence: Synthetic oligonucleotide
  Antisense strand to SEQ ID NO: 72230
ucuaggccaagagucccgg

SEQ ID NO: 72312 - RNA, 19 nt, Artificial Sequence
  Description of Artificial Sequence: Synthetic oligonucleotide
  Sense strand starting at position 3498 of SEQ ID NO: 900
gaaugaugccgggacucuu

SEQ ID NO: 72313 - RNA, 19 nt, Artificial Sequence
  Description of Artificial Sequence: Synthetic oligonucleotide
  Antisense strand to SEQ ID NO: 72232
aagagucccggcaucauuc

SEQ ID NO: 72314 - RNA, 19 nt, Artificial Sequence
  Description of Artificial Sequence: Synthetic oligonucleotide
  Sense strand starting at position 3178 of SEQ ID NO: 900
gugggagcgucuggaacua

SEQ ID NO: 72315 - RNA, 19 nt, Artificial Sequence
  Description of Artificial Sequence: Synthetic oligonucleotide
  Antisense strand to SEQ ID NO: 72234
uaguuccagacgcucccac

SEQ ID NO: 72316 - RNA, 19 nt, Artificial Sequence
  Description of Artificial Sequence: Synthetic oligonucleotide
  Sense strand starting at position 3158 of SEQ ID NO: 900
ucccgaugguuccauuaga

SEQ ID NO: 72317 - RNA, 19 nt, Artificial Sequence
  Description of Artificial Sequence: Synthetic oligonucleotide
  Antisense strand to SEQ ID NO: 72236
ucuaauggaaccaucggga

SEQ ID NO: 72318 - RNA, 19 nt, Artificial Sequence
  Description of Artificial Sequence: Synthetic oligonucleotide
  Sense strand starting at position 3111 of SEQ ID NO: 900
ggaggagauucugaccuga

SEQ ID NO: 72319 - RNA, 19 nt, Artificial Sequence
  Description of Artificial Sequence: Synthetic oligonucleotide
  Antisense strand to SEQ ID NO: 72238
ucaggucagaaucuccucc

SEQ ID NO: 72320 - RNA, 19 nt, Artificial Sequence
  Description of Artificial Sequence: Synthetic oligonucleotide
  Sense strand starting at position 2981 of SEQ ID NO: 900
acagauguucgccaccacu

SEQ ID NO: 72321 - RNA, 19 nt, Artificial Sequence
  Description of Artificial Sequence: Synthetic oligonucleotide
  Antisense strand to SEQ ID NO: 72240
agugguggcgaacaucugu

SEQ ID NO: 72322 - RNA, 19 nt, Artificial Sequence
  Description of Artificial Sequence: Synthetic oligonucleotide
  Sense strand starting at position 2746 of SEQ ID NO: 900
ccaccauuaucaggcagua

SEQ ID NO: 72323 - RNA, 19 nt, Artificial Sequence
  Description of Artificial Sequence: Synthetic oligonucleotide
  Antisense strand to SEQ ID NO: 72242
uacugccugauaauggugg

SEQ ID NO: 72324 - RNA, 19 nt, Artificial Sequence
  Description of Artificial Sequence: Synthetic oligonucleotide
  Sense strand starting at position 2665 of SEQ ID NO: 900
gcuucucuguagggugaga

SEQ ID NO: 72325 - RNA, 19 nt, Artificial Sequence
  Description of Artificial Sequence: Synthetic oligonucleotide
  Antisense strand to SEQ ID NO: 72244
ucucacccuacagagaagc

SEQ ID NO: 72326 - RNA, 19 nt, Artificial Sequence
  Description of Artificial Sequence: Synthetic oligonucleotide
  Sense strand starting at position 2663 of SEQ ID NO: 900
gggcuucucuguaggguga

SEQ ID NO: 72327 - RNA, 19 nt, Artificial Sequence
  Description of Artificial Sequence: Synthetic oligonucleotide
  Antisense strand to SEQ ID NO: 72246
ucacccuacagagaagccc

SEQ ID NO: 72328 - RNA, 19 nt, Artificial Sequence
  Description of Artificial Sequence: Synthetic oligonucleotide
  Sense strand starting at position 2630 of SEQ ID NO: 900
agacauugcuaagaaagac

SEQ ID NO: 72329 - RNA, 19 nt, Artificial Sequence
  Description of Artificial Sequence: Synthetic oligonucleotide
  Antisense strand to SEQ ID NO: 72248
gucuuucuuagcaaugucu

SEQ ID NO: 72330 - RNA, 19 nt, Artificial Sequence
  Description of Artificial Sequence: Synthetic oligonucleotide
  Sense strand starting at position 2627 of SEQ ID NO: 900
cuaagacauugcuaagaaa

SEQ ID NO: 72331 - RNA, 19 nt, Artificial Sequence
  Description of Artificial Sequence: Synthetic oligonucleotide
  Antisense strand to SEQ ID NO: 72250
uuucuuagcaaugucuuag

SEQ ID NO: 72332 - RNA, 19 nt, Artificial Sequence
  Description of Artificial Sequence: Synthetic oligonucleotide
  Sense strand starting at position 2602 of SEQ ID NO: 900
ccguguggcaaauagaaga

SEQ ID NO: 72333 - RNA, 19 nt, Artificial Sequence
  Description of Artificial Sequence: Synthetic oligonucleotide
  Antisense strand to SEQ ID NO: 72252
ucuucuauuugccacacgg

SEQ ID NO: 72334 - RNA, 19 nt, Artificial Sequence
  Description of Artificial Sequence: Synthetic oligonucleotide
  Sense strand starting at position 2569 of SEQ ID NO: 900
gcacuugggugcuuaguaa

SEQ ID NO: 72335 - RNA, 19 nt, Artificial Sequence
  Description of Artificial Sequence: Synthetic oligonucleotide
  Antisense strand to SEQ ID NO: 72254
uuacuaagcacccaagugc

SEQ ID NO: 72336 - RNA, 19 nt, Artificial Sequence
  Description of Artificial Sequence: Synthetic oligonucleotide
  Sense strand starting at position 2497 of SEQ ID NO: 900
gugugacccugaguucagu

SEQ ID NO: 72337 - RNA, 19 nt, Artificial Sequence
  Description of Artificial Sequence: Synthetic oligonucleotide
  Antisense strand to SEQ ID NO: 72256
acugaacucagggucacac

SEQ ID NO: 72338 - RNA, 19 nt, Artificial Sequence
  Description of Artificial Sequence: Synthetic oligonucleotide
  Sense strand starting at position 2409 of SEQ ID NO: 900
uauccagaguagggauuua

SEQ ID NO: 72339 - RNA, 19 nt, Artificial Sequence
  Description of Artificial Sequence: Synthetic oligonucleotide
  Antisense strand to SEQ ID NO: 72258
uaaaucccuacucuggaua

SEQ ID NO: 72340 - RNA, 19 nt, Artificial Sequence
  Description of Artificial Sequence: Synthetic oligonucleotide
  Sense strand starting at position 1457 of SEQ ID NO: 900
gccaaucaaugccaaagau

SEQ ID NO: 72341 - RNA, 19 nt, Artificial Sequence
  Description of Artificial Sequence: Synthetic oligonucleotide
  Antisense strand to SEQ ID NO: 72260
aucuuuggcauugauuggc

SEQ ID NO: 72342 - RNA, 19 nt, Artificial Sequence
  Description of Artificial Sequence: Synthetic oligonucleotide
  Sense strand starting at position 1431 of SEQ ID NO: 900
cgggaaacgcuaugugaaa

SEQ ID NO: 72343 - RNA, 19 nt, Artificial Sequence
  Description of Artificial Sequence: Synthetic oligonucleotide
  Antisense strand to SEQ ID NO: 72262
uuucacauagcguuucccg

SEQ ID NO: 72344 - RNA, 19 nt, Artificial Sequence
  Description of Artificial Sequence: Synthetic oligonucleotide
  Sense strand starting at position 1338 of SEQ ID NO: 900
cucacuucuggcuaagcau

SEQ ID NO: 72345 - RNA, 19 nt, Artificial Sequence
  Description of Artificial Sequence: Synthetic oligonucleotide
  Antisense strand to SEQ ID NO: 72264
augcuuagccagaagugag

SEQ ID NO: 72346 - RNA, 19 nt, Artificial Sequence
  Description of Artificial Sequence: Synthetic oligonucleotide
  Sense strand starting at position 1334 of SEQ ID NO: 900
aguucucacuucuggcuaa

SEQ ID NO: 72347 - RNA, 19 nt, Artificial Sequence
  Description of Artificial Sequence: Synthetic oligonucleotide
  Antisense strand to SEQ ID NO: 72266
uuagccagaagugagaacu

SEQ ID NO: 72348 - RNA, 19 nt, Artificial Sequence
  Description of Artificial Sequence: Synthetic oligonucleotide
  Sense strand starting at position 1317 of SEQ ID NO: 900
ggacacuucuuuccagaag

SEQ ID NO: 72349 - RNA, 19 nt, Artificial Sequence
  Description of Artificial Sequence: Synthetic oligonucleotide
  Antisense strand to SEQ ID NO: 72268
cuucuggaaagaagugucc

SEQ ID NO: 72350 - RNA, 19 nt, Artificial Sequence
  Description of Artificial Sequence: Synthetic oligonucleotide
  Sense strand starting at position 477 of SEQ ID NO: 900
cuugcuagcuucuugaacu

SEQ ID NO: 72351 - RNA, 19 nt, Artificial Sequence
  Description of Artificial Sequence: Synthetic oligonucleotide
  Antisense strand to SEQ ID NO: 72270
aguucaagaagcuagcaag

SEQ ID NO: 72352 - RNA, 19 nt, Artificial Sequence
  Description of Artificial Sequence: Synthetic oligonucleotide
  Sense strand starting at position 424 of SEQ ID NO: 900
ccagaaauguuaguuucua

SEQ ID NO: 72353 - RNA, 19 nt, Artificial Sequence
  Description of Artificial Sequence: Synthetic oligonucleotide
  Antisense strand to SEQ ID NO: 72272
uagaaacuaacauuucugg

SEQ ID NO: 72354 - RNA, 19 nt, Artificial Sequence
  Description of Artificial Sequence: Synthetic oligonucleotide
  Sense strand starting at position 139 of SEQ ID NO: 900
ggagaagucuagcuuuguc

SEQ ID NO: 72355 - RNA, 19 nt, Artificial Sequence
  Description of Artificial Sequence: Synthetic oligonucleotide
  Antisense strand to SEQ ID NO: 72274
gacaaagcuagacuucucc

SEQ ID NO: 72356 - RNA, 19 nt, Artificial Sequence
  Description of Artificial Sequence: Synthetic oligonucleotide
  Sense strand starting at position 136 of SEQ ID NO: 900
uaaggagaagucuagcuuu

SEQ ID NO: 72357 - RNA, 19 nt, Artificial Sequence
  Description of Artificial Sequence: Synthetic oligonucleotide
  Antisense strand to SEQ ID NO: 72276
aaagcuagacuucuccuua

SEQ ID NO: 72358 - RNA, 19 nt, Artificial Sequence
  Description of Artificial Sequence: Synthetic oligonucleotide
  Sense strand starting at position 49 of SEQ ID NO: 900
augggaagcauguaaggua

SEQ ID NO: 72359 - RNA, 19 nt, Artificial Sequence
  Description of Artificial Sequence: Synthetic oligonucleotide
  Antisense strand to SEQ ID NO: 72278
uaccuuacaugcuucccau

SEQ ID NO: 72360 - RNA, 19 nt, Artificial Sequence
  Description of Artificial Sequence: Synthetic oligonucleotide
  Sense strand starting at position 3916 of SEQ ID NO: 901
aguagaauagaaugccaaa

SEQ ID NO: 72361 - RNA, 19 nt, Artificial Sequence
  Description of Artificial Sequence: Synthetic oligonucleotide
  Antisense strand to SEQ ID NO: 72280
uuuggcauucuauucuacu

SEQ ID NO: 72362 - RNA, 19 nt, Artificial Sequence
  Description of Artificial Sequence: Synthetic oligonucleotide
  Sense strand starting at position 3880 of SEQ ID NO: 901
augaccuagucucuuagaa

SEQ ID NO: 72363 - RNA, 19 nt, Artificial Sequence
  Description of Artificial Sequence: Synthetic oligonucleotide
  Antisense strand to SEQ ID NO: 72282
uucuaagagacuaggucau

SEQ ID NO: 72364 - RNA, 19 nt, Artificial Sequence
  Description of Artificial Sequence: Synthetic oligonucleotide
  Sense strand starting at position 3849 of SEQ ID NO: 901
aagagaaaugucgggucau

SEQ ID NO: 72365 - RNA, 19 nt, Artificial Sequence
  Description of Artificial Sequence: Synthetic oligonucleotide
  Antisense strand to SEQ ID NO: 72284
augacccgacauuucucuu

SEQ ID NO: 72366 - RNA, 19 nt, Artificial Sequence
  Description of Artificial Sequence: Synthetic oligonucleotide
  Sense strand starting at position 3812 of SEQ ID NO: 901
gguacccauugagcaauau

SEQ ID NO: 72367 - RNA, 19 nt, Artificial Sequence
  Description of Artificial Sequence: Synthetic oligonucleotide
  Antisense strand to SEQ ID NO: 72286
auauugcucaauggguacc

SEQ ID NO: 72368 - RNA, 19 nt, Artificial Sequence
  Description of Artificial Sequence: Synthetic oligonucleotide
  Sense strand starting at position 3810 of SEQ ID NO: 901
aggguacccauugagcaau

SEQ ID NO: 72369 - RNA, 19 nt, Artificial Sequence
  Description of Artificial Sequence: Synthetic oligonucleotide
  Antisense strand to SEQ ID NO: 72288
auugcucaauggguacccu

SEQ ID NO: 72370 - RNA, 19 nt, Artificial Sequence
  Description of Artificial Sequence: Synthetic oligonucleotide
  Sense strand starting at position 3809 of SEQ ID NO: 901
uaggguacccauugagcaa

SEQ ID NO: 72371 - RNA, 19 nt, Artificial Sequence
  Description of Artificial Sequence: Synthetic oligonucleotide
  Antisense strand to SEQ ID NO: 72290
uugcucaauggguacccua

SEQ ID NO: 72372 - RNA, 19 nt, Artificial Sequence
  Description of Artificial Sequence: Synthetic oligonucleotide
  Sense strand starting at position 3759 of SEQ ID NO: 901
auguuucaggaugagguua

SEQ ID NO: 72373 - RNA, 19 nt, Artificial Sequence
  Description of Artificial Sequence: Synthetic oligonucleotide
  Antisense strand to SEQ ID NO: 72292
uaaccucauccugaaacau

SEQ ID NO: 72374 - RNA, 19 nt, Artificial Sequence
  Description of Artificial Sequence: Synthetic oligonucleotide
  Sense strand starting at position 3751 of SEQ ID NO: 901
cuuggagaauguuucagga

SEQ ID NO: 72375 - RNA, 19 nt, Artificial Sequence
  Description of Artificial Sequence: Synthetic oligonucleotide
  Antisense strand to SEQ ID NO: 72294
uccugaaacauucuccaag

SEQ ID NO: 72376 - RNA, 19 nt, Artificial Sequence
  Description of Artificial Sequence: Synthetic oligonucleotide
  Sense strand starting at position 3541 of SEQ ID NO: 901
ugaugauugcacugaguua

SEQ ID NO: 72377 - RNA, 19 nt, Artificial Sequence
  Description of Artificial Sequence: Synthetic oligonucleotide
  Antisense strand to SEQ ID NO: 72296
uaacucagugcaaucauca

SEQ ID NO: 72378 - RNA, 19 nt, Artificial Sequence
  Description of Artificial Sequence: Synthetic oligonucleotide
  Sense strand starting at position 3533 of SEQ ID NO: 901
uuuaaaucugaugauugca

SEQ ID NO: 72379 - RNA, 19 nt, Artificial Sequence
  Description of Artificial Sequence: Synthetic oligonucleotide
  Antisense strand to SEQ ID NO: 72298
ugcaaucaucagauuuaaa

SEQ ID NO: 72380 - RNA, 19 nt, Artificial Sequence
  Description of Artificial Sequence: Synthetic oligonucleotide
  Sense strand starting at position 3425 of SEQ ID NO: 901
agaaguaagugaguuaaua

SEQ ID NO: 72381 - RNA, 19 nt, Artificial Sequence
  Description of Artificial Sequence: Synthetic oligonucleotide
  Antisense strand to SEQ ID NO: 72300
uauuaacucacuuacuucu

SEQ ID NO: 72382 - RNA, 19 nt, Artificial Sequence
  Description of Artificial Sequence: Synthetic oligonucleotide
  Sense strand starting at position 3422 of SEQ ID NO: 901
augagaaguaagugaguua

SEQ ID NO: 72383 - RNA, 19 nt, Artificial Sequence
  Description of Artificial Sequence: Synthetic oligonucleotide
  Antisense strand to SEQ ID NO: 72302
uaacucacuuacuucucau

SEQ ID NO: 72384 - RNA, 19 nt, Artificial Sequence
  Description of Artificial Sequence: Synthetic oligonucleotide
  Sense strand starting at position 3036 of SEQ ID NO: 901
gcuauuuauuuggagggua

SEQ ID NO: 72385 - RNA, 19 nt, Artificial Sequence
  Description of Artificial Sequence: Synthetic oligonucleotide
  Antisense strand to SEQ ID NO: 72304
uacccuccaaauaaauagc

SEQ ID NO: 72386 - RNA, 19 nt, Artificial Sequence
  Description of Artificial Sequence: Synthetic oligonucleotide
  Sense strand starting at position 3035 of SEQ ID NO: 901
ggcuauuuauuuggagggu

SEQ ID NO: 72387 - RNA, 19 nt, Artificial Sequence
  Description of Artificial Sequence: Synthetic oligonucleotide
  Antisense strand to SEQ ID NO: 72306
acccuccaaauaaauagcc

SEQ ID NO: 72388 - RNA, 19 nt, Artificial Sequence
  Description of Artificial Sequence: Synthetic oligonucleotide
  Sense strand starting at position 2966 of SEQ ID NO: 901
ccuguaguuagagagcaaa

SEQ ID NO: 72389 - RNA, 19 nt, Artificial Sequence
  Description of Artificial Sequence: Synthetic oligonucleotide
  Antisense strand to SEQ ID NO: 72308
uuugcucucuaacuacagg

SEQ ID NO: 72390 - RNA, 19 nt, Artificial Sequence
  Description of Artificial Sequence: Synthetic oligonucleotide
  Sense strand starting at position 2961 of SEQ ID NO: 901
uagaaccuguaguuagaga

SEQ ID NO: 72391 - RNA, 19 nt, Artificial Sequence
  Description of Artificial Sequence: Synthetic oligonucleotide
  Antisense strand to SEQ ID NO: 72310
ucucuaacuacagguucua

SEQ ID NO: 72392 - RNA, 19 nt, Artificial Sequence
  Description of Artificial Sequence: Synthetic oligonucleotide
  Sense strand starting at position 2920 of SEQ ID NO: 901
agcuguaccgaugaccaua

SEQ ID NO: 72393 - RNA, 19 nt, Artificial Sequence
  Description of Artificial Sequence: Synthetic oligonucleotide
  Antisense strand to SEQ ID NO: 72312
uauggucaucgguacagcu

SEQ ID NO: 72394 - RNA, 19 nt, Artificial Sequence
  Description of Artificial Sequence: Synthetic oligonucleotide
  Sense strand starting at position 2710 of SEQ ID NO: 901
gugugugaugcgcuuacga

SEQ ID NO: 72395 - RNA, 19 nt, Artificial Sequence
  Description of Artificial Sequence: Synthetic oligonucleotide
  Antisense strand to SEQ ID NO: 72314
ucguaagcgcaucacacac

SEQ ID NO: 72396 - RNA, 19 nt, Artificial Sequence
  Description of Artificial Sequence: Synthetic oligonucleotide
  Sense strand starting at position 2630 of SEQ ID NO: 901
gucacuaauuuguccaggu

SEQ ID NO: 72397 - RNA, 19 nt, Artificial Sequence
  Description of Artificial Sequence: Synthetic oligonucleotide
  Antisense strand to SEQ ID NO: 72316
accuggacaaauuagugac

SEQ ID NO: 72398 - RNA, 19 nt, Artificial Sequence
  Description of Artificial Sequence: Synthetic oligonucleotide
  Sense strand starting at position 2476 of SEQ ID NO: 901
ucuagauuaauaugggagu

SEQ ID NO: 72399 - RNA, 19 nt, Artificial Sequence
  Description of Artificial Sequence: Synthetic oligonucleotide
  Antisense strand to SEQ ID NO: 72318
acucccauauuaaucuaga

SEQ ID NO: 72400 - RNA, 19 nt, Artificial Sequence
  Description of Artificial Sequence: Synthetic oligonucleotide
  Sense strand starting at position 2463 of SEQ ID NO: 901
ggaaguaauuaugucuaga

SEQ ID NO: 72401 - RNA, 19 nt, Artificial Sequence
  Description of Artificial Sequence: Synthetic oligonucleotide
  Antisense strand to SEQ ID NO: 72320
ucuagacauaauuacuucc

SEQ ID NO: 72402 - RNA, 19 nt, Artificial Sequence
  Description of Artificial Sequence: Synthetic oligonucleotide
  Sense strand starting at position 2227 of SEQ ID NO: 901
cucaucacagauuguuaga

SEQ ID NO: 72403 - RNA, 19 nt, Artificial Sequence
  Description of Artificial Sequence: Synthetic oligonucleotide
  Antisense strand to SEQ ID NO: 72322
ucuaacaaucugugaugag

SEQ ID NO: 72404 - RNA, 19 nt, Artificial Sequence
  Description of Artificial Sequence: Synthetic oligonucleotide
  Sense strand starting at position 2069 of SEQ ID NO: 901
gagcaagguugacuuugaa

SEQ ID NO: 72405 - RNA, 19 nt, Artificial Sequence
  Description of Artificial Sequence: Synthetic oligonucleotide
  Antisense strand to SEQ ID NO: 72324
uucaaagucaaccuugcuc

SEQ ID NO: 72406 - RNA, 19 nt, Artificial Sequence
  Description of Artificial Sequence: Synthetic oligonucleotide
  Sense strand starting at position 2038 of SEQ ID NO: 901
ccagcuuagcaguaaauaa

SEQ ID NO: 72407 - RNA, 19 nt, Artificial Sequence
  Description of Artificial Sequence: Synthetic oligonucleotide
  Antisense strand to SEQ ID NO: 72326
uuauuuacugcuaagcugg

SEQ ID NO: 72408 - RNA, 19 nt, Artificial Sequence
  Description of Artificial Sequence: Synthetic oligonucleotide
  Sense strand starting at position 1744 of SEQ ID NO: 901
ggaccaucuuugccaaggu

SEQ ID NO: 72409 - RNA, 19 nt, Artificial Sequence
  Description of Artificial Sequence: Synthetic oligonucleotide
  Antisense strand to SEQ ID NO: 72328
accuuggcaaagauggucc

SEQ ID NO: 72410 - RNA, 19 nt, Artificial Sequence
  Description of Artificial Sequence: Synthetic oligonucleotide
  Sense strand starting at position 1502 of SEQ ID NO: 901
ggaagcaguggucagaaua

SEQ ID NO: 72411 - RNA, 19 nt, Artificial Sequence
  Description of Artificial Sequence: Synthetic oligonucleotide
  Antisense strand to SEQ ID NO: 72330
uauucugaccacugcuucc

SEQ ID NO: 72412 - RNA, 19 nt, Artificial Sequence
  Description of Artificial Sequence: Synthetic oligonucleotide
  Sense strand starting at position 1420 of SEQ ID NO: 901
gaacuacauuguuugagac

SEQ ID NO: 72413 - RNA, 19 nt, Artificial Sequence
  Description of Artificial Sequence: Synthetic oligonucleotide
  Antisense strand to SEQ ID NO: 72332
gucucaaacaauguaguuc

SEQ ID NO: 72414 - RNA, 19 nt, Artificial Sequence
  Description of Artificial Sequence: Synthetic oligonucleotide
  Sense strand starting at position 1419 of SEQ ID NO: 901
ggaacuacauuguuugaga

SEQ ID NO: 72415 - RNA, 19 nt, Artificial Sequence
  Description of Artificial Sequence: Synthetic oligonucleotide
  Antisense strand to SEQ ID NO: 72334
ucucaaacaauguaguucc

SEQ ID NO: 72416 - RNA, 19 nt, Artificial Sequence
  Description of Artificial Sequence: Synthetic oligonucleotide
  Sense strand starting at position 1325 of SEQ ID NO: 901
cagguugaucuguagauuc

SEQ ID NO: 72417 - RNA, 19 nt, Artificial Sequence
  Description of Artificial Sequence: Synthetic oligonucleotide
  Antisense strand to SEQ ID NO: 72336
gaaucuacagaucaaccug

SEQ ID NO: 72418 - RNA, 19 nt, Artificial Sequence
  Description of Artificial Sequence: Synthetic oligonucleotide
  Sense strand starting at position 1129 of SEQ ID NO: 901
guuauuacugucuaucuca

SEQ ID NO: 72419 - RNA, 19 nt, Artificial Sequence
  Description of Artificial Sequence: Synthetic oligonucleotide
  Antisense strand to SEQ ID NO: 72338
ugagauagacaguaauaac

SEQ ID NO: 72420 - RNA, 19 nt, Artificial Sequence
  Description of Artificial Sequence: Synthetic oligonucleotide
  Sense strand starting at position 1022 of SEQ ID NO: 901
cugggaauuuggcaauauu

SEQ ID NO: 72421 - RNA, 19 nt, Artificial Sequence
  Description of Artificial Sequence: Synthetic oligonucleotide
  Antisense strand to SEQ ID NO: 72340
aauauugccaaauucccag

SEQ ID NO: 72422 - RNA, 19 nt, Artificial Sequence
  Description of Artificial Sequence: Synthetic oligonucleotide
  Sense strand starting at position 1014 of SEQ ID NO: 901
agaguuaccugggaauuug

SEQ ID NO: 72423 - RNA, 19 nt, Artificial Sequence
  Description of Artificial Sequence: Synthetic oligonucleotide
  Antisense strand to SEQ ID NO: 72342
caaauucccagguaacucu

SEQ ID NO: 72424 - RNA, 19 nt, Artificial Sequence
  Description of Artificial Sequence: Synthetic oligonucleotide
  Sense strand starting at position 975 of SEQ ID NO: 901
ugauacgauuuagaguaca

SEQ ID NO: 72425 - RNA, 19 nt, Artificial Sequence
  Description of Artificial Sequence: Synthetic oligonucleotide
  Antisense strand to SEQ ID NO: 72344
uguacucuaaaucguauca

SEQ ID NO: 72426 - RNA, 19 nt, Artificial Sequence
  Description of Artificial Sequence: Synthetic oligonucleotide
  Sense strand starting at position 792 of SEQ ID NO: 901
guguuaucucacuaaguug

SEQ ID NO: 72427 - RNA, 19 nt, Artificial Sequence
  Description of Artificial Sequence: Synthetic oligonucleotide
  Antisense strand to SEQ ID NO: 72346
caacuuagugagauaacac

SEQ ID NO: 72428 - RNA, 19 nt, Artificial Sequence
  Description of Artificial Sequence: Synthetic oligonucleotide
  Sense strand starting at position 758 of SEQ ID NO: 901
gcugauauuguguaaggaa

SEQ ID NO: 72429 - RNA, 19 nt, Artificial Sequence
  Description of Artificial Sequence: Synthetic oligonucleotide
  Antisense strand to SEQ ID NO: 72348
uuccuuacacaauaucagc

SEQ ID NO: 72430 - RNA, 19 nt, Artificial Sequence
  Description of Artificial Sequence: Synthetic oligonucleotide
  Sense strand starting at position 757 of SEQ ID NO: 901
agcugauauuguguaagga

SEQ ID NO: 72431 - RNA, 19 nt, Artificial Sequence
  Description of Artificial Sequence: Synthetic oligonucleotide
  Antisense strand to SEQ ID NO: 72350
uccuuacacaauaucagcu

SEQ ID NO: 72432 - RNA, 19 nt, Artificial Sequence
  Description of Artificial Sequence: Synthetic oligonucleotide
  Sense strand starting at position 283 of SEQ ID NO: 901
uuguauagacuagauuguu

SEQ ID NO: 72433 - RNA, 19 nt, Artificial Sequence
  Description of Artificial Sequence: Synthetic oligonucleotide
  Antisense strand to SEQ ID NO: 72352
aacaaucuagucuauacaa

SEQ ID NO: 72434 - RNA, 19 nt, Artificial Sequence
  Description of Artificial Sequence: Synthetic oligonucleotide
  Sense strand starting at position 278 of SEQ ID NO: 901
gugccuuguauagacuaga

SEQ ID NO: 72435 - RNA, 19 nt, Artificial Sequence
  Description of Artificial Sequence: Synthetic oligonucleotide
  Antisense strand to SEQ ID NO: 72354
ucuagucuauacaaggcac

SEQ ID NO: 72436 - RNA, 19 nt, Artificial Sequence
  Description of Artificial Sequence: Synthetic oligonucleotide
  Sense strand starting at position 79 of SEQ ID NO: 901
ugagggagucaguggagua

SEQ ID NO: 72437 - RNA, 19 nt, Artificial Sequence
  Description of Artificial Sequence: Synthetic oligonucleotide
  Antisense strand to SEQ ID NO: 72356
uacuccacugacucccuca

SEQ ID NO: 72438 - RNA, 19 nt, Artificial Sequence
  Description of Artificial Sequence: Synthetic oligonucleotide
  Sense strand starting at position 15 of SEQ ID NO: 901
cccagacuguguuucugaa

SEQ ID NO: 72439 - RNA, 19 nt, Artificial Sequence
  Description of Artificial Sequence: Synthetic oligonucleotide
  Antisense strand to SEQ ID NO: 72358
uucagaaacacagucuggg

SEQ ID NO: 72440 - RNA, 19 nt, Artificial Sequence
  Description of Artificial Sequence: Synthetic oligonucleotide
  Sense strand starting at position 3980 of SEQ ID NO: 902
cugaacauuuacuagagga

SEQ ID NO: 72441 - RNA, 19 nt, Artificial Sequence
  Description of Artificial Sequence: Synthetic oligonucleotide
  Antisense strand to SEQ ID NO: 72360
uccucuaguaaauguucag

SEQ ID NO: 72442 - RNA, 19 nt, Artificial Sequence
  Description of Artificial Sequence: Synthetic oligonucleotide
  Sense strand starting at position 3823 of SEQ ID NO: 902
ggaggcuugaggugggaaa

SEQ ID NO: 72443 - RNA, 19 nt, Artificial Sequence
  Description of Artificial Sequence: Synthetic oligonucleotide
  Antisense strand to SEQ ID NO: 72362
uuucccaccucaagccucc

SEQ ID NO: 72444 - RNA, 19 nt, Artificial Sequence
  Description of Artificial Sequence: Synthetic oligonucleotide
  Sense strand starting at position 3503 of SEQ ID NO: 902
uguaaacagccauguagaa

SEQ ID NO: 72445 - RNA, 19 nt, Artificial Sequence
  Description of Artificial Sequence: Synthetic oligonucleotide
  Antisense strand to SEQ ID NO: 72364
uucuacauggcuguuuaca

SEQ ID NO: 72446 - RNA, 19 nt, Artificial Sequence
  Description of Artificial Sequence: Synthetic oligonucleotide
  Sense strand starting at position 3340 of SEQ ID NO: 902
agaaauuauguguacagcu

SEQ ID NO: 72447 - RNA, 19 nt, Artificial Sequence
  Description of Artificial Sequence: Synthetic oligonucleotide
  Antisense strand to SEQ ID NO: 72366
agcuguacacauaauuucu

SEQ ID NO: 72448 - RNA, 19 nt, Artificial Sequence
  Description of Artificial Sequence: Synthetic oligonucleotide
  Sense strand starting at position 3334 of SEQ ID NO: 902
agucauagaaauuaugugu

SEQ ID NO: 72449 - RNA, 19 nt, Artificial Sequence
  Description of Artificial Sequence: Synthetic oligonucleotide
  Antisense strand to SEQ ID NO: 72368
acacauaauuucuaugacu

SEQ ID NO: 72450 - RNA, 19 nt, Artificial Sequence
  Description of Artificial Sequence: Synthetic oligonucleotide
  Sense strand starting at position 2920 of SEQ ID NO: 902
cgaaauuaucuaggacuac

SEQ ID NO: 72451 - RNA, 19 nt, Artificial Sequence
  Description of Artificial Sequence: Synthetic oligonucleotide
  Antisense strand to SEQ ID NO: 72370
guaguccuagauaauuucg

SEQ ID NO: 72452 - RNA, 19 nt, Artificial Sequence
  Description of Artificial Sequence: Synthetic oligonucleotide
  Sense strand starting at position 2456 of SEQ ID NO: 902
aucuuccuggauggaaauu

SEQ ID NO: 72453 - RNA, 19 nt, Artificial Sequence
  Description of Artificial Sequence: Synthetic oligonucleotide
  Antisense strand to SEQ ID NO: 72372
aauuuccauccaggaagau

SEQ ID NO: 72454 - RNA, 19 nt, Artificial Sequence
  Description of Artificial Sequence: Synthetic oligonucleotide
  Sense strand starting at position 2452 of SEQ ID NO: 902
cuuaaucuuccuggaugga

SEQ ID NO: 72455 - RNA, 19 nt, Artificial Sequence
  Description of Artificial Sequence: Synthetic oligonucleotide
  Antisense strand to SEQ ID NO: 72374
uccauccaggaagauuaag

SEQ ID NO: 72456 - RNA, 19 nt, Artificial Sequence
  Description of Artificial Sequence: Synthetic oligonucleotide
  Sense strand starting at position 2450 of SEQ ID NO: 902
uccuuaaucuuccuggaug

SEQ ID NO: 72457 - RNA, 19 nt, Artificial Sequence
  Description of Artificial Sequence: Synthetic oligonucleotide
  Antisense strand to SEQ ID NO: 72376
cauccaggaagauuaagga

SEQ ID NO: 72458 - RNA, 19 nt, Artificial Sequence
  Description of Artificial Sequence: Synthetic oligonucleotide
  Sense strand starting at position 2364 of SEQ ID NO: 902
aagagaaguuaucuuauug

SEQ ID NO: 72459 - RNA, 19 nt, Artificial Sequence
  Description of Artificial Sequence: Synthetic oligonucleotide
  Antisense strand to SEQ ID NO: 72378
caauaagauaacuucucuu

SEQ ID NO: 72460 - RNA, 19 nt, Artificial Sequence
  Description of Artificial Sequence: Synthetic oligonucleotide
  Sense strand starting at position 2323 of SEQ ID NO: 902
gagaauuucugaggacaga

SEQ ID NO: 72461 - RNA, 19 nt, Artificial Sequence
  Description of Artificial Sequence: Synthetic oligonucleotide
  Antisense strand to SEQ ID NO: 72380
ucuguccucagaaauucuc

SEQ ID NO: 72462 - RNA, 19 nt, Artificial Sequence
  Description of Artificial Sequence: Synthetic oligonucleotide
  Sense strand starting at position 2254 of SEQ ID NO: 902
cuagcauugcaauaggaga

SEQ ID NO: 72463 - RNA, 19 nt, Artificial Sequence
  Description of Artificial Sequence: Synthetic oligonucleotide
  Antisense strand to SEQ ID NO: 72382
ucuccuauugcaaugcuag

SEQ ID NO: 72464 - RNA, 19 nt, Artificial Sequence
  Description of Artificial Sequence: Synthetic oligonucleotide
  Sense strand starting at position 1991 of SEQ ID NO: 902
gguaauggcaaugaaaugu

SEQ ID NO: 72465 - RNA, 19 nt, Artificial Sequence
  Description of Artificial Sequence: Synthetic oligonucleotide
  Antisense strand to SEQ ID NO: 72384
acauuucauugccauuacc

SEQ ID NO: 72466 - RNA, 19 nt, Artificial Sequence
  Description of Artificial Sequence: Synthetic oligonucleotide
  Sense strand starting at position 1990 of SEQ ID NO: 902
ggguaauggcaaugaaaug

SEQ ID NO: 72467 - RNA, 19 nt, Artificial Sequence
  Description of Artificial Sequence: Synthetic oligonucleotide
  Antisense strand to SEQ ID NO: 72386
cauuucauugccauuaccc

SEQ ID NO: 72468 - RNA, 19 nt, Artificial Sequence
  Description of Artificial Sequence: Synthetic oligonucleotide
  Sense strand starting at position 1648 of SEQ ID NO: 902
cuaaauguggcucaaagau

SEQ ID NO: 72469 - RNA, 19 nt, Artificial Sequence
  Description of Artificial Sequence: Synthetic oligonucleotide
  Antisense strand to SEQ ID NO: 72388
aucuuugagccacauuuag

SEQ ID NO: 72470 - RNA, 19 nt, Artificial Sequence
  Description of Artificial Sequence: Synthetic oligonucleotide
  Sense strand starting at position 1595 of SEQ ID NO: 902
uagauugaucgguggauau

SEQ ID NO: 72471 - RNA, 19 nt, Artificial Sequence
  Description of Artificial Sequence: Synthetic oligonucleotide
  Antisense strand to SEQ ID NO: 72390
auauccaccgaucaaucua

SEQ ID NO: 72472 - RNA, 19 nt, Artificial Sequence
  Description of Artificial Sequence: Synthetic oligonucleotide
  Sense strand starting at position 1594 of SEQ ID NO: 902
guagauugaucgguggaua

SEQ ID NO: 72473 - RNA, 19 nt, Artificial Sequence
  Description of Artificial Sequence: Synthetic oligonucleotide
  Antisense strand to SEQ ID NO: 72392
uauccaccgaucaaucuac

SEQ ID NO: 72474 - RNA, 19 nt, Artificial Sequence
  Description of Artificial Sequence: Synthetic oligonucleotide
  Sense strand starting at position 1581 of SEQ ID NO: 902
gaaccagagagguguagau

SEQ ID NO: 72475 - RNA, 19 nt, Artificial Sequence
  Description of Artificial Sequence: Synthetic oligonucleotide
  Antisense strand to SEQ ID NO: 72394
aucuacaccucucugguuc

SEQ ID NO: 72476 - RNA, 19 nt, Artificial Sequence
  Description of Artificial Sequence: Synthetic oligonucleotide
  Sense strand starting at position 1575 of SEQ ID NO: 902
gccuuugaaccagagaggu

SEQ ID NO: 72477 - RNA, 19 nt, Artificial Sequence
  Description of Artificial Sequence: Synthetic oligonucleotide
  Antisense strand to SEQ ID NO: 72396
accucucugguucaaaggc

SEQ ID NO: 72478 - RNA, 19 nt, Artificial Sequence
  Description of Artificial Sequence: Synthetic oligonucleotide
  Sense strand starting at position 1430 of SEQ ID NO: 902
ggaaaucacuauuccggga

SEQ ID NO: 72479 - RNA, 19 nt, Artificial Sequence
  Description of Artificial Sequence: Synthetic oligonucleotide
  Antisense strand to SEQ ID NO: 72398
ucccggaauagugauuucc

SEQ ID NO: 72480 - RNA, 19 nt, Artificial Sequence
  Description of Artificial Sequence: Synthetic oligonucleotide
  Sense strand starting at position 1417 of SEQ ID NO: 902
ugacuauaucuguggaaau

SEQ ID NO: 72481 - RNA, 19 nt, Artificial Sequence
  Description of Artificial Sequence: Synthetic oligonucleotide
  Antisense strand to SEQ ID NO: 72400
auuuccacagauauaguca

SEQ ID NO: 72482 - RNA, 19 nt, Artificial Sequence
  Description of Artificial Sequence: Synthetic oligonucleotide
  Sense strand starting at position 1416 of SEQ ID NO: 902
gugacuauaucuguggaaa

SEQ ID NO: 72483 - RNA, 19 nt, Artificial Sequence
  Description of Artificial Sequence: Synthetic oligonucleotide
  Antisense strand to SEQ ID NO: 72402
uuuccacagauauagucac

SEQ ID NO: 72484 - RNA, 19 nt, Artificial Sequence
  Description of Artificial Sequence: Synthetic oligonucleotide
  Sense strand starting at position 1415 of SEQ ID NO: 902
ugugacuauaucuguggaa

SEQ ID NO: 72485 - RNA, 19 nt, Artificial Sequence
  Description of Artificial Sequence: Synthetic oligonucleotide
  Antisense strand to SEQ ID NO: 72404
uuccacagauauagucaca

SEQ ID NO: 72486 - RNA, 19 nt, Artificial Sequence
  Description of Artificial Sequence: Synthetic oligonucleotide
  Sense strand starting at position 1379 of SEQ ID NO: 902
uccacuaagccauguuaag

SEQ ID NO: 72487 - RNA, 19 nt, Artificial Sequence
  Description of Artificial Sequence: Synthetic oligonucleotide
  Antisense strand to SEQ ID NO: 72406
cuuaacauggcuuagugga

SEQ ID NO: 72488 - RNA, 19 nt, Artificial Sequence
  Description of Artificial Sequence: Synthetic oligonucleotide
  Sense strand starting at position 1322 of SEQ ID NO: 902
cuguccugugcucaaagaa

SEQ ID NO: 72489 - RNA, 19 nt, Artificial Sequence
  Description of Artificial Sequence: Synthetic oligonucleotide
  Antisense strand to SEQ ID NO: 72408
uucuuugagcacaggacag

SEQ ID NO: 72490 - RNA, 19 nt, Artificial Sequence
  Description of Artificial Sequence: Synthetic oligonucleotide
  Sense strand starting at position 765 of SEQ ID NO: 902
gaucgugaggacugagauu

SEQ ID NO: 72491 - RNA, 19 nt, Artificial Sequence
  Description of Artificial Sequence: Synthetic oligonucleotide
  Antisense strand to SEQ ID NO: 72410
aaucucaguccucacgauc

SEQ ID NO: 72492 - RNA, 19 nt, Artificial Sequence
  Description of Artificial Sequence: Synthetic oligonucleotide
  Sense strand starting at position 693 of SEQ ID NO: 902
ggugaaaguaucugggaug

SEQ ID NO: 72493 - RNA, 19 nt, Artificial Sequence
  Description of Artificial Sequence: Synthetic oligonucleotide
  Antisense strand to SEQ ID NO: 72412
caucccagauacuuucacc

SEQ ID NO: 72494 - RNA, 19 nt, Artificial Sequence
  Description of Artificial Sequence: Synthetic oligonucleotide
  Sense strand starting at position 692 of SEQ ID NO: 902
aggugaaaguaucugggau

SEQ ID NO: 72495 - RNA, 19 nt, Artificial Sequence
  Description of Artificial Sequence: Synthetic oligonucleotide
  Antisense strand to SEQ ID NO: 72414
aucccagauacuuucaccu

SEQ ID NO: 72496 - RNA, 19 nt, Artificial Sequence
  Description of Artificial Sequence: Synthetic oligonucleotide
  Sense strand starting at position 684 of SEQ ID NO: 902
gugguuaaaggugaaagua

SEQ ID NO: 72497 - RNA, 19 nt, Artificial Sequence
  Description of Artificial Sequence: Synthetic oligonucleotide
  Antisense strand to SEQ ID NO: 72416
uacuuucaccuuuaaccac

SEQ ID NO: 72498 - RNA, 19 nt, Artificial Sequence
  Description of Artificial Sequence: Synthetic oligonucleotide
  Sense strand starting at position 683 of SEQ ID NO: 902
agugguuaaaggugaaagu

SEQ ID NO: 72499 - RNA, 19 nt, Artificial Sequence
  Description of Artificial Sequence: Synthetic oligonucleotide
  Antisense strand to SEQ ID NO: 72418
acuuucaccuuuaaccacu

SEQ ID NO: 72500 - RNA, 19 nt, Artificial Sequence
  Description of Artificial Sequence: Synthetic oligonucleotide
  Sense strand starting at position 638 of SEQ ID NO: 902
caguuugcaguaggagaaa

SEQ ID NO: 72501 - RNA, 19 nt, Artificial Sequence
  Description of Artificial Sequence: Synthetic oligonucleotide
  Antisense strand to SEQ ID NO: 72420
uuucuccuacugcaaacug

SEQ ID NO: 72502 - RNA, 19 nt, Artificial Sequence
  Description of Artificial Sequence: Synthetic oligonucleotide
  Sense strand starting at position 636 of SEQ ID NO: 902
accaguuugcaguaggaga

SEQ ID NO: 72503 - RNA, 19 nt, Artificial Sequence
  Description of Artificial Sequence: Synthetic oligonucleotide
  Antisense strand to SEQ ID NO: 72422
ucuccuacugcaaacuggu

SEQ ID NO: 72504 - RNA, 19 nt, Artificial Sequence
  Description of Artificial Sequence: Synthetic oligonucleotide
  Sense strand starting at position 491 of SEQ ID NO: 902
uaaauaaguguguaugguu

SEQ ID NO: 72505 - RNA, 19 nt, Artificial Sequence
  Description of Artificial Sequence: Synthetic oligonucleotide
  Antisense strand to SEQ ID NO: 72424
aaccauacacacuuauuua

SEQ ID NO: 72506 - RNA, 19 nt, Artificial Sequence
  Description of Artificial Sequence: Synthetic oligonucleotide
  Sense strand starting at position 409 of SEQ ID NO: 902
gugucuggaauguaauaag

SEQ ID NO: 72507 - RNA, 19 nt, Artificial Sequence
  Description of Artificial Sequence: Synthetic oligonucleotide
  Antisense strand to SEQ ID NO: 72426
cuuauuacauuccagacac

SEQ ID NO: 72508 - RNA, 19 nt, Artificial Sequence
  Description of Artificial Sequence: Synthetic oligonucleotide
  Sense strand starting at position 407 of SEQ ID NO: 902
uagugucuggaauguaaua

SEQ ID NO: 72509 - RNA, 19 nt, Artificial Sequence
  Description of Artificial Sequence: Synthetic oligonucleotide
  Antisense strand to SEQ ID NO: 72428
uauuacauuccagacacua

SEQ ID NO: 72510 - RNA, 19 nt, Artificial Sequence
  Description of Artificial Sequence: Synthetic oligonucleotide
  Sense strand starting at position 402 of SEQ ID NO: 902
ugaaauagugucuggaaug

SEQ ID NO: 72511 - RNA, 19 nt, Artificial Sequence
  Description of Artificial Sequence: Synthetic oligonucleotide
  Antisense strand to SEQ ID NO: 72430
cauuccagacacuauuuca

SEQ ID NO: 72512 - RNA, 19 nt, Artificial Sequence
  Description of Artificial Sequence: Synthetic oligonucleotide
  Sense strand starting at position 401 of SEQ ID NO: 902
uugaaauagugucuggaau

SEQ ID NO: 72513 - RNA, 19 nt, Artificial Sequence
  Description of Artificial Sequence: Synthetic oligonucleotide
  Antisense strand to SEQ ID NO: 72432
auuccagacacuauuucaa

SEQ ID NO: 72514 - RNA, 19 nt, Artificial Sequence
  Description of Artificial Sequence: Synthetic oligonucleotide
  Sense strand starting at position 345 of SEQ ID NO: 902
acaccuaccucacugagua

SEQ ID NO: 72515 - RNA, 19 nt, Artificial Sequence
  Description of Artificial Sequence: Synthetic oligonucleotide
  Antisense strand to SEQ ID NO: 72434
uacucagugagguaggugu

SEQ ID NO: 72516 - RNA, 19 nt, Artificial Sequence
  Description of Artificial Sequence: Synthetic oligonucleotide
  Sense strand starting at position 313 of SEQ ID NO: 902
guccucaucagugaaaugu

SEQ ID NO: 72517 - RNA, 19 nt, Artificial Sequence
  Description of Artificial Sequence: Synthetic oligonucleotide
  Antisense strand to SEQ ID NO: 72436
acauuucacugaugaggac

SEQ ID NO: 72518 - RNA, 19 nt, Artificial Sequence
  Description of Artificial Sequence: Synthetic oligonucleotide
  Sense strand starting at position 250 of SEQ ID NO: 902
auugcaugacuaugcauaa

SEQ ID NO: 72519 - RNA, 19 nt, Artificial Sequence
  Description of Artificial Sequence: Synthetic oligonucleotide
  Antisense strand to SEQ ID NO: 72438
uuaugcauagucaugcaau

SEQ ID NO: 72520 - RNA, 19 nt, Artificial Sequence
  Description of Artificial Sequence: Synthetic oligonucleotide
  Sense strand starting at position 3016 of SEQ ID NO: 903
auagcuaugucacagagaa

SEQ ID NO: 72521 - RNA, 19 nt, Artificial Sequence
  Description of Artificial Sequence: Synthetic oligonucleotide
  Antisense strand to SEQ ID NO: 72440
uucucugugacauagcuau

SEQ ID NO: 72522 - RNA, 19 nt, Artificial Sequence
  Description of Artificial Sequence: Synthetic oligonucleotide
  Sense strand starting at position 3011 of SEQ ID NO: 903
uggguauagcuaugucaca

SEQ ID NO: 72523 - RNA, 19 nt, Artificial Sequence
  Description of Artificial Sequence: Synthetic oligonucleotide
  Antisense strand to SEQ ID NO: 72442
ugugacauagcuauaccca

SEQ ID NO: 72524 - RNA, 19 nt, Artificial Sequence
  Description of Artificial Sequence: Synthetic oligonucleotide
  Sense strand starting at position 2977 of SEQ ID NO: 903
gccagaccuugcucuagau

SEQ ID NO: 72525 - RNA, 19 nt, Artificial Sequence
  Description of Artificial Sequence: Synthetic oligonucleotide
  Antisense strand to SEQ ID NO: 72444
aucuagagcaaggucuggc

SEQ ID NO: 72526 - RNA, 19 nt, Artificial Sequence
  Description of Artificial Sequence: Synthetic oligonucleotide
  Sense strand starting at position 2570 of SEQ ID NO: 903
cuaguugaguccugagaag

SEQ ID NO: 72527 - RNA, 19 nt, Artificial Sequence
  Description of Artificial Sequence: Synthetic oligonucleotide
  Antisense strand to SEQ ID NO: 72446
cuucucaggacucaacuag

SEQ ID NO: 72528 - RNA, 19 nt, Artificial Sequence
  Description of Artificial Sequence: Synthetic oligonucleotide
  Sense strand starting at position 2477 of SEQ ID NO: 903
gggaguuuguuauaacuau

SEQ ID NO: 72529 - RNA, 19 nt, Artificial Sequence
  Description of Artificial Sequence: Synthetic oligonucleotide
  Antisense strand to SEQ ID NO: 72448
auaguuauaacaaacuccc

SEQ ID NO: 72530 - RNA, 19 nt, Artificial Sequence
  Description of Artificial Sequence: Synthetic oligonucleotide
  Sense strand starting at position 2475 of SEQ ID NO: 903
uagggaguuuguuauaacu

SEQ ID NO: 72531 - RNA, 19 nt, Artificial Sequence
  Description of Artificial Sequence: Synthetic oligonucleotide
  Antisense strand to SEQ ID NO: 72450
aguuauaacaaacucccua

SEQ ID NO: 72532 - RNA, 19 nt, Artificial Sequence
  Description of Artificial Sequence: Synthetic oligonucleotide
  Sense strand starting at position 2432 of SEQ ID NO: 903
auaagagacgcauggacuu

SEQ ID NO: 72533 - RNA, 19 nt, Artificial Sequence
  Description of Artificial Sequence: Synthetic oligonucleotide
  Antisense strand to SEQ ID NO: 72452
aaguccaugcgucucuuau

SEQ ID NO: 72534 - RNA, 19 nt, Artificial Sequence
  Description of Artificial Sequence: Synthetic oligonucleotide
  Sense strand starting at position 2390 of SEQ ID NO: 903
agcuccuucuaguauugaa

SEQ ID NO: 72535 - RNA, 19 nt, Artificial Sequence
  Description of Artificial Sequence: Synthetic oligonucleotide
  Antisense strand to SEQ ID NO: 72454
uucaauacuagaaggagcu

SEQ ID NO: 72536 - RNA, 19 nt, Artificial Sequence
  Description of Artificial Sequence: Synthetic oligonucleotide
  Sense strand starting at position 2357 of SEQ ID NO: 903
ugcuguuagagggaugaac

SEQ ID NO: 72537 - RNA, 19 nt, Artificial Sequence
  Description of Artificial Sequence: Synthetic oligonucleotide
  Antisense strand to SEQ ID NO: 72456
guucaucccucuaacagca

SEQ ID NO: 72538 - RNA, 19 nt, Artificial Sequence
  Description of Artificial Sequence: Synthetic oligonucleotide
  Sense strand starting at position 2348 of SEQ ID NO: 903
ggcgaugucugcuguuaga

SEQ ID NO: 72539 - RNA, 19 nt, Artificial Sequence
  Description of Artificial Sequence: Synthetic oligonucleotide
  Antisense strand to SEQ ID NO: 72458
ucuaacagcagacaucgcc

SEQ ID NO: 72540 - RNA, 19 nt, Artificial Sequence
  Description of Artificial Sequence: Synthetic oligonucleotide
  Sense strand starting at position 2347 of SEQ ID NO: 903
gggcgaugucugcuguuag

SEQ ID NO: 72541 - RNA, 19 nt, Artificial Sequence
  Description of Artificial Sequence: Synthetic oligonucleotide
  Antisense strand to SEQ ID NO: 72460
cuaacagcagacaucgccc

SEQ ID NO: 72542 - RNA, 19 nt, Artificial Sequence
  Description of Artificial Sequence: Synthetic oligonucleotide
  Sense strand starting at position 2172 of SEQ ID NO: 903
agcgauuucgaggguuuga

SEQ ID NO: 72543 - RNA, 19 nt, Artificial Sequence
  Description of Artificial Sequence: Synthetic oligonucleotide
  Antisense strand to SEQ ID NO: 72462
ucaaacccucgaaaucgcu

SEQ ID NO: 72544 - RNA, 19 nt, Artificial Sequence
  Description of Artificial Sequence: Synthetic oligonucleotide
  Sense strand starting at position 2171 of SEQ ID NO: 903
aagcgauuucgaggguuug

SEQ ID NO: 72545 - RNA, 19 nt, Artificial Sequence
  Description of Artificial Sequence: Synthetic oligonucleotide
  Antisense strand to SEQ ID NO: 72464
caaacccucgaaaucgcuu

SEQ ID NO: 72546 - RNA, 19 nt, Artificial Sequence
  Description of Artificial Sequence: Synthetic oligonucleotide
  Sense strand starting at position 2070 of SEQ ID NO: 903
accaguuuccgugacggga

SEQ ID NO: 72547 - RNA, 19 nt, Artificial Sequence
  Description of Artificial Sequence: Synthetic oligonucleotide
  Antisense strand to SEQ ID NO: 72466
ucccgucacggaaacuggu

SEQ ID NO: 72548 - RNA, 19 nt, Artificial Sequence
  Description of Artificial Sequence: Synthetic oligonucleotide
  Sense strand starting at position 2035 of SEQ ID NO: 903
uuugaaaggcuuuaucuuu

SEQ ID NO: 72549 - RNA, 19 nt, Artificial Sequence
  Description of Artificial Sequence: Synthetic oligonucleotide
  Antisense strand to SEQ ID NO: 72468
aaagauaaagccuuucaaa

SEQ ID NO: 72550 - RNA, 19 nt, Artificial Sequence
  Description of Artificial Sequence: Synthetic oligonucleotide
  Sense strand starting at position 1512 of SEQ ID NO: 903
ucacuugcucacugucuua

SEQ ID NO: 72551 - RNA, 19 nt, Artificial Sequence
  Description of Artificial Sequence: Synthetic oligonucleotide
  Antisense strand to SEQ ID NO: 72470
uaagacagugagcaaguga

SEQ ID NO: 72552 - RNA, 19 nt, Artificial Sequence
  Description of Artificial Sequence: Synthetic oligonucleotide
  Sense strand starting at position 1368 of SEQ ID NO: 903
acauuaauacaauggcuga

SEQ ID NO: 72553 - RNA, 19 nt, Artificial Sequence
  Description of Artificial Sequence: Synthetic oligonucleotide
  Antisense strand to SEQ ID NO: 72472
ucagccauuguauuaaugu

SEQ ID NO: 72554 - RNA, 19 nt, Artificial Sequence
  Description of Artificial Sequence: Synthetic oligonucleotide
  Sense strand starting at position 1284 of SEQ ID NO: 903
ucaacucauggguggcaaa

SEQ ID NO: 72555 - RNA, 19 nt, Artificial Sequence
  Description of Artificial Sequence: Synthetic oligonucleotide
  Antisense strand to SEQ ID NO: 72474
uuugccacccaugaguuga

SEQ ID NO: 72556 - RNA, 19 nt, Artificial Sequence
  Description of Artificial Sequence: Synthetic oligonucleotide
  Sense strand starting at position 1218 of SEQ ID NO: 903
gaucucuguggcugagagu

SEQ ID NO: 72557 - RNA, 19 nt, Artificial Sequence
  Description of Artificial Sequence: Synthetic oligonucleotide
  Antisense strand to SEQ ID NO: 72476
acucucagccacagagauc

SEQ ID NO: 72558 - RNA, 19 nt, Artificial Sequence
  Description of Artificial Sequence: Synthetic oligonucleotide
  Sense strand starting at position 1214 of SEQ ID NO: 903
aagggaucucuguggcuga

SEQ ID NO: 72559 - RNA, 19 nt, Artificial Sequence
  Description of Artificial Sequence: Synthetic oligonucleotide
  Antisense strand to SEQ ID NO: 72478
ucagccacagagaucccuu

SEQ ID NO: 72560 - RNA, 19 nt, Artificial Sequence
  Description of Artificial Sequence: Synthetic oligonucleotide
  Sense strand starting at position 828 of SEQ ID NO: 903
ggacuugggcucuauuaau

SEQ ID NO: 72561 - RNA, 19 nt, Artificial Sequence
  Description of Artificial Sequence: Synthetic oligonucleotide
  Antisense strand to SEQ ID NO: 72480
auuaauagagcccaagucc

SEQ ID NO: 72562 - RNA, 19 nt, Artificial Sequence
  Description of Artificial Sequence: Synthetic oligonucleotide
  Sense strand starting at position 807 of SEQ ID NO: 903
gguguuugcugggauggga

SEQ ID NO: 72563 - RNA, 19 nt, Artificial Sequence
  Description of Artificial Sequence: Synthetic oligonucleotide
  Antisense strand to SEQ ID NO: 72482
ucccaucccagcaaacacc

SEQ ID NO: 72564 - RNA, 19 nt, Artificial Sequence
  Description of Artificial Sequence: Synthetic oligonucleotide
  Sense strand starting at position 804 of SEQ ID NO: 903
gcagguguuugcugggaug

SEQ ID NO: 72565 - RNA, 19 nt, Artificial Sequence
  Description of Artificial Sequence: Synthetic oligonucleotide
  Antisense strand to SEQ ID NO: 72484
caucccagcaaacaccugc

SEQ ID NO: 72566 - RNA, 19 nt, Artificial Sequence
  Description of Artificial Sequence: Synthetic oligonucleotide
  Sense strand starting at position 803 of SEQ ID NO: 903
ggcagguguuugcugggau

SEQ ID NO: 72567 - RNA, 19 nt, Artificial Sequence
  Description of Artificial Sequence: Synthetic oligonucleotide
  Antisense strand to SEQ ID NO: 72486
aucccagcaaacaccugcc

SEQ ID NO: 72568 - RNA, 19 nt, Artificial Sequence
  Description of Artificial Sequence: Synthetic oligonucleotide
  Sense strand starting at position 784 of SEQ ID NO: 903
ggaaguucugcagaaaggu

SEQ ID NO: 72569 - RNA, 19 nt, Artificial Sequence
  Description of Artificial Sequence: Synthetic oligonucleotide
  Antisense strand to SEQ ID NO: 72488
accuuucugcagaacuucc

SEQ ID NO: 72570 - RNA, 19 nt, Artificial Sequence
  Description of Artificial Sequence: Synthetic oligonucleotide
  Sense strand starting at position 781 of SEQ ID NO: 903
ccuggaaguucugcagaaa

SEQ ID NO: 72571 - RNA, 19 nt, Artificial Sequence
  Description of Artificial Sequence: Synthetic oligonucleotide
  Antisense strand to SEQ ID NO: 72490
uuucugcagaacuuccagg

SEQ ID NO: 72572 - RNA, 19 nt, Artificial Sequence
  Description of Artificial Sequence: Synthetic oligonucleotide
  Sense strand starting at position 549 of SEQ ID NO: 903
cuuuauuaguggucucuca

SEQ ID NO: 72573 - RNA, 19 nt, Artificial Sequence
  Description of Artificial Sequence: Synthetic oligonucleotide
  Antisense strand to SEQ ID NO: 72492
ugagagaccacuaauaaag

SEQ ID NO: 72574 - RNA, 19 nt, Artificial Sequence
  Description of Artificial Sequence: Synthetic oligonucleotide
  Sense strand starting at position 540 of SEQ ID NO: 903
gucuuugcacuuuauuagu

SEQ ID NO: 72575 - RNA, 19 nt, Artificial Sequence
  Description of Artificial Sequence: Synthetic oligonucleotide
  Antisense strand to SEQ ID NO: 72494
acuaauaaagugcaaagac

SEQ ID NO: 72576 - RNA, 19 nt, Artificial Sequence
  Description of Artificial Sequence: Synthetic oligonucleotide
  Sense strand starting at position 286 of SEQ ID NO: 903
aaggcugggucucaaacaa

SEQ ID NO: 72577 - RNA, 19 nt, Artificial Sequence
  Description of Artificial Sequence: Synthetic oligonucleotide
  Antisense strand to SEQ ID NO: 72496
uuguuugagacccagccuu

SEQ ID NO: 72578 - RNA, 19 nt, Artificial Sequence
  Description of Artificial Sequence: Synthetic oligonucleotide
  Sense strand starting at position 11 of SEQ ID NO: 903
aaucuuuggccaggcauga

SEQ ID NO: 72579 - RNA, 19 nt, Artificial Sequence
  Description of Artificial Sequence: Synthetic oligonucleotide
  Antisense strand to SEQ ID NO: 72498
ucaugccuggccaaagauu

SEQ ID NO: 72580 - RNA, 19 nt, Artificial Sequence
  Description of Artificial Sequence: Synthetic oligonucleotide
  Sense strand starting at position 9 of SEQ ID NO: 903
gcaaucuuuggccaggcau

SEQ ID NO: 72581 - RNA, 19 nt, Artificial Sequence
  Description of Artificial Sequence: Synthetic oligonucleotide
  Antisense strand to SEQ ID NO: 72500
augccuggccaaagauugc

SEQ ID NO: 72582 - RNA, 19 nt, Artificial Sequence
  Description of Artificial Sequence: Synthetic oligonucleotide
  Sense strand starting at position 3857 of SEQ ID NO: 904
cuguaaagucucuaacucu

SEQ ID NO: 72583 - RNA, 19 nt, Artificial Sequence
  Description of Artificial Sequence: Synthetic oligonucleotide
  Antisense strand to SEQ ID NO: 72502
agaguuagagacuuuacag

SEQ ID NO: 72584 - RNA, 19 nt, Artificial Sequence
  Description of Artificial Sequence: Synthetic oligonucleotide
  Sense strand starting at position 3856 of SEQ ID NO: 904
ucuguaaagucucuaacuc

SEQ ID NO: 72585 - RNA, 19 nt, Artificial Sequence
  Description of Artificial Sequence: Synthetic oligonucleotide
  Antisense strand to SEQ ID NO: 72504
gaguuagagacuuuacaga

SEQ ID NO: 72586 - RNA, 19 nt, Artificial Sequence
  Description of Artificial Sequence: Synthetic oligonucleotide
  Sense strand starting at position 3847 of SEQ ID NO: 904
ucaauuccuucuguaaagu

SEQ ID NO: 72587 - RNA, 19 nt, Artificial Sequence
  Description of Artificial Sequence: Synthetic oligonucleotide
  Antisense strand to SEQ ID NO: 72506
acuuuacagaaggaauuga

SEQ ID NO: 72588 - RNA, 19 nt, Artificial Sequence
  Description of Artificial Sequence: Synthetic oligonucleotide
  Sense strand starting at position 3548 of SEQ ID NO: 904
cuaaacuaugucugguuau

SEQ ID NO: 72589 - RNA, 19 nt, Artificial Sequence
  Description of Artificial Sequence: Synthetic oligonucleotide
  Antisense strand to SEQ ID NO: 72508
auaaccagacauaguuuag

SEQ ID NO: 72590 - RNA, 19 nt, Artificial Sequence
  Description of Artificial Sequence: Synthetic oligonucleotide
  Sense strand starting at position 3547 of SEQ ID NO: 904
ucuaaacuaugucugguua

SEQ ID NO: 72591 - RNA, 19 nt, Artificial Sequence
  Description of Artificial Sequence: Synthetic oligonucleotide
  Antisense strand to SEQ ID NO: 72510
uaaccagacauaguuuaga

SEQ ID NO: 72592 - RNA, 19 nt, Artificial Sequence
  Description of Artificial Sequence: Synthetic oligonucleotide
  Sense strand starting at position 3527 of SEQ ID NO: 904
guucuauuccagggaacuu

SEQ ID NO: 72593 - RNA, 19 nt, Artificial Sequence
  Description of Artificial Sequence: Synthetic oligonucleotide
  Antisense strand to SEQ ID NO: 72512
aaguucccuggaauagaac

SEQ ID NO: 72594 - RNA, 19 nt, Artificial Sequence
  Description of Artificial Sequence: Synthetic oligonucleotide
  Sense strand starting at position 3526 of SEQ ID NO: 904
uguucuauuccagggaacu

SEQ ID NO: 72595 - RNA, 19 nt, Artificial Sequence
  Description of Artificial Sequence: Synthetic oligonucleotide
  Antisense strand to SEQ ID NO: 72514
aguucccuggaauagaaca

SEQ ID NO: 72596 - RNA, 19 nt, Artificial Sequence
  Description of Artificial Sequence: Synthetic oligonucleotide
  Sense strand starting at position 3511 of SEQ ID NO: 904
auugauugcucuccauguu

SEQ ID NO: 72597 - RNA, 19 nt, Artificial Sequence
  Description of Artificial Sequence: Synthetic oligonucleotide
  Antisense strand to SEQ ID NO: 72516
aacauggagagcaaucaau

SEQ ID NO: 72598 - RNA, 19 nt, Artificial Sequence
  Description of Artificial Sequence: Synthetic oligonucleotide
  Sense strand starting at position 3360 of SEQ ID NO: 904
gugaaacucugagaaacag

SEQ ID NO: 72599 - RNA, 19 nt, Artificial Sequence
  Description of Artificial Sequence: Synthetic oligonucleotide
  Antisense strand to SEQ ID NO: 72518
cuguuucucagaguuucac

SEQ ID NO: 72600 - RNA, 19 nt, Artificial Sequence
  Description of Artificial Sequence: Synthetic oligonucleotide
  Sense strand starting at position 3358 of SEQ ID NO: 904
uugugaaacucugagaaac

SEQ ID NO: 72601 - RNA, 19 nt, Artificial Sequence
  Description of Artificial Sequence: Synthetic oligonucleotide
  Antisense strand to SEQ ID NO: 72520
guuucucagaguuucacaa

SEQ ID NO: 72602 - RNA, 19 nt, Artificial Sequence
  Description of Artificial Sequence: Synthetic oligonucleotide
  Sense strand starting at position 3309 of SEQ ID NO: 904
gcaugagcauggucucauu

SEQ ID NO: 72603 - RNA, 19 nt, Artificial Sequence
  Description of Artificial Sequence: Synthetic oligonucleotide
  Antisense strand to SEQ ID NO: 72522
aaugagaccaugcucaugc

SEQ ID NO: 72604 - RNA, 19 nt, Artificial Sequence
  Description of Artificial Sequence: Synthetic oligonucleotide
  Sense strand starting at position 3190 of SEQ ID NO: 904
gggcuaccauuauuauuau

SEQ ID NO: 72605 - RNA, 19 nt, Artificial Sequence
  Description of Artificial Sequence: Synthetic oligonucleotide
  Antisense strand to SEQ ID NO: 72524
auaauaauaaugguagccc

SEQ ID NO: 72606 - RNA, 19 nt, Artificial Sequence
  Description of Artificial Sequence: Synthetic oligonucleotide
  Sense strand starting at position 3126 of SEQ ID NO: 904
gggucuauucuagagcuuu

SEQ ID NO: 72607 - RNA, 19 nt, Artificial Sequence
  Description of Artificial Sequence: Synthetic oligonucleotide
  Antisense strand to SEQ ID NO: 72526
aaagcucuagaauagaccc

SEQ ID NO: 72608 - RNA, 19 nt, Artificial Sequence
  Description of Artificial Sequence: Synthetic oligonucleotide
  Sense strand starting at position 3119 of SEQ ID NO: 904
ucagguagggucuauucua

SEQ ID NO: 72609 - RNA, 19 nt, Artificial Sequence
  Description of Artificial Sequence: Synthetic oligonucleotide
  Antisense strand to SEQ ID NO: 72528
uagaauagacccuaccuga

SEQ ID NO: 72610 - RNA, 19 nt, Artificial Sequence
  Description of Artificial Sequence: Synthetic oligonucleotide
  Sense strand starting at position 3070 of SEQ ID NO: 904
ucuugcuuucucuaggaaa

SEQ ID NO: 72611 - RNA, 19 nt, Artificial Sequence
  Description of Artificial Sequence: Synthetic oligonucleotide
  Antisense strand to SEQ ID NO: 72530
uuuccuagagaaagcaaga

SEQ ID NO: 72612 - RNA, 19 nt, Artificial Sequence
  Description of Artificial Sequence: Synthetic oligonucleotide
  Sense strand starting at position 3068 of SEQ ID NO: 904
gaucuugcuuucucuagga

SEQ ID NO: 72613 - RNA, 19 nt, Artificial Sequence
  Description of Artificial Sequence: Synthetic oligonucleotide
  Antisense strand to SEQ ID NO: 72532
uccuagagaaagcaagauc

SEQ ID NO: 72614 - RNA, 19 nt, Artificial Sequence
  Description of Artificial Sequence: Synthetic oligonucleotide
  Sense strand starting at position 3052 of SEQ ID NO: 904
ucgaacaguugguucagau

SEQ ID NO: 72615 - RNA, 19 nt, Artificial Sequence
  Description of Artificial Sequence: Synthetic oligonucleotide
  Antisense strand to SEQ ID NO: 72534
aucugaaccaacuguucga

SEQ ID NO: 72616 - RNA, 19 nt, Artificial Sequence
  Description of Artificial Sequence: Synthetic oligonucleotide
  Sense strand starting at position 2990 of SEQ ID NO: 904
cugccuugucucuaugcuu

SEQ ID NO: 72617 - RNA, 19 nt, Artificial Sequence
  Description of Artificial Sequence: Synthetic oligonucleotide
  Antisense strand to SEQ ID NO: 72536
aagcauagagacaaggcag

SEQ ID NO: 72618 - RNA, 19 nt, Artificial Sequence
  Description of Artificial Sequence: Synthetic oligonucleotide
  Sense strand starting at position 2809 of SEQ ID NO: 904
caacuauggcugugucacu

SEQ ID NO: 72619 - RNA, 19 nt, Artificial Sequence
  Description of Artificial Sequence: Synthetic oligonucleotide
  Antisense strand to SEQ ID NO: 72538
agugacacagccauaguug

SEQ ID NO: 72620 - RNA, 19 nt, Artificial Sequence
  Description of Artificial Sequence: Synthetic oligonucleotide
  Sense strand starting at position 2719 of SEQ ID NO: 904
cuuaaauuacuucggaaac

SEQ ID NO: 72621 - RNA, 19 nt, Artificial Sequence
  Description of Artificial Sequence: Synthetic oligonucleotide
  Antisense strand to SEQ ID NO: 72540
guuuccgaaguaauuuaag

SEQ ID NO: 72622 - RNA, 19 nt, Artificial Sequence
  Description of Artificial Sequence: Synthetic oligonucleotide
  Sense strand starting at position 2606 of SEQ ID NO: 904
gguaaauugcagugcuaug

SEQ ID NO: 72623 - RNA, 19 nt, Artificial Sequence
  Description of Artificial Sequence: Synthetic oligonucleotide
  Antisense strand to SEQ ID NO: 72542
cauagcacugcaauuuacc

SEQ ID NO: 72624 - RNA, 19 nt, Artificial Sequence
  Description of Artificial Sequence: Synthetic oligonucleotide
  Sense strand starting at position 2509 of SEQ ID NO: 904
uuagcaucuccauguagua

SEQ ID NO: 72625 - RNA, 19 nt, Artificial Sequence
  Description of Artificial Sequence: Synthetic oligonucleotide
  Antisense strand to SEQ ID NO: 72544
uacuacauggagaugcuaa

SEQ ID NO: 72626 - RNA, 19 nt, Artificial Sequence
  Description of Artificial Sequence: Synthetic oligonucleotide
  Sense strand starting at position 2506 of SEQ ID NO: 904
gucuuagcaucuccaugua

SEQ ID NO: 72627 - RNA, 19 nt, Artificial Sequence
  Description of Artificial Sequence: Synthetic oligonucleotide
  Antisense strand to SEQ ID NO: 72546
uacauggagaugcuaagac

SEQ ID NO: 72628 - RNA, 19 nt, Artificial Sequence
  Description of Artificial Sequence: Synthetic oligonucleotide
  Sense strand starting at position 2296 of SEQ ID NO: 904
ugggauucuucuccacucu

SEQ ID NO: 72629 - RNA, 19 nt, Artificial Sequence
  Description of Artificial Sequence: Synthetic oligonucleotide
  Antisense strand to SEQ ID NO: 72548
agaguggagaagaauccca

SEQ ID NO: 72630 - RNA, 19 nt, Artificial Sequence
  Description of Artificial Sequence: Synthetic oligonucleotide
  Sense strand starting at position 2295 of SEQ ID NO: 904
uugggauucuucuccacuc

SEQ ID NO: 72631 - RNA, 19 nt, Artificial Sequence
  Description of Artificial Sequence: Synthetic oligonucleotide
  Antisense strand to SEQ ID NO: 72550
gaguggagaagaaucccaa

SEQ ID NO: 72632 - RNA, 19 nt, Artificial Sequence
  Description of Artificial Sequence: Synthetic oligonucleotide
  Sense strand starting at position 2227 of SEQ ID NO: 904
ggguuuguagcuugaagga

SEQ ID NO: 72633 - RNA, 19 nt, Artificial Sequence
  Description of Artificial Sequence: Synthetic oligonucleotide
  Antisense strand to SEQ ID NO: 72552
uccuucaagcuacaaaccc

SEQ ID NO: 72634 - RNA, 19 nt, Artificial Sequence
  Description of Artificial Sequence: Synthetic oligonucleotide
  Sense strand starting at position 2098 of SEQ ID NO: 904
gggcguggcuuagcaaaga

SEQ ID NO: 72635 - RNA, 19 nt, Artificial Sequence
  Description of Artificial Sequence: Synthetic oligonucleotide
  Antisense strand to SEQ ID NO: 72554
ucuuugcuaagccacgccc

SEQ ID NO: 72636 - RNA, 19 nt, Artificial Sequence
  Description of Artificial Sequence: Synthetic oligonucleotide
  Sense strand starting at position 1512 of SEQ ID NO: 904
cgagggugggauugaugua

SEQ ID NO: 72637 - RNA, 19 nt, Artificial Sequence
  Description of Artificial Sequence: Synthetic oligonucleotide
  Antisense strand to SEQ ID NO: 72556
uacaucaaucccacccucg

SEQ ID NO: 72638 - RNA, 19 nt, Artificial Sequence
  Description of Artificial Sequence: Synthetic oligonucleotide
  Sense strand starting at position 1395 of SEQ ID NO: 904
caggaauucccaggcuaga

SEQ ID NO: 72639 - RNA, 19 nt, Artificial Sequence
  Description of Artificial Sequence: Synthetic oligonucleotide
  Antisense strand to SEQ ID NO: 72558
ucuagccugggaauuccug

SEQ ID NO: 72640 - RNA, 19 nt, Artificial Sequence
  Description of Artificial Sequence: Synthetic oligonucleotide
  Sense strand starting at position 1383 of SEQ ID NO: 904
gggauacccgcccaggaau

SEQ ID NO: 72641 - RNA, 19 nt, Artificial Sequence
  Description of Artificial Sequence: Synthetic oligonucleotide
  Antisense strand to SEQ ID NO: 72560
auuccugggcggguauccc

SEQ ID NO: 72642 - RNA, 19 nt, Artificial Sequence
  Description of Artificial Sequence: Synthetic oligonucleotide
  Sense strand starting at position 1299 of SEQ ID NO: 904
aauccaggucucuggagau

SEQ ID NO: 72643 - RNA, 19 nt, Artificial Sequence
  Description of Artificial Sequence: Synthetic oligonucleotide
  Antisense strand to SEQ ID NO: 72562
aucuccagagaccuggauu

SEQ ID NO: 72644 - RNA, 19 nt, Artificial Sequence
  Description of Artificial Sequence: Synthetic oligonucleotide
  Sense strand starting at position 1293 of SEQ ID NO: 904
agaggaaauccaggucucu

SEQ ID NO: 72645 - RNA, 19 nt, Artificial Sequence
  Description of Artificial Sequence: Synthetic oligonucleotide
  Antisense strand to SEQ ID NO: 72564
agagaccuggauuuccucu

SEQ ID NO: 72646 - RNA, 19 nt, Artificial Sequence
  Description of Artificial Sequence: Synthetic oligonucleotide
  Sense strand starting at position 1280 of SEQ ID NO: 904
ccggguuccugaaagagga

SEQ ID NO: 72647 - RNA, 19 nt, Artificial Sequence
  Description of Artificial Sequence: Synthetic oligonucleotide
  Antisense strand to SEQ ID NO: 72566
uccucuuucaggaacccgg

SEQ ID NO: 72648 - RNA, 19 nt, Artificial Sequence
  Description of Artificial Sequence: Synthetic oligonucleotide
  Sense strand starting at position 930 of SEQ ID NO: 904
guuccuucucugggaguca

SEQ ID NO: 72649 - RNA, 19 nt, Artificial Sequence
  Description of Artificial Sequence: Synthetic oligonucleotide
  Antisense strand to SEQ ID NO: 72568
ugacucccagagaaggaac

SEQ ID NO: 72650 - RNA, 19 nt, Artificial Sequence
  Description of Artificial Sequence: Synthetic oligonucleotide
  Sense strand starting at position 709 of SEQ ID NO: 904
gauaaugucugggucuaca

SEQ ID NO: 72651 - RNA, 19 nt, Artificial Sequence
  Description of Artificial Sequence: Synthetic oligonucleotide
  Antisense strand to SEQ ID NO: 72570
uguagacccagacauuauc

SEQ ID NO: 72652 - RNA, 19 nt, Artificial Sequence
  Description of Artificial Sequence: Synthetic oligonucleotide
  Sense strand starting at position 708 of SEQ ID NO: 904
agauaaugucugggucuac

SEQ ID NO: 72653 - RNA, 19 nt, Artificial Sequence
  Description of Artificial Sequence: Synthetic oligonucleotide
  Antisense strand to SEQ ID NO: 72572
guagacccagacauuaucu

SEQ ID NO: 72654 - RNA, 19 nt, Artificial Sequence
  Description of Artificial Sequence: Synthetic oligonucleotide
  Sense strand starting at position 706 of SEQ ID NO: 904
caagauaaugucugggucu

SEQ ID NO: 72655 - RNA, 19 nt, Artificial Sequence
  Description of Artificial Sequence: Synthetic oligonucleotide
  Antisense strand to SEQ ID NO: 72574
agacccagacauuaucuug

SEQ ID NO: 72656 - RNA, 19 nt, Artificial Sequence
  Description of Artificial Sequence: Synthetic oligonucleotide
  Sense strand starting at position 389 of SEQ ID NO: 904
ggaggaauccuguauugug

SEQ ID NO: 72657 - RNA, 19 nt, Artificial Sequence
  Description of Artificial Sequence: Synthetic oligonucleotide
  Antisense strand to SEQ ID NO: 72576
cacaauacaggauuccucc

SEQ ID NO: 72658 - RNA, 19 nt, Artificial Sequence
  Description of Artificial Sequence: Synthetic oligonucleotide
  Sense strand starting at position 215 of SEQ ID NO: 904
accuaaucccagugucaac

SEQ ID NO: 72659 - RNA, 19 nt, Artificial Sequence
  Description of Artificial Sequence: Synthetic oligonucleotide
  Antisense strand to SEQ ID NO: 72578
guugacacugggauuaggu

SEQ ID NO: 72660 - RNA, 19 nt, Artificial Sequence
  Description of Artificial Sequence: Synthetic oligonucleotide
  Sense strand starting at position 85 of SEQ ID NO: 904
gugacauugcuguggcaga

SEQ ID NO: 72661 - RNA, 19 nt, Artificial Sequence
  Description of Artificial Sequence: Synthetic oligonucleotide
  Antisense strand to SEQ ID NO: 72580
ucugccacagcaaugucac

SEQ ID NO: 72662 - RNA, 19 nt, Artificial Sequence
  Description of Artificial Sequence: Synthetic oligonucleotide
  Sense strand starting at position 3961 of SEQ ID NO: 905
guguaagguucugugagug

SEQ ID NO: 72663 - RNA, 19 nt, Artificial Sequence
  Description of Artificial Sequence: Synthetic oligonucleotide
  Antisense strand to SEQ ID NO: 72582
cacucacagaaccuuacac

SEQ ID NO: 72664 - RNA, 19 nt, Artificial Sequence
  Description of Artificial Sequence: Synthetic oligonucleotide
  Sense strand starting at position 3952 of SEQ ID NO: 905
ugccuuuguguguaagguu

SEQ ID NO: 72665 - RNA, 19 nt, Artificial Sequence
  Description of Artificial Sequence: Synthetic oligonucleotide
  Antisense strand to SEQ ID NO: 72584
aaccuuacacacaaaggca

SEQ ID NO: 72666 - RNA, 19 nt, Artificial Sequence
  Description of Artificial Sequence: Synthetic oligonucleotide
  Sense strand starting at position 3913 of SEQ ID NO: 905
gcguguuucccugugagug

SEQ ID NO: 72667 - RNA, 19 nt, Artificial Sequence
  Description of Artificial Sequence: Synthetic oligonucleotide
  Antisense strand to SEQ ID NO: 72586
cacucacagggaaacacgc

SEQ ID NO: 72668 - RNA, 19 nt, Artificial Sequence
  Description of Artificial Sequence: Synthetic oligonucleotide
  Sense strand starting at position 3853 of SEQ ID NO: 905
acuguuucucaguguggau

SEQ ID NO: 72669 - RNA, 19 nt, Artificial Sequence
  Description of Artificial Sequence: Synthetic oligonucleotide
  Antisense strand to SEQ ID NO: 72588
auccacacugagaaacagu

SEQ ID NO: 72670 - RNA, 19 nt, Artificial Sequence
  Description of Artificial Sequence: Synthetic oligonucleotide
  Sense strand starting at position 3849 of SEQ ID NO: 905
gaugacuguuucucagugu

SEQ ID NO: 72671 - RNA, 19 nt, Artificial Sequence
  Description of Artificial Sequence: Synthetic oligonucleotide
  Antisense strand to SEQ ID NO: 72590
acacugagaaacagucauc

SEQ ID NO: 72672 - RNA, 19 nt, Artificial Sequence
  Description of Artificial Sequence: Synthetic oligonucleotide
  Sense strand starting at position 3846 of SEQ ID NO: 905
ggagaugacuguuucucag

SEQ ID NO: 72673 - RNA, 19 nt, Artificial Sequence
  Description of Artificial Sequence: Synthetic oligonucleotide
  Antisense strand to SEQ ID NO: 72592
cugagaaacagucaucucc

SEQ ID NO: 72674 - RNA, 19 nt, Artificial Sequence
  Description of Artificial Sequence: Synthetic oligonucleotide
  Sense strand starting at position 3843 of SEQ ID NO: 905
ugaggagaugacuguuucu

SEQ ID NO: 72675 - RNA, 19 nt, Artificial Sequence
  Description of Artificial Sequence: Synthetic oligonucleotide
  Antisense strand to SEQ ID NO: 72594
agaaacagucaucuccuca

SEQ ID NO: 72676 - RNA, 19 nt, Artificial Sequence
  Description of Artificial Sequence: Synthetic oligonucleotide
  Sense strand starting at position 3830 of SEQ ID NO: 905
gaauguguaugugugagga

SEQ ID NO: 72677 - RNA, 19 nt, Artificial Sequence
  Description of Artificial Sequence: Synthetic oligonucleotide
  Antisense strand to SEQ ID NO: 72596
uccucacacauacacauuc

SEQ ID NO: 72678 - RNA, 19 nt, Artificial Sequence
  Description of Artificial Sequence: Synthetic oligonucleotide
  Sense strand starting at position 3792 of SEQ ID NO: 905
uugaucugucccuguguuu

SEQ ID NO: 72679 - RNA, 19 nt, Artificial Sequence
  Description of Artificial Sequence: Synthetic oligonucleotide
  Antisense strand to SEQ ID NO: 72598
aaacacagggacagaucaa

SEQ ID NO: 72680 - RNA, 19 nt, Artificial Sequence
  Description of Artificial Sequence: Synthetic oligonucleotide
  Sense strand starting at position 3791 of SEQ ID NO: 905
cuugaucugucccuguguu

SEQ ID NO: 72681 - RNA, 19 nt, Artificial Sequence
  Description of Artificial Sequence: Synthetic oligonucleotide
  Antisense strand to SEQ ID NO: 72600
aacacagggacagaucaag

SEQ ID NO: 72682 - RNA, 19 nt, Artificial Sequence
  Description of Artificial Sequence: Synthetic oligonucleotide
  Sense strand starting at position 3707 of SEQ ID NO: 905
ugagucugacugugcauau

SEQ ID NO: 72683 - RNA, 19 nt, Artificial Sequence
  Description of Artificial Sequence: Synthetic oligonucleotide
  Antisense strand to SEQ ID NO: 72602
auaugcacagucagacuca

SEQ ID NO: 72684 - RNA, 19 nt, Artificial Sequence
  Description of Artificial Sequence: Synthetic oligonucleotide
  Sense strand starting at position 3701 of SEQ ID NO: 905
uguguuugagucugacugu

SEQ ID NO: 72685 - RNA, 19 nt, Artificial Sequence
  Description of Artificial Sequence: Synthetic oligonucleotide
  Antisense strand to SEQ ID NO: 72604
acagucagacucaaacaca

SEQ ID NO: 72686 - RNA, 19 nt, Artificial Sequence
  Description of Artificial Sequence: Synthetic oligonucleotide
  Sense strand starting at position 3691 of SEQ ID NO: 905
gggaauccaguguguuuga

SEQ ID NO: 72687 - RNA, 19 nt, Artificial Sequence
  Description of Artificial Sequence: Synthetic oligonucleotide
  Antisense strand to SEQ ID NO: 72606
ucaaacacacuggauuccc

SEQ ID NO: 72688 - RNA, 19 nt, Artificial Sequence
  Description of Artificial Sequence: Synthetic oligonucleotide
  Sense strand starting at position 3689 of SEQ ID NO: 905
uagggaauccaguguguuu

SEQ ID NO: 72689 - RNA, 19 nt, Artificial Sequence
  Description of Artificial Sequence: Synthetic oligonucleotide
  Antisense strand to SEQ ID NO: 72608
aaacacacuggauucccua

SEQ ID NO: 72690 - RNA, 19 nt, Artificial Sequence
  Description of Artificial Sequence: Synthetic oligonucleotide
  Sense strand starting at position 3643 of SEQ ID NO: 905
guuuguguuugagucuuga

SEQ ID NO: 72691 - RNA, 19 nt, Artificial Sequence
  Description of Artificial Sequence: Synthetic oligonucleotide
  Antisense strand to SEQ ID NO: 72610
ucaagacucaaacacaaac

SEQ ID NO: 72692 - RNA, 19 nt, Artificial Sequence
  Description of Artificial Sequence: Synthetic oligonucleotide
  Sense strand starting at position 3618 of SEQ ID NO: 905
ucugcauaugugugcauga

SEQ ID NO: 72693 - RNA, 19 nt, Artificial Sequence
  Description of Artificial Sequence: Synthetic oligonucleotide
  Antisense strand to SEQ ID NO: 72612
ucaugcacacauaugcaga

SEQ ID NO: 72694 - RNA, 19 nt, Artificial Sequence
  Description of Artificial Sequence: Synthetic oligonucleotide
  Sense strand starting at position 3485 of SEQ ID NO: 905
gugugugaugucuugucuu

SEQ ID NO: 72695 - RNA, 19 nt, Artificial Sequence
  Description of Artificial Sequence: Synthetic oligonucleotide
  Antisense strand to SEQ ID NO: 72614
aagacaagacaucacacac

SEQ ID NO: 72696 - RNA, 19 nt, Artificial Sequence
  Description of Artificial Sequence: Synthetic oligonucleotide
  Sense strand starting at position 3449 of SEQ ID NO: 905
agaacuuuguccuugggca

SEQ ID NO: 72697 - RNA, 19 nt, Artificial Sequence
  Description of Artificial Sequence: Synthetic oligonucleotide
  Antisense strand to SEQ ID NO: 72616
ugcccaaggacaaaguucu

SEQ ID NO: 72698 - RNA, 19 nt, Artificial Sequence
  Description of Artificial Sequence: Synthetic oligonucleotide
  Sense strand starting at position 3269 of SEQ ID NO: 905
ggugacuccugggaugcaa

SEQ ID NO: 72699 - RNA, 19 nt, Artificial Sequence
  Description of Artificial Sequence: Synthetic oligonucleotide
  Antisense strand to SEQ ID NO: 72618
uugcaucccaggagucacc

SEQ ID NO: 72700 - RNA, 19 nt, Artificial Sequence
  Description of Artificial Sequence: Synthetic oligonucleotide
  Sense strand starting at position 3268 of SEQ ID NO: 905
aggugacuccugggaugca

SEQ ID NO: 72701 - RNA, 19 nt, Artificial Sequence
  Description of Artificial Sequence: Synthetic oligonucleotide
  Antisense strand to SEQ ID NO: 72620
ugcaucccaggagucaccu

SEQ ID NO: 72702 - RNA, 19 nt, Artificial Sequence
  Description of Artificial Sequence: Synthetic oligonucleotide
  Sense strand starting at position 3266 of SEQ ID NO: 905
ggaggugacuccugggaug

SEQ ID NO: 72703 - RNA, 19 nt, Artificial Sequence
  Description of Artificial Sequence: Synthetic oligonucleotide
  Antisense strand to SEQ ID NO: 72622
caucccaggagucaccucc

SEQ ID NO: 72704 - RNA, 19 nt, Artificial Sequence
  Description of Artificial Sequence: Synthetic oligonucleotide
  Sense strand starting at position 3217 of SEQ ID NO: 905
ggacauuccuaacauguca

SEQ ID NO: 72705 - RNA, 19 nt, Artificial Sequence
  Description of Artificial Sequence: Synthetic oligonucleotide
  Antisense strand to SEQ ID NO: 72624
ugacauguuaggaaugucc

SEQ ID NO: 72706 - RNA, 19 nt, Artificial Sequence
  Description of Artificial Sequence: Synthetic oligonucleotide
  Sense strand starting at position 3069 of SEQ ID NO: 905
ggauugugguauucgagga

SEQ ID NO: 72707 - RNA, 19 nt, Artificial Sequence
  Description of Artificial Sequence: Synthetic oligonucleotide
  Antisense strand to SEQ ID NO: 72626
uccucgaauaccacaaucc

SEQ ID NO: 72708 - RNA, 19 nt, Artificial Sequence
  Description of Artificial Sequence: Synthetic oligonucleotide
  Sense strand starting at position 2767 of SEQ ID NO: 905
ggcgcaaugacuugcccaa

SEQ ID NO: 72709 - RNA, 19 nt, Artificial Sequence
  Description of Artificial Sequence: Synthetic oligonucleotide
  Antisense strand to SEQ ID NO: 72628
uugggcaagucauugcgcc

SEQ ID NO: 72710 - RNA, 19 nt, Artificial Sequence
  Description of Artificial Sequence: Synthetic oligonucleotide
  Sense strand starting at position 2714 of SEQ ID NO: 905
gugagguggucguuauugu

SEQ ID NO: 72711 - RNA, 19 nt, Artificial Sequence
  Description of Artificial Sequence: Synthetic oligonucleotide
  Antisense strand to SEQ ID NO: 72630
acaauaacgaccaccucac

SEQ ID NO: 72712 - RNA, 19 nt, Artificial Sequence
  Description of Artificial Sequence: Synthetic oligonucleotide
  Sense strand starting at position 2712 of SEQ ID NO: 905
uggugagguggucguuauu

SEQ ID NO: 72713 - RNA, 19 nt, Artificial Sequence
  Description of Artificial Sequence: Synthetic oligonucleotide
  Antisense strand to SEQ ID NO: 72632
aauaacgaccaccucacca

SEQ ID NO: 72714 - RNA, 19 nt, Artificial Sequence
  Description of Artificial Sequence: Synthetic oligonucleotide
  Sense strand starting at position 2711 of SEQ ID NO: 905
cuggugagguggucguuau

SEQ ID NO: 72715 - RNA, 19 nt, Artificial Sequence
  Description of Artificial Sequence: Synthetic oligonucleotide
  Antisense strand to SEQ ID NO: 72634
auaacgaccaccucaccag

SEQ ID NO: 72716 - RNA, 19 nt, Artificial Sequence
  Description of Artificial Sequence: Synthetic oligonucleotide
  Sense strand starting at position 2653 of SEQ ID NO: 905
acagcuaccguuuggauaa

SEQ ID NO: 72717 - RNA, 19 nt, Artificial Sequence
  Description of Artificial Sequence: Synthetic oligonucleotide
  Antisense strand to SEQ ID NO: 72636
uuauccaaacgguagcugu

SEQ ID NO: 72718 - RNA, 19 nt, Artificial Sequence
  Description of Artificial Sequence: Synthetic oligonucleotide
  Sense strand starting at position 2615 of SEQ ID NO: 905
uuuauuaagcugugugcua

SEQ ID NO: 72719 - RNA, 19 nt, Artificial Sequence
  Description of Artificial Sequence: Synthetic oligonucleotide
  Antisense strand to SEQ ID NO: 72638
uagcacacagcuuaauaaa

SEQ ID NO: 72720 - RNA, 19 nt, Artificial Sequence
  Description of Artificial Sequence: Synthetic oligonucleotide
  Sense strand starting at position 2611 of SEQ ID NO: 905
acgauuuauuaagcugugu

SEQ ID NO: 72721 - RNA, 19 nt, Artificial Sequence
  Description of Artificial Sequence: Synthetic oligonucleotide
  Antisense strand to SEQ ID NO: 72640
acacagcuuaauaaaucgu

SEQ ID NO: 72722 - RNA, 19 nt, Artificial Sequence
  Description of Artificial Sequence: Synthetic oligonucleotide
  Sense strand starting at position 1156 of SEQ ID NO: 905
uuaacuuuggguugggaaa

SEQ ID NO: 72723 - RNA, 19 nt, Artificial Sequence
  Description of Artificial Sequence: Synthetic oligonucleotide
  Antisense strand to SEQ ID NO: 72642
uuucccaacccaaaguuaa

SEQ ID NO: 72724 - RNA, 19 nt, Artificial Sequence
  Description of Artificial Sequence: Synthetic oligonucleotide
  Sense strand starting at position 1126 of SEQ ID NO: 905
gcaaauauuucuugagcca

SEQ ID NO: 72725 - RNA, 19 nt, Artificial Sequence
  Description of Artificial Sequence: Synthetic oligonucleotide
  Antisense strand to SEQ ID NO: 72644
uggcucaagaaauauuugc

SEQ ID NO: 72726 - RNA, 19 nt, Artificial Sequence
  Description of Artificial Sequence: Synthetic oligonucleotide
  Sense strand starting at position 1113 of SEQ ID NO: 905
agccaucccgauugcaaau

SEQ ID NO: 72727 - RNA, 19 nt, Artificial Sequence
  Description of Artificial Sequence: Synthetic oligonucleotide
  Antisense strand to SEQ ID NO: 72646
auuugcaaucgggauggcu

SEQ ID NO: 72728 - RNA, 19 nt, Artificial Sequence
  Description of Artificial Sequence: Synthetic oligonucleotide
  Sense strand starting at position 1034 of SEQ ID NO: 905
ugagucucuugcucaaggu

SEQ ID NO: 72729 - RNA, 19 nt, Artificial Sequence
  Description of Artificial Sequence: Synthetic oligonucleotide
  Antisense strand to SEQ ID NO: 72648
accuugagcaagagacuca

SEQ ID NO: 72730 - RNA, 19 nt, Artificial Sequence
  Description of Artificial Sequence: Synthetic oligonucleotide
  Sense strand starting at position 1025 of SEQ ID NO: 905
cagagagauugagucucuu

SEQ ID NO: 72731 - RNA, 19 nt, Artificial Sequence
  Description of Artificial Sequence: Synthetic oligonucleotide
  Antisense strand to SEQ ID NO: 72650
aagagacucaaucucucug

SEQ ID NO: 72732 - RNA, 19 nt, Artificial Sequence
  Description of Artificial Sequence: Synthetic oligonucleotide
  Sense strand starting at position 1015 of SEQ ID NO: 905
gaccgaagcucagagagau

SEQ ID NO: 72733 - RNA, 19 nt, Artificial Sequence
  Description of Artificial Sequence: Synthetic oligonucleotide
  Antisense strand to SEQ ID NO: 72652
aucucucugagcuucgguc

SEQ ID NO: 72734 - RNA, 19 nt, Artificial Sequence
  Description of Artificial Sequence: Synthetic oligonucleotide
  Sense strand starting at position 970 of SEQ ID NO: 905
gacguuuccgguuaccauu

SEQ ID NO: 72735 - RNA, 19 nt, Artificial Sequence
  Description of Artificial Sequence: Synthetic oligonucleotide
  Antisense strand to SEQ ID NO: 72654
aaugguaaccggaaacguc

SEQ ID NO: 72736 - RNA, 19 nt, Artificial Sequence
  Description of Artificial Sequence: Synthetic oligonucleotide
  Sense strand starting at position 727 of SEQ ID NO: 905
cguauaaguucccucuuaa

SEQ ID NO: 72737 - RNA, 19 nt, Artificial Sequence
  Description of Artificial Sequence: Synthetic oligonucleotide
  Antisense strand to SEQ ID NO: 72656
uuaagagggaacuuauacg

SEQ ID NO: 72738 - RNA, 19 nt, Artificial Sequence
  Description of Artificial Sequence: Synthetic oligonucleotide
  Sense strand starting at position 726 of SEQ ID NO: 905
gcguauaaguucccucuua

SEQ ID NO: 72739 - RNA, 19 nt, Artificial Sequence
  Description of Artificial Sequence: Synthetic oligonucleotide
  Antisense strand to SEQ ID NO: 72658
uaagagggaacuuauacgc

SEQ ID NO: 72740 - RNA, 19 nt, Artificial Sequence
  Description of Artificial Sequence: Synthetic oligonucleotide
  Sense strand starting at position 215 of SEQ ID NO: 905
ccuaguucugccuaaucag

SEQ ID NO: 72741 - RNA, 19 nt, Artificial Sequence
  Description of Artificial Sequence: Synthetic oligonucleotide
  Antisense strand to SEQ ID NO: 72660
cugauuaggcagaacuagg

SEQ ID NO: 72742 - RNA, 19 nt, Artificial Sequence
  Description of Artificial Sequence: Synthetic oligonucleotide
  Sense strand starting at position 3679 of SEQ ID NO: 906
gccaacuugugguccuaca

SEQ ID NO: 72743 - RNA, 19 nt, Artificial Sequence
  Description of Artificial Sequence: Synthetic oligonucleotide
  Antisense strand to SEQ ID NO: 72662
uguaggaccacaaguuggc

SEQ ID NO: 72744 - RNA, 19 nt, Artificial Sequence
  Description of Artificial Sequence: Synthetic oligonucleotide
  Sense strand starting at position 3645 of SEQ ID NO: 906
cuuccugugugccaaacau

SEQ ID NO: 72745 - RNA, 19 nt, Artificial Sequence
  Description of Artificial Sequence: Synthetic oligonucleotide
  Antisense strand to SEQ ID NO: 72664
auguuuggcacacaggaag

SEQ ID NO: 72746 - RNA, 19 nt, Artificial Sequence
  Description of Artificial Sequence: Synthetic oligonucleotide
  Sense strand starting at position 3642 of SEQ ID NO: 906
gugcuuccugugugccaaa

SEQ ID NO: 72747 - RNA, 19 nt, Artificial Sequence
  Description of Artificial Sequence: Synthetic oligonucleotide
  Antisense strand to SEQ ID NO: 72666
uuuggcacacaggaagcac

SEQ ID NO: 72748 - RNA, 19 nt, Artificial Sequence
  Description of Artificial Sequence: Synthetic oligonucleotide
  Sense strand starting at position 3592 of SEQ ID NO: 906
gugcaaugcugggcuauua

SEQ ID NO: 72749 - RNA, 19 nt, Artificial Sequence
  Description of Artificial Sequence: Synthetic oligonucleotide
  Antisense strand to SEQ ID NO: 72668
uaauagcccagcauugcac

SEQ ID NO: 72750 - RNA, 19 nt, Artificial Sequence
  Description of Artificial Sequence: Synthetic oligonucleotide
  Sense strand starting at position 3591 of SEQ ID NO: 906
agugcaaugcugggcuauu

SEQ ID NO: 72751 - RNA, 19 nt, Artificial Sequence
  Description of Artificial Sequence: Synthetic oligonucleotide
  Antisense strand to SEQ ID NO: 72670
aauagcccagcauugcacu

SEQ ID NO: 72752 - RNA, 19 nt, Artificial Sequence
  Description of Artificial Sequence: Synthetic oligonucleotide
  Sense strand starting at position 3448 of SEQ ID NO: 906
gugcaauagcuuuaccauu

SEQ ID NO: 72753 - RNA, 19 nt, Artificial Sequence
  Description of Artificial Sequence: Synthetic oligonucleotide
  Antisense strand to SEQ ID NO: 72672
aaugguaaagcuauugcac

SEQ ID NO: 72754 - RNA, 19 nt, Artificial Sequence
  Description of Artificial Sequence: Synthetic oligonucleotide
  Sense strand starting at position 3437 of SEQ ID NO: 906
ugccaaguacugugcaaua

SEQ ID NO: 72755 - RNA, 19 nt, Artificial Sequence
  Description of Artificial Sequence: Synthetic oligonucleotide
  Antisense strand to SEQ ID NO: 72674
uauugcacaguacuuggca

SEQ ID NO: 72756 - RNA, 19 nt, Artificial Sequence
  Description of Artificial Sequence: Synthetic oligonucleotide
  Sense strand starting at position 3266 of SEQ ID NO: 906
agcuauucugugcauuaac

SEQ ID NO: 72757 - RNA, 19 nt, Artificial Sequence
  Description of Artificial Sequence: Synthetic oligonucleotide
  Antisense strand to SEQ ID NO: 72676
guuaaugcacagaauagcu

SEQ ID NO: 72758 - RNA, 19 nt, Artificial Sequence
  Description of Artificial Sequence: Synthetic oligonucleotide
  Sense strand starting at position 3264 of SEQ ID NO: 906
gaagcuauucugugcauua

SEQ ID NO: 72759 - RNA, 19 nt, Artificial Sequence
  Description of Artificial Sequence: Synthetic oligonucleotide
  Antisense strand to SEQ ID NO: 72678
uaaugcacagaauagcuuc

SEQ ID NO: 72760 - RNA, 19 nt, Artificial Sequence
  Description of Artificial Sequence: Synthetic oligonucleotide
  Sense strand starting at position 3263 of SEQ ID NO: 906
ggaagcuauucugugcauu

SEQ ID NO: 72761 - RNA, 19 nt, Artificial Sequence
  Description of Artificial Sequence: Synthetic oligonucleotide
  Antisense strand to SEQ ID NO: 72680
aaugcacagaauagcuucc

SEQ ID NO: 72762 - RNA, 19 nt, Artificial Sequence
  Description of Artificial Sequence: Synthetic oligonucleotide
  Sense strand starting at position 3219 of SEQ ID NO: 906
ccugguagcuaaugacauu

SEQ ID NO: 72763 - RNA, 19 nt, Artificial Sequence
  Description of Artificial Sequence: Synthetic oligonucleotide
  Antisense strand to SEQ ID NO: 72682
aaugucauuagcuaccagg

SEQ ID NO: 72764 - RNA, 19 nt, Artificial Sequence
  Description of Artificial Sequence: Synthetic oligonucleotide
  Sense strand starting at position 2848 of SEQ ID NO: 906
ggauuauccuaugauagga

SEQ ID NO: 72765 - RNA, 19 nt, Artificial Sequence
  Description of Artificial Sequence: Synthetic oligonucleotide
  Antisense strand to SEQ ID NO: 72684
uccuaucauaggauaaucc

SEQ ID NO: 72766 - RNA, 19 nt, Artificial Sequence
  Description of Artificial Sequence: Synthetic oligonucleotide
  Sense strand starting at position 2845 of SEQ ID NO: 906
augggauuauccuaugaua

SEQ ID NO: 72767 - RNA, 19 nt, Artificial Sequence
  Description of Artificial Sequence: Synthetic oligonucleotide
  Antisense strand to SEQ ID NO: 72686
uaucauaggauaaucccau

SEQ ID NO: 72768 - RNA, 19 nt, Artificial Sequence
  Description of Artificial Sequence: Synthetic oligonucleotide
  Sense strand starting at position 2819 of SEQ ID NO: 906
guaggcgucucuuuagaca

SEQ ID NO: 72769 - RNA, 19 nt, Artificial Sequence
  Description of Artificial Sequence: Synthetic oligonucleotide
  Antisense strand to SEQ ID NO: 72688
ugucuaaagagacgccuac

SEQ ID NO: 72770 - RNA, 19 nt, Artificial Sequence
  Description of Artificial Sequence: Synthetic oligonucleotide
  Sense strand starting at position 2720 of SEQ ID NO: 906
augcuuucuuugcaccaga

SEQ ID NO: 72771 - RNA, 19 nt, Artificial Sequence
  Description of Artificial Sequence: Synthetic oligonucleotide
  Antisense strand to SEQ ID NO: 72690
ucuggugcaaagaaagcau

SEQ ID NO: 72772 - RNA, 19 nt, Artificial Sequence
  Description of Artificial Sequence: Synthetic oligonucleotide
  Sense strand starting at position 2646 of SEQ ID NO: 906
ucagacuucugugaauuau

SEQ ID NO: 72773 - RNA, 19 nt, Artificial Sequence
  Description of Artificial Sequence: Synthetic oligonucleotide
  Antisense strand to SEQ ID NO: 72692
auaauucacagaagucuga

SEQ ID NO: 72774 - RNA, 19 nt, Artificial Sequence
  Description of Artificial Sequence: Synthetic oligonucleotide
  Sense strand starting at position 2553 of SEQ ID NO: 906
gcgacacuuuaccaauguu

SEQ ID NO: 72775 - RNA, 19 nt, Artificial Sequence
  Description of Artificial Sequence: Synthetic oligonucleotide
  Antisense strand to SEQ ID NO: 72694
aacauugguaaagugucgc

SEQ ID NO: 72776 - RNA, 19 nt, Artificial Sequence
  Description of Artificial Sequence: Synthetic oligonucleotide
  Sense strand starting at position 2545 of SEQ ID NO: 906
aguacugugcgacacuuua

SEQ ID NO: 72777 - RNA, 19 nt, Artificial Sequence
  Description of Artificial Sequence: Synthetic oligonucleotide
  Antisense strand to SEQ ID NO: 72696
uaaagugucgcacaguacu

SEQ ID NO: 72778 - RNA, 19 nt, Artificial Sequence
  Description of Artificial Sequence: Synthetic oligonucleotide
  Sense strand starting at position 2543 of SEQ ID NO: 906
caaguacugugcgacacuu

SEQ ID NO: 72779 - RNA, 19 nt, Artificial Sequence
  Description of Artificial Sequence: Synthetic oligonucleotide
  Antisense strand to SEQ ID NO: 72698
aagugucgcacaguacuug

SEQ ID NO: 72780 - RNA, 19 nt, Artificial Sequence
  Description of Artificial Sequence: Synthetic oligonucleotide
  Sense strand starting at position 2542 of SEQ ID NO: 906
ccaaguacugugcgacacu

SEQ ID NO: 72781 - RNA, 19 nt, Artificial Sequence
  Description of Artificial Sequence: Synthetic oligonucleotide
  Antisense strand to SEQ ID NO: 72700
agugucgcacaguacuugg

SEQ ID NO: 72782 - RNA, 19 nt, Artificial Sequence
  Description of Artificial Sequence: Synthetic oligonucleotide
  Sense strand starting at position 2530 of SEQ ID NO: 906
ggcugcugugugccaagua

SEQ ID NO: 72783 - RNA, 19 nt, Artificial Sequence
  Description of Artificial Sequence: Synthetic oligonucleotide
  Antisense strand to SEQ ID NO: 72702
uacuuggcacacagcagcc

SEQ ID NO: 72784 - RNA, 19 nt, Artificial Sequence
  Description of Artificial Sequence: Synthetic oligonucleotide
  Sense strand starting at position 2509 of SEQ ID NO: 906
gaaagcuaauguuugucga

SEQ ID NO: 72785 - RNA, 19 nt, Artificial Sequence
  Description of Artificial Sequence: Synthetic oligonucleotide
  Antisense strand to SEQ ID NO: 72704
ucgacaaacauuagcuuuc

SEQ ID NO: 72786 - RNA, 19 nt, Artificial Sequence
  Description of Artificial Sequence: Synthetic oligonucleotide
  Sense strand starting at position 2506 of SEQ ID NO: 906
aaagaaagcuaauguuugu

SEQ ID NO: 72787 - RNA, 19 nt, Artificial Sequence
  Description of Artificial Sequence: Synthetic oligonucleotide
  Antisense strand to SEQ ID NO: 72706
acaaacauuagcuuucuuu

SEQ ID NO: 72788 - RNA, 19 nt, Artificial Sequence
  Description of Artificial Sequence: Synthetic oligonucleotide
  Sense strand starting at position 2414 of SEQ ID NO: 906
cgaguuuguggccgcaaag

SEQ ID NO: 72789 - RNA, 19 nt, Artificial Sequence
  Description of Artificial Sequence: Synthetic oligonucleotide
  Antisense strand to SEQ ID NO: 72708
cuuugcggccacaaacucg

SEQ ID NO: 72790 - RNA, 19 nt, Artificial Sequence
  Description of Artificial Sequence: Synthetic oligonucleotide
  Sense strand starting at position 2413 of SEQ ID NO: 906
gcgaguuuguggccgcaaa

SEQ ID NO: 72791 - RNA, 19 nt, Artificial Sequence
  Description of Artificial Sequence: Synthetic oligonucleotide
  Antisense strand to SEQ ID NO: 72710
uuugcggccacaaacucgc

SEQ ID NO: 72792 - RNA, 19 nt, Artificial Sequence
  Description of Artificial Sequence: Synthetic oligonucleotide
  Sense strand starting at position 2393 of SEQ ID NO: 906
ggcugaaccuggguuagaa

SEQ ID NO: 72793 - RNA, 19 nt, Artificial Sequence
  Description of Artificial Sequence: Synthetic oligonucleotide
  Antisense strand to SEQ ID NO: 72712
uucuaacccagguucagcc

SEQ ID NO: 72794 - RNA, 19 nt, Artificial Sequence
  Description of Artificial Sequence: Synthetic oligonucleotide
  Sense strand starting at position 2272 of SEQ ID NO: 906
gucccacuucgucgugaaa

SEQ ID NO: 72795 - RNA, 19 nt, Artificial Sequence
  Description of Artificial Sequence: Synthetic oligonucleotide
  Antisense strand to SEQ ID NO: 72714
uuucacgacgaagugggac

SEQ ID NO: 72796 - RNA, 19 nt, Artificial Sequence
  Description of Artificial Sequence: Synthetic oligonucleotide
  Sense strand starting at position 2248 of SEQ ID NO: 906
gaaagcagcucuguaaacu

SEQ ID NO: 72797 - RNA, 19 nt, Artificial Sequence
  Description of Artificial Sequence: Synthetic oligonucleotide
  Antisense strand to SEQ ID NO: 72716
aguuuacagagcugcuuuc

SEQ ID NO: 72798 - RNA, 19 nt, Artificial Sequence
  Description of Artificial Sequence: Synthetic oligonucleotide
  Sense strand starting at position 1661 of SEQ ID NO: 906
ucaagauuaccucacgcuu

SEQ ID NO: 72799 - RNA, 19 nt, Artificial Sequence
  Description of Artificial Sequence: Synthetic oligonucleotide
  Antisense strand to SEQ ID NO: 72718
aagcgugagguaaucuuga

SEQ ID NO: 72800 - RNA, 19 nt, Artificial Sequence
  Description of Artificial Sequence: Synthetic oligonucleotide
  Sense strand starting at position 1531 of SEQ ID NO: 906
uuggguucucggcaagaaa

SEQ ID NO: 72801 - RNA, 19 nt, Artificial Sequence
  Description of Artificial Sequence: Synthetic oligonucleotide
  Antisense strand to SEQ ID NO: 72720
uuucuugccgagaacccaa

SEQ ID NO: 72802 - RNA, 19 nt, Artificial Sequence
  Description of Artificial Sequence: Synthetic oligonucleotide
  Sense strand starting at position 1351 of SEQ ID NO: 906
gagauuaagugagaagucu

SEQ ID NO: 72803 - RNA, 19 nt, Artificial Sequence
  Description of Artificial Sequence: Synthetic oligonucleotide
  Antisense strand to SEQ ID NO: 72722
agacuucucacuuaaucuc

SEQ ID NO: 72804 - RNA, 19 nt, Artificial Sequence
  Description of Artificial Sequence: Synthetic oligonucleotide
  Sense strand starting at position 1336 of SEQ ID NO: 906
caguaaccugcuugagaga

SEQ ID NO: 72805 - RNA, 19 nt, Artificial Sequence
  Description of Artificial Sequence: Synthetic oligonucleotide
  Antisense strand to SEQ ID NO: 72724
ucucucaagcagguuacug

SEQ ID NO: 72806 - RNA, 19 nt, Artificial Sequence
  Description of Artificial Sequence: Synthetic oligonucleotide
  Sense strand starting at position 1335 of SEQ ID NO: 906
acaguaaccugcuugagag

SEQ ID NO: 72807 - RNA, 19 nt, Artificial Sequence
  Description of Artificial Sequence: Synthetic oligonucleotide
  Antisense strand to SEQ ID NO: 72726
cucucaagcagguuacugu

SEQ ID NO: 72808 - RNA, 19 nt, Artificial Sequence
  Description of Artificial Sequence: Synthetic oligonucleotide
  Sense strand starting at position 1262 of SEQ ID NO: 906
gagagaacuucggucacug

SEQ ID NO: 72809 - RNA, 19 nt, Artificial Sequence
  Description of Artificial Sequence: Synthetic oligonucleotide
  Antisense strand to SEQ ID NO: 72728
cagugaccgaaguucucuc

SEQ ID NO: 72810 - RNA, 19 nt, Artificial Sequence
  Description of Artificial Sequence: Synthetic oligonucleotide
  Sense strand starting at position 1197 of SEQ ID NO: 906
ugacuccucagguggaguu

SEQ ID NO: 72811 - RNA, 19 nt, Artificial Sequence
  Description of Artificial Sequence: Synthetic oligonucleotide
  Antisense strand to SEQ ID NO: 72730
aacuccaccugaggaguca

SEQ ID NO: 72812 - RNA, 19 nt, Artificial Sequence
  Description of Artificial Sequence: Synthetic oligonucleotide
  Sense strand starting at position 1136 of SEQ ID NO: 906
cccugugccuggcuaagaa

SEQ ID NO: 72813 - RNA, 19 nt, Artificial Sequence
  Description of Artificial Sequence: Synthetic oligonucleotide
  Antisense strand to SEQ ID NO: 72732
uucuuagccaggcacaggg

SEQ ID NO: 72814 - RNA, 19 nt, Artificial Sequence
  Description of Artificial Sequence: Synthetic oligonucleotide
  Sense strand starting at position 1109 of SEQ ID NO: 906
ucugaaacuugcuguuauc

SEQ ID NO: 72815 - RNA, 19 nt, Artificial Sequence
  Description of Artificial Sequence: Synthetic oligonucleotide
  Antisense strand to SEQ ID NO: 72734
gauaacagcaaguuucaga

SEQ ID NO: 72816 - RNA, 19 nt, Artificial Sequence
  Description of Artificial Sequence: Synthetic oligonucleotide
  Sense strand starting at position 711 of SEQ ID NO: 906
guccaacuuccuugggaca

SEQ ID NO: 72817 - RNA, 19 nt, Artificial Sequence
  Description of Artificial Sequence: Synthetic oligonucleotide
  Antisense strand to SEQ ID NO: 72736
ugucccaaggaaguuggac

SEQ ID NO: 72818 - RNA, 19 nt, Artificial Sequence
  Description of Artificial Sequence: Synthetic oligonucleotide
  Sense strand starting at position 652 of SEQ ID NO: 906
accugaugaugucaauaac

SEQ ID NO: 72819 - RNA, 19 nt, Artificial Sequence
  Description of Artificial Sequence: Synthetic oligonucleotide
  Antisense strand to SEQ ID NO: 72738
guuauugacaucaucaggu

SEQ ID NO: 72820 - RNA, 19 nt, Artificial Sequence
  Description of Artificial Sequence: Synthetic oligonucleotide
  Sense strand starting at position 646 of SEQ ID NO: 906
guauaaaccugaugauguc

SEQ ID NO: 72821 - RNA, 19 nt, Artificial Sequence
  Description of Artificial Sequence: Synthetic oligonucleotide
  Antisense strand to SEQ ID NO: 72740
gacaucaucagguuuauac

SEQ ID NO: 72822 - RNA, 19 nt, Artificial Sequence
  Description of Artificial Sequence: Synthetic oligonucleotide
  Sense strand starting at position 81 of SEQ ID NO: 907
cguucuggcggaagaucuu

SEQ ID NO: 72823 - RNA, 19 nt, Artificial Sequence
  Description of Artificial Sequence: Synthetic oligonucleotide
  Antisense strand to SEQ ID NO: 72742
aagaucuuccgccagaacg

SEQ ID NO: 72824 - RNA, 19 nt, Artificial Sequence
  Description of Artificial Sequence: Synthetic oligonucleotide
  Sense strand starting at position 215 of SEQ ID NO: 907
gcagcauauggaggaauau

SEQ ID NO: 72825 - RNA, 19 nt, Artificial Sequence
  Description of Artificial Sequence: Synthetic oligonucleotide
  Antisense strand to SEQ ID NO: 72744
auauuccuccauaugcugc

SEQ ID NO: 72826 - RNA, 19 nt, Artificial Sequence
  Description of Artificial Sequence: Synthetic oligonucleotide
  Sense strand starting at position 225 of SEQ ID NO: 907
gaggaauauuucuguggag

SEQ ID NO: 72827 - RNA, 19 nt, Artificial Sequence
  Description of Artificial Sequence: Synthetic oligonucleotide
  Antisense strand to SEQ ID NO: 72746
cuccacagaaauauuccuc

SEQ ID NO: 72828 - RNA, 19 nt, Artificial Sequence
  Description of Artificial Sequence: Synthetic oligonucleotide
  Sense strand starting at position 254 of SEQ ID NO: 907
auggguucugacggauaau

SEQ ID NO: 72829 - RNA, 19 nt, Artificial Sequence
  Description of Artificial Sequence: Synthetic oligonucleotide
  Antisense strand to SEQ ID NO: 72748
auuauccgucagaacccau

SEQ ID NO: 72830 - RNA, 19 nt, Artificial Sequence
  Description of Artificial Sequence: Synthetic oligonucleotide
  Sense strand starting at position 255 of SEQ ID NO: 907
uggguucugacggauaauu

SEQ ID NO: 72831 - RNA, 19 nt, Artificial Sequence
  Description of Artificial Sequence: Synthetic oligonucleotide
  Antisense strand to SEQ ID NO: 72750
aauuauccgucagaaccca

SEQ ID NO: 72832 - RNA, 19 nt, Artificial Sequence
  Description of Artificial Sequence: Synthetic oligonucleotide
  Sense strand starting at position 357 of SEQ ID NO: 907
caaaguuuccuagaagcga

SEQ ID NO: 72833 - RNA, 19 nt, Artificial Sequence
  Description of Artificial Sequence: Synthetic oligonucleotide
  Antisense strand to SEQ ID NO: 72752
ucgcuucuaggaaacuuug

SEQ ID NO: 72834 - RNA, 19 nt, Artificial Sequence
  Description of Artificial Sequence: Synthetic oligonucleotide
  Sense strand starting at position 404 of SEQ ID NO: 907
uugggauccuucuuaacca

SEQ ID NO: 72835 - RNA, 19 nt, Artificial Sequence
  Description of Artificial Sequence: Synthetic oligonucleotide
  Antisense strand to SEQ ID NO: 72754
ugguuaagaaggaucccaa

SEQ ID NO: 72836 - RNA, 19 nt, Artificial Sequence
  Description of Artificial Sequence: Synthetic oligonucleotide
  Sense strand starting at position 455 of SEQ ID NO: 907
gcgacaauccacgaacaaa

SEQ ID NO: 72837 - RNA, 19 nt, Artificial Sequence
  Description of Artificial Sequence: Synthetic oligonucleotide
  Antisense strand to SEQ ID NO: 72756
uuuguucguggauugucgc

SEQ ID NO: 72838 - RNA, 19 nt, Artificial Sequence
  Description of Artificial Sequence: Synthetic oligonucleotide
  Sense strand starting at position 554 of SEQ ID NO: 907
gccagacuucgcgcucgaa

SEQ ID NO: 72839 - RNA, 19 nt, Artificial Sequence
  Description of Artificial Sequence: Synthetic oligonucleotide
  Antisense strand to SEQ ID NO: 72758
uucgagcgcgaagucuggc

SEQ ID NO: 72840 - RNA, 19 nt, Artificial Sequence
  Description of Artificial Sequence: Synthetic oligonucleotide
  Sense strand starting at position 555 of SEQ ID NO: 907
ccagacuucgcgcucgaaa

SEQ ID NO: 72841 - RNA, 19 nt, Artificial Sequence
  Description of Artificial Sequence: Synthetic oligonucleotide
  Antisense strand to SEQ ID NO: 72760
uuucgagcgcgaagucugg

SEQ ID NO: 72842 - RNA, 19 nt, Artificial Sequence
  Description of Artificial Sequence: Synthetic oligonucleotide
  Sense strand starting at position 556 of SEQ ID NO: 907
cagacuucgcgcucgaaac

SEQ ID NO: 72843 - RNA, 19 nt, Artificial Sequence
  Description of Artificial Sequence: Synthetic oligonucleotide
  Antisense strand to SEQ ID NO: 72762
guuucgagcgcgaagucug

SEQ ID NO: 72844 - RNA, 19 nt, Artificial Sequence
  Description of Artificial Sequence: Synthetic oligonucleotide
  Sense strand starting at position 568 of SEQ ID NO: 907
ucgaaaccucugggaguau

SEQ ID NO: 72845 - RNA, 19 nt, Artificial Sequence
  Description of Artificial Sequence: Synthetic oligonucleotide
  Antisense strand to SEQ ID NO: 72764
auacucccagagguuucga

SEQ ID NO: 72846 - RNA, 19 nt, Artificial Sequence
  Description of Artificial Sequence: Synthetic oligonucleotide
  Sense strand starting at position 827 of SEQ ID NO: 907
gugcccuucccgguguuau

SEQ ID NO: 72847 - RNA, 19 nt, Artificial Sequence
  Description of Artificial Sequence: Synthetic oligonucleotide
  Antisense strand to SEQ ID NO: 72766
auaacaccgggaagggcac

SEQ ID NO: 72848 - RNA, 19 nt, Artificial Sequence
  Description of Artificial Sequence: Synthetic oligonucleotide
  Sense strand starting at position 1829 of SEQ ID NO: 907
gccuuugcuaaggaggaaa

SEQ ID NO: 72849 - RNA, 19 nt, Artificial Sequence
  Description of Artificial Sequence: Synthetic oligonucleotide
  Antisense strand to SEQ ID NO: 72768
uuuccuccuuagcaaaggc

SEQ ID NO: 72850 - RNA, 19 nt, Artificial Sequence
  Description of Artificial Sequence: Synthetic oligonucleotide
  Sense strand starting at position 1840 of SEQ ID NO: 907
ggaggaaacgcuugaguuu

SEQ ID NO: 72851 - RNA, 19 nt, Artificial Sequence
  Description of Artificial Sequence: Synthetic oligonucleotide
  Antisense strand to SEQ ID NO: 72770
aaacucaagcguuuccucc

SEQ ID NO: 72852 - RNA, 19 nt, Artificial Sequence
  Description of Artificial Sequence: Synthetic oligonucleotide
  Sense strand starting at position 1908 of SEQ ID NO: 907
gggugcauucgaucucguu

SEQ ID NO: 72853 - RNA, 19 nt, Artificial Sequence
  Description of Artificial Sequence: Synthetic oligonucleotide
  Antisense strand to SEQ ID NO: 72772
aacgagaucgaaugcaccc

SEQ ID NO: 72854 - RNA, 19 nt, Artificial Sequence
  Description of Artificial Sequence: Synthetic oligonucleotide
  Sense strand starting at position 1909 of SEQ ID NO: 907
ggugcauucgaucucguuu

SEQ ID NO: 72855 - RNA, 19 nt, Artificial Sequence
  Description of Artificial Sequence: Synthetic oligonucleotide
  Antisense strand to SEQ ID NO: 72774
aaacgagaucgaaugcacc

SEQ ID NO: 72856 - RNA, 19 nt, Artificial Sequence
  Description of Artificial Sequence: Synthetic oligonucleotide
  Sense strand starting at position 1939 of SEQ ID NO: 907
ugucuugccaaggagacuu

SEQ ID NO: 72857 - RNA, 19 nt, Artificial Sequence
  Description of Artificial Sequence: Synthetic oligonucleotide
  Antisense strand to SEQ ID NO: 72776
aagucuccuuggcaagaca

SEQ ID NO: 72858 - RNA, 19 nt, Artificial Sequence
  Description of Artificial Sequence: Synthetic oligonucleotide
  Sense strand starting at position 1982 of SEQ ID NO: 907
caaagaugagcucaguucu

SEQ ID NO: 72859 - RNA, 19 nt, Artificial Sequence
  Description of Artificial Sequence: Synthetic oligonucleotide
  Antisense strand to SEQ ID NO: 72778
agaacugagcucaucuuug

SEQ ID NO: 72860 - RNA, 19 nt, Artificial Sequence
  Description of Artificial Sequence: Synthetic oligonucleotide
  Sense strand starting at position 2134 of SEQ ID NO: 907
ggcauuaaagaaugaguag

SEQ ID NO: 72861 - RNA, 19 nt, Artificial Sequence
  Description of Artificial Sequence: Synthetic oligonucleotide
  Antisense strand to SEQ ID NO: 72780
cuacucauucuuuaaugcc

SEQ ID NO: 72862 - RNA, 19 nt, Artificial Sequence
  Description of Artificial Sequence: Synthetic oligonucleotide
  Sense strand starting at position 2231 of SEQ ID NO: 907
ggucucuuccauuaagcua

SEQ ID NO: 72863 - RNA, 19 nt, Artificial Sequence
  Description of Artificial Sequence: Synthetic oligonucleotide
  Antisense strand to SEQ ID NO: 72782
uagcuuaauggaagagacc

SEQ ID NO: 72864 - RNA, 19 nt, Artificial Sequence
  Description of Artificial Sequence: Synthetic oligonucleotide
  Sense strand starting at position 2311 of SEQ ID NO: 907
acaccuauguucccuuaga

SEQ ID NO: 72865 - RNA, 19 nt, Artificial Sequence
  Description of Artificial Sequence: Synthetic oligonucleotide
  Antisense strand to SEQ ID NO: 72784
ucuaagggaacauaggugu

SEQ ID NO: 72866 - RNA, 19 nt, Artificial Sequence
  Description of Artificial Sequence: Synthetic oligonucleotide
  Sense strand starting at position 2478 of SEQ ID NO: 907
caaggaaguccaggaugua

SEQ ID NO: 72867 - RNA, 19 nt, Artificial Sequence
  Description of Artificial Sequence: Synthetic oligonucleotide
  Antisense strand to SEQ ID NO: 72786
uacauccuggacuuccuug

SEQ ID NO: 72868 - RNA, 19 nt, Artificial Sequence
  Description of Artificial Sequence: Synthetic oligonucleotide
  Sense strand starting at position 2579 of SEQ ID NO: 907
uuuccucugcuguaagaug

SEQ ID NO: 72869 - RNA, 19 nt, Artificial Sequence
  Description of Artificial Sequence: Synthetic oligonucleotide
  Antisense strand to SEQ ID NO: 72788
caucuuacagcagaggaaa

SEQ ID NO: 72870 - RNA, 19 nt, Artificial Sequence
  Description of Artificial Sequence: Synthetic oligonucleotide
  Sense strand starting at position 2584 of SEQ ID NO: 907
ucugcuguaagaugggaua

SEQ ID NO: 72871 - RNA, 19 nt, Artificial Sequence
  Description of Artificial Sequence: Synthetic oligonucleotide
  Antisense strand to SEQ ID NO: 72790
uaucccaucuuacagcaga

SEQ ID NO: 72872 - RNA, 19 nt, Artificial Sequence
  Description of Artificial Sequence: Synthetic oligonucleotide
  Sense strand starting at position 2676 of SEQ ID NO: 907
cccagaguccugcaugaca

SEQ ID NO: 72873 - RNA, 19 nt, Artificial Sequence
  Description of Artificial Sequence: Synthetic oligonucleotide
  Antisense strand to SEQ ID NO: 72792
ugucaugcaggacucuggg

SEQ ID NO: 72874 - RNA, 19 nt, Artificial Sequence
  Description of Artificial Sequence: Synthetic oligonucleotide
  Sense strand starting at position 2678 of SEQ ID NO: 907
cagaguccugcaugacacu

SEQ ID NO: 72875 - RNA, 19 nt, Artificial Sequence
  Description of Artificial Sequence: Synthetic oligonucleotide
  Antisense strand to SEQ ID NO: 72794
agugucaugcaggacucug

SEQ ID NO: 72876 - RNA, 19 nt, Artificial Sequence
  Description of Artificial Sequence: Synthetic oligonucleotide
  Sense strand starting at position 2709 of SEQ ID NO: 907
uguccauggcaauauguuu

SEQ ID NO: 72877 - RNA, 19 nt, Artificial Sequence
  Description of Artificial Sequence: Synthetic oligonucleotide
  Antisense strand to SEQ ID NO: 72796
aaacauauugccauggaca

SEQ ID NO: 72878 - RNA, 19 nt, Artificial Sequence
  Description of Artificial Sequence: Synthetic oligonucleotide
  Sense strand starting at position 2861 of SEQ ID NO: 907
gccacaagcuugucaauuu

SEQ ID NO: 72879 - RNA, 19 nt, Artificial Sequence
  Description of Artificial Sequence: Synthetic oligonucleotide
  Antisense strand to SEQ ID NO: 72798
aaauugacaagcuuguggc

SEQ ID NO: 72880 - RNA, 19 nt, Artificial Sequence
  Description of Artificial Sequence: Synthetic oligonucleotide
  Sense strand starting at position 2869 of SEQ ID NO: 907
cuugucaauuuguuuccau

SEQ ID NO: 72881 - RNA, 19 nt, Artificial Sequence
  Description of Artificial Sequence: Synthetic oligonucleotide
  Antisense strand to SEQ ID NO: 72800
auggaaacaaauugacaag

SEQ ID NO: 72882 - RNA, 19 nt, Artificial Sequence
  Description of Artificial Sequence: Synthetic oligonucleotide
  Sense strand starting at position 2930 of SEQ ID NO: 907
ugguguuuacucuacaaug

SEQ ID NO: 72883 - RNA, 19 nt, Artificial Sequence
  Description of Artificial Sequence: Synthetic oligonucleotide
  Antisense strand to SEQ ID NO: 72802
cauuguagaguaaacacca

SEQ ID NO: 72884 - RNA, 19 nt, Artificial Sequence
  Description of Artificial Sequence: Synthetic oligonucleotide
  Sense strand starting at position 2932 of SEQ ID NO: 907
guguuuacucuacaaugca

SEQ ID NO: 72885 - RNA, 19 nt, Artificial Sequence
  Description of Artificial Sequence: Synthetic oligonucleotide
  Antisense strand to SEQ ID NO: 72804
ugcauuguagaguaaacac

SEQ ID NO: 72886 - RNA, 19 nt, Artificial Sequence
  Description of Artificial Sequence: Synthetic oligonucleotide
  Sense strand starting at position 2971 of SEQ ID NO: 907
aguguaauaguccagauuc

SEQ ID NO: 72887 - RNA, 19 nt, Artificial Sequence
  Description of Artificial Sequence: Synthetic oligonucleotide
  Antisense strand to SEQ ID NO: 72806
gaaucuggacuauuacacu

SEQ ID NO: 72888 - RNA, 19 nt, Artificial Sequence
  Description of Artificial Sequence: Synthetic oligonucleotide
  Sense strand starting at position 2973 of SEQ ID NO: 907
uguaauaguccagauucua

SEQ ID NO: 72889 - RNA, 19 nt, Artificial Sequence
  Description of Artificial Sequence: Synthetic oligonucleotide
  Antisense strand to SEQ ID NO: 72808
uagaaucuggacuauuaca

SEQ ID NO: 72890 - RNA, 19 nt, Artificial Sequence
  Description of Artificial Sequence: Synthetic oligonucleotide
  Sense strand starting at position 3014 of SEQ ID NO: 907
gagagagucuugucacaag

SEQ ID NO: 72891 - RNA, 19 nt, Artificial Sequence
  Description of Artificial Sequence: Synthetic oligonucleotide
  Antisense strand to SEQ ID NO: 72810
cuugugacaagacucucuc

SEQ ID NO: 72892 - RNA, 19 nt, Artificial Sequence
  Description of Artificial Sequence: Synthetic oligonucleotide
  Sense strand starting at position 3024 of SEQ ID NO: 907
ugucacaaguucuugaaga

SEQ ID NO: 72893 - RNA, 19 nt, Artificial Sequence
  Description of Artificial Sequence: Synthetic oligonucleotide
  Antisense strand to SEQ ID NO: 72812
ucuucaagaacuugugaca

SEQ ID NO: 72894 - RNA, 19 nt, Artificial Sequence
  Description of Artificial Sequence: Synthetic oligonucleotide
  Sense strand starting at position 3029 of SEQ ID NO: 907
caaguucuugaagauguuu

SEQ ID NO: 72895 - RNA, 19 nt, Artificial Sequence
  Description of Artificial Sequence: Synthetic oligonucleotide
  Antisense strand to SEQ ID NO: 72814
aaacaucuucaagaacuug

SEQ ID NO: 72896 - RNA, 19 nt, Artificial Sequence
  Description of Artificial Sequence: Synthetic oligonucleotide
  Sense strand starting at position 3050 of SEQ ID NO: 907
agaauaagucuccagcauc

SEQ ID NO: 72897 - RNA, 19 nt, Artificial Sequence
  Description of Artificial Sequence: Synthetic oligonucleotide
  Antisense strand to SEQ ID NO: 72816
gaugcuggagacuuauucu

SEQ ID NO: 72898 - RNA, 19 nt, Artificial Sequence
  Description of Artificial Sequence: Synthetic oligonucleotide
  Sense strand starting at position 3053 of SEQ ID NO: 907
auaagucuccagcaucaga

SEQ ID NO: 72899 - RNA, 19 nt, Artificial Sequence
  Description of Artificial Sequence: Synthetic oligonucleotide
  Antisense strand to SEQ ID NO: 72818
ucugaugcuggagacuuau

SEQ ID NO: 72900 - RNA, 19 nt, Artificial Sequence
  Description of Artificial Sequence: Synthetic oligonucleotide
  Sense strand starting at position 3069 of SEQ ID NO: 907
agaacagguuuccuuuaac

SEQ ID NO: 72901 - RNA, 19 nt, Artificial Sequence
  Description of Artificial Sequence: Synthetic oligonucleotide
  Antisense strand to SEQ ID NO: 72820
guuaaaggaaaccuguucu

SEQ ID NO: 72902 - RNA, 19 nt, Artificial Sequence
  Description of Artificial Sequence: Synthetic oligonucleotide
  Sense strand starting at position 297 of SEQ ID NO: 909
cguucuggcggaagaucuu

SEQ ID NO: 72903 - RNA, 19 nt, Artificial Sequence
  Description of Artificial Sequence: Synthetic oligonucleotide
  Antisense strand to SEQ ID NO: 72822
aagaucuuccgccagaacg

SEQ ID NO: 72904 - RNA, 19 nt, Artificial Sequence
  Description of Artificial Sequence: Synthetic oligonucleotide
  Sense strand starting at position 431 of SEQ ID NO: 909
gcagcauauggaggaauau

SEQ ID NO: 72905 - RNA, 19 nt, Artificial Sequence
  Description of Artificial Sequence: Synthetic oligonucleotide
  Antisense strand to SEQ ID NO: 72824
auauuccuccauaugcugc

SEQ ID NO: 72906 - RNA, 19 nt, Artificial Sequence
  Description of Artificial Sequence: Synthetic oligonucleotide
  Sense strand starting at position 441 of SEQ ID NO: 909
gaggaauauuucuguggag

SEQ ID NO: 72907 - RNA, 19 nt, Artificial Sequence
  Description of Artificial Sequence: Synthetic oligonucleotide
  Antisense strand to SEQ ID NO: 72826
cuccacagaaauauuccuc

SEQ ID NO: 72908 - RNA, 19 nt, Artificial Sequence
  Description of Artificial Sequence: Synthetic oligonucleotide
  Sense strand starting at position 470 of SEQ ID NO: 909
auggguucugacggauaau

SEQ ID NO: 72909 - RNA, 19 nt, Artificial Sequence
  Description of Artificial Sequence: Synthetic oligonucleotide
  Antisense strand to SEQ ID NO: 72828
auuauccgucagaacccau

SEQ ID NO: 72910 - RNA, 19 nt, Artificial Sequence
  Description of Artificial Sequence: Synthetic oligonucleotide
  Sense strand starting at position 471 of SEQ ID NO: 909
uggguucugacggauaauu

SEQ ID NO: 72911 - RNA, 19 nt, Artificial Sequence
  Description of Artificial Sequence: Synthetic oligonucleotide
  Antisense strand to SEQ ID NO: 72830
aauuauccgucagaaccca

SEQ ID NO: 72912 - RNA, 19 nt, Artificial Sequence
  Description of Artificial Sequence: Synthetic oligonucleotide
  Sense strand starting at position 573 of SEQ ID NO: 909
caaaguuuccuagaagcga

SEQ ID NO: 72913 - RNA, 19 nt, Artificial Sequence
  Description of Artificial Sequence: Synthetic oligonucleotide
  Antisense strand to SEQ ID NO: 72832
ucgcuucuaggaaacuuug

SEQ ID NO: 72914 - RNA, 19 nt, Artificial Sequence
  Description of Artificial Sequence: Synthetic oligonucleotide
  Sense strand starting at position 620 of SEQ ID NO: 909
uugggauccuucuuaacca

SEQ ID NO: 72915 - RNA, 19 nt, Artificial Sequence
  Description of Artificial Sequence: Synthetic oligonucleotide
  Antisense strand to SEQ ID NO: 72834
ugguuaagaaggaucccaa

SEQ ID NO: 72916 - RNA, 19 nt, Artificial Sequence
  Description of Artificial Sequence: Synthetic oligonucleotide
  Sense strand starting at position 671 of SEQ ID NO: 909
gcgacaauccacgaacaaa

SEQ ID NO: 72917 - RNA, 19 nt, Artificial Sequence
  Description of Artificial Sequence: Synthetic oligonucleotide
  Antisense strand to SEQ ID NO: 72836
uuuguucguggauugucgc

SEQ ID NO: 72918 - RNA, 19 nt, Artificial Sequence
  Description of Artificial Sequence: Synthetic oligonucleotide
  Sense strand starting at position 770 of SEQ ID NO: 909
gccagacuucgcgcucgaa

SEQ ID NO: 72919 - RNA, 19 nt, Artificial Sequence
  Description of Artificial Sequence: Synthetic oligonucleotide
  Antisense strand to SEQ ID NO: 72838
uucgagcgcgaagucuggc

SEQ ID NO: 72920 - RNA, 19 nt, Artificial Sequence
  Description of Artificial Sequence: Synthetic oligonucleotide
  Sense strand starting at position 771 of SEQ ID NO: 909
ccagacuucgcgcucgaaa

SEQ ID NO: 72921 - RNA, 19 nt, Artificial Sequence
  Description of Artificial Sequence: Synthetic oligonucleotide
  Antisense strand to SEQ ID NO: 72840
uuucgagcgcgaagucugg

SEQ ID NO: 72922 - RNA, 19 nt, Artificial Sequence
  Description of Artificial Sequence: Synthetic oligonucleotide
  Sense strand starting at position 772 of SEQ ID NO: 909
cagacuucgcgcucgaaac

SEQ ID NO: 72923 - RNA, 19 nt, Artificial Sequence
  Description of Artificial Sequence: Synthetic oligonucleotide
  Antisense strand to SEQ ID NO: 72842
guuucgagcgcgaagucug

SEQ ID NO: 72924 - RNA, 19 nt, Artificial Sequence
  Description of Artificial Sequence: Synthetic oligonucleotide
  Sense strand starting at position 784 of SEQ ID NO: 909
ucgaaaccucugggaguau

SEQ ID NO: 72925 - RNA, 19 nt, Artificial Sequence
  Description of Artificial Sequence: Synthetic oligonucleotide
  Antisense strand to SEQ ID NO: 72844
auacucccagagguuucga

SEQ ID NO: 72926 - RNA, 19 nt, Artificial Sequence
  Description of Artificial Sequence: Synthetic oligonucleotide
  Sense strand starting at position 1043 of SEQ ID NO: 909
gugcccuucccgguguuau

SEQ ID NO: 72927 - RNA, 19 nt, Artificial Sequence
  Description of Artificial Sequence: Synthetic oligonucleotide
  Antisense strand to SEQ ID NO: 72846
auaacaccgggaagggcac

SEQ ID NO: 72928 - RNA, 19 nt, Artificial Sequence
  Description of Artificial Sequence: Synthetic oligonucleotide
  Sense strand starting at position 2045 of SEQ ID NO: 909
gccuuugcuaaggaggaaa

SEQ ID NO: 72929 - RNA, 19 nt, Artificial Sequence
  Description of Artificial Sequence: Synthetic oligonucleotide
  Antisense strand to SEQ ID NO: 72848
uuuccuccuuagcaaaggc

SEQ ID NO: 72930 - RNA, 19 nt, Artificial Sequence
  Description of Artificial Sequence: Synthetic oligonucleotide
  Sense strand starting at position 2056 of SEQ ID NO: 909
ggaggaaacgcuugaguuu

SEQ ID NO: 72931 - RNA, 19 nt, Artificial Sequence
  Description of Artificial Sequence: Synthetic oligonucleotide
  Antisense strand to SEQ ID NO: 72850
aaacucaagcguuuccucc

SEQ ID NO: 72932 - RNA, 19 nt, Artificial Sequence
  Description of Artificial Sequence: Synthetic oligonucleotide
  Sense strand starting at position 2124 of SEQ ID NO: 909
gggugcauucgaucucguu

SEQ ID NO: 72933 - RNA, 19 nt, Artificial Sequence
  Description of Artificial Sequence: Synthetic oligonucleotide
  Antisense strand to SEQ ID NO: 72852
aacgagaucgaaugcaccc

SEQ ID NO: 72934 - RNA, 19 nt, Artificial Sequence
  Description of Artificial Sequence: Synthetic oligonucleotide
  Sense strand starting at position 2125 of SEQ ID NO: 909
ggugcauucgaucucguuu

SEQ ID NO: 72935 - RNA, 19 nt, Artificial Sequence
  Description of Artificial Sequence: Synthetic oligonucleotide
  Antisense strand to SEQ ID NO: 72854
aaacgagaucgaaugcacc

SEQ ID NO: 72936 - RNA, 19 nt, Artificial Sequence
  Description of Artificial Sequence: Synthetic oligonucleotide
  Sense strand starting at position 2155 of SEQ ID NO: 909
ugucuugccaaggagacuu

SEQ ID NO: 72937 - RNA, 19 nt, Artificial Sequence
  Description of Artificial Sequence: Synthetic oligonucleotide
  Antisense strand to SEQ ID NO: 72856
aagucuccuuggcaagaca

SEQ ID NO: 72938 - RNA, 19 nt, Artificial Sequence
  Description of Artificial Sequence: Synthetic oligonucleotide
  Sense strand starting at position 2198 of SEQ ID NO: 909
caaagaugagcucaguucu

SEQ ID NO: 72939 - RNA, 19 nt, Artificial Sequence
  Description of Artificial Sequence: Synthetic oligonucleotide
  Antisense strand to SEQ ID NO: 72858
agaacugagcucaucuuug

SEQ ID NO: 72940 - RNA, 19 nt, Artificial Sequence
  Description of Artificial Sequence: Synthetic oligonucleotide
  Sense strand starting at position 2350 of SEQ ID NO: 909
ggcauuaaagaaugaguag

SEQ ID NO: 72941 - RNA, 19 nt, Artificial Sequence
  Description of Artificial Sequence: Synthetic oligonucleotide
  Antisense strand to SEQ ID NO: 72860
cuacucauucuuuaaugcc

SEQ ID NO: 72942 - RNA, 19 nt, Artificial Sequence
  Description of Artificial Sequence: Synthetic oligonucleotide
  Sense strand starting at position 2447 of SEQ ID NO: 909
ggucucuuccauuaagcua

SEQ ID NO: 72943 - RNA, 19 nt, Artificial Sequence
  Description of Artificial Sequence: Synthetic oligonucleotide
  Antisense strand to SEQ ID NO: 72862
uagcuuaauggaagagacc

SEQ ID NO: 72944 - RNA, 19 nt, Artificial Sequence
  Description of Artificial Sequence: Synthetic oligonucleotide
  Sense strand starting at position 2527 of SEQ ID NO: 909
acaccuauguucccuuaga

SEQ ID NO: 72945 - RNA, 19 nt, Artificial Sequence
  Description of Artificial Sequence: Synthetic oligonucleotide
  Antisense strand to SEQ ID NO: 72864
ucuaagggaacauaggugu

SEQ ID NO: 72946 - RNA, 19 nt, Artificial Sequence
  Description of Artificial Sequence: Synthetic oligonucleotide
  Sense strand starting at position 2694 of SEQ ID NO: 909
caaggaaguccaggaugua

SEQ ID NO: 72947 - RNA, 19 nt, Artificial Sequence
  Description of Artificial Sequence: Synthetic oligonucleotide
  Antisense strand to SEQ ID NO: 72866
uacauccuggacuuccuug

SEQ ID NO: 72948 - RNA, 19 nt, Artificial Sequence
  Description of Artificial Sequence: Synthetic oligonucleotide
  Sense strand starting at position 2795 of SEQ ID NO: 909
uuuccucugcuguaagaug

SEQ ID NO: 72949 - RNA, 19 nt, Artificial Sequence
  Description of Artificial Sequence: Synthetic oligonucleotide
  Antisense strand to SEQ ID NO: 72868
caucuuacagcagaggaaa

SEQ ID NO: 72950 - RNA, 19 nt, Artificial Sequence
  Description of Artificial Sequence: Synthetic oligonucleotide
  Sense strand starting at position 2800 of SEQ ID NO: 909
ucugcuguaagaugggaua

SEQ ID NO: 72951 - RNA, 19 nt, Artificial Sequence
  Description of Artificial Sequence: Synthetic oligonucleotide
  Antisense strand to SEQ ID NO: 72870
uaucccaucuuacagcaga

SEQ ID NO: 72952 - RNA, 19 nt, Artificial Sequence
  Description of Artificial Sequence: Synthetic oligonucleotide
  Sense strand starting at position 2892 of SEQ ID NO: 909
cccagaguccugcaugaca

SEQ ID NO: 72953 - RNA, 19 nt, Artificial Sequence
  Description of Artificial Sequence: Synthetic oligonucleotide
  Antisense strand to SEQ ID NO: 72872
ugucaugcaggacucuggg

SEQ ID NO: 72954 - RNA, 19 nt, Artificial Sequence
  Description of Artificial Sequence: Synthetic oligonucleotide
  Sense strand starting at position 2894 of SEQ ID NO: 909
cagaguccugcaugacacu

SEQ ID NO: 72955 - RNA, 19 nt, Artificial Sequence
  Description of Artificial Sequence: Synthetic oligonucleotide
  Antisense strand to SEQ ID NO: 72874
agugucaugcaggacucug

SEQ ID NO: 72956 - RNA, 19 nt, Artificial Sequence
  Description of Artificial Sequence: Synthetic oligonucleotide
  Sense strand starting at position 2925 of SEQ ID NO: 909
uguccauggcaauauguuu

SEQ ID NO: 72957 - RNA, 19 nt, Artificial Sequence
  Description of Artificial Sequence: Synthetic oligonucleotide
  Antisense strand to SEQ ID NO: 72876
aaacauauugccauggaca

SEQ ID NO: 72958 - RNA, 19 nt, Artificial Sequence
  Description of Artificial Sequence: Synthetic oligonucleotide
  Sense strand starting at position 3077 of SEQ ID NO: 909
gccacaagcuugucaauuu

SEQ ID NO: 72959 - RNA, 19 nt, Artificial Sequence
  Description of Artificial Sequence: Synthetic oligonucleotide
  Antisense strand to SEQ ID NO: 72878
aaauugacaagcuuguggc

SEQ ID NO: 72960 - RNA, 19 nt, Artificial Sequence
  Description of Artificial Sequence: Synthetic oligonucleotide
  Sense strand starting at position 3085 of SEQ ID NO: 909
cuugucaauuuguuuccau

SEQ ID NO: 72961 - RNA, 19 nt, Artificial Sequence
  Description of Artificial Sequence: Synthetic oligonucleotide
  Antisense strand to SEQ ID NO: 72880
auggaaacaaauugacaag

SEQ ID NO: 72962 - RNA, 19 nt, Artificial Sequence
  Description of Artificial Sequence: Synthetic oligonucleotide
  Sense strand starting at position 3146 of SEQ ID NO: 909
ugguguuuacucuacaaug

SEQ ID NO: 72963 - RNA, 19 nt, Artificial Sequence
  Description of Artificial Sequence: Synthetic oligonucleotide
  Antisense strand to SEQ ID NO: 72882
cauuguagaguaaacacca

SEQ ID NO: 72964 - RNA, 19 nt, Artificial Sequence
  Description of Artificial Sequence: Synthetic oligonucleotide
  Sense strand starting at position 3148 of SEQ ID NO: 909
guguuuacucuacaaugca

SEQ ID NO: 72965 - RNA, 19 nt, Artificial Sequence
  Description of Artificial Sequence: Synthetic oligonucleotide
  Antisense strand to SEQ ID NO: 72884
ugcauuguagaguaaacac

SEQ ID NO: 72966 - RNA, 19 nt, Artificial Sequence
  Description of Artificial Sequence: Synthetic oligonucleotide
  Sense strand starting at position 3187 of SEQ ID NO: 909
aguguaauaguccagauuc

SEQ ID NO: 72967 - RNA, 19 nt, Artificial Sequence
  Description of Artificial Sequence: Synthetic oligonucleotide
  Antisense strand to SEQ ID NO: 72886
gaaucuggacuauuacacu

SEQ ID NO: 72968 - RNA, 19 nt, Artificial Sequence
  Description of Artificial Sequence: Synthetic oligonucleotide
  Sense strand starting at position 3189 of SEQ ID NO: 909
uguaauaguccagauucua

SEQ ID NO: 72969 - RNA, 19 nt, Artificial Sequence
  Description of Artificial Sequence: Synthetic oligonucleotide
  Antisense strand to SEQ ID NO: 72888
uagaaucuggacuauuaca

SEQ ID NO: 72970 - RNA, 19 nt, Artificial Sequence
  Description of Artificial Sequence: Synthetic oligonucleotide
  Sense strand starting at position 3230 of SEQ ID NO: 909
gagagagucuugucacaag

SEQ ID NO: 72971 - RNA, 19 nt, Artificial Sequence
  Description of Artificial Sequence: Synthetic oligonucleotide
  Antisense strand to SEQ ID NO: 72890
cuugugacaagacucucuc

SEQ ID NO: 72972 - RNA, 19 nt, Artificial Sequence
  Description of Artificial Sequence: Synthetic oligonucleotide
  Sense strand starting at position 3240 of SEQ ID NO: 909
ugucacaaguucuugaaga

SEQ ID NO: 72973 - RNA, 19 nt, Artificial Sequence
  Description of Artificial Sequence: Synthetic oligonucleotide
  Antisense strand to SEQ ID NO: 72892
ucuucaagaacuugugaca

SEQ ID NO: 72974 - RNA, 19 nt, Artificial Sequence
  Description of Artificial Sequence: Synthetic oligonucleotide
  Sense strand starting at position 3245 of SEQ ID NO: 909
caaguucuugaagauguuu

SEQ ID NO: 72975 - RNA, 19 nt, Artificial Sequence
  Description of Artificial Sequence: Synthetic oligonucleotide
  Antisense strand to SEQ ID NO: 72894
aaacaucuucaagaacuug

SEQ ID NO: 72976 - RNA, 19 nt, Artificial Sequence
  Description of Artificial Sequence: Synthetic oligonucleotide
  Sense strand starting at position 3266 of SEQ ID NO: 909
agaauaagucuccagcauc

SEQ ID NO: 72977 - RNA, 19 nt, Artificial Sequence
  Description of Artificial Sequence: Synthetic oligonucleotide
  Antisense strand to SEQ ID NO: 72896
gaugcuggagacuuauucu

SEQ ID NO: 72978 - RNA, 19 nt, Artificial Sequence
  Description of Artificial Sequence: Synthetic oligonucleotide
  Sense strand starting at position 3269 of SEQ ID NO: 909
auaagucuccagcaucaga

SEQ ID NO: 72979 - RNA, 19 nt, Artificial Sequence
  Description of Artificial Sequence: Synthetic oligonucleotide
  Antisense strand to SEQ ID NO: 72898
ucugaugcuggagacuuau

SEQ ID NO: 72980 - RNA, 19 nt, Artificial Sequence
  Description of Artificial Sequence: Synthetic oligonucleotide
  Sense strand starting at position 3285 of SEQ ID NO: 909
agaacagguuuccuuuaac

SEQ ID NO: 72981 - RNA, 19 nt, Artificial Sequence
  Description of Artificial Sequence: Synthetic oligonucleotide
  Antisense strand to SEQ ID NO: 72900
guuaaaggaaaccuguucu

SEQ ID NO: 72982 - RNA, 19 nt, Artificial Sequence
  Description of Artificial Sequence: Synthetic oligonucleotide
  Sense strand starting at position 201 of SEQ ID NO: 908
agaguuguaacgcagagag

SEQ ID NO: 72983 - RNA, 19 nt, Artificial Sequence
  Description of Artificial Sequence: Synthetic oligonucleotide
  Antisense strand to SEQ ID NO: 72902
cucucugcguuacaacucu

SEQ ID NO: 72984 - RNA, 19 nt, Artificial Sequence
  Description of Artificial Sequence: Synthetic oligonucleotide
  Sense strand starting at position 350 of SEQ ID NO: 908
gaggaagggucucugaguu

SEQ ID NO: 72985 - RNA, 19 nt, Artificial Sequence
  Description of Artificial Sequence: Synthetic oligonucleotide
  Antisense strand to SEQ ID NO: 72904
aacucagagacccuuccuc

SEQ ID NO: 72986 - RNA, 19 nt, Artificial Sequence
  Description of Artificial Sequence: Synthetic oligonucleotide
  Sense strand starting at position 401 of SEQ ID NO: 908
ugaauaagccugggccaga

SEQ ID NO: 72987 - RNA, 19 nt, Artificial Sequence
  Description of Artificial Sequence: Synthetic oligonucleotide
  Antisense strand to SEQ ID NO: 72906
ucuggcccaggcuuauuca

SEQ ID NO: 72988 - RNA, 19 nt, Artificial Sequence
  Description of Artificial Sequence: Synthetic oligonucleotide
  Sense strand starting at position 778 of SEQ ID NO: 908
cguucuggcggaagaucuu

SEQ ID NO: 72989 - RNA, 19 nt, Artificial Sequence
  Description of Artificial Sequence: Synthetic oligonucleotide
  Antisense strand to SEQ ID NO: 72908
aagaucuuccgccagaacg

SEQ ID NO: 72990 - RNA, 19 nt, Artificial Sequence
  Description of Artificial Sequence: Synthetic oligonucleotide
  Sense strand starting at position 912 of SEQ ID NO: 908
gcagcauauggaggaauau

SEQ ID NO: 72991 - RNA, 19 nt, Artificial Sequence
  Description of Artificial Sequence: Synthetic oligonucleotide
  Antisense strand to SEQ ID NO: 72910
auauuccuccauaugcugc

SEQ ID NO: 72992 - RNA, 19 nt, Artificial Sequence
  Description of Artificial Sequence: Synthetic oligonucleotide
  Sense strand starting at position 951 of SEQ ID NO: 908
auggguucugacggauaau

SEQ ID NO: 72993 - RNA, 19 nt, Artificial Sequence
  Description of Artificial Sequence: Synthetic oligonucleotide
  Antisense strand to SEQ ID NO: 72912
auuauccgucagaacccau

SEQ ID NO: 72994 - RNA, 19 nt, Artificial Sequence
  Description of Artificial Sequence: Synthetic oligonucleotide
  Sense strand starting at position 952 of SEQ ID NO: 908
uggguucugacggauaauu

SEQ ID NO: 72995 - RNA, 19 nt, Artificial Sequence
  Description of Artificial Sequence: Synthetic oligonucleotide
  Antisense strand to SEQ ID NO: 72914
aauuauccgucagaaccca

SEQ ID NO: 72996 - RNA, 19 nt, Artificial Sequence
  Description of Artificial Sequence: Synthetic oligonucleotide
  Sense strand starting at position 1054 of SEQ ID NO: 908
caaaguuuccuagaagcga

SEQ ID NO: 72997 - RNA, 19 nt, Artificial Sequence
  Description of Artificial Sequence: Synthetic oligonucleotide
  Antisense strand to SEQ ID NO: 72916
ucgcuucuaggaaacuuug

SEQ ID NO: 72998 - RNA, 19 nt, Artificial Sequence
  Description of Artificial Sequence: Synthetic oligonucleotide
  Sense strand starting at position 1101 of SEQ ID NO: 908
uugggauccuucuuaacca

SEQ ID NO: 72999 - RNA, 19 nt, Artificial Sequence
  Description of Artificial Sequence: Synthetic oligonucleotide
  Antisense strand to SEQ ID NO: 72918
ugguuaagaaggaucccaa

SEQ ID NO: 73000 - RNA, 19 nt, Artificial Sequence
  Description of Artificial Sequence: Synthetic oligonucleotide
  Sense strand starting at position 1152 of SEQ ID NO: 908
gcgacaauccacgaacaaa

SEQ ID NO: 73001 - RNA, 19 nt, Artificial Sequence
  Description of Artificial Sequence: Synthetic oligonucleotide
  Antisense strand to SEQ ID NO: 72920
uuuguucguggauugucgc

SEQ ID NO: 73002 - RNA, 19 nt, Artificial Sequence
  Description of Artificial Sequence: Synthetic oligonucleotide
  Sense strand starting at position 1251 of SEQ ID NO: 908
gccagacuucgcgcucgaa

SEQ ID NO: 73003 - RNA, 19 nt, Artificial Sequence
  Description of Artificial Sequence: Synthetic oligonucleotide
  Antisense strand to SEQ ID NO: 72922
uucgagcgcgaagucuggc

SEQ ID NO: 73004 - RNA, 19 nt, Artificial Sequence
  Description of Artificial Sequence: Synthetic oligonucleotide
  Sense strand starting at position 1252 of SEQ ID NO: 908
ccagacuucgcgcucgaaa

SEQ ID NO: 73005 - RNA, 19 nt, Artificial Sequence
  Description of Artificial Sequence: Synthetic oligonucleotide
  Antisense strand to SEQ ID NO: 72924
uuucgagcgcgaagucugg

SEQ ID NO: 73006 - RNA, 19 nt, Artificial Sequence
  Description of Artificial Sequence: Synthetic oligonucleotide
  Sense strand starting at position 1253 of SEQ ID NO: 908
cagacuucgcgcucgaaac

SEQ ID NO: 73007 - RNA, 19 nt, Artificial Sequence
  Description of Artificial Sequence: Synthetic oligonucleotide
  Antisense strand to SEQ ID NO: 72926
guuucgagcgcgaagucug

SEQ ID NO: 73008 - RNA, 19 nt, Artificial Sequence
  Description of Artificial Sequence: Synthetic oligonucleotide
  Sense strand starting at position 1265 of SEQ ID NO: 908
ucgaaaccucugggaguau

SEQ ID NO: 73009 - RNA, 19 nt, Artificial Sequence
  Description of Artificial Sequence: Synthetic oligonucleotide
  Antisense strand to SEQ ID NO: 72928
auacucccagagguuucga

SEQ ID NO: 73010 - RNA, 19 nt, Artificial Sequence
  Description of Artificial Sequence: Synthetic oligonucleotide
  Sense strand starting at position 1524 of SEQ ID NO: 908
gugcccuucccgguguuau

SEQ ID NO: 73011 - RNA, 19 nt, Artificial Sequence
  Description of Artificial Sequence: Synthetic oligonucleotide
  Antisense strand to SEQ ID NO: 72930
auaacaccgggaagggcac

SEQ ID NO: 73012 - RNA, 19 nt, Artificial Sequence
  Description of Artificial Sequence: Synthetic oligonucleotide
  Sense strand starting at position 2526 of SEQ ID NO: 908
gccuuugcuaaggaggaaa

SEQ ID NO: 73013 - RNA, 19 nt, Artificial Sequence
  Description of Artificial Sequence: Synthetic oligonucleotide
  Antisense strand to SEQ ID NO: 72932
uuuccuccuuagcaaaggc

SEQ ID NO: 73014 - RNA, 19 nt, Artificial Sequence
  Description of Artificial Sequence: Synthetic oligonucleotide
  Sense strand starting at position 2537 of SEQ ID NO: 908
ggaggaaacgcuugaguuu

SEQ ID NO: 73015 - RNA, 19 nt, Artificial Sequence
  Description of Artificial Sequence: Synthetic oligonucleotide
  Antisense strand to SEQ ID NO: 72934
aaacucaagcguuuccucc

SEQ ID NO: 73016 - RNA, 19 nt, Artificial Sequence
  Description of Artificial Sequence: Synthetic oligonucleotide
  Sense strand starting at position 2605 of SEQ ID NO: 908
gggugcauucgaucucguu

SEQ ID NO: 73017 - RNA, 19 nt, Artificial Sequence
  Description of Artificial Sequence: Synthetic oligonucleotide
  Antisense strand to SEQ ID NO: 72936
aacgagaucgaaugcaccc

SEQ ID NO: 73018 - RNA, 19 nt, Artificial Sequence
  Description of Artificial Sequence: Synthetic oligonucleotide
  Sense strand starting at position 2606 of SEQ ID NO: 908
ggugcauucgaucucguuu

SEQ ID NO: 73019 - RNA, 19 nt, Artificial Sequence
  Description of Artificial Sequence: Synthetic oligonucleotide
  Antisense strand to SEQ ID NO: 72938
aaacgagaucgaaugcacc

SEQ ID NO: 73020 - RNA, 19 nt, Artificial Sequence
  Description of Artificial Sequence: Synthetic oligonucleotide
  Sense strand starting at position 2636 of SEQ ID NO: 908
ugucuugccaaggagacuu

SEQ ID NO: 73021 - RNA, 19 nt, Artificial Sequence
  Description of Artificial Sequence: Synthetic oligonucleotide
  Antisense strand to SEQ ID NO: 72940
aagucuccuuggcaagaca

SEQ ID NO: 73022 - RNA, 19 nt, Artificial Sequence
  Description of Artificial Sequence: Synthetic oligonucleotide
  Sense strand starting at position 2679 of SEQ ID NO: 908
caaagaugagcucaguucu

SEQ ID NO: 73023 - RNA, 19 nt, Artificial Sequence
  Description of Artificial Sequence: Synthetic oligonucleotide
  Antisense strand to SEQ ID NO: 72942
agaacugagcucaucuuug

SEQ ID NO: 73024 - RNA, 19 nt, Artificial Sequence
  Description of Artificial Sequence: Synthetic oligonucleotide
  Sense strand starting at position 2831 of SEQ ID NO: 908
ggcauuaaagaaugaguag

SEQ ID NO: 73025 - RNA, 19 nt, Artificial Sequence
  Description of Artificial Sequence: Synthetic oligonucleotide
  Antisense strand to SEQ ID NO: 72944
cuacucauucuuuaaugcc

SEQ ID NO: 73026 - RNA, 19 nt, Artificial Sequence
  Description of Artificial Sequence: Synthetic oligonucleotide
  Sense strand starting at position 2928 of SEQ ID NO: 908
ggucucuuccauuaagcua

SEQ ID NO: 73027 - RNA, 19 nt, Artificial Sequence
  Description of Artificial Sequence: Synthetic oligonucleotide
  Antisense strand to SEQ ID NO: 72946
uagcuuaauggaagagacc

SEQ ID NO: 73028 - RNA, 19 nt, Artificial Sequence
  Description of Artificial Sequence: Synthetic oligonucleotide
  Sense strand starting at position 3008 of SEQ ID NO: 908
acaccuauguucccuuaga

SEQ ID NO: 73029 - RNA, 19 nt, Artificial Sequence
  Description of Artificial Sequence: Synthetic oligonucleotide
  Antisense strand to SEQ ID NO: 72948
ucuaagggaacauaggugu

SEQ ID NO: 73030 - RNA, 19 nt, Artificial Sequence
  Description of Artificial Sequence: Synthetic oligonucleotide
  Sense strand starting at position 3175 of SEQ ID NO: 908
caaggaaguccaggaugua

SEQ ID NO: 73031 - RNA, 19 nt, Artificial Sequence
  Description of Artificial Sequence: Synthetic oligonucleotide
  Antisense strand to SEQ ID NO: 72950
uacauccuggacuuccuug

SEQ ID NO: 73032 - RNA, 19 nt, Artificial Sequence
  Description of Artificial Sequence: Synthetic oligonucleotide
  Sense strand starting at position 3276 of SEQ ID NO: 908
uuuccucugcuguaagaug

SEQ ID NO: 73033 - RNA, 19 nt, Artificial Sequence
  Description of Artificial Sequence: Synthetic oligonucleotide
  Antisense strand to SEQ ID NO: 72952
caucuuacagcagaggaaa

SEQ ID NO: 73034 - RNA, 19 nt, Artificial Sequence
  Description of Artificial Sequence: Synthetic oligonucleotide
  Sense strand starting at position 3281 of SEQ ID NO: 908
ucugcuguaagaugggaua

SEQ ID NO: 73035 - RNA, 19 nt, Artificial Sequence
  Description of Artificial Sequence: Synthetic oligonucleotide
  Antisense strand to SEQ ID NO: 72954
uaucccaucuuacagcaga

SEQ ID NO: 73036 - RNA, 19 nt, Artificial Sequence
  Description of Artificial Sequence: Synthetic oligonucleotide
  Sense strand starting at position 3373 of SEQ ID NO: 908
cccagaguccugcaugaca

SEQ ID NO: 73037 - RNA, 19 nt, Artificial Sequence
  Description of Artificial Sequence: Synthetic oligonucleotide
  Antisense strand to SEQ ID NO: 72956
ugucaugcaggacucuggg

SEQ ID NO: 73038 - RNA, 19 nt, Artificial Sequence
  Description of Artificial Sequence: Synthetic oligonucleotide
  Sense strand starting at position 3558 of SEQ ID NO: 908
gccacaagcuugucaauuu

SEQ ID NO: 73039 - RNA, 19 nt, Artificial Sequence
  Description of Artificial Sequence: Synthetic oligonucleotide
  Antisense strand to SEQ ID NO: 72958
aaauugacaagcuuguggc

SEQ ID NO: 73040 - RNA, 19 nt, Artificial Sequence
  Description of Artificial Sequence: Synthetic oligonucleotide
  Sense strand starting at position 3566 of SEQ ID NO: 908
cuugucaauuuguuuccau

SEQ ID NO: 73041 - RNA, 19 nt, Artificial Sequence
  Description of Artificial Sequence: Synthetic oligonucleotide
  Antisense strand to SEQ ID NO: 72960
auggaaacaaauugacaag

SEQ ID NO: 73042 - RNA, 19 nt, Artificial Sequence
  Description of Artificial Sequence: Synthetic oligonucleotide
  Sense strand starting at position 3627 of SEQ ID NO: 908
ugguguuuacucuacaaug

SEQ ID NO: 73043 - RNA, 19 nt, Artificial Sequence
  Description of Artificial Sequence: Synthetic oligonucleotide
  Antisense strand to SEQ ID NO: 72962
cauuguagaguaaacacca

SEQ ID NO: 73044 - RNA, 19 nt, Artificial Sequence
  Description of Artificial Sequence: Synthetic oligonucleotide
  Sense strand starting at position 3629 of SEQ ID NO: 908
guguuuacucuacaaugca

SEQ ID NO: 73045 - RNA, 19 nt, Artificial Sequence
  Description of Artificial Sequence: Synthetic oligonucleotide
  Antisense strand to SEQ ID NO: 72964
ugcauuguagaguaaacac

SEQ ID NO: 73046 - RNA, 19 nt, Artificial Sequence
  Description of Artificial Sequence: Synthetic oligonucleotide
  Sense strand starting at position 3668 of SEQ ID NO: 908
aguguaauaguccagauuc

SEQ ID NO: 73047 - RNA, 19 nt, Artificial Sequence
  Description of Artificial Sequence: Synthetic oligonucleotide
  Antisense strand to SEQ ID NO: 72966
gaaucuggacuauuacacu

SEQ ID NO: 73048 - RNA, 19 nt, Artificial Sequence
  Description of Artificial Sequence: Synthetic oligonucleotide
  Sense strand starting at position 3670 of SEQ ID NO: 908
uguaauaguccagauucua

SEQ ID NO: 73049 - RNA, 19 nt, Artificial Sequence
  Description of Artificial Sequence: Synthetic oligonucleotide
  Antisense strand to SEQ ID NO: 72968
uagaaucuggacuauuaca

SEQ ID NO: 73050 - RNA, 19 nt, Artificial Sequence
  Description of Artificial Sequence: Synthetic oligonucleotide
  Sense strand starting at position 3711 of SEQ ID NO: 908
gagagagucuugucacaag

SEQ ID NO: 73051 - RNA, 19 nt, Artificial Sequence
  Description of Artificial Sequence: Synthetic oligonucleotide
  Antisense strand to SEQ ID NO: 72970
cuugugacaagacucucuc

SEQ ID NO: 73052 - RNA, 19 nt, Artificial Sequence
  Description of Artificial Sequence: Synthetic oligonucleotide
  Sense strand starting at position 3721 of SEQ ID NO: 908
ugucacaaguucuugaaga

SEQ ID NO: 73053 - RNA, 19 nt, Artificial Sequence
  Description of Artificial Sequence: Synthetic oligonucleotide
  Antisense strand to SEQ ID NO: 72972
ucuucaagaacuugugaca

SEQ ID NO: 73054 - RNA, 19 nt, Artificial Sequence
  Description of Artificial Sequence: Synthetic oligonucleotide
  Sense strand starting at position 3726 of SEQ ID NO: 908
caaguucuugaagauguuu

SEQ ID NO: 73055 - RNA, 19 nt, Artificial Sequence
  Description of Artificial Sequence: Synthetic oligonucleotide
  Antisense strand to SEQ ID NO: 72974
aaacaucuucaagaacuug

SEQ ID NO: 73056 - RNA, 19 nt, Artificial Sequence
  Description of Artificial Sequence: Synthetic oligonucleotide
  Sense strand starting at position 3747 of SEQ ID NO: 908
agaauaagucuccagcauc

SEQ ID NO: 73057 - RNA, 19 nt, Artificial Sequence
  Description of Artificial Sequence: Synthetic oligonucleotide
  Antisense strand to SEQ ID NO: 72976
gaugcuggagacuuauucu

SEQ ID NO: 73058 - RNA, 19 nt, Artificial Sequence
  Description of Artificial Sequence: Synthetic oligonucleotide
  Sense strand starting at position 3750 of SEQ ID NO: 908
auaagucuccagcaucaga

SEQ ID NO: 73059 - RNA, 19 nt, Artificial Sequence
  Description of Artificial Sequence: Synthetic oligonucleotide
  Antisense strand to SEQ ID NO: 72978
ucugaugcuggagacuuau

SEQ ID NO: 73060 - RNA, 19 nt, Artificial Sequence
  Description of Artificial Sequence: Synthetic oligonucleotide
  Sense strand starting at position 3766 of SEQ ID NO: 908
agaacagguuuccuuuaac

SEQ ID NO: 73061 - RNA, 19 nt, Artificial Sequence
  Description of Artificial Sequence: Synthetic oligonucleotide
  Antisense strand to SEQ ID NO: 72980
guuaaaggaaaccuguucu

SEQ ID NO: 73062 - RNA, 19 nt, Artificial Sequence
  Description of Artificial Sequence: Synthetic oligonucleotide
  Sense strand starting at position 579 of SEQ ID NO: 910
gugauuaacccauaguuau

SEQ ID NO: 73063 - RNA, 19 nt, Artificial Sequence
  Description of Artificial Sequence: Synthetic oligonucleotide
  Antisense strand to SEQ ID NO: 72982
auaacuauggguuaaucac

SEQ ID NO: 73064 - RNA, 19 nt, Artificial Sequence
  Description of Artificial Sequence: Synthetic oligonucleotide
  Sense strand starting at position 610 of SEQ ID NO: 910
auuagcuaccugugaauca

SEQ ID NO: 73065 - RNA, 19 nt, Artificial Sequence
  Description of Artificial Sequence: Synthetic oligonucleotide
  Antisense strand to SEQ ID NO: 72984
ugauucacagguagcuaau

SEQ ID NO: 73066 - RNA, 19 nt, Artificial Sequence
  Description of Artificial Sequence: Synthetic oligonucleotide
  Sense strand starting at position 651 of SEQ ID NO: 910
uggcuuaagcaggaaguaa

SEQ ID NO: 73067 - RNA, 19 nt, Artificial Sequence
  Description of Artificial Sequence: Synthetic oligonucleotide
  Antisense strand to SEQ ID NO: 72986
uuacuuccugcuuaagcca

SEQ ID NO: 73068 - RNA, 19 nt, Artificial Sequence
  Description of Artificial Sequence: Synthetic oligonucleotide
  Sense strand starting at position 1088 of SEQ ID NO: 910
cuaggccaguccucugaga

SEQ ID NO: 73069 - RNA, 19 nt, Artificial Sequence
  Description of Artificial Sequence: Synthetic oligonucleotide
  Antisense strand to SEQ ID NO: 72988
ucucagaggacuggccuag

SEQ ID NO: 73070 - RNA, 19 nt, Artificial Sequence
  Description of Artificial Sequence: Synthetic oligonucleotide
  Sense strand starting at position 1423 of SEQ ID NO: 910
ggcggugucccugucgauu

SEQ ID NO: 73071 - RNA, 19 nt, Artificial Sequence
  Description of Artificial Sequence: Synthetic oligonucleotide
  Antisense strand to SEQ ID NO: 72990
aaucgacagggacaccgcc

SEQ ID NO: 73072 - RNA, 19 nt, Artificial Sequence
  Description of Artificial Sequence: Synthetic oligonucleotide
  Sense strand starting at position 1438 of SEQ ID NO: 910
gauuguggccgcuuccuua

SEQ ID NO: 73073 - RNA, 19 nt, Artificial Sequence
  Description of Artificial Sequence: Synthetic oligonucleotide
  Antisense strand to SEQ ID NO: 72992
uaaggaagcggccacaauc

SEQ ID NO: 73074 - RNA, 19 nt, Artificial Sequence
  Description of Artificial Sequence: Synthetic oligonucleotide
  Sense strand starting at position 1499 of SEQ ID NO: 910
cuggcaucacuuugaggga

SEQ ID NO: 73075 - RNA, 19 nt, Artificial Sequence
  Description of Artificial Sequence: Synthetic oligonucleotide
  Antisense strand to SEQ ID NO: 72994
ucccucaaagugaugccag

SEQ ID NO: 73076 - RNA, 19 nt, Artificial Sequence
  Description of Artificial Sequence: Synthetic oligonucleotide
  Sense strand starting at position 1540 of SEQ ID NO: 910
ggcuaaggacgucaucuuu

SEQ ID NO: 73077 - RNA, 19 nt, Artificial Sequence
  Description of Artificial Sequence: Synthetic oligonucleotide
  Antisense strand to SEQ ID NO: 72996
aaagaugacguccuuagcc

SEQ ID NO: 73078 - RNA, 19 nt, Artificial Sequence
  Description of Artificial Sequence: Synthetic oligonucleotide
  Sense strand starting at position 1595 of SEQ ID NO: 910
acguaagcacuuugauaag

SEQ ID NO: 73079 - RNA, 19 nt, Artificial Sequence
  Description of Artificial Sequence: Synthetic oligonucleotide
  Antisense strand to SEQ ID NO: 72998
cuuaucaaagugcuuacgu

SEQ ID NO: 73080 - RNA, 19 nt, Artificial Sequence
  Description of Artificial Sequence: Synthetic oligonucleotide
  Sense strand starting at position 1605 of SEQ ID NO: 910
uuugauaaguuucuacgaa

SEQ ID NO: 73081 - RNA, 19 nt, Artificial Sequence
  Description of Artificial Sequence: Synthetic oligonucleotide
  Antisense strand to SEQ ID NO: 73000
uucguagaaacuuaucaaa

SEQ ID NO: 73082 - RNA, 19 nt, Artificial Sequence
  Description of Artificial Sequence: Synthetic oligonucleotide
  Sense strand starting at position 1687 of SEQ ID NO: 910
cgcggguguccugagauuu

SEQ ID NO: 73083 - RNA, 19 nt, Artificial Sequence
  Description of Artificial Sequence: Synthetic oligonucleotide
  Antisense strand to SEQ ID NO: 73002
aaaucucaggacacccgcg

SEQ ID NO: 73084 - RNA, 19 nt, Artificial Sequence
  Description of Artificial Sequence: Synthetic oligonucleotide
  Sense strand starting at position 2193 of SEQ ID NO: 910
uucugugggcuuuaaggau

SEQ ID NO: 73085 - RNA, 19 nt, Artificial Sequence
  Description of Artificial Sequence: Synthetic oligonucleotide
  Antisense strand to SEQ ID NO: 73004
auccuuaaagcccacagaa

SEQ ID NO: 73086 - RNA, 19 nt, Artificial Sequence
  Description of Artificial Sequence: Synthetic oligonucleotide
  Sense strand starting at position 2282 of SEQ ID NO: 910
aaagcuauggguugugaag

SEQ ID NO: 73087 - RNA, 19 nt, Artificial Sequence
  Description of Artificial Sequence: Synthetic oligonucleotide
  Antisense strand to SEQ ID NO: 73006
cuucacaacccauagcuuu

SEQ ID NO: 73088 - RNA, 19 nt, Artificial Sequence
  Description of Artificial Sequence: Synthetic oligonucleotide
  Sense strand starting at position 2343 of SEQ ID NO: 910
ccggguuaacgccaccaaa

SEQ ID NO: 73089 - RNA, 19 nt, Artificial Sequence
  Description of Artificial Sequence: Synthetic oligonucleotide
  Antisense strand to SEQ ID NO: 73008
uuugguggcguuaacccgg

SEQ ID NO: 73090 - RNA, 19 nt, Artificial Sequence
  Description of Artificial Sequence: Synthetic oligonucleotide
  Sense strand starting at position 2346 of SEQ ID NO: 910
gguuaacgccaccaaauua

SEQ ID NO: 73091 - RNA, 19 nt, Artificial Sequence
  Description of Artificial Sequence: Synthetic oligonucleotide
  Antisense strand to SEQ ID NO: 73010
uaauuugguggcguuaacc

SEQ ID NO: 73092 - RNA, 19 nt, Artificial Sequence
  Description of Artificial Sequence: Synthetic oligonucleotide
  Sense strand starting at position 2412 of SEQ ID NO: 910
cgagauugucgugaaagga

SEQ ID NO: 73093 - RNA, 19 nt, Artificial Sequence
  Description of Artificial Sequence: Synthetic oligonucleotide
  Antisense strand to SEQ ID NO: 73012
uccuuucacgacaaucucg

SEQ ID NO: 73094 - RNA, 19 nt, Artificial Sequence
  Description of Artificial Sequence: Synthetic oligonucleotide
  Sense strand starting at position 2844 of SEQ ID NO: 910
ucgaauccuguugagguau

SEQ ID NO: 73095 - RNA, 19 nt, Artificial Sequence
  Description of Artificial Sequence: Synthetic oligonucleotide
  Antisense strand to SEQ ID NO: 73014
auaccucaacaggauucga

SEQ ID NO: 73096 - RNA, 19 nt, Artificial Sequence
  Description of Artificial Sequence: Synthetic oligonucleotide
  Sense strand starting at position 2892 of SEQ ID NO: 910
aguggaagaguuugaugac

SEQ ID NO: 73097 - RNA, 19 nt, Artificial Sequence
  Description of Artificial Sequence: Synthetic oligonucleotide
  Antisense strand to SEQ ID NO: 73016
gucaucaaacucuuccacu

SEQ ID NO: 73098 - RNA, 19 nt, Artificial Sequence
  Description of Artificial Sequence: Synthetic oligonucleotide
  Sense strand starting at position 2923 of SEQ ID NO: 910
cauguauagguguaaugac

SEQ ID NO: 73099 - RNA, 19 nt, Artificial Sequence
  Description of Artificial Sequence: Synthetic oligonucleotide
  Antisense strand to SEQ ID NO: 73018
gucauuacaccuauacaug

SEQ ID NO: 73100 - RNA, 19 nt, Artificial Sequence
  Description of Artificial Sequence: Synthetic oligonucleotide
  Sense strand starting at position 2983 of SEQ ID NO: 910
gucucuugccuguuugcga

SEQ ID NO: 73101 - RNA, 19 nt, Artificial Sequence
  Description of Artificial Sequence: Synthetic oligonucleotide
  Antisense strand to SEQ ID NO: 73020
ucgcaaacaggcaagagac

SEQ ID NO: 73102 - RNA, 19 nt, Artificial Sequence
  Description of Artificial Sequence: Synthetic oligonucleotide
  Sense strand starting at position 2999 of SEQ ID NO: 910
cgaagauucccgcaaccac

SEQ ID NO: 73103 - RNA, 19 nt, Artificial Sequence
  Description of Artificial Sequence: Synthetic oligonucleotide
  Antisense strand to SEQ ID NO: 73022
gugguugcgggaaucuucg

SEQ ID NO: 73104 - RNA, 19 nt, Artificial Sequence
  Description of Artificial Sequence: Synthetic oligonucleotide
  Sense strand starting at position 3048 of SEQ ID NO: 910
ggaagaguauccuuaugua

SEQ ID NO: 73105 - RNA, 19 nt, Artificial Sequence
  Description of Artificial Sequence: Synthetic oligonucleotide
  Antisense strand to SEQ ID NO: 73024
uacauaaggauacucuucc

SEQ ID NO: 73106 - RNA, 19 nt, Artificial Sequence
  Description of Artificial Sequence: Synthetic oligonucleotide
  Sense strand starting at position 3052 of SEQ ID NO: 910
gaguauccuuauguaugaa

SEQ ID NO: 73107 - RNA, 19 nt, Artificial Sequence
  Description of Artificial Sequence: Synthetic oligonucleotide
  Antisense strand to SEQ ID NO: 73026
uucauacauaaggauacuc

SEQ ID NO: 73108 - RNA, 19 nt, Artificial Sequence
  Description of Artificial Sequence: Synthetic oligonucleotide
  Sense strand starting at position 3064 of SEQ ID NO: 910
guaugaauauagcuaaucu

SEQ ID NO: 73109 - RNA, 19 nt, Artificial Sequence
  Description of Artificial Sequence: Synthetic oligonucleotide
  Antisense strand to SEQ ID NO: 73028
agauuagcuauauucauac

SEQ ID NO: 73110 - RNA, 19 nt, Artificial Sequence
  Description of Artificial Sequence: Synthetic oligonucleotide
  Sense strand starting at position 3102 of SEQ ID NO: 910
gcgcuagaacuaggaugaa

SEQ ID NO: 73111 - RNA, 19 nt, Artificial Sequence
  Description of Artificial Sequence: Synthetic oligonucleotide
  Antisense strand to SEQ ID NO: 73030
uucauccuaguucuagcgc

SEQ ID NO: 73112 - RNA, 19 nt, Artificial Sequence
  Description of Artificial Sequence: Synthetic oligonucleotide
  Sense strand starting at position 3122 of SEQ ID NO: 910
ugacgucuuccagacgaag

SEQ ID NO: 73113 - RNA, 19 nt, Artificial Sequence
  Description of Artificial Sequence: Synthetic oligonucleotide
  Antisense strand to SEQ ID NO: 73032
cuucgucuggaagacguca

SEQ ID NO: 73114 - RNA, 19 nt, Artificial Sequence
  Description of Artificial Sequence: Synthetic oligonucleotide
  Sense strand starting at position 3124 of SEQ ID NO: 910
acgucuuccagacgaagga

SEQ ID NO: 73115 - RNA, 19 nt, Artificial Sequence
  Description of Artificial Sequence: Synthetic oligonucleotide
  Antisense strand to SEQ ID NO: 73034
uccuucgucuggaagacgu

SEQ ID NO: 73116 - RNA, 19 nt, Artificial Sequence
  Description of Artificial Sequence: Synthetic oligonucleotide
  Sense strand starting at position 3139 of SEQ ID NO: 910
aggagugagaucugaugcu

SEQ ID NO: 73117 - RNA, 19 nt, Artificial Sequence
  Description of Artificial Sequence: Synthetic oligonucleotide
  Antisense strand to SEQ ID NO: 73036
agcaucagaucucacuccu

SEQ ID NO: 73118 - RNA, 19 nt, Artificial Sequence
  Description of Artificial Sequence: Synthetic oligonucleotide
  Sense strand starting at position 3175 of SEQ ID NO: 910
auuaauuucucugaagagc

SEQ ID NO: 73119 - RNA, 19 nt, Artificial Sequence
  Description of Artificial Sequence: Synthetic oligonucleotide
  Antisense strand to SEQ ID NO: 73038
gcucuucagagaaauuaau

SEQ ID NO: 73120 - RNA, 19 nt, Artificial Sequence
  Description of Artificial Sequence: Synthetic oligonucleotide
  Sense strand starting at position 3225 of SEQ ID NO: 910
aaccgucuucccuggagaa

SEQ ID NO: 73121 - RNA, 19 nt, Artificial Sequence
  Description of Artificial Sequence: Synthetic oligonucleotide
  Antisense strand to SEQ ID NO: 73040
uucuccagggaagacgguu

SEQ ID NO: 73122 - RNA, 19 nt, Artificial Sequence
  Description of Artificial Sequence: Synthetic oligonucleotide
  Sense strand starting at position 3226 of SEQ ID NO: 910
accgucuucccuggagaau

SEQ ID NO: 73123 - RNA, 19 nt, Artificial Sequence
  Description of Artificial Sequence: Synthetic oligonucleotide
  Antisense strand to SEQ ID NO: 73042
auucuccagggaagacggu

SEQ ID NO: 73124 - RNA, 19 nt, Artificial Sequence
  Description of Artificial Sequence: Synthetic oligonucleotide
  Sense strand starting at position 3227 of SEQ ID NO: 910
ccgucuucccuggagaaug

SEQ ID NO: 73125 - RNA, 19 nt, Artificial Sequence
  Description of Artificial Sequence: Synthetic oligonucleotide
  Antisense strand to SEQ ID NO: 73044
cauucuccagggaagacgg

SEQ ID NO: 73126 - RNA, 19 nt, Artificial Sequence
  Description of Artificial Sequence: Synthetic oligonucleotide
  Sense strand starting at position 3274 of SEQ ID NO: 910
ccugguugucuauaccuca

SEQ ID NO: 73127 - RNA, 19 nt, Artificial Sequence
  Description of Artificial Sequence: Synthetic oligonucleotide
  Antisense strand to SEQ ID NO: 73046
ugagguauagacaaccagg

SEQ ID NO: 73128 - RNA, 19 nt, Artificial Sequence
  Description of Artificial Sequence: Synthetic oligonucleotide
  Sense strand starting at position 3427 of SEQ ID NO: 910
gagugccuugcagagaaua

SEQ ID NO: 73129 - RNA, 19 nt, Artificial Sequence
  Description of Artificial Sequence: Synthetic oligonucleotide
  Antisense strand to SEQ ID NO: 73048
uauucucugcaaggcacuc

SEQ ID NO: 73130 - RNA, 19 nt, Artificial Sequence
  Description of Artificial Sequence: Synthetic oligonucleotide
  Sense strand starting at position 3429 of SEQ ID NO: 910
gugccuugcagagaauaac

SEQ ID NO: 73131 - RNA, 19 nt, Artificial Sequence
  Description of Artificial Sequence: Synthetic oligonucleotide
  Antisense strand to SEQ ID NO: 73050
guuauucucugcaaggcac

SEQ ID NO: 73132 - RNA, 19 nt, Artificial Sequence
  Description of Artificial Sequence: Synthetic oligonucleotide
  Sense strand starting at position 3918 of SEQ ID NO: 910
ugaccugauuugucuguuu

SEQ ID NO: 73133 - RNA, 19 nt, Artificial Sequence
  Description of Artificial Sequence: Synthetic oligonucleotide
  Antisense strand to SEQ ID NO: 73052
aaacagacaaaucagguca

SEQ ID NO: 73134 - RNA, 19 nt, Artificial Sequence
  Description of Artificial Sequence: Synthetic oligonucleotide
  Sense strand starting at position 3921 of SEQ ID NO: 910
ccugauuugucuguuuguu

SEQ ID NO: 73135 - RNA, 19 nt, Artificial Sequence
  Description of Artificial Sequence: Synthetic oligonucleotide
  Antisense strand to SEQ ID NO: 73054
aacaaacagacaaaucagg
